United States Patent Application Publication US 2021/0199660 A1 - sequence listing, part 42

SEQ ID NO: 598180 - DNA, 120 bp, Artificial Sequence
  ENSG00000174206_0 (sequence is synthesized)
ccggaagtgcgaggccgaggagagccacgtgggtcgagctggggcgcagctcgcatgggggagtctatcccgctggccgccccggtcccggtggaacaggcggtgctggagacgttcttc

SEQ ID NO: 598181 - DNA, 120 bp, Artificial Sequence
  ENSG00000174206_1 (sequence is synthesized)
tctcacctgggtatcttctcttacgacaaggctaaggacaatgtggagaaggaacgagaggccaacaagagcgcggggggcagctggctgtcgctgctggcggccttggcgcacctggcc

SEQ ID NO: 598182 - DNA, 120 bp, Artificial Sequence
  ENSG00000174206_2 (sequence is synthesized)
gcggccgagaaggtctatcacagcctcacctacctggggcagaaactagggggccagtctttcttcagcaggaaggattccatccgcaccatctatacttcattgcataatgagctgaag

SEQ ID NO: 598183 - DNA, 120 bp, Artificial Sequence
  ENSG00000174206_3 (sequence is synthesized)
aaggtggtgactggccgtggtgccctgggtgggactgctcctcacgtggaagaactcctttcccacctgtcagagcagctctgcttctttgttcaggctcggatggagatagcagacttc

SEQ ID NO: 598184 - DNA, 120 bp, Artificial Sequence
  ENSG00000174206_4 (sequence is synthesized)
tatgagaagatgtacaccctcagcacacagaagttcatcaatgctgaagagctcgttggccttttggatgccatcatgaaaaaatacagctccagatttcaccacccaatcctcagtcct

SEQ ID NO: 598185 - DNA, 120 bp, Artificial Sequence
  ENSG00000174206_5 (sequence is synthesized)
ttggaaagcagtttccagctggaagttgacgtcctgtgtcatctcctgaaagcccaggcccaggtctcagagtggaagttcctcccatctctggttaatttacacagtgcgcacaccaaa

SEQ ID NO: 598186 - DNA, 120 bp, Artificial Sequence
  ENSG00000174206_6 (sequence is synthesized)
ctgcagacgtggggccagatctttgagaaacagcgggagaccaagaaacatctgtttggagggcagtctcagaaggccgtgcagcctccacaccttttcctttggctgatgaaactcaaa

SEQ ID NO: 598187 - DNA, 120 bp, Artificial Sequence
  ENSG00000174206_7 (sequence is synthesized)
aacatgcttcttgccaagtttagcttttactttcatgaggctctgagccgacaaacgactgcttcagaaatgaaaacgttgacagcaaaagctaacccagacttttttggaaagatttcc

SEQ ID NO: 598188 - DNA, 120 bp, Artificial Sequence
  ENSG00000174206_8 (sequence is synthesized)
agcttcatcagaaaatatgatgctgccaatgtgtccttaatttttgacaacagaggttctgagagttttcagggtcatggttatcaccacccccattcctacagagaggcccccaagggt

SEQ ID NO: 598189 - DNA, 120 bp, Artificial Sequence
  ENSG00000174206_9 (sequence is synthesized)
gtggaccagtatccagctgtagtgtctctgcccagcgacaggccagtcatgcactggcccaatgtcatcatgatcatgacggaccgcacatctgatctgaacagcttggagaaagtggtc

SEQ ID NO: 598190 - DNA, 120 bp, Artificial Sequence
  ENSG00000174206_10 (sequence is synthesized)
cacttctatgatgacaaagttcagagtacctacttcctaacccgcccggaacctcactttaccattgtcatcatttttgagtcaaagaaatctgagagagactcccactttatttccttc

SEQ ID NO: 598191 - DNA, 120 bp, Artificial Sequence
  ENSG00000174206_11 (sequence is synthesized)
ctcaatgaggtctcacttgcccttaagaaccccaaagtgtttgcaagtctgaaacctggagccaaaggttagcaggtgatttgcgtggaggggtttcaagactagaaactgttcttaatt

SEQ ID NO: 598192 - DNA, 120 bp, Artificial Sequence
  ENSG00000174206_12 (sequence is synthesized)
gccctaatgatctacggtggtctgtgaatagagtttacatccattcatgcctctttcagaactaaattaaagacaaatcctccctgtgttgcacactttataagcaattaaggccaattg

SEQ ID NO: 598193 - DNA, 120 bp, Artificial Sequence
  ENSG00000174206_13 (sequence is synthesized)
aattaagtttccaaagagtaatctaggaagtggtcatgggctaccatgtgtctccatggtacagcaaagtagtttcagtattttcccctattttgctatatttcttgtagattgaatatt

SEQ ID NO: 598194 - DNA, 120 bp, Artificial Sequence
  ENSG00000174206_14 (sequence is synthesized)
tattgggcttttttttttcccatatgtttttctgttgttctaaacattgtgttctactgcaattccaaacagcctctctgtttccctccttcttggaagagtaatagggatgagatatta

SEQ ID NO: 598195 - DNA, 120 bp, Artificial Sequence
  ENSG00000174206_15 (sequence is synthesized)
aatggcctttttagaattaagaactatatgttttctgtctcataaattagcaaatgaatatggagttagtagatttatgattctgatctacaaattaacatttttgatgccaaaattagg

SEQ ID NO: 598196 - DNA, 120 bp, Artificial Sequence
  ENSG00000174206_16 (sequence is synthesized)
gtcttggtaagaaatttctatcagttattgaaactgaaagtgagtcagattggtagcatgacgtaaggttttaacagttcagaagatcctcatggcagctttaatagccatgggttcttt

SEQ ID NO: 598197 - DNA, 120 bp, Artificial Sequence
  ENSG00000174206_17 (sequence is synthesized)
agtcagcataagccatcatgtgggctttcttcattcttcagcatattatccgcttcgctttctgtttatcacttttctgctgaaatgtacatgtttggctctactccttggttattttta

SEQ ID NO: 598198 - DNA, 120 bp, Artificial Sequence
  ENSG00000174206_18 (sequence is synthesized)
ggcttaaaagcatgcagtcggtttttcagccacttttagatactcatgcaacatagcctacttttataaaatcaaaatgaaggtcttcatacgctgtacttgctaaaaatcaactgtgcg

SEQ ID NO: 598199 - DNA, 120 bp, Artificial Sequence
  ENSG00000174206_19 (sequence is synthesized)
cttgaaagacctcttcatagttgagtaatcacctcagtacttaagcacttctgaacttgggtttcatgcctgccccccacaaattatgtttagaagcagcactgcatcttagcacatgct

SEQ ID NO: 598200 - DNA, 120 bp, Artificial Sequence
  ENSG00000174206_20 (sequence is synthesized)
gccttatttctttccttcggcaggtgttcatgggaagtaggtggatcagtgaaggcataatgggctgtggagaccttcacttctagattattgattcaaaataaaaagaagccacaaaga

SEQ ID NO: 598201 - DNA, 120 bp, Artificial Sequence
  ENSG00000174206_21 (sequence is synthesized)
gtaattgagttgttactggtttgatggttcctttgaagcttgtgtgaaatgtaatggtcatattcgtcttttttcccatgattgtgtggagccactgttttactgggtgtccacagcagg

SEQ ID NO: 598202 - DNA, 120 bp, Artificial Sequence
  ENSG00000174206_22 (sequence is synthesized)
tatgccagcaacatcagcagagaccagagagcccctcagagtccatgtaggaagcctgcccacctagggtggactgcctggcagaagaaagaagaaccggccaggcacggtggcacacgc

SEQ ID NO: 598203 - DNA, 69 bp, Artificial Sequence
  ENSG00000174206_23 (sequence is synthesized)
acttgaggtcaggagttcgagaggccggttgtagtgacgggtgactgtaatcccagttactctggaggc

SEQ ID NO: 598204 - DNA, 120 bp, Artificial Sequence
  ENSG00000174206_24 (sequence is synthesized)
cctgggtgaaagagcgagacctgtctcaaaaaaaaaaaaagaagaagaagaaccaagaatctactggcctattttttattttctgggaagaacatgtgtttttccttttttttttttttt

SEQ ID NO: 598205 - DNA, 60 bp, Artificial Sequence
  ENSG00000174206_25 (sequence is synthesized)
ttttttttttttttgagacagggtcttgtctgttttccaggctggagtaatcagcatccc

SEQ ID NO: 598206 - DNA, 120 bp, Artificial Sequence
  ENSG00000174206_26 (sequence is synthesized)
aggcatgagccatcacacctgggtctcactatgttgctcgggctggactcaaactcctggactcacatgagcctcccgcctcggcctcccaaagcactgggtttataagcatgtgccact

SEQ ID NO: 598207 - DNA, 120 bp, Artificial Sequence
  ENSG00000174206_27 (sequence is synthesized)
gcacctggcctcctttctttttctttaaaaatggtcataagctttgtaaaaagctagtttgctttaaatagaaagtagtgatttacctctgcattttattcactcaggttctataaaaaa

SEQ ID NO: 598208 - DNA, 120 bp, Artificial Sequence
  ENSG00000174206_28 (sequence is synthesized)
agtctcagcagattttacaacattgaccttacctaagaaattgaaagcaattggagctaaaaagtcaaatcacttttcctctctattgtgttctgccaagaaactgaaaaatattccttg

SEQ ID NO: 598209 - DNA, 120 bp, Artificial Sequence
  ENSG00000174206_29 (sequence is synthesized)
gtatgcatgtatttttttcctcttagattaaaccaccattagccttaatgacacagtcccccaaatacctagaagaatatatacttcagtggaaccccgagagaggtgtaagtaaagcat

SEQ ID NO: 598210 - DNA, 120 bp, Artificial Sequence
  ENSG00000174206_30 (sequence is synthesized)
atatatgttatttaaataaccagtcctcacctagaacatatttgaattgtatatctatttttaaacataaacacaaaaagaatttcaaagaacagaaggcagatgtgaatattaagaaaa

SEQ ID NO: 598211 - DNA, 120 bp, Artificial Sequence
  ENSG00000174206_31 (sequence is synthesized)
tctaagacaatatgtattactgtgcagctgtcatagactgtactggaagagtttttgaagattgaatattgatacttaaattatttctgaagctcttcaataaagttttctaattataaa

SEQ ID NO: 598212 - DNA, 120 bp, Artificial Sequence
  ENSG00000174206_32 (sequence is synthesized)
aactccacataatttggttcaagccaagaaacaaagtcattttactctaagatttattctctaaatatagtaatgagatctgtaaagtctgtgttttgctaattaaaagagtaaatctgc

SEQ ID NO: 598213 - DNA, 120 bp, Artificial Sequence
  ENSG00000174206_33 (sequence is synthesized)
cagtggcttgggtttcccgtctctgtgtcacttctagtcgcaggctcgactcggcattcccagatctcctcccaccgttcctttccttccctgggcttccacaagccccgcccaccggcc

SEQ ID NO: 598214 - DNA, 120 bp, Artificial Sequence
  ENSG00000174206_34 (sequence is synthesized)
tgcgctgctgatagattggcgaactgggtagatgctctttgcagggctgtgacccaaaccgaagggtttgcccttttgcctcgtgcatggattgatgccataaatgagaagttaaccaaa

SEQ ID NO: 598215 - DNA, 120 bp, Artificial Sequence
  ENSG00000174206_35 (sequence is synthesized)
ctgttgtgtggcctcttaaggttaaggcccgagagtcacatttagagtcctaccccgtcttcatagtcccccaatacatatttaatgactaaagtaataaatgaatattgggcaggaaag

SEQ ID NO: 598216 - DNA, 120 bp, Artificial Sequence
  ENSG00000174206_36 (sequence is synthesized)
aattatttcgtggccttttgcctgaattattctaagctgcttctccagaggaaatgagtcagaagaaataggcttgatgtgcatttctgcctttggagacttctcttgatatggtgtaaa

SEQ ID NO: 598217 - DNA, 120 bp, Artificial Sequence
  ENSG00000174206_37 (sequence is synthesized)
tccgtaaggtttcattaatgccttgtctgcatattttttcaatctgcttttgataacaaggtctgtttctagggtacttcaaatttaaaaccgtagggtatgtgtaaaatatcaccacta

SEQ ID NO: 598218 - DNA, 120 bp, Artificial Sequence
  ENSG00000174206_38 (sequence is synthesized)
gaaaatggagagatgcaaatgggttcccccttctgtagtccctcctaatgtcagaatctggggttagggttctaagtgatggtagcactcaggagagggtcacaagaggcaatgacatgg

SEQ ID NO: 598219 - DNA, 120 bp, Artificial Sequence
  ENSG00000174206_39 (sequence is synthesized)
gactgcatcctgaaagatgactgcttagacgtgcggcgagaatggccggaaaacggaggatggcgcttgacattgatctaggaaaggaagacagtcattgggacttttgctaactttgtc

SEQ ID NO: 598220 - DNA, 120 bp, Artificial Sequence
  ENSG00000174206_40 (sequence is synthesized)
cctagagagtgaattctgcttttgctggtcctaaaaactgtagagtaattctacaatccagttaaatttgtaaatctaatgcctgattcagtctgagatttatgactcagccggttgatc

SEQ ID NO: 598221 - DNA, 120 bp, Artificial Sequence
  ENSG00000174206_41 (sequence is synthesized)
cagcttaggtctagactcatttcacttttgttatgacaagatacgacaatgtagggcacaccctttaccccccagggtcatcctgatgtcagtcatttcaggctaggccagtgtcagagc

SEQ ID NO: 598222 - DNA, 120 bp, Artificial Sequence
  ENSG00000174206_42 (sequence is synthesized)
agtccctgaagcagaagtggatggaaagaggtgaatgatttctaatattcaacattcattaatttaacatcaactatgttaagggtaatgatatagcagttaaccaagaccaacatggtg

SEQ ID NO: 598223 - DNA, 120 bp, Artificial Sequence
  ENSG00000174206_43 (sequence is synthesized)
tctgcttggttgatgcttgaaataaggtgacctggccccagccacccgggtggccaggagctgaaagggctgtaacaagtaggcagtgaatagtcttcaaacttgttacttgcatacctc

SEQ ID NO: 598224 - DNA, 120 bp, Artificial Sequence
  ENSG00000174206_44 (sequence is synthesized)
cctacaaattttggaaaaaccatgagactctgattgattttttaaaagaatatctaaaatcattatgtttaaatagcctcaaaagaagcattttattatgtattgtaaatattggcattt

SEQ ID NO: 598225 - DNA, 120 bp, Artificial Sequence
  ENSG00000174206_45 (sequence is synthesized)
taaaatgttattcggtcttttaaatgtatccagtgaaatgttggtacaatagagttttgatagctaccattttccatttttaaaaatactttaacacgctttgtaacagttggaaatatt

SEQ ID NO: 598226 - DNA, 120 bp, Artificial Sequence
  ENSG00000174206_46 (sequence is synthesized)
gtttgattccttttgctccctgaactccattcttcttcttctgaagaattttatcctaaaatgaatttattttttgcttaacagtcttattggttaccttattaaatattactcagtata

SEQ ID NO: 598227 - DNA, 120 bp, Artificial Sequence
  ENSG00000174225_0 (sequence is synthesized)
gacaagaaggctagaaagctcaatgcgtcttcctattactctgcatatcttatgtcttccatccaaaaagaatcaacttatcagataaataaccacctcatgaactaagatgaatcatgt

SEQ ID NO: 598228 - DNA, 120 bp, Artificial Sequence
  ENSG00000174225_1 (sequence is synthesized)
tccggcttttgtcctcctgctgctcttgcctaaggacaacagaagagacacgaaggaatgtgaccatccctatcattggcttgaacaactctggcaaaactgttcttgtggaggcattcc

SEQ ID NO: 598229 - DNA, 120 bp, Artificial Sequence
  ENSG00000174225_2 (sequence is synthesized)
aaaaattacttcccagtaagacagaccattgcatgaaatcggaactgactacacttttgttagatgagtatgaactttccatctatgacctgaatggagacctgaagggccgggaagcat

SEQ ID NO: 598230 - DNA, 120 bp, Artificial Sequence
  ENSG00000174225_3 (sequence is synthesized)
ggccaaactactatgcacaggcccatgggcttgttttcgtcctggattccagtgacataagacgcatgcaggaagtgaagatcatcttaacacatctgctgtccgataaaagagtggcag

SEQ ID NO: 598231 - DNA, 120 bp, Artificial Sequence
  ENSG00000174225_4 (sequence is synthesized)
atgccttgtgatattattgactatctacttctaaagaagctagtgaaagagaataagtgcccatgccgagtagagccatgttcagccatcagaaaccttgaaagaagaaaccatcagccc

SEQ ID NO: 598232 - DNA, 120 bp, Artificial Sequence
  ENSG00000174225_5 (sequence is synthesized)
atagttgaaggactgcgctggctattagctgtcattgatacttgccaactaccacctacctcgagcatctcaatctccaagaataacacaggctctggagaaagatgctcatcacacagc

SEQ ID NO: 598233 - DNA, 120 bp, Artificial Sequence
  ENSG00000174225_6 (sequence is synthesized)
ttctccaccagaacaggaatgtcaaaggagaaaagacagcatctagaacaatgctcaatcgaagctaagcctctaaagtcaatcctacagccatcaaatcaatcctatactcactgagag

SEQ ID NO: 598234 - DNA, 120 bp, Artificial Sequence
  ENSG00000174225_7 (sequence is synthesized)
gctcaagaagagtgagatggcatccattgagaatgaagaccaccttggtaaaaaagaacagagactttacatctttgtaccgagatgctgctgacaaagcttgtggacaataagtcatgg

SEQ ID NO: 598235 - DNA, 120 bp, Artificial Sequence
  ENSG00000174225_8 (sequence is synthesized)
gtgatcaaccaaaactgagccttagaaatacagggttcatttagaaataagtatttttttctttaaggttcttaggcagaaaaggattggcaaaaataaatagaacttctttgctgagaa

SEQ ID NO: 598236 - DNA, 120 bp, Artificial Sequence
  ENSG00000174225_9 (sequence is synthesized)
gaatgttctaggagaatgagagctcagaatactacgaagctttgctacaattgaaggagtggcttatagactccagctccatatgctgatgacaatatttttgaagagaaagtaaaagaa

SEQ ID NO: 598237 - DNA, 120 bp, Artificial Sequence
  ENSG00000174225_10 (sequence is synthesized)
agtaacagagaaagtaaagagaaaaacagagggaaaccaaaagaaacagttgatatccctcccttagcaaacaggttcatctccagaactatcaggactacccggtttttaaatttccat

SEQ ID NO: 598238 - DNA, 120 bp, Artificial Sequence
  ENSG00000174225_11 (sequence is synthesized)
ttgataatatttctacactccccatacaactccacctactctaatatcacatccctgagaacccctgttgttcctgtatatctatattctagccatcaaatcaatcctatactcactgag

SEQ ID NO: 598239 - DNA, 120 bp, Artificial Sequence
  ENSG00000174226_0 (sequence is synthesized)
agatgtccccggccggcgagagcgggcgccggggttcgctctgagtcgcgtggcaggccgcgctgcgtccaccgctgccgagttcagagccgcgcaccgcccgccgccgcaggtcgggtt

SEQ ID NO: 598240 - DNA, 120 bp, Artificial Sequence
  ENSG00000174226_1 (sequence is synthesized)
cccagcgctactcccaagacaccgctcagccatgaagatgcatttctgtatcccggtgtcccagcagcggtccgacgcgctggggggccgctacgtgctgtactccgtgcacctggacgg

SEQ ID NO: 598241 - DNA, 120 bp, Artificial Sequence
  ENSG00000174226_2 (sequence is synthesized)
gttcctcttctgcagggtgcgctacagccagctgcacggttggaacgaacagctaaggcgggtctttggaaattgcctgccacccttcccaccaaagtactatctggcaatgaccacagc

SEQ ID NO: 598242 - DNA, 120 bp, Artificial Sequence
  ENSG00000174226_3 (sequence is synthesized)
tatggctgatgagaggagggaccaactggaacaatatttgcaaaatgtaaccatggacccaaacgtgttgagaagtgatgtcttcgttgagtttttaaaactggcgcagctgaatacatt

SEQ ID NO: 598243 - DNA, 120 bp, Artificial Sequence
  ENSG00000174226_4 (sequence is synthesized)
tgacatcgccaccaagaaagcttatctggacatatttctgcccaatgaacagagtattagaatcgaaattataacatcagacactgctgaaagagtcctagaggtggtgtcacacaaaat

SEQ ID NO: 598244 - DNA, 120 bp, Artificial Sequence
  ENSG00000174226_5 (sequence is synthesized)
tggactgtgtcgagagctcttgggctacttcggcctctttctcattcggtttggcaaggagggcaagctctctgttgtgaaaaaattggctgactttgaactcccttatgttagtcttgg

SEQ ID NO: 598245 - DNA, 120 bp, Artificial Sequence
  ENSG00000174226_6 (sequence is synthesized)
aagttctgaggtggaaaactgtaaggttggactccgaaagtggtatatggctccatccctcgactccgtgctgatggactgcagggtggcggtagatttgctctacatgcaggcaataca

SEQ ID NO: 598246 - DNA, 120 bp, Artificial Sequence
  ENSG00000174226_7 (sequence is synthesized)
ggacattgaaaaaggatgggccaaacccacacaggcacagaggcagaaattagaagctttccagaaagaagacagtcaaacaaagtttttggagctggcccgggaggtacggcactatgg

SEQ ID NO: 598247 - DNA, 120 bp, Artificial Sequence
  ENSG00000174226_8 (sequence is synthesized)
atacctgcagctggatccttgtacctgtgactacccagaatcaggctctggagctgttctttctgttggcaataatgagatcagctgctgcatcaccctgcctgacagccagacccagga

SEQ ID NO: 598248 - DNA, 120 bp, Artificial Sequence
  ENSG00000174226_9 (sequence is synthesized)
catcgttttccagatgagcagggtgaagtgctggcaggtcactttccttggaactctgctggatacggatgggccccagagaactctcaaccagaacttagagctcagatttcaatacag

SEQ ID NO: 598249 - DNA, 120 bp, Artificial Sequence
  ENSG00000174226_10 (sequence is synthesized)
tgctgagtagctgcttgaaaaagatgatctcagaaaagatggtaaagctagctgctgagaatacagaaatgcagattgaagttccggaacaaagcaaaagtaaaaaataccacattcaac

SEQ ID NO: 598250 - DNA, 120 bp, Artificial Sequence
  ENSG00000174226_11 (sequence is synthesized)
aaagccagcagaaagactattctagttttctatcaagaaaaagcaagattaagatagctaaagatgactgcgtttttgggaacataaaggaagaagatctctgaagaaagctctcatatt

SEQ ID NO: 598251 - DNA, 120 bp, Artificial Sequence
  ENSG00000174226_12 (sequence is synthesized)
ttaaaatatccttggaggctatctcaagacagtgaaagaacttggggattcaggtgggctacctaccatcagtggaggaaatttgacctcttcccatttttttggcattaacatggactg

SEQ ID NO: 598252 - DNA, 120 bp, Artificial Sequence
  ENSG00000174226_13 (sequence is synthesized)
tattcatcaaggtattataccacagcactctatggaaatctcaagattagaaaaaaaaaaagaaccaagttatagagttagtttttattttatttttgcacttcgtcatgacagtataga

SEQ ID NO: 598253 - DNA, 120 bp, Artificial Sequence
  ENSG00000174226_14 (sequence is synthesized)
gtttgtttttaatgtctcataaatgacaagtggcaaattcaaatcaactcatataaaactcattctattttttctctaaaatagatctttatatggcttcatgaagtcttttatgtgttt

SEQ ID NO: 598254 - DNA, 120 bp, Artificial Sequence
  ENSG00000174226_15 (sequence is synthesized)
tgaatttacataaatgaaagtctcataaaatatcataaagatattttggatcgatttctaaagatgtgactcttcaacggaggagaatagggctctgagaaatggaatcactgaaaaaga

SEQ ID NO: 598255 - DNA, 120 bp, Artificial Sequence
  ENSG00000174226_16 (sequence is synthesized)
aacctgggttctctgatctatccacacagaactagagcaaggaggtgatgaaatactgatctctttcctcacataagtctgagcctaccaatatggatgtactcaaagtgaaacgctgcc

SEQ ID NO: 598256 - DNA, 120 bp, Artificial Sequence
  ENSG00000174226_17 (sequence is synthesized)
ctgttctctgcttgaccattgttataattttattctgtccttagagtactgaaggcagttcaataatcaacatgctatttggaatgttttaatttggaaagcaataaggctctgcacctg

SEQ ID NO: 598257 - DNA, 120 bp, Artificial Sequence
  ENSG00000174226_18 (sequence is synthesized)
atatcagataccttataattctcttagctttaaaaatatgtatactttctcacaaggtttttccttatctagcttcatttctctcatggtaattaatgtaattatgtatagaattaagac

SEQ ID NO: 598258 - DNA, 120 bp, Artificial Sequence
  ENSG00000174226_19 (sequence is synthesized)
cacaataagggagatgatcagaggaatctgtatagtgtaattagaaaaagtacaatattctaatgttctaactgggttgtatacctaattatataataaatacaaaataattccagtgaa

SEQ ID NO: 598259 - DNA, 120 bp, Artificial Sequence
  ENSG00000174226_20 (sequence is synthesized)
ctcaaaagccctgtgcattcaaaaaaggcttggttgggttatttccagttgtactgtcgagaaaagagctatttctgtcttttaactctcaaatacaaagatactgctcagtgggaatca

SEQ ID NO: 598260 - DNA, 120 bp, Artificial Sequence
  ENSG00000174226_21 (sequence is synthesized)
aacattcctaattttcatttatttatcttttcattttaattttggattggggggggtatctgcgcagctctgttagacggagtatattgcatggtgctgaggtctgggcttctgatggtc

SEQ ID NO: 598261 - DNA, 120 bp, Artificial Sequence
  ENSG00000174226_22 (sequence is synthesized)
taaagctagctgctgagaatacagaaatgaactgaacgtaccttttccagggaaaataaattcactgcctcttggtgactgaacaattcaagatgtgctagagagtagtaaatcaaagca

SEQ ID NO: 598262 - DNA, 120 bp, Artificial Sequence
  ENSG00000174226_23 (sequence is synthesized)
ataaaagaatcaaggaaactctttttaaaagagtaatataataaaatccaacctctcaggcaggatggaccctcttaggctgagattattgtatgtattaaaaagaagaaagagaaaagt

SEQ ID NO: 598263 - DNA, 120 bp, Artificial Sequence
  ENSG00000174226_24 (sequence is synthesized)
gattctcctgcctcagcctcccaagtagtccacttcattcttcacctctggaccttcaccagctaaggcgggtctttggaaattgcctgccacccttcccaccaaagtactatctggcaa

SEQ ID NO: 598264 - DNA, 120 bp, Artificial Sequence
  ENSG00000174227_0 (sequence is synthesized)
gacgataaggcctggcgttattgcttagaggcggctacctggagccggaagcgcggctgcagcagggcgaggctccaggtggggtcggttccgcatccagcctagcgtgtccacgatgcg

SEQ ID NO: 598265 - DNA, 120 bp, Artificial Sequence
  ENSG00000174227_1 (sequence is synthesized)
gctgggctccgggactttcgctacctgttgcgtagcgatcgaggtgctagggatcgcggtcttccttcggggattcttcccggctcccgttcgttcctctgccagagcggaacacggagc

SEQ ID NO: 598266 - DNA, 120 bp, Artificial Sequence
  ENSG00000174227_2 (sequence is synthesized)
ggagcccccagcgcccgaaccctcggctggagccagttctaactggaccacgctgccaccacctctcttcagtaaagttgttattgttctgatagatgccttgagagatgattttgtgtt

SEQ ID NO: 598267 - DNA, 120 bp, Artificial Sequence
  ENSG00000174227_3 (sequence is synthesized)
tgggtcaaagggtgtgaaatttatgccctacacaacttaccttgtggaaaaaggagcatctcacagttttgtggctgaagcaaagccacctacagttactatgcctcgaatcaaggcatt

SEQ ID NO: 598268 - DNA, 120 bp, Artificial Sequence
  ENSG00000174227_4 (sequence is synthesized)
gatgacggggagccttcctggctttgtcgacgtcatcaggaacctcaattctcctgcactgctggaagacagtgtgataagacaagcaaaagcagctggaaaaagaatagtcttttatgg

SEQ ID NO: 598269 - DNA, 120 bp, Artificial Sequence
  ENSG00000174227_5 (sequence is synthesized)
agatgaaacctgggttaaattattcccaaagcattttgtggaatatgatggaacaacctcatttttcgtgtcagattacacagaggtggataataatgtcacgaggcatttggataaagt

SEQ ID NO: 598270 - DNA, 120 bp, Artificial Sequence
  ENSG00000174227_6 (sequence is synthesized)
attaaaaagaggagattgggacatattaatcctccactacctggggctggaccacattggccacatttcagggcccaacagccccctgattgggcagaagctgagcgagatggacagcgt

SEQ ID NO: 598271 - DNA, 120 bp, Artificial Sequence
  ENSG00000174227_7 (sequence is synthesized)
gctgatgaagatccacacctcactgcagtcgaaggagagagagacgcctttacccaatttgctggttctttgtggtgaccatggcatgtctgaaacaggaagtcacggggcctcctccac

SEQ ID NO: 598272 - DNA, 120 bp, Artificial Sequence
  ENSG00000174227_8 (sequence is synthesized)
cgaggaggtgaatacacctctgattttaatcagttctgcgtttgaaaggaaacccggtgatatccgacatccaaagcacgtccaacagacggatgtggctgcgacactggcgatagcact

SEQ ID NO: 598273 - DNA, 120 bp, Artificial Sequence
  ENSG00000174227_9 (sequence is synthesized)
tggcttaccgattccaaaagacagtgtagggagcctcctattcccagttgtggaaggaagaccaatgagagagcagttgagatttttacatttgaatacagtgcagcttagtaaactgtt

SEQ ID NO: 598274 - DNA, 120 bp, Artificial Sequence
  ENSG00000174227_10 (sequence is synthesized)
gcaagagaatgtgccgtcatatgaaaaagatcctgggtttgagcagtttaaaatgtcagaaagattgcatgggaactggatcagactgtacttggaggaaaagcattcagaagtcctatt

SEQ ID NO: 598275 - DNA, 120 bp, Artificial Sequence
  ENSG00000174227_11 (sequence is synthesized)
caacctgggctccaaggttctcaggcagtacctggatgctctgaagacgctgagcttgtccctgagtgcacaagtggcccagtacgacatctattcgatgatggttctcaccctgctcct

SEQ ID NO: 598276 - DNA, 120 bp, Artificial Sequence
  ENSG00000174227_12 (sequence is synthesized)
gctcagcgtcccacaggcactgcgcagaaaggctgagctggaagtcccactgtcatctcctgggttttctctgctcttttatttggtgatcctggttctttcggccgttcacgtcattgt

SEQ ID NO: 598277 - DNA, 120 bp, Artificial Sequence
  ENSG00000174227_13 (sequence is synthesized)
tgctgtgtgtgattgtgtctgttctgaccaacgtgctcgtgggtggaaacaccccaaggaagaaccccatgcatcccagctcaaggtggtcagagctagaccttcttattctgttgggga

SEQ ID NO: 598278 - DNA, 120 bp, Artificial Sequence
  ENSG00000174227_14 (sequence is synthesized)
cggcgggccacgtcttgagcctgggcgccagcagcttcgtggaggaggagcaccagacctggtacttccttgtgaacaccctgtgtctagctctgagccaagaaacctacagaaactact

SEQ ID NO: 598279 - DNA, 120 bp, Artificial Sequence
  ENSG00000174227_15 (sequence is synthesized)
ttctgggagatgacggtgagcctccgtgtggcctctgtgtggaacaagggcatgacggggccacagcagcgtggcaggacgggcctggctgtgatgtcctggagcgagacaaaggccacg

SEQ ID NO: 598280 - DNA, 120 bp, Artificial Sequence
  ENSG00000174227_16 (sequence is synthesized)
gaagcccctctacctccgaagtgctcagaggccgcgagaagtggatggtgctggccagtccgtggctaatactggcctgctgccggctgctgcgctccctaaaccagacaggtgtgcagt

SEQ ID NO: 598281 - DNA, 120 bp, Artificial Sequence
  ENSG00000174227_17 (sequence is synthesized)
gggctcaccggcctgacctcggccactggctcaccagctctgaccacaaagccgagctctctgtcctggctgccctctccctcctcgtagtttttgtgctggtgcagagggggtgctccc

SEQ ID NO: 598282 - DNA, 120 bp, Artificial Sequence
  ENSG00000174227_18 (sequence is synthesized)
ctgtgtccaaggctgccctggcgctggggctgctgggcgtctactgctaccgggcggccatcgggagtgtccggttcccgtggcggccggacagcaaggacatttccaagggtattattg

SEQ ID NO: 598283 - DNA, 120 bp, Artificial Sequence
  ENSG00000174227_19 (sequence is synthesized)
aagctcgttttgtttatgtctttgtccttggcattctgttcacgggcaccaaagacttacttaaatctcaagtcattgctgcagacttcaaactcaagactgtaggtttatgggagatat

SEQ ID NO: 598284 - DNA, 120 bp, Artificial Sequence
  ENSG00000174227_20 (sequence is synthesized)
atagtggattagttcttctggcagccttgctctttagaccacataatcttccggtcttagcatttagcctcttgattcagactctaatgactaaattcatctggaagcccctgagacacg

SEQ ID NO: 598285 - DNA, 120 bp, Artificial Sequence
  ENSG00000174227_21 (sequence is synthesized)
atgcagctgagattactgtgatgcattattggtttggtcaagcattcttctattttcagggcaactccaacaacattgccaccgtggacatctccgcaggcttcgtgggcttagacacct

SEQ ID NO: 598286 - DNA, 120 bp, Artificial Sequence
  ENSG00000174227_22 (sequence is synthesized)
acgtggaaatcccagccgtgctcctgacagcgtttgggacgtacgcagggcctgtgctgtgggccagccacttagtgcacttcctgagctcagaaacacgcagtggttcagcactgagtc

SEQ ID NO: 598287 - DNA, 120 bp, Artificial Sequence
  ENSG00000174227_23 (sequence is synthesized)
atgcttgcttctgctacgcactgatttgttctattccagttttcacgtacatcgttttggtgacatctctgcgttatcatttatttatatggagtgtattttctccaaaacttctctacg

SEQ ID NO: 598288 - DNA, 120 bp, Artificial Sequence
  ENSG00000174227_24 (sequence is synthesized)
agggaatgcacctgctcattacagctgctgtctgtgtattcttcacggcaatggatcaaaccagactcacacagtcttagactaagctgaacactggaaaaataatacatgcttaaagtc

SEQ ID NO: 598289 - DNA, 120 bp, Artificial Sequence
  ENSG00000174227_25 (sequence is synthesized)
tgctgttattctaaaatgaaagatatgaattcaacaaagttgatggataactttctttgactgctctacctgaatttagactaagcagtaaatagtttaataaaagatcactttaatata

SEQ ID NO: 598290 - DNA, 120 bp, Artificial Sequence
  ENSG00000174227_26 (sequence is synthesized)
agctatggtgtgacccaaatatgtgtgtttaaatcaatgaatgaaaaggttctggactttgttagagtccaggagctctgtgggaggaggcacccagattaccttagggagcacagagct

SEQ ID NO: 598291 - DNA, 120 bp, Artificial Sequence
  ENSG00000174227_27 (sequence is synthesized)
cttagaatcctacaaaccactgagggccccaaggcgctttggtttatgagggttacatgtatcagtgtttatggcatttgagatgaaaactaagataaaaaagtattcatttataaggaa

SEQ ID NO: 598292 - DNA, 120 bp, Artificial Sequence
  ENSG00000174227_28 (sequence is synthesized)
tctattgcatattaatgaaacacttgaaggaaaagtaactatattttccaaaacaaaaaaattcagtgagacccagcactttgggaggccagagtgggggtatcacttgagcccaggtgt

SEQ ID NO: 598293 - DNA, 120 bp, Artificial Sequence
  ENSG00000174227_29 (sequence is synthesized)
tatcacttgagcccaggtgtttgagatcagcctgggaaacatagtgagaccctcatctctccaaaaacttcaaaaaattagctgggcgtgatggcacacacctgtggtcccagctactca

SEQ ID NO: 598294 - DNA, 83 bp, Artificial Sequence
  ENSG00000174227_30 (sequence is synthesized)
tgtttcagcctactccagccaggacaacagagtgagactcttgtctttaaaatgaaaaaataaatgtttaatgagaaaagtga

SEQ ID NO: 598295 - DNA, 120 bp, Artificial Sequence
  ENSG00000174227_31 (sequence is synthesized)
cagtcttggtgagcacgtgaggattcctggggccacgttagtggcacagttcttttggaagatacttgtaagtttacatcagaagctgcgaaattacagattcttctgattaagtaattc

SEQ ID NO: 598296 - DNA, 120 bp, Artificial Sequence
  ENSG00000174227_32 (sequence is synthesized)
ttgtgggaggctaagcattaactaaattacgaaaacctcggttagccaagtcatcgcagatgggtccttctatctgcctgctgtgtgcctgcacgtttcctttccagagaagccccggag

SEQ ID NO: 598297 - DNA, 120 bp, Artificial Sequence
  ENSG00000174227_33 (sequence is synthesized)
ccctcggctggtacggacccctccccggcgtctccgctcccctgaccccacatcccctagaagaccttttttctgagcctcgctgctcggatttcttctcggcgctccccggtggtctct

SEQ ID NO: 598298 - DNA, 120 bp, Artificial Sequence
  ENSG00000174227_34 (sequence is synthesized)
tccattatggtccccacctcagaaattttttttaaccgctccagcgtctcttttctgtattcttacaactttgtggcaaccacctctactggccccacttcgaccttccttcctgatcac

SEQ ID NO: 598299 - DNA, 120 bp, Artificial Sequence
  ENSG00000174227_35 (sequence is synthesized)
ttcaggctgcctttcgtttaccagactctggttgaacacctggtgtgtgccacgtgctggcagtgccctggacagggggcctcagggaaggacgtggagcagccttatcccaggcctctg

SEQ ID NO: 598300 - DNA, 120 bp, Artificial Sequence
  ENSG00000174227_36 (sequence is synthesized)
ggtgtcccgacacaggtgttcacatctgtgctgtcaggtcagatgcctcagttcttggaaagctaggttcctgcgactgttaccaaggtgattgtaaagagctggcggtcacagaggaac

SEQ ID NO: 598301 - DNA, 120 bp, Artificial Sequence
  ENSG00000174227_37 (sequence is synthesized)
aagcccccccgctgagggggtgtgtgaatcggacagcctcccagcagaggtgtgggagctgcagctgagggaagaagagacaatcggcctggacactcaggagggtcaaaaggagacttg

SEQ ID NO: 598302 - DNA, 120 bp, Artificial Sequence
  ENSG00000174227_38 (sequence is synthesized)
gtcgcaccactcatcctgccacccccagaatgcatcctgcctcatcaggtccagatttctttccaaggcggacgttttctgttggaattcttagtccttggcctcggacaccttcattcg

SEQ ID NO: 598303 - DNA, 120 bp, Artificial Sequence
  ENSG00000174227_39 (sequence is synthesized)
ttagctggggagtggtggtgaggcagtgaggaagaggcggatggtcacactcagatccacagagcccaggatcaagggacccactgcagtggcagcaggactgttgggcccccaccccaa

SEQ ID NO: 598304 - DNA, 120 bp, Artificial Sequence
  ENSG00000174227_40 (sequence is synthesized)
ccctgcgcagccctcatcccctcttggcttgagccgtcagaggccctgtgctgagtgtctgaccgagacactcacagctttgtcatcagggcacaggcttcctcggagccaggatgatct

SEQ ID NO: 598305 - DNA, 120 bp, Artificial Sequence
  ENSG00000174227_41 (sequence is synthesized)
gtgccacgcttgcacctcgggcccatctgggctcatgctctctctcctgctattgaattagtacctagctgcacgcagtatgtagttaccaaaagaataaacggcaataattgagtcctc

SEQ ID NO: 598306 - DNA, 120 bp, Artificial Sequence
  ENSG00000174227_42 (sequence is synthesized)
aacagatcagggatcaggaacatgactgcccttgctcatctgctggccctccacatttgcccagtccctgggtctctctgcctccgtttcctccctgtttgatgaggataatcacgaagc

SEQ ID NO: 598307 - DNA, 120 bp, Artificial Sequence
  ENSG00000174227_43 (sequence is synthesized)
acatcaggactgttgggttagatgaagtcatgcaggtaaagctgctgtgcagctgcagacatgtcagcatggctggcagtctctgtgcttggctgagcctgctcagagccacagtgacct

SEQ ID NO: 598308 - DNA, 120 bp, Artificial Sequence
  ENSG00000174227_44 (sequence is synthesized)
cctaggtgtcctcctcccctgctcccatcgtggcatctgggactctgtccccctgccaccctccagggtctcctactgcttctgcctgtttgctctctcctcagtctccctgcagaagag

SEQ ID NO: 598309 - DNA, 120 bp, Artificial Sequence
  ENSG00000174227_45 (sequence is synthesized)
cttccaagtggaggagacacatgactggggtggcaccgtccaagagaggcagtagctgcgagtccagtgggtctcagggcaagccaagtcaaagggctggggcctaagacaacagggata

SEQ ID NO: 598310 - DNA, 120 bp, Artificial Sequence
  ENSG00000174227_46 (sequence is synthesized)
ggagtcaatgcacatctgtgagataatggggaagcagcatcaacatgacttggggaccccctgggcccacagctctctgcatggaaagggaggaaggagccaagctggtgagcacccagc

SEQ ID NO: 598311 - DNA, 120 bp, Artificial Sequence
  ENSG00000174227_47 (sequence is synthesized)
cagtgttttgtggacatgaacagttctggttctggagagggatcttcgttgagcttgatagagacatgtgctgtcggactgtagatgtcatgagtttctgaggaaaggtcagcatgacag

SEQ ID NO: 598312 - DNA, 120 bp, Artificial Sequence
  ENSG00000174227_48 (sequence is synthesized)
gcaagtgacagacatcagagtcagtaaagatggagcgtggggaggcggggcctgggagcagagaggaggggcctaggaatggagaggtggggcctaggagtggaagggtgtggtcttgga

SEQ ID NO: 598313 - DNA, 120 bp, Artificial Sequence
  ENSG00000174227_49 (sequence is synthesized)
gtggagaggcggggcctgggagcagagaggaggggcctaggaatggagaggtagggcctaggagtggaaaggtgtggtcttggagtggagaggcggggcctgcgcagagaggcagggtct

SEQ ID NO: 598314 - DNA, 120 bp, Artificial Sequence
  ENSG00000174227_50 (sequence is synthesized)
ctcagaagacccctttttgggatccagaatcactaggagcagggtaagctgtgtggcatcagcgcttgcatcctgcagggagttacctaccagggctgggccgggactggccagaacctt

SEQ ID NO: 598315 - DNA, 120 bp, Artificial Sequence
  ENSG00000174227_51 (sequence is synthesized)
ggctgtgctcccccagtggctggcctgccctccaccatataacccactggcagcacctcaccgtagatgggacctggctgggtgcccgttctagtcttcagcccagctccccgcttggct

SEQ ID NO: 598316 - DNA, 120 bp, Artificial Sequence
  ENSG00000174227_52 (sequence is synthesized)
gggcccagcagctggcctctcagggccctatgcgcccctcggatgggggtccttgaggggagcttcatgtgcttgtcttaagtcgatgggtctggacaagggtcttagatgtggcacagt

SEQ ID NO: 598317 - DNA, 120 bp, Artificial Sequence
  ENSG00000174227_53 (sequence is synthesized)
cagccagccggtctgtgtgtgcgtccctcttcagagggggccccagcttctgcacggtccgctcacgtgcccttccgcagcctgggcactgcaggcagggggagggggtgccacctaggc

SEQ ID NO: 598318 - DNA, 120 bp, Artificial Sequence
  ENSG00000174227_54 (sequence is synthesized)
aaggccagctcggcagtctgaaggaacggctgggcagccacctctgaccacacgtgtgtccgtgccggcgtggttatctgggctgcctacacagttcacgctaacatcgtggctcacgct

SEQ ID NO: 598319 - DNA, 120 bp, Artificial Sequence
  ENSG00000174227_55 (sequence is synthesized)
tgactgtcagtgtggcatggtgaattacgctgaactctcgtgtattttataagacaaagtacagccggttgtttaagacacgcgtcccaggtgtggatgtgtgggtgcttaagacagcag

SEQ ID NO: 598320 - DNA, 120 bp, Artificial Sequence
  ENSG00000174227_56 (sequence is synthesized)
actgctgctttgctgggccaggcctgggtttatttattacaagcagttcaggaagcacagacatcacgttgttcacttgcttcactgatgaatgtaataattgttctcgttcatgccctt

SEQ ID NO: 598321 - DNA, 120 bp, Artificial Sequence
  ENSG00000174227_57 (sequence is synthesized)
tgcccctggtgtcggggctgtccacactggggaccattggtgcccccatgattattagctccctgaagcctggtgggtcgtcagggcttctgtccggtgtttaaagacccatcccagaca

SEQ ID NO: 598322 - DNA, 120 bp, Artificial Sequence
  ENSG00000174227_58 (sequence is synthesized)
agcccaaaccacctcagtttgaagagacatagagggacaggcagacggggcctcagagggatccagcctcatccagcctcccggcaacctcaggagagcaggccagatggggcctcagag

SEQ ID NO: 598323 - DNA, 120 bp, Artificial Sequence
  ENSG00000174227_59 (sequence is synthesized)
ggatccagcctcatccagcctcccggcaacctcaggagagcaggcacagccctgctggttcccttccagtgccgactcccaggctgagtcgctttgcagcagctgaacgtcgtggttgca

SEQ ID NO: 598324 - DNA, 120 bp, Artificial Sequence
  ENSG00000174227_60 (sequence is synthesized)
ttttggtctctaccgtgaggtctgtattttcttggtgtgcaccggtgtctgcctgtccgctgtctcgtacccaggaggcatgtgcagttctttgtgtccctacagggcctctcttccatc

SEQ ID NO: 598325 - DNA, 120 bp, Artificial Sequence
  ENSG00000174227_61 (sequence is synthesized)
ctcttctcctttcctggtgctcccagcctttcccatggaacagcccacagttgcaggattttctgtctttatgtctgtccccctgatcctgaagcccaaaggtggtaggcgtgaagttac

SEQ ID NO: 598326 - DNA, 120 bp, Artificial Sequence
  ENSG00000174227_62 (sequence is synthesized)
agaagtctgtgtcttcaggtacaatgagtaggtggccaatggccagcttcttagccccgtcctggtgcttccccgacccttctgatccgctcaggcccctgtcctcctcgtacacagctg

SEQ ID NO: 598327 - DNA, 120 bp, Artificial Sequence
  ENSG00000174227_63 (sequence is synthesized)
cagctctccctgccatgtccacgcaaggcacaagggtgtccccagcagaactgcaggcctggatgctggtatccagcacgttcaagccaggtggcctccggcaggctcttgccacacctt

SEQ ID NO: 598328 - DNA, 120 bp, Artificial Sequence
  ENSG00000174227_64 (sequence is synthesized)
cgtttccttatctgtaaaccagggatagtggtctcccggcctccccaggacccagccctccctggtctccccacctccccgtggcccctgttttgaggctgagtccgctgcccctcagtg

SEQ ID NO: 598329 - DNA, 120 bp, Artificial Sequence
  ENSG00000174227_65 (sequence is synthesized)
ctcaccagccacagcgagaatgcgctcattactgcgaagatggcaccaagccattcgtgaggaatctgcccccatgacccagacgtctcccacaaggctcacttccaacactggaggttc

SEQ ID NO: 598330 - DNA, 71 bp, Artificial Sequence
  ENSG00000174227_66 (sequence is synthesized)
agacgtctcccacaaggctcacttccaacactggaggttcagtgtcttttttttttttctgaaacggagtt

SEQ ID NO: 598331 - DNA, 120 bp, Artificial Sequence
  ENSG00000174227_67 (sequence is synthesized)
gctgtcagcacgtcgtgtggtcaggtgtcaggacaagcgggcgtgagcgcgtggaggtgcatctgcctctgccctggagaacggatgtgctacagctgtgcgcggcgtgatcaagcacct

SEQ ID NO: 598332 - DNA, 120 bp, Artificial Sequence
  ENSG00000174227_68 (sequence is synthesized)
gttgggtggacggcacacctcccagtggccagctggagacggagggctggaagtacttgcccggctcctctctctgtaggtttggtcttcggccttgcagctgccctggtgcttgcagat

SEQ ID NO: 598333 - DNA, 120 bp, Artificial Sequence
  ENSG00000174227_69 (sequence is synthesized)
cagtgttttgtggacatgaacagttctggttctggagagggatcttcgttgagcttgatagagacatgtgctgtcggactgtagatgtcatgagtttctgaggaaagaatcactaggagc

SEQ ID NO: 598334 - DNA, 120 bp, Artificial Sequence
  ENSG00000174227_70 (sequence is synthesized)
gtggaaccacttcactgtttgatgaactgagaagaccaagccagtcttcagagcattggagtttggtgtttgtgaattgtgattgtgtcaacagctactggagtgtaactaagaaaacct

SEQ ID NO: 598335 - DNA, 120 bp, Artificial Sequence
  ENSG00000174227_71 (sequence is synthesized)
caaccagctgcgttgttagcactttttatgttttatgtgttacttttaggagacaaatcacttggaagtaagattttttaaatttaaaataaaaccttcagggtgtgtgatgggacagac

SEQ ID NO: 598336 - DNA, 120 bp, Artificial Sequence
  ENSG00000174227_72 (sequence is synthesized)
tcgtccagagctcccgcccctttcctgagcagcctttgggtcactccccgttataggcgccctttttgccccctagcacacaacagataagacccctgccgatcccctcgcgttttggtc

SEQ ID NO: 598337 - DNA, 120 bp, Artificial Sequence
  ENSG00000174227_73 (sequence is synthesized)
tcttatattcctccaagatgttttccctgcctaggggctaaggcctctctgcgttaggcctcttcctaggcttcacctacccagccatatacagcaagtaaaggcgccctggttctggac

SEQ ID NO: 598338 - DNA, 120 bp, Artificial Sequence
  ENSG00000174227_74 (sequence is synthesized)
tttaataccgttctttgaaagccacttggtgtagattgatcttgtcgctgtttgtttacgtaatgctggcattttccatctcatttcagctctgaccacaaagccgagctctctgtcctg

SEQ ID NO: 598339 - DNA, 120 bp, Artificial Sequence
  ENSG00000174227_75 (sequence is synthesized)
aaaagaagcagcacaatgagagcatctgcggcgagagtaacagcaagggttgcggtcccgtcactgcagagaactcctgtaagaaatggcagcagaaggaaaagggaaatgcctagtcct

SEQ ID NO: 598340 - DNA, 120 bp, Artificial Sequence
  ENSG00000174227_76 (sequence is synthesized)
agtaatgagggcacttccagttaaatgacagggtgtgacttcatacctgctgaggcagagaagcagaattgaatgacgagactcagtcttggtgagcacgtgaggattcctggggccacg

SEQ ID NO: 598341 - DNA, 120 bp, Artificial Sequence
  ENSG00000174227_77 (sequence is synthesized)
acttccttcagcaatatttattgagcatctactgtgtgccacactgttccagacaggagggaggcagtgaagaacaagacagcattgtcctcatggagcttactttctaattggagggat

SEQ ID NO: 598342 - DNA, 120 bp, Artificial Sequence
  ENSG00000174227_78 (sequence is synthesized)
agaaaatcggtaaaatatgaatcaatgaagatggtttcagacagtgacaactgctctggaaggaatggagagggaggtgagagagaatgaaggggagaggggcatgcccggcacctttga

SEQ ID NO: 598343 - DNA, 120 bp, Artificial Sequence
  ENSG00000174227_79 (sequence is synthesized)
acacagcactcagagtttttgccgtcctgctgaaactagctgtgggaatctggaagaaagacatccagcccctgattttcaggaacaccggtttctttatctgctctatcagaagtgtgg

SEQ ID NO: 598344 - DNA, 120 bp, Artificial Sequence
  ENSG00000174227_80 (sequence is synthesized)
aaggaacccttttctccttttcttttaagatttaacaggcagatttgagaaaatgtataagtgattgtgcaggttctaggttctattcagaccagtccgttggcactgtggttcttgggg

SEQ ID NO: 598345 - DNA, 120 bp, Artificial Sequence
  ENSG00000174227_81 (sequence is synthesized)
cctctgtctccagcttattggttttatttcacctttgctggggagcctcaccccagagctagtgttttgtttcattttcagtcctttgaggattcttgctccttatttccccatcaggga

SEQ ID NO: 598346 - DNA, 120 bp, Artificial Sequence
  ENSG00000174227_82 (sequence is synthesized)
aaatcaatgtgatcattgagtgctgtgtctttttcagaacagccttcttgtaggacacatgtagatgccctcagcttcatcatcctgctggttactttaacgctgggtggataataatgt

SEQ ID NO: 598347 - DNA, 120 bp, Artificial Sequence
  ENSG00000174231_0 (sequence is synthesized)
acttcccggcgctgggaacgcggagcggacgcagtctggccgccattgcgctgcggggaaagcggcctcttgtgtgagggcctgtgggattctccggatatggccggagtgtttccttat

SEQ ID NO: 598348 - DNA, 120 bp, Artificial Sequence
  ENSG00000174231_1 (sequence is synthesized)
cgagggccgggtaacccggtgcctggccctctagccccgctaccggactacatgtcggaggagaagctgcaggagaaagctcgaaaatggcagcaattgcaggccaagcgctatgcagaa

SEQ ID NO: 598349 - DNA, 120 bp, Artificial Sequence
  ENSG00000174231_2 (sequence is synthesized)
aagcggaagtttgggtttgtggatgcccagaaggaagacatgcccccagaacatgtcaggaagatcattcgagaccatggagacatgaccaacaggaagttccgccatgacaaaagggtt

SEQ ID NO: 598350 - DNA, 120 bp, Artificial Sequence
  ENSG00000174231_3 (sequence is synthesized)
tacttgggtgccctaaagtacatgccccacgcagtcctcaaactcctggagaacatgcctatgccttgggagcagattcgggatgtgcctgtgctgtaccacatcactggagccatttcc

SEQ ID NO: 598351 - DNA, 120 bp, Artificial Sequence
  ENSG00000174231_4 (sequence is synthesized)
ttcgtcaatgagattccctgggtcattgaacctgtctacatctcccagtgggggtcaatgtggattatgatgcgccgagaaaaaagagataggaggcatttcaagaggatgcgttttccc

SEQ ID NO: 598352 - DNA, 120 bp, Artificial Sequence
  ENSG00000174231_5 (sequence is synthesized)
ccttttgatgatgaggagccgcccttggactatgctgacaacatcctagatgttgagccactggaggccattcagctagagctggaccctgaggaggacgcccctgtgttggactggttc

SEQ ID NO: 598353 - DNA, 120 bp, Artificial Sequence
  ENSG00000174231_6 (sequence is synthesized)
tatgaccaccagccgttgagggacagcaggaagtatgtaaatggctccacttaccagcgctggcagttcacactacctatgatgtcgactctctaccgcctggctaatcagctcctgaca

SEQ ID NO: 598354 - DNA, 120 bp, Artificial Sequence
  ENSG00000174231_7 (sequence is synthesized)
gacttggtggatgacaactacttctacctgtttgatttgaaggccttctttacgtccaaggcactcaatatggccattcctggaggccccaaatttgaacctcttgttcgagacatcaac

SEQ ID NO: 598355 - DNA, 120 bp, Artificial Sequence
  ENSG00000174231_8 (sequence is synthesized)
ctacaggatgaagactggaatgaattcaatgatattaacaagattatcatccggcagcctatccgcactgagtacaagattgcttttccttacttgtacaacaatcttccacaccatgtc

SEQ ID NO: 598356 - DNA, 120 bp, Artificial Sequence
  ENSG00000174231_9 (sequence is synthesized)
cacctcacctggtaccatactcccaatgttgtattcatcaaaactgaggatcctgacttgccagctttctactttgaccctttgatcaacccaatctcccataggcactcagtcaagagc

SEQ ID NO: 598357 - DNA, 120 bp, Artificial Sequence
  ENSG00000174231_10 (sequence is synthesized)
caggaaccattgccggatgatgatgaggaatttgagctcccggagtttgtggagcccttcctgaaggacacacccctctatacagacaatacagccaatggcattgccctgctctgggcc

SEQ ID NO: 598358 - DNA, 120 bp, Artificial Sequence
  ENSG00000174231_11 (sequence is synthesized)
ccgcggcccttcaacctacgctctggtcgcacccgtcgggccctggacataccccttgtcaagaactggtatcgggagcattgtcctgccgggcagcctgtgaaagtgagggtctcctac

SEQ ID NO: 598359 - DNA, 120 bp, Artificial Sequence
  ENSG00000174231_12 (sequence is synthesized)
cagaagctgcttaagtactatgtgctgaatgccctgaagcatcggccccctaaggctcaaaagaagaggtatttgttccgctccttcaaagccaccaaattctttcagtccacaaagctg

SEQ ID NO: 598360 - DNA, 120 bp, Artificial Sequence
  ENSG00000174231_13 (sequence is synthesized)
gactgggtggaggttgggctccaggtttgccgccagggctacaacatgctcaaccttctcattcaccgcaaaaacctcaactacctgcacctggactacaacttcaacctcaagcctgtg

SEQ ID NO: 598361 - DNA, 120 bp, Artificial Sequence
  ENSG00000174231_14 (sequence is synthesized)
aaaacgctcaccaccaaggaaagaaagaaatctcgttttgggaatgctttccacctgtgtcgggaagttctgcgtttgactaagctggtggtggatagtcacgtgcagtatcggctgggc

SEQ ID NO: 598362 - DNA, 120 bp, Artificial Sequence
  ENSG00000174231_15 (sequence is synthesized)
aatgtggatgccttccagctggcagatggattgcagtatatatttgcccatgttgggcagttgacgggcatgtatcgatacaaatacaagctgatgcgacagattcgcatgtgcaaggac

SEQ ID NO: 598363 - DNA, 120 bp, Artificial Sequence
  ENSG00000174231_16 (sequence is synthesized)
ctgaagcatctcatctattatcgtttcaacacgggccctgtagggaagggtcctggctgtggcttctgggctgccggttggcgagtctggctctttttcatgcgtggcattaccccttta

SEQ ID NO: 598364 - DNA, 120 bp, Artificial Sequence
  ENSG00000174231_17 (sequence is synthesized)
ttagagcgatggcttggcaacctcctggcccggcagtttgaaggtcgacactcaaagggggtggcaaagacagtaacaaagcagcgagtggagtcacattttgaccttgagctgcgggca

SEQ ID NO: 598365 - DNA, 120 bp, Artificial Sequence
  ENSG00000174231_18 (sequence is synthesized)
gctgtgatgcatgatattctggacatgatgcctgaggggatcaagcagaacaaggcccggacaatcctgcagcacctcagtgaagcctggcgctgctggaaagccaacattccctggaag

SEQ ID NO: 598366 - DNA, 120 bp, Artificial Sequence
  ENSG00000174231_19 (sequence is synthesized)
gtccctgggctgccgacgcccatagagaatatgatccttcgatacgtgaaggccaaggctgactggtggaccaacactgcccactacaaccgagaacggatccgccgaggggccactgtg

SEQ ID NO: 598367 - DNA, 120 bp, Artificial Sequence
  ENSG00000174231_20 (sequence is synthesized)
gacaagactgtttgtaaaaagaatctgggccgcctcacccggctctatctgaaggcagaacaggagcggcagcacaactacctgaaggacgggccttacatcacagcggaggaagcagtg

SEQ ID NO: 598368 - DNA, 120 bp, Artificial Sequence
  ENSG00000174231_21 (sequence is synthesized)
gcagtatataccaccacagtgcattggttggaaagccgcaggttttcacccatcccattccccccactctcctataagcatgacaccaagttgctcatcttggcattggagcggctcaag

SEQ ID NO: 598369 - DNA, 120 bp, Artificial Sequence
  ENSG00000174231_22 (sequence is synthesized)
gaagcttatagtgtgaagtctcggttgaaccagtctcagagggaggagctaggtctgatcgagcaggcctacgataacccccacgaggcgctgtcccgcatcaagcgtcacctcctcaca

SEQ ID NO: 598370 - DNA, 120 bp, Artificial Sequence
  ENSG00000174231_23 (sequence is synthesized)
cagagagccttcaaagaggtgggcattgagttcatggatctgtatagccacctcgttccagtatatgatgttgagcccctggagaagataactgatgcttacctggaccagtacctgtgg

SEQ ID NO: 598371 - DNA, 120 bp, Artificial Sequence
  ENSG00000174231_24 (sequence is synthesized)
tatgaagccgacaagcgccgcctgttcccaccctggattaagcctgcagacacagaaccacctccgctgcttgtttacaagtggtgtcaaggcatcaataacctgcaggacgtgtgggag

SEQ ID NO: 598372 - DNA, 120 bp, Artificial Sequence
  ENSG00000174231_25 (sequence is synthesized)
acgagtgaaggcgagtgcaatgtcatgctggaatcccgctttgagaagatgtatgagaagatcgacttgactctgctcaacaggctgctgcgcctcatcgtggaccacaacatagccgac

SEQ ID NO: 598373 - DNA, 120 bp, Artificial Sequence
  ENSG00000174231_26 (sequence is synthesized)
tacatgacagccaagaacaacgtcgtcatcaactataaggacatgaaccatacgaattcatatgggatcatcagaggcctgcagtttgcctcattcatcgtgcagtattatggcctggtg

SEQ ID NO: 598374 - DNA, 120 bp, Artificial Sequence
  ENSG00000174231_27 (sequence is synthesized)
atggatttgcttgtattgggattgcaccgggccagtgagatggctgggccccctcagatgccaaatgactttctcagtttccaggacatagccactgaggctgcccaccccatccgtctc

SEQ ID NO: 598375 - DNA, 120 bp, Artificial Sequence
  ENSG00000174231_28 (sequence is synthesized)
ttctgcagatacattgatcgcatccatatttttttcaggttcacagcagatgaggctcgggacctgattcaacgttacctgacagagcaccctgaccccaataatgaaaacatcgttggc

SEQ ID NO: 598376 - DNA, 120 bp, Artificial Sequence
  ENSG00000174231_29 (sequence is synthesized)
tataataacaagaagtgctggccccgagatgcccgcatgcgcctcatgaaacatgatgttaacttaggccgggcggtattctgggacatcaagaaccgcttgccacggtcagtgactaca

SEQ ID NO: 598377 - DNA, 120 bp, Artificial Sequence
  ENSG00000174231_30 (sequence is synthesized)
ccgcatcctgcctaagtgccgcaccagctatgaggagttcacccacaaggacggggtctggaacctgcagaatgaggttactaaggagcgcacagctcagtgtttcctgcgtgtggacga

SEQ ID NO: 598378 - DNA, 120 bp, Artificial Sequence
  ENSG00000174231_31 (sequence is synthesized)
tgagtcaatgcagcgcttccacaaccgcgtgcgtcagattctcatggcctctgggtccaccaccttcaccaagattgtgaataagtggaatacagctctcattggccttatgacatactt

SEQ ID NO: 598379 - DNA, 120 bp, Artificial Sequence
  ENSG00000174231_32 (sequence is synthesized)
tcgggaggctgtggtgaacacccaagagctcttggacttactggtgaagtgtgagaacaaaatccagacacgtatcaagattggactcaactccaagatgccaagtcggttccccccggt

SEQ ID NO: 598380 - DNA, 120 bp, Artificial Sequence
  ENSG00000174231_33 (sequence is synthesized)
tgtgttctacacccctaaggagttgggtggactcggcatgctctcaatgggccatgtgctcatcccccaatccgacctcaggtggtccaaacagacagatgtaggtatcacacactttcg

SEQ ID NO: 598381 - DNA, 120 bp, Artificial Sequence
  ENSG00000174231_34 (sequence is synthesized)
ttcaggaatgagccatgaagaagaccagctcattcccaacttgtaccgctacatacagccatgggagagcgagttcattgattctcagcgggtctgggctgagtacgcactcaagaggca

SEQ ID NO: 598382 - DNA, 120 bp, Artificial Sequence
  ENSG00000174231_35 (sequence is synthesized)
agaggccattgctcagaacagacgcctgactttagaagacctagaagattcatgggatcgtggcattcctcgaatcaataccctcttccagaaggaccggcacacactggcttatgataa

SEQ ID NO: 598383 - DNA, 120 bp, Artificial Sequence
  ENSG00000174231_36 (sequence is synthesized)
gggctggcgtgtcagaactgactttaagcagtatcaggttttgaagcagaatccgttctggtggacacaccagcggcatgatgggaagctctggaacctgaacaactaccgtacagacat

SEQ ID NO: 598384 - DNA, 120 bp, Artificial Sequence
  ENSG00000174231_37 (sequence is synthesized)
gatccaggccctgggcggtgtggaaggcattctggaacacacactctttaagggcacttacttccctacctgggaggggcttttctgggagaaggccagtggctttgaggaatctatgaa

SEQ ID NO: 598385 - DNA, 120 bp, Artificial Sequence
  ENSG00000174231_38 (sequence is synthesized)
gtggaagaagctaactaatgctcagcgatcaggactgaaccagattcccaatcgtagattcaccctctggtggtccccgaccattaatcgagccaatgtatatgtaggctttcaggtgca

SEQ ID NO: 598386 - DNA, 120 bp, Artificial Sequence
  ENSG00000174231_39 (sequence is synthesized)
gctagacctgacgggtatcttcatgcacggcaagatccccacgctgaagatctctctcatccagatcttccgagctcacttgtggcagaagatccatgagagcattgttatggacttatg

SEQ ID NO: 598387 - DNA, 120 bp, Artificial Sequence
  ENSG00000174231_40 (sequence is synthesized)
tcaggtgtttgaccaggaacttgatgcactggaaattgagacagtacaaaaggagacaatccatccccgaaagtcatataagatgaactcttcctgtgcagatatcctgctctttgcctc

SEQ ID NO: 598388 - DNA, 120 bp, Artificial Sequence
  ENSG00000174231_41 (sequence is synthesized)
ctataagtggaatgtctcccggccctcattgctggctgactccaaggatgtgatggacagcaccaccacccagaaatactggattgacatccagttgcgctggggggactatgattccca

SEQ ID NO: 598389 - DNA, 120 bp, Artificial Sequence
  ENSG00000174231_42 (sequence is synthesized)
cgacattgagcgctacgcccgggccaagttcctggactacaccaccgacaacatgagtatctacccttcgcccacaggtgtactcatcgccattgacctggcctataacttgcacagtgc

SEQ ID NO: 598390 - DNA, 120 bp, Artificial Sequence
  ENSG00000174231_43 (sequence is synthesized)
ctatggaaactggttcccaggcagcaagcctctcatacaacaggccatggccaagatcatgaaggcaaaccctgccctgtatgtgttacgtgaacggatccgcaaggggctacagctcta

SEQ ID NO: 598391 - DNA, 120 bp, Artificial Sequence
  ENSG00000174231_44 (sequence is synthesized)
ttcatctgaacccactgagccttatttgtcttctcagaactatggtgagctcttctccaaccagattatctggtttgtggatgacaccaacgtctacagagtgactattcacaagacctt

SEQ ID NO: 598392 - DNA, 120 bp, Artificial Sequence
  ENSG00000174231_45 (sequence is synthesized)
tgaagggaacttgacaaccaagcccatcaacggagccatcttcatcttcaacccacgcacagggcagctgttcctcaagataatccacacgtccgtgtgggcgggacagaagcgtttggg

SEQ ID NO: 598393 - DNA, 120 bp, Artificial Sequence
  ENSG00000174231_46 (sequence is synthesized)
gcagttggctaagtggaagacagctgaggaggtggccgccctgatccgatctctgcctgtggaggagcagcccaagcagatcattgtcaccaggaagggcatgctggacccactggaggt

SEQ ID NO: 598394 - DNA, 120 bp, Artificial Sequence
  ENSG00000174231_47 (sequence is synthesized)
gcacttactggacttccccaatattgtcatcaaaggatcggagctccaactccctttccaggcgtgtctcaaggtggaaaaattcggggatctcatccttaaagccactgagccccagat

SEQ ID NO: 598395 - DNA, 120 bp, Artificial Sequence
  ENSG00000174231_48 (sequence is synthesized)
ggttctcttcaacctctatgacgactggctcaagactatttcatcttacacggccttctcccgtctcatcctgattctgcgtgccctacatgtgaacaacgatcgggcaaaagtgatcct

SEQ ID NO: 598396 - DNA, 120 bp, Artificial Sequence
  ENSG00000174231_49 (sequence is synthesized)
gaagccagacaagactactattacagaaccacaccacatctggcccactctgactgacgaagaatggatcaaggtcgaggtgcagctcaaggatctgatcttggctgactacggcaagaa

SEQ ID NO: 598397 - DNA, 120 bp, Artificial Sequence
  ENSG00000174231_50 (sequence is synthesized)
aaacaatgtgaacgtggcatcactgacacaatcagaaattcgagacatcatcctgggtatggagatctcggcaccgtcacagcagcggcagcagatcgctgagatcgagaagcagaccaa

SEQ ID NO: 598398 - DNA, 120 bp, Artificial Sequence
  ENSG00000174231_51 (sequence is synthesized)
ggaacaatcgcagctgacggcaacacagactcgcactgtcaacaagcatggcgatgagatcatcacctccaccaccagcaactatgagacccagactttctcatccaagactgagtggag

SEQ ID NO: 598399 - DNA, 120 bp, Artificial Sequence
  ENSG00000174231_52 (sequence is synthesized)
ggtcagggccatctctgctgccaacctgcacctaaggaccaatcacatctatgtttcatctgacgacatcaaggagactggctacacctacatccttcccaagaatgtgcttaagaagtt

SEQ ID NO: 598400 - DNA, 120 bp, Artificial Sequence
  ENSG00000174231_53 (sequence is synthesized)
catctgcatatctgaccttcgggcccaaattgcaggatacctatatggggtgagcccaccagataacccccaggtgaaggagatccgctgcattgtgatggtgccgcagtggggcactca

SEQ ID NO: 598401 - DNA, 120 bp, Artificial Sequence
  ENSG00000174231_54 (sequence is synthesized)
ccagaccgtgcacctgcctggccagctgccccagcatgagtacctcaaggagatggaacccttaggttggatccacactcagcccaatgagtccccgcagttatcaccccaggatgtcac

SEQ ID NO: 598402 - DNA, 120 bp, Artificial Sequence
  ENSG00000174231_55 (sequence is synthesized)
cacccatgccaagatcatggctgacaacccatcttgggatggcgagaagaccattatcatcacatgcagcttcacgccaggctcctgtacactgacggcctacaagctgacccccagtgg

SEQ ID NO: 598403 - DNA, 120 bp, Artificial Sequence
  ENSG00000174231_56 (sequence is synthesized)
ctacgaatggggccgccagaacacagacaagggcaacaaccccaagggctacctgccttcacactatgagagggtgcagatgctgctgtcggaccgtttccttggcttcttcatggtccc

SEQ ID NO: 598404 - DNA, 120 bp, Artificial Sequence
  ENSG00000174231_57 (sequence is synthesized)
tgcccagtcctcgtggaactacaacttcatgggtgttcggcatgaccccaacatgaaatatgagctacagctggcgaaccccaaagagttctaccacgaggtgcacaggccctctcactt

SEQ ID NO: 598405 - DNA, 120 bp, Artificial Sequence
  ENSG00000174231_58 (sequence is synthesized)
cctcaactttgctctcctgcaggagggggaggtttactctgcggatcgggaggacctgtatgcctgaccgtttccctgcctcctgcttcagcctcccgaggccgaagcctcagcccctcc

SEQ ID NO: 598406 - DNA, 120 bp, Artificial Sequence
  ENSG00000174231_59 (sequence is synthesized)
agacaggccgctgacattcagcagtttggcctctttccctctgtctgtgcttgtgttgttgacctcctgatggcttgtcatcctgaataaaatataataataaattttgtataaatagga

SEQ ID NO: 598407 - DNA, 120 bp, Artificial Sequence
  ENSG00000174231_60 (sequence is synthesized)
gcagtctggccgccattgcgctgcggggaaagcggcctcttgtgtgagggcctgtggggtgcgtggcaggcgtttaaggccgggctgcgggaggcgtggtcgggtcgggccgagtgaccg

SEQ ID NO: 598408 - DNA, 120 bp, Artificial Sequence
  ENSG00000174231_61 (sequence is synthesized)
aaggggttaggccgggcggggctggatgcactgtgtggcgggactgcaggccggggtccccggacgcctttctgctgcgcttcttgtgggcccgggcctgtggttagtgaatttttctat

SEQ ID NO: 598409 - DNA, 120 bp, Artificial Sequence
  ENSG00000174231_62 (sequence is synthesized)
atttggcccttttcccttctccctgtcccacagtcttggattgatgctttgacagctcatcttggtggatataagagaaaggagaaaaccagtaggagtctctgataatttctacatctt

SEQ ID NO: 598410 - DNA, 120 bp, Artificial Sequence
  ENSG00000174231_63 (sequence is synthesized)
tttctacatcttccacttttgcagtctgtttcccctctcttcccgatctgggactggtgctttaatttgtcctgttgatgatattataagatgtccctggccaggcgcggtggctcatgc

SEQ ID NO: 598411 - DNA, 120 bp, Artificial Sequence
  ENSG00000174231_64 (sequence is synthesized)
cagccctaggcagccaggacactttcgttttcctgttcttctagccctgcaactttaggaattgtcctgtctgcctttgtttcaaacttggagccagtgctacgcttggagcctgtcaac

SEQ ID NO: 598412 - DNA, 120 bp, Artificial Sequence
  ENSG00000174231_65 (sequence is synthesized)
acccttagtcagatctgctgattctctggggtcctgctgacctggaacaagttggtggagtgggtgggatggttttgggatttaagtggttctggttctggggacattggttatgcccat

SEQ ID NO: 598413 - DNA, 120 bp, Artificial Sequence
  ENSG00000174231_66 (sequence is synthesized)
ggtttcttagaagcttgaaccctcttcatcctcagggatgtgatggacagcaccaccacccagaaatactggattgacatccagttgcgctggggggactatgattcccacgacattgag

SEQ ID NO: 598414 - DNA, 120 bp, Artificial Sequence
  ENSG00000174231_67 (sequence is synthesized)
gaagggaagggatgctttccctcagctcttctaggagaaatgcgtgaggttggctgatgttactaaacgctcaggtggagggagatgtgttttccgtcttgctaagtgttccccttgagc

SEQ ID NO: 598415 - DNA, 120 bp, Artificial Sequence
  ENSG00000174231_68 (sequence is synthesized)
tataagcgaatatgagaattcagcatttgctttaaaacatgtcattggtataatcctgttttctgtgattatccttttggactttacggttcttttcttgggtgctctagataatctgtc

SEQ ID NO: 598416 - DNA, 120 bp, Artificial Sequence
  ENSG00000174231_69 (sequence is synthesized)
ctttaagcagtatcaggtatgtagagggagcagattttccctgagtcaggaaaatccatggctatccccgaaacttggggcaataggcacccagaagcttgaccgtgcctgccttgccat

SEQ ID NO: 598417 - DNA, 80 bp, Artificial Sequence
  ENSG00000174231_70 (sequence is synthesized)
ctccaaaaaaaaaaaaaaaaaagacgtttctcaagaaattatcttgtcttagccaggcttgagtgctcatgctaatgagc

SEQ ID NO: 598418 - DNA, 120 bp, Artificial Sequence
  ENSG00000174231_71 (sequence is synthesized)
caggagttgaaaccagcctgatcaacaagagactgacgccatctctaccaaaaaaaaaaaatttaaaacaggtgtggtggtacacgcttgtagtcccagcttcttggaggctgaggcagg

SEQ ID NO: 598419 - DNA, 120 bp, Artificial Sequence
  ENSG00000174231_72 (sequence is synthesized)
cgcttgtagtcccagcttcttggaggctgaggcaggaggcttgcttgagcccgggggtttgaggctgcagtgagccatgatgatgccactgtactccagcctgggtaacagagcgagact

SEQ ID NO: 598420 - DNA, 120 bp, Artificial Sequence
  ENSG00000174231_73 (sequence is synthesized)
agtctcgaggaagagagatacagcagtgtcttcgaatagtatgggaagcatccctgttttagggcttcagtctgactcttggccattgtttctcactgttgccatttcaaacagggcatt

SEQ ID NO: 598421 - DNA, 120 bp, Artificial Sequence
  ENSG00000174231_74 (sequence is synthesized)
tctttactgtccatacatgggaagaattttgaacatccgagaccctaagtatccgagactgctgccaacacacacacacaccttcctcccctcgtctccctccctgtcatcgtggcaacc

SEQ ID NO: 598422 - DNA, 120 bp, Artificial Sequence
  ENSG00000174231_75 (sequence is synthesized)
aaaattatccatagggtgacggacaataccacctctgattaagaaccagtattctagggtttctggggtttccatttctgagaacagttccatgccagagcattgttttggtcaaggaag

SEQ ID NO: 598423 - DNA, 120 bp, Artificial Sequence
  ENSG00000174231_76 (sequence is synthesized)
cgtagggtttatggatgctaaacagtgggaaggtgcacacgcagtgtgctgtcccgcttggatctgacgaatcttggaagtgttagtgcacctccgtttcacacttcctgtagaagcagc

SEQ ID NO: 598424 - DNA, 120 bp, Artificial Sequence
  ENSG00000174231_77 (sequence is synthesized)
tcttgtggattgtctggggcgtgagtataggctgtcctgtcctaccaagttacaccctttccattgaggcagaagtgaccaaggggaagggatccttgtaatataacccacaccatcccc

SEQ ID NO: 598425 - DNA, 120 bp, Artificial Sequence
  ENSG00000174231_78 (sequence is synthesized)
tggtttcaagattcatggatgagtaattatacaaggatagccaaaacaacgaggtgggttttggccccatgagatagcaaaagctgtggcagctgagagaaggtagtaattgtagtattg

SEQ ID NO: 598426 - DNA, 120 bp, Artificial Sequence
  ENSG00000174231_79 (sequence is synthesized)
gcctgatagtatttggaagagaacagatatggtcagaaacaaattcctgaccaggtgtgcgtgctggctcatgcctgtaatcccaacactcggctgggcacagtggctaatgcctataat

SEQ ID NO: 598427 - DNA, 89 bp, Artificial Sequence
  ENSG00000174231_80 (sequence is synthesized)
cgtggtgcttgaacgcaagcagtgagctttgatgaccccactgcactccaggctgggcacagtggctcatgactgtaatcccagcactg

SEQ ID NO: 598428 - DNA, 79 bp, Artificial Sequence
  ENSG00000174231_81 (sequence is synthesized)
tgaacgcaagcagtgagctttgatgaccccactgcactccaggctgggcacagtggctcatgttttgagcccaggagtt

SEQ ID NO: 598429 - DNA, 120 bp, Artificial Sequence
  ENSG00000174231_82 (sequence is synthesized)
tttattaataaccataatgagtgaggagcatgaaggtagagacccttattgaaagcaaggaatcttccttgtaatccccttgggacactctacttccaggtcgacactcaaagggggtgg

SEQ ID NO: 598430 - DNA, 120 bp, Artificial Sequence
  ENSG00000174231_83 (sequence is synthesized)
aaacttaaaatagcaccaagtgctggttttccagatgttttcagcttgtgaaaatacactgagctgcatgtgtgctcatttgcttgtgaatactatgcttaataatcagctggggagctt

SEQ ID NO: 598431 - DNA, 120 bp, Artificial Sequence
  ENSG00000174231_84 (sequence is synthesized)
gtgagcagtgcagattcctggaccccactcaggagattctgatgtggtaagtccgcgatgaggtccatgtctaacattttgaacaagcaccccagctgattctgatacagggggttctga

SEQ ID NO: 598432 - DNA, 120 bp, Artificial Sequence
  ENSG00000174231_85 (sequence is synthesized)
tcacgttttaagaaactctgtcctcgttcttgggggaaggaaggaaacagagggctggcagctccaactctgacctggtactaagaagagttttggttcctgacccctttgtctccagat

SEQ ID NO: 598433 - DNA, 120 bp, Artificial Sequence
  ENSG00000174231_86 (sequence is synthesized)
gcttccctcttgtcctctgctgtcctctgctcatttcacacccctttcacttcgtcccctgctggctgcttccttctcttctttgcttagtgtgccagtttccatgctctgtgccatagt

SEQ ID NO: 598434 - DNA, 120 bp, Artificial Sequence
  ENSG00000174231_87 (sequence is synthesized)
ctctcttgatgcgtggtagtaaagggaagtagtgttcgtgttaaactgaggaaaagcccatagtcaaagcaatccaaatgaatacgtggaatcatagtgggattggttatggaaggtaat

SEQ ID NO: 598435 - DNA, 88 bp, Artificial Sequence
  ENSG00000174233_0 (sequence is synthesized)
gccttacgcctggcccaggctaattttttgaaattttaatagaggcagggtcttgctgtattgcccaggttgctctcacattcctagc

SEQ ID NO: 598436 - DNA, 120 bp, Artificial Sequence
  ENSG00000174233_1 (sequence is synthesized)
gcccaggctaattttttgaaattttaatagaggcagggtcttgctgtattgcccaggttgctctcacattcctagccttaagccatcctcctatctcggcctcacaaagtgctgggatta

SEQ ID NO: 598437 - DNA, 120 bp, Artificial Sequence
  ENSG00000174233_2 (sequence is synthesized)
tcttgtcctgactgtgtcttgggttctcacctgttgattggggatacccttgttgcctacctccaagtaattttatgaggatgaaactcatagcttgtcagtgggaagtgcttaggtaat

SEQ ID NO: 598438 - DNA, 120 bp, Artificial Sequence
  ENSG00000174233_3 (sequence is synthesized)
gagctactagtggtggcagtggctgtgatggtggtattaataccactcctactggatggtctctaatactatctccttccttccctaccagcaacatgtcatggtttagtggcctcctgg

SEQ ID NO: 598439 - DNA, 120 bp, Artificial Sequence
  ENSG00000174233_4 (sequence is synthesized)
tccctaaagtggatgaacggaaaacagcctggggtgaacgcaatgggcagaagcgttcgcggcgccgtggcactcgggcaggtggcttctgcacgccccgctatatgagctgcctccggg

SEQ ID NO: 598440 - DNA, 120 bp, Artificial Sequence
  ENSG00000174233_5 (sequence is synthesized)
atgcagagccacccagccccacccctgcgggcccccctcggtgcccctggcaggatgacgccttcatccggaggggcggcccaggcaagggcaaggagctggggctgcgggcagtggccc

SEQ ID NO: 598441 - DNA, 120 bp, Artificial Sequence
  ENSG00000174233_6 (sequence is synthesized)
tgggcttcgaggataccgaggtgacaacgacagcgggcgggacggctgaggtggcgcccgacgcggtgcccaggagtgggcgatcctgctggcgccgtctggtgcaggtgttccagtcga

SEQ ID NO: 598442 - DNA, 120 bp, Artificial Sequence
  ENSG00000174233_7 (sequence is synthesized)
agcagttccgttcggccaagctggagcgcctgtaccagcggtacttcttccagatgaaccagagcagcctgacgctgctgatggcggtgctggtgctgctcacagcggtgctgctggctt

SEQ ID NO: 598443 - DNA, 120 bp, Artificial Sequence
  ENSG00000174233_8 (sequence is synthesized)
tccacgccgcacccgcccgccctcagcctgcctatgtggcactgttggcctgtgccgccgccctgttcgtggggctcatggtggtgtgtaaccggcatagcttccgccaggactccatgt

SEQ ID NO: 598444 - DNA, 120 bp, Artificial Sequence
  ENSG00000174233_9 (sequence is synthesized)
gggtggtgagctacgtggtgctgggcatcctggcggcagtgcaggtcgggggcgctctcgcagcagacccgcgcagcccctctgcgggcctctggtgccctgtgttctttgtctacatcg

SEQ ID NO: 598445 - DNA, 120 bp, Artificial Sequence
  ENSG00000174233_10 (sequence is synthesized)
cctacacgctcctccccatccgcatgcgggctgccgtcctcagcggcctgggcctctccaccttgcatttgatcttggcctggcaacttaaccgtggtgatgccttcctctggaagcagc

SEQ ID NO: 598446 - DNA, 120 bp, Artificial Sequence
  ENSG00000174233_11 (sequence is synthesized)
tcggtgccaatgtgctgctgttcctctgcaccaacgtcattggcatctgcacacactatccagcagaggtgtctcagcgccaggcctttcaggagacccgcggttacatccaggcccggc

SEQ ID NO: 598447 - DNA, 120 bp, Artificial Sequence
  ENSG00000174233_12 (sequence is synthesized)
tccacctgcagcatgagaatcggcagcaggagcggctgctgctgtcggtattgccccagcacgttgccatggagatgaaagaagacatcaacacaaaaaaagaagacatgatgttccaca

SEQ ID NO: 598448 - DNA, 120 bp, Artificial Sequence
  ENSG00000174233_13 (sequence is synthesized)
agatctacatacagaagcatgacaatgtcagcatcctgtttgcagacattgagggcttcaccagcctggcatcccagtgcactgcgcaggagctggtcatgaccctgaatgagctctttg

SEQ ID NO: 598449 - DNA, 120 bp, Artificial Sequence
  ENSG00000174233_14 (sequence is synthesized)
cccggtttgacaagctggctgcggagaatcactgcctgaggatcaagatcttgggggactgttactactgtgtgtcagggctgccggaggcccgggccgaccatgcccactgctgtgtgg

SEQ ID NO: 598450 - DNA, 120 bp, Artificial Sequence
  ENSG00000174233_15 (sequence is synthesized)
agatgggggtagacatgattgaggccatctcgctggtacgtgaggtgacaggtgtgaatgtgaacatgcgcgtgggcatccacagcgggcgcgtgcactgcggcgtccttggcttgcgga

SEQ ID NO: 598451 - DNA, 120 bp, Artificial Sequence
  ENSG00000174233_16 (sequence is synthesized)
aatggcagttcgatgtgtggtccaatgatgtgaccctggccaaccacatggaggcaggaggccgggctggccgcatccacatcactcgggcaacactgcagtacctgaacggggactacg

SEQ ID NO: 598452 - DNA, 120 bp, Artificial Sequence
  ENSG00000174233_17 (sequence is synthesized)
aggtggagccaggccgtggtggcgagcgcaacgcgtacctcaaggagcagcacattgagactttcctcatcctgggcgccagccagaaacggaaagaggagaaggccatgctggccaagc

SEQ ID NO: 598453 - DNA, 120 bp, Artificial Sequence
  ENSG00000174233_18 (sequence is synthesized)
tgcagcggactcgggccaactccatggaagggctgatgccgcgctgggttcctgatcgtgccttctcccggaccaaggactccaaggccttccgccagatgggcattgatgattccagca

SEQ ID NO: 598454 - DNA, 120 bp, Artificial Sequence
  ENSG00000174233_19 (sequence is synthesized)
aagacaaccggggcacccaagatgccctgaaccctgaggatgaggtggatgagttcctgagccgtgccatcgatgcccgcagcattgatcagctgcggaaggaccatgtgcgccggtttc

SEQ ID NO: 598455 - DNA, 120 bp, Artificial Sequence
  ENSG00000174233_20 (sequence is synthesized)
tgctcaccttccagagagaggatcttgagaagaagtactcccggaaggtggatccccgcttcggagcctacgttgcctgtgccctgttggtcttctgcttcatctgcttcatccagcttc

SEQ ID NO: 598456 - DNA, 120 bp, Artificial Sequence
  ENSG00000174233_21 (sequence is synthesized)
tcatcttcccacactccaccctgatgcttgggatctatgccagcatcttcctgctgctgctaatcaccgtgctgatctgtgctgtgtactcctgtggttctctgttccctaaggccctgc

SEQ ID NO: 598457 - DNA, 120 bp, Artificial Sequence
  ENSG00000174233_22 (sequence is synthesized)
aacgtctgtcccgcagcattgtccgctcacgggcacatagcaccgcagttggcatcttttccgtcctgcttgtgtttacttctgccattgccaacatgttcacctgtaaccacaccccca

SEQ ID NO: 598458 - DNA, 120 bp, Artificial Sequence
  ENSG00000174233_23 (sequence is synthesized)
tacggagctgtgcagcccggatgctgaatttaacacctgctgacatcactgcctgccacctgcagcagctcaattactctctgggcctggatgctcccctgtgtgagggcaccatgccca

SEQ ID NO: 598459 - DNA, 120 bp, Artificial Sequence
  ENSG00000174233_24 (sequence is synthesized)
gtcttggggctcatctatttggtgctgcttctgctgggtcccccagccaccatctttgacaactatgacctactgcttggcgtccatggcttggcttcttccaatgagacctttgatggg

SEQ ID NO: 598460 - DNA, 120 bp, Artificial Sequence
  ENSG00000174233_25 (sequence is synthesized)
ctggactgtccagctgcagggagggtggccctcaaatatatgacccctgtgattctgctggtgtttgcgctggcgctgtatctgcatgctcagcaggtggagtcgactgcccgcctagac

SEQ ID NO: 598461 - DNA, 120 bp, Artificial Sequence
  ENSG00000174233_26 (sequence is synthesized)
ttcctctggaaactacaggcaacaggggagaaggaggagatggaggagctacaggcatacaaccggaggctgctgcataacattctgcccaaggacgtggcggcccacttcctggcccgg

SEQ ID NO: 598462 - DNA, 120 bp, Artificial Sequence
  ENSG00000174233_27 (sequence is synthesized)
gagcgccgcaatgatgaactctactatcagtcgtgtgagtgtgtggctgttatgtttgcctccattgccaacttctctgagttctatgtggagctggaggcaaacaatgagggtgtcgag

SEQ ID NO: 598463 - DNA, 120 bp, Artificial Sequence
  ENSG00000174233_28 (sequence is synthesized)
tgcctgcggctgctcaacgagatcatcgctgactttgatgagattatcagcgaggagcggttccggcagctggaaaagatcaagacgattggtagcacctacatggctgcctcagggctg

SEQ ID NO: 598464 - DNA, 120 bp, Artificial Sequence
  ENSG00000174233_29 (sequence is synthesized)
aacgccagcacctacgatcaggtgggccgctcccacatcactgccctggctgactacgccatgcggctcatggagcagatgaagcacatcaatgagcactccttcaacaatttccagatg

SEQ ID NO: 598465 - DNA, 120 bp, Artificial Sequence
  ENSG00000174233_30 (sequence is synthesized)
aagattgggctgaacatgggcccagtcgtggcaggtgtcatcggggctcggaagccacagtatgacatctgggggaacacagtgaatgtctctagtcgtatggacagcacgggggtcccc

SEQ ID NO: 598466 - DNA, 120 bp, Artificial Sequence
  ENSG00000174233_31 (sequence is synthesized)
gaccgaatccaggtgaccacggacctgtaccaggttctagctgccaagggctaccagctggagtgtcgaggggtggtcaaggtgaagggcaagggggagatgaccacctacttcctcaat

SEQ ID NO: 598467 - DNA, 120 bp, Artificial Sequence
  ENSG00000174233_32 (sequence is synthesized)
gggggccccagcagttaacagggcccagccacaaattcagctgaagggaccaaggtgggcattgagtggactctgtgctcactgggtggagctgtggcagggggcactgagcctccagac

SEQ ID NO: 598468 - DNA, 120 bp, Artificial Sequence
  ENSG00000174233_33 (sequence is synthesized)
cctgctaaccacaaaagggaacatcccagcaggctgtgcttggatcatgctcgtctgccctcaagctggaaaacaaggggctacctaccgagaggattatgcaagtgactttctttctta

SEQ ID NO: 598469 - DNA, 120 bp, Artificial Sequence
  ENSG00000174233_34 (sequence is synthesized)
cttggggtagggctgttccctctccaatcttccagcctttgggagcaggggaggggtcagtagcagaagcagagggaggcctcttgcctgagggattaaaatggcagcttgccatgccta

SEQ ID NO: 598470 - DNA, 120 bp, Artificial Sequence
  ENSG00000174233_35 (sequence is synthesized)
cccttccctgtctgtctgggcagcaggttcagggctgagcccttcttttccctcttttttcctgggaatattttgtacaatattttgtacaaagacaggcatgaggagtgcctattccat

SEQ ID NO: 598471 - DNA, 120 bp, Artificial Sequence
  ENSG00000174233_36 (sequence is synthesized)
gcttgcctttgcaatacctgcatccccagcactggtcctgggcacttccccaccccagccaggtgtccctcctatgcacagagcagaggagggagaagctctggggagccagctttggcc

SEQ ID NO: 598472 - DNA, 120 bp, Artificial Sequence
  ENSG00000174233_37 (sequence is synthesized)
atatttcaggagaatgtttccatgtgccaaatcttagtcccatgatctgtccccaaaggggaacaaagggacctctgacagcttagatttagccccagttcctgcacgctccagggaacg

SEQ ID NO: 598473 - DNA, 120 bp, Artificial Sequence
  ENSG00000174233_38 (sequence is synthesized)
gggtgtctggcctcactggtactgtgaaaaatgctcagagagcaagcctgtgtgtggggatgtcaggtcaggagctggaagttcacctgcaggtgccaaagagcaggccggccagggctg

SEQ ID NO: 598474 - DNA, 120 bp, Artificial Sequence
  ENSG00000174233_39 (sequence is synthesized)
gggcagtgccagactctgatctgaggaccccgtcggggtccagatcaggtcactctgccccagtgctctcttgctgtctgctgacaagggggcatggagcatctcttcctcttctgttgc

SEQ ID NO: 598475 - DNA, 120 bp, Artificial Sequence
  ENSG00000174233_40 (sequence is synthesized)
caaatagaaaagggtcagggcatggagaaaggtgaccctgatcccaaacctgccctcccaagtctctggtgttggggagggcccgtgtgtttgtgtaactgtgtgtgcatgttggtcttt

SEQ ID NO: 598476 - DNA, 120 bp, Artificial Sequence
  ENSG00000174233_41 (sequence is synthesized)
gtgtgcatatctgttttccaggtctatgtgagtccttgtgctcctgctcctcagctctccaccccaggttgcctctctcctgtgggcctctgtcttctgggaataaagcagggtttccta

SEQ ID NO: 598477 - DNA, 120 bp, Artificial Sequence
  ENSG00000174233_42 (sequence is synthesized)
cttcaggggatgtagagagatgcccaggttgcacaggagtgggatggggtgtggtagcaaaaggagggagaggagtcctttttgtgccaaatccctaagtgccgttcgggggccatgtgt

SEQ ID NO: 598478 - DNA, 120 bp, Artificial Sequence
  ENSG00000174233_43 (sequence is synthesized)
gcagcatgactctccctgtctgtggcagggacccaagcgcttgcttaagccccagtgctccatgccagcacttgaactgtctggggtttgatggacagaggctgaggaatttcctggctt

SEQ ID NO: 598479 - DNA, 120 bp, Artificial Sequence
  ENSG00000174233_44 (sequence is synthesized)
ccccagatagtgtcctgggacatggtatgctttggggctggggtagcatggaatccctctgaggacctggatactggtactacggggtggggaagaggaaccttaaacttggctttcccc

SEQ ID NO: 598480 - DNA, 120 bp, Artificial Sequence
  ENSG00000174233_45 (sequence is synthesized)
agccttcagcctgagtctagcatgtttctagctccccagtcccttgtgaagccttgagggctggcagaagggttaggaggttgaactctagattcccttcctgtctttgccttcctttta

SEQ ID NO: 598481 - DNA, 120 bp, Artificial Sequence
  ENSG00000174233_46 (sequence is synthesized)
cccctttccctgcaacctccttgactctggcctgaatttgttggtgcctcagtttctctgtctgtacctatttaagccaaaggcactagcctgaattttgcttgaagatcactttgtctt

SEQ ID NO: 598482 - DNA, 120 bp, Artificial Sequence
  ENSG00000174233_47 (sequence is synthesized)
ggaaatgactagagaggcagaggagaagggtttccagagttgctaggtttgggagtggaaggggcaggcagtgcacttgcccctcctcatgccccttctgacaccagctccctgtggagg

SEQ ID NO: 598483 - DNA, 120 bp, Artificial Sequence
  ENSG00000174233_48 (sequence is synthesized)
cctggtttctgggtaatgcctcccttgggcatcttcatgcatcaaccaaatgggccatcaggtacttcattagtcatggcagaaggaggggaaaagacttgttttccagacagaaaatct

SEQ ID NO: 598484 - DNA, 120 bp, Artificial Sequence
  ENSG00000174233_49 (sequence is synthesized)
actcccctgtccccagccatatccctggataggaagggataggaagagactacttggtgccatggggtaggggtgagggtataagtagatcagagtgggaagacctcagccttgggtggc

SEQ ID NO: 598485 - DNA, 120 bp, Artificial Sequence
  ENSG00000174233_50 (sequence is synthesized)
ttgtctctgcttcttgccaggtgggagggcctgtccacaccctggatccccgtaccacagtgccagccatgcccttcccctgggctaccattgtccctttcctcacccagttggtagagg

SEQ ID NO: 598486 - DNA, 80 bp, Artificial Sequence
  ENSG00000174233_51 (sequence is synthesized)
ccggagcccgcgggggcggcggggcgggggcccagggcaggcgcggagccgggccggcagcaacatgtcatggtttagtg

SEQ ID NO: 598487 - DNA, 120 bp, Artificial Sequence
  ENSG00000174233_52 (sequence is synthesized)
gggaggccgtgggctttggttttataatgtaaccactgtgggggtgggggaggatggtgaaccatgtatttcagtgaaatatttaatatatttaaatatcaataaaatcaaactctttgt

SEQ ID NO: 598488 - DNA, 120 bp, Artificial Sequence
  ENSG00000174233_53 (sequence is synthesized)
gtaatgggagagatatattgcaggggtggcagtggcttggggacagacagggtgcaggaccctggcttccttcctcagagaacctagcaagttgtgtgaatgtgtgtgtgtgtttagggg

SEQ ID NO: 598489 - DNA, 120 bp, Artificial Sequence
  ENSG00000174233_54 (sequence is synthesized)
gtctgtcccgcagcattgtccgctcacgggcacatagcaccgcagttggcatcttttccgtcctgcttgtgtttacttctgccattgccaacatggtaagggtccagtgggaattctccc

SEQ ID NO: 598490 - DNA, 120 bp, Artificial Sequence
  ENSG00000174233_55 (sequence is synthesized)
acctctgctctgtgccaagcactgtcctggacactgggagtacagcggagaaaaggacatattttctgccctcagggagccccctcccagaataggggaaggttaactccggttctcctt

SEQ ID NO: 598491 - DNA, 120 bp, Artificial Sequence
  ENSG00000174233_56 (sequence is synthesized)
ccttgttctcccaacctcttgtcatccctgagtgagtactaaggcccatggggtataaggtacctgggcatagcccaggttagggtacatggcttcaccaggtaccttgcaaccctttcc

SEQ ID NO: 598492 - DNA, 120 bp, Artificial Sequence
  ENSG00000174233_57 (sequence is synthesized)
ggggggtacttggagaccagggattggaatgggtgagtggaactgggaagagagagagagatttgatgggacccagagtcatcaggggtaagggtatgcacagtggaggcagaggcaaga

SEQ ID NO: 598493 - DNA, 120 bp, Artificial Sequence
  ENSG00000174233_58 (sequence is synthesized)
acccatgaaggtgtcagaggcagcaagggggtcagccctagtggggcagggtcatcactgttggggagcaggggaggacttgatctgtagggggataggataggtaccaggtggatgtca

SEQ ID NO: 598494 - DNA, 120 bp, Artificial Sequence
  ENSG00000174233_59 (sequence is synthesized)
ctgaagaagaaggcaatagtctgtggacagaacctcatgagaccaaccaagcaagatggtcctctgaatagagaaaattgaagcaaaatgtgaggtagtgtcctgaacatccagatcagg

SEQ ID NO: 598495 - DNA, 120 bp, Artificial Sequence
  ENSG00000174233_60 (sequence is synthesized)
aatgggctgttcactgttctggagggaagtcacttgctcactctgggactcagtatcccaaaaggtaaggattggagaaattgcttaatattgcacttgtgggtctgtgttctgtgagtg

SEQ ID NO: 598496 - DNA, 120 bp, Artificial Sequence
  ENSG00000174233_61 (sequence is synthesized)
agctactggagggaccttctgaagctgtatgcccaagtcctgcctggagtcctaggctgcctgttttcccagctcctcagtcttacactgatagcagcagctggaagggggctcttgaga

SEQ ID NO: 598497 - DNA, 120 bp, Artificial Sequence
  ENSG00000174233_62 (sequence is synthesized)
cagggaagtggggaaggcagccaaggcgtggcaagaaatgagtgttggggcagggctgggtctggggtctttgccttgacagccaggtctccttgtgttgttcagattatcagcgaggag

SEQ ID NO: 598498 - DNA, 120 bp, Artificial Sequence
  ENSG00000174233_63 (sequence is synthesized)
cggtgggggggctgtcctggcacagacattggcccttctgtgccaggcctggtgatgggcgctggggacccaggaactcaccagagtctcccacactaggagcaaccaggggccctggtg

SEQ ID NO: 598499 - DNA, 120 bp, Artificial Sequence
  ENSG00000174233_64 (sequence is synthesized)
tgttgtaggggctgggcatggaaggtggaggatatgggggtttgaggggtgtggtgggaaggttaggtcaggcaggagagtgcagggctctccctgcccaagggtgctgtggcctctgcc

SEQ ID NO: 598500 - DNA, 120 bp, Artificial Sequence
  ENSG00000174236_0 (sequence is synthesized)
gtagagttagaaaaacatgaaccattaacagatgtggcctccctgcagaacttttactttgaaaaagaagtacgtctgaaccagattcacatgtttgatatttggatgcagagaaaatgg

SEQ ID NO: 598501 - DNA, 120 bp, Artificial Sequence
  ENSG00000174236_1 (sequence is synthesized)
ggcagaaagcatcgcaacagttggctctgaaggacagcaaagaggtgcccgtcgtctgtgaggtggtcagtgaagctatagtccatgcagctcagaaactgaaggagtaccttggatttg

SEQ ID NO: 598502 - DNA, 120 bp, Artificial Sequence
  ENSG00000174236_2 (sequence is synthesized)
aatatcctccaagtaaactctgcccagctgcaaatactctgaatgagatcttcttaatccatttcatcactttctgccaagaaaagggagttgatgagtggctgaccaccaccaagatga

SEQ ID NO: 598503 - DNA, 120 bp, Artificial Sequence
  ENSG00000174236_3 (sequence is synthesized)
ccaagcaccaagccttcctgtttggtgcagactggatttggaccttttggggatccaacaagcaaataaagcttcagctcgcagtacagactctgcagatgtcttcacctcctcctgtgg

SEQ ID NO: 598504 - DNA, 120 bp, Artificial Sequence
  ENSG00000174236_4 (sequence is synthesized)
tgataagctggaagaattctgtaacttaataggagaggattgcctgggtctgtttatcatctttggtatgccaggaaagcctaaagacatcaggggagttgtcctggacagtgtcaaaag

SEQ ID NO: 598505 - DNA, 120 bp, Artificial Sequence
  ENSG00000174236_5 (sequence is synthesized)
tcagatggtgaggagccatctgccaggagggaaggctgtggctcagtttgtcctggaaactgaagattgtgtgttcatcaaagagctgctcagaaattgtctgagtaagaaagacgggct

SEQ ID NO: 598506 - DNA, 120 bp, Artificial Sequence
  ENSG00000174236_6 (sequence is synthesized)
gagagaggtgggcaaggtttatatcagcattctctgacttggatatgtattatgtgagtggcctgtaagaggaaaagaaaaaaagattctaataagcaagctcacctatttgcatcattc

SEQ ID NO: 598507 - DNA, 120 bp, Artificial Sequence
  ENSG00000174236_7 (sequence is synthesized)
cagcatgggattttttttcatttgttttcccattgattgaaaatgattactgggatcaaagtacattcatgtcgcaattacagagagagagagaaaaaaagaaaaccctggctctgccta

SEQ ID NO: 598508 - DNA, 120 bp, Artificial Sequence
  ENSG00000174236_8 (sequence is synthesized)
tgatttaaaaacagttcaggaaaagttataatttagtttaatatttcattcacttattcaataataaaaatggaagagagataataaagtcacatttaaagtttgatttgcaaaaaaaaa

SEQ ID NO: 598509 - DNA, 80 bp, Artificial Sequence
  ENSG00000174238_0 (sequence is synthesized)
agaggcgacgaggcccgggcggcaggagccggcgcggcgaccgcggcgagggcggcggggacggagcagagcacgacgaa

SEQ ID NO: 598510 - DNA, 120 bp, Artificial Sequence
  ENSG00000174238_1 (sequence is synthesized)
ggccgggccgggccacggggagagcggccggcgggcagcgggcgggaggccgggcgggccgcgggcagccaccgagccgcgaagcgacatggtgctgctcaaggagtatcgagtaatcct

SEQ ID NO: 598511 - DNA, 120 bp, Artificial Sequence
  ENSG00000174238_2 (sequence is synthesized)
gctcaaggagtatcgagtaatcctgcctgtgtctgtagatgagtatcaagtggggcagctgtattctgtggctgaggccagtaaaaatgaaacgggtggtggcgaaggcgtggaggtcct

SEQ ID NO: 598512 - DNA, 120 bp, Artificial Sequence
  ENSG00000174238_3 (sequence is synthesized)
ggtgaatgagccctacgagaaggacggtgagaaaggccagtacacacacaagatctaccacctgcagagcaaagtacccacgtttgttcgaatgctggccccagagggagccctgaatat

SEQ ID NO: 598513 - DNA, 120 bp, Artificial Sequence
  ENSG00000174238_4 (sequence is synthesized)
acacgagaaagcctggaatgcttacccctactgcagaaccgttattacaaatgagtacatgaaagaagactttctgattaaaattgaaacctggcacaaaccagatcttggcacgcagga

SEQ ID NO: 598514 - DNA, 120 bp, Artificial Sequence
  ENSG00000174238_5 (sequence is synthesized)
gaatgtgcataagctggagcctgaggcgtggaaacacgtggaagccgtatatatagacattgcagatcgaagccaagtgctcagcaaggattacaaggcagaggaagacccagcaaaatt

SEQ ID NO: 598515 - DNA, 120 bp, Artificial Sequence
  ENSG00000174238_6 (sequence is synthesized)
taaatctatcaaaacaggccgaggacccttgggccccaattggaagcaagagcttgtaaaccagaaggactgcccatatatgtgtgcatacaaactggtgaccgtcaagttcaagtggtg

SEQ ID NO: 598516 - DNA, 120 bp, Artificial Sequence
  ENSG00000174238_7 (sequence is synthesized)
gggcctgcagaacaaagtggagaacttcatccataagcaagagaggcgtctgtttacaaacttccacaggcagctgttctgttggctcgataagtgggttgacctgaccatggacgacat

SEQ ID NO: 598517 - DNA, 120 bp, Artificial Sequence
  ENSG00000174238_8 (sequence is synthesized)
tcgaaggatggaagaagagacgaagagacagctggatgaaatgagacaaaaggacccagtgaaaggaatgacagcagatgactaaagccgcctttcccctctgcactttttgcaagacag

SEQ ID NO: 598518 - DNA, 120 bp, Artificial Sequence
  ENSG00000174238_9 (sequence is synthesized)
tggtcaacaggaagacccagcagctccaccctcccaagtgacaggccattttcggacgcagccgttctgtgcccattcttcaggcaactttcgattccttactgtagctaattctagatg

SEQ ID NO: 598519 - DNA, 120 bp, Artificial Sequence
  ENSG00000174238_10 (sequence is synthesized)
cccttcagtattgtgaacaaatagaccgtctggtgtcacagagcccgcgtgtgcaggagcctgctcctccgagatacgtggcgtgtaggttgctgtagttacagcgcctccgtctctctc

SEQ ID NO: 598520 - DNA, 120 bp, Artificial Sequence
  ENSG00000174238_11 (sequence is synthesized)
cattgtgttccgatccatttctgtgtgttcccccaacctttatttccaagtgacattttcagtctttcaaatagctgccttttgtgatgtggtgatttaaatgatttaagttcatttgtt

SEQ ID NO: 598521 - DNA, 120 bp, Artificial Sequence
  ENSG00000174238_12 (sequence is synthesized)
ctcaaccttggggtaaactgaggtattttgcttcctgggaagatcttcgcaattttgagtgctcctgtggggagcggggatgagctaaagatacaatgtttccctgccccgcaccgcttc

SEQ ID NO: 598522 - DNA, 120 bp, Artificial Sequence
  ENSG00000174238_13 (sequence is synthesized)
cacaaaatagcaatgtggttttgcagctctgacttctgctcccagtaacccatcgttagggcactctagcactatggaggtacccaaggctcagccagtctctatttaagaaaatttaac

SEQ ID NO: 598523 - DNA, 120 bp, Artificial Sequence
  ENSG00000174238_14 (sequence is synthesized)
aaatacgagtaaccctgtcccaatcactgaatctctagttactactcttagaaacacctgtggcttcttggccctcctgttgcccgctctgaatctctctgcagtctacaaaatcgcccc

SEQ ID NO: 598524 - DNA, 120 bp, Artificial Sequence
  ENSG00000174238_15 (sequence is synthesized)
agtcaactctccacttggagggaattgtccagtgtggcccctagaattgagtcaccccctagataccaactgtctgaccccgaggagctctgtaagtccctgctcctcctcttccctttg

SEQ ID NO: 598525 - DNA, 120 bp, Artificial Sequence
  ENSG00000174238_16 (sequence is synthesized)
taggtccctgtcctctgtctttgaggctggttaggaagcaagagtcctgatctttcatgctgcacaatatgagcatgcaaaaagctttttccagcagaacatgttccctcgtctccagtt

SEQ ID NO: 598526 - DNA, 120 bp, Artificial Sequence
  ENSG00000174238_17 (sequence is synthesized)
gccggaaaggaatttggggatcaagaacttagctcgtcctacccccatgttgagttctgccctggaaaacccaaagcaagtagtgatcatagtacagaacccgaccaaagtaggctggtg

SEQ ID NO: 598527 - DNA, 120 bp, Artificial Sequence
  ENSG00000174238_18 (sequence is synthesized)
aggaagtccaggctccaggggaacagacgctgcccagtgttcatagcttcctgcaacttgacagagcctgagtttgcctcttagtgggagaatgagagagagctgtagtgtcacctgaca

SEQ ID NO: 598528 - DNA, 120 bp, Artificial Sequence
  ENSG00000174238_19 (sequence is synthesized)
ttccccaaaccttgtgaagcacgttggcctaagtgtgccgtgatcccagcccacactagcctgggtgcatctgctaatgggagaccaaatctttgtccgggaagcaagaagtgggtggga

SEQ ID NO: 598529 - DNA, 120 bp, Artificial Sequence
  ENSG00000174238_20 (sequence is synthesized)
gaatgtatcctgtttttgtcagtttgtttgccttactcatttctaagtgcaataagggagtgtctcacaggattgcacctgtgacatcctgatggatgcttccctgtggccctcctgggg

SEQ ID NO: 598530 - DNA, 120 bp, Artificial Sequence
  ENSG00000174238_21 (sequence is synthesized)
caagggtggacagactcagacccccagcatggttagcgctgaccttcattgaggtccctttggaaccagatgtcttgttacagacaccttcctctgtgtaagtctcctcaccttgagggg

SEQ ID NO: 598531 - DNA, 120 bp, Artificial Sequence
  ENSG00000174238_22 (sequence is synthesized)
tctttagtaatgcatctgggtagcatctcaactgctggtagcatttatctgacttggaaagttggagaagaggcattcctactggagaaaaatgtcagtgttttcctataagctctgtgt

SEQ ID NO: 598532 - DNA, 120 bp, Artificial Sequence
  ENSG00000174238_23 (sequence is synthesized)
tagctattcattatatttgtgcttaaagatgttccttcattcatcaactaggggaagtccagatgcgggttatcttgaaagaaacaaactgacattctaggcagacagttgtctatgtgg

SEQ ID NO: 598533 - DNA, 120 bp, Artificial Sequence
  ENSG00000174238_24 (sequence is synthesized)
tctgagggtcagcagctgttagtctccttcctttggctcttgagacccacacatatcactttagccctaacaagggctcctcccacctccacctgttgccccagttgaaaagcatccatt

SEQ ID NO: 598534 - DNA, 120 bp, Artificial Sequence
  ENSG00000174238_25 (sequence is synthesized)
atgagctgaggtcagcctggatctggaattgcagcccacataaacataaaggaggatgtccctggtctgttccatccccacggatggtgttgctgctgggcaacagtgttggcttctttt

SEQ ID NO: 598535 - DNA, 120 bp, Artificial Sequence
  ENSG00000174238_26 (sequence is synthesized)
aagtaccccctttcctcctcacccacctccaaactgactagcactcagagggacttatgataaaggttcagctccaggggtagtacctgagtgtgtgccatgccccttcagaccagctgc

SEQ ID NO: 598536 - DNA, 120 bp, Artificial Sequence
  ENSG00000174238_27 (sequence is synthesized)
ttccatcagaattccagggtcacagccccaacagaagcagcagtgcctctgtaggaggggtgctgggctctggccttctcatgcagagaggtccgggacagggtcagtatcgtgggcatg

SEQ ID NO: 598537 - DNA, 120 bp, Artificial Sequence
  ENSG00000174238_28 (sequence is synthesized)
tgtatagcttcccaagttcttttacagtccctgctgggactccctgacttactttggttggttcctagtgctacttgttttacaaactacactttgtagaattgattagattaccttgtt

SEQ ID NO: 598538 - DNA, 120 bp, Artificial Sequence
  ENSG00000174238_29 (sequence is synthesized)
tatttaatgtgagtttgtgcctttttgtctcaatcttccaatacaggtatattgagaaaaaaagcagtctaataaaatcctagacagaactttctggagtccagtttggtgatgtccatt

SEQ ID NO: 598539 - DNA, 120 bp, Artificial Sequence
  ENSG00000174238_30 (sequence is synthesized)
ttccagctgtatgtatcctcaaacttgcactgataaccgccattttaccagggcaggattaggaagaggtacaaaggtgtgtctgaaaatttttgcacgtggatttctgcatataatagt

SEQ ID NO: 598540 - DNA, 120 bp, Artificial Sequence
  ENSG00000174238_31 (sequence is synthesized)
cccgtgtcagtttacttatgcaaacattgcacatctgaattgtaattcggccgtttcctactgacaggatgtccttttgcttttgtctgcctcctcttcacatcttcctctttatccacc

SEQ ID NO: 598541 - DNA, 120 bp, Artificial Sequence
  ENSG00000174238_32 (sequence is synthesized)
aggatccgtttaaagacgtgggtggccttcgagacgcagaaatgacttctcaatgctaaagaaaccaggaaaccatacccaacttggcacaaaaggaaattctgatgtgtcttgcttgtt

SEQ ID NO: 598542 - DNA, 120 bp, Artificial Sequence
  ENSG00000174238_33 (sequence is synthesized)
cccaaatttgtgtgccctgtttggcctctgaaaattattactggactaagtaggtattgtagctagagtattttgccctgctaaaatgatgcttagcctgaaaaatcggagcaccacttc

SEQ ID NO: 598543 - DNA, 120 bp, Artificial Sequence
  ENSG00000174238_34 (sequence is synthesized)
tcaaatttatttttccaactcagtaattaaaaaaacatttacttcctgcctactgggttgtggaatattgtcaggatctctgggttccaggtgagggatgcagaatgcagggaaagacag

SEQ ID NO: 598544 - DNA, 120 bp, Artificial Sequence
  ENSG00000174238_35 (sequence is synthesized)
ggagagcggccggcgggcagcgggcgggaggccgggcgggccgcgggcagccaccgagccgcgaagcgacatggtgctgctcaaggagtagggactgggggacaggtggagatgtttggt

SEQ ID NO: 598545 - DNA, 120 bp, Artificial Sequence
  ENSG00000174238_36 (sequence is synthesized)
attttgtttttcctgctactttcctgcttggtgtcttgcctttgaggtgatgttttcctcagacccctctgtgtccttcttgcttcctgggggacctttgtggaactagaaaatagctgt

SEQ ID NO: 598546 - DNA, 120 bp, Artificial Sequence
  ENSG00000174238_37 (sequence is synthesized)
ttactagcctggagcaaggagcctgagtggtgagccggctgcataaggaaggcacagcagctcatgcttccctaatgcttcactaaacatgcaagacacaaaaggacccagagggctcca

SEQ ID NO: 598547 - DNA, 120 bp, Artificial Sequence
  ENSG00000174243_0 (sequence is synthesized)
atctccgcgaccaggaaacgggaaagatggcgacggctccgcgacgttgaggccgcgttgggcggttcagactcagggtgatggcaggagagctggctgacaaaaaggaccgtgatgcat

SEQ ID NO: 598548 - DNA, 120 bp, Artificial Sequence
  ENSG00000174243_1 (sequence is synthesized)
caccttccaaggaggaaaggaagcgatcacggactcctgacagagagcgggatagagaccgggaccggaagtcttccccatctaaagatagaaagcggcatcgttcaagggatagacgtc

SEQ ID NO: 598549 - DNA, 120 bp, Artificial Sequence
  ENSG00000174243_2 (sequence is synthesized)
gaggaggcagccgttctcgctctcgttcccgttccaaatctgcagaaagagaacgacggcacaaagaacgagaacgagataaggagcgggatcggaataagaaggaccgagatcgagaca

SEQ ID NO: 598550 - DNA, 120 bp, Artificial Sequence
  ENSG00000174243_3 (sequence is synthesized)
aggatgggcacagacgggacaaggaccgtaaacgatccagcttatctcctggtcgaggaaaagactttaaatctcggaaggacagagactctaagaaggatgaagaggatgaacatggtg

SEQ ID NO: 598551 - DNA, 120 bp, Artificial Sequence
  ENSG00000174243_4 (sequence is synthesized)
ataagaagcctaaggcccagccattatccctggaggagcttctggccaagaaaaaggctgaggaagaagctgaggctaagcccaagttcctctctaaagcagaacgagaggctgaagctc

SEQ ID NO: 598552 - DNA, 120 bp, Artificial Sequence
  ENSG00000174243_5 (sequence is synthesized)
taaagcgacggcagcaggaggtggaagagcggcagaggatgcttgaagaagagaggaagaaaaggaaacagttccaagacttgggcaggaagatgttggaagatcctcaggaacgggaac

SEQ ID NO: 598553 - DNA, 120 bp, Artificial Sequence
  ENSG00000174243_6 (sequence is synthesized)
gtcgggaacgcagggagaggatggaacgggagaccaatggaaatgaggatgaggaagggcggcagaagatccgggaagagaaggataagagcaaggaactgcatgccattaaggagcgtt

SEQ ID NO: 598554 - DNA, 120 bp, Artificial Sequence
  ENSG00000174243_7 (sequence is synthesized)
acctgggtggcatcaaaaagcggcgccgaacgagacatctcaatgaccggaaatttgtttttgagtgggatgcatctgaggacacatccattgactacaaccccctgtacaaagaacggc

SEQ ID NO: 598555 - DNA, 120 bp, Artificial Sequence
  ENSG00000174243_8 (sequence is synthesized)
accaggtgcagttgttagggcgaggcttcattgcaggcattgacctcaagcagcagaagcgagagcagtcacgtttctatggagacctaatggagaagaggcgaaccctggaagaaaagg

SEQ ID NO: 598556 - DNA, 120 bp, Artificial Sequence
  ENSG00000174243_9 (sequence is synthesized)
agcaggaggaggcaagactccgcaaacttcgtaagaaggaagccaagcagcgctgggatgatcgtcattggtctcagaaaaagttagatgagatgacggacagggactggcggatcttcc

SEQ ID NO: 598557 - DNA, 120 bp, Artificial Sequence
  ENSG00000174243_10 (sequence is synthesized)
gtgaggactacagcatcaccaccaaaggtggcaagatccccaatcccatccgatcctggaaagactcttctctgcccccacacatcttggaggtcattgataagtgtggctacaaggaac

SEQ ID NO: 598558 - DNA, 120 bp, Artificial Sequence
  ENSG00000174243_11 (sequence is synthesized)
caacacctatacagcgtcaggcaattcccattgggctacagaatcgtgacatcattggtgtggctgagactggcagtggcaagacagcagccttcctcatccctctgctggtctggatca

SEQ ID NO: 598559 - DNA, 120 bp, Artificial Sequence
  ENSG00000174243_12 (sequence is synthesized)
ccacacttcccaaaattgacaggatcgaagagtcagaccaaggcccttatgccatcatcctggctcccacccgtgagttggctcaacagattgaggaagagaccatcaagtttgggaaac

SEQ ID NO: 598560 - DNA, 120 bp, Artificial Sequence
  ENSG00000174243_13 (sequence is synthesized)
tgtggctgtcattggtggcatctccagagaagaccagggcttcaggctgcgcatgggttgtgagattgtgattgctacccctgggcgtttgattgatgtgctggagaaccgctacctggt

SEQ ID NO: 598561 - DNA, 120 bp, Artificial Sequence
  ENSG00000174243_14 (sequence is synthesized)
gctgagccgctgtacctatgtggttctggatgaggcagataggatgattgacatgggctttgagccagatgtccagaagatcctggagcacatgcctgtcagcaaccagaagccagacac

SEQ ID NO: 598562 - DNA, 120 bp, Artificial Sequence
  ENSG00000174243_15 (sequence is synthesized)
ggatgaggctgaggaccctgagaagatgctggccaactttgagtcgggaaaacataagtaccgccaaacagtcatgttcacggccaccatgcccccagcggtggagcgtctggccaggag

SEQ ID NO: 598563 - DNA, 120 bp, Artificial Sequence
  ENSG00000174243_16 (sequence is synthesized)
ctatcttcggcgacctgctgtggtgtacattggctccgcaggcaagccccatgagcgtgtggaacagaaggtcttcctcatgtcagagtcagaaaagaggaaaaagctgctggcaatctt

SEQ ID NO: 598564 - DNA, 120 bp, Artificial Sequence
  ENSG00000174243_17 (sequence is synthesized)
ggagcaaggctttgacccacccatcattatttttgtcaaccagaagaagggctgcgacgtgttggccaaatccctggagaagatggggtacaatgcttgcacactgcacggtggaaaagg

SEQ ID NO: 598565 - DNA, 120 bp, Artificial Sequence
  ENSG00000174243_18 (sequence is synthesized)
ccaggagcagcgagagtttgcgttgtccaacctcaaggctggggccaaggatattttggtggctacagatgtggctggtcgtggtattgacatccaagatgtgtctatggttgtcaacta

SEQ ID NO: 598566 - DNA, 120 bp, Artificial Sequence
  ENSG00000174243_19 (sequence is synthesized)
tgatatggccaaaaatattgaagattacatccaccgcattggccgcacgggacgagcaggcaagagtggggtggccatcaccttcctcacaaaagaggactctgctgtgttctacgagct

SEQ ID NO: 598567 - DNA, 120 bp, Artificial Sequence
  ENSG00000174243_20 (sequence is synthesized)
gaagcaagctatcctggaaagcccagtgtcttcctgtccccccgaactagccaaccacccagatgcccagcataagccaggcaccatcctcaccaagaagcgccgggaagagaccatctt

SEQ ID NO: 598568 - DNA, 120 bp, Artificial Sequence
  ENSG00000174243_21 (sequence is synthesized)
tgcctgacacagcactcttcctgtgggctgagggcatctccaaagctgcctgatgcctgtttttcagaaccctcacatccctctttccaggtcctcactcttgggatatgggggcttagg

SEQ ID NO: 598569 - DNA, 120 bp, Artificial Sequence
  ENSG00000174243_22 (sequence is synthesized)
aaaacaatccaactccctagcccagaccctcaggtcaggaggcctgcgtgtggggctgcaaaaggagaggacgacgctgtcggaggcagggagagcaaattaccacagcttcttggccca

SEQ ID NO: 598570 - DNA, 120 bp, Artificial Sequence
  ENSG00000174243_23 (sequence is synthesized)
gttctgcccttctttgctttgggattgcactgggccatcagctcatgccaggctatgggggcagccagttggcattgctccccagactgaacagaaacctggccgccggatgggacctcc

SEQ ID NO: 598571 - DNA, 120 bp, Artificial Sequence
  ENSG00000174243_24 (sequence is synthesized)
tttggcacagacttgactgtgtaactgcataaactgcagtagcatcattgccctagatgccccaggagacctggcaccatgaggattacagacagtggaatcttactgtcatctggacag

SEQ ID NO: 598572 - DNA, 120 bp, Artificial Sequence
  ENSG00000174243_25 (sequence is synthesized)
ctgttttcctgtttggatggtaaaggaagttgagagtctttagacctgtgcacagccccgcaccaaggggtgctgtatgctctaggcatcccctcccccaggggattttctaagtagatg

SEQ ID NO: 598573 - DNA, 120 bp, Artificial Sequence
  ENSG00000174243_26 (sequence is synthesized)
gggggacacggtgaactggctgtgtccatctttgtcactgagtgaaatctctgttttctattctctgagaagataagtttgtatgttctgagaataaatacatgaatattaagactgtta

SEQ ID NO: 598574 - DNA, 61 bp, Artificial Sequence
  ENSG00000174243_27 (sequence is synthesized)
atgcccagccctggcctctgatttttaagtgagatcattgcattcttttctcatcatcctc

SEQ ID NO: 598575 - DNA, 120 bp, Artificial Sequence
  ENSG00000174243_28 (sequence is synthesized)
tttttaagtgagatcattgcattcttttctcatcatcctccccattcccattgctccccgtaagagtgactttgtcttgctctggcttgtggttggataagaaccaaagctcacgaagct

SEQ ID NO: 598576 - DNA, 86 bp, Artificial Sequence
  ENSG00000174243_29 (sequence is synthesized)
cagcagccttcctcatccctctgctggtctggatcaccacacttcccaaaattgaagcaaccgttgcctcccaggctcatatcctc

SEQ ID NO: 598577 - DNA, 120 bp, Artificial Sequence
  ENSG00000174243_30 (sequence is synthesized)
gcaggggagaacaaagtctagcctctgtggcactgctttctgaatctagcagggccccctaggctcttcctttcaagtctcaccctttctttagcctgtccagcaatcaacaagttagga

SEQ ID NO: 598578 - DNA, 120 bp, Artificial Sequence
  ENSG00000174243_31 (sequence is synthesized)
ccagggtgaagggtggtttgagggaataaagagaatggaatcaattgctgggaccccctgtctgctgcagtaatgccagccaaagctgccttgggtcttcatcctggtgaggtggagcca

SEQ ID NO: 598579 - DNA, 120 bp, Artificial Sequence
  ENSG00000174243_32 (sequence is synthesized)
accgggaccacaggtgctagcaaatgctctcaatccttcctgtcatcataagatggaaagtgccttgatgagcaggtactcaggaaggatgggaattcagaggacactattttctaaggt

SEQ ID NO: 598580 - DNA, 120 bp, Artificial Sequence
  ENSG00000174243_33 (sequence is synthesized)
ggtggctatcaaagcctatactgtggcccattttagattctttagtctgggctgacctgccttcggtgacagtgggatatatgattattcctgcctgggtgcagggctgagcctcctgtt

SEQ ID NO: 598581 - DNA, 120 bp, Artificial Sequence
  ENSG00000174243_34 (sequence is synthesized)
gatgagatacagtgtctcttaggagagatagaaacctgttcactctggagtttggaaaggggaaggatggtgggagtttatgagaaaacatttttctgttagatctccatttaccccata

SEQ ID NO: 598582 - DNA, 120 bp, Artificial Sequence
  ENSG00000174243_35 (sequence is synthesized)
tcataagtctacccctttttttcttcatttggggttcctcgtctggattccctccattccctctcctcttttcttccatgagctcttctgcagctttgctttctttggtctgcagaagat

SEQ ID NO: 598583 - DNA, 120 bp, Artificial Sequence
  ENSG00000174243_36 (sequence is synthesized)
ttgtttttgagtgggatgcatctgaggacacatccattgactacaaccccctgtgagtggcttcaggcctgagttctaggtcttttccactaggcagtcctagagagctgatgactacgg

SEQ ID NO: 598584 - DNA, 120 bp, Artificial Sequence
  ENSG00000174243_37 (sequence is synthesized)
aggtggaggaagtaagataagctgggatggaaaattggtagactggtagtcagccagccctctggtggaagaaagaccctgtctgggaagaactgtttcatactagtagtctgcccttcc

SEQ ID NO: 598585 - DNA, 120 bp, Artificial Sequence
  ENSG00000174243_38 (sequence is synthesized)
tgggcaggaagatgttgggagcgttacctgggtggcatcaaaaagcggcgccgaacgagacatctcaatgaccggaaatttgtttttgagtgggatgcatctgaggacacatccattgac

SEQ ID NO: 598586 - DNA, 120 bp, Artificial Sequence
  ENSG00000174243_39 (sequence is synthesized)
aatgttgagaaaacaggtgctagagcccaggagataccatccttccgggaggactttagagcccattgtgtgggctcatttggagctgtaacaataactgggggttgttatggcattcac

SEQ ID NO: 598587 - DNA, 120 bp, Artificial Sequence
  ENSG00000174243_40 (sequence is synthesized)
ccggctgcaggggccaaggttgctaaaacgtcctcctaagcctgggatagttccacacacaatggagaactgcatcaccctccttgtgaacctactccgatggcaggagagctggctgac

SEQ ID NO: 598588 - DNA, 120 bp, Artificial Sequence
  ENSG00000174255_0 (sequence is synthesized)
tcccacacggagaccttctggaggaagatgagccctaaacgcgatgggttggggacaggtgatggtctgcactcacaggttttacaggagcaggtctccacaggagacaatctccatgaa

SEQ ID NO: 598589 - DNA, 120 bp, Artificial Sequence
  ENSG00000174255_1 (sequence is synthesized)
tgtgactcccagggaccaagtaaagacactttggttcgtgaggggaagacctacaaatgcaaggaatgtgggagcgtgtttaacaaaaacagcctccttgttcgacatcagcagattcac

SEQ ID NO: 598590 - DNA, 120 bp, Artificial Sequence
  ENSG00000174255_2 (sequence is synthesized)
actggggtgaagccttatgaatgccaggagtgtggaaaagcctttcctgaaaaggtcgacttcgttcgacccatgaggattcacacaggggagaagccctgtaagtgcgtggagtgcggg

SEQ ID NO: 598591 - DNA, 120 bp, Artificial Sequence
  ENSG00000174255_3 (sequence is synthesized)
aaggtcttcaaccgcaggtcgcacctcctgtgctaccgccagattcacactggagagaagccctatgagtgcagcgagtgtggaaagaccttcagctatcactctgtcttcatccagcat

SEQ ID NO: 598592 - DNA, 120 bp, Artificial Sequence
  ENSG00000174255_4 (sequence is synthesized)
cgtgtgacccacactggagaaaaactctttgggtgcaaagaatgtggaaaaaccttttactacaactcttccttaacccggcacatgaagattcacactggagagaagccctgcaagtgc

SEQ ID NO: 598593 - DNA, 120 bp, Artificial Sequence
  ENSG00000174255_5 (sequence is synthesized)
agtgagtgcgggaagaccttcacctaccgctctgttttcttccgacatagtatgacccacactgcaggaaagccctacgagtgcaaagaatgtgggaaaggtttttactacagctattcc

SEQ ID NO: 598594 - DNA, 120 bp, Artificial Sequence
  ENSG00000174255_6 (sequence is synthesized)
ctcactcgacatacaaggagtcacactggagagaaaccttatgagtgccttgaacatagaaaggactttggctaccactctgcttttgcccaacagagtaagatccactctggaggaaaa

SEQ ID NO: 598595 - DNA, 120 bp, Artificial Sequence
  ENSG00000174255_7 (sequence is synthesized)
aacctttgagtgcaaatgatgtgggaatttgtgggttttctttttttttttttctttgatacatagagagccacactgaggagaagcactctgaattcagtggcagtaggaaagctgtga

SEQ ID NO: 598596 - DNA, 120 bp, Artificial Sequence
  ENSG00000174255_8 (sequence is synthesized)
cctgcagctcatcctcacttggcattgaagaattccttccagagataaactctatgagatatgtgggaaggccttttgcaagtgggcccacatcagtcaacgtcagagaacttaaactgc

SEQ ID NO: 598597 - DNA, 120 bp, Artificial Sequence
  ENSG00000174255_9 (sequence is synthesized)
gaaaagacattttgacaaaaactagtgaagaaaatcttttggccacaggaaatatcttcctcagcatctgagaatttttccaggagggagacctgttggttattgtgcacttaaaagaac

SEQ ID NO: 598598 - DNA, 120 bp, Artificial Sequence
  ENSG00000174255_10 (sequence is synthesized)
actgtaaaagagaaaaaaagaaattcatgcatagcttctgtcagacttctctgaaagccatgcctatcaaaatttgaattcagttcttcattttgcagatggctgaaaggtacaaaggcc

SEQ ID NO: 598599 - DNA, 120 bp, Artificial Sequence
  ENSG00000174255_11 (sequence is synthesized)
ttgcctcgttatttgtcctttatatgtattcactcctgtctacaggagaattgtcctctgtaaagattaactctgtaaagatttattgaatgcattctttgttctaaaacattgtactcc

SEQ ID NO: 598600 - DNA, 120 bp, Artificial Sequence
  ENSG00000174255_12 (sequence is synthesized)
tgaggaatgtaagtctttgtgagaaatatgaacgcttaagtaatggaatatgtgaaacttgtaagaacgtagaatataaaaatactgccatataaaatcctttcatatctgaggaggtaa

SEQ ID NO: 598601 - DNA, 120 bp, Artificial Sequence
  ENSG00000174255_13 (sequence is synthesized)
gtaaccacattgaatgggcatattttgctacatcatttaagactacttaaggctttaatttaacaaaaaacaattcttcatgtggttttgaacacccagtgctcaatatacttgtttgtt

SEQ ID NO: 598602 - DNA, 120 bp, Artificial Sequence
  ENSG00000174255_14 (sequence is synthesized)
ttgatttattttctcagggacgagagaatgatggtgaagctgtgttgctttcccaggtgagccttgattatttcctctgtgctttctcagcttctttggccttctgtaagaggggcttct

SEQ ID NO: 598603 - DNA, 120 bp, Artificial Sequence
  ENSG00000174255_15 (sequence is synthesized)
ccaagagcatgtcactagttttctagaagttaaacaagagctaagacaaacaaaacaaaacacagcttatctaatctaatgagaaactcagaaaaaaatgttttgatgaatacaatgtat

SEQ ID NO: 598604 - DNA, 120 bp, Artificial Sequence
  ENSG00000174255_16 (sequence is synthesized)
taaaatataaaacatgtagatcctttgacatgttaattcaattctagaaatcctcagaaatgtttttatattatgcagagatgtgcgtgcaaagaataatcgctgcagttttgtttttat

SEQ ID NO: 598605 - DNA, 120 bp, Artificial Sequence
  ENSG00000174255_17 (sequence is synthesized)
gtgtgaaacgttgagaacaatctaaatgtttatcagttggaagtaagttatggtacatctgttctatgaaatactgtgaaacaataaggtatctctgtatgtactgatatcaaaacatct

SEQ ID NO: 598606 - DNA, 120 bp, Artificial Sequence
  ENSG00000174255_18 (sequence is synthesized)
ctaagatacagtatttagtaaaagagaaagtttcaggaaataaaactacatctagaagtataagcataaaactgttaatagtggttttctgcaggaaatgggatggaccagggttatatg

SEQ ID NO: 598607 - DNA, 120 bp, Artificial Sequence
  ENSG00000174255_19 (sequence is synthesized)
cagggttatatgcaatgttcagtttttacttttatacttaagtattgtttatgtttgaaaaataaaaagcatttattgtttttgcaataaatgtttaaaatatttcaataaagatagcat

SEQ ID NO: 598608 - DNA, 72 bp, Artificial Sequence
  ENSG00000174255_20 (sequence is synthesized)
tctcactctttgggtccacactgcttttaccagctgtaacactcaccgcaaacgtctgcagcttcactcctg

SEQ ID NO: 598609 - DNA, 60 bp, Artificial Sequence
  ENSG00000174255_21 (sequence is synthesized)
ttgctacttctcactctttgggtccacactgcttttaccagctgtaacactcaccgcaaa

SEQ ID NO: 598610 - DNA, 120 bp, Artificial Sequence
  ENSG00000174276_0 (sequence is synthesized)
gaactaccaccggcgtgcgttcgcaggtagatcgcggtgccagttgccatggagccggccgggccctgtggcttctgcccggcgggggaggtccagccagcgcgttacacctgccctcgc

SEQ ID NO: 598611 - DNA, 120 bp, Artificial Sequence
  ENSG00000174276_1 (sequence is synthesized)
tgtaatgcgccctactgctcgctgcgctgctaccggacgcatggcacctgcgcagaaaacttctaccgtgaccaggtgctgggagagctccgcggttgcagcgctcctcccagccgccta

SEQ ID NO: 598612 - DNA, 120 bp, Artificial Sequence
  ENSG00000174276_2 (sequence is synthesized)
gcaagcgccctacgccggctgcgtcagcaacgcgagaccgaggacgagcctggggaagcaggcctcagctccggcccggcgcccggcggcctatcgggactctgggagcggctggcgccg

SEQ ID NO: 598613 - DNA, 120 bp, Artificial Sequence
  ENSG00000174276_3 (sequence is synthesized)
ggcgaaaaagctgccttcgagcggctgctgagccgcggtgaggccgggcggctgctgcctccatggcggccgtggtggtggaaccgcggagccggaccgcagcttctggaggagctggat

SEQ ID NO: 598614 - DNA, 120 bp, Artificial Sequence
  ENSG00000174276_4 (sequence is synthesized)
aatgccccgggtagtgacgccgcggagctggagctcgcccctgcgaggaccccgccggattctgtgaaagatgcctccgccgcggagcccgcggccgccgagcgggttcttggagatgtc

SEQ ID NO: 598615 - DNA, 120 bp, Artificial Sequence
  ENSG00000174276_5 (sequence is synthesized)
gtgctgttcgcctacgcgcatactctcgccctgtatcacggcggtgacgacgcgctgctctctgacttctgtgccacactgctcggcgtttccggagccctgggtgcccagcaagtcttc

SEQ ID NO: 598616 - DNA, 120 bp, Artificial Sequence
  ENSG00000174276_6 (sequence is synthesized)
gcctctgcggaagaagccctgcaggcggcagcccacgtgctggaagcaggcgagcacccgccggggcccctgggcacacgaggggctatgcacgaggtcgcccgcatcctgctgggcgag

SEQ ID NO: 598617 - DNA, 120 bp, Artificial Sequence
  ENSG00000174276_7 (sequence is synthesized)
ggcccgaccaaccagaaaggctacacgctggcagcactgggggacctggcacagaccctgggccgtgcccggaaacaggccgtggctagagaagagcgagatcatctttaccgggcccgg

SEQ ID NO: 598618 - DNA, 120 bp, Artificial Sequence
  ENSG00000174276_8 (sequence is synthesized)
aaaaagtgccagttcctcctggcctggaccaacgaaaatgaggcggccctcacacccctggccctagactgcgccagggctcaccaagcccatgctgtggtagccgaggaggtggccgcc

SEQ ID NO: 598619 - DNA, 120 bp, Artificial Sequence
  ENSG00000174276_9 (sequence is synthesized)
ctcactggggagctggagcggctttggggaggccccgtgccacctgccccaagaactctcattgaggagctccctagctgaacgggttaccctggtcattaataaagctgtgactggtca

SEQ ID NO: 598620 - DNA, 120 bp, Artificial Sequence
  ENSG00000174279_0 (sequence is synthesized)
caatttttccgcctccctccgaaagcgataataatatttagaggcgttcgctggggctgaatgagaattagccctaggcgcagcctatcattaggacgggacagcagggccactgtgaca

SEQ ID NO: 598621 - DNA, 120 bp, Artificial Sequence
  ENSG00000174279_1 (sequence is synthesized)
tttttaagaaagctgagatgatggaaagaataagaaaagagatgattctgatggagagagggctgcacagccctacggcgggcaagagattctccaatttgtccaactcggctggcaatg

SEQ ID NO: 598622 - DNA, 120 bp, Artificial Sequence
  ENSG00000174279_2 (sequence is synthesized)
ctgtgctcgaggccctggaaaattcgcagcacccggctcgcctaagcccgcgcctgccgtctgcccccctgcacagcgctctgggagaactccccgccaagggcaaattcgaaatagaca

SEQ ID NO: 598623 - DNA, 120 bp, Artificial Sequence
  ENSG00000174279_3 (sequence is synthesized)
ctttgttcaacctgcagcacacgggcagcgaaagcaccgtctcctccgaaatctcctccgccgccgagagccgcaagaagccgggccattattcagaggcggccgctgaggccgacatga

SEQ ID NO: 598624 - DNA, 120 bp, Artificial Sequence
  ENSG00000174279_4 (sequence is synthesized)
gcagcgacgtggaggtgggctgctccgcgcttcgctcccccgggggcctcggcgccgctcagcttaaggaaaacaatggcaaagggtacgcagagagcggctcggctgccggcaccacga

SEQ ID NO: 598625 - DNA, 120 bp, Artificial Sequence
  ENSG00000174279_5 (sequence is synthesized)
cgtcggcgtcgggctcaggcctcggaagcctgcatggaggcagcggaggcagcggcgggagcgcggcgctgggtggctccggctctggcgcggatcaagtgcggcgctaccgtacggcgt

SEQ ID NO: 598626 - DNA, 120 bp, Artificial Sequence
  ENSG00000174279_6 (sequence is synthesized)
tcacccgcgagcagatcgcgcgcctggagaaggagttctaccgggagaactatgtgtcgcggccccgccggtgcgagctggccgcggcactcaacctgcccgaaaccaccatcaaggtgt

SEQ ID NO: 598627 - DNA, 120 bp, Artificial Sequence
  ENSG00000174279_7 (sequence is synthesized)
ggttccagaaccggcgcatgaaggacaagcggcagcgcctggccatgtcctggccgcacccagccgaccccagcttctacacctacatgatgacgcacgcggccgccaccggaagcctgc

SEQ ID NO: 598628 - DNA, 120 bp, Artificial Sequence
  ENSG00000174279_8 (sequence is synthesized)
cctaccccttccactcgcacgtgccgctgcactactacccgcacgtgggcgtcacggcggcggcggccgcggctgcagcctcaggcgcggcggccgcggcttcgtcgcccttcgctactt

SEQ ID NO: 598629 - DNA, 120 bp, Artificial Sequence
  ENSG00000174279_9 (sequence is synthesized)
ccatccggccactggacaccttccgcgccctctcgcacccctactctcggccggagctgctgtgtagcttccgccaccctggtctctaccaggctcccgcggccgccgcggggctcaaca

SEQ ID NO: 598630 - DNA, 80 bp, Artificial Sequence
  ENSG00000174279_10 (sequence is synthesized)
tgcggcctcctcggcggcggcggccggcgcgccccccagcggcggctctgcaccctgctcgtgcctcagttgccacagca

SEQ ID NO: 598631 - DNA, 120 bp, Artificial Sequence
  ENSG00000174279_11 (sequence is synthesized)
tgcaccctgctcgtgcctcagttgccacagcagtcagtcggcggcggcagccgcggcagcagctgccgcagccctgggttcccggggtggcggtggcggcggcggtggtggtggtggcgg

SEQ ID NO: 598632 - DNA, 120 bp, Artificial Sequence
  ENSG00000174279_12 (sequence is synthesized)
cggacttcggctgcagcgcggcggcgccgcgttccgagagcggcttcctgccctactcggccgcggtgcttagtaagacggccgtgagcccgccggaccagagggacgaggctccgctca

SEQ ID NO: 598633 - DNA, 120 bp, Artificial Sequence
  ENSG00000174279_13 (sequence is synthesized)
ccagataactacgtcgccaccgccagggggccgcgcccgcctctctgagtgtgcccgggagtcccctgtgcgccccctgagccctccgcgcgttgcccgctgctgccgctgccgccaggg

SEQ ID NO: 598634 - DNA, 120 bp, Artificial Sequence
  ENSG00000174279_14 (sequence is synthesized)
ggcgccccggggcgcgggaggccgaagggaacctgctccgaattgggggagaaggagcaggcgcaaaagcctggcgggcatccccctaaattatttctatttttgtatttgccacccagc

SEQ ID NO: 598635 - DNA, 120 bp, Artificial Sequence
  ENSG00000174279_15 (sequence is synthesized)
cgtctgcccttctctctcttttctggctcccgggacccactttccacctctgtcctgagcgcttggtttcccaaagaccaacccctcgccccctaagctagtcctggctgtgcactctca

SEQ ID NO: 598636 - DNA, 120 bp, Artificial Sequence
  ENSG00000174279_16 (sequence is synthesized)
ggtccgggttgcttggctgaacggcgtggcccgaagcaacggagaaccacaacaaagacagagggggatgctgtgcgctggtgcttgggggcgggggaggagtcgccccggaggtttctc

SEQ ID NO: 598637 - DNA, 120 bp, Artificial Sequence
  ENSG00000174279_17 (sequence is synthesized)
gctgctgtttttcttccttttctttcaacgagggtgggggaggtggcaaacgttctttcagcctgagcttattagggaccctgcccgaagagtgcgggagaacggaggtctgataaggcc

SEQ ID NO: 598638 - DNA, 120 bp, Artificial Sequence
  ENSG00000174279_18 (sequence is synthesized)
gggaggacggatggagagcgtgggcagcggtggttgtttgtgagattgtttactacgttcaggagcaaggcgggtagggatgtggccgccttccccgggaaggacaaagccgaggtgctg

SEQ ID NO: 598639 - DNA, 120 bp, Artificial Sequence
  ENSG00000174279_19 (sequence is synthesized)
gaaggggtggccgttgcgccgcctccttttcggtccaacacctttctctcttttggtctttggtttcagtgctgatggaatggaagcatcttgcatattttatgcaaaaagtgatggcaa

SEQ ID NO: 598640 - DNA, 120 bp, Artificial Sequence
  ENSG00000174279_20 (sequence is synthesized)
aagaggttgccacggccagggaagggaaaggaagggagttggggtaggggtaagactgatagatcgctgtagtatttggagaggcgttttcagctcagttttccaactaccgggttccac

SEQ ID NO: 598641 - DNA, 120 bp, Artificial Sequence
  ENSG00000174279_21 (sequence is synthesized)
tcgatctgggaaatacttgaatctctagatatattaatattatcctaaagcatttccttagacacttttctaagttagaactctctatgtccctcgtccccttctctcctcgctttcctt

SEQ ID NO: 598642 - DNA, 120 bp, Artificial Sequence
  ENSG00000174279_22 (sequence is synthesized)
ttcctcgggtgaaatggttcttggcatatttctcacgcatgtctattgcgccttcgcctctgcaaagccaccgctgggttgctgagacccgctctgccaacccggctactggaggggttt

SEQ ID NO: 598643 - DNA, 120 bp, Artificial Sequence
  ENSG00000174279_23 (sequence is synthesized)
ccttgaacttgaagaaaggtacatcaaaacccactagtgttaactgccacgtcaagtttgatgctaataatgtgcagattatgacgaaaattgccaatcatgctctctgatggacctcct

SEQ ID NO: 598644 - DNA, 120 bp, Artificial Sequence
  ENSG00000174279_24 (sequence is synthesized)
ttgaatgtggaattggagaaaagttccccgcacggagacctgctgtcaagtactaacaacccgctaagggaagtcattaggagagacggataagagactcggtacataaaacattgttct

SEQ ID NO: 598645 - DNA, 120 bp, Artificial Sequence
  ENSG00000174279_25 (sequence is synthesized)
tggtgcatagaatgtatgttatttaatgttatctctgttacctgaagtgatttcgcagaagaaagccacgttcttatcatctcaattgccgattttcattttggtaacttggacgccctg

SEQ ID NO: 598646 - DNA, 120 bp, Artificial Sequence
  ENSG00000174279_26 (sequence is synthesized)
ggtagacttttctctgttaagttgatattccaccagtgtgaacagcctcattaaatcaagcccagatatttccataatgctccccgcagagccacttggctcctcacataatgagatttt

SEQ ID NO: 598647 - DNA, 120 bp, Artificial Sequence
  ENSG00000174279_27 (sequence is synthesized)
ctgaagagttgaagccctaaaataacttgctagtgcatgtttagacccagcgaagtgggtatgtgtgtgtacgtgtattaaaatgtaggtaggctacctacatgtgtttgtgtatgtgta

SEQ ID NO: 598648 - DNA, 120 bp, Artificial Sequence
  ENSG00000174279_28 (sequence is synthesized)
tatatatgtatatgtatgtatatgcatatatatatccgtgctcttaaatacatatgtaagagatacacacatattcatgtatacatacacattggcactattttctgtggtttatttcag

SEQ ID NO: 598649 - DNA, 120 bp, Artificial Sequence
  ENSG00000174279_29 (sequence is synthesized)
atttgtgtcctgccatcatattgttattttaaagacactggattttaaaatatcatttcctaaatataggctttcagtaaacttttgaaagaattagttttccaggagaaattatttcca

SEQ ID NO: 598650 - DNA, 120 bp, Artificial Sequence
  ENSG00000174279_30 (sequence is synthesized)
tcaaatggaaaatacataaaggggaaacagtatttcgaaattcctggggtctattaaaatattaccataaaatattagagaactttccaatgaaatagcaatgatctaaaacttaagttt

SEQ ID NO: 598651 - DNA, 120 bp, Artificial Sequence
  ENSG00000174279_31 (sequence is synthesized)
aaacatgagactacttatgtaaaatattgattataccagctcttattcactgagtttacatttttaaaaatattaatatataatttaaggctaaataaaataaaccaaaatatggtaccc

SEQ ID NO: 598652 - DNA, 120 bp, Artificial Sequence
  ENSG00000174279_32 (sequence is synthesized)
ccaaaatatggtaccctttatcagctttacctatttagattgttaaagtcctttgttatgatcagctaacagatgtatataaggtactttaggcagtaatgtttacatttcccccaaaaa

SEQ ID NO: 598653 - DNA, 120 bp, Artificial Sequence
  ENSG00000174279_33 (sequence is synthesized)
atatatatgattgatgagaacgctggttggtaaaattaacataaattcatcatttgttgggtccattggatctggttattatattgaaataaaattgtaaataaagtcttcgtgctttaa

SEQ ID NO: 598654 - DNA, 120 bp, Artificial Sequence
  ENSG00000174279_34 (sequence is synthesized)
atattgctggatgtatgaactcactgtaagatattttacaaatgtgcaataattataaagccttgtatattacgttatttattgtgtttggtcatgtaaaataaatgttatttaaatcaa

SEQ ID NO: 598655 - DNA, 120 bp, Artificial Sequence
  ENSG00000174282_0 (sequence is synthesized)
aaggggtgcgagccagagtcgtgggtaaaccccccgctcgctggttgggcgaccttttgaagtgacagggagagaagaatttttttctttaatcccaccgcctctcctcgctgctccctt

SEQ ID NO: 598656 - DNA, 120 bp, Artificial Sequence
  ENSG00000174282_1 (sequence is synthesized)
ttgcactgaggcttaaggtttgaagactcgagggtaaaattgggccgctttcattctagtttggacaacggtttcatcttcagcaaaagcctctcattcgtagccccccccagctggaaa

SEQ ID NO: 598657 - DNA, 120 bp, Artificial Sequence
  ENSG00000174282_2 (sequence is synthesized)
atggtctgctctgcgaatcgaaggaagaggcccagcagaagggactcgctgagccaccccccgccccactccatgttggctgtgctctcaggctggcaccatgcccccccctgcagaggt

SEQ ID NO: 598658 - DNA, 120 bp, Artificial Sequence
  ENSG00000174282_3 (sequence is synthesized)
gacggacccgtcccatgcccccgccgtcctgcgccagctcaatgaacagcggctccgtggcctcttctgtgacgtcaccctcatagccggagacaccaagttccctgctcaccgcagcgt

SEQ ID NO: 598659 - DNA, 120 bp, Artificial Sequence
  ENSG00000174282_4 (sequence is synthesized)
cctggctgcttcaagtcccttcttcagagaggccctgctcacttcagccccactaccccttccaccagctactgggggcgccgcacccaaccctgccaccaccacagctgcctcttcctc

SEQ ID NO: 598660 - DNA, 88 bp, Artificial Sequence
  ENSG00000174282_5 (sequence is synthesized)
gccccctccagcctctccccctgcttcttccccaccccgggtcctggagttgccaggagtcccagcagctgcgttttctgatgtcctc

SEQ ID NO: 598661 - DNA, 120 bp, Artificial Sequence
  ENSG00000174282_6 (sequence is synthesized)
gttgccaggagtcccagcagctgcgttttctgatgtcctcaacttcatctacagcgcccggctcgcactgcctggtggtggaggggacggggcagctgtagcagagattggagctttggg

SEQ ID NO: 598662 - DNA, 120 bp, Artificial Sequence
  ENSG00000174282_7 (sequence is synthesized)
gcgccgtctgggcatctcccgccttcagggcctgggggagggaggtgatgcctgggtacctcctaccccagcccccatggccacctcgcagcctgaagaggacagctttgggcccgggcc

SEQ ID NO: 598663 - DNA, 120 bp, Artificial Sequence
  ENSG00000174282_8 (sequence is synthesized)
caggccagctggggagtgggagggtgacagggctgaggcccaggcccctgacttgcagtgctccctgccccggcggcccctcccctgcccccagtgtggaaaaagcttcatccatcccaa

SEQ ID NO: 598664 - DNA, 120 bp, Artificial Sequence
  ENSG00000174282_9 (sequence is synthesized)
acggctgcagacccatgaggcccagtgccgacgaggggccagcacgcgggggtctacagggctgggagctgggggcgctggccctggtggtcctgcaggggtggacgcctcagccctgcc

SEQ ID NO: 598665 - DNA, 120 bp, Artificial Sequence
  ENSG00000174282_10 (sequence is synthesized)
tccaccagtgggcttccgagggggccccgagcacgtggtgaaggtggtgggcggccacgtgctgtatgtgtgcgcggcctgcgagcgttcctacgtgaccctgtccagtctgaagagaca

SEQ ID NO: 598666 - DNA, 120 bp, Artificial Sequence
  ENSG00000174282_11 (sequence is synthesized)
cagcaatgtacactcgtggcggaggaagtacccctgccgctattgtgagaaagtgtttgctctggcggagtaccgcacgaagcatgaagtgtggcacacgggggagcgcaggtaccagtg

SEQ ID NO: 598667 - DNA, 120 bp, Artificial Sequence
  ENSG00000174282_12 (sequence is synthesized)
catcttctgttgggagacctttgtcacttactataacctgaagacccaccagcgagccttccacggcattagcccgggcctccttgccagtgagaagacacccaatggaggctacaagcc

SEQ ID NO: 598668 - DNA, 120 bp, Artificial Sequence
  ENSG00000174282_13 (sequence is synthesized)
caagctcaatacactcaagctctaccgcctgctccccatgcgggcagccaagcggccctacaagacctacagccagggagccccggaggctcccctttctccaaccctcaacacaccggc

SEQ ID NO: 598669 - DNA, 120 bp, Artificial Sequence
  ENSG00000174282_14 (sequence is synthesized)
ccctgtggcaatgccagccagcccgccgcctgggcctccacctgccccagagcctggccctccaccctctgtcatcacttttgcccacccagccccctctgtcattgtccatgggggcag

SEQ ID NO: 598670 - DNA, 120 bp, Artificial Sequence
  ENSG00000174282_15 (sequence is synthesized)
tagcagtggtggaggggggagtgggacggccagcacaggagggtcccaagctgcctcggttatcacttacactgctcccccgaggccacccaagaaacgagaatacccacctcctccccc

SEQ ID NO: 598671 - DNA, 120 bp, Artificial Sequence
  ENSG00000174282_16 (sequence is synthesized)
tgagcctgcagccacacccaccagcccagccacagcagtcagcccagccaccgctgcagggccagccatggccaccaccacggaggaggccaagggccggaatccacgggctggaaggac

SEQ ID NO: 598672 - DNA, 120 bp, Artificial Sequence
  ENSG00000174282_17 (sequence is synthesized)
tctgacttacacagccaagccagtgggcgggattggtggaggtgggggtccccccacaggggctggccggggcccctctcagctgcaggctccacctccactgtgtcagatcactgtgcg

SEQ ID NO: 598673 - DNA, 120 bp, Artificial Sequence
  ENSG00000174282_18 (sequence is synthesized)
aataggggaggaggccatcgtcaagcgccgcatctcagagactgacctgcgtcctggggagctgagcggagaggagatggaggagagtgaggaggacgaagaggaggaggacgaagagga

SEQ ID NO: 598674 - DNA, 120 bp, Artificial Sequence
  ENSG00000174282_19 (sequence is synthesized)
ggaggaggaggatgaggaggaatcaaaggctggtggggaggaccagctctggaggccctactactcctacaagcctaagcgcaaggctggagctgctggaggtgccagtgtggggggcag

SEQ ID NO: 598675 - DNA, 120 bp, Artificial Sequence
  ENSG00000174282_20 (sequence is synthesized)
tgggctgccccgaggccgccggccaccacgttggaggcagaagctggaacggaggagctgggaggaaaccccagcggccgagagcccagcgggacgtgcccgcacagagcggaggcaccg

SEQ ID NO: 598676 - DNA, 120 bp, Artificial Sequence
  ENSG00000174282_21 (sequence is synthesized)
atgcggggactgtgcccagaccttcaccaccctgagaaagctgcggaagcaccaagaggcccacggtgggggctcccacagctcccgggccggacggaggccctccacccgctttacctg

SEQ ID NO: 598677 - DNA, 120 bp, Artificial Sequence
  ENSG00000174282_22 (sequence is synthesized)
cccccactgcgccaaggtgtgcaagaccgcagctgccctgagccgccacgggcagaggcatgctgctgagcggcccgggggcaccccaacccctgtcattgcctattccaagggcagcgc

SEQ ID NO: 598678 - DNA, 120 bp, Artificial Sequence
  ENSG00000174282_23 (sequence is synthesized)
tggcaccaggcccggggatgtcaaggaggaagccccccaagagatgcaagtctcctcatccagcggtgaggcaggtggcgggagcactgctgctgaggaagcttccgagaccgcctcact

SEQ ID NO: 598679 - DNA, 120 bp, Artificial Sequence
  ENSG00000174282_24 (sequence is synthesized)
caggaatttccactggccttgattgggggcggccgggaacctggcggtggcaggggaaaatctgggagtgaagggccagtgggggctggtgagggggaccggatggaggggataggggct

SEQ ID NO: 598680 - DNA, 120 bp, Artificial Sequence
  ENSG00000174282_25 (sequence is synthesized)
gccaaagtcactttctaccctgagccctacccgctcgtctatggcccccagctccttgccgcctacccttacaacttcagtaacttggccgctctcccggttgctctcaacatggtccta

SEQ ID NO: 598681 - DNA, 120 bp, Artificial Sequence
  ENSG00000174282_26 (sequence is synthesized)
cctgatgagaagggtgcgggggcccttcccttcctaccaggggtctttggctacgcagtgaatcctcaagcagcaccccctgccccaccaacaccacctcccccaactcttcctccacca

SEQ ID NO: 598682 - DNA, 120 bp, Artificial Sequence
  ENSG00000174282_27 (sequence is synthesized)
attccccctaagggagaaggggaaagggcaggggttgagagaacccagaagggcgatgtggggtgaaccctggggctcaatccccctttcaccagatgccaccctccctgaaccccccac

SEQ ID NO: 598683 - DNA, 120 bp, Artificial Sequence
  ENSG00000174282_28 (sequence is synthesized)
cactaccagctccctggcctccctgccccttgggagccccttcacactcttgtgcagggacttgggggcccctggagctcaggggtcaggctgctttgtgtgagatgtagttttcccatc

SEQ ID NO: 598684 - DNA, 120 bp, Artificial Sequence
  ENSG00000174282_29 (sequence is synthesized)
tcctgggaagggatctttcgaggttcccctctcagtcttcctccagggaatggcctccatgaggggcagggccagcttccatcccttctccagcccttggggcaactgagcaatatactt

SEQ ID NO: 598685 - DNA, 120 bp, Artificial Sequence
  ENSG00000174282_30 (sequence is synthesized)
aacctgaatctctactcacagcccccaccagctctgaatgtctaacctgctcccctgattcgtaaacctaggggaaaccatctctctcacctaatgacccgccttgttctgaagctttct

SEQ ID NO: 598686 - DNA, 120 bp, Artificial Sequence
  ENSG00000174282_31 (sequence is synthesized)
ctaagcccttcccagttgcttcctagcacattccattctttgtggcccagggcctggaccagaccattgtgatacctgaccccgcccacctgggagtgtggctttgggtttcatccttcc

SEQ ID NO: 598687 - DNA, 120 bp, Artificial Sequence
  ENSG00000174282_32 (sequence is synthesized)
ccagcgtgggtctctacgtccctgtttcccttgtatcaagacaccttcctcagcttccatgcctttggatcttccatgttcctccccatattcctggacttcggagatggcctctcccaa

SEQ ID NO: 598688 - DNA, 120 bp, Artificial Sequence
  ENSG00000174282_33 (sequence is synthesized)
gccaggtcaaggaggtttgggggagggttgcccctctgcccctctgttctgtggctgagcactttcccagtccagggcagggaaatattggccctatcttgacccccaaatccagtgagc

SEQ ID NO: 598689 - DNA, 120 bp, Artificial Sequence
  ENSG00000174282_34 (sequence is synthesized)
tccagattcttccaaggcaaaagaggtaagcagatcacacctctttctgcctctacatatggcctattctgggctagaccagatttgggggccaggagggaagaactccatatgggatgg

SEQ ID NO: 598690 - DNA, 120 bp, Artificial Sequence
  ENSG00000174282_35 (sequence is synthesized)
agaagggaatctactttctccctgtttttttttcctgatggtttctcccagactagaccaaatagccagaaaaatgataggggtcggatgggtgggtaagcccaggatttgcacatgacc

SEQ ID NO: 598691 - DNA, 120 bp, Artificial Sequence
  ENSG00000174282_36 (sequence is synthesized)
ttccatccttacctgtattcccatctccccagtgtcactcccctcaccaatcactccagatggttttgggggaaccattctactcttctggtgggctttggggtatccccaccaactttc

SEQ ID NO: 598692 - DNA, 120 bp, Artificial Sequence
  ENSG00000174282_37 (sequence is synthesized)
ccttcaaaatagcaccttacaccccatctttgactcagttccccacacccaaagatcccagcctagggatggggtacagggactttaaatagtccctaatccctaatttgcactagttaa

SEQ ID NO: 598693 - DNA, 120 bp, Artificial Sequence
  ENSG00000174282_38 (sequence is synthesized)
ccctggtcagggtccctgtatttccttccagtgggggagataaatgtttgctcctaattctctttgaaaactgggcctccctgctctgtgattggataaatatttcccatcccacccacc

SEQ ID NO: 598694 - DNA, 120 bp, Artificial Sequence
  ENSG00000174282_39 (sequence is synthesized)
tccccccaaaaaatagctcacaaggggagagccagtatgggggagcaaatttgacaaatgggaattagaggagtgcagttttaaaaggaaaagttgctgtcatcaaaatggcagcctttt

SEQ ID NO: 598695 - DNA, 120 bp, Artificial Sequence
  ENSG00000174282_40 (sequence is synthesized)
ccccagctactgtttttggggccaagatggctgccctagcagcaatcactgccaagggcaagatcatggcttttggagggaggtgagtttagggagggccaggaccatcctcctacccct

SEQ ID NO: 598696 - DNA, 120 bp, Artificial Sequence
  ENSG00000174282_41 (sequence is synthesized)
cataccctcccagcatatacaaaaggggaggttttagacaggctccctgaatgttaaccacagaggagtcactccttcattcctcctctgtctctttgcacttttcttggtcttggccac

SEQ ID NO: 598697 - DNA, 120 bp, Artificial Sequence
  ENSG00000174282_42 (sequence is synthesized)
agcctgagtgacgaatttcctactgaatgtaccaagttccaatttttaagggggggaaaggtttcaaatggggaaaaacacacaaaaaaaaaaatcactaaaaattcccacaaatcttgt

SEQ ID NO: 598698 - DNA, 120 bp, Artificial Sequence
  ENSG00000174282_43 (sequence is synthesized)
ttctggcactttagaaaaactgcaaaaaaatacgtaataaagaatacatatatatatatctacacacaaattatatatctatctatctatacagcggaaccacaagagagactgaggaag

SEQ ID NO: 598699 - DNA, 120 bp, Artificial Sequence
  ENSG00000174282_44 (sequence is synthesized)
gcctggaggcaggggcagaggtgacgacagtgcccctatatccttaacccatactcctctgaggcaaacaggcatgggaaaatggaagggttgaggatggaccggagaattggaacttca

SEQ ID NO: 598700 - DNA, 120 bp, Artificial Sequence
  ENSG00000174282_45 (sequence is synthesized)
gaataggtcaaaattccaaaaccatggacatttttttttgggagaattgagattgtagacattttttttttcttaaatatgatcaaggaaaatagcttccagaatgtggtggttctgggc

SEQ ID NO: 598701 - DNA, 120 bp, Artificial Sequence
  ENSG00000174282_46 (sequence is synthesized)
aacaaatgagattgtggcgacgtggagattaaaatatatgtatttgagctggggaatttgaatattgtgagtttcagatgttggaaatttgggattttgcagttttgtcttttgaaaatg

SEQ ID NO: 598702 - DNA, 120 bp, Artificial Sequence
  ENSG00000174282_47 (sequence is synthesized)
atcaagtcttgtcagttcgtgccctctttccccatgttccctgggaagacgggtggtggcagagtgagaaggccactggttctgtgccgcagcacgcaaaatttagaattctacagacta

SEQ ID NO: 598703 - DNA, 120 bp, Artificial Sequence
  ENSG00000174282_48 (sequence is synthesized)
gctctatacgtagtgaggacccagatttagagaaactgaccaatatttatctccgcatttgtgtgtgtgtccaactctgtaggccaataaaccaacaagacaaatgaactgtgctccaca

SEQ ID NO: 598704 - DNA, 80 bp, Artificial Sequence
  ENSG00000174282_49 (sequence is synthesized)
ggggccagggccggagctggagccggagccggagctggaggcgggcaaaaccggagcggccgggggcggccacggtgatg

SEQ ID NO: 598705 - DNA, 120 bp, Artificial Sequence
  ENSG00000174292_0 (sequence is synthesized)
aacagcttcaactgtagactctgtctaggccagggccaactctccgtaccagcatcaacatctctctgccctggccccattccagggttcattaagtaaagcctgctaggaagctctgaa

SEQ ID NO: 598706 - DNA, 120 bp, Artificial Sequence
  ENSG00000174292_1 (sequence is synthesized)
ccccctgccatggggcaggaactgtgtcctatttagccttatattccctgtgcgtggacaggatagctctatcgggcgcttattcatgtaagagggaactcggggtgcggccctcgccgg

SEQ ID NO: 598707 - DNA, 120 bp, Artificial Sequence
  ENSG00000174292_2 (sequence is synthesized)
ccccgggccagcggccaggtccccgccctccgcgggatttactcctgtcccgcctcctcggatttagcccaggcagcctgggaggttccgcagtcgccgcttccgccttgaccaggtgga

SEQ ID NO: 598708 - DNA, 120 bp, Artificial Sequence
  ENSG00000174292_3 (sequence is synthesized)
gctggagacctggtctctctagggcctaccctgagctcaccatctgaaggagagtgccatcatccttaggaactccttctccagacatgcttcctgaggctggctccctgtggctactga

SEQ ID NO: 598709 - DNA, 120 bp, Artificial Sequence
  ENSG00000174292_4 (sequence is synthesized)
agctgctccgggacatccagttggcccagttttactggcccatccttgaggagcttaatgtcactcggccagagcacttcgactttgtaaagcctgaggacctggacggcattggcatgg

SEQ ID NO: 598710 - DNA, 120 bp, Artificial Sequence
  ENSG00000174292_5 (sequence is synthesized)
gccggcctgcccagcgcagactgtccgaagctctgaaaaggctacgttctgggcctaagtctaagaactgggtctacaagatccttggaggttttgcccctgagcacaaggagcccaccc

SEQ ID NO: 598711 - DNA, 120 bp, Artificial Sequence
  ENSG00000174292_6 (sequence is synthesized)
tgccctcggacagcccacggcacctccctgagccagaggggggcctcaagtgtctgatcccagagggtgctgtttgcagaggggagctgctgggttcaggctgcttcggtgtggtgcacc

SEQ ID NO: 598712 - DNA, 120 bp, Artificial Sequence
  ENSG00000174292_7 (sequence is synthesized)
gagggctgtggacgctgcccagtggcaagagtgtcccagtggctgtcaagtccctccgggtaggtcccgaaggcccgatgggcacagaactgggggacttcctgcgagaggtatcggtca

SEQ ID NO: 598713 - DNA, 120 bp, Artificial Sequence
  ENSG00000174292_8 (sequence is synthesized)
tgatgaacttggagcacccacacgtgctgcgtctgcacggccttgtactgggccagcctctgcagatggtgatggagctggcgccactgggctccctgcacgcgcgcctaacggccccgg

SEQ ID NO: 598714 - DNA, 120 bp, Artificial Sequence
  ENSG00000174292_9 (sequence is synthesized)
ccccgacacccccgctgctcgtggccctgctctgcctcttcctgcggcagctggcgggagccatggcgtacctgggggcccgcgggctggtgcaccgagacctcgctacgcgcaacctac

SEQ ID NO: 598715 - DNA, 120 bp, Artificial Sequence
  ENSG00000174292_10 (sequence is synthesized)
tgctggcgtcgccgcgcaccatcaaggtggctgacttcgggctggtgcggcctctgggcggtgcccggggccgctacgtcatgggcgggccccgccctatcccctacgcctggtgtgccc

SEQ ID NO: 598716 - DNA, 120 bp, Artificial Sequence
  ENSG00000174292_11 (sequence is synthesized)
cagagagcctgcgccacggagccttctcgtctgcctcggacgtgtggatgtttggggtgacgctgtgggagatgttctccgggggcgaggaaccctgggccggggtcccaccgtacctca

SEQ ID NO: 598717 - DNA, 120 bp, Artificial Sequence
  ENSG00000174292_12 (sequence is synthesized)
tcctgcagcggctggaggacagagcccggctgcctaggcctcccctctgctccagggccctctactccctcgccttgcgctgctgggccccccaccctgccgaccggcctagcttttccc

SEQ ID NO: 598718 - DNA, 120 bp, Artificial Sequence
  ENSG00000174292_13 (sequence is synthesized)
ctggaggggctgctgcaagaggccgggccttcggaagcatgttgtgtgagggatgtcacagaaccaggcgccctgaggatggagactggtgaccccatcacagtcatcgagggcagcccc

SEQ ID NO: 598719 - DNA, 120 bp, Artificial Sequence
  ENSG00000174292_14 (sequence is synthesized)
gactccacaatctggaagggccagaatggtcgcaccttcaaagtgggcagcttcccagcctcggcagtgacgctggcagatgcggggggcttgccagccacccgtccagtccacagaggc

SEQ ID NO: 598720 - DNA, 120 bp, Artificial Sequence
  ENSG00000174292_15 (sequence is synthesized)
acccctgcccggggagatcaacacccaggaagcatagatggagacagaaagaaggcaaatctttgggatgcgcccccagcacggggccagaggaggaacatgcccctggagaggatgaaa

SEQ ID NO: 598721 - DNA, 120 bp, Artificial Sequence
  ENSG00000174292_16 (sequence is synthesized)
ggcatttccaggagtctggagtcagttctgtccctcggtcctcgtcccacagggggtggttcaagcccccctgaaattcgacaagccagagctgtgccccagggacctccaggcctgcct

SEQ ID NO: 598722 - DNA, 120 bp, Artificial Sequence
  ENSG00000174292_17 (sequence is synthesized)
ccacgcccacctttatcctctagctctcctcagcccagccagccctctagggagaggcttccctggcccaaaagaaaacccccacacaatcaccccatgggaatgcctggagcccgtaaa

SEQ ID NO: 598723 - DNA, 120 bp, Artificial Sequence
  ENSG00000174292_18 (sequence is synthesized)
gccgctgccctctctggaggcctcttgtccgatcctgagttgcagaggaagattatggaggtggagctgagtgtgcatggggtcacccaccaggagtgccagacagcactaggagccact

SEQ ID NO: 598724 - DNA, 120 bp, Artificial Sequence
  ENSG00000174292_19 (sequence is synthesized)
gggggagatgtggtttctgccatccggaacctcaaggtagatcagctcttccacctgagtagccggtccagagctgactgctggcgcatcctggagcattaccagtgggacctctcagct

SEQ ID NO: 598725 - DNA, 120 bp, Artificial Sequence
  ENSG00000174292_20 (sequence is synthesized)
gccagccgctatgtcctggccaggccctgagctcagcttctgcgggcacagacaccagcatgaaaagcctaggcccctgagggcctggccacatgggaccaagcggaaccagaacaaggt

SEQ ID NO: 598726 - DNA, 120 bp, Artificial Sequence
  ENSG00000174292_21 (sequence is synthesized)
cccgacaggggtagacgttccacctggggagatcccacctgccgtaggcacatggaggaggagcccagagttgggcactggcaaatgtctcctccctcccatgctccttggcttctgaag

SEQ ID NO: 598727 - DNA, 120 bp, Artificial Sequence
  ENSG00000174292_22 (sequence is synthesized)
gctgaagctcctttggctgggccaagaaggatctagtctgcccactacattctcaaacaagaggacttggaagaaaagagctgctatacatcatatgcagaggaagcttctacgcgctag

SEQ ID NO: 598728 - DNA, 120 bp, Artificial Sequence
  ENSG00000174292_23 (sequence is synthesized)
agaggatcaaggggccacactggaccatgtgaacagccatcctgaactgccatcagctaccacactggactctgcagggcagccatcctggatgatggaagccaccatattgacttgggg

SEQ ID NO: 598729 - DNA, 120 bp, Artificial Sequence
  ENSG00000174292_24 (sequence is synthesized)
tataggcccaaactgccttcgtttggtccagggccatcgtgggtgatgacgattgctctcttgcactcaaggacatttgatgctggtagtatggattatgagatggactagcccctgccc

SEQ ID NO: 598730 - DNA, 120 bp, Artificial Sequence
  ENSG00000174292_25 (sequence is synthesized)
cagcccagctctcacattcccctttgttttttcccataccaactgcttctaccctcccctattacatacatctttcaatgtccaaaaagttacaaagtttatatgaatgtaacatataaa

SEQ ID NO: 598731 - DNA, 120 bp, Artificial Sequence
  ENSG00000174292_26 (sequence is synthesized)
attcggagaaggctggaaagacgtgaaggaagacgagcagaggagaagggaagggggcttctcacagtcggggcgatctggtctggaggagggaggggccgccagtcgccctggggaccg

SEQ ID NO: 598732 - DNA, 120 bp, Artificial Sequence
  ENSG00000174292_27 (sequence is synthesized)
ccgcgggcggtcgggctctgagccgggcggatccggagggcagcagccgagggagatcggagggggccgggcttctgagggaggcttggaccagaagggttatcctcctaggcaaagagg

SEQ ID NO: 598733 - DNA, 120 bp, Artificial Sequence
  ENSG00000174292_28 (sequence is synthesized)
gtccacagcctatcagttgccttcccccaccacaaccctcttccagcccttttcttccctgtaagtctctccgcactcttccccacacccacctccactccagccctgattctggcctcc

SEQ ID NO: 598734 - DNA, 120 bp, Artificial Sequence
  ENSG00000174292_29 (sequence is synthesized)
acacccaggaagcatagatggagacagaaagaaggcaaatctttgggatgcgcccccagcacggggccagaggaggaacatgcccctggagaggatgaaagctctcctcagcccagccag

SEQ ID NO: 598735 - DNA, 120 bp, Artificial Sequence
  ENSG00000174292_30 (sequence is synthesized)
gcaagagtgtgagtgtccagggagcccgcttcatccaggccagctgccccctctgttcttcatgcccgcaatgcctaaaggcgcttccccccacctccaggtcccagtggctgtcaagtc

SEQ ID NO: 598736 - DNA, 120 bp, Artificial Sequence
  ENSG00000174292_31 (sequence is synthesized)
acgcctggtgagagcgggtccgcgggcggtcgggctctgagccgggcggatccggagggcagcagccgagggagatcggagggggccgggcttctgagggaggcttggaccagaagggtt

SEQ ID NO: 598737 - DNA, 120 bp, Artificial Sequence
  ENSG00000174306_0 (sequence is synthesized)
aaatagactgaatgaaagatgagcttctgcctttatatccttctctcctgctacccaactcattgtggtgaaggaaaaagaaaacgcgggtggagactgcactatatgcttaggactgaa

SEQ ID NO: 598738 - DNA, 120 bp, Artificial Sequence
  ENSG00000174306_1 (sequence is synthesized)
atgcaactgcagaagcaacatgtgaccttttagagatgcttgtgggactgcataaagtgaagagggaaactggaaaaaaacaatgaagtaaggaaaaaatgaggaaactgagacacagct

SEQ ID NO: 598739 - DNA, 120 bp, Artificial Sequence
  ENSG00000174306_2 (sequence is synthesized)
taagaattttgcccaaagctacaaagattgaatagggaaaacctgctttctgcaaacaactgaaaaagctgcatttagaaactgtttctttggccctcatcgagaagctggaacttgtat

SEQ ID NO: 598740 - DNA, 120 bp, Artificial Sequence
  ENSG00000174306_3 (sequence is synthesized)
tgttaggccccttatgggacaagctctcaactgctgatcacccagtgattgtcaccatggccagcaagaggaaatccaccacaccatgcatgatcccagtgaagactgtggtgttgcaag

SEQ ID NO: 598741 - DNA, 120 bp, Artificial Sequence
  ENSG00000174306_4 (sequence is synthesized)
atgccagcatggaggcccagcccgctgagaccttgcctgaaggaccccagcaggatctgcccccagaagcatctgctgccagcagtgaggcagcacagaaccccagcagtactgatggct

SEQ ID NO: 598742 - DNA, 120 bp, Artificial Sequence
  ENSG00000174306_5 (sequence is synthesized)
ctacactggccaatgggcatcggagcactttagatggctatttatattcctgtaaatactgcgatttcagatcccatgacatgacccaatttgtgggacatatgaactcagagcacacag

SEQ ID NO: 598743 - DNA, 120 bp, Artificial Sequence
  ENSG00000174306_6 (sequence is synthesized)
actttaataaagacccaacctttgtatgcagtgggtgcagttttctggcaaaaacccctgaggggctttccttgcacaatgccacatgtcactccggggaagccagctttgtgtggaacg

SEQ ID NO: 598744 - DNA, 120 bp, Artificial Sequence
  ENSG00000174306_7 (sequence is synthesized)
tggccaagccagacaatcatgtggttgtggagcagagcatccctgagagcaccagcactcctgacctagcgggtgagcccagtgctgaaggggctgatggacaggcagaaatcatcatta

SEQ ID NO: 598745 - DNA, 120 bp, Artificial Sequence
  ENSG00000174306_8 (sequence is synthesized)
ccaaaactccaatcatgaagataatgaaaggcaaagctgaagccaaaaaaattcatacactcaaggagaatgtccctagccagcctgtgggtgaggccttaccaaagctgtcgactggag

SEQ ID NO: 598746 - DNA, 120 bp, Artificial Sequence
  ENSG00000174306_9 (sequence is synthesized)
aaatggaggtgagagagggggaccattccttcatcaatggggcagttccagtcagccaggcatctgccagctctgcaaaaaacccccatgccgccaacgggcccctgataggaacagtgc

SEQ ID NO: 598747 - DNA, 120 bp, Artificial Sequence
  ENSG00000174306_10 (sequence is synthesized)
cagttttgccagctggcatagcacagttcctctccctccagcagcagcccccagtgcatgcccaacaccatgtccaccagccactgcccacggccaaggcccttcccaaagtgatgatcc

SEQ ID NO: 598748 - DNA, 120 bp, Artificial Sequence
  ENSG00000174306_11 (sequence is synthesized)
ccctgagcagcattccaacgtacaatgcagccatggactctaacagcttcctgaagaactccttccacaagttcccctaccccaccaaagccgagctctgctatttgactgtggtgacca

SEQ ID NO: 598749 - DNA, 120 bp, Artificial Sequence
  ENSG00000174306_12 (sequence is synthesized)
agtatccagaagaacagctcaagatctggttcacagcccaaaggctgaagcaggggatcagctggtcccctgaggagattgaggatgcccggaaaaagatgttcaatacagtcatccagt

SEQ ID NO: 598750 - DNA, 120 bp, Artificial Sequence
  ENSG00000174306_13 (sequence is synthesized)
ctgtgcctcagcccacaattacggttctaaataccccactcgtcgccagtgctggcaatgtccagcatctcatccaggccgctcttccaggtcacgttgtggggcagccagagggtacag

SEQ ID NO: 598751 - DNA, 120 bp, Artificial Sequence
  ENSG00000174306_14 (sequence is synthesized)
gagggggacttctggtcactcagccattgatggccaatgggttgcaagcaacaagttcccctctccccctcacggtgacatccgtccccaagcagccaggtgtggcacccattaacactg

SEQ ID NO: 598752 - DNA, 120 bp, Artificial Sequence
  ENSG00000174306_15 (sequence is synthesized)
tgtgttcaaatacaacgtcagctgtgaaggtggtcaatgcggcccagtcgctcctcacggcctgccccagcataacctcccaagccttccttgatgctagcatctacaaaaataagaaat

SEQ ID NO: 598753 - DNA, 120 bp, Artificial Sequence
  ENSG00000174306_16 (sequence is synthesized)
ctcatgaacagctgtcagctctgaaagggagcttctgtcggaaccagttcccagggcagagcgaagttgaacatctcacaaaagtgacgggcctcagtaccagagaggtgcggaaatggt

SEQ ID NO: 598754 - DNA, 120 bp, Artificial Sequence
  ENSG00000174306_17 (sequence is synthesized)
tcagtgatcgtagataccactgccggaacttgaagggctccagagcgatgatacctggagatcacagttccatcatcattgactctgtgccagaggtgtccttctccccatcgtccaagg

SEQ ID NO: 598755 - DNA, 120 bp, Artificial Sequence
  ENSG00000174306_18 (sequence is synthesized)
tccctgaggtaacctgcattccgacaacagccacactagcaacccacccttctgccaaacgacaatcttggcaccagactcctgacttcacaccaaccaaatacaaggagagagcccctg

SEQ ID NO: 598756 - DNA, 120 bp, Artificial Sequence
  ENSG00000174306_19 (sequence is synthesized)
agcagctcagagccctggagagcagttttgcacaaaaccctcttcctcttgatgaggaactggaccgcctgagaagtgaaaccaaaatgacccgacgagaaattgatagctggttttcag

SEQ ID NO: 598757 - DNA, 120 bp, Artificial Sequence
  ENSG00000174306_20 (sequence is synthesized)
agagacggaaaaaagtgaatgctgaggagaccaagaaggctgaggagaatgcctctcaggaggaagaggaggctgctgaggatgagggtggagaagaggatttggccagtgagctaaggg

SEQ ID NO: 598758 - DNA, 120 bp, Artificial Sequence
  ENSG00000174306_21 (sequence is synthesized)
tctctggtgaaaatggctctctggaaatgcccagcagccatatcttggcagagcgcaaagtcagccccattaaaatcaacctgaagaacctgagggtcactgaagccaatggcaggaacg

SEQ ID NO: 598759 - DNA, 120 bp, Artificial Sequence
  ENSG00000174306_22 (sequence is synthesized)
agattccagggctgggtgcctgtgaccctgaggatgatgagtcaaacaaactggcagagcagctcccaggcaaagtgagctgcaaaaagactgcccagcagcggcacttgctgcggcagc

SEQ ID NO: 598760 - DNA, 120 bp, Artificial Sequence
  ENSG00000174306_23 (sequence is synthesized)
tctttgtccagacacagtggccaagcaaccaggactatgactccatcatggcccagacgggtctgccacggccagaggtggtgcgctggtttggagatagcaggtacgcactgaagaacg

SEQ ID NO: 598761 - DNA, 120 bp, Artificial Sequence
  ENSG00000174306_24 (sequence is synthesized)
gccaactcaaatggtacgaagactataagcgaggcaacttcccaccagggctactggtcattgcccctggcaaccgggagctcctgcaggactattacatgacacacaagatgctgtatg

SEQ ID NO: 598762 - DNA, 120 bp, Artificial Sequence
  ENSG00000174306_25 (sequence is synthesized)
aagaggacctgcagaacctctgtgacaagacccagatgagctcccagcaggtcaagcagtggtttgctgagaaaatgggggaggagaccagagccgtggcagacacaggcagtgaggacc

SEQ ID NO: 598763 - DNA, 120 bp, Artificial Sequence
  ENSG00000174306_26 (sequence is synthesized)
agggccctggtactggtgagctcacagcagttcacaaagggatgggtgacacctattcagaggtgtctgagaacagtgagtcgtgggagccccgtgtccctgaggccagctcagagccct

SEQ ID NO: 598764 - DNA, 120 bp, Artificial Sequence
  ENSG00000174306_27 (sequence is synthesized)
ttgacacatcgagtccccaggctggacgtcagctcgaaacagactgaatttgatctgattaatgtgaaggactggccagtctgggaaaccgcctgccacgtggaagagccaaacccgact

SEQ ID NO: 598765 - DNA, 120 bp, Artificial Sequence
  ENSG00000174306_28 (sequence is synthesized)
ctctgctgccacatgccgttcccatgcccggctgctgggcacctgggagagcttccagaatcctcgcagacagcccagagcctgccgctaccctcggcctgcccaccaccaagcaagcag

SEQ ID NO: 598766 - DNA, 120 bp, Artificial Sequence
  ENSG00000174306_29 (sequence is synthesized)
caagcaagatggggttctcatcagttcttcctcccacaatgtaggacctttcctttaccttccaatggataaaatagttcagagttcatagtcatattcatagacacagaatcaagcttt

SEQ ID NO: 598767 - DNA, 120 bp, Artificial Sequence
  ENSG00000174306_30 (sequence is synthesized)
taacatatacatccacctctatatgttaaataaaacatcagattatcaacactgtcattacgtagaaactttggttagccaagcagtgcattgtcagttacgtcatctctaaaaatgacc

SEQ ID NO: 598768 - DNA, 120 bp, Artificial Sequence
  ENSG00000174306_31 (sequence is synthesized)
tgtgtctgttctctggggattgctgggtcacaggtgcccctcaccttccacagtcaggcagggaagttataggcacaaagctacgtctggaacccctttgtgccccctttgtgttcctca

SEQ ID NO: 598769 - DNA, 120 bp, Artificial Sequence
  ENSG00000174306_32 (sequence is synthesized)
aggaagcagtacctttgaagagatctctgctgcattaagtgatgaccggctacgtttcatgtcaggcttgctttgccttgtgggctactcagtgcagaacctgctgtaaccctcagttca

SEQ ID NO: 598770 - DNA, 120 bp, Artificial Sequence
  ENSG00000174306_33 (sequence is synthesized)
aaaaatggactggcaatgtgattagcgttggatgctttaccattctctttagttgttaccgtaattctgctttttcatgggagtttgaatcatggaccataacttttcagttatcagatc

SEQ ID NO: 598771 - DNA, 120 bp, Artificial Sequence
  ENSG00000174306_34 (sequence is synthesized)
aactaaagaaacatttgttgttaagcctaatgtgctgacctatgtgcctgcattttttttttaatctagacatgtttggagtgagagaaagatggaaaaaagacatggggtagggacgta

SEQ ID NO: 598772 - DNA, 120 bp, Artificial Sequence
  ENSG00000174306_35 (sequence is synthesized)
agtggaaatctatagccacagcctgaagctttgaccactgcggttttcagagccctttctccacactcatttcagagcctcctatggtttgggaaggaataacacactggcccattagta

SEQ ID NO: 598773 - DNA, 120 bp, Artificial Sequence
  ENSG00000174306_36 (sequence is synthesized)
agggtgaaggctggagggatttgttgacttcttggaattatcagaggtagggtggtctttagcacaaagacttgcatgcagagatccctggcagaacacccagagtgcccgtggctccca

SEQ ID NO: 598774 - DNA, 120 bp, Artificial Sequence
  ENSG00000174306_37 (sequence is synthesized)
ccccagggtctggccggtgtgctggatgcatgcccaagggtgctgggcatcactggtccttgtgaggatgcttttaaagttttatatttatgtccccaaacttggaaacaagaactctac

SEQ ID NO: 598775 - DNA, 120 bp, Artificial Sequence
  ENSG00000174306_38 (sequence is synthesized)
tttagcctaaccctcatgtccttttttgaattgagaaaattacaggaaatggtgcctttgaaaattagaaaacttgcttacagagctgttctaaatggtaaatcctcaatttccccaaga

SEQ ID NO: 598776 - DNA, 120 bp, Artificial Sequence
  ENSG00000174306_39 (sequence is synthesized)
ccggttgctctgagagtagctggtaaagaggggcgaactaaagacctgtccacctgtagctccgctcatttcttagaaaccacctgcttcccagagtgccaagccacaagtaccaggctt

SEQ ID NO: 598777 - DNA, 120 bp, Artificial Sequence
  ENSG00000174306_40 (sequence is synthesized)
cgtgggcacagacacctcctgggctgggcagagtgacagtgctagaagaccccagagagagggcaagggctttgggcaagaagcactggtggtgttttagggaccgtccttctcccctac

SEQ ID NO: 598778 - DNA, 120 bp, Artificial Sequence
  ENSG00000174306_41 (sequence is synthesized)
tgccttccaggagaggtcttgcttttgaaaccaaaatcatgttcttctaaagtgtcatcttctgccctccctgtcccaatagggaccacatcttatttgtctcaaacagggacttgtgag

SEQ ID NO: 598779 - DNA, 120 bp, Artificial Sequence
  ENSG00000174306_42 (sequence is synthesized)
tacttggcaagttttgcagcctatttttgtattcttaatttggggagtaaagatgtttggtctcaaaaacctttgaggaattgccaagaatggcgagtgattgctttccttcagagaaca

SEQ ID NO: 598780 - DNA, 90 bp, Artificial Sequence
  ENSG00000174306_43 (sequence is synthesized)
ttgccaagaatggcgagtgattgctttccttcagagaacagacacttggaatttctccttttagtgtttatatacgtgcagattaattca

SEQ ID NO: 598781 - DNA, 120 bp, Artificial Sequence
  ENSG00000174306_44 (sequence is synthesized)
cgtgtgcagttgagaaacttggtggcacatgggtgttgggggagtagcctgtgttggagggacaccagtgcactaggcagctggggcggcccaggctgaagccatctccgggtgtctgag

SEQ ID NO: 598782 - DNA, 120 bp, Artificial Sequence
  ENSG00000174306_45 (sequence is synthesized)
aaaccacccagtgcctcacctccagatcctgctggcatcacctccagagccctgcatgcactggctgaagagttggtctgtggagaggattttcttggttacttgtattcacggttaatt

SEQ ID NO: 598783 - DNA, 120 bp, Artificial Sequence
  ENSG00000174306_46 (sequence is synthesized)
tacaacccaaacagcaaaacacagttggtggacaagttcatgcaggacctacagtgacccagccatgggcactagctcatctttcaggtggaaaagtacagtgctgcctgccctggtatg

SEQ ID NO: 598784 - DNA, 120 bp, Artificial Sequence
  ENSG00000174306_47 (sequence is synthesized)
tttttcttatagatgttagccctgcccaacagccagggctacactacaaaaggcaagaatgcccatgtaaggagcccagcagtctggacagatccttcttcctctgctgttggatgagag

SEQ ID NO: 598785 - DNA, 120 bp, Artificial Sequence
  ENSG00000174306_48 (sequence is synthesized)
tgagtgagtatgctctggaccttatccttgaaagatgatcaaaagcgatgatgagggaggcagtcatcacgcaggtgcttaaagggacattgtaggaggtactcaagggtttgggggcaa

SEQ ID NO: 598786 - DNA, 120 bp, Artificial Sequence
  ENSG00000174306_49 (sequence is synthesized)
aaccctgaatccagccagtcgtgcacagagacacacccacactagcccagtggcagtgggggatgtgggatggcagcagccaggtatgtagccctgtcacaggacagctcactgtggttt

SEQ ID NO: 598787 - DNA, 120 bp, Artificial Sequence
  ENSG00000174306_50 (sequence is synthesized)
tgcacactgcctaagggttaaattgtgttgttgccttcagtagaaggcatttgtgggctgcagagttgagagttgggtgaggttagtctctcctgaagaaaaagcctataaaaagtggct

SEQ ID NO: 598788 - DNA, 120 bp, Artificial Sequence
  ENSG00000174306_51 (sequence is synthesized)
aatcttatcccttttctctgtatgcagttggactcgtcagagatagtaaaatcatcttttagtgtttttttgttgctgatgtcttgtacccatttgttttttacatggggttgtagatcg

SEQ ID NO: 598789 - DNA, 120 bp, Artificial Sequence
  ENSG00000174306_52 (sequence is synthesized)
agttctcaaaggtgaaaccagatgatcattctgataaaggaaatttaaatttgatacatatgctttgtatattttgattacttgttttcgtttttgactataaaggagcttttttatttt

SEQ ID NO: 598790 - DNA, 120 bp, Artificial Sequence
  ENSG00000174306_53 (sequence is synthesized)
gggaggggaggagtgtcatttttgagaatcttgggttcctgaaaaagaacgccctagttggatggcttgccagggccttggggtttggtagtgattgtacaacttaaagctcctttctct

SEQ ID NO: 598791 - DNA, 120 bp, Artificial Sequence
  ENSG00000174306_54 (sequence is synthesized)
tggctgagtgacaggtggctgttcaggtggaccaaagcaccttgacacaaggactccacactgtgctctctagtagcacaaggaggaagttggacagaacattgggtagtgccttgcggg

SEQ ID NO: 598792 - DNA, 120 bp, Artificial Sequence
  ENSG00000174306_55 (sequence is synthesized)
ctcacacatgtactagtggtctcatctccagctagccttgggaggccgtcccaccaggaaatctctctattccgtagcctgagatgtgcccttgtgggttttatcctgctcagtcagtgg

SEQ ID NO: 598793 - DNA, 120 bp, Artificial Sequence
  ENSG00000174306_56 (sequence is synthesized)
cctaggggcaggtcctgtgttctctccctctctctcctggctctgggacatctgtccctggctgcctttcatggaggaaggacactggcctttctggttggatgctgtgtggatgctctc

SEQ ID NO: 598794 - DNA, 120 bp, Artificial Sequence
  ENSG00000174306_57 (sequence is synthesized)
tgcttgagcctcgtggtctcttgtctctttttggaccaatatcctcagattggtgcagctttttcagttcagatatcacaccccaagtggataaaggcaacttgcaggagaggagagcca

SEQ ID NO: 598795 - DNA, 120 bp, Artificial Sequence
  ENSG00000174306_58 (sequence is synthesized)
gccaagaagaaaattttaaaaccaaacctcgtttaggattttcctaaagtcatcttctcttttttcttgctcagagtttacctgggagatttcaccagtttgactcaccatttgcagatg

SEQ ID NO: 598796 - DNA, 120 bp, Artificial Sequence
  ENSG00000174306_59 (sequence is synthesized)
tgcttttgtattaaatttaaattttcacatatcacatccattctcaaggtagttatatgctggagaagaaaaatcctctagacacatgaaggcccacatagtcaagtcttccagggcaaa

SEQ ID NO: 598797 - DNA, 120 bp, Artificial Sequence
  ENSG00000174306_60 (sequence is synthesized)
gccagcagcccacccaggtcaggtagccagcagggctcagttcccctcactccagacacggaccctcctcttcagggtctcttgacccagcttccttctctccttttacctgagagcaca

SEQ ID NO: 598798 - DNA, 120 bp, Artificial Sequence
  ENSG00000174306_61 (sequence is synthesized)
gacctctctcagccagcctgcccagaccacggggggctactcccatgtagtttggggagcacttgatctcagaaaagctccattgtctgagcaaatgggcagttgtggagctcaagcctt

SEQ ID NO: 598799 - DNA, 120 bp, Artificial Sequence
  ENSG00000174306_62 (sequence is synthesized)
tctcctgtgctcaagtcccttccccaagcaaggcttcaacctcatctacccaccatgtagttttctctggccatttaagtggggcggcagggacatggttgggccatgccacaccagggc

SEQ ID NO: 598800 - DNA, 120 bp, Artificial Sequence
  ENSG00000174306_63 (sequence is synthesized)
tggtgaggcaaccagttttgattttgacagagtggctggaggaaaagtggcaatcaaggtgctgcttggtttgctctgagtgcaaatggaaccaacaggtttctgctgcaatctgtgtgt

SEQ ID NO: 598801 - DNA, 120 bp, Artificial Sequence
  ENSG00000174306_64 (sequence is synthesized)
tcccagtgccaggtcacaccaggaggggtggggcagggctaaccaagtggtctctgaactcaccgagcgtctgcacttggttgtgaagttaatgggagtacagagagcgtctggccttgg

SEQ ID NO: 598802 - DNA, 120 bp, Artificial Sequence
  ENSG00000174306_65 (sequence is synthesized)
agaggggttgagagcctcctttttggttcttcattcctgagctcttgcctgcccacaaatctgacctctttgaatggggacgcagtccttcaacagagaagtttctatggcaaagaagtt

SEQ ID NO: 598803 - DNA, 120 bp, Artificial Sequence
  ENSG00000174306_66 (sequence is synthesized)
tctatttagctctagatccagcagagtcatccattctaactgccctgaagtctagagcaggggagggaacccagaggctggggatgagactaggcagaccctggttaccatatggacaag

SEQ ID NO: 598804 - DNA, 120 bp, Artificial Sequence
  ENSG00000174306_67 (sequence is synthesized)
gacaggggaaagcacccccttcctcaatttctgaaagttctatctttgggttcgcaggactttgaggatgataaagaacatataggtactagcttgttgttgctggtccaaagcttccac

SEQ ID NO: 598805 - DNA, 120 bp, Artificial Sequence
  ENSG00000174306_68 (sequence is synthesized)
agccctgagaatttggctttcgtggctgctctggcagctgagcgaagggaggaaggcagccgctctggtggggactctaggcaccttccctgctgtccacttggataggcggtgagcccc

SEQ ID NO: 598806 - DNA, 120 bp, Artificial Sequence
  ENSG00000174306_69 (sequence is synthesized)
agggtactgagaggagcctgagcatttacctgccattagtgcctcttccttcaggagactggcttgaaacgtgtgttcatgtgcgcgtgcacacacacacatgagcacctgtatgtgtta

SEQ ID NO: 598807 - DNA, 120 bp, Artificial Sequence
  ENSG00000174306_70 (sequence is synthesized)
atgagcacctgtatgtgttaatgaatagtttttcttggttaatgctttttaacttctgttcctttccgtaagtggatgattcaaaattaacgtgacttggctgggcgcagtggctcacac

SEQ ID NO: 598808 - DNA, 120 bp, Artificial Sequence
  ENSG00000174306_71 (sequence is synthesized)
aaaaaaaaaaaaaaaacttaatgtgactggagttaaaagtgaaatgtcaggttgtttagtcactgaatagagagctacaagtgcttggtctttcccaagaatcaaacctgagtagaaata

SEQ ID NO: 598809 - DNA, 120 bp, Artificial Sequence
  ENSG00000174306_72 (sequence is synthesized)
catttaaaagaaaaatctacatggtacctatgaatcctgtaatttgtttagggagatcttgtcactcatccctggttcctgcccatactgtttggtctcgttcttgcagtttgcttggaa

SEQ ID NO: 598810 - DNA, 120 bp, Artificial Sequence
  ENSG00000174306_73 (sequence is synthesized)
cagggccagagccccacatgagattgtcagcaggagtgaggagcgccagtccctactcctcagcagggacccagcacagcaatccggttgttctcggttagactgggtcggggccagggg

SEQ ID NO: 598811 - DNA, 120 bp, Artificial Sequence
  ENSG00000174306_74 (sequence is synthesized)
agaagcagtcacccctgtgtagagggttcccgctgtgcttctgagcagttgctttgttcagaagtgttaggagggtcagattgtgccataattgttattaaagagaaaacacgcccacct

SEQ ID NO: 598812 - DNA, 120 bp, Artificial Sequence
  ENSG00000174306_75 (sequence is synthesized)
tcctttctcccctgctggccattgttcattgagttttactgagggcagcctttgtggaagtcagggaggttgccaaaggcctgtagatgcctcctgacaaggtcttgattcctggttttc

SEQ ID NO: 598813 - DNA, 120 bp, Artificial Sequence
  ENSG00000174306_76 (sequence is synthesized)
tagcacccatttgcattttggtcttcagcacaaagccttgttccctgtggccggacttctgggcaataagactggggagtgactgttgagcagtctgctgtcaggagagatggctgaaaa

SEQ ID NO: 598814 - DNA, 120 bp, Artificial Sequence
  ENSG00000174306_77 (sequence is synthesized)
ggtgatcatcttggtgctaaacaagtaagaggcaactgccctgtttttgtttgttttgaggcacaatgaaactttagccaaactctgcaagagggtcccatctcctgccatggccaggtg

SEQ ID NO: 598815 - DNA, 120 bp, Artificial Sequence
  ENSG00000174306_78 (sequence is synthesized)
tgagagaccaaaccgagaaaacagcatactctatcacttaagccttgggtagaatgggaattctttaccctgggtaaacgttttaacaaaaaaatggaacttaacttcggtttggactgt

SEQ ID NO: 598816 - DNA, 120 bp, Artificial Sequence
  ENSG00000174306_79 (sequence is synthesized)
ggtcgtgctgaggcaggagtggggttgccctcttggggctgaatctccaggcctcacgaggtcccctgtggggatgctgctatttctaagatgcaaattgcacatttcctagattttgta

SEQ ID NO: 598817 - DNA, 120 bp, Artificial Sequence
  ENSG00000174306_80 (sequence is synthesized)
tctgtggatttggataagggaggggaacacggacaaattgcttgtacaatttgaaatgggcctcaatggtacttcaaaccttttgattattcctaaataaaaacataaatatatttcaca

SEQ ID NO: 598818 - DNA, 120 bp, Artificial Sequence
  ENSG00000174306_81 (sequence is synthesized)
ggccgcccgcccggccgcggggagggaggcccgcagcgcgggaagagcggcccggtcgcgggcgccgccaccgccgccgctgccaggactgaaatgcaactgcagaagcaacatgtgacc

SEQ ID NO: 598819 - DNA, 120 bp, Artificial Sequence
  ENSG00000174306_82 (sequence is synthesized)
ccactgtagataaatttgattggctgtctccctgccttcccttcacacccagtaccttccctgcctgaaatcctcattgagggcaagaactttatccccaggatctaaaccagtgctgga

SEQ ID NO: 598820 - DNA, 120 bp, Artificial Sequence
  ENSG00000174306_83 (sequence is synthesized)
caatagatgctcatcccttccataggaaacagggaatgtttgtttctgtcttctggtaggagaaggattggtcccacccccagctccagggatggatcttgattgtttaagcccagtcag

SEQ ID NO: 598821 - DNA, 120 bp, Artificial Sequence
  ENSG00000174306_84 (sequence is synthesized)
tgattctaacccatggaccaagaccctgccttggagattggggaacaggtgttggaagggctctattttggcaaagaatggattatttatgtgagcatatttccgcaaagctaatcccga

SEQ ID NO: 598822 - DNA, 120 bp, Artificial Sequence
  ENSG00000174306_85 (sequence is synthesized)
ccaaagtgctgggattacagacgtgagctgctgtgcctggccaagacttaattttgaatgacattgggactattgccaaaaatcaaatccatcttcatgttgtccacttctcagccttaa

SEQ ID NO: 598823 - DNA, 120 bp, Artificial Sequence
  ENSG00000174306_86 (sequence is synthesized)
gtgctttgtacattgggaagttctttccagctctggacaggaaaacatgaaaacagatgatcccaaggaggtttctccctaaactaacaattaaagaatatagttttactttttcatttt

SEQ ID NO: 598824 - DNA, 120 bp, Artificial Sequence
  ENSG00000174306_87 (sequence is synthesized)
tgtttccttcatttaatttgaaaaagcttgtttaaaataactatttggagatggaataattttttggttttatgaaaatttaaaggaattgtaaaagaatctaagacatacttatggaat

SEQ ID NO: 598825 - DNA, 120 bp, Artificial Sequence
  ENSG00000174306_88 (sequence is synthesized)
tgcagtcaagtttttctggtgattttgactgaaatgcaactgcagaagcaacatgtgaccttttagagatgcttgtgggactgcataaagtgaagagggaaactggaaaaaaacaatgaa

SEQ ID NO: 598826 - DNA, 120 bp, Artificial Sequence
  ENSG00000174306_89 (sequence is synthesized)
agctctggacaggaaaacatgaaaacagatgatcccaaggaggtttctccctaaactaacaattaaagaatatagttttactttttcatttttatttgttgaaactggactgaaatgcaa

SEQ ID NO: 598827 - DNA, 120 bp, Artificial Sequence
  ENSG00000174306_90 (sequence is synthesized)
cgtagaaggcgcaaaagggggtggtagaggggaagcgggggcgttcgcgcaggcccgcctgaccgtgtgagagtgcatgcccgagtgtgcgttccgcgtgtgcacccgagagccgcctgc

SEQ ID NO: 598828 - DNA, 120 bp, Artificial Sequence
  ENSG00000174306_91 (sequence is synthesized)
gtccacgcccgagggcccttgcactctgctgggatgtggcagcccatgcccccggtgtaaagagcgtcagctcgaccagtgaaggcggcagagccaggactcgaaccactcggggtacag

SEQ ID NO: 598829 - DNA, 120 bp, Artificial Sequence
  ENSG00000174306_92 (sequence is synthesized)
ttctttccagctctggacaggaaaacatgaaaacagatgatcccaaggaggtttctccctaaactaacaattaaagaatatagttttactttttcatttttatttgttgaaactgaatcc

SEQ ID NO: 598830 - DNA, 120 bp, Artificial Sequence
  ENSG00000174306_93 (sequence is synthesized)
acaccaggaaaacccgaatggaagaacatcagaaaatagcacatccttgaagttacaaagcaacacatctgactgaaatgcaactgcagaagcaacatgtgaccttttagagatgcttgt

SEQ ID NO: 598831 - DNA, 120 bp, Artificial Sequence
  ENSG00000174306_94 (sequence is synthesized)
gtcattgcccctggcaaccgggagctcctgcaggactattacatgacacacaagatgctgtatgaagaggacctgcagaacctctgtgacaagacccagatgagctcccagcagactgaa

SEQ ID NO: 598832 - DNA, 120 bp, Artificial Sequence
  ENSG00000174307_0 (sequence is synthesized)
aggggagggccggccagggtaggaatgcgctgcgggcgggcggcgcaggaggcgagcggcggaacatccgggtgctgagggccgcggtgtgggtgcgcggagcagtcagggcgcaggtgg

SEQ ID NO: 598833 - DNA, 120 bp, Artificial Sequence
  ENSG00000174307_1 (sequence is synthesized)
ggggcgccagaatcctgcgctgcggggccgagaggggcgccgcgcccgccgcagcctggagctttccgcgaacctcggggcgcccatgacggcggcggcgacggctaccgtgctcaagga

SEQ ID NO: 598834 - DNA, 120 bp, Artificial Sequence
  ENSG00000174307_2 (sequence is synthesized)
ggcgacggctaccgtgctcaaggagggcgtgctggagaagcgcagcggcgggctgctgcagctgtggaagcggaagcgctgcgtcctcaccgaacgcgggctgcagctcttcgaggccaa

SEQ ID NO: 598835 - DNA, 120 bp, Artificial Sequence
  ENSG00000174307_3 (sequence is synthesized)
gcgtggagagcaccgggcgccacatctacttcacgctggtgaccgaagggggcggcgagatcgacttccgctgccccctggaagatcccggctggaacgcccagatcaccctaggcctgg

SEQ ID NO: 598836 - DNA, 120 bp, Artificial Sequence
  ENSG00000174307_4 (sequence is synthesized)
tcaagttcaagaaccagcaggccatccagacagtgcgggcccggcagagcctcgggaccgggaccctcgtgtcctaaaccaccgggcgcaccatctttccttcatgctacccaccacctc

SEQ ID NO: 598837 - DNA, 120 bp, Artificial Sequence
  ENSG00000174307_5 (sequence is synthesized)
agtgctgaggtcaaggcagcttcgttgttccctctggcttgtgggggcacggctgtgctccatgtggcaaggtggaaggcatggacgtgtggaggaggcgctggagctgaaggaatggac

SEQ ID NO: 598838 - DNA, 120 bp, Artificial Sequence
  ENSG00000174307_6 (sequence is synthesized)
gagccctgggaggagggcagaaggctacgcagggctgaggatgaagatgcagcccctggatggtcccagactctcaggacatgcccagctcaggggcttcgagccacaggcctggcctca

SEQ ID NO: 598839 - DNA, 120 bp, Artificial Sequence
  ENSG00000174307_7 (sequence is synthesized)
aggcgagcggcggaacatgtaagggcacatcccgcgagctgccgcccagcgcgcagacagagcccaggggagcaagagaacgggcgggcggtggggctcacggcctagggaggcgcggag

SEQ ID NO: 598840 - DNA, 120 bp, Artificial Sequence
  ENSG00000174307_8 (sequence is synthesized)
gcatctggcagaggcgggtcgggctgggccagctggggtagagcggaggagcgggtgccggctgaagcggggcggtgggcgcggagcgcgctgggggcaccgacaccacctcaccggcag

SEQ ID NO: 598841 - DNA, 120 bp, Artificial Sequence
  ENSG00000174307_9 (sequence is synthesized)
ggggagctggcataggagccccctccctgctgtggtcctgccctctgtcctgcagactgctcttagccccctggctttgtgccaggcctggaggagggcagtcccccatggggtgccgag

SEQ ID NO: 598842 - DNA, 120 bp, Artificial Sequence
  ENSG00000174307_10 (sequence is synthesized)
ccaacgcctcaggaatcaggaggccagcctggtaccaaaaggagtacccagggcctggtacccaggcccactccagaatggcctctggactcaccttgagaagggggagctgctgggcct

SEQ ID NO: 598843 - DNA, 120 bp, Artificial Sequence
  ENSG00000174307_11 (sequence is synthesized)
ctgcggtgttcggcctgaaggtggtgggggtgagggggggtttggccattagcatttcatgtctttccccaaatgaagatgccctgcaaagggcagtaaccacacagtttgctgagtgaa

SEQ ID NO: 598844 - DNA, 120 bp, Artificial Sequence
  ENSG00000174307_12 (sequence is synthesized)
attctttgcccacaaagacccagggcttggagcatctctctctttatccttaatctcccaatttgcaacccattctgaagtctccagcctggataggcagagacactaaaaccccagtag

SEQ ID NO: 598845 - DNA, 120 bp, Artificial Sequence
  ENSG00000174307_13 (sequence is synthesized)
acagggccttggtggtcctaggaaggagggcccatagattctggaccgagggatgtcaagctggtcagttcagtccctatgaatgtctcttctacaggaggctaccctgcccctgctacc

SEQ ID NO: 598846 - DNA, 120 bp, Artificial Sequence
  ENSG00000174307_14 (sequence is synthesized)
ctgggagaagcctcagctttctgggcagagtttgtctccctgtcatttatactctcaggctttatacatttacacagtaagttctccctcctggagggttaaaaggaataatttcaacag

SEQ ID NO: 598847 - DNA, 77 bp, Artificial Sequence
  ENSG00000174307_15 (sequence is synthesized)
gttctccctcctggagggttaaaaggaataatttcaacagggtgaaggcctggcacggtggctcacaactgtaatcc

SEQ ID NO: 598848 - DNA, 72 bp, Artificial Sequence
  ENSG00000174307_16 (sequence is synthesized)
attagccaggtgaggtggcacacacctatagccccagctactgggggaggctgaggcaggagaattgcttga

SEQ ID NO: 598849 - DNA, 120 bp, Artificial Sequence
  ENSG00000174307_17 (sequence is synthesized)
tggcaccactgcactccagcctaggtgacaaagcagcaagacgcagtctcaaaacaacaacaacaaaaaaaacgggaaaacaggtacagacaatagctgcctggagttgtacagaaactt

SEQ ID NO: 598850 - DNA, 120 bp, Artificial Sequence
  ENSG00000174307_18 (sequence is synthesized)
gattgggtaaccctggacctttccaggctgtggccagcagttgaccctgcctgcctttcctccattgttttcccatgtctgaccttccctgttgcaaagcagtggcctactacagggtct

SEQ ID NO: 598851 - DNA, 120 bp, Artificial Sequence
  ENSG00000174307_19 (sequence is synthesized)
ctctggagggagcaaggaggctcagtggccccattcagcaattcgaagtccctttaattgttttgtgcttccaacctgttttgttcccgttcagatttctctcgccttccaataaaaact

SEQ ID NO: 598852 - DNA, 120 bp, Artificial Sequence
  ENSG00000174307_20 (sequence is synthesized)
tccctgtcctgtgccccagtccctcagagtccacaagaggttcaacttgctcatctgatgtgtgaattacatcacacagttgaatgagaatttgttaattacaacagaacttttataaat

SEQ ID NO: 598853 - DNA, 120 bp, Artificial Sequence
  ENSG00000174307_21 (sequence is synthesized)
atgtcacttactgtatccaattgtacaattgtccatgggtggcttaatcccaccatggcaaataagcgtctgtttatgcaaccctaatcagtgctgagaaagatcagagctcaactagaa

SEQ ID NO: 598854 - DNA, 120 bp, Artificial Sequence
  ENSG00000174307_22 (sequence is synthesized)
agatgccactcccttcttgtgagaagtaggagtagggctgagaaaggatttagccttccttctagccttaatttttccagtggaaacctagatccttctctccccactaccacctcctag

SEQ ID NO: 598855 - DNA, 120 bp, Artificial Sequence
  ENSG00000174307_23 (sequence is synthesized)
gcgaccttacccgcctgcagatgtcttcaacagtagagagtcctagtgagcctggggccccatctagtgccataccccactttgatggtcctgttaatgccctcccacattgtagttagg

SEQ ID NO: 598856 - DNA, 120 bp, Artificial Sequence
  ENSG00000174325_0 (sequence is synthesized)
tgacatgggcagagtttctcttgcccttaaagtcttactttccacttctaaataccttccaagatgttttcctccacaaacacaatatcttccttaaaagatagaccctgcatcagttgt

SEQ ID NO: 598857 - DNA, 120 bp, Artificial Sequence
  ENSG00000174325_1 (sequence is synthesized)
taagctaacacatctttctcctcactacaaatgtatcactattgaatttctctccacaagtgtgaagatggctggagtagaaattctggcattgcttctcatcaccagaaggaaaaattc

SEQ ID NO: 598858 - DNA, 120 bp, Artificial Sequence
  ENSG00000174325_2 (sequence is synthesized)
agagaaacagcccgaccacccaccctgacaaatgcctgaggcccacatgcagcctgcaaaactgcaaacatcactgcccaccacagaccacggaagcaagaagcctgtttcctgttactt

SEQ ID NO: 598859 - DNA, 120 bp, Artificial Sequence
  ENSG00000174325_3 (sequence is synthesized)
gccaccactcagcaatgcccaccccatgtgtatagaggtccagaatgctcaaaattgttcttctgctgctgcaacattggagccttccatcatctcagacacatgcttttataaaccaat

SEQ ID NO: 598860 - DNA, 120 bp, Artificial Sequence
  ENSG00000174325_4 (sequence is synthesized)
aacaaaggatcaactttcttctaggtctgaattgaatactgtgaggctaaagtgtcttaactcattgagggggtggaaaatattaaaccaactaagccttacctaattacaatgccctgc

SEQ ID NO: 598861 - DNA, 120 bp, Artificial Sequence
  ENSG00000174325_5 (sequence is synthesized)
tgctgctcatctccctttattcgtttgtactcatactcaaaagaggttgtgtttttttcccttcattcaataacgattttccttgattcttagataagtccattccataatgtactcctt

SEQ ID NO: 598862 - DNA, 120 bp, Artificial Sequence
  ENSG00000174325_6 (sequence is synthesized)
tctttcagagaaaaactggaaaagacattaaatcatgttgaaatatttgactgactttcatctaggaaaaaatataaagttaaatctctacactaaaatataaacaaaataaaaagaaat

SEQ ID NO: 598863 - DNA, 120 bp, Artificial Sequence
  ENSG00000174325_7 (sequence is synthesized)
ttcagtaagaccaaaacatttacttttaaaaacctatatcatgttatatgtataactgaggaatgtaatcataattttgatttgtagaactgaagacaatatcaagtaaccctcaaaatg

SEQ ID NO: 598864 - DNA, 120 bp, Artificial Sequence
  ENSG00000174325_8 (sequence is synthesized)
taaattcaagaaacaaggtagttacgttagcctgcattaaaataaaaatatctgtgtgacaatatatgctgtagagcaaattaaaaaacaagtgaaaaggttgggtaaatatttgcaata

SEQ ID NO: 598865 - DNA, 120 bp, Artificial Sequence
  ENSG00000174325_9 (sequence is synthesized)
aatacatattgatacggtttggatttgtgtccctgcccaaatcttatggcaaattggaggaggggcctggtgggaggtgattggatcataggagcggatttcccccttgctgttctcatg

SEQ ID NO: 598866 - DNA, 120 bp, Artificial Sequence
  ENSG00000174325_10 (sequence is synthesized)
catgatagtgagtgagttctcacaatatctgatggattaaaagtgtgtgcacctcccctcttgcactttctctccagtcaccatgtgaagttccttgcttccccttctgccatgattgta

SEQ ID NO: 598867 - DNA, 120 bp, Artificial Sequence
  ENSG00000174325_11 (sequence is synthesized)
gaggcctcccagtcatgcttcttattaagcctgtggaattgtgagtcaattaagccttttttattcataaattatccagtctcaggtagatctttatagagtgtgaaaacagactaatgc

SEQ ID NO: 598868 - DNA, 120 bp, Artificial Sequence
  ENSG00000174326_0 (sequence is synthesized)
atctctgtttaccgagagagcccgtccaagttgggctccatcgctgccctcgctccccttcggggcccccgcccgcctgggaagcagagagaaagccgggcccagcccttcctcaccctt

SEQ ID NO: 598869 - DNA, 120 bp, Artificial Sequence
  ENSG00000174326_1 (sequence is synthesized)
cccctccccgcaccgcccggagaggtcgggtaagggggaaggagtgtgcgtgggacggggaacctcgggcctggggatctggctgtccccgtccccgtacctcgcgcggacccgggagtt

SEQ ID NO: 598870 - DNA, 120 bp, Artificial Sequence
  ENSG00000174326_2 (sequence is synthesized)
ccagccctaggccaggctccggctccctccgccccgcgccatcgcgctcggagtgacgggcccaccccgggcgagcagccagaggctggatctcagggatgccagctccccagcggaagc

SEQ ID NO: 598871 - DNA, 120 bp, Artificial Sequence
  ENSG00000174326_3 (sequence is synthesized)
acaggcgtggaggcttctctcacagatgtttccccaccccgcagacggcgatgaccccccagcccgccggacccccggatgggggctggggctgggtggtggcggccgcagccttcgcga

SEQ ID NO: 598872 - DNA, 120 bp, Artificial Sequence
  ENSG00000174326_4 (sequence is synthesized)
taaacgggctgtcctacgggctgctgcgctcgctgggccttgccttccctgaccttgccgagcactttgaccgaagcgcccaggacactgcgtggatcagcgccctggccctggccgtgc

SEQ ID NO: 598873 - DNA, 120 bp, Artificial Sequence
  ENSG00000174326_5 (sequence is synthesized)
agcaggcagccagccccgtgggcagcgccctgagcacgcgctggggggcccgccccgtggtgatggttgggggcgtcctcgcctcgctgggcttcgtcttctcggctttcgccagcgatc

SEQ ID NO: 598874 - DNA, 120 bp, Artificial Sequence
  ENSG00000174326_6 (sequence is synthesized)
tgctgcatctctacctcggcctgggcctcctcgctggctttggttgggccctggtgttcgcccccgccctaggcaccctctcgcgttacttctcccgccgtcgagtcttggcggtggggc

SEQ ID NO: 598875 - DNA, 120 bp, Artificial Sequence
  ENSG00000174326_7 (sequence is synthesized)
cgctcaccggcaacggggcctcctcgctgctcctggcgcccgccttgcagcttcttctcgatactttcggctggcggggcgctctgctcctcctcggcgcgatcaccctccacctcaccc

SEQ ID NO: 598876 - DNA, 120 bp, Artificial Sequence
  ENSG00000174326_8 (sequence is synthesized)
cctgtggcgccctgctgctacccctggtccttcctggagaccccccagccccaccgcgtagtcccctagctgccctcggcctgagtctgttcacacgccgggccttctcaatctttgctc

SEQ ID NO: 598877 - DNA, 120 bp, Artificial Sequence
  ENSG00000174326_9 (sequence is synthesized)
taggcacagccctggttgggggcgggtacttcgttccttacgtgcacttggctccccacgctttagaccggggcctggggggatacggagcagcgctggtggtggccgtggctgcgatgg

SEQ ID NO: 598878 - DNA, 120 bp, Artificial Sequence
  ENSG00000174326_10 (sequence is synthesized)
gggatgcgggcgcccggctggtctgcgggtggctggcagaccaaggctgggtgcccctcccgcggctgctggccgtattcggggctctgactgggctggggctgtgggtggtggggctgg

SEQ ID NO: 598879 - DNA, 120 bp, Artificial Sequence
  ENSG00000174326_11 (sequence is synthesized)
tgcccgtggtgggcggcgaagagagctgggggggtcccctgctggccgcggctgtggcctatgggctgagcgcggggagttacgccccgctggttttcggtgtactccccgggctggtgg

SEQ ID NO: 598880 - DNA, 120 bp, Artificial Sequence
  ENSG00000174326_12 (sequence is synthesized)
gcgtcggaggtgtggtgcaggccacagggctggtgatgatgctgatgagcctcggggggctcctgggccctcccctgtcaggcttcctaagggatgagacaggagacttcaccgcctctt

SEQ ID NO: 598881 - DNA, 120 bp, Artificial Sequence
  ENSG00000174326_13 (sequence is synthesized)
tcctcctgtctggttctttgatcctctccggcagcttcatctacatagggttgcccagggcgctgccctcctgtggtccagcctcccctccagccacgcctcccccagagacgggggagc

SEQ ID NO: 598882 - DNA, 120 bp, Artificial Sequence
  ENSG00000174326_14 (sequence is synthesized)
tgcttcccgctccccaggcagtcttgctgtccccaggaggccctggctccactctggacaccacttgttgattattttcttgtttgagcccctcccccaataaagaatttttatcgggtt

SEQ ID NO: 598883 - DNA, 120 bp, Artificial Sequence
  ENSG00000174327_0 (sequence is synthesized)
acacggaaactggcgcgctccaggggtggggcccaaactcagttccaccctctggctcccagccgaacaccgaaccgggaccgatccggccccggcttgaactagctcagctccgagctc

SEQ ID NO: 598884 - DNA, 120 bp, Artificial Sequence
  ENSG00000174327_1 (sequence is synthesized)
gcggaaccacgcccccgggagactctggcccggccagcgcgggccaggtcttcagtcctatatcgccccgccttgggaaaaggtgcaggggcctctcgccgcctcgtcgggcccttcctc

SEQ ID NO: 598885 - DNA, 120 bp, Artificial Sequence
  ENSG00000174327_2 (sequence is synthesized)
tctacctgcctctccaacccctctcggccccgagccacccggcagcgggggtgggtgtgcagaggtgcggcgtccagaacccggctcctgcagaggctctgggtggcagcagccctgtta

SEQ ID NO: 598886 - DNA, 120 bp, Artificial Sequence
  ENSG00000174327_3 (sequence is synthesized)
ccgcttagatggcgcgcaggacagagccccccgacgggggctggggatgggtggtggtgctctcagcgttcttccagtcggcgcttgtgtttggggtgctccgctcctttggggtcttct

SEQ ID NO: 598887 - DNA, 120 bp, Artificial Sequence
  ENSG00000174327_4 (sequence is synthesized)
tcgtggagtttgtggcggcgtttgaggagcaggcagcgcgcgtctcctggatcgcctccataggaatcgcggtgcagcagtttgggagcccggtaggcagtgccctgagcacgaagttcg

SEQ ID NO: 598888 - DNA, 120 bp, Artificial Sequence
  ENSG00000174327_5 (sequence is synthesized)
ggcccaggcccgtggtgatgactggaggcatcttggctgcgctggggatgctgctcgcctcttttgctacttccttgacccacctatacctgagtattgggttgctgtcaggctctggct

SEQ ID NO: 598889 - DNA, 120 bp, Artificial Sequence
  ENSG00000174327_6 (sequence is synthesized)
gggctttgaccttcgctccgaccctggcctgcctgtcctgttatttctctcgccgacgatccctggccaccgggctggcactgacaggcgtgggcctctcctccttcacatttgccccct

SEQ ID NO: 598890 - DNA, 120 bp, Artificial Sequence
  ENSG00000174327_7 (sequence is synthesized)
ccagtggctgctcagccactacgcctggagggggtccctgctgctggtgtctgccctctccctccacctagtggcctgtggtgctctcctccgcccaccctccctggctgaggaccctgc

SEQ ID NO: 598891 - DNA, 120 bp, Artificial Sequence
  ENSG00000174327_8 (sequence is synthesized)
tgtgggtggtcccagggcccaactcacctctctcctccatcatggccccttcctccgttacactgttgccctcaccctgatcaacactggctacttcattccctacctccacctggtggc

SEQ ID NO: 598892 - DNA, 120 bp, Artificial Sequence
  ENSG00000174327_9 (sequence is synthesized)
ccatctccaggacctggattgggacccactacctgctgccttcctactctcagttgttgctatttctgacctcgtggggcgtgtggtctccggatggctgggagatgcagtcccagggcc

SEQ ID NO: 598893 - DNA, 120 bp, Artificial Sequence
  ENSG00000174327_10 (sequence is synthesized)
tgtgacacgactcctgatgctctggaccaccttgactggggtgtcactagccctgttccctgtagctcaggctcccacagccctggtggctctggctgtggcctacggcttcacatcagg

SEQ ID NO: 598894 - DNA, 120 bp, Artificial Sequence
  ENSG00000174327_11 (sequence is synthesized)
ggctctggccccactggccttctccgtgctgcctgaactaatagggactagaaggatttactgtggcctgggactgttgcagatgatagagagcatcggggggctgctggggcctcctct

SEQ ID NO: 598895 - DNA, 120 bp, Artificial Sequence
  ENSG00000174327_12 (sequence is synthesized)
ctcaggctacctccgggatgtgacaggcaactacacggcttcttttgtggtggctggggccttccttctttcagggagtggcattctcctcaccctgccccacttcttctgcttctcaac

SEQ ID NO: 598896 - DNA, 120 bp, Artificial Sequence
  ENSG00000174327_13 (sequence is synthesized)
tactacctccgggccccaggaccttgtaacagaagcactagatactaaagttcccctacccaaggaggggctggaagaggactgaactccacagagtcaggcccagaaagccaaagcttg

SEQ ID NO: 598897 - DNA, 120 bp, Artificial Sequence
  ENSG00000174327_14 (sequence is synthesized)
acagctccaggtcttctcttgccacgtcttggtctccacagaaccacagtgccttaagattcttgatctgcctccccctagagcaggcctggggctcctgcaatgtgtgtgccaaccctt

SEQ ID NO: 598898 - DNA, 120 bp, Artificial Sequence
  ENSG00000174327_15 (sequence is synthesized)
agtgcggcgcctggatctggcggactgcgaccctcggaagggagagggaatgcggcgactgggaagtggaagggcgaggggcgggagatgctgggggggagacccctgagatcttctcgc

SEQ ID NO: 598899 - DNA, 120 bp, Artificial Sequence
  ENSG00000174327_16 (sequence is synthesized)
aagggttcggggagaagctgagggaaagtttagctagcacctgtacccagaagggaattcttaataggaatgactaaagcgacaaacatggtgaggaattaggaaattcaaggatgatga

SEQ ID NO: 598900 - DNA, 120 bp, Artificial Sequence
  ENSG00000174332_0 (sequence is synthesized)
cactgtgtactgagactggatgcatccttgcaataaaaaagaggttgatcacgacaaatgtgaaccccgccgttataaaaacagccatcatggctgtaaatgccaaaaagcagtcagtct

SEQ ID NO: 598901 - DNA, 120 bp, Artificial Sequence
  ENSG00000174332_1 (sequence is synthesized)
tgtaacttgaaaaaaaaaaaaaaggaattgtagattgtgcgcatggactcggagtgggggcggtggacagtaagtcatgatgttttggtggtaccacctggttgaatttcttcatctgaa

SEQ ID NO: 598902 - DNA, 120 bp, Artificial Sequence
  ENSG00000174332_2 (sequence is synthesized)
taagaagctcctgtgatgttctggggaggccttggaaggctagcgcatccctcatagaaagtgaatgggagctacggacaccgtaccccgggctcagagaagagcctgctggacctggac

SEQ ID NO: 598903 - DNA, 120 bp, Artificial Sequence
  ENSG00000174332_3 (sequence is synthesized)
cttgctgagggccctggccccacctgctgccagggcctgtttctccctgcaggaagcccaccgccccgggctcacccccaagcttgtgagaggctgctgcatttcccccaccctgacagg

SEQ ID NO: 598904 - DNA, 120 bp, Artificial Sequence
  ENSG00000174332_4 (sequence is synthesized)
tcacctagaccccaggccacgtatgtgaacggcagcctcccaaccacacaacacatcaaacaggagtccttgcccgactaccaagccatggcagaggcccgcacatccctgtctgcccac

SEQ ID NO: 598905 - DNA, 120 bp, Artificial Sequence
  ENSG00000174332_5 (sequence is synthesized)
tgtcggggcccgctggccactggcctgcacccagacctggacctcccgggccgaagcctcgccacccctgcgccttcctgctaccttctgggcagcgaacccagctctggcctgggcctc

SEQ ID NO: 598906 - DNA, 120 bp, Artificial Sequence
  ENSG00000174332_6 (sequence is synthesized)
cagcccgagacccacctccccgagggcagcctgaagcggtgctgcgtcttgggcctaccccccacctccccagcctcctcctcaccctgtgcctcctccgacgtcacctccatcatccgc

SEQ ID NO: 598907 - DNA, 120 bp, Artificial Sequence
  ENSG00000174332_7 (sequence is synthesized)
tcctcccagacgtctctggtcacctgtgtaaatggactccggagcccccctctgacgggagatctggggggcccttccaagcgggcccggcctggccctgcatcgacggacagccatgag

SEQ ID NO: 598908 - DNA, 120 bp, Artificial Sequence
  ENSG00000174332_8 (sequence is synthesized)
ggcagcttgcaacttgaagcctgccggaaggcgagcttcctgaagcaggaacccgcggatgagttttcagagctctttgggcctcaccagcagggcctgccgcccccctatcccctgtct

SEQ ID NO: 598909 - DNA, 120 bp, Artificial Sequence
  ENSG00000174332_9 (sequence is synthesized)
cagttgccgcctggcccaagccttggaggcctggggctgggcctggcaggcagggtggtggccgggcggcaggcgtgccgctgggtggactgctgtgcagcctatgagcagcaggaggag

SEQ ID NO: 598910 - DNA, 120 bp, Artificial Sequence
  ENSG00000174332_10 (sequence is synthesized)
ctggtgcggcacatcgagaagagccacatcgaccagcgcaagggcgaggacttcacctgcttctgggctggctgcgtgcgccgctacaagcccttcaacgcccgctacaagctgctcatc

SEQ ID NO: 598911 - DNA, 120 bp, Artificial Sequence
  ENSG00000174332_11 (sequence is synthesized)
gcagcaaggccttctcacggctggagaacctcaagatccacctgaggagccacacgggcgagaagccgtacctgtgccagcacccgggttgccagaaggccttcagcaactccagcgacc

SEQ ID NO: 598912 - DNA, 120 bp, Artificial Sequence
  ENSG00000174332_12 (sequence is synthesized)
gcgccaagcaccagcgcacccacctagacacgaagccgtacgcctgtcagatccctggctgctccaagcgctacacagaccccagctccctccgcaagcacgtcaaggcccattcagcca

SEQ ID NO: 598913 - DNA, 120 bp, Artificial Sequence
  ENSG00000174332_13 (sequence is synthesized)
aagagcagcaggtgcgtaagaagctgcatgcgggccctgacaccgaggccgacgtcctgaccgagtgtctggtcctgcagcagctccacacgtccacacagctggctgccagcgacggca

SEQ ID NO: 598914 - DNA, 120 bp, Artificial Sequence
  ENSG00000174332_14 (sequence is synthesized)
agggtggctgtggcctgggccaggagctgctcccaggtgtgtatcctggctccatcaccccccataacggacttgcatcgggcctcctgcccccagcgcacgacgtaccttccaggcacc

SEQ ID NO: 598915 - DNA, 120 bp, Artificial Sequence
  ENSG00000174332_15 (sequence is synthesized)
acccgctggatgccaccaccagttcccaccaccatctgtcccctctgcccatggctgagagcacccgggatgggttggggcccggcctcctctcaccaatagtcagccccctgaaggggc

SEQ ID NO: 598916 - DNA, 120 bp, Artificial Sequence
  ENSG00000174332_16 (sequence is synthesized)
tggggccaccgccgctgcccccatcctctcagagccattctccggggggccagcccttccccacactccccagcaagccgtcctacccacccttccagagccctccacccccgcctctgc

SEQ ID NO: 598917 - DNA, 120 bp, Artificial Sequence
  ENSG00000174332_17 (sequence is synthesized)
ccagcccacaaggttaccagggcagtttccactccatccagagttgcttcccctatggcgactgctaccggatggctgaaccagcagccggtggggacggactggtcggggagacccacg

SEQ ID NO: 598918 - DNA, 120 bp, Artificial Sequence
  ENSG00000174332_18 (sequence is synthesized)
gtttcaaccccctgcggcccaatggctaccacagcctcagcacgcccttgcctgccacaggctatgaggccctggctgaggcctcatgccccacagcgctgccacagcagccatctgaag

SEQ ID NO: 598919 - DNA, 120 bp, Artificial Sequence
  ENSG00000174332_19 (sequence is synthesized)
atgtggtgtccagcggccccgaggactgtggcttcttccccaatggagcctttgaccactgcctgggccacatcccctccatctacacagacacctgaaggagcccccacatgcgcctgc

SEQ ID NO: 598920 - DNA, 120 bp, Artificial Sequence
  ENSG00000174332_20 (sequence is synthesized)
ccatccagcactgcagatgccacctcgcccacctgctgtcgctcccaccctccgtgcacctagcaggagtgccaggccacagccggaacagccaggccatgacccaggggagccagcgct

SEQ ID NO: 598921 - DNA, 120 bp, Artificial Sequence
  ENSG00000174332_21 (sequence is synthesized)
gccaccccacccagcgctgccagggagccgccatccgagcttgagctgggcgcacagaggtgcccgccaggatctgtggccctgtaacattccctcgatcttgtcttcccgttcctcccc

SEQ ID NO: 598922 - DNA, 120 bp, Artificial Sequence
  ENSG00000174332_22 (sequence is synthesized)
gcagtggttttgaaatcacagacctcgtgtatataaaatatgcagaacttgttttccgttcccctgccagttttatatttttggttttacaagaaaaaacattaaaaactggaaaggaga

SEQ ID NO: 598923 - DNA, 120 bp, Artificial Sequence
  ENSG00000174332_23 (sequence is synthesized)
gagcccggcgcgacccccagccgtgcgccccgccccggcgccatgcattgcgaggtggctgaggcacactcggacaagaggcctaaggaggcccctggtgcgcccggccccgaccgcggc

SEQ ID NO: 598924 - DNA, 80 bp, Artificial Sequence
  ENSG00000174332_24 (sequence is synthesized)
cccgccagcctcggcgcgcacatggccttcagggtcaccgtgagtggcggcggctgcggggacaggggcccgcgggacct

SEQ ID NO: 598925 - DNA, 120 bp, Artificial Sequence
  ENSG00000174332_25 (sequence is synthesized)
ctcctccggccccgcagtccccgagactacggtccatccaaggccgccgccgccgggaaggtgaatgggagctacggacaccgtaccccgggctcagagaagagcctgctggacctggac

SEQ ID NO: 598926 - DNA, 120 bp, Artificial Sequence
  ENSG00000174339_0 (sequence is synthesized)
ggcattgcacttccttctgctgttcagacaggcaaaaggccatgggaagtttcaacaccagttttgaagatggcttcattttggtgggattctcagattggccgcaactggagcccatcc

SEQ ID NO: 598927 - DNA, 120 bp, Artificial Sequence
  ENSG00000174339_1 (sequence is synthesized)
tgtttgtctttatttttattttctactccctaactctctttggcaacaccatcatcatcgctctctcctggctagaccttcggctgcacacacctatgtacttctttctctctcatctgt

SEQ ID NO: 598928 - DNA, 120 bp, Artificial Sequence
  ENSG00000174339_2 (sequence is synthesized)
ccctcctggacctctgcttcaccaccagcaccgtgccccagctcctgatcaacctttgcggggtggaccgcaccatcacccgtggagggtgtgtggctcagctcttcatctacctagccc

SEQ ID NO: 598929 - DNA, 120 bp, Artificial Sequence
  ENSG00000174339_3 (sequence is synthesized)
tgggctccacagagtgtgtgctcctggtggtgatggcctttgaccgctatgctgctgtctgtcgtccactccactacatggccatcatgcacccccatctctgccagaccctggctatcg

SEQ ID NO: 598930 - DNA, 120 bp, Artificial Sequence
  ENSG00000174339_4 (sequence is synthesized)
atgcctgtatttctgaagttggcttgtgcggacacagaaggaacagaggccaagatgtttgtggcccgagtcatagtcgtggctgttcctgcagcacttattctaggctcctatgtgcac

SEQ ID NO: 598931 - DNA, 120 bp, Artificial Sequence
  ENSG00000174339_5 (sequence is synthesized)
attgctcatgcagtgctgagggtgaagtcaacggctgggcgcagaaaggcttttgggacttgtgggtcccacctcctagtagttttccttttttatggctcagccatctacacatatctc

SEQ ID NO: 598932 - DNA, 120 bp, Artificial Sequence
  ENSG00000174339_6 (sequence is synthesized)
caatccatccacaattattctgagcgtgagggaaaatttgttgcccttttttatactataattacccccattctcaatcctctcatttatacactaagaaacaaggacgtgaagggggct

SEQ ID NO: 598933 - DNA, 120 bp, Artificial Sequence
  ENSG00000174339_7 (sequence is synthesized)
ctgtggaaagtactatggaggggcagggactcagggtaggaggtgaaaaaatgagcagtaaaattttctgtaatagctcttcaatcacagatctttccctgttccttggagggcagttgg

SEQ ID NO: 598934 - DNA, 120 bp, Artificial Sequence
  ENSG00000174343_0 (sequence is synthesized)
aatgcaagcctgagctctcccgccataaggctgcagcggtgtgggctccttgtgcccagatcctttgtattcatagggggaagtggaagaccacgctgcctgactgagactttattatag

SEQ ID NO: 598935 - DNA, 120 bp, Artificial Sequence
  ENSG00000174343_1 (sequence is synthesized)
aggctcaggaaaaagatgaactggtcccattcctgcatctccttttgctggatctactttgctgcttccagactgagagctgcagagacggcagatggaaaatatgctcagaagttgttt

SEQ ID NO: 598936 - DNA, 120 bp, Artificial Sequence
  ENSG00000174343_2 (sequence is synthesized)
aatgacctttttgaagattattctaatgctcttcgtccagtggaagatacagataaagtcctgaatgtgaccctgcagattacgctctctcagattaaggatatggatgaaagaaaccaa

SEQ ID NO: 598937 - DNA, 120 bp, Artificial Sequence
  ENSG00000174343_3 (sequence is synthesized)
attctgactgcttatttgtggatccgccaaatctggcacgatgcctatctcacgtgggaccgagatcagtacgatggcctagactccatcaggatccccagtgacctcgtgtggaggcca

SEQ ID NO: 598938 - DNA, 120 bp, Artificial Sequence
  ENSG00000174343_4 (sequence is synthesized)
gacatcgtcttatataacaaggctgatgatgaatcttcagagcctgtgaacaccaatgtggtcctgcggtatgatgggctgatcacctgggatgcaccggccatcaccaaaagctcctgt

SEQ ID NO: 598939 - DNA, 120 bp, Artificial Sequence
  ENSG00000174343_5 (sequence is synthesized)
gtggtggatgtcacctacttcccttttgacaaccagcagtgcaacctgacttttggttcctggacctacaatggcaatcaggtggacatattcaacgccttggacagcggagatctctct

SEQ ID NO: 598940 - DNA, 120 bp, Artificial Sequence
  ENSG00000174343_6 (sequence is synthesized)
gacttcattgaagatgtggaatgggaggtccatggcatgcccgctgtgaagaatgtgatctcctatggctgctgctctgagccttacccggatgtcacattcaccctccttctgaagagg

SEQ ID NO: 598941 - DNA, 120 bp, Artificial Sequence
  ENSG00000174343_7 (sequence is synthesized)
aggtcctcgttctatatcgtcaacctcctcatcccatgcgtcctcatatcttttctggctcctctgagtttttatctcccagcagcctccggagaaaaggtctccctgggagtgaccatc

SEQ ID NO: 598942 - DNA, 120 bp, Artificial Sequence
  ENSG00000174343_8 (sequence is synthesized)
ctgttggccatgactgtatttcagctaatggtggcagaaatcatgccggcctcagaaaatgtgcccctgataggtaaatactacatagccacgatggccctgatcacagcctccactgcg

SEQ ID NO: 598943 - DNA, 120 bp, Artificial Sequence
  ENSG00000174343_9 (sequence is synthesized)
atgtgggtgaaagctgcctcagcccgcaccacagtagagagcgggaccacctcacgaaagtttatagcaaactcccagagtctaacctgaaagcagccaggaacaaagacctttccagaa

SEQ ID NO: 598944 - DNA, 120 bp, Artificial Sequence
  ENSG00000174343_10 (sequence is synthesized)
agaaggacatgaacaaacgcttaaagaacgacctgggctgccagggtaagaaccctcaggaggccgagagttactgtgcacagtacaaagtgctgacgaggaatattgagtacatcgcca

SEQ ID NO: 598945 - DNA, 120 bp, Artificial Sequence
  ENSG00000174343_11 (sequence is synthesized)
agtgcctcaaagaccacaaggccaccaattccaaggggagtgaatggaagaaggtggcgaaagtcatagaccgattcttcatgtggatttttttcattatggtgtttgtgatgactattt

SEQ ID NO: 598946 - DNA, 120 bp, Artificial Sequence
  ENSG00000174343_12 (sequence is synthesized)
tgatcatagcaagagcggattagtcacagatattggctttgctatctgggtagaaattaatacaattccctgtgatctattccaatgttcttccaagatttttgttcatctataatttag

SEQ ID NO: 598947 - DNA, 120 bp, Artificial Sequence
  ENSG00000174343_13 (sequence is synthesized)
gggttatgttgtctgtgctttttatttttagcttcaaatgaatgtcgaagctatctgctctgttaaattaagcagaagaaccaaaatttcaagggtaggaagatggaagaaatagggaaa

SEQ ID NO: 598948 - DNA, 120 bp, Artificial Sequence
  ENSG00000174343_14 (sequence is synthesized)
gagcccttttatagcccaccgtagtggtgggtgactggcctctagtttatataattatttacctctttggcagtacagataacaaaatacactttactggtaaaatttaaaacaaaaaag

SEQ ID NO: 598949 - DNA, 120 bp, Artificial Sequence
  ENSG00000174343_15 (sequence is synthesized)
gcaaaacaaaacaaactcattttccccttagttcccattaaaatatgcatttgaaaaatgaaatagtcatatatatattagtgtgatttaagtctcaatggtaccttattcaggcatagt

SEQ ID NO: 598950 - DNA, 120 bp, Artificial Sequence
  ENSG00000174343_16 (sequence is synthesized)
gcatttgaagtcatatctcaaatagtggaataaaaggttttgtcccatgtaaagaaagtctaagcatcagctgtttaatggggaaaagaactttcttcataatggtgatgtcgtatatgt

SEQ ID NO: 598951 - DNA, 120 bp, Artificial Sequence
  ENSG00000174343_17 (sequence is synthesized)
tggttatgttttatataaacccaaaagatgaagtcattcctgcatttaccctttgattaaaatatgatagatgaagctgttcctgcatttagtcttgtattaaaataaggtgattagcaa

SEQ ID NO: 598952 - DNA, 120 bp, Artificial Sequence
  ENSG00000174343_18 (sequence is synthesized)
gagatcagtacgatggcctagactccatcaggatccccagtgacctcgtgtggaggccagacatcgtcttatataacaaggacacaattcaactcttaacagtgacactcaccatccaag

SEQ ID NO: 598953 - DNA, 120 bp, Artificial Sequence
  ENSG00000174343_19 (sequence is synthesized)
atcatgtatcaataattaattaaaccggaatgggccatctagaaactgacctgtggatttggggctttgtgtggagtggaggatgaaccagtttacgggatacaaagtgacgttttcccg

SEQ ID NO: 598954 - DNA, 120 bp, Artificial Sequence
  ENSG00000174343_20 (sequence is synthesized)
ataacgggatccaatccagaataccacattatatttagccaaaatatacttttcggggaaaaacttgtaaggaagacttcaaaaatatgcatccaaatgttaacagaaatgtaccaatta

SEQ ID NO: 598955 - DNA, 120 bp, Artificial Sequence
  ENSG00000174343_21 (sequence is synthesized)
aggctctttggttgtaagcatcagaaactgactttggcaaccttgtgaaataggaatttgttagaaggatgtggcacatctcattgaattaaaggaaaaagtaaacaaccagctcttgga

SEQ ID NO: 598956 - DNA, 120 bp, Artificial Sequence
  ENSG00000174343_22 (sequence is synthesized)
aaggacagaaccaaggctgctctagtgttcaaggcaggagggactgtctgttttttttcagccatcactagggtgatgcttttggtctctggatcactctgcttaagatctaaactctgg

SEQ ID NO: 598957 - DNA, 120 bp, Artificial Sequence
  ENSG00000174343_23 (sequence is synthesized)
ttttgcaatcaaaactggtcttatggtctctgggtttacacgaaagagcaatgaaagacattatactttagagcagtagttctcaaagtggtggtccccagatgcacagcatcggcatcc

SEQ ID NO: 598958 - DNA, 120 bp, Artificial Sequence
  ENSG00000174343_24 (sequence is synthesized)
gtgattctgatgcattttctgttgaagtctgaaatccactgacccagaggttaagacctgattttgaagtcaaagaaacttgcatttgaacgctgacttcactgctcactccttgatcaa

SEQ ID NO: 598959 - DNA, 120 bp, Artificial Sequence
  ENSG00000174343_25 (sequence is synthesized)
acaggtaaatactacatagccacgatggccctgatcacagcctccactgcgttgaccatcatggtgatgaatatccacttctgtggggccgaggcccggccggtgccacactgggccagg

SEQ ID NO: 598960 - DNA, 120 bp, Artificial Sequence
  ENSG00000174348_0 (sequence is synthesized)
gacttgaatggaaggagcccgagcccgcggagcgcagctgagactgggggagcgcgttcggcctgtggggcgccgctcggcgccggggcgcagcaggttccgtcagccctggcgcccagg

SEQ ID NO: 598961 - DNA, 120 bp, Artificial Sequence
  ENSG00000174348_1 (sequence is synthesized)
cgcatctgactcggcaccccctgcaggcaccatggcccagagccgggtgctgctgctcctgctgctgctgccgccacagctgcacctgggacctgtgcttgccgtgagggccccaggatt

SEQ ID NO: 598962 - DNA, 120 bp, Artificial Sequence
  ENSG00000174348_2 (sequence is synthesized)
tggccgaagtggcggccacagcctgagccccgaagagaacgaatttgcggaggaggagccggtgctggtactgagccctgaggagcccgggcctggcccagccgcggtcagctgcccccg

SEQ ID NO: 598963 - DNA, 120 bp, Artificial Sequence
  ENSG00000174348_3 (sequence is synthesized)
agactgtgcctgttcccaggagggcgtcgtggactgtggcggtattgacctgcgtgagttcccgggggacctgcctgagcacaccaaccacctatctctgcagaacaaccagctggaaaa

SEQ ID NO: 598964 - DNA, 120 bp, Artificial Sequence
  ENSG00000174348_4 (sequence is synthesized)
gatctaccctgaggagctctcccggctgcaccggctggagacgctgaacctgcaaaacaaccgcctgacttcccgagggctcccagagaaggcgtttgagcatctgaccaacctcaatta

SEQ ID NO: 598965 - DNA, 120 bp, Artificial Sequence
  ENSG00000174348_5 (sequence is synthesized)
cctgtacttggccaataacaagctgaccttggcaccccgcttcctgccaaacgccctgatcagtgtggactttgctgccaactatctcaccaagatctatgggctcacctttggccagaa

SEQ ID NO: 598966 - DNA, 120 bp, Artificial Sequence
  ENSG00000174348_6 (sequence is synthesized)
gccaaacttgaggtctgtgtacctgcacaacaacaagctggcagacgccgggctgccggacaacatgttcaacggctccagcaacgtcgaggtcctcatcctgtccagcaacttcctgcg

SEQ ID NO: 598967 - DNA, 120 bp, Artificial Sequence
  ENSG00000174348_7 (sequence is synthesized)
ccacgtgcccaagcacctgccgcctgccctgtacaagctgcacctcaagaacaacaagctggagaagatccccccgggggccttcagcgagctgagcagcctgcgcgagctatacctgca

SEQ ID NO: 598968 - DNA, 120 bp, Artificial Sequence
  ENSG00000174348_8 (sequence is synthesized)
gaacaactacctgactgacgagggcctggacaacgagaccttctggaagctctccagcctggagtacctggatctgtccagcaacaacctgtctcgggtcccagctgggctgccgcgcag

SEQ ID NO: 598969 - DNA, 120 bp, Artificial Sequence
  ENSG00000174348_9 (sequence is synthesized)
cctggtgctgctgcacttggagaagaacgccatccggagcgtggacgcgaatgtgctgacccccatccgcagcctggagtacctgctgctgcacagcaaccagctgcgggagcagggcat

SEQ ID NO: 598970 - DNA, 120 bp, Artificial Sequence
  ENSG00000174348_10 (sequence is synthesized)
ccacccactggccttccagggcctcaagcggttgcacacggtgcacctgtacaacaacgcgctggagcgcgtgcccagtggcctgcctcgccgcgtgcgcaccctcatgatcctgcacaa

SEQ ID NO: 598971 - DNA, 120 bp, Artificial Sequence
  ENSG00000174348_11 (sequence is synthesized)
ccagatcacaggcattggccgcgaagactttgccaccacctacttcctggaggagctcaacctcagctacaaccgcatcaccagcccgcaggtgcaccgcgacgccttccgcaagctgcg

SEQ ID NO: 598972 - DNA, 120 bp, Artificial Sequence
  ENSG00000174348_12 (sequence is synthesized)
tcgctggacctgtcgggcaaccggctgcacacgctgccacctgggctgcctcgaaatgtccatgtgctgaaggtcaagcgcaatgagctggctgccttggcacgaggggcgctggtgggc

SEQ ID NO: 598973 - DNA, 120 bp, Artificial Sequence
  ENSG00000174348_13 (sequence is synthesized)
atggctcagctgcgtgagctgtacctcaccagcaaccgactgcgcagccgagccctgggcccccgtgcctgggtggacctcgcccatctgcagctgctggacatcgccgggaatcagctc

SEQ ID NO: 598974 - DNA, 120 bp, Artificial Sequence
  ENSG00000174348_14 (sequence is synthesized)
acagagatccccgaggggctccccgagtcacttgagtacctgtacctgcagaacaacaagattagtgcggtgcccgccaatgccttcgactccacgcccaacctcaaggggatctttctc

SEQ ID NO: 598975 - DNA, 120 bp, Artificial Sequence
  ENSG00000174348_15 (sequence is synthesized)
aggtttaacaagctggctgtgggctccgtggtggacagtgccttccggaggctgaagcacctgcaggtcttggacattgaaggcaacttagagtttggtgacatttccaaggaccgtggc

SEQ ID NO: 598976 - DNA, 120 bp, Artificial Sequence
  ENSG00000174348_16 (sequence is synthesized)
gaggaagaggaggaggaggaggaagaggaaacaagatagtgacaaggtgatgcagatgtgacctaggacgatggaccgccggactcttttctgcagcacacgcctgtgtgctgtgagccc

SEQ ID NO: 598977 - DNA, 120 bp, Artificial Sequence
  ENSG00000174348_17 (sequence is synthesized)
cacacgcctgtgtgctgtgagccccccactctgccgtgctcacacagacacacccagctgcacacatgaggcatcccacatgacacgggctgacacagtctcatatccccaccccttccc

SEQ ID NO: 598978 - DNA, 120 bp, Artificial Sequence
  ENSG00000174348_18 (sequence is synthesized)
acggcgtgtcccacggccagacacatgcacacacatcacaccctcaaacacccagctcagccacacacaactaccctccaaaccaccacagtctctgtcacacccccactaccgctgcca

SEQ ID NO: 598979 - DNA, 120 bp, Artificial Sequence
  ENSG00000174348_19 (sequence is synthesized)
cgccctctgaatcatgcagggaagggtctgcccctgccctggcacacacaggcacccattccctccccctgctgacatgtgtatgcgtatgcatacacaccacacacacacacatgcaca

SEQ ID NO: 598980 - DNA, 120 bp, Artificial Sequence
  ENSG00000174348_20 (sequence is synthesized)
agtcatgtgcgaacagccctccaaagcctatgccacagacagctcttgccccagccagaatcagccatagcagctcgccgtctgccctgtccatctgtccgtccgttccctggagaagac

SEQ ID NO: 598981 - DNA, 120 bp, Artificial Sequence
  ENSG00000174348_21 (sequence is synthesized)
acaagggtatccatgctctgtggccaggtgcctgccaccctctggaactcacaaaagctggcttttattcctttcccatcctatggggacaggagccttcaggactgctggcctggcctg

SEQ ID NO: 598982 - DNA, 120 bp, Artificial Sequence
  ENSG00000174348_22 (sequence is synthesized)
gcccaccctgctcctccaggtgctgggcagtcactctgctaagagtccctccctgccacgccctggcaggacacaggcacttttccaatgggcaagcccagtggaggcaggatgggagag

SEQ ID NO: 598983 - DNA, 120 bp, Artificial Sequence
  ENSG00000174348_23 (sequence is synthesized)
ccccctgggtgctgctggggccttggggcaggagtgaagcagaggtgatggggctgggctgagccagggaggaaggacccagctgcacctaggagacacctttgttcttcaggcctgtgg

SEQ ID NO: 598984 - DNA, 120 bp, Artificial Sequence
  ENSG00000174348_24 (sequence is synthesized)
gggaagttccgggtgcctttattttttattcttttctaaggaaaaaaatgataaaaatctcaaagctgatttttcttgttatagaaaaactaatataaaagcattatccctatccctgca

SEQ ID NO: 598985 - DNA, 120 bp, Artificial Sequence
  ENSG00000174348_25 (sequence is synthesized)
gcagcagggaaggggaagctgtggtctgccctgctccacgaggcgccactggtgtgaaccgggagagcccctgggtggtcccgtcccctatccctcctttatatagaaaccttccacact

SEQ ID NO: 598986 - DNA, 120 bp, Artificial Sequence
  ENSG00000174348_26 (sequence is synthesized)
gggaaggcagcggcgaggcaggagggctcatggtgagcaaggaggccggctgatctgcaggcgcacagcattccgagtttacagatttttacagataccaaatggaaggcgaggaggcag

SEQ ID NO: 598987 - DNA, 120 bp, Artificial Sequence
  ENSG00000174348_27 (sequence is synthesized)
gacttgaatggaaggagcccgagcccgcggagcgcagctgagactgggggagcgcgttcggcctgtggggcgccgctcggcgccggggcgcagcagtttacagatttttacagataccaa

SEQ ID NO: 598988 - DNA, 120 bp, Artificial Sequence
  ENSG00000174348_28 (sequence is synthesized)
ggcgcctgcactgggcctctggtcctgtgtaggggctgggcatggaggcagggcccggcgttccctgccctgtgcttacagtcagtggcgaggcagagacttcttaaacagaggcaccag

SEQ ID NO: 598989 - DNA, 120 bp, Artificial Sequence
  ENSG00000174348_29 (sequence is synthesized)
atggaaatggaaggactgtgtgtggggcccagagtaacctcctaattcagctccagcccaacccaggaaggcttctggaggaggtggtacctgccccagctttccattcattctaagtgg

SEQ ID NO: 598990 - DNA, 120 bp, Artificial Sequence
  ENSG00000174348_30 (sequence is synthesized)
agaggggactgcagggccaaggaggggaaggaaaagtggtttctgacttggggagcagctgtggttgcctgtcacgaggtgggaacgctccaggagcacgcctggaggagatagcatgtc

SEQ ID NO: 598991 - DNA, 120 bp, Artificial Sequence
  ENSG00000174348_31 (sequence is synthesized)
gagtttgaactgcccgtagatgtccatgtgtgggctccctgaaggcaggacccacactcctgttgtgatcactgctgtgccccagagcccatatgcagacctggcccagagctggcaccg

SEQ ID NO: 598992 - DNA, 120 bp, Artificial Sequence
  ENSG00000174348_32 (sequence is synthesized)
ggggtctgctgccatgggggagaattccaagggaggtgcccagcaggtggactggattctaggactggagctatgggtagggaatggagtccagggcacaccccactaggctgatgctgc

SEQ ID NO: 598993 - DNA, 120 bp, Artificial Sequence
  ENSG00000174348_33 (sequence is synthesized)
ttccttgcggccccctacccccctagaacaaccagctggaaaagatctaccctgaggagctctcccggctgcaccggctggagacgctgaacctgcaaaacaaccgcctgacttcccgag

SEQ ID NO: 598994 - DNA, 120 bp, Artificial Sequence
  ENSG00000174348_34 (sequence is synthesized)
ctgggcaataagagtgaaaaaagctgtctaactaaagcaagctcctccaacaagaccaagacagcatctctccttctaaggcttaggatttgcccagaattcctgatacctggactagcc

SEQ ID NO: 598995 - DNA, 120 bp, Artificial Sequence
  ENSG00000174348_35 (sequence is synthesized)
cataccaacagtcatggctcctataacaaagccttgaactgccacatgcatgtggatcagatgaagggacattgtcgtgtttcccatgctcttcaatttgtgtaatccctatgcaacaat

SEQ ID NO: 598996 - DNA, 120 bp, Artificial Sequence
  ENSG00000174348_36 (sequence is synthesized)
ggctgcaaagcctgccattccaatgggacaaatggtgcctctttagctttctgaagaagtttggatccctgatcttcatcatgtgaaaaatgggaaacctctgtgtctattgacatagtg

SEQ ID NO: 598997 - DNA, 120 bp, Artificial Sequence
  ENSG00000174348_37 (sequence is synthesized)
attggttgaagaatctccctagagtgagaaaacctcttacacgccaaccagcttctgatccctcccgtgcaccccaggcgggtgtttctaagacctgggggatgcgcaggagagaggctt

SEQ ID NO: 598998 - DNA, 120 bp, Artificial Sequence
  ENSG00000174348_38 (sequence is synthesized)
cagagaagctgagcttccagaaccttgtcacaggatcttcggttccgagggcctttagaacccaagagttgtagagtcctcacattttaaaaagatttttttttcctgatgacgaaaata

SEQ ID NO: 598999 - DNA, 120 bp, Artificial Sequence
  ENSG00000174348_39 (sequence is synthesized)
acatctgactgggatagaaactttgtaacataaaatggaaagagaaaatttctcataattttgccactcggaattaactactattgacattttggtaaatttgtttccatttttaaaaaa

SEQ ID NO: 599000 - DNA, 120 bp, Artificial Sequence
  ENSG00000174348_40 (sequence is synthesized)
ttctcctgcccgcgcctggggggaccctacgcctgtgtccgaaggaggccggcgtccagcagatgctcccggggcgggtggggagtgggggaagggggcgggagagaggcggggaggaga

SEQ ID NO: 599001 - DNA, 120 bp, Artificial Sequence
  ENSG00000174358_0 (sequence is synthesized)
actcgccctccagcttctgccctgcctgctgtgtgcggagccgtccagcgaccaccatggtgaggctcgtgctgcccaaccccggcctagacgcccggatcccgtccctggctgagctgg

SEQ ID NO: 599002 - DNA, 120 bp, Artificial Sequence
  ENSG00000174358_1 (sequence is synthesized)
agaccatcgagcaggaggaggccagctcccggccgaagtgggacaacaaggcgcagtacatgctcacctgcctgggcttctgcgtgggcctcggcaacgtgtggcgcttcccctacctgt

SEQ ID NO: 599003 - DNA, 120 bp, Artificial Sequence
  ENSG00000174358_2 (sequence is synthesized)
gtcagagccacggaggaggagccttcatgatcccgttcctcatcctgctggtcctggagggcatccccctgctgtacctggagttcgccatcgggcagcggctgcggcggggcagcctgg

SEQ ID NO: 599004 - DNA, 120 bp, Artificial Sequence
  ENSG00000174358_3 (sequence is synthesized)
gtgtgtggagctccatccacccggccctgaagggcctaggcctggcctccatgctcacgtccttcatggtgggactgtattacaacaccatcatctcctggatcatgtggtacttattca

SEQ ID NO: 599005 - DNA, 120 bp, Artificial Sequence
  ENSG00000174358_4 (sequence is synthesized)
actccttccaggagcctctgccctggagcgactgcccgctcaacgagaaccagacagggtatgtggacgagtgcgccaggagctcccctgtggactacttctggtaccgagagacgctca

SEQ ID NO: 599006 - DNA, 120 bp, Artificial Sequence
  ENSG00000174358_5 (sequence is synthesized)
acatctccacgtccatcagcgactcgggctccatccagtggtggatgctgctgtgcctggcctgcgcatggagcgtcctgtacatgtgcaccatccgcggcatcgagaccaccgggaagg

SEQ ID NO: 599007 - DNA, 120 bp, Artificial Sequence
  ENSG00000174358_6 (sequence is synthesized)
ccgtgtacatcacctccacgctgccctatgtcgtcctgaccatcttcctcatccgaggcctgacgctgaagggcgccaccaatggcatcgtcttcctcttcacgcccaacgtcacggagc

SEQ ID NO: 599008 - DNA, 120 bp, Artificial Sequence
  ENSG00000174358_7 (sequence is synthesized)
tggcccagccggacacctggctggacgcgggcgcacaggtcttcttctccttctccctggccttcgggggcctcatctccttctccagctacaactctgtgcacaacaactgcgagaagg

SEQ ID NO: 599009 - DNA, 120 bp, Artificial Sequence
  ENSG00000174358_8 (sequence is synthesized)
actcggtgattgtgtccatcatcaacggcttcacatcggtgtatgtggccatcgtggtctactccgtcattgggttccgcgccacacagcgctacgacgactgcttcagcacgaacatcc

SEQ ID NO: 599010 - DNA, 120 bp, Artificial Sequence
  ENSG00000174358_9 (sequence is synthesized)
tgaccctcatcaacgggttcgacctgcctgaaggcaacgtgacccaggagaactttgtggacatgcagcagcggtgcaacgcctccgaccccgcggcctacgcgcagctggtgttccaga

SEQ ID NO: 599011 - DNA, 120 bp, Artificial Sequence
  ENSG00000174358_10 (sequence is synthesized)
cctgcgacatcaacgccttcctctcagaggccgtggagggcacaggcctggccttcatcgtcttcaccgaggccatcaccaagatgccgttgtccccactgtggtctgtgctcttcttca

SEQ ID NO: 599012 - DNA, 120 bp, Artificial Sequence
  ENSG00000174358_11 (sequence is synthesized)
ttatgctcttctgcctggggctgtcatctatgtttgggaacatggagggcgtcgttgtgcccctgcaggacctcagagtcatccccccgaagtggcccaaggaggtgctcacaggcctca

SEQ ID NO: 599013 - DNA, 120 bp, Artificial Sequence
  ENSG00000174358_12 (sequence is synthesized)
tctgcctggggacattcctcattggcttcatcttcacgctgaactccggccagtactggctctccctgctggacagctatgccggctccattcccctgctcatcatcgccttctgcgaga

SEQ ID NO: 599014 - DNA, 120 bp, Artificial Sequence
  ENSG00000174358_13 (sequence is synthesized)
tgttctctgtggtctacgtgtacggtgtggacaggttcaataaggacatcgagttcatgatcggccacaagcccaacatcttctggcaagtcacgtggcgcgtggtcagccccctgctca

SEQ ID NO: 599015 - DNA, 120 bp, Artificial Sequence
  ENSG00000174358_14 (sequence is synthesized)
tgctgatcatcttcctcttcttcttcgtggtagaggtcagtcaggagctgacctacagcatctgggaccctggctacgaggaatttcccaaatcccagaagatctcctacccgaactggg

SEQ ID NO: 599016 - DNA, 120 bp, Artificial Sequence
  ENSG00000174358_15 (sequence is synthesized)
tgtatgtggtggtggtgattgtggctggagtgccctccctcaccatccctggctatgccatctacaagctcatcaggaaccactgccagaagccaggggaccatcaggggctggtgagca

SEQ ID NO: 599017 - DNA, 120 bp, Artificial Sequence
  ENSG00000174358_16 (sequence is synthesized)
cactgtccacagcctccatgaacggggacctgaagtactgagaaggcccatcccacggcgtgccatacactggtgtcagggaaggaggaaccagcaagacctgtggggtgggggccgggc

SEQ ID NO: 599018 - DNA, 120 bp, Artificial Sequence
  ENSG00000174358_17 (sequence is synthesized)
tgcacctgcatgtgtgtaagcgtgagtgtatgctcgtgtgtgagtgtgtgtattgtacacgcatgtgccatgtgtgcagatatgtatcgtgtgtgcatgtacatgcatgggcactgtgtg

SEQ ID NO: 599019 - DNA, 120 bp, Artificial Sequence
  ENSG00000174358_18 (sequence is synthesized)
agtgtgcacgtgtatgcacacatatacatgtgtgtgggtgtgtgtattgtatgtgcatgtgccatgtgtgcagatgtgtcatgttgtgtgtgtgcatgtacatgtatggacattgtgtga

SEQ ID NO: 599020 - DNA, 120 bp, Artificial Sequence
  ENSG00000174358_19 (sequence is synthesized)
gtgtgcaagtgtgcatgcatatacatgtgtgcgatatttgctgcccgtgtgtgtgcatgtatatatagacatacatgcctatgttgtgtgtggtgtgcatatgtgtgaacacacacgtgt

SEQ ID NO: 599021 - DNA, 120 bp, Artificial Sequence
  ENSG00000174358_20 (sequence is synthesized)
atacatgcatgcacatgtgctcgtacaatgggtgtccacatgcacgtgtatatgtatatctgtgagtgtatatacatgcatgcaattgtgtgtatgtgtgttctgtgtgtgcgtttgcaa

SEQ ID NO: 599022 - DNA, 120 bp, Artificial Sequence
  ENSG00000174358_21 (sequence is synthesized)
gcacatgtgtatatgtacatgtatgcctgtgtgacgtgtgtatatgtgagcatgtgtacgtgtgtgtatacgtgtgttgtgtatatgtgtgtgtctgtacctgtttgtgtatatgtgtgt

SEQ ID NO: 599023 - DNA, 120 bp, Artificial Sequence
  ENSG00000174358_22 (sequence is synthesized)
gatgtgtgctcgtgtgtgtgcatattcaggcaggtgtgcatttgtgcatgccagtgtgtatgtatgtgcgcatatggacacgcatggacacgcatatggacacatatggacacacatatg

SEQ ID NO: 599024 - DNA, 120 bp, Artificial Sequence
  ENSG00000174358_23 (sequence is synthesized)
gacacgtgtggatatgtgtgcgtacacgtcgctgggacacatgcctgccactcggggcccagctgccctctgtgtttgtccttgccacagtcacggggtgcatgtgcagaggggagcaga

SEQ ID NO: 599025 - DNA, 120 bp, Artificial Sequence
  ENSG00000174358_24 (sequence is synthesized)
ccactggggacgtgctgtgccctgcacgtgcccgggggaagcggaagctgcagctggggtgggggcagcacctctatgcttcatctctgtgggtggcaggagacaaaagcacagggtact

SEQ ID NO: 599026 - DNA, 120 bp, Artificial Sequence
  ENSG00000174358_25 (sequence is synthesized)
atcttggctcctgggagcgactcttgctacccacccccacccatccccttccccttggtgttgacctttgacctgggggttcccagagccctgtagccctcgacccggagcagcctctcg

SEQ ID NO: 599027 - DNA, 120 bp, Artificial Sequence
  ENSG00000174358_26 (sequence is synthesized)
gaagccggagtgggcagttgctggcgattctgagaaaacttggccgcatccaccggggccctgcctccagtcggccgctgccgagtctctgcgttctggccgcttcccggcttaatgaat

SEQ ID NO: 599028 - DNA, 120 bp, Artificial Sequence
  ENSG00000174358_27 (sequence is synthesized)
gccagccatttaatcattgctcctgccaccacaaatagatgagcagttaaataaaactcaacttggcataattcaaggcaaataccactctgtgcattttcttaagaggacatgagctgt

SEQ ID NO: 599029 - DNA, 120 bp, Artificial Sequence
  ENSG00000174358_28 (sequence is synthesized)
gtgaatttttagccagcctttggaaaagatgggttacagggtaactcaaccctggctgccatccttgggcactgtgtgtgtccagggcaccttggaggaccgtgcagcccccagaagctt

SEQ ID NO: 599030 - DNA, 120 bp, Artificial Sequence
  ENSG00000174358_29 (sequence is synthesized)
ccagctcccgcaccactcagtgaagcccagcctggcgcctgccctgcccccgtcacgggatgggcccccattggggttcaacattccatcgcagccaaaggcagtcggcacttgggacat

SEQ ID NO: 599031 - DNA, 120 bp, Artificial Sequence
  ENSG00000174358_30 (sequence is synthesized)
ctgcttccacggacaggtcacctccgctttgcacggaagaatctggatgcttacattaaactggtgttctgagagttcctacggacaggtcacctccgctttgcatggaagaatctggat

SEQ ID NO: 599032 - DNA, 120 bp, Artificial Sequence
  ENSG00000174358_31 (sequence is synthesized)
gcttacattaaactggtgttctgagagttcctacggacaggtcacctctgctttccatagaagaatctggacgcttacattaaactgatgttctgagaattcctacaggcaggactgaaa

SEQ ID NO: 599033 - DNA, 120 bp, Artificial Sequence
  ENSG00000174358_32 (sequence is synthesized)
gcctggtgtgtgccagtatgatgttccacccacagaaacctggtcacaatcgtcccttccagcaccccatccagcagtgactgcacacactgagtcccctaccagcccctttcaccctgc

SEQ ID NO: 599034 - DNA, 120 bp, Artificial Sequence
  ENSG00000174358_33 (sequence is synthesized)
tgactgtcactgggccctgggatgcgcaagactccacagcagcagaggtggggggacatatcacagcctctgcccccggctgtgatgccaccgaggggctcgcctgctgatggcttcaac

SEQ ID NO: 599035 - DNA, 120 bp, Artificial Sequence
  ENSG00000174358_34 (sequence is synthesized)
agggtctcacctcatcttttcctgctctttggccctggatcgagaaaatttccatcagtgccccattaatatgctgccctgtggcatctgcccaggaggccctgccaggcgtgcacaggt

SEQ ID NO: 599036 - DNA, 120 bp, Artificial Sequence
  ENSG00000174358_35 (sequence is synthesized)
gtgcattggtgtaccctggcatgcacaggtgtgcactgatgtgccctggcatccattggtgtaccctggtgtgcctgccataggaccctgggcgggagctcccatctcatctacatctcc

SEQ ID NO: 599037 - DNA, 120 bp, Artificial Sequence
  ENSG00000174358_36 (sequence is synthesized)
tgattcatgcgttgtttcataggtttcaatgtctctgtaaatgtggtagaaatgcaggctttatgggcataaagtgtacatttctaaataaatcccttctattgagtatgctcaccctag

SEQ ID NO: 599038 - DNA, 120 bp, Artificial Sequence
  ENSG00000174358_37 (sequence is synthesized)
aagttactgttgtccagacgtagagggatgagtgagccagtgacctcagacgggatggtggggacggcaggtccagctcctgcctcctcctggggggtctggctttgggggcttgctccg

SEQ ID NO: 599039 - DNA, 120 bp, Artificial Sequence
  ENSG00000174358_38 (sequence is synthesized)
aagaggccatggcccaggcctgtggcctcacaatggggaccaaccagctcttctcatcttcttccctcacacttcctctcactcaaataagaaccttccaaaaatgtgtccacctgggcc

SEQ ID NO: 599040 - DNA, 120 bp, Artificial Sequence
  ENSG00000174358_39 (sequence is synthesized)
cctgccctgggactcatggatttggagttgtggccacacggttgaggggtgcagtgtccagtggaatggggcaattgcgggcctgggggcccttggcctgtccgtggcgggagcatctgc

SEQ ID NO: 599041 - DNA, 120 bp, Artificial Sequence
  ENSG00000174358_40 (sequence is synthesized)
aaggaggagccccagagtccagggagcactgtggggagctccttagagctgaactcacccggcgtcaactcatcaaccctccacccatggacaggggtgcccccagcacaggagaggact

SEQ ID NO: 599042 - DNA, 120 bp, Artificial Sequence
  ENSG00000174358_41 (sequence is synthesized)
cagccctctgcccccacgcacggtgggtgcctgtcaccctgtcctgcccagcggcccgagggcagcagtgggtgtgagggcagcccccggcctcccaagagcagctgagaggatccctgc

SEQ ID NO: 599043 - DNA, 120 bp, Artificial Sequence
  ENSG00000174358_42 (sequence is synthesized)
gggaatccgggcttcgggtgcatgcgatctgatctgagttgtttctgacagtgacagagtgacaatctataagtatctcaagatcaaatggttaaataaaacataagaaatttaaaacga

SEQ ID NO: 599044 - DNA, 120 bp, Artificial Sequence
  ENSG00000174370_0 (sequence is synthesized)
cccacgcctaaggtccaggtcccagggctttcccttgcaccttcatccctggccctgcagaggcctgcttctcgcttccggggtcgccagagcgcccctcccgccaccccgccatctctt

SEQ ID NO: 599045 - DNA, 120 bp, Artificial Sequence
  ENSG00000174370_1 (sequence is synthesized)
ggccggatcgtgcgagagaaggggaggaggtctggggtttccagagtccgcggttttgctaagaagccgcagtgatgttgacgcggctggtcctcagtgcacacctgagtagcacgacct

SEQ ID NO: 599046 - DNA, 120 bp, Artificial Sequence
  ENSG00000174370_2 (sequence is synthesized)
ctccgccctggacgcacgctgccatcagctgggagctggacaacgtgctgatgcctagtcccagaatctggccccaggtgactccaacaggcaggtctgcctctgtcaggagtgagggta

SEQ ID NO: 599047 - DNA, 120 bp, Artificial Sequence
  ENSG00000174370_3 (sequence is synthesized)
acacctcctcactctggaatttctcagctgggcaggatgtgcatgccatagtaaccagaacctgtgagtctgtgctgagctctgccgtctacacccacggctgtggctgtgtgaggtctg

SEQ ID NO: 599048 - DNA, 120 bp, Artificial Sequence
  ENSG00000174370_4 (sequence is synthesized)
ccacaaacattacctgtcagtcctcaggacaacaaaggcaggcggcccggcaggaagaggagaactcaatctgcaaggcccatgatagtagagagggccgcctgggctaccccctcagtg

SEQ ID NO: 599049 - DNA, 120 bp, Artificial Sequence
  ENSG00000174370_5 (sequence is synthesized)
cccatcagcctggttccggtggtcctaactagccctgtctccttgccaatagccctgtgctccccagccccctcccccatgcagacggctgctatgacatccctgttccttaaagtgcgg

SEQ ID NO: 599050 - DNA, 120 bp, Artificial Sequence
  ENSG00000174370_6 (sequence is synthesized)
ggttcctcgctgccttctcctccctaactggcaccctgtgcaaacctgctgcagagaacagtgtcttgggcagtgcgatagtcctccagttcaccaacagtaaaaatggtctcaatgggg

SEQ ID NO: 599051 - DNA, 120 bp, Artificial Sequence
  ENSG00000174370_7 (sequence is synthesized)
agagatgtctgactgcaagcgctgagtccttccagaggagggctggagggacaggagggcggatcaggtggcctcctgagctggttcctggcgccgatgtaatggatgctgattaccagc

SEQ ID NO: 599052 - DNA, 120 bp, Artificial Sequence
  ENSG00000174370_8 (sequence is synthesized)
ggtgagggcatcgtggaagggactgcagaggtgtgcgagatgagtggaatgaggccccaggtgctgatttttatgcccaggatgctcctggctgtcatgggctcccaggggctccaggca

SEQ ID NO: 599053 - DNA, 120 bp, Artificial Sequence
  ENSG00000174370_9 (sequence is synthesized)
tgcacagctcttccgcctcttctcgaagcagaatgccccagaaagggcacctttactatccagggtggctagagtcgccggtggctgtgcgtgggggctgagggctagaatcagggcaag

SEQ ID NO: 599054 - DNA, 120 bp, Artificial Sequence
  ENSG00000174370_10 (sequence is synthesized)
gggctttcagtgaaacgcagagccaggcagggacagcgcggatctcagaacagtctttgtcagatgggacacttcatccccgcggagctgtccgtgcacacagcgttctctgattgccaa

SEQ ID NO: 599055 - DNA, 120 bp, Artificial Sequence
  ENSG00000174370_11 (sequence is synthesized)
gctgttaagcactctgcggaagggagctgctgggaaggcggacgaggcatctcaggtgggtgaggggctccgctgcatcagcgttgctcagacccaccatccctggggagctgtcactga

SEQ ID NO: 599056 - DNA, 120 bp, Artificial Sequence
  ENSG00000174370_12 (sequence is synthesized)
cgcccaggtttccccttctcagtacatcctgtgcctcctttctgggctgcctcagtccctcaaaggggagctccccacatgggtgggattattgttgagaacagtcagggtgttgacgag

SEQ ID NO: 599057 - DNA, 120 bp, Artificial Sequence
  ENSG00000174370_13 (sequence is synthesized)
gatgcaggactgaggttgctcccagagtcactcagtgtccctcgttttgctcggagacatcctgacctgggcaagctctttagggagcatctttcctgtctgtgccgcattctccatggc

SEQ ID NO: 599058 - DNA, 120 bp, Artificial Sequence
  ENSG00000174370_14 (sequence is synthesized)
ctttgcactctttttgcttttgttttaaacacgtcatcaattcattgcctgcagcagcttgtactgccttttggtttttctttgcagaacagctctggaagtgaagtgtgtgtgtgtgtg

SEQ ID NO: 599059 - DNA, 120 bp, Artificial Sequence
  ENSG00000174370_15 (sequence is synthesized)
tggactgggtgccttacacgtgttaacacacttgatcagctcagcaacactgtggaataagtgtaatgtgtccattattcagatcaggagactgagattcagagcagggagggaacttgc

SEQ ID NO: 599060 - DNA, 120 bp, Artificial Sequence
  ENSG00000174370_16 (sequence is synthesized)
cagagaccacatggcttgcaagcagcagaacctgggtttgaactgacagcggcctgacttcagaacccacgctttcccaccctcctacttcacacccatttgagtccagccatcttggtt

SEQ ID NO: 599061 - DNA, 120 bp, Artificial Sequence
  ENSG00000174370_17 (sequence is synthesized)
ctgaatcataaccctgactctcctggccacatcctatgctccacattacatgttactctacaggttaccaccctgggtctctttcctatataagaaatagaaatatttgtggaaatccta

SEQ ID NO: 599062 - DNA, 120 bp, Artificial Sequence
  ENSG00000174370_18 (sequence is synthesized)
atgttcatgacatctctgccattttatcaggaaaaattctatcctaccaaatactggtataatgtacttggcccccctggattggattggtataggttaagagcagatataaggtctgaa

SEQ ID NO: 599063 - DNA, 120 bp, Artificial Sequence
  ENSG00000174370_19 (sequence is synthesized)
ataatcccggtattcctagtatgtggaattattatcatggaatcataatggcagtttgcacctctgttgggctctttcaactcctgtgttggctcaggagaatcctatcacattagtccc

SEQ ID NO: 599064 - DNA, 120 bp, Artificial Sequence
  ENSG00000174370_20 (sequence is synthesized)
cttttgtagttggatagttgggcttgccagaaggcacacaaatttgggttaactcatttccaggattctggcattgtagacacagaaacaccgactgtgaagttttatgtaatacaaaca

SEQ ID NO: 599065 - DNA, 120 bp, Artificial Sequence
  ENSG00000174370_21 (sequence is synthesized)
ctgggagatttagcaataggcctgccaggcggccctggcttctggctgcacaacaaaggggggtggctggtgctgaatggggcaacagaaggtgagtttggggcctgcagagcctcgggt

SEQ ID NO: 599066 - DNA, 120 bp, Artificial Sequence
  ENSG00000174370_22 (sequence is synthesized)
agcccagaggagcgagagagtattggctgttcattttaactccatccttggaggattccccaccacaagcctaaggaagtaataaaacctcatgcattattttttgatatctggagagaa

SEQ ID NO: 599067 - DNA, 120 bp, Artificial Sequence
  ENSG00000174370_23 (sequence is synthesized)
acacgtaccctagaaatgctgtggactaattccatggttactttgtcattaaagaaaccaaaatactgagaggtcaccataaacacaaaaaggcagagagagaaggattaaatggtgttt

SEQ ID NO: 599068 - DNA, 120 bp, Artificial Sequence
  ENSG00000174370_24 (sequence is synthesized)
catgtaaggatctttaaagggagacagaattctagtctgaaaggagcgcaggcagatctggcattttgcttggggagttcaattctttggagaaaatacagagacaaaaagaccattttg

SEQ ID NO: 599069 - DNA, 120 bp, Artificial Sequence
  ENSG00000174370_25 (sequence is synthesized)
atggtatttaaaatatccctctgcccagtgtatctaagtgagtctaaatatattcagcaattttttaaagggcagatattaggcccgattcaaggtatggaatatagattcgaaagggtt

SEQ ID NO: 599070 - DNA, 120 bp, Artificial Sequence
  ENSG00000174370_26 (sequence is synthesized)
agtgataggtgagtgcctttcaggtagctttgcatcacagaccaagcccattattgaggactgtacgtatggagcaggcccgtgagcttgtgactgagtttcccaacctgccaggctccc

SEQ ID NO: 599071 - DNA, 120 bp, Artificial Sequence
  ENSG00000174370_27 (sequence is synthesized)
atttgcttaggatgaatatttttctgccctccctggtgagccactgtgggccactcgccactccttacaccccttccctttaatacctcgcttggcttacttgcaaaatccacatgcatc

SEQ ID NO: 599072 - DNA, 120 bp, Artificial Sequence
  ENSG00000174370_28 (sequence is synthesized)
ctcctggatctcacagaagatgtatgaaaagtcatggccatgaaaagggcacggaaatcaaattaattaattttgctttttccccacgtttgtttctgtctgtctggtacttttcctttt

SEQ ID NO: 599073 - DNA, 120 bp, Artificial Sequence
  ENSG00000174370_29 (sequence is synthesized)
taagcctgccatctctttgaaagtgagccgcacagtgataatccattttcttcattgtaaccccacagtgtatgtattccacattaaataataaaagggattaataattaaatcaaaatg

SEQ ID NO: 599074 - DNA, 120 bp, Artificial Sequence
  ENSG00000174370_30 (sequence is synthesized)
gtgcttcaaacgccttgaggataaggaaggagaatcagcaagtcccgagttcctacggtgtgtcagcatcgtgctcccactcccgggagagaggcattatcttcagtttacaaaagggga

SEQ ID NO: 599075 - DNA, 120 bp, Artificial Sequence
  ENSG00000174371_0 (sequence is synthesized)
gcctaaggaaacgtgtcgtctggaatgggcttgggggccacgcctgcacatctccgcgagacagagggataaagtgaagatggtgctgttattgttacctcgagtgccacatgcgacctc

SEQ ID NO: 599076 - DNA, 120 bp, Artificial Sequence
  ENSG00000174371_1 (sequence is synthesized)
tgagatatgtacacagtcattcttactatcgcactcagccattcttactacgctaaagaagaaataattattcgaggatatttgcctggcccagaagaaacttatgtaaatttcatgaac

SEQ ID NO: 599077 - DNA, 120 bp, Artificial Sequence
  ENSG00000174371_2 (sequence is synthesized)
tattatatccgttttcctcggagtgagagaaaactctttttagatatcatctgagaggtagttaatttggcaccatggggatacagggattgctacaatttatcaaagaagcttcagaac

SEQ ID NO: 599078 - DNA, 120 bp, Artificial Sequence
  ENSG00000174371_3 (sequence is synthesized)
ccatccatgtgaggaagtataaagggcaggtagtagctgtggatacatattgctggcttcacaaaggagctattgcttgtgctgaaaaactagccaaaggtgaacctactgataggtatg

SEQ ID NO: 599079 - DNA, 120 bp, Artificial Sequence
  ENSG00000174371_4 (sequence is synthesized)
taggattttgtatgaaatttgtaaatatgttactatctcatgggatcaagcctattctcgtatttgatggatgtactttaccttctaaaaaggaagtagagagatctagaagagaaagac

SEQ ID NO: 599080 - DNA, 120 bp, Artificial Sequence
  ENSG00000174371_5 (sequence is synthesized)
gacaagccaatcttcttaagggaaagcaacttcttcgtgaggggaaagtctcggaagctcgagagtgtttcacccggtctatcaatatcacacatgccatggcccacaaagtaattaaag

SEQ ID NO: 599081 - DNA, 120 bp, Artificial Sequence
  ENSG00000174371_6 (sequence is synthesized)
ctgcccggtctcagggggtagattgcctcgtggctccctatgaagctgatgcgcagttggcctatcttaacaaagcgggaattgtgcaagccataattacagaggactcggatctcctag

SEQ ID NO: 599082 - DNA, 120 bp, Artificial Sequence
  ENSG00000174371_7 (sequence is synthesized)
cttttggctgtaaaaaggtaattttaaagatggaccagtttggaaatggacttgaaattgatcaagctcggctaggaatgtgcagacagcttggggatgtattcacggaagagaagtttc

SEQ ID NO: 599083 - DNA, 120 bp, Artificial Sequence
  ENSG00000174371_8 (sequence is synthesized)
gttacatgtgtattctttcaggttgtgactacctgtcatcactgcgtgggattggattagcaaaggcatgcaaagtcctaagactagccaataatccagatatagtaaaggttatcaaga

SEQ ID NO: 599084 - DNA, 120 bp, Artificial Sequence
  ENSG00000174371_9 (sequence is synthesized)
aaattggacattatctcaagatgaatatcacggtaccagaggattacatcaacgggtttattcgggccaacaataccttcctctatcagctagtttttgatcccatcaaaaggaaactta

SEQ ID NO: 599085 - DNA, 120 bp, Artificial Sequence
  ENSG00000174371_10 (sequence is synthesized)
ttcctctgaacgcctatgaagatgatgttgatcctgaaacactaagctacgctgggcaatatgttgatgattccatagctcttcaaatagcacttggaaataaagatataaatacttttg

SEQ ID NO: 599086 - DNA, 120 bp, Artificial Sequence
  ENSG00000174371_11 (sequence is synthesized)
aacagatcgatgactacaatccagacactgctatgcctgcccattcaagaagtcatagttgggatgacaaaacatgtcaaaagtcagctaatgttagcagcatttggcataggaattact

SEQ ID NO: 599087 - DNA, 120 bp, Artificial Sequence
  ENSG00000174371_12 (sequence is synthesized)
ctcccagaccagagtcgggtactgtttcagatgccccacaattgaaggaaaatccaagtactgtgggagtggaacgagtgattagtactaaagggttaaatctcccaaggaaatcatcca

SEQ ID NO: 599088 - DNA, 120 bp, Artificial Sequence
  ENSG00000174371_13 (sequence is synthesized)
agaagaccaagaaaaatagctctgaaggcaataaatcattgagcttttctgaagtgtttgtgcctgacctggtaaatggacctactaacaaaaagagtgtaagcactccacctaggacga

SEQ ID NO: 599089 - DNA, 120 bp, Artificial Sequence
  ENSG00000174371_14 (sequence is synthesized)
gaaataaatttgcaacatttttacaaaggaaaaatgaagaaagtggtgcagttgtggttccagggaccagaagcaggtttttttgcagttcagattctactgactgtgtatcaaacaaag

SEQ ID NO: 599090 - DNA, 120 bp, Artificial Sequence
  ENSG00000174371_15 (sequence is synthesized)
tgagcatccagcctctggatgaaactgctgtcacagataaagagaacaatctgcatgaatcagagtatggagaccaagaaggcaagagactggttgacacagatgtagcacgtaattcaa

SEQ ID NO: 599091 - DNA, 120 bp, Artificial Sequence
  ENSG00000174371_16 (sequence is synthesized)
gtgatgacattccgaataatcatattccaggtgatcatattccagacaaggcaacagtgtttacagatgaagagtcctactcttttgagagcagcaaatttacaaggaccatttcaccac

SEQ ID NO: 599092 - DNA, 120 bp, Artificial Sequence
  ENSG00000174371_17 (sequence is synthesized)
ccactttgggaacactaagaagttgttttagttggtctggaggtcttggagatttttcaagaacgccgagcccctctccaagcacagcattgcagcagttccgaagaaagagcgattccc

SEQ ID NO: 599093 - DNA, 120 bp, Artificial Sequence
  ENSG00000174371_18 (sequence is synthesized)
ccacctctttgcctgagaataatatgtctgatgtgtcgcagttaaagagcgaggagtccagtgacgatgagtctcatcccttacgagaagaggcatgttcttcacagtcccaggaaagtg

SEQ ID NO: 599094 - DNA, 120 bp, Artificial Sequence
  ENSG00000174371_19 (sequence is synthesized)
gagaattctcactgcagagttcaaatgcatcaaagctttctcagtgctctagtaaggactctgattcagaggaatctgattgcaatattaagttacttgacagtcaaagtgaccagacct

SEQ ID NO: 599095 - DNA, 120 bp, Artificial Sequence
  ENSG00000174371_20 (sequence is synthesized)
ccaagctacgtttatctcatttctcaaaaaaagacacacctctaaggaacaaggttcctgggctatataagtccagttctgcagactctctttctacaaccaagatcaaacctctaggac

SEQ ID NO: 599096 - DNA, 120 bp, Artificial Sequence
  ENSG00000174371_21 (sequence is synthesized)
ctgccagagccagtgggctgagcaagaagccggcaagcatccagaagagaaagcatcataatgccgagaacaagccggggttacagatcaaactcaatgagctctggaaaaactttggat

SEQ ID NO: 599097 - DNA, 120 bp, Artificial Sequence
  ENSG00000174371_22 (sequence is synthesized)
ttaaaaaagattctgaaaagcttcctccttgtaagaaacccctgtccccagtcagagataacatccaactaactccagaagcggaagaggatatatttaacaaacctgaatgtggccgtg

SEQ ID NO: 599098 - DNA, 120 bp, Artificial Sequence
  ENSG00000174371_23 (sequence is synthesized)
ttcaaagagcaatattccagtaaatgcagactgctgcaaagcttttgcctgcaagagaatctgatcaatttgaagtccctgtttgggaatgaggcacttatcagcatgaagaattttttc

SEQ ID NO: 599099 - DNA, 120 bp, Artificial Sequence
  ENSG00000174371_24 (sequence is synthesized)
tcattctgtgccattttaaaaatagaatacattttgtatattaactttataattgggttgtggtttttttgctcagctttttatatttttataagaagctaaatagaagaataattgtat

SEQ ID NO: 599100 - DNA, 120 bp, Artificial Sequence
  ENSG00000174371_25 (sequence is synthesized)
ctctgacaggtttttggaggttttagtgttaattgggaaaatcctctggagtttataaaagtctactctaaatatttctgtaatgttgtcaagtagaaagatagtaaatggagaaactac

SEQ ID NO: 599101 - DNA, 120 bp, Artificial Sequence
  ENSG00000174371_26 (sequence is synthesized)
agcctttcgcgcgctgtgtaggcaagttacccgtgttctgcgttgccggccgtgggtgctctggccacagtgagttaggggcgtcggagcgggtttctccaaccgcaatcggctccgctc

SEQ ID NO: 599102 - DNA, 120 bp, Artificial Sequence
  ENSG00000174371_27 (sequence is synthesized)
gagtctaagaacctctgaaatttgagaactgctggaccagagcctttagagctctgataaggtgtcaacagggtagttaatttggcaccatggggatacagggattgctacaatttatca

SEQ ID NO: 599103 - DNA, 120 bp, Artificial Sequence
  ENSG00000174371_28 (sequence is synthesized)
accatcggccatcagcgccagtgccactcgcgccctcaagaagccgcacggagttcgggccggcagcagcggctgcagtcgtatggcagtgagccgctgtctacccagcgagacggagag

SEQ ID NO: 599104 - DNA, 65 bp, Artificial Sequence
  ENSG00000174371_29 (sequence is synthesized)
cttcctccatcctaggcagaaataaagtcccaaatctttgttttttaacgggtcatagaggaccc

SEQ ID NO: 599105 - DNA, 120 bp, Artificial Sequence
  ENSG00000174371_30 (sequence is synthesized)
agtcccaaatctttgttttttaacgggtcatagaggacccatcatcaccctttattcattccttgatcatctcaggctagagaagtctagggatacagctatatataacatgaccagaag

SEQ ID NO: 599106 - DNA, 120 bp, Artificial Sequence
  ENSG00000174371_31 (sequence is synthesized)
gaagagaggctgcattgtgtgcggaagtagaggagaaaccctgattggacacaaatagtggtgtaaaagtgtgtccagaattggtgggttcttggcctcactgacttcaagaatgaagcc

SEQ ID NO: 599107 - DNA, 120 bp, Artificial Sequence
  ENSG00000174373_0 (sequence is synthesized)
atcactaccacactcgtctccgtttcggcctctgcagggtgtaagctgctaaagaagcttcaaccttaagggggcctcagggagagagttgtgctcctgccgccgagagctccaccttcg

SEQ ID NO: 599108 - DNA, 120 bp, Artificial Sequence
  ENSG00000174373_1 (sequence is synthesized)
ctgtggcggcgagcggcggccgctggagacgagcggcggcggcaggcggccagcccgggtctgcctcgctccgtgcagggccgggagagggatccgccatattggagctggggccgaagg

SEQ ID NO: 599109 - DNA, 120 bp, Artificial Sequence
  ENSG00000174373_2 (sequence is synthesized)
ccatattggagctggggccgaaggtgccttggagccgcggcgcgaggcgggtggaggtggcggccctggcctggatcgggaaggagtcggctctgccctggcccgcaaggctggggagct

SEQ ID NO: 599110 - DNA, 120 bp, Artificial Sequence
  ENSG00000174373_3 (sequence is synthesized)
aatgagcctctctggctagtctcctccccgtccactccctccactttctgccgccgggacccggctgggagccggctgtggcagtggcagtggcagtggcagcgacaggatgttctccaa

SEQ ID NO: 599111 - DNA, 120 bp, Artificial Sequence
  ENSG00000174373_4 (sequence is synthesized)
gaagccgcacggggacgtgaagaagtccacccagaaggtgctagacaccaagaaggacgcactgactcgcctcaagcacctgcgcatcgtcatcgagaatgcagaatctattgatcttaa

SEQ ID NO: 599112 - DNA, 120 bp, Artificial Sequence
  ENSG00000174373_5 (sequence is synthesized)
acagtttttcgaccaacatttttcacatatatactatgtgttctttgaaaattttgtgactattgaagctagtcttaaacagaaaggtcacaagtctcaaagagaggaattggatgctat

SEQ ID NO: 599113 - DNA, 120 bp, Artificial Sequence
  ENSG00000174373_6 (sequence is synthesized)
actttttatttttgagaaaattttacaacttcttccagaaagaattcatcagcgatggcagtttcatagtattggattgattttaaagaagctacttcacacaggaaactccttaaagat

SEQ ID NO: 599114 - DNA, 120 bp, Artificial Sequence
  ENSG00000174373_7 (sequence is synthesized)
taggcgggaaggtgttcgtcttttcttactatggttgcaagctcttcagaataactgtagcaaagaacagctctggatgttttcatgcttaatccctggattttcagcaccacagtctga

SEQ ID NO: 599115 - DNA, 120 bp, Artificial Sequence
  ENSG00000174373_8 (sequence is synthesized)
acatggacctcgaactttagataatctcattaatcctccactcaaccttcaagaaactcaagtcactatagaagaaatcactcctcttgtccccccacaatcaggagataaagggcaaga

SEQ ID NO: 599116 - DNA, 120 bp, Artificial Sequence
  ENSG00000174373_9 (sequence is synthesized)
agatctcacaagctattttcttgaagcacttctaaaatacatagtcattcaggtaaaaagtttagaatggaagaacaaagaaaaccaagaaaggggattttcatttttgttttcacattt

SEQ ID NO: 599117 - DNA, 120 bp, Artificial Sequence
  ENSG00000174373_10 (sequence is synthesized)
taagaaatattacttgccttatatttttccaaacatctgtaaggaaaacagtttatatcatcctatacttgacatcccgcagatgagaccaaagccacattatgtcgtgataaagaaaga

SEQ ID NO: 599118 - DNA, 120 bp, Artificial Sequence
  ENSG00000174373_11 (sequence is synthesized)
tgctgaaaccaatgaagcaatctattgtacaaaggagcctttcattaaggctcgtgttattgtcattcgttggctggtttctttctggctggagccaaaaccacatacaggacctcatat

SEQ ID NO: 599119 - DNA, 120 bp, Artificial Sequence
  ENSG00000174373_12 (sequence is synthesized)
tcctgggatggaaggtgaagtcttgccaaagaatattcagagagcagctgctagtttagtatccagagaagaaagcaaaaatgataatgctgataaaacagacagaactacagaacccga

SEQ ID NO: 599120 - DNA, 120 bp, Artificial Sequence
  ENSG00000174373_13 (sequence is synthesized)
acagtctcattccaatacaagcactctcacggagcgagaacctagctcatctagtctctgtagtattgatgaagaacatctcacagacattgaaatagttcgcagagttttttcttctaa

SEQ ID NO: 599121 - DNA, 120 bp, Artificial Sequence
  ENSG00000174373_14 (sequence is synthesized)
aaggagtaatgtaaactttgtgacagagatatttcgtcaggcatttttattaccaatttgtgaagcagcagctatgagaaaagtggtaaaagtatatcaagaatggatccaacaagagga

SEQ ID NO: 599122 - DNA, 120 bp, Artificial Sequence
  ENSG00000174373_15 (sequence is synthesized)
aaaacctttgttcatgcaagagcctgaagaaattgtgatcacttcttcagacctcccttgcattgaaaatgtcacagaccatgatatttcaatggaagaaggagaaaaaagagaagagga

SEQ ID NO: 599123 - DNA, 120 bp, Artificial Sequence
  ENSG00000174373_16 (sequence is synthesized)
aaatgggaccaatactgctgatcatgttcgaaattccagttgggcaaaaaacggctcctaccaaggtgctcttcataacgcctctgaagaagccacagaacaaaacatacgagctggtac

SEQ ID NO: 599124 - DNA, 120 bp, Artificial Sequence
  ENSG00000174373_17 (sequence is synthesized)
ccaggcagttttgcaggtgtttattataaactcatcaaatatatttcttcttgaacctgcaaatgaaataaaaaatcttctggatgaacacacagatatgtgtaaacgcattcttaacat

SEQ ID NO: 599125 - DNA, 120 bp, Artificial Sequence
  ENSG00000174373_18 (sequence is synthesized)
ttatcggtacatggttgtacaagtatcaatggacaaaaagacttgggaacagatgctgcttgtgttgctcagagtcacggaatctgtactgaagatgccatcacaagcttttctacagtt

SEQ ID NO: 599126 - DNA, 120 bp, Artificial Sequence
  ENSG00000174373_19 (sequence is synthesized)
ccaagggaaaaaaaatatgaccttggcaggtcgacttgcaggaccacttttccagacccttatagttgcctggatcaaagcaaacctaaatgtgtacatctcccgagaactttgggatga

SEQ ID NO: 599127 - DNA, 120 bp, Artificial Sequence
  ENSG00000174373_20 (sequence is synthesized)
cttactgtcagtattgtcatcgctgacctattgggaagagttggccactgagtggtcactgactatggagacattaactaaagttttagctaggaatttatatagtttggatctcagtga

SEQ ID NO: 599128 - DNA, 120 bp, Artificial Sequence
  ENSG00000174373_21 (sequence is synthesized)
tttaccattggataagctgagtgaacagaaacaaaaaaagcacaaagggaaaggagttggacatgaatttcagaaagtttcagttgacaagtcattttctagaggatggagtcgtgatca

SEQ ID NO: 599129 - DNA, 120 bp, Artificial Sequence
  ENSG00000174373_22 (sequence is synthesized)
gcctggccaagccccaatgagacagaggagtgcaacaaccactggttctccaggaaccgaaaaggcgaggagtatagtacggcaaaaaactgtcgatattgatgatgctcaaatacttcc

SEQ ID NO: 599130 - DNA, 120 bp, Artificial Sequence
  ENSG00000174373_23 (sequence is synthesized)
ccgctcaactagagtcagacatttttcacaaagtgaagaaactggaaatgaagtttttggtgctttgaatgaggagcagccattgcctcgaagtagcagcacttctgacatcttggaacc

SEQ ID NO: 599131 - DNA, 120 bp, Artificial Sequence
  ENSG00000174373_24 (sequence is synthesized)
attcactgttgaacgagccaaagtcaataaagaggacatgagccaaaaactgcctcctcttaatagtgatattggcggcagcagtgctaatgttcctgatctgatggatgagtttatagc

SEQ ID NO: 599132 - DNA, 120 bp, Artificial Sequence
  ENSG00000174373_25 (sequence is synthesized)
agaacgacttcgaagtggtaatgcctcgactatgacaagaagaggaagtagtccaggcagcctggaaattcccaaagacctccctgatattctaaacaagcagaaccagatgcgccctat

SEQ ID NO: 599133 - DNA, 120 bp, Artificial Sequence
  ENSG00000174373_26 (sequence is synthesized)
tgatgacccaggtgtgccctcagaatggacttctcctgccagtgcagggagcagtgatcttatcagctcagatagtcattcggattctttcagcgctttccaatatgatggccgaaaatt

SEQ ID NO: 599134 - DNA, 120 bp, Artificial Sequence
  ENSG00000174373_27 (sequence is synthesized)
tgacaattttggctttggaaccgacactggggttacgtcctctgctgatgtggattcaggttctggccatcatcagagtgctgaagagcaggaagtggctagtctaactactcttcatat

SEQ ID NO: 599135 - DNA, 120 bp, Artificial Sequence
  ENSG00000174373_28 (sequence is synthesized)
agattctgaaacaagcagtcttaatcagcaagctttctctgctgaagttgcaactattactggttcagaaagtgcttccccagtccactcacctctgggctccaggtcacagactccttc

SEQ ID NO: 599136 - DNA, 120 bp, Artificial Sequence
  ENSG00000174373_29 (sequence is synthesized)
cccttctacattgaatatagatcacatggaacagaaggatctgcagctcgacgagaagctccaccactctgttcttcagacaccagatgatctagaaattagtgaatttccatcagaatg

SEQ ID NO: 599137 - DNA, 120 bp, Artificial Sequence
  ENSG00000174373_30 (sequence is synthesized)
ttgtagtgtgatggcaggaggtactctgactggatggcatgctgatgttgctactgtaatgtggcgaagaatgctaggcattttgggagatgtaaattcaatcatggatcctgaaataca

SEQ ID NO: 599138 - DNA, 120 bp, Artificial Sequence
  ENSG00000174373_31 (sequence is synthesized)
tgctcaagtttttgattacctctgtgaactttggcagaatctagctaagattagagataaccttggcatttcaactgataacctgacctccccttctccaccagttttaattcctccact

SEQ ID NO: 599139 - DNA, 120 bp, Artificial Sequence
  ENSG00000174373_32 (sequence is synthesized)
tgtttctccaaatagagattttctaacacatttctacaatataatgcattgtggattacttcatattgaccaggatattgtcaatacaatcatcaaacactgctcacctcaatttttttc

SEQ ID NO: 599140 - DNA, 120 bp, Artificial Sequence
  ENSG00000174373_33 (sequence is synthesized)
acttggtttgcctggtgccacaatgcttattatggattttattgtagcagctggtagagtggcttcttcagcttttctcaatgcaccaagagtagaagcacaagttcttctgggatcttt

SEQ ID NO: 599141 - DNA, 120 bp, Artificial Sequence
  ENSG00000174373_34 (sequence is synthesized)
ggtttgctttcccaacttatattgtgaactgccttctcttcatcccaacattcctgatgttgctgtgtctcagtttacagatgttaaggaacttataatcaaaactgtattaagctcggc

SEQ ID NO: 599142 - DNA, 120 bp, Artificial Sequence
  ENSG00000174373_35 (sequence is synthesized)
aagagatgagccctctggtcctgcacgatgtgtagcactttgtagtttaggtatttggatttgtgaagaactagtccatgagtctcatcatcctcaaattaaggaagctctgaatgtgat

SEQ ID NO: 599143 - DNA, 120 bp, Artificial Sequence
  ENSG00000174373_36 (sequence is synthesized)
ttgtgtttccttaaagtttactaataaaacagtagcccacgtagcttgtaacatgcttcacatgctggttcattatgtacctagacttcagatttaccagcctgattctcccttgaaaat

SEQ ID NO: 599144 - DNA, 120 bp, Artificial Sequence
  ENSG00000174373_37 (sequence is synthesized)
tattcaaatcctaatagctaccatcacccatcttttaccaagtacagaggcttcatcttatgaaatggacaagaggttggtagtatctttacttctctgccttctggactggatcatggc

SEQ ID NO: 599145 - DNA, 120 bp, Artificial Sequence
  ENSG00000174373_38 (sequence is synthesized)
cttacctctaaagacactgctccaaccatttcatgctacgggagcagaaagcgataaaacagaaaaatctgttctcaattgcatttataaggttttacatgggtgtgtttatggagctca

SEQ ID NO: 599146 - DNA, 120 bp, Artificial Sequence
  ENSG00000174373_39 (sequence is synthesized)
gtgttttagcaatccaaggtattttcccatgagcctctctgatttggcatctgtagattatgatccttttatgcatttggaaagtctgaaagagcctgagcctctgcactctcctgactc

SEQ ID NO: 599147 - DNA, 120 bp, Artificial Sequence
  ENSG00000174373_40 (sequence is synthesized)
agaacgatcttctaaactccagccagtaacagaagtgaaaactcaaatgcagcatggattaatctctatagcagcccgcactgttattacacatctggtaaatcacctgggccattatcc

SEQ ID NO: 599148 - DNA, 120 bp, Artificial Sequence
  ENSG00000174373_41 (sequence is synthesized)
aatgagcggtggtcctgctatgctaacaagtcaggtgtgtgaaaatcacgacaatcattacagtgaaagtactgaactttctcctgaactctttgagagtccaaatatccagttctttgt

SEQ ID NO: 599149 - DNA, 120 bp, Artificial Sequence
  ENSG00000174373_42 (sequence is synthesized)
gttaaataatacaaccttagtgtcctgtatccagatcagatcagaagagaatatgcctggaggaggtttatctgctggccttgcatcagccaattcaaatgtcagaatcatagtacgtga

SEQ ID NO: 599150 - DNA, 120 bp, Artificial Sequence
  ENSG00000174373_43 (sequence is synthesized)
tctctctggaaaatattcatgggattctgctatactgtatggcccacctcctgtaagtggcttgtcagaacctacatctttcatgctttcattgtctcaccaagagaagccagaagagcc

SEQ ID NO: 599151 - DNA, 120 bp, Artificial Sequence
  ENSG00000174373_44 (sequence is synthesized)
tccgacatctaatgaatgcttagaagatataaccgtaaaagatggactttctctccagtttaaaagatttagagaaactgtaccaacttgggatacaataagagatgaagaagatgttct

SEQ ID NO: 599152 - DNA, 120 bp, Artificial Sequence
  ENSG00000174373_45 (sequence is synthesized)
tgatgagctcttgcagtatttgggtgttactagtcctgaatgcttacagagaactggaatctcacttaatattcctgctccacaacctgtgtgcatttctgaaaaacaagaaaatgatgt

SEQ ID NO: 599153 - DNA, 120 bp, Artificial Sequence
  ENSG00000174373_46 (sequence is synthesized)
tattaatgctatccttaagcaacatacagaagaaaaagaatttgttgagaagcactttaatgacttaaacatgaaagctgtggaacaagatgaaccaatacctcaaaaacctcagtcagc

SEQ ID NO: 599154 - DNA, 120 bp, Artificial Sequence
  ENSG00000174373_47 (sequence is synthesized)
attttattattgcagattgcttcttagtatattgggaatgaattcctgggacaaacggaggagctttcatctcctgaagaaaaatgaaaagctacttagagaacttaggaacttggattc

SEQ ID NO: 599155 - DNA, 120 bp, Artificial Sequence
  ENSG00000174373_48 (sequence is synthesized)
aaggcagtgccgagagacacacaagattgcagtattttatgttgctgaaggacaagaagacaaacactccattctcaccaatacaggaggaagtcaagcatatgaagattttgtagctgg

SEQ ID NO: 599156 - DNA, 120 bp, Artificial Sequence
  ENSG00000174373_49 (sequence is synthesized)
tcttggttgggaggtaaatcttacaaaccattgtggttttatgggaggactacaaaaaaacaaaagcactggattgaccactccatattttgctacctctacagtagaggtaatatttca

SEQ ID NO: 599157 - DNA, 120 bp, Artificial Sequence
  ENSG00000174373_50 (sequence is synthesized)
cgtgtcaacaagaatgccttctgattctgatgattctttgaccaaaaaattgagacatttgggaaatgatgaagtgcacattgtttggtcagagcatactagagactacaggagaggaat

SEQ ID NO: 599158 - DNA, 120 bp, Artificial Sequence
  ENSG00000174373_51 (sequence is synthesized)
tattcccacagaatttggtgatgtccttattgtaatatatccaatgaaaaatcacatgttcagtattcagataatgaaaaaaccagaggttcccttctttggtcccctttttgatggtgc

SEQ ID NO: 599159 - DNA, 120 bp, Artificial Sequence
  ENSG00000174373_52 (sequence is synthesized)
tattgtgaatggaaaggttctacccattatggttagagcaacagctataaatgcaagccgtgctctgaaatctctgattccattgtatcaaaacttctatgaggagagagcacgatacct

SEQ ID NO: 599160 - DNA, 120 bp, Artificial Sequence
  ENSG00000174373_53 (sequence is synthesized)
gcaaacaattgtccagcaccacttagaaccaacaacatttgaagattttgcagcacaggttttttctccagctccctaccaccatttaccatctgatgccggctcctacccagagattct

SEQ ID NO: 599161 - DNA, 120 bp, Artificial Sequence
  ENSG00000174373_54 (sequence is synthesized)
acccagtgaaactcccacagcaacgcaggtagatggggctgacctggcctctccaatgtctcctcgaactagcaaaagccgcatgtccatgaagctgcgtcgttcctctggctcagccaa

SEQ ID NO: 599162 - DNA, 120 bp, Artificial Sequence
  ENSG00000174373_55 (sequence is synthesized)
taaatcctaaggagacaagcagcccagcagtgatcagcagtagccaccttagcacgaacatagggttaaccctttcaggccttcatgtctgccataacatgcatgtttcttcctgtacat

SEQ ID NO: 599163 - DNA, 120 bp, Artificial Sequence
  ENSG00000174373_56 (sequence is synthesized)
ttatttgagaaaacactggatttaaataattttaaataatttgtagcttaatattaaagatttaagttatttattgtttcattttttttcccacaatccaagctgccatattttgagggc

SEQ ID NO: 599164 - DNA, 120 bp, Artificial Sequence
  ENSG00000174373_57 (sequence is synthesized)
agggggagttttattctacaccctttaccttcctagataattatgtctaagtagttttatctttaatttcatggttaactgtgagccaaaatacaattggacaattagtctcattattta

SEQ ID NO: 599165 - DNA, 120 bp, Artificial Sequence
  ENSG00000174373_58 (sequence is synthesized)
ttgtgccccattgcaactttatggttcaataaatatataattttttacaaatgtaaaattttacatttaagcatttgtaaagttacagcaaaagatgtacctgttaatacacagaatgtg

SEQ ID NO: 599166 - DNA, 120 bp, Artificial Sequence
  ENSG00000174373_59 (sequence is synthesized)
tacagattatttgttatgacaataaaacactcaaaataaatggtctttagcatctcaaattccaactgaaatcattttagtattaactcttcttcccaaagcaatgtctcatttcttggc

SEQ ID NO: 599167 - DNA, 120 bp, Artificial Sequence
  ENSG00000174373_60 (sequence is synthesized)
tgtgcaggtgatgccatgttatatccaataactagaaaaatcactgtgctgaacttttatgtttagcttccaagtatttttctaatgttttgcatttcaagtggtatcactgttaaatgc

SEQ ID NO: 599168 - DNA, 120 bp, Artificial Sequence
  ENSG00000174373_61 (sequence is synthesized)
catttgttttcagattgtggccttttattattggctgctagatcctggtgtttctatgttcttttttaagcaccaaaaagaagatggggaagaaaagaaggaaaattttctgatataaat

SEQ ID NO: 599169 - DNA, 120 bp, Artificial Sequence
  ENSG00000174373_62 (sequence is synthesized)
atgttgttcaaattatgagtattatttaaaaaagaaaaaggaacataacccaggagtctaagttaaatctaatattgttaatactgaacttgcaggtccaggttggtatacattccaccc

SEQ ID NO: 599170 - DNA, 120 bp, Artificial Sequence
  ENSG00000174373_63 (sequence is synthesized)
tctagaagtattttcttacagtagataagctgctcacattttgttttgaatgggcatctcctgaggaaatgtagcatgacattggtactaactgcatgtgtaaatacatcatactggcaa

SEQ ID NO: 599171 - DNA, 120 bp, Artificial Sequence
  ENSG00000174373_64 (sequence is synthesized)
accgtaaaatataaattatgtatcatcattcatgtagtatctataatttgtaacagtgggggggaaagatgacatggtatttaataatacaataaaaatattcttatcacttcctatcca

SEQ ID NO: 599172 - DNA, 120 bp, Artificial Sequence
  ENSG00000174373_65 (sequence is synthesized)
tccattggtgaatgtgctctgccatcggcctatatacgcagtgctaaaagtgctcctgttctgatccatacttccaaacccttcttgcctgatattgttctcactcccctttctgatgag

SEQ ID NO: 599173 - DNA, 120 bp, Artificial Sequence
  ENSG00000174373_66 (sequence is synthesized)
tcaaatgtccagtacctgttgcaaagtaggaaagccaaaactaagtggaatggaattgatgaattgattggttctgctaatgcagttgcctttcgttataataaaacattataaaacctt

SEQ ID NO: 599174 - DNA, 120 bp, Artificial Sequence
  ENSG00000174373_67 (sequence is synthesized)
gcgtcagtgtcaggagatcataaataaggcatcttacatttgattatatatgattattgtaaatattttggacttttctaagtcctttggaaatttgttaatgtaacttttttcttgttc

SEQ ID NO: 599175 - DNA, 120 bp, Artificial Sequence
  ENSG00000174373_68 (sequence is synthesized)
ttaaagatatttgttgtctgagttttattcattttattatagttgattagagtcctcaaattagttattgcattattttcaagtattgtattatcatttattgatattggtagtgtttcc

SEQ ID NO: 599176 - DNA, 120 bp, Artificial Sequence
  ENSG00000174373_69 (sequence is synthesized)
taaaacaggaaatacataatttggcatccttattcttagttttatacctaaagaacctagtaactcacaggagaacgtagtaacattatcacttgttaatcaagctttcagtgaaacagt

SEQ ID NO: 599177 - DNA, 120 bp, Artificial Sequence
  ENSG00000174373_70 (sequence is synthesized)
ttatcaaaccattttttttattttgattcagcaaatttgtcaactaaatttaatttaaaagtagaggtccaaatgaatattttcaagtaaatgttaaaaagtgacttgggaaacctaagt

SEQ ID NO: 599178 - DNA, 120 bp, Artificial Sequence
  ENSG00000174373_71 (sequence is synthesized)
aactgccaagttttttttaaagttatttttgctagattttgtataatgtaacaaacatcagacaaatatgcacatttatggcatatgcaaatatgccataaattggtcaaagacacagtt

SEQ ID NO: 599179 - DNA, 120 bp, Artificial Sequence
  ENSG00000174373_72 (sequence is synthesized)
aatgagatatttacaatgaatgaaaagctagttttcattgataaggtagcacatttattctctgacgaaaggaagaaatttaaaactatataacttctaaacttcttttaagaaacccgt

SEQ ID NO: 599180 - DNA, 89 bp, Artificial Sequence
  ENSG00000174373_73 (sequence is synthesized)
tgcccaggctggtcttaagcttctgaggattacgggtgtgagccaccacacccggcccaagggacccattcgttaacttgcaattgcct

SEQ ID NO: 599181 - DNA, 120 bp, Artificial Sequence
  ENSG00000174373_74 (sequence is synthesized)
acccggcccaagggacccattcgttaacttgcaattgccttgtaattatatagccctaattttctggtttgtggattatttctgaccttttctttttctcctttgatctgcagttgttta

SEQ ID NO: 599182 - DNA, 120 bp, Artificial Sequence
  ENSG00000174373_75 (sequence is synthesized)
tttgtttacagttatttccccaacatttggaaaaaaacttcagttatagaagtgtttcaaggctagtaaaatgaatgcacataaaccctttatataaattcatcaattaatattttgcca

SEQ ID NO: 599183 - DNA, 120 bp, Artificial Sequence
  ENSG00000174373_76 (sequence is synthesized)
ctttgtctatatttacacacagcacatatatgcacaaaatagcctgcccttcccacatgtctccctaaccttttatttttgctgaggcatgtaagaggaaattgcaaatatcagatcctt

SEQ ID NO: 599184 - DNA, 120 bp, Artificial Sequence
  ENSG00000174373_77 (sequence is synthesized)
cagacctaaacatgtcagtggatatgtcctaataagtgtatgttttctgcgtaaccacaatataatggccatattcatgatatttaacatagatacattgctgttattttagtctatagt

SEQ ID NO: 599185 - DNA, 120 bp, Artificial Sequence
  ENSG00000174373_78 (sequence is synthesized)
tagtcgtaagtcctcaattgtcccaataatgccctttatagctaccccacaccgtcagcaatccaataaagaatttaatcaggctgggcaccgtggctcacgcctgtcatcccagcactt

SEQ ID NO: 599186 - DNA, 120 bp, Artificial Sequence
  ENSG00000174373_79 (sequence is synthesized)
tcccagctactcggtaggctgaggcaggaaaattacttaaacctgggatgtggaggttgcagtgaactgaggtcgtgctgccactgtactccaacctgggtaacagagtgagactgtctc

SEQ ID NO: 599187 - DNA, 120 bp, Artificial Sequence
  ENSG00000174373_80 (sequence is synthesized)
tttgtgtttcatatgtaaaactgatcaagtgcaatttaacaattttttaatttcgtttttcccctttttatgttgtatgtgactgtatgactgtactcaaagagcttttaaagcagtata

SEQ ID NO: 599188 - DNA, 120 bp, Artificial Sequence
  ENSG00000174373_81 (sequence is synthesized)
aaatctcagggggtacttactggctaatccatttctgtccttttatgaatttttttatcctgtgatcagatttattacagaatgcttttaatttgttgtgtttaaaaatatttaatttca

SEQ ID NO: 599189 - DNA, 120 bp, Artificial Sequence
  ENSG00000174373_82 (sequence is synthesized)
acctttagtttatgtatacattttcaaaactacatttcattaagttaaatatgtctctagtatgttgtttctttatattattaaaaaacattttcgagttgtagttagtgatttccatcc

SEQ ID NO: 599190 - DNA, 120 bp, Artificial Sequence
  ENSG00000174373_83 (sequence is synthesized)
ttaatttgggaatgtaggttttggctttttagttcagtaactcaacattttcaacacttaaaagtatggagactattttttaaatagcatttatttaacattaatataatgcagcataag

SEQ ID NO: 599191 - DNA, 120 bp, Artificial Sequence
  ENSG00000174373_84 (sequence is synthesized)
agacagttataaatttagggagatttctttttagattgctgggtgttgggagttggcagttgttgaaatgaaatttatagtagattctaatgattgcatgaattgcttttacaagtagta

SEQ ID NO: 599192 - DNA, 120 bp, Artificial Sequence
  ENSG00000174373_85 (sequence is synthesized)
ttatctattaaaaaaagcatgcgattttaaatgttgcttgtttttaagtaatttttttaagaattgaatgtctgattttgaagtcacacactaaacacattttattgttatttctgatat

SEQ ID NO: 599193 - DNA, 120 bp, Artificial Sequence
  ENSG00000174373_86 (sequence is synthesized)
gaacgagccaaagaggcagaacagaatgccaccagaggctccactgagggatctgtacagtcatgtaatgggctattttggaaggaaagctgcagtgatattggcggcagcagtgctaat

SEQ ID NO: 599194 - DNA, 120 bp, Artificial Sequence
  ENSG00000174373_87 (sequence is synthesized)
cttgtccccccacaatcaggagataaagggcaagaagatctcacaagctattttcttgaagcacttctaaaatacatagtcattcagagagcagctgctagtttagtatccagagaagaa

SEQ ID NO: 599195 - DNA, 120 bp, Artificial Sequence
  ENSG00000174373_88 (sequence is synthesized)
ttcaataactagatccactgaaagccacatcactgatactcatagtagagagtcttctctggaagttggtgatagcatatatgaccatctttgtcatttaataggtccagtagaacttgc

SEQ ID NO: 599196 - DNA, 120 bp, Artificial Sequence
  ENSG00000174373_89 (sequence is synthesized)
agattcagcttttgaacaaatccagtacattgaccttgaaggagatgatgatcttctttccaccctgaaagaatattttaaggaaaaccaggaaaatcatagtaaaaatgagacagggaa

SEQ ID NO: 599197 - DNA, 120 bp, Artificial Sequence
  ENSG00000174373_90 (sequence is synthesized)
agacccagcttctcaggaagtgactattgcagtaaataggggtgaaagattatccttagataaattagaatgcacagatcaggaaactgaatcagaaaatatcacctcttttgttgggac

SEQ ID NO: 599198 - DNA, 120 bp, Artificial Sequence
  ENSG00000174373_91 (sequence is synthesized)
tcctgaaaacctacagtttcagaaagaaccaaactcagctgtcttcatgagtaatatcgcacctaaccagtcagacagtttttttagaacacaaacttctgaaaaatctaagcaactaaa

SEQ ID NO: 599199 - DNA, 120 bp, Artificial Sequence
  ENSG00000174373_92 (sequence is synthesized)
cactgataaacagccatcagagcctagtttagatagcccttgtgataaagaaaaaaggaaacatctgtacagacaagcagccacagaattagatgcttgtgttgatgtaacactagttga

SEQ ID NO: 599200 - DNA, 120 bp, Artificial Sequence
  ENSG00000174373_93 (sequence is synthesized)
aaagcttaagagtgtgcaaattaatgaaaaaatcactgtcccacatgttatgcgtgccaagaaagcaacactaaaagcacctgttaaccgcagaatgcctcatgttacaagtactagcaa

SEQ ID NO: 599201 - DNA, 120 bp, Artificial Sequence
  ENSG00000174373_94 (sequence is synthesized)
actttctccaactaaaaggagcttgtctgaaacagtaactcatagagccaaaatcatgaaaattgctactaaaaaacgaaatagtgttcatgttacttttaggccatccactgagtccgt

SEQ ID NO: 599202 - DNA, 120 bp, Artificial Sequence
  ENSG00000174373_95 (sequence is synthesized)
tcagttttataatcctctggaaaacaaagaggctccatggaagatgagactgcggaagctcggtggctttagtagtggtagcagcaatagcagcactagcaacacccataccagcacaaa

SEQ ID NO: 599203 - DNA, 120 bp, Artificial Sequence
  ENSG00000174373_96 (sequence is synthesized)
tagtgctacagagctagtaaaacctggtgtgtacagacctctagatacacttggtactgcatcagtaagcagcaaaacagtgaaggaatccacagagattcccaccaccatattacaaaa

SEQ ID NO: 599204 - DNA, 120 bp, Artificial Sequence
  ENSG00000174373_97 (sequence is synthesized)
agaaggaattgcaagtagtcaattaggtagtcgtagtactcttaggtcatcaagtcatgaggcaggactacagcagggctccctgggtggcgtttataaaactgttgtacatgctctttc

SEQ ID NO: 599205 - DNA, 120 bp, Artificial Sequence
  ENSG00000174373_98 (sequence is synthesized)
gaagccgaaggcaaatgtttccccacagaggcagaacagaatgccaccagaggctccactgagggatctgtacagtcatgtaatgggctattttggaaggaaagctgcagtcaataaaga

SEQ ID NO: 599206 - DNA, 83 bp, Artificial Sequence
  ENSG00000174373_99 (sequence is synthesized)
tttataaggaaggcttttatctttaatattaaacatactgatttttagctgggaacagtggtgtgtacctttagttgtagttg

SEQ ID NO: 599207 - DNA, 120 bp, Artificial Sequence
  ENSG00000174373_100 (sequence is synthesized)
aaaactgtcggctaatgaagaaaagccatatgatcacatcaatagatgcagaaaaaacatttggcaaaatccaacacccatttaggataaaaactctcagcaaagtaggaataaggagaa

SEQ ID NO: 599208 - DNA, 120 bp, Artificial Sequence
  ENSG00000174373_101 (sequence is synthesized)
cttcctcaacttgataaatctattaaaaaataaaaacacaggacaacttacctctagcatcatacttaatggtgagaaactaggtttttttctgctgagatccacaacaaggcaaggata

SEQ ID NO: 599209 - DNA, 120 bp, Artificial Sequence
  ENSG00000174373_102 (sequence is synthesized)
tctcactattcctgtaagacaggaaaaggaaataaaaggtctacagattgagaagaaataaataaagctatctttgtagatgacatgattatttatgtggaaaatttcaaagtgacaacc

SEQ ID NO: 599210 - DNA, 120 bp, Artificial Sequence
  ENSG00000174373_103 (sequence is synthesized)
tcctgaaactaataagcaattatagcaaggttataggatgccagattaatatataaaagtcagtcgctccttccataccagcaatgaacaactggaatgtgaaactgaaagcacagtacc

SEQ ID NO: 599211 - DNA, 120 bp, Artificial Sequence
  ENSG00000174373_104 (sequence is synthesized)
atttacattagcatcaaaaatctccaaaacaattaggtataaatctagcaaaatatttacaagatctatatgaggaaaactatgaaactttgatgaaagaaatcaaagaataaataagtt

SEQ ID NO: 599212 - DNA, 120 bp, Artificial Sequence
  ENSG00000174373_105 (sequence is synthesized)
gagaggtctagttcatgtacatggatagaaaaactcactattggcaagatgtcattttttccctacttaatctgtagattcaacacaatctcagttgattttgttcttaacaagttattt

SEQ ID NO: 599213 - DNA, 120 bp, Artificial Sequence
  ENSG00000174373_106 (sequence is synthesized)
tgtggatattgacagaatctaaaatttatatagaaaggcagagcatgagcaacatggcaaaacctgtctctacaaaaaatacaaaaactagttggatgtggtgtcatgtgcctgtagtcc

SEQ ID NO: 599214 - DNA, 84 bp, Artificial Sequence
  ENSG00000174373_107 (sequence is synthesized)
tgtagtcccagctacttgggagcctgagatgggaggattgcttaagttcctgcactctctagcctgggtaacacagcaagatct

SEQ ID NO: 599215 - DNA, 120 bp, Artificial Sequence
  ENSG00000174373_108 (sequence is synthesized)
tttatgtaacaatgaaggggagaaaagacattagtttcttgacctgaggtccactgggttaagcttcagaggactctgtgaacttgtagtattttatgcaatattttgtatatatatgca

SEQ ID NO: 599216 - DNA, 120 bp, Artificial Sequence
  ENSG00000174373_109 (sequence is synthesized)
ctagaacattttctgcaggattaaaaaaaaattttaatgggaacataatagatgtatatgtatatggagtacatgagatagttggagtgatttttaaaataaataaaaaagttaaaagta

SEQ ID NO: 599217 - DNA, 120 bp, Artificial Sequence
  ENSG00000174373_110 (sequence is synthesized)
gttaggaagtactgataactatacaccacacacactaaaaatccttatttgactctgttgagtgaagggagatttcactttaaaggcagtgaggaagacatggaagaattgtttttgagg

SEQ ID NO: 599218 - DNA, 120 bp, Artificial Sequence
  ENSG00000174373_111 (sequence is synthesized)
aaaatattatttgagtttgccataatgtagagcaatgctctctgataaagccctccttctatggtgatggaaatgttctatatctgcactgtctaatgtggaagccgctaactacatgtg

SEQ ID NO: 599219 - DNA, 120 bp, Artificial Sequence
  ENSG00000174373_112 (sequence is synthesized)
gctgttgaacaattgaaatgtggctagtgtactgaggaactgaatttttatttaattcattttaattcaataaatttaaacttaatgtggctgtggctaccacattggacaatgcagctc

SEQ ID NO: 599220 - DNA, 120 bp, Artificial Sequence
  ENSG00000174373_113 (sequence is synthesized)
tagagattttatgtctgagtgattaggataacatgccaacagtacagtgaacactttaaaaggtagatatttacagaatctctcatagaccttttttcttcttttcttttttcctatttg

SEQ ID NO: 599221 - DNA, 120 bp, Artificial Sequence
  ENSG00000174405_0 (sequence is synthesized)
ccacagcgctgtagactgcgccgcattagaagcctggcctcctgatgctgtgctcttcatctagacccaagccccaggtcgtgggacgatttctcccgtttttgactccctggaactgta

SEQ ID NO: 599222 - DNA, 120 bp, Artificial Sequence
  ENSG00000174405_1 (sequence is synthesized)
ttgcctgctttacctgcgtacatgttgattctttctcatggcaaccccgcaggaaaccatcaagatctcattttacagctgggattctctggttcacagaggtaacggagcttgcccgag

SEQ ID NO: 599223 - DNA, 120 bp, Artificial Sequence
  ENSG00000174405_2 (sequence is synthesized)
gccagttaaacgagaagattcatcaccgctttgatggctgcctcacaaacttcacaaactgttgcatctcacgttccttttgcagatttgtgttcaactttagaacgaatacagaaaagt

SEQ ID NO: 599224 - DNA, 120 bp, Artificial Sequence
  ENSG00000174405_3 (sequence is synthesized)
aaaggacgtgcagaaaaaatcagacacttcagggaatttttagattcttggagaaaatttcatgatgctcttcataagaaccacaaagatgtcacagactctttttatccagcaatgaga

SEQ ID NO: 599225 - DNA, 120 bp, Artificial Sequence
  ENSG00000174405_4 (sequence is synthesized)
ctaattcttcctcagctagaaagagagagaatggcctatggaattaaagaaactatgcttgctaagctttatattgagttgcttaatttacctagagatggaaaagatgccctcaaactt

SEQ ID NO: 599226 - DNA, 120 bp, Artificial Sequence
  ENSG00000174405_5 (sequence is synthesized)
ttaaactacagaacacccactggaactcatggagatgctggagactttgcaatgattgcatattttgtgttgaagccaagatgtttacagaaaggaagtttaaccatacagcaagtaaac

SEQ ID NO: 599227 - DNA, 120 bp, Artificial Sequence
  ENSG00000174405_6 (sequence is synthesized)
gaccttttagactcaattgccagcaataattctgctaaaagaaaagacctaataaaaaagagccttcttcaacttataactcagagttcagcacttgagcaaaagtggcttatacggatg

SEQ ID NO: 599228 - DNA, 120 bp, Artificial Sequence
  ENSG00000174405_7 (sequence is synthesized)
atcataaaggatttaaagcttggtgttagtcagcaaactatcttttctgtttttcataatgatgctgctgagttgcataatgtcactacagatctggaaaaagtctgtaggcaactgcat

SEQ ID NO: 599229 - DNA, 120 bp, Artificial Sequence
  ENSG00000174405_8 (sequence is synthesized)
gatccttctgtaggactcagtgatatttctatcactttattttctgcatttaaaccaatgctagctgctattgcagatattgagcacattgagaaggatatgaaacatcagagtttctac

SEQ ID NO: 599230 - DNA, 120 bp, Artificial Sequence
  ENSG00000174405_9 (sequence is synthesized)
atagaaaccaagctagatggtgaacgtatgcaaatgcacaaagatggagatgtatataaatacttctctcgaaatggatataactacactgatcagtttggtgcttctcctactgaaggt

SEQ ID NO: 599231 - DNA, 120 bp, Artificial Sequence
  ENSG00000174405_10 (sequence is synthesized)
tctcttaccccattcattcataatgcattcaaagcagatatacaaatctgtattcttgatggtgagatgatggcctataatcctaatacacaaactttcatgcaaaagggaactaagttt

SEQ ID NO: 599232 - DNA, 120 bp, Artificial Sequence
  ENSG00000174405_11 (sequence is synthesized)
gatattaaaagaatggtagaggattctgatctgcaaacttgttattgtgtttttgatgtattgatggttaataataaaaagctagggcatgagactctgagaaagaggtatgagattctt

SEQ ID NO: 599233 - DNA, 120 bp, Artificial Sequence
  ENSG00000174405_12 (sequence is synthesized)
agtagtatttttacaccaattccaggtagaatagaaatagtgcagaaaacacaagctcatactaagaatgaagtaattgatgcattgaatgaagcaatagataaaagagaagagggaatt

SEQ ID NO: 599234 - DNA, 120 bp, Artificial Sequence
  ENSG00000174405_13 (sequence is synthesized)
atggtaaaacaacctctatccatctacaagccagacaaaagaggtgaagggtggttaaaaattaaaccagagtatgtcagtggactaatggatgaattggacattttaattgttggagga

SEQ ID NO: 599235 - DNA, 120 bp, Artificial Sequence
  ENSG00000174405_14 (sequence is synthesized)
tattggggtaaaggatcacggggtggaatgatgtctcattttctgtgtgcagtagcagagaagccccctcctggtgagaagccatctgtgtttcatactctctctcgtgttgggtctggc

SEQ ID NO: 599236 - DNA, 120 bp, Artificial Sequence
  ENSG00000174405_15 (sequence is synthesized)
tgcaccatgaaagaactgtatgatctgggtttgaaattggccaagtattggaagccttttcatagaaaagctccaccaagcagcattttatgtggaacagagaagccagaagtatacatt

SEQ ID NO: 599237 - DNA, 120 bp, Artificial Sequence
  ENSG00000174405_16 (sequence is synthesized)
gaaccttgtaattctgtcattgttcagattaaagcagcagagatcgtacccagtgatatgtataaaactggctgcaccttgcgttttccacgaattgaaaagataagagatgacaaggag

SEQ ID NO: 599238 - DNA, 120 bp, Artificial Sequence
  ENSG00000174405_17 (sequence is synthesized)
ccctggacgacctagaacaacttagggggaaggcatctggtaagctcgcatctaaacacctttatataggtggtgatgatgaaccacaagaaaaaaagcggaaagctgccccaaagatga

SEQ ID NO: 599239 - DNA, 120 bp, Artificial Sequence
  ENSG00000174405_18 (sequence is synthesized)
agaaagttattggaattattgagcacttaaaagcacctaaccttactaacgttaacaaaatttctaatatatttgaagatgtagagttttgtgttatgagtggaacagatagccagccaa

SEQ ID NO: 599240 - DNA, 120 bp, Artificial Sequence
  ENSG00000174405_19 (sequence is synthesized)
agcctgacctggagaacagaattgcagaatttggtggttatatagtacaaaatccaggcccagacacgtactgtgtaattgcagggtctgagaacatcagagtgaaaaacataattttgt

SEQ ID NO: 599241 - DNA, 120 bp, Artificial Sequence
  ENSG00000174405_20 (sequence is synthesized)
caaataaacatgatgttgtcaagcctgcatggcttttagaatgttttaagaccaaaagctttgtaccatggcagcctcgctttatgattcatatgtgcccatcaaccaaagaacattttg

SEQ ID NO: 599242 - DNA, 120 bp, Artificial Sequence
  ENSG00000174405_21 (sequence is synthesized)
cccgtgaatatgattgctatggtgatagttatttcattgatacagacttgaaccaactgaaggaagtattctcaggaattaaaaattctaacgagcagactcctgaagaaatggcttctc

SEQ ID NO: 599243 - DNA, 120 bp, Artificial Sequence
  ENSG00000174405_22 (sequence is synthesized)
tgattgctgatttagaatatcggtattcctgggattgctctcctctcagtatgtttcgacgccacaccgtttatttggactcgtatgctgttattaatgacctgagtaccaaaaatgagg

SEQ ID NO: 599244 - DNA, 120 bp, Artificial Sequence
  ENSG00000174405_23 (sequence is synthesized)
ggacaaggttagctattaaagccttggagcttcggtttcatggagcaaaagtagtttcttgtttagctgagggagtgtctcatgtaataattggggaagatcatagtcgtgttgcagatt

SEQ ID NO: 599245 - DNA, 120 bp, Artificial Sequence
  ENSG00000174405_24 (sequence is synthesized)
ttaaagcttttagaagaacttttaagagaaagtttaaaatcctaaaagaaagttgggtaactgattcaatagacaagtgtgaattacaagaagaaaaccagtatttgatttaaagctagg

SEQ ID NO: 599246 - DNA, 120 bp, Artificial Sequence
  ENSG00000174405_25 (sequence is synthesized)
tttcctagtgaggaaagcctctgatctggcagactcattgcagcaggtggtaatgataaaatactaaactacattttatttttgtatcttaaaaatctatgcctaaaaagtatcattaca

SEQ ID NO: 599247 - DNA, 120 bp, Artificial Sequence
  ENSG00000174405_26 (sequence is synthesized)
tataggaaaacaataattttaacttttaaggttgaaaagacaatagcccaaagccaagaaagaaaaattatcttgaatgtagtattcaatgattttttatgatcaaggtgaaataaacag

SEQ ID NO: 599248 - DNA, 120 bp, Artificial Sequence
  ENSG00000174405_27 (sequence is synthesized)
acagtctaaagaagaggtgtttttataatatccatatagaaatctagaatttttacttagatactaataaaatacatttagaaacttttaaagtcatgaaaaagcattaaccttctaaac

SEQ ID NO: 599249 - DNA, 120 bp, Artificial Sequence
  ENSG00000174405_28 (sequence is synthesized)
tattctaaaaagtcaaaacgttaacaatagtttttatctaataaaagcactgcaagaaaatagggtagaattgttacagctggacttgtaaaaatatgtctttttactcagggtttaaaa

SEQ ID NO: 599250 - DNA, 120 bp, Artificial Sequence
  ENSG00000174405_29 (sequence is synthesized)
tgtcccatttaaatatgaaatgtaaacaaatttgttttttaaggttaaggccaaatgtaacaataaaaccctgtcgatggttttagctaaattagaggaagttgtatgagacttaatgat

SEQ ID NO: 599251 - DNA, 120 bp, Artificial Sequence
  ENSG00000174405_30 (sequence is synthesized)
ctaaaaacttaaaattgaattggtttgattaaaaataaagcttgcaattttaaaagtagctcacatttaatttcttgtgtgaaatagaacatgctttaaaggaagtatttttatgtgaat

SEQ ID NO: 599252 - DNA, 120 bp, Artificial Sequence
  ENSG00000174405_31 (sequence is synthesized)
ttgcattccagtataaatagtattcacaaaaaagattttcctagattttatctattgaataggtgtcaatatggcatgcatattgtaactttcattagaaataagttgctttgactttta

SEQ ID NO: 599253 - DNA, 120 bp, Artificial Sequence
  ENSG00000174405_32 (sequence is synthesized)
aaaatgacatagttagattatttaaagtcaatgtatatagtatatattatgtatggatttatataccaaattttggaatacagcctatctcatgaccatattgaaatgtacggaatttga

SEQ ID NO: 599254 - DNA, 120 bp, Artificial Sequence
  ENSG00000174405_33 (sequence is synthesized)
tccatgcgatactatgtgtgcattatttgaaagttattggaaattttattcaaaccgtggaacaaatgtatgtgattttgttatacttcttaatttaaataaaatatttaatgcactatt

SEQ ID NO: 599255 - DNA, 120 bp, Artificial Sequence
  ENSG00000174405_34 (sequence is synthesized)
gccagtgagcccccgcgacggtggcccggacggaaaagatacctcggcggcgtgggcccggctccctgctccaggacctagggatcttggccttccaccctcctccgagcaccaggactc

SEQ ID NO: 599256 - DNA, 120 bp, Artificial Sequence
  ENSG00000174405_35 (sequence is synthesized)
agcttccggcttagcggctgagcttcaggcttgacgtcaggaaaccatcaagatctcattttacagctgggattctctggttcacagaggtaacggagcttgcccgaggccagatttgtg

SEQ ID NO: 599257 - DNA, 120 bp, Artificial Sequence
  ENSG00000174417_0 (sequence is synthesized)
gggggatggaactgctgcaataaaggtgggcgctggaaagaagatgttttgagaagtcagtgtttccgagaaactttaagcttctaaagatggaaaacgagacagtcagtgaactgaacc

SEQ ID NO: 599258 - DNA, 120 bp, Artificial Sequence
  ENSG00000174417_1 (sequence is synthesized)
aaacacagcttcagccacgagcagtggtggccttagaataccaggtggtcaccatcttacttgtactcattatttgtggcctgggcattgtaggcaacatcatggtagtcctggttgtca

SEQ ID NO: 599259 - DNA, 120 bp, Artificial Sequence
  ENSG00000174417_2 (sequence is synthesized)
tgagaaccaagcacatgaggacccccacaaactgctacctggtgagcctggcagtagctgatctcatggtcttggtggccgcaggcctccccaacataacagacagtatctacggttcct

SEQ ID NO: 599260 - DNA, 120 bp, Artificial Sequence
  ENSG00000174417_3 (sequence is synthesized)
gggtctatggctatgttggatgcctctgcattacttacctccagtatttgggaattaatgcatcctcttgttcaataacagcctttaccattgagaggtacatagcaatctgtcacccca

SEQ ID NO: 599261 - DNA, 120 bp, Artificial Sequence
  ENSG00000174417_4 (sequence is synthesized)
tcaaagcccagtttctctgcacattttccagagccaaaaagattatcatctttgtctgggctttcacatctctttactgtatgctctggttcttcttgctggatctcaatattagcacct

SEQ ID NO: 599262 - DNA, 120 bp, Artificial Sequence
  ENSG00000174417_5 (sequence is synthesized)
ccaatgatcctggctaccgtcctctatggattcatagctagaatccttttcttaaatcccattccttcagatcctaaagaaaactctaagacatggaaaaatgattcaacccatcagaac

SEQ ID NO: 599263 - DNA, 120 bp, Artificial Sequence
  ENSG00000174417_6 (sequence is synthesized)
acaaatctgaatgtaaatacctctaatagatgtttcaacagcacagtatcttcaaggaagcaggtcaccaagatgctggcagtggttgtaattctgtttgcccttttatggatgccctac

SEQ ID NO: 599264 - DNA, 120 bp, Artificial Sequence
  ENSG00000174417_7 (sequence is synthesized)
aggactctagtggttgtcaactcatttctctccagtcctttccaagaaaattggtttttgctcttttgcagaatttgcatttatctcaacagtgccatcaacccggtgatttacaatctc

SEQ ID NO: 599265 - DNA, 120 bp, Artificial Sequence
  ENSG00000174417_8 (sequence is synthesized)
atgtcccagaaattccgtgcagccttcagaaagctctgcaactgcaagcagaagccaacagagaaacctgctaactacagtgtggccctaaattacagcgtcatcaaggagtcagaccat

SEQ ID NO: 599266 - DNA, 120 bp, Artificial Sequence
  ENSG00000174417_9 (sequence is synthesized)
ttcagcacagagcttgatgatatcactgtcactgacacttacctgtctgccacaaaagtgtcttttgatgacacctgcttggcttctgaggtatcctttagccaaagttgattcatgaat

SEQ ID NO: 599267 - DNA, 120 bp, Artificial Sequence
  ENSG00000174417_10 (sequence is synthesized)
tagaagaaaatggatgacaaagaaaatgagaatctgtgcagtcatcaacaaaagggagaacatggccaatagtcatatgtgaagacagagcagatcagtctttgtcaatgctctaacaaa

SEQ ID NO: 599268 - DNA, 120 bp, Artificial Sequence
  ENSG00000174417_11 (sequence is synthesized)
tgttctcattaggggacgatctatgatttgacagcctcactgctgctgctcctgctgctgcttctgcttctgccgcggctgtatggtttgtcattagttggaaagggctgtgagggtttg

SEQ ID NO: 599269 - DNA, 120 bp, Artificial Sequence
  ENSG00000174417_12 (sequence is synthesized)
gagaaactgcagttttaaagactgagcactgctaagtggtctccctctcaaatagagtagacaagattttctgcaagattagaaacttggaactattaccacttcatctacccagaaaat

SEQ ID NO: 599270 - DNA, 120 bp, Artificial Sequence
  ENSG00000174428_0 (sequence is synthesized)
aaaagggggggaaagaaagaaagagaaaaaggagggcgagtggcgagcaggggcctcggccgccacccacacgccccgaagcgtgctcgtcccccgcgcggggctcccggccgccgccct

SEQ ID NO: 599271 - DNA, 120 bp, Artificial Sequence
  ENSG00000174428_1 (sequence is synthesized)
cggccatcggctgctccccggtggcccaggcctcggactccgcggccggcccggcgcggcccagcgccctcaggtgtataccaaggactggaattgatgggccaagctttgtgttttaag

SEQ ID NO: 599272 - DNA, 120 bp, Artificial Sequence
  ENSG00000174428_2 (sequence is synthesized)
gaaaaaaaaatcatgttttagtttcgtgctggtaatttgaagtaagcagatgtctagatataagcttggaaactggccagttggagattgctcacggctgcaattgaagactccagcagc

SEQ ID NO: 599273 - DNA, 120 bp, Artificial Sequence
  ENSG00000174428_3 (sequence is synthesized)
ctcttctcctctttgcttccatttggagaggaaggcgtcataggctgtgtgacttccgtggacgcggggcttggcaccggcttgcagttgggatcaatcttcagtggcggtttggagtgg

SEQ ID NO: 599274 - DNA, 120 bp, Artificial Sequence
  ENSG00000174428_4 (sequence is synthesized)
gtcacggttcttcctgcttgccttccagtttagtccctgacgtctgctccccagggccctggctcttcccccacgccttcagcctgcacagtcccttctctcattctcaggctgcagaac

SEQ ID NO: 599275 - DNA, 120 bp, Artificial Sequence
  ENSG00000174428_5 (sequence is synthesized)
ctggaagtacagttgtccccccttacccgctgtttcagttacctgaggtcaaccgtggtctgaaaatactacatggaaaattccggaaataaacaattcgtaagttttaaattgcacgct

SEQ ID NO: 599276 - DNA, 120 bp, Artificial Sequence
  ENSG00000174428_6 (sequence is synthesized)
gtgatgaaatctcgcgctgtgcagcctgggcagtgaatcgtcccctttgttcagcgtccccacgctgtggacgctccacacccatagtcacttagtagctggctcggttatcagatcgac

SEQ ID NO: 599277 - DNA, 120 bp, Artificial Sequence
  ENSG00000174428_7 (sequence is synthesized)
cgtcacagtgtcccagtgtatgtgttcaagtcacccttattttccgtcataatggccccaaagcacaagagtagtgatgctgggaatttggataggccaaagagaagccgtaaagtgctt

SEQ ID NO: 599278 - DNA, 120 bp, Artificial Sequence
  ENSG00000174428_8 (sequence is synthesized)
cctctaagtgaaaaggtgaaagttctcgacttaatcaggaaagacaaaaaatcctatgctgaggttgctaagatctacgggaagaatgaatcttccatccgtgaaattgtgaagaaggaa

SEQ ID NO: 599279 - DNA, 120 bp, Artificial Sequence
  ENSG00000174428_9 (sequence is synthesized)
aaagaaattcgtgctagttttgctgtctcacctccaactgctaaagtgacggccacagtgcgtgataagtgcttagttaagatggaacaggcactgcatttgtgggtggaagagatgaac

SEQ ID NO: 599280 - DNA, 120 bp, Artificial Sequence
  ENSG00000174428_10 (sequence is synthesized)
agaaaacgtgttcccattgacagcaacatgttgcgccagaaagctttgagcctataccaagacttctgcaagggatgctctgaaactgacaccaagccatttactgcgagtaagggatgg

SEQ ID NO: 599281 - DNA, 120 bp, Artificial Sequence
  ENSG00000174428_11 (sequence is synthesized)
ttacacagattcaggcatagattctcacatcattacaagaagaagaagaaggggatcatggcccaggtagcagtgtccaccctgcctgttgaagaagagtcctcctcagagaccaggatg

SEQ ID NO: 599282 - DNA, 120 bp, Artificial Sequence
  ENSG00000174428_12 (sequence is synthesized)
gtggtgacattcctcgtgtctgccctcgaatccatgtgtaaagaactggccaagtccaaggcagaagtggcctgcatcgcagtgtacgaaacagacgtgtttgtcgtcggaaccgagaga

SEQ ID NO: 599283 - DNA, 120 bp, Artificial Sequence
  ENSG00000174428_13 (sequence is synthesized)
ggatgcgcttttgttaatgccaggacggattttcagaaagattttgcaaaatactgcgttgcagagggactgtgtgaggtgaaacctccctgccctgtgaacgggatgcaggtccactcg

SEQ ID NO: 599284 - DNA, 120 bp, Artificial Sequence
  ENSG00000174428_14 (sequence is synthesized)
ggcgaaacggaaatactcaggaaggcagtggaggactatttctgcttttgttatggtaaagccttagggacaacagtgatggtgcctgttccctatgagaagatgctgcgagaccagtcg

SEQ ID NO: 599285 - DNA, 120 bp, Artificial Sequence
  ENSG00000174428_15 (sequence is synthesized)
gctgtggtagtgcaggggcttccggaaggcgttgcctttcaacaccctgagaattacgaccttgcaaccctgaaatggattttggagaacaaagcagggatttcattcatcataaataga

SEQ ID NO: 599286 - DNA, 120 bp, Artificial Sequence
  ENSG00000174428_16 (sequence is synthesized)
cccttcctaggaccagagagtcagctgggtggccctgggatggtaacagatgcggagagatccatagtatcaccaagtgaaagctgcggccccatcaatgtgaaaactgaacccatggaa

SEQ ID NO: 599287 - DNA, 120 bp, Artificial Sequence
  ENSG00000174428_17 (sequence is synthesized)
gattctggcatttcactgaaagcagaagctgtctcagtcaagaaagaatcagaagatcctaattactatcaatataatatgcaaggaagccacccttcttccacaagcaatgaagtaata

SEQ ID NO: 599288 - DNA, 120 bp, Artificial Sequence
  ENSG00000174428_18 (sequence is synthesized)
gaaatggaattaccaatggaagattccactccgctggtcccttcagaagaaccaaatgaggaccctgaagccgaggtgaaaatcgaaggaaacacaaattcatccagtgttacaaattct

SEQ ID NO: 599289 - DNA, 120 bp, Artificial Sequence
  ENSG00000174428_19 (sequence is synthesized)
gcattgaaaagattaaacagctaagagaacaagttaatgacctctttagccgaaaatttggtgaagcaattggcgtggatttccctgtgaaagttccctacaggaagatcacattcaacc

SEQ ID NO: 599290 - DNA, 120 bp, Artificial Sequence
  ENSG00000174428_20 (sequence is synthesized)
ctggctgtgtggtgattgatggcatgcccccgggggtggtattcaaggcccccggctatctggaaatcagttccatgaggaggatcttggaggcagctgagtttatcaaattcacagtca

SEQ ID NO: 599291 - DNA, 120 bp, Artificial Sequence
  ENSG00000174428_21 (sequence is synthesized)
tcaggccgcttccagggcttgagctcagtaatggtgagtattctacagtgggaaaacgcaagatagaccaggagggccgtgtgtttcaagaaaagtgggagagagcgtatttcttcgtgg

SEQ ID NO: 599292 - DNA, 120 bp, Artificial Sequence
  ENSG00000174428_22 (sequence is synthesized)
aagtacagaatattccaacatgtctcatatgcaaacaaagcatgtctgtgtccaaagaatataacctaagacgccactatcaaaccaatcacagcaagcattatgaccagtatacggaaa

SEQ ID NO: 599293 - DNA, 120 bp, Artificial Sequence
  ENSG00000174428_23 (sequence is synthesized)
gaatgcgtgacgagaagcttcacgagctgaaaaaagggctcaggaagtatctcttaggctcgtcagacaccgagtgtcccgagcaaaaacaagtgtttgcaaacccaagtccaacccaga

SEQ ID NO: 599294 - DNA, 120 bp, Artificial Sequence
  ENSG00000174428_24 (sequence is synthesized)
aatcccccgtgcagcctgtagaggacctagctgggaacttatgggagaagttacgtgaaaaaatcaggtcttttgtggcatattctatcgcaatcgatgagatcacggatataaataata

SEQ ID NO: 599295 - DNA, 120 bp, Artificial Sequence
  ENSG00000174428_25 (sequence is synthesized)
ccacccagttggccatattcatccgtggtgtcgatgagaatttcgatgtgtccgaagaacttctggacacggtgcccatgacgggtacaaaatctggcaacgagatctttttgcgtgttg

SEQ ID NO: 599296 - DNA, 120 bp, Artificial Sequence
  ENSG00000174428_26 (sequence is synthesized)
agaagagcctgaaaaagttctgtatcaactggtcgagattagtaagcgtggcctccactggcaccccagcgatggtggatgccaataacgggcttgtcacaaaactgaagtccagggtgg

SEQ ID NO: 599297 - DNA, 120 bp, Artificial Sequence
  ENSG00000174428_27 (sequence is synthesized)
cgacgttctgcaagggtgcggaactgaagtccatctgttgtataattcatccggaatcactctgtgctcagaagttgaagatggaccacgtcatggacgtggtagtgaagtccgtgaact

SEQ ID NO: 599298 - DNA, 120 bp, Artificial Sequence
  ENSG00000174428_28 (sequence is synthesized)
ggatatgctcccggggactgaaccacagcgagttcacaaccttgctctatgagctggacagccagtatggtagcctcctgtactacacggagattaagtggctcagtcgcgggctcgtgc

SEQ ID NO: 599299 - DNA, 120 bp, Artificial Sequence
  ENSG00000174428_29 (sequence is synthesized)
taaagagatttttcgaatccttggaagaaatcgactccttcatgtcatccagagggaaacccctgcctcaactgagctccatagattggatccgagacctggccttcttggttgacatga

SEQ ID NO: 599300 - DNA, 120 bp, Artificial Sequence
  ENSG00000174428_30 (sequence is synthesized)
cgatgcatctgaacgctttgaacatctctctccaaggacactcccaaatcgtcacgcagatgtatgacctgatccgggcgttcctagcaaaactgtgcctctgggagactcatttgacga

SEQ ID NO: 599301 - DNA, 120 bp, Artificial Sequence
  ENSG00000174428_31 (sequence is synthesized)
ggaataatctggcccactttcccaccctgaaattggtttccagaaatgaaagcgatggcctgaactacattcccaaaatcgcggaactcaagaccgaattccagaaaaggctgtctgatt

SEQ ID NO: 599302 - DNA, 120 bp, Artificial Sequence
  ENSG00000174428_32 (sequence is synthesized)
tcaaactctacgaaagcgaactgactctgttcagctccccgttctccacgaagatcgacagtgtgcacgaggagctccagatggaggttatcgacctgcaatgcaacacggtcctgaaga

SEQ ID NO: 599303 - DNA, 120 bp, Artificial Sequence
  ENSG00000174428_33 (sequence is synthesized)
cgaaatacgacaaggtgggaataccagaattctacaagtacctctggggtagctacccgaaatacaagcaccattgcgcaaagattctttccatgttcgggagcacctacatctgcgaac

SEQ ID NO: 599304 - DNA, 120 bp, Artificial Sequence
  ENSG00000174428_34 (sequence is synthesized)
agctgttctccattatgaaactgagcaaaacaaaatactgctcccagttaaaggattcccagtgggattctgtactccacatcgcaacgtgatggagagaaaactcctggcagggcccta

SEQ ID NO: 599305 - DNA, 120 bp, Artificial Sequence
  ENSG00000174428_35 (sequence is synthesized)
caacgtgatggagagaaaactcctggcagggccctatggtgggaaaggctggagtcttctagtcccaagggattgggagatgacaaaatgaattttttttttcttttttgagatggagtc

SEQ ID NO: 599306 - DNA, 120 bp, Artificial Sequence
  ENSG00000174428_36 (sequence is synthesized)
gagttcttaaactttttttttttttcagttttttttccactttgaatcagaaatataatctgcagtatcatacttgtttatattacattgtatgcctcactattcattaaaaatcaagaa

SEQ ID NO: 599307 - DNA, 80 bp, Artificial Sequence
  ENSG00000174428_37 (sequence is synthesized)
tgagaccagcctgggcaacaaacagtggctcacacctgtagccccagctacttggcaggctaaagcaggaggatcactta

SEQ ID NO: 599308 - DNA, 120 bp, Artificial Sequence
  ENSG00000174428_38 (sequence is synthesized)
cacctgtagccccagctacttggcaggctaaagcaggaggatcacttaaactcaggagtttgagacagcagagaaccataattgcaatactacactccagcctgggtgacagaacaagac

SEQ ID NO: 599309 - DNA, 120 bp, Artificial Sequence
  ENSG00000174428_39 (sequence is synthesized)
taaaaagaaaatgcaaacatattatcaaataattcctgtttaaactggacataacaagcacagctacatgctgaacctcatcaaaggtgtcttttgtttggctcatgtacttttgaaaat

SEQ ID NO: 599310 - DNA, 67 bp, Artificial Sequence
  ENSG00000174428_40 (sequence is synthesized)
tcaaaggtgtcttttgtttggctcatgtacttttgaaaataaggatgaggcctggcacggtgtgggg

SEQ ID NO: 599311 - DNA, 120 bp, Artificial Sequence
  ENSG00000174428_41 (sequence is synthesized)
atcgcaggcaagacttccacagtattttcttctaagctatcataagcattctcctagaaacgatcctaacacatcttcttggattcagcttaccaaataaatactgcctaacactgcaga

SEQ ID NO: 599312 - DNA, 120 bp, Artificial Sequence
  ENSG00000174428_42 (sequence is synthesized)
ctggtgagctgaggctcagccgcacgaccgtgctctggccccaaaacactcctcggtaacccccatcctgcccacacaaatggccccggaacacagcggctgctttgagtcagtttctct

SEQ ID NO: 599313 - DNA, 120 bp, Artificial Sequence
  ENSG00000174428_43 (sequence is synthesized)
ctcgatgacttttccacgttggcttcgatctgggagttccgttttctgtgtatttgctgtcaatttctatgcctttggatgttagtcattttccgaggtgctaaaaggggctggtgtgtg

SEQ ID NO: 599314 - DNA, 120 bp, Artificial Sequence
  ENSG00000174428_44 (sequence is synthesized)
ggccgcttccagggcttgagctcagtaatggtgagtattctacaggtgagaagaacgttccggcaatgttgggccatgggaagtgtcttggtgggcgctcaccacggggtttttgcttcc

SEQ ID NO: 599315 - DNA, 120 bp, Artificial Sequence
  ENSG00000174428_45 (sequence is synthesized)
cactccagcctgggcagcagagtgaaaccctgtctctaaaaataataatttccttaaactactactatttctttatatgttgatttttttatagttcattaacctgtttatcataaatac

SEQ ID NO: 599316 - DNA, 120 bp, Artificial Sequence
  ENSG00000174428_46 (sequence is synthesized)
acaaagtacggaagtgtacagcacaaatgcttagaaactgacctaatgccaatcatccatttgcaggcgttgcagagggactgtgtgaggtgaaacctccctgccctgtgaacgggatgc

SEQ ID NO: 599317 - DNA, 120 bp, Artificial Sequence
  ENSG00000174428_47 (sequence is synthesized)
cccgcctgctgcgtttcagagctgactgttcagatgtgtcatgcttttttcattggtccgtgctgggtaatggtgttgcttttcttgcagacccttcctaggaccagagagtcagctggg

SEQ ID NO: 599318 - DNA, 120 bp, Artificial Sequence
  ENSG00000174428_48 (sequence is synthesized)
cagagagtcagctgggtaagtgacagcttctcaggtttggtggctcttctgagctgctgaaccacttcttcttcattaaaacttgaattgggggccgggcgtgatggctcacacctgtaa

SEQ ID NO: 599319 - DNA, 120 bp, Artificial Sequence
  ENSG00000174429_0 (sequence is synthesized)
acactcattttagccagtgtccaggctatcagcagagaaagacaggtgggcagcatggctccgggcgaaaaggaaagcggggagggcccagccaagagcgccctccggaagatacgcaca

SEQ ID NO: 599320 - DNA, 120 bp, Artificial Sequence
  ENSG00000174429_1 (sequence is synthesized)
gccaccctggtcatcagcttggcccgaggttggcagcagtgggcgaatgagaacagcatcaggcaggcccaggagcctacaggctggctgccgggagggacccaggactcacctcaagct

SEQ ID NO: 599321 - DNA, 120 bp, Artificial Sequence
  ENSG00000174429_2 (sequence is synthesized)
cctaaaccaatcacaccccctacttcacaccagaaagctcagagtgccccaaagtcgccaccccgcctgccagaaggacatggagatggacaaagctcagagaaagcccctgaggtttct

SEQ ID NO: 599322 - DNA, 120 bp, Artificial Sequence
  ENSG00000174429_3 (sequence is synthesized)
cacatcaaaaagaaagaggtgtccaaaacggtggtcagcaagacttatgagagaggaggggacgtgagccacctcagccacaggtacgagagggatgctggtgtgcttgaacctgggcag

SEQ ID NO: 599323 - DNA, 120 bp, Artificial Sequence
  ENSG00000174429_4 (sequence is synthesized)
ccagagaatgacattgacagaatcctccacagccacggctccccaacgcggaggagaaaatgtgccaacctggtgtctgagctaaccaagggctggagagtgatggagcaggaggagccc

SEQ ID NO: 599324 - DNA, 120 bp, Artificial Sequence
  ENSG00000174429_5 (sequence is synthesized)
acatggaggagtgacagcgtagacacagaggacagcggctatggaggagaggctgaggagaggcccgagcaggatggagtgcaggtggctgtggtcaggatcaagcgccccttgccctcc

SEQ ID NO: 599325 - DNA, 120 bp, Artificial Sequence
  ENSG00000174429_6 (sequence is synthesized)
caggtaaacagatttacagagaaactcaactgcaaagcccaacagaaatatagcccagtgggcaacttgaaagggagatggcagcagtgggctgatgaacacatacaatcccagaagctc

SEQ ID NO: 599326 - DNA, 120 bp, Artificial Sequence
  ENSG00000174429_7 (sequence is synthesized)
aatcctttcagtgaagagtttgattacgagctggccatgtccacccgcctacacaaaggagatgagggctatggccgccccaaagaaggaaccaaaactgctgaaagggccaagcgtgct

SEQ ID NO: 599327 - DNA, 120 bp, Artificial Sequence
  ENSG00000174429_8 (sequence is synthesized)
gaggagcacatctacagggaaatgatggacatgtgcttcattatctgcacaatggctcgccacagacgagatggcaagatccaggttacttttggagatctctttgacagatacgttcgt

SEQ ID NO: 599328 - DNA, 120 bp, Artificial Sequence
  ENSG00000174429_9 (sequence is synthesized)
atttcagataaagtagtgggcattctcatgcgtgccaggaaacatggactggtagactttgaaggagagatgctatggcaaggccgagatgaccatgttgtgattacgctactcaagtga

SEQ ID NO: 599329 - DNA, 120 bp, Artificial Sequence
  ENSG00000174429_10 (sequence is synthesized)
accttcaaaaacaaaagccaaatttggcccactatggtcttaatgctaaatgctcatgtaggtaaaatgaaaatgcaaactctctgtaataagttagtaaatattaaacaatttttacat

SEQ ID NO: 599330 - DNA, 120 bp, Artificial Sequence
  ENSG00000174429_11 (sequence is synthesized)
atgtataataatagtattaatagttgaaattccacagggtgtttttgtttttgttttgagacagattctctttatgtcaccaaagctggtcttttaactcctggcctcaagtgatcctct

SEQ ID NO: 599331 - DNA, 120 bp, Artificial Sequence
  ENSG00000174429_12 (sequence is synthesized)
ctgggattataggcatgagcaacagcacccagccacttgtatattttaggcaaaatatttagctagtcattgtagaaactactatagatttttaattaaacattacatctaagaagaatg

SEQ ID NO: 599332 - DNA, 120 bp, Artificial Sequence
  ENSG00000174429_13 (sequence is synthesized)
ctgacttgagataaatatcagtagaacatataataatgtgtctttatttggaaaaaagaaaataccattaagtttggtaaaactaaacttaaaattttttcagaagcttgactttgtatt

SEQ ID NO: 599333 - DNA, 120 bp, Artificial Sequence
  ENSG00000174429_14 (sequence is synthesized)
attgtttatatcatagcatcacttacaaaacaagcacatatataaaaagttgtcaagatgttgctgaaattgttgaagttcctctgtgggcttggattctaacaggtttccagtaagagt

SEQ ID NO: 599334 - DNA, 120 bp, Artificial Sequence
  ENSG00000174429_15 (sequence is synthesized)
tcaccttcctcttgtttgatttcagcaaatcacataaaaacagacacttcctgtcttagtaccaacaaaggaaggcacaccctcactaaaagtagagcagaggtgagagattcagattta

SEQ ID NO: 599335 - DNA, 120 bp, Artificial Sequence
  ENSG00000174429_16 (sequence is synthesized)
cttgcctttgtaggacttcttggagaagtttattgtttcattacatgtcagcatataacgagtcaagctgcttgcattaacatcaatgcaatgatatgtatttctccaacaatggagaaa

SEQ ID NO: 599336 - DNA, 120 bp, Artificial Sequence
  ENSG00000174429_17 (sequence is synthesized)
tacagaaaatctatgaagtggaatgttcagtattagaaaaatcccatagaatcattggtgaattaaaaacagatttgagacagtttaatgttcctcatactgtaacaaagaaaactttat

SEQ ID NO: 599337 - DNA, 120 bp, Artificial Sequence
  ENSG00000174429_18 (sequence is synthesized)
gaaatgtttaagtcataaaactgcaatattagttctgccaaagtaaaaaatatacaatgatgatggcaaggagaaaatcattggacattaatgtgcctatgtgatcttaaaaacaaatgg

SEQ ID NO: 599338 - DNA, 120 bp, Artificial Sequence
  ENSG00000174429_19 (sequence is synthesized)
aatggaatgtgagattgcaattcttactggattcaatgaaattactaaaatgcattgatagtatagcactttggtgttaaatgtaaaaattaatgtctaaatatgatacctcaaaataat

SEQ ID NO: 599339 - DNA, 120 bp, Artificial Sequence
  ENSG00000174429_20 (sequence is synthesized)
aggtattagactgctataagaattatatttgttttcatgtatgagtctctttcaaactgaaggttctggtatcttaagaaagtatgcgtattttgtttccataccgtatttataaagcta

SEQ ID NO: 599340 - DNA, 120 bp, Artificial Sequence
  ENSG00000174429_21 (sequence is synthesized)
taagttaatgaccaatatttctaagtaggatttcatgtaagatgcacacttctattacaagtgaaacctacgccaaatgttaaagacaaatagcataagaataaaagatgttttcttgta

SEQ ID NO: 599341 - DNA, 120 bp, Artificial Sequence
  ENSG00000174437_0 (sequence is synthesized)
attagagcagccgccgcggagccgtccccgacgccacctccttttccttcgccgcagtttcctccgccgctgtcgggcgtgcggcgctgagggacccgggcgagcgcgccgcgcaccgcc

SEQ ID NO: 599342 - DNA, 80 bp, Artificial Sequence
  ENSG00000174437_1 (sequence is synthesized)
gtggtctgccgggcgccccctcctccggcccgggcggggcctctgatcgcctcaagagagcggggagggggctcgggggc

SEQ ID NO: 599343 - DNA, 120 bp, Artificial Sequence
  ENSG00000174437_2 (sequence is synthesized)
cgagggaggccctcccttctggcgaggggagggagggtgggtcaggagcccccaacccgccctgcggagctcggggccgcgcgaggggcggttgtctgggggagggggcgcggggtgatt

SEQ ID NO: 599344 - DNA, 120 bp, Artificial Sequence
  ENSG00000174437_3 (sequence is synthesized)
gcgaggggcggttgtctgggggagggggcgcggggtgattcagcgcccggcgaggcggaagcggccgcaagaggaggaggggagagcccgtccgcgcctgggctcccggggtggcacgag

SEQ ID NO: 599345 - DNA, 120 bp, Artificial Sequence
  ENSG00000174437_4 (sequence is synthesized)
gtgcgaggcggaggcgaggaggccgcggggacgggaggcgaggccggccgggcccccgaagccatggagaacgcgcacaccaagacggtggaggaggtgctgggccacttcggcgtcaac

SEQ ID NO: 599346 - DNA, 120 bp, Artificial Sequence
  ENSG00000174437_5 (sequence is synthesized)
gagagtacggggctgagcctggaacaggtcaagaagcttaaggagagatggggctccaacgagttaccggctgaagaaggaaaaaccttgctggaacttgtgattgagcagtttgaagac

SEQ ID NO: 599347 - DNA, 120 bp, Artificial Sequence
  ENSG00000174437_6 (sequence is synthesized)
ttgctagttaggattttattactggcagcatgtatatcttttgttttggcttggtttgaagaaggtgaagaaacaattacagcctttgtagaaccttttgtaattttactcatattagta

SEQ ID NO: 599348 - DNA, 120 bp, Artificial Sequence
  ENSG00000174437_7 (sequence is synthesized)
gccaatgcaattgtgggtgtatggcaggaaagaaatgctgaaaatgccatcgaagcccttaaggaatatgagcctgaaatgggcaaagtgtatcgacaggacagaaagagtgtgcagcgg

SEQ ID NO: 599349 - DNA, 120 bp, Artificial Sequence
  ENSG00000174437_8 (sequence is synthesized)
attaaagctaaagacatagttcctggtgatattgtagaaattgctgttggtgacaaagttcctgctgatataaggttaacttccatcaaatctaccacactaagagttgaccagtcaatt

SEQ ID NO: 599350 - DNA, 120 bp, Artificial Sequence
  ENSG00000174437_9 (sequence is synthesized)
ctcacaggtgaatctgtctctgtcatcaagcacactgatcccgtccctgacccacgagctgtcaaccaagataaaaagaacatgctgttttctggtacaaacattgctgctgggaaagct

SEQ ID NO: 599351 - DNA, 120 bp, Artificial Sequence
  ENSG00000174437_10 (sequence is synthesized)
atgggagtggtggtagcaactggagttaacaccgaaattggcaagatccgggatgaaatggtggcaacagaacaggagagaacaccccttcagcaaaaactagatgaatttggggaacag

SEQ ID NO: 599352 - DNA, 120 bp, Artificial Sequence
  ENSG00000174437_11 (sequence is synthesized)
ctttccaaagtcatctcccttatttgcattgcagtctggatcataaatattgggcacttcaatgacccggttcatggagggtcctggatcagaggtgctatttactactttaaaattgca

SEQ ID NO: 599353 - DNA, 120 bp, Artificial Sequence
  ENSG00000174437_12 (sequence is synthesized)
gtggccctggctgtagcagccattcctgaaggtctgcctgcagtcatcaccacctgcctggctcttggaactcgcagaatggcaaagaaaaatgccattgttcgaagcctcccgtctgtg

SEQ ID NO: 599354 - DNA, 120 bp, Artificial Sequence
  ENSG00000174437_13 (sequence is synthesized)
gaaacccttggttgtacttctgttatctgctcagacaagactggtacacttacaacaaaccagatgtcagtctgcaggatgttcattctggacagagtggaaggtgatacttgttccctt

SEQ ID NO: 599355 - DNA, 120 bp, Artificial Sequence
  ENSG00000174437_14 (sequence is synthesized)
aatgagtttaccataactggatcaacttatgcacctattggagaagtgcataaagatgataaaccagtgaattgtcaccagtatgatggtctggtagaattagcaacaatttgtgctctt

SEQ ID NO: 599356 - DNA, 120 bp, Artificial Sequence
  ENSG00000174437_15 (sequence is synthesized)
tgtaatgactctgctttggattacaatgaggcaaagggtgtgtatgaaaaagttggagaagctacagagactgctctcacttgcctagtagagaagatgaatgtatttgataccgaattg

SEQ ID NO: 599357 - DNA, 120 bp, Artificial Sequence
  ENSG00000174437_16 (sequence is synthesized)
aagggtctttctaaaatagaacgtgcaaatgcctgcaactcagtcattaaacagctgatgaaaaaggaattcactctagagttttcacgtgacagaaagtcaatgtcggtttactgtaca

SEQ ID NO: 599358 - DNA, 120 bp, Artificial Sequence
  ENSG00000174437_17 (sequence is synthesized)
ccaaataaaccaagcaggacatcaatgagcaagatgtttgtgaagggtgctcctgaaggtgtcattgacaggtgcacccacattcgagttggaagtactaaggttcctatgacctctgga

SEQ ID NO: 599359 - DNA, 120 bp, Artificial Sequence
  ENSG00000174437_18 (sequence is synthesized)
gtcaaacagaagatcatgtctgtcattcgagagtggggtagtggcagcgacacactgcgatgcctggccctggccactcatgacaacccactgagaagagaagaaatgcaccttgaggac

SEQ ID NO: 599360 - DNA, 120 bp, Artificial Sequence
  ENSG00000174437_19 (sequence is synthesized)
tctgccaactttattaaatatgagaccaatctgaccttcgttggctgcgtgggcatgctggatcctccgagaatcgaggtggcctcctccgtgaagctgtgccggcaagcaggcatccgg

SEQ ID NO: 599361 - DNA, 120 bp, Artificial Sequence
  ENSG00000174437_20 (sequence is synthesized)
gtcatcatgatcactggggacaacaagggcactgctgtggccatctgtcgccgcatcggcatcttcgggcaggatgaggacgtgacgtcaaaagctttcacaggccgggagtttgatgaa

SEQ ID NO: 599362 - DNA, 120 bp, Artificial Sequence
  ENSG00000174437_21 (sequence is synthesized)
ctcaacccctccgcccagcgagacgcctgcctgaacgcccgctgttttgctcgagttgaaccctcccacaagtctaaaatcgtagaatttcttcagtcttttgatgagattacagctatg

SEQ ID NO: 599363 - DNA, 120 bp, Artificial Sequence
  ENSG00000174437_22 (sequence is synthesized)
actggcgatggcgtgaacgatgctcctgctctgaagaaagccgagattggcattgctatgggctctggcactgcggtggctaaaaccgcctctgagatggtcctggcggatgacaacttc

SEQ ID NO: 599364 - DNA, 120 bp, Artificial Sequence
  ENSG00000174437_23 (sequence is synthesized)
tccaccattgtggctgccgttgaggaggggcgggcaatctacaacaacatgaaacagttcatccgctacctcatctcgtccaacgtcggggaagttgtctgtattttcctgacagcagcc

SEQ ID NO: 599365 - DNA, 120 bp, Artificial Sequence
  ENSG00000174437_24 (sequence is synthesized)
cttggatttcccgaggctttgattcctgttcagctgctctgggtcaatctggtgacagatggcctgcctgccactgcactggggttcaaccctcctgatctggacatcatgaataaacct

SEQ ID NO: 599366 - DNA, 120 bp, Artificial Sequence
  ENSG00000174437_25 (sequence is synthesized)
ccccggaacccaaaggaaccattgatcagcgggtggctctttttccgttacttggctattggctgttacgtcggcgctgctaccgtgggtgctgctgcatggtggttcattgctgctgac

SEQ ID NO: 599367 - DNA, 120 bp, Artificial Sequence
  ENSG00000174437_26 (sequence is synthesized)
ggtggtccaagagtgtccttctaccagctgagtcatttcctacagtgtaaagaggacaacccggactttgaaggcgtggattgtgcaatctttgaatccccatacccgatgacaatggcg

SEQ ID NO: 599368 - DNA, 120 bp, Artificial Sequence
  ENSG00000174437_27 (sequence is synthesized)
ctctctgttctagtaactatagaaatgtgtaacgccctcaacagcttgtccgaaaaccagtccttgctgaggatgcccccctgggagaacatctggctcgtgggctccatctgcctgtcc

SEQ ID NO: 599369 - DNA, 120 bp, Artificial Sequence
  ENSG00000174437_28 (sequence is synthesized)
atgtcactccacttcctgatcctctatgtcgaacccttgccactcatcttccagatcacaccgctgaacgtgacccagtggctgatggtgctgaaaatctccttgcccgtgattctcatg

SEQ ID NO: 599370 - DNA, 120 bp, Artificial Sequence
  ENSG00000174437_29 (sequence is synthesized)
gatgagacgctcaagtttgtggcccgcaactacctggaacctggtaaagagtgtgtgcagcctgccaccaaatcctgctcgttctcggcatgcaccgatgggatttcctggccgtttgtg

SEQ ID NO: 599371 - DNA, 120 bp, Artificial Sequence
  ENSG00000174437_30 (sequence is synthesized)
ctgctcataatgcccctggtgatctgggtctatagcacagacactaactttagcgatatgttctggtcttgactgacagttttccataaagaagatgtttaacttaatcaattaattttt

SEQ ID NO: 599372 - DNA, 120 bp, Artificial Sequence
  ENSG00000174437_31 (sequence is synthesized)
ttattgtttaaagcaactgtctatttctgctgaattttcacatgaacatactggctggtgatggaggtttcatactctagattttgttttgctttttctgactccagtggggcaagattt

SEQ ID NO: 599373 - DNA, 120 bp, Artificial Sequence
  ENSG00000174437_32 (sequence is synthesized)
tccttttttatacacataattaaagtgtccattgacatgtacagagaactaacactattttatgcaaatatttttttgtagatgaaaaagcatgtacagtgttctgtttaatactcatcc

SEQ ID NO: 599374 - DNA, 120 bp, Artificial Sequence
  ENSG00000174437_33 (sequence is synthesized)
ttgtataaaaaaaatagttgagccagcagacattgtcagcaaattaattggcagcagattttaggaaatgaatgtgtgtggttttttttctaaaactaaatagcatgtattgtgtctttt

SEQ ID NO: 599375 - DNA, 120 bp, Artificial Sequence
  ENSG00000174437_34 (sequence is synthesized)
tttaatttgatatcacagtctaatttttattcataagccaatttttctgcactgagcagagtcttgctacctcagtcagtattgttttggtttgctacttccctcacccactttggcctc

SEQ ID NO: 599376 - DNA, 120 bp, Artificial Sequence
  ENSG00000174437_35 (sequence is synthesized)
cgttcaccccaccccaccccacctctccccaccttacccccgccccgcttggcttcttctttaggattgtgatggttcgttctgtttacatcagttttaacgagaggtatgcctgtactc

SEQ ID NO: 599377 - DNA, 120 bp, Artificial Sequence
  ENSG00000174437_36 (sequence is synthesized)
gcttgtgcagaaaacattgttccagattcaatcgactgggtttatgtcccttcacatagtttttaaggttatttatttaaatgtctaatgtattttattgtaacagacattgttttgcca

SEQ ID NO: 599378 - DNA, 120 bp, Artificial Sequence
  ENSG00000174437_37 (sequence is synthesized)
acattgcctatttcagtggcacgtcatctagttttaaaaaaataaaacattttaaatggacagagaaaaataactgtcttgtctttaactcgtaagtggcttacctgggactaacagaca

SEQ ID NO: 599379 - DNA, 120 bp, Artificial Sequence
  ENSG00000174437_38 (sequence is synthesized)
tgtccaactttctctccagttcttagctcagaactttagttgtactctgcttgaggggaagaaggctcctgctctgctgtgtaggtagtcataggaattgtattcttaatgtacaggcac

SEQ ID NO: 599380 - DNA, 120 bp, Artificial Sequence
  ENSG00000174437_39 (sequence is synthesized)
taattgtcatctgtgatgtacattttatgcaagtttctgctggcctggtatagagaacataagggcaagtgtgtatgtgtgtgtatgtgtgtgttttgtaaaatctgtaaatagcacatg

SEQ ID NO: 599381 - DNA, 120 bp, Artificial Sequence
  ENSG00000174437_40 (sequence is synthesized)
accaaatgaacatattgtatagaactatttttatttgaatgtggcactaaccaccaccaccgttactacgatcaatgtttgcgcatgttcgagatgagtctcaccaacagtgtgtaagtc

SEQ ID NO: 599382 - DNA, 120 bp, Artificial Sequence
  ENSG00000174437_41 (sequence is synthesized)
attaacagtcctaactgtggtgttttcctccaatgccttccaacatccatcaactaacgtgagtattttcttcctgggatttggatgctttagcctaaaggtgactgccaccaagtgaga

SEQ ID NO: 599383 - DNA, 120 bp, Artificial Sequence
  ENSG00000174437_42 (sequence is synthesized)
taactgtatgtcactaacttataagccgcctccatggcagatgctgctgtgctccctgatgccctgtgagcaccggggttgcctgtggcgcctgccatgtgactcgggcgcagcatcagc

SEQ ID NO: 599384 - DNA, 120 bp, Artificial Sequence
  ENSG00000174437_43 (sequence is synthesized)
tggctggaggtgtggctttcatagacctccacaggctgcctaggacaagatgaccaggagggcccaagccagacaaaagccggagtggggagagaggcatttcagccagaccaacaggct

SEQ ID NO: 599385 - DNA, 120 bp, Artificial Sequence
  ENSG00000174437_44 (sequence is synthesized)
gaaggagctgtgcagactattgctaaaatgagggttcgcagctgccaggagtcatcccagaacattgctacttatttattaaaaagctaaaaactagtgaaagcaagtaactgaaccagt

SEQ ID NO: 599386 - DNA, 120 bp, Artificial Sequence
  ENSG00000174437_45 (sequence is synthesized)
gaactctgggtatcgataggttcgtcttaaataggccacttccccactcccccacccccccttgcttggtcttgtccttggtggctaagacttagctctgcaggggatgttaaagcacag

SEQ ID NO: 599387 - DNA, 120 bp, Artificial Sequence
  ENSG00000174437_46 (sequence is synthesized)
ttagtaggacgtggctctgcacagcccaaaaaccagcttactccttagccagggtgtgaggcctcgactatattcttcaaaatgtacttaggctctggttactgggatggccagtagatg

SEQ ID NO: 599388 - DNA, 120 bp, Artificial Sequence
  ENSG00000174437_47 (sequence is synthesized)
taatgcagatggttggagtttggggagggttaggaggcatcaagcaggacaaggtgctgctgagttcagagggcccacgttcaagggatggaggtggaacctggagaccgactcttaaaa

SEQ ID NO: 599389 - DNA, 120 bp, Artificial Sequence
  ENSG00000174437_48 (sequence is synthesized)
gcacagtccgtggttgggtgtggtggctcatgcctgtaagtaagtctcagccctttggaggccacagcagaaggattgcttgagcccaggtactcaaaccagcctgggcaacagagtgag

SEQ ID NO: 599390 - DNA, 120 bp, Artificial Sequence
  ENSG00000174437_49 (sequence is synthesized)
gccctgtcaaaaaaaaatcagccttactgtgaagcctccaaggctgctcgcaggcagctgtggctctcgggaagggaggctgctttgcccagcagggaacatttggggcagggggtaaat

SEQ ID NO: 599391 - DNA, 120 bp, Artificial Sequence
  ENSG00000174437_50 (sequence is synthesized)
tttgccagtttgagcatcatgaggtgtaacaagaaatgggttgaatgggccaaatgcaaggagtgcatctctgggctgcaaactgacttgagtgctgcactattgctattccgtgcaaac

SEQ ID NO: 599392 - DNA, 120 bp, Artificial Sequence
  ENSG00000174437_51 (sequence is synthesized)
aaaactcagcttttcctgactcagttccttgacttagtggcctttacaaaaaaagttgagtagtgtgtggcctgctgtcgcacagcccctagttagcttcatggtttctcagcttcagac

SEQ ID NO: 599393 - DNA, 120 bp, Artificial Sequence
  ENSG00000174437_52 (sequence is synthesized)
ccctccagcccacagaggagcccatggagggacccacttcccttggtccagacagctgggagtgggttaggcccactgctgttttgagcagggccacttgctccatttcactgaaggctt

SEQ ID NO: 599394 - DNA, 120 bp, Artificial Sequence
  ENSG00000174437_53 (sequence is synthesized)
tgctgggtgaaaacacttcagcatctcctcctcaggtcaacccataaagaccaggtccagcaccgtggtcttggcacatccctggcctcaggccctcacctaacagtgaggcagcagctg

SEQ ID NO: 599395 - DNA, 120 bp, Artificial Sequence
  ENSG00000174437_54 (sequence is synthesized)
cccagccccgcaatgtgcctgctgtcaggcagctcttgcctgaaacttacttccacattctttcctgatgggcaggtggctgaaggcccagccatcagtgtcgcttgttgccaccccgtg

SEQ ID NO: 599396 - DNA, 120 bp, Artificial Sequence
  ENSG00000174437_55 (sequence is synthesized)
cctcccttggcctctctgagctttgcccagaagaccaacaatcatacataccctaactgggacaccactctgcagaatgcagatgatccattctggaggaagctgtcccttgagctcagt

SEQ ID NO: 599397 - DNA, 120 bp, Artificial Sequence
  ENSG00000174437_56 (sequence is synthesized)
gagctcccaggcaagcagggcatctggccgacttccctcacaacagctgctcccacatcccctcggactggagcttcagccctgactgaggtgggcagacctaagacctgagaccacaag

SEQ ID NO: 599398 - DNA, 120 bp, Artificial Sequence
  ENSG00000174437_57 (sequence is synthesized)
attagctcagtgtctaccaagcatctagccactgtccagggccagagcataccacgtctgcagtgcctgtgagcagagccagcagttgccctgtgactgtaaccaccaaattgtccaaac

SEQ ID NO: 599399 - DNA, 120 bp, Artificial Sequence
  ENSG00000174437_58 (sequence is synthesized)
acccgctgcagttagcaagaagggtaggcttcaccctcctttactgaggagaatgatgcggaggagtttcctctccagggctaggcaaggcaggcgagcagccagaagccgggtgcccac

SEQ ID NO: 599400 - DNA, 120 bp, Artificial Sequence
  ENSG00000174437_59 (sequence is synthesized)
agggcagggacaggaaggctgtgctgctactggctgctcacttctccatcaacctcaccctctgcaccactaaccaagaccttgtcctcttgcctgtctcgctgctttcacagctgcaac

SEQ ID NO: 599401 - DNA, 120 bp, Artificial Sequence
  ENSG00000174437_60 (sequence is synthesized)
gattgtgtctgcctcatggggttttcctccagagcctttattctgtagccagacgacacgaggagtctgtgtcactgagccagtgcttctagatgctaccctgtgtgggcggcacctcag

SEQ ID NO: 599402 - DNA, 120 bp, Artificial Sequence
  ENSG00000174437_61 (sequence is synthesized)
ggacagtaaatcagaaatgctggtcttgaaaccttgaaaagatcaagctgaatgttccttttcatctgtcgctgttgatcttcatctatttaaataggtattctaacgtttcctctctgt

SEQ ID NO: 599403 - DNA, 120 bp, Artificial Sequence
  ENSG00000174437_62 (sequence is synthesized)
atttcatgaagctgatttcctctctctttccttttcagcaatactggagtaaccgcttcctaaaccattttgcagaaatgtaagggtgttcggttgcgtgcatgtgcgtttttagcaaca

SEQ ID NO: 599404 - DNA, 120 bp, Artificial Sequence
  ENSG00000174437_63 (sequence is synthesized)
catctaccaaccctgtgcatgactgatgttggggaaaaagaaaagtaaaaaacttcccaactcactttgtgttatgtggaggaaatgtgtattaccaatggggttgttagcttttaaatc

SEQ ID NO: 599405 - DNA, 120 bp, Artificial Sequence
  ENSG00000174437_64 (sequence is synthesized)
aaaatactgattacagatgtacaatttagcttaatcagaaagcctctccagagaagtttggtttctttgctgcaagaggaatgaggctctgtaaccttatctaagaacttggaagccgtc

SEQ ID NO: 599406 - DNA, 120 bp, Artificial Sequence
  ENSG00000174437_65 (sequence is synthesized)
agccaagtcgccacatttctctgcaaaatgtcatagcttatataaatgtacagtattcaattgtaatgcatgccttcggttgtaagtagccagatccctctccagtgacattggaacatg

SEQ ID NO: 599407 - DNA, 120 bp, Artificial Sequence
  ENSG00000174437_66 (sequence is synthesized)
ctactttttaattggccctgtacagtttgcttatttataaattcattaaaaacactacaggtgttgaatggttaaaatgtaggcctccagttcattttcagttattttctgagtgtgcag

SEQ ID NO: 599408 - DNA, 120 bp, Artificial Sequence
  ENSG00000174437_67 (sequence is synthesized)
acagctatttcgcactgtattaaatgtaacttatttaatgaaatcagaagcagtagacagatgttggtgcaatacaaatattgtgatgcatttatcttaataaaatgctaaatgtcaatt

SEQ ID NO: 599409 - DNA, 120 bp, Artificial Sequence
  ENSG00000174437_68 (sequence is synthesized)
tatcactgcgcatgtttgactttagactgtaaatagagatcagtttgtttctttctgtgctggtaacaatgagcgtcgcacagacatggtttcaggtaaataaatctattctatgataaa

SEQ ID NO: 599410 - DNA, 120 bp, Artificial Sequence
  ENSG00000174437_69 (sequence is synthesized)
ccgggaggagggggcggggccgcgccgcccgcgccgcgctgggcgctctcggccaatgagcggcgtccacatgccgcggcggcggcgaaaggggaggcagcggccgataaatgctattag

SEQ ID NO: 599411 - DNA, 120 bp, Artificial Sequence
  ENSG00000174437_70 (sequence is synthesized)
gggaattgtgtgtagtcacggttgattgaggatcacaggacagttcttcccttcccaaaagaaaggagaacaggcaataccagttttaaaagcatgagctgtcgtcacctccaggaagta

SEQ ID NO: 599412 - DNA, 120 bp, Artificial Sequence
  ENSG00000174437_71 (sequence is synthesized)
gtgggagtgcttagccctgtgtttcttaggagctcttccttaaaagaaaccgtgggggccaaaaataggaactttggtacccctgtatgccagcacccacagggaaggaacctcaccctt

SEQ ID NO: 599413 - DNA, 120 bp, Artificial Sequence
  ENSG00000174437_72 (sequence is synthesized)
tcacacagacaaatggtaccatccagttaagcccgtgacaaaaatggaaatttctaaatagcccaagtctccagggcaattgggaacagctttgaacccactaagatggggtctgctatg

SEQ ID NO: 599414 - DNA, 120 bp, Artificial Sequence
  ENSG00000174437_73 (sequence is synthesized)
ccaaaacatagatacagaattcacagtttgtcctgcattaggacattctcttcaactttgccactgtagaaagtggaggtaggtcagcggatggtgccacattaacagccgccttactga

SEQ ID NO: 599415 - DNA, 120 bp, Artificial Sequence
  ENSG00000174437_74 (sequence is synthesized)
agtgtagtccaacagggtcttactgccactgtgacacgtgccttgccttgggggtgcgtttccccacctctccttgctctgcagcttgtccgaaaaccagtccttgctgaggatgccccc

SEQ ID NO: 599416 - DNA, 120 bp, Artificial Sequence
  ENSG00000174437_75 (sequence is synthesized)
aagtgttgtgaggccttgacctttctgtggtttcggtatctatcaaatcatcttaagactcagacaataaacagttacatctaagatgattctgaaggaccagggcttctccgagaaatt

SEQ ID NO: 599417 - DNA, 120 bp, Artificial Sequence
  ENSG00000174437_76 (sequence is synthesized)
ggggtaaacctcttggctggctctgcattcaggctggtctgtgctaggcttggtatggggttggagcctggacttgggaaatatactgggctgataggaatttgattggattttcttgca

SEQ ID NO: 599418 - DNA, 120 bp, Artificial Sequence
  ENSG00000174437_77 (sequence is synthesized)
tggtaaaacctcatctctacaaaaaaataccaaaaaaattaacccggcgtggtattgggtgcctgtaatcccagctattcaggaagccaagttgggaagattgcttgagcccaggaagtt

SEQ ID NO: 599419 - DNA, 120 bp, Artificial Sequence
  ENSG00000174437_78 (sequence is synthesized)
gaggctgtagtgagttgtgatggtgccattgcaccagcccgggtgatagagcaagacctctgtctcgaaaaaaaaaaaaagtatcagtatatatgttaaagtatttattaaagtatacaa

SEQ ID NO: 599420 - DNA, 120 bp, Artificial Sequence
  ENSG00000174437_79 (sequence is synthesized)
caaatatatgtaaataatacagtcacagtatcagagtataaaatgattactgaaaaataaattaatttgaatagttactccagaaaataatcaatggggattctacttgaaaattcactt

SEQ ID NO: 599421 - DNA, 120 bp, Artificial Sequence
  ENSG00000174437_80 (sequence is synthesized)
ttttattttggaattgtgttgatttttatcctgacaccctttgttctggtattaatttccattactaagttttcccagcttacctcctttgaatgaattgggccttttgccaaccttttc

SEQ ID NO: 599422 - DNA, 120 bp, Artificial Sequence
  ENSG00000174437_81 (sequence is synthesized)
tactctgcttgaggggaagaaggctcctgctctgctgtcaatactggagtaaccgcttcctaaaccattttgcagaaatgtaagggtgttcggttgcgtgcatgtgcgtttttagcaaca

SEQ ID NO: 599423 - DNA, 120 bp, Artificial Sequence
  ENSG00000174437_82 (sequence is synthesized)
tgcagcttcatagaacatgagctattgccacaataaaaataagtgggaaggagcagagaagcagtttgtcttattttactcgggaaatgtttatgcaactctgaaatgtgagtttattct

SEQ ID NO: 599424 - DNA, 68 bp, Artificial Sequence
  ENSG00000174437_83 (sequence is synthesized)
atatttttgtttgtttgtttgttccgatctcagctcactacaacctccgccttctgggttcaagcaat

SEQ ID NO: 599425 - DNA, 88 bp, Artificial Sequence
  ENSG00000174437_84 (sequence is synthesized)
cgcgcccggccatcctatattttttgaccatcatttgataaaataaataatttaaacctgctgttagaaaagtaacaactgaataaat

SEQ ID NO: 599426 - DNA, 120 bp, Artificial Sequence
  ENSG00000174437_85 (sequence is synthesized)
aatttaaacctgctgttagaaaagtaacaactgaataaataatgcaataattatacagctggattattttgtataattcactttccttaggttttgcttaaacaacttggtacaagtcta

SEQ ID NO: 599427 - DNA, 120 bp, Artificial Sequence
  ENSG00000174437_86 (sequence is synthesized)
ttccaaaaggtacacatgactcatacagagtagacatttgtcacatattttattcggctcattaattagcaagggaatctgtatttgaggaagtgttcaatattagaatattagaatagg

SEQ ID NO: 599428 - DNA, 120 bp, Artificial Sequence
  ENSG00000174437_87 (sequence is synthesized)
gattgctaggttagattacaaaactaatgtcttacagggaaacctcatataacatgagcatttatttagtaacacagtgttacattttcctagaatgggcttgttaaataatgcttctgt

SEQ ID NO: 599429 - DNA, 120 bp, Artificial Sequence
  ENSG00000174437_88 (sequence is synthesized)
atgatattgaaagggtgtagttatcttggcctttttgtcaggttttagataattatttttaacatcggaaattgttttataatcagttaagccctgtgaatttttatcttgccaatttta

SEQ ID NO: 599430 - DNA, 120 bp, Artificial Sequence
  ENSG00000174437_89 (sequence is synthesized)
agctcatgatgattttttagatacaggttctccctcccccgcaagctccttgtgaagtccaaacccacatttagaattgacagaactggggtgttccaactttcaaagtggaaagcttct

SEQ ID NO: 599431 - DNA, 120 bp, Artificial Sequence
  ENSG00000174437_90 (sequence is synthesized)
aggtttgtcttaggtttctccaggatattaaggtgtttgagctacttaagttcttattttttggaaccaaaaggttggatgaattggctaaaagtcagttttgtcatactggttgtttca

SEQ ID NO: 599432 - DNA, 120 bp, Artificial Sequence
  ENSG00000174437_91 (sequence is synthesized)
ggaagagaaagggaattttcttatttacgattttgtgtctcacttagcctgaaagctttaattcctcagaatagtctttatgtctgtgaaagtaagccatgtgtaaagccatgtgtaaaa

SEQ ID NO: 599433 - DNA, 120 bp, Artificial Sequence
  ENSG00000174437_92 (sequence is synthesized)
ttgtaatttttaaaatttcagtttcccagttcactataatttttttttgttcttttctcccttgaatggcttggcttaaaatgttttcttataataaagaaaaagcctgcctgttctgag

SEQ ID NO: 599434 - DNA, 120 bp, Artificial Sequence
  ENSG00000174437_93 (sequence is synthesized)
tgaagctctacctcacaacaggaagctggtgctaattggtattctgcaggaggcttcttgcagtggtattgcataactgcccttgacttaggaagattttcatcctgcatatcctaaatg

SEQ ID NO: 599435 - DNA, 120 bp, Artificial Sequence
  ENSG00000174437_94 (sequence is synthesized)
gttgacttgctcacagtcaaaaatgtctaagtacatttagatttagctaatgtagattcagattctgaatgtcttttagaatattttgggctttggtatagactcaaagaatttcacatt

SEQ ID NO: 599436 - DNA, 72 bp, Artificial Sequence
  ENSG00000174437_95 (sequence is synthesized)
atattttgggctttggtatagactcaaagaatttcacatttttggctgggcacagtggttcacgcctgttat

SEQ ID NO: 599437 - DNA, 73 bp, Artificial Sequence
  ENSG00000174437_96 (sequence is synthesized)
ctaacatggtgaaacctcgtctctactaatattacaaaaattagctgggcatgttggcaggcgcctataattt

SEQ ID NO: 599438 - DNA, 120 bp, Artificial Sequence
  ENSG00000174437_97 (sequence is synthesized)
aaagattaactaatttccttattgaatgtgagatgaattgctctgaaaagatgtgtttttaaaacacaacatagctttgttgttgctgttattacggagttttgctctgtcgcccaggct

SEQ ID NO: 599439 - DNA, 62 bp, Artificial Sequence
  ENSG00000174437_98 (sequence is synthesized)
ctcccgggttcaagcacttctctgttatatttttagtagagacgggtttcaccatctttgcc

SEQ ID NO: 599440 - DNA, 120 bp, Artificial Sequence
  ENSG00000174437_99 (sequence is synthesized)
aatttgttatatttttagtagagacgggtttcaccatctttgccaggctgatcttgagctcctgtcctcatgatctactcaccttggcctctcagtgctgggattataggcgtgagccac

SEQ ID NO: 599441 - DNA, 120 bp, Artificial Sequence
  ENSG00000174437_100 (sequence is synthesized)
cccagctcaacgtggcctgtttaacttgagttttacattttttaaattccccttagagaatgatttgatcagattattaattgctcatatttcagagaaagcacgagaaaatatagtttt

SEQ ID NO: 599442 - DNA, 120 bp, Artificial Sequence
  ENSG00000174437_101 (sequence is synthesized)
gacatcactttctgtaattttttctttttagaggaggttttacaagttttcatttgcaatgaaaacacaagcctaaatcttacttttccaaactgggcttctgaattataatttgtgaat

SEQ ID NO: 599443 - DNA, 120 bp, Artificial Sequence
  ENSG00000174437_102 (sequence is synthesized)
gcaaatcaagcagtggaaaaattatctttaagaaaatagcttatgtcgctttaaaaaataaaattaatcctttcctaagcatgcttccatctgtattgtctagggaacatcaattcattc

SEQ ID NO: 599444 - DNA, 120 bp, Artificial Sequence
  ENSG00000174437_103 (sequence is synthesized)
atctaaagagtaacttgtctctggaactgaccttttgctgaccgggagtcctcataacttggattttgtgtgggttgttgtgtctttggtgccactgctgctcattcattcagcacctca

SEQ ID NO: 599445 - DNA, 120 bp, Artificial Sequence
  ENSG00000174437_104 (sequence is synthesized)
gtgatgctgtttttcatactgttcgattggtcgggggtgtgatgggcgaagcagtctaatataattaagctagttagggtaagggacagtactgctgatgctgagtgagcctcagtgagt

SEQ ID NO: 599446 - DNA, 120 bp, Artificial Sequence
  ENSG00000174437_105 (sequence is synthesized)
tttattaaagttgttttcgtaaatgaaagaggttgtttgcctttgtcctaagctaacaaaggtagtttatttgtgtagcattttttaaaaatcccttttaaatactctgatgcgctctcc

SEQ ID NO: 599447 - DNA, 120 bp, Artificial Sequence
  ENSG00000174437_106 (sequence is synthesized)
atgctgcttatcagtcgtactatatatacttagtgtctgcactgtcctactctcttagaaaactaattataccttatctcctcaaacttacagtatttccttccccatattcactctcag

SEQ ID NO: 599448 - DNA, 120 bp, Artificial Sequence
  ENSG00000174437_107 (sequence is synthesized)
gaggggggctctgaaggagccagattaggatgcagagcgcagcccgggcgaccgagggcgaggaggcgagccaaggacatcagcccgagggcgcctcgagacgccccgcgtggaccgcgc

SEQ ID NO: 599449 - DNA, 120 bp, Artificial Sequence
  ENSG00000174437_108 (sequence is synthesized)
tcccagctcctcggcctcgccttccaaccatccgcccaccggccccagagcagcgtgcccactgtgagcgccccaccctgcgtctgcagagttaccggctgaagaaggaaaaaccttgct

SEQ ID NO: 599450 - DNA, 120 bp, Artificial Sequence
  ENSG00000174437_109 (sequence is synthesized)
gtcattttatagacagtaaacttgtgtgttgtgtaacctctctacagtgacatagctgttaagagcctgtattgaacctgggcagcttagcccagagttgggttgggttggggttttttt

SEQ ID NO: 599451 - DNA, 120 bp, Artificial Sequence
  ENSG00000174442_0 (sequence is synthesized)
acattggggcgggatgtgggagcggctgaactgcgcagcagaggacttttattctcgtctccttcagaaatttaatgaagaaaagaaaggaatccgtaaagacccatttctctatgaggc

SEQ ID NO: 599452 - DNA, 120 bp, Artificial Sequence
  ENSG00000174442_1 (sequence is synthesized)
tgatgtccaagtgcagttgatcagcaaaggccaaccaaaccctttgaaaaatattctaaatgaaaatgacatagtattcatagtggaaaaagtgcctttagaaaaggaagaaacaagtca

SEQ ID NO: 599453 - DNA, 120 bp, Artificial Sequence
  ENSG00000174442_2 (sequence is synthesized)
tattgaagaacttcaatctgaagaaactgccatatctgatttctctactggcgaaaatgttggaccacttgctttaccagttgggaaggcaaggcagttaattggactttacaccatggc

SEQ ID NO: 599454 - DNA, 120 bp, Artificial Sequence
  ENSG00000174442_3 (sequence is synthesized)
tcacaatcctaatatgacccatttgaagattaatctgccagttactgcccttcctcccctttgggtaagatgtgacagttcagatcctgaaggtacttgttggctaggagctgagcttat

SEQ ID NO: 599455 - DNA, 120 bp, Artificial Sequence
  ENSG00000174442_4 (sequence is synthesized)
cacaacaaacaacagcattacaggaattgtcttatatgtggtcagttgtaaagctgataaaaattattctgtaaatcttgaaaacctaaaaaatttacacaagaaaagacatcacttgtc

SEQ ID NO: 599456 - DNA, 120 bp, Artificial Sequence
  ENSG00000174442_5 (sequence is synthesized)
tactgtaacatccaaaggctttgcccagtatgagctctttaagtcctctgccttggatgatacaatcacagcatcacaaactgcgatcgctttggatatttcctggagtcctgtggatga

SEQ ID NO: 599457 - DNA, 120 bp, Artificial Sequence
  ENSG00000174442_6 (sequence is synthesized)
gattcttcaaatccctccactctcttcaactgcaactctgaatattaaagtggaatcaggagagcccagaggtcctttgaatcatctctacagagaactgaaatttcttcttgttttggc

SEQ ID NO: 599458 - DNA, 120 bp, Artificial Sequence
  ENSG00000174442_7 (sequence is synthesized)
tgatggtttgaggactggtgtcactgaatggctcgagcccctggaagcaaaatctgctgttgaacttgttcaggaatttctgaatgacttaaataagctggatggatttggtgattctac

SEQ ID NO: 599459 - DNA, 120 bp, Artificial Sequence
  ENSG00000174442_8 (sequence is synthesized)
aaaaaaagacactgaggttgagaccttgaagcatgacactgctgcagtcgatcgttccgtcaagcgtcttttcaaagttcggagtgatcttgattttgctgagcaactgtggtgcaaaat

SEQ ID NO: 599460 - DNA, 120 bp, Artificial Sequence
  ENSG00000174442_9 (sequence is synthesized)
gagcagtagtgtgatttcataccaagacttggtgaagtgtttcacattgatcatccagagtctacaacgtggtgatatacagccatggctccatagtggaagtaacagtttactaagtaa

SEQ ID NO: 599461 - DNA, 120 bp, Artificial Sequence
  ENSG00000174442_10 (sequence is synthesized)
gctcattcatcagtcttatcatggaaccatggacacagtttctctcagtgggactattccagttcaaatgcttttggaaattggtttggacaaactaaagaaagattatatcagtttttt

SEQ ID NO: 599462 - DNA, 120 bp, Artificial Sequence
  ENSG00000174442_11 (sequence is synthesized)
cataggtcaggaacttgcatctttgaatcatttggaatacttcattgctccatcagtagatatacaagaacaggtttatcgtgtccaaaaactccaccatattctagaaatattagtcag

SEQ ID NO: 599463 - DNA, 120 bp, Artificial Sequence
  ENSG00000174442_12 (sequence is synthesized)
ttgcatgcctttcattaaatctcaacatgaactcctcttttctttaacacagatctgcataaagtattacaaacaaaatcctcttgatgagcaacacatttttcagctgccagtcagacc

SEQ ID NO: 599464 - DNA, 120 bp, Artificial Sequence
  ENSG00000174442_13 (sequence is synthesized)
aactgctgtaaagaacttatatcaaagtgagaagccacagaaatggagagtggaaatatatagtggtcaaaagaagattaagacagtttggcaactgagtgacagctcacccatagacca

SEQ ID NO: 599465 - DNA, 120 bp, Artificial Sequence
  ENSG00000174442_14 (sequence is synthesized)
ctgatgaagtcctctataagcacaagccaaaaagagaaagagaaaaaaaggtaattattgtagaacctgaaaacagcaatgtatggaaaccctcaaagcagaaaagggaggaagatcctg

SEQ ID NO: 599466 - DNA, 120 bp, Artificial Sequence
  ENSG00000174442_15 (sequence is synthesized)
aagattctcttatgaagctccaaaattgataatcctgtctcagctctgcctcctcaggaggagcattagtagaacagcagtgatgaggacacagagggagcagacagtgggtaccacgat

SEQ ID NO: 599467 - DNA, 120 bp, Artificial Sequence
  ENSG00000174442_16 (sequence is synthesized)
ctccgtaaccatttgcatgtgacttagcaagggctctgaaatgacaaagagaacgagcaccacaaatgagaacaggatcattttagtaaatacagctttatcccaaaagctttaactgta

SEQ ID NO: 599468 - DNA, 120 bp, Artificial Sequence
  ENSG00000174442_17 (sequence is synthesized)
ttgggaaaacttaaaaaatagcatcctcaaattttctgattcttatttgccatgaaatagaacttagtaaattaaatgttatttgaaaatgttataagagctttgtaaatatttcagaaa

SEQ ID NO: 599469 - DNA, 120 bp, Artificial Sequence
  ENSG00000174442_18 (sequence is synthesized)
atatgggataaatgcctgaatttggttcttctacaggtgctataataaagtccatctctcaatacttatactttctaaattcatctcagaatattagcagccatattccacagttcctat

SEQ ID NO: 599470 - DNA, 120 bp, Artificial Sequence
  ENSG00000174442_19 (sequence is synthesized)
aatttttactgggggggatttgtgataggaaagtccttgggaaacatttccaatctttcaaaatattattgtgtatcttaagaagtataggaacttgtatgttgaaatgttgtatggtag

SEQ ID NO: 599471 - DNA, 120 bp, Artificial Sequence
  ENSG00000174442_20 (sequence is synthesized)
ttcttgtatagttaaataataatctttttaagagttaatgataagcatatgttatgtgcattattaataaaatagtggccacttaggtaatacccacttttatcttgtgtgctgggtact

SEQ ID NO: 599472 - DNA, 120 bp, Artificial Sequence
  ENSG00000174442_21 (sequence is synthesized)
ctggttactgagataaataaggcactggacatcctcacgtggagttcacaggctcatcagtgaattctgtaccacatttcaaccttgtttattttagtttaatggaatatacattcttag

SEQ ID NO: 599473 - DNA, 120 bp, Artificial Sequence
  ENSG00000174442_22 (sequence is synthesized)
tattgcctgattatttaaatttgttgagggggattgcatgttgctttattggcctgtaaaaatagctagtttggtaagatttggtctcgcaccttccatctttgctaccacattaaagat

SEQ ID NO: 599474 - DNA, 120 bp, Artificial Sequence
  ENSG00000174442_23 (sequence is synthesized)
gagcttgttaaaaaggaaagcatatttctctgattgcccttatggagaaataaagataaaattcaaagaaacaaataatatgtgttggcatttcttgatgcatagttgcatctttgttat

SEQ ID NO: 599475 - DNA, 120 bp, Artificial Sequence
  ENSG00000174442_24 (sequence is synthesized)
tcgacatctctgatccttttagaccccattacataggaaatgatgtcttctatgaagacagggaccttgttttgttcctggctatatctcatgacttaaacattccctggcaaatagtga

SEQ ID NO: 599476 - DNA, 120 bp, Artificial Sequence
  ENSG00000174442_25 (sequence is synthesized)
gtgcttaataattgcttgccgaatgaacaaatataagatctcaagtattcttttttccttcatcccagttggtatagtggttggcttttcctctccttgcccaagcccactataacaaaa

SEQ ID NO: 599477 - DNA, 120 bp, Artificial Sequence
  ENSG00000174442_26 (sequence is synthesized)
taacaaaaatagtaggtatataaatttataggtatgattctgaaagaataaaacttgaatggataaaatggataaaatgtttatctttcatggtagattaaatgctttaaaatgcttata

SEQ ID NO: 599478 - DNA, 120 bp, Artificial Sequence
  ENSG00000174442_27 (sequence is synthesized)
tttgacattgcttcaaagaaacctgattttaatcataagtagttttggaagattgacttcaagtagagccacattttgagattttgaaaatgatatgtataattatttagtttaattatt

SEQ ID NO: 599479 - DNA, 120 bp, Artificial Sequence
  ENSG00000174442_28 (sequence is synthesized)
aaaggaaaacattgaaatatactgactcacctgcagcaagcatctgattgttgatagagcaagtttccaaagctttgaggtaccaactttccacctaataaaaacccacttgataagtaa

SEQ ID NO: 599480 - DNA, 120 bp, Artificial Sequence
  ENSG00000174442_29 (sequence is synthesized)
agtttggcggttccggtaccgctctcacattggggcgggatgtgggagcggctgaactgcgcagcagaggacttttattctcgtctccttcagtgtcctgcagagataaagtgatgactg

SEQ ID NO: 599481 - DNA, 120 bp, Artificial Sequence
  ENSG00000174442_30 (sequence is synthesized)
actcctgagtgtgaataacgggagagataatgtagttctgtttttcacatgtggttctgcgtttcaggaaatttaatgaagaaaagaaaggaatccgtaaagacccatttctctatgagg

SEQ ID NO: 599482 - DNA, 120 bp, Artificial Sequence
  ENSG00000174442_31 (sequence is synthesized)
ttctttctacattatcaatgtcgatttgctacattaggaatagggattattagtaatcacataaaaggcttaccagttgttattgagcagtgcaactctttaattttctttctacctttt

SEQ ID NO: 599483 - DNA, 120 bp, Artificial Sequence
  ENSG00000174442_32 (sequence is synthesized)
agtttggcggttccggtaccgctctcacattggggcgggatgtgggagcggctgaactgcgcagcagaggacttttattctcgtctccttcagtgagtctaatagtagaaatatataagt

SEQ ID NO: 599484 - DNA, 120 bp, Artificial Sequence
  ENSG00000174442_33 (sequence is synthesized)
gagtaagatgttctaaatgatgtgttgacctcatttttcaattcattggtcctttatgaaatatattttttaatgtgtgaaagatagtttgaaatgcaagtataacacttatgtagagaa

SEQ ID NO: 599485 - DNA, 120 bp, Artificial Sequence
  ENSG00000174442_34 (sequence is synthesized)
aatgtgagggattacagttttgtagctctgacaatgtaattttgagttgtgcctttacatttctttctttcatttcctatagctgataaaaattattctgtaaatcttgaaaacctaaaa

SEQ ID NO: 599486 - DNA, 120 bp, Artificial Sequence
  ENSG00000174442_35 (sequence is synthesized)
taaaaacgagagtgttatttctttatttgtgggaaattacggtatctattttcttccaaacgtaataataattcttagaaaatagggactcctttttgcggaataatccatagggggcga

SEQ ID NO: 599487 - DNA, 120 bp, Artificial Sequence
  ENSG00000174442_36 (sequence is synthesized)
ggccaactctcgcgagtcgaggtatcttctccccaaccactgctcttattttaattattgcagacggaagttgaagactattgacatagtaaatagctctgggtggcttgaaacgaaagt

SEQ ID NO: 599488 - DNA, 120 bp, Artificial Sequence
  ENSG00000174442_37 (sequence is synthesized)
tatgacccatttgaagattaatctgccagttactgcccttcctcccctttggctgataaaaattattctgtaaatcttgaaaacctaaaaaatttacacaagaaaagacatcacttgtct

SEQ ID NO: 599489 - DNA, 120 bp, Artificial Sequence
  ENSG00000174442_38 (sequence is synthesized)
acggtagcctggaagaaaggatattctttactaacatggttacctgcagccaggtgcatttcaagtgaagtgtgctgatgaagtcctctataaggctggagtgcagtggcgctatctcgg

SEQ ID NO: 599490 - DNA, 120 bp, Artificial Sequence
  ENSG00000174444_0 (sequence is synthesized)
aagcacttccttttcctgtggcagcagccgggctgagaggagcgtggctgtctcctctctccgccatggcgtgtgctcgcccactgatatcggtgtactccgaaaagggggagtcatctg

SEQ ID NO: 599491 - DNA, 120 bp, Artificial Sequence
  ENSG00000174444_1 (sequence is synthesized)
gcaaaaatgtcactttgcctgctgtattcaaggctcctattcgaccagatattgtgaactttgttcacaccaacttgcgcaaaaacaacagacagccctatgctgtcagtgaattagcag

SEQ ID NO: 599492 - DNA, 120 bp, Artificial Sequence
  ENSG00000174444_2 (sequence is synthesized)
gtcatcagactagtgctgagtcttggggtactggcagagctgtggctcgaattcccagagttcgaggtggtgggactcaccgctctggccagggtgcttttggaaacatgtgtcgtggag

SEQ ID NO: 599493 - DNA, 120 bp, Artificial Sequence
  ENSG00000174444_3 (sequence is synthesized)
gccgaatgtttgcaccaaccaaaacctggcgccgttggcatcgtagagtgaacacaacccaaaaacgatacgccatctgttctgccctggctgcctcagccctaccagcactggtcatgt

SEQ ID NO: 599494 - DNA, 120 bp, Artificial Sequence
  ENSG00000174444_4 (sequence is synthesized)
ctaaaggtcatcgtattgaggaagttcctgaacttcctttggtagttgaagataaagttgaaggctacaagaagaccaaggaagctgttttgctccttaagaaacttaaagcctggaatg

SEQ ID NO: 599495 - DNA, 120 bp, Artificial Sequence
  ENSG00000174444_5 (sequence is synthesized)
atatcaaaaaggtctatgcctctcagcgaatgagagctggcaaaggcaaaatgagaaaccgtcgccgtatccagcgcaggggcccgtgcatcatctataatgaggataatggtatcatca

SEQ ID NO: 599496 - DNA, 120 bp, Artificial Sequence
  ENSG00000174444_6 (sequence is synthesized)
aggccttcagaaacatccctggaattactctgcttaatgtaagcaagctgaacattttgaagcttgctcctggtgggcatgtgggacgtttctgcatttggactgaaagtgctttccgga

SEQ ID NO: 599497 - DNA, 120 bp, Artificial Sequence
  ENSG00000174444_7 (sequence is synthesized)
agttagatgaattgtacggcacttggcgtaaagccgcttccctcaagagtaactacaatcttcccatgcacaagatgattaatacagatcttagcagaatcttgaaaagcccagagatcc

SEQ ID NO: 599498 - DNA, 120 bp, Artificial Sequence
  ENSG00000174444_8 (sequence is synthesized)
aaagagcccttcgagcaccacgcaagaagatccatcgcagagtcctaaagaagaacccactgaaaaacttgagaatcatgttgaagctaaacccatatgcaaagaccatgcgccggaaca

SEQ ID NO: 599499 - DNA, 120 bp, Artificial Sequence
  ENSG00000174444_9 (sequence is synthesized)
ccattcttcgccaggccaggaatcacaagctccgggtggataaggcagctgctgcagcagcggcactacaagccaaatcagatgagaaggcggcggttgcaggcaagaagcctgtggtag

SEQ ID NO: 599500 - DNA, 120 bp, Artificial Sequence
  ENSG00000174444_10 (sequence is synthesized)
gtaagaaaggaaagaaggctgctgttggtgttaagaagcagaagaagcctctggtgggaaaaaaggcagcagctaccaagaaaccagcccctgaaaagaagcctgcagagaagaaaccta

SEQ ID NO: 599501 - DNA, 120 bp, Artificial Sequence
  ENSG00000174444_11 (sequence is synthesized)
acaggcagtgagaaacatgacttggtgtgctctgtaaagcttggttagaatttttttaaagtgacattttgttggccataatttagactgttacattttatatagtgtggtataaaatgg

SEQ ID NO: 599502 - DNA, 120 bp, Artificial Sequence
  ENSG00000174444_12 (sequence is synthesized)
ggcatggatttatactaagtccatggagttcagtggaaggggaatgatttaaaaaaagttgtggttttctaaataatgtggcttgaaaaataggtgtaacaggacttggtcagaaacgca

SEQ ID NO: 599503 - DNA, 120 bp, Artificial Sequence
  ENSG00000174444_13 (sequence is synthesized)
gaggctgttcaagtttagctccccaccagatggaaaataggttaaattctgtaaagatttaactttaaccacaagagggcacaactggagagcacaatttttttggtactgcagtaaaat

SEQ ID NO: 599504 - DNA, 120 bp, Artificial Sequence
  ENSG00000174444_14 (sequence is synthesized)
tgattacctcttgagaagtgttctttttaaccagctataacaatagagttgagtattttcacccatggtttgaaaaagtgccagaaggccacactggcccacatctgtaatcccaacact

SEQ ID NO: 599505 - DNA, 120 bp, Artificial Sequence
  ENSG00000174444_15 (sequence is synthesized)
tcaagaccagcctggtcaacatgatgaaatctcgtctctactgaaaatataaaaaatagccagtcatggtgcatgcctgtaaccccagctacttggaggctgaggcaagagaatcacttg

SEQ ID NO: 599506 - DNA, 83 bp, Artificial Sequence
  ENSG00000174444_16 (sequence is synthesized)
accattgccctccagcctgggcgtcagagcaagactctctgaaaagtaccagaagcatttttcaggactgcctgtgtgtcttg

SEQ ID NO: 599507 - DNA, 120 bp, Artificial Sequence
  ENSG00000174444_17 (sequence is synthesized)
aagtaccagaagcatttttcaggactgcctgtgtgtcttggtgattatgttaaccaactgtgttcaaaagaagtacccatgaaatgcctccagatataagggtgtttttttttacccata

SEQ ID NO: 599508 - DNA, 120 bp, Artificial Sequence
  ENSG00000174444_18 (sequence is synthesized)
aagctaaactgcaaatattaccctagaattaacctcttgtcctgtgtcaaaagtcttgttttgcatctggattgttaaactgtcagcttctctctgacagtctcgaactgtcaagacagt

SEQ ID NO: 599509 - DNA, 120 bp, Artificial Sequence
  ENSG00000174444_19 (sequence is synthesized)
ctcagttcacagccaaggtgatctgttaaccctccccatttccagggccaaatctcagttcttaagcacgtcgtttcttagcacggctttattttcatgctctttatttctctattttgt

SEQ ID NO: 599510 - DNA, 120 bp, Artificial Sequence
  ENSG00000174444_20 (sequence is synthesized)
gcagccttacccctttaaagtccactgtgagtcctaccctgcagggcctcttaacacagtagagttcatgtgctactgatttggtgcctgccttcaaacacatgtgcaagttttgtgggg

SEQ ID NO: 599511 - DNA, 120 bp, Artificial Sequence
  ENSG00000174444_21 (sequence is synthesized)
ttaaagatagccacttggtggcacaccacattggaagtgctgttcacccggtcatttgaaacggtgtttgaccacttggtgcgcaaatggcctatcggattaaaggatagccaaacccaa

SEQ ID NO: 599512 - DNA, 120 bp, Artificial Sequence
  ENSG00000174444_22 (sequence is synthesized)
aactgcttacatatattgactaggtatactctgcaagtctactcagcttttgttatgatgagattccacttaaggtccgtgtttctgaaacaaatgattttgtggaagttctgatttatg

SEQ ID NO: 599513 - DNA, 120 bp, Artificial Sequence
  ENSG00000174444_23 (sequence is synthesized)
gctgaaagagttgcaccattgatggttgaaacttcataattaataagttctcaggtaccttttatagctcttaagccataaagatgatttgtgtttcttttgttggaatacaggctccct

SEQ ID NO: 599514 - DNA, 120 bp, Artificial Sequence
  ENSG00000174444_24 (sequence is synthesized)
tagaagagaataatttgaatgtttttagcataaaatattttagttcatggatattccagttacactgatttgatcttgacaaatgagtgcattcagttatcaaatgtactccagaaatac

SEQ ID NO: 599515 - DNA, 120 bp, Artificial Sequence
  ENSG00000174444_25 (sequence is synthesized)
atgttacataccggtttaaaaattttttaatcaaaaatatttcgtatcagtgatacaaaatgccccactttttctttcacgtgaacctttgttaaaattgcacattcttttcattctgaa

SEQ ID NO: 599516 - DNA, 120 bp, Artificial Sequence
  ENSG00000174444_26 (sequence is synthesized)
agtagtttagtatatccttagaaaacttccaacttaaacttgcctgttgcgtacccatcgcatttttatttaactgtcaaaatgatgagattccacttaattggtccgtgtttctgaaac

SEQ ID NO: 599517 - DNA, 120 bp, Artificial Sequence
  ENSG00000174444_27 (sequence is synthesized)
acatgatatttgtggaaattctgacttggcaaacggaataccattttgcttttattggttgtataaaatgtttgattttttttttttctccaaaagtttcaggataaccaagtaagtgtc

SEQ ID NO: 599518 - DNA, 120 bp, Artificial Sequence
  ENSG00000174444_28 (sequence is synthesized)
aagaacctcagagcccgattacttgggtttgaatcctaactgctgtttatggctctgtgtaaccttggcaagttattgtgcccagtttaatcatctgtaaaaaggaattaaaactctgaa

SEQ ID NO: 599519 - DNA, 120 bp, Artificial Sequence
  ENSG00000174444_29 (sequence is synthesized)
agactggtcatctctgatggaatttagcggcctgggtctggtttattgatgataatacggtgtaaaaatattacttttttttgtcttgaagagaaggggcttcatttatatggggttatt

SEQ ID NO: 599520 - DNA, 120 bp, Artificial Sequence
  ENSG00000174444_30 (sequence is synthesized)
ttgcttgcaatgatgtcgtaatttgcgtcttactctgttctcagcgacagttgcctgctgtcagtaagctggtacagaaggttgacgaaaattcttactgagcaagaaataaccttgttg

SEQ ID NO: 599521 - DNA, 120 bp, Artificial Sequence
  ENSG00000174444_31 (sequence is synthesized)
gcaacagtatgccaaaatgagactcacctggtctatatttttggttttttgttttgtttttgagacagagttgttctgtctcacccacgctggagtgtagtggtgtgatcgtggcttact

SEQ ID NO: 599522 - DNA, 120 bp, Artificial Sequence
  ENSG00000174444_32 (sequence is synthesized)
gtgagccaccacacccggcctggtccatgtttatgagaagtgatagtgtagtagatattttggagagcatagtggctaaaaataaagcttcagttgagcttcctgttctttggttgatta

SEQ ID NO: 599523 - DNA, 120 bp, Artificial Sequence
  ENSG00000174444_33 (sequence is synthesized)
acacactcccctgccttttcccaaggaatttccaggaggacaaggagtcaacaaggctttaaacaggggaaggatgccaacacctagttttccgtatcccgggtggtgcctctacttatg

SEQ ID NO: 599524 - DNA, 120 bp, Artificial Sequence
  ENSG00000174444_34 (sequence is synthesized)
gcaagtgtgtccatcagcagaaagaataaatcgcctcttggaacacttgccaccttccatctcgtttgatgacgtacacgttttctcctgagacaagcaagctcccacacggtcaacccc

SEQ ID NO: 599525 - DNA, 120 bp, Artificial Sequence
  ENSG00000174444_35 (sequence is synthesized)
agagtggcaagaggcttagggcggggatccagacacccagggaaagaagtgctgtcccaggaccccagccaaaagaagagactagactcactgaaggagacgagaataaaagtcctctgc

SEQ ID NO: 599526 - DNA, 120 bp, Artificial Sequence
  ENSG00000174444_36 (sequence is synthesized)
tgcgcagttcagccgctcccacatcccgccccaatgtgagagcggtaccggaaccgccaaactgaactgcgcgccggaccggcgacgtcaggggtcatggccccgccccgccgggactat

SEQ ID NO: 599527 - DNA, 120 bp, Artificial Sequence
  ENSG00000174444_37 (sequence is synthesized)
gcataccaggtagatcaagatgcacacaccagaagatgatagagtatgacaggatccgagctacaagcaaggagcttggagtcaacaaggctttaaacaggggaaggatgccaacaccta

SEQ ID NO: 599528 - DNA, 120 bp, Artificial Sequence
  ENSG00000174446_0 (sequence is synthesized)
agcccggaggttggctatgtgaccaggcaacatgctgagccggcttcaggaactgcgcaaggaggaggagacgctgctgcggttgaaggcagccctgcacgaccagctgaaccgcctcaa

SEQ ID NO: 599529 - DNA, 120 bp, Artificial Sequence
  ENSG00000174446_1 (sequence is synthesized)
ggttgaagaattagccctccaatcaatgatcagttctagaagaggggatgagatgctgtcttctcacactgtacctgaacagtcacatgatatgttggtgcatgtagacaatgaagcatc

SEQ ID NO: 599530 - DNA, 120 bp, Artificial Sequence
  ENSG00000174446_2 (sequence is synthesized)
aatcaaccaaacaaccctggagctgagcacaaagagtcatgtgacggaagaggaggaggaggaagaggaagaagaatcagattcctaaaggagggggaaagccaggctggtcagttatac

SEQ ID NO: 599531 - DNA, 120 bp, Artificial Sequence
  ENSG00000174446_3 (sequence is synthesized)
aaattgcatttctaaggctcaggctacttctcctcaaggaaatcatcttgccctgggccctgtgatctgcttgaaaggaaagcaagaactataaggaggatgtgtagttgcaaaaatggc

SEQ ID NO: 599532 - DNA, 120 bp, Artificial Sequence
  ENSG00000174446_4 (sequence is synthesized)
tccatcggtaactcaagcttcagaatgttatgacatacagaaaatcaaagatgctgtgtcttagcattgagtaatatgggtggtgctgtctgtaatctggtcagattcagttaactgttc

SEQ ID NO: 599533 - DNA, 120 bp, Artificial Sequence
  ENSG00000174446_5 (sequence is synthesized)
tctttgaagaaaaccaattaaagactgtttgcatgccgctgaacccttgtgagcagttaggacacagtctaggacagaaagatgacaaggggaaggactgagggccgtctgagagcacaa

SEQ ID NO: 599534 - DNA, 120 bp, Artificial Sequence
  ENSG00000174446_6 (sequence is synthesized)
gctgtttctacctctcagaggcattgaaatattgcatgctataaactgctttgtgtatctgttaccacctctcacttgagacatcactcactggtaaaatgttttataaataaatttata

SEQ ID NO: 599535 - DNA, 120 bp, Artificial Sequence
  ENSG00000174446_7 (sequence is synthesized)
agtagccatcatggagcctgctggtttctagatagcgacagagagaagcagcagttccttctctgaggaaaagatacaacaggatggtttgaaatccatttctggtccttaagagagatg

SEQ ID NO: 599536 - DNA, 61 bp, Artificial Sequence
  ENSG00000174446_8 (sequence is synthesized)
aggatggtttgaaatccatttctggtccttaagagagatgtgccatgcttggaagactgga

SEQ ID NO: 599537 - DNA, 120 bp, Artificial Sequence
  ENSG00000174446_9 (sequence is synthesized)
catggcaaaccaccgggcaggggactcgctctttgttgcttcccaaacacttagacgccagcagcatgggttggtgtgctgggctggttaaggccgatggtggagcagagccaacctgca

SEQ ID NO: 599538 - DNA, 120 bp, Artificial Sequence
  ENSG00000174446_10 (sequence is synthesized)
aaatccacttcctcagcatcagatctcttgataaaagcatgaacctgcatgtaaggaaacgagaggacgtggtgttaaaaagaaacaaaaaaacaaaacccaccaggaaggaaaatccaa

SEQ ID NO: 599539 - DNA, 120 bp, Artificial Sequence
  ENSG00000174446_11 (sequence is synthesized)
gagtttcaggtctagagcttgtgctgcacttggaaagagcacctggcacctgcccctgagcaacagtggggccagctgcaggcccaaagacctgctccaccagtcacagcagctgtgagg

SEQ ID NO: 599540 - DNA, 120 bp, Artificial Sequence
  ENSG00000174446_12 (sequence is synthesized)
ctctgccttaaatgcctcacaggcttgttagaagggacaaagaaaatgatggacttagtgcatattatatactatatacaccgtctatggctgtccagatatttacagtattacttagct

SEQ ID NO: 599541 - DNA, 120 bp, Artificial Sequence
  ENSG00000174446_13 (sequence is synthesized)
ccctcctccattcctcccgagcgaccatttccccccaacctgggcctctgtggtgaccacctgctgcggccagttctccgctactcactagctgtggtggcgccaatttagaggtttaca

SEQ ID NO: 599542 - DNA, 120 bp, Artificial Sequence
  ENSG00000174446_14 (sequence is synthesized)
caagtgcaggcctaggagagaatgcaaagtctgctctgctcccatgctgcttgggtggtgaagaactgttgtaaatcacattacctagcccaaagggctctgagaagtgctgataacagt

SEQ ID NO: 599543 - DNA, 120 bp, Artificial Sequence
  ENSG00000174446_15 (sequence is synthesized)
tttctggtttaataaggtggcaactctccattaaccaccttcctaccagctagttatacactaattaattaagtagttactaatgttttacctccatcctcctcgtcatccattctgtct

SEQ ID NO: 599544 - DNA, 120 bp, Artificial Sequence
  ENSG00000174446_16 (sequence is synthesized)
agttactcagatgaacccgggggagagtggagatttttgtaggacgatgtcaaaactcttgattttttgtgaataagtaaccttgagattcaagagtgtggcttcaagtacaaggcacag

SEQ ID NO: 599545 - DNA, 120 bp, Artificial Sequence
  ENSG00000174448_0 (sequence is synthesized)
atggacttcaaggcaattgcccaacaaactgcccaagaagttttaggttataatcgagatacatcaggctggaaagtggttaaaacttcaaaaaagataactgtttccagtaaggcttct

SEQ ID NO: 599546 - DNA, 120 bp, Artificial Sequence
  ENSG00000174448_1 (sequence is synthesized)
agaaaattccatggaaatctatatcgtgttgaagggataattccagaatcaccagctaaactatctgatttcctctaccaaactggagacagaattacatgggataaatcattgcaagtg

SEQ ID NO: 599547 - DNA, 120 bp, Artificial Sequence
  ENSG00000174448_2 (sequence is synthesized)
gccgtgggctccatttcccctcgagactttatcgacttagtgtacatcaagcgctacgaaggaaatatgaacattatcagttctaaaagtgtggattttccagaatatcctccatcttca

SEQ ID NO: 599548 - DNA, 120 bp, Artificial Sequence
  ENSG00000174448_3 (sequence is synthesized)
aattatatccgcggttataaccatccttgtggctttgtatgttcaccaatggaagaaaacccagcatattccaaactagtgatgtttgtccagacagaaatgagaggaaaattgtcccca

SEQ ID NO: 599549 - DNA, 120 bp, Artificial Sequence
  ENSG00000174448_4 (sequence is synthesized)
tcaataattgaaaaaaccatgccttccaacttagtaaacttcatcctcaatgcaaaagatggaataaaggcacacagaactccatcaagacgtggatttcatcataatagtcattcatga

SEQ ID NO: 599550 - DNA, 120 bp, Artificial Sequence
  ENSG00000174448_5 (sequence is synthesized)
ctccgcagtcacagcagagctcgacacccgcgctcgctttcaaaccgccccaacatggcgccggcctgcggtgcgcatgcgcggcagtggggcgccgggcgcgagcggagatgagggagc

SEQ ID NO: 599551 - DNA, 120 bp, Artificial Sequence
  ENSG00000174448_6 (sequence is synthesized)
ggccggagaagagaggatgctgttgagcgttaggtcgcgacccctgctggaagaggccatcccaatgttggtttatgtttattttccactgaccctatgagtgaagatatccttgaccat

SEQ ID NO: 599552 - DNA, 120 bp, Artificial Sequence
  ENSG00000174448_7 (sequence is synthesized)
gagtccatctgaatatgttccagctcatccgacgttccaccaccatgttaagagatatggagatttccacaaggatttggagaggagccccagtagttactaaaattctgcattagatct

SEQ ID NO: 599553 - DNA, 120 bp, Artificial Sequence
  ENSG00000174448_8 (sequence is synthesized)
aaactattctagacagtattcttgtacacatggctgaagatagttcataaaaataagaactcatagttgtacaagaatatggcattaaataccgtttttaatctcacgtaagaatgatgt

SEQ ID NO: 599554 - DNA, 120 bp, Artificial Sequence
  ENSG00000174448_9 (sequence is synthesized)
taaataagtgttattagtatatttttatcttttgcttttgtccctgtaaaatcctctgtataaggaccaataagaaagcagatacagtcagaggtcagcattaactaaaagttaaaatac

SEQ ID NO: 599555 - DNA, 120 bp, Artificial Sequence
  ENSG00000174448_10 (sequence is synthesized)
tactaaaattctgcattagatctgtcaggaaagcttcccctaactgaaagctggatgatgacccgaaggaccagtgagactgcagcttccggaactcattcacagcagtaataatagatg

SEQ ID NO: 599556 - DNA, 120 bp, Artificial Sequence
  ENSG00000174448_11 (sequence is synthesized)
cacctatagtcccagctactcaggaggctaacacaggaggactgcttgagcacaggagtttgaggctgtcatgcaccatgattgtgcctgtgaatagccagtacactacagactgggcaa

SEQ ID NO: 599557 - DNA, 120 bp, Artificial Sequence
  ENSG00000174448_12 (sequence is synthesized)
attgtgcctgtgaatagccagtacactacagactgggcaacatagtgagaccctgtctctgaaaaatatatatatatatttttttcttttacaaaccagaaaaaaaagtgtttttacttt

SEQ ID NO: 599558 - DNA, 120 bp, Artificial Sequence
  ENSG00000174448_13 (sequence is synthesized)
tgttagtttttcattttcatttttcctgcatttgacagctaattatttgtggatttttattcccctttgagaaaaagataactgtttccagtaaggcttctagaaaattccatggaaatc

SEQ ID NO: 599559 - DNA, 120 bp, Artificial Sequence
  ENSG00000174448_14 (sequence is synthesized)
caatcttctatttacaattactgttttaaattcaatgccattgatgtatctggaatttcagtgctgcttcattagctataataaattattttatagtaataaatagaaattattaagtca

SEQ ID NO: 599560 - DNA, 120 bp, Artificial Sequence
  ENSG00000174450_0 (sequence is synthesized)
gctgcgtggtacgtgactggaggtgtatccttgtcctcgtctgaatcacgctgatgtggccccaaccccacctccctccccaccccatgatgtcagaaaaaaccagacagaacaaattgg

SEQ ID NO: 599561 - DNA, 120 bp, Artificial Sequence
  ENSG00000174450_1 (sequence is synthesized)
ctgaggccaagaaaaagtttacagactatcgtcagtggaacattgctggtgttggtaccagagcaactgacaccaaaaagaagaaaataaataatggcactaaccctgagacaaccactt

SEQ ID NO: 599562 - DNA, 120 bp, Artificial Sequence
  ENSG00000174450_2 (sequence is synthesized)
cggagggttgccattcacctgaggatacacaacagaaccgagcgcagctgaaagaagaaaagaaggcaagccaccaacatcaggaagccctaaggcgggagatagaggcccaggatcata

SEQ ID NO: 599563 - DNA, 120 bp, Artificial Sequence
  ENSG00000174450_3 (sequence is synthesized)
caatacgaattctcacgtgtcagaaaactgaactggagacagcgctctattacagccaggatgctgccaggaaatttgaagatgggaacctgggcaccccatcatccttcaacctggcac

SEQ ID NO: 599564 - DNA, 120 bp, Artificial Sequence
  ENSG00000174450_4 (sequence is synthesized)
tttcacaggcctttagggggagtcctttgggctgtgtctcaacctctctcattccaggagagtccaaggatctcgccggccgcttgcatcattcctggcactttgcaggagagttacagc

SEQ ID NO: 599565 - DNA, 120 bp, Artificial Sequence
  ENSG00000174450_5 (sequence is synthesized)
acaaaggagagggacgccctgagtctggaactgtacaggaacaccataaccaatgaggagctgaagaagaaaaatgccgaactacaagaaaaacttcgacttgcagaatctgaaaagtct

SEQ ID NO: 599566 - DNA, 120 bp, Artificial Sequence
  ENSG00000174450_6 (sequence is synthesized)
gagatccagctcaacgtgaaggagctaaaaaggaaactggagagggccaagttcctgctgccacaggttcaaaccaacactttgcaggaggagatgtggaggcaggaggaggagctacgg

SEQ ID NO: 599567 - DNA, 120 bp, Artificial Sequence
  ENSG00000174450_7 (sequence is synthesized)
gagcaggaaaagaagatacggaagcaggaggagaagatgtggagacaggaggagagactgcgggagcaggaggggaagatgcgggagcaggaggagaagatgcggagacaggaggagatg

SEQ ID NO: 599568 - DNA, 120 bp, Artificial Sequence
  ENSG00000174450_8 (sequence is synthesized)
cgagagaaggaggagaggatacgagatcagaaagagaagatgcaggagaggctgccagagcacgaggagcggtgctcagagccctgcctccctccctccaaagttctttgtaatatgagc

SEQ ID NO: 599569 - DNA, 120 bp, Artificial Sequence
  ENSG00000174450_9 (sequence is synthesized)
cacactggcagtgtggagcctgcaggaggagaggctggggagggttctccgcaggacaaccccactgcacaggagatcatgcagctgttttgtgggatgaagaacgcccagcagtgccca

SEQ ID NO: 599570 - DNA, 120 bp, Artificial Sequence
  ENSG00000174450_10 (sequence is synthesized)
ggattaggcagtacctcctgcatcccattcttctaccgaggagacaagagaaagatgaagatcatcaatatctaaaagttggcactgtcaacaaggcctacagaagcataagccgccatg

SEQ ID NO: 599571 - DNA, 120 bp, Artificial Sequence
  ENSG00000174450_11 (sequence is synthesized)
agaaggagctgcgggagcaggagaaggagctgcgggagcagaagaagctgcgggagcaggaggagcagatgcaggagcaggaggagaagatgtgggagcaggaggagaagatgcgggagc

SEQ ID NO: 599572 - DNA, 120 bp, Artificial Sequence
  ENSG00000174450_12 (sequence is synthesized)
caggaggagaggctgtgggagcaggagaagcagatgcgggagcaggagcagaagatgcgggaccaagaggagaggatgtgggagcaggacgagaggctacgggagaaggaggagaggatg

SEQ ID NO: 599573 - DNA, 120 bp, Artificial Sequence
  ENSG00000174450_13 (sequence is synthesized)
cgggagcaggagaagatgtgggagcaggtggagaagatgcgggaggagaagaagatgcaggagcaggagaagaagacgcgggaccaggaggagaagatgcaagaggaggagaggatacgg

SEQ ID NO: 599574 - DNA, 120 bp, Artificial Sequence
  ENSG00000174450_14 (sequence is synthesized)
gagcgggagaagaagatgcgggaagaggaggagacgatgcgggagcaggaggagaagatgcagaagcaggaggagaatatgtgggagcaggaagagaaggagtggcagcagcagaggctg

SEQ ID NO: 599575 - DNA, 120 bp, Artificial Sequence
  ENSG00000174450_15 (sequence is synthesized)
tatgggagcaggaggagaagatacgggaccaggaggagatgtgggggcaggagaagaagatgtggcggcaggagaagatgcgggagcaggaagatgtggagacaggaggagaggctgcag

SEQ ID NO: 599576 - DNA, 120 bp, Artificial Sequence
  ENSG00000174450_16 (sequence is synthesized)
gagcaggagaagcagatgtgggagcaggaggagaagatgcgggatcaggagcagaagatgtgggaccaggaggagaggatgtgggagcaggacgagaggctgcgggagaaggaggagaga

SEQ ID NO: 599577 - DNA, 120 bp, Artificial Sequence
  ENSG00000174450_17 (sequence is synthesized)
atgcgggagcagaagaagatgtggcagcaggaggagaagatgcgggaggagaagaagacgcaggagcaggagaagaagacatgggaccaggaggagaagatgcgagaggaggagaggatg

SEQ ID NO: 599578 - DNA, 120 bp, Artificial Sequence
  ENSG00000174450_18 (sequence is synthesized)
cgggagcgggagaagaagatgcgggaggaggaggagatgatgcgggagcaggaggagaagatgcaggagcaggaagagaagatgcgggagcaggaggagaagatgtgggagcaggaagag

SEQ ID NO: 599579 - DNA, 120 bp, Artificial Sequence
  ENSG00000174450_19 (sequence is synthesized)
aagatgcaggagcaggaggagaagatgtgggagcaggaggagaagatgtgggagcaggaagaagaagatgtgggagcagcagaggctgccggaacagaaggagaagctgtgggaacacga

SEQ ID NO: 599580 - DNA, 120 bp, Artificial Sequence
  ENSG00000174450_20 (sequence is synthesized)
gaagatgcaggagcaggagatcaggagcagaagatgtgggaccagaaggagaggatgtgggagcaggacgagaggctgcgggagaaggaggagagaatgcgggagcagaagatgtggcag

SEQ ID NO: 599581 - DNA, 120 bp, Artificial Sequence
  ENSG00000174450_21 (sequence is synthesized)
caggtggagaagatgcgggagaagaagaagacgcaggaggagaagatgcaggagcagcaagagaagatgcaggagcaggaggagatgatgtgggagcaggaagagaagatgcaggagcag

SEQ ID NO: 599582 - DNA, 120 bp, Artificial Sequence
  ENSG00000174450_22 (sequence is synthesized)
aagatgcgggagcaggaggagaagatgcggggccaggaggagaagatgtggggccaggaggagaagatgtgggggcaggaggagaagatgtgggggcaggaggagatgcgagagaaggag

SEQ ID NO: 599583 - DNA, 76 bp, Artificial Sequence
  ENSG00000174450_23 (sequence is synthesized)
tttactttaaattgtggtaaaatactagccaggccttgtggccgaaacctacaaccgcagcactttgggagaccta

SEQ ID NO: 599584 - DNA, 90 bp, Artificial Sequence
  ENSG00000174450_24 (sequence is synthesized)
atgaaaccccgtctctactaaaaatacaagttagccgggcgtggttgtgcacgcctgtaatcacagctactcacgcattccagcctggat

SEQ ID NO: 599585 - DNA, 120 bp, Artificial Sequence
  ENSG00000174450_25 (sequence is synthesized)
aaaagtttctacctgaggactctgatatctatgtatgtttctattgtttttcttcttggtctttctcatttagtcttgttttgttttatggcattcctagtaaacttttatgtgcctcca

SEQ ID NO: 599586 - DNA, 120 bp, Artificial Sequence
  ENSG00000174453_0 (sequence is synthesized)
agcctcgtctaaagcagctctgggatttcgacagagctgggctcagaagccagttgttggcgctgtccgtggtgctgaggaattcccggctgccggcagaatgagctccaaatcagcaat

SEQ ID NO: 599587 - DNA, 120 bp, Artificial Sequence
  ENSG00000174453_1 (sequence is synthesized)
ctgcaaactgctcttactgatgcagaaacccagctaaagttgctcctttccttcacatccacagttagtattttccggtgtgtaagaggggattcaagcaacacactgtggacgatggtg

SEQ ID NO: 599588 - DNA, 120 bp, Artificial Sequence
  ENSG00000174453_2 (sequence is synthesized)
atggtattgccagcggagtgggctttaagctacagcatgctgttgctgtttgtgatcctcagagcctagccaaatcacctctactgccgtagcaaacactgtgtaagtgaactcatgtgt

SEQ ID NO: 599589 - DNA, 120 bp, Artificial Sequence
  ENSG00000174453_3 (sequence is synthesized)
ggaggaggcgtaatcagccgggaaatttcatagaaggatctaagaaaatgctaaaaataagttcaacatgattctgctactggggtctggatttctacaggaccagctttgcttcttgct

SEQ ID NO: 599590 - DNA, 120 bp, Artificial Sequence
  ENSG00000174453_4 (sequence is synthesized)
ttgaattctgaagacaggtccaaagcaaatttcttatatgtgtctgctgtgtttctttctggaagggcgggagactgcttctttactgtgttttgaaatgggaggtagagagaatggatt

SEQ ID NO: 599591 - DNA, 120 bp, Artificial Sequence
  ENSG00000174453_5 (sequence is synthesized)
gcctttaattcatgcctaaaaaatgtattctttgggtaattaaagaggaactgctttcttaaaacatacctgaccttttagttcattttgggctgtgacccctaccaccaccattaacct

SEQ ID NO: 599592 - DNA, 120 bp, Artificial Sequence
  ENSG00000174453_6 (sequence is synthesized)
ccagagtgattagcctacccctcttgtattcccatggaaggagctgagtatatttaatattaggagcacatccagaagtctttgaagagggggatggctcttcatattcatgaagcttgc

SEQ ID NO: 599593 - DNA, 120 bp, Artificial Sequence
  ENSG00000174453_7 (sequence is synthesized)
atacttctgttggtcatccctggattggtcacctctgctgctatcagtcatgaagactatcctgctgatgaaggtgaccagatctccagtaatgacaatctgatctttgatgactatcga

SEQ ID NO: 599594 - DNA, 120 bp, Artificial Sequence
  ENSG00000174453_8 (sequence is synthesized)
gggaaagggtgtgtcgatgacagcggctttgtatacaagttgggagaacgatttttccctgggcattccaactgtccatgtgtctgtgctctagatggacctgtttgcgaccaaccagaa

SEQ ID NO: 599595 - DNA, 120 bp, Artificial Sequence
  ENSG00000174453_9 (sequence is synthesized)
tgccctaaaattcacccaaagtgtactaaagtggaacacaatggatgctgtcctgagtgcaaagaagtaaaaaacttctgtgaatatcacgggaaaaattacaaaatcttggaggaattt

SEQ ID NO: 599596 - DNA, 120 bp, Artificial Sequence
  ENSG00000174453_10 (sequence is synthesized)
aagccctctccatgtgaatggtgtcgctgtgagcccagcaatgaagttcactgtgttgtagcagactgcgcagttcctgagtgtgtcaacccagtctatgaaccagaacaatgttgtcct

SEQ ID NO: 599597 - DNA, 120 bp, Artificial Sequence
  ENSG00000174453_11 (sequence is synthesized)
gtctgcaaaaatggtccaaactgctttgcaggaacgacgataattccagctggcattgaagtgaaagtggacgaatgtaacatctgtcattgtcacaacggggactggtggaagcctgct

SEQ ID NO: 599598 - DNA, 120 bp, Artificial Sequence
  ENSG00000174453_12 (sequence is synthesized)
cagtgttcgaaacgtgaatgccaaggcaagcagactgtgtaggacaaacttccacccaatgatgagttcttaggaaaggatgctatggcttcaacactgcacatgtttaacacaaaacaa

SEQ ID NO: 599599 - DNA, 120 bp, Artificial Sequence
  ENSG00000174453_13 (sequence is synthesized)
aacaaacaaactcctgccagctacaacagggtcaccagcaaaactttctagggttgacaaaagtgaatattttcctaagaggaaatttctttctctcttgctatataaaatatatatagt

SEQ ID NO: 599600 - DNA, 120 bp, Artificial Sequence
  ENSG00000174453_14 (sequence is synthesized)
atatagctatctaaatcgcttttgtatttaccaatgcttgatggtgacttgacgactggattgctggaacaaaaagaaagaaatagccttgcacaggctccttccctggtaatgcctctg

SEQ ID NO: 599601 - DNA, 120 bp, Artificial Sequence
  ENSG00000174453_15 (sequence is synthesized)
acctaccagctcactgtcccctggtttacttcatttttactcttctgtacattgtacatggcattgttctcctgtaatatttgttttttcacttttagagtctaaggggctaaatttgac

SEQ ID NO: 599602 - DNA, 120 bp, Artificial Sequence
  ENSG00000174453_16 (sequence is synthesized)
tgcacagtaaagttttgagttgtgtaaaaaaaaaagtttggtaaaggaatgtcaggggaaatatctttcccgagctgggaaacacaagagcatccagtcaattgctcccctagggtgaat

SEQ ID NO: 599603 - DNA, 120 bp, Artificial Sequence
  ENSG00000174453_17 (sequence is synthesized)
catgccctgtagactaaggaaagaggggtgggcacatagacgggcctattgctggacagggttgggaacaagtactttgtccattacgtgggggctcacaatttaattcttacaaaccac

SEQ ID NO: 599604 - DNA, 120 bp, Artificial Sequence
  ENSG00000174453_18 (sequence is synthesized)
acatttcatatggaaaacctcgaaactgccaatcaaaatctattacgtaaagaacaccataagctcaactaaagaatccaaagagagacagatctttaaaattgtagcattaatcatcag

SEQ ID NO: 599605 - DNA, 120 bp, Artificial Sequence
  ENSG00000174453_19 (sequence is synthesized)
accagaaccagggtgagaaaacccactgtgaatccaaatccttatgaacatctctggcttttgagttcagatttggctaaaagtcagtagtacacactggcagtttttgtggttcgggac

SEQ ID NO: 599606 - DNA, 120 bp, Artificial Sequence
  ENSG00000174453_20 (sequence is synthesized)
tgtgtttgccatgttgtagtaacaaccactcagccctatgtctgaaacacagattcaggacaccctttccacctcaagtgctgatttaaattaaagattagggtagagtgagtcttgcac

SEQ ID NO: 599607 - DNA, 120 bp, Artificial Sequence
  ENSG00000174453_21 (sequence is synthesized)
aatacaattccatttgttgaacattttttaaaatgtatatattagatactgaaaaattaaagtgaacctttgaagagtctctaggttgccctggtaatgctgctagtatagtaacagaaa

SEQ ID NO: 599608 - DNA, 120 bp, Artificial Sequence
  ENSG00000174453_22 (sequence is synthesized)
aaacaaaacacacagggtatctgatgccacctcgattcaagtgcaaaattaacaattctgaaaccacatggcatagttagtcgcttattccatgctcctgccctaaaaaccctggcacag

SEQ ID NO: 599609 - DNA, 120 bp, Artificial Sequence
  ENSG00000174453_23 (sequence is synthesized)
atctgatagggtccttgaagagactttacagttgtctttattatcaatgttctttctttttctgctcccccaacctgggctttgccatagctcctgtggagagccatattctagagcaag

SEQ ID NO: 599610 - DNA, 120 bp, Artificial Sequence
  ENSG00000174453_24 (sequence is synthesized)
gtgtctcaatcttagtaggattgacatttggggccagatcattattcgttggtgggggctgtcctgtgtgcttttaggatgtttagcaccatcactggcctctatccactagcaacatcc

SEQ ID NO: 599611 - DNA, 120 bp, Artificial Sequence
  ENSG00000174453_25 (sequence is synthesized)
cagcaactggtgacaaccaaatttctccagacattgcctaatgtccctaaggagtgggagtgaggggcctaatttcacctcgttgagaaccagtggtctagaataatcagtatagagtgg

SEQ ID NO: 599612 - DNA, 120 bp, Artificial Sequence
  ENSG00000174453_26 (sequence is synthesized)
tttctggcaggggacacagtaggcaagctctagcagcacctgtggcttttgtgagcttctgatccctatgggacatacacagtcagcatttccaaggggtcagtcttctccatagagagt

SEQ ID NO: 599613 - DNA, 120 bp, Artificial Sequence
  ENSG00000174453_27 (sequence is synthesized)
gaggcttctaatgctataggcccaccctcaggaaacatatttttttgagtcttgtcaactggtttttcatttaaaattgtcagcctctcctccctggaagcatctgctgtcatcaagaaa

SEQ ID NO: 599614 - DNA, 120 bp, Artificial Sequence
  ENSG00000174453_28 (sequence is synthesized)
gagttgtcatttccaaaattaacgtgctgacgagtcagacctgacattcttatgcacactgtgcttgcgttatgatacaaatagccatgccggcaccatcccgaggaagagcatcaagcc

SEQ ID NO: 599615 - DNA, 120 bp, Artificial Sequence
  ENSG00000174453_29 (sequence is synthesized)
accttcccttagaacaccaatttgcagcaaggttggtgcctttcatttgccaccatggatacatcatatagacagtcatgaatcattcatgagcaatgctgcatgatttatgtctgcact

SEQ ID NO: 599616 - DNA, 120 bp, Artificial Sequence
  ENSG00000174453_30 (sequence is synthesized)
caaaagtaaaggaattccacactttagcttatgtctagacagagatgtattatagagctttctttgccccgaggttgcctgttgccaacttcaaaaatccacactcttggaaagaaataa

SEQ ID NO: 599617 - DNA, 120 bp, Artificial Sequence
  ENSG00000174453_31 (sequence is synthesized)
taataataaatgacaggaataaggtttgaaactcagaaaatatcattaatagagccatgcagcatagtaccttatctattattaaggagttactatgtccttttttagaaaacagaaaga

SEQ ID NO: 599618 - DNA, 120 bp, Artificial Sequence
  ENSG00000174453_32 (sequence is synthesized)
gagtacaactgggaagctgaagtgcagaaattttgcatcaaagcattggcacagcgagagtcacagcaagaatttactagaattgaatgggacatccattaaggatctctcttcagagag

SEQ ID NO: 599619 - DNA, 120 bp, Artificial Sequence
  ENSG00000174453_33 (sequence is synthesized)
tttgcagaaagcaggctgttctgtggcctctgataaccagctagagagagggatttttatggttggttttgttgttgttggattttctttttctcaaagtttcactgcaggctgtttcct

SEQ ID NO: 599620 - DNA, 120 bp, Artificial Sequence
  ENSG00000174453_34 (sequence is synthesized)
ttaagattttgtagcactgacatttttccccctttagggagagatgaacctatactgtgacaatttctcataaactgataaacattttacaacttccttctacccaggtcattgagaaat

SEQ ID NO: 599621 - DNA, 120 bp, Artificial Sequence
  ENSG00000174453_35 (sequence is synthesized)
tctttccagactctgaacaacagagctctggtctcatctgttgtttgtttcttgtgaagtctttgtttgcagccacactgtcatctctgtactcctatttctcctccgcctttggttctc

SEQ ID NO: 599622 - DNA, 120 bp, Artificial Sequence
  ENSG00000174453_36 (sequence is synthesized)
ggctttaacaacagctatgttaaaataagggatcaacatcttgtttgtcagctgatgcctattaaaaacgattcagtttctaaaatctttgaaaaatggcgtgcctgaaaactagtgaga

SEQ ID NO: 599623 - DNA, 120 bp, Artificial Sequence
  ENSG00000174453_37 (sequence is synthesized)
aaaaaaaaaaacctaaacactaaactgtaaaaaggggattctagcaacaatatttgatgtgtaaaagaatatattattaaaaaattattttgttaaatataaagtgtgttaaccagcaaa

SEQ ID NO: 599624 - DNA, 120 bp, Artificial Sequence
  ENSG00000174453_38 (sequence is synthesized)
ttattgaaatatcaacttttcataccacgtgcttagtacattgctacattaaagtcagagttggaaaaatgtactttaaaatttccctttaaattatacaatttgattctaattaccata

SEQ ID NO: 599625 - DNA, 120 bp, Artificial Sequence
  ENSG00000174453_39 (sequence is synthesized)
agtagcaccatggtcaacaaatggccaactggtttgttgatcatatttgttaagttgcacaataacctttattttttttcccagaagtatttggggcatacctaacaccttttatttttg

SEQ ID NO: 599626 - DNA, 120 bp, Artificial Sequence
  ENSG00000174453_40 (sequence is synthesized)
cccttaaacatttcttctctgttattacaaaatatgttttctgatgggaacaattttgtgtatagtgtatgtgtctcctaaattaattttttaattgtgtcagttttgtgtgttgcttat

SEQ ID NO: 599627 - DNA, 120 bp, Artificial Sequence
  ENSG00000174453_41 (sequence is synthesized)
tagcctgtatttgaagtcatttaacaatatagtctagaattatttgtttattgtgtggaaaagctacagagatatacttcttagctgtggtcctcatattaagaaaatgcattgggccta

SEQ ID NO: 599628 - DNA, 120 bp, Artificial Sequence
  ENSG00000174453_42 (sequence is synthesized)
cttgtggtcaagcaagatccccattctgttctctgctcgctggattttttgctttcaggattccacagagaactgaatttttatcacaatccatgtaaagagtagtaaaaaagactgtaa

SEQ ID NO: 599629 - DNA, 120 bp, Artificial Sequence
  ENSG00000174456_0 (sequence is synthesized)
atgttccagaacctgcaaggaacatttgaaaaggaaattggaaaaataattccatttaccatagcatttaagagagctgaggctgtggagccagatggctgcgttcagagctggcgctgc

SEQ ID NO: 599630 - DNA, 120 bp, Artificial Sequence
  ENSG00000174456_1 (sequence is synthesized)
gtttgttcggctattaggtggaggagctgtaagggggagaggaactttgctgaaaggcacatcctccctgcagagcttgaagaacaatctaaccatgctggcatggggcccatcctacct

SEQ ID NO: 599631 - DNA, 120 bp, Artificial Sequence
  ENSG00000174456_2 (sequence is synthesized)
gcaatgccaagtgttgatgggaaccattttcagcatcctgctggtgactgtcatccttatggcattttgtgtctacaagcccattcggcgtcggtgacagccagacaagttcttcaatga

SEQ ID NO: 599632 - DNA, 120 bp, Artificial Sequence
  ENSG00000174456_3 (sequence is synthesized)
tctctgcttctgcagggctggggaagatgctgcgtccagcgttaccgtggctgtaccttggcctctgcagcctcctggtgggggaggcagaggccccgagccccgtggatccgctggagc

SEQ ID NO: 599633 - DNA, 120 bp, Artificial Sequence
  ENSG00000174456_4 (sequence is synthesized)
tggtaaatgctaaatgaattagaagaaaacatgtactagacattattttttcctaacactgtagcgcaaataattggcccctgagtccgcttctcagtgtttctgactgtacttgttaaa

SEQ ID NO: 599634 - DNA, 120 bp, Artificial Sequence
  ENSG00000174456_5 (sequence is synthesized)
agtaagacctgaaagctccaaaggtcagtgtaaagatggagtgttcatgagaaagaaaacatggtaaccttgtgagtgcctgtaagaaccacactgtaaagaactcatcattaatgcttg

SEQ ID NO: 599635 - DNA, 120 bp, Artificial Sequence
  ENSG00000174456_6 (sequence is synthesized)
aaaatgttattaagaaggagacttaccatgcagacattccctatttaagaaccatttggttacagtgggttaagaatcacagatttttttttttaatctcacctgagttagcctagaatg

SEQ ID NO: 599636 - DNA, 79 bp, Artificial Sequence
  ENSG00000174456_7 (sequence is synthesized)
cttgcctggctaaatcttggtttttcaaaggaacagtaatgagactgaagaacaaccatggttaggccctagctggaac

SEQ ID NO: 599637 - DNA, 120 bp, Artificial Sequence
  ENSG00000174456_8 (sequence is synthesized)
tgagactgaagaacaaccatggttaggccctagctggaacctgggatgggcccacatccctacagacacacatcagtgtacatttgcttgttttgaatgcttcccaagatcgctgagata

SEQ ID NO: 599638 - DNA, 120 bp, Artificial Sequence
  ENSG00000174456_9 (sequence is synthesized)
actatatgcacctttggcctggaatgctctgaagttggactggaaatgttactaggttggcctgttacaaaaaggaccccatcctgcttaaacacattgatctcccttgccctgcatttg

SEQ ID NO: 599639 - DNA, 120 bp, Artificial Sequence
  ENSG00000174456_10 (sequence is synthesized)
agtctttctagcccacggtctgaaacttgaggcagctttccagatttggaatgtaaaaggctcagtgggcactctgttcatccctgggtggggagggcccagccaacagaagtgcatgtc

SEQ ID NO: 599640 - DNA, 120 bp, Artificial Sequence
  ENSG00000174456_11 (sequence is synthesized)
cactgtgcgggccagtgtgtgtttacacaaatttcatctcagctttgaaaatgctgctattagtttccactgttggtgaactggattttttcctcctattgaaatgatactttcatactt

SEQ ID NO: 599641 - DNA, 120 bp, Artificial Sequence
  ENSG00000174456_12 (sequence is synthesized)
ataaagctgtcgtcaatatttatttcaaggtgctagatttaattttgttattaaattgaaatgcttatcttgtgttcaagcacagcactgattttaacaacctgcatttaatgtgaagta

SEQ ID NO: 599642 - DNA, 120 bp, Artificial Sequence
  ENSG00000174456_13 (sequence is synthesized)
accgaagtaggatactgtaactgtgtaaggattttgtttgtaatcttgtaacattgaaccattgaaatgttcagttctttgcttttgagcaaaacgtcaattaaaactaaagtaaaatcc

SEQ ID NO: 599643 - DNA, 120 bp, Artificial Sequence
  ENSG00000174456_14 (sequence is synthesized)
attttgcagttactgggagggggcttgctgtggccccatctgggagagttgagccctggtccagccccgcgcaggaagggaggctgtaaccgtgccagcctgctgcagctgcagtgatgt

SEQ ID NO: 599644 - DNA, 120 bp, Artificial Sequence
  ENSG00000174456_15 (sequence is synthesized)
tgtttgcagtagcacattccgtggtgaggtcctgctgagccagaactcaggagagtcagaaatgccaaatgatgttcacaagtgaaggcctgtggcactcagtgtctgaggtggacgtgt

SEQ ID NO: 599645 - DNA, 120 bp, Artificial Sequence
  ENSG00000174456_16 (sequence is synthesized)
taaccagctaaagaccgggaagttctattcactaacttttttgcatggaacaagaaaatctatgaggatatcaccaaactacacaggaagtgtaatggatttcttcattttaaaatattt

SEQ ID NO: 599646 - DNA, 120 bp, Artificial Sequence
  ENSG00000174456_17 (sequence is synthesized)
ctctactctcctttacatttttatctcctgattataacaaagaaaaaaagaaagaaatatctgaaagtgcatgagacttggaagacttggagttgaagttctagctgtttccctgtctag

SEQ ID NO: 599647 - DNA, 120 bp, Artificial Sequence
  ENSG00000174456_18 (sequence is synthesized)
ctttgatagtggaaaggtaatttcatttttctgacccgcagggacatccactgtaccaagttcatatagttactgtgagcatcaagtaagaaaatatttgttaaggtgctctgttgcaat

SEQ ID NO: 599648 - DNA, 120 bp, Artificial Sequence
  ENSG00000174456_19 (sequence is synthesized)
ataaagtcctgaatcctttttaagttccatttctataaagaggcccctcgtttataatggataagagggaaagcacctgatttctataatcactacccctcctctaaaatccttatttat

SEQ ID NO: 599649 - DNA, 120 bp, Artificial Sequence
  ENSG00000174456_20 (sequence is synthesized)
acatagagtgggctgttcaggatccagtaaatgccatcccagacacagacaagttgtttcctttcatctaactgcaatgaaagctcattgcttcaacttaccccttgtgcaccaaattgg

SEQ ID NO: 599650 - DNA, 120 bp, Artificial Sequence
  ENSG00000174456_21 (sequence is synthesized)
tgttccacagttcccagcaaagattccagcgggttcctgtctgctacagaggggtagggagtttaaagtctaatattatatctcacttgtggctataaaaaaaagatcttcattaaagtt

SEQ ID NO: 599651 - DNA, 120 bp, Artificial Sequence
  ENSG00000174456_22 (sequence is synthesized)
tctggtccaagctacctcattaggaaatgcaattacagactggctgatcaaatcattcacaataaccataaactaatttatcctttatagggtgcttttcatgaggatctctaaactaga

SEQ ID NO: 599652 - DNA, 120 bp, Artificial Sequence
  ENSG00000174456_23 (sequence is synthesized)
taaacagttgtaagaattaaagcagaataatgggaagagtctggattttggagtgagccagacctggattccaaccccaccttggccactcgctacccatgtgttctgggcctcagttcc

SEQ ID NO: 599653 - DNA, 120 bp, Artificial Sequence
  ENSG00000174456_24 (sequence is synthesized)
ctcatctgtcaaagtggagtaatggcaatggtggtggtggtgctggtgaacaattactgcatgcttaccacatactgcaggcgccattctaaaggcttccacgtcgtaactcatctaatc

SEQ ID NO: 599654 - DNA, 120 bp, Artificial Sequence
  ENSG00000174456_25 (sequence is synthesized)
ctctcaataactctaaggaaggttgggtatcacctgcatttcactgctgaggaactaaggcacagagcagaagtaatttcacaaggccatagaactggtggggctgggatggggctggga

SEQ ID NO: 599655 - DNA, 120 bp, Artificial Sequence
  ENSG00000174456_26 (sequence is synthesized)
tgtggcaaccacatgcaatgtttttgcttggaccccaagttctgtctaaatctttcatcacaatagtttggactaaatcactcattccaatgataaatattctcaaatgtccttatctcc

SEQ ID NO: 599656 - DNA, 71 bp, Artificial Sequence
  ENSG00000174456_27 (sequence is synthesized)
ccctgtaatcccaatagatgacggagcagtgtgagccctactgaaccacatccagtggattttccttagga

SEQ ID NO: 599657 - DNA, 120 bp, Artificial Sequence
  ENSG00000174456_28 (sequence is synthesized)
tgagccctactgaaccacatccagtggattttccttaggaaggaagatcctgttaccagacaaaatgggaaaaggaagtgaggagggtgatgtgagagcttgagggggaggtcagaaggt

SEQ ID NO: 599658 - DNA, 120 bp, Artificial Sequence
  ENSG00000174456_29 (sequence is synthesized)
cagagatgacccagttctggaggtgaccccatagaaggagaagaatccagccacgtgatacacgggaccaagagaacagtaaatgcaaagatctggaagcacaaaagaggaacagcaagg

SEQ ID NO: 599659 - DNA, 78 bp, Artificial Sequence
  ENSG00000174456_30 (sequence is synthesized)
ccaggcctggtttcgggcctggcgccgggctgcccgtctttggtttcacttccttgttgtttatgagagggtctctct

SEQ ID NO: 599660 - DNA, 120 bp, Artificial Sequence
  ENSG00000174456_31 (sequence is synthesized)
gtctctctctcccccagtctctgggacagagcagagagcaagaacaaaatcgctgtgctcgtggactttacatgctagggcggagcaggtcctcagaaaatcatcaaatgcccgtaatga

SEQ ID NO: 599661 - DNA, 120 bp, Artificial Sequence
  ENSG00000174456_32 (sequence is synthesized)
aggtttaataagaaaatgcatggattcgtaaaaaatcttcaataggccccaaatggacctacaagacctcgaccccaatggatgagggaacgctaaccacagcagaacggtaatcgcggc

SEQ ID NO: 599662 - DNA, 120 bp, Artificial Sequence
  ENSG00000174456_33 (sequence is synthesized)
ggaaagttgatctgaacggaaagttggtccgggggaaacattagttattgaggaacgttaatccggaacaaatcttaggcagaagcggaacttagaccaggacgcacagttaccatggca

SEQ ID NO: 599663 - DNA, 120 bp, Artificial Sequence
  ENSG00000174460_0 (sequence is synthesized)
ggcgctgcctcgtctctgctacccctggttgggcggccctgcgaagcagctccttcgggcagccccgggtcgcttagcggccaaggaggcttcagttctttgccgcctgcaaggcggaga

SEQ ID NO: 599664 - DNA, 120 bp, Artificial Sequence
  ENSG00000174460_1 (sequence is synthesized)
ccagaaggcggaatccacagctggcgacgcgggagcatctgctgtccaccagcggagcacaggccatcaaagccgcatctgaacttgaattctgtgcagctgattgcagagctggacccg

SEQ ID NO: 599665 - DNA, 120 bp, Artificial Sequence
  ENSG00000174460_2 (sequence is synthesized)
gatctgcgaccccctgtggacagaggttgaccgtaccccggagaggagctttctcacggagggcactggttgcagaggctggaagtgaaataaagacgcgctcttgtttcagagttcgtc

SEQ ID NO: 599666 - DNA, 120 bp, Artificial Sequence
  ENSG00000174460_3 (sequence is synthesized)
ccctgctgagataggaaggcagagccacctcctctcctctcccacctgcagattaagcttttctaaaaagcctaggcatcttcttatattcagataccctatcgtcgtcagtcatggcta

SEQ ID NO: 599667 - DNA, 120 bp, Artificial Sequence
  ENSG00000174460_4 (sequence is synthesized)
gcatcattgcacgtgtcggtaacagccggcggctgaatgcacccttgccgccttgggcccattccatgctgaggtccctggggagaagtctcggtcctataatggccagcatggcagaca

SEQ ID NO: 599668 - DNA, 120 bp, Artificial Sequence
  ENSG00000174460_5 (sequence is synthesized)
gaaacatgaagttgttctcggggagggtggtgccagcccaaggggaagaaacctttgaaaactggctgacccaagtcaatggcgtcctgccagattggaatatgtctgaggaggaaaagc

SEQ ID NO: 599669 - DNA, 120 bp, Artificial Sequence
  ENSG00000174460_6 (sequence is synthesized)
tcaagcgcttgatgaaaacccttaggggccctgcccgcgaggtcatgcgtgtgcttcaggcgaccaaccctaacctaagtgtggcagatttcttgcgagccatgaaattggtgtttgggg

SEQ ID NO: 599670 - DNA, 120 bp, Artificial Sequence
  ENSG00000174460_7 (sequence is synthesized)
agtctgaaagcagtgtgactgcccatggtaaattttttaacaccctacaagctcaaggggagaaagcctccctttatgtgatccgtttagaggtgcagctccagaacgctattcaggcag

SEQ ID NO: 599671 - DNA, 120 bp, Artificial Sequence
  ENSG00000174460_8 (sequence is synthesized)
gcattatagctgagaaagatgcaaaccggactcgcttgcagcagctccttttaggcggtgagctgagtagggacctccgactcagacttaaggattttctcaggatgtatgcaaatgagc

SEQ ID NO: 599672 - DNA, 120 bp, Artificial Sequence
  ENSG00000174460_9 (sequence is synthesized)
ggtaagggaggaagaggattgggatgatgcttttattaaacggaagcgtccaaaaaggtctgagtcaatggtggagagggcagtcagccctgtggcatttcagggctccccaccgatagt

SEQ ID NO: 599673 - DNA, 120 bp, Artificial Sequence
  ENSG00000174460_10 (sequence is synthesized)
gatcggcagtgctgactgcaatgtgatagagatagatgataccctcgacgactccgatgaggatgtgatcctggtggagtctcaggaccctccacttccatcctggggtgcccctcccct

SEQ ID NO: 599674 - DNA, 120 bp, Artificial Sequence
  ENSG00000174460_11 (sequence is synthesized)
cagagacagggccagacctcaggatgaagtgctggtcattgattccccccacaattccagggctcagtttccttccaccagtggtggttctggctataagaataacggtcctggggagat

SEQ ID NO: 599675 - DNA, 120 bp, Artificial Sequence
  ENSG00000174460_12 (sequence is synthesized)
gcgtagagccaggaagcgaaaacacacaatccgctgttcgtattgtggtgaggaaggccactcaaaagaaacctgtgacaacgagagtgacaaggcccaggtttttgagaatttgatcat

SEQ ID NO: 599676 - DNA, 120 bp, Artificial Sequence
  ENSG00000174460_13 (sequence is synthesized)
cactctccaggagctgacccatactgagatggagaggtcaagagtggcccctggcgaatacaatgacttctctgagccactgtaagggaccacccccaggtttcagtgaacccttaccta

SEQ ID NO: 599677 - DNA, 120 bp, Artificial Sequence
  ENSG00000174460_14 (sequence is synthesized)
tattcagcatccagtagtgggaaaactggggtgggggtgggggtgggacttctaactgcatgaattaatccacaaagcggctatcttttggggtggagtagaaagggtcttggataccag

SEQ ID NO: 599678 - DNA, 120 bp, Artificial Sequence
  ENSG00000174460_15 (sequence is synthesized)
cacattggagggagatagcctgacctctgtccttgctccttctccctgcagcctacgggtctgttttctgtgtgtgcccatttccttgacagctttattctttgtgaaagtggtataatt

SEQ ID NO: 599679 - DNA, 120 bp, Artificial Sequence
  ENSG00000174460_16 (sequence is synthesized)
tattgttaaatatttgaacaataaaaaaggtacaaaaagtgaagtacaaattacccaaatctctccacccttatataatcattgtcaaccctttgatgagtgatatttccctatacctat

SEQ ID NO: 599680 - DNA, 120 bp, Artificial Sequence
  ENSG00000174460_17 (sequence is synthesized)
gtacccagatagatatatgcatagataaaagtgatgaaatataagtgctgttctatctgtattttttcaccaaacaatatatgttgtgagcttctatgtcaataaatatatatatcagca

SEQ ID NO: 599681 - DNA, 120 bp, Artificial Sequence
  ENSG00000174469_0 (sequence is synthesized)
cttcaagaaccctacggagagtcggactgcatctccgcagcgagctcttggagcgccgccggccgggaggcgaaggatgcaggcggctccgcgcgccggctgcggggcagcgctcctgct

SEQ ID NO: 599682 - DNA, 82 bp, Artificial Sequence
  ENSG00000174469_1 (sequence is synthesized)
tggactcccccatgtggctttcagcagctcctcctccatctctggtagctattctcccggctatgccaagataaacaagaga

SEQ ID NO: 599683 - DNA, 120 bp, Artificial Sequence
  ENSG00000174469_2 (sequence is synthesized)
tggtagctattctcccggctatgccaagataaacaagagaggaggtgctgggggatggtctccatcagacagcgaccattatcaatggcttcaggttgactttggcaatcggaagcagat

SEQ ID NO: 599684 - DNA, 120 bp, Artificial Sequence
  ENSG00000174469_3 (sequence is synthesized)
cagtgccattgcaacccaaggaaggtatagcagctcagattgggtgacccaataccggatgctctacagcgacacagggagaaactggaaaccctatcatcaagatgggaatatctgggc

SEQ ID NO: 599685 - DNA, 120 bp, Artificial Sequence
  ENSG00000174469_4 (sequence is synthesized)
atttcccggaaacattaactctgacggtgtggtccggcacgaattacagcatccgattattgcccgctatgtgcgcatagtgcctctggattggaatggagaaggtcgcattggactcag

SEQ ID NO: 599686 - DNA, 120 bp, Artificial Sequence
  ENSG00000174469_5 (sequence is synthesized)
aattgaagtttatggctgttcttactgggctgatgttatcaactttgatggccatgttgtattaccatatagattcagaaacaagaagatgaaaacactgaaagatgtcattgccttgaa

SEQ ID NO: 599687 - DNA, 120 bp, Artificial Sequence
  ENSG00000174469_6 (sequence is synthesized)
ctttaagacgtctgaaagtgaaggagtaatcctgcacggagaaggacagcaaggagattacattaccttggaactgaaaaaagccaagctggtcctcagtttaaacttaggaagcaacca

SEQ ID NO: 599688 - DNA, 120 bp, Artificial Sequence
  ENSG00000174469_7 (sequence is synthesized)
gcttggccccatatatggccacacatcagtgatgacaggaagtttgctggatgaccaccactggcactctgtggtcattgagcgccaggggcggagcattaacctcactctggacaggag

SEQ ID NO: 599689 - DNA, 120 bp, Artificial Sequence
  ENSG00000174469_8 (sequence is synthesized)
catgcagcacttccgtaccaatggagagtttgactacctggacttggactatgagataacctttggaggcatccctttctctggcaagcccagctccagcagtagaaagaatttcaaagg

SEQ ID NO: 599690 - DNA, 120 bp, Artificial Sequence
  ENSG00000174469_9 (sequence is synthesized)
ctgcatggaaagcatcaactacaatggcgtcaacattactgatcttgccagaaggaagaaattagagccctcaaatgtgggaaatttgagcttttcttgtgtggaaccctatacggtgcc

SEQ ID NO: 599691 - DNA, 120 bp, Artificial Sequence
  ENSG00000174469_10 (sequence is synthesized)
tgtctttttcaacgctacaagttacctggaggtgcccggacggcttaaccaggacctgttctcagtcagtttccagtttaggacatggaaccccaatggtctcctggtcttcagtcactt

SEQ ID NO: 599692 - DNA, 120 bp, Artificial Sequence
  ENSG00000174469_11 (sequence is synthesized)
tgcggataatttgggcaatgtggagattgacctcactgaaagcaaagtgggtgttcacatcaacatcacacagaccaagatgagccaaatcgatatttcctcaggttctgggttgaatga

SEQ ID NO: 599693 - DNA, 120 bp, Artificial Sequence
  ENSG00000174469_12 (sequence is synthesized)
tggacagtggcacgaggttcgcttcctagccaaggaaaattttgctattctcaccatcgatggagatgaagcatcagcagttcgaactaatagtccccttcaagttaaaactggcgagaa

SEQ ID NO: 599694 - DNA, 120 bp, Artificial Sequence
  ENSG00000174469_13 (sequence is synthesized)
gtacttttttggaggttttctgaaccagatgaataactcaagtcactctgtccttcagccttcattccaaggatgcatgcagctcattcaagtggacgatcaacttgtaaatttatacga

SEQ ID NO: 599695 - DNA, 120 bp, Artificial Sequence
  ENSG00000174469_14 (sequence is synthesized)
agtggcacaaaggaagccgggaagtttcgcgaatgtcagcattgacatgtgtgcgatcatagacagatgtgtgcccaatcactgtgagcatggtggaaagtgctcgcaaacatgggacag

SEQ ID NO: 599696 - DNA, 120 bp, Artificial Sequence
  ENSG00000174469_15 (sequence is synthesized)
cttcaaatgcacttgtgatgagacaggatacagtggggccacctgccacaactctatctacgagccttcctgtgaagcctacaaacacctaggacagacatcaaattattactggataga

SEQ ID NO: 599697 - DNA, 120 bp, Artificial Sequence
  ENSG00000174469_16 (sequence is synthesized)
tcctgatggcagcggacctctggggcctctgaaagtttactgcaacatgacagaggacaaagtgtggaccatagtgtctcatgacttgcagatgcagacgcctgtggtcggctacaaccc

SEQ ID NO: 599698 - DNA, 120 bp, Artificial Sequence
  ENSG00000174469_17 (sequence is synthesized)
agaaaaatactcagtgacacagctcgtttacagcgcctccatggaccagataagtgccatcactgacagtgccgagtactgcgagcagtatgtctcctatttctgcaagatgtcaagatt

SEQ ID NO: 599699 - DNA, 120 bp, Artificial Sequence
  ENSG00000174469_18 (sequence is synthesized)
gttgaacaccccagatggaagcccttacacttggtgggttggcaaagccaacgagaagcactactactggggaggctctgggcctggaatccagaaatgtgcctgcggcatcgaacgcaa

SEQ ID NO: 599700 - DNA, 120 bp, Artificial Sequence
  ENSG00000174469_19 (sequence is synthesized)
ctgcacagatcccaagtactactgtaactgcgacgcggactacaagcaatggaggaaggatgctggtttcttatcatacaaagatcacctgccagtgagccaagtggtggttggagatac

SEQ ID NO: 599701 - DNA, 120 bp, Artificial Sequence
  ENSG00000174469_20 (sequence is synthesized)
tgaccgtcaaggctcagaagccaaattgagcgtaggtcctctgcgctgccaaggagacaggaattattggaatgccgcctctttcccaaacccatcctcctacctgcacttctctacttt

SEQ ID NO: 599702 - DNA, 120 bp, Artificial Sequence
  ENSG00000174469_21 (sequence is synthesized)
ccaaggggaaactagcgctgacatttctttctacttcaaaacattaaccccctggggagtgtttcttgaaaatatgggaaaggaagatttcatcaagctggagctgaagtctgccacaga

SEQ ID NO: 599703 - DNA, 120 bp, Artificial Sequence
  ENSG00000174469_22 (sequence is synthesized)
agtgtccttttcatttgatgtgggaaatgggccagtagagattgtagtgaggtcaccaacccctctcaacgatgaccagtggcaccgggtcactgcagagaggaatgtcaagcaggccag

SEQ ID NO: 599704 - DNA, 120 bp, Artificial Sequence
  ENSG00000174469_23 (sequence is synthesized)
cctacaggtggaccggctaccgcagcagatccgcaaggccccaacagaaggccacacccgcctggagctctacagccagttatttgtgggtggtgctgggggccagcagggcttcctggg

SEQ ID NO: 599705 - DNA, 120 bp, Artificial Sequence
  ENSG00000174469_24 (sequence is synthesized)
ctgcatccgctccttgaggatgaatggggtgacacttgacctggaggaaagagcaaaggtcacatctgggttcatatccggatgctcgggccattgcaccagctatggaacaaactgtga

SEQ ID NO: 599706 - DNA, 120 bp, Artificial Sequence
  ENSG00000174469_25 (sequence is synthesized)
aaatggaggcaaatgcctagagagataccacggttactcctgcgattgctctaatactgcatatgatggaacattttgcaacaaagatgttggtgcattttttgaagaagggatgtggct

SEQ ID NO: 599707 - DNA, 120 bp, Artificial Sequence
  ENSG00000174469_26 (sequence is synthesized)
acgatataactttcaggcaccagcaacaaatgccagagactccagcagcagagtagacaacgctcccgaccagcagaactcccacccggacctggcacaggaggagatccgcttcagctt

SEQ ID NO: 599708 - DNA, 120 bp, Artificial Sequence
  ENSG00000174469_27 (sequence is synthesized)
cagcaccaccaaggcgccctgcattctcctctacatcagctccttcaccacagacttcttggcagtcctcgtcaaacccactggaagcttacagattcgatacaacctgggtggcacccg

SEQ ID NO: 599709 - DNA, 120 bp, Artificial Sequence
  ENSG00000174469_28 (sequence is synthesized)
agagccatacaatattgacgtagaccacaggaacatggccaatggacagccccacagtgtcaacatcacccgccacgagaagaccatctttctcaagctcgatcattatccttctgtgag

SEQ ID NO: 599710 - DNA, 120 bp, Artificial Sequence
  ENSG00000174469_29 (sequence is synthesized)
ttaccatctgccaagttcatccgacaccctcttcaattctcccaagtcgctctttctgggaaaagttatagaaacagggaaaattgaccaagagattcacaaatacaacaccccaggatt

SEQ ID NO: 599711 - DNA, 120 bp, Artificial Sequence
  ENSG00000174469_30 (sequence is synthesized)
cactggttgcctctccagagtccagttcaaccagatcgcccctctcaaggccgccttgaggcagacaaacgcctcggctcacgtccacatccagggcgagctggtggagtccaactgcgg

SEQ ID NO: 599712 - DNA, 120 bp, Artificial Sequence
  ENSG00000174469_31 (sequence is synthesized)
ggcctcgccgctgaccctctcccccatgtcgtccgccaccgacccctggcacctggatcacctggattcagccagtgcggattttccatataatccaggacaaggccaagctataagaaa

SEQ ID NO: 599713 - DNA, 120 bp, Artificial Sequence
  ENSG00000174469_32 (sequence is synthesized)
tggagtcaacagaaactcggctatcattggaggcgtcattgctgtggtgattttcaccatcctgtgcaccctggtcttcctgatccggtacatgttccgccacaagggcacctaccatac

SEQ ID NO: 599714 - DNA, 120 bp, Artificial Sequence
  ENSG00000174469_33 (sequence is synthesized)
caacgaagcaaagggggcggagtcggcagagagcgcggacgccgccatcatgaacaacgaccccaacttcacagagaccattgatgaaagcaaaaaggaatggctcatttgaggggtggc

SEQ ID NO: 599715 - DNA, 120 bp, Artificial Sequence
  ENSG00000174469_34 (sequence is synthesized)
tacttggctatgggatagggaggagggaattactagggaggagagaaagggacaaaagcaccctgcttcatactcttgagcacatccttaaaatatcagcacaagttgggggaggcaggc

SEQ ID NO: 599716 - DNA, 120 bp, Artificial Sequence
  ENSG00000174469_35 (sequence is synthesized)
aatggaatataatggaatattcttgagactgatcacaaaaaaaaaaacctttttaatatttctttatagctgagttttcccttctgtatcaaaacaaaataatacaaaaaatgcttttag

SEQ ID NO: 599717 - DNA, 120 bp, Artificial Sequence
  ENSG00000174469_36 (sequence is synthesized)
agtttaagcaatggttgaaatttgtaggtactatctgtcttattttgtgtgtgtttagaggtgttctaaagacccgtggtaacagggcaagttttctacgtttttaagagcccttagaac

SEQ ID NO: 599718 - DNA, 120 bp, Artificial Sequence
  ENSG00000174469_37 (sequence is synthesized)
gtgggtattttttttcttgagaaaagctaatgcacctacagatggcccccaacattctcttccttttgcttctagtcaaccttaatgggctgttacagaaactagttcgtgtttatatac

SEQ ID NO: 599719 - DNA, 120 bp, Artificial Sequence
  ENSG00000174469_38 (sequence is synthesized)
tatttcctttgatgtcctataagtcggaaaagaaaggggcaaagagaacctattatttgccagtttttaagcagagctcaatctatgccagctctctggcatctggggttcctgactgat

SEQ ID NO: 599720 - DNA, 120 bp, Artificial Sequence
  ENSG00000174469_39 (sequence is synthesized)
tttgatttttcattgaattctacaagctaatattgttccacgtatgtagtcttagaccaatagctgtaactatcagctgcaataccatggtgaccagctgttacaaaagattttttcctg

SEQ ID NO: 599721 - DNA, 120 bp, Artificial Sequence
  ENSG00000174469_40 (sequence is synthesized)
ttttatctgaaacatactggatttatatatgtataagcgcctcaatggggaattagagccagatgttatgatttgtttgctctttttcttttatagtttagttatagcaaaaatatggat

SEQ ID NO: 599722 - DNA, 120 bp, Artificial Sequence
  ENSG00000174469_41 (sequence is synthesized)
aatttctagtgaatgcataaattaggttgcgtttcttattttgctttaaatctctggtagtttttccacccctgtgacacaatcctaatagacagtgtcctgtaaatggacacaacacaa

SEQ ID NO: 599723 - DNA, 120 bp, Artificial Sequence
  ENSG00000174469_42 (sequence is synthesized)
taaagtcaagttattattgctgttactctggatgatatggaaaacactgccatattttaaatcaactactccacgtgtttttccatccaatcacactgctgtgattcagggatctttctt

SEQ ID NO: 599724 - DNA, 120 bp, Artificial Sequence
  ENSG00000174469_43 (sequence is synthesized)
ctaagacggacacatttgaacctcaggttcatcacaaacctggtacctgttgcttcccagaggatggagaagtgtagttaatcacacctcttagtttaatctgaaatcttgacccagtta

SEQ ID NO: 599725 - DNA, 120 bp, Artificial Sequence
  ENSG00000174469_44 (sequence is synthesized)
tttaacaaataaatacctcattgattatatttaaaagtaatacacttcctgtaaacaaatggggacaatgcatccaaaaaatctttttaaacagattacacaaaaattatttccagaaag

SEQ ID NO: 599726 - DNA, 120 bp, Artificial Sequence
  ENSG00000174469_45 (sequence is synthesized)
gctaccatttatcatcattatatttcaagcctcttatacttaataagcactttctaaaaagtcttgagatcccaccattctgaggaattcaatatgatcactttttccttctttgcctgg

SEQ ID NO: 599727 - DNA, 120 bp, Artificial Sequence
  ENSG00000174469_46 (sequence is synthesized)
gagaggttaagaggaggtttcgaaggtatagatgctattgttctgatggcccggctgaataaaatggaaattctagtttgttagaattatgcattctttttcaagattctcagtgtgcct

SEQ ID NO: 599728 - DNA, 120 bp, Artificial Sequence
  ENSG00000174469_47 (sequence is synthesized)
aacttattggagcacatcagtttcttgggtaatggaaaacattacctagagttgccagtggcacattacaccagtacagagcacattccaaaggagacattggaccagttaattcccata

SEQ ID NO: 599729 - DNA, 120 bp, Artificial Sequence
  ENSG00000174469_48 (sequence is synthesized)
caagtcaaggtaacagaacaaaagggaatcctgatgcccttttaccattgctggttgagctcaggcactgtcatggacacccttaattttaaaaggttttaatcattcttctataaaata

SEQ ID NO: 599730 - DNA, 120 bp, Artificial Sequence
  ENSG00000174469_49 (sequence is synthesized)
catttaaaatggaaaaatacttaatatcactaaatatcagaacaatgtaacatttacaaatgacatattgaaagcaaaggctgttttatttagccaagatgattaccattaggagttact

SEQ ID NO: 599731 - DNA, 120 bp, Artificial Sequence
  ENSG00000174469_50 (sequence is synthesized)
ttatgtattgttgaaagcaaattttaaacatgatgttttagaagtgtttctgatttttaaacctggtttacaggtattacttctgcacttaccaaataatgccagatggaaatttattat

SEQ ID NO: 599732 - DNA, 120 bp, Artificial Sequence
  ENSG00000174469_51 (sequence is synthesized)
ttcttgcaattcccatgatagctctgttctttatgcattgtctcaacactttcccttttttcccaaaatgagtagagaattaaagccacccaaaacagcttctgctactaaaatgttctc

SEQ ID NO: 599733 - DNA, 120 bp, Artificial Sequence
  ENSG00000174469_52 (sequence is synthesized)
atcctttctcctccctctccttttcctgccacaaaaggtgaaaaatgagatccaatcctctcaccaaaatttcaaacctaggacactggaatgactgcagggatcagtggttctcccata

SEQ ID NO: 599734 - DNA, 120 bp, Artificial Sequence
  ENSG00000174469_53 (sequence is synthesized)
tcaccatcaattaagacatataggacactgtcttccttcaagagggttacaatgtggccatcagacaggaaaccaaacggtggataaagtattaagtaactaagtgccaaataaatgctg

SEQ ID NO: 599735 - DNA, 120 bp, Artificial Sequence
  ENSG00000174469_54 (sequence is synthesized)
gaaatcttgacctctccttgggattatgggtgtaacaaaaatccctacatctgtttatgaaggccatattcagtacattttaaatggtaaataatctgtttatgtgaagaaaaagaatta

SEQ ID NO: 599736 - DNA, 120 bp, Artificial Sequence
  ENSG00000174469_55 (sequence is synthesized)
agtctttcttccaactctctccttggatagcctagcacagtgcagcctccataaccatgacattcccgcccaagctctcagtgcctaatcctgctttgtcattcacatctcacaaaatct

SEQ ID NO: 599737 - DNA, 120 bp, Artificial Sequence
  ENSG00000174469_56 (sequence is synthesized)
tgacatcttacattccaatacattatcaagcaagcacaagtatgctggtagtagcctctttaaataatatgtatagacaacaacaacgacaaaaaatagactgttttaaagtttcaggga

SEQ ID NO: 599738 - DNA, 120 bp, Artificial Sequence
  ENSG00000174469_57 (sequence is synthesized)
aagttggtggctgatttaaagttgtgcaggaaacatcttctgtgtatgaagcaaatgtcgatgttttgaaaaaagctaggagatgactttgaatgaatgcaaggttagtgagatcctaag

SEQ ID NO: 599739 - DNA, 120 bp, Artificial Sequence
  ENSG00000174469_58 (sequence is synthesized)
ctctcaaaatagcatattccctagagctcaagaaagctggtccaggaggttgaaaaagctattttgttgttaaattattttctggcccttcttaatatttaaaaatgtatttccccttgt

SEQ ID NO: 599740 - DNA, 120 bp, Artificial Sequence
  ENSG00000174469_59 (sequence is synthesized)
ggctttcaaccacctgctcaaaaaaagagacttgttacatgaaagttttcattaaagagctgaaaacaagaatttagagagccattcctagaaaatgtcctactgccctgcatttgacaa

SEQ ID NO: 599741 - DNA, 120 bp, Artificial Sequence
  ENSG00000174469_60 (sequence is synthesized)
acaagcatcctttactaacaagagcaggaattcagaggcacaagaaaaagcattggcatgagccaaagagtctgtcttaatgttacttttgaaaatctgctgagcggccaccatatgcag

SEQ ID NO: 599742 - DNA, 120 bp, Artificial Sequence
  ENSG00000174469_61 (sequence is synthesized)
gctgagagctgggcacaggcgaagccattggaagcacttcaggaacaagcacacagctgtgggacttgaacatgcaagtgttcaggttgtgtcaagaagcttttctttccttctatgatg

SEQ ID NO: 599743 - DNA, 120 bp, Artificial Sequence
  ENSG00000174469_62 (sequence is synthesized)
gaatctgttcttttctatcctacttttttctctcttcctctcctcaccacattataccctgctcttacgcagtaaacgttttaatggcccgtttatgtctcatgcctccaaacaacactg

SEQ ID NO: 599744 - DNA, 120 bp, Artificial Sequence
  ENSG00000174469_63 (sequence is synthesized)
aatttgaaaccccccattttttcttttcaccaccctgttgagcaattttcccaaaaaaagggcagcaattattaaattgaattcaagtaagccagccaaagataggtcctaaattgctag

SEQ ID NO: 599745 - DNA, 120 bp, Artificial Sequence
  ENSG00000174469_64 (sequence is synthesized)
tcccagtagaaccacctgatcctaaaccagtgcgaaacaaacagtaacaatgtccccagctgacttcagctaagaaccaatggctcctacccccgccccgcttttttttgttgttttttg

SEQ ID NO: 599746 - DNA, 61 bp, Artificial Sequence
  ENSG00000174469_65 (sequence is synthesized)
gctggagtgcactggcgcaatctcgggctcactgcaacctcctcctcctcccacattaccc

SEQ ID NO: 599747 - DNA, 72 bp, Artificial Sequence
  ENSG00000174469_66 (sequence is synthesized)
acccagctaatttttttttttttttgtattattagtagaagccaggtttcaccatgttggccagggtggtct

SEQ ID NO: 599748 - DNA, 120 bp, Artificial Sequence
  ENSG00000174469_67 (sequence is synthesized)
tgggattacaggtgtgagccaccgtgccgagccagccccattttttaaatgatgttttggttaagagtggaccatgagaattagctgacagcatcccctttctctctccctgccttggtg

SEQ ID NO: 599749 - DNA, 120 bp, Artificial Sequence
  ENSG00000174469_68 (sequence is synthesized)
cagcatcccctttctctctccctgccttggtgggaccctccctgtgtgaccttggtcaagtcctcgaacttttgtcccgtatttaagatggagctgttttacctacttcataagacagtt

SEQ ID NO: 599750 - DNA, 120 bp, Artificial Sequence
  ENSG00000174469_69 (sequence is synthesized)
gcgaggtgccattgattcttgactgcaaaataccttgaaacccttatataaagactgaagtcaacggagcctagtgaaagacttactttgtggcttgtggttgaaagtcacatcaaaaga

SEQ ID NO: 599751 - DNA, 120 bp, Artificial Sequence
  ENSG00000174469_70 (sequence is synthesized)
caaatgtggccacgttcaggaattggagacttactggcatggctctacagctgctcagttattaatcatgcagactaacctgtcaacactgggagatgcaacatagcaaaaggacagaga

SEQ ID NO: 599752 - DNA, 120 bp, Artificial Sequence
  ENSG00000174469_71 (sequence is synthesized)
aattagaattttttgtgcagaaagccctaaattcccacctgaatgtaacttacagctcccttacctactctcacacatgccctcaaacatgctagattggcttatacataggccaacaca

SEQ ID NO: 599753 - DNA, 120 bp, Artificial Sequence
  ENSG00000174469_72 (sequence is synthesized)
aaatacaaacgtgacgtgttcatgtagcctagtggctatatgcctattctccatgtaccctgcatggtagtgctgcaaactttaaagtacatttctttcacagcagtattttttttcata

SEQ ID NO: 599754 - DNA, 120 bp, Artificial Sequence
  ENSG00000174469_73 (sequence is synthesized)
agtggcatataaatgtcattcaatgaaatggggaaatcacgttgagaagttggtctgtcatctcccattgagcaaagactggcaggagataataaaaataaatatgggcacacatgtatt

SEQ ID NO: 599755 - DNA, 120 bp, Artificial Sequence
  ENSG00000174469_74 (sequence is synthesized)
aatatacagcacgcatttacaagtttattttccagataaaattgtgctataagaacagctctaccaagacagtctgcaccatttccaagtctcagttaatttacagcaactgctgctttc

SEQ ID NO: 599756 - DNA, 120 bp, Artificial Sequence
  ENSG00000174469_75 (sequence is synthesized)
ggagatggctgtgaaaatatggaagttcctctcaagtaggccaagaaacagttctagattttactaagttttattttgtcaggttttttaaattttttcagtgagcgtggtgactgcaga

SEQ ID NO: 599757 - DNA, 120 bp, Artificial Sequence
  ENSG00000174469_76 (sequence is synthesized)
ggttagtgctgtgaaaagctgggctaaatattctttctgtaaagtcaaacaggattccatcccctgtgaaataacacaaaatttcactctctaaaagcaacagcatgtaaactagaatga

SEQ ID NO: 599758 - DNA, 120 bp, Artificial Sequence
  ENSG00000174469_77 (sequence is synthesized)
aagaaggaaattatgtacgtatgcctaatattctttgtgaatgtctttcatttaactaaaattatattagaaaccagattgataaataaaaaattcaaagtagttttaattatcctaaaa

SEQ ID NO: 599759 - DNA, 120 bp, Artificial Sequence
  ENSG00000174469_78 (sequence is synthesized)
catatgcagtagcaattagaatgctctccccaagaggaggacattctctgaaatcccaagtaggagtgaacccagagtagcatagcatatctgctaacttgattccatctgtctttgttg

SEQ ID NO: 599760 - DNA, 120 bp, Artificial Sequence
  ENSG00000174469_79 (sequence is synthesized)
caacatgctcactgagcatatgcccctaaatgaatatgagatgaagacaggatctgtggtccctcccgcaacattgatgggggaattattggaatgccgcctctttcccaaacccatcct

SEQ ID NO: 599761 - DNA, 120 bp, Artificial Sequence
  ENSG00000174469_80 (sequence is synthesized)
acacctggatttgtttgctaaactctatttaaaaactactcagtgaggattctcttgattttgcaccattcacaggaagaaattctgaaagttgaattattggttcccgtattttttatt

SEQ ID NO: 599762 - DNA, 120 bp, Artificial Sequence
  ENSG00000174469_81 (sequence is synthesized)
ttttatttttttttataaaatcatgataaacagaactcttacttcatccattttgttgttgctgttgccgcattttgctttttcttcctcctttcctctccctcttggcaaaagaatgct

SEQ ID NO: 599763 - DNA, 120 bp, Artificial Sequence
  ENSG00000174469_82 (sequence is synthesized)
acaaaaatataaagattgttgtaatctggggcgaaattatccatccacctaaataatctcctcctgttatctttgatgaatatgtctaacaccattaataagcaatagtttcttataaaa

SEQ ID NO: 599764 - DNA, 120 bp, Artificial Sequence
  ENSG00000174469_83 (sequence is synthesized)
aatgcagccgtttccaagaaaattttgatgcttgacttttggggtattctctcatctgacttctttcaaatgtttgtgaaatcgctgatttggaaatctttagacttagccaataaaagt

SEQ ID NO: 599765 - DNA, 120 bp, Artificial Sequence
  ENSG00000174469_84 (sequence is synthesized)
ctcagaagccaaattgagcgtaggtcctctgcgctgccaaggagacagtaagtttgcatagcagctatggcttgcactttcttatcccatttaaatattgtttccaggctcctcagaaga

SEQ ID NO: 599766 - DNA, 120 bp, Artificial Sequence
  ENSG00000174469_85 (sequence is synthesized)
tgcctgcaatcagacttgctctcctgtagctcctacagaaacatcacacaacccaagcagagataacttagaggaggggaacagccataaagcctccagtacaggagccgagatttgggc

SEQ ID NO: 599767 - DNA, 120 bp, Artificial Sequence
  ENSG00000174469_86 (sequence is synthesized)
accttattcaagttggtgttaaagatattggagtcctcatttggaagtcactcactatagcatttatgggaaaccgagctctgaattacaaacatcgagttgacaaacgaaaatctggaa

SEQ ID NO: 599768 - DNA, 120 bp, Artificial Sequence
  ENSG00000174469_87 (sequence is synthesized)
cagaacccactcaccagctggcgaccacccagtattatttgactttaaacttgatacttgaacatgattttttaaaagaaacttaagcaagtaaacataaaaaaaaaaaaaaaaaccacc

SEQ ID NO: 599769 - DNA, 120 bp, Artificial Sequence
  ENSG00000174469_88 (sequence is synthesized)
gagttcaacatttcacattcaccctagactgctctcccaagatcaggagctactggagattttgaaggaaaacaggcctattcctaaaatgtaaaaagtgagcatgaaaattgcatctga

SEQ ID NO: 599770 - DNA, 120 bp, Artificial Sequence
  ENSG00000174469_89 (sequence is synthesized)
tgatgacattcaggagaaacagttagtgtgcctatgcaaggtgatccgtgtgggacagagccaggactattacgaagcacttgatacctcaccacggaggactgatgagaaaattcatta

SEQ ID NO: 599771 - DNA, 120 bp, Artificial Sequence
  ENSG00000174469_90 (sequence is synthesized)
accttcagcatgaccattctatcaactgtattaaatgctctgattgttcaatgaggtctcttcagtgtggttgttggactataaacatctcccagccctccgtgagctctggttttttgc

SEQ ID NO: 599772 - DNA, 120 bp, Artificial Sequence
  ENSG00000174469_91 (sequence is synthesized)
cacagtttgaagaggttaattttgcttcactcaaaattgaaatattttcctgtgaatctatccattctagcatgtcctttcttacctgtgatggtatagattttatcccaggagaacctt

SEQ ID NO: 599773 - DNA, 120 bp, Artificial Sequence
  ENSG00000174469_92 (sequence is synthesized)
acaagtttatgtgatgagcattcattccaggaactctaatgctgtttccatttttatgaccaatatgctttgacctcctttctgttccagaacaaaaggagagcacagaaagggtggata

SEQ ID NO: 599774 - DNA, 120 bp, Artificial Sequence
  ENSG00000174469_93 (sequence is synthesized)
ttttatcataatacttcttcaaggccttgaaattgcatattgcctcctatatgctaccaaggcctatgctatgaatggaatctttactcttaaacagatcaacaacaaaaaccataccca

SEQ ID NO: 599775 - DNA, 120 bp, Artificial Sequence
  ENSG00000174469_94 (sequence is synthesized)
gtgtcttgtacccttaaggcaaaaggcatcctgggcaatccctcaactcactttttgcacactcacaaatattctatctctcagtactaaagatttatcaatattcaactctgggacatg

SEQ ID NO: 599776 - DNA, 120 bp, Artificial Sequence
  ENSG00000174469_95 (sequence is synthesized)
cctgctctgaagaggcacccatcatttgccccagcaagccacctagcctgtggagcagagtgacaaacagctccactttgcttagctctgggaggaggccatggtcctgacccaggggtc

SEQ ID NO: 599777 - DNA, 120 bp, Artificial Sequence
  ENSG00000174469_96 (sequence is synthesized)
cgtggggaccacaggctatgacctggacagtccctacaactataaaatgccaccaatggaggaagctcttgtgaaaacagacattcagatagctcttctgggtgttataaacgagtaact

SEQ ID NO: 599778 - DNA, 120 bp, Artificial Sequence
  ENSG00000174469_97 (sequence is synthesized)
ccttgttctggcttggatgcaaaacagattataaatgtatggctagtatcatacttgaagattatagaggaaatgttgctgttctactgtttaatttaggcaaggaaagtttgaagtaaa

SEQ ID NO: 599779 - DNA, 120 bp, Artificial Sequence
  ENSG00000174469_98 (sequence is synthesized)
aaagaaaaagtgatccagttgcacagctcatttgtgaacagattttttatctaaatatagaagaagtttaaattttgaataacactgaagtgggttcaggaggtttggctttcatcggaa

SEQ ID NO: 599780 - DNA, 120 bp, Artificial Sequence
  ENSG00000174469_99 (sequence is synthesized)
catgtgatgacgtagaaattgtaataaaatgtcaagcaattgtgtcactctcctactgtattgtattattgttaattatattactacttacaccttttttattttcttctctaaacaaga

SEQ ID NO: 599781 - DNA, 120 bp, Artificial Sequence
  ENSG00000174469_100 (sequence is synthesized)
cactgacaattttaaaaacctgattaattcgtttcattttatttctaaatttataatcatgagtacttgaactattataaaaatcttagtaccaatgtaataatttgaagagaggaacca

SEQ ID NO: 599782 - DNA, 120 bp, Artificial Sequence
  ENSG00000174469_101 (sequence is synthesized)
tgctatccaggccatttaataaattcagaataaatttaatttgtaatcctttcattggtagttaatcatgttatcaattcttcttgagaatgtgcagtacattatatgcagagggttgtc

SEQ ID NO: 599783 - DNA, 120 bp, Artificial Sequence
  ENSG00000174469_102 (sequence is synthesized)
taatatttattataaagtattgaataagaaatcttagtttctggtttatattaagtcatttagaaactcatgactgtagatgggtcttttgacaagctctgttttctcagaatcaatatc

SEQ ID NO: 599784 - DNA, 120 bp, Artificial Sequence
  ENSG00000174469_103 (sequence is synthesized)
tatttttaaattatttggagagcaattcaaccttaaaatatccattaaaactgttaatcatatacgtaggtgagctctttaagatgtttgtcagccgggcgtggtggcgcatgcctgtaa

SEQ ID NO: 599785 - DNA, 65 bp, Artificial Sequence
  ENSG00000174469_104 (sequence is synthesized)
ggaggtgcctcaaaaaaaacaacaacgaaaaaaagatgtttgtcacagtattatacatcctagga

SEQ ID NO: 599786 - DNA, 120 bp, Artificial Sequence
  ENSG00000174469_105 (sequence is synthesized)
cgaaaaaaagatgtttgtcacagtattatacatcctaggagaaaaggataacactatacatacaaaagcagcagaacggtaagataaaagggacacaatgctattacttagccagaagtt

SEQ ID NO: 599787 - DNA, 120 bp, Artificial Sequence
  ENSG00000174469_106 (sequence is synthesized)
tccgaactttcttagttcatggagcccttagtgtcttcgaactttttccacagcagtcctgagccgttaggtccaaacaacctaaaaatttacgtcctaagactttggtagccatttaga

SEQ ID NO: 599788 - DNA, 120 bp, Artificial Sequence
  ENSG00000174469_107 (sequence is synthesized)
gaaataaacacaaaataaaagtgaaagtagatttttatttcattcttaaacaacagcaattattactaatgggatgagtgctattgcactgtacgactggcagaaatggggatcagattt

SEQ ID NO: 599789 - DNA, 120 bp, Artificial Sequence
  ENSG00000174469_108 (sequence is synthesized)
gccaatggcattctaattttctgttccacttttactctacatgatactctgtcttaatcagagtaatgagagtaatgaccaaatccaaaattcacaaagacagcacatcattaaaaggaa

SEQ ID NO: 599790 - DNA, 120 bp, Artificial Sequence
  ENSG00000174469_109 (sequence is synthesized)
tgacacattatctaatactggaacagtaaactaccttaagctagagtttcacacaatgtccaaaaggtgtcaaatattgttgtgttttctttaaaaatttcaaacatgctatggcacccc

SEQ ID NO: 599791 - DNA, 120 bp, Artificial Sequence
  ENSG00000174469_110 (sequence is synthesized)
tattagttttctgcaccaccttcatgttccttggcacccagttctgaaattggagatgtattcatatatatatgtgtgtgttatgtatatttatgtataattttataagaatatggaata

SEQ ID NO: 599792 - DNA, 120 bp, Artificial Sequence
  ENSG00000174469_111 (sequence is synthesized)
aaactgtgaaaatggaggcaaatgcctagagagataccacggttactcctgcgattgctctaatactgcatatgatggaacattttgcaacaaagctgggtaactgccccagagccaaat

SEQ ID NO: 599793 - DNA, 120 bp, Artificial Sequence
  ENSG00000174469_112 (sequence is synthesized)
aaggcagaagacccaagatttagtgtctggaggggcttcttttatctcttgaagatttggaagattgtgttttccaaggacggctgccacaaaagctctcctgacacctgtgcttccaga

SEQ ID NO: 599794 - DNA, 120 bp, Artificial Sequence
  ENSG00000174469_113 (sequence is synthesized)
gccaagtgactgctccatcaagacgtgatatctagttttcctctccaagaatctggacagccttgggacttgcttaagccaacagaatgtggcagaaattatgctgcctgacttccaaag

SEQ ID NO: 599795 - DNA, 120 bp, Artificial Sequence
  ENSG00000174469_114 (sequence is synthesized)
ctaggttatagagccaaggtgacacgtgccttggggactgggccatgcacattggagtactgattgcccaggaaagcagtcaactgccctgaggccaccatgctcaaggaactgcactag

SEQ ID NO: 599796 - DNA, 120 bp, Artificial Sequence
  ENSG00000174469_115 (sequence is synthesized)
gttttaaaccagcaagtttggggagcaatctgttaggtagcaataaggactggaacagagaagatgaataatagttttttggttttccaaaagaacttactctccaagtattatctttgt

SEQ ID NO: 599797 - DNA, 120 bp, Artificial Sequence
  ENSG00000174469_116 (sequence is synthesized)
ttttgctaaatcctttgtattagtctaggctcttagagcgacagaatcaagaggagatatgtacctatatctgtatctctatatatgaaaggagatttatttggggaattggcacatgca

SEQ ID NO: 599798 - DNA, 120 bp, Artificial Sequence
  ENSG00000174469_117 (sequence is synthesized)
attatggcagaagtcccacaatcggccgtctgcaacctggagaaccagggaagccagcagcatggctcagtccaagtcttaaggccacagaactagggaagccgatggtgtagctctcag

SEQ ID NO: 599799 - DNA, 120 bp, Artificial Sequence
  ENSG00000174469_118 (sequence is synthesized)
tgggaggctggagccctcagacaccgggcggccactggtacaagttctgtagtacaaatactggagaacccagagttctgatgccaagggcaggagatgtcccagccctaggggaaagac

SEQ ID NO: 599800 - DNA, 120 bp, Artificial Sequence
  ENSG00000174469_119 (sequence is synthesized)
aggagtatgcgagagagaagacgtaaggacgccttgctcgtggtaagatcagagactgatcggagaacgctttcctccttccctcctttgagaatttcctcaggcactgcagcttcacct

SEQ ID NO: 599801 - DNA, 120 bp, Artificial Sequence
  ENSG00000174469_120 (sequence is synthesized)
gctgatggaccccggccggtcggctcagtctcccttttgctttcaaacgaggccagggcagggcagaagggttttgacagccagagggtgcaagaggcaatacccgcacggagggagaac

SEQ ID NO: 599802 - DNA, 120 bp, Artificial Sequence
  ENSG00000174469_121 (sequence is synthesized)
gaaggctgagactcccctgccgctccaagcccggaagaactggagcctggaggggggtgaggggagaagaggaagcgggaggggcttggcttcctcgcgtatttgaggacagcccatctc

SEQ ID NO: 599803 - DNA, 120 bp, Artificial Sequence
  ENSG00000174469_122 (sequence is synthesized)
gtgccatgtgaggacactgctggaaggcaccatctatgaagcagagagtcggccctcatcagacaccaaatctactgctacctctgtctcgggcttcccagcctccagaactggaattat

SEQ ID NO: 599804 - DNA, 120 bp, Artificial Sequence
  ENSG00000174469_123 (sequence is synthesized)
taagagctagtcacatgtctccacctggatgcacagggaccaggaaggcagttactggctgggtagcagctttgcgggagtgatgatgaaaaggggaaagaaaccttctgtgaatggtta

SEQ ID NO: 599805 - DNA, 120 bp, Artificial Sequence
  ENSG00000174469_124 (sequence is synthesized)
agtggtgcggggtttgatcccgagagcggtggactcaaagctgcccgccgggactcgggctgccggccgacaaaggacggtcctcgggggttctgaagtctgacccggccagtgggaaag

SEQ ID NO: 599806 - DNA, 120 bp, Artificial Sequence
  ENSG00000174469_125 (sequence is synthesized)
gccgatgaaagtggctctcagcaggaagggaagttgaaaaggggatggagagggaaggtaatcttctcctgaagtccagccatctctggccagattcttctctgatgttacgtgtcaagc

SEQ ID NO: 599807 - DNA, 120 bp, Artificial Sequence
  ENSG00000174469_126 (sequence is synthesized)
tgtccctctgaagtgaagctgcttctctccaatgtctaaccatagtcaccaacgtccagctgcttctcttctctctgccaaaacagggaaaattgaccaagagattcacaaatacaacac

SEQ ID NO: 599808 - DNA, 120 bp, Artificial Sequence
  ENSG00000174473_0 (sequence is synthesized)
gcagacaccagcgacgtctccgcggaaggcaggcgccggggagtggggcgcgggcgaccgtgtgcagccgcggcgcatctccgccttccgctcctcctcgcagcgccctcgtccgcttcc

SEQ ID NO: 599809 - DNA, 120 bp, Artificial Sequence
  ENSG00000174473_1 (sequence is synthesized)
aagcccagcacagacttcggtttctccgcctccatcccctttacgagaagaggagatcaaaaaatattgccctttaggtgctcgtgatggtcctgtgggttcgttcagttgccagaaaag

SEQ ID NO: 599810 - DNA, 120 bp, Artificial Sequence
  ENSG00000174473_2 (sequence is synthesized)
aatggtaacatgaacagcggagcgtgagagcgtcaccgggggaagggacgagattgatgggcagagcgctcacttctcagaggatcgcattccgaggaccgcgcgaggaagggacgtcgc

SEQ ID NO: 599811 - DNA, 120 bp, Artificial Sequence
  ENSG00000174473_3 (sequence is synthesized)
ggcgccaccacttcctggctggactccgctgacatctgtagcctcctttccaccaggttcccggggctcccagccgctgcctgcagaggagcgtgtagacagcgcgcgagggtccggcac

SEQ ID NO: 599812 - DNA, 120 bp, Artificial Sequence
  ENSG00000174473_4 (sequence is synthesized)
ttcgtggacctccatccgaaccggagttctgcccggatcccgagtccctggatcccggtggagcccgccggcaagctggctccggagggagttgaacttgagttcagatggccaactccc

SEQ ID NO: 599813 - DNA, 120 bp, Artificial Sequence
  ENSG00000174473_5 (sequence is synthesized)
tctgaatcctgcagattggtgctgagcacgcaacaaaagtttgtagcttctcagtttctggtgcttcgcaggggagaggaaaggaatttgacattaaacacaagaagcagtcagggagcc

SEQ ID NO: 599814 - DNA, 120 bp, Artificial Sequence
  ENSG00000174473_6 (sequence is synthesized)
atctcctttaacttttcttctctgttaccatttgcaatgaagaggaaacagaagagatttctgcagatgactttgttgttcacggtggctttaattttcctgcctaacgttggtctctgg

SEQ ID NO: 599815 - DNA, 120 bp, Artificial Sequence
  ENSG00000174473_7 (sequence is synthesized)
tctctgtacaaggataagcacctggtgaagtcagcggagcccggggagcagcagacatttccactgggcctgggagatgggcaattctattcatggacagatggtttgagaagaaaggac

SEQ ID NO: 599816 - DNA, 120 bp, Artificial Sequence
  ENSG00000174473_8 (sequence is synthesized)
tggcatgactatgaaagcattcagaaagaggctatgcgctcagggaaaggtgaacatgggaaaccttacccccttactgaagaggaccatgatgactcagcttacagggaaaatggtttt

SEQ ID NO: 599817 - DNA, 120 bp, Artificial Sequence
  ENSG00000174473_9 (sequence is synthesized)
aatattttcgtcagcaacaatattgctctagagaggtctctgccagatattcgtcatgctaactgtaagcataagatgtatctggaaaggctgccaaacaccagcatcattatcccattt

SEQ ID NO: 599818 - DNA, 120 bp, Artificial Sequence
  ENSG00000174473_10 (sequence is synthesized)
cataatgaaggttggacttcactcctgcggaccatacacagtataattaaccgaaccccagggagtctgatagcagaaatcattctagtagatgacttcagtgagagagaacacctgaag

SEQ ID NO: 599819 - DNA, 120 bp, Artificial Sequence
  ENSG00000174473_11 (sequence is synthesized)
gataaattggaagaatacatggcccgattttccaaagtgaggattgttcgcaccaagaaaagagaaggactcatccggacccgtctcctgggggcatctatggccagaggagaagtcctg

SEQ ID NO: 599820 - DNA, 120 bp, Artificial Sequence
  ENSG00000174473_12 (sequence is synthesized)
acattcctggactcccactgcgaggtcaatgtgaactggctgcccccactcctcaaccaaattgcactaaaccacaaaaccatcgtgtgtcccatgatcgatgtcattgaccacaatcac

SEQ ID NO: 599821 - DNA, 120 bp, Artificial Sequence
  ENSG00000174473_13 (sequence is synthesized)
ttcgggtatgaggcacaagctggggatgccatgcgaggagccttcgactgggaaatgtactacaaaagaatccccatccctccagagctccagagggcagatcccagcgacccttttgag

SEQ ID NO: 599822 - DNA, 120 bp, Artificial Sequence
  ENSG00000174473_14 (sequence is synthesized)
tctcctgttatggctggaggtctctttgctgtggatcggaaatggttttgggaattgggtggctatgatccaggtttagaaatctggggaggagaacagtatgaaatctcttttaaggtt

SEQ ID NO: 599823 - DNA, 120 bp, Artificial Sequence
  ENSG00000174473_15 (sequence is synthesized)
tggatgtgtggaggagaaatgtttgatgttccatgttctagagttggtcatatctacaggaagtacgttccatacaaagttccatctgggacaagcctggcaagaaacctgaagcgggta

SEQ ID NO: 599824 - DNA, 120 bp, Artificial Sequence
  ENSG00000174473_16 (sequence is synthesized)
atctctccacgggggacatctctgcccagaaggagctgcgcaagcagctcaagtgcaaggacttcaaatggttcatggctgctgtggcctgggacgtgcctaaatactaccctccagtgg

SEQ ID NO: 599825 - DNA, 120 bp, Artificial Sequence
  ENSG00000174473_17 (sequence is synthesized)
agcccccgcctgctgcctggggggagatccgaaatgtggcagcaaatctctgtgtggacagcaagcatggagccaccggaacagagctgaggctggacatctgtgtcaaggatggttctg

SEQ ID NO: 599826 - DNA, 120 bp, Artificial Sequence
  ENSG00000174473_18 (sequence is synthesized)
aaagaacatggtctcatgaacagctttttacctttggatggagagaagatattcgacccggtgagccactgcatacccggaaattctgctttgatgcgatctcacacaacagccccgtta

SEQ ID NO: 599827 - DNA, 120 bp, Artificial Sequence
  ENSG00000174473_19 (sequence is synthesized)
cactctatgactgtcatggcatgaaggggaaccagctctggggataccggaaggacagaacattattccatcctgtgagcaacagctgcatggattgcaaccccgcagagaagaagattt

SEQ ID NO: 599828 - DNA, 120 bp, Artificial Sequence
  ENSG00000174473_20 (sequence is synthesized)
tcatggccagatgtgaccctctctctgagactcagcagtggatttttgaacacattaatatgactgttttagaaaaatttaaccaccatgccaactcctagaaagaagaaaggaagaaag

SEQ ID NO: 599829 - DNA, 120 bp, Artificial Sequence
  ENSG00000174473_21 (sequence is synthesized)
agtgattacctacaggttataaattaaattttagccagcatctgggtcgaaggagtcaggaataacatttcctcgatccaggaaggctggtttaaaaatttgcaaatgccatgtcaaagt

SEQ ID NO: 599830 - DNA, 120 bp, Artificial Sequence
  ENSG00000174473_22 (sequence is synthesized)
aggttgttttgaagaacttcctgcatctgaagaacttggctgagaatctcaccagctgcttctgagaactcgagactagcagttcccttgctggccaagggcaaagataatttagggact

SEQ ID NO: 599831 - DNA, 120 bp, Artificial Sequence
  ENSG00000174473_23 (sequence is synthesized)
tttcaaaacaactgctgagctaataaatcctagcatttctcaggtcaaatcctgcagtagtgagtagctatgaatggatcctattaactgggtgggaggggggtgaaaatggagtgcatg

SEQ ID NO: 599832 - DNA, 120 bp, Artificial Sequence
  ENSG00000174473_24 (sequence is synthesized)
actgctctgacaacctgaggatatcacaggtttagaactagccaagcttaaggggtgagctgtactctttggtgccattctctgactaagaatgggttcagcaggtttaacccttaaaag

SEQ ID NO: 599833 - DNA, 120 bp, Artificial Sequence
  ENSG00000174473_25 (sequence is synthesized)
tgctgcagatgatttcagagtgctcacactattctgttttttttatttttatttttaaatgagggtgcaatatctaatgtaagacttaaattacataatgaaatggacatccagtgttcc

SEQ ID NO: 599834 - DNA, 120 bp, Artificial Sequence
  ENSG00000174473_26 (sequence is synthesized)
cattctttcgtttatatttgccatttttttttcagagcaaagtttcttttttatgaaagttcatgctccatgaatccactgaatttctaattcagtgcccttctatgaatccagttaaaa

SEQ ID NO: 599835 - DNA, 120 bp, Artificial Sequence
  ENSG00000174473_27 (sequence is synthesized)
acaaaagcaaaagcaaaaatctatgctatcaagttactccaaagaaagatttcacagaagcagcaaaaccatataagatttaggagagggacttccctgggaaatctatttttacttttc

SEQ ID NO: 599836 - DNA, 120 bp, Artificial Sequence
  ENSG00000174473_28 (sequence is synthesized)
tattatttttaaaatcttaaaagtctgatatttgtccagtcataatttttattaagcaaggaaatggagtgagtttgatgtaatttgtttaggagattcttaaacccaaataaatctaca

SEQ ID NO: 599837 - DNA, 120 bp, Artificial Sequence
  ENSG00000174473_29 (sequence is synthesized)
ctccaagtgatatgtgaaaatggcttagttcacttcaattctgtttagtcagtggtgggagcttagaagtggttttatttgttcgtttgtttgggttttgcttttgttttttattttttt

SEQ ID NO: 599838 - DNA, 120 bp, Artificial Sequence
  ENSG00000174473_30 (sequence is synthesized)
cttgttttttttttgtagtgttgaattaatgatgttcttttatttggaagctcataaaaggaattaccattaataaagtgtttctgacaccattttctgttaatgggacaatatttcggg

SEQ ID NO: 599839 - DNA, 120 bp, Artificial Sequence
  ENSG00000174473_31 (sequence is synthesized)
gatgaagaaaggaatgctccgaaaactaaatggaacacttaatccttaaagcaattttttactgttcaataatatcacattgggggaagaaaacacaggtatcaaggtggttcttgggaa

SEQ ID NO: 599840 - DNA, 120 bp, Artificial Sequence
  ENSG00000174473_32 (sequence is synthesized)
aaaagaatcatgtttattatatatctctcaagtttttttggtataaaaatgttttaactttgctttctttttggtttttgtttgaagttggttttcctgttaataaaaatttatataaca

SEQ ID NO: 599841 - DNA, 120 bp, Artificial Sequence
  ENSG00000174473_33 (sequence is synthesized)
gagaacttactgtggttgtgagctggacaccacagccctgaagcctgagcaggagcagtgaaaggagggggtttaccatatcatcgcaagctgagaggaaggctgttgggggatacatgc

SEQ ID NO: 599842 - DNA, 120 bp, Artificial Sequence
  ENSG00000174473_34 (sequence is synthesized)
taggcctttgctaaaagcatggtgaatggatgaatgaataaatcagatgatgggagtcacagtccacttgcactccaaagtttgagaagcactagtctacgctgtatttgcagctcttgt

SEQ ID NO: 599843 - DNA, 120 bp, Artificial Sequence
  ENSG00000174473_35 (sequence is synthesized)
ggactccagcaagaattgtgtaactattgccttctagtgaaagccactgtatgccaggaggcagattctgaggagggtgaatcatcgtggatatagcagagaaaagcaggcaactggtgg

SEQ ID NO: 599844 - DNA, 120 bp, Artificial Sequence
  ENSG00000174473_36 (sequence is synthesized)
acaatctagtgccacctcacttcatttccaaagctattcccaccaagtttagcctacgagaatgataagtccacttgctgcgtatgtggagttcaggctgtgtcctcaaatcctctactc

SEQ ID NO: 599845 - DNA, 120 bp, Artificial Sequence
  ENSG00000174473_37 (sequence is synthesized)
actcctttctaggctttccctatcatgtccacatcttccttcctctgccacttcatgtggggtagtggagcgactcctagcggaatctgtgttccattagcattacagctactcactgaa

SEQ ID NO: 599846 - DNA, 120 bp, Artificial Sequence
  ENSG00000174473_38 (sequence is synthesized)
actattgcactctcctcccttctactggctccatcacctgtgttaggagctccctgtaccaagtcttccactttattgagtaaatagttagagccaaagggaacactgtgataaagcctg

SEQ ID NO: 599847 - DNA, 120 bp, Artificial Sequence
  ENSG00000174473_39 (sequence is synthesized)
tgtcagctgccatgttgattttctactgctactgtcataatcacaaagttagcagttaaagcaacacccattttgcaggccagttctctgctctgggtttcacaaagtgatggacggggt

SEQ ID NO: 599848 - DNA, 120 bp, Artificial Sequence
  ENSG00000174473_40 (sequence is synthesized)
gtgttcttttccagagcttctggggatgaattcgcttccaggctcattcatgttgttggcagaattgaattccatgagattataggactcaggtccggtgtccctgccagcaatcagccc

SEQ ID NO: 599849 - DNA, 120 bp, Artificial Sequence
  ENSG00000174473_41 (sequence is synthesized)
caaagccagcaaagacccttcacagtagttcctcgattcacgttagattaaatcagcagggagcaggaattttgtgggacatcttttgaattctgccttgtgcagctgcactatgcaaat

SEQ ID NO: 599850 - DNA, 120 bp, Artificial Sequence
  ENSG00000174473_42 (sequence is synthesized)
gattaggaaaaactgcaagttcttattttgaagtaattttccaagtgcctgcagtacatccttactctcactcctgcttatcactgggaggattttatatggaaagcacttccctaactt

SEQ ID NO: 599851 - DNA, 120 bp, Artificial Sequence
  ENSG00000174473_43 (sequence is synthesized)
tttaggaactccctgttttgcctgtgatgaaccactcagcattttcccccgcattaaattacaatgacttcatttgaaacagaaatgcctcaaattttgggatctacttatgatagcctt

SEQ ID NO: 599852 - DNA, 120 bp, Artificial Sequence
  ENSG00000174473_44 (sequence is synthesized)
ccctcttgaccaggactcaaagtctattttgccctaatgtgtctttggtcaataaaatggaatttggagagtttgagaaggtatatttgtaatttcaatccctgtctagaaagcatgaaa

SEQ ID NO: 599853 - DNA, 120 bp, Artificial Sequence
  ENSG00000174473_45 (sequence is synthesized)
aaagatattagaaaaaaatgtgttgctcttgagtattattgccattgatgagttccacagtgctagtagactacattaggaatttgaatgaagcagaattgaatgaattctatttttaaa

SEQ ID NO: 599854 - DNA, 120 bp, Artificial Sequence
  ENSG00000174473_46 (sequence is synthesized)
aaaatgaattgtacattacagctcacaagtatccaagagctaaatttgaaatgtcaaaggttatgtaaatcttatatgtttagctaaccctgtaatgagaaagactcccaacactgaagt

SEQ ID NO: 599855 - DNA, 120 bp, Artificial Sequence
  ENSG00000174473_47 (sequence is synthesized)
ctcaaatcgtttttgagaacactgaggagagaagccacataatttgagagtgtcataaccgggagtcctagaaagaggaagatcaaacagccgatgtgaatttaggccatgaagaggttt

SEQ ID NO: 599856 - DNA, 120 bp, Artificial Sequence
  ENSG00000174473_48 (sequence is synthesized)
aatttaaaagctgagagcaaaatcacagtcctttcataattattataaggagatattgggtaccctcactctggcagacctgtggtgcctaatgaaaagagagcatttctctcctgcttg

SEQ ID NO: 599857 - DNA, 120 bp, Artificial Sequence
  ENSG00000174473_49 (sequence is synthesized)
gcttattttatccctaatcagcagcggtacttcaaattagcttcacaatctattggcctctctcagccataaaagcctcttttctcttttgatattagcatagctccccattgaaagtaa

SEQ ID NO: 599858 - DNA, 120 bp, Artificial Sequence
  ENSG00000174473_50 (sequence is synthesized)
cagaaaaagagctcctacttgaaggttatatccttccttgtggatggcccacttcaaagggttcatcacatggtccaaagagaagtaaaaataagatgaggggagtgcagcagctgtgtt

SEQ ID NO: 599859 - DNA, 120 bp, Artificial Sequence
  ENSG00000174473_51 (sequence is synthesized)
tctaagacaagaggttctgagctgaagaacaccacatcgattaaggtcagggcagctgggaaggttgcagttcagccaaaagagggctgaagtactgaacttgaaaactctagaacctgg

SEQ ID NO: 599860 - DNA, 120 bp, Artificial Sequence
  ENSG00000174473_52 (sequence is synthesized)
gaaatgtaagcattaaactcagagacattttatggaaaaaaaaaagttttattttatagattcagttctgtaatatagatattggaacattaaaatgatctgaggtattgacttcaaaat

SEQ ID NO: 599861 - DNA, 120 bp, Artificial Sequence
  ENSG00000174473_53 (sequence is synthesized)
ccatcatttggggtgttggattatctgttatttacttaactccattagcacccagctatggataaattgtgtgtaatagttgtgttttatgagatcaagattttaaaatagtgaccactg

SEQ ID NO: 599862 - DNA, 120 bp, Artificial Sequence
  ENSG00000174473_54 (sequence is synthesized)
atgagagccaagttcagagccggagctggccaccagaggaatccaagcattagtgcagaccacggagtgcatgagctggtttaccagacatttccactgggcctgggagatgggcaattc

SEQ ID NO: 599863 - DNA, 120 bp, Artificial Sequence
  ENSG00000174473_55 (sequence is synthesized)
ctttttttgttcttatttacatcattcaacccttgatgtaaaacaggattttaataactttagtagtcaatatgctattatgtaaaatctccactccatgctggtaaaacaggaaaggca

SEQ ID NO: 599864 - DNA, 120 bp, Artificial Sequence
  ENSG00000174473_56 (sequence is synthesized)
tttctcaagtgagacactagagagagtagaaagggaggaagagatagggcgagaagaaaaggagggagggacagagatgaggacgagaaagaagaaaaaagggaaagagaaaataccgtc

SEQ ID NO: 599865 - DNA, 120 bp, Artificial Sequence
  ENSG00000174473_57 (sequence is synthesized)
tgaagtccacaggcttatctatcccaagcatgtctaccccacgcatgtgggcatcatatccaggttgtaacaaagaggtgaccatggcgtttatttttggctccagacaggcggattcag

SEQ ID NO: 599866 - DNA, 120 bp, Artificial Sequence
  ENSG00000174473_58 (sequence is synthesized)
cctgcattgcatgcatgcatgtctgtcacctcatctaagtccccattccttccggagttgtgagctccagatccaagagtgcccagtgcacggtgctgggcacgctgtcccttggcgagg

SEQ ID NO: 599867 - DNA, 120 bp, Artificial Sequence
  ENSG00000174473_59 (sequence is synthesized)
ctgccacaggttcctgagtgtgcggtcaggggcgttggtgcattgatacgttaggcggagggaggagtaccatctgccagagtcttatctcgagtcccacgttttctggccatcgcggag

SEQ ID NO: 599868 - DNA, 120 bp, Artificial Sequence
  ENSG00000174473_60 (sequence is synthesized)
gagtgtgcgaggacaggtagccctcgcagtgacaaggcgcgcggagtgcggtcgtgcaaggcgggggaggagcggggtggccctgccgaatcttaaccggggccccgggtgtttgcagac

SEQ ID NO: 599869 - DNA, 120 bp, Artificial Sequence
  ENSG00000174473_61 (sequence is synthesized)
ccaaataaagccgccttgggtctccacggtgtcctccagaagctgctgcctgagaactctgagcctcagctctgtcttgcttcgggatcctcttcctcctccttccccaccccctacctg

SEQ ID NO: 599870 - DNA, 120 bp, Artificial Sequence
  ENSG00000174473_62 (sequence is synthesized)
ccttccccaccccctacctggcctgaacggcggaacgcgcggctcgggggatcccctctccctgggaccggccctgtcccgggtcgcctccacctcccgcagccgccgcgccccggctcg

SEQ ID NO: 599871 - DNA, 120 bp, Artificial Sequence
  ENSG00000174473_63 (sequence is synthesized)
tggaggaattcctgggacaaccgcctgcagccggcgacttttccccaggaatctctggcctggcgccctttgggtgagatgacggggtgctggcatccctgtcggtcccagattacccgg

SEQ ID NO: 599872 - DNA, 120 bp, Artificial Sequence
  ENSG00000174473_64 (sequence is synthesized)
aaaagccctggcaggtaaagagaggacccgcgcaggctgggagctcccactcctcctccagcgtcacgctcgccctccgccgctgcctcgcgtccgggtctgtttatatagcgtctggag

SEQ ID NO: 599873 - DNA, 120 bp, Artificial Sequence
  ENSG00000174473_65 (sequence is synthesized)
atcacacaaggattggtaaggcagtgatcctcgcgcggggactcgagaaagccggtgtgggatcgccttgggttttcccccaagtcttgacagagctgattattacaagactctagagac

SEQ ID NO: 599874 - DNA, 120 bp, Artificial Sequence
  ENSG00000174473_66 (sequence is synthesized)
tttggggtttaagcaagtagatgttttaagattgcagccagtaacatcgtgacatgtacaactagtaaagaaggataagacaggtcaagaagaagagaagataatctttcaccattggtc

SEQ ID NO: 599875 - DNA, 120 bp, Artificial Sequence
  ENSG00000174473_67 (sequence is synthesized)
ttaggttgattttgacttgaggtggatgaaaggtaactgttcagctatggaggtgggagtgggtttggtgcaagtttaatgacaaggataggtttttgctttccatttggcatgcatgtc

SEQ ID NO: 599876 - DNA, 120 bp, Artificial Sequence
  ENSG00000174473_68 (sequence is synthesized)
tatgttcaggtgaattgggccaactaaatcattaagattgtgaagtggttctttaaaaatcaagctatggttttcagtattttggttgtaaattttgcttagcaacagctttttaccctg

SEQ ID NO: 599877 - DNA, 120 bp, Artificial Sequence
  ENSG00000174473_69 (sequence is synthesized)
tcgaaacttaaagtctctctttcgtctcccctgttgctaaggtgctgccatggggcacacaggcagagttattaaggacgttcattccgtttcacagtcgcttgataacagtatgttgct

SEQ ID NO: 599878 - DNA, 120 bp, Artificial Sequence
  ENSG00000174473_70 (sequence is synthesized)
aacagcttgctgtcatattggaaacacccatactaaagatatgtagtataatatgttttctttctacttaatatgtaactcattagtatgtatatacctcatgacttaacatggaccaaa

SEQ ID NO: 599879 - DNA, 120 bp, Artificial Sequence
  ENSG00000174473_71 (sequence is synthesized)
ataactgtgttccctggtgaacaataatgcaaaatagacttcccaaaatgttgatgaaaatcaatgttgtcgaattccttgtttgttaataaataaaatagcttccgtaattaaacgttt

SEQ ID NO: 599880 - DNA, 120 bp, Artificial Sequence
  ENSG00000174473_72 (sequence is synthesized)
ccatctgaagtatttgctggtatagctaacataaagcgctaattaattttattaatgagattcttacaactttcacattgactctataattttgacccttaatgagaaaattgtttgtct

SEQ ID NO: 599881 - DNA, 120 bp, Artificial Sequence
  ENSG00000174482_0 (sequence is synthesized)
tgtaggaattgatgagtgccatcagaaagctgtatcatgagctgcctgcacttctaaagtgtccagtggatttttaatcacatgagcctggaaatagggttatgagaagaagctcagagc

SEQ ID NO: 599882 - DNA, 120 bp, Artificial Sequence
  ENSG00000174482_1 (sequence is synthesized)
agagcaccgaaagtggccactaccagcatgaagagcccaacaattcaaactggtaagtgagtctcatcttgtttgttgcaggttcgtttcaagcagttggcttgtgggactctgagagat

SEQ ID NO: 599883 - DNA, 120 bp, Artificial Sequence
  ENSG00000174482_2 (sequence is synthesized)
gctgctgcccatgacatgcgggaattatcatgatcaactacccagcttggatttcacccagtggccaagagctttgtgtgggagacggcaagggttggatttttcaaagattttctcagg

SEQ ID NO: 599884 - DNA, 120 bp, Artificial Sequence
  ENSG00000174482_3 (sequence is synthesized)
ataaatcatgaggaacctataacccttttggccacatgcaaaaaagcaagacccgtgaccaaggtgtagactaagaagtggagtcatgcttcacacggccatatcatgctggcagccatt

SEQ ID NO: 599885 - DNA, 120 bp, Artificial Sequence
  ENSG00000174482_4 (sequence is synthesized)
cctgggtctggctgtggtgttaatcttcatgggatccaccattggctgccccgctcgctgtgagtgctctgcccagaacaaatctgttagctgtcacagaaggcgattgatcgccatccc

SEQ ID NO: 599886 - DNA, 120 bp, Artificial Sequence
  ENSG00000174482_5 (sequence is synthesized)
agagggcattcccatcgaaaccaaaatcttggacctcagtaaaaacaggctaaaaagcgtcaaccctgaagaattcatatcatatcctctgctggaagagatagacttgagtgacaacat

SEQ ID NO: 599887 - DNA, 120 bp, Artificial Sequence
  ENSG00000174482_6 (sequence is synthesized)
cattgccaatgtggaaccaggagcattcaacaatctctttaacctgcgttccctccgcctaaaaggcaatcgtctaaagctggtccctttgggagtattcacggggctgtccaatctcac

SEQ ID NO: 599888 - DNA, 120 bp, Artificial Sequence
  ENSG00000174482_7 (sequence is synthesized)
taagcttgacattagtgagaataagattgtcattttactagactacatgttccaagatctacataacctgaagtctctagaagtgggggacaatgatttggtttatatatcacacagggc

SEQ ID NO: 599889 - DNA, 120 bp, Artificial Sequence
  ENSG00000174482_8 (sequence is synthesized)
attcagtgggcttcttagcttggagcagctcaccctggagaaatgcaacttaacagcagtaccaacagaagccctctcccacctccgcagcctcatcagcctgcatctgaagcatctcaa

SEQ ID NO: 599890 - DNA, 120 bp, Artificial Sequence
  ENSG00000174482_9 (sequence is synthesized)
tatcaacaatatgcctgtgtatgcctttaaaagattgttccacctgaaacacctagagattgactattggcctttactggatatgatgcctgccaatagcctctacggtctcaacctcac

SEQ ID NO: 599891 - DNA, 120 bp, Artificial Sequence
  ENSG00000174482_10 (sequence is synthesized)
atccctttcagtcaccaacaccaatctgtctactgtacccttccttgcctttaaacacctggtatacctgactcaccttaacctctcctacaatcccatcagcactattgaagcaggcat

SEQ ID NO: 599892 - DNA, 120 bp, Artificial Sequence
  ENSG00000174482_11 (sequence is synthesized)
gttctctgacctgatccgccttcaggagcttcatatagtgggggcccagcttcgcaccattgagcctcactccttccaagggctccgcttcctacgcgtgctcaatgtgtctcagaacct

SEQ ID NO: 599893 - DNA, 120 bp, Artificial Sequence
  ENSG00000174482_12 (sequence is synthesized)
tcccctagggctctggaggtcttgagcattaacaacaaccctctggcctgtgactgccgccttctctggatcttgcagcgacagcccaccctgcagtttggtggccagcaacctatgtgt

SEQ ID NO: 599894 - DNA, 120 bp, Artificial Sequence
  ENSG00000174482_13 (sequence is synthesized)
gctggcccagacaccatccgtgagaggtctttcaaggatttccatagcactgccctttctttttactttacctgcaaaaaacccaaaatccgtgaaaagaagttgcagcatctgctagta

SEQ ID NO: 599895 - DNA, 120 bp, Artificial Sequence
  ENSG00000174482_14 (sequence is synthesized)
gatgaagggcagacagtccagctagaatgcagtgcagatggagacccgcagcctgtgatttcctgggtgacaccccgaaggcgtttcatcaccaccaagtccaatggaagagccaccgtg

SEQ ID NO: 599896 - DNA, 120 bp, Artificial Sequence
  ENSG00000174482_15 (sequence is synthesized)
ttgggtgatggcaccttggaaatccgctttgcccaggatcaagacagcgggatgtatgtttgcatcgctagcaatgctgctgggaatgataccttcacagcctccttaactgtgaaagga

SEQ ID NO: 599897 - DNA, 120 bp, Artificial Sequence
  ENSG00000174482_16 (sequence is synthesized)
ttcgcttcagatcgttttctttatgcgaacaggacccctatgtacatgaccgactccaatgacaccatttccaatggcaccaatgccaatactttttccctggaccttaaaacaatactg

SEQ ID NO: 599898 - DNA, 120 bp, Artificial Sequence
  ENSG00000174482_17 (sequence is synthesized)
gtgtctacagctatgggctgcttcacattcctgggagtggttttattttgttttcttctcctttttgtgtggagccgagggaaaggcaagcacaaaaacagcattgaccttgagtatgtg

SEQ ID NO: 599899 - DNA, 120 bp, Artificial Sequence
  ENSG00000174482_18 (sequence is synthesized)
cccagaaaaaacaatggtgctgttgtggaaggggaggtagctggacccaggaggttcaacatgaaaatgatttgaaggcccacccctcacattactgtctctttgtcaatgtgggtaatc

SEQ ID NO: 599900 - DNA, 120 bp, Artificial Sequence
  ENSG00000174482_19 (sequence is synthesized)
agtaagacagtatggcacagtaaattactagattaagaggcagccatgtgcagctgcccctgtatcaaaagcagggtctatggaagcaggaggacttccaatggagactctccatcgaaa

SEQ ID NO: 599901 - DNA, 120 bp, Artificial Sequence
  ENSG00000174482_20 (sequence is synthesized)
ggcaggcaggcaggcatgtgtcagagcccttcacacagtgggatactaagtgtttgcgttgcaaatattggcgttctggggatctcagtaatgaacctgaatatttggctcacactcacg

SEQ ID NO: 599902 - DNA, 120 bp, Artificial Sequence
  ENSG00000174482_21 (sequence is synthesized)
aaacaaaagaaaaaataaaaaagaacaacctacagtgtaggatttacatattaaaaagacacatttgtctaaaacatactctacagaaaaatttgtatctatgattatcatttgttaaag

SEQ ID NO: 599903 - DNA, 120 bp, Artificial Sequence
  ENSG00000174482_22 (sequence is synthesized)
aaatttgtatctatgattatcatttgttaaagccttgcatcataccatattgttggttcagtaccacaaagagatcaatatattcttttcttccttttttgaaacatatatgctgtacat

SEQ ID NO: 599904 - DNA, 120 bp, Artificial Sequence
  ENSG00000174482_23 (sequence is synthesized)
gttttaaagcaatatgaatgagaggttgtgcttttagttactcaccactatagatccaagtgtgatttcaccttccgttacctacagatgaccctgagactagatccctggagttatggg

SEQ ID NO: 599905 - DNA, 120 bp, Artificial Sequence
  ENSG00000174482_24 (sequence is synthesized)
cggagatattttgagagatgtgtttgtctgatgtaggatgccaagaaacaggacccaaggcaaaactgctcaactctgttaacttctgttactataaataaaggcatgtgcctagttttg

SEQ ID NO: 599906 - DNA, 120 bp, Artificial Sequence
  ENSG00000174482_25 (sequence is synthesized)
agagcaccgaaagtggccactaccagcatgaagagcccaacaattcaaactggtgaagtgagaaaaacagaatgcagctttcaaggttcgtttcaagcagttggcttgtgggactctgag

SEQ ID NO: 599907 - DNA, 120 bp, Artificial Sequence
  ENSG00000174482_26 (sequence is synthesized)
ccaggctaccttctcctgccacagatactctatcccatttgctgtcatccaacgactaacaccgttttcacttcagaacgtcaagccttttctgttctcttcatggcctcctcccattaa

SEQ ID NO: 599908 - DNA, 120 bp, Artificial Sequence
  ENSG00000174482_27 (sequence is synthesized)
tcagtcatttgtcctaactgagtaagagtacattctttttagaatttaagaacctacactttagacctctcttcactaattatagaatccatcattcaacaaatatttattgattgccta

SEQ ID NO: 599909 - DNA, 120 bp, Artificial Sequence
  ENSG00000174482_28 (sequence is synthesized)
ctatgtgccatgctctgttccaggctttaagggtgcagtggtagcaatcacagataggaccccattattctgtctacaccttgtgaggggagatagtcaataaagaaacaaacaaaataa

SEQ ID NO: 599910 - DNA, 120 bp, Artificial Sequence
  ENSG00000174483_0 (sequence is synthesized)
ggttgccaggacgacgcctgcgaagatggccgctgcgtcctcatcggattccgacgcctgcggagctgagagcaatgaggccaattcgaagtggttggatgcgcactacgacccaatggc

SEQ ID NO: 599911 - DNA, 120 bp, Artificial Sequence
  ENSG00000174483_1 (sequence is synthesized)
caatatccacaccttttctgcctgcctagcgctggcagatttacatggggatggggaatacaagctggtggtaggggaccttggccctggtgggcagcagccccgcctgaaggtgctcaa

SEQ ID NO: 599912 - DNA, 120 bp, Artificial Sequence
  ENSG00000174483_2 (sequence is synthesized)
aggaccactggtgatgaccgaaagcccgctacctgctctgccagctgctgctgccaccttcctcatggagcaacatgagccccggaccccagctctggcacttgcttcaggcccttgtgt

SEQ ID NO: 599913 - DNA, 120 bp, Artificial Sequence
  ENSG00000174483_3 (sequence is synthesized)
ctatgtgtataagaatctcagaccctacttcaagttcagcctgccccaattgcctccaaatcctctggaacaagacctttggaaccaggccaaagaggaccgaatcgaccccttaaccct

SEQ ID NO: 599914 - DNA, 120 bp, Artificial Sequence
  ENSG00000174483_4 (sequence is synthesized)
gaaggagatgctggagagcatccgggagacggcagaggagcctttgtccatccagtcactcaggtttctgcagctggagctaagtgaaatggaggcatttgtaaaccaacacaagtccaa

SEQ ID NO: 599915 - DNA, 120 bp, Artificial Sequence
  ENSG00000174483_5 (sequence is synthesized)
ctccatcaagcggcagacagtcatcaccaccatgaccaccttgaagaagaacctggctgacgaggatgctgtgtcttgcctggtgctgggcaccgagaacaaggagctcctggtgcttga

SEQ ID NO: 599916 - DNA, 120 bp, Artificial Sequence
  ENSG00000174483_6 (sequence is synthesized)
ccccgaggccttcaccattttagccaagatgagccttcccagcgtccccgtcttcctagaggtttctggccagtttgatgttgagttccggcttgccgcggcctgccgcaatggaaacat

SEQ ID NO: 599917 - DNA, 120 bp, Artificial Sequence
  ENSG00000174483_7 (sequence is synthesized)
ctatattctgagaagagactccaagcaccccaagtactgcatcgagctgagcgcccagcctgtgggacttatccgggtacacaaggtcctagtggtgggcagcacccaagacagcctgca

SEQ ID NO: 599918 - DNA, 120 bp, Artificial Sequence
  ENSG00000174483_8 (sequence is synthesized)
tggcttcacccacaaggggaagaagctgtggacagtgcagatgcccgcagccatcctgaccatgaacctcctggagcagcattcccggggcctgcaggccgtcatggctgggctggccaa

SEQ ID NO: 599919 - DNA, 120 bp, Artificial Sequence
  ENSG00000174483_9 (sequence is synthesized)
tggagaggtccgcatttatcgtgacaaggccctgctcaatgtcatccacaccccggatgcagtgaccagcctttgctttggccggtacgggcgggaggacaacaccctcatcatgaccac

SEQ ID NO: 599920 - DNA, 120 bp, Artificial Sequence
  ENSG00000174483_10 (sequence is synthesized)
tcgaggtggtggcctgatcatcaagatcctgaagcgtacagcagtgtttgtagagggaggaagtgaggtgggtcccccaccagcccaggccatgaaactcaatgtgccccgaaagacccg

SEQ ID NO: 599921 - DNA, 120 bp, Artificial Sequence
  ENSG00000174483_11 (sequence is synthesized)
gctttacgtggatcagacactgcgagagcgggaggctggcaccgccatgcaccgggccttccagacagacctatacctgctgcgcctacgtgctgcccgcgcctacctgcaggccctcga

SEQ ID NO: 599922 - DNA, 120 bp, Artificial Sequence
  ENSG00000174483_12 (sequence is synthesized)
gtccagcctgagccccctgtccacgacagcccgagagccactcaagctgcacgccgtggttcagggccttggccccacctttaagctcacacttcacctgcagaacacctcaacaacccg

SEQ ID NO: 599923 - DNA, 120 bp, Artificial Sequence
  ENSG00000174483_13 (sequence is synthesized)
tcctgtcctggggctgctggtctgcttcctgtacaacgaggcgctctattccctgccccgggccttcttcaaggtacccttgctggtgccagggctcaactaccccctggagacctttgt

SEQ ID NO: 599924 - DNA, 120 bp, Artificial Sequence
  ENSG00000174483_14 (sequence is synthesized)
tcagtaacaagggcatctcagacatcatcaaggtgctggtgcttcgagaaggccaaagtgcacccctgctgagtgcccacgtcaacatgcctgggagcgaggggctggcggccgcctgag

SEQ ID NO: 599925 - DNA, 120 bp, Artificial Sequence
  ENSG00000174483_15 (sequence is synthesized)
acctgagctgctgtgaaagcccctgcacaatcagccagggagaactgggcgggtttagtggccccaggcccactcctcatgcagcagtgtgctggggcgacagctcgtctcccctctctt

SEQ ID NO: 599926 - DNA, 120 bp, Artificial Sequence
  ENSG00000174483_16 (sequence is synthesized)
aagcacccgcttcctcaccacccccactgttgggcctatagtagcaggttagtgagtacctagggcggctcaactcctcccacagcaccaacccagcatggtcccactgaagtcctacta

SEQ ID NO: 599927 - DNA, 120 bp, Artificial Sequence
  ENSG00000174483_17 (sequence is synthesized)
cgccctcccctccccagccttttccagaaaccatactgggctcagatcagagctccgaagcggtcaaagtgagctgagcaggacaggcccagcctttctccactgccacgtccctcatgc

SEQ ID NO: 599928 - DNA, 120 bp, Artificial Sequence
  ENSG00000174483_18 (sequence is synthesized)
acatcactcatctcctgctgcaggccaaggccaaaattgggctagtcctggccagggaaatcagaagctcttcttgggtgagattgagcctcctgttgctccctggagttccggaggctg

SEQ ID NO: 599929 - DNA, 120 bp, Artificial Sequence
  ENSG00000174483_19 (sequence is synthesized)
ggctgcagcccactcagcttgcgggcaaaatacgtgctctcctctctccttgtcagctgagcaaacccagggaatagccctcctctccccaggaaacttctctgaaatcttagacttagc

SEQ ID NO: 599930 - DNA, 120 bp, Artificial Sequence
  ENSG00000174483_20 (sequence is synthesized)
cagtcttaggcctacgatgccacacaaaggttgttcagggagaagggggtgcaggaggcagagggtgccccgcagggagctggtggctccagccccactagagctcctaaagatcacaca

SEQ ID NO: 599931 - DNA, 120 bp, Artificial Sequence
  ENSG00000174483_21 (sequence is synthesized)
gcagctgctcctgacagggatgctcatgcccagaaagcaagcccaggagaggaaggcagagtgtgacagagcagagccagggccaggcgcaccaggagaggcgtttctggggctccagag

SEQ ID NO: 599932 - DNA, 120 bp, Artificial Sequence
  ENSG00000174483_22 (sequence is synthesized)
aagtgccacgggaggcagaagtccagaactgcccatatagatgcccttctacatcctggagcccaaatcagtcatgtgggtgggaagttcccagggcagtggtcacatcgtgagaattag

SEQ ID NO: 599933 - DNA, 120 bp, Artificial Sequence
  ENSG00000174483_23 (sequence is synthesized)
caggaaaggcggggcctttcttgtcatagctatttctgaggatgaaatgggagacatatgcccagcacctgatgtaagtttatataatgtaatattatgtacctaccactaagaaataca

SEQ ID NO: 599934 - DNA, 120 bp, Artificial Sequence
  ENSG00000174483_24 (sequence is synthesized)
tgaaccgtgccatgaggacagtaagtgttcataaagcaacatgaagcaagaaacagtgcagggtgcccagtgcacacactagagagaaattgtgaacattaaggacaaggagaattggtg

SEQ ID NO: 599935 - DNA, 120 bp, Artificial Sequence
  ENSG00000174483_25 (sequence is synthesized)
tctttctaaaacatacttatttaaaaacacatacccacttactaatgtggaattacacagtttgtaacaagaaaacagtctctcccattctctagtactgctcccctacccagcagtcac

SEQ ID NO: 599936 - DNA, 120 bp, Artificial Sequence
  ENSG00000174483_26 (sequence is synthesized)
ttccagttcattcagctatttttaaaatgtgcttatatgactcttgcttgatatatcaatcttagacattacctgttgactccctgttgtcatacatgaggctttagctctcttttgtca

SEQ ID NO: 599937 - DNA, 120 bp, Artificial Sequence
  ENSG00000174483_27 (sequence is synthesized)
gcaaccctcccccatccctagttattaggttaaaaaatactcagattactatttctattactatgtgaaagttaactgcggagccaagagttggactataattaaattaccttccttgta

SEQ ID NO: 599938 - DNA, 120 bp, Artificial Sequence
  ENSG00000174483_28 (sequence is synthesized)
aaataacaggtaagggtgatcaggaacacctctctgtggagatggcttgaaagttaaaaaggaaccagttggtgagaaagtcgggaagagtgttgtaggccaactcaaagtgggaaagac

SEQ ID NO: 599939 - DNA, 120 bp, Artificial Sequence
  ENSG00000174483_29 (sequence is synthesized)
attggcgtgtgctcctcgaatagagaggaactaactgtactttctggaaagggaaactaaaattgagaggccagtaaactaaaaactgcattgacacagggcaaagctcttcatcctttt

SEQ ID NO: 599940 - DNA, 120 bp, Artificial Sequence
  ENSG00000174483_30 (sequence is synthesized)
agccaccatagtgaaggtgggcggaagacaagacaccatagtgaaggtgggaggaagacaagacaccatagtgaaggtgggaggaagacacacttgatgttttccaaggccacacattta

SEQ ID NO: 599941 - DNA, 120 bp, Artificial Sequence
  ENSG00000174483_31 (sequence is synthesized)
ctaaggtggcagaagtggaaataatcccagggtcatctgctttggggccagtgttcctcccagagactccaagcaccccaagtactgcatcgagctgagcgcccagcctgtgggacttat

SEQ ID NO: 599942 - DNA, 120 bp, Artificial Sequence
  ENSG00000174483_32 (sequence is synthesized)
gttacgcgagggcggggccggttgccaggacgacgcctgcgaagatggccgctgcgtcctcatcggattccgacgcctgcggagctgagaggtgaaggcagggctcctcaaggcctcttt

SEQ ID NO: 599943 - DNA, 120 bp, Artificial Sequence
  ENSG00000174483_33 (sequence is synthesized)
tcccacccgtgtaaagagggtcccttggtccccgggctctgggctcctgctgttctcgggcagtctggaaggactcttaagaggtcagatagggaaaccgaggcctaagatgtgcatatg

SEQ ID NO: 599944 - DNA, 120 bp, Artificial Sequence
  ENSG00000174483_34 (sequence is synthesized)
tgtgtctggaggtcgctcggtgagccagtggcggagcctggacttgtacccagacgttctgtaccttatgttcagagtgacctgtaccagcttcctcaaagtttttttttcccctcccat

SEQ ID NO: 599945 - DNA, 120 bp, Artificial Sequence
  ENSG00000174483_35 (sequence is synthesized)
gcctcagactgggtcctttcccttcttcctcctccactgctcctacacagcaaagctgggggaatgctgcccagcctccctgtgcactgggaggagatctcggccaactaggcagaagaa

SEQ ID NO: 599946 - DNA, 120 bp, Artificial Sequence
  ENSG00000174483_36 (sequence is synthesized)
ctgggcccgctggaggcccaggctgcattctctccccatgctccacagttagttctgggtaatatatatgttccttgtagaaaaattagaaactagataagcattaaaaaagatatatat

SEQ ID NO: 599947 - DNA, 120 bp, Artificial Sequence
  ENSG00000174483_37 (sequence is synthesized)
gaaggtagccacatccgtggtctccggggccgggaggaacatctcagaaaactggtggcttcagaggcttgcaagatgagagtgggctttaaggctggaatttggaaatgcaaagagctg

SEQ ID NO: 599948 - DNA, 120 bp, Artificial Sequence
  ENSG00000174483_38 (sequence is synthesized)
agaacttcataaaggaggctgagcccacaaacacaggggaggatacctggaggcttgtgagataggggctggcacagtgagagactaggctgggtggctatagtacaggagtgatcagaa

SEQ ID NO: 599949 - DNA, 120 bp, Artificial Sequence
  ENSG00000174483_39 (sequence is synthesized)
gcaatgaggccaattcgaagtggttggatgcgcactacgacccaatggccaatatccacaccttttctgcctgcctagcgctggcagatttacatggggatggggaatacaagctgctgc

SEQ ID NO: 599950 - DNA, 120 bp, Artificial Sequence
  ENSG00000174483_40 (sequence is synthesized)
tgcaaatccagggacagcctaggaggtacacgttgcctgcaaatcactgttcctcaggctggaaggtgctgtgggtgacagcaagagcccttagaattcagggaagggagcagtcacttc

SEQ ID NO: 599951 - DNA, 120 bp, Artificial Sequence
  ENSG00000174483_41 (sequence is synthesized)
gtgctgggcaccgagaacaaggagctcctggtgcttgaccccgaggccttcaccattttagccaaggctgaagtgcagtggtacaatctcagcttactgcaacctatgccacctgggctc

SEQ ID NO: 599952 - DNA, 120 bp, Artificial Sequence
  ENSG00000174483_42 (sequence is synthesized)
ctgggctcaaacagtcctctcacctcatcttctcatctgtgggaccaccacgcccagctaagttttgtacttttggtagagacaaagttttgccatgttggacaggctggtcttgaactc

SEQ ID NO: 599953 - DNA, 120 bp, Artificial Sequence
  ENSG00000174483_43 (sequence is synthesized)
gcatcgtttagtcaaaaggcacagactaaaaggcttttgctaaatgttgccccaagtttccctcctgaaaaactgtatgagtttaaactgggtgtaagtgaggagattgggactttagac

SEQ ID NO: 599954 - DNA, 120 bp, Artificial Sequence
  ENSG00000174483_44 (sequence is synthesized)
caggcactcactcagaggagttactgacagggcagggagggacgggggctccagagaaattggagtgtttgcgcttcttgtttgcagatgagccttcccagcgtccccgtcttcctagag

SEQ ID NO: 599955 - DNA, 120 bp, Artificial Sequence
  ENSG00000174483_45 (sequence is synthesized)
ggtgagaggctgccttccccttcatacccccctcactccttcatcccatctgagccccagggccccattcttccattcggctgccatgctggcccctttccttgcagggagacggcagag

SEQ ID NO: 599956 - DNA, 120 bp, Artificial Sequence
  ENSG00000174483_46 (sequence is synthesized)
aaggtaggccccgcacttgtaccacgtggaaggtgagcaggaccctggggaggacagtaagggtgagtgccaacaaagaccttagggggctcctgggtgggggtgggggtatctgcacag

SEQ ID NO: 599957 - DNA, 120 bp, Artificial Sequence
  ENSG00000174483_47 (sequence is synthesized)
gggaggctccagggagaggaagcagccgccagaatgtgccagaatgatggaggagggcagcgaggccggggcctgcagatgccagttctctgtgtgtctaggtttctgcagctggagcta

SEQ ID NO: 599958 - DNA, 120 bp, Artificial Sequence
  ENSG00000174483_48 (sequence is synthesized)
ttttagccaagaatcttgctgtgtcacccaggctggagtacagtggctctatctcagctcactgcagcttctacctcccgggttcaagcagttctcatgcctcagccacctgagtagctg

SEQ ID NO: 599959 - DNA, 120 bp, Artificial Sequence
  ENSG00000174483_49 (sequence is synthesized)
ggactgcaggctgaagtgcagtggtacaatctcagcttactgcaacctatgccacctgggctcaaacagtcctctcacctcatcttctcatctgtgggaccaccacgcccagctaagttt

SEQ ID NO: 599960 - DNA, 120 bp, Artificial Sequence
  ENSG00000174485_0 (sequence is synthesized)
aagcgggctcagagcgccgcggcattcagcccctcgtgttccgctaccgcgcgtgcgggattccggcgccgctctccgagctcgatccgctgctcgcacgggagccagctgggtgttatt

SEQ ID NO: 599961 - DNA, 120 bp, Artificial Sequence
  ENSG00000174485_1 (sequence is synthesized)
tctcaaactctgaggctgcggagttcacacattgaaatctgtcatctttttcagagagaaactttcgatgtaaccttctgtaatggaagatgattgaagacaaggggcctcgtgttgctg

SEQ ID NO: 599962 - DNA, 120 bp, Artificial Sequence
  ENSG00000174485_2 (sequence is synthesized)
actactttgttgtagcaggattaactgatgtttcaaagcctctagaagaagaaattcacttcaatgatgcttgtcataaagtagctaaaccaaaagaacctattacagatgtttcagtta

SEQ ID NO: 599963 - DNA, 120 bp, Artificial Sequence
  ENSG00000174485_3 (sequence is synthesized)
ttatcaaatctcttggggaggaagtcccacaggattatatctgtattgatgttaccccaactggattgtcagctgatcttaataatggaagtcttgtggggccacagatttacctttgct

SEQ ID NO: 599964 - DNA, 120 bp, Artificial Sequence
  ENSG00000174485_4 (sequence is synthesized)
atagaagaggaagagataagcctccacttacagatctgggggttttatatgactggaaagaaagattgaaacagggttgtgaaattattcagagtactccctatgggcgccccgcaaata

SEQ ID NO: 599965 - DNA, 120 bp, Artificial Sequence
  ENSG00000174485_5 (sequence is synthesized)
ttagtgggagtacctcatcacaaagaatttatatcacttaccgaagagcctctgaaaacatgactcagaatacgttggctgtcactgacatatgtattattatacccagtaaaggagaaa

SEQ ID NO: 599966 - DNA, 120 bp, Artificial Sequence
  ENSG00000174485_6 (sequence is synthesized)
gcccaccacacacgttctgcaaagtcgacaagaatctcaataacagtatgtggggatcagcagtatacttgtgttataaaaaatcggtggcaaagacgaacactgtatcttacaaagctg

SEQ ID NO: 599967 - DNA, 120 bp, Artificial Sequence
  ENSG00000174485_7 (sequence is synthesized)
gcctaatttgtagatatcctcaagaagattatgagtcattctcactaccggaatctgttcctctattttgtttaccaatgggtgcaaccattgaatgttggccatcaaatagcaaatacc

SEQ ID NO: 599968 - DNA, 120 bp, Artificial Sequence
  ENSG00000174485_8 (sequence is synthesized)
ctctgcctgtattttctacttttgttttaactggagcctcagctgaaaaggtttatggtgctgctattcagttttatgaaccatactctgaggagaatctcacagaaaagcagagacttc

SEQ ID NO: 599969 - DNA, 120 bp, Artificial Sequence
  ENSG00000174485_9 (sequence is synthesized)
ttttgggtttaacatcagcagatgggaagtctgatagttccaaaacaattcatactaacaaatgcatctgtcttctttctcactggcctttttttgatgcattcaggaagtttctgactt

SEQ ID NO: 599970 - DNA, 120 bp, Artificial Sequence
  ENSG00000174485_10 (sequence is synthesized)
ttctgtatcgttattccatctctgggcctcatgtccttccaattgagaagcatatttctcattttatgcataaagttccttttccatctcctcagagaccacggattttagttcagttat

SEQ ID NO: 599971 - DNA, 120 bp, Artificial Sequence
  ENSG00000174485_11 (sequence is synthesized)
caccacatgataatctgattctcagtcagcctgtgtcttcacctcttccactaagtggtggcaagttttcaacactactgcagaatttaggccctgaaaatgctgtgacactactggtgt

SEQ ID NO: 599972 - DNA, 120 bp, Artificial Sequence
  ENSG00000174485_12 (sequence is synthesized)
ttgcagtaacagaacataaaattcttatccattccctacggccatccgtgcttactagtgtgacagaagcattagtgtctatgattttccctttccactggccatgcccgtatgttcctc

SEQ ID NO: 599973 - DNA, 120 bp, Artificial Sequence
  ENSG00000174485_13 (sequence is synthesized)
tctgcccactggctttagcagatgtcttgagtgcaccatgtccattcatagtagggattgattcaagatactttgatctctatgatcctccaccagatgtcagttgtgttgatgtagata

SEQ ID NO: 599974 - DNA, 120 bp, Artificial Sequence
  ENSG00000174485_14 (sequence is synthesized)
ccaacactatttctcaaattggtgacaagaaaaatgtagcctggaagatacttccaaagaagccatgtaaaaatctgatgaacacactgaataatttgcatcagcaattggcaaaattgc

SEQ ID NO: 599975 - DNA, 120 bp, Artificial Sequence
  ENSG00000174485_15 (sequence is synthesized)
agcagagaccgagagatgatggactcatggatttagcaataaatgactatgattttaattctggaaagaggttgcacatgatagatttggaaatccaagaggcatttttgtttttcatgg

SEQ ID NO: 599976 - DNA, 120 bp, Artificial Sequence
  ENSG00000174485_16 (sequence is synthesized)
cctctattttaaaaggttacagatcatacttaaggccaataacacaagccccatctgagacagccacagatgcagcctctctctttgccctacaagctttcttaagaagccgggaccggt

SEQ ID NO: 599977 - DNA, 120 bp, Artificial Sequence
  ENSG00000174485_17 (sequence is synthesized)
cacatcaaaaattctataacatgatgaccaaaacacaaatgtttattcgcttcattgaagaatgttcttttgttagtgacaaagatgcaagcctggcattttttgatgattgtgtagata

SEQ ID NO: 599978 - DNA, 120 bp, Artificial Sequence
  ENSG00000174485_18 (sequence is synthesized)
aagtggatatggacaagagcggtgaagtacgacttatagaactggatgaatctttcaaaagtgaacacactgtttttgtaacaccacctgagatcccccacctacccaatggtgaagaac

SEQ ID NO: 599979 - DNA, 120 bp, Artificial Sequence
  ENSG00000174485_19 (sequence is synthesized)
cccctttacagtacagctataatggatttccagttcttaggaacaatttatttgaaagacctgaaggatttctacaagcaaagaagaacaaattgccttcaaaatcaagtagtcctaata

SEQ ID NO: 599980 - DNA, 120 bp, Artificial Sequence
  ENSG00000174485_20 (sequence is synthesized)
gccctttgcccatgttcagaagaacaaaacaggaaattaaatcagcccataaaattgcaaagaggtactcttccatccctcagatgtggtctaggtgtctactgcgccactgttatggac

SEQ ID NO: 599981 - DNA, 120 bp, Artificial Sequence
  ENSG00000174485_21 (sequence is synthesized)
tgtggtttatttgtctcccagcttatgtgaaagtctgtcattcaaaagtcagggctctgaaaacagcatatgatgtgcttaaaaaaatgcagtcaaagaagatggatccacctgatgagg

SEQ ID NO: 599982 - DNA, 120 bp, Artificial Sequence
  ENSG00000174485_22 (sequence is synthesized)
tatgctaccgcattcttatgcaactctgtggacaatatgatcagccagtgcttgcagttcgagtgctttttgaaatgcagaaagctggtattgaccccaatgccattacttatggttatt

SEQ ID NO: 599983 - DNA, 120 bp, Artificial Sequence
  ENSG00000174485_23 (sequence is synthesized)
ataataaggctgttttggaaagtacctggccttcaagaagtcgtagtggctattttctttggacaaaagtaagaaatgttgttttaggagtaacacagttcaaaagagctttaaagaagc

SEQ ID NO: 599984 - DNA, 120 bp, Artificial Sequence
  ENSG00000174485_24 (sequence is synthesized)
aaaagataaaaaagggagtgattgtagttccttgtcagagagtgagagtacaaaaggaagtgctgattgccttcctaagctcagttatcaaaattcttccagtatcgttcgcctcactgg

SEQ ID NO: 599985 - DNA, 120 bp, Artificial Sequence
  ENSG00000174485_25 (sequence is synthesized)
tacaagtaacaacagtgctggtaaaatatcaggagaaagcatggaaagcacacctgagctgctcttaatatcatctcttgaagatacaaatgaaacacgaaacattcaaagtagatgctt

SEQ ID NO: 599986 - DNA, 120 bp, Artificial Sequence
  ENSG00000174485_26 (sequence is synthesized)
caggaaaagacataaaagtgacaatgaaactaatttgcagcagcaagtggtctggggaaatagaaaccgtaatcttagtggaggggtactgatgggatttatgctcaatagaattaacca

SEQ ID NO: 599987 - DNA, 120 bp, Artificial Sequence
  ENSG00000174485_27 (sequence is synthesized)
ggaagcaacccctggagatatagttgaaaaattgggagctgatgcaaaaattctttcaaatgttatctcaaaaagcacgagaccaaatactcttgatattgggaagccacctttaagatc

SEQ ID NO: 599988 - DNA, 120 bp, Artificial Sequence
  ENSG00000174485_28 (sequence is synthesized)
aaaaagagacagtctagaaaaggaatctagtgatgatgatacaccttttgatggttctaactatttggcagataaagtggattctcctgttatttttgacttagaagacttagacagtga

SEQ ID NO: 599989 - DNA, 120 bp, Artificial Sequence
  ENSG00000174485_29 (sequence is synthesized)
aacagatgtatcaaaagcaggatgtgttgctacacaaaatcccaagaggattcaacgtatgaacagcagcttttcagtaaaaccttttgaaaaaactgatgtcgcaacaggatttgatcc

SEQ ID NO: 599990 - DNA, 120 bp, Artificial Sequence
  ENSG00000174485_30 (sequence is synthesized)
cctctctcttttggttgctgagactgaacagcagcaaaaagaagaagaggaggaggatgaagatgatagcaaaagcatttcaacaccatctgctaggcgtgatttagctgaagaaattgt

SEQ ID NO: 599991 - DNA, 120 bp, Artificial Sequence
  ENSG00000174485_31 (sequence is synthesized)
gatgtatatgaataacatgagcagtcctttgacaagtcgtacaccaagcattgatttacaacgggcatgtgatgataaattaaataagaaaagtccaccattggtcaaggcatgcagaag

SEQ ID NO: 599992 - DNA, 120 bp, Artificial Sequence
  ENSG00000174485_32 (sequence is synthesized)
atctagtctgcctcctaattctcctaagccagtgagacttaccaaatctaaaagttacacaaaaagtgaggagaaaccaagggatagactttggtcttctccagccttctcacctacttg

SEQ ID NO: 599993 - DNA, 120 bp, Artificial Sequence
  ENSG00000174485_33 (sequence is synthesized)
cccatttagggaagaatctcaggatacattaacccactcatcaccttcatttaacttagatacactactagtacctaaactagatgttctaagaaacagtatgttcactgctggaaaagg

SEQ ID NO: 599994 - DNA, 120 bp, Artificial Sequence
  ENSG00000174485_34 (sequence is synthesized)
agttgcagagaaagcaagcaaatggtattcaagattcaccatgtacaccacatcatctaaggatcaaagttctgatcgtaccagtctttcttcagtgggagcccaggattctgaatctac

SEQ ID NO: 599995 - DNA, 120 bp, Artificial Sequence
  ENSG00000174485_35 (sequence is synthesized)
ctctttaacagatgaagatgtctgccatgagttggaaggacctatctcctctcaagagaccagtgctacttcagggactaagagaattgatctcagccgaataagcctggaaagttctgc

SEQ ID NO: 599996 - DNA, 120 bp, Artificial Sequence
  ENSG00000174485_36 (sequence is synthesized)
atccttggaaggatctctgtcgaagtttgccttacctgggaaatcagaagtgacatcttccttcaacgcgagtaatacaaatatcttccagaactatgcaatggaggttctcatctcaag

SEQ ID NO: 599997 - DNA, 120 bp, Artificial Sequence
  ENSG00000174485_37 (sequence is synthesized)
ttgctctcggtgtagaacttgtgattgtcttgtccatgatgaggaaatcatggctggctggacagcagatgattcaaatctcaatactacatgcccattctgtggcaatatcttcttacc

SEQ ID NO: 599998 - DNA, 120 bp, Artificial Sequence
  ENSG00000174485_38 (sequence is synthesized)
ctttctgaatatagaaataagagatttaagacgacctggaagatactttctaaagtcaagcccatcaacagaaaatatgcactttccatcctccatttcaagtcagacgaggcagtcttg

SEQ ID NO: 599999 - DNA, 120 bp, Artificial Sequence
  ENSG00000174485_39 (sequence is synthesized)
catttcaacatcagcctctggtcttgacacatctgctctctctgttcaagggaattttgatctaaatagcaaatctaaactgcaggaaaatttttgcacccgaagtattcagatccctgc

SEQ ID NO: 600000 - DNA, 120 bp, Artificial Sequence
  ENSG00000174485_40 (sequence is synthesized)
taatagatcaaaaacagctatgtctaaatgtccaatatttccaatggccaggagtattagtacttctggccccttggataaggaagatactggaagacagaagctcatttctacaggcag

SEQ ID NO: 600001 - DNA, 120 bp, Artificial Sequence
  ENSG00000174485_41 (sequence is synthesized)
cctgccagctactttacaaggagctacagattctttaggtttagaatggcaccttccaagtcccgatcctgtcactgttccgtatcttagtcctttagtggtatggaaagaacttgaaag

SEQ ID NO: 600002 - DNA, 120 bp, Artificial Sequence
  ENSG00000174485_42 (sequence is synthesized)
cttattggaaaatgaaggtgatcatgcaataacagtagcagactttgtggaccatcatccaattgttttttggaacctggtatggtatttcagacgtcttgacttgcccagtaacttacc

SEQ ID NO: 600003 - DNA, 120 bp, Artificial Sequence
  ENSG00000174485_43 (sequence is synthesized)
tggattgattctttcttctgagcactgtaacaagtattcaaagattccccgccactgtatgtctgaagatagcaaatatgttttaatacaaatgttatgggacaatatgaagttacatca

SEQ ID NO: 600004 - DNA, 120 bp, Artificial Sequence
  ENSG00000174485_44 (sequence is synthesized)
ggatccgggacagcccttgtacattctctggaatgcacacacccaaaaatatccaatggtccatttattgcaaaaaagtgataactcatttaaccaggaactgttgaaaagtatggtaaa

SEQ ID NO: 600005 - DNA, 120 bp, Artificial Sequence
  ENSG00000174485_45 (sequence is synthesized)
aagcattaaaatgaatgatgtctatggaccaatgagtcagattttagagacactgaataagtgtccacattttaaaagacagaggagtttatacagagaaatactatttctctcacttgt

SEQ ID NO: 600006 - DNA, 120 bp, Artificial Sequence
  ENSG00000174485_46 (sequence is synthesized)
ggcactgggaagagaaaacattgatatagatgcttttgataaagagtacaagatggcatacgatcgtctcacacctagtcaagtcaagagtacacacaactgtgatagaccaccaagtac

SEQ ID NO: 600007 - DNA, 120 bp, Artificial Sequence
  ENSG00000174485_47 (sequence is synthesized)
aggggtgatggaatgtcgaaaaacctttggagaaccttatctttaagatgtatttgtatgtgtaaacattcaatgtatattgtatagtcagtgtataaaataacacttttagactctaaa

SEQ ID NO: 600008 - DNA, 120 bp, Artificial Sequence
  ENSG00000174485_48 (sequence is synthesized)
acgggtttaatcaaagtatatgctactgatgatagatctagtacaggtggccagtctgatcttggatataattcattatctaaagatgaagttagaagaggggatacatctactgaagac

SEQ ID NO: 600009 - DNA, 120 bp, Artificial Sequence
  ENSG00000174485_49 (sequence is synthesized)
tttttgaaaatacaatttgtaaatggttcaaaagactcagacagcttatgtacagaatgtttgaagaagagaatagtgacaagtggggagaaagccactttgtttctcatttcttttttc

SEQ ID NO: 600010 - DNA, 120 bp, Artificial Sequence
  ENSG00000174485_50 (sequence is synthesized)
ttcttctttaactcccctgtaataggaaataaagtatttttgtgatgaggaaatccctaaacaaaattagttgccataaaatatgacaactgctttatggtttcttttggaagagacaga

SEQ ID NO: 600011 - DNA, 120 bp, Artificial Sequence
  ENSG00000174485_51 (sequence is synthesized)
ttgaaaaatcatgaatggaatctaaacagaaatgtcagatgaacgtatttcctgttttcatagactattcaaatgttttgaccatgaagttgtattatacatattttaaattgtttatag

SEQ ID NO: 600012 - DNA, 120 bp, Artificial Sequence
  ENSG00000174485_52 (sequence is synthesized)
taagttgatatttttttaatttttaaatttaatatagcaaacttaaaatgaatttaaacttaagcaagcaagcgtgtattttccttgtctgctgctatttgaagtaattagtacagctgc

SEQ ID NO: 600013 - DNA, 120 bp, Artificial Sequence
  ENSG00000174485_53 (sequence is synthesized)
agatctctctgtgtatatctatctatatatatattttttattacttgggagaatgaattttaaaatgtcagtgctagtgtcaagtgttgtcctaggattgcatgttagtacccctaagcc

SEQ ID NO: 600014 - DNA, 120 bp, Artificial Sequence
  ENSG00000174485_54 (sequence is synthesized)
tgagtgtggggagtgagttatgcaagggtagcgtgcactgcccagactgactcatggagccttgtgcaaggagagccagagaggttcactataccatgactccaaaattgtctctattgc

SEQ ID NO: 600015 - DNA, 120 bp, Artificial Sequence
  ENSG00000174485_55 (sequence is synthesized)
taatagatacgtatagtatacagggaaaacagcttataaatccaaatatcaatttaaattttaatattctacatgaaaacttacattgggaaatatgcagacaagtgattatattccaaa

SEQ ID NO: 600016 - DNA, 120 bp, Artificial Sequence
  ENSG00000174485_56 (sequence is synthesized)
acaagtgattatattccaaattttacccttattttaatatctaaaatattgggtatgatgcaaattatactatagaatatttatctgaaatatgacttactggggtattctgttaatact

SEQ ID NO: 600017 - DNA, 120 bp, Artificial Sequence
  ENSG00000174485_57 (sequence is synthesized)
tttttcaaaagtagaaaaattcccctctaaaagtacagccagatagattttcatccatattgaggaacttagctttttcaacaagcttcagaatctgaagtctgtagaatctaaaataca

SEQ ID NO: 600018 - DNA, 120 bp, Artificial Sequence
  ENSG00000174485_58 (sequence is synthesized)
gaaatatccagaaatcagacaataaattgaaagtttagacatcatgagtattaaatagctttaaaaatatatttttagtcatattatttctaatgtaactttctttgggtaatttctggt

SEQ ID NO: 600019 - DNA, 120 bp, Artificial Sequence
  ENSG00000174485_59 (sequence is synthesized)
aaggaaaaacatcttttggctgctagaattagttatagattttcaatatgtgtgtgtgtttgcacacattatcattagtgaaggaattccctagccagctttaaagaaggaaaaaatgga

SEQ ID NO: 600020 - DNA, 120 bp, Artificial Sequence
  ENSG00000174485_60 (sequence is synthesized)
tagtcccaaattaggtgtataaagccagtagagtccacgacacttggactggaggtatcttggagtcctgagacttagaatcagttcagctgcagaaaacccaccttttgagttcacacc

SEQ ID NO: 600021 - DNA, 120 bp, Artificial Sequence
  ENSG00000174485_61 (sequence is synthesized)
attagtgaatagcaccatgctgaaacatttcacagcttccaactctgggaaataatggagagagtttaaaaatgtaaaacttcagttagtttggggctgaacttgcttacttgaaaaatc

SEQ ID NO: 600022 - DNA, 120 bp, Artificial Sequence
  ENSG00000174485_62 (sequence is synthesized)
tggtgctaggcacatatatctgcctctcctttgtaaataccactccaatattattctttactattcagatccaagcttcatgttctacttgttcttcatgttctttaaatcatttgaaag

SEQ ID NO: 600023 - DNA, 120 bp, Artificial Sequence
  ENSG00000174485_63 (sequence is synthesized)
ttgtcaactgagagaaacatttcagaggggggaggcttttggcactggtgataaacatccctccaagagaaccgtctggggttctcttctatttgtggttggtggtttttattcttttaa

SEQ ID NO: 600024 - DNA, 120 bp, Artificial Sequence
  ENSG00000174485_64 (sequence is synthesized)
aaacagctttcattgttgtttactttttgtgtaatacaaacaaaatgtaggaatcatagtttattgatttcaaatggctgacaaagaatgagtaaaaccattctttatggttttacgatt

SEQ ID NO: 600025 - DNA, 120 bp, Artificial Sequence
  ENSG00000174485_65 (sequence is synthesized)
cagactcatttggaaaagcgaatgtaatttttacctcctctttccaccccaagttttgtttctgcttttggagagggttgtatttcccctacttttaatccctagggaatattattgcac

SEQ ID NO: 600026 - DNA, 120 bp, Artificial Sequence
  ENSG00000174485_66 (sequence is synthesized)
agatttagtcttaaaacctaaaacacaaatacaaagtggtaaacctgttcaaaagaaaattaaaatgtgaatcattcttgagctgggcgtggttgctcatggaggcctgtaatcccagca

SEQ ID NO: 600027 - DNA, 120 bp, Artificial Sequence
  ENSG00000174485_67 (sequence is synthesized)
ctttgggaggctgaagcagggaggattgcttgagtccaggagttcaaaaccagcctgagcaacatagagagaccctgtctctacaaaaaaattttttaaatttgctcggtatggtggctc

SEQ ID NO: 600028 - DNA, 90 bp, Artificial Sequence
  ENSG00000174485_68 (sequence is synthesized)
ctcgggaggctgaagcaggaggatcactttgagcctgggggtttggggctgcaatgagctgtgatcatgccattgcactctagcctggat

SEQ ID NO: 600029 - DNA, 120 bp, Artificial Sequence
  ENSG00000174485_69 (sequence is synthesized)
aaaaaaaaaaaaaaaaccagaaaatatcaatcatttaaaataactctatacaaacttttcttcaattttctgttaaccatacattttggagaataatggccaatcatgttggagagaaat

SEQ ID NO: 600030 - DNA, 120 bp, Artificial Sequence
  ENSG00000174485_70 (sequence is synthesized)
tggccaatcatgttggagagaaatgcccttttgctacagcatctgtcttttattttcttactcttagttttgtttatatgtttaaatggttgacaataaaccatgtcctgtgctgatgta

SEQ ID NO: 600031 - DNA, 120 bp, Artificial Sequence
  ENSG00000174485_71 (sequence is synthesized)
taaggaggagatcaaaatggcaacattaactggagtttggaagaaatagattccagttctcaaggatgattttgaggggttcaggacttcagtggaggaattatgcagatatggtgaaaa

SEQ ID NO: 600032 - DNA, 120 bp, Artificial Sequence
  ENSG00000174485_72 (sequence is synthesized)
tagcaaaaacccctagaattagaagtggagccttgaggatgtgacttaattgctgcaatcaaataataaaacttgaagggatgaggagttgcttctaatggatgagcaaagaaagttgtc

SEQ ID NO: 600033 - DNA, 120 bp, Artificial Sequence
  ENSG00000174485_73 (sequence is synthesized)
cagccactcaaccttcagcagccaccactctgttcagtcaccagccatcaatatccaggcaaaaccctcaaccagcaaaaagattaccacttgctgaaggttcacataattgttagcaat

SEQ ID NO: 600034 - DNA, 120 bp, Artificial Sequence
  ENSG00000174485_74 (sequence is synthesized)
ttttagtaataaggtattttaaaatttatgtgcattttttagacataatgctgttgtacagtagacttcagtgtaatgtgaacaacttttatatgcactgggaaataaatttgtggtttg

SEQ ID NO: 600035 - DNA, 120 bp, Artificial Sequence
  ENSG00000174485_75 (sequence is synthesized)
ctttattgcgacatttgttttgttgaggtggtctggaactgaacctgccatacctccaaggtaggtctgtacagtgccttcattgaaggcactaaataaatggttattgttgctatactc

SEQ ID NO: 600036 - DNA, 120 bp, Artificial Sequence
  ENSG00000174485_76 (sequence is synthesized)
actgttataaatgttatgagttatagtttctatgtacagcttttaatgaaattgaaattaatttcattttcatcgttgaccacttaaatgaaagttttggtagcctgctagaaattatag

SEQ ID NO: 600037 - DNA, 120 bp, Artificial Sequence
  ENSG00000174485_77 (sequence is synthesized)
aatgcacctcttacaattaccttgtagaattttactacaaggtaattgtaatcataagttttattgtagcaatcaagtcctaaccctccctgtccacttacaaaaccaggaattttttgc

SEQ ID NO: 600038 - DNA, 120 bp, Artificial Sequence
  ENSG00000174485_78 (sequence is synthesized)
cagcctgtgcacctccaacttgaacgtctgtgattttcacctctcctttttgtctgatatgggttatcacatgctgaaagtaggtgtgaaagtataataaatgttttacctgaatatttc

SEQ ID NO: 600039 - DNA, 120 bp, Artificial Sequence
  ENSG00000174485_79 (sequence is synthesized)
attgccaagatggcgccggtcgcggtggccgcggaggctagagtcggagaaagaggcggaggcagtggcggccgcgaggggagggggagtcccgtctgactgagacggcaggcctgggcg

SEQ ID NO: 600040 - DNA, 120 bp, Artificial Sequence
  ENSG00000174485_80 (sequence is synthesized)
ggaaacaatattcttagttattgtctatttaagaccacagaaagctttagacctttttttgtcattatttgtcttattttttgctttcttcattcttggattcctatttctttatctatt

SEQ ID NO: 600041 - DNA, 120 bp, Artificial Sequence
  ENSG00000174485_81 (sequence is synthesized)
gcccttaatttatttttagtgctttgtaacttaatatctgtcagttgctgcttaatttctttctcctttctacacagaacattttccttcatctgttcttttgttcgtttacagcccaaa

SEQ ID NO: 600042 - DNA, 120 bp, Artificial Sequence
  ENSG00000174485_82 (sequence is synthesized)
gagtacacacaactgtgatagaccaccaagtacaggggtgatggaatgtcgaaaaacctttggagaaccttatctttaagatgtatttaacttgaaagctgctatttggcactttatctc

SEQ ID NO: 600043 - DNA, 120 bp, Artificial Sequence
  ENSG00000174485_83 (sequence is synthesized)
agagcaagaagagaaagagcaggctgtctctttgagaagacccttgtccttcgtgctaaagttagcatgtgctgcctcttcctgtctggatataagactaagctttatttcaaaactgaa

SEQ ID NO: 600044 - DNA, 120 bp, Artificial Sequence
  ENSG00000174485_84 (sequence is synthesized)
ccctctagcagctgcataccagtttaccttaatatccttagtacttggtgtcttaacatcctcatactaccttgctcctttggcctcaaagtaagcatattggctggcttatatttctta

SEQ ID NO: 600045 - DNA, 120 bp, Artificial Sequence
  ENSG00000174485_85 (sequence is synthesized)
acaaaattagcagtacacaaattgaagaattttcatctttgattacaaaagtctgcgcatgtgcttgtactctgagatggtaatagattcttctgataaagttattgctgcctttccaca

SEQ ID NO: 600046 - DNA, 80 bp, Artificial Sequence
  ENSG00000174498_0 (sequence is synthesized)
gacagatcgcccgggtgggtgcaagatggcgcaagcggcgctccccctgcgccccccgcgctgctgagcaggcatgcggc

SEQ ID NO: 600047 - DNA, 80 bp, Artificial Sequence
  ENSG00000174498_1 (sequence is synthesized)
gccgcgagaggcccgggagccgcgcgtcgccgagccgagctgaccgagagccccatggctgtgcagcgcgccgcgtctcc

SEQ ID NO: 600048 - DNA, 120 bp, Artificial Sequence
  ENSG00000174498_2 (sequence is synthesized)
gcgccgcccgcccgccccgctctggccccggctcctgctgccgctgctgttgctgctgctgcccgcgccgagcgagggtcttggccactctgctgaactggcatttgctgtggagccaag

SEQ ID NO: 600049 - DNA, 120 bp, Artificial Sequence
  ENSG00000174498_3 (sequence is synthesized)
tgatgatgttgccgtccccgggcagcctatagtgctggactgcagggtggaggggacccctccagtgcgaatcacctggaggaagaatggggtagagctgccagagagtacccactccac

SEQ ID NO: 600050 - DNA, 120 bp, Artificial Sequence
  ENSG00000174498_4 (sequence is synthesized)
cttgctggccaatgggtccttgatgatccgtcacttcaggctggagccgggaggcagcccttcggatgaaggtgactatgagtgtgtggcccagaaccgctttgggctggtggtcagccg

SEQ ID NO: 600051 - DNA, 120 bp, Artificial Sequence
  ENSG00000174498_5 (sequence is synthesized)
gaaggctcgcatccaagctgcaaccatgtcggacttccacgtgcatccccaggccaccgtgggtgaggagggtggtgtggcccgcttccagtgccaaatccatgggcttcccaaacccct

SEQ ID NO: 600052 - DNA, 120 bp, Artificial Sequence
  ENSG00000174498_6 (sequence is synthesized)
gatcacttgggagaagaacagagtcccaattgacacggacaatgagaggtacacattgctgcccaagggggtcctgcagatcacaggacttcgagctgaggacggtggcatcttccactg

SEQ ID NO: 600053 - DNA, 120 bp, Artificial Sequence
  ENSG00000174498_7 (sequence is synthesized)
tgtggcctcaaacatcgccagtatccggatcagccacggggccaggctcactgtgtcaggctcgggctctggggcctacaaggagccagccatcctcgtggggcctgagaacctcaccct

SEQ ID NO: 600054 - DNA, 120 bp, Artificial Sequence
  ENSG00000174498_8 (sequence is synthesized)
gacagtgcaccagaccgcggtgcttgagtgtgtcgccacgggcaacccgcgccccattgtgtcctggagccgcctggatggtcgccctatcggggtggagggcatccaggtgctgggcac

SEQ ID NO: 600055 - DNA, 120 bp, Artificial Sequence
  ENSG00000174498_9 (sequence is synthesized)
aggaaacctcatcatctcagacgtgacggtccagcactctggcgtctacgtctgtgcagccaacagacctggcacccgggtgaggagaacggcacagggccggctggtggtgcaagcccc

SEQ ID NO: 600056 - DNA, 120 bp, Artificial Sequence
  ENSG00000174498_10 (sequence is synthesized)
agctgagtttgtgcagcatccccagtccatctccaggccagctgggaccacagccatgttcacctgccaagcccagggtgagccaccgcctcatgtcacgtggctgaaaaatggacaggt

SEQ ID NO: 600057 - DNA, 120 bp, Artificial Sequence
  ENSG00000174498_11 (sequence is synthesized)
gctggggccaggaggccacgtcaggctcaagaataacaacagcacactgaccatttctggaatcggtcctgaggatgaagccatttatcagtgtgtggccgagaacagtgcgggctcatc

SEQ ID NO: 600058 - DNA, 120 bp, Artificial Sequence
  ENSG00000174498_12 (sequence is synthesized)
acaggccagtgccaggctgaccgtactgtgggctgaggggctccccgggcctccccgcaatgtgcgggcagtctctgtgtcttccactgaggtgcgtgtgtcctggagtgagccgctggc

SEQ ID NO: 600059 - DNA, 120 bp, Artificial Sequence
  ENSG00000174498_13 (sequence is synthesized)
caacaccaaggagatcatcggctacgtcctgcacatcaggaaggctgctgacccaccggagctggagtatcaggaggcagtcagcaagagcacctttcagcacctggtcagcgacctgga

SEQ ID NO: 600060 - DNA, 120 bp, Artificial Sequence
  ENSG00000174498_14 (sequence is synthesized)
gccctccacagcctacagtttctacatcaaggcctacacaccaaggggggccagctcagcctctgtgcccaccctagctagcaccctgggtgaagcccctgccccacccccactgtcagt

SEQ ID NO: 600061 - DNA, 120 bp, Artificial Sequence
  ENSG00000174498_15 (sequence is synthesized)
gcgagtcctgggcagctcctccttgcagctgctgtgggagccttggccccggctggcccagcacgagggcggcttcaagctgttttaccgcccagcaagcaagacctccttcaccggccc

SEQ ID NO: 600062 - DNA, 120 bp, Artificial Sequence
  ENSG00000174498_16 (sequence is synthesized)
catcctgctgcctggaaccgtctcctcctacaacctcagccagctcgaccccactgcagtgtatgaggtgaagctgctcgcctacaaccagcatggagatggcaatgccacagtccgctt

SEQ ID NO: 600063 - DNA, 120 bp, Artificial Sequence
  ENSG00000174498_17 (sequence is synthesized)
tgtgtctttgaggggagcatctgagaggacagccttgagcccaccatgtgactgccggaaggaggaggccgccaaccagacgtccaccacaggcatcgtcatcggcatccacatcggggt

SEQ ID NO: 600064 - DNA, 120 bp, Artificial Sequence
  ENSG00000174498_18 (sequence is synthesized)
acttgcatcatcttctgtgtcctcttcctcctgttcggccaaaggggcagggtcctcctgtgtaaagatgtggaaaaccagctgtcccctccacagggtccccggagccagagggaccct

SEQ ID NO: 600065 - DNA, 120 bp, Artificial Sequence
  ENSG00000174498_19 (sequence is synthesized)
ggcattctagccctaaatggggcgagacggggacagcggggccagctgggccgagacgagaaacgtgtggatatgaaggagctggagcagctgttccccccggccagcgcagcagggcag

SEQ ID NO: 600066 - DNA, 120 bp, Artificial Sequence
  ENSG00000174498_20 (sequence is synthesized)
ccggaccccagacccacacaggatcctgcagcccccgctccgtgtgaggagacccagctctccgtgctgccacttcaggggtgcggcctgatggaggggaagacgacggaggcgaagacc

SEQ ID NO: 600067 - DNA, 120 bp, Artificial Sequence
  ENSG00000174498_21 (sequence is synthesized)
acagaggccacggctccctgcgccggcctggcggctgccccaccacccccagatggaggccctggcctcctcagtgaaggccaggcttccaggcctgcagcggcccgggttacccagcca

SEQ ID NO: 600068 - DNA, 120 bp, Artificial Sequence
  ENSG00000174498_22 (sequence is synthesized)
gctcactcggaacagtagccagtgtctggcaggctccagagggtggacggagcggggcccattctcaggtcaaaagcaagatttctactgtcatgtgggatttggatggtcctgggggct

SEQ ID NO: 600069 - DNA, 120 bp, Artificial Sequence
  ENSG00000174498_23 (sequence is synthesized)
ccccagcatttctatcctgactgcctcttgggttgtcaaaacccaaggcagccttgacagggaccccccggccctaacacccatcaggagttggagcagttcctgcaggagcctgttcct

SEQ ID NO: 600070 - DNA, 120 bp, Artificial Sequence
  ENSG00000174498_24 (sequence is synthesized)
tccctgggctgacgcccccttgcctctgcctggtacccacatgacttggaactgaactaacatttttctttaaaaagcaaaacttaaaaaaaaaaaaaaagaggagagagatagaggaag

SEQ ID NO: 600071 - DNA, 120 bp, Artificial Sequence
  ENSG00000174498_25 (sequence is synthesized)
gtgaattagactccaaaagatgaccctgctgtagctgggccctgacactgtcaccctccaccgactttgttttctcaggatggatttttgctgttttggctctcagcacctacctcagcc

SEQ ID NO: 600072 - DNA, 120 bp, Artificial Sequence
  ENSG00000174498_26 (sequence is synthesized)
ggaatgaatgtcctggggggcagtggggcggtggcctcagcccccttaccccacagagcccgaatgcactcctacctcaagtccccttgctggggaccccctctcccttcccacactgtt

SEQ ID NO: 600073 - DNA, 120 bp, Artificial Sequence
  ENSG00000174498_27 (sequence is synthesized)
taaaaaaaaaaaaaaaaaaaaaagcacttccccgtttccaggtgtgaaagaaaaaaaaaagcacttccccatttccagatgtgaaagaaaatgtctacctcaaggctcgctggctctgtg

SEQ ID NO: 600074 - DNA, 120 bp, Artificial Sequence
  ENSG00000174498_28 (sequence is synthesized)
gctctgtgggctgtgttgtcactggacctgcctccccgcccctcctgcccacagcccacctacctctcctgcagaggagaggccagaggttgggccaccaaggggaactcttgtggccta

SEQ ID NO: 600075 - DNA, 120 bp, Artificial Sequence
  ENSG00000174498_29 (sequence is synthesized)
cagaaatagaaatggattgggcagagaaaaaatgtgaaagcagccaaaaatgagaggaaatttgttccttgaagtataaattgtccaaacgagccacctcccagcacaccgcctgtcccc

SEQ ID NO: 600076 - DNA, 120 bp, Artificial Sequence
  ENSG00000174498_30 (sequence is synthesized)
gtcttgtctgtccactcccattttgagccagcccatccttgatggggatgcccatgaggaacctgggcttgggagggtggcatcagctggccgcctgcctcctgtcctgcaggcccggcc

SEQ ID NO: 600077 - DNA, 120 bp, Artificial Sequence
  ENSG00000174498_31 (sequence is synthesized)
cctggaatgtaccatgtgtgggatgggtgtgtgggagggtgagggggtgtgggtgtcccctgcagaggcgccccagcctcaggcacccagccagcctgatccacccctcgacaggggagc

SEQ ID NO: 600078 - DNA, 120 bp, Artificial Sequence
  ENSG00000174498_32 (sequence is synthesized)
atccactgtcagcagccatggccggaagctatttttatacaaggtgtgttaagggttatgttcttgtgactttttgttactcttttctgttgtgttgttctttgaactacttagttaaag

SEQ ID NO: 600079 - DNA, 120 bp, Artificial Sequence
  ENSG00000174498_33 (sequence is synthesized)
aagaagaaaagaaaaccaaggaaacaaatacctatttttggttatactcagaaacatttttttaaatagcagaagaaaaactttttttaaagaaaaaagataagtgtattccttaagaat

SEQ ID NO: 600080 - DNA, 120 bp, Artificial Sequence
  ENSG00000174498_34 (sequence is synthesized)
gagaccataaatatccctgacccccaatcctctagggacacctccaccctgaactttagttaattagctgaagaagatagaatttgtggtgttttcctagaaaactagagctgtgtccgc

SEQ ID NO: 600081 - DNA, 120 bp, Artificial Sequence
  ENSG00000174498_35 (sequence is synthesized)
gtggacttggggaagggtagtcccttcccttctcccaaatgatgtgtggatgcccagggctccacaaagctccaaggcagtgccccctctgttcccaaagcagcttctctcgggagcctc

SEQ ID NO: 600082 - DNA, 120 bp, Artificial Sequence
  ENSG00000174498_36 (sequence is synthesized)
cctctcccttgggaagggtgcggctggggcaggagggggctggggggccacctggccttacttgggttttgtcacactctgctcattttgactgaataaaagtcctgttgccaaagtgaa

SEQ ID NO: 600083 - DNA, 120 bp, Artificial Sequence
  ENSG00000174498_37 (sequence is synthesized)
cgcgagtgcgccggggccgggcccagctggggaatccgaggctctgggggagggggtggcgggaaatggtgcctcgctcgccccagcgacatcaaaccctcgtttggcgtgcgaggacaa

SEQ ID NO: 600084 - DNA, 61 bp, Artificial Sequence
  ENSG00000174498_38 (sequence is synthesized)
tatgcacaattacgcccggctaatttttgaattttttggtaaagatggggtttcaccatgt

SEQ ID NO: 600085 - DNA, 120 bp, Artificial Sequence
  ENSG00000174498_39 (sequence is synthesized)
ctaacactttttaagtacttgctgcatgctgggcaccctgtccaagtgctttacatgaattacttcattttgtcatcacaacagccctgggagaatggaagataggtcattatcatcccc

SEQ ID NO: 600086 - DNA, 120 bp, Artificial Sequence
  ENSG00000174498_40 (sequence is synthesized)
cttttacagaagagaaaactgagccttagggggactcaatggcattctggtagcagaagagccaggactgtcatctgggcagcctgaacccacaccctcccacttagctcccgtggcacg

SEQ ID NO: 600087 - DNA, 120 bp, Artificial Sequence
  ENSG00000174498_41 (sequence is synthesized)
ccgcctctttcctgtctgatcgctgacaagtttcttcctggctctgagggcatttgcacagttgctctgaacggctggtgagtgatgaatcagtttgaggcaggagccctctcgctgggt

SEQ ID NO: 600088 - DNA, 120 bp, Artificial Sequence
  ENSG00000174498_42 (sequence is synthesized)
atttccctcttcccgactcctctagtcccttcatcagtccaggctccccacagtgccccatcttccctcttcttttcccagtctttctctcctgccttctctacccgcatctctcccagc

SEQ ID NO: 600089 - DNA, 120 bp, Artificial Sequence
  ENSG00000174500_0 (sequence is synthesized)
ctgctgtctctgcacgggtggccagagccacacagccctttctttaagtcaggagttgccctgtcagagcacaaggcaagaaggaagtggtaaagggacggaggggaagccctgagagga

SEQ ID NO: 600090 - DNA, 120 bp, Artificial Sequence
  ENSG00000174500_1 (sequence is synthesized)
ctgagaggatgggaaattctctgctgagagaaaacaggcggcagcagaacactcaagagatgccttggaatgtgagaatgcaaagccccaaacagagaacatccagatgctgggatcacc

SEQ ID NO: 600091 - DNA, 120 bp, Artificial Sequence
  ENSG00000174500_2 (sequence is synthesized)
atatcgctgaagggtgtttctgccttccatggaaaaaaatactcatttttgaaaagaggcaagattcccaaaacgaaaatgaaagaatgtcatctactcccatccaggacaatgttgacc

SEQ ID NO: 600092 - DNA, 120 bp, Artificial Sequence
  ENSG00000174500_3 (sequence is synthesized)
agacctactcagaggagctgtgctataccctcatcaatcatcgggttctctgtacaaggccatcagggaactctgctgaagagtactatgagaatgttccctgcaaagctgagagaccca

SEQ ID NO: 600093 - DNA, 120 bp, Artificial Sequence
  ENSG00000174500_4 (sequence is synthesized)
gagagtccttgggaggaactgagactgagtattcacttctacatatgccttctacagaccccaggcatgcccgatccccagaagatgaatatgaacttctcatgcctcacagaatctcct

SEQ ID NO: 600094 - DNA, 120 bp, Artificial Sequence
  ENSG00000174500_5 (sequence is synthesized)
ctcactttctgcaacagccacgtccacttatggccccttctgagactcagttttcccatttatagtgaagtggctggactagcatttgtttagcaccaacaaataaaaggtgggatgggg

SEQ ID NO: 600095 - DNA, 120 bp, Artificial Sequence
  ENSG00000174500_6 (sequence is synthesized)
gatctgcctgaagcagggatgggacacaaagtccctccagcttatctcccacaacaaccctttccctgcagagcatggtttgtataccacaagccctcttagcacgcaaaagccaaaatc

SEQ ID NO: 600096 - DNA, 120 bp, Artificial Sequence
  ENSG00000174500_7 (sequence is synthesized)
taaagatcaaccatttatcctgaacaacaccatttgagaaagaggtaaccatctttggttctacatggtttggagagtatagtggtaggaggggctccctgattcccctaaagctatgca

SEQ ID NO: 600097 - DNA, 120 bp, Artificial Sequence
  ENSG00000174500_8 (sequence is synthesized)
caccacaaggggctctgctcttctgtctgggatcttcttataaagtgttcccatgatcattctctaaagtcacaaggaagctttactcatcatactaagtgtgcccaagggggagttcac

SEQ ID NO: 600098 - DNA, 120 bp, Artificial Sequence
  ENSG00000174500_9 (sequence is synthesized)
tcattactgtgaccttccagctcagtccccacccatgggagcctgtgttgctcctctcactccatgtgtctaagtcatgtcttttacatagtgtcctttgacctgttggcccccatggtc

SEQ ID NO: 600099 - DNA, 120 bp, Artificial Sequence
  ENSG00000174500_10 (sequence is synthesized)
tggttagttatgtgagttgaatcaagaggctctaggccagatgtttacataattttaacctatatgattttatttttaactttgtatttctccctagaaatcttaataagacaattatgc

SEQ ID NO: 600100 - DNA, 120 bp, Artificial Sequence
  ENSG00000174500_11 (sequence is synthesized)
catcagacaatgttaagaagaacgatccttggagatcccgtaatcccactacccttctttggctcagagaggataatttgcctaatgatacattaaagttagtggcaaaacttaatttgg

SEQ ID NO: 600101 - DNA, 120 bp, Artificial Sequence
  ENSG00000174500_12 (sequence is synthesized)
agcctgatttcctactgacttccaatttagtgctcccccagtatgctaaatagaaagccctctgcaatatattaaatgtatactaaatgtatatatttaataatgtcatgtataaaatat

SEQ ID NO: 600102 - DNA, 120 bp, Artificial Sequence
  ENSG00000174500_13 (sequence is synthesized)
ctctgataagcactcctctatgtgtcctgattatttactttctcttatcttttccttagtgttcctcaaattatatctatcctctaaaccagggatcagcaaactataacccccaggcca

SEQ ID NO: 600103 - DNA, 120 bp, Artificial Sequence
  ENSG00000174500_14 (sequence is synthesized)
aatctagcccactccctgtttttatagataaagatttgttggaacacagccacactcatttgtttacctactatctatgattgttcaaccatgggagagttgagtaattgtgacatggac

SEQ ID NO: 600104 - DNA, 120 bp, Artificial Sequence
  ENSG00000174500_15 (sequence is synthesized)
cataggccctaaagagccaaaataaatatactttggcactttttggaaaaaaagtttgcagacacctgccctaaatgattatagtttgagagaaacttaacagaaatgtgtttggttact

SEQ ID NO: 600105 - DNA, 120 bp, Artificial Sequence
  ENSG00000174500_16 (sequence is synthesized)
gatgcataagagcaagcaccaataaaatggcataaaaatattaaatcacaaatggataagtgagaccaaggcaatttagcaaattctactatttctgtattcacacctgtgtcttccact

SEQ ID NO: 600106 - DNA, 120 bp, Artificial Sequence
  ENSG00000174500_17 (sequence is synthesized)
tgctgttttatttaactcacggctactgtcctaattttagggatgctaaaatagtttgttttaaaagaggtttgtttaagaaagcagtaggtacattatgtttactagacaggcccttgg

SEQ ID NO: 600107 - DNA, 120 bp, Artificial Sequence
  ENSG00000174500_18 (sequence is synthesized)
accagctaagcgacagggaacctggtacattatgtttagttactgttttcttctcaaagttaaccaaagctaaataactttcctatgtaaaatgtgctgactcccaaaagaggagaaatg

SEQ ID NO: 600108 - DNA, 120 bp, Artificial Sequence
  ENSG00000174500_19 (sequence is synthesized)
caatggcttgagcttgcatgtgtcacaggtttgtggagccttcagccaggtgatggtcttcagctaaagagccagctgcatcttggtatctcttcctctgctaacttcctacttttagca

SEQ ID NO: 600109 - DNA, 120 bp, Artificial Sequence
  ENSG00000174500_20 (sequence is synthesized)
aaattctttcacttggaactctagctgatccttggccaggatcagatcctcaaaaggaaatattcagttagcagtggatattgtacaagatgtaacatggcttagaggaaagagtgtaga

SEQ ID NO: 600110 - DNA, 120 bp, Artificial Sequence
  ENSG00000174500_21 (sequence is synthesized)
cccagcgacagatcatcagtcactcaaatcctggttctctctcttcctccatctgtgactttgaacatgctacttggaggctcagcttcttcaccatcaacaggaggattacatctaatg

SEQ ID NO: 600111 - DNA, 120 bp, Artificial Sequence
  ENSG00000174500_22 (sequence is synthesized)
caggcaatcatctattacagatgccgaataaatgatatcaaagagcatagagaaacaaaaatcttttatgatgtacggaaaaaaaccatgctgatacagctggctattcagggtcaccca

SEQ ID NO: 600112 - DNA, 120 bp, Artificial Sequence
  ENSG00000174500_23 (sequence is synthesized)
gcagtcctccagcaaggtagaaacaccaaatcaatgagtttatgctagaatttttcacatggccactggaccattgtggaagtagactggttgaaatattcttagtatgacatagtaagt

SEQ ID NO: 600113 - DNA, 120 bp, Artificial Sequence
  ENSG00000174500_24 (sequence is synthesized)
tatatttgtttgaaccttatcctgtgaaagcattatctgtcccaaacagtatatgccttttatcagggacacattaaatataaatgtttaaccaaagaaagttgttcttataatgtaatt

SEQ ID NO: 600114 - DNA, 120 bp, Artificial Sequence
  ENSG00000174500_25 (sequence is synthesized)
ataacagggatttataagagggaattataagagggattatgaaagggaattacttttgagcaaggggagccatttgggagtgcttcaagatacccaatatgatatacacaattatgattt

SEQ ID NO: 600115 - DNA, 120 bp, Artificial Sequence
  ENSG00000174500_26 (sequence is synthesized)
gtcagtcaaaaataatattaagaacaaaaaaagagttaaaaaattctgatatgagtgtaatatacttaatatgtaggatgtctcaaatttccagtaaataaattttaatgtcccaaaata

SEQ ID NO: 600116 - DNA, 120 bp, Artificial Sequence
  ENSG00000174500_27 (sequence is synthesized)
acaaaggcattctaccatgagagatgtgtccaagttatctagaatgaaacacgcttgcggggagaaaaaaagttttccacagaaatggcaaaaggaaaggagtcaccttaacaaagctgc

SEQ ID NO: 600117 - DNA, 120 bp, Artificial Sequence
  ENSG00000174500_28 (sequence is synthesized)
gactttaccaaggaaggtctatataataggttaccacctaagaaatgaaacaactttctgaaagcccgggaaggagatgctctcctgagctcctcatgctccacaaggaggtcaaaatca

SEQ ID NO: 600118 - DNA, 120 bp, Artificial Sequence
  ENSG00000174501_0 (sequence is synthesized)
tttgcctgttgttgctcttcggaggcggcgatccccgaaggcgagctgaaatacggctgcaggctacaatttgcagccgaccattatggatgacaaggagccgaagaggtggcccaccct

SEQ ID NO: 600119 - DNA, 120 bp, Artificial Sequence
  ENSG00000174501_1 (sequence is synthesized)
cagggaccgcttgtgctcggatggcttcttatttccccaataccccattaaaccgtatcatctgaaggggatccacagagctgtcttctatcgtgatctggaggaactgaagttcgttct

SEQ ID NO: 600120 - DNA, 120 bp, Artificial Sequence
  ENSG00000174501_2 (sequence is synthesized)
gctcacgcgttatgacatcaataagagagacaggaaggaaaggaccgccctacatttggcctgtgccactggccaaccggaaatggtacatctcctggtgtccagaagatgtgagcttaa

SEQ ID NO: 600121 - DNA, 120 bp, Artificial Sequence
  ENSG00000174501_3 (sequence is synthesized)
cctctgcgaccgtgaagacaggacacctctgatcaaggctgtacaactgaggcaggaggcttgtgcaactcttctgctgcaaaatggcgccgatccaaatattacggatgtctttggaag

SEQ ID NO: 600122 - DNA, 120 bp, Artificial Sequence
  ENSG00000174501_4 (sequence is synthesized)
gactgctctgcactacgctgtgtataatgaagatacatccatgatagaaaaacttctttcatatggtgcaaatattgaagaatgcagcgaggatgaatatccgccactgttccttgctgt

SEQ ID NO: 600123 - DNA, 120 bp, Artificial Sequence
  ENSG00000174501_5 (sequence is synthesized)
gagtcaaagaaaagtgaaaatggtggaatttttattaaagaaaaaagcaaatataaatgccgttgattatcttggcagatcagccctcatacatgctgttactcttggagaaaaagatat

SEQ ID NO: 600124 - DNA, 120 bp, Artificial Sequence
  ENSG00000174501_6 (sequence is synthesized)
agtcattcttcttctgcagcacaatattgatgtgttttctcgagatgtgtatggaaagcttgcagaagattatgccagcgaggctaagaacagagtcatttttgaactaatttatgaata

SEQ ID NO: 600125 - DNA, 120 bp, Artificial Sequence
  ENSG00000174501_7 (sequence is synthesized)
tgaaagaaagaaacatgaagagctttctataaatagcaatccagtgtcttctcagaaacaaccagccttgaaggctacaagtggcaaggaagattctatctcgaatatagccacagaaat

SEQ ID NO: 600126 - DNA, 120 bp, Artificial Sequence
  ENSG00000174501_8 (sequence is synthesized)
aaaggatggacaaaaatctgggacagtgtcttctcagaaacaaccggccttgaagggtacaagtgacaagaacgattctgtttcgaacacagccacagaaataaaagatgaacaaaaatc

SEQ ID NO: 600127 - DNA, 120 bp, Artificial Sequence
  ENSG00000174501_9 (sequence is synthesized)
tgggacagtgtcttctcagaaacaaccggccttgaaggatacaagtgacaagaacgattctgtttcgaacacagccacagaaataaaagatgaacaaaaatctgggacagtgcttcctgc

SEQ ID NO: 600128 - DNA, 120 bp, Artificial Sequence
  ENSG00000174501_10 (sequence is synthesized)
tgttgaacagtgtttaaacaggagtctctacagaccggatgctgttgcacagcctgtgacagaggatgagtttgctttggaatctgagattatttcaaaactatacatcccaaagagaaa

SEQ ID NO: 600129 - DNA, 120 bp, Artificial Sequence
  ENSG00000174501_11 (sequence is synthesized)
gattatttctccacgatctatagaagatgtgcttcctcctgttgaagaggctgttgacaggtgtctctacctactggaccgttttgcacaggctgtgacaaaggataagtttgctttgga

SEQ ID NO: 600130 - DNA, 120 bp, Artificial Sequence
  ENSG00000174501_12 (sequence is synthesized)
atctgagaatatttcagaaccatactttacaaacagaaggactatttctcaacaatctgcagaaaagttagatgctgcatgtggcattgacaaaacagaaaatggaaccttgtttgaaga

SEQ ID NO: 600131 - DNA, 120 bp, Artificial Sequence
  ENSG00000174501_13 (sequence is synthesized)
ccaaaatgttgataaggaaggaaaagcactaccagcaactggacaaaaagcaaatgtgtctcctgagcaaccgcctttattcacgcatacggtgaaagacagtgatcacatttcaactag

SEQ ID NO: 600132 - DNA, 120 bp, Artificial Sequence
  ENSG00000174501_14 (sequence is synthesized)
attcttaggaagtatggattcactaacttccagtgaagaatcttctgagcgacctcctttatccacgcttactctgaaagaggcagatcccagttcaaaagcagccatgagaaggaagga

SEQ ID NO: 600133 - DNA, 120 bp, Artificial Sequence
  ENSG00000174501_15 (sequence is synthesized)
ttcaccacctccaggaaaagtgtcttctcagaaacaaccagctgagaaggctacaagtgacgacaaagattctgtttcaaatatagccacagaaataaaggagggaccaatatctgggac

SEQ ID NO: 600134 - DNA, 120 bp, Artificial Sequence
  ENSG00000174501_16 (sequence is synthesized)
agtgtcttctcagaaacaaccagctgagaaggctacaagtgatgagaaagattctgtttcaaatatagccacagaaataaaggagggacaacaatctgggacagtgtctcctcagaaaca

SEQ ID NO: 600135 - DNA, 120 bp, Artificial Sequence
  ENSG00000174501_17 (sequence is synthesized)
atcagcctggaaggttatatttaaaaagaaagtttctcttttgaatattgccacaagaataacgggcggtgggaaatctggaacagtgtcttctcagaaacaaccaccctcaaaggctac

SEQ ID NO: 600136 - DNA, 120 bp, Artificial Sequence
  ENSG00000174501_18 (sequence is synthesized)
aagtgacaagacagattctgctttgaatatagctacagaaataaaggatggactacaatgtgggacagtgtcttctcagaaacaaccagccttgaaggctacaactgacgaggaagattc

SEQ ID NO: 600137 - DNA, 120 bp, Artificial Sequence
  ENSG00000174501_19 (sequence is synthesized)
tgtttcgaatatagccacagaaataaaggatggagaaaaatctgggacagtgtcttctcagaaacaaccagccttgaaggctacaactgacgaggaagattctgtttcgattatagccac

SEQ ID NO: 600138 - DNA, 120 bp, Artificial Sequence
  ENSG00000174501_20 (sequence is synthesized)
agaaataaaggacggagaaaaatctgggacagtgtcttctcggaaaaaaccagccttgaaggctacaagtgatgagaaagattctttttcgaatataaccagagaaaaaaaggatggaga

SEQ ID NO: 600139 - DNA, 120 bp, Artificial Sequence
  ENSG00000174501_21 (sequence is synthesized)
aatatctaggacagtgacttctgagaaaccagcaggcttgaaggctacaagtgacgaggaagattctgttttgaatatagccagaggaaaagaggatggagaaaaaactaggagagtgtc

SEQ ID NO: 600140 - DNA, 120 bp, Artificial Sequence
  ENSG00000174501_22 (sequence is synthesized)
acaagtgatgagaaagattctttttcgaatataaccagagaaaaaaaggatggagaaacatctaggacagtgtcttctcagaaaccaccagccttgaaggctacaagtgacgaggaagat

SEQ ID NO: 600141 - DNA, 120 bp, Artificial Sequence
  ENSG00000174501_23 (sequence is synthesized)
tctgttttgaatatagccagagaaaaaaaggatggagaaaaatctagaacagtgtcttctgagaaaccatcaggcttgaaggctacaagtgacgagaaagattctgttttgaatatagcc

SEQ ID NO: 600142 - DNA, 120 bp, Artificial Sequence
  ENSG00000174501_24 (sequence is synthesized)
agaggaaaaaagcatggagaaaaaactaggagagtgtcttctcataaacaaccagccttgaaggctacaagtgacaaggaaaattctgttccgaatatggccacagaaacaaaggatgaa

SEQ ID NO: 600143 - DNA, 120 bp, Artificial Sequence
  ENSG00000174501_25 (sequence is synthesized)
caaatatctgggacagtgtcttctcagaaacaaccagccttgaaggctacaagtgacaagaaagattctgtttcgaatatacccacagaaataaaggatggacaacaatctggaacagtg

SEQ ID NO: 600144 - DNA, 120 bp, Artificial Sequence
  ENSG00000174501_26 (sequence is synthesized)
tcttctcagaaacaactggcctggaaggctacaagtgtcaagaaagattctgtttcgaatatagccacagagataaaggatggacaaatacgtgggacagtgtcttctcagagacaacca

SEQ ID NO: 600145 - DNA, 120 bp, Artificial Sequence
  ENSG00000174501_27 (sequence is synthesized)
gccttgaaggctacaggtgatgagaaagattctgtttcgaatatagccagagaaataaaggatggagaaaaatctgggacagtgtctcctcagaaacaatcggcccagaaggttatattt

SEQ ID NO: 600146 - DNA, 120 bp, Artificial Sequence
  ENSG00000174501_28 (sequence is synthesized)
aaaaagaaagtttctcttttgaatattgccacaagaataacgggcggttggaaatctggaacagagtatcctgagaatctgcccaccttgaaggctacaattgaaaataaaaattctgtt

SEQ ID NO: 600147 - DNA, 120 bp, Artificial Sequence
  ENSG00000174501_29 (sequence is synthesized)
ctgaatacagccaccaaaatgaaagatgtacaaacatccacaccagaacaagacttagaaatggcatcagagggagagcaaaagaggcttgaagaatatgaaaataaccagccacaggtg

SEQ ID NO: 600148 - DNA, 120 bp, Artificial Sequence
  ENSG00000174501_30 (sequence is synthesized)
aaaaaccaaatacattctagggatgaccttgatgacataattcagtcatctcaaacagtctcagaggacggtgactcgctttgctgtaattgtaagaatgtcatattactcattgatcaa

SEQ ID NO: 600149 - DNA, 120 bp, Artificial Sequence
  ENSG00000174501_31 (sequence is synthesized)
catgaaatgaagtgtaaagattgtgttcacctattgaaaattaaaaagacattttgtttatgtaaaagattaacagaacttaaagataatcactgtgagcaacttagagtaaaaattcga

SEQ ID NO: 600150 - DNA, 120 bp, Artificial Sequence
  ENSG00000174501_32 (sequence is synthesized)
aaactgaaaaataaggctagtgtactacaaaagagactatctgaaaaagaagaaataaaatcgcagttaaagcatgaaacacttgaattggaaaaagaactctgtagtttgagatttgcc

SEQ ID NO: 600151 - DNA, 120 bp, Artificial Sequence
  ENSG00000174501_33 (sequence is synthesized)
atacagcaagaaaaaaagaaaagaagaaatgttgaagagttgcaccaaaaagttagggaaaagttaagaatcacagaagagcaatataggatagaagctgatgtgacaaaaccaattaaa

SEQ ID NO: 600152 - DNA, 120 bp, Artificial Sequence
  ENSG00000174501_34 (sequence is synthesized)
ccggctctcaaatcagcagaggtggaattgaagacaggaggaaataattcaaatcaggtttctgaaactgatgaaaaagaagacctgctgcatgaaaaccgcttgatgcaagatgaaatt

SEQ ID NO: 600153 - DNA, 120 bp, Artificial Sequence
  ENSG00000174501_35 (sequence is synthesized)
gccaggctcaggctggaaaaagacacaataaaaaaccaaaacctggaaaagaaatacttaaaagactttgaaattgtgaaaagaaagcatgaagaccttcaaaaggctctaaaacggaat

SEQ ID NO: 600154 - DNA, 120 bp, Artificial Sequence
  ENSG00000174501_36 (sequence is synthesized)
gaggaaacattagcagaaacgatagcctgttatagtggacagcttgctgctctgacggatgaaaacacaacgctccgttctaaactggagaagcaaagagagagcgggcaaagactggaa

SEQ ID NO: 600155 - DNA, 120 bp, Artificial Sequence
  ENSG00000174501_37 (sequence is synthesized)
acagaaatgcaatcataccgttgtagactgaatgctgctctatgtgatcatgatcaaagtcactcatcaaaaagagaccaagagcttgctttccagggcacagtagataaatgttgtcat

SEQ ID NO: 600156 - DNA, 120 bp, Artificial Sequence
  ENSG00000174501_38 (sequence is synthesized)
ttacaggaaaatttgaattctcatgttctgattctttctctgcaactttctaaagctgagagtaagttcagagtcctcgaaactgagctccattacacaggagaggctctgaaagaaaag

SEQ ID NO: 600157 - DNA, 120 bp, Artificial Sequence
  ENSG00000174501_39 (sequence is synthesized)
gctttggtttttgaacacgtgcaaagtgagctaaagcaaaaacagagtcaaatgaaggacattgaaaaaatgtacaaaagtggatacaatacaatggaaaaatgcatagaaaagcaggaa

SEQ ID NO: 600158 - DNA, 120 bp, Artificial Sequence
  ENSG00000174501_40 (sequence is synthesized)
agattttgtcaactaaaaaaacaaaatatgttgcttcaacagcaactggatgatgctcgcaacaaagctgacaatcaagaaaaagcaatacttaatattcaagccagatgtgatgctaga

SEQ ID NO: 600159 - DNA, 120 bp, Artificial Sequence
  ENSG00000174501_41 (sequence is synthesized)
gtagaaaaccttcaagctgagtgcagaaagcaccgtctcttactagaagaagacaataaaatgttggtgaatgaattgaatcattcgaaagaaaaaaaatgccaatatgaaaaagagaaa

SEQ ID NO: 600160 - DNA, 120 bp, Artificial Sequence
  ENSG00000174501_42 (sequence is synthesized)
gcagaaagagaagtagctgtgagacagcttcaacaaaaacaagatgatgtcttaaacaaacgatcagcaacaaaagctttgctggatgcttcatcgcgtcactgcatctatttagaaaat

SEQ ID NO: 600161 - DNA, 120 bp, Artificial Sequence
  ENSG00000174501_43 (sequence is synthesized)
gggatgcaggattcaaggaagaaattagaccagatgagaagtcaatttcaagaaatacaggatcaacttacagctactataagatgtactaaggagatggaaggcgacgcacaaaagctt

SEQ ID NO: 600162 - DNA, 120 bp, Artificial Sequence
  ENSG00000174501_44 (sequence is synthesized)
gaagtagaaaatgtcatgatgagaaaaattattaaaaaacaggatgaacaaattgagcggtttgagaaaatcctgcagcattcaagtttgatgctgcaggtgtttgagagctagatgaag

SEQ ID NO: 600163 - DNA, 120 bp, Artificial Sequence
  ENSG00000174501_45 (sequence is synthesized)
caaccaatgttattttcaaactatctgaaatgcatttattttaacattgacacatgtaagggtcaatttttcatatttggaagctcaaacattccttgaatgaaaatattttgaaatgcc

SEQ ID NO: 600164 - DNA, 120 bp, Artificial Sequence
  ENSG00000174501_46 (sequence is synthesized)
taattaatgttattaaaattttatagtggatggctttcttctgtattttccttattattaattttattaagattttattataatgcacctatatcttaatctctggctttcattctgcca

SEQ ID NO: 600165 - DNA, 120 bp, Artificial Sequence
  ENSG00000174501_47 (sequence is synthesized)
ttcattctgccattttttatacatatatttttttcttaaatatttaaccttaggaaagttgagaattatgcatcatttctcacagaaattgagagagtttttttcctgttaaacgtctat

SEQ ID NO: 600166 - DNA, 120 bp, Artificial Sequence
  ENSG00000174501_48 (sequence is synthesized)
ttttaatgatttctctattggcatggtgaggcaagccagattaattcagaggataatgtctaatggaatgtttcagaaaattatcttctttttagtctctacttttctgaatgtataaag

SEQ ID NO: 600167 - DNA, 120 bp, Artificial Sequence
  ENSG00000174501_49 (sequence is synthesized)
aacctgtgtatacttatttcatagatttcaggttaatttgttcagaaaggccattttactgaataaatttttatttcgatgaaaatcgttactccttttgtattgggctcagagagcaca

SEQ ID NO: 600168 - DNA, 120 bp, Artificial Sequence
  ENSG00000174501_50 (sequence is synthesized)
ctctgtctctatatgaatatggacagttcgcatttgccaacatgtatctattttctcttatttgtagaaaaagctaaactaaaaagggggttatagaaggtcagcaaaggatgggtttga

SEQ ID NO: 600169 - DNA, 120 bp, Artificial Sequence
  ENSG00000174501_51 (sequence is synthesized)
gatgtttgggttggttaagtgggcatttagacaacagggcttctcctttggcatgtttaatggacacctttgcagtttaagatgatgcttttaaattacttctctcctaatgatgacctg

SEQ ID NO: 600170 - DNA, 120 bp, Artificial Sequence
  ENSG00000174501_52 (sequence is synthesized)
agtcctgctattcaatgggagagtcaataatatcctgtaggatcttatttggaactgactttgtcgattttaattttgttcctgcttgtttttaaattttcttgttgtttccctagaaag

SEQ ID NO: 600171 - DNA, 120 bp, Artificial Sequence
  ENSG00000174501_53 (sequence is synthesized)
aaaagatgacgcttagttttaaatatttaaaaatgtgcaagttgctttgctataataaaactaaatgcatacatacaaaaaataaaattatagttgatgtggtagtgtttggaattcaaa

SEQ ID NO: 600172 - DNA, 120 bp, Artificial Sequence
  ENSG00000174501_54 (sequence is synthesized)
atataaatgcttagcctgatgtaatcctttatctttccacattttaccagtttgtaagtttgagtatttaactgataaaatgtaattcaaaagcaagaagaatgttgtgttttagtccta

SEQ ID NO: 600173 - DNA, 120 bp, Artificial Sequence
  ENSG00000174501_55 (sequence is synthesized)
gagcaggggtctgtgaacttttctgtaaagggccagatagtattatttaaggctttgtgagccataagatccttgttgcaataactcagccctgcagttacagcacaaaagtagccatga

SEQ ID NO: 600174 - DNA, 120 bp, Artificial Sequence
  ENSG00000174501_56 (sequence is synthesized)
acaatatgcagactgaaggggtgtagcagtgtcccactaaaattaattacaaaaaacaggtaatgggatgacttctcctagattatgaccttttataaataaaaaagattctgatagtct

SEQ ID NO: 600175 - DNA, 120 bp, Artificial Sequence
  ENSG00000174501_57 (sequence is synthesized)
cagccagaaagtcacctctgagagccaaatgtctgataatagacaagagagtcagagaatgataacgacatctcaggaaaattgtgaaaataatcagcaaccgtatgtggataacccttt

SEQ ID NO: 600176 - DNA, 88 bp, Artificial Sequence
  ENSG00000174501_58 (sequence is synthesized)
tatattatcctttggtgccaagagtggatgaagaaactttcggaagcctaaactagtggatacatgaaacttaggcaaattattacac

SEQ ID NO: 600177 - DNA, 77 bp, Artificial Sequence
  ENSG00000174501_59 (sequence is synthesized)
aggacacttccactgaagatatgttaagtgtacgttcagctggagtgtcatcgtaattgtgtgccttctcagttatt

SEQ ID NO: 600178 - DNA, 83 bp, Artificial Sequence
  ENSG00000174501_60 (sequence is synthesized)
tcatgtagcacctgttttgacattgattctcacgtgtatgagttgctcctctgtttttagatcacatttgtcctcatcactca

SEQ ID NO: 600179 - DNA, 120 bp, Artificial Sequence
  ENSG00000174501_61 (sequence is synthesized)
tgctcctctgtttttagatcacatttgtcctcatcactcagcatatccacattgatattgacacggttttattttgggtttcgacacatgacaaatcataccatgtttgaaattgtaagg

SEQ ID NO: 600180 - DNA, 120 bp, Artificial Sequence
  ENSG00000174501_62 (sequence is synthesized)
gtatatttcatggagcctgtgttcccttttttcagtgtacttctgtcaccttctggtccccagagacaaagtagaagccatcaaagcctccactaatacaggcaggaggacagaggttga

SEQ ID NO: 600181 - DNA, 85 bp, Artificial Sequence
  ENSG00000174501_63 (sequence is synthesized)
tcaaagcctccactaatacaggcaggaggacagaggttgatgctaacaccgtgtgaatgtatggataactttatcatatttacat

SEQ ID NO: 600182 - DNA, 120 bp, Artificial Sequence
  ENSG00000174501_64 (sequence is synthesized)
gaaagattctttttcaaatataaccagagaaagaaaggatggagaaacatctaggacaggtatcagcaaacaggtgtccaatgtgatcaattcaggactcttccactgaagagatgtgaa

SEQ ID NO: 600183 - DNA, 120 bp, Artificial Sequence
  ENSG00000174501_65 (sequence is synthesized)
gttgtcttctcagaaaccaccagccttgaaggctacaagtgacgaggaagattctgttttgaatatagccagagaaaaaaaggatggagaaaaatctagaacagtgtcttcagagcaacc

SEQ ID NO: 600184 - DNA, 120 bp, Artificial Sequence
  ENSG00000174501_66 (sequence is synthesized)
accaggcttgaaggctacaagagacgagaaagattctcttttgaatatagccagaggaaaaaagtatggagaaaaaactaggagagtgtcttctcggaaaaaagcagccttgaaggctac

SEQ ID NO: 600185 - DNA, 120 bp, Artificial Sequence
  ENSG00000174501_67 (sequence is synthesized)
aagtgatgagaaagattctttttcaaatataaccagagaaagaaaggatggagaaacatctaggacaggtatcagcaaacaggtgtccaatgtgatcaattcaggactcttccactgaag

SEQ ID NO: 600186 - DNA, 120 bp, Artificial Sequence
  ENSG00000174502_0 (sequence is synthesized)
atatgagccagcccaggccccgctacgtggtagacagagccgcatactcccttaccctcttcgacgatgagtttgagaagaaggaccggacatacccagtgggagagaaacttcgcaatg

SEQ ID NO: 600187 - DNA, 120 bp, Artificial Sequence
  ENSG00000174502_1 (sequence is synthesized)
ccttcagatgttcctcagccaagatcaaagctgtggtgtttgggctgctgcctgtgctctcctggctccccaagtacaagattaaagactacatcattcctgacctgctcggtggactca

SEQ ID NO: 600188 - DNA, 120 bp, Artificial Sequence
  ENSG00000174502_2 (sequence is synthesized)
gcgggggatccatccaggtcccacaaggcatggcatttgctctgctggccaaccttcctgcagtcaatggcctctactcctccttcttccccctcctgacctacttcttcctggggggtg

SEQ ID NO: 600189 - DNA, 120 bp, Artificial Sequence
  ENSG00000174502_3 (sequence is synthesized)
ttcaccagatggtgccaggtacctttgccgttatcagcatcctggtgggtaacatctgtctgcagctggccccagagtcgaaattccaggtcttcaacaatgccaccaatgagagctatg

SEQ ID NO: 600190 - DNA, 120 bp, Artificial Sequence
  ENSG00000174502_4 (sequence is synthesized)
tggacacagcagccatggaggctgagaggctgcacgtgtcagctacgctagcctgcctcaccgccatcatccagatgggtctgggcttcatgcagtttggctttgtggccatctacctct

SEQ ID NO: 600191 - DNA, 120 bp, Artificial Sequence
  ENSG00000174502_5 (sequence is synthesized)
ccgagtccttcatccggggcttcatgacggccgccggcctgcagatcctgatttcggtgctcaagtacatcttcggactgaccatcccctcctacacaggcccagggtccatcgtcttta

SEQ ID NO: 600192 - DNA, 120 bp, Artificial Sequence
  ENSG00000174502_6 (sequence is synthesized)
ccttcattgacatttgcaaaaacctcccccacaccaacatcgcctcgctcatcttcgctctcatcagcggtgccttcctggtgctggtgaaggagctcaatgctcgctacatgcacaaga

SEQ ID NO: 600193 - DNA, 120 bp, Artificial Sequence
  ENSG00000174502_7 (sequence is synthesized)
ttcgcttccccatccctacagagatgattgtggtggtggtggcaacagctatctccgggggctgtaagatgcccaaaaagtatcacatgcagatcgtgggagaaatccaacgcgggttcc

SEQ ID NO: 600194 - DNA, 120 bp, Artificial Sequence
  ENSG00000174502_8 (sequence is synthesized)
ccaccccggtgtcgcctgtggtctcacagtggaaggacatgataggcacagccttctccctagccatcgtgagctacgtcatcaacctggctatgggccggaccctggccaacaagcacg

SEQ ID NO: 600195 - DNA, 120 bp, Artificial Sequence
  ENSG00000174502_9 (sequence is synthesized)
gctacgacgtggattcgaaccaggagatgatcgctctcggctgcagcaacttctttggctccttctttaaaattcatgtcatttgctgtgcgctttctgtcactctggctgtggatggag

SEQ ID NO: 600196 - DNA, 120 bp, Artificial Sequence
  ENSG00000174502_10 (sequence is synthesized)
ctggaggaaaatcccaggtggccagcctgtgtgtgtctctggtggtgatgatcaccatgctggtcctggggatctatctgtatcctctccctaagtctgtgctaggagccctgatcgctg

SEQ ID NO: 600197 - DNA, 120 bp, Artificial Sequence
  ENSG00000174502_11 (sequence is synthesized)
tcaatctcaagaactccctcaagcaactcaccgacccctactacctgtggaggaagagcaagctggactgttgcatctgggtagtgagcttcctctcctccttcttcctcagcctgccct

SEQ ID NO: 600198 - DNA, 120 bp, Artificial Sequence
  ENSG00000174502_12 (sequence is synthesized)
atggtgtggcagtgggtgtcgccttctccgtcctggtcgtggtcttccagactcagtttcgaaatggctatgcactggcccaggtcatggacactgacatttatgtgaatcccaagacct

SEQ ID NO: 600199 - DNA, 120 bp, Artificial Sequence
  ENSG00000174502_13 (sequence is synthesized)
ataatagggcccaggatatccaggggattaaaatcatcacgtactgctcccctctctactttgccaactcagagatcttcaggcaaaaggtcatcgccaagacaggcatggacccccaga

SEQ ID NO: 600200 - DNA, 120 bp, Artificial Sequence
  ENSG00000174502_14 (sequence is synthesized)
aagtattactagccaagcaaaaatacctcaagaagcaggagaagcggagaatgaggcccacacaacagaggaggtctctattcatgaaaaccaagactgtctccctgcaggagctgcagc

SEQ ID NO: 600201 - DNA, 120 bp, Artificial Sequence
  ENSG00000174502_15 (sequence is synthesized)
aggactttgagaatgcgccccccaccgaccccaacaacaaccagaccccggctaacggcaccagcgtgtcctatatcaccttcagccctgacagctcctcacctgcccagagtgagccac

SEQ ID NO: 600202 - DNA, 120 bp, Artificial Sequence
  ENSG00000174502_16 (sequence is synthesized)
cagcctccgctgaggcccccggcgagcccagtgacatgctggccagcgtcccacccttcgtcaccttccacaccctcatcctggacatgagtggagtcagcttcgtggacttgatgggca

SEQ ID NO: 600203 - DNA, 120 bp, Artificial Sequence
  ENSG00000174502_17 (sequence is synthesized)
tcaaggccctggccaagctgagctccacctatgggaagatcggcgtgaaggtcttcttggtgaacatccatgcccaggtgtacaatgacattagccatggaggcgtctttgaggatggga

SEQ ID NO: 600204 - DNA, 120 bp, Artificial Sequence
  ENSG00000174502_18 (sequence is synthesized)
cgtgaccccaggacacaacttccaaggggctccaggggatgctgagctctccttgtacgactcagaggaggacattcgcagctactgggacttagagcaggagatgttcgggagcatgtt

SEQ ID NO: 600205 - DNA, 120 bp, Artificial Sequence
  ENSG00000174502_19 (sequence is synthesized)
tcacgcagagaccctgaccgccctagagagcctctcagcagcaggggggtgctacccttacaggagtgagagtctggtgagcccactcttcacccgtcaggccctggccgcaatggacaa

SEQ ID NO: 600206 - DNA, 120 bp, Artificial Sequence
  ENSG00000174502_20 (sequence is synthesized)
gcctcctgctcactccaccccacccacctctgccctgtccttggcagctgaaggacaccttgacttccagcttttacgagtgagccaaaaacagaaggacaagtacaactgtgctggcct

SEQ ID NO: 600207 - DNA, 120 bp, Artificial Sequence
  ENSG00000174502_21 (sequence is synthesized)
gctgtacaagcttcaaaaagtgtcccagagcccacacggctcggtgtcagatggtgtcaggctgtcacggacatagggataaacttggttaggactctggcttgccttccccagctgcct

SEQ ID NO: 600208 - DNA, 120 bp, Artificial Sequence
  ENSG00000174502_22 (sequence is synthesized)
caactctgtctctggcagctctgcacccagggaccatgtgctctccacacccaggagtctaggccttggtaactatgcgccccccctccatcatccccaaggctgcccaaaccaccactg

SEQ ID NO: 600209 - DNA, 120 bp, Artificial Sequence
  ENSG00000174502_23 (sequence is synthesized)
ctgtcagcaagcacatcagactctagcctggacagtggccaggaccgtcgagaccaccagagctacctccccggggacagcccactaaggttctgcctcagcctcctgaaacatcactgc

SEQ ID NO: 600210 - DNA, 120 bp, Artificial Sequence
  ENSG00000174502_24 (sequence is synthesized)
cctcagaggctgctcccttcccctggaggctggctagaaaccccaaagagggggatgggtagctggcagaatcatctggcatcctagtaatagataccagttattctgcacaaaactttt

SEQ ID NO: 600211 - DNA, 120 bp, Artificial Sequence
  ENSG00000174502_25 (sequence is synthesized)
gggaattcctctttgcacccagagactcagaggggaagagggtgctagtaccaacacagggaaaacggatgggacctgggcccagacagtcccccttgaccccagggcccatcagggaaa

SEQ ID NO: 600212 - DNA, 120 bp, Artificial Sequence
  ENSG00000174502_26 (sequence is synthesized)
tgcctccctttggtaaatctgccttatccttctttacctggcaaagagccaatcatgttaactcttccttatcagcctgtggcccagagacacaatggggtccttctgtaggcaaaggtg

SEQ ID NO: 600213 - DNA, 120 bp, Artificial Sequence
  ENSG00000174502_27 (sequence is synthesized)
gaagtcctccagggatccgctacatcccctaactgcatgcagatgtggaaaggggctgatccagattgggtcttcctgcacaggaagactctttaacacccttaggacctcaggccatct

SEQ ID NO: 600214 - DNA, 120 bp, Artificial Sequence
  ENSG00000174502_28 (sequence is synthesized)
tctcctatgaagatgaaaataggggttaagttttccatatgtacaaggaggtattgagaggaaccctactgttgacttgaaaataaataggttccatgtgtaagtgttttgtaaaatttc

SEQ ID NO: 600215 - DNA, 120 bp, Artificial Sequence
  ENSG00000174502_29 (sequence is synthesized)
agtggaaatgcacagaaaatcttctggcctctcatcactgcttttctcaagcttcttcagcttaacaaccccttccctaacaggttgggctggcccagcctaggaaaacatccccatttc

SEQ ID NO: 600216 - DNA, 120 bp, Artificial Sequence
  ENSG00000174502_30 (sequence is synthesized)
taacttcagccagacctgcgttgtgtgtctgtgtgttgagtgagctggtcagctaacaagtcttcttagagttaaaggagggggtgctggccaagagccaacacattcttggcccaggag

SEQ ID NO: 600217 - DNA, 120 bp, Artificial Sequence
  ENSG00000174502_31 (sequence is synthesized)
cattgcttttctgtgaattcattatgccatctggctgccaatggaactcaaaacttggaaggcgaaggacaatgttatctgggattcaccgtgcccagcacccgaagtgccaaattccag

SEQ ID NO: 600218 - DNA, 120 bp, Artificial Sequence
  ENSG00000174502_32 (sequence is synthesized)
gaggacaagagccttagccaatgacaactcactctcccctactccacctccttccaagtccagctcaggcccaggaggtgggagaaggtcacagagcctcaggaatttccaagtcagagt

SEQ ID NO: 600219 - DNA, 120 bp, Artificial Sequence
  ENSG00000174502_33 (sequence is synthesized)
cccctttgaaccaagtatctagatcccctgaggacttgatgaagtgatccttaacccccaagtaatcattaacccccagaccagcctcagaactgaaggagattgttgacccagtgacct

SEQ ID NO: 600220 - DNA, 120 bp, Artificial Sequence
  ENSG00000174502_34 (sequence is synthesized)
ggagttgaggctcagggagagatctgccacatgtctgagggttgcagagcccgctgtggaggtaagattggaaacacatgaggcagagggaagacattgaagaaaacatctctgctggaa

SEQ ID NO: 600221 - DNA, 120 bp, Artificial Sequence
  ENSG00000174502_35 (sequence is synthesized)
tatttggaaaagaacactcttctggacctggttgaagcaggaaagatggaggcaaagtagtgaaataatccagaatttcaatgcttttgaatgttcttagtgatactgacctgtgataat

SEQ ID NO: 600222 - DNA, 120 bp, Artificial Sequence
  ENSG00000174502_36 (sequence is synthesized)
ataattcccagggaggactgggaaccttatctcttgagatatttgcataatttatttaatttaagcctcattctccttttgttcattttggtaataaactggatttgaattgtgaacaaa

SEQ ID NO: 600223 - DNA, 120 bp, Artificial Sequence
  ENSG00000174502_37 (sequence is synthesized)
tacagagtgcctggcacttgggacttccataaaggatgagcctggggtcacagggggtgtcgggcggaggaaagtgcatcccccagagcttgggttcctctctcctctccccctctctcc

SEQ ID NO: 600224 - DNA, 120 bp, Artificial Sequence
  ENSG00000174502_38 (sequence is synthesized)
aagccagagaggtgatgtgacagaaaggcccatgctctaaaggagctgaaggtctgatggcagccatgtagagcacagtgaagggcaggtgaaggtcacagatggtccaattccctcaag

SEQ ID NO: 600225 - DNA, 120 bp, Artificial Sequence
  ENSG00000174502_39 (sequence is synthesized)
ctactgctacgctaggactgcacggagctccagacctgcgtgtgtgtggggcgggtcgttggaactgctgaaccacattggtcttccgccaccaaccacccttttcctcctctcagatgg

SEQ ID NO: 600226 - DNA, 120 bp, Artificial Sequence
  ENSG00000174502_40 (sequence is synthesized)
ccacctccctgtgtgctggggcttctactaaaaacacagacaagatcaggcaaccacagtcaatctaagggaaagaggaaagtgtaaccaaagcacaaatacataaaatattgcaaaaaa

SEQ ID NO: 600227 - DNA, 120 bp, Artificial Sequence
  ENSG00000174502_41 (sequence is synthesized)
tgctatttaaagaaaaaaaagagaagagaggctctgaggttgtactaacagagaatggccttggctaatccaggaagacttcctgaaagaggttgttttttccccaggtctgcttttgac

SEQ ID NO: 600228 - DNA, 120 bp, Artificial Sequence
  ENSG00000174502_42 (sequence is synthesized)
agggaagaccacatagcaccaaaggtctaggggtctgtggactcgtgagcatacagggttcagaatctgggagttaacaaacgaggccctaccacatactggcccggggaccttgggcaa

SEQ ID NO: 600229 - DNA, 120 bp, Artificial Sequence
  ENSG00000174502_43 (sequence is synthesized)
gttaggttctctcagcctcagtttcctcctttgtaaaacaggagtgatggtccctaccctatggggtggtgctgaggattcagactggatgggataacttaggcaaagatcccggcacac

SEQ ID NO: 600230 - DNA, 120 bp, Artificial Sequence
  ENSG00000174514_0 (sequence is synthesized)
ggcactcgggcaccgggctcgccgggaccagatccgcgagcccgtcagcctgcgccatgggctgcgacggccgcgtgtcggggctgctccgccgcaacctgcagcccacgctcacctact

SEQ ID NO: 600231 - DNA, 120 bp, Artificial Sequence
  ENSG00000174514_1 (sequence is synthesized)
ggagcgtcttcttcagcttcggcctgtgcatcgccttcctggggcccacgctgctggacctgcgctgtcagacgcacagctcgctgccccagatctcctgggtcttcttctcgcagcagc

SEQ ID NO: 600232 - DNA, 120 bp, Artificial Sequence
  ENSG00000174514_2 (sequence is synthesized)
tctgcctcctgctgggcagcgccctcgggggcgtcttcaaaaggaccctggcccagtcactatgggccctgttcacctcctctctggccatctccctggtgtttgccgtcatccccttct

SEQ ID NO: 600233 - DNA, 120 bp, Artificial Sequence
  ENSG00000174514_3 (sequence is synthesized)
gccgcgacgtgaaggtgctggcctcagtcatggcgctggcgggcttggccatgggctgcatcgacaccgtggccaacatgcagctggtaaggatgtaccagaaggactcggccgtcttcc

SEQ ID NO: 600234 - DNA, 120 bp, Artificial Sequence
  ENSG00000174514_4 (sequence is synthesized)
tccaggtgctccatttcttcgtgggctttggtgctctgctgagcccccttattgctgaccctttcctgtctgaggccaactgcttgcctgccaatagcacggccaacaccacctcccgag

SEQ ID NO: 600235 - DNA, 120 bp, Artificial Sequence
  ENSG00000174514_5 (sequence is synthesized)
gccacctgttccatgtctccagggtgctgggccagcaccacgtagatgccaagccttggtccaaccagacgttcccagggctgactccaaaggacggggcagggacccgagtgtcctatg

SEQ ID NO: 600236 - DNA, 120 bp, Artificial Sequence
  ENSG00000174514_6 (sequence is synthesized)
ccttctggatcatggccctcatcaatcttccagtgcccatggctgtgctgatgctgctgtccaaggagcggctgctgacctgctgtccccagaggaggcccctgcttctgtctgctgatg

SEQ ID NO: 600237 - DNA, 120 bp, Artificial Sequence
  ENSG00000174514_7 (sequence is synthesized)
agcttgccttggagacacagcctcctgagaaggaagatgcctcctcactgcccccaaagtttcagtcacacctagggcatgaggacctgttcagctgctgccaaaggaagaacctcagag

SEQ ID NO: 600238 - DNA, 120 bp, Artificial Sequence
  ENSG00000174514_8 (sequence is synthesized)
gagccccttattccttctttgccatccacatcacgggcgccctggtactgttcatgacggatgggttgacgggtgcctattccgccttcgtgtacagctatgctgtggagaagcccctgt

SEQ ID NO: 600239 - DNA, 120 bp, Artificial Sequence
  ENSG00000174514_9 (sequence is synthesized)
ctgtgggacacaaggtggctggctacctccccagcctcttctggggcttcatcacactgggccggctcctctccattcccatatcctcaagaatgaagccggccaccatggttttcatca

SEQ ID NO: 600240 - DNA, 120 bp, Artificial Sequence
  ENSG00000174514_10 (sequence is synthesized)
acgtggttggcgtggtggtgacgttcctggtgctgcttattttctcctacaacgtcgtcttcctgttcgtggggacggcaagcctgggcctgtttctcagcagcaccttccccagcatgc

SEQ ID NO: 600241 - DNA, 120 bp, Artificial Sequence
  ENSG00000174514_11 (sequence is synthesized)
tggcctacacggaggactcgctgcagtacaaaggctgtgcaaccacagtgctggtgacaggggcaggagttggcgagatggtgctgcagatgctggttggttcgatattccaggctcagg

SEQ ID NO: 600242 - DNA, 120 bp, Artificial Sequence
  ENSG00000174514_12 (sequence is synthesized)
gcagctatagtttcctggtctgtggcgtgatctttggttgtctggcttttaccttctatatcttgctcctgtttttccacaggatgcaccctggactcccatcagttcctacccaagaca

SEQ ID NO: 600243 - DNA, 120 bp, Artificial Sequence
  ENSG00000174514_13 (sequence is synthesized)
gatcaattggaatggaaaactctgagtgctaccagaggtaaaactgggtgaagaaggcaagagaagactttcagcctcttgatcaccagcacgaccatactgtttcagaaagctgggtgg

SEQ ID NO: 600244 - DNA, 120 bp, Artificial Sequence
  ENSG00000174514_14 (sequence is synthesized)
tggtggaggcgctctctcaatggctattcaagtcttctccactaaaacttggttgggtagaggaaattaaattgagtcctggtacctggtcaaaatcattagaagtttacctggcttctc

SEQ ID NO: 600245 - DNA, 120 bp, Artificial Sequence
  ENSG00000174514_15 (sequence is synthesized)
aagttatcttcttccctggttcagactgttggtaagagctgtccagatacccagatgggaaggaaggagacagccgcgcgcttcactccatttgtcacctcatgcatggaccatactctg

SEQ ID NO: 600246 - DNA, 120 bp, Artificial Sequence
  ENSG00000174514_16 (sequence is synthesized)
acaagctgcaagttattccctggcatgctcaaaggattttcgtgcttttcacttaatagtccaaagtctcttaaattcctgctgcagacatcaatagcttatctatattctcaaacacca

SEQ ID NO: 600247 - DNA, 120 bp, Artificial Sequence
  ENSG00000174514_17 (sequence is synthesized)
aaaggaaaagttgaatcttgctctctttggtatactaatgtagtggtatgctaagctggctcataccaacttagaaaagctgattgtaaaattttcattttgacagctggttattaaatg

SEQ ID NO: 600248 - DNA, 120 bp, Artificial Sequence
  ENSG00000174514_18 (sequence is synthesized)
cagccattattaaaaatcaaatcatacaaacttataattaaatcaattacatttaaaacaaaggtaataaatattcaaagcatatcacttcctaatttgatcttgatgctcttgaggtaa

SEQ ID NO: 600249 - DNA, 120 bp, Artificial Sequence
  ENSG00000174514_19 (sequence is synthesized)
tttacgtccatggtacctgtgtggtggaattactatatatgatggtgtgctactgtgcaccttgtctcaactccactcttcgtgatagcatgttggtagcttgaaatcagcctggtggga

SEQ ID NO: 600250 - DNA, 120 bp, Artificial Sequence
  ENSG00000174514_20 (sequence is synthesized)
gtattaccatggacactggcaaaagctacagatcccggagagccagtggttaaacatttaccagcataccactgctagtaatcaaggctaactggtccagaaatcgcccaggagaatgaa

SEQ ID NO: 600251 - DNA, 120 bp, Artificial Sequence
  ENSG00000174514_21 (sequence is synthesized)
atggatgttccatttttttctactgacattgactagcatataaaaggtatagaaacagcactaagactttctgaaaatacctaatgaaaattttacatctttttttgtttttgtttttgt

SEQ ID NO: 600252 - DNA, 120 bp, Artificial Sequence
  ENSG00000174514_22 (sequence is synthesized)
aggcgtgagccactgcacccagccaaaaattttacatcttttatagagggaaaaaaactctttataccatggcaaggccttttctttcacaaaaagctgggcctactgaacaattcaagc

SEQ ID NO: 600253 - DNA, 120 bp, Artificial Sequence
  ENSG00000174514_23 (sequence is synthesized)
gcctactgaacaattcaagctgtgcagtagtagactgaaagcaggatttgttgaggagttacagctcctgtccagagcaaatcctgtagtgatacaaggagaatgtaaacttgccagctt

SEQ ID NO: 600254 - DNA, 120 bp, Artificial Sequence
  ENSG00000174514_24 (sequence is synthesized)
agacagggatcagtcctgagactgctggcagtagcaaatggctattagagtaactgtataatggttttgcctgcactttctctatgtatatacaaatgtacatgtataaatataaaaatt

SEQ ID NO: 600255 - DNA, 120 bp, Artificial Sequence
  ENSG00000174514_25 (sequence is synthesized)
aagtgatcatggttcttggtaacctgtcccaagtgctgtgattcacacgcctgacactaaaaggttcttcctggtccagtcagccagctgtgaccaccagcagcacagctgagtgctgag

SEQ ID NO: 600256 - DNA, 120 bp, Artificial Sequence
  ENSG00000174514_26 (sequence is synthesized)
aatctggctggaaagagaaacgtggctcaagtgctggctcaccttctagctgtgtggccctgggcaggttactgaggctcttccaacctcacttttcacatgtaaaatggcatttctaaa

SEQ ID NO: 600257 - DNA, 120 bp, Artificial Sequence
  ENSG00000174514_27 (sequence is synthesized)
agtacctaccctacctcaaaggaattctgaaaaaagtaagtgaatttgtataaagcaaagcactcacaatatgcctgacacacaaactgcttaataaatgttagtaatttttaaaacctc

SEQ ID NO: 600258 - DNA, 120 bp, Artificial Sequence
  ENSG00000174514_28 (sequence is synthesized)
ctcataagcggcttagaaattattcatgtttggtacatatttattgcaagtcaagcagatccaacttttttgaaagctggtggtctaggagtatagttttaattatatttgtaaatactc

SEQ ID NO: 600259 - DNA, 120 bp, Artificial Sequence
  ENSG00000174514_29 (sequence is synthesized)
aaaagtattagatgccagtctaatttaaatgcagtctgactgtagcgagtaactgacctgggcaatgaaaaagcagttgtatttttcttgtggtttttcaagaaaatatcctttttatac

SEQ ID NO: 600260 - DNA, 120 bp, Artificial Sequence
  ENSG00000174514_30 (sequence is synthesized)
agatttagaaagaagaatcaatggctatatcgaagttgattgtgactaatttgttaatacagaaaacaacattaacacaaatctaagagtacctttcctaaaataaaatatttaaactta

SEQ ID NO: 600261 - DNA, 120 bp, Artificial Sequence
  ENSG00000174514_31 (sequence is synthesized)
atgtgggatctggagatgtaaacggatgcatggaaaagtccaaagcaaacacaagccatgtctgggagcagggccagagggggcccgtgggaatgctgtttagctctcagagcctgagat

SEQ ID NO: 600262 - DNA, 120 bp, Artificial Sequence
  ENSG00000174514_32 (sequence is synthesized)
gggttggaactgcagtcagagttctttttccatcccttcggaacccaccactccctaccccacctctcacagcctctggccaccctgcagagggcccagcttcctgctcaactcctgccc

SEQ ID NO: 600263 - DNA, 120 bp, Artificial Sequence
  ENSG00000174514_33 (sequence is synthesized)
tgaccgagagggccaactcttccagttctattcaaatccacccatgtttcatttattcaccaggaaaaaaaaaaaaacaacctaacatctactttttattgaatactataatgtagatat

SEQ ID NO: 600264 - DNA, 120 bp, Artificial Sequence
  ENSG00000174514_34 (sequence is synthesized)
tattcccctttttacaacagaggacacggaaactcagatgaatttagcaacttaccctaggtcagtcacacttccagaaactgacagagaggacctcacatctagatcttccggcctcca

SEQ ID NO: 600265 - DNA, 120 bp, Artificial Sequence
  ENSG00000174514_35 (sequence is synthesized)
aaatctccctcattgtgactccattctcctttcctcctcttttgccctgctggagggaggggaagagctgcatctcaccataccctcctcattgaaatgatgtgacatctgggacttgct

SEQ ID NO: 600266 - DNA, 120 bp, Artificial Sequence
  ENSG00000174514_36 (sequence is synthesized)
ttagtgtaacctagtgcagaaaagaagtgcaaggccaccaatgaaaccggtgctgactgctaaagttgagtgttgggttcattggagctccatatactactttaacatgttttaaattct

SEQ ID NO: 600267 - DNA, 120 bp, Artificial Sequence
  ENSG00000174514_37 (sequence is synthesized)
cataataaaagagtaaaacaatatatcctctgcaaagttctggttagggcttatgggtatagaaacacctagtatgactggagcttcagtgatgatagagatcgtcagaaggttccagaa

SEQ ID NO: 600268 - DNA, 120 bp, Artificial Sequence
  ENSG00000174514_38 (sequence is synthesized)
cacagagctgcaagggactgcagggggtcaccaggtccagtccctgccttagagcaggacttcggccttctccagacacatcaacttgaaacaaggccaaggcctccctcctccccgtga

SEQ ID NO: 600269 - DNA, 120 bp, Artificial Sequence
  ENSG00000174514_39 (sequence is synthesized)
ttccatctcttggtgtgacgggcctcaacttagctgaaaaaccagccaaggatggagaaggctgcttcctccgatacaccttccacgtgaagttttaattgtctgtctctctgtgttttc

SEQ ID NO: 600270 - DNA, 120 bp, Artificial Sequence
  ENSG00000174514_40 (sequence is synthesized)
acaggtgagaagatgcagatagccaccttctgaactcaaactgtccctttcctgagtctccagcaaagccagcagggccccctgtgccgttgttacctgtttccgtttccaagccagccc

SEQ ID NO: 600271 - DNA, 120 bp, Artificial Sequence
  ENSG00000174514_41 (sequence is synthesized)
tgagagctgagcctccatatgtgggatctggagatgtaaacggatgcatggaaaagtccaaagcaaacacaagccatgtctgggagcagggccagagggggcccgtgggaatgctgttta

SEQ ID NO: 600272 - DNA, 120 bp, Artificial Sequence
  ENSG00000174514_42 (sequence is synthesized)
agctaataagtgagcagcttcttcctcagctctcttccttttctaccagagggggagaaatgtcttggctgcccagaccacccagtgaatggaggagaagggggaggggatgcttccagc

SEQ ID NO: 600273 - DNA, 120 bp, Artificial Sequence
  ENSG00000174514_43 (sequence is synthesized)
gtgaagtgtcctgcagccaccttgtgaggtagattgttatctgagcagactttgacaacttgcccacagctaataacctggcccagtcactatgggccctgttcacctcctctctggcca

SEQ ID NO: 600274 - DNA, 120 bp, Artificial Sequence
  ENSG00000174516_0 (sequence is synthesized)
gaaggggcggagctccgcctacgaaggctgagcatcgccgcaagaggcggagtctggagcgaggcggagctctcctaggggcggggaaaatggggcggggcctccggacagggggcggag

SEQ ID NO: 600275 - DNA, 80 bp, Artificial Sequence
  ENSG00000174516_1 (sequence is synthesized)
cgtggctgttcgcgctcatccccctcccccggccctgggtgtccccgtgacgaggcagcgcggagccgccgcgggccggg

SEQ ID NO: 600276 - DNA, 120 bp, Artificial Sequence
  ENSG00000174516_2 (sequence is synthesized)
gcggggagggagcggcgcccagcggggcccggagcgtggccagaatggtgctggaaggaaaccctgaagtggggtccccccgaacctcagacctccagcaccgggggaacaagggctctt

SEQ ID NO: 600277 - DNA, 120 bp, Artificial Sequence
  ENSG00000174516_3 (sequence is synthesized)
gcgttctctcctctcccggtgaagatgcgcagccaggcgaggagcccatcaagtatggtgaactcatcgtcctgggctacaatggttgtctggcaagtggggacaagggccgccggcgaa

SEQ ID NO: 600278 - DNA, 120 bp, Artificial Sequence
  ENSG00000174516_4 (sequence is synthesized)
gccgcctggcactgagccgccggtcgcacgccaacggggtgaagccagacgtcatgcaccacatctccacgccgctcgtctccaaggcactgagtaaccgtggtcagcacagcatctcgt

SEQ ID NO: 600279 - DNA, 120 bp, Artificial Sequence
  ENSG00000174516_5 (sequence is synthesized)
atacactgtcccggagccactcggtcatagtggagtatacacatgatagcgacacagacatgttccagattggccgctccacagagaacatgattgacttcgtggtaacagacacgtccc

SEQ ID NO: 600280 - DNA, 120 bp, Artificial Sequence
  ENSG00000174516_6 (sequence is synthesized)
ctggaggaggggctgccgagggcccttctgcccagagcaccatctcccgctatgcctgccgcatcctctgtgaccgccggccaccctatactgcccgcatctatgccgctggcttcgatg

SEQ ID NO: 600281 - DNA, 120 bp, Artificial Sequence
  ENSG00000174516_7 (sequence is synthesized)
cctctagcaacatcttccttggagagcgagcggccaaatggcggaccccagatggcctgatggatggactgaccaccaatggagtcctggtgatgcacccggcaggcggcttctccgagg

SEQ ID NO: 600282 - DNA, 120 bp, Artificial Sequence
  ENSG00000174516_8 (sequence is synthesized)
actcagccccgggtgtctggcgggagatctcggtctgtgggaatgtgtacacattgcgggacagccgctcagcccagcagcggggcaagctggtggaaaacgagtccaacgtgctgcagg

SEQ ID NO: 600283 - DNA, 120 bp, Artificial Sequence
  ENSG00000174516_9 (sequence is synthesized)
acggctctctcatcgacctgtgtggggccacactgctgtggcgcacaccggcggggctgctgcgggctcccacactgaagcaactggaggcccagcggcaggaggcaaatgcagcgcggc

SEQ ID NO: 600284 - DNA, 120 bp, Artificial Sequence
  ENSG00000174516_10 (sequence is synthesized)
cccagtgccccgtgggcctcagcactctggccttccccagcccagcccgtggccgcacagcgcccgacaaacagcagccctgggtctacgtccgctgcgggcacgtccatggctaccacg

SEQ ID NO: 600285 - DNA, 120 bp, Artificial Sequence
  ENSG00000174516_11 (sequence is synthesized)
ggcccccaggagcgcgaatgtcctctctgccgccttgtggggccttatgtgcctctatggcttggccaggaggccggcctctgcctggaccctgggccgcctagccatgcctttgcacct

SEQ ID NO: 600286 - DNA, 120 bp, Artificial Sequence
  ENSG00000174516_12 (sequence is synthesized)
tgcggccacgtctgctctgagaagactgcccgctactgggcccagacaccactgccccacggcacccatgctttccatgccgcctgccccttttgcggggcctggcttaccggcgagcat

SEQ ID NO: 600287 - DNA, 120 bp, Artificial Sequence
  ENSG00000174516_13 (sequence is synthesized)
ggctgcgtccgcctcattttccagggcccgctggattaggctccctggggccccctgctgctgtgcccacctgcccacccaggtccccacctcctgcagcccagagggagctctgcatgt

SEQ ID NO: 600288 - DNA, 120 bp, Artificial Sequence
  ENSG00000174516_14 (sequence is synthesized)
gggacactccctgctggcacagccacaccagatggacatgttggatgggctgtgcccttccccccaactgtggccccccaaggaggtccccaagatctccaccccagtcatgctgatggg

SEQ ID NO: 600289 - DNA, 120 bp, Artificial Sequence
  ENSG00000174516_15 (sequence is synthesized)
gccttcagcaccagctctgtcctgggtcgatggaggaaagcccagccccatggccttgcccttcctggggcatcccacatcgtgccgccgacactgtgtgcccctgggggagtgaagggg

SEQ ID NO: 600290 - DNA, 120 bp, Artificial Sequence
  ENSG00000174516_16 (sequence is synthesized)
ccaggggcctttgacccccagcttaggctggctatgccctgagcctgccaacccagtttcagacactcatccttcatccttcctgctgccgccctgggttcctctataaacctcgctgct

SEQ ID NO: 600291 - DNA, 120 bp, Artificial Sequence
  ENSG00000174516_17 (sequence is synthesized)
cagctgcccccacaagtcccacatgccccgcatgcgtgcaatgcctccagcccccaagtgagtggtgggtgggtggcaggctgggcctagcacttgctgatagccactatgggctcgact

SEQ ID NO: 600292 - DNA, 120 bp, Artificial Sequence
  ENSG00000174516_18 (sequence is synthesized)
ctgtgctaagtggtatctggggacacagaggcaatcagacctggttccccccctggtggagttcacagtctagtggaggacagactgttaacaaatggcaacacggcttcatgcgtgcca

SEQ ID NO: 600293 - DNA, 120 bp, Artificial Sequence
  ENSG00000174516_19 (sequence is synthesized)
ggatcagagtacaaatcaggctgtggcaggcctcactggtaatggaaaagtgagggaggcttcacggaggaggtgtcataggagctcagcctcaacggctgctcggaaccctccgagtcc

SEQ ID NO: 600294 - DNA, 120 bp, Artificial Sequence
  ENSG00000174516_20 (sequence is synthesized)
acaagatgggaagcaagtccacaagatgggaagcgtgctctatacagaagggagggcctgtgcacaggctcaggtgtcagtaagccagaaatccagggacagagtcaggatggctggagc

SEQ ID NO: 600295 - DNA, 120 bp, Artificial Sequence
  ENSG00000174516_21 (sequence is synthesized)
atggactgcggggggaacagagaagggggtggagcaaaaggttgggaccatgtgaccagggaagatgctggatggaggattctgaacctcatttgtggacggtcaggagtcaacaaaggg

SEQ ID NO: 600296 - DNA, 120 bp, Artificial Sequence
  ENSG00000174516_22 (sequence is synthesized)
aggagagaggactcactggtcaagagtgtcggctgtgacacaagggccatcatccctgaatgcccaccatgtgccccgcactgtgctgatgatgataataataactacgtccattgagca

SEQ ID NO: 600297 - DNA, 120 bp, Artificial Sequence
  ENSG00000174516_23 (sequence is synthesized)
gtgctgcagcccgagctcgaggggggagcgccgcctccgcaggcctcctgagacccgggcggctggggacgcagacagacacctgagggagggaagagcgcgcacccaggaggagtctat

SEQ ID NO: 600298 - DNA, 120 bp, Artificial Sequence
  ENSG00000174516_24 (sequence is synthesized)
gagcccatcaagtatggtgaactcatcgtcctgggatgctgtgaggaaggaggtgaggaaaccgaggctcagagaggggaagtgactggcccaagggcacacagctgctacaatggttgt

SEQ ID NO: 600299 - DNA, 120 bp, Artificial Sequence
  ENSG00000174516_25 (sequence is synthesized)
ggcccgctccattccccacccctatccttgccaggccctcacaagctgcccatccccctgcccaagccaggagatgatctccagtccttctgccccagggagccccaacaggctccatat

SEQ ID NO: 600300 - DNA, 120 bp, Artificial Sequence
  ENSG00000174516_26 (sequence is synthesized)
cagggaatcccaggcccagggggttcttagcatgagccacttgtcccacagacaggcagacagaccagggtccccaagcatagcatgcataccactggaggtccagggggtgatgcgatc

SEQ ID NO: 600301 - DNA, 120 bp, Artificial Sequence
  ENSG00000174516_27 (sequence is synthesized)
aaggcacacacagacatactgtgcagtcccaggtggcttcaaggctgctggcagcttaaaaaaaatcacaccttcttatgagagtgacacttggcccatgtgtgagcagtttatagccta

SEQ ID NO: 600302 - DNA, 120 bp, Artificial Sequence
  ENSG00000174516_28 (sequence is synthesized)
aagggttggcagtttgtagcatgtctatcacgttcagacaggtttagcactgttctcctctcgcaggaggaaagggtccttacagtagttctgacacaggtgttagtggcagctccttgt

SEQ ID NO: 600303 - DNA, 120 bp, Artificial Sequence
  ENSG00000174516_29 (sequence is synthesized)
ggtacagatcagagagctgaggttagggaccgggagtgagtcctagagagaggcaggggctgtccaaggtcacatggccgtgctcctcaaactggccatgcactgctcttctctggcatg

SEQ ID NO: 600304 - DNA, 120 bp, Artificial Sequence
  ENSG00000174516_30 (sequence is synthesized)
agcacattggccaaggagatgcaaaacctcagagaaaagcctggcttttctttccagagcgtcaactctgtggggaggtctggggaagcattgtttgttaaaacaatgcatgtgaatgtt

SEQ ID NO: 600305 - DNA, 120 bp, Artificial Sequence
  ENSG00000174516_31 (sequence is synthesized)
agacaggtctgcgactctggtcaactgcagctgctttccccggcctccaccgctgccgcacaccccctttgcctttagcattttcctcctctcctctaattgcgtggcgtccccagatga

SEQ ID NO: 600306 - DNA, 120 bp, Artificial Sequence
  ENSG00000174516_32 (sequence is synthesized)
gggcccatcccgccgcagcggcccggggccgagcaggggctaggcggggagggagcggcgcccagcggggcccggagcgtggccagctacaatggttgtctggcaagtggggacaagggc

SEQ ID NO: 600307 - DNA, 120 bp, Artificial Sequence
  ENSG00000174521_0 (sequence is synthesized)
cggcaggagtttcccacaatgcagcgcggcgcgctgtccccggtgctgatgctcagcgctgccccggagcctccgccgcgcccgcctcccgccctctccccaccgggctcgggcccaggc

SEQ ID NO: 600308 - DNA, 120 bp, Artificial Sequence
  ENSG00000174521_1 (sequence is synthesized)
tcgggctcccgccatggctcggctcgtcccggtcctaccccagagccgtcggggagcctgggcgcggcgctcgacagcagcctgcgtgccgccgtggcgttcaaggcagagggccagcgc

SEQ ID NO: 600309 - DNA, 120 bp, Artificial Sequence
  ENSG00000174521_2 (sequence is synthesized)
tgctatcgagagaagaagttccgggaggccatcggcaagtaccaccgagcgctgctgcagctgaaggcggcgcagggggcccgccctagcggcctgcccgcccccgcccccgggcccacc

SEQ ID NO: 600310 - DNA, 120 bp, Artificial Sequence
  ENSG00000174521_3 (sequence is synthesized)
agccccgggccggcgcgcctcagcgaggagcagcggcgcctggtggagagcacggaggtggagtgttacgactccctcacggcttgcctgctgcagtcggagctggtaaactacgagcgc

SEQ ID NO: 600311 - DNA, 120 bp, Artificial Sequence
  ENSG00000174521_4 (sequence is synthesized)
gtgcgcgagtactgtctcaaggtactggagaagcagcagggcaacttcaaggccacctaccgtgccggcattgccttctaccacctgggcgactacgcacgcgcgctgcgctacctgcag

SEQ ID NO: 600312 - DNA, 120 bp, Artificial Sequence
  ENSG00000174521_5 (sequence is synthesized)
gaggcccgcagccgggaacccacagacaccaatgtgctccgctacatccagctgactcagctgaagatgaatcgttgcagcctccagcgggaagacagtggggctgggtcccagactcgg

SEQ ID NO: 600313 - DNA, 120 bp, Artificial Sequence
  ENSG00000174521_6 (sequence is synthesized)
gatgtaattggctgaggccaatccagggggacctctctatccctcgccctcccacctcaccatgtaacttcccccgactcatgtgtttgttggtaaaacacttgtcactggtgatcataa

SEQ ID NO: 600314 - DNA, 120 bp, Artificial Sequence
  ENSG00000174521_7 (sequence is synthesized)
agagcttggcgacttgggggccaggggccctggggctgaagggtccagggctgtgggcttctgggggagccttcagagcttgatcaaggaaagggattaggggtaggggatgacaggggt

SEQ ID NO: 600315 - DNA, 120 bp, Artificial Sequence
  ENSG00000174521_8 (sequence is synthesized)
ctgtggctggagggagctgggatgcaggaaatggtctttgggtcgggtattcagggcctcgcttcccctgagtcattctttccaccccctggccgcacgtggacccaaggtgaggaagtc

SEQ ID NO: 600316 - DNA, 120 bp, Artificial Sequence
  ENSG00000174521_9 (sequence is synthesized)
tgccctgagccaggctctcgaggtcccggccctcgcccccgcgcggggccttagtgctcttgcccaccgacagctctgggtggatcgcccagtggcgcctgtccgtgttttggcgccccc

SEQ ID NO: 600317 - DNA, 120 bp, Artificial Sequence
  ENSG00000174521_10 (sequence is synthesized)
tagcagcggcgcagttgcgcctgtttcgataggcgagcggattggcgcccctggttgccggagcaatcccttaggcctggttccctgccgcctggagcctcggctcctcgcagtcaggtg

SEQ ID NO: 600318 - DNA, 120 bp, Artificial Sequence
  ENSG00000174521_11 (sequence is synthesized)
aaaggggctgcagcggagggaacaggcaggaagatcagggcagaatagcagagccctcctcccgcggagctgcttctaggtagggctgcgccacccacctactccctacacgcccactca

SEQ ID NO: 600319 - DNA, 120 bp, Artificial Sequence
  ENSG00000174521_12 (sequence is synthesized)
tccattcatccaccccgcccttcacccgccattcaaacatccgtccacctatcgctcctctgacatctccccggccatttctcatctaccgtcattgccacatctgatatctcctattca

SEQ ID NO: 600320 - DNA, 120 bp, Artificial Sequence
  ENSG00000174521_13 (sequence is synthesized)
cctgctcagtcacttccctatccacccactgtcatctccattaccccgtcccacccctgcctaccgcacacactcattcctccactcacccattcacgcacacctattcattcacttcct

SEQ ID NO: 600321 - DNA, 120 bp, Artificial Sequence
  ENSG00000174521_14 (sequence is synthesized)
gcaccatccactcatccactcgggtggacgatgccaggaaattggggtgtgtgtgtgtgtgcgtgcatgtgtgcacttacacacatgagtgcaggagggcagacacaacactcagttttg

SEQ ID NO: 600322 - DNA, 120 bp, Artificial Sequence
  ENSG00000174521_15 (sequence is synthesized)
tattaagagccaatgaagaaggaagagggattacaacaggtgcagggttgtgggagccgagacgagattagttttcctgttaagtggctcggagagaacagacttcttgcagatgtcgct

SEQ ID NO: 600323 - DNA, 120 bp, Artificial Sequence
  ENSG00000174521_16 (sequence is synthesized)
ggaggatgagaagtgtgacgggagcctctgcgaagaggcattcctggcagagggtgccgcaaatacaggcgcacagaggtgtgcgatggctccgctgtgactggggactgccgactgtga

SEQ ID NO: 600324 - DNA, 120 bp, Artificial Sequence
  ENSG00000174521_17 (sequence is synthesized)
ctggggctttggggaagggctctggctctactggctgtgtgagcgagctgctggatacttcggagaatggggtgtgagccagggaggtgtggaagtcacctgctgccccgggacacccag

SEQ ID NO: 600325 - DNA, 120 bp, Artificial Sequence
  ENSG00000174527_0 (sequence is synthesized)
atggaaggggcgctgactgcccgggacaaggtcggggttcaggattttgtgctattggacgcgtacaccagcgaatctgcctttgtcgacaacctccgcaagcgtttcagcgagaacctc

SEQ ID NO: 600326 - DNA, 120 bp, Artificial Sequence
  ENSG00000174527_1 (sequence is synthesized)
atatacacatatattggcaccctccttgtgtctgtgaatccataccaggagctcggaatctacactgtgagccagatggaactttatcaaggggtcaatttctttgaactgccaccacat

SEQ ID NO: 600327 - DNA, 120 bp, Artificial Sequence
  ENSG00000174527_2 (sequence is synthesized)
gtctacgctatagccgacaacgcttaccgaatgatgtgtgctgaactaaataaccatttcatcctcatttctggagagagtggggcagggaaaacagaggcctccaagaaaattctcgag

SEQ ID NO: 600328 - DNA, 120 bp, Artificial Sequence
  ENSG00000174527_3 (sequence is synthesized)
tattttgcagtgacctgcccaatgacccagtcactacaaatagcccgtgacagactgctgttctccaacccagtgctggaggcttttggaaatgccagaacgctccggaatgacaactcc

SEQ ID NO: 600329 - DNA, 120 bp, Artificial Sequence
  ENSG00000174527_4 (sequence is synthesized)
agcagatttgggaaatacatggatatacaatttgattttcagggcattcccgtaggtgggcatatcatcagttacttgatagagaagtcccgagttgtctaccaaaacgaaggcgagcgg

SEQ ID NO: 600330 - DNA, 120 bp, Artificial Sequence
  ENSG00000174527_5 (sequence is synthesized)
aatttccacatcttctaccagctgctggcaggtggcgaagaggagcgcctgtcttacctgggactcgagcgagacccccagctgtataaatacctctcacagggtcattgtgccaaagag

SEQ ID NO: 600331 - DNA, 120 bp, Artificial Sequence
  ENSG00000174527_6 (sequence is synthesized)
tcatccattagtgacaagaatgactggaaaactgtttccaacgccttttctgtcattgattttactgaagctgacctcgagaatctctttggaattattgccagtgtcttacacctgggg

SEQ ID NO: 600332 - DNA, 120 bp, Artificial Sequence
  ENSG00000174527_7 (sequence is synthesized)
aacattggttttgaagaagacgaccaaggctgtgccactatcccagacacccatgagatcaagtggatagccaagctcctgggggtccacccatcagtccttctggaagctctcacccac

SEQ ID NO: 600333 - DNA, 120 bp, Artificial Sequence
  ENSG00000174527_8 (sequence is synthesized)
agaaaaattgaagccaaaactgaggaggtgatctgcccgttgacactagaactctctgtctacgctagagatgcaatggcaaaggctgtttatggacgaacgtttacttggctggtcaac

SEQ ID NO: 600334 - DNA, 120 bp, Artificial Sequence
  ENSG00000174527_9 (sequence is synthesized)
aaaatcaattcctccttagttaacaaggatttcaccaggaaaactgtaattggattactggacatctatgggtttgaagtctttgacaagaatggttttgaacagttctgtataaattac

SEQ ID NO: 600335 - DNA, 120 bp, Artificial Sequence
  ENSG00000174527_10 (sequence is synthesized)
tgcaatgagaaactccagcaactgttaattgagaggactctaaaagcagaacaggcagaatatgaaatggaaggcatagagtgggagccaattaaatatttcaacaacaagatcatctgt

SEQ ID NO: 600336 - DNA, 120 bp, Artificial Sequence
  ENSG00000174527_11 (sequence is synthesized)
gatttggtagaagagagacataaaggaatcatatctattctggatgaagaatgcattcggcctggtcctgctacagacttgagtttcctggagaaattggaagagaaagtgggcaaacat

SEQ ID NO: 600337 - DNA, 120 bp, Artificial Sequence
  ENSG00000174527_12 (sequence is synthesized)
gcacacttcgaaacccgtaagctggctggtccaaagggccgaaagaggattggctggatggagttccgactcctccactatgcaggagaggtcacatactgcaccaagggattcttggaa

SEQ ID NO: 600338 - DNA, 120 bp, Artificial Sequence
  ENSG00000174527_13 (sequence is synthesized)
aaaaacaatgatcttctttacagacatctgaaagaagtgctgtgcaagtccaagaacattatcctgagggaatgcttcctgctggccgagttagaaaaccggaggaggcccccaacagtg

SEQ ID NO: 600339 - DNA, 120 bp, Artificial Sequence
  ENSG00000174527_14 (sequence is synthesized)
gggactcagtttaaaaacagtctgagcagccttctagaaaccctcatctctaaggagccctcctacatccgttgcatcaagcccaacgacaggaaagaacccagcaaatttgatgacttc

SEQ ID NO: 600340 - DNA, 120 bp, Artificial Sequence
  ENSG00000174527_15 (sequence is synthesized)
ctcataaggcatcagatcaaatacctggggctgatggagcacctgcgggtgagacgggctggttttgcataccgaaggaaatacgagcatttcttgcaaaggtacaagtccttatgccca

SEQ ID NO: 600341 - DNA, 120 bp, Artificial Sequence
  ENSG00000174527_16 (sequence is synthesized)
gacacctggccgcactggcacgggcctccagcagagggcgtggaacggctgatcaagtacatcggctacaaacccgaggaatacaagttaggcaaaaccaaaatattcattcgtttcccc

SEQ ID NO: 600342 - DNA, 120 bp, Artificial Sequence
  ENSG00000174527_17 (sequence is synthesized)
gaatccaagccacttacaaacgctgcctaggaaggagagaatacgtgaaaaaaagacaagcagccatcaaactggaagcccactggcgtggggccctggctcggaaggcaatccaaagga

SEQ ID NO: 600343 - DNA, 120 bp, Artificial Sequence
  ENSG00000174527_18 (sequence is synthesized)
gaaagtgggccgtgcggattatcagaaagttcattaaaggattcatcagtcgcaacaaacccctctgtcctgacaacgaggaatttatcgtgtttgtgcggaagaattacatcttgaatc

SEQ ID NO: 600344 - DNA, 120 bp, Artificial Sequence
  ENSG00000174527_19 (sequence is synthesized)
tccggtatcaccttccaaagactgtcctggacaagagctggctgaggcctcctggcatcttggaaaatgcatcagatctgctcaggaaaatgtgcgtgaggaacctggtgcagaagtact

SEQ ID NO: 600345 - DNA, 120 bp, Artificial Sequence
  ENSG00000174527_20 (sequence is synthesized)
gccgcgggatcacagctgagcggaaagcaatgatgcagcaaaaggtagttacaagtgaaatcttcaggggaaggaaagacggctacacagaaagtttaaatcaaccctttgtcaacagtc

SEQ ID NO: 600346 - DNA, 120 bp, Artificial Sequence
  ENSG00000174527_21 (sequence is synthesized)
ggatagatgaaggagacattaatccgaaagtgcttcagctaattagccatgagaaaatccagtatggtgtcccggtcattaaatatgacagaaaaggcttcaaagcacggcagcggcaac

SEQ ID NO: 600347 - DNA, 120 bp, Artificial Sequence
  ENSG00000174527_22 (sequence is synthesized)
tcattcttactcagaaagcagcttacgtggtggaacttgccaaaatcaagcagaaaatagagtactcagctctcaaaggtgtctccactagcaatctgagtgatggaatcttagtcattc

SEQ ID NO: 600348 - DNA, 120 bp, Artificial Sequence
  ENSG00000174527_23 (sequence is synthesized)
atgtttcaccagaggacagcaagcaaaagggggatgccgttttgcagtgtggacacgtgtttgaagcagttactaaactcgtcatgctggttaagaaggagaacattgtcaatgttgttc

SEQ ID NO: 600349 - DNA, 120 bp, Artificial Sequence
  ENSG00000174527_24 (sequence is synthesized)
aaggaagtttacagttttttattagtccgggaaaagaaggcacaatagttttcgacactggactggaagaacaagtctataaaaataaaaatggacaattaacagtggtgtcagtccgga

SEQ ID NO: 600350 - DNA, 120 bp, Artificial Sequence
  ENSG00000174527_25 (sequence is synthesized)
ggaagtcctgatagaggatgacgtctgacctctaccatcgccatttttgctccaactgaggaaactacaggggaagtggggattggatccagttagctacctcttcaaggtaccaggccc

SEQ ID NO: 600351 - DNA, 120 bp, Artificial Sequence
  ENSG00000174527_26 (sequence is synthesized)
gcagcactaacagatcacatctgaagaaactgaggggcgttaggccaaagcctaatcccagctcctcagctgccccatggcaccttatttaaaatgtcaccttctggaagcagaccccag

SEQ ID NO: 600352 - DNA, 120 bp, Artificial Sequence
  ENSG00000174527_27 (sequence is synthesized)
gtcacccgaaggcgcaattctaaacaccctcgacaggatctatgttcagtgcgcagtccaacgtgtcattagagggtgggcaagattctctacctctgtcaagctgccctgagacatgat

SEQ ID NO: 600353 - DNA, 120 bp, Artificial Sequence
  ENSG00000174527_28 (sequence is synthesized)
gaaatactgtgtacagcaagttctcaaataacatttcgttatatgttgataagacatctgattcctgggcagggccactgtctgggtggagtctgtatgttctccccatgtctctgggtt

SEQ ID NO: 600354 - DNA, 120 bp, Artificial Sequence
  ENSG00000174527_29 (sequence is synthesized)
tcttctgggtgctctggtttcctcccacgtccccaaggtgtgtgtgtcaggtgcactggcgtgtctatgcggtcccagtctgagtgagtgtgggtgcgtgagccccgtgagaggaggaca

SEQ ID NO: 600355 - DNA, 120 bp, Artificial Sequence
  ENSG00000174527_30 (sequence is synthesized)
tcctgtccagggtgggtcccgccttctgccctgagctgctgggattgggctctggccatctgcaaccctgaacgtgcaggttggagaacgaatgaatacaaattttattgtaaaataaaa

SEQ ID NO: 600356 - DNA, 120 bp, Artificial Sequence
  ENSG00000174527_31 (sequence is synthesized)
atgtatataaagcatatgagcacacaaatggacaataaatgccacagcgcaaaagcgtgtagcgagcctgccacgcttgtgactggggaggggctccgtataatctcacctttgcaagcg

SEQ ID NO: 600357 - DNA, 120 bp, Artificial Sequence
  ENSG00000174527_32 (sequence is synthesized)
tttatttactgatgtatgcggccaccactgtgaccaccatcacttaccgattcaccaaaacttaggtaatatggtcttatttttgatttaattaaatatacgtgtagctcatgtatttca

SEQ ID NO: 600358 - DNA, 120 bp, Artificial Sequence
  ENSG00000174527_33 (sequence is synthesized)
cagtttaatatgagaagtgctttggtctttatttagaaattgggtgatgtttttgtgcccagcaacatgctgtaggaatttaactcttgtttacatccattagcctcatggttttgcttc

SEQ ID NO: 600359 - DNA, 120 bp, Artificial Sequence
  ENSG00000174527_34 (sequence is synthesized)
aagtctcagcttccaagaacctatcgatgacttactgtgcatggtctgagactaagtaaaggaaatttcctaaagctgtgaaatttgaattttgctttaaataaatggaactcacatgtg

SEQ ID NO: 600360 - DNA, 120 bp, Artificial Sequence
  ENSG00000174527_35 (sequence is synthesized)
actttggccgcctctgaatcaaagaagggggaagagaatgtaaatctcggtgaagaaatggtccagaaaagtaagaaaacattttcctttttaggttcattaaaggattcatcagtcgca

SEQ ID NO: 600361 - DNA, 120 bp, Artificial Sequence
  ENSG00000174527_36 (sequence is synthesized)
agcaaaaagttgggagaggatcaggttagctgctgtgactataaaatataaaatattaacactgtgcttgaaatcaaactgaattcagcagtgtttttttaaagcttcattttgatcgcc

SEQ ID NO: 600362 - DNA, 120 bp, Artificial Sequence
  ENSG00000174529_0 (sequence is synthesized)
gttttattgacaatacatgcatcatatcttttgactttgaaggatatctcatgtcaaaggaatcaagttatgatttatagaggattcagctggaataccttgtgggtgctggctgagggt

SEQ ID NO: 600363 - DNA, 120 bp, Artificial Sequence
  ENSG00000174529_1 (sequence is synthesized)
ggcaaaacgcctaccgagacatgaaggttttagccactagttttgtccttgggagcctggggttggccttctacctgcctttggtggtgactacacctaaaacactggccatccctgaga

SEQ ID NO: 600364 - DNA, 120 bp, Artificial Sequence
  ENSG00000174529_2 (sequence is synthesized)
agctgcaagaagctgtggggaaagttatcatcaatgccacaacctgtactgtcacctgtggccttggctataaggaggagaccgtctgtgaggtgggccctgatggagtgagaaggaaat

SEQ ID NO: 600365 - DNA, 120 bp, Artificial Sequence
  ENSG00000174529_3 (sequence is synthesized)
gtcagactcggcgcttagaatgtctgaccaactggatctgtgggatgctccatttcaccattctcattggcaaggaatttgagcttagctgtctgagttcagacatcttggagtttggac

SEQ ID NO: 600366 - DNA, 120 bp, Artificial Sequence
  ENSG00000174529_4 (sequence is synthesized)
aggaagctttccggttcacctggagacttgctcgaggtgtcatctccactgacgatgaggtcttcaaaccctttcaagccaactcccactttgtgaagtttaaatatgctcaggagtatg

SEQ ID NO: 600367 - DNA, 120 bp, Artificial Sequence
  ENSG00000174529_5 (sequence is synthesized)
atcgctgtgatgtgcagctggtaaaaaacttgagactcgtcaagaggctctattttgggttgagggtccttcctcctaacttggtgaatctgaatttccatcagtcacttactgaggatc

SEQ ID NO: 600368 - DNA, 120 bp, Artificial Sequence
  ENSG00000174529_6 (sequence is synthesized)
agaagttaatagatgagggattggaagttaatctggacagctactccaagcctcaccacccaaagtggaaaaagaaggtggcgtcagccttgggaataggaattgccattggagtggttg

SEQ ID NO: 600369 - DNA, 120 bp, Artificial Sequence
  ENSG00000174529_7 (sequence is synthesized)
gtggcgtgttggtgaggattgtcctctgtgcgctaagggggggcctgcagcagtgacagcttcaagaacttaacagccttgctcctgaagaactggctgcccaggaagccaagctagctt

SEQ ID NO: 600370 - DNA, 120 bp, Artificial Sequence
  ENSG00000174529_8 (sequence is synthesized)
tttaggggagtgttccagctgctggtagtggatcagcttagagggaacactcccacagccaaaagaatgagtgggagaaatggaggggacaatctcctgggagctatgcgcagtaaccta

SEQ ID NO: 600371 - DNA, 120 bp, Artificial Sequence
  ENSG00000174529_9 (sequence is synthesized)
acttccttatgtcccatggatctcttcctgatcttccctgcccattgggtacccaggaaactgcaagcattgcctgtgttcctgggaagagttctaagaagcttgcattcattttctacc

SEQ ID NO: 600372 - DNA, 120 bp, Artificial Sequence
  ENSG00000174529_10 (sequence is synthesized)
ctttatgacttggatgcctccccacctccatttcccctcttctgagctgtgtattcatgtagagggatgtattcagcctttttagtgaacattttttttcaataaaagtaattcacagta

SEQ ID NO: 600373 - DNA, 120 bp, Artificial Sequence
  ENSG00000174547_0 (sequence is synthesized)
gtgaggacccttgacctctggcccaagatggtggcgcccagagcttcgctcttgctgctcccctgaggtgaactgaagccagcagccccgcatcatgtcaaagctcggccgggccgcccg

SEQ ID NO: 600374 - DNA, 120 bp, Artificial Sequence
  ENSG00000174547_1 (sequence is synthesized)
gggcctcaggaagcccgaggtcggcggtgtgatccgggcgatcgtgcgggcaggcctggccatgcccgggcccccactaggcccagtgctgggtcagagaggcgtttccatcaaccagtt

SEQ ID NO: 600375 - DNA, 120 bp, Artificial Sequence
  ENSG00000174547_2 (sequence is synthesized)
ttgcaaggagttcaatgagaggacaaaggacatcaaggaaggcattcctctgcctaccaagattttagtgaagcctgacaggacatttgaaattaagattggacagcccactgtttccta

SEQ ID NO: 600376 - DNA, 120 bp, Artificial Sequence
  ENSG00000174547_3 (sequence is synthesized)
cttcctgaaggcagcagctgggattgaaaagggggcccggcaaacagggaaagaggtggcaggcctggtgaccttgaagcatgtgtatgagattgcccgcatcaaagctcaggatgaggc

SEQ ID NO: 600377 - DNA, 120 bp, Artificial Sequence
  ENSG00000174547_4 (sequence is synthesized)
atttgccctgcaggatgtacccctgtcgtctgttgtccgctccatcatcgggtctgcccgttctctgggcattcgcgtggtgaaggacctcagttcagaagagcttgcagctttccagaa

SEQ ID NO: 600378 - DNA, 120 bp, Artificial Sequence
  ENSG00000174547_5 (sequence is synthesized)
ggaacgagccatcttcctggctgctcagaaggaggcagatttggctgcccaagaagaagctgccaagaagtgacccttgccccaccaactcccagatttcaaaggaggtagttgcaaaag

SEQ ID NO: 600379 - DNA, 120 bp, Artificial Sequence
  ENSG00000174547_6 (sequence is synthesized)
tttcatgactttgaatgatatatttttgtacatctagctgtatcgaggcatcaggcctgaataaacatcctttcttacccactgtcatcttctatcttgggacctcagggaagggaacca

SEQ ID NO: 600380 - DNA, 120 bp, Artificial Sequence
  ENSG00000174547_7 (sequence is synthesized)
gtactggtggtagccaatatgggcagacattaggaaattggggtcttcatactgcttctcagatgtgcaaactgaggttcagccaagcaaagtaacttgcccaggtccttttttttcttt

SEQ ID NO: 600381 - DNA, 120 bp, Artificial Sequence
  ENSG00000174547_8 (sequence is synthesized)
tttaagttataattttgttttattgcccaggttctgaattggtgccagaggtaggaatagaacccaggccttctcatttgaaatcctgtgttcttcccctccccagggtgggaactatgg

SEQ ID NO: 600382 - DNA, 120 bp, Artificial Sequence
  ENSG00000174547_9 (sequence is synthesized)
ttgctagggctgaggtgtattgcttacttcttccatcaaaaatctcttttatctctgaacaacttgccacctctgcagaaacaagtccctgtggagatctcagttcagccccaggcaggg

SEQ ID NO: 600383 - DNA, 120 bp, Artificial Sequence
  ENSG00000174547_10 (sequence is synthesized)
ttactacatggagtacccagatcccaggggctacttcaggcccttctactaagctcctgaccctggctctgggtcagatgttggctgaacatgaactattgtagggctgacagctacaga

SEQ ID NO: 600384 - DNA, 120 bp, Artificial Sequence
  ENSG00000174547_11 (sequence is synthesized)
ccacagaaagagcaaagcttcagtaggttcctgcctgatggagaagtcctcgggaagcccttggccttctatttcctcattgtcctttcagagaagagagcaggagttgggggagaaagg

SEQ ID NO: 600385 - DNA, 120 bp, Artificial Sequence
  ENSG00000174547_12 (sequence is synthesized)
agattcgcatttactgaccatctgttatgtgctagacacttcattttacactgagaaaatatggaaagcatagataaacacctaaaagaaaataaaaacctcatgttatcccaccaccca

SEQ ID NO: 600386 - DNA, 120 bp, Artificial Sequence
  ENSG00000174547_13 (sequence is synthesized)
cgttgttctgcaaatgttctaagaaatggaaagatctccatgaaggatccaagtgggagaagttcagtgtgacctgggtctgtcgtcctagaggcaagtggagaatgcctcagttcagaa

SEQ ID NO: 600387 - DNA, 120 bp, Artificial Sequence
  ENSG00000174547_14 (sequence is synthesized)
gaccacgcccttcccctggtaccgccctctgaccagggaagccccgctctccactccgtctgagggactcccttgcccctcctagccggctcaggactcccccgtagtctacacgacccc

SEQ ID NO: 600388 - DNA, 120 bp, Artificial Sequence
  ENSG00000174547_15 (sequence is synthesized)
tcccccatttcagactccccaaactccgcctccatttccggggactccggggttctcccagagacatgggcgcccctccccactgtcggtcagggccctcacacggcgctggaggcccct

SEQ ID NO: 600389 - DNA, 120 bp, Artificial Sequence
  ENSG00000174547_16 (sequence is synthesized)
tccctagccttaggcccgggactacgcacccccagctccgacaccccgcctaccatctggggacgccacgcaattagaggagaggaggaaaatgctaaaggcaaagggggtgtgcggcag

SEQ ID NO: 600390 - DNA, 120 bp, Artificial Sequence
  ENSG00000174547_17 (sequence is synthesized)
cggtggaggccggggaaagcagctgcagttgaccagagtcgcagacctgtcttccagcccagctcgggcaccccccattcccctcccctcagtcccctcccctccgccaggatgcacaca

SEQ ID NO: 600391 - DNA, 120 bp, Artificial Sequence
  ENSG00000174547_18 (sequence is synthesized)
ccccccgctgtgctgcaaaggaaagagagttttgggggagcaccgccccttctgggcctggggcttgcgagagatctatcagtctacgttaggcgctgtgcgctgtgctttgagcaaatt

SEQ ID NO: 600392 - DNA, 120 bp, Artificial Sequence
  ENSG00000174547_19 (sequence is synthesized)
aaaccctttactttaatcctgggaggcaggcacgatagttgcccattttacagatgaggaaatagatttacaaaagtgacttgcttgttgtagtttgctagaaacgggccaagagagaat

SEQ ID NO: 600393 - DNA, 120 bp, Artificial Sequence
  ENSG00000174547_20 (sequence is synthesized)
ctcagctgtatgagtggcttcagtctcaactcctaacttcgtaccttgtcgttctgactagggatggagcctcagaggtgcagaagagaaaccttgtctgcatcagagaggcgtttccat

SEQ ID NO: 600394 - DNA, 120 bp, Artificial Sequence
  ENSG00000174562_0 (sequence is synthesized)
actgcagccgaaccctggtccctcctccacaatgtggcttctcctcactctctccttcctgctggcatccacagcagcccaggatggtgacaagttgctggaaggtgacgagtgtgcacc

SEQ ID NO: 600395 - DNA, 120 bp, Artificial Sequence
  ENSG00000174562_1 (sequence is synthesized)
ccactcccagccatggcaagtggctctctacgagcgtggacgctttaactgtggcgcttccctcatctccccacactgggtgctgtctgcggcccactgccaaagccgcttcatgagagt

SEQ ID NO: 600396 - DNA, 120 bp, Artificial Sequence
  ENSG00000174562_2 (sequence is synthesized)
gcgcctgggagagcacaacctgcgcaagcgcgatggcccagagcaactacggaccacgtctcgggtcattccacacccgcgctacgaagcgcgcagccaccgcaacgacatcatgttgct

SEQ ID NO: 600397 - DNA, 120 bp, Artificial Sequence
  ENSG00000174562_3 (sequence is synthesized)
cgcacgcctgaacccccaggtgcgccccgcggtgctacccacgcgttgcccccacccgggggaggcctgtgtggtgtctggctggggcctggtgtcccacaacgagcctgggaccgctgg

SEQ ID NO: 600398 - DNA, 120 bp, Artificial Sequence
  ENSG00000174562_4 (sequence is synthesized)
gagcccccggtcacaagtgagtctcccagatacgttgcattgtgccaacatcagcattatctcggacacatcttgtgacaagagctacccagggcgcctgacaaacaccatggtgtgtgc

SEQ ID NO: 600399 - DNA, 120 bp, Artificial Sequence
  ENSG00000174562_5 (sequence is synthesized)
aggcgcggagggcagaggcgcagaatcctgtgagggtgactctgggggacccctggtctgtgggggcatcctgcagggcattgtgtcctggggtgacgtcccttgtgacaacaccaccaa

SEQ ID NO: 600400 - DNA, 120 bp, Artificial Sequence
  ENSG00000174562_6 (sequence is synthesized)
gcctggtgtctataccaaagtctgccactacttggagtggatcagggaaaccatgaagaggaactgactattctagcctatctcctgtgcccctgactgagcagaagcccccacagctgg

SEQ ID NO: 600401 - DNA, 120 bp, Artificial Sequence
  ENSG00000174562_7 (sequence is synthesized)
gttactcctcgaaaaactctacgaggggatcctctgattttaaggataagaaactgagacacagagaagaaaaaactcttaccagggtctcccaaaataactgcagccgaaccctggtcc

SEQ ID NO: 600402 - DNA, 120 bp, Artificial Sequence
  ENSG00000174562_8 (sequence is synthesized)
cttgtcccacctgaggacaaagctggcgctcaaggtcacctgtttaatgccaagataacaaagcgctgatccaagttgctctgtaggaatttctgtgacttttttctggggtcaaagaga

SEQ ID NO: 600403 - DNA, 120 bp, Artificial Sequence
  ENSG00000174562_9 (sequence is synthesized)
aaccccgagacactgtacactgttccttttcacccaccaccccgatccctaggtgaggagaagcggcttgaagcagggctccattcattcaacacacatgaccacccgtgtgatcttgaa

SEQ ID NO: 600404 - DNA, 120 bp, Artificial Sequence
  ENSG00000174562_10 (sequence is synthesized)
caagaggcccaatctcacttcgccttggtttccttatctgtaaaatgagaccatcttattgctgacttcaaagggctgttgtgaggattaaatgagatgattcgtctgaactgattaaaa

SEQ ID NO: 600405 - DNA, 120 bp, Artificial Sequence
  ENSG00000174562_11 (sequence is synthesized)
ggtgcgtgaaaggatggagctggatgcgaggcctcaaggaatcctatgctccagggctcttgggcggaggggacaagggccggaatttatggatctgctccaagtccactgtcttcccca

SEQ ID NO: 600406 - DNA, 120 bp, Artificial Sequence
  ENSG00000174562_12 (sequence is synthesized)
ataggtggggattgcgttgtttgaggtggataatgtgatagttagtttgagatggcatgggttggggttgagaatgggaatggtttggtttgattctgggtgggaaatacgtcagggttg

SEQ ID NO: 600407 - DNA, 120 bp, Artificial Sequence
  ENSG00000174562_13 (sequence is synthesized)
aattgggatgaggtagattttgtttggaatgcagaagacatgaagattgagattggattttgagatgggcatgggtttgatttgattttgaatggtgaggatgtgggctgagttggattt

SEQ ID NO: 600408 - DNA, 120 bp, Artificial Sequence
  ENSG00000174562_14 (sequence is synthesized)
aacttagtacagttgcactggagttgcatgggggtgagattggatataggttgggtgagttgtattgagctgtgttgaattggggttggggttggggttgggttggctctgtttgggata

SEQ ID NO: 600409 - DNA, 120 bp, Artificial Sequence
  ENSG00000174562_15 (sequence is synthesized)
aactgggctgtattgagttgagttgggttggggttccctgggatggggatggattgggtttggggtgagattgcaaatggtgattaggatgaggatgaatccaggaggtttcactcaacc

SEQ ID NO: 600410 - DNA, 120 bp, Artificial Sequence
  ENSG00000174562_16 (sequence is synthesized)
gggcagtgctgaggtcacagaaagaacctgacctgagccccatcttcaagacccccagatggagaaaagaacaggccagacctcagcaacccaggatggtgacaagttgctggaaggtga

SEQ ID NO: 600411 - DNA, 120 bp, Artificial Sequence
  ENSG00000174564_0 (sequence is synthesized)
agaacaattcaggcttcgctgcgactcagacctcagctccaacatatgcattctgaagaaagatggctgagatggacagaatgctttattttggaaagaaacaatgttctaggtcaaact

SEQ ID NO: 600412 - DNA, 120 bp, Artificial Sequence
  ENSG00000174564_1 (sequence is synthesized)
gagtctaccaaatgcagactttcacaatggttctagaagaaatctggacaagtcttttcatgtggtttttctacgcattgattccatgtttgctcacagatgaagtggccattctgcctg

SEQ ID NO: 600413 - DNA, 120 bp, Artificial Sequence
  ENSG00000174564_2 (sequence is synthesized)
cccctcagaacctctctgtactctcaaccaacatgaagcatctcttgatgtggagcccagtgatcgcgcctggagaaacagtgtactattctgtcgaataccagggggagtacgagagcc

SEQ ID NO: 600414 - DNA, 120 bp, Artificial Sequence
  ENSG00000174564_3 (sequence is synthesized)
tgtacacgagccacatctggatccccagcagctggtgctcactcactgaaggtcctgagtgtgatgtcactgatgacatcacggccactgtgccatacaaccttcgtgtcagggccacat

SEQ ID NO: 600415 - DNA, 120 bp, Artificial Sequence
  ENSG00000174564_4 (sequence is synthesized)
tgggctcacagacctcagcctggagcatcctgaagcatccctttaatagaaactcaaccatccttacccgacctgggatggagatcaccaaagatggcttccacctggttattgagctgg

SEQ ID NO: 600416 - DNA, 120 bp, Artificial Sequence
  ENSG00000174564_5 (sequence is synthesized)
aggacctggggccccagtttgagttccttgtggcctactggaggagggagcctggtgccgaggaacatgtcaaaatggtgaggagtgggggtattccagtgcacctagaaaccatggagc

SEQ ID NO: 600417 - DNA, 120 bp, Artificial Sequence
  ENSG00000174564_6 (sequence is synthesized)
caggggctgcatactgtgtgaaggcccagacattcgtgaaggccattgggaggtacagcgccttcagccagacagaatgtgtggaggtgcaaggagaggccattcccctggtactggccc

SEQ ID NO: 600418 - DNA, 120 bp, Artificial Sequence
  ENSG00000174564_7 (sequence is synthesized)
tgtttgcctttgttggcttcatgctgatccttgtggtcgtgccactgttcgtctggaaaatgggccggctgctccagtactcctgttgccccgtggtggtcctcccagacaccttgaaaa

SEQ ID NO: 600419 - DNA, 120 bp, Artificial Sequence
  ENSG00000174564_8 (sequence is synthesized)
caccccagaagttaatcagctgcagaagggaggaggtggatgcctgtgccacggctgtgatgtctcctgaggaactcctcagggcctggatctcataggtttgcggaagggcccaggtga

SEQ ID NO: 600420 - DNA, 120 bp, Artificial Sequence
  ENSG00000174564_9 (sequence is synthesized)
agccgagaacctggtctgcatgacatggaaaccatgaggggacaagttgtgtttctgttttccgccacggacaagggatgagagaagtaggaagagcctgttgtctacaagtctagaagc

SEQ ID NO: 600421 - DNA, 120 bp, Artificial Sequence
  ENSG00000174564_10 (sequence is synthesized)
aaccatcagaggcagggtggtttgtctaacagaacactgactgaggcttaggggatgtgacctctagactgggggctgccacttgctggctgagcaaccctgggaaaagtgacttcatcc

SEQ ID NO: 600422 - DNA, 120 bp, Artificial Sequence
  ENSG00000174564_11 (sequence is synthesized)
cttcggtcctaagttttctcatctgtaatgggggaattacctacacacctgctaaacacacacacacagagtctctctctatatatacacacgtacacataaatacacccagcacttgca

SEQ ID NO: 600423 - DNA, 120 bp, Artificial Sequence
  ENSG00000174564_12 (sequence is synthesized)
aggctagagggaaactggtgacactctacagtctgactgattcagtgtttctggagagcaggacataaatgtatgatgagaatgatcaaggactctacacactgggtggcttggagagcc

SEQ ID NO: 600424 - DNA, 120 bp, Artificial Sequence
  ENSG00000174564_13 (sequence is synthesized)
cactttcccagaataatccttgagagaaaaggaatcatgggagcaatggtgttgagttcacttcaagcccaatgccggtgcagaggggaatggcttagcgagctctacagtaggtgacct

SEQ ID NO: 600425 - DNA, 120 bp, Artificial Sequence
  ENSG00000174564_14 (sequence is synthesized)
ggaggaaggtcacagccacactgaaaatgggatgtgcatgaacacggaggatccatgaactactgtaaagtgttgacagtgtgtgcacactgcagacagcaggtgaaatgtatgtgtgca

SEQ ID NO: 600426 - DNA, 120 bp, Artificial Sequence
  ENSG00000174564_15 (sequence is synthesized)
atgcgacgagaatgcagaagtcagtaacatgtgcatgtttgttgtgctccttttttctgttggtaaagtacagaattcagcaaataaaaagggccaccctggccaaaagcggtctttaaa

SEQ ID NO: 600427 - DNA, 120 bp, Artificial Sequence
  ENSG00000174564_16 (sequence is synthesized)
aatctcagcttactgcaacctccgccagtgaggcccttcattagacactaatttgaagctatggcattcccccactatgagcccacctgtcagccaggctatctgccttgatcctagatg

SEQ ID NO: 600428 - DNA, 120 bp, Artificial Sequence
  ENSG00000174564_17 (sequence is synthesized)
gcagaaatggcattaaatgaaagaggacatgaaggggatttcctcattcgtgatagtgaatcttcggccactccctgctgatgcaacatctgggtttgggcagaaaggagggtgcttcgg

SEQ ID NO: 600429 - DNA, 120 bp, Artificial Sequence
  ENSG00000174567_0 (sequence is synthesized)
gtgaccatgtaccagctgcgtcctctgggccacgctccacttgcccgcttccacccggaaagccccccaggctgagtgcggcatgatctccatcaccgaatggcagaagattggtgtggg

SEQ ID NO: 600430 - DNA, 120 bp, Artificial Sequence
  ENSG00000174567_1 (sequence is synthesized)
gatcaccggtttcggcatcttcttcatcctctttggaacactcctgtactttgattccgtgctcctggcctttggaaacctgctgttcctgacgggcctgtccctcatcattggcctgag

SEQ ID NO: 600431 - DNA, 120 bp, Artificial Sequence
  ENSG00000174567_2 (sequence is synthesized)
gaagaccttttggttcttcttccaacggcacaaactcaagggaaccagcttcctcctggggggtgtggttatcgtgctcctacgctggcccctcctcggcatgttcctggaaacctacgg

SEQ ID NO: 600432 - DNA, 120 bp, Artificial Sequence
  ENSG00000174567_3 (sequence is synthesized)
tctgcaacatccccttcctgggtgcgctgttccggagacttcaaggcactagctcgatggtctgaaaaacagagatgagctccttgaacttggatcattggttgagggggctagagggag

SEQ ID NO: 600433 - DNA, 120 bp, Artificial Sequence
  ENSG00000174567_4 (sequence is synthesized)
aatgggaaccaccccctcagtcccctgcactgactcactccccgacatatccggacctccccaagtccagaaggaaggaatggagctgagcaactgacgtcaaatccccaagtcgactca

SEQ ID NO: 600434 - DNA, 120 bp, Artificial Sequence
  ENSG00000174567_5 (sequence is synthesized)
agaggctgccaggaagcagagatgcagaccccaaggagactgggctggggctggtatcacaccctcactctatatttatgggaggaaaagtgaagattaaattcccaagttgtgcgtgtg

SEQ ID NO: 600435 - DNA, 120 bp, Artificial Sequence
  ENSG00000174567_6 (sequence is synthesized)
gcctgcagccctgcgggcgtaccctggggagtgagggggagcacacggaggggagctggtaaaactgctgccccaggggcagtggcctctcccctgtctcccctcagaccccctagccca

SEQ ID NO: 600436 - DNA, 120 bp, Artificial Sequence
  ENSG00000174567_7 (sequence is synthesized)
ggtttggtgctttaggctcctcttccccccgcaccttctccatttgacaagagcccatgaggagaggggatccagacgcagttgtagctgagtgtggctgtagaggcaggtagctatgaa

SEQ ID NO: 600437 - DNA, 120 bp, Artificial Sequence
  ENSG00000174574_0 (sequence is synthesized)
gctggaggcgccattggagccggcttggctggcgagcccggctgaggagcctcttgggccgcacttaccgccgcgtccgctcccggtccctggcccctcagcggcatggcgtgcggggcg

SEQ ID NO: 600438 - DNA, 80 bp, Artificial Sequence
  ENSG00000174574_1 (sequence is synthesized)
acgctgaagcggcccatggagttcgaggcggcgctgctgagccccggctccccgaagcggcggcgctgcgcccctctgcc

SEQ ID NO: 600439 - DNA, 120 bp, Artificial Sequence
  ENSG00000174574_2 (sequence is synthesized)
ccgccgccgtttcagacgcagaccccaccgcagagtctgcagcagcccgccccgcccggcagcgagcggcgccttccaactccggagcaaatttttcagaacataaaacaagaatatagt

SEQ ID NO: 600440 - DNA, 120 bp, Artificial Sequence
  ENSG00000174574_3 (sequence is synthesized)
cgttatcagaggtggagacatttagaagttgttcttaatcagagtgaagcttgtgcttcggaaagtcaacctcactcctcagcactcacagcacctagctctccaggttcctcatggatg

SEQ ID NO: 600441 - DNA, 120 bp, Artificial Sequence
  ENSG00000174574_4 (sequence is synthesized)
aagaaggaccagcccacatttaccctccgacaagttggcataatatgtgagcgcctcttaaaagactatgaagataaaattcgggaggagtatgagcaaatcctcaataccaaactagca

SEQ ID NO: 600442 - DNA, 120 bp, Artificial Sequence
  ENSG00000174574_5 (sequence is synthesized)
gaacaatatgaatcttttgtgaaattcacacatgatcagattatgcgacggtatgggacaaggccaacaagctatgtgtcatgaagctttgtcacatatctgggtaccaggtttgacctc

SEQ ID NO: 600443 - DNA, 120 bp, Artificial Sequence
  ENSG00000174574_6 (sequence is synthesized)
aagagatggctgctgtacactttttgcaactggtttgatgtcacatttcagctccaactttgcatcctgagaacacttaaacgtttctgcaggtccattttatacaacttgaaagaccgt

SEQ ID NO: 600444 - DNA, 120 bp, Artificial Sequence
  ENSG00000174574_7 (sequence is synthesized)
aaaactttctggttgccacaagcatatctttcttttctgctcatccaataaacagctgtgccctactgtgatagattttccaaacaaaaatacctggagcagcagtttagcaaaatatgc

SEQ ID NO: 600445 - DNA, 120 bp, Artificial Sequence
  ENSG00000174574_8 (sequence is synthesized)
cttcagtggcattcaacaaatggagtttccccaagcacagttctgtaagaagtgcgtgtgagagtgtgtgtatatgtgtgtatgtgtattttaagttattatttgtattgtgcaaaaatt

SEQ ID NO: 600446 - DNA, 120 bp, Artificial Sequence
  ENSG00000174574_9 (sequence is synthesized)
tttttttgatcttggggattctggctgtgaatttggtgcacgacaattatggtaaaaaaacatttgcttggtctaaagaagatcattaatgttttgtgaccatacaagttgtaacagtgg

SEQ ID NO: 600447 - DNA, 120 bp, Artificial Sequence
  ENSG00000174574_10 (sequence is synthesized)
ggtattgttaaatacagggactgtttccaggcacagaatatgaatcgtaagttaggatggacattagatgtgattatgatgataaagcgaaggtctgcggtcctatatctacagacacgt

SEQ ID NO: 600448 - DNA, 120 bp, Artificial Sequence
  ENSG00000174574_11 (sequence is synthesized)
attgacacatggactctgcctgggcatgttaggttaattctttgactccaagccttaaaatactcacatggagtcagcgctcacctcattcacacaattatcatagagctccctggacac

SEQ ID NO: 600449 - DNA, 120 bp, Artificial Sequence
  ENSG00000174574_12 (sequence is synthesized)
tgaacctctaaagggaaaaggtctaccctggagccaggagcatcagggttggcttgggagcatgagaggtgagcccagggctaggcctgggccaggccccggcagcactgctacttggga

SEQ ID NO: 600450 - DNA, 79 bp, Artificial Sequence
  ENSG00000174574_13 (sequence is synthesized)
ctaggcctgggccaggccccggcagcactgctacttgggaggagccacttcacctttgtattagttattaaaaaatata

SEQ ID NO: 600451 - DNA, 86 bp, Artificial Sequence
  ENSG00000174574_14 (sequence is synthesized)
cgagacttcgtctcaaaaaaaaaaaaaaaacatagaatttggatcctttggtcgggttctcccaaattcttttgaggtgtccatgg

SEQ ID NO: 600452 - DNA, 120 bp, Artificial Sequence
  ENSG00000174574_15 (sequence is synthesized)
tttggtcgggttctcccaaattcttttgaggtgtccatggtcaactgcttcagctttgttttggcaaccccctgcccgaagtcgcatataggctgttcttcaccttgtttccaaggctga

SEQ ID NO: 600453 - DNA, 120 bp, Artificial Sequence
  ENSG00000174574_16 (sequence is synthesized)
ggaacagaaagtagcctctgttttgaggaggtggaagttaagtatacatttattttttactgtgacttgttcaggaccacattttacaaaatgccttgtttccttcattgtttctggaaa

SEQ ID NO: 600454 - DNA, 120 bp, Artificial Sequence
  ENSG00000174574_17 (sequence is synthesized)
ggaaagttctattaatattgttttactttgaatatagaatagtttttttaattagggcttattttgaaaaattctgagtttaattcaaatgtatgccaataccttccaaagtaaggtaat

SEQ ID NO: 600455 - DNA, 120 bp, Artificial Sequence
  ENSG00000174574_18 (sequence is synthesized)
attcagagacagttgttgtgatcagatggcttagagaaatttctggaatattcacattcgaagattccttattaatgaatgtctttgacttaaatctaaccaaaaactgcaacattattc

SEQ ID NO: 600456 - DNA, 120 bp, Artificial Sequence
  ENSG00000174574_19 (sequence is synthesized)
tttgtacattttcattatatagtgttaacaagcttagttgcaaacaaataaaatacttaagctatttgtttaccttgccttcttaatactgtgataatgtttattaattcaaataactta

SEQ ID NO: 600457 - DNA, 120 bp, Artificial Sequence
  ENSG00000174574_20 (sequence is synthesized)
tgtgagagctgctataaccatttccccagttcaacattgcattgaaaatttatggacctttaaaaaaaaaagcccaacagtgatttttttttaataattaaagaatgattttactttgta

SEQ ID NO: 600458 - DNA, 120 bp, Artificial Sequence
  ENSG00000174576_0 (sequence is synthesized)
gggcagcgcagccgagcggagcccaggagagcagagagcgagcctgagcgagagacggggaagcacggaggaggaagccgccggtgcgtcgggacgggagcgcaggtgctcgggcacccg

SEQ ID NO: 600459 - DNA, 120 bp, Artificial Sequence
  ENSG00000174576_1 (sequence is synthesized)
agctggagctccgcagccgccggtcatgtaccgctccaccaagggcgcctccaaggcgcgccgggaccagatcaacgccgagatccggaacctcaaggagctgctgccgctggccgaagc

SEQ ID NO: 600460 - DNA, 120 bp, Artificial Sequence
  ENSG00000174576_2 (sequence is synthesized)
ggacaaggtccggctgtcctacctgcacatcatgagcctcgcctgcatctacactcgcaagggcgtcttcttcgctggtggcactcctctggcgggccccacggggcttctctcagctca

SEQ ID NO: 600461 - DNA, 120 bp, Artificial Sequence
  ENSG00000174576_3 (sequence is synthesized)
agagcttgaggacatcgtagcggcactacccggctttctgcttgtgttcacagccgaggggaaattgctctacctgtctgagagtgtgagcgagcatctgggccactccatggtggacct

SEQ ID NO: 600462 - DNA, 120 bp, Artificial Sequence
  ENSG00000174576_4 (sequence is synthesized)
ggttgcccagggtgacagcatctacgacatcattgacccagctgaccacctcactgtgcgccagcaactcaccctgccctctgccctggacactgatcgcctcttccgctgccgcttcaa

SEQ ID NO: 600463 - DNA, 120 bp, Artificial Sequence
  ENSG00000174576_5 (sequence is synthesized)
cacctccaagtccctcaggcgccagagtgcaggcaacaaactcgtgcttattcgaggccgattccatgctcacccacctggagcctactgggcaggaaatcccgtgttcacagctttctg

SEQ ID NO: 600464 - DNA, 120 bp, Artificial Sequence
  ENSG00000174576_6 (sequence is synthesized)
tgcccctctggagccgagaccccgcccaggtcctggccctggccctggccctgcctcgctcttcctggccatgttccagagccgccatgctaaagacctggctctactggacatctccga

SEQ ID NO: 600465 - DNA, 120 bp, Artificial Sequence
  ENSG00000174576_7 (sequence is synthesized)
gagtgtcctaatctacctgggctttgagcgcagtgaactgctttgtaaatcatggtatggactgctgcaccccgaggacctggcccacgcttctgctcaacactaccgcctgttggctga

SEQ ID NO: 600466 - DNA, 120 bp, Artificial Sequence
  ENSG00000174576_8 (sequence is synthesized)
gagtggagatattcaggcagagatggtggtgaggctacaggccaagactggaggctgggcatggatttactgcctgttatactcagaaggtccagagggacccattactgccaataacta

SEQ ID NO: 600467 - DNA, 120 bp, Artificial Sequence
  ENSG00000174576_9 (sequence is synthesized)
cccaatcagtgacatggaagcctggagcctccgccagcagttgaactctgaagacacccaggcagcttatgtcctgggcactccgaccatgctgccctcattccctgaaaacattctttc

SEQ ID NO: 600468 - DNA, 120 bp, Artificial Sequence
  ENSG00000174576_10 (sequence is synthesized)
ccaggaagagtgctccagcactaacccactcttcaccgcagcactgggggctcccagaagcaccagcttccccagtgctcctgaactgagtgttgtctctgcatcagaagagcttccccg

SEQ ID NO: 600469 - DNA, 120 bp, Artificial Sequence
  ENSG00000174576_11 (sequence is synthesized)
accctccaaagaactggacttcagttacctgacattcccttctgggcctgagccttctctccaagcagaactaagcaaggatcttgtgtgcactccaccttacacgccccatcagccagg

SEQ ID NO: 600470 - DNA, 120 bp, Artificial Sequence
  ENSG00000174576_12 (sequence is synthesized)
aggctgtgccttcctcttcagcctccatgagcccttccagacccatttgcccaccccatccagcactcttcaagaacagctgactccaagcactgcgaccttctctgatcagttgacgcc

SEQ ID NO: 600471 - DNA, 120 bp, Artificial Sequence
  ENSG00000174576_13 (sequence is synthesized)
gcccactgcaaggccagttgactgaaacctcggtcagaagctatgaagaccagttgactccctgcacctccaccttcccagaccagctgcttcccagcacagccaccttcccagagcctc

SEQ ID NO: 600472 - DNA, 120 bp, Artificial Sequence
  ENSG00000174576_14 (sequence is synthesized)
tgggcagccctgcccatgaacagctgactcctcccagcacagcattccaagcacacctggacagccccagccaaaccttcccagagcaactgagccccaaccctaccaagacttactttg

SEQ ID NO: 600473 - DNA, 120 bp, Artificial Sequence
  ENSG00000174576_15 (sequence is synthesized)
cccaggagggatgcagttttctctatgagaagttgcccccaagtcctagcagccctggtaatggggactgcacgctcttggccctagcccagctccggggccccctctctgtggatgtcc

SEQ ID NO: 600474 - DNA, 120 bp, Artificial Sequence
  ENSG00000174576_16 (sequence is synthesized)
ccctggtgcccgaaggcctgctcacacctgaggcctctccagtcaagcagagtttcttccactactctgaaaaggagcagaatgagatagaccgtctcatccagcagattagccaattgg

SEQ ID NO: 600475 - DNA, 120 bp, Artificial Sequence
  ENSG00000174576_17 (sequence is synthesized)
ctcagggcatggacagacccttctcagctgaggctggcactggcggactagagccacttggaggactggagcccctggactccaacctgtccctgtcaggggcaggcccccctgtgctca

SEQ ID NO: 600476 - DNA, 120 bp, Artificial Sequence
  ENSG00000174576_18 (sequence is synthesized)
gcctggacctgaaaccctggaaatgccaggagctggacttcctggctgaccctgataacatgttcctggaagagacgcccgtggaagacatcttcatggatctctctaccccagatccca

SEQ ID NO: 600477 - DNA, 120 bp, Artificial Sequence
  ENSG00000174576_19 (sequence is synthesized)
gtgaggaatggggctcaggggatcctgaggcagagggcccaggaggggccccatcgccttgcaacaacctgtccccagaagaccacagcttcctggaggacctggccacatatgaaaccg

SEQ ID NO: 600478 - DNA, 120 bp, Artificial Sequence
  ENSG00000174576_20 (sequence is synthesized)
cctttgagacaggtgtctcagcattcccctatgatgggtttactgatgagttgcatcaactccagagccaagttcaagacagcttccatgaagatggaagtggaggggaaccaacgtttt

SEQ ID NO: 600479 - DNA, 120 bp, Artificial Sequence
  ENSG00000174576_21 (sequence is synthesized)
gaataagtctgtgacttaacgtcgtcaagtatggcatattgtcatcaagacgtggagccgctctccacccccccgggactgttggggggattctgagggccagagggggatatatatgat

SEQ ID NO: 600480 - DNA, 120 bp, Artificial Sequence
  ENSG00000174576_22 (sequence is synthesized)
tccccaggccctgcaggattttggggggggggaggtgggagggcaagggaggggagcttctttttaaaatcaagagacttcgagcgatcccagtttccatttcaatctgtattcactcgt

SEQ ID NO: 600481 - DNA, 120 bp, Artificial Sequence
  ENSG00000174576_23 (sequence is synthesized)
agtgagtttccttgaatgggatttcaagcggagaatgggggagtctcacttccccgccgccttgccccattggcctgggccagttctccactcctaggggccaagccacccctagccttg

SEQ ID NO: 600482 - DNA, 120 bp, Artificial Sequence
  ENSG00000174576_24 (sequence is synthesized)
gtgggggaaaggcagggcccacccgggccagcccgtgccctgaggggctcttgacacccacgtagaattctctacacaccagtaacgggatttcaattccgatggactctgccgccctgg

SEQ ID NO: 600483 - DNA, 120 bp, Artificial Sequence
  ENSG00000174576_25 (sequence is synthesized)
cggcccttcctgtgacttttgcgccccgcgcctggggtggggggtgcgaagagacgctacgttcctttccgatggaggaaggcagacctgccgtcacacgtgtgcttgcacgagtgcgtg

SEQ ID NO: 600484 - DNA, 120 bp, Artificial Sequence
  ENSG00000174576_26 (sequence is synthesized)
tacctggtgcgggactcacccggccgccagactgcctgggcctgcccagatggccacctcgtggtgctgcggtgactttgtagccaactttataataaagtccagtttgcctttttggta

SEQ ID NO: 600485 - DNA, 120 bp, Artificial Sequence
  ENSG00000174576_27 (sequence is synthesized)
ccaggggactagggggcagctgaggtcgtcatggaggagacacaaatcagggaactgctctggatatggacgtcggacccttaccagctgcctcttctctcctctccagtgacatggaag

SEQ ID NO: 600486 - DNA, 120 bp, Artificial Sequence
  ENSG00000174579_0 (sequence is synthesized)
gcgcatgcgtgcgagcgctagcgacgacggcggcgggggagtctcggggatgacagtggctttgcccgttggggtaacggtcgtcgtcgccgccagcagaggcctgaggcgccacacagc

SEQ ID NO: 600487 - DNA, 120 bp, Artificial Sequence
  ENSG00000174579_1 (sequence is synthesized)
ccgcgggatccattaaggccgcagcagcccgggccctaccgagctggagtggcgcgtggagtcggggtgagggcggcgaggcacgggggaggggcctgcggcggggccttgctgtgtgcg

SEQ ID NO: 600488 - DNA, 120 bp, Artificial Sequence
  ENSG00000174579_2 (sequence is synthesized)
ctgggcggcggcggggcctggcggtgtgagcgcttgccttccgcggccggggagtgctgagggcggcggcggccgtcgtgctcggcggaggagtcgtctgtgtgtgtggcgccgaaaaaa

SEQ ID NO: 600489 - DNA, 120 bp, Artificial Sequence
  ENSG00000174579_3 (sequence is synthesized)
tgtgtgtggcgccgaaaaaatggccgggcagtgagggggcggcgcttgagtctggtgaccccggagtgtgcgactgaggcgcgaggggcgccgccgcggcccggccgggcttgccccccg

SEQ ID NO: 600490 - DNA, 120 bp, Artificial Sequence
  ENSG00000174579_4 (sequence is synthesized)
gcggcccgcgcacttcctccccggccttcccctccgggttgaggactcccgcccgcctcgccacctcggggaactgcgggctgcaacccacggggcggagagccagggcgcagtctgggc

SEQ ID NO: 600491 - DNA, 120 bp, Artificial Sequence
  ENSG00000174579_5 (sequence is synthesized)
cccgcgtccgatatggagagcgcggcggcggcgtccgccagccgcaacatcaaccttcgtcgccgccgcggcgtcttgcactagatccgggaagccgctgcccgaccgtcgtccttgccg

SEQ ID NO: 600492 - DNA, 120 bp, Artificial Sequence
  ENSG00000174579_6 (sequence is synthesized)
tcgccgccgcctccgcgccctgtactgggatggagtaagaggccctgcagcccgggagaagcgtgccgcgcctcagacggggccggggcctgctcccgcgcctgccagctcgacttgagg

SEQ ID NO: 600493 - DNA, 120 bp, Artificial Sequence
  ENSG00000174579_7 (sequence is synthesized)
aggcgcctccgtgtccggagatggagctcgagtgcaggccgcctgccgagccgcggggctagactgagctccgagtcccgccccgagcgcccaagccgccgcgttctgcgctctgtggtc

SEQ ID NO: 600494 - DNA, 120 bp, Artificial Sequence
  ENSG00000174579_8 (sequence is synthesized)
gctccggacgaactcgaacgctggtttctctctcatatttttggtctggaagtctcagggacggaggggcgccaaggccccatgtgtgggaggattgtttcagctccacaaacttgcacg

SEQ ID NO: 600495 - DNA, 120 bp, Artificial Sequence
  ENSG00000174579_9 (sequence is synthesized)
gattttggttacttgtttggccaatggttcggctctgatttcttccgaattgttgcaaattcgccatcgttccctggctgcttactaagttggatccggaatttcttttcaaccgggagc

SEQ ID NO: 600496 - DNA, 120 bp, Artificial Sequence
  ENSG00000174579_10 (sequence is synthesized)
cattggtgtcgaagtgtctgcaatgaaccccgtgaatgctactgctctctacatttccgcgagccgcctagtgctcaactacgaccccggagaccccaaggcgtttactgagattaacag

SEQ ID NO: 600497 - DNA, 120 bp, Artificial Sequence
  ENSG00000174579_11 (sequence is synthesized)
gctcttgccttacttccgacagtccctttcgtgctgtgtttgcggacatttgctacaagatcctattgcacccaccaactccacctgccaacattatgtctgcaaaacttgtaaaggcaa

SEQ ID NO: 600498 - DNA, 120 bp, Artificial Sequence
  ENSG00000174579_12 (sequence is synthesized)
gaaaatgatgatgaaaccttcctgtagctggtgcaaagactatgagcagtttgaggaaaacaagcagttaagcatcctagtgaactgctacaaaaaactatgcgagtatataacacagac

SEQ ID NO: 600499 - DNA, 120 bp, Artificial Sequence
  ENSG00000174579_13 (sequence is synthesized)
tacactggcacgggatataatagaagcagttgactgttcttctgatattttggctttgcttaatgatggatcattgttttgtgaggagacagaaaaaccctcagattcatcctttacttt

SEQ ID NO: 600500 - DNA, 120 bp, Artificial Sequence
  ENSG00000174579_14 (sequence is synthesized)
gtgtttgacacattcccctttaccttcaacctcagaacccacaactgatcctcaagctagtttatctccaatgtctgaaagcaccctcagcattgctattggcagttctgttatcaatgg

SEQ ID NO: 600501 - DNA, 120 bp, Artificial Sequence
  ENSG00000174579_15 (sequence is synthesized)
tttgcctacttataatgggctttcaatagatagatttggtataaatattccttcacctgaacattcaaatacgattgacgtatgtaatactgttgacataaaaactgaggatctgtctga

SEQ ID NO: 600502 - DNA, 120 bp, Artificial Sequence
  ENSG00000174579_16 (sequence is synthesized)
cagcctgccacccgtttgtgacacagtagccactgacttatgttccacaggcattgatatctgcagtttcagtgaagatataaaacctggagactctctgttactgagtgttgaggaagt

SEQ ID NO: 600503 - DNA, 120 bp, Artificial Sequence
  ENSG00000174579_17 (sequence is synthesized)
actccgcagcttagaaactgtttcaaatacagaggtctgttgccctaatttgcagccgaacttggaagccactgtatccaatggaccttttctgcagctttcttcccagtctcttagcca

SEQ ID NO: 600504 - DNA, 120 bp, Artificial Sequence
  ENSG00000174579_18 (sequence is synthesized)
taatgtttttatgtccaccagtcctgcacttcatgggttatcatgtacagcagcaactccgaagatagcaaaattgaatagaaaacgatccagatcagagagtgacagtgagaaagttca

SEQ ID NO: 600505 - DNA, 120 bp, Artificial Sequence
  ENSG00000174579_19 (sequence is synthesized)
gccacttccaatttctaccattatccgaggcccaacactgggggcatctgctcctgtgacagtgaaacgggagagcaaaatttctcttcaacctatagcaactgttcccaatggaggcac

SEQ ID NO: 600506 - DNA, 120 bp, Artificial Sequence
  ENSG00000174579_20 (sequence is synthesized)
aacacctaaaatcagcaaaactgtacttttatctactaaaagcatgaaaaagagtcatgaacatggatccaagaaatctcactctaaaaccaagccaggtattcttaaaaaagacaaagc

SEQ ID NO: 600507 - DNA, 120 bp, Artificial Sequence
  ENSG00000174579_21 (sequence is synthesized)
attttatgccaggaagtcctaccaagactgtgtacaaaaaaccccaggaaaagaaagggtgtaaatgtgggcgtgctactcaaaatccaagtgttcttacatgccgaggccaacgctgcc

SEQ ID NO: 600508 - DNA, 120 bp, Artificial Sequence
  ENSG00000174579_22 (sequence is synthesized)
cttgctactctaaccgcaaagcctgcttagattgtatatgtcgtggctgccaaaactcctatatggccaatggggagaagaagctggaggcatttgccgtgccagaaaaggccttggagc

SEQ ID NO: 600509 - DNA, 120 bp, Artificial Sequence
  ENSG00000174579_23 (sequence is synthesized)
agaccaggctcactttgggcattaacgtgactagcattgctgtgcgtaacgctagtaccagcaccagtgtaataaatgtcacagggtccccagtaacgacgtttttagctgccagtacac

SEQ ID NO: 600510 - DNA, 120 bp, Artificial Sequence
  ENSG00000174579_24 (sequence is synthesized)
atgatgataaaagtttggatgaagctatagacatgagattcgactgttaaatcagtgggtcttttaaacctactcctggtagggaaatagctacagttttacggcagctatggttctgtt

SEQ ID NO: 600511 - DNA, 120 bp, Artificial Sequence
  ENSG00000174579_25 (sequence is synthesized)
ggtttaacttgccggagctcctgcatatagatcacttgtatcaagtgttttcattgctaagttatatgtgttagtgtcggggaaatagtttgcagataatggaggagtaaccctacaact

SEQ ID NO: 600512 - DNA, 120 bp, Artificial Sequence
  ENSG00000174579_26 (sequence is synthesized)
atatgtccttagttcttacagaacctcatagtttgagaacaaagctgatgcaactgatttatacaaaatgaactttggcaagaaaaataacattaacctcattgtttatggccatgcttt

SEQ ID NO: 600513 - DNA, 120 bp, Artificial Sequence
  ENSG00000174579_27 (sequence is synthesized)
gtgcataatcaaagtttatgattaaatgtaaggaagtggtatctagtcagtccataaagattgtgctaatttttttgtggaaaagtagccattagttcaggaaactcagtgctgccttca

SEQ ID NO: 600514 - DNA, 120 bp, Artificial Sequence
  ENSG00000174579_28 (sequence is synthesized)
gatgtcattgatgtttctcctgttggaaagctgatgtgtccagctcaacctttgtgctgacatcataccatttctgatcatgaaatattggctactggtgtatgtagcagttcttaaatc

SEQ ID NO: 600515 - DNA, 120 bp, Artificial Sequence
  ENSG00000174579_29 (sequence is synthesized)
agcagtattatgaaaaaaaattccccctcattagaatgtttaagaaatctttttaaaaagtaaaattctgtcagactacaaatgtttagctgttactcatttctagggaagaaattctaa

SEQ ID NO: 600516 - DNA, 120 bp, Artificial Sequence
  ENSG00000174579_30 (sequence is synthesized)
atccctccttcactttgagcagtgttctaattggataaatgaaggagagtagttttattctgaaggtaattaaatttagactatgtagtatgtgacagaatttttttaaaattataaaaa

SEQ ID NO: 600517 - DNA, 120 bp, Artificial Sequence
  ENSG00000174579_31 (sequence is synthesized)
gattttatttagtaattgggatttacttaaaataattttggaataatgctcccagacttgcccagatttgtgtattgtacttattgccactggccgccactttgacttattttctctaat

SEQ ID NO: 600518 - DNA, 120 bp, Artificial Sequence
  ENSG00000174579_32 (sequence is synthesized)
agtttatttgccacagtctttattttgaatatgctcctagtttttttttagggtgctgttcattatgaaggcttctttatagaggcctaataagaatgcctttttataaagcctgtgcat

SEQ ID NO: 600519 - DNA, 120 bp, Artificial Sequence
  ENSG00000174579_33 (sequence is synthesized)
ttaggtaggttgaagctaggaggattttctttagaatgctcttttgcatgtaaagcacaaagtatgtttcagtttaaatgcacttcttccggttaatttttatggggaagacaagtgagt

SEQ ID NO: 600520 - DNA, 120 bp, Artificial Sequence
  ENSG00000174579_34 (sequence is synthesized)
cacaaacattctgttgaagggaaatctagtcagttgcttgaaagagcacagcccaaataaaacaaggactgactaggtgtaatgaaataacctgtgatttaaaagaagagctgcagcttt

SEQ ID NO: 600521 - DNA, 120 bp, Artificial Sequence
  ENSG00000174579_35 (sequence is synthesized)
gacagtgcttatttaaagaaaaatactgctggaaaatttccaatttctactacgttcaccatctctagtaagatctgacatatgctgaagttatgttttgatttggcacacagcatgttc

SEQ ID NO: 600522 - DNA, 120 bp, Artificial Sequence
  ENSG00000174579_36 (sequence is synthesized)
aatgatggttactcgcctagtacaagacatggagaagaaacctttggacacagagcagatgacacctccttctgttttgtagtgtatcctggtgtcattttctgtgaatgtggtcaggta

SEQ ID NO: 600523 - DNA, 120 bp, Artificial Sequence
  ENSG00000174579_37 (sequence is synthesized)
tttctttttttttttttggtctcttttggtggggtgggggtgggctaaagccataggaagaaaaatgtgatgtatgtgtccagtatgtactattttgtttttgttttgcaagaagagttg

SEQ ID NO: 600524 - DNA, 120 bp, Artificial Sequence
  ENSG00000174579_38 (sequence is synthesized)
actattttgtttttgttttgcaagaagagttgaactatttttgataacaagagtaaatggtggaaaatgcttcttagttgtcttgtctttatttgctttccaagatttggaattttattt

SEQ ID NO: 600525 - DNA, 120 bp, Artificial Sequence
  ENSG00000174579_39 (sequence is synthesized)
aattcctttaagtgttagcagtgtcttatgaaacgtgtatttacctaacgtttgtaacagttttgtgttgaacccagatgccctgctatataaagttgtaaatctgttctttattcacta

SEQ ID NO: 600526 - DNA, 120 bp, Artificial Sequence
  ENSG00000174579_40 (sequence is synthesized)
atgatcactgcaaaaatgattagaaatgagattgtacacatggatgaggatatattttgcaaatcgaccaaactttcctaatattatgatcttaaaattcatagagtactttattgcttc

SEQ ID NO: 600527 - DNA, 120 bp, Artificial Sequence
  ENSG00000174579_41 (sequence is synthesized)
ccaagtttgataatcttgtgggtttttttttttttttgatgcatgggaggttggcaatatagacaaagtggaaatcattagtatgtgagggccttgattgttatgtaatattgccaatga

SEQ ID NO: 600528 - DNA, 120 bp, Artificial Sequence
  ENSG00000174579_42 (sequence is synthesized)
tgaattcaggttgtttttagcacaagtttctcttttttatgctggtattctcactgccacatttttggaaacctgtattacaccttaaatctatcaataaatgatagttttctaattcta

SEQ ID NO: 600529 - DNA, 120 bp, Artificial Sequence
  ENSG00000174579_43 (sequence is synthesized)
aaactggtgttacgtgggagtggtgggctaagctgatgaacccacagctggagaacccggcgcggaactttgccccaggttcctccacaaatgctttgacggtttgacggttaacagcga

SEQ ID NO: 600530 - DNA, 120 bp, Artificial Sequence
  ENSG00000174586_0 (sequence is synthesized)
attccacgcggctcgagcccgcgtgcgggcctctttcaggccgctcctagtggacgcagaggcgggccgaggacggtgccagcccccaggccccaagaggagctggtccccaggacagag

SEQ ID NO: 600531 - DNA, 120 bp, Artificial Sequence
  ENSG00000174586_1 (sequence is synthesized)
gagggagaggagcaagaggctcccctgggccccttccaggccccacctccaggtcacaggcgcgagatggagtccccaagagggtggaccctgcaggtggccccagaggaaggccaggtc

SEQ ID NO: 600532 - DNA, 120 bp, Artificial Sequence
  ENSG00000174586_2 (sequence is synthesized)
ctctgcaatgtgaagactgccacgaggggcctctctgagggggctgtgtctggaggctggggggcctgggaaaactccacggaggttccgagggaggcaggggacggccagcggcagcaa

SEQ ID NO: 600533 - DNA, 120 bp, Artificial Sequence
  ENSG00000174586_3 (sequence is synthesized)
gcggcggacgaacagggaggccccggcagggagctgggccccgcagacggtgggcgggacggggctgggcccaggagcgagcctgcagaccgggcgttgcgcccttcgcctctcccagag

SEQ ID NO: 600534 - DNA, 120 bp, Artificial Sequence
  ENSG00000174586_4 (sequence is synthesized)
cctctcccagaggagccgggctgccggtgcggggagtgcggcaaggcgttcagccagggctcttacttgctgcagcatcggcgcgtgcacacaggcgagaagccgtacacgtgccccgag

SEQ ID NO: 600535 - DNA, 120 bp, Artificial Sequence
  ENSG00000174586_5 (sequence is synthesized)
tgcggcaaggccttcgcctggagctccaacctcagccagcaccagcgcatccacagcggcgagaagccctacgcttgcagggagtgcggcaaggccttccgcgcgcactcgcagctcatc

SEQ ID NO: 600536 - DNA, 120 bp, Artificial Sequence
  ENSG00000174586_6 (sequence is synthesized)
caccaccaggagacacacagcggcctgaagcccttccgctgcccggactgcggcaagtccttcggccgaagcaccacgctggtgcagcaccgacgcacgcacacgggcgagaagccctac

SEQ ID NO: 600537 - DNA, 120 bp, Artificial Sequence
  ENSG00000174586_7 (sequence is synthesized)
gagtgcccggagtgcggcaaggccttcagctggaactccaatttcctggagcaccggcgcgtgcacacgggcgcgcggccgcacgcctgccgggactgtggcaaggccttcagccagagc

SEQ ID NO: 600538 - DNA, 120 bp, Artificial Sequence
  ENSG00000174586_8 (sequence is synthesized)
tccaacctggccgagcacctgaagatccacgcgggcgcacggccacacgcctgtcccgactgcggcaaggccttcgtgcgtgtggcggggctgcggcagcaccggcgcacgcacagcagc

SEQ ID NO: 600539 - DNA, 120 bp, Artificial Sequence
  ENSG00000174586_9 (sequence is synthesized)
gagaagcccttcccctgcgccgagtgcggaaaggctttccgcgagagctcgcagctcctgcagcaccagcgcacgcacactggtgagcggcccttcgagtgcgccgagtgcggccaggct

SEQ ID NO: 600540 - DNA, 120 bp, Artificial Sequence
  ENSG00000174586_10 (sequence is synthesized)
ttcgtcatgggctcctacctggcggagcaccggcgcgtgcacacgggcgagaagcctcatgcgtgcgcccagtgcggcaaggccttcagccagcgctccaacctactgagccaccggcgc

SEQ ID NO: 600541 - DNA, 120 bp, Artificial Sequence
  ENSG00000174586_11 (sequence is synthesized)
acgcactcgggcgccaagcccttcgcctgcgccgactgcggcaaggccttccgcggcagttccggcctggcgcaccaccggctttcgcacacgggagagcgacccttcgcctgcgcagaa

SEQ ID NO: 600542 - DNA, 120 bp, Artificial Sequence
  ENSG00000174586_12 (sequence is synthesized)
tgcggcaaggccttccgcggcagctccgagctgcgccagcaccagcgcctgcactctggcgagaggccgttcgtctgcgcccactgcagcaaggccttcgtgcgcaagtcggagctctta

SEQ ID NO: 600543 - DNA, 120 bp, Artificial Sequence
  ENSG00000174586_13 (sequence is synthesized)
agccaccggcgcacgcacacgggcgagaggccctacgcttgcggcgagtgcgggaagcctttcagccaccgttgcaacctcaacgagcaccagaagcggcacgggggccgcgctgcgccc

SEQ ID NO: 600544 - DNA, 120 bp, Artificial Sequence
  ENSG00000174586_14 (sequence is synthesized)
gggcgccctcctgctgggagtgcaggggcggccttgggtgtggagaaccctggctgcacagtccctttgacgatagtccaccggccacccaggcctgtctggggacatgtaggatgggct

SEQ ID NO: 600545 - DNA, 120 bp, Artificial Sequence
  ENSG00000174586_15 (sequence is synthesized)
cttaccccagggagggcggcaggctccacttcggcgagaggttcgtccatgcagaggtgggcaagaactggggtctccgacaggtgtggctatttctttgagttctctggcactgtcaaa

SEQ ID NO: 600546 - DNA, 120 bp, Artificial Sequence
  ENSG00000174586_16 (sequence is synthesized)
agcagccaacccaccccccagtccacatggtcaccactgctgctaccagctgctcagtgcagtggccactgtgtctcctaaggtgctcgcttcagtcagcacttcatctcaggcaaccac

SEQ ID NO: 600547 - DNA, 120 bp, Artificial Sequence
  ENSG00000174586_17 (sequence is synthesized)
aggtgacagttaaacatgatgaaaccgcatgctatggctttctagtgtctcatattctgttggcaagaagctcagcactgcattcctgaccgaggtcagaaccagatcaatctcagaatc

SEQ ID NO: 600548 - DNA, 89 bp, Artificial Sequence
  ENSG00000174586_18 (sequence is synthesized)
cattcctgaccgaggtcagaaccagatcaatctcagaatctcacctgtgtaggtctgtttcatgggacttttcttttttgggggagggg

SEQ ID NO: 600549 - DNA, 120 bp, Artificial Sequence
  ENSG00000174586_19 (sequence is synthesized)
tcccacctcagcctcccaagcagctgggatgacagacttgcgtcactacacctggctaattttaaaattttttgtaaggacagtgtctcaccatgttgcctaggcgggtctcaaaactcc

SEQ ID NO: 600550 - DNA, 83 bp, Artificial Sequence
  ENSG00000174586_20 (sequence is synthesized)
cagcctcccaaagcggaaccttctttataccaagtaccacaccagtcagagtcaagtcaggaaatagaaaccacactaggtat

SEQ ID NO: 600551 - DNA, 120 bp, Artificial Sequence
  ENSG00000174586_21 (sequence is synthesized)
agtcagagtcaagtcaggaaatagaaaccacactaggtatttcaaacagaggggatataagttagggactgattgtgcaggttttgcaaggctcagagagcaaaagtggatgttgcagaa

SEQ ID NO: 600552 - DNA, 120 bp, Artificial Sequence
  ENSG00000174586_22 (sequence is synthesized)
tctcagagctggatacttgcaggaagctgctaccacccttagggctggagaacccagggaagctaagaggagggtgcaacgaggctggtgttgggactgccaaaggaaacacagaatgac

SEQ ID NO: 600553 - DNA, 120 bp, Artificial Sequence
  ENSG00000174586_23 (sequence is synthesized)
agctccatctctgcagacctcagatttgaccaggcctctggctgcctgggcagcctcattgccaatgggctgaaaggttctgtcactgttcagtggtctgacttctgagttctgtgcaca

SEQ ID NO: 600554 - DNA, 120 bp, Artificial Sequence
  ENSG00000174586_24 (sequence is synthesized)
ccctgagctctgctcctctggcctggccaccagtccttgtctgagtgccccaggtctggttatgacttcaggcctcagcacctggttgtctcttctgcaaagaatgcattctcccccagt

SEQ ID NO: 600555 - DNA, 120 bp, Artificial Sequence
  ENSG00000174586_25 (sequence is synthesized)
ccacccagaacacacagcctccatccaggtactggctctgagcaggacagagagcatgcagcaggtgctcagcaatatggaaatgggaccaaacagagggagtctccacagctccccgtc

SEQ ID NO: 600556 - DNA, 120 bp, Artificial Sequence
  ENSG00000174586_26 (sequence is synthesized)
cctcacagcagaagccagagccgctgcagtgcccagctggtcttcatcacgtctatgagctctgcaatcgctctgcagtcgcctcaactcctggtctcctctgctccttctcactgcacc

SEQ ID NO: 600557 - DNA, 120 bp, Artificial Sequence
  ENSG00000174586_27 (sequence is synthesized)
cgcatctcccatgtttgcactggctgttccctctgcctggaatgctccttgcccagttatcccactgtcttctttgcatctggcacacagtagatgctcaataaatgcctgtggaatgaa

SEQ ID NO: 600558 - DNA, 120 bp, Artificial Sequence
  ENSG00000174586_28 (sequence is synthesized)
ctccagggatctgggctgcacagccaccccatgccttggaccacctggtctgacctgcacagaggcctggtgtggacattgcctgggtaacagccactgagatcctccagcctggacatg

SEQ ID NO: 600559 - DNA, 120 bp, Artificial Sequence
  ENSG00000174586_29 (sequence is synthesized)
gtttgggtcaggcggtgtcctccagccttcaggaatggagacgggtccatcgtgttcctcacaaactggagtctccaccttcttgacacttggggccccaccctgtgaagcaaggagagg

SEQ ID NO: 600560 - DNA, 120 bp, Artificial Sequence
  ENSG00000174599_0 (sequence is synthesized)
atgctcagctcagctcggccctcgcctttgatttattttttttctgggcggccgctgcgacccgggactgacttcgggatgggaagtggagcccccggagctgctaccgtggcggcggcg

SEQ ID NO: 600561 - DNA, 120 bp, Artificial Sequence
  ENSG00000174599_1 (sequence is synthesized)
ctgtgaggagcagccagggggaggcagctgcggctcgccggtgagtatccgggaagcgccaccatggggctccgtaagaagagcaccaagaacccccccgttctcagccaggaattcatc

SEQ ID NO: 600562 - DNA, 120 bp, Artificial Sequence
  ENSG00000174599_2 (sequence is synthesized)
ctgcagaatcatgcggacatcgtctcctgcgtggggatgttcttcctgctggggcttgtgttcgagggaacagcagaagcatccatcgtgtttctcactcttcagcacagtgttgctgtc

SEQ ID NO: 600563 - DNA, 120 bp, Artificial Sequence
  ENSG00000174599_3 (sequence is synthesized)
cctgcagcagaggaacaagccacgggctcaaagtccctctattattatggtgtcaaagatttggccacggttttcttctacatgctggtggcaatcattattcatgccacaattcaggaa

SEQ ID NO: 600564 - DNA, 120 bp, Artificial Sequence
  ENSG00000174599_4 (sequence is synthesized)
tatgtgttggataaaattaacaagagaatgcagttcaccaaagcgaaacaaaacaagtttaacgagtctggtcagtttagtgtgttctactttttttcttgtatttggggcacattcatt

SEQ ID NO: 600565 - DNA, 120 bp, Artificial Sequence
  ENSG00000174599_5 (sequence is synthesized)
ttaatctctgaaaactgcctgtcagacccaactcttatatggaaggctcgtccccatagcatgatgacatttcaaatgaagtttttctacatatcccagttggcttactggtttcatgct

SEQ ID NO: 600566 - DNA, 120 bp, Artificial Sequence
  ENSG00000174599_6 (sequence is synthesized)
tttcctgaactctacttccagaaaaccaaaaaacaagacatccctcgtcaacttgtctacattggtcttcacctcttccacattactggagcttatctcttgtacttgaatcatttggga

SEQ ID NO: 600567 - DNA, 120 bp, Artificial Sequence
  ENSG00000174599_7 (sequence is synthesized)
cttcttcttttggtactgcattattttgttgaattactttcccacatgtgcggcctgttttactttagtgatgaaaagtaccagaaaggcatatctctgtgggccattgtgtttatcttg

SEQ ID NO: 600568 - DNA, 120 bp, Artificial Sequence
  ENSG00000174599_8 (sequence is synthesized)
tggcagctaaaattgctgttctgtcgtccagttgcacgatccaagcctacgtaacatggaacttaattactctctggcttcagaggtgggtagaagattctaatattcaggcctcatgta

SEQ ID NO: 600569 - DNA, 120 bp, Artificial Sequence
  ENSG00000174599_9 (sequence is synthesized)
tgaaaaagaaacggtcgagatcttctaaaaaaagaacagaaaacggagtgggagtggaaacttcaaatagagtagactgtccgccaaagaggaaagagaaatcttcataatctttgcaag

SEQ ID NO: 600570 - DNA, 120 bp, Artificial Sequence
  ENSG00000174599_10 (sequence is synthesized)
cgcattgattaatgtctgcaaaggaatctgctctttgaggtttctttctgcactagagatttttctgtttttgaaaatagttcgtgctcttcggtttttgttattgaactgtttcatgta

SEQ ID NO: 600571 - DNA, 120 bp, Artificial Sequence
  ENSG00000174599_11 (sequence is synthesized)
ttttttaaagacatttgaggggaggaggattattatgaatgggaaaaaaagattttggttgagactaaattactcatcgtcaaaataatgtcaaaatagttttggggatcaccactatat

SEQ ID NO: 600572 - DNA, 120 bp, Artificial Sequence
  ENSG00000174599_12 (sequence is synthesized)
tttgttttgatttttaacctttcaacattttcctaatgatttgcagagataactgcacaattttgcatatcaatgatactggttcttactcccaccagtgtttcataatactaacaagat

SEQ ID NO: 600573 - DNA, 120 bp, Artificial Sequence
  ENSG00000174599_13 (sequence is synthesized)
ggtctctcctagcaagattatgtgtttaatgcttgctttggggtaaaataaaagtacgaaaaaggtggaagtcaaatcagtattctgtaattgttagaatttattttttaagaacttaca

SEQ ID NO: 600574 - DNA, 120 bp, Artificial Sequence
  ENSG00000174599_14 (sequence is synthesized)
actcagaaaagattgctagactcaccaaaataataaatgttctttattttacaggtagtgattattagtgcttcatccccatttaaaaaaacacagtactaatgggtaacacatatggag

SEQ ID NO: 600575 - DNA, 120 bp, Artificial Sequence
  ENSG00000174599_15 (sequence is synthesized)
gtttgctgccatatatattgcatcaaaatatcattaattaatataaaaatattaaaatcattcctgtccattccacttgtaaatgggaattcatgaaattaaatattactttaaaaagga

SEQ ID NO: 600576 - DNA, 120 bp, Artificial Sequence
  ENSG00000174600_0 (sequence is synthesized)
ccattcagggaagcagccccggcggccagcagggagctcaggacagagcaggctccctgggaagcctccgggtgataggggtgttccagctgcggcgctctgggggttcagagggggatc

SEQ ID NO: 600577 - DNA, 120 bp, Artificial Sequence
  ENSG00000174600_1 (sequence is synthesized)
ttgaatgaacaaatgaatgaactgctttctgggcaaacagccacagccagaggagcctgtgattggcagaaagaagccagggtgtgcaagtctccccaacagcctcgagtggcctgcagt

SEQ ID NO: 600578 - DNA, 120 bp, Artificial Sequence
  ENSG00000174600_2 (sequence is synthesized)
cacagggaaccctcaggaagaccttccgggcagagaccagagggaagcccatctctccagcagaactgcttggatttttctaccaggaggctcagggctctgcaacaatgatagcagaag

SEQ ID NO: 600579 - DNA, 120 bp, Artificial Sequence
  ENSG00000174600_3 (sequence is synthesized)
ctgatggcatctagagatctaggctgggactagcacagcatcacttctaccactttctgttggtcacagcaactcaccatgccagtgcagattcaaggggaggagaaatagagtccactt

SEQ ID NO: 600580 - DNA, 120 bp, Artificial Sequence
  ENSG00000174600_4 (sequence is synthesized)
cttgatgggaggcgtgacatagaatggaggatgaagattacaacacttccatcagttacggtgatgaataccctgattatttagactccattgtggttttggaggacttatcccccttgg

SEQ ID NO: 600581 - DNA, 120 bp, Artificial Sequence
  ENSG00000174600_5 (sequence is synthesized)
aagccagggtgaccaggatcttcctggtggtggtctacagcatcgtctgcttcctcgggattctgggcaatggtctggtgatcatcattgccaccttcaagatgaagaagacagtgaaca

SEQ ID NO: 600582 - DNA, 120 bp, Artificial Sequence
  ENSG00000174600_6 (sequence is synthesized)
tggtctggttcctcaacctggcagtggcagatttcctgttcaacgtcttcctcccaatccatatcacctatgccgccatggactaccactgggttttcgggacagccatgtgcaagatca

SEQ ID NO: 600583 - DNA, 120 bp, Artificial Sequence
  ENSG00000174600_7 (sequence is synthesized)
tctggtcccagaaccaccgcagcgttcgcctggcttacatggcctgcatggtcatctgggtcctggctttcttcttgagttccccatctctcgtcttccgggacacagccaacctgcatg

SEQ ID NO: 600584 - DNA, 120 bp, Artificial Sequence
  ENSG00000174600_8 (sequence is synthesized)
ggaaaatatcctgcttcaacaacttcagcctgtccacacctgggtcttcctcgtggcccactcactcccaaatggaccctgtggggtatagccggcacatggtggtgactgtcacccgct

SEQ ID NO: 600585 - DNA, 120 bp, Artificial Sequence
  ENSG00000174600_9 (sequence is synthesized)
tcctctgtggcttcctggtcccagtcctcatcatcacagcttgctacctcaccatcgtgtgcaaactgcagcgcaaccgcctggccaagaccaagaagcccttcaagattattgtgacca

SEQ ID NO: 600586 - DNA, 120 bp, Artificial Sequence
  ENSG00000174600_10 (sequence is synthesized)
tcatcattaccttcttcctctgctggtgcccctaccacacactcaacctcctagagctccaccacactgccatgcctggctctgtcttcagcctgggtttgcccctggccactgcccttg

SEQ ID NO: 600587 - DNA, 120 bp, Artificial Sequence
  ENSG00000174600_11 (sequence is synthesized)
ccattgccaacagctgcatgaaccccattctgtatgttttcatgggtcaggacttcaagaagttcaaggtggccctcttctctcgcctggtcaatgctctaagtgaagatacaggccact

SEQ ID NO: 600588 - DNA, 120 bp, Artificial Sequence
  ENSG00000174600_12 (sequence is synthesized)
cttcctaccccagccatagaagctttaccaagatgtcatcaatgaatgagaggacttctatgaatgagagggagaccggcatgctttgatcctcactgtggaacccctcaatggactctc

SEQ ID NO: 600589 - DNA, 120 bp, Artificial Sequence
  ENSG00000174600_13 (sequence is synthesized)
tcaacccagggacacccaaggatatgtcttctgaagatcaaggcaagaacctctttagcatccaccaattttcactgcattttgcatgggatgaacagtgttttatgctgggaatctagg

SEQ ID NO: 600590 - DNA, 120 bp, Artificial Sequence
  ENSG00000174600_14 (sequence is synthesized)
gcctggaacccctttcttctagtggacagaacatgctgtgttccatacagccttggactagcaatttatgcttcttgggaggccagccttgactgactcaaagcaaaaaaggaagaattc

SEQ ID NO: 600591 - DNA, 120 bp, Artificial Sequence
  ENSG00000174600_15 (sequence is synthesized)
attaagctgcctattgtgtgtgccccagaaatgacactctccaaggtccattcctggtgtgagcagtgagggggtcagagcaaacccagtgtgatgcagatcacacttggcccttgtata

SEQ ID NO: 600592 - DNA, 120 bp, Artificial Sequence
  ENSG00000174600_16 (sequence is synthesized)
tatattatcagtagctggccagaaaaccctaccttcaagtcactgctctgtgttaaagtatgtggaaatgcataggtgatctgggagaggaaggtgacatatcagcccatgaactccata

SEQ ID NO: 600593 - DNA, 120 bp, Artificial Sequence
  ENSG00000174600_17 (sequence is synthesized)
ggccatgaatttggctttcggatcagctaggaagacagagaactggtcctgagaggtcctgtgggctctttgcaagggcaagacaagtgagggatgcaacgaggacttgagatttggcaa

SEQ ID NO: 600594 - DNA, 120 bp, Artificial Sequence
  ENSG00000174600_18 (sequence is synthesized)
agaaatgagaaaggagaaaagaacctttaaaggatgcaggcatggagcagctcaccctagaacatcgcaggctgatggtgctttaggctggagctatttggggcgtcagggtggtgccag

SEQ ID NO: 600595 - DNA, 120 bp, Artificial Sequence
  ENSG00000174600_19 (sequence is synthesized)
cccctgatctcaccttgcccctcttacctgggggtggggttgtggcaggcatcttcaccagcagccctcaccccatcacagggatttttttctgcctttcctaatccactcagctctggc

SEQ ID NO: 600596 - DNA, 120 bp, Artificial Sequence
  ENSG00000174600_20 (sequence is synthesized)
tggaggtgcttagaataaaacactggtggtggggcttctcattctggttaatttcctcaacgcctttggagacaggtccaaaatgcagctttgggaagcaactccggagagtcccctggg

SEQ ID NO: 600597 - DNA, 120 bp, Artificial Sequence
  ENSG00000174600_21 (sequence is synthesized)
aagaagagtatgtccgaggactcagtcacttgagacagagtctggagctggactccttgaactgtgtttctgagctgcagacaccaaatacctcctggatacaggtgcctggcatggctt

SEQ ID NO: 600598 - DNA, 120 bp, Artificial Sequence
  ENSG00000174600_22 (sequence is synthesized)
tcatctaatactgacacgtccctgtggccacagagtgtcatagccccatttacaaatgacatagctgaggcccagatggggaaagtaacttgcccagcatcacacagctaatcagtggca

SEQ ID NO: 600599 - DNA, 120 bp, Artificial Sequence
  ENSG00000174600_23 (sequence is synthesized)
gagttaagatctgaacctggctccgtctggctccagaaactctgttcttctatttggaatttatctgtggagattattctagtatattgatagcctacatttatttagcactttttatat

SEQ ID NO: 600600 - DNA, 120 bp, Artificial Sequence
  ENSG00000174600_24 (sequence is synthesized)
tatgcactttacatatgttttctcatttaatcattacagcaaccctgagttaggtatggttataacttcccttttacataggaggaatctgaggcttagagaggttaagtaacttgccca

SEQ ID NO: 600601 - DNA, 120 bp, Artificial Sequence
  ENSG00000174600_25 (sequence is synthesized)
aaggtacccagctagtctctgccggagcttggatttgaacttcagtttgcctggctcaaatgaggctgcagagttgggaaggacttaaaaagtttggagatttttgccataaatattgat

SEQ ID NO: 600602 - DNA, 120 bp, Artificial Sequence
  ENSG00000174600_26 (sequence is synthesized)
ttttctgcaaatgaggatgaacatcttaatggcctttaagaaactttgcaaatagttttcaaaaatgatgcaacatggcagagaaaatgcacttggcttccagctccctcaacagccatt

SEQ ID NO: 600603 - DNA, 120 bp, Artificial Sequence
  ENSG00000174600_27 (sequence is synthesized)
aacagcctcctaccgtggctcccacctcctatgtctccagagatcaaggcaatggggagggaaagctggcaggaggcagtcccttgtgggcctgaggccctttggctcctaagtgtccac

SEQ ID NO: 600604 - DNA, 120 bp, Artificial Sequence
  ENSG00000174600_28 (sequence is synthesized)
attctgttctcttccaagtcccttcattgttaagctgattctccaacaagatgcaatgaacagatgcaatgtctaccccgcgctgggcgagttcccgaggccatgggctgtttggaatca

SEQ ID NO: 600605 - DNA, 120 bp, Artificial Sequence
  ENSG00000174600_29 (sequence is synthesized)
cacttcattaagagacaaactgttccttcccttattgtgccttaatgcttatgacaaggcagctctgaattgatcccaagctggagcctctgaatgctttaaagagtttgaatatagacg

SEQ ID NO: 600606 - DNA, 120 bp, Artificial Sequence
  ENSG00000174600_30 (sequence is synthesized)
gtttgagagcaaaaagggagctttaaatattgctcagtggcccccatctcccctcttcccacatttactgaggcacgagatgggatgggacctgtcccgggtcacagcagcagtcgtcag

SEQ ID NO: 600607 - DNA, 120 bp, Artificial Sequence
  ENSG00000174600_31 (sequence is synthesized)
cgccttggccctcctggcttgtaggatgctgcttttcctgggcttctggcagtccaggccaggatgggggagccaggaattcatgttgtcattggaaaagctgataaacaggagcacaat

SEQ ID NO: 600608 - DNA, 120 bp, Artificial Sequence
  ENSG00000174600_32 (sequence is synthesized)
tcaaaccggctgttttcctccttagagtctggcctccctctttctggctgctctgtgggtcttcctgttctgacttaggttcctgtcaagtacttaaatgcagccttaacatcccataca

SEQ ID NO: 600609 - DNA, 120 bp, Artificial Sequence
  ENSG00000174600_33 (sequence is synthesized)
gtcttgtccccacagcttcatgtgaacatctccatgggtcatgcatatatcgtccctgcagtgtgcaaagtgtgctcacctgcactgctgcacaggcaaccaacatacttagtgcccaga

SEQ ID NO: 600610 - DNA, 120 bp, Artificial Sequence
  ENSG00000174600_34 (sequence is synthesized)
gccttctctctgggcccaggactcagtgatggggccttacttagccctgcctcctgggtggggtgggggagctgagggatcgtgaggacaagaggtagagggaaaagaaaagaagatggt

SEQ ID NO: 600611 - DNA, 120 bp, Artificial Sequence
  ENSG00000174600_35 (sequence is synthesized)
gtttgaggataggggagggacaggagaggggacagaaaggtcccagagcatgatgatgaaggaaagggatctggcattcatgaagcacctacgatggttcaggcacaaacactgaaacct

SEQ ID NO: 600612 - DNA, 120 bp, Artificial Sequence
  ENSG00000174600_36 (sequence is synthesized)
caaattggccctggcagaaggggaccatcatagcaaggtggggggggggtgcagaaagtgagtttctgtttcaagaacagacttcactagttcagagttgcacagctagtgaggtatgga

SEQ ID NO: 600613 - DNA, 120 bp, Artificial Sequence
  ENSG00000174600_37 (sequence is synthesized)
gctgggctttgaatcaggtcagctgcctgaatgcccaacttcttcagcccttggaaggagagggtggggagaagaagaaggaaaagacaaggaagaaagaaagaagagagaaggggagag

SEQ ID NO: 600614 - DNA, 120 bp, Artificial Sequence
  ENSG00000174600_38 (sequence is synthesized)
gaatggaagtccaaagagtgggaggaatttgatttcagaaccatctccagctgacccttgagccagcaaggacagggagaagggaagagcaagaacacgaagggcctcaagcaccgggat

SEQ ID NO: 600615 - DNA, 120 bp, Artificial Sequence
  ENSG00000174600_39 (sequence is synthesized)
gcctttgccagccttagataattcccagagcgcacagagccctgcaggttcctgggtccttctccagagaagaggcacagagattctggcagcaaggttcagaaggggtgaggaaactgg

SEQ ID NO: 600616 - DNA, 120 bp, Artificial Sequence
  ENSG00000174600_40 (sequence is synthesized)
gcactgacaaagggaggggattggctcaaattcgaccccagagtcagctctggtggggttgggagcctggatgggtgggagaagatagaatccaatcgtgaaaaccataagggaccttca

SEQ ID NO: 600617 - DNA, 120 bp, Artificial Sequence
  ENSG00000174600_41 (sequence is synthesized)
aactcatcttgcccagatgtctcccatttcacagatgagggaactgaggttttgagagcttcccctgaggactctgcaaaacgaggtggtgtctggtttggatgaaagtggtcggtgatt

SEQ ID NO: 600618 - DNA, 120 bp, Artificial Sequence
  ENSG00000174600_42 (sequence is synthesized)
cctcaactcctgccctgcctccctctctcgttcctccctaacatgttatgctcttgttggggctgggatgccctaggcccaaggttaccaaatcctgggtttggaaaattgctgctgggg

SEQ ID NO: 600619 - DNA, 120 bp, Artificial Sequence
  ENSG00000174600_43 (sequence is synthesized)
gtggtatctaggaccagagaggaatctactatttctactgtgaaataattcagcagggggtcttcttacttcttccctttgaggacaaagtttctctcgaataaagagactgaagcaaga

SEQ ID NO: 600620 - DNA, 120 bp, Artificial Sequence
  ENSG00000174600_44 (sequence is synthesized)
aaagtggaacaggtgtctgtgattctgcccacggaaggagacatggaggaggaagaggctgaggggaagatggaagaaggagggaaggaaggagaaatctttgcttttgggtaatcaggt

SEQ ID NO: 600621 - DNA, 120 bp, Artificial Sequence
  ENSG00000174600_45 (sequence is synthesized)
gtatttctccaaagaaactctggaaggagacatgaggaactaacatagggaggtgtttctagctgtgtacagggactgattggctgaggactcacattggagagctgcagacaacataac

SEQ ID NO: 600622 - DNA, 120 bp, Artificial Sequence
  ENSG00000174606_0 (sequence is synthesized)
attcagggactctgactgcgcaagatggagtgtaggccggccggcgagactgcacctcccagcatgccttgcagccaggactggagtcggtacttaagagtgatggggttccctagatac

SEQ ID NO: 600623 - DNA, 120 bp, Artificial Sequence
  ENSG00000174606_1 (sequence is synthesized)
tttaggccgtcgcatcgattatagagattgaggtggaacccggggcctgggaactggacgcacgcggagggcgaagatggaagcctggcgctgtgtgaggaagggctacggccactgtgt

SEQ ID NO: 600624 - DNA, 120 bp, Artificial Sequence
  ENSG00000174606_2 (sequence is synthesized)
ggtgggaagaggccgataccccatgtttccccatcactcgaggagtctgggcagagactggactacaccgtgggagaatctgcaaaggtgttgctggaacagacatatttctagttgtat

SEQ ID NO: 600625 - DNA, 120 bp, Artificial Sequence
  ENSG00000174606_3 (sequence is synthesized)
gaggtggcctggacattactctcgagctccttacccatacttcagtagtaggcatttttcactaaattggagaccaccctgtttgtttgagtctagaactcagttccagtactgtaactg

SEQ ID NO: 600626 - DNA, 120 bp, Artificial Sequence
  ENSG00000174606_4 (sequence is synthesized)
gagacctgacaacctgagccagacatctttgattcatctctctagttacgtcatgaacgctgagggagatgagccttcatcaaaacgaagaaaacaccaaggtgtgataaagcggaattg

SEQ ID NO: 600627 - DNA, 120 bp, Artificial Sequence
  ENSG00000174606_5 (sequence is synthesized)
ggaatatatatgtagccatgataaagaaaaaacgaagatcctaggagacaaaaatgttgatcccaaatgtgaagacagtgagaacaagtttgacttttcagtgatgtcctataatatact

SEQ ID NO: 600628 - DNA, 120 bp, Artificial Sequence
  ENSG00000174606_6 (sequence is synthesized)
ttcacaagatttactggaagataactctcacctttatagacattgccggcggccagtattacactggagttttaggtttcccaatattctgaaagaaattaaacattttgatgcagacgt

SEQ ID NO: 600629 - DNA, 120 bp, Artificial Sequence
  ENSG00000174606_7 (sequence is synthesized)
actttgtttgcaagaagttcaagaagatcattatggagcagagatcaggccaagtttggaatcactgggttatcactgtgaatataagatgcggacaggaaggaaacctgatggctgtgc

SEQ ID NO: 600630 - DNA, 120 bp, Artificial Sequence
  ENSG00000174606_8 (sequence is synthesized)
tatttgcttcaaacattccaaattttcactcttgtcagtgaacccagtggaattcttccgccctgatatttctctgttggacagagacaatgttggattagttttactcttacagcccaa

SEQ ID NO: 600631 - DNA, 120 bp, Artificial Sequence
  ENSG00000174606_9 (sequence is synthesized)
aattccatatgctgcctgccctgcaatctgcgtagcaaatacgcatctgttgtataatccaaggcgaggtgatattaagctgacgcaattggcaatgctactggcagagatttccagtgt

SEQ ID NO: 600632 - DNA, 120 bp, Artificial Sequence
  ENSG00000174606_10 (sequence is synthesized)
tgcccaccagaaagatggcagcttctgccctattgttatgtgtggtgactttaattctgttcctggttctccactatatagtttcataaaggaaggaaaattgaattatgaaggacttcc

SEQ ID NO: 600633 - DNA, 120 bp, Artificial Sequence
  ENSG00000174606_11 (sequence is synthesized)
cataggaaaggtatctggccaggaacagtcttcacggggacaaagaattttatctattccaatttggcccccaaacctaggtatctcacagaactgtgtgtatgaggtacagcaggtacc

SEQ ID NO: 600634 - DNA, 120 bp, Artificial Sequence
  ENSG00000174606_12 (sequence is synthesized)
aaaagtagaaaagacagacagtgatctgacacaaacacagctgaagcaaacagaggtcctagtgacagctgaaaaattgtcttcaaatttacagcaccatttcagtttgtcatctgttta

SEQ ID NO: 600635 - DNA, 120 bp, Artificial Sequence
  ENSG00000174606_13 (sequence is synthesized)
ttcacattactttcctgacactggaattccagaagtgaccacctgtcattcccgaagtgccataactgtggattatattttctactctgcagaaaaggaagatgttgctgggcacccagg

SEQ ID NO: 600636 - DNA, 120 bp, Artificial Sequence
  ENSG00000174606_14 (sequence is synthesized)
agctgaagttgctttggttggtggcttgaaacttctagctagactgtcacttcttacagaacaagacttatggactgttaatggacttccaaacgaaaataactcttcagatcatctgcc

SEQ ID NO: 600637 - DNA, 120 bp, Artificial Sequence
  ENSG00000174606_15 (sequence is synthesized)
tttattggcaaagttcagacttgagctctgactctctttgatcacatactaattttctttccaatttgtattgtttttcaaagaatgtaaagttcttaagtgtatgcatgttgtttattt

SEQ ID NO: 600638 - DNA, 120 bp, Artificial Sequence
  ENSG00000174606_16 (sequence is synthesized)
ttgcactgtggagattctgaagcggttatgttagatgctttgaaactccatatcagaagaaataactttataacaattttttttaataatgaaaaatattttcgtgacaagtgagctcta

SEQ ID NO: 600639 - DNA, 120 bp, Artificial Sequence
  ENSG00000174606_17 (sequence is synthesized)
aattctctttattgtaaaagagatgtaaaggttttatattctaaatcctagtaaaattgacagtgatttttaaatataatgcatcttcctttgtctgcttagtaaaaaatttcatttcat

SEQ ID NO: 600640 - DNA, 120 bp, Artificial Sequence
  ENSG00000174606_18 (sequence is synthesized)
aattttggcaagctctgtagtggatccaaagtatctttgagttcttgcaaactacaagttgtttcctttccagaaggcttgatttcattaggagacccctctattgagttctaaatagtt

SEQ ID NO: 600641 - DNA, 120 bp, Artificial Sequence
  ENSG00000174606_19 (sequence is synthesized)
agccttgggtcattcacaggtatccaaccagccattgtttagtttgtttttgaaggggtttgataatgctttttaagttgtacagaatgcttaatccatcttattactgtcctgagccat

SEQ ID NO: 600642 - DNA, 120 bp, Artificial Sequence
  ENSG00000174606_20 (sequence is synthesized)
gtaatatgcctgcatcgtgttggggaaatgtttgggaaatataagccagcataacgtgtaaagctcactctttcaccctggaacagacaagaggtgggcttaatagaggcagagactggg

SEQ ID NO: 600643 - DNA, 69 bp, Artificial Sequence
  ENSG00000174606_21 (sequence is synthesized)
gaacagacaagaggtgggcttaatagaggcagagactggggatatacctttgtttccctagcattttta

SEQ ID NO: 600644 - DNA, 90 bp, Artificial Sequence
  ENSG00000174606_22 (sequence is synthesized)
gatccgcccacctcagctcttgcacatggcagcattttttaaaaattcagttttaagatctctggtttaggggagagattttattttact

SEQ ID NO: 600645 - DNA, 120 bp, Artificial Sequence
  ENSG00000174606_23 (sequence is synthesized)
ttttaagatctctggtttaggggagagattttattttactgaaccagttctatagaaatttattttattaggaaatttgtctttggaacaaagtggcagctataaaattatttttgttaa

SEQ ID NO: 600646 - DNA, 120 bp, Artificial Sequence
  ENSG00000174606_24 (sequence is synthesized)
gcctcagaaatatgaggaagcctgtaaaactctagtggggagatattaacttggagacctaatgctctgtaaatagtcatttaaactgttggttttagtggttttgtttctaaaatgttt

SEQ ID NO: 600647 - DNA, 120 bp, Artificial Sequence
  ENSG00000174606_25 (sequence is synthesized)
tcttttaccgtgatgcaccagtatgagatggtgctgacactttctatgaagtggttatgagcaggtttaataaatcctctatacaagtgtttgaatcaattttaaaacataaaaagtgga

SEQ ID NO: 600648 - DNA, 120 bp, Artificial Sequence
  ENSG00000174606_26 (sequence is synthesized)
aatttccttttttgtagacagtaggaacaaggaattatatgcatttttactaagtagtaattttacactgaattgtaaatgtttttacagtgagttttattaatagaatgcttcacctta

SEQ ID NO: 600649 - DNA, 120 bp, Artificial Sequence
  ENSG00000174606_27 (sequence is synthesized)
aattggaaaacaataatagtcttggactaagtctttgtactaaagcatttgctataattatttttaaaaaaacaaacagatgaaaacctcagagaaggcatgtggattataagatttgtc

SEQ ID NO: 600650 - DNA, 120 bp, Artificial Sequence
  ENSG00000174606_28 (sequence is synthesized)
tgtctagtaaaaattgtaattgaatatgtttaaatatttaatttctcattttggggggtttttatttttttattttttagatggtgtctcacgctatcgcccaggctggagtgcagtggc

SEQ ID NO: 600651 - DNA, 120 bp, Artificial Sequence
  ENSG00000174606_29 (sequence is synthesized)
ggggggattttaattacagtattaattatagttctaggatttcccacattttatagtagtagtttgcaggatattatgtgccctaattagcagatatagacattatcaaattataatgat

SEQ ID NO: 600652 - DNA, 120 bp, Artificial Sequence
  ENSG00000174606_30 (sequence is synthesized)
agtataattatccctttttaatattggggaaagaaaaatgaaaattcattagttaattactgctttgtgttgtgtgaatttattaacaaataacattattacatataggtcattgttaac

SEQ ID NO: 600653 - DNA, 120 bp, Artificial Sequence
  ENSG00000174606_31 (sequence is synthesized)
aaacaaacatccctgaaaacctctgtgaaaatttaattttttatatcctgattaatatattgtgactttaggcccatttttcatgtgcttcactttgatagagttaatccataaaattgc

SEQ ID NO: 600654 - DNA, 120 bp, Artificial Sequence
  ENSG00000174606_32 (sequence is synthesized)
tctttactttagcttatcaaatgaagtattattttgtggactggaggccaaaaagtcaatgtgagcttctcacaggtttttaaagctccactaaaaataattatccacttgtctttactt

SEQ ID NO: 600655 - DNA, 120 bp, Artificial Sequence
  ENSG00000174606_33 (sequence is synthesized)
ttgttgaccagaatagttggtaactctgccagagcctgtacttacctgccaaaaacaattaaatctggttaatgcctgaaaccaaatctctcagtctcaagtgttatactatccaagttt

SEQ ID NO: 600656 - DNA, 120 bp, Artificial Sequence
  ENSG00000174606_34 (sequence is synthesized)
taaatggaaaggtaaactgtggagtaatgaaattttggttttactgtaccttttgctatcaagataatattcatgtttgaaatcttgtctttatttggaatttagttactgtctgctttt

SEQ ID NO: 600657 - DNA, 120 bp, Artificial Sequence
  ENSG00000174606_35 (sequence is synthesized)
aacctttgctttcctaaagaaagtttgagatccagagagttcaagggattggggaaagagaggcgtcaagtcatttgcactttgtacctgtaagttaggtaataaactattatactcgta

SEQ ID NO: 600658 - DNA, 120 bp, Artificial Sequence
  ENSG00000174606_36 (sequence is synthesized)
gagggtctgggcgatggtgcatccgggacgagcctccagagaccaagcgggataggtaaacccgccgcgcagctggcgggacgctgggccaacgaggtctggggtcttggcgcggagttc

SEQ ID NO: 600659 - DNA, 120 bp, Artificial Sequence
  ENSG00000174606_37 (sequence is synthesized)
atgggccgccggccaggcttgtgccagtggctttggatccctggcctgcttcccccaacccagcctccagaccagcgctggcctgctccacacactccgcagcaccgtcccgggaaccga

SEQ ID NO: 600660 - DNA, 120 bp, Artificial Sequence
  ENSG00000174606_38 (sequence is synthesized)
cctaggtgttgtgaataaggaaaatgctcttcgttaagccatatttgtgacttccgatatttcactaatacttttcaatcaagaaaacagcattgctaacttgcctatcactttaaagtg

SEQ ID NO: 600661 - DNA, 120 bp, Artificial Sequence
  ENSG00000174606_39 (sequence is synthesized)
gtatttgaaggatttgtgtgatacaattatgactttgtaattaggcaccctaaaaacctgatcaggcctattgcttactttctttgattcatctgtcttctctgctgtgatcaccttgtt

SEQ ID NO: 600662 - DNA, 73 bp, Artificial Sequence
  ENSG00000174606_40 (sequence is synthesized)
tcaagaagatcattatggagcagagatcaggccaagtttggaatcactgggtacaatgcaacttttctggagt

SEQ ID NO: 600663 - DNA, 120 bp, Artificial Sequence
  ENSG00000174606_41 (sequence is synthesized)
gggctcaagtaatcctctcatttcggcttcctgagtagctgggactagagatgtgtgccaccatgcccggccaattatttaattttttttatagagacaaggcaatgtaacttttagcca

SEQ ID NO: 600664 - DNA, 120 bp, Artificial Sequence
  ENSG00000174606_42 (sequence is synthesized)
aatttacttttgaaaattcatgtgtcattaaagtataacttgctgacaaagatgtgtggcatattttggctaaaaatcttaattttaaaaacttaatttcaaagaggaaaagattgaggt

SEQ ID NO: 600665 - DNA, 120 bp, Artificial Sequence
  ENSG00000174606_43 (sequence is synthesized)
actcactggaaacttttgtgttggtgtataattttaattcaaacagaaagatgtgtaagaatatcttagtagctccctttcctaggagttgttctgtccacctgtagacctataagcttc

SEQ ID NO: 600666 - DNA, 120 bp, Artificial Sequence
  ENSG00000174606_44 (sequence is synthesized)
tgagctccaggagaccattttgtctcgttcatcattataataccagtgcctgccagtgtctacctaatggatagatgccaaaaacctgtttgataaataaacactcctagaaacaagtta

SEQ ID NO: 600667 - DNA, 120 bp, Artificial Sequence
  ENSG00000174606_45 (sequence is synthesized)
ttttttcatccctgctaacacggcatccattctgcagcctatggaatcaaggagtaattttgtacctacaggtctccttatttaagaaatacatttcataggctatagctgccatagaag

SEQ ID NO: 600668 - DNA, 120 bp, Artificial Sequence
  ENSG00000174606_46 (sequence is synthesized)
tgatttctctgatggatctggggaaagtaaattgcaaacctgcaaaggattcagcatcctaaatgctattcagaacattcgtgattcatgggaggaggtcaaaatatcaccattaaaaag

SEQ ID NO: 600669 - DNA, 120 bp, Artificial Sequence
  ENSG00000174606_47 (sequence is synthesized)
atgactttgaggggttcaagacttcaggggaggaagtaactgtagatgtggtggaaatagcaagagaactagaagtggagcctgaagaattaactgaattgtttcaatctcatgataaaa

SEQ ID NO: 600670 - DNA, 120 bp, Artificial Sequence
  ENSG00000174606_48 (sequence is synthesized)
attaactgaattgtttcaatctcatgataaaacttaaatagatgaggagttgcttcttatagatgagcagagtattttcttgagatgcattctattcctggtgaagatgctgtgaacatt

SEQ ID NO: 600671 - DNA, 120 bp, Artificial Sequence
  ENSG00000174606_49 (sequence is synthesized)
gctgaaattacaacaaaggattttaaatgttacataaatttaattgataaaacattggaagggtttccaattttgaaaaaaagttccgtggataaagtgctgtcaaatagcatcagatgc

SEQ ID NO: 600672 - DNA, 87 bp, Artificial Sequence
  ENSG00000174606_50 (sequence is synthesized)
aagttccgtggataaagtgctgtcaaatagcatcagatgctacagaaaaatcttttatgaaaggaagcatcaatggctgcagcaaat

SEQ ID NO: 600673 - DNA, 120 bp, Artificial Sequence
  ENSG00000174606_51 (sequence is synthesized)
gcagtcattaatatctaggcaagatcctccacctgtaaaaagatgatgactcactgaaggctgagatgattgttaggatattttaacaatgaagtatttttaaattaaggtatgtatttt

SEQ ID NO: 600674 - DNA, 120 bp, Artificial Sequence
  ENSG00000174606_52 (sequence is synthesized)
cttaggcataatgctattgcacacttagtaaactacagtatagtataaacgcaacttacatgcactgggaaactgaaaaaattatgtgacttgctttattgagatactcactttattgtg

SEQ ID NO: 600675 - DNA, 120 bp, Artificial Sequence
  ENSG00000174606_53 (sequence is synthesized)
agttcaaagcgatagatgatttgtatgtccaaattaaagaaaagcatgtatgggaaaaagattgtcatttttatgtaaatgataagtgctttctgaattgtatttaaagaaaagaagatt

SEQ ID NO: 600676 - DNA, 120 bp, Artificial Sequence
  ENSG00000174606_54 (sequence is synthesized)
ttataagtccaaagaatcacttaatacaatgaataaagggtaataatttaccacttttggattaccttttatttaagacataaatttttcaactcataagctatttaaaatcttttcact

SEQ ID NO: 600677 - DNA, 120 bp, Artificial Sequence
  ENSG00000174606_55 (sequence is synthesized)
gaattgtttgcatttttctatttttcctaattctggaggccatcgaaatatatagattccagaatgaaacatgtaactaggcatctttctaacctagataagtcttaaatattgtttcta

SEQ ID NO: 600678 - DNA, 120 bp, Artificial Sequence
  ENSG00000174607_0 (sequence is synthesized)
agagagccctccttagccaacacgctaactccgaagcctcccttacgcccccgaaccaccgaaggcggcgacacctgattcagcgcacaaacacaggtcccttctgtcccggatacaatt

SEQ ID NO: 600679 - DNA, 120 bp, Artificial Sequence
  ENSG00000174607_1 (sequence is synthesized)
acgcggcagacacacactcaaactcgcgcggggcagccaagagacgagctatgaagtcttacactccatatttcattctcctgtggagtgctgttgggatagcgaaggctgccaaaatca

SEQ ID NO: 600680 - DNA, 120 bp, Artificial Sequence
  ENSG00000174607_2 (sequence is synthesized)
tcatcgtgccgccaattatgtttgaaagccatatgtacattttcaagacgctagcctcagccttgcacgagagaggccaccatacagtgttcctcctctctgaaggcagagacatcgccc

SEQ ID NO: 600681 - DNA, 120 bp, Artificial Sequence
  ENSG00000174607_3 (sequence is synthesized)
catctaatcattacagcctccagcgctacccagggatctttaacagtaccacctcagatgctttcctacagtccaagatgcggaatattttctctgggagattgacagcaatcgaactgt

SEQ ID NO: 600682 - DNA, 120 bp, Artificial Sequence
  ENSG00000174607_4 (sequence is synthesized)
ttgacatactggatcactatactaagaactgtgacctgatggttggcaaccatgccctgatccagggtctgaagaaagaaaaatttgacctgctgctggtggaccctaatgatatgtgtg

SEQ ID NO: 600683 - DNA, 120 bp, Artificial Sequence
  ENSG00000174607_5 (sequence is synthesized)
gatttgtgatagctcatcttttaggggttaaatatgctgtattttcaactggcctttggtatcctgctgaagtgggtgctcctgctccattagcatacgtcccagagtttaactcactcc

SEQ ID NO: 600684 - DNA, 120 bp, Artificial Sequence
  ENSG00000174607_6 (sequence is synthesized)
tcacagaccgcatgaacttgctgcaaaggatgaaaaataccggtgtttacctcatttccagattaggggtcagctttctggttcttcccaaatatgaaaggataatgcagaagtacaacc

SEQ ID NO: 600685 - DNA, 120 bp, Artificial Sequence
  ENSG00000174607_7 (sequence is synthesized)
tgctgccagagaagtccatgtatgatttggttcatgggtccagcctgtggatgctgtgtactgacgtagcactggaattcccaagacccactctgcctaatgttgtttatgtaggaggaa

SEQ ID NO: 600686 - DNA, 120 bp, Artificial Sequence
  ENSG00000174607_8 (sequence is synthesized)
tcctaaccaaaccagccagcccactaccagaagatctccaaagatgggtaaatggtgctaatgaacatggctttgtcttggtgtcttttggagctggtgtcaagtatctgtcagaagaca

SEQ ID NO: 600687 - DNA, 120 bp, Artificial Sequence
  ENSG00000174607_9 (sequence is synthesized)
ttgctaacaaactggcaggagctctggggagattgcctcaaaaagtgatttggaggttttctggacccaaaccaaagaatctaggaaacaacactaaactcatagaatggttaccacaaa

SEQ ID NO: 600688 - DNA, 120 bp, Artificial Sequence
  ENSG00000174607_10 (sequence is synthesized)
atgacctgcttgggcattcaaagattaaagccttcctgagccatggtggtttgaacagtatttttgaaactatatatcatggtgtgcctgtagtgggaattccactctttggagaccatt

SEQ ID NO: 600689 - DNA, 120 bp, Artificial Sequence
  ENSG00000174607_11 (sequence is synthesized)
atgatactatgaccagagtacaggcaaaaggcatggggatattgctagaatggaagacagttactgaaaaagagctctatgaagcactagtgaaggttatcaataatcccagctaccgtc

SEQ ID NO: 600690 - DNA, 120 bp, Artificial Sequence
  ENSG00000174607_12 (sequence is synthesized)
agagggctcagaagctttcggaaattcacaaggatcaacctggtcaccctgtcaatcgaactatctattggatagattatattattcgtcacaatggagcccatcacctacgtgccgctg

SEQ ID NO: 600691 - DNA, 120 bp, Artificial Sequence
  ENSG00000174607_13 (sequence is synthesized)
tccatcagatctccttttgtcagtattttttactggatattgcctttgtgcttttgcttggtgctgccttgttatactttctcttgtcttgggtgacaaaatttatctacagaaaaatca

SEQ ID NO: 600692 - DNA, 120 bp, Artificial Sequence
  ENSG00000174607_14 (sequence is synthesized)
aaagtctgtggtctagaaataagcatagcacagttaatggacattaccacaatggaatcctcaatggcaagtacaaaagaaatggccatattaaacatgaaaagaaagtgaaatgagcca

SEQ ID NO: 600693 - DNA, 120 bp, Artificial Sequence
  ENSG00000174607_15 (sequence is synthesized)
tagaaataaattggttcactcattgaatttttattgctattatttagtctaacagctactaaaagtaaaacatcagtaaacaattctaacatgcccttatgagatctactaatgaaattc

SEQ ID NO: 600694 - DNA, 120 bp, Artificial Sequence
  ENSG00000174607_16 (sequence is synthesized)
tgtggaattaagatggctgtaaaaagcacaaacctaaaatgcagaaatgtattttattcaaatactgatgtagagagttttggcactgaaccttttagaagccttaattatttaaatcaa

SEQ ID NO: 600695 - DNA, 120 bp, Artificial Sequence
  ENSG00000174607_17 (sequence is synthesized)
tatttaaatcaattcagtgactgtgtcagaccttagttttaaatcttgatatgtgcgtgtcccggatcaggaatggtttcatttttcttaataatgtgtgtgtgtgtatgtgtgtgtgtg

SEQ ID NO: 600696 - DNA, 120 bp, Artificial Sequence
  ENSG00000174607_18 (sequence is synthesized)
tgtgtgtgtgtgtgtgtgtcctaattaagagaatttttactggctgcttgttacatttgttgagggtacaacacactcaagaataaagtaaaaggatagtcaggatccagatgtttcttt

SEQ ID NO: 600697 - DNA, 120 bp, Artificial Sequence
  ENSG00000174607_19 (sequence is synthesized)
tctagcatttaatgtgtgtgaactcagaacactaccatgaaagaacacttccccccaaaactggatgcagaggaagaaaaaaaaaaaagaaatggcacagttttttgtattttttttttt

SEQ ID NO: 600698 - DNA, 120 bp, Artificial Sequence
  ENSG00000174607_20 (sequence is synthesized)
agttattttttgttgttgttgtttgtattgtttttcttttctgatagagtatggccacttctgggggaaaaacatgtaattaagtaaatgtatacattggttttcacgttttacttttgt

SEQ ID NO: 600699 - DNA, 120 bp, Artificial Sequence
  ENSG00000174607_21 (sequence is synthesized)
tttcccactaccaataattttcctctggaagaattttatagttttttctatttcattttaatgagtaacaatatgttaaatgcataattaagacaaagcaatgaaattctgactttattc

SEQ ID NO: 600700 - DNA, 120 bp, Artificial Sequence
  ENSG00000174607_22 (sequence is synthesized)
aaagtactgaagattattgcttctagggcatttttaaacagcaccattgtattgttgaatgtttatgtaactgatggcttttctataatgtaatttttgaatgttcaggtgttacatttc

SEQ ID NO: 600701 - DNA, 120 bp, Artificial Sequence
  ENSG00000174607_23 (sequence is synthesized)
caaagtttaacttttaaaaaaccatcttctgatcccttttattgtctgggccatacaatctatattacataggtgccaacatttaattcttttaaatggaacatttgcagttttccatat

SEQ ID NO: 600702 - DNA, 120 bp, Artificial Sequence
  ENSG00000174607_24 (sequence is synthesized)
tggtacctgctttttctggagaggtttgagatcttgttaacaaatcagactttacactatatacagatgtgacagataaattgaaccacttgtttgtgaaaatgagttcctgtcatcttc

SEQ ID NO: 600703 - DNA, 120 bp, Artificial Sequence
  ENSG00000174607_25 (sequence is synthesized)
ctcattcactcagccctcaccccagcagccttttccggtcattgtagctgacatggagcagtgacagtattcatttgagaacagggatgcaagtcacagacatcataaaatcagggtctc

SEQ ID NO: 600704 - DNA, 120 bp, Artificial Sequence
  ENSG00000174607_26 (sequence is synthesized)
cctgctgaagcattcactagttggcaactatgaatttattccatgtcattctgtttacttagcacttgcactacccttgttggttgagtgtatgctttatttgtttctagtttgaaatcc

SEQ ID NO: 600705 - DNA, 120 bp, Artificial Sequence
  ENSG00000174607_27 (sequence is synthesized)
cacatctgatagctgagagtaggcaaatacaacatttacctaatgtcattcactaacatggaagagttgtgaaaattctagagtgctgtaaatccttggcatacactatgacaaacaact

SEQ ID NO: 600706 - DNA, 120 bp, Artificial Sequence
  ENSG00000174607_28 (sequence is synthesized)
tcattactctcccaccaggagctgctctcctgcacttagaaataatgtcacaagtagttttctaatgtacaatgcagacaaatgtactgctctctgaatacttgaagaaatggtattata

SEQ ID NO: 600707 - DNA, 120 bp, Artificial Sequence
  ENSG00000174607_29 (sequence is synthesized)
catacatagaaacttattagttataccttttcacaatcttattacgatgttgccgttaaaagggaaaaaagacacaggcaatgaatggtgggatagtaagaggacttagagtgtatgaat

SEQ ID NO: 600708 - DNA, 120 bp, Artificial Sequence
  ENSG00000174607_30 (sequence is synthesized)
gagttgattttacttttttggaatttgattaagttgacagtaggcactgattggatgattaaacataagttaatctccactgtgataaaaacttaaataataaacatgatttaaaataga

SEQ ID NO: 600709 - DNA, 120 bp, Artificial Sequence
  ENSG00000174607_31 (sequence is synthesized)
gtcttcttttgagaagtgtctgttcatgattttttttttagacaaagtattagatcagatatttttggggaaaaatgctttgtgattgcttgttttgaatggtgagcattgtattttgtt

SEQ ID NO: 600710 - DNA, 120 bp, Artificial Sequence
  ENSG00000174611_0 (sequence is synthesized)
atttgcagcgcaagcagcctagcgtgcggccgcggcgcccaggtcggaaaggaggcggcatcatggagctgaagaaggacatcaacgctgtatctatcgacatgctgctgatcgtgcact

SEQ ID NO: 600711 - DNA, 120 bp, Artificial Sequence
  ENSG00000174611_1 (sequence is synthesized)
cggagaagcggcgcgccgcacagggtacgctctcagaccagcaggcgaacccgagctcgctgctgcagcgcggaggaggattccaaggtgttggaaatggagtccgaagatggcagaaat

SEQ ID NO: 600712 - DNA, 120 bp, Artificial Sequence
  ENSG00000174611_2 (sequence is synthesized)
tagaaggaaatgactttcacgaaaacttggtggagaagcagcaccctcagcagccccaggtcatcacttcctacaacagccaagggacacaactgactgtggaagtccaccctcgagatg

SEQ ID NO: 600713 - DNA, 120 bp, Artificial Sequence
  ENSG00000174611_3 (sequence is synthesized)
ccatgccccagctgctcaagaagttctccttggctaaacgtttacaaggtgataaaaatggaaacacaagaccccggcaacctggagggaaagatgcccatgcctacccctgggatcgat

SEQ ID NO: 600714 - DNA, 120 bp, Artificial Sequence
  ENSG00000174611_4 (sequence is synthesized)
ctagcctgaaatccatgtccctggacctgcagcagtttgagaaattggatatctacgcctcacaggtgacagccaagagtggcctagacgaactggtgagtgacctgctccaggaggccc

SEQ ID NO: 600715 - DNA, 120 bp, Artificial Sequence
  ENSG00000174611_5 (sequence is synthesized)
acactgacctggaaagggtccgcgccatctggatctggatctgccatcacatagagtatgacattgcagctgctcaggagaaggaccgccaagccttcaaacccactgacatcctgcgga

SEQ ID NO: 600716 - DNA, 120 bp, Artificial Sequence
  ENSG00000174611_6 (sequence is synthesized)
cccagaagaccaactgtgatggctatgctggcctcttcgagagaatgtgcaggctcgccggagtgcagtgtatgaccgtgcctggctactccaagggtttcggctaccagacagggcaga

SEQ ID NO: 600717 - DNA, 120 bp, Artificial Sequence
  ENSG00000174611_7 (sequence is synthesized)
gcttctcgggggagtttgaccatgcctggaatgctgtgtacctggagggaagatggcacctggtggacagcacctggggcagcggcctggtggacaccatcacctccaaattcaccttcc

SEQ ID NO: 600718 - DNA, 120 bp, Artificial Sequence
  ENSG00000174611_8 (sequence is synthesized)
tctacaatgagttctacttcctcacccaccctgcactgttcatcgaggaccacttcccagacaacaagaactggcagctgctaaaacctcctcaatctctgaggcagtttgagaacaaca

SEQ ID NO: 600719 - DNA, 120 bp, Artificial Sequence
  ENSG00000174611_9 (sequence is synthesized)
tgtatcacaagagtgaattctacaacaaagggatgctgagtgcccacccagagacttccatgatcagaacagtgaatgggaaggccacggtcaccattgagagctgcgccccgacgctgt

SEQ ID NO: 600720 - DNA, 120 bp, Artificial Sequence
  ENSG00000174611_10 (sequence is synthesized)
tcatgttcatgctcaatggcaagcaagagcatgggctgctgagcctaaggaagaatgggatgaagttggaggtgtaccctccaaccatgggcactcacaagctgcagatctttgccaagg

SEQ ID NO: 600721 - DNA, 120 bp, Artificial Sequence
  ENSG00000174611_11 (sequence is synthesized)
gcaactccgacatctacagctcagtgctggagtacacgctcaagtgcaattatgtggacatgggtgtccagctgcctgctgagcttcaccagcccgtgggccccagctggttctcggagc

SEQ ID NO: 600722 - DNA, 120 bp, Artificial Sequence
  ENSG00000174611_12 (sequence is synthesized)
agatgggcatcatgaagccctcccaccctgaccctatcatccacaccagcgacgggcgctgctccatcagcttcagcgtggaggagggcattaatgtcctggcttccctccacggggatg

SEQ ID NO: 600723 - DNA, 120 bp, Artificial Sequence
  ENSG00000174611_13 (sequence is synthesized)
atggccccatcactgaggagacacagcggcgctacatcttccagctgcaccgggagaagcagaccgagctgaaagtccagctgccccatgcaggcaagtttgccctcaagatctttgtca

SEQ ID NO: 600724 - DNA, 120 bp, Artificial Sequence
  ENSG00000174611_14 (sequence is synthesized)
agaagaggcaggaaccaggaaactacatcttcgtctttaattaccttgtatgctgtgccaacaccaaggtgaactggcccatgttccctgagagctttggcaactggggacaggacaatg

SEQ ID NO: 600725 - DNA, 120 bp, Artificial Sequence
  ENSG00000174611_15 (sequence is synthesized)
agctgctggaacctctgtcaggtgtgcttcctgccaaccggaatgtcccattcaaattgaagctgcatggtattgccaaagtcctggtgaaggggcaggacacatggcccctgaccctga

SEQ ID NO: 600726 - DNA, 120 bp, Artificial Sequence
  ENSG00000174611_16 (sequence is synthesized)
accacgagggctactgggagggaagctgcagcacagctggctgccaggaagtctatgtcatggtgctggagaatgccaaccacaatttctactcctacatcctgaaatacaaagtgaatg

SEQ ID NO: 600727 - DNA, 120 bp, Artificial Sequence
  ENSG00000174611_17 (sequence is synthesized)
cccagtgagggctgtgccccggtcttaccctcccaaagggccaaggccagacctccccagggagggctcgaaggaagtgcagggagccctggacaccactgagtctgcatgaaatccctt

SEQ ID NO: 600728 - DNA, 120 bp, Artificial Sequence
  ENSG00000174611_18 (sequence is synthesized)
ctaggcctctgcctcagtgtcccacctctgccacaggagctgtgatctttgtgttctgaaggcttcactcaggtgtggctgtgactgagggggcagaggcagtggctctttagaaggaaa

SEQ ID NO: 600729 - DNA, 120 bp, Artificial Sequence
  ENSG00000174611_19 (sequence is synthesized)
aggtgctatgtaaatctaaggtattgtaaactgtacacctgcatccagatgccccttctcgtattagtgctgctgctgttgttgttgctgtagggttgatgagggaaagcagggatattg

SEQ ID NO: 600730 - DNA, 120 bp, Artificial Sequence
  ENSG00000174611_20 (sequence is synthesized)
cccaggttgacagcttttcacatgatgcttagagaattctcttccatgcccaaggggacatgatttgcaaggctgggttgtccttgaatcacagagcccctttcaagcaatatcaccgtg

SEQ ID NO: 600731 - DNA, 120 bp, Artificial Sequence
  ENSG00000174611_21 (sequence is synthesized)
cctctcgacagctccgagcccccagggaatcttggactatcttctcctcccagacctgatcatcttctgcatcctgctgcctcttcattagctacttcttgttcttcaagagcccaagaa

SEQ ID NO: 600732 - DNA, 120 bp, Artificial Sequence
  ENSG00000174611_22 (sequence is synthesized)
aaagggtgtggtgaggaagccagctgacccacaactggctggaagctgatcgtctccaacatccctaagtatagtcaggaatgtgacaaccagaaagttgtgaggagactgcaaagcaaa

SEQ ID NO: 600733 - DNA, 120 bp, Artificial Sequence
  ENSG00000174611_23 (sequence is synthesized)
ggtctgagggtgtaagacctccagctctgctctgagaggagtacacagggcaggtagttcagtctaaggcctggagtgccctccaggccctcacagagcctgggcctcaggcccctgccc

SEQ ID NO: 600734 - DNA, 120 bp, Artificial Sequence
  ENSG00000174611_24 (sequence is synthesized)
cacctccacagagagcctccagaggctggccaggcccttggggagtcttgtggatagccctgaataaggacctgggcgcagatcaggtgagtagtgcagtgcggcaatgccgaggagact

SEQ ID NO: 600735 - DNA, 120 bp, Artificial Sequence
  ENSG00000174611_25 (sequence is synthesized)
cacactttaacagggctctgcctgcccccagtgtctctaccagcaaagccagggctgggaagaattccagctgcacgagagcagcttttgtgcctgtctcggagaaaacatcctatcccg

SEQ ID NO: 600736 - DNA, 120 bp, Artificial Sequence
  ENSG00000174611_26 (sequence is synthesized)
tctcctttcctcccttctctgagaagacagccccctccagtctcaccttgcatggggacagctcagggctccttgcttgctcaggcacagactgagaggcctcagctgcccagctggccc

SEQ ID NO: 600737 - DNA, 120 bp, Artificial Sequence
  ENSG00000174611_27 (sequence is synthesized)
tcagcagcgcctcaggctgccgttgccatggcaacggaggaaaggctgacttcagcgagggcagataagagggaaaggcgagagaggccccacatggccactgcagaaccatcctggcac

SEQ ID NO: 600738 - DNA, 120 bp, Artificial Sequence
  ENSG00000174611_28 (sequence is synthesized)
acagacatgctccctgctgaactcccggcttctccagctccgtggcccctggctgtctcagtgccccccaacccctgagagccagcactgcctggcacctctccccacagcccctccaca

SEQ ID NO: 600739 - DNA, 120 bp, Artificial Sequence
  ENSG00000174611_29 (sequence is synthesized)
ggcctccaggctcaaccacagccagggccagctgggaccctcatagcttcctccgtggcactcaccctcacatccctgtatccaacaaatgctcacagaagtaccagatgcttgggctac

SEQ ID NO: 600740 - DNA, 120 bp, Artificial Sequence
  ENSG00000174611_30 (sequence is synthesized)
agaggtgaaccaagggggcccggcccctgccatccagagtacagggtgaggaaactgccaggcagcagcagccttccctgcccaggcctgactgaagatccaggctccagacacttctgt

SEQ ID NO: 600741 - DNA, 120 bp, Artificial Sequence
  ENSG00000174611_31 (sequence is synthesized)
tcattatcccccgggatccctcccctaaaagtccccactgccacccagcacggtggcctagcccagaaccagctcacaagggtgcccatcatccaacaggccggcggcctcgagcaaaag

SEQ ID NO: 600742 - DNA, 120 bp, Artificial Sequence
  ENSG00000174611_32 (sequence is synthesized)
gggtgtctcccctggggggctgaactgtcctgggcaggtcctgcgccctccgcagtctctgccaccgaggccacccagccagcctcgtgtcactcacacctgaaaaatgcacaaaggccc

SEQ ID NO: 600743 - DNA, 120 bp, Artificial Sequence
  ENSG00000174611_33 (sequence is synthesized)
cggaggcataacagctatgcaccaccacagggaaacaaagggagttttacaccctgaaaacagccgtcttgcacacttctgattttatgggcttaaagaaatgtgtttgtttcatcaaaa

SEQ ID NO: 600744 - DNA, 120 bp, Artificial Sequence
  ENSG00000174611_34 (sequence is synthesized)
caataagtgccttcgatgacgcatgtcactcactggaccccgcgctggctgcctcgcttagtcctgctggagacccccataccttttcgatatgcaatataattaatcaatacatcctgg

SEQ ID NO: 600745 - DNA, 120 bp, Artificial Sequence
  ENSG00000174611_35 (sequence is synthesized)
agcattgcagagaatgccacccagcaaaataggagctgtccccagcaccagagagggaggccccgcccctcaaagcaccgcagggcatcagcaagcccctccctctcgtttaactaggca

SEQ ID NO: 600746 - DNA, 120 bp, Artificial Sequence
  ENSG00000174611_36 (sequence is synthesized)
ccccctttgtaaagacagctgtaggcgcagtcagaaaatcacctgcatttctttccactgaagtaaaaatacatgaaatgaaatctaatcttcatgaatttttacacgcatgctgctcag

SEQ ID NO: 600747 - DNA, 120 bp, Artificial Sequence
  ENSG00000174611_37 (sequence is synthesized)
ggtagacattcggagttgcattttgaaggcttttctttaaatccccatctttgtttcccgggcgacgagtcccagtcgccggcggaatggcacgggcgcccccaggtgtccgaagtgcgg

SEQ ID NO: 600748 - DNA, 120 bp, Artificial Sequence
  ENSG00000174611_38 (sequence is synthesized)
agctgccggcgctgcacaccgcgaggctgatctatcaccgggctttttcgcagaacttgaaaatgctgtggaaatgtttatgttaaaatcactaggtgctttctcgtggcttctcagcgc

SEQ ID NO: 600749 - DNA, 120 bp, Artificial Sequence
  ENSG00000174611_39 (sequence is synthesized)
taccttatgtgtacacggaggacatctttgtcacgcacaagctgtgagggcatcctgggggacaacctggtgtgttgaaaagacaagggatgtgatgggactgttttgcctggaaataac

SEQ ID NO: 600750 - DNA, 120 bp, Artificial Sequence
  ENSG00000174611_40 (sequence is synthesized)
ttcttgaaacagaagcacttgacataggactggatggaacagctgtgactacactcattactataccattgaaggattggaaccgatcaaactcagaaagtatctgcttgcaattctcag

SEQ ID NO: 600751 - DNA, 120 bp, Artificial Sequence
  ENSG00000174611_41 (sequence is synthesized)
gatggcagcccccaggccacagggcagaagggaaccgagggtggaggagtggtgggcagaggcactacaaccacaacttcagtacacttctttccagcttgtttcagaagtgccatagct

SEQ ID NO: 600752 - DNA, 120 bp, Artificial Sequence
  ENSG00000174611_42 (sequence is synthesized)
cagctggactccattttcaatctgattatgatcattgtgagttccccatatgttacattgtcctaccaggacagcctcctcactgcctgctaagattaaaagtaaataaatagactaact

SEQ ID NO: 600753 - DNA, 120 bp, Artificial Sequence
  ENSG00000174611_43 (sequence is synthesized)
gaagcatgaaggatttcggctagacataaagaactatttcctgttgttaagcaggagggacaagttgccaagaaagtttgtgaaatcctcttctcaaaggacttgaaaaggagaaaagtt

SEQ ID NO: 600754 - DNA, 120 bp, Artificial Sequence
  ENSG00000174611_44 (sequence is synthesized)
ttcccagtggtctgaggttttagatgccatgttcactagaaggagtgggttttctcctctccaaaccaattaattcctgagatatcctggtctgcctgcagcaaacagagggttaacagc

SEQ ID NO: 600755 - DNA, 120 bp, Artificial Sequence
  ENSG00000174611_45 (sequence is synthesized)
atcactacatcatttgctattggcaaaattttcgaagatggtgtgcctctattgcccgcctcagtttatcttaggtctataatttcttttcatttggagtaagtagtcggcaattgaaag

SEQ ID NO: 600756 - DNA, 120 bp, Artificial Sequence
  ENSG00000174611_46 (sequence is synthesized)
aggtgattacttctcataatgtgtgcattgagttgtgtgggccggtggctgttgagtatgctttctccatgttgttgctggtgttgtttttcaataaaatttatattcatttttatccaa

SEQ ID NO: 600757 - DNA, 120 bp, Artificial Sequence
  ENSG00000174611_47 (sequence is synthesized)
acaccaggaagttcctggcaattcaagcagcaattcagtggtcagtggggtgggaacaaggagactgtgaaaaggagagtaaagaggaggggtcaaaagcaaggaccaccagaaggttta

SEQ ID NO: 600758 - DNA, 120 bp, Artificial Sequence
  ENSG00000174611_48 (sequence is synthesized)
caggtggctctgagcagaggacaagcatcagtgggcagcatgtccagaggtccacagcgccgctaaatcagttcaccttaatgcaaaacgagccattctccaagccccattgttcccagg

SEQ ID NO: 600759 - DNA, 120 bp, Artificial Sequence
  ENSG00000174611_49 (sequence is synthesized)
actccccttatccctccacatcatcctagaaagtgatatgcacagacattctaggcagcaatggaaagtaatttcctgaagaatataattttaagtagtatttatggctttttttccaat

SEQ ID NO: 600760 - DNA, 120 bp, Artificial Sequence
  ENSG00000174611_50 (sequence is synthesized)
gggccgtaactggggggagctcctgactccaacaccccacccaactccctcctagggagagagagctgtcaacctccaaaaccaacccagggaaggagtgaggtcgaggccaaaacttgg

SEQ ID NO: 600761 - DNA, 120 bp, Artificial Sequence
  ENSG00000174611_51 (sequence is synthesized)
acaatctctgcacatcttgcaattcaatctggagcccctttgctgtctttccttttcctgaatctactctcaatgttgacagcactgtgcgatttctgtatttgccaggggcttctcgtg

SEQ ID NO: 600762 - DNA, 120 bp, Artificial Sequence
  ENSG00000174611_52 (sequence is synthesized)
ggaggtcggctccagccctctcgagaaccctccggagaccgtggggatgaggcagcgctcagccagagaagccctggagcccaggaccagcgcttcaagtgcaccgggcgggaggcaggg

SEQ ID NO: 600763 - DNA, 120 bp, Artificial Sequence
  ENSG00000174611_53 (sequence is synthesized)
gcgcagggagggaggctctggaccggccgcccctgctgactatggccccggtgcaggtcaaggcttgggcccggggatttcctttcaaaggtgacttagagccgcttcattagggtagcg

SEQ ID NO: 600764 - DNA, 120 bp, Artificial Sequence
  ENSG00000174611_54 (sequence is synthesized)
ccctcccaggcgggccctaatggcgtgtttggcagagtcagcgaaaagcagcgccctgcggctccagcggcgggggagcgccctcttccgcgccctcgccctctcccgtgtggggcagct

SEQ ID NO: 600765 - DNA, 120 bp, Artificial Sequence
  ENSG00000174611_55 (sequence is synthesized)
ggtgagaaaggcctcactgagaaagtgacatctaagcaaggaaagagggtgtcactctgtggcccaggttggagtgcagaggtgcgatcatagctcactccagcctcaaactcctgggct

SEQ ID NO: 600766 - DNA, 120 bp, Artificial Sequence
  ENSG00000174611_56 (sequence is synthesized)
gcctcccgagtagctgggaccacagggacacaactgactgtggaagtccaccctcgagatgccatgccccagctgctcaagaagttctccttggctaaacgtatgtatgacacaggtact

SEQ ID NO: 600767 - DNA, 120 bp, Artificial Sequence
  ENSG00000174611_57 (sequence is synthesized)
gtatgtatgacacaggtactcatggtggagggctggcagagaggattgaaggcagctggttgggccagatcccagcccaagcatcttctgagggaaggagaagagtgacatgggcctgca

SEQ ID NO: 600768 - DNA, 120 bp, Artificial Sequence
  ENSG00000174611_58 (sequence is synthesized)
aactgggaaaaggcagaagcatgacagctttatcctgggagactcttttctctacacccagctaccgctgattttgcatctctggaactagtcataggtttacaaggtgataaaaatgga

SEQ ID NO: 600769 - DNA, 120 bp, Artificial Sequence
  ENSG00000174611_59 (sequence is synthesized)
tatgctggcctcttcgagagaatgtgcagagctgcttgaggagcgtgtcaagcaggctctagggatgaacatttcagaagtgatctgaatggtgttggtctcaggggaggagcagacagc

SEQ ID NO: 600770 - DNA, 120 bp, Artificial Sequence
  ENSG00000174611_60 (sequence is synthesized)
tgcccacccagagacttccatgatcagaacaggtgagcccggagcaggtgccagtgtgctagcagcaggaatggagcatttcgcactgtcctccaggagcccgcctgagactgcgctttc

SEQ ID NO: 600771 - DNA, 120 bp, Artificial Sequence
  ENSG00000174611_61 (sequence is synthesized)
aaggcatgcccttccagacgcatggcttgtgagcttagcacaaagcttgtgtgtgcatgtggatgagtggaggctgctgaggcagcccaggccatcagggcagggaagggccataggcca

SEQ ID NO: 600772 - DNA, 120 bp, Artificial Sequence
  ENSG00000174611_62 (sequence is synthesized)
catcagcagggacaaaagctcactcacactagcataaacccagaaagggatgtgtctgaaggctgcaggtttcctagaacttgaaggctgaacacacagcctggcatgtcacagaagcca

SEQ ID NO: 600773 - DNA, 120 bp, Artificial Sequence
  ENSG00000174611_63 (sequence is synthesized)
gggctgggcacttcctagctgggtgagtctctctcagttcacatagcagggaaaaggactacgtcaccctggctacacatagcctctgggctcaggtccccaacagaagctactggcctg

SEQ ID NO: 600774 - DNA, 120 bp, Artificial Sequence
  ENSG00000174611_64 (sequence is synthesized)
ctgtgttctcttccccaactcctgctggagagaatacatggcctcagcagagctggaatctgggtgttggtggtccaaccagcaaggatggggagcaacatgggtctcccaggacaggtg

SEQ ID NO: 600775 - DNA, 120 bp, Artificial Sequence
  ENSG00000174611_65 (sequence is synthesized)
ggggcagtcccacccaagacagagagttggggcagacttccttagggaggtggccactgagctgggtcttgggagaggagaacaggcctagtagctagacagagatggacatgttctagg

SEQ ID NO: 600776 - DNA, 120 bp, Artificial Sequence
  ENSG00000174611_66 (sequence is synthesized)
cagcagaggagaggcggggacacagtaagcccccagcctccaaactcaggcacccctggatgagggccaagctccagcacctctgcctggctggctcagtacccctcccttctggaggcg

SEQ ID NO: 600777 - DNA, 120 bp, Artificial Sequence
  ENSG00000174611_67 (sequence is synthesized)
ggacccagccgtttccagcccactcccctggggcagtataggatacccagcttagccatctcccatggctggcctgggctgacatgtgctctcccaaccttcaccacggagccatggcag

SEQ ID NO: 600778 - DNA, 120 bp, Artificial Sequence
  ENSG00000174611_68 (sequence is synthesized)
ctgagtatgtttgcacactctgaggcatacgggggctgccctggagggccagaactggtcacaaaaaagcagggccttctctggaagattgtctcttatgcctctccaaggccttggcac

SEQ ID NO: 600779 - DNA, 120 bp, Artificial Sequence
  ENSG00000174611_69 (sequence is synthesized)
ctgatccagtgctgggcacacagcctgggcacgctgcacagccctgtaagtcgggtcagtccagcctcccacacctcagcaaaggactgcctggtggcaccgtctctgccactggggcct

SEQ ID NO: 600780 - DNA, 120 bp, Artificial Sequence
  ENSG00000174611_70 (sequence is synthesized)
ccatccgcccaggacaggaggtctgagctcacactgactattagcacagggtgcctgtgggtgggcccagagcccctggggagctccaacccacattgcagggcaatggggcagcgggga

SEQ ID NO: 600781 - DNA, 120 bp, Artificial Sequence
  ENSG00000174611_71 (sequence is synthesized)
gcacaggtgtccccaagttagttccaactgacttgtcccttccaccacacaatgacttcctttgccaagttgctgagctcttgcaaactcttccaactccaaatacctggcagctcctgc

SEQ ID NO: 600782 - DNA, 120 bp, Artificial Sequence
  ENSG00000174611_72 (sequence is synthesized)
agctaaaataacagcgtgaagttgctcaatttgagaatccatttcctgtgcttacaacagatgcagggcttgttcaatgtatcataggccgtggaaatatcggaaagaactgaccaggtc

SEQ ID NO: 600783 - DNA, 120 bp, Artificial Sequence
  ENSG00000174611_73 (sequence is synthesized)
aaagcaacaccaaactgatgtcattgagtggagtttgcctttttaagagacataaaaatataaacaccagattccttaatttatagaaatctaaacctaaatatgattccatatatctga

SEQ ID NO: 600784 - DNA, 120 bp, Artificial Sequence
  ENSG00000174628_0 (sequence is synthesized)
attaatccctgagacaaaggtactgaaggcaagtggctgaagaacaggcttgattggacagatgacttggagatgttcactggacagggacagccttgtgaagatctttgtgaatacccg

SEQ ID NO: 600785 - DNA, 120 bp, Artificial Sequence
  ENSG00000174628_1 (sequence is synthesized)
acctcgcaagctccagagactacaataattcacttgccctaggttccaaagccagcaagtggaaaacggagactggaattccgcccacaggactccaaagcctgtgcagcaacaccccac

SEQ ID NO: 600786 - DNA, 120 bp, Artificial Sequence
  ENSG00000174628_2 (sequence is synthesized)
tcccccggcaggatcaccagcaggacgcgcgggagccaggaagtaagatccgtacctccaaggctcccatgggcccaagcctccgcatcaacagactgggagggattacgtggggtccca

SEQ ID NO: 600787 - DNA, 120 bp, Artificial Sequence
  ENSG00000174628_3 (sequence is synthesized)
gggccggctctgaggcgggaaaactttctggaggcggcggcctcaggccggagcgggcgcacaccgactggaggggtcggattcagggatgtgggtggaccgcatttccccatcttcccc

SEQ ID NO: 600788 - DNA, 120 bp, Artificial Sequence
  ENSG00000174628_4 (sequence is synthesized)
gccgcgcacttcctctggtgcaatctccacaccccgcgccggcccgcctgcaacgcgccctggcactcaccggtgggcgaaatttccccgcctccacgtgagagccagctccgccgtgac

SEQ ID NO: 600789 - DNA, 120 bp, Artificial Sequence
  ENSG00000174628_5 (sequence is synthesized)
ccggaagtccacttcgagtcgccggcccaccctctcgggttccggcttcttccgggtcgcggccttccggcgaacgcggttaccgtggaaaccgcggccatggcggcaccgcggcaaatc

SEQ ID NO: 600790 - DNA, 120 bp, Artificial Sequence
  ENSG00000174628_6 (sequence is synthesized)
cccagccacatagtgcgcctcaagcccagctgctctacagactcgtcgttcacccggacgccggtgcccaccgtgtctctcgcgtcccgcgagctgcctgtctcgtcgtggcaggtcacc

SEQ ID NO: 600791 - DNA, 120 bp, Artificial Sequence
  ENSG00000174628_7 (sequence is synthesized)
gagccgtcaagcaagaatctgtgggagcagatctgcaaggagtatgaagctgagcagcctccctttccagaaggatataaagtcaaacaggagcctgtgattacggttgcgccagtagag

SEQ ID NO: 600792 - DNA, 120 bp, Artificial Sequence
  ENSG00000174628_8 (sequence is synthesized)
gaaatgctttttcatggcttcagtgcagagcactattttccggtttcccatttcaccatgatctcacgtacaccctgtcctcaagataaatcggaaacaatcaacccaaaaacatgttct

SEQ ID NO: 600793 - DNA, 120 bp, Artificial Sequence
  ENSG00000174628_9 (sequence is synthesized)
cccaaagaatatttggaaactttcatctttcctgttctgcttcccggaatggctagcctgcttcaccaagcgaagaaagaaaaatgttttgagaggaaaagaaccaaattcattgcctgt

SEQ ID NO: 600794 - DNA, 120 bp, Artificial Sequence
  ENSG00000174628_10 (sequence is synthesized)
gattttctgactgagtggttatacaaccaaaatccaaagagggcaggggagccattcacagaatttttctccattccatttgtggaggagcggctaaagcaacacccacggccgccaatc

SEQ ID NO: 600795 - DNA, 120 bp, Artificial Sequence
  ENSG00000174628_11 (sequence is synthesized)
ccactctcgctcctgctgacagaagaggaagcagccctctacattcaatccttctggagagcctgtgtggttcgctgtgatcctgagattcaagaactgcgtcagtggcagaagaaactt

SEQ ID NO: 600796 - DNA, 120 bp, Artificial Sequence
  ENSG00000174628_12 (sequence is synthesized)
cgcgaggccaagcacattcaccagcaagtcaaaattttctgggccaagcaagaacaaaaagtgaaatgcaaaatggaggacgatgcagtacctgcagccaagatgaaaattccatcatct

SEQ ID NO: 600797 - DNA, 120 bp, Artificial Sequence
  ENSG00000174628_13 (sequence is synthesized)
taaccatagctaagacgtatctttgcccattcgagcacaagttaccttgtgcaaggaaaatgtccaaatgatgctctctctcttgtgatttctttaacaagacttggaacatgtgcaaat

SEQ ID NO: 600798 - DNA, 120 bp, Artificial Sequence
  ENSG00000174628_14 (sequence is synthesized)
aatcttttctgtacaagataggattcattgcaaacaagctttaatgcaaatagtttagaaaagaaaggaccagtcttcactttctgcattatccccacattttattcattcatccagatt

SEQ ID NO: 600799 - DNA, 120 bp, Artificial Sequence
  ENSG00000174628_15 (sequence is synthesized)
acttcttcagtgcctcaggagtattcttctacaccagctgctgttaaaatgtacaatgaactctagtcccaaggaatacagaagtgctcttattaccagttttcccacttgtggccgcct

SEQ ID NO: 600800 - DNA, 120 bp, Artificial Sequence
  ENSG00000174628_16 (sequence is synthesized)
ttgcaaagatccatattctaatttaagtccccaacctctgaatttggttttaagtttacctagtgactgactactctctttataaaaaagaccttatacttaatgatcatttccaaagga

SEQ ID NO: 600801 - DNA, 120 bp, Artificial Sequence
  ENSG00000174628_17 (sequence is synthesized)
gaccactccttaacttttactgcaaacccaacaagatgagacacttaaacccagacagatgtaacaaaggatttttgttgtctaagtcccaaagtattatatagaaagttcctgctttta

SEQ ID NO: 600802 - DNA, 120 bp, Artificial Sequence
  ENSG00000174628_18 (sequence is synthesized)
tgggtaaacttattaccttaatatgttctgtggtttgctgttaaccaagattctcccatttaaaatgccacagaccgaccctcaaggcagatccgaaagcctagtagttagttgcactgg

SEQ ID NO: 600803 - DNA, 120 bp, Artificial Sequence
  ENSG00000174628_19 (sequence is synthesized)
gttgttttgacaagctaccacacgtcttaagtaaatagtaaagcctttatttttgtgttaagaacagcattttgaaaataaaacctatctgcccatggtttacagccttttaaatttgta

SEQ ID NO: 600804 - DNA, 120 bp, Artificial Sequence
  ENSG00000174628_20 (sequence is synthesized)
atatttatatagtcgtttatggtacatattgattgtcttgaaatttctttaacttcttttttataagtatgcaacagtcagccgggggaagataaaggtacattataaaacacacattaa

SEQ ID NO: 600805 - DNA, 120 bp, Artificial Sequence
  ENSG00000174628_21 (sequence is synthesized)
tgcatttaataaatatatattatctatcaaaagtgagccttagctcttcatcagttaataaaaagcacctgctgagaactcctgtaagctggtatcatcattgcatcattggattataaa

SEQ ID NO: 600806 - DNA, 120 bp, Artificial Sequence
  ENSG00000174628_22 (sequence is synthesized)
agccacaatgctccctttcaacttggggtttggcctgaggcgttcaactcagccttggccaaccgagaccaccacccgagttcacccttgttcagtgggtcctgacggcatctgggctaa

SEQ ID NO: 600807 - DNA, 120 bp, Artificial Sequence
  ENSG00000174628_23 (sequence is synthesized)
aaaaaaaaaaaaaaaaaagcactgggcgcccagcttccaacaaccagatcttcaactctggaatccctggagatgcacagaacttcccagtttgtaagctgtcagagctgactcccttct

SEQ ID NO: 600808 - DNA, 120 bp, Artificial Sequence
  ENSG00000174628_24 (sequence is synthesized)
cttcccaccctccacctccagtggggagaaatccaggctagaatgacaattttctattaaaaggggggacaagagtggctgttatagacccaaagcgattttaataaccagacacggaac

SEQ ID NO: 600809 - DNA, 120 bp, Artificial Sequence
  ENSG00000174628_25 (sequence is synthesized)
aatttgtgcttacaatgagagattttgatcacagatgctctcctcccgggtcgttttccccaaacgagtcttgtttacacacgcagatcttaaacagaggtgccatttaattttgtcttt

SEQ ID NO: 600810 - DNA, 120 bp, Artificial Sequence
  ENSG00000174628_26 (sequence is synthesized)
aaaccttgctccacggggggcagctggctgctacagtctcttggcaaagatgtctcttgatacttttcaggtgtagtcattagaaaaagaacagctctctcccttctcctctcactcccg

SEQ ID NO: 600811 - DNA, 120 bp, Artificial Sequence
  ENSG00000174628_27 (sequence is synthesized)
cctccgcccccattatgaaggcgttcagcccactctcaaccttaaaagccaaaataaaacaaaaccctaagtgcgataacatatcagatttaaaaggggggaaaaaggtctcattaaatg

SEQ ID NO: 600812 - DNA, 120 bp, Artificial Sequence
  ENSG00000174628_28 (sequence is synthesized)
aggcttcccatggctcaaagatggctctgttcttatgctggggaagcacgactttccatggcagccatttgtgctgtgctcaccttatatgcttggacaataaagaacttagaaaacgaa

SEQ ID NO: 600813 - DNA, 120 bp, Artificial Sequence
  ENSG00000174628_29 (sequence is synthesized)
gtctgactattcagtgatcctaagaattcagtcgtgttaatttgcaagcagaatagcaacaactgacttgaattcttgcttattgttttcttgtcaatcaaacatatggcatcatgacca

SEQ ID NO: 600814 - DNA, 120 bp, Artificial Sequence
  ENSG00000174628_30 (sequence is synthesized)
aggaagcagccctctacattcaatccttctggagagcctgtgtggtaagaatcatatgcgactgtggtatttgatttaatggggaacttttgtgaggtggagggtccagggtaaacctta

SEQ ID NO: 600815 - DNA, 120 bp, Artificial Sequence
  ENSG00000174628_31 (sequence is synthesized)
gatgagttaggaacaggatattatagctaacatccagacctcagaaatacgattctctgtaaaatgggtcttaaaaagtgatttagaatttttactgaaactggctgggcatagtagctc

SEQ ID NO: 600816 - DNA, 66 bp, Artificial Sequence
  ENSG00000174628_32 (sequence is synthesized)
atttagaatttttactgaaactggctgggcatagtagctcatggctgtaatcccagaactttgcag

SEQ ID NO: 600817 - DNA, 120 bp, Artificial Sequence
  ENSG00000174628_33 (sequence is synthesized)
aaaatgttttgagattgattgttccccctggcatctctctactccatgccaactgtcatgaatgtaaactgctcgcagagagtcttggaacacaaggaaaagaaccaaattcattgcctg

SEQ ID NO: 600818 - DNA, 120 bp, Artificial Sequence
  ENSG00000174628_34 (sequence is synthesized)
gttctcccaaagaatatttggaaactttcatctttcctgttctgcttcccggaatggctagcctgcttcaccaagcgaagaaagaaaaatgttttgaggttgttctccagatgacccctt

SEQ ID NO: 600819 - DNA, 120 bp, Artificial Sequence
  ENSG00000174628_35 (sequence is synthesized)
ggactccggagagcttttccgccttgcttggcctcctgcctgcccttctcctgtgcagtttggcatccaccaggtttcttgggtcttcagcttctgtttattacatgcactgattaaagc

SEQ ID NO: 600820 - DNA, 120 bp, Artificial Sequence
  ENSG00000174628_36 (sequence is synthesized)
ctcagggagaccacatacataagaaagaatgtgttcttgttttatttttaagagacatgtcctttatttcactgatttatctttaaggttaaaaatgtaataaagataataagtaacaaa

SEQ ID NO: 600821 - DNA, 120 bp, Artificial Sequence
  ENSG00000174628_37 (sequence is synthesized)
attcaagatggagttgctctggttcacgtgcctctgacatttccaataaggatggacctatctggagggtacaggagcctggtttatgtgaaccatgaaaagcagcttcctgagaggaaa

SEQ ID NO: 600822 - DNA, 120 bp, Artificial Sequence
  ENSG00000174628_38 (sequence is synthesized)
gcggctaaagcaacagtgagtatgacacaaggctttgaataatttattcctaatttaagattgtgttaataatacttttcttccatctaagagaacaaactgatgtgatccatccaggac

SEQ ID NO: 600823 - DNA, 120 bp, Artificial Sequence
  ENSG00000174628_39 (sequence is synthesized)
tctgggccagtcatatttgtgactcctgtctctagttattcttagcctaggctaaccttatcctaatcaggccagtaatttcattcaagaagcactccagaaataaaatagaaaacttaa

SEQ ID NO: 600824 - DNA, 80 bp, Artificial Sequence
  ENSG00000174640_0 (sequence is synthesized)
agtctccgctccgcgaatctcctccggccactgccgccgcggtcgcctctcacccgcccggccgctccagcccgaggcgc

SEQ ID NO: 600825 - DNA, 120 bp, Artificial Sequence
  ENSG00000174640_1 (sequence is synthesized)
gccatggggctcctgcccaagctcggcgcgtcccagggcagcgacacctctactagccgagccggccgctgtgcccgctcggtcttcggcaacattaaggtgtttgtgctctgccaaggc

SEQ ID NO: 600826 - DNA, 120 bp, Artificial Sequence
  ENSG00000174640_2 (sequence is synthesized)
ctcctgcagctctgccaactcctgtacagcgcctacttcaagagcagcctcaccaccattgagaagcgctttgggctctccagttcttcatcgggtctcatttccagcttgaatgagatc

SEQ ID NO: 600827 - DNA, 120 bp, Artificial Sequence
  ENSG00000174640_3 (sequence is synthesized)
agcaatgccatcctcatcatctttgtcagctactttggcagccgggtgcaccgtccacgtctgattggcatcggaggtctcttcctggctgcaggtgccttcatcctcaccctcccacac

SEQ ID NO: 600828 - DNA, 120 bp, Artificial Sequence
  ENSG00000174640_4 (sequence is synthesized)
ttcctctccgagccctaccagtacaccttggccagcactgggaacaacagccgcttgcaggccgagctctgccagaagcattggcaggacctgcctcccagtaagtgccacagcaccacc

SEQ ID NO: 600829 - DNA, 120 bp, Artificial Sequence
  ENSG00000174640_5 (sequence is synthesized)
cagaacccccagaaggagaccagcagcatgtggggcctgatggtggttgcccagctgctggctggcatcgggacagtgcctattcagccatttgggatctcctatgtggatgacttctca

SEQ ID NO: 600830 - DNA, 120 bp, Artificial Sequence
  ENSG00000174640_6 (sequence is synthesized)
gagcccagcaactcgcccctgtacatctccatcttatttgccatctctgtatttggaccggctttcgggtacctgctgggctctgtcatgctgcagatctttgtggactatggcagggtc

SEQ ID NO: 600831 - DNA, 120 bp, Artificial Sequence
  ENSG00000174640_7 (sequence is synthesized)
aacacagctgcagttaacttggtcccgggtgacccccgatggattggagcctggtggctaggcctgctcatttcttcagctttattggttctcacctctttccccttttttttcttccct

SEQ ID NO: 600832 - DNA, 120 bp, Artificial Sequence
  ENSG00000174640_8 (sequence is synthesized)
cgagcaatgcccataggagcaaagagggctcctgccacagcagatgaagcaaggaagttggaggaggccaagtcaagaggctccctggtggatttcattaaacggtttccatgcatcttt

SEQ ID NO: 600833 - DNA, 120 bp, Artificial Sequence
  ENSG00000174640_9 (sequence is synthesized)
ctgaggctcctgatgaactcactcttcgtcctggtggtcctggcccagtgcaccttctcctccgtcattgctggcctctccaccttcctcaacaagttcctggagaagcagtatggcacc

SEQ ID NO: 600834 - DNA, 120 bp, Artificial Sequence
  ENSG00000174640_10 (sequence is synthesized)
tcagcagcctatgccaacttcctcattggtgctgtgaacctccctgctgcagccttggggatgctgtttggaggaatcctcatgaagcgctttgttttctctctacaagccattccccgc

SEQ ID NO: 600835 - DNA, 120 bp, Artificial Sequence
  ENSG00000174640_11 (sequence is synthesized)
atagctaccaccatcatcaccatctccatgatcctttgtgttcctttgttcttcatgggatgctccaccccaactgtggccgaagtctacccccctagcacatcaagttctatacatccg

SEQ ID NO: 600836 - DNA, 120 bp, Artificial Sequence
  ENSG00000174640_12 (sequence is synthesized)
cagtctcctgcctgccgcagggactgctcgtgcccagattctatcttccacccggtctgtggagacaatggaatcgagtacctctccccttgccatgccggctgcagcaacatcaacatg

SEQ ID NO: 600837 - DNA, 120 bp, Artificial Sequence
  ENSG00000174640_13 (sequence is synthesized)
agctctgcaacctccaagcaactgatctatttgaactgcagctgtgtgaccgggggatccgcttcagcaaagacaggatcgtgccctgtcccctgtgcccacttcctgctcccggccatc

SEQ ID NO: 600838 - DNA, 120 bp, Artificial Sequence
  ENSG00000174640_14 (sequence is synthesized)
ttcctcatctccttcgtgtccctgatagcctgcatctcccacaaccccctctacatgatggttctgcgtgtggtgaaccaggaggaaaagtcatttgccatcggggtgcagttcttgttg

SEQ ID NO: 600839 - DNA, 120 bp, Artificial Sequence
  ENSG00000174640_15 (sequence is synthesized)
atgcgcttgctggcctggctgccatctccagccctctatggcctcaccattgaccactcctgcatccggtggaactcgctgtgcttggggaggcgaggggcctgcgcctactatgacaac

SEQ ID NO: 600840 - DNA, 120 bp, Artificial Sequence
  ENSG00000174640_16 (sequence is synthesized)
gatgctctccgagacaggtacctgggcctgcagatgggctacaaggcgctgggcatgctgctgctttgcttcatcagctggagggtgaagaagaacaaggagtacaacgtgcagaaggcg

SEQ ID NO: 600841 - DNA, 120 bp, Artificial Sequence
  ENSG00000174640_17 (sequence is synthesized)
gcaggcctcatctgaccccaccctgggccactgccctgctccagagagtggaccttgactcttccacacctgcctatactcactaatgttaacacgtcatttcctttttgtatttttaaa

SEQ ID NO: 600842 - DNA, 120 bp, Artificial Sequence
  ENSG00000174640_18 (sequence is synthesized)
caagaaagaaaaccccagtcctcatttgccttccctacctcttcctcccagagtcctccccacagttcctaagggccactgtgtacccgggctgtgtgggccagaactggggggctgagt

SEQ ID NO: 600843 - DNA, 120 bp, Artificial Sequence
  ENSG00000174640_19 (sequence is synthesized)
cttccctggccccttggaagaggcccccagatgcccaggctcacttcagtgttgagtcctccattgaggatgcccactgaggcagccaggcccctcaccagccctggggggaatcctaaa

SEQ ID NO: 600844 - DNA, 120 bp, Artificial Sequence
  ENSG00000174640_20 (sequence is synthesized)
cagagagagaaaaagggtatctgcccttcttgccaggcagctccactctcccgctgactgcccacaccctgcagagtggcaggggtgaaaggaagaaggaagtggctgagttattaatag

SEQ ID NO: 600845 - DNA, 120 bp, Artificial Sequence
  ENSG00000174640_21 (sequence is synthesized)
ccagagccactgggagactggggagactggctgtaacccccttcacacctgggtttggcatcagcacagactacgggaggggctggctccctccccctcagaccctcacttcctgtacct

SEQ ID NO: 600846 - DNA, 120 bp, Artificial Sequence
  ENSG00000174640_22 (sequence is synthesized)
agaggccattctggatgctgccatgttgggaagtacagtctctgcccattacctgcatgcaggcaccagagcagggactgagaaaccccaaggatgggtcatctaagtgctgtccatatg

SEQ ID NO: 600847 - DNA, 120 bp, Artificial Sequence
  ENSG00000174640_23 (sequence is synthesized)
aaccctggactttctgtccttagatcctcacatgttatccctgtctttctggggtacgtttcaaactgaggaagctacaacacagtgaagacccaaggaaggcctatgaaaaggtcctga

SEQ ID NO: 600848 - DNA, 120 bp, Artificial Sequence
  ENSG00000174640_24 (sequence is synthesized)
tgcccaacctcccaccccttcaatgtggggacgagaccccctcatctcagagtaatgggaagaacctcccacatctccctggcagcagatgaggtggcttcacatgcacttccctgtctg

SEQ ID NO: 600849 - DNA, 120 bp, Artificial Sequence
  ENSG00000174640_25 (sequence is synthesized)
gacttcagcccgtattccgaggagtagagaggcagaagagatgtcagcaaagcaagtgatgaagcagagtggatgtccactgtcaccaagctggatggcaagctgcggcccacaaaacag

SEQ ID NO: 600850 - DNA, 120 bp, Artificial Sequence
  ENSG00000174640_26 (sequence is synthesized)
ccagtcaggttggctttcctggtttcagacatgctcataccattcccattttctcagcctcttctcactgcctccagagaggtgggtgcctgggttgagagacacagctgctacgtgata

SEQ ID NO: 600851 - DNA, 120 bp, Artificial Sequence
  ENSG00000174640_27 (sequence is synthesized)
gatgttgagagacagaagccaacgaaggaggtcattcatcaacaaatatatttattggagaccgactttgtgcaaagcaatgctaatcagggttctccatggagcttccctcagctctta

SEQ ID NO: 600852 - DNA, 120 bp, Artificial Sequence
  ENSG00000174640_28 (sequence is synthesized)
cctcacctccctccatttacattagggccttctcccagggtgtgctcggtgggcagtgtgggactgggggtgtgggagttggtgagagcaggaggagaggtggggacagcaagaagccac

SEQ ID NO: 600853 - DNA, 120 bp, Artificial Sequence
  ENSG00000174640_29 (sequence is synthesized)
agattggcatgaaggatcctgacctgactatccatgccatccatggcccccagactgactctgcacctggccctttgccagacagctctgtctccccatgtcctctggaacagctgggca

SEQ ID NO: 600854 - DNA, 120 bp, Artificial Sequence
  ENSG00000174640_30 (sequence is synthesized)
tgggtcatggccattcatgacccttaagtgccacccttcttggaagaccccctccagaagcatactggaagccacctctggaaaagcctcatatggtgatatgccaaaatatttatgtca

SEQ ID NO: 600855 - DNA, 120 bp, Artificial Sequence
  ENSG00000174640_31 (sequence is synthesized)
atgtccaaacaaagtccaatgccatgagactgaagtctttgtggaaaccactgttacagacaagcttatttccaaagccacctcatttccaaacatctcactcaggaagggaggctcaat

SEQ ID NO: 600856 - DNA, 120 bp, Artificial Sequence
  ENSG00000174640_32 (sequence is synthesized)
gtaacctcaggggccagttttagcatttgaaatggttctgcttggaaaatgatgccctgcaactaaccctggtctttcccatggcaatttaaccacatttggaaggcactgccttcagct

SEQ ID NO: 600857 - DNA, 120 bp, Artificial Sequence
  ENSG00000174640_33 (sequence is synthesized)
gagtttatgaacaatgaatgccaaccttcaggttctagaagattggttgcactcccaaacctttattctattatattactattaaaatattctaattttgctattgaggtaacttggtca

SEQ ID NO: 600858 - DNA, 120 bp, Artificial Sequence
  ENSG00000174640_34 (sequence is synthesized)
tgaggtaacttggtcatgaatttatgttgtcatatacatctgtcagagaacagacagcacctgcactttttaattttattttatttttatttgtattttatttttgagatggagtcttgc

SEQ ID NO: 600859 - DNA, 120 bp, Artificial Sequence
  ENSG00000174640_35 (sequence is synthesized)
ttacaggcatgagccactgcgccctgccggcacctgcatcttgtaaacagaggaagtgctcatgacatagaccccaggggcccatggccatggagattagaggtaatgcaactgtcaacc

SEQ ID NO: 600860 - DNA, 120 bp, Artificial Sequence
  ENSG00000174640_36 (sequence is synthesized)
cattagcctggtatcaggcaagtaccagacactgcttattccttcagtgaagttctgctgggctctgagaaggccgcatcactgctcttgggtttatatccagaagcggagctggacgca

SEQ ID NO: 600861 - DNA, 120 bp, Artificial Sequence
  ENSG00000174640_37 (sequence is synthesized)
aacagctatgtccatggcacaaaacagaattaatatcataatcaaattgatcacatggtcacaaccagtactactactcccaagaaaatctttcttttcagctgtcagcagggaatataa

SEQ ID NO: 600862 - DNA, 120 bp, Artificial Sequence
  ENSG00000174640_38 (sequence is synthesized)
tagtgtcactttcatttcacttctagagcaaagcttaacaaactttcttgagtgtgtgacactcacagaggatgcaaattcccaacaccctccacccagccccagcgtctacttctgtgg

SEQ ID NO: 600863 - DNA, 120 bp, Artificial Sequence
  ENSG00000174640_39 (sequence is synthesized)
gtctaatggggacccaggaatggctcttttaacggccccctcatgagattgatgtgggtagttcccaaatcctgtgaggtgggctgtcagtgcaatagagcctggggtatgcccatttgt

SEQ ID NO: 600864 - DNA, 120 bp, Artificial Sequence
  ENSG00000174640_40 (sequence is synthesized)
gcttaggccactgagaaatttacaggctcgataggcctttggtatgttcaaaggtgagtgaaggataacaaggtgaagagatgcctgtgaatctgattttttggatggctgcaactaaga

SEQ ID NO: 600865 - DNA, 120 bp, Artificial Sequence
  ENSG00000174640_41 (sequence is synthesized)
gtcaatgggcatgaaaaacaatccaagagctcacatttatatgaggcccttatcagtactgagagagacattctcacttcacaagcttggatgtgcaaaaagaaaaaaatcacttatttc

SEQ ID NO: 600866 - DNA, 120 bp, Artificial Sequence
  ENSG00000174640_42 (sequence is synthesized)
tttaaatcagttattgatttcaaaccccccatcctactgtctggctggaaattcaatatcaaccatgcttgggtctggctcctagagccatctgaaggtccttggatgcctacgcattca

SEQ ID NO: 600867 - DNA, 120 bp, Artificial Sequence
  ENSG00000174640_43 (sequence is synthesized)
agggtgccattgtgggtctttggtccctttcccatttgaggctgtttaatggccctgcttctcacctgagcctggaaaccctacaaagccgagaccccagggttaggcccacctccctgt

SEQ ID NO: 600868 - DNA, 120 bp, Artificial Sequence
  ENSG00000174640_44 (sequence is synthesized)
gcacactcgcggctatgccctctcccggccccagtcctaggaagcccactcctctgcaccactccctctccctacagaatcccgctcctcaagggctgaacaaaaaagccggaaaaggaa

SEQ ID NO: 600869 - DNA, 120 bp, Artificial Sequence
  ENSG00000174640_45 (sequence is synthesized)
gagtgtgcaggaaccttttttattcaatccttcttttacccttcttggaaaaagcgcaaatacagtgataactaaataccgtatctctatcaattatcctttggcccaaagccctttggg

SEQ ID NO: 600870 - DNA, 120 bp, Artificial Sequence
  ENSG00000174640_46 (sequence is synthesized)
gtgatcctccatgatggatgccccatgtaaaggtgaggaatctgatcccgaggaagcaaccattgtggccaatttcacatagataatagctggccaggtctagactcaaaccaggctgtc

SEQ ID NO: 600871 - DNA, 120 bp, Artificial Sequence
  ENSG00000174640_47 (sequence is synthesized)
cacttctctctggtccagcccaattgccccagctgagtcattctgaagagtcagcatggactaaaatggtggggaggcccctcttttcccactgatgttcactggcccatgggagggaag

SEQ ID NO: 600872 - DNA, 120 bp, Artificial Sequence
  ENSG00000174640_48 (sequence is synthesized)
tgggggaatctcttgagggccattaaggtgggtaacaaaggcaaaagaaccaggtaacagttcatttacttaccttctattcaactagcaacaacatcacaactattcattaaacagggc

SEQ ID NO: 600873 - DNA, 120 bp, Artificial Sequence
  ENSG00000174640_49 (sequence is synthesized)
caatttatccctatagcaccatgagttaaagagagttgtggagaaaagagacaaagagggaagggttttgagaagaaaaggccctgagaatcctgcacacagaccttcaagggaacagct

SEQ ID NO: 600874 - DNA, 120 bp, Artificial Sequence
  ENSG00000174640_50 (sequence is synthesized)
ccatctggtgactgcttagcagattcttgctcaagaaacaaagccatattgtgattttattcaaccactctcaaagatggagagatacagttaagctggaggctgaagccagtcagtatc

SEQ ID NO: 600875 - DNA, 120 bp, Artificial Sequence
  ENSG00000174640_51 (sequence is synthesized)
aaattgatactaaaatattatattgcagcaaatccagaagaaatacatcctatctttcgcaaccacaggaagtaaatacctggaagaaaggtccatctcctgccagtagcaccagacacc

SEQ ID NO: 600876 - DNA, 120 bp, Artificial Sequence
  ENSG00000174640_52 (sequence is synthesized)
agattcattataacctttcatcagagattaaatatggaaacagatcctggaaaagcccttggcaaatcataaatgagaggaagtttttctccatggcataccctggccattcctccactc

SEQ ID NO: 600877 - DNA, 120 bp, Artificial Sequence
  ENSG00000174640_53 (sequence is synthesized)
tccagccacatcatgtctccagccctgctacaacttgacagcaataataataactaaaatgtgcacagatctttacagtttaccaagccattaacccatttaaaacacttctttaatcag

SEQ ID NO: 600878 - DNA, 120 bp, Artificial Sequence
  ENSG00000174640_54 (sequence is synthesized)
taaatcagtggggaaaggcttggctatgctgtggtaacaaacctctcgaatcttagtcacttgacacaacaaaagatggtatctcgctcacagaacctgtggtgatctgggtgactctca

SEQ ID NO: 600879 - DNA, 120 bp, Artificial Sequence
  ENSG00000174640_55 (sequence is synthesized)
ggtcagtggctcagtagtgcccctctgcctgctcagggcctggaggattggcctgagagcccccccaaccagtgtctcagtaactcagactgtttggaacctgaggtacctccatttcat

SEQ ID NO: 600880 - DNA, 120 bp, Artificial Sequence
  ENSG00000174640_56 (sequence is synthesized)
tataagctgccatgatggatggggcaggggaagaaagtcctggaagatcccgcactgctaagcaatgctttgtcccaaagtaacgctcttcactctgctcccagcctagctgccgcaaga

SEQ ID NO: 600881 - DNA, 120 bp, Artificial Sequence
  ENSG00000174640_57 (sequence is synthesized)
gcggaacagaatattctgtgtgctcaggagaagaaaagagcagatatggttgagcactaaaaccctctactgtgggtagtgaacctaggtggacacagttgctcaccgggacacttaaac

SEQ ID NO: 600882 - DNA, 120 bp, Artificial Sequence
  ENSG00000174640_58 (sequence is synthesized)
cagctttgcggggctgtcggggttgggaagcacagtctggaaagatttcccaatggaggaagcaccaattgtgggtccctgaagctgaggggatgatgcccaggcaaggccgaggcagtc

SEQ ID NO: 600883 - DNA, 120 bp, Artificial Sequence
  ENSG00000174640_59 (sequence is synthesized)
tgcagagggctggggaggtgggaaagacgattttgctcagaggaggcagagatggggtggtggctgagagagatgcagggtcaaggaaaggatggcttcagagaggagagatttgctggg

SEQ ID NO: 600884 - DNA, 120 bp, Artificial Sequence
  ENSG00000174640_60 (sequence is synthesized)
gcaaaaggccacaggatggggaggctgcggggtccaagaggacagctgatggagcgagaccctgcaggcaaggaggagatggggtgactcatggcagaatcgcaccagagttcccacagc

SEQ ID NO: 600885 - DNA, 120 bp, Artificial Sequence
  ENSG00000174640_61 (sequence is synthesized)
cctgtgcggccactatgactagtcccatcctgtacatggagaaaacgaggctccttccagttgtccctcacgcctcccttgatttatgtactacctgatgtgtataaggacaggtggtga

SEQ ID NO: 600886 - DNA, 120 bp, Artificial Sequence
  ENSG00000174640_62 (sequence is synthesized)
caaacacatggtccctacccttcaaggacatataatccagagctaagacaagaccttaacacagggcaaagtactatgctctgagttcatttgatgagcgatgggagaacgggcttgatc

SEQ ID NO: 600887 - DNA, 120 bp, Artificial Sequence
  ENSG00000174640_63 (sequence is synthesized)
ctagccatgcgggagagactggaattcaagagagtcaaatgtgctgggaaagactttctgggcaaaaggaataagcaaaggtgtgcaaaggtaaggaagcaggaaacctttgcacatctt

SEQ ID NO: 600888 - DNA, 120 bp, Artificial Sequence
  ENSG00000174640_64 (sequence is synthesized)
gagaactcgccggccagaggcctgtgaaggagcgcagtggtcaggcaggagaggcagtcggatgcaggctgagaccatcctggagggtcttgaggctggcttaccccaggctgtgagtag

SEQ ID NO: 600889 - DNA, 120 bp, Artificial Sequence
  ENSG00000174640_65 (sequence is synthesized)
tgggctcagcctagtcccggctcctgggttagtgctcacgtgtctctctgccccctcagggcctggaggaatggccttagagcccccaccaaccacgctcaggaaggcattcctagctca

SEQ ID NO: 600890 - DNA, 120 bp, Artificial Sequence
  ENSG00000174640_66 (sequence is synthesized)
gagtaccctcctggagtctacactggaaggggctcctgagtgggccgcgccacaccccgaggagcagaggcgcagtcctcccgcgtgctcccagcacactccacccctacccagcacacc

SEQ ID NO: 600891 - DNA, 120 bp, Artificial Sequence
  ENSG00000174640_67 (sequence is synthesized)
cacggggcccccaccttgctcacctggggggaaccacccactctgcgccctctcagggagaggtggtggccgctgctctatcccctccctctcttcctcttccaccttctctctcttctc

SEQ ID NO: 600892 - DNA, 120 bp, Artificial Sequence
  ENSG00000174640_68 (sequence is synthesized)
atctgggtgctggaacccaagggtgaaactgagagtcagaaagtctcagtctcaaggcagagcggggcaactaatttaaaacggcttctactccggcccccagtgtgactaatctccttc

SEQ ID NO: 600893 - DNA, 120 bp, Artificial Sequence
  ENSG00000174640_69 (sequence is synthesized)
tcttcgctccacaggtctataaatgggccacagtaggcacccctttttaaatctgtaaaatccccaaatccattaaaagtgacttcagaggtcccagatagggaccaacatttgtttaaa

SEQ ID NO: 600894 - DNA, 120 bp, Artificial Sequence
  ENSG00000174640_70 (sequence is synthesized)
aagtccaggcacagaagcaagccagtgtcaagggactcgccattgccagtgtttgtgctctgccaaggcctcctgcagctctgccaactcctgtacagcgcctacttcaagagcagcctc

SEQ ID NO: 600895 - DNA, 120 bp, Artificial Sequence
  ENSG00000174640_71 (sequence is synthesized)
caggtatcgtgggaggcattggcatagatgtgttctgattgtcggccaaaacaccaggctcacggaaatgcaggtgctgtttgcttcaggagagcattctctggatgccctcccatgcac

SEQ ID NO: 600896 - DNA, 120 bp, Artificial Sequence
  ENSG00000174640_72 (sequence is synthesized)
gggggctcacctccacccagccctgagcttctgaggccagagactcaagggctcagggaagggtggctacagtgagcctgggccgtgaacactcaccccttttattgccttcagagggct

SEQ ID NO: 600897 - DNA, 120 bp, Artificial Sequence
  ENSG00000174640_73 (sequence is synthesized)
tcactggtcggtggagaaatgtctgtagacccactctggtggttgcaagaatttgccatcagcagagaaggcagggcgccattctgcacgacagcttcgagaggaaggagaggaaaaggt

SEQ ID NO: 600898 - DNA, 120 bp, Artificial Sequence
  ENSG00000174640_74 (sequence is synthesized)
ccatgactctacctgatggagttgaagaaagggatgtgggggtagaaaataaatagagctaaaaagctgcagcatgttaagcaaattcagggtgaaatctaaacaaatttcatgatgcag

SEQ ID NO: 600899 - DNA, 120 bp, Artificial Sequence
  ENSG00000174640_75 (sequence is synthesized)
gacttcccagaggctttaagaggtgagggtgttggtgaatttccaaaaggtggtatctcctatgtgttcccgtaccatgttagcatgtcaaggatcaggagacctccagggaacagtttg

SEQ ID NO: 600900 - DNA, 120 bp, Artificial Sequence
  ENSG00000174640_76 (sequence is synthesized)
ccctttgactttgcgcctagttgcctgtttctcatctctccccccttttgtggccctcagagtcctttaaatgacaatgtgcaaggttcttttgctgaggggaaataatactaatggcaa

SEQ ID NO: 600901 - DNA, 120 bp, Artificial Sequence
  ENSG00000174640_77 (sequence is synthesized)
cagtgctgggagccctgcccagggaggctctgtgctgagctcctcattgcagggcctcattcagtcccacagcgtccatgtgacacaggccctgttggcgcctccactctgcacattgga

SEQ ID NO: 600902 - DNA, 120 bp, Artificial Sequence
  ENSG00000174652_0 (sequence is synthesized)
gtgttttccggcgctttctccgcgccgccaaacccgttttcttcctggtggcgtttgggcttaatacagctttggcgaggtcggatgacgggtgggagccagcggtggaaggggtggcga

SEQ ID NO: 600903 - DNA, 120 bp, Artificial Sequence
  ENSG00000174652_1 (sequence is synthesized)
aagtaccggtttgccccaggccgccgaggggcctccttagagagaccttgcctgctccgctcgcgtccgccggggccgcgcgggtcctcctggcgccgccaggttcaaaaagccactcga

SEQ ID NO: 600904 - DNA, 120 bp, Artificial Sequence
  ENSG00000174652_2 (sequence is synthesized)
gttgtcactgcgacggccctgggccaggagccgtttcgggatctgtcaaacaacgagttttcgtcgttcgaatcaggttgactggtccttcatccccccaatctcccgtacctggcgagt

SEQ ID NO: 600905 - DNA, 120 bp, Artificial Sequence
  ENSG00000174652_3 (sequence is synthesized)
ccagctcgtcgcggcctgtacctccccacagagcttcaaaacgggcttttaggaagaaggaatggaggctttgaagcaatgctaagaaaagagtgatatgcaagctgagaccaaaaatat

SEQ ID NO: 600906 - DNA, 120 bp, Artificial Sequence
  ENSG00000174652_4 (sequence is synthesized)
ggtatgatttagccatactgaaggggaaggaaataagagctgggcaaagcattctgtgaattggctgactccacttctatggtgagagagaggagtgcatcaaagattactcccagtaga

SEQ ID NO: 600907 - DNA, 68 bp, Artificial Sequence
  ENSG00000174652_5 (sequence is synthesized)
ataagccactgtgcctggccaaagataccgttaaccctggataaagagaatggaggttacctctgtcc

SEQ ID NO: 600908 - DNA, 120 bp, Artificial Sequence
  ENSG00000174652_6 (sequence is synthesized)
cgttaaccctggataaagagaatggaggttacctctgtccgtgtagattcctaagctgtcctggagtgatccttggagtaaaggaaaggtgctttgaagcacattcagccatcagccctg

SEQ ID NO: 600909 - DNA, 120 bp, Artificial Sequence
  ENSG00000174652_7 (sequence is synthesized)
tgggatggcagccactgatttgtcctatggtctttacagggacccagtctgccttcaagaaaagacagaagtagaaagggtggtggctgactgtctgacaaattgttatcaggattcagt

SEQ ID NO: 600910 - DNA, 120 bp, Artificial Sequence
  ENSG00000174652_8 (sequence is synthesized)
gacttttgatgatctggctgtggacttcaccccagaagaatggactttactggacccaactcagagaaacctctacagagatgtgatgctggagaactacaagaatttggccacagtagg

SEQ ID NO: 600911 - DNA, 120 bp, Artificial Sequence
  ENSG00000174652_9 (sequence is synthesized)
atatcagctcttcaaacccagtctgatctcttggctggaacaagaagagtctaggacagtgcagagaggtgatttccaagcttcagaatggaaagtgcaacttaaaaccaaagagttagc

SEQ ID NO: 600912 - DNA, 120 bp, Artificial Sequence
  ENSG00000174652_10 (sequence is synthesized)
ccttcagcaggatgttttgggggagccaacctccagtgggattcaaatgataggaagccacaacggaggggaggtcagtgatgttaagcaatgtggagatgtctccagtgaacactcatg

SEQ ID NO: 600913 - DNA, 120 bp, Artificial Sequence
  ENSG00000174652_11 (sequence is synthesized)
ccttaagacacatgtgagaactcaaaatagtgagaacacatttgagtgttatctgtatggagtagacttccttactctgcacaagaaaacctctactggagagcaacgttctgtatttag

SEQ ID NO: 600914 - DNA, 120 bp, Artificial Sequence
  ENSG00000174652_12 (sequence is synthesized)
tcagtgtggaaaagccttcagcctgaacccagatgttgtttgccagagaacgtgcacaggagagaaagcttttgattgcagtgactctgggaaatccttcattaatcattcacaccttca

SEQ ID NO: 600915 - DNA, 120 bp, Artificial Sequence
  ENSG00000174652_13 (sequence is synthesized)
gggacatttaagaactcacaatggagaaagtctccatgaatggaaggaatgtgggagaggctttattcactccacagaccttgctgtgcgtatacaaactcacaggtcagaaaaacccta

SEQ ID NO: 600916 - DNA, 120 bp, Artificial Sequence
  ENSG00000174652_14 (sequence is synthesized)
gatattctgcataccttaatattcacatgggaacccacactggagacaatccctatgagtgtaaggagtgtgggaaagccttcaccaggtcttgtcaacttactcagcacagaaaaactc

SEQ ID NO: 600917 - DNA, 120 bp, Artificial Sequence
  ENSG00000174652_15 (sequence is synthesized)
acactggagagaaaccttataaatgtaaggattgtgggagagccttcactgtttcctcttgcttaagtcaacatatgaaaatccatgtgggtgagaagccttatgaatgcaaggaatgtg

SEQ ID NO: 600918 - DNA, 120 bp, Artificial Sequence
  ENSG00000174652_16 (sequence is synthesized)
ggatagccttcactagatcttctcaacttactgaacatttaaaaactcacactgcaaaggatccctttgaatgtaagatatgtggaaaatcctttagaaattcctcatgcctcagtgatc

SEQ ID NO: 600919 - DNA, 120 bp, Artificial Sequence
  ENSG00000174652_17 (sequence is synthesized)
actttcgaattcacactggaataaaaccctataaatgtaaggattgtgggaaagccttcactcagaactcagaccttactaagcatgcacgaactcacagtggagagaggccctatgaat

SEQ ID NO: 600920 - DNA, 120 bp, Artificial Sequence
  ENSG00000174652_18 (sequence is synthesized)
gtaaggaatgtggaaaggcctttgccagatcctctcgccttagtgaacatacaagaactcacactggagagaagccttttgaatgtgtcaaatgtgggaaagcctttgctatttcttcaa

SEQ ID NO: 600921 - DNA, 120 bp, Artificial Sequence
  ENSG00000174652_19 (sequence is synthesized)
atcttagtggacatttgagaattcacactggagagaagccctttgagtgcctggaatgtggtaaagcatttacgcattcctccagtcttaataatcacatgcggacccacagcgccaaaa

SEQ ID NO: 600922 - DNA, 120 bp, Artificial Sequence
  ENSG00000174652_20 (sequence is synthesized)
aaccattcacgtgtatggaatgtggcaaagcttttaagtttcccacgtgtgttaaccttcacatgcggatccacactggagaaaaaccctacaaatgtaaacagtgtgggaaatccttca

SEQ ID NO: 600923 - DNA, 120 bp, Artificial Sequence
  ENSG00000174652_21 (sequence is synthesized)
acactggagagaaaccctatgaatgtaaggagtgcgggaaagccttcagttcttccagttcctttcgaaatcatgaaagaaggcatgcggatgagagactgtcagcataaggaatgtggg

SEQ ID NO: 600924 - DNA, 120 bp, Artificial Sequence
  ENSG00000174652_22 (sequence is synthesized)
atgcggatgagagactgtcagcataaggaatgtgggaaaacctaaaggtgtccctgttctctctgaagacatgaaaactcactggggagaaaccctatgaatgtaaaaatgtggaagcaa

SEQ ID NO: 600925 - DNA, 120 bp, Artificial Sequence
  ENSG00000174652_23 (sequence is synthesized)
ctttgtatctcaggtcttaatgaacacatatgaattcacagtggagaagaccctgcatcagggaatgtggaaatgactttgctgaattctcaagccttaccaaacacatcagaaatctca

SEQ ID NO: 600926 - DNA, 120 bp, Artificial Sequence
  ENSG00000174652_24 (sequence is synthesized)
ctggagagaaactgtatgaatgtagagaatctgggaatacctttctgaatcccacaaaccttaatgtgtgtatgtgaactcacattggagagaaaccctgcaatttaaatggtatggtct

SEQ ID NO: 600927 - DNA, 120 bp, Artificial Sequence
  ENSG00000174652_25 (sequence is synthesized)
ggatgatgccccactccatatttgtaagccctaagtcctagttccttacactataactgtatttggacatagggttttcaaacaggtgagtaacttcaaatgaggttgttgggttcgatc

SEQ ID NO: 600928 - DNA, 120 bp, Artificial Sequence
  ENSG00000174652_26 (sequence is synthesized)
cctaatctgacatcactggtgtccctataagggaaactgaaggaaggatacacatggagaagactgtgtggatccaccagaagatggccatctacaagccaaggacagagacctggaaca

SEQ ID NO: 600929 - DNA, 120 bp, Artificial Sequence
  ENSG00000174652_27 (sequence is synthesized)
gatgctttcattatggcctccagaggaaaccaaccctgtctccaccttgatattgcacttccaggctccagaactgtgaggcaataaatttctcttggttaaatcattcagtctgttatt

SEQ ID NO: 600930 - DNA, 120 bp, Artificial Sequence
  ENSG00000174652_28 (sequence is synthesized)
ttgtacagcaaccctaggaaactaatactgtgaggaacttgggaaaagctttagatcaagcttgtccaacccgcaggccaggatggctttgaatgcagaccaacacaaatttttaagctt

SEQ ID NO: 600931 - DNA, 120 bp, Artificial Sequence
  ENSG00000174652_29 (sequence is synthesized)
ccaaaatatcatacttgcatcaccaggtagacacatttccttctacacagaattatcttcagagcttcttaaagcaaataaagcctccttcaaggactgagtccctagtcgaattcccgg

SEQ ID NO: 600932 - DNA, 120 bp, Artificial Sequence
  ENSG00000174652_30 (sequence is synthesized)
aaggagtggagcctgtcatattgtgtttatctagcatctgctcaagagtgtgctgcagtggagggaaatcagatgacctcccagtctggttgtgttacatacaatcatgtgtaagaagtg

SEQ ID NO: 600933 - DNA, 120 bp, Artificial Sequence
  ENSG00000174652_31 (sequence is synthesized)
attagtcttccctcatggtcccaactgcatagtttttattttgttgagtgttctgacacatggtaagggacatgaaagtatcctttgagataatctttccattcatcagtgtttatctag

SEQ ID NO: 600934 - DNA, 120 bp, Artificial Sequence
  ENSG00000174652_32 (sequence is synthesized)
aaacaacgagttttcgtcgttcgaatcaggttgactggtccttcatccccccaatctcccgtacctggcgagtccagctcgtcgcggcaatgctaagaaaagagtgatatgcaagctgag

SEQ ID NO: 600935 - DNA, 120 bp, Artificial Sequence
  ENSG00000174652_33 (sequence is synthesized)
acaggcgtgagccaccgcccccggcctgattttttctttatcaaataggggtcattggtatctactgtaaagggtggttatgataattaagcgagtatataaagctgctagtgtgacttc

SEQ ID NO: 600936 - DNA, 120 bp, Artificial Sequence
  ENSG00000174652_34 (sequence is synthesized)
gtgacttctgacacacactgttcctcagtagtggaagttggtcttcctactatttgtagtgtacaccgttttcagtgtcttttcctctatatgctctgcagagagagtgctaatgatgtc

SEQ ID NO: 600937 - DNA, 120 bp, Artificial Sequence
  ENSG00000174652_35 (sequence is synthesized)
aggtgtccccccccacacagtatggagtccagtggcctgtgcctgatcattcacgctgcagcttcatttctgaggtgctgatgtgggctagggaatgctttgttcctttttttttttttt

SEQ ID NO: 600938 - DNA, 120 bp, Artificial Sequence
  ENSG00000174652_36 (sequence is synthesized)
aaagtgctaggattacaggtgtgagccatcacgcccagccagaatacttcatcagccccctgctgtgtgtgctttgggaagaggtgctgtgtctttccagggaagagaagttttccttat

SEQ ID NO: 600939 - DNA, 120 bp, Artificial Sequence
  ENSG00000174652_37 (sequence is synthesized)
ttccttatctgtaaaataagactgttacccttttcccagtgggcagcatggctgactatccttttttttgcctttacgtgaggcagtagtgccctggaattgatagcggtggtgtgtatg

SEQ ID NO: 600940 - DNA, 120 bp, Artificial Sequence
  ENSG00000174652_38 (sequence is synthesized)
tgtgtgttttcttgagtgtgcgggagtatataggaatctcacagtaggatggaatgactttggggtacgtgaatgtgggaattatcgtcagccctgggttctcatgccttctttcttttc

SEQ ID NO: 600941 - DNA, 120 bp, Artificial Sequence
  ENSG00000174667_0 (sequence is synthesized)
tttttcctccttccccagcagacacaacagctacatggaagcagaaaaccttacagaattatcaaaatttctcctcctgggactctcagatgatcctgaactgcagcccgtcctctttgg

SEQ ID NO: 600942 - DNA, 86 bp, Artificial Sequence
  ENSG00000174667_1 (sequence is synthesized)
gactctcagatgatcctgaactgcagcccgtcctctttgggctgttcctgtccatgttctggccgtcagctctgactcccacctcc

SEQ ID NO: 600943 - DNA, 120 bp, Artificial Sequence
  ENSG00000174667_2 (sequence is synthesized)
tgacatctgtttcatctccaccacagtccccaagatgctagtgagcatccaggcacggagcaaagacatctcctacatggggtgcctcactcaggtgtattttttaatgatgtttgctgg

SEQ ID NO: 600944 - DNA, 120 bp, Artificial Sequence
  ENSG00000174667_3 (sequence is synthesized)
aatggatactttcctactggccgtgatggcctatgaccggtttgtggccatctgccacccactgcactacacggtcatcatgaacccctgcctctgtggcctcctggttctggcatcttg

SEQ ID NO: 600945 - DNA, 120 bp, Artificial Sequence
  ENSG00000174667_4 (sequence is synthesized)
caggcactgagattccgcatttcttctgtgaaccggctcaggtcctcaaggtggcctgctctaacaccctcctcaataacattgtcttgtatgtggccacggcactgctgggtgtgtttc

SEQ ID NO: 600946 - DNA, 120 bp, Artificial Sequence
  ENSG00000174667_5 (sequence is synthesized)
ctgtagctgggatcctcttctcctactctcagattgtctcctccttaatgggaatgtcctccaccaagggcaagtacaaagccttttccacctgtggatctcacctctgtgtggtctcct

SEQ ID NO: 600947 - DNA, 120 bp, Artificial Sequence
  ENSG00000174667_6 (sequence is synthesized)
tccttgttctatggaacaggacttggggtctatctgagttctgctgtgacccattcttcccagagcagctccaccgcctcagtgatgtacgccatggtcacccccatgctgaaccccttc

SEQ ID NO: 600948 - DNA, 120 bp, Artificial Sequence
  ENSG00000174667_7 (sequence is synthesized)
acagcctgaggaacaaggatgtgaagggggccctggaaagactcctcagcagggccgactcttgtccatgacaaatcagggcctcagaactaagaggacacactgcgtacccctaaggca

SEQ ID NO: 600949 - DNA, 120 bp, Artificial Sequence
  ENSG00000174667_8 (sequence is synthesized)
gcttcctaggaacagatcgtgtagaagagaaaacttcagtgataaccatcagagttagtgtgacccagtgagggctggtggggtaagaaggaaaagaggagagagaataagtactagcct

SEQ ID NO: 600950 - DNA, 120 bp, Artificial Sequence
  ENSG00000174667_9 (sequence is synthesized)
tcacagtaatgagcctggaaagtcccatacttattgagtctatgaaggtgaagtccctgtactttgatggtactttagttttcacagaaaccagtgtctcccaccttctgttctcactcc

SEQ ID NO: 600951 - DNA, 120 bp, Artificial Sequence
  ENSG00000174667_10 (sequence is synthesized)
ttggaatccagggcccgtctttaataagttattttccgaacagtctctaactctcctgcactctttcctataaactttagtctcctgttgaatttcgtacatccagttacttattcatta

SEQ ID NO: 600952 - DNA, 120 bp, Artificial Sequence
  ENSG00000174667_11 (sequence is synthesized)
gtttaaatatccggctctttttctcttttaaaaaatgtgcttgatgtgggatttttggttgttgttattgggttgtttgttgttgttattgttattgtttttgagacagagtctggctct

SEQ ID NO: 600953 - DNA, 120 bp, Artificial Sequence
  ENSG00000174667_12 (sequence is synthesized)
ttttctttttttttttaatcaaaaacaactatgattttgcttttgtttttgtgttagtttctcctaaaaactccctctgtaagccctttttgacttttcttccctagatgtttcccataa

SEQ ID NO: 600954 - DNA, 120 bp, Artificial Sequence
  ENSG00000174667_13 (sequence is synthesized)
agttccatctttgatcagttttcttaccactctttctgagacttctaatttgatgtgtatggcactcccaatatcaagtgctgacctggtttcctcaaaaattatcctgttgaatgttga

SEQ ID NO: 600955 - DNA, 120 bp, Artificial Sequence
  ENSG00000174667_14 (sequence is synthesized)
tgttcctcaccttagtatagttttttcttgtcctctggataggaaataaaatgaaaaccatagattagtcgtataaaatgtttacaatatcaggacagtgcttgttgctttacatgtctg

SEQ ID NO: 600956 - DNA, 120 bp, Artificial Sequence
  ENSG00000174667_15 (sequence is synthesized)
atgttattcaatcctgaaaacatttcgtgagaaattttgtctcattcactgcatttctcaaaggaggagactgagatggaggtagagtatatcctaacaatctgacactttgcccacact

SEQ ID NO: 600957 - DNA, 120 bp, Artificial Sequence
  ENSG00000174667_16 (sequence is synthesized)
tctaactttgccatcctactttccataaaaacagtgatataaaattttcggggcacagtggctcacacctgtcttcccagctacttggagggctgaggcaggagaatcactggagcctag

SEQ ID NO: 600958 - DNA, 120 bp, Artificial Sequence
  ENSG00000174667_17 (sequence is synthesized)
gggtgacagagcaagaccctgtctcaaaccaaaaacaaacacaaaagcaaagaatgataatgtgattttcaacttcaaattatgactctatatttgaaagctggttgggtcaaatggttc

SEQ ID NO: 600959 - DNA, 120 bp, Artificial Sequence
  ENSG00000174667_18 (sequence is synthesized)
ctagtaatatactggccagaatgagtctgacatgctatccctttgaaatacaagccctataagcccacagaaatcagagccgtggaatctgggagcacaaaccccttaggtgtctcacta

SEQ ID NO: 600960 - DNA, 120 bp, Artificial Sequence
  ENSG00000174667_19 (sequence is synthesized)
caggtgatgttaggcagggccaatcttgttccaactcttgatttccgggccattgtattctatatcataaagatattatcattttgatggtatcaaaagatattatcatttttcactgat

SEQ ID NO: 600961 - DNA, 120 bp, Artificial Sequence
  ENSG00000174667_20 (sequence is synthesized)
ttggaatgcatactaatcctaatttgcatcctgcaaatttggtagccagtattttctgtttattcaaatacctgcaataaatatttgtctttgaaataaaactcaggtggcagaggttgc

SEQ ID NO: 600962 - DNA, 120 bp, Artificial Sequence
  ENSG00000174667_21 (sequence is synthesized)
gcgacagagcaagactctgtctaaaacataaaacaaaataaataaataaaacaaaataacttagaaagtataattgcattgtttgtaactctaaagataaatagttgagggatgaatacc

SEQ ID NO: 600963 - DNA, 120 bp, Artificial Sequence
  ENSG00000174667_22 (sequence is synthesized)
gtaactctaaagataaatagttgagggatgaatacctcattctccacgatgtggttatttcacattgcattcctgtatcaaaacgtttcatctaccccataaatatatacagctactatc

SEQ ID NO: 600964 - DNA, 120 bp, Artificial Sequence
  ENSG00000174667_23 (sequence is synthesized)
tacgcacaaaaattaaaaatgttttaaaacatttttaaagaaaaataaaagtagaagaggagaaaagtgaatgaccattgaaggaacagggcttcctcttctcattaaaacctcttctgt

SEQ ID NO: 600965 - DNA, 120 bp, Artificial Sequence
  ENSG00000174667_24 (sequence is synthesized)
cctctgagttcccaccaccaagtttcagagacagtgacaaaccacatcagatttttttttaattttaaaatgaaatgggagtcatatctgcaaatccattgaatgaaccatgtaaataaa

SEQ ID NO: 600966 - DNA, 71 bp, Artificial Sequence
  ENSG00000174667_25 (sequence is synthesized)
gtcatatctgcaaatccattgaatgaaccatgtaaataaagaagaagcaggccttccatgagaagaatatg

SEQ ID NO: 600967 - DNA, 120 bp, Artificial Sequence
  ENSG00000174667_26 (sequence is synthesized)
tgggattacaggcatgacccaccacacccagccactactttcattcttgaagttcagatttatgtttctaaggaggactttctattttactttctatactccttgcctgtaatttgagat

SEQ ID NO: 600968 - DNA, 120 bp, Artificial Sequence
  ENSG00000174667_27 (sequence is synthesized)
tttatgcattggtaatttatgtttttgctaagttggataagaccctaattctttctgtctgattgatctatgttggcatgttagaaactgctgatctttgcagcctaacttggtaacttt

SEQ ID NO: 600969 - DNA, 120 bp, Artificial Sequence
  ENSG00000174667_28 (sequence is synthesized)
atatattgcttaagcatttccccatatctaacaagactgcaatcagatgtcagccagggttgcagtcatctcgtggactgactggagaggatctgctgtgaagctcactcacatggctgt

SEQ ID NO: 600970 - DNA, 120 bp, Artificial Sequence
  ENSG00000174667_29 (sequence is synthesized)
ttgtagggtttaggttcttgcaggacaatggcctaaggcccctcagtttgttgccacaagggactctcatggggcagctcacatatgccagctgagttctgtcagtgcagggaagcaagg

SEQ ID NO: 600971 - DNA, 120 bp, Artificial Sequence
  ENSG00000174667_30 (sequence is synthesized)
gacagagcaacagaggccaggcctatccttctaccaggacatgggtctctaagcacccaagaccatggagatttccctctgccttccggtagagttcctcaccattcaagacattgtact

SEQ ID NO: 600972 - DNA, 120 bp, Artificial Sequence
  ENSG00000174667_31 (sequence is synthesized)
gtcagaaaaattccatgctgtagaactggcacatggacatgtcgccctttcctctgcactggatatttctacagacttaacaatgttctcctggaccttcagacaaaataagccaccctg

SEQ ID NO: 600973 - DNA, 120 bp, Artificial Sequence
  ENSG00000174667_32 (sequence is synthesized)
gttctccttcgccacaagctctcagcccaacatcacaataagctgctgcaattctgcacctaaattcagcaagtgttcccagcagcttctgattgttgctcatcaagaaagagctcatct

SEQ ID NO: 600974 - DNA, 120 bp, Artificial Sequence
  ENSG00000174667_33 (sequence is synthesized)
tgtgtgttgtgtgtgtgtgtgtgtgtgtgagatcacctagtaaattctttaatgaaatgtactttcttttggcctgtctttattcaagtagataaaataggttgtatggaagttatggag

SEQ ID NO: 600975 - DNA, 120 bp, Artificial Sequence
  ENSG00000174667_34 (sequence is synthesized)
tattcaagtagataaaataggttgtatggaagttatggagtttttgttttgttttgttttgagatgtcttgctctgttgcccaagctgcagtgaagcggctcagtcatagctcactgcag

SEQ ID NO: 600976 - DNA, 120 bp, Artificial Sequence
  ENSG00000174667_35 (sequence is synthesized)
gaagcggctcagtcatagctcactgcagccttgaattcctggcctcaagtaatcctcctgcgccaccatgtccaggtaatttattttattttatttttttgtagagatggagtcttgcta

SEQ ID NO: 600977 - DNA, 120 bp, Artificial Sequence
  ENSG00000174667_36 (sequence is synthesized)
gtctcaagtgaccctcctgcttcagcctcccaaagtggtgagattgtaggtacagaccaccatgcccagccagatattatggttctttataaactttcacattccacccatggctcagag

SEQ ID NO: 600978 - DNA, 62 bp, Artificial Sequence
  ENSG00000174667_37 (sequence is synthesized)
tcagcctctcaagtagctgagattacaggtctgttcaggctggtctggaactcctgacctca

SEQ ID NO: 600979 - DNA, 120 bp, Artificial Sequence
  ENSG00000174669_0 (sequence is synthesized)
gagacacgccgaaatccgcccgaggctacctgtgcgactccagccgccctgcaccggaatctggggagacccgccccccgccccaccggtctgcggccctccgccccagcgcaggtgcag

SEQ ID NO: 600980 - DNA, 120 bp, Artificial Sequence
  ENSG00000174669_1 (sequence is synthesized)
gtgcggcttctctgcccctttcaccccaggcgcatccgccgcggcggccatggcgcgaggagacgccccgcgggacagctaccacctggtcgggatcagcttcttcatcctggggctggg

SEQ ID NO: 600981 - DNA, 120 bp, Artificial Sequence
  ENSG00000174669_2 (sequence is synthesized)
caccctccttccctggaacttcttcatcaccgccatcccgtacttccaggcgcgactggccggggccggcaacagcacagccaggatcctgagcaccaaccacacgggtcccgaggatgc

SEQ ID NO: 600982 - DNA, 120 bp, Artificial Sequence
  ENSG00000174669_3 (sequence is synthesized)
cttcaacttcaacaattgggtgacgctgctgtcccagctgcccctgctgctcttcaccctcctcaactccttcctgtaccagtgcgtcccggagacggtgcgcattctgggcagcctgct

SEQ ID NO: 600983 - DNA, 120 bp, Artificial Sequence
  ENSG00000174669_4 (sequence is synthesized)
ggccatactgctgctctttgccctgacagcagcgctggtcaaggtggacatgagccccggacccttcttctccatcaccatggcctccgtctgcttcatcaactccttcagtgcagtcct

SEQ ID NO: 600984 - DNA, 120 bp, Artificial Sequence
  ENSG00000174669_5 (sequence is synthesized)
acagggcagcctcttcgggcagctgggcaccatgccctccacctacagcaccctcttcctcagcggccagggcctggctgggatctttgctgcccttgccatgctcctgtccatggccag

SEQ ID NO: 600985 - DNA, 120 bp, Artificial Sequence
  ENSG00000174669_6 (sequence is synthesized)
tggcgtggacgccgagacctctgccctggggtactttatcacgccctgtgtgggcatcctcatgtccatcgtgtgttacctgagcctgcctcacctgaagtttgcccgctactacctggc

SEQ ID NO: 600986 - DNA, 120 bp, Artificial Sequence
  ENSG00000174669_7 (sequence is synthesized)
caataaatcatcccaggcccaagctcaggagctggagaccaaagctgagctcctccagtctgatgagaacgggattcccagtagtccccagaaagtagctctgaccctggatcttgacct

SEQ ID NO: 600987 - DNA, 120 bp, Artificial Sequence
  ENSG00000174669_8 (sequence is synthesized)
ggagaaggagccggaatcagagccagatgagccccagaagccaggaaaaccttcagtcttcactgtcttccagaagatctggctgacagcgctgtgccttgtgttggtcttcacagtcac

SEQ ID NO: 600988 - DNA, 120 bp, Artificial Sequence
  ENSG00000174669_9 (sequence is synthesized)
cctgtccgtcttccccgccatcacagccatggtgaccagctccaccagtcctgggaagtggagtcagttcttcaaccccatctgctgcttcctcctcttcaacatcatggactggctggg

SEQ ID NO: 600989 - DNA, 120 bp, Artificial Sequence
  ENSG00000174669_10 (sequence is synthesized)
ctgctggtctgcctgcggttcctgttcgtgcccctcttcatgctgtgccacgtgccccagaggtcccggctgcccatcctcttcccacaggatgcctacttcatcaccttcatgctgctc

SEQ ID NO: 600990 - DNA, 120 bp, Artificial Sequence
  ENSG00000174669_11 (sequence is synthesized)
tttgccgtttctaatggctacctggtgtccctcaccatgtgcctggcgcccaggcaggtgctgccacacgagagggaggtggccggcgccctcatgaccttcttcctggccctgggactt

SEQ ID NO: 600991 - DNA, 120 bp, Artificial Sequence
  ENSG00000174669_12 (sequence is synthesized)
tcctgtggagcctccctctccttcctcttcaaggcgctgctctgaagtggcccctccaggctctttggcagcctcttctcgacgtctccttccggagctgagatccagcccagggcgaat

SEQ ID NO: 600992 - DNA, 120 bp, Artificial Sequence
  ENSG00000174669_13 (sequence is synthesized)
ggcgagcttggctcaggcctctgcggggtggaggcccctgggcctgaggctgccagcagcgggcaggagctgctcttcatccacttggagtgctgtggggaagaaatcaccaccggtcat

SEQ ID NO: 600993 - DNA, 120 bp, Artificial Sequence
  ENSG00000174669_14 (sequence is synthesized)
tctaaccctcacccaggaatgggggtgactcgcacaagacctcatggaaagggtgatgactagggaaaagagggtgcagggcacggctgctccccaccaccaggtctgcatttgttcatc

SEQ ID NO: 600994 - DNA, 120 bp, Artificial Sequence
  ENSG00000174669_15 (sequence is synthesized)
atcatcaggagcagaggtgaccagagggttcagagtgggaggcggggccagcccaggccaggagcgcctcatcttcccaggcctcagccacccagggtaaaaggtgccagggaagttgtg

SEQ ID NO: 600995 - DNA, 120 bp, Artificial Sequence
  ENSG00000174669_16 (sequence is synthesized)
ggcacctgagaggaggaacagatgtggaggacctgagggtgctcaaagggccaggctcagcctcaagcagtgttttcattgccaacacttactgtacccactccgcagagcccagctggg

SEQ ID NO: 600996 - DNA, 120 bp, Artificial Sequence
  ENSG00000174669_17 (sequence is synthesized)
cctgggccccagggccacagctagcctgcatgtgtgtactgcactttacagtttgcaaagctcttccatacccactctctcaccgaagcctaattgaggctcttggaaggagtcaggcaa

SEQ ID NO: 600997 - DNA, 120 bp, Artificial Sequence
  ENSG00000174669_18 (sequence is synthesized)
ggattgtgcttcccccattatacaggtgacaaaactgagtcctggggaaagtgactggtccgtggtagagccgggacccaatcccctctctctcctccctgttggtgctgttcttcctgc

SEQ ID NO: 600998 - DNA, 120 bp, Artificial Sequence
  ENSG00000174669_19 (sequence is synthesized)
ccaacacctgtttctcttttcctcaaggggtttggggcaggagcctgggcacttactccccgtttttgctgtttctccttctgaccctgctcttgggtctaataaccccatttatttgta

SEQ ID NO: 600999 - DNA, 120 bp, Artificial Sequence
  ENSG00000174669_20 (sequence is synthesized)
acgctctgggcggggactccgcagcggctccctagttagggggcgccccggtgggttccagctttaggggtcgcaggagcggctctggcatcacctcggagctgacgaagcgggaagagc

SEQ ID NO: 601000 - DNA, 80 bp, Artificial Sequence
  ENSG00000174672_0 (sequence is synthesized)
gctgttcggctcagctgcacggctcggctcggctcggctcggctcggctgcgcggccgctgacgggcgtgcgctgggggc

SEQ ID NO: 601001 - DNA, 80 bp, Artificial Sequence
  ENSG00000174672_1 (sequence is synthesized)
cggcggcggaagccaggtgcccccgcccgccctgtcctctcgacgaggcggaggcgtcgccgcgggccaggcctcggact

SEQ ID NO: 601002 - DNA, 120 bp, Artificial Sequence
  ENSG00000174672_2 (sequence is synthesized)
cctggccggcgccgggccccagagcgatgacatcgacggggaaggacggcggcgcgcagcacgcgcagtatgttgggccctaccggctggagaagacgctgggcaaggggcagacaggtc

SEQ ID NO: 601003 - DNA, 120 bp, Artificial Sequence
  ENSG00000174672_3 (sequence is synthesized)
tggtgaagctgggggttcactgcgtcacctgccagaaggtggccatcaagatcgtcaaccgtgagaagctcagcgagtcggtgctgatgaaggtggagcgggagatcgcgatcctgaagc

SEQ ID NO: 601004 - DNA, 120 bp, Artificial Sequence
  ENSG00000174672_4 (sequence is synthesized)
tcattgagcacccccacgtcctaaagctgcacgacgtttatgaaaacaaaaaatatttgtacctggtgctagaacacgtgtcaggtggtgagctcttcgactacctggtgaagaagggga

SEQ ID NO: 601005 - DNA, 120 bp, Artificial Sequence
  ENSG00000174672_5 (sequence is synthesized)
ggctgacgcctaaggaggctcggaagttcttccggcagatcatctctgcgctggacttctgccacagccactccatatgccacagggatctgaaacctgaaaacctcctgctggacgaga

SEQ ID NO: 601006 - DNA, 120 bp, Artificial Sequence
  ENSG00000174672_6 (sequence is synthesized)
agaacaacatccgcatcgcagactttggcatggcgtccctgcaggttggcgacagcctgttggagaccagctgtgggtccccccactacgcctgccccgaggtgatccggggggagaagt

SEQ ID NO: 601007 - DNA, 120 bp, Artificial Sequence
  ENSG00000174672_7 (sequence is synthesized)
atgacggccggaaggcggacgtgtggagctgcggcgtcatcctgttcgccttgctggtgggggctctgcccttcgacgatgacaacttgcgacagctgctggagaaggtgaagcggggcg

SEQ ID NO: 601008 - DNA, 120 bp, Artificial Sequence
  ENSG00000174672_8 (sequence is synthesized)
tgttccacatgccgcactttatcccgcccgactgccagagtctgctacggggcatgatcgaggtggacgccgcacgccgcctcacgctagagcacattcagaaacacatatggtatatag

SEQ ID NO: 601009 - DNA, 120 bp, Artificial Sequence
  ENSG00000174672_9 (sequence is synthesized)
ggggcaagaatgagcccgaaccagagcagcccattcctcgcaaggtgcagatccgctcgctgcccagcctggaggacatcgaccccgacgtgctggacagcatgcactcactgggctgct

SEQ ID NO: 601010 - DNA, 120 bp, Artificial Sequence
  ENSG00000174672_10 (sequence is synthesized)
tccgagaccgcaacaagctgctgcaggacctgctgtccgaggaggagaaccaggagaagatgatttacttcctcctcctggaccggaaagaaaggtacccgagccaggaggatgaggacc

SEQ ID NO: 601011 - DNA, 120 bp, Artificial Sequence
  ENSG00000174672_11 (sequence is synthesized)
tgcccccccggaacgagatagaccctccccggaagcgtgtggactccccgatgctgaaccggcacggcaagcggcggccagaacgcaaatccatggaggtgctcagcgtgacggacggcg

SEQ ID NO: 601012 - DNA, 120 bp, Artificial Sequence
  ENSG00000174672_12 (sequence is synthesized)
gctccccggtgcctgcgcggcgggccattgagatggcccagcacggccagaggtctcggtccatcagcggtgcctcctcaggcctttccaccagcccactcagcagcccccgggtgaccc

SEQ ID NO: 601013 - DNA, 120 bp, Artificial Sequence
  ENSG00000174672_13 (sequence is synthesized)
ctcacccctcaccaaggggcagtcccctccccacccccaaggggacacctgtccacacgccaaaggagagcccggctggcacgcccaaccccacgcccccgtccagccccagcgtcggag

SEQ ID NO: 601014 - DNA, 120 bp, Artificial Sequence
  ENSG00000174672_14 (sequence is synthesized)
gggtgccctggagggcgcggctcaactccatcaagaacagctttctgggctcaccccgcttccaccgccggaaactgcaagttccgacgccggaggagatgtccaacctgacaccagagt

SEQ ID NO: 601015 - DNA, 120 bp, Artificial Sequence
  ENSG00000174672_15 (sequence is synthesized)
cgtccccagagctggcgaagaagtcctggtttgggaacttcatcagcctggagaaggaggagcagatcttcgtggtcatcaaagacaaacctctgagctccatcaaggctgacatcgtgc

SEQ ID NO: 601016 - DNA, 120 bp, Artificial Sequence
  ENSG00000174672_16 (sequence is synthesized)
tgtcgattcccagtctcagccacagcgtcatctcccaaacgagcttccgggccgagtacaaggccacgggggggccagccgtgttccagaagccggtcaagttccaggttgatatcacct

SEQ ID NO: 601017 - DNA, 120 bp, Artificial Sequence
  ENSG00000174672_17 (sequence is synthesized)
acacggagggtggggaggcgcagaaggagaacggcatctactccgtcaccttcaccctgctctcaggccccagccgtcgcttcaagagggtggtggagaccatccaggcccagctgctga

SEQ ID NO: 601018 - DNA, 120 bp, Artificial Sequence
  ENSG00000174672_18 (sequence is synthesized)
gcacacacgacccgcctgcggcccagcacttgtcagacaccactaactgtatggaaatgatgacggggcggctttccaaatgtggaattatcccgaaaagttaacatgtcacctccacga

SEQ ID NO: 601019 - DNA, 120 bp, Artificial Sequence
  ENSG00000174672_19 (sequence is synthesized)
ggccatcctctgtgaccgaaggcagctgctgcggacccgccctccctccgctcctgctgttgctgccgggcagtgaggcccagcccagcgccccgtccaccccgcggcagctcctcgcct

SEQ ID NO: 601020 - DNA, 120 bp, Artificial Sequence
  ENSG00000174672_20 (sequence is synthesized)
cagctccgcacggcccgtgggaggaaggccaggctcgggggagcctcctccagcccggccgacccggactcccggtcacctgacccctcagcaagaacagcctgcctggtggccttctgg

SEQ ID NO: 601021 - DNA, 120 bp, Artificial Sequence
  ENSG00000174672_21 (sequence is synthesized)
ggccaggacccctggtgggcaacgtagccacaggaacaggccccgtccaccgcctccacgccgcacctggaggcctcctcgcaggcccgtgccccgcctccctggctgcgccgcctccgt

SEQ ID NO: 601022 - DNA, 120 bp, Artificial Sequence
  ENSG00000174672_22 (sequence is synthesized)
gtagtcttggcctcctcaggctgcctcccgtcctctcgtctcacccgcgcctcccttgcctcatctggggcggctgtgggctctggcgctcctctctggctgaggtggaaacagagacac

SEQ ID NO: 601023 - DNA, 120 bp, Artificial Sequence
  ENSG00000174672_23 (sequence is synthesized)
cctgcggcaccagagccttcccagcaggccaggccgctgggctgggatcagtgttatttatttgccgttttaatttatggattctccgcacctctgttcagggaagggcggcggccacat

SEQ ID NO: 601024 - DNA, 120 bp, Artificial Sequence
  ENSG00000174672_24 (sequence is synthesized)
cccctgccgtctgcgtgtctcaggcagtgggggggctggggccagggcgccctctgaggacagagctggtggggcgcgggggggctggcgagctactgtaaactttaaagaattcctgca

SEQ ID NO: 601025 - DNA, 120 bp, Artificial Sequence
  ENSG00000174672_25 (sequence is synthesized)
agatatttttataaacttttttttcttggtggtttttggaaaagggtgtgggggtgggggcgccgctggggcagggccaggttttgtgttttagtcccttgctcctgcttctttctacac

SEQ ID NO: 601026 - DNA, 120 bp, Artificial Sequence
  ENSG00000174672_26 (sequence is synthesized)
acacatctaaagacggtgcggctcgctctgtcatgggttccgtctctctgtggagaagcagctccacctctgggggggctcggggcagaggggcggtgtcttgtagcgggcggcagcgcc

SEQ ID NO: 601027 - DNA, 120 bp, Artificial Sequence
  ENSG00000174672_27 (sequence is synthesized)
agcgcccctctgtcaggctggggcaatcttggttttgtgtccaaaggtgaaggggtaggaggagggccctcagctggccctccccacacacaggacggcaggggcactgtgaggcttttc

SEQ ID NO: 601028 - DNA, 120 bp, Artificial Sequence
  ENSG00000174672_28 (sequence is synthesized)
ttattaaaatgaaaaaattgaaaaaaaaggacaaagagtcggtggcgctcctctgcagggcgttctgtgcagagcgaggcccagggcgcagccctcagagggctgcaggcccaccctgcc

SEQ ID NO: 601029 - DNA, 120 bp, Artificial Sequence
  ENSG00000174672_29 (sequence is synthesized)
cagtgcccgccgccgtgcttcaccccagctccagcttctgtgttcccttccgcccatgtgcccagccctcccaggcgggcacagcccgggtgcggcggccgtgggggacggcgggtctga

SEQ ID NO: 601030 - DNA, 120 bp, Artificial Sequence
  ENSG00000174672_30 (sequence is synthesized)
tgcatgcctctgccatggagtcgtctgtctgcttcggtgcctgcccctgcctcccacccacctcgtgtatagattttaacgcttctgttaacattagacctctgccacaggctgggattt

SEQ ID NO: 601031 - DNA, 120 bp, Artificial Sequence
  ENSG00000174672_31 (sequence is synthesized)
ctatacataagaacaaaagcaaacacctaggacagcaaacgccaggcggtacaggcgggaaggggctctccacggagatcgaggacacgaagcaaactgcctcttgcttgccttcccctt

SEQ ID NO: 601032 - DNA, 120 bp, Artificial Sequence
  ENSG00000174672_32 (sequence is synthesized)
ttgtgcttcggacacacgcggactccagcaggcgccacggaaatgggcaagcccctgcagtgtacccctgtcataactgtgagcagctgcagctccggaacaataaatcccttccgcaaa

SEQ ID NO: 601033 - DNA, 120 bp, Artificial Sequence
  ENSG00000174672_33 (sequence is synthesized)
acacacgacccgcctgcggcccagcacttgtcagaaccccccccaccagcgccaggactaagctggggtgctgggcttaagggccagaaggtggccaccagctacgagagtagcctctga

SEQ ID NO: 601034 - DNA, 120 bp, Artificial Sequence
  ENSG00000174672_34 (sequence is synthesized)
ttaaacaacttttttcagacgagaagaacgggcaggcggcccaggcccccagcacgcccgccaagcggagtgcccacggcccactcggtgactccgcggccgctggccctggccccggag

SEQ ID NO: 601035 - DNA, 120 bp, Artificial Sequence
  ENSG00000174672_35 (sequence is synthesized)
gggacgccgagtacccaacgggcaaggacacggccaagatgggcccgcccaccgcccgccgcgagcagccttagacacactagcccccccccccagcacagcactgacagcggctgcctc

SEQ ID NO: 601036 - DNA, 120 bp, Artificial Sequence
  ENSG00000174672_36 (sequence is synthesized)
gccgcccgccgcccgccctgccccgagtggacccgcggccgcgccgcccgtccgtccagactgttctcagagcctgggaggaaaggaaaggggcgttggggccggcctgtgggctgcgcc

SEQ ID NO: 601037 - DNA, 120 bp, Artificial Sequence
  ENSG00000174672_37 (sequence is synthesized)
agtctcaggctggctagttcctccttcctggtcactgagccagccttgctgaggggagagcgggttctggacgtgctctgagcttccttcctcacagccttgctcctgggccagatcagc

SEQ ID NO: 601038 - DNA, 120 bp, Artificial Sequence
  ENSG00000174672_38 (sequence is synthesized)
aggaaagcagccagtgccccgccatggcctgcccgggtggggtcctgaagctggggccggagcagggggcacagttctgccccatctggccctagtttggggagggagcctggtagggca

SEQ ID NO: 601039 - DNA, 120 bp, Artificial Sequence
  ENSG00000174672_39 (sequence is synthesized)
ccagcctcaccccatgagccctgagggccaccccagccgatgggcacgtccccgccggccctgcatctgtccttcctccctctgctccccaagagagcccaggtctggcccagcggtggg

SEQ ID NO: 601040 - DNA, 120 bp, Artificial Sequence
  ENSG00000174672_40 (sequence is synthesized)
caggggaggggccgcacatcacagagtgccagctggccacactcccggcccacagctgctccagccgcacctccaccttcctcaaggccagacctggctctgcctgcagcccagcccagc

SEQ ID NO: 601041 - DNA, 120 bp, Artificial Sequence
  ENSG00000174672_41 (sequence is synthesized)
tttgggggcgccgtgaaagcacccagcgtagtcatgctgctgtgtgcgatgggtgctgggcccgcagacttcggtgcttcaaaggcctcactgctgagcacgagacgccgcttttgatgt

SEQ ID NO: 601042 - DNA, 120 bp, Artificial Sequence
  ENSG00000174672_42 (sequence is synthesized)
cgtcaggctctctggtccccgggagtggactcgggggctccgagtgcagggctcacactgtgtctttgagggctggtcacccacccaggcacacctgtggccctgagtcagcactgcctg

SEQ ID NO: 601043 - DNA, 120 bp, Artificial Sequence
  ENSG00000174672_43 (sequence is synthesized)
acgcccaccctcaggagcccccgcctgcctagggtgggaccatgggggaggctggtcctccattctcaggggctgggggacaccccttctggttgagaaggccacaggtggcccccccgc

SEQ ID NO: 601044 - DNA, 120 bp, Artificial Sequence
  ENSG00000174672_44 (sequence is synthesized)
ggaaatgatgacggggcggctttccaaatgtggtaagaatcccccacgctcacctggcacctccacctgccacttcaccgctcaccctcagcccgctgtggccgccacctgccgcccggg

SEQ ID NO: 601045 - DNA, 120 bp, Artificial Sequence
  ENSG00000174672_45 (sequence is synthesized)
ttgtcccggcctccctgtgtagatgtaggcacccagcagcccagatgtccccggccccatcctctaccaggagcagcccaggtcgctcccctaccacagcaagcccaggcggggttcctg

SEQ ID NO: 601046 - DNA, 120 bp, Artificial Sequence
  ENSG00000174672_46 (sequence is synthesized)
tctgaacagccacccaggcgcgctctgcctgagtctcgggctgtgctagaggcgcctctggccatggtcctctcacggctgggcttcctggcccccgcgctggtgggtggggttcgggtg

SEQ ID NO: 601047 - DNA, 120 bp, Artificial Sequence
  ENSG00000174672_47 (sequence is synthesized)
ctcttgagctggagagcagagggcctctgcatgttggggtgagcctgccagcaagacaggagtagccttctgtggcctcagaagcgcctccccactctcctgttggaagcgagttgcagg

SEQ ID NO: 601048 - DNA, 120 bp, Artificial Sequence
  ENSG00000174672_48 (sequence is synthesized)
ccccgcctgctcctgggggtggggggcacagctgacttcaggagcccagcttgagccacctctcacagcggccttggtgagggggggctcacctgtggggggctcacctgtggaggggca

SEQ ID NO: 601049 - DNA, 120 bp, Artificial Sequence
  ENSG00000174672_49 (sequence is synthesized)
tccccagacttgggagtgggtggcatatgggccagggtcagggcgttagggcttggagaaaggttagggttggggttggggttagagccacggtgatggtcagggcatatgggctagggt

SEQ ID NO: 601050 - DNA, 120 bp, Artificial Sequence
  ENSG00000174672_50 (sequence is synthesized)
tagggcgttggggtcagggccatgggttctggctagcactgtggagacagccgtttctatcacgaagcgatggaagattccgccgttccaaccccagattcgagggaggcaggggtgtgg

SEQ ID NO: 601051 - DNA, 120 bp, Artificial Sequence
  ENSG00000174672_51 (sequence is synthesized)
agttggagtgttggtggttttgtaacgaactggtcagagcaccttccgtgagaagggccttttcccccagttcaccggggctcccctgctcagggtgtgccgggggctttgagtcacttc

SEQ ID NO: 601052 - DNA, 120 bp, Artificial Sequence
  ENSG00000174684_0 (sequence is synthesized)
aggctgcggtaaatccgggcttgcggccgctggcgtagtctgtggccgggtggtcgttgctgcgcgccccgagccccgagagccatgcagatgtcctacgccatccggtgcgccttctac

SEQ ID NO: 601053 - DNA, 120 bp, Artificial Sequence
  ENSG00000174684_1 (sequence is synthesized)
cagctgctgctggccgcgctcatgctggtggcgatgctgcagctgctctacctgtcgctgctgtccggactgcacgggcaggaggagcaagaccaatattttgagttctttcccccgtcc

SEQ ID NO: 601054 - DNA, 120 bp, Artificial Sequence
  ENSG00000174684_2 (sequence is synthesized)
ccacggtccgtggaccaggtcaaggcgcagctccgcaccgcgctggcctctggaggcgtcctggacgctagcggcgattaccgcgtctacaggggcctgctgaagaccaccatggacccc

SEQ ID NO: 601055 - DNA, 120 bp, Artificial Sequence
  ENSG00000174684_3 (sequence is synthesized)
aacgatgtgatcctggccacgcacgccagcgtggacaacctgctgcacctgtcgggtctgctggagcgctgggagggcccgctgtccgtgtcggtgttcgcggccaccaaggaggaggcg

SEQ ID NO: 601056 - DNA, 120 bp, Artificial Sequence
  ENSG00000174684_4 (sequence is synthesized)
cagctggccacggtgctggcctacgcgctgagcagccactgccccgacatgcgcgccagggtcgccatgcacctcgtgtgcccctcgcgttacgaggcagccgtgcccgacccccgggag

SEQ ID NO: 601057 - DNA, 120 bp, Artificial Sequence
  ENSG00000174684_5 (sequence is synthesized)
ccgggggagtttgccctgctgcggtcctgccaggaggtctttgacaagctagccagggtggcccagcccgggattaattatgcgctgggcaccaatgtctcctaccccaataacctgctg

SEQ ID NO: 601058 - DNA, 120 bp, Artificial Sequence
  ENSG00000174684_6 (sequence is synthesized)
aggaatctggctcgtgagggggccaactatgccctggtgatcgatgtggacatggtgcccagcgaggggctgtggagaggcctgcgggaaatgctggatcagagcaaccagtggggaggc

SEQ ID NO: 601059 - DNA, 120 bp, Artificial Sequence
  ENSG00000174684_7 (sequence is synthesized)
accgcgctggtggtgcctgccttcgaaatccgaagagcccgccgcatgcccatgaacaaaaacgagctggtgcagctctaccaggttggcgaggtgcggcccttctattatgggttgtgc

SEQ ID NO: 601060 - DNA, 120 bp, Artificial Sequence
  ENSG00000174684_8 (sequence is synthesized)
caggacccctgggagccattctacgtggcaggaggcaaggtgcccaccttcgacgagcgctttcggcagtacggcttcaaccgaatcagccaggcctgcgagctgcatgtggcggggttt

SEQ ID NO: 601061 - DNA, 120 bp, Artificial Sequence
  ENSG00000174684_9 (sequence is synthesized)
gattttgaggtcctgaacgaaggtttcttggttcataagggcttcaaagaagcgttgaagttccatccccaaaaggaggctgaaaatcagcacaataagatcctatatcgccagttcaaa

SEQ ID NO: 601062 - DNA, 120 bp, Artificial Sequence
  ENSG00000174684_10 (sequence is synthesized)
caggagttgaaggccaagtaccccaactctccccgacgctgctgagcccttccctcccctaatctgagaagtcagcctcttggctcctcaggccaccatttaggcctgactggggtaaga

SEQ ID NO: 601063 - DNA, 120 bp, Artificial Sequence
  ENSG00000174684_11 (sequence is synthesized)
aatgtcgctccactttacagaggtagctgtggtgttgaaacactggacttggatatggggtgctgggatcgattcctagctttaccactaactagctgtgtggccttgagtaaatcccgt

SEQ ID NO: 601064 - DNA, 120 bp, Artificial Sequence
  ENSG00000174684_12 (sequence is synthesized)
tacctctctgagcctcggttaccctgtctgtaaaaagggaggtgagaatacctacctcacggaactgttgggaggctcagatgagatgctatatgtgaaaacattctgtaagcttcgtac

SEQ ID NO: 601065 - DNA, 120 bp, Artificial Sequence
  ENSG00000174684_13 (sequence is synthesized)
aaatgtgaagtattaatattatcgcagtattattgttgttattattattgttattattaacaatcttgggtgggtagtaggagagcaaaaagtatgaatgggatggagctaagaagtctg

SEQ ID NO: 601066 - DNA, 120 bp, Artificial Sequence
  ENSG00000174684_14 (sequence is synthesized)
aatacttaatgaaatggactttttggaaagaaatcagatgaaggcataaaatttagttcttagctcttgaacagaagcctaaaattcctggttctctcagggcttcgccttcaagggttc

SEQ ID NO: 601067 - DNA, 120 bp, Artificial Sequence
  ENSG00000174684_15 (sequence is synthesized)
tggaggagggaagggtctgcaggttccatgggtgacagcctgagatctgtcccttcaacgggctgggctgggtatgtgcctaccgatgacaatgtgtaaataaatgcgtgttcacaccca

SEQ ID NO: 601068 - DNA, 120 bp, Artificial Sequence
  ENSG00000174695_0 (sequence is synthesized)
agacgggacatgcagcctcttccgcctgagccccggaagggtgatgtggctgcggcatcgccggcctcgctatgtctgccattttcaattttcagagtctattgactgtaatcttgctgc

SEQ ID NO: 601069 - DNA, 120 bp, Artificial Sequence
  ENSG00000174695_1 (sequence is synthesized)
ttatatgtacctgtgcttatattcgatccttggcacccagcctcctggacagaaataaaactggattgttgggtatattttggaagtgtgccagaattggtgaacggaagagtccttatg

SEQ ID NO: 601070 - DNA, 120 bp, Artificial Sequence
  ENSG00000174695_2 (sequence is synthesized)
ttgcagtatgctgtatagtaatggccttcagcatcctcttcatacagtagctggggaaaatgccagaatgtagttgccatcagatttgattgtgaacaaggactgactgcagaaaataat

SEQ ID NO: 601071 - DNA, 120 bp, Artificial Sequence
  ENSG00000174695_3 (sequence is synthesized)
ggaaaggatgtttaactcttttatctccgaacattgaatgagataaatttccagatgctgttctctattttaatgttattggaccaatgttctgtataaacaattaagatgtaaccattt

SEQ ID NO: 601072 - DNA, 120 bp, Artificial Sequence
  ENSG00000174695_4 (sequence is synthesized)
aatagtctgtaacaatcaacctcagtactgtcactacaatattacattctgcaaatgttattctgttgtatcagatacaaaattttagtgaggtatctctaaggcacatagtagaaaaca

SEQ ID NO: 601073 - DNA, 120 bp, Artificial Sequence
  ENSG00000174695_5 (sequence is synthesized)
aaattggttaattactcaagttcctttcactgtgatttggaaatgatttaatctttatagaatgagaaccttttttggactagcttttttattaaaatggctcaatttgtgttgataagg

SEQ ID NO: 601074 - DNA, 120 bp, Artificial Sequence
  ENSG00000174695_6 (sequence is synthesized)
attgcattaatatttaatagtgcttgcttttcctctgggcacaccattttgatcattaaccagagtacctctactcttagcaaactctagtttatgacaagtatttaaaatatttaaaac

SEQ ID NO: 601075 - DNA, 120 bp, Artificial Sequence
  ENSG00000174695_7 (sequence is synthesized)
aagcttatgcagttcttaaggacgaaggtaaatgagatgtaacttaaaaatagtattgggaaaatgttgatagttaacattagtggatttagactagccaaatgacatagtaggctctga

SEQ ID NO: 601076 - DNA, 120 bp, Artificial Sequence
  ENSG00000174695_8 (sequence is synthesized)
aacatcttgtcaagtatatgtattttgtgcatgaatttttgctggaaagctgtctttctctgaaaaacacaacgttcttagaatgaaaagaacaattataaaataattatcctatatgtg

SEQ ID NO: 601077 - DNA, 120 bp, Artificial Sequence
  ENSG00000174695_9 (sequence is synthesized)
tttttcattctttttagtgtcatggcttcaaaaatgaaacatttattttaattgccgtaaaggaactgtatttttgttttgttttttaacacagcactttaaatccagtttgtgttttgt

SEQ ID NO: 601078 - DNA, 120 bp, Artificial Sequence
  ENSG00000174695_10 (sequence is synthesized)
caacttgaactggaatctcttttgttactttggaggtgataaatagttttcaaatctgctgatttgtatactgtggcacaagtatctttgaactttgatagtgaaaggagaccttcaaca

SEQ ID NO: 601079 - DNA, 120 bp, Artificial Sequence
  ENSG00000174695_11 (sequence is synthesized)
atttttagtctaggcgagaggaatattaggaatgtgacttctaaattttacaatagagcagttattttaaggtcatggttaacatttcttaaggttcaactaaaattcagttaaaatttc

SEQ ID NO: 601080 - DNA, 120 bp, Artificial Sequence
  ENSG00000174695_12 (sequence is synthesized)
agagctacgaggaacttaaatcttagctaaaaattacctgttgtagatagtattaattagattgtttgcagctattaattcatcataaagataaaatgaagaaactctccctttttttaa

SEQ ID NO: 601081 - DNA, 120 bp, Artificial Sequence
  ENSG00000174695_13 (sequence is synthesized)
acaaaaaaaattatttctagattaataggctagtagttatttctgcagaaacaacgtatggaactgaaagccacctatttttattttagactaatttaaaccacttggaatggattctag

SEQ ID NO: 601082 - DNA, 120 bp, Artificial Sequence
  ENSG00000174695_14 (sequence is synthesized)
gaaacatcttaagcttgtgtgttgcctgtggtggttttttgtttgggggtgttttttggttttggtttgattttctgtattttgttatctggggattttttgtttgtttgttttggtttg

SEQ ID NO: 601083 - DNA, 120 bp, Artificial Sequence
  ENSG00000174695_15 (sequence is synthesized)
gttttggttttatatttttggcatgtctatggcagttaaaagtggtatattttgctttagatagggaatcaggttataatcattgttcttcctctaaactgcctcttgggctttacatca

SEQ ID NO: 601084 - DNA, 120 bp, Artificial Sequence
  ENSG00000174695_16 (sequence is synthesized)
ggtcaaggatttttagggtttctcaaaaataggattcttgtcagtgtatgcatgctgagtaagtcacctttctggctctaatttctgggtggccatctgttgtccagctctgctgccaac

SEQ ID NO: 601085 - DNA, 120 bp, Artificial Sequence
  ENSG00000174695_17 (sequence is synthesized)
tggactttccgaaagccatgtcaactaattttttatatgctaagacaaatcgaatatgaaaagaggaagaatattctagatattctaagacatttcttaatttggcatctcagaggaggt

SEQ ID NO: 601086 - DNA, 120 bp, Artificial Sequence
  ENSG00000174695_18 (sequence is synthesized)
gggaggcagcatatttgtaacaacaaccattctgaccttttgaaacacaagcttttggagaagtcagggagagacacagtatgaataaaagcaattaacattttctttaatgtatatttt

SEQ ID NO: 601087 - DNA, 120 bp, Artificial Sequence
  ENSG00000174695_19 (sequence is synthesized)
tcaaagaggaccacggaatcctgttctctaacccaaggggcagtgtaggtggttttaagcccacagaatattgagatatttctcttgtggttttggtggggtggtgggatgcagaaggtt

SEQ ID NO: 601088 - DNA, 81 bp, Artificial Sequence
  ENSG00000174695_20 (sequence is synthesized)
tctcttgtggttttggtggggtggtgggatgcagaaggttattaaagatcaatttaagcatcagatagactatccctttta

SEQ ID NO: 601089 - DNA, 89 bp, Artificial Sequence
  ENSG00000174695_21 (sequence is synthesized)
tataggtaaactcatgtcaagtggtgctaagcctagtacccagtagttattttccctgctcttctccctcctcccaccctccaccctca

SEQ ID NO: 601090 - DNA, 120 bp, Artificial Sequence
  ENSG00000174695_22 (sequence is synthesized)
ggccccagtgtctgttgttcctttctttgtgtccttgagttctcatcatttagctcctacttctaaatgagaacatgtatttggttttctgttctgtgttagtttgctaaggataatggc

SEQ ID NO: 601091 - DNA, 120 bp, Artificial Sequence
  ENSG00000174695_23 (sequence is synthesized)
gacctgttgttacagggcaggatcggatgatggacactgaagtcctcagcttgctaagttcagttgctctccctagcctccttttggcttcagagtcttttgattccatctatcctggta

SEQ ID NO: 601092 - DNA, 120 bp, Artificial Sequence
  ENSG00000174695_24 (sequence is synthesized)
ttttttgtgtgctgatgtttagttctggattggcttcagctgtgctaataggaagggcgttgtcttttcaagcaatcttaaaaggtggtcaatcaaaaggccagagtctgaatcccttct

SEQ ID NO: 601093 - DNA, 120 bp, Artificial Sequence
  ENSG00000174695_25 (sequence is synthesized)
gtggcttaaataatttgaggatcaagtccagtgtcttgttaatccctgttctactgtgccagacactatcttgaatgcttttatatgttcaggttcaaaatcgctctttcataccagggg

SEQ ID NO: 601094 - DNA, 120 bp, Artificial Sequence
  ENSG00000174695_26 (sequence is synthesized)
atgatagtaacgtgtaacttgcaatagattccttcatcttagtaataagatgatcagtctagttaggacaaaatagagattgaataaattaacttttccaagtttacagagtaaaaatga

SEQ ID NO: 601095 - DNA, 120 bp, Artificial Sequence
  ENSG00000174695_27 (sequence is synthesized)
gcagatctctgcctggttttgtgaaaaagagttagcactggtaaatagaatatttctactcctacaccattctttcagtatatcatcactgaagacaggaagataggcacacagattctt

SEQ ID NO: 601096 - DNA, 120 bp, Artificial Sequence
  ENSG00000174695_28 (sequence is synthesized)
cctcgtagtaattcatagtgcactaggtgaaagagatgaagtatgtattaaaagtacaatgtgatggcatttattattcagataatcccaggattctagaagaaaataaagaagagtgac

SEQ ID NO: 601097 - DNA, 120 bp, Artificial Sequence
  ENSG00000174695_29 (sequence is synthesized)
agttcagttagggtgtgaacttccagaggagcactgcttaagctgaacttgagagcattgtgcaaaagcacagtagtctgttaagaactagaaataacctagcttgtgccacttcgggag

SEQ ID NO: 601098 - DNA, 120 bp, Artificial Sequence
  ENSG00000174695_30 (sequence is synthesized)
tattaagacataagcctagaaaggtaggcaaaggttagatcttagactgtcttgtatttttctcattcctgttgattacctacctcaaaattgaatatgtttttcctcctgcctaacaca

SEQ ID NO: 601099 - DNA, 120 bp, Artificial Sequence
  ENSG00000174695_31 (sequence is synthesized)
aaactactcaagggcagaaatttaaattcttccttggtgtatgtgcaaagaaggttgaatatattcatgcctaccttattttggactaggaatacagtagtatactttccgaagacttgc

SEQ ID NO: 601100 - DNA, 120 bp, Artificial Sequence
  ENSG00000174695_32 (sequence is synthesized)
ctgaatagtatataaggtggaggcaactgactagttaggtcagtatttttagaaactcttaatagctcatactcttgataccaaaagcagccctgattgttaaagcacacacctgcacaa

SEQ ID NO: 601101 - DNA, 120 bp, Artificial Sequence
  ENSG00000174695_33 (sequence is synthesized)
gaagcagtgatggttgcatttacatttcctgggtgcacaaaaaaaaattctcaaaaagcaaggacttacgctttttgcaaagcctttgagaagttactggatcataggaagcttataaca

SEQ ID NO: 601102 - DNA, 120 bp, Artificial Sequence
  ENSG00000174695_34 (sequence is synthesized)
agaatggaagattcttaaataactcactttctttggtatccagtaacagtagatgttcaaaatatgtagctgattaataccagcattgtgaacgctgtacaaccttgtggttattactaa

SEQ ID NO: 601103 - DNA, 120 bp, Artificial Sequence
  ENSG00000174695_35 (sequence is synthesized)
gcaagttactactagcttctgaaaagtagcttcataattaatgttatttatacactgccttccatgacttttactttgccctaagctaatctccaaaatctgaaatgctactccaatatc

SEQ ID NO: 601104 - DNA, 120 bp, Artificial Sequence
  ENSG00000174695_36 (sequence is synthesized)
agaaaaaaagggggaggtggaattatatttcctgtgattttaagagtacagagaatcatgcacatctctgattagttcatatatgtctagtgtgtaataaaagtcaagatgaactctcaa

SEQ ID NO: 601105 - DNA, 120 bp, Artificial Sequence
  ENSG00000174695_37 (sequence is synthesized)
aagagaataatttacctttccgagtaatcaatagctactttttttctttttttattctatgcagattgttgggtatattttggaagtgtgccagaattggtgaacggaagagtccttatg

SEQ ID NO: 601106 - DNA, 120 bp, Artificial Sequence
  ENSG00000174695_38 (sequence is synthesized)
aaccggacggctggagagggcgagaagggcagacgggacatgcagcctcttccgcctgagccccggaagggtgatgtggctgcggcatcgccggcctcgctatggtgaacggaagagtcc

SEQ ID NO: 601107 - DNA, 120 bp, Artificial Sequence
  ENSG00000174695_39 (sequence is synthesized)
agatgcaaacggagaaactgaaaagggggtgaacaggtcgcaccctgaggataatgccgagaaccctagcatccccaaaagcccacaagaggaagtcgcgggagctcacaaattgagggg

SEQ ID NO: 601108 - DNA, 120 bp, Artificial Sequence
  ENSG00000174695_40 (sequence is synthesized)
gagccccggaagggtgatgtggctgcggcatcgccggcctcgctatggtcaggagtgtcatttctgtgttcccttccacccccaaaaagggataaactagtttcatgtaaaagaatctgc

SEQ ID NO: 601109 - DNA, 120 bp, Artificial Sequence
  ENSG00000174695_41 (sequence is synthesized)
gtcttggtaggcggtgccgtgacaagcccaaccggacggctggagagggcgagaagggcagacgggacatgcagcctcttccgcctgagccccggaagggtgatgtggctgcggcatcgc

SEQ ID NO: 601110 - DNA, 120 bp, Artificial Sequence
  ENSG00000174697_0 (sequence is synthesized)
gtaggaatcgcagcgccagcggttgcaaggcccaagaagcccatcctgggaaggaaaatgcattggggaaccctgtgcggattcttgtggctttggccctatcttttctatgtccaagct

SEQ ID NO: 601111 - DNA, 120 bp, Artificial Sequence
  ENSG00000174697_1 (sequence is synthesized)
gtgcccatccaaaaagtccaagatgacaccaaaaccctcatcaagacaattgtcaccaggatcaatgacatttcacacacgcagtcagtctcctccaaacagaaagtcaccggtttggac

SEQ ID NO: 601112 - DNA, 120 bp, Artificial Sequence
  ENSG00000174697_2 (sequence is synthesized)
ttcattcctgggctccaccccatcctgaccttatccaagatggaccagacactggcagtctaccaacagatcctcaccagtatgccttccagaaacgtgatccaaatatccaacgacctg

SEQ ID NO: 601113 - DNA, 120 bp, Artificial Sequence
  ENSG00000174697_3 (sequence is synthesized)
gagaacctccgggatcttcttcacgtgctggccttctctaagagctgccacttgccctgggccagtggcctggagaccttggacagcctggggggtgtcctggaagcttcaggctactcc

SEQ ID NO: 601114 - DNA, 120 bp, Artificial Sequence
  ENSG00000174697_4 (sequence is synthesized)
acagaggtggtggccctgagcaggctgcaggggtctctgcaggacatgctgtggcagctggacctcagccctgggtgctgaggccttgaaggtcactcttcctgcaaggactacgttaag

SEQ ID NO: 601115 - DNA, 120 bp, Artificial Sequence
  ENSG00000174697_5 (sequence is synthesized)
ggaaggaactctggcttccaggtatctccaggattgaagagcattgcatggacaccccttatccaggactctgtcaatttccctgactcctctaagccactcttccaaaggcataagacc

SEQ ID NO: 601116 - DNA, 120 bp, Artificial Sequence
  ENSG00000174697_6 (sequence is synthesized)
ctaagcctccttttgcttgaaaccaaagatatatacacaggatcctattctcaccaggaagggggtccacccagcaaagagtgggctgcatctgggattcccaccaaggtcttcagccat

SEQ ID NO: 601117 - DNA, 120 bp, Artificial Sequence
  ENSG00000174697_7 (sequence is synthesized)
caacaagagttgtcttgtcccctcttgacccatctccccctcactgaatgcctcaatgtgaccaggggtgatttcagagagggcagaggggtaggcagagcctttggatgaccagaacaa

SEQ ID NO: 601118 - DNA, 120 bp, Artificial Sequence
  ENSG00000174697_8 (sequence is synthesized)
ggttccctctgagaattccaaggagttccatgaagaccacatccacacacgcaggaactcccagcaacacaagctggaagcacatgtttatttattctgcattttattctggatggattt

SEQ ID NO: 601119 - DNA, 120 bp, Artificial Sequence
  ENSG00000174697_9 (sequence is synthesized)
gaagcaaagcaccagcttctccaggctctttggggtcagccagggccaggggtctccctggagtgcagtttccaatcccatagatgggtctggctgagctgaacccattttgagtgactc

SEQ ID NO: 601120 - DNA, 120 bp, Artificial Sequence
  ENSG00000174697_10 (sequence is synthesized)
gagggttgggttcatctgagcaagagctggcaaaggtggctctccagttagttctctcgtaactggtttcatttctactgtgactgatgttacatcacagtgtttgcaatggtgttgccc

SEQ ID NO: 601121 - DNA, 120 bp, Artificial Sequence
  ENSG00000174697_11 (sequence is synthesized)
tgagtggatctccaaggaccaggttattttaaaaagatttgttttgtcaagtgtcatatgtaggtgtctgcacccaggggtggggaatgtttgggcagaagggagaaggatctagaatgt

SEQ ID NO: 601122 - DNA, 120 bp, Artificial Sequence
  ENSG00000174697_12 (sequence is synthesized)
gttttctgaataacatttgtgtggtgggttctttggaaggagtgagatcattttcttatcttctgcaattgcttaggatgtttttcatgaaaatagctctttcaggggggttgtgaggcc

SEQ ID NO: 601123 - DNA, 120 bp, Artificial Sequence
  ENSG00000174697_13 (sequence is synthesized)
tggccaggcaccccctggagagaagtttctggccctggctgaccccaaagagcctggagaagctgatgctttgcttcaaatccatccagaataaaacgcaaagggctgaaagccatttgt

SEQ ID NO: 601124 - DNA, 120 bp, Artificial Sequence
  ENSG00000174697_14 (sequence is synthesized)
gtcccacactggtgactgcgatcttcagagcaggggtccttggtgtgaccctctgaatggtccagggttgatcacactctgggtttattacatggcagtgttcctatttggggcttgcat

SEQ ID NO: 601125 - DNA, 120 bp, Artificial Sequence
  ENSG00000174697_15 (sequence is synthesized)
gccaaattgtagttcttgtctgattggctcacccaagcaaggccaaaattaccaaaaatcttggggggtttttactccagtggtgaagaaaactcctttagcaggtggtcctgagacctg

SEQ ID NO: 601126 - DNA, 120 bp, Artificial Sequence
  ENSG00000174697_16 (sequence is synthesized)
acaagcactgctaggcgagtgccaggactccccaggccaggccaccaggatggcccttcccactggaggtcacattcaggaagatgaaagaggaggtttggggtctgccaccatcctgct

SEQ ID NO: 601127 - DNA, 120 bp, Artificial Sequence
  ENSG00000174697_17 (sequence is synthesized)
gctgtgtttttgctatcacacagtgggtggtggatctgtccaaggaaacttgaatcaaagcagttaactttaagactgagcacctgcttcatgctcagccctgactggtgctataggctg

SEQ ID NO: 601128 - DNA, 120 bp, Artificial Sequence
  ENSG00000174697_18 (sequence is synthesized)
gagaagctcacccaataaacattaagattgaggcctgccctcagggatcttgcattcccagtggtcaaaccgcactcacccatgtgccaaggtggggtatttaccacagcagctgaacag

SEQ ID NO: 601129 - DNA, 120 bp, Artificial Sequence
  ENSG00000174697_19 (sequence is synthesized)
ccaaatgcatggtgcagttgacagcaggtgggaaatggtatgagctgaggggggccgtgcccaggggcccacagggaaccctgcttgcactttgtaacatgtttacttttcagggcatct

SEQ ID NO: 601130 - DNA, 120 bp, Artificial Sequence
  ENSG00000174697_20 (sequence is synthesized)
tagcttctattatagccacatccctttgaaacaagataactgagaatttaaaaataagaaaatacataagaccataacagccaacaggtggcaggaccaggactatagcccaggtcctct

SEQ ID NO: 601131 - DNA, 120 bp, Artificial Sequence
  ENSG00000174697_21 (sequence is synthesized)
gatacccagagcattacgtgagccaggtaatgagggactggaaccagggagaccgagcgctttctggaaaagaggagtttcgaggtagagtttgaaggaggtgagggatgtgaattgcct

SEQ ID NO: 601132 - DNA, 120 bp, Artificial Sequence
  ENSG00000174697_22 (sequence is synthesized)
gcagagagaagcctgttttgttggaaggtttggtgtgtggagatgcagaggtaaaagtgtgagcagtgagttacagcgagaggcagagaaagaagagacaggagggcaagggccatgctg

SEQ ID NO: 601133 - DNA, 120 bp, Artificial Sequence
  ENSG00000174697_23 (sequence is synthesized)
aagggaccttgaagggtaaagaagtttgatattaaaggagttaagagtagcaagttctagagaagaggctggtgctgtggccagggtgagagctgctctggaaaatgtgacccagatcct

SEQ ID NO: 601134 - DNA, 120 bp, Artificial Sequence
  ENSG00000174697_24 (sequence is synthesized)
cacaaccacctaatcaggctgaggtgtcttaagccttttgctcacaaaacctggcacaatggctaattcccagagtgtgaaacttcctaagtataaatggttgtctgtttttgtaactta

SEQ ID NO: 601135 - DNA, 85 bp, Artificial Sequence
  ENSG00000174697_25 (sequence is synthesized)
atgacagagcgagattccgtcttaaaaaaaaaaaaaaaaaagtttgtttttaaaaaaatctaaataaaataactttgccccctgc

SEQ ID NO: 601136 - DNA, 80 bp, Artificial Sequence
  ENSG00000174705_0 (sequence is synthesized)
ggagtgcgcgccgagcgaagggcggcggcggtggcggcggcggctcgtgctcggccccggctgcgattgcgctcagctcc

SEQ ID NO: 601137 - DNA, 120 bp, Artificial Sequence
  ENSG00000174705_1 (sequence is synthesized)
caccccgcgccacccgcacccgcgctcggcccgctgcgggcggaggagcggccatgccgccgcggcgcagcatcgtggaggtgaaggtgctagacgtgcagaagcggcgggtgcccaaca

SEQ ID NO: 601138 - DNA, 120 bp, Artificial Sequence
  ENSG00000174705_2 (sequence is synthesized)
agcattatgtctacatcatccgggtcacgtggtccagcggctccaccgaggccatttaccggcgctacagcaagttttttgacctccagatgcagatgttggacaaatttcccatggaag

SEQ ID NO: 601139 - DNA, 120 bp, Artificial Sequence
  ENSG00000174705_3 (sequence is synthesized)
gaggacagaaggaccccaagcagcggatcatcccctttctgccaggtaagattctcttcagacgaagccacatccgggacgtggctgtcaaacgcctgataccaattgatgaatactgta

SEQ ID NO: 601140 - DNA, 120 bp, Artificial Sequence
  ENSG00000174705_4 (sequence is synthesized)
aggccctcatccagctgcccccctacatctctcagtgtgatgaggtgctgcagttctttgagacaagacctgaggacctgaatccccccaaagaggagcacattgggaaaaagaaatctg

SEQ ID NO: 601141 - DNA, 120 bp, Artificial Sequence
  ENSG00000174705_5 (sequence is synthesized)
ggggtgaccaaacctcagtggaccccatggtcctggagcagtatgtggtggtagccaactaccagaagcaggagagttcggagatcagcctcagcgtggggcaggtggtggacatcatcg

SEQ ID NO: 601142 - DNA, 120 bp, Artificial Sequence
  ENSG00000174705_6 (sequence is synthesized)
agaagaatgagtcaggttggtggttcgtcagcactgccgaggagcaaggctgggtccctgcaacgtgcctcgaaggccaggatggggtgcaggatgagttttctctgcagcctgaagaag

SEQ ID NO: 601143 - DNA, 120 bp, Artificial Sequence
  ENSG00000174705_7 (sequence is synthesized)
aggagaagtacacagtcatctacccgtacacagctcgggaccaggatgaaatgaacctggagagaggggctgtggtggaggtcatccagaaaaacctggaaggctggtggaagatcaggt

SEQ ID NO: 601144 - DNA, 120 bp, Artificial Sequence
  ENSG00000174705_8 (sequence is synthesized)
accagggcaaagaaggctgggcccccgcctcctacctaaagaagaacagtggggagcccttgcccccgaagccaggccctggctcaccctcccacccgggtgcccttgacttggatggtg

SEQ ID NO: 601145 - DNA, 120 bp, Artificial Sequence
  ENSG00000174705_9 (sequence is synthesized)
tttcccggcagcagaacgcggtgggcagggagaaggagctgctcagcagccagagggacgggcggtttgaaggccgcccggtgcccgacggtgacgccaagcagagatcaccaaagatga

SEQ ID NO: 601146 - DNA, 120 bp, Artificial Sequence
  ENSG00000174705_10 (sequence is synthesized)
ggcagagaccccctcctcgccgggacatgaccattcctcgaggcctcaacctgccgaagccgcccatcccgccccaagtggaggaagagtattacaccatcgccgaattccagacaacca

SEQ ID NO: 601147 - DNA, 120 bp, Artificial Sequence
  ENSG00000174705_11 (sequence is synthesized)
tcccagacggcatcagcttccaggcaggcctgaaggtcgaggtgatcgagaaaaacttgagtggctggtggtacattcagattgaagataaggaagggtgggccccggccaccttcattg

SEQ ID NO: 601148 - DNA, 120 bp, Artificial Sequence
  ENSG00000174705_12 (sequence is synthesized)
acaagtacaagaagacgagcaacgcgtcgagacccaactttctggctcccctgccccacgaggtgacccagctccggctgggggaagcagcagcgctggagaacaacacgggcagcgaag

SEQ ID NO: 601149 - DNA, 120 bp, Artificial Sequence
  ENSG00000174705_13 (sequence is synthesized)
ccacgggcccctcccggcccctgcctgacgcaccgcatggtgtcatggactcggggttgccatggtctaaagactggaagggcagtaaggatgtcctgaggaaggcatcttcagacatgt

SEQ ID NO: 601150 - DNA, 120 bp, Artificial Sequence
  ENSG00000174705_14 (sequence is synthesized)
ctgcgtcagcaggctacgaggagatctcagaccccgacatggaggagaagcccagcctccctccgcggaaagaatccatcatcaagtcggagggggagctgctggagcgggagcgggagc

SEQ ID NO: 601151 - DNA, 120 bp, Artificial Sequence
  ENSG00000174705_15 (sequence is synthesized)
ggcagaggacggagcagctccggggccccactcccaagcctccgggcgtgattttgccgatgatgccagccaaacacatccctccagcccgggacagcaggaggccagagcccaaacctg

SEQ ID NO: 601152 - DNA, 120 bp, Artificial Sequence
  ENSG00000174705_16 (sequence is synthesized)
acaaaagcagactgttccagctgaaaaatgacatggggctggagtgtggccacaaggtcttggccaaggaagtgaagaagcccaacctccggcccatctccaaatccaaaactgacctgc

SEQ ID NO: 601153 - DNA, 120 bp, Artificial Sequence
  ENSG00000174705_17 (sequence is synthesized)
cagaggagaagccagatgccactccccagaatcccttcttgaagtccagacctcaggttaggccaaaaccagctccttcccccaaaacggagccacctcagggcgaagaccaagtcgaca

SEQ ID NO: 601154 - DNA, 120 bp, Artificial Sequence
  ENSG00000174705_18 (sequence is synthesized)
tctgcaacctcaggagtaagctcaggcctgccaagtcccaagacaagtccttgttggatggggagggcccccaggcagtagggggccaagacgtggccttcagccgaagcttcctcccag

SEQ ID NO: 601155 - DNA, 120 bp, Artificial Sequence
  ENSG00000174705_19 (sequence is synthesized)
gagaggggcctggccgcgcccaggacaggacgggcaaacaggatggtctcagcccaaaagagatttcctgcagagcccctccgaggccagccaagaccacagatcctgtgtctaagagcg

SEQ ID NO: 601156 - DNA, 120 bp, Artificial Sequence
  ENSG00000174705_20 (sequence is synthesized)
tgcctgttcctctccaagaggctccccagcagagacctgtggtcccaccccgcagaccacctcccccaaagaaaacctcttcgtcatccaggccgctcccagaggtcagaggtccacagt

SEQ ID NO: 601157 - DNA, 120 bp, Artificial Sequence
  ENSG00000174705_21 (sequence is synthesized)
gtgaaggccacgaaagcagggcagctcccaccccaggccgtgctctcctcgtccctccaaaagccaaaccttttctctccaactctttggggggccaggatgacacgcgaggcaaaggca

SEQ ID NO: 601158 - DNA, 120 bp, Artificial Sequence
  ENSG00000174705_22 (sequence is synthesized)
gcctggggccatgggggaccggcaagattggagaaaacagggagaaagcagctgcagcctctgtccccaatgccgacggcctgaaggactctttgtatgtggccgtggccgactttgaag

SEQ ID NO: 601159 - DNA, 120 bp, Artificial Sequence
  ENSG00000174705_23 (sequence is synthesized)
gagacaaagacaccagcagcttccaggaagggacagtgtttgaagtccgggagaagaacagcagtggctggtggttctgccaggtcctgagcggagccccttcctgggaagggtggattc

SEQ ID NO: 601160 - DNA, 120 bp, Artificial Sequence
  ENSG00000174705_24 (sequence is synthesized)
cttccaactatctcagaaagaagccgtagccgactccctttctgcctagagggcccgctggtccttgctggctttacccacgtatttaatacgcctcttaatttatcattctccacgcag

SEQ ID NO: 601161 - DNA, 120 bp, Artificial Sequence
  ENSG00000174705_25 (sequence is synthesized)
cttccaaggcagacagactctggggtactgtgacttcttgcctcccatgggtggagagtgagtttcggacacctcgggcgcccctgggcctgatccctcctatcacagcatcactggagg

SEQ ID NO: 601162 - DNA, 120 bp, Artificial Sequence
  ENSG00000174705_26 (sequence is synthesized)
ctcagaacccacagcctttgctttctgtccatgtcagcatccctgccttaagagaactcctcctggccaatggcattgccacccagcagtgggaccaagactctccaagacctccaggac

SEQ ID NO: 601163 - DNA, 120 bp, Artificial Sequence
  ENSG00000174705_27 (sequence is synthesized)
tggatcccattgcctggagaaactccagcaagggtctctcatggcttggacatggcacagtaaggggcagccaacccagtccatgatgacttttgctccaacttcttcatgtttctaaaa

SEQ ID NO: 601164 - DNA, 120 bp, Artificial Sequence
  ENSG00000174705_28 (sequence is synthesized)
gcccagtggctttattcactcctcctaaattgcctgctaccagaaggaacttcatcctgaagaaatgcattccattaccagttccagggaaagtgtccccttccccaaagcctcaggccc

SEQ ID NO: 601165 - DNA, 120 bp, Artificial Sequence
  ENSG00000174705_29 (sequence is synthesized)
gtgggcctctgaggttccactggatgcggctcccccaggagtgggcctggagatccgctcagccgccctgcctcccaccttctatcttgggaccgtggtcagccctgaagggtggttcca

SEQ ID NO: 601166 - DNA, 120 bp, Artificial Sequence
  ENSG00000174705_30 (sequence is synthesized)
gccccgcgtatgctgcgctttgctgctgcaggctccggtccctccagggcttttcaatgagagttcccaccccaacttggagcatttcatttttgcctacctaaagcaagaatctcaaag

SEQ ID NO: 601167 - DNA, 120 bp, Artificial Sequence
  ENSG00000174705_31 (sequence is synthesized)
tttgtttgaataagaggcccattcacaagtcgtgcccttgtgagcacccctttgctgagtgcctcgtgggtgccaaacactgtacttggcgctttgcattcatgctttgaccctcacaac

SEQ ID NO: 601168 - DNA, 120 bp, Artificial Sequence
  ENSG00000174705_32 (sequence is synthesized)
agtgcctgtgccctcccctctgtaaaagacaaaccaggcagggaagagatagaagctggctaagtggtggccaagtggcttcattgtgaggggggtgagggggcattcgtggctgctccc

SEQ ID NO: 601169 - DNA, 120 bp, Artificial Sequence
  ENSG00000174705_33 (sequence is synthesized)
acacccaccatccctccagcccacagcagcctataccaaaggctgccctggactcaacagctgcatctccatgacaggagaatgccagggtcctggtggttgacacagagccctgttccc

SEQ ID NO: 601170 - DNA, 120 bp, Artificial Sequence
  ENSG00000174705_34 (sequence is synthesized)
tcttctaagctgttgccccctggggaatagagcttatggagcaacgggagctgaggtggcctcgagggccagcctggagggctctgagcatagcatgcagcggtcccatagggaggcagg

SEQ ID NO: 601171 - DNA, 120 bp, Artificial Sequence
  ENSG00000174705_35 (sequence is synthesized)
taaccaagggccaggcagagctgcttcctgtgcctctccggcatttgtaatgtttttttcttttttcacgcactgccaaatctgttttctcccttgaagaaacccagggcagatgtggtc

SEQ ID NO: 601172 - DNA, 120 bp, Artificial Sequence
  ENSG00000174705_36 (sequence is synthesized)
atctgtcaaactgaggtctggagaggcatgactaaatcactgcagaagcaaaatcaggacccagcatttctagctcccagcccagagtaagagagcagagcagaaccccttcccattcta

SEQ ID NO: 601173 - DNA, 120 bp, Artificial Sequence
  ENSG00000174705_37 (sequence is synthesized)
cccgaccgaggcagccctgccctgccctgccccgcccctccccaccctgccctgccccagagatctccagttcacagtgttcatcaggcgagatacttttggacccacaaagccagtttt

SEQ ID NO: 601174 - DNA, 120 bp, Artificial Sequence
  ENSG00000174705_38 (sequence is synthesized)
ttggggggatgctcagtgtctacctgcagtgccaaagttttgcttgaacagccctcttctgccgcgcctcccagctccaccccctatcacgtgggtgctggctgcttctgcgtgaggagc

SEQ ID NO: 601175 - DNA, 120 bp, Artificial Sequence
  ENSG00000174705_39 (sequence is synthesized)
ttcctctgatcacctgtagcatctttagtgccttcgtccagtcggcctgcaaatcccatttcccagagaggcttgggcagggcccacttgccacttggccctgtgcccagagcgttgggg

SEQ ID NO: 601176 - DNA, 120 bp, Artificial Sequence
  ENSG00000174705_40 (sequence is synthesized)
gcagatggcagccaggggaagaagggaggtggggaagggccgccaccgcttgagggtcccctcccttgagaggaggccccatggcagttttcctgagttcttgatccactttggtttaaa

SEQ ID NO: 601177 - DNA, 120 bp, Artificial Sequence
  ENSG00000174705_41 (sequence is synthesized)
caacttttgtgaagctatgtgagatttgactgcatttcaaaagacaaaacacatgtttttttctgatttgctctttgcctttcagcgacgctttcagatactttgtgagtgtctactctg

SEQ ID NO: 601178 - DNA, 120 bp, Artificial Sequence
  ENSG00000174705_42 (sequence is synthesized)
tgctaggtgctgagtagactgggatgtgtgtggctccatccctggctggaagagctttgagtcctgtctgctgacttcactgaaggagtttctctcttgcttcattccttcctcccgggg

SEQ ID NO: 601179 - DNA, 120 bp, Artificial Sequence
  ENSG00000174705_43 (sequence is synthesized)
gtcagctgggtaggagcagacttgccctgccttcctctaggcagaaagttttcctgcaaatgaaagaatctgccattctcttttgctatgatgatgatgattattctgacatgacccgcg

SEQ ID NO: 601180 - DNA, 120 bp, Artificial Sequence
  ENSG00000174705_44 (sequence is synthesized)
ggtactgaagccacagtcctctctgttcactgttctctccttgagtcatatctatggcctgaggacgtctgtatccagctccttttcctacaatggtagacacttccccaggcagtgggt

SEQ ID NO: 601181 - DNA, 120 bp, Artificial Sequence
  ENSG00000174705_45 (sequence is synthesized)
gggtcagggtggccagtcactctcctagctgtccttgcctggggacttagatttaccccatccaggactgtggtcgctattctgtgagcgattgatggcgcatatgcagaactcccctgg

SEQ ID NO: 601182 - DNA, 120 bp, Artificial Sequence
  ENSG00000174705_46 (sequence is synthesized)
agtcatggctctagaaagtgtccaggcccatcgtgacaatggtgccaagcaccgggctggtgaccagtgcctaaacacacacgctcctttaatccttacggcaagcctgtgaggcggata

SEQ ID NO: 601183 - DNA, 120 bp, Artificial Sequence
  ENSG00000174705_47 (sequence is synthesized)
ggaccagccctgatctatagtgagaaaattaaggttcagagggagaaggtccaaatagtggccaagctgggactgagatctcgagtttgggtttgtttggttttgttgttgttgttcttt

SEQ ID NO: 601184 - DNA, 120 bp, Artificial Sequence
  ENSG00000174705_48 (sequence is synthesized)
ccctcgtgtccatgacttttctctgccattagcagggaagtgtgcggagggcttccagggaatcaagtgaccctccctctgaatttcggtgcctcttccccccgccccttgctcacacat

SEQ ID NO: 601185 - DNA, 120 bp, Artificial Sequence
  ENSG00000174705_49 (sequence is synthesized)
ttcagtaggtcacaggccaaatggcagcccaaaaggtgggcagagatttttttttcttcccctcacccctgcttattaacacaattgtgacaactactttaccttacatcccagggcaaa

SEQ ID NO: 601186 - DNA, 120 bp, Artificial Sequence
  ENSG00000174705_50 (sequence is synthesized)
cggacagcttgcggtacctccaaaaatttggaaaaccctgagtctaagaccacctcttgataaaagaggcctttgctcacatgttctgctcggaatctttctttgccattggtgggtgta

SEQ ID NO: 601187 - DNA, 120 bp, Artificial Sequence
  ENSG00000174705_51 (sequence is synthesized)
tgtcgtcccagctgagactgcgggagagctgagctccagcttaaaccgcttttaatggcccttccctactgggggatcgctggagcccatgccaggttacggtagtcattttaaacctct

SEQ ID NO: 601188 - DNA, 120 bp, Artificial Sequence
  ENSG00000174705_52 (sequence is synthesized)
gccacaaggccacgccatagaatcaatttccaagtcaatgttcttggccctaaaatgtttgcgcccactgaggatttcattaccaggtggaagatgggggaacatatgccacgttaaaga

SEQ ID NO: 601189 - DNA, 120 bp, Artificial Sequence
  ENSG00000174705_53 (sequence is synthesized)
gcaagtgctgagtgtgccaggacttgagaaggaccttaggctgaggagtggacagtctggtatttatttcgcctctcccaagtacccagcacagagtgggaaaaagaagaaactgctcct

SEQ ID NO: 601190 - DNA, 120 bp, Artificial Sequence
  ENSG00000174705_54 (sequence is synthesized)
gccttccagtagctggcaacttgacatcaagaacaaaaacattcgtagctggacccccgtcctttcatcgtgcccaagtcttacatgttggcttaagctgcccccttggaggccgtacct

SEQ ID NO: 601191 - DNA, 120 bp, Artificial Sequence
  ENSG00000174705_55 (sequence is synthesized)
ttctctttggactgtgacagtggacacctaacagcctgagccatgtgtggctgtcttatcccccaagggttgtccaggcccgttctgcagggctgttgtgtagactgcagacatccatac

SEQ ID NO: 601192 - DNA, 120 bp, Artificial Sequence
  ENSG00000174705_56 (sequence is synthesized)
ctcaccacagaccaaagatgacctcgtgtcagactgtgggctgatgagaggtagagcagcatgcatcgaggcctgagggtgcagggcgccctctcttggcctggaggaattgctcctaac

SEQ ID NO: 601193 - DNA, 120 bp, Artificial Sequence
  ENSG00000174705_57 (sequence is synthesized)
tagagtaagtttccacgagggtcccaggcagagctgcagagctggaaccggaggctccacagtccttgcctgctcatggacctccttcagagcacctttctacagactggactgcccagc

SEQ ID NO: 601194 - DNA, 120 bp, Artificial Sequence
  ENSG00000174705_58 (sequence is synthesized)
tccgtggggtggcatctggtttctggtgctattctgccaagttatcgagctcctcctcatgtttcaacattccatcttcccgtttctatcctcgactccaaagtaagccttcttagctcc

SEQ ID NO: 601195 - DNA, 120 bp, Artificial Sequence
  ENSG00000174705_59 (sequence is synthesized)
aatcagggatgaggggctcaacctcttctgtcctcaaagaggccaaacgcagtgccacagtcggtagccttcacttttagatgtcctattcatgtaaaaaagaaggtgcccccaccaggc

SEQ ID NO: 601196 - DNA, 120 bp, Artificial Sequence
  ENSG00000174705_60 (sequence is synthesized)
ttacatcagcaataagcaattctaatgcaacgatggtgtccacattttaccccagtgtgtgcccatgtatgcctttgtgcccgtgtaattattgttagcgcccctttcacttagaggggt

SEQ ID NO: 601197 - DNA, 120 bp, Artificial Sequence
  ENSG00000174705_61 (sequence is synthesized)
gatgataaactgtggccaccttgattacaacccacatttcctgctttggggagcttccaagtaacaggccatttcttacctccctccaggaacagtgggcactgcccaccacctcgtgtc

SEQ ID NO: 601198 - DNA, 120 bp, Artificial Sequence
  ENSG00000174705_62 (sequence is synthesized)
tgctcataggatgacgctggagatccccacacttactctaccctcttggcaaattggcattccggtggtggtttttgtttcctttaacacattaaataaatgagtatataggatgtgagg

SEQ ID NO: 601199 - DNA, 120 bp, Artificial Sequence
  ENSG00000174705_63 (sequence is synthesized)
ggaggggtgagaacaactagctgtagcatgtgtaggctatatactttaccatttgacttctttcctttttttttttttaaataaaaaaagtgcttgactggtttcaagcttcatcatgaa

SEQ ID NO: 601200 - DNA, 120 bp, Artificial Sequence
  ENSG00000174705_64 (sequence is synthesized)
cccagacggcatcagcttccaggcaggcctgaaggtcgaggatcataagaatgttcacttggagagccctgtggaagtccctcttagaagaatcaagatgcggacagcacttgggaagca

SEQ ID NO: 601201 - DNA, 120 bp, Artificial Sequence
  ENSG00000174705_65 (sequence is synthesized)
cgtggcagcttccatggagatgtgagaaccacgtcatgtccttgctgctgtgaacatgaatttgctaaactgcttttactgtatttttttttgtcgtggtaaaatatgcgtaatacaaaa

SEQ ID NO: 601202 - DNA, 120 bp, Artificial Sequence
  ENSG00000174705_66 (sequence is synthesized)
accaccaccaccatccatcttcagacttttttcatcttcccaaaatgaaactgtgtgcccattaaacactaaccccacaattctcctctcctctccccccagctccctggcaatcgtcat

SEQ ID NO: 601203 - DNA, 120 bp, Artificial Sequence
  ENSG00000174718_0 (sequence is synthesized)
acttgacttaaactctggggcccgggaggccgccggttttctccccgcttgccggggtggtcctcttccctttgtcggaccaaagaagtaaacactgtgtggagagggactgacgtgttt

SEQ ID NO: 601204 - DNA, 120 bp, Artificial Sequence
  ENSG00000174718_1 (sequence is synthesized)
ggagggaaatgggaatgtacacgataattaaagagtaaagttgtgctcaacgctgtttacttctaattatttcctgattcacaaattaatttttgcaattcacaacttcaagaatacttg

SEQ ID NO: 601205 - DNA, 120 bp, Artificial Sequence
  ENSG00000174718_2 (sequence is synthesized)
gactattggattcaatccatagtaatctgcaaaagaagagaagcagaattatacctagaagtctactaatggacagttagtcacccacctacatgttgagattcctgacattcagacaac

SEQ ID NO: 601206 - DNA, 120 bp, Artificial Sequence
  ENSG00000174718_3 (sequence is synthesized)
tgacttgtaactgacttataactgacttgtaatacactgctactatatcaaaccgacaatgaattggaatgaaaaaccaaagagtgctacattaccaccactgtatcctaaaagccagcc

SEQ ID NO: 601207 - DNA, 120 bp, Artificial Sequence
  ENSG00000174718_4 (sequence is synthesized)
accttttttgcaccagtctttaataaaccaaattaccacaacatctcagagttctttcagctatcctggaagtaaccaagaagcatgcatgtatcccggtaattcaaatccaatttcaca

SEQ ID NO: 601208 - DNA, 120 bp, Artificial Sequence
  ENSG00000174718_5 (sequence is synthesized)
gccactgctgaatatccaaaattatcctcaacaaatttctgtttctgatatgcataatgggacagttgtggcctcacacacttcagtagaaagaataacatatgcaaatgttaatggacc

SEQ ID NO: 601209 - DNA, 120 bp, Artificial Sequence
  ENSG00000174718_6 (sequence is synthesized)
caaacaactaactcacaatttgcagatgtcttcaggagttacccaaaacgtatggttgaactcaccaatgaggaatcctgtgcattctcatataggggcaactgtatctcatcaaactga

SEQ ID NO: 601210 - DNA, 120 bp, Artificial Sequence
  ENSG00000174718_7 (sequence is synthesized)
ttttggagctaacgtacccaatatgccggcactacagagtcaactgataacatcagatacctattctatgcaaatgcagatgatcccttctaattctacacgacttcctgtagcttacca

SEQ ID NO: 601211 - DNA, 120 bp, Artificial Sequence
  ENSG00000174718_8 (sequence is synthesized)
aggaaatcagggacttaaccagtctttttcagagcaacaggttgattggacacaacagtgtatatctaagggactgacttacccagattacagaccacctccaaagctataccgttactc

SEQ ID NO: 601212 - DNA, 120 bp, Artificial Sequence
  ENSG00000174718_9 (sequence is synthesized)
accacaaagctttttaccagattctaccattcaaaaacaaaactttataccacatacatcattgcaagttaaaaatagtcagcttctaaattctgtattaactttaccatcaaggcagac

SEQ ID NO: 601213 - DNA, 120 bp, Artificial Sequence
  ENSG00000174718_10 (sequence is synthesized)
ctcagctgtaccatcacagcagtatgccacgcaaactgacaaaagacctcctcctcctccttacaactgtagatatggaagccagcctttgcaaagtactcagcatattactaaacactt

SEQ ID NO: 601214 - DNA, 120 bp, Artificial Sequence
  ENSG00000174718_11 (sequence is synthesized)
gtctatggaagttcctcagagtcgagaaatgctgtcatctgaaataaggaccagctttcaacagcagtggcaaaaccctaatgaaaatgtcagcacaattggaaatttcactaacttgaa

SEQ ID NO: 601215 - DNA, 120 bp, Artificial Sequence
  ENSG00000174718_12 (sequence is synthesized)
agtaaataccaacagcaaacagccttttaacagtcccattagatcttctgtggatggtgttcagactcttgctcaaactaatgaagagaaaataatggattcttgcaatccaacttcaaa

SEQ ID NO: 601216 - DNA, 120 bp, Artificial Sequence
  ENSG00000174718_13 (sequence is synthesized)
tcaagtactggacacaagtgttgcaaaagaaaagctagtaagggatattaaaacattagtagagataaaacagaagttttcagaacttgcaaggaaaattaaaatcaataaagatctttt

SEQ ID NO: 601217 - DNA, 120 bp, Artificial Sequence
  ENSG00000174718_14 (sequence is synthesized)
gatggcagcaggttgtattaaaatgactaatacttcttatagtgaaccagctcagaattctaaattgtctctaaaacaaactgccaaaatccagtctggaccccagataactccagtaat

SEQ ID NO: 601218 - DNA, 120 bp, Artificial Sequence
  ENSG00000174718_15 (sequence is synthesized)
gccagagaatgcagagagacaaacaccaacagtagtggaatctgcagaaacaaataagactcaatgtatgttgaattctgacattcaggaagtcaattgcagaaggtttaaccaagttga

SEQ ID NO: 601219 - DNA, 120 bp, Artificial Sequence
  ENSG00000174718_16 (sequence is synthesized)
ttctgttttaccaaatcctgtctattctgaaaagcggccaatgccagactcatctcatgatgtgaaagttctcacttcaaagacatcagctgttgagatgacccaggcagtattgaatac

SEQ ID NO: 601220 - DNA, 120 bp, Artificial Sequence
  ENSG00000174718_17 (sequence is synthesized)
tcagctttcatcagaaaatgttaccaaagttgagcaaaattcaccagcagtttgtgaaacaatttctgttcccaagtccatgtccactgaggaatataaatcaaaaattcaaaatgaaaa

SEQ ID NO: 601221 - DNA, 120 bp, Artificial Sequence
  ENSG00000174718_18 (sequence is synthesized)
tatgctacttctcgctttgctttcacaggcacgtaagactcagaagacagtattaaaagatgctaatcaaactattcaggattctaaaccagacagttgtgaaatgaatccaaataccca

SEQ ID NO: 601222 - DNA, 120 bp, Artificial Sequence
  ENSG00000174718_19 (sequence is synthesized)
aatgactggtaaccaactgaatttgaagaacatggaaactccaagtacttctaatgtaagtggcagggttttggacaactccttttgcagtggacaagaatcctcaacaaaaggaatgcc

SEQ ID NO: 601223 - DNA, 120 bp, Artificial Sequence
  ENSG00000174718_20 (sequence is synthesized)
tgctaaaagtgacagtagctgttccatggaagtgctagcaacctgtctttccctgtggaaaaagcaaccttcagatactgcaaaagaaaaggagtgtgataaactcagaacaaacacaac

SEQ ID NO: 601224 - DNA, 120 bp, Artificial Sequence
  ENSG00000174718_21 (sequence is synthesized)
agcagttggaatttcaaagcctgctaacatccacgttaagagtccttgttcagttgtgggaaattcaaattctcagaataaaataagtaatccctcacagcagacagctttgtcgatggt

SEQ ID NO: 601225 - DNA, 120 bp, Artificial Sequence
  ENSG00000174718_22 (sequence is synthesized)
aatgcacaattatgagtcttcaggtataaatataacaaagggaacagaacttcagatagctgtagtgtcaccgttagttctgtcagaggtcaaaacattgtctgtcaaaggaataacacc

SEQ ID NO: 601226 - DNA, 120 bp, Artificial Sequence
  ENSG00000174718_23 (sequence is synthesized)
tgcagtgttacctgaaacagtgtatcccgttattaaagaaggcagtgtttgtagtttacaaaatcaattggcagaaaatgcaaaggcaactgctgctttgaaagttgatgttagtggacc

SEQ ID NO: 601227 - DNA, 120 bp, Artificial Sequence
  ENSG00000174718_24 (sequence is synthesized)
agtagcaagtacagcaacatcaaccaagatttttccactaactcagaaggaaaagcagaatgagtcaactaatggtaattcagaagtcacacctaatgtcaatcaaggaaagcataacaa

SEQ ID NO: 601228 - DNA, 120 bp, Artificial Sequence
  ENSG00000174718_25 (sequence is synthesized)
tgaaggtgatacctcttacaattcccaaatagcaaagatattcagctctcttcccttgaaaatggttgagccacagaaaccttctctacccaatcagcaagggattggcagcagagaacc

SEQ ID NO: 601229 - DNA, 120 bp, Artificial Sequence
  ENSG00000174718_26 (sequence is synthesized)
agaaaaacaattagataataccactgaaaataaagactttggttttcaaaaagataaacctgtacagtgcacagatgtttcacataaaatatgtgatcagtcaaagtcagagccaccctt

SEQ ID NO: 601230 - DNA, 120 bp, Artificial Sequence
  ENSG00000174718_27 (sequence is synthesized)
agagtcatcttttaacaatcttgaaacaaacagagttattctagagaaaagtagtttggagcatgccactgaaaaaagcacagctaacgatacgtgctcgtcagctgctattcaggagga

SEQ ID NO: 601231 - DNA, 120 bp, Artificial Sequence
  ENSG00000174718_28 (sequence is synthesized)
tatttaccctcaggaaatagatgcatccagcaactatactccccaagatcctgcaagaaatgaaatccacagtgataaggcacctgtcttatacctacatgaccagctgtcagaacttct

SEQ ID NO: 601232 - DNA, 120 bp, Artificial Sequence
  ENSG00000174718_29 (sequence is synthesized)
aaaagagtttccttatggcattgaggctgtgaatacacgtgaaggttctgtgggccagcaaactacataccagacctcagaagatcaaactgctgataaaaccagttctgactccaaaga

SEQ ID NO: 601233 - DNA, 120 bp, Artificial Sequence
  ENSG00000174718_30 (sequence is synthesized)
cccagcagatcaaatacaaattacaatattaagctcagagcaaatgaaagaaatatttcctgaacaggatgatcaaccctatgtagtagacaagttggcagaacctcagaaagaagagcc

SEQ ID NO: 601234 - DNA, 120 bp, Artificial Sequence
  ENSG00000174718_31 (sequence is synthesized)
catcacagaagtagttagccagtgtgacctgcaggcacctgcagctggacaaagtcgtgattctgtgatactggactctgagaaagatgatatccactgctgtgcattgggctggctctc

SEQ ID NO: 601235 - DNA, 120 bp, Artificial Sequence
  ENSG00000174718_32 (sequence is synthesized)
catggtttacgaaggagtaccccagtgtcagtgtaattccatcaagaactcatcttcagaggaagagaaacaaaaagagcagtgttctcctttggataccaacagttgtaaacaaggaga

SEQ ID NO: 601236 - DNA, 120 bp, Artificial Sequence
  ENSG00000174718_33 (sequence is synthesized)
gagaacttctgatagagatgtcactgttgttcaatttaagagccttgtaaataatccaaagactcctccagatgggaaaagtcattttcctgaactacaagacgacagtagaaaagatac

SEQ ID NO: 601237 - DNA, 120 bp, Artificial Sequence
  ENSG00000174718_34 (sequence is synthesized)
acccaaaacaaaacataaaagcttaccaaggacagaacaagaattagttgctggtcagttttcatctaaatgtgataaactaaatcccttgcaaaatcacaaaagaaaaaaattgaggtt

SEQ ID NO: 601238 - DNA, 120 bp, Artificial Sequence
  ENSG00000174718_35 (sequence is synthesized)
tcacgaggtaacctttcactccagtaataaaatgacagcatcttatgaacaagcttctcaggaaacccgacagaagaaacatgtaacacagaactcacgtccactaaaaacaaaaacagc

SEQ ID NO: 601239 - DNA, 120 bp, Artificial Sequence
  ENSG00000174718_36 (sequence is synthesized)
ttttttgccaaataaagatgtgtataagaagcatagttctttgggacagtcattatcaccagaaaagataaaattgaaactcaaatcagttagcttcaaacaaaaacgaaagttagacca

SEQ ID NO: 601240 - DNA, 120 bp, Artificial Sequence
  ENSG00000174718_37 (sequence is synthesized)
agggaacgtattagatatggaagtaaagaaaaagaaacatgataaacaagaacagaaaggaagtgtgggagctacattcaaattaggtgactctttgtcaaacccaaacgaaagagccat

SEQ ID NO: 601241 - DNA, 120 bp, Artificial Sequence
  ENSG00000174718_38 (sequence is synthesized)
tgttaaagaaaagatggtatcaaatactaagtctgtagacacgaaagcgagttcatctaaatttagtagaattctaactcctaaggagtatttacaaaggcagaagcataaagaagctct

SEQ ID NO: 601242 - DNA, 120 bp, Artificial Sequence
  ENSG00000174718_39 (sequence is synthesized)
gagtaataaagcatcgaagaaaatctgtgtgaaaaacgtgccatgtgattctgaacatatgagaccaagtaaacttgccgtgcaggttgaaagttgtgggaaatcaaatgagaaacacag

SEQ ID NO: 601243 - DNA, 120 bp, Artificial Sequence
  ENSG00000174718_40 (sequence is synthesized)
cagcggcgtgcagacctctaaagaatcattaaatggcttgacaagccatggtaaaaacctcaaaatccaccattctcaggagtctaaaacatacaacattctaaggaatgttaaagaaaa

SEQ ID NO: 601244 - DNA, 120 bp, Artificial Sequence
  ENSG00000174718_41 (sequence is synthesized)
agttggtgggaagcagcctgataaaatatggattgataagactaaattagacaaattaaccaatataagcaacgaagctcaattcagccaaatgcctccccaagtaaaggatcaaaagaa

SEQ ID NO: 601245 - DNA, 120 bp, Artificial Sequence
  ENSG00000174718_42 (sequence is synthesized)
attatatctgaatagagttgggtttaaatgcactgaacgtgaaagcatttctctcaccaaattagaaagttcacccaggaagcttcataaagataagagacaggaaaataaacataagac

SEQ ID NO: 601246 - DNA, 120 bp, Artificial Sequence
  ENSG00000174718_43 (sequence is synthesized)
ctttttaccggtgaaaggtaacacagaaaaatcaaacatgctggagtttaaattatgtccagatatcttactaaagaatacaaactctgtggaagaacggaaggatgtaaagcctcatcc

SEQ ID NO: 601247 - DNA, 120 bp, Artificial Sequence
  ENSG00000174718_44 (sequence is synthesized)
taggaaggagcaagcccctctgcaagtttcaggaataaaaagtacaaaagaagactggttaaaatttgttgctacaaagaaaaggacacagaaagacagccaagagagagataatgttaa

SEQ ID NO: 601248 - DNA, 120 bp, Artificial Sequence
  ENSG00000174718_45 (sequence is synthesized)
ttcaagactctcgaagagaagcttcagtgcagatggatttgagatgctacaaaacccagtaaaagattcaaaagaaatgtttcaaacctacaaacagatgtacctggagaagagaagcag

SEQ ID NO: 601249 - DNA, 120 bp, Artificial Sequence
  ENSG00000174718_46 (sequence is synthesized)
aagccttggtagcagtcctgtaaaataattacaagatgtggttttgtaattgccactgggaaatttctttccttttctgttcaaaatatttcgctgaaactaatgagaaatgccatgata

SEQ ID NO: 601250 - DNA, 120 bp, Artificial Sequence
  ENSG00000174718_47 (sequence is synthesized)
aagatttctcagagtttggttcccactttcattgtatttcattgaaagtgcttaattaaaatggcttgagaactttgggtagccatgtgtaagaaatggatggtattcaccggggaaaca

SEQ ID NO: 601251 - DNA, 120 bp, Artificial Sequence
  ENSG00000174718_48 (sequence is synthesized)
aggtatttgaatttctactttattgaaccagatttaccattattttaaaaggaatgcttatacaaatcaatttgaaattctacccatcttgagggaggaccgttcctcagttaaggactt

SEQ ID NO: 601252 - DNA, 120 bp, Artificial Sequence
  ENSG00000174718_49 (sequence is synthesized)
gtttatttaaatgggactgtaaatatgttttggtttctaagctatattagcaaaatttatttttcaaaaatgcccactgtgatgtgaatgtcaaaatatattcttaagtgttttataact

SEQ ID NO: 601253 - DNA, 120 bp, Artificial Sequence
  ENSG00000174718_50 (sequence is synthesized)
aattgtaaactttttttcagaagtcttattttatacttgtgaaactgaacacaattttgggacaacgtttaaacattacttttcatacttgaaataaacatttattttttaaaaaactaa

SEQ ID NO: 601254 - DNA, 120 bp, Artificial Sequence
  ENSG00000174718_51 (sequence is synthesized)
cggagctgggccgggccgccgcgcttgcttctgcccgccgcaccggggccggccctgggcctccgcggatgccgagccttgcaccggagggcgggcctcgctggctgttttccctcattg

SEQ ID NO: 601255 - DNA, 120 bp, Artificial Sequence
  ENSG00000174718_52 (sequence is synthesized)
cattgcctggctctgcgcggtagaggtcgcgagtggcgaaggctaggacgcattttgtcgaactgcgaggcgcggctggtgaggcgggaccaaagaagtaaacactgtgtggagagggac

SEQ ID NO: 601256 - DNA, 120 bp, Artificial Sequence
  ENSG00000174720_0 (sequence is synthesized)
ggggcccggcgtggggaggtttggggcgcgcccggcctatgacggcgtccttgcggaagtacgggtgccgagagaagcagtagtcaataaagagagtgccgtatttcgcagattggagct

SEQ ID NO: 601257 - DNA, 120 bp, Artificial Sequence
  ENSG00000174720_1 (sequence is synthesized)
gagctgtggctgccagaagatagcgaacgaatggaaactgaaagtggaaatcaggaaaaggtaatggaagaagaaagcactgaaaagaaaaaagaagttgaaaaaaagaaacggtcacga

SEQ ID NO: 601258 - DNA, 120 bp, Artificial Sequence
  ENSG00000174720_2 (sequence is synthesized)
gttaaacaggtgcttgcagatattgctaagcaagtggacttctggtttggggatgcaaatcttcacaaggatagatttcttcgagaacagatagaaaaatctagagatggatatgttgat

SEQ ID NO: 601259 - DNA, 120 bp, Artificial Sequence
  ENSG00000174720_3 (sequence is synthesized)
atatcactacttgtgtcttttaacaaaatgaaaaaattgactactgatgggaagttaattgccagagcattgagaagttcagctgttgtagagcttgatttggaaggcaccagaatccgg

SEQ ID NO: 601260 - DNA, 120 bp, Artificial Sequence
  ENSG00000174720_4 (sequence is synthesized)
aggaaaaaacctctgggggaaagaccaaaggatgaggatgaacgcacagtgtatgtggagttacttcccaaaaatgttaatcacagctggattgaaagagtatttgggaaatgtggcaat

SEQ ID NO: 601261 - DNA, 120 bp, Artificial Sequence
  ENSG00000174720_5 (sequence is synthesized)
gttgtttatataagtataccacattataagtctactggagatccaaagggatttgcgtttgtggaatttgaaacaaaagaacaagcagcaaaagcaattgagtttcttaacaacccacca

SEQ ID NO: 601262 - DNA, 120 bp, Artificial Sequence
  ENSG00000174720_6 (sequence is synthesized)
gaagaagcaccaagaaaacctggcatatttcctaaaacagtgaaaaataagcccattccagccttaagagttgtggaagagaagaaaaagaaaaagaagaagaaaggccgaatgaaaaag

SEQ ID NO: 601263 - DNA, 120 bp, Artificial Sequence
  ENSG00000174720_7 (sequence is synthesized)
gaagacaatatccaagccaaagaagaaaacatggacacaagcaacaccagcatcagtaaaatgaaaagatccagacccacatctgagggctctgacattgagtccactgaaccccaaaag

SEQ ID NO: 601264 - DNA, 120 bp, Artificial Sequence
  ENSG00000174720_8 (sequence is synthesized)
cagtgctcaaagaaaaagaaaaaacgggacagagttgaagcatctagcttacctgaagtcagaacagggaagaggaagagaagcagctctgaagatgcagaatccctagctccccgatca

SEQ ID NO: 601265 - DNA, 120 bp, Artificial Sequence
  ENSG00000174720_9 (sequence is synthesized)
taaagaaaattattcagaaagacatcattaaggaagcatcagaagcttccaaggaaaatagagatatagaaatctctactgaagaggaaaaggatactggagatctaaaagatagctctc

SEQ ID NO: 601266 - DNA, 120 bp, Artificial Sequence
  ENSG00000174720_10 (sequence is synthesized)
tcttgaaaacaaaaaggaaacataagaaaaaacataaagagagacataaaatgggagaagaagttataccattaagagtgctatcaaagagcgaatggatggatttgaaaaaagagtatt

SEQ ID NO: 601267 - DNA, 120 bp, Artificial Sequence
  ENSG00000174720_11 (sequence is synthesized)
tagcgctacaaaaagctagcatggcttctttaaaaaaaacaatatcccaaataaaatcagagtcagaaatggaaacagacagtggagtacctcaaaacactggaatgaaaaatgaaaaaa

SEQ ID NO: 601268 - DNA, 120 bp, Artificial Sequence
  ENSG00000174720_12 (sequence is synthesized)
cagccaacagggaagagtgtcgcacccaggagaaagttaatgcaacaggaccacagttcgtgagtggagtgattgtgaagatcattagcacagagcctctacctggcaggaaacaagtcc

SEQ ID NO: 601269 - DNA, 120 bp, Artificial Sequence
  ENSG00000174720_13 (sequence is synthesized)
gggatactttggcagcaatctcagaagttctttatgttgatttgctagaaggggatacagaatgccatgctagatttaaaactcctgaggatgctcaagcagtaataaatgcctatacag

SEQ ID NO: 601270 - DNA, 120 bp, Artificial Sequence
  ENSG00000174720_14 (sequence is synthesized)
aaattaacaagaaacactgctggaaactcgagatcctttctggtgatcacgaacaaaggtattggcagaagattttggttgatagacaggcaaaacttaatcagcctcgggaaaagaaaa

SEQ ID NO: 601271 - DNA, 120 bp, Artificial Sequence
  ENSG00000174720_15 (sequence is synthesized)
gaggcactgaaaagttaatcaccaaagctgaaaagattagactggcaaagactcaacaagcgagtaaacatataagattttctgaatatgattgaaaaaaaaaacagttcacctcttaat

SEQ ID NO: 601272 - DNA, 120 bp, Artificial Sequence
  ENSG00000174720_16 (sequence is synthesized)
acttcacaagatacttgagctgttcttgggagattcacttttattatggtagcactgcataattaatgtgtttttaattaaaagaaatatctttgttcctcaacttgtaaataagacttt

SEQ ID NO: 601273 - DNA, 120 bp, Artificial Sequence
  ENSG00000174720_17 (sequence is synthesized)
tttctagagacaaatatgatgtataccacaatttttcttaaacattttatttgttgaaattatcttagatgtcagtgtcaggtgatttagtaaataaatgtgttttgaacattatttgga

SEQ ID NO: 601274 - DNA, 120 bp, Artificial Sequence
  ENSG00000174720_18 (sequence is synthesized)
atcctatgacgcgaaagtaaccgagactatcaggatccggagacggaaatgtccgaaggccgcagtacttgaccctgtattttgggagtcgaacggagaatggaaactgaaagtggaaat

SEQ ID NO: 601275 - DNA, 120 bp, Artificial Sequence
  ENSG00000174720_19 (sequence is synthesized)
ggaaaacgttgtcgctcatcctatgacgcgaaagtaaccgagactatcaggatccggagacggaaatgtccgaaggccgcagtacttgaccctgtattttgggagtcgaacggagactct

SEQ ID NO: 601276 - DNA, 120 bp, Artificial Sequence
  ENSG00000174720_20 (sequence is synthesized)
gccatcgtcctcaaagagtaaaaaatccagttacggaagggaactaacacttgctagatatggtgtgcagagtgcgtttgcaaagaaacttaagagaaaacaaatgataggacacagggt

SEQ ID NO: 601277 - DNA, 120 bp, Artificial Sequence
  ENSG00000174720_21 (sequence is synthesized)
tcaaagagtaagatgccatttaacctgggccttgaaaatttaataaggaaatttagacgagaagattcagacaaagcagaacacacaggccactacgtgttgagggacttgagttgtaag

SEQ ID NO: 601278 - DNA, 120 bp, Artificial Sequence
  ENSG00000174720_22 (sequence is synthesized)
cagtgaccagaacaatgattcttaacctgttgtggcacacttcttttgaaaacttaattatatggattagcttctcaggaaaacgtgcatgtacctattaaaacattttgcgaggctggg

SEQ ID NO: 601279 - DNA, 120 bp, Artificial Sequence
  ENSG00000174720_23 (sequence is synthesized)
agctcatctttgactaggaagttcttaaattgagttggaacacaactcagttatgacgtcaggattgtcgttaacgcaatttgttaagtagctatggaagtagccagttgactcttgtcg

SEQ ID NO: 601280 - DNA, 120 bp, Artificial Sequence
  ENSG00000174720_24 (sequence is synthesized)
gctgagaacacagatgttgatatatcactacttgtgtcttttaacaaaatgaaaaaattgactactgatgggaagttaattgccagagcattgagaagttcagctgttgtagagcttgat

SEQ ID NO: 601281 - DNA, 120 bp, Artificial Sequence
  ENSG00000174720_25 (sequence is synthesized)
gatggagaggagggggtgttgcgatggagagtgtccacgtcccttaatcttacacttttcacttactgacttaaaagtgcagcttagtgagataaaggtgtaattttttatattattcta

SEQ ID NO: 601282 - DNA, 120 bp, Artificial Sequence
  ENSG00000174720_26 (sequence is synthesized)
ggataatctggccctgtgttttaaaaggtacaaagaaactaaagctatgatccctaacatagaaggtaaattatttttaaatttaatttattaaatataaaaatgaatgttctttctgtt

SEQ ID NO: 601283 - DNA, 120 bp, Artificial Sequence
  ENSG00000174720_27 (sequence is synthesized)
tgtcttctgatggccaaatgtgagtccattattctctcagacagttaaaggctaatctaaatatttaactatattagctattgtggtgatttaaatatttacatctttttcttgtaattc

SEQ ID NO: 601284 - DNA, 120 bp, Artificial Sequence
  ENSG00000174720_28 (sequence is synthesized)
ggagatccaaagggatttgcgtttgtggaatttgaaacaaaagaacaagcagcaaaagcaattgagaagaagcaccaagaaaacctggcatatttcctaaaacagtgaaaaataagccca

SEQ ID NO: 601285 - DNA, 120 bp, Artificial Sequence
  ENSG00000174720_29 (sequence is synthesized)
tcatttttgtttttttagactaaactttccttgaacgtttaatgccaaagtcagtactaggtagtcataaaatgatcgtagttttgctattacctaacaaaaatttactgagtatatact

SEQ ID NO: 601286 - DNA, 120 bp, Artificial Sequence
  ENSG00000174720_30 (sequence is synthesized)
tgatatactttaacagtcttgatatctggctgctatgtcttgtagtttggtgataaatgattatagaaagattatcttcatggtaaaaacacaatgtattcagaatgtagtttataaaga

SEQ ID NO: 601287 - DNA, 120 bp, Artificial Sequence
  ENSG00000174720_31 (sequence is synthesized)
taggaggctccatagataagatggagagactttatgcatagtgtttcctatagcaacgataagctttattcctctttctctaagatagtaggtaatacaaacaagcttaaataatttaaa

SEQ ID NO: 601288 - DNA, 120 bp, Artificial Sequence
  ENSG00000174720_32 (sequence is synthesized)
gcaagcccctctttcagtaattttatttttctgtcacttaaaatgatactggtctgatcagtagtggaatcacacctgggaatagccactgctttccagcttaggcaacatagcaagacc

SEQ ID NO: 601289 - DNA, 120 bp, Artificial Sequence
  ENSG00000174721_0 (sequence is synthesized)
attcacagggagccggctaaaacagactactcccccgtgcagtcgttccctctaccctaataaggctttggcgcctctcccagaactcggtcctggggaatgctctttgcctggtccagc

SEQ ID NO: 601290 - DNA, 120 bp, Artificial Sequence
  ENSG00000174721_1 (sequence is synthesized)
cccgacaaacgtggtctgagaacagcggagcgcggaaaccgcggagcatgactcctccgaagctgcgagcgtcgctgtcgccgtcgctgctgctgctgctgagtggttgcctcctcgcgg

SEQ ID NO: 601291 - DNA, 120 bp, Artificial Sequence
  ENSG00000174721_2 (sequence is synthesized)
ctgctcggagggagaaaggggcggctagcaacgtggcggagccggtccccgggcccactggcggctcctcgggtcgcttcctcagccccgagcagcacgcgtgcagctggcagctcctgc

SEQ ID NO: 601292 - DNA, 120 bp, Artificial Sequence
  ENSG00000174721_3 (sequence is synthesized)
cgcagcgggcagcgagctggcgctgcgctgccagagcccggacggggcgcgccaccagtgcgcctaccgcgggcatccggagcgctgcgcagcctacgccgctcgccgcgcgcacttctg

SEQ ID NO: 601293 - DNA, 120 bp, Artificial Sequence
  ENSG00000174721_4 (sequence is synthesized)
gccgcgcgcacttctggaagcaggtgctgggagggctgcgcaagaagcggaggccctgtcacgaccccgcgccgctccaggcccgcttgtgcgcgggcaagaagggccacggcgccgagc

SEQ ID NO: 601294 - DNA, 120 bp, Artificial Sequence
  ENSG00000174721_5 (sequence is synthesized)
cgtcgcgggattcgcgggggagtccaagccccgggcccggaaccgggggcggacccgggagcgtgcgtccggcccagccgctgggaccccgcctccccaaagcgcaccgcccaaagaaaa

SEQ ID NO: 601295 - DNA, 120 bp, Artificial Sequence
  ENSG00000174721_6 (sequence is synthesized)
ctgggaccccgcctccccaaagcgcaccgcccaaagaaaacccctcagagaggaagaccaacgagggcaagaggaaggcggccttggtccccaacgaggagcgacccatggggaccgggc

SEQ ID NO: 601296 - DNA, 120 bp, Artificial Sequence
  ENSG00000174721_7 (sequence is synthesized)
ccgaccccgacgggctggacgggaacgcggagctcacggagacctactgcgctgagaagtggcactccctctgcaacttctttgtcaatttctggaacggctgagactgcctgccggctt

SEQ ID NO: 601297 - DNA, 120 bp, Artificial Sequence
  ENSG00000174721_8 (sequence is synthesized)
agggagggttgatgggggaggcgtggggaagggaaagctaagggcgtcttagaccggggggtactgtgatagagattggggagaagtccaggttctcgaatgggggtgggggcaagggta

SEQ ID NO: 601298 - DNA, 120 bp, Artificial Sequence
  ENSG00000174721_9 (sequence is synthesized)
agggtgagatgcttgggatgagagtgtaaggggtatggagaatctctgggatagcagagaagttaaaaattttgaaaagtctcagtcctgattaagagcaggaaaaataatggaaacaga

SEQ ID NO: 601299 - DNA, 120 bp, Artificial Sequence
  ENSG00000174721_10 (sequence is synthesized)
actggggagagaaatcgatgcagagggaggctgagaataagggggagatagagtgactaaagtgatgtgagtcccatgtggggagggggatgcaatgtttattgtttaacatttctatta

SEQ ID NO: 601300 - DNA, 120 bp, Artificial Sequence
  ENSG00000174721_11 (sequence is synthesized)
aatgcagccatgagcaattgccaacctgagccaggttgaatcaatgtcttctcacttaatcagctaacaagactgcagactttttttccgtttctgaattggtataaacttggatgcggc

SEQ ID NO: 601301 - DNA, 120 bp, Artificial Sequence
  ENSG00000174721_12 (sequence is synthesized)
gtggtgggtgtcatagataacctctatagggacagaagcctcacaggtcaaaactggctccaaggaaagttttgcagaatgatttcctttccattcttttagaagagctacctttttttt

SEQ ID NO: 601302 - DNA, 120 bp, Artificial Sequence
  ENSG00000174721_13 (sequence is synthesized)
tttttttccctgacagggtctggcttgcccaggctggagtgcggtggctagtcacaggtgtaataataggcactgcagtctccaactcctggcctcaagggatcctcacatcttagcctc

SEQ ID NO: 601303 - DNA, 120 bp, Artificial Sequence
  ENSG00000174721_14 (sequence is synthesized)
cagaatagctaggagtaggagtagctgggactacaagcatgcacagctgcacttggcttagaagtgctactttatttttatttttgagacagggtcttgtgtcatccagactggagcagt

SEQ ID NO: 601304 - DNA, 120 bp, Artificial Sequence
  ENSG00000174721_15 (sequence is synthesized)
ggtgcaattatggctcactgcggcctcgacattccagtctcaagtgatcctctgcctcagcctccggagtagccaggactacaggggtgtgccactagaagtgctactttttaacgaaat

SEQ ID NO: 601305 - DNA, 120 bp, Artificial Sequence
  ENSG00000174721_16 (sequence is synthesized)
ggtgactaatgttctggaactttcccattaaccttctgcatttagaaggaattatagatgttgagtgctccagtaaacagtgattctctttatatctgatttttttttttaaacagctaa

SEQ ID NO: 601306 - DNA, 120 bp, Artificial Sequence
  ENSG00000174721_17 (sequence is synthesized)
aatgtaagtatgtatctcagagtcattttgaccattatggaagttgtatctctctgtttcatgtaactaattattaatatatttcatttttagtgtgatgtaatgagagactgtgtgtgt

SEQ ID NO: 601307 - DNA, 120 bp, Artificial Sequence
  ENSG00000174721_18 (sequence is synthesized)
atgttaggtgctcaataaaaactgtatggttagatttaaagaagtggcaaggcaatggaaattctacctgcatttgatctacttccaagtacaccttgaattaagttcttaaacacatct

SEQ ID NO: 601308 - DNA, 120 bp, Artificial Sequence
  ENSG00000174721_19 (sequence is synthesized)
tgaattgctgggaaaagacagaaactaagaagttgacataaagcaagagtcacaaactggcagccacctggccttatcattgttctatttgatttgcaccctggttctctttctttttcc

SEQ ID NO: 601309 - DNA, 120 bp, Artificial Sequence
  ENSG00000174721_20 (sequence is synthesized)
cttcctccccaccttcctcccatccattgttgaatctgtggatgcagagcccacggatgtggaggggcaactatatatatgtttttccattatatatataaatgtgtgtgtgtgtatata

SEQ ID NO: 601310 - DNA, 120 bp, Artificial Sequence
  ENSG00000174738_0 (sequence is synthesized)
gtcagccgccctcgccgccgcggtgcgctggctgcaggaagccgccgcgccgccgcttttgttgtcagggacccagcgaggagcgccgctcgccggccgccgccaccctctctcgctgca

SEQ ID NO: 601311 - DNA, 80 bp, Artificial Sequence
  ENSG00000174738_1 (sequence is synthesized)
gctgtgcgctgcacggcctggggcccgggagccccgcccgctctgcccatgagggggccccgcgaccaccgctgcttcca

SEQ ID NO: 601312 - DNA, 120 bp, Artificial Sequence
  ENSG00000174738_2 (sequence is synthesized)
cgctgccccctctgcgggaagcgggcggccccggccgcctccgcgagggcaccatggaggtgaatgcaggaggtgtgattgcctatatcagttcttccagctcagcctcaagccctgcct

SEQ ID NO: 601313 - DNA, 120 bp, Artificial Sequence
  ENSG00000174738_3 (sequence is synthesized)
cttgtcacagtgagggttctgagaatagtttccagtcctcctcctcttctgttccatcttctccaaatagctctaattctgataccaatggtaatcccaagaatggtgatctcgccaata

SEQ ID NO: 601314 - DNA, 120 bp, Artificial Sequence
  ENSG00000174738_4 (sequence is synthesized)
ttgaaggcatcttgaagaatgatcgaatagattgttctatgaaaacaagcaaatcgagtgcacctgggatgacaaaaagtcatagtggtgtgacaaaatttagtggcatggttctactgt

SEQ ID NO: 601315 - DNA, 120 bp, Artificial Sequence
  ENSG00000174738_5 (sequence is synthesized)
gtaaagtctgtggggatgtggcgtcaggattccactatggagttcatgcttgcgaaggctgtaagggtttctttcggagaagtattcaacaaaacatccagtacaagaagtgcctgaaga

SEQ ID NO: 601316 - DNA, 120 bp, Artificial Sequence
  ENSG00000174738_6 (sequence is synthesized)
atgaaaactgttctataatgagaatgaataggaacagatgtcagcaatgtcgcttcaaaaagtgtctgtctgttggaatgtcaagagatgctgttcggtttggtcgtattcctaagcgtg

SEQ ID NO: 601317 - DNA, 120 bp, Artificial Sequence
  ENSG00000174738_7 (sequence is synthesized)
aaaaacagaggatgctaattgaaatgcaaagtgcaatgaagaccatgatgaacagccagttcagtggtcacttgcaaaatgacacattagtagaacatcatgaacagacagccttgccag

SEQ ID NO: 601318 - DNA, 120 bp, Artificial Sequence
  ENSG00000174738_8 (sequence is synthesized)
cccaggaacagctgcgacccaagccccaactggagcaagaaaacatcaaaagctcttctcctccatcttctgattttgcaaaggaagaagtgattggcatggtgaccagagctcacaagg

SEQ ID NO: 601319 - DNA, 120 bp, Artificial Sequence
  ENSG00000174738_9 (sequence is synthesized)
atacctttatgtataatcaagagcagcaagaaaactcagctgagagcatgcagccccagagaggagaacggattcccaagaacatggagcaatataatttaaatcatgatcattgcggca

SEQ ID NO: 601320 - DNA, 120 bp, Artificial Sequence
  ENSG00000174738_10 (sequence is synthesized)
atgggcttagcagccattttccctgtagtgagagccagcagcatctcaatggacagttcaaagggaggaatataatgcattacccaaatggtcatgccatttgtattgcaaatggacatt

SEQ ID NO: 601321 - DNA, 120 bp, Artificial Sequence
  ENSG00000174738_11 (sequence is synthesized)
gtatgaacttctccaatgcttatactcaaagagtatgtgatagagttccgatagatggattttctcagaatgagaacaagaatagttacctgtgcaacactggaggaagaatgcatctgg

SEQ ID NO: 601322 - DNA, 120 bp, Artificial Sequence
  ENSG00000174738_12 (sequence is synthesized)
tttgtccaatgagtaagtctccatatgtggatcctcataaatcaggacatgaaatctgggaagaattttcgatgagcttcactccagcagtgaaagaagtggtggaatttgcaaagcgta

SEQ ID NO: 601323 - DNA, 120 bp, Artificial Sequence
  ENSG00000174738_13 (sequence is synthesized)
ttcctgggttcagagatctctctcagcatgaccaggtcaaccttttaaaggctgggacttttgaggttttaatggtacggttcgcatcattatttgatgcaaaggaacgtactgtcacct

SEQ ID NO: 601324 - DNA, 120 bp, Artificial Sequence
  ENSG00000174738_14 (sequence is synthesized)
ttttaagtggaaagaaatatagtgtggatgatttacactcaatgggagcaggggatctgctaaactctatgtttgaatttagtgagaagctaaatgccctccaacttagtgatgaagaga

SEQ ID NO: 601325 - DNA, 120 bp, Artificial Sequence
  ENSG00000174738_15 (sequence is synthesized)
tgagtttgtttacagctgttgtcctggtatctgcagatcgatctggaatagaaaacgtcaactctgtggaggctttgcaggaaactctcattcgtgcactaaggaccttaataatgaaaa

SEQ ID NO: 601326 - DNA, 120 bp, Artificial Sequence
  ENSG00000174738_16 (sequence is synthesized)
accatccaaatgaggcctctatttttacaaaactgcttctaaagttgccagatcttcgatctttaaacaacatgcactctgaggagctcttggcctttaaagttcacccttaaggccttt

SEQ ID NO: 601327 - DNA, 120 bp, Artificial Sequence
  ENSG00000174738_17 (sequence is synthesized)
gtttatttaaacatgaactgatggtaactgtacattttgtgctaaaatgcatatttatatgtgtataccatatgtggagatagaaaagacctttaagacaataaaagattgtaggctatc

SEQ ID NO: 601328 - DNA, 120 bp, Artificial Sequence
  ENSG00000174738_18 (sequence is synthesized)
tctgtaatcatgcaatagctgttcggattgagaactcttcagccatgattagacgttgactgcatctccctgatagaccaatcagctgtgtcgcacttaaactggagaagttacactgaa

SEQ ID NO: 601329 - DNA, 120 bp, Artificial Sequence
  ENSG00000174738_19 (sequence is synthesized)
gtataatcacactgaatgttagactttttcatctgccaaaaccaaaaaccattttgatctccctgtggttatcaatataacgcacaatcacaagtgtatgaggacttagaaattaatcct

SEQ ID NO: 601330 - DNA, 120 bp, Artificial Sequence
  ENSG00000174738_20 (sequence is synthesized)
ttgtggtaggagttctgttgaatgatggaaatcttattactaccacaagactatttgatctggtaattggagacttcgggatttaggagatctccatgtctgtatttactctaccactgc

SEQ ID NO: 601331 - DNA, 120 bp, Artificial Sequence
  ENSG00000174738_21 (sequence is synthesized)
ctcacagagttactaaaaaatgtctgtaaagcatatttacctcttgggagataggcactatgtaaataaggtaaaatttctgttattacaattattcataataatattcttttcttattt

SEQ ID NO: 601332 - DNA, 120 bp, Artificial Sequence
  ENSG00000174738_22 (sequence is synthesized)
ctaagcctttctgggaaatcatttcagtccacaccaaccatattattcagggttcctgccatatgtgtggggtatcctactgatacacacgtattcaaagtttatgggtacaacaaagac

SEQ ID NO: 601333 - DNA, 120 bp, Artificial Sequence
  ENSG00000174738_23 (sequence is synthesized)
atagtacatgtacataatatgtatgtgaatatagttaaatatatttcttcacaatattttaaactgtgaagaactttatcatacaggaaacttaaaacaagaggtgtcaaaagacccaaa

SEQ ID NO: 601334 - DNA, 120 bp, Artificial Sequence
  ENSG00000174738_24 (sequence is synthesized)
ttaggtgcattttacttgtttatgatggcataaccattgctttaaaatgtttagacagtagaatattgaatttatgctctatttttgtttatttaagcaacacttaatgtaaaagtgcaa

SEQ ID NO: 601335 - DNA, 120 bp, Artificial Sequence
  ENSG00000174738_25 (sequence is synthesized)
caggcaattgaatccaaatttcaacgacaaaaaaaaaaaacatgtattttagagttcatctttggcaaaatctttggttcagggtactagttgtttaaaagttgattcatattcttacct

SEQ ID NO: 601336 - DNA, 120 bp, Artificial Sequence
  ENSG00000174738_26 (sequence is synthesized)
tgtgctgagaaaggttgcattgctgccccttatacacatgctgcagcttgatgttaaagaatttttattctttctgaagaactaattaatgtttaaagcaactgtttaatatgatggcat

SEQ ID NO: 601337 - DNA, 120 bp, Artificial Sequence
  ENSG00000174738_27 (sequence is synthesized)
gtgtgtgtgtgcgtgcgtgtgtatgttctgagtccacttcttttttcctaaataacactacagggattttgtcatattagatttaatttataatttgaaaaatcatctagtgtgtgacct

SEQ ID NO: 601338 - DNA, 120 bp, Artificial Sequence
  ENSG00000174738_28 (sequence is synthesized)
acaggcttagaaatggtatagtcaaagacattttatccacatttctaatagtggacttgattaagtagataagatcagcatctgtttatggtagtaggagaaatagccaaagttgaggat

SEQ ID NO: 601339 - DNA, 120 bp, Artificial Sequence
  ENSG00000174738_29 (sequence is synthesized)
tttatgtatgttttcctgtttacctggaaaatagcaattaattggattttttggtaaagattgccttctgtataatgtttggattatataaaattgcaaaaatgataacagcccgcttta

SEQ ID NO: 601340 - DNA, 120 bp, Artificial Sequence
  ENSG00000174738_30 (sequence is synthesized)
ctgtactaagcctgttactttcatgacgtgtgagcagaatgccttattttgtaatcttgtttaacttgttgctactgggacttgatttactgtggcactagttaagtaagttaaaaaaaa

SEQ ID NO: 601341 - DNA, 120 bp, Artificial Sequence
  ENSG00000174738_31 (sequence is synthesized)
gttaaaccctctcattattaaagaggaaaggcgatggtgatgtctgtagtacaatataaaccataattgtgatttaccttaagtaggtataactcttatgggatatacagtatagttttt

SEQ ID NO: 601342 - DNA, 120 bp, Artificial Sequence
  ENSG00000174738_32 (sequence is synthesized)
gtgaatctttacatgatagcattatctttttataattttttttcctaagataaacaaatgcatagttttcttctatgggtgatagaaacagctttttgaagtaatgaaaacctcaaaaga

SEQ ID NO: 601343 - DNA, 120 bp, Artificial Sequence
  ENSG00000174738_33 (sequence is synthesized)
tcatgttgattcttaatttttgccttttgcataagcctctttataacatgtatctttaaaacaattaagtctttaggaatgtgtaaccagaactatgttagtattgcttataaaacttta

SEQ ID NO: 601344 - DNA, 120 bp, Artificial Sequence
  ENSG00000174738_34 (sequence is synthesized)
gttaggttcaatatatacatatatacatctctatataggtatatagatttgcattttgtcttgtaaaattttatttgaataaattcttcctgtaggtaatgggaaacaaaattaatagtt

SEQ ID NO: 601345 - DNA, 120 bp, Artificial Sequence
  ENSG00000174738_35 (sequence is synthesized)
catatgtcactcatagcatttctatatttgaaagtagcccaatataaaacttttgattctaaaattaaaccagcagcctattacaagcacattctttgattgagtcattggttataaact

SEQ ID NO: 601346 - DNA, 120 bp, Artificial Sequence
  ENSG00000174738_36 (sequence is synthesized)
tactaaatgcagagaaagcagccaatttaggaaacttctgagttggtgggacactgttgattaataatgtactgtatgaattaagtgatgctttaactttgattttacattttaaagtta

SEQ ID NO: 601347 - DNA, 120 bp, Artificial Sequence
  ENSG00000174738_37 (sequence is synthesized)
aaatgtgggcattatgtcagcaaacttaagggcattatgtcagcaagctaaaacattttttttcctgtgcttttaatgtatctctttacatgatctgagagaggattcaagttgatagaa

SEQ ID NO: 601348 - DNA, 120 bp, Artificial Sequence
  ENSG00000174738_38 (sequence is synthesized)
atagctgaggggaaaagggggaacatcttgggatgaagcttgtccttatggtgatggtttaattacagattaaaaaattagaaggaaatttcagtggattaagtgtatagctttcatatc

SEQ ID NO: 601349 - DNA, 120 bp, Artificial Sequence
  ENSG00000174738_39 (sequence is synthesized)
tacatttcaagaaattaccattgtaacttgataagagatgatttattttatgtaaacatctttgcaaagcaaggtgtagcagctcagctagatttattactgtgcacgaaagtaaatacc

SEQ ID NO: 601350 - DNA, 120 bp, Artificial Sequence
  ENSG00000174738_40 (sequence is synthesized)
tatctcaattattctttttcttttccaatataaagtttgctgaatgtacaagaagagtttatcacttaggatatagaatttttttaggggttgggggaggggatctgttaggaaactgtt

SEQ ID NO: 601351 - DNA, 120 bp, Artificial Sequence
  ENSG00000174738_41 (sequence is synthesized)
acctataaacaaagattgactggattcgatccaaaagataaaacttgaagctattctggaactaacatggaaaaatgaaatggctattgtttaaaaaaatgatagaaatacattgttgat

SEQ ID NO: 601352 - DNA, 120 bp, Artificial Sequence
  ENSG00000174738_42 (sequence is synthesized)
gggatatgagttaagtttattttctacaaactgtaattgatgaggacatggataatatcttcatgtttctgagaagtaatctgtatgtggggggaggggataataaatatttctaaccaa

SEQ ID NO: 601353 - DNA, 120 bp, Artificial Sequence
  ENSG00000174738_43 (sequence is synthesized)
ggttgcacactgcggaggaggccgcgcgtgcgcgcccgctgagcccccgcggcggggcgtccccgaagcgggcgctgacaccgcagtgcaccggacgccgcacgctcttttcgcgaggag

SEQ ID NO: 601354 - DNA, 120 bp, Artificial Sequence
  ENSG00000174738_44 (sequence is synthesized)
atgtcaagagatggtatgttcccagtttaaagagtgttcctaaagtgtatggagcttggcttttattcctcatcatgaaccagagctataaaccggttaccaaggaccctcttgtattta

SEQ ID NO: 601355 - DNA, 120 bp, Artificial Sequence
  ENSG00000174738_45 (sequence is synthesized)
aatgataagttaattgctatttatattaggttgccaagaggctttctacagtatggtgggcagcaaatggatgaagtgctaatatctcagtagattttacttgtgttttgggggttaaat

SEQ ID NO: 601356 - DNA, 120 bp, Artificial Sequence
  ENSG00000174740_0 (sequence is synthesized)
agtctctccggacctgcctcgagcctcaggctgctgaaatcaccgcgcctcactcgcctcgacagtgattctgagtctgcttttagcttccttttgcctgccttggctttttctgttcgt

SEQ ID NO: 601357 - DNA, 120 bp, Artificial Sequence
  ENSG00000174740_1 (sequence is synthesized)
gaacagctgtttggcccatagcttagagaaagcagccttttttctcttcaaagagaacctcctcccagtgctcagagagatggggagcggggagcctaatcctgctggcaagaaaaagaa

SEQ ID NO: 601358 - DNA, 120 bp, Artificial Sequence
  ENSG00000174740_2 (sequence is synthesized)
gtatctcaaggccgctctgtacgtgggtgacttggacccagatgtcaccgaggacatgctctataagaagttcaggcctgctggccctctgcgattcacccgaatctgccgtgatccggt

SEQ ID NO: 601359 - DNA, 120 bp, Artificial Sequence
  ENSG00000174740_3 (sequence is synthesized)
gacccgcagccccctgggctatgggtatgttaacttccgctttcccgcggatgcagagtgggccttgaacaccatgaattttgatttgattaatggaaaaccattccgccttatgtggtc

SEQ ID NO: 601360 - DNA, 120 bp, Artificial Sequence
  ENSG00000174740_4 (sequence is synthesized)
tcagccagatgaccgcttaagaaagtctggagtgggaaatatattcatcaaaaacctggacaaatccatagacaatagggccctgttttacttattttctgcttttgggaacattctgtc

SEQ ID NO: 601361 - DNA, 120 bp, Artificial Sequence
  ENSG00000174740_5 (sequence is synthesized)
ctgcaaagtcgtatgcgatgacaacggctctaagggttatgcctatgttcactttgacagcctggccgctgccaatagagccatctggcacatgaatggagtgcggctcaacaaccgcca

SEQ ID NO: 601362 - DNA, 120 bp, Artificial Sequence
  ENSG00000174740_6 (sequence is synthesized)
ggtgtatgttggcagattcaaattcccagaagagcgggcggctgaggtcagaaccagggatagagcaactttcaccaatgttttcgttaaaaacattggagacgacatagatgacgaaaa

SEQ ID NO: 601363 - DNA, 120 bp, Artificial Sequence
  ENSG00000174740_7 (sequence is synthesized)
actgaaggaacttttctgtgaatatgggccaactgagagtgttaaagtaataagagatgccagtgggaaatctaaaggctttggatttgtgagatatgagacacacgaggctgcccaaaa

SEQ ID NO: 601364 - DNA, 120 bp, Artificial Sequence
  ENSG00000174740_8 (sequence is synthesized)
ggctgtgctagacttgcatggaaagtccatcgatggaaaagtcctctatgtagggcgagcacagaagaaaattgaacgcctggctgagttgaggcggagatttgaacggctgaggttaaa

SEQ ID NO: 601365 - DNA, 120 bp, Artificial Sequence
  ENSG00000174740_9 (sequence is synthesized)
agaaaaaagtcggcccccaggggtgcctatctatattaagaacttggatgagacaatcaatgatgaaaaactgaaggaggaattttcttcctttgggtcaattagtcgggccaaagtgat

SEQ ID NO: 601366 - DNA, 120 bp, Artificial Sequence
  ENSG00000174740_10 (sequence is synthesized)
gatggaagtggggcaaggcaaaggatttggtgtggtctgcttttcctcttttgaagaggctaccaaagcagtggatgagatgaatggccgcatagtgggctccaagcccctgcatgtcac

SEQ ID NO: 601367 - DNA, 120 bp, Artificial Sequence
  ENSG00000174740_11 (sequence is synthesized)
cctgggccaggccaggcgcaggtgctgagaataagaatgctcagtttgtttcagccttagttggtgcctccttagtttgggctcctttgtgataaggggttattttatgctaattcacaa

SEQ ID NO: 601368 - DNA, 120 bp, Artificial Sequence
  ENSG00000174740_12 (sequence is synthesized)
gtttttttttgaagtgaattcttttgaaaaaaaaatgcaaaactagaaaactttattcattttagaatagaacataatttctaactgtaaaattgtcattttgtactttttttgatgtaa

SEQ ID NO: 601369 - DNA, 120 bp, Artificial Sequence
  ENSG00000174740_13 (sequence is synthesized)
cccttcttatttcagtaatactctattttttttcatgaaaatgtcaacatggttcttctgaatctatcacagtgaaaagttctaacttgtttttgagaagtcagtacagcaggggaaaac

SEQ ID NO: 601370 - DNA, 120 bp, Artificial Sequence
  ENSG00000174740_14 (sequence is synthesized)
atatgtgatgcaattaacatctgcataatttcacttaaaattattatgcaaaaatgaatgttttttcaaaaaatgtgaaatgtattttattttctttatttgtattcttgtttcattttt

SEQ ID NO: 601371 - DNA, 120 bp, Artificial Sequence
  ENSG00000174740_15 (sequence is synthesized)
taatatgttgtgaacatgctacagatttgatagtacttttgactaaatgttgggagtggtcgtattaacttcttgcccaaagaagtaagcatattggtgttttctcaattagtcactgag

SEQ ID NO: 601372 - DNA, 120 bp, Artificial Sequence
  ENSG00000174740_16 (sequence is synthesized)
aaaattaacactttaggcagtggctatttaaagtaggaattgcatcttaaaaacctttcctaagagatttggtatgtgaggatactttcagtaccactcctaccattcatttttctaaat

SEQ ID NO: 601373 - DNA, 120 bp, Artificial Sequence
  ENSG00000174740_17 (sequence is synthesized)
tccttagtacatatacttggatcatgttaaattaacaagaaagatgaataactgcgctgaattgcctttacctataaataatttaatattttaccttcgggttttatcaactgtcaatat

SEQ ID NO: 601374 - DNA, 120 bp, Artificial Sequence
  ENSG00000174740_18 (sequence is synthesized)
aaaaggcagtactccacagaatgatgttgaaaaacttcttcgaagaacaccttctattaaacttgttatctcttgtaaattattgtgtgtgtccttttgataatattcacaggtgtttca

SEQ ID NO: 601375 - DNA, 120 bp, Artificial Sequence
  ENSG00000174740_19 (sequence is synthesized)
aaggtaaggaataggttgtctcttggattaagtcatatgcctccagccattatatgagaactgtgaaaccaatatggttttctttatgtcttggctgcttgaaaattaaaaaaaaaaaag

SEQ ID NO: 601376 - DNA, 120 bp, Artificial Sequence
  ENSG00000174740_20 (sequence is synthesized)
gtttgttcaatattgccgttacatttattagcctgtaatttctaaattggagattctctacatttcacttgcagtttcctgttctcctcattgcctgccttccattcatattacacttat

SEQ ID NO: 601377 - DNA, 120 bp, Artificial Sequence
  ENSG00000174740_21 (sequence is synthesized)
tgtattacctttttaaaaatatataccagttcaagtccttttaggaagaagaaaatacctaatttatgtaaaatttaaataattacttttttataatatgattcacttatgccacagatt

SEQ ID NO: 601378 - DNA, 120 bp, Artificial Sequence
  ENSG00000174740_22 (sequence is synthesized)
atgccacagattcaacattagaatatgttttatctctactgtcagttttattaccttatatacaaatcttcattttcatacatagtacaatgtaaatatataactttgttaacacttttg

SEQ ID NO: 601379 - DNA, 120 bp, Artificial Sequence
  ENSG00000174740_23 (sequence is synthesized)
ttagctctttgaccataaaataatgacaataagctgtttctatgtatttgtttatctacaaattacaggtttatccatttgcaaatattttcaaaatggaaatcactgtttatattgatt

SEQ ID NO: 601380 - DNA, 120 bp, Artificial Sequence
  ENSG00000174740_24 (sequence is synthesized)
ataaacataagacatgctcattgtaaaaaatgtacacaaggcagaaggaagtaaaatttccacagttcagaaataccacaattaatattttcaatgtgtaaatatcttttcataattttt

SEQ ID NO: 601381 - DNA, 120 bp, Artificial Sequence
  ENSG00000174740_25 (sequence is synthesized)
cctacgtatacacaaacattttgaccaaaaatccacactatatgtactgttctgtatttttaattttaaactgaacaataatcatcttttcctgacaataaatatcaatctctatcatca

SEQ ID NO: 601382 - DNA, 120 bp, Artificial Sequence
  ENSG00000174740_26 (sequence is synthesized)
cagaggaagcgggaagttacttagcacggttccgggtttctcgcgccccgcctgtcccccctccctatcactgctactggctcttggtccctccgttggactgtcctgcggagagaaacc

SEQ ID NO: 601383 - DNA, 120 bp, Artificial Sequence
  ENSG00000174740_27 (sequence is synthesized)
ccagcccatcggtctgcgctgggaccgcccgccgcgcatctgcccttcttcgctgactccgccccgcatctggccagacccgcctcgcgtcagagctgacccactcactgcgcgtttgcc

SEQ ID NO: 601384 - DNA, 120 bp, Artificial Sequence
  ENSG00000174744_0 (sequence is synthesized)
gataggctctgcctcccgaagaaaagggagccgcgcagcgcctacgggagtccggcggcagcagccggtaccggcaaccacgggcagctctcagggaatctccgtcgtgaggccagaggc

SEQ ID NO: 601385 - DNA, 120 bp, Artificial Sequence
  ENSG00000174744_1 (sequence is synthesized)
tccagtccccgcgagtccagatgcctgtccagcctccaagcaaagacacagaagagatggaagcagagggtgattctgctgctgagatgaatggggaggaggaagagagtgaggaggagc

SEQ ID NO: 601386 - DNA, 120 bp, Artificial Sequence
  ENSG00000174744_2 (sequence is synthesized)
ggagcggcagccagacagagtcagaagaggagagctccgagatggatgatgaggactatgagcgacgccgcagcgagtgtgtcagtgagatgctggacctagagaagcagttctcggagc

SEQ ID NO: 601387 - DNA, 120 bp, Artificial Sequence
  ENSG00000174744_3 (sequence is synthesized)
taaaggagaagttgttcagggaacgactgagtcagctgcggttgcggctggaggaagtgggggctgagagagcccctgaatacacggagccccttggggggctgcagcggagcctcaaga

SEQ ID NO: 601388 - DNA, 120 bp, Artificial Sequence
  ENSG00000174744_4 (sequence is synthesized)
ttcgcattcaggtggcagggatctacaagggcttctgtctggatgtgatcaggaataagtacgaatgtgagctgcagggagccaaacagcacctggagagtgagaagctgctgctctatg

SEQ ID NO: 601389 - DNA, 120 bp, Artificial Sequence
  ENSG00000174744_5 (sequence is synthesized)
ggcagctccaggtcttgggactccctgccgcccagcaagaggaagaaggcacctctggtttctggcccatacatcgtgtacatgcttcaagagatcgacatcctggaggactggacagcc

SEQ ID NO: 601390 - DNA, 120 bp, Artificial Sequence
  ENSG00000174744_6 (sequence is synthesized)
atcaaaaaggctagggcagctgtgtcccctcagaagagaaaatcggatggaccttgaccctgctgttcacagccagggggaccctcagagcagctggcactgcacccaggattctcgtct

SEQ ID NO: 601391 - DNA, 120 bp, Artificial Sequence
  ENSG00000174744_7 (sequence is synthesized)
tcctcctgcagacaggcggacccacaggcccctcagggtctgcccagccaggctcctgtggtgctgctgggccctcccactccatctggcactggcctggactcctcctctgccctcctc

SEQ ID NO: 601392 - DNA, 120 bp, Artificial Sequence
  ENSG00000174744_8 (sequence is synthesized)
gaggcctgcacagctgtggccgtggagctgacctgaccaggcaaggctgctgtctccatccctgagccgcctgccacctcccactcctgaagatccatctcttggggctcccctgacaga

SEQ ID NO: 601393 - DNA, 120 bp, Artificial Sequence
  ENSG00000174744_9 (sequence is synthesized)
gaagacagccgaagtcaaagccacatcctcttgctgatgttggatgcaggctgtccggcctcagggccagggagccagtttccactgtgcgggaactctgagtcagacgtgattatctgg

SEQ ID NO: 601394 - DNA, 120 bp, Artificial Sequence
  ENSG00000174744_10 (sequence is synthesized)
gggtctgtccaccctggctggatctggaggcaagatgccaggccccccaggtgttctcagggcagttcttggtgtctgcttctcagattccaaggactggaattaaaacctttcctggga

SEQ ID NO: 601395 - DNA, 120 bp, Artificial Sequence
  ENSG00000174744_11 (sequence is synthesized)
cacacacacacagagcccctacacacacacatgcacacacacagcccctacacacaagcatgcacgcacatgcacatacagcgcctacacacaagcacatacacagaccctgcacacaag

SEQ ID NO: 601396 - DNA, 120 bp, Artificial Sequence
  ENSG00000174744_12 (sequence is synthesized)
tgcccggccttgccctttgctctcagccctcctatgtgggcaccgggctccccagccaagcagggaccctcctccctttctctgcagggatctacaagggcttctgtctggatgtgatca

SEQ ID NO: 601397 - DNA, 120 bp, Artificial Sequence
  ENSG00000174744_13 (sequence is synthesized)
tgagctattgccccctcttccagagtgagaagctgctgctctatgacacgctgcagggggagctgcaggagcggatccagaggctggaggaggaccgccagagcctggacctcagctctg

SEQ ID NO: 601398 - DNA, 120 bp, Artificial Sequence
  ENSG00000174744_14 (sequence is synthesized)
agaagggagcgggaggccccctgggcgctgcggagaagctggattgacctctgcgagagtggggagggtctgccttccctaggggcctgccccggaggagctgccattctgaaaagataa

SEQ ID NO: 601399 - DNA, 120 bp, Artificial Sequence
  ENSG00000174744_15 (sequence is synthesized)
gggccccccaccctggcagcagctctgccatctgcaggcctgggagttctctgctcaccaaggcttccccatcttcagcccagagtccctggatcgcagttggctcacaagtcctcttgc

SEQ ID NO: 601400 - DNA, 120 bp, Artificial Sequence
  ENSG00000174744_16 (sequence is synthesized)
tcaaggcggccctgggaaaagggatttctagtctgtgtcagccccttcccgttctggggcaggttttgatggggtgggagggtggcggggaggcgggagagccgctgagctggccagcag

SEQ ID NO: 601401 - DNA, 120 bp, Artificial Sequence
  ENSG00000174744_17 (sequence is synthesized)
tcaggagcatgggagctctgcctgggtggggcctatgctcccggtcctgggggcacagcactgaggcaacagcccacaagccacagaggtggggggtggggcagggattgccaagctgga

SEQ ID NO: 601402 - DNA, 120 bp, Artificial Sequence
  ENSG00000174748_0 (sequence is synthesized)
tggaggagcttcacgcagtctggagctgaagggacacagcgagcgccccgacccgcgacgccccgactccgcgaaggcctccctgggaggctggggaagcgtcgggggatctctcagcgc

SEQ ID NO: 601403 - DNA, 120 bp, Artificial Sequence
  ENSG00000174748_1 (sequence is synthesized)
agctctggggcccagatttctgcgcccgtcgtgcggtggccagagagggacagcgcagcgcggagacgcggagacgcagagactccgcagggggagagcccgcggtgcgtgaaacaaacc

SEQ ID NO: 601404 - DNA, 120 bp, Artificial Sequence
  ENSG00000174748_2 (sequence is synthesized)
tgttctctcctcagacctcaaagacagcggctccaccgcggtacgcggccaccggctttggagcctggaccccaacttgcctcctctcgcggagagacagtcgccgacgctcgcttagcc

SEQ ID NO: 601405 - DNA, 120 bp, Artificial Sequence
  ENSG00000174748_3 (sequence is synthesized)
gccgagacctcgccgccaactctctcacctctcgagacgcccaggccgctcaggctcgaatcttgcggagcagggggcgggacaatagcggccgcggcgccccactcggcagaactccgc

SEQ ID NO: 601406 - DNA, 120 bp, Artificial Sequence
  ENSG00000174748_4 (sequence is synthesized)
caccaggcgcgatgccggaactacatgtcccatgacgctctgggaggccgcagctttccaccggaaagagggtggctgaggtgggggaggagcccaaaaggcattgtgggagtacagctc

SEQ ID NO: 601407 - DNA, 120 bp, Artificial Sequence
  ENSG00000174748_5 (sequence is synthesized)
tttcctttccgtctggcggcagccatcaggtaagccaagatgggtgcatacaagtacatccaggagctatggagaaagaagcagtctgatgtcatgcgctttcttctgagggtccgctgc

SEQ ID NO: 601408 - DNA, 120 bp, Artificial Sequence
  ENSG00000174748_6 (sequence is synthesized)
tggcagtaccgccagctctctgctctccacagggctccccgccccacccggcctgataaagcgcgccgactgggctacaaggccaagcaaggttacgttatatataggattcgtgttcgc

SEQ ID NO: 601409 - DNA, 120 bp, Artificial Sequence
  ENSG00000174748_7 (sequence is synthesized)
cgtggtggccgaaaacgcccagttcctaagggtgcaacttacggcaagcctgtccatcatggtgttaaccagctaaagtttgctcgaagccttcagtccgttgcagaggagcgagctgga

SEQ ID NO: 601410 - DNA, 120 bp, Artificial Sequence
  ENSG00000174748_8 (sequence is synthesized)
cgccactgtggggctctgagagtcctgaattcttactgggttggtgaagattccacatacaaattttttgaggttatcctcattgatccattccataaagctatcagaagaaatcctgac

SEQ ID NO: 601411 - DNA, 120 bp, Artificial Sequence
  ENSG00000174748_9 (sequence is synthesized)
acccagtggatcaccaaaccagtccacaagcacagggagatgcgtgggctgacatctgcaggccgaaagagccgtggccttggaaagggccacaagttccaccacactattggtggctct

SEQ ID NO: 601412 - DNA, 120 bp, Artificial Sequence
  ENSG00000174748_10 (sequence is synthesized)
cgccgggcagcttggagaaggcgcaatactctccagctccaccgttaccgctaatataagtaaagtttgtaaaattcatacttaataaacaatttaggacagtcatgtctgcttacaggt

SEQ ID NO: 601413 - DNA, 120 bp, Artificial Sequence
  ENSG00000174748_11 (sequence is synthesized)
aagtggtggtgtatcttgtttctaataagataaacttttttgtctttgctttatcttattagggagttgtatgtcagtgtataaaacatactgtgtggtataacaggcttaataaattct

SEQ ID NO: 601414 - DNA, 120 bp, Artificial Sequence
  ENSG00000174748_12 (sequence is synthesized)
ttaaaaggagagaactgaaactagccctgtagatttgtctggtgcatgtgatgaaacctgcagctttatcggagtgatggcaatgctctgctggtttattttcaagtggctgcgtttttt

SEQ ID NO: 601415 - DNA, 120 bp, Artificial Sequence
  ENSG00000174748_13 (sequence is synthesized)
ttagtttggcaggtgtagactttttaagttgggctttagaaaatctgggttagcctgaagaaaattgcctcagcctccacagtaccattttaaattcacataaaaggtgaaagctcctgg

SEQ ID NO: 601416 - DNA, 120 bp, Artificial Sequence
  ENSG00000174748_14 (sequence is synthesized)
ttcagtgccatggcttcatggcattcagtgattagtggtaatggtaaacactggtgtgttttgaagttgaatgtgcgataaaattattagccttaagattggtaagctagcaatgaatgc

SEQ ID NO: 601417 - DNA, 120 bp, Artificial Sequence
  ENSG00000174748_15 (sequence is synthesized)
tagggtgggaagctggtgagccagtggccattagataaatacctttcaagtgtgagcttagacgtcaaccctaaaatacttaaccgtaatgctaattgtgatcattatgaatcccttcag

SEQ ID NO: 601418 - DNA, 120 bp, Artificial Sequence
  ENSG00000174748_16 (sequence is synthesized)
tcacattagggggaaagtagttggctataagtacgtcattcttagtccagtcagtcttaaaaacatcttgggttacccactctgtccactcccataggctacagaaaaagtcacaagcgc

SEQ ID NO: 601419 - DNA, 120 bp, Artificial Sequence
  ENSG00000174748_17 (sequence is synthesized)
atggtttccaaccatatgtgttttctgcagttatttctcttgttctggccaaacaaccctaaaaatccttaccattccacaaagttggaccatcacttgtgcacccactttgactatgag

SEQ ID NO: 601420 - DNA, 120 bp, Artificial Sequence
  ENSG00000174748_18 (sequence is synthesized)
tataccaccacattgcatttctgtttgcaccatgtcttccaggagactagactactgttgtccagggtcaatttgagtgtaaagaaaatgtagacaaggaattgcccaattttaaattct

SEQ ID NO: 601421 - DNA, 120 bp, Artificial Sequence
  ENSG00000174748_19 (sequence is synthesized)
gactttgctgacttaatttaaatgctcgttctgaaccaattttctcctatcttctctaggggtttcaaaagactcagttaattgatttccaggaagtactcatagcaagttcataaaagt

SEQ ID NO: 601422 - DNA, 120 bp, Artificial Sequence
  ENSG00000174748_20 (sequence is synthesized)
tcttgagacctaaatttcttcacaaaaaaagaaaagatcttaagtcatacattttaattgtgtagaggttgttcaactgaaggaataaatgtctattaaactaaaacaaatggaccttct

SEQ ID NO: 601423 - DNA, 120 bp, Artificial Sequence
  ENSG00000174748_21 (sequence is synthesized)
gttattttttgtcatcttacagtgctaatgtactttaaagcaaaccaaatgccctaaccagcaaaaaggcatcaaaatgtgattatagaaataatataatttgagatagcataaaatgta

SEQ ID NO: 601424 - DNA, 120 bp, Artificial Sequence
  ENSG00000174748_22 (sequence is synthesized)
gggctagctgtccccggcagttggtgcagagccattttcattcccggcggtttccttgtttttgttggggaactaagatggacggatacagtcgtcttattgtacttaaagcggatgata

SEQ ID NO: 601425 - DNA, 120 bp, Artificial Sequence
  ENSG00000174748_23 (sequence is synthesized)
gggagtacagctctttcctttccgtctggcggcagccatcaggtaggctgcgttgaggatctttgctcttccatccgcctttgatcgtcttcctcttcagccatccaggtaagccaagat

SEQ ID NO: 601426 - DNA, 120 bp, Artificial Sequence
  ENSG00000174748_24 (sequence is synthesized)
cctttccgtctggcggcagccatcagcggcatctcctttcaggtcctccttggggacgccgcctgccgcagccacccgcccccttggtgctcagttctggttctgttaattcgccccacc

SEQ ID NO: 601427 - DNA, 120 bp, Artificial Sequence
  ENSG00000174748_25 (sequence is synthesized)
cctttccgtctggcggcagccatcaggtaggctgcgttgaggatctttgctcttccatccgcctttgatcgtcttcctcttcagccatccaggtccggggaccctgcgtcctcggagata

SEQ ID NO: 601428 - DNA, 120 bp, Artificial Sequence
  ENSG00000174748_26 (sequence is synthesized)
ggtctccctcctgtgcggccagagtttggtcaggatgcgggacagcaaaggggtggagaggcggcccccggggcgggttgagcgaagatgtgatggcggcgcgaattcgagctgggcccg

SEQ ID NO: 601429 - DNA, 120 bp, Artificial Sequence
  ENSG00000174748_27 (sequence is synthesized)
gatcctggaggaggcgtggggctgacgaatggggcgcccgggacaaggcagcctaaagtgaggctgctggttgggtggggtagatgcattttcctcgagagttaatcctcggtggccgca

SEQ ID NO: 601430 - DNA, 120 bp, Artificial Sequence
  ENSG00000174748_28 (sequence is synthesized)
ctgttaggaagacactgctgcctcagtgtctttcttcgcatagggctttggcagaaaaaagctagcaacactggtcagttactgtatgcactgttgtctaaagtggcaagtgtgtcaaag

SEQ ID NO: 601431 - DNA, 120 bp, Artificial Sequence
  ENSG00000174748_29 (sequence is synthesized)
gttacaaatctgaatgagttcagactaaagcaaaataaacagtgtgcctccctgtgtgagtagcctaaggtgcattgaaaaagactgggatgtgttttatttttttctattagatagcat

SEQ ID NO: 601432 - DNA, 120 bp, Artificial Sequence
  ENSG00000174748_30 (sequence is synthesized)
taacttactgttgaagtatttttggtggagtattagtgacaagccattgagtcttaagccttacggcttcctataaaatcactaatttcgtgtgtgtttgtgtgtaggttacgttatata

SEQ ID NO: 601433 - DNA, 120 bp, Artificial Sequence
  ENSG00000174748_31 (sequence is synthesized)
gtgaagagtaattgcttgaaagacttgtctttgttacaaatgcgtgtgtatatactggaagtacttgtggaacctaagctttaaagcggcaagaatatgcagaagagaccaaatgtggcc

SEQ ID NO: 601434 - DNA, 120 bp, Artificial Sequence
  ENSG00000174748_32 (sequence is synthesized)
tgcacagcctaaaatatatactaaatatttttaaagctaaacgttgctgagctctcagttgtatggaaaaagataaggtccccaaaccctaaattttgttacccagatattaacatattc

SEQ ID NO: 601435 - DNA, 120 bp, Artificial Sequence
  ENSG00000174748_33 (sequence is synthesized)
ctgccctagtcaggaatggagtattaagagggaatgatgtgtttcagtctatgtgtgttgttttagcaagtctacattatctcattacacttgtgatagtctagggagaaatgcttagta

SEQ ID NO: 601436 - DNA, 120 bp, Artificial Sequence
  ENSG00000174748_34 (sequence is synthesized)
aataacttgagtagtaaaagactcttgtctggtggtgaactagagttgagaattaaaattctttctgacttgctgctataggcaatgtgggagattgaccttgggccttttttcctattc

SEQ ID NO: 601437 - DNA, 90 bp, Artificial Sequence
  ENSG00000174748_35 (sequence is synthesized)
caatcatgagcaattcttctgcctcggcctcccaaatagccaggactacaggcgcacactgccatgcccagctaagttttgtatttttag

SEQ ID NO: 601438 - DNA, 84 bp, Artificial Sequence
  ENSG00000174748_36 (sequence is synthesized)
tcaagcaaaatgagccaccacaccgggcccaaatttactttagtaataacaacaattggctgggtgcggtggctcacgcctgca

SEQ ID NO: 601439 - DNA, 120 bp, Artificial Sequence
  ENSG00000174748_37 (sequence is synthesized)
gtggctcacgcctgcaatcccaacactttcggtaaccaaggtgggcttgagctcatgagttagagagcagcctgagcaacgtggtgagagcccatctcacaaaaaataacaaatcagctg

SEQ ID NO: 601440 - DNA, 120 bp, Artificial Sequence
  ENSG00000174748_38 (sequence is synthesized)
acaaatcagctgggcatggtgttgcacgcctgtagtctccgaaatcacaccactgcactcccatcttgggtgatagagccagaacttgtctcaaaaataacaattggtttcttacaatcc

SEQ ID NO: 601441 - DNA, 120 bp, Artificial Sequence
  ENSG00000174748_39 (sequence is synthesized)
caaaaggtgcagttactagtattaatccttttttgccaatgaggaaacacaaagatgaagcaacttgctcaaagtcatacagtgacagtctgaattcaaatcctatacacttaaagttta

SEQ ID NO: 601442 - DNA, 84 bp, Artificial Sequence
  ENSG00000174748_40 (sequence is synthesized)
agtgacagtctgaattcaaatcctatacacttaaagtttatttgttttgttttggttttttttgagatggagtctcactgtgtc

SEQ ID NO: 601443 - DNA, 120 bp, Artificial Sequence
  ENSG00000174748_41 (sequence is synthesized)
ctcccaaagtgccgggattacaggtgtcagccactgcacgtggccaacttaaagtttttgatagataatacattaacgttaaaaattcaaaagataagtataggctctacagtacaaacc

SEQ ID NO: 601444 - DNA, 89 bp, Artificial Sequence
  ENSG00000174748_42 (sequence is synthesized)
gggtctcactgttgcccaggctggagtgtagtggcgcgttcacaacttactgtagcctcaacctgtcgagtagctggaaccacaggtgc

SEQ ID NO: 601445 - DNA, 120 bp, Artificial Sequence
  ENSG00000174748_43 (sequence is synthesized)
ttcccaaagtgctgggattacagatgtgggccacggtgcctggcctacatatgtattttttccttttcttccccaagtggtaggatatgatacacattgttgatttttttgtttagttat

SEQ ID NO: 601446 - DNA, 120 bp, Artificial Sequence
  ENSG00000174748_44 (sequence is synthesized)
ttatgtatctcagagcttattctttatcagctcatgaggaacttcatttttttttttttttttgagatgtagttttgctcttatagcccaggttggagtacagtaacacaatcttggctc

SEQ ID NO: 601447 - DNA, 120 bp, Artificial Sequence
  ENSG00000174748_45 (sequence is synthesized)
gtgatccgcccatctcagcctcccaaagtagtgggattacaggcatgagcaaccgtgcccggctggaacttcattcttttggtataactgcatggtatcccatcatgtggatgtaccatg

SEQ ID NO: 601448 - DNA, 120 bp, Artificial Sequence
  ENSG00000174748_46 (sequence is synthesized)
ggtataactgcatggtatcccatcatgtggatgtaccatgattcattggatgtggaccctcctgatggacatttaaatttcttccaatctgttgctattacaaaaagaaaaatgtgtgca

SEQ ID NO: 601449 - DNA, 120 bp, Artificial Sequence
  ENSG00000174748_47 (sequence is synthesized)
tacatctttattcatctgtagaataaattcttagaagtagaatggcagagttaaaaattgtatgtatataattttttatagatattgccaaattgtcttccataaaagttgaaccaattt

SEQ ID NO: 601450 - DNA, 120 bp, Artificial Sequence
  ENSG00000174748_48 (sequence is synthesized)
tcactaccaccagcaaagtaggagaggacttgtttatccacaccctctttaatgtatgtaatcaaattttgggatatctgccagtctgttagggggaaatgatactcttctctactttta

SEQ ID NO: 601451 - DNA, 120 bp, Artificial Sequence
  ENSG00000174748_49 (sequence is synthesized)
ttttgcattctgagtgtggcagaggcaaagctatgtgcataccatagctttttctccccctgaaaacacaactaaactacattgttttcctggcctctcatgcatttaggttggggtcat

SEQ ID NO: 601452 - DNA, 120 bp, Artificial Sequence
  ENSG00000174748_50 (sequence is synthesized)
attacttccctccaagaaaaacaacagttggtatgcctcctccacacttcccacaactgtggaagccagtgatccagatagcatagctattaatacaagatgggtgaaagctgctcaacc

SEQ ID NO: 601453 - DNA, 120 bp, Artificial Sequence
  ENSG00000174748_51 (sequence is synthesized)
gcatcagacagcatgagtggtaagattttattgtgtcaaacgactgcattagttgtgttttgttattatggcagcatagcctagcttagccctaactaattcaataaataaagttgagca

SEQ ID NO: 601454 - DNA, 120 bp, Artificial Sequence
  ENSG00000174748_52 (sequence is synthesized)
ttatttgtacatttaaaagcgttttttatgtttgctttacagtggctttccacttttctatcagagaatcccccctcccttatgtaccatgctatattaataaattggaaggagctgcta

SEQ ID NO: 601455 - DNA, 120 bp, Artificial Sequence
  ENSG00000174748_53 (sequence is synthesized)
gggcgggacaatagcggccgcggcgccccactcggcagaactccgccaccaggcgcgatgccggaactacatgtcccatgacgctctgggaggccgcagctttccaccggaaagagggta

SEQ ID NO: 601456 - DNA, 120 bp, Artificial Sequence
  ENSG00000174749_0 (sequence is synthesized)
gctccggcggctcctgtcagcggcgggtgcggcggatcccagggcagccttcgggcggcggcgctgcctggtgcgtcgcggcgtggtcctccggcggctgtccggggcggtaggagttgg

SEQ ID NO: 601457 - DNA, 120 bp, Artificial Sequence
  ENSG00000174749_1 (sequence is synthesized)
ggagttggctgcgggatgtgctcagccggggagctgctgcggggcggcgacggcggggaacgcgacgaggacggggacgcgctggcggagcgggaggcggcagggaccgggtgggatccc

SEQ ID NO: 601458 - DNA, 120 bp, Artificial Sequence
  ENSG00000174749_2 (sequence is synthesized)
cccgcggcggcgcggacagcggccgaaggagagcgagcaggatgttgaagactcacagaaccacactggtgagccggttggagatgactacaagaaaatgggaacactttttggtgaact

SEQ ID NO: 601459 - DNA, 120 bp, Artificial Sequence
  ENSG00000174749_3 (sequence is synthesized)
gaacaaaaaccttatcaacatgggcttcacaaggatgtattttggagaacgaatagtggaaccagtaatagtcattttcttttgggttatgctgtggttccttggcctgcaagcccttgg

SEQ ID NO: 601460 - DNA, 120 bp, Artificial Sequence
  ENSG00000174749_4 (sequence is synthesized)
actagttgctgttctttgccttgttattatttatgtgcaacagtaaaacatggccgaattgaattgtttgacatttggtagccatatatgtaattgaagaagttatatatttcacttttt

SEQ ID NO: 601461 - DNA, 120 bp, Artificial Sequence
  ENSG00000174749_5 (sequence is synthesized)
gacaaccgaaaaagtttgccttgtttcaaatcatgtgctggctgttttgtaagtaaatttatacatggatgtcacttaaaactaaactcttgatcataacagggttgaatatatattttg

SEQ ID NO: 601462 - DNA, 120 bp, Artificial Sequence
  ENSG00000174749_6 (sequence is synthesized)
aatatacattagcttattcaaaactcttgtttcactactgtgatctctgtctcctttatacacctctatccccatgccaaatcttaagtaacaccaccagaaagtgaacagggaaaataa

SEQ ID NO: 601463 - DNA, 120 bp, Artificial Sequence
  ENSG00000174749_7 (sequence is synthesized)
caggacatggaattcaaatcaagcaatatagttcttataaagagttccaataaaacatttcagaagaaaaagtatgaaacaagctaaaagtaagtttcacttagaaaacttctccccact

SEQ ID NO: 601464 - DNA, 120 bp, Artificial Sequence
  ENSG00000174749_8 (sequence is synthesized)
cacactccccaccaaataatctcatattatttgggaaatatttggatttcaattgtccctacccagcctaaactaaggtaaatgataattagcatacactaccttaatattgtgatgaaa

SEQ ID NO: 601465 - DNA, 120 bp, Artificial Sequence
  ENSG00000174749_9 (sequence is synthesized)
atcagtaaagatagaacgttttctaaaggtcaaaaataatatatttattattactggggaaagctcccaggttaaatataacttttttaaaatgtaacatttggacctagacctacttta

SEQ ID NO: 601466 - DNA, 120 bp, Artificial Sequence
  ENSG00000174749_10 (sequence is synthesized)
atatatcatttgaagtttcagacaattttggtgctaattactttttgtgagtttttaaagtctcatagcctagttgactgcaccctatggtaatgccatattttcttgtatctaacaagt

SEQ ID NO: 601467 - DNA, 120 bp, Artificial Sequence
  ENSG00000174749_11 (sequence is synthesized)
tgcatattttttcctagagagacattttcagtgtatttttttttagaaatttataattttatagttctttcataacacttattctgagttttgaaacaatgtatttcctatcttgacatg

SEQ ID NO: 601468 - DNA, 120 bp, Artificial Sequence
  ENSG00000174749_12 (sequence is synthesized)
gattttttcacaaaaaatttgtattttactgttgttttcaggaaaaaaatcagatcatttttctttgatatctatatcagaaaggtacaatattaacagtataaaaccaaatgcttaaat

SEQ ID NO: 601469 - DNA, 120 bp, Artificial Sequence
  ENSG00000174749_13 (sequence is synthesized)
ttggaacttagccaattttgataatctttttctaaggctaaagtcacatcagtaattggctagccatgttattaaggtgtcttaattcagcattttcaggttttatattgaaatacgcat

SEQ ID NO: 601470 - DNA, 120 bp, Artificial Sequence
  ENSG00000174749_14 (sequence is synthesized)
ttctttaaatattctttgaaaatggagaatggctttagtgatattttgggttttgttagagaacctaaaatctttacactttcatctcaaagattataaaggaaaggggggtagttaaga

SEQ ID NO: 601471 - DNA, 120 bp, Artificial Sequence
  ENSG00000174749_15 (sequence is synthesized)
tttagaattcaagttaaatttcagaaattggggcagtcaggcatttgtatctttggtagggcaacaagtaaaacatgtagagtgcttgctatcccacttcataaagcttttacccaatct

SEQ ID NO: 601472 - DNA, 120 bp, Artificial Sequence
  ENSG00000174749_16 (sequence is synthesized)
tatttctaaacctctgtgcattcttagtgtcttctcattctgaaacagaaaataaggaaaaacatttaacttagttttctaaaatcagataatcctaaacaaaaatgttagtcagggtca

SEQ ID NO: 601473 - DNA, 120 bp, Artificial Sequence
  ENSG00000174749_17 (sequence is synthesized)
ctaaaaagtattgcacatttatataaatacagtccttttaaaatttgacttttaaaaaacaaaagactttgtacgatattgtgtttttattgcttttgcaatatttttatagtagccttt

SEQ ID NO: 601474 - DNA, 120 bp, Artificial Sequence
  ENSG00000174749_18 (sequence is synthesized)
atgaactcagtataagtgcaagttgtttgaaaaggtgtttttattagtgcacaatagaattgtgaggttttcaatagatgtcatgagattttgtatatctacataaaatatcagtacatt

SEQ ID NO: 601475 - DNA, 120 bp, Artificial Sequence
  ENSG00000174749_19 (sequence is synthesized)
tttttctaatgctactggaaattttacttttcctttgcaacacataaatgatatgatgtacaaaataacagctctggttccaccagtacctaatgttgaaaacatttttaaagtaatttt

SEQ ID NO: 601476 - DNA, 120 bp, Artificial Sequence
  ENSG00000174749_20 (sequence is synthesized)
tttttaatactaactatttagtatactgtcagtactgtacatctgcacactggtgttaatagggtatatattaaattatataaagaaataagatattttgctgttattctttctacatat

SEQ ID NO: 601477 - DNA, 120 bp, Artificial Sequence
  ENSG00000174749_21 (sequence is synthesized)
ttggtcagtacatcaaataatatttggctttgatatgggaaaaaacaaactttgcctatgtaatggaaataaaatattttcttttatgaaatatattagaatgcagattatactaatatc

SEQ ID NO: 601478 - DNA, 67 bp, Artificial Sequence
  ENSG00000174749_22 (sequence is synthesized)
actccagcactctgggtgaaaatgattctcatcatttcaatctcaaatacaagccagttttagaaac

SEQ ID NO: 601479 - DNA, 120 bp, Artificial Sequence
  ENSG00000174749_23 (sequence is synthesized)
ctcatcatttcaatctcaaatacaagccagttttagaaactgttattgcttatgaataaagaaatagaagttacaatgctaaggttattacataatgcatactcatatggccagtaattc

SEQ ID NO: 601480 - DNA, 120 bp, Artificial Sequence
  ENSG00000174749_24 (sequence is synthesized)
aaaagaaaaaggtcgaagtctacaaataaacagactgtagatgagtaaatccatttttcttaaagtaaaaactctgtattttgtagaattctgtcctctcataccttaagctgtcatggg

SEQ ID NO: 601481 - DNA, 120 bp, Artificial Sequence
  ENSG00000174749_25 (sequence is synthesized)
caaggtattttcccattcctggctacaggcagatcattcctagtccagtagtgtgctggagcaagcttgcactggcttacaagagccaactgtgaacattttttctgccttcagtgctgt

SEQ ID NO: 601482 - DNA, 120 bp, Artificial Sequence
  ENSG00000174749_26 (sequence is synthesized)
caagttggtagtttgaaattggccatggtgagagtatttacaccaaaaaaattagtaaacactgcaaatcagatcttttttttttttttttccttgaaagccagctgttaaacatacatc

SEQ ID NO: 601483 - DNA, 120 bp, Artificial Sequence
  ENSG00000174749_27 (sequence is synthesized)
agcacaccctagaggccacattcccatttctattcctacagatacgaaagtaaagaacagaacacattttgtgaaataaaagaaagcatatgaggtaaatccccatcgacccacccaaaa

SEQ ID NO: 601484 - DNA, 120 bp, Artificial Sequence
  ENSG00000174749_28 (sequence is synthesized)
ctgaatctggctctttcccttgtgggtattatggttcatggttatcttctgaccaacaaatctctatttaatcatgttttgaccacagaaaatctctctaggctgtcaccaagctgtaaa

SEQ ID NO: 601485 - DNA, 120 bp, Artificial Sequence
  ENSG00000174749_29 (sequence is synthesized)
tccactaaagactatccaggcaatcaggaaaggcaaaacttacagaatgatagaggaaaaattacagtataagtaaaggtctgttgtaatatagaaagctcaaaatagtcaaagccaggt

SEQ ID NO: 601486 - DNA, 120 bp, Artificial Sequence
  ENSG00000174749_30 (sequence is synthesized)
ttggagcaatcaaaggctattcgtgtggttcatagattgttttaatagttattttacaaatgtttattaatttcaggtgtttaaaatgctttcattaccaatttatggctttacaattga

SEQ ID NO: 601487 - DNA, 120 bp, Artificial Sequence
  ENSG00000174749_31 (sequence is synthesized)
ctttcattaccaatttatggctttacaattgaagggagaaaaaaaaatgtaagacggccaggcgcggtggctcatccctataaaagtgctgggacagcactttgggaggccgaagcgggc

SEQ ID NO: 601488 - DNA, 73 bp, Artificial Sequence
  ENSG00000174749_32 (sequence is synthesized)
gctgaggcaggagagtcgcttgaacccggaagccaaagtttgcagtgagccaagattatgcccttgcactcaa

SEQ ID NO: 601489 - DNA, 120 bp, Artificial Sequence
  ENSG00000174749_33 (sequence is synthesized)
gtctctctgcccaacatttaatttttggtatgcgttggagttcagtccaacagcctgctctcacatcactccacacagcagctcggcaatgtcaccactcccgtggctgcagagttacca

SEQ ID NO: 601490 - DNA, 120 bp, Artificial Sequence
  ENSG00000174749_34 (sequence is synthesized)
tttgcatcctaacagctccccaatttgcatctctagatcagagcactgtacagaatttaagactcctacattcaattgcttgcccaatatttatttgcatttggttatcccatagtaccc

SEQ ID NO: 601491 - DNA, 120 bp, Artificial Sequence
  ENSG00000174749_35 (sequence is synthesized)
aagactcagcgtgtccaaacgagcgcagcatccttctcccaaatctttaattcctgtttcccatctcagcaaatgacacaatcctttccctaactgctcaagcaggagttgtagatgaca

SEQ ID NO: 601492 - DNA, 120 bp, Artificial Sequence
  ENSG00000174749_36 (sequence is synthesized)
tccttgactctgtgtttcctacactacctacatgtaaccaagtaccaaatctattttacttctaaaaatataatctttctacttctattcattcctagcatcactgagtccattctgcca

SEQ ID NO: 601493 - DNA, 120 bp, Artificial Sequence
  ENSG00000174749_37 (sequence is synthesized)
tcatctcacctggcatgctgagaatcctgattagcctccctaccttcattttccactttgtagttacagatctttctaaagaattattctaacatgattctgatatccttgacctaaatc

SEQ ID NO: 601494 - DNA, 120 bp, Artificial Sequence
  ENSG00000174749_38 (sequence is synthesized)
ttttcaatggctttctgttttcgttatgataaagtccttatgccttaatatgttttacaaggctcttcatgtactggttcttgcgtacctcatctctctatactgccactctccatttcc

SEQ ID NO: 601495 - DNA, 120 bp, Artificial Sequence
  ENSG00000174749_39 (sequence is synthesized)
aggattcaactatactgaacttttccccagttcctttaaagagacatgctttcttacttccagaactttgtacatgctttacttctttaactgctccctaccagactgaccaatatctac

SEQ ID NO: 601496 - DNA, 120 bp, Artificial Sequence
  ENSG00000174749_40 (sequence is synthesized)
acagccttaagacctcaagtgagacatcatgtcctccagggaaacttctctgactcctttaaatccagttttggttcttcattatggcttggtttctcaagtgcaaccctgtgctttcca

SEQ ID NO: 601497 - DNA, 120 bp, Artificial Sequence
  ENSG00000174749_41 (sequence is synthesized)
ggtcagcacttctcatgctatattgcaatagcttatttgtcagctgctgctttaataattgattaattattaaattaatcaataggcttcacaagggaagagaacatgtctgtcattcta

SEQ ID NO: 601498 - DNA, 120 bp, Artificial Sequence
  ENSG00000174749_42 (sequence is synthesized)
taattgcattgctagtgcctaacacaatgcctgggacataataggccatcaaaatatttatcaagtaaacccacttcatctactcatggtcttcatatagaccactaacaaaaaagatct

SEQ ID NO: 601499 - DNA, 120 bp, Artificial Sequence
  ENSG00000174749_43 (sequence is synthesized)
agagctggttgtactttgaagttctttgactccaaaagtatacttactgtgcacaaagagcatgggttgatgtatacattataatttataaagctattcacttctgataaaagaatactg

SEQ ID NO: 601500 - DNA, 120 bp, Artificial Sequence
  ENSG00000174749_44 (sequence is synthesized)
ctgttatttggatacatacacagtatttccactatacacttgtgtattttaggagaaaatgtattttcaatgtttggttgattcactatttttccaaaaaggatattttacaatacctac

SEQ ID NO: 601501 - DNA, 120 bp, Artificial Sequence
  ENSG00000174749_45 (sequence is synthesized)
atacctacggtcactgatactaccagaacttcacttttgttcagtattttttaatagacctttatttactacattttaattttttaatttttttcttttattttattgttattatacttt

SEQ ID NO: 601502 - DNA, 89 bp, Artificial Sequence
  ENSG00000174749_46 (sequence is synthesized)
tttggttcgccagtattttattgaggagaggcgaagtctcgctccgttgccaggctggagggcagtggcacgatctcgactcactgcaa

SEQ ID NO: 601503 - DNA, 71 bp, Artificial Sequence
  ENSG00000174749_47 (sequence is synthesized)
cgcctcccaggtttaagcaattctcctgtctcagcaggagtggttgggattacaggcacatgctggcatgc

SEQ ID NO: 601504 - DNA, 120 bp, Artificial Sequence
  ENSG00000174749_48 (sequence is synthesized)
ggcgtgagccactgcacccggcctacattttaatttttacaaaaaactcttaaacttttttgtgagcagaaattctcaagtatcgaagcgtggtgttttaggctccagaagaaatccact

SEQ ID NO: 601505 - DNA, 120 bp, Artificial Sequence
  ENSG00000174749_49 (sequence is synthesized)
cgtggtgttttaggctccagaagaaatccactattacagtgtcctagtagcccagacatatgtgttaaatgacatgtatatactttgttattctttctaataaataatactcttttacaa

SEQ ID NO: 601506 - DNA, 80 bp, Artificial Sequence
  ENSG00000174775_0 (sequence is synthesized)
ccgagtctccgccgcccgtgccctgcgcccgcaacccgagccgcacccgccgcggacggagcccatgcgcggggcgaacc

SEQ ID NO: 601507 - DNA, 120 bp, Artificial Sequence
  ENSG00000174775_1 (sequence is synthesized)
ggccccggccctggccccgggggcagtcgcgcctgtgaacggtggggcaggagaccctgtaggaggaccccgggccgcaggcccctgaggagcgatgacggaatataagctggtggtggt

SEQ ID NO: 601508 - DNA, 120 bp, Artificial Sequence
  ENSG00000174775_2 (sequence is synthesized)
gggcgccggcggtgtgggcaagagtgcgctgaccatccagctgatccagaaccattttgtggacgaatacgaccccactatagaggattcctaccggaagcaggtggtcattgatgggga

SEQ ID NO: 601509 - DNA, 120 bp, Artificial Sequence
  ENSG00000174775_3 (sequence is synthesized)
gacgtgcctgttggacatcctggataccgccggccaggaggagtacagcgccatgcgggaccagtacatgcgcaccggggagggcttcctgtgtgtgtttgccatcaacaacaccaagtc

SEQ ID NO: 601510 - DNA, 120 bp, Artificial Sequence
  ENSG00000174775_4 (sequence is synthesized)
aatctcggcaggctcaggacctcgcccgaagctacggcatcccctacatcgagacctcggccaagacccggcagggagtggaggatgccttctacacgttggtgcgtgagatccggcagc

SEQ ID NO: 601511 - DNA, 120 bp, Artificial Sequence
  ENSG00000174775_5 (sequence is synthesized)
acaagctgcggaagctgaaccctcctgatgagagtggccccggctgcatgagctgcaagtgtgtgctctcctgacgcagcacaagctcaggacatggaggtgccggatgcaggaaggagg

SEQ ID NO: 601512 - DNA, 120 bp, Artificial Sequence
  ENSG00000174775_6 (sequence is synthesized)
tgcagacggaaggaggaggaaggaaggacggaagcaaggaaggaaggaagggctgctggagcccagtcaccccgggaccgtgggccgaggtgactgcagaccctcccagggaggctgtgc

SEQ ID NO: 601513 - DNA, 120 bp, Artificial Sequence
  ENSG00000174775_7 (sequence is synthesized)
acagactgtcttgaacatcccaaatgccaccggaaccccagcccttagctcccctcccaggcctctgtgggcccttgtcgggcacagatgggatcacagtaaattattggatggtcttga

SEQ ID NO: 601514 - DNA, 120 bp, Artificial Sequence
  ENSG00000174775_8 (sequence is synthesized)
cggcggcggcggcggcgggtgggtggggccgggcggggcccgcgggcacaggtggggcaggagaccctgtaggaggaccccgggccgcaggcccctgaggagcgatgacggaatataagc

SEQ ID NO: 601515 - DNA, 120 bp, Artificial Sequence
  ENSG00000174775_9 (sequence is synthesized)
gcccaccggatgaccccggctccccgcccctgccggtctcctggcctgcggtcagcagcctcccttgtgccccgcccagcacaagctcaggacatggaggtgccggatgcaggaaggagg

SEQ ID NO: 601516 - DNA, 120 bp, Artificial Sequence
  ENSG00000174775_10 (sequence is synthesized)
cggcatcccctacatcgagacctcggccaagacccggcagggcagccgctctggctctagctccagctccgggaccctctgggaccccccgggacccatgtgacccagcggcccctcgcg

SEQ ID NO: 601517 - DNA, 120 bp, Artificial Sequence
  ENSG00000174775_11 (sequence is synthesized)
cacgctgggttgcagctgcacaggtggggcaggagaccctgtaggaggaccccgggccgcaggcccctgaggagcgatgacggaatataagctggtggtggtgggcgccggcggtgtggg

SEQ ID NO: 601518 - DNA, 120 bp, Artificial Sequence
  ENSG00000174775_12 (sequence is synthesized)
gcaggcgcgtcaggtgccagcttcctgcggctccgtgcctgggccgtcgcgatgcacgtgtcgcgtttcctcgcgatcctggcgcttcccacgcggggcgggtaaaggcggtctctgctg

SEQ ID NO: 601519 - DNA, 120 bp, Artificial Sequence
  ENSG00000174775_13 (sequence is synthesized)
gaggctcgcgcccacctttcccaggtggaagggtcgcccctggggccgaggcctgccgtcctgaccttcggttggaagtgaggccgacggcaaaaggaagcaccgggggaagcgcccccg

SEQ ID NO: 601520 - DNA, 120 bp, Artificial Sequence
  ENSG00000174775_14 (sequence is synthesized)
aggaccaggaaacacacaccggacgccggagcgcacccgagtgcccggcccgcgggacacgctgccgcccgccgtccagtcgccgcttctcactcgcgttcatgcgtgtccgccccgagc

SEQ ID NO: 601521 - DNA, 120 bp, Artificial Sequence
  ENSG00000174776_0 (sequence is synthesized)
ggcattcagagtcaagtacttcattggtagggaaactctgcagctttgtcatctaactcttccagacaagaaagtggaattgaaaactacaacatgttaatggaagcaaggcacctgttg

SEQ ID NO: 601522 - DNA, 120 bp, Artificial Sequence
  ENSG00000174776_1 (sequence is synthesized)
aaggaaaaagaagatccatccttatagaaatagttgaaggcaactgagaaaaggtgaagccattatgagttgccagaaagctgtacttgagttaaacatagggtcacagcttgggccaaa

SEQ ID NO: 601523 - DNA, 120 bp, Artificial Sequence
  ENSG00000174776_2 (sequence is synthesized)
gagtcctgagagaacagaaggtgtaactgcatttgaagactatggcacaggcctgcttgaaaaccaactcagcgtgggtgactttgtaaaaatacagaaggcctttgagtccccacagcc

SEQ ID NO: 601524 - DNA, 120 bp, Artificial Sequence
  ENSG00000174776_3 (sequence is synthesized)
aaggaaaatcatttgtatgtccagagaagacttcacgcagaagatgacagagattgttggttggggcacgaaggaagaatatggggagctctttgacaaagtggatgtggcccaagatgg

SEQ ID NO: 601525 - DNA, 120 bp, Artificial Sequence
  ENSG00000174776_4 (sequence is synthesized)
cttcattaattgggacaagctgacttcatttatactgctagagctttatgagcaagatgaacgagcaaaggcaactgtggtgccccagtggaaggaccttgaattcctcccagtaaaaca

SEQ ID NO: 601526 - DNA, 120 bp, Artificial Sequence
  ENSG00000174776_5 (sequence is synthesized)
caaggacaccattcaaaaagtaattttcttaaaaaattcaagtcattatctgacaattagtaaagaaggtttattggcaatctggggagagcatttaaagctgcaagaaacattccccat

SEQ ID NO: 601527 - DNA, 120 bp, Artificial Sequence
  ENSG00000174776_6 (sequence is synthesized)
cacttcagatgccaccaagctcaaacacctgtgggtgacaagtctggtttctctggaaaatgtaaacaagatagcagtggcttttacaagtaaagaggtttgtttctatgatctgctgtc

SEQ ID NO: 601528 - DNA, 120 bp, Artificial Sequence
  ENSG00000174776_7 (sequence is synthesized)
caaagaagaatttgcttgccaatacaaactccaaggcctgaaaggaacaccaatttgcatggattattggtatgatcctcttgatgccaatgaatcaattctttcttttggggatataac

SEQ ID NO: 601529 - DNA, 120 bp, Artificial Sequence
  ENSG00000174776_8 (sequence is synthesized)
tggaaaggttcaagcaattgctttcaccgcagccttgatttccctgtttgaacggcctgctagtgcatgtgaagatggagaagccactatgaccattaactgggcagagctgctctctgg

SEQ ID NO: 601530 - DNA, 120 bp, Artificial Sequence
  ENSG00000174776_9 (sequence is synthesized)
atgtcacaaatgttgccatatattagagcataaacttcatcaaggagattgggtcaggcaagttacttacaatgcatctttagacgctatcatttccagtacaaccagcaatacaaatag

SEQ ID NO: 601531 - DNA, 120 bp, Artificial Sequence
  ENSG00000174776_10 (sequence is synthesized)
tgtggtgatggcttggagagagaaatcaaaaaagcgtcttaatatgacatccttcaacattgcccagggcattcatgcttttgattatcactctcggctcaatttaattgcaactgctgg

SEQ ID NO: 601532 - DNA, 120 bp, Artificial Sequence
  ENSG00000174776_11 (sequence is synthesized)
cattaacaataaagtttgcctttggaatccctatgttgtctctaaaccagtgggtgtcctttggggccactcagccagtgtaatagccgtccaattctttgtggaaagaaaacaactttt

SEQ ID NO: 601533 - DNA, 120 bp, Artificial Sequence
  ENSG00000174776_12 (sequence is synthesized)
cagcttctccaaggataaagttttgagactctgggatattcaacaccagctgtccatccagaggatagcttgttctttccccaaaagtcaggacttcagatgtctcttccactttgatga

SEQ ID NO: 601534 - DNA, 120 bp, Artificial Sequence
  ENSG00000174776_13 (sequence is synthesized)
tgagaaagcagtcacttgtgttctttacaattctatcttgaagcaggtaatcagctctgatacagggtctactgtttccttctggatgatagacactgggcagaaaatcaaacagtttac

SEQ ID NO: 601535 - DNA, 120 bp, Artificial Sequence
  ENSG00000174776_14 (sequence is synthesized)
tggttgccacggcaacgcagaaatcagcactatggcccttgatgcaaatgagactcggcttttgactggcagcacagatgggactgtaaagatatgggacttcaatggatattgtcacca

SEQ ID NO: 601536 - DNA, 120 bp, Artificial Sequence
  ENSG00000174776_15 (sequence is synthesized)
tacactaaatgttgggcaagatggagctgtggatatttcacaaatcctcattcttaagaagaaaatactggttacaggctgggagagggctattactgtgtttcgaccccaaaacttcaa

SEQ ID NO: 601537 - DNA, 120 bp, Artificial Sequence
  ENSG00000174776_16 (sequence is synthesized)
tcaatttttcatccagcctgaagaatggaaaggaggtatacagcaccatgatgacatcttgtgtgctgcgtttttacctccacaaactcttgttacggggagttatgatggagaaattgt

SEQ ID NO: 601538 - DNA, 120 bp, Artificial Sequence
  ENSG00000174776_17 (sequence is synthesized)
tctatggaacaatagcacagagaatgctcaccatgttcttcaccctgattaccagaggttgctaaagtcaaaattagatacaaaacctcaaaaacttctcagtgctgggagaagccaacc

SEQ ID NO: 601539 - DNA, 120 bp, Artificial Sequence
  ENSG00000174776_18 (sequence is synthesized)
ctcccaccccatggcagaccattctaccacgggagtccgcaactttgagattgacactgagggcaaaaatgctgttatgagactttgctttcttaaagcaagaaaaaacactgcagtgac

SEQ ID NO: 601540 - DNA, 120 bp, Artificial Sequence
  ENSG00000174776_19 (sequence is synthesized)
aggaggagctaacctggtatcatgtggaggatctggttatgtcagattttgggatatatataagaagcaacttctggctgaatttttggctcatagtggagttggatcgattattatgtc

SEQ ID NO: 601541 - DNA, 120 bp, Artificial Sequence
  ENSG00000174776_20 (sequence is synthesized)
tactgataagatgaatcgataccttaccacaggagatcttgatggatggttgaaaatctggaatatagaggagtactgtcttaactccagtaagaacaaaatcaccaaggccccaactct

SEQ ID NO: 601542 - DNA, 120 bp, Artificial Sequence
  ENSG00000174776_21 (sequence is synthesized)
gataagatcattccaacctcatgaggaccgaataagttccttagagatgtgtgagccaggtggtcagttactgattatctcctcctctgcagactgcagtatttgtgtgactggtgtctg

SEQ ID NO: 601543 - DNA, 120 bp, Artificial Sequence
  ENSG00000174776_22 (sequence is synthesized)
caatgctcctgtttggatctttggtcaggcaaagcactggcatattgaaaactgccttttccttcctaaaagagatactaatttagtggaaagtgagattcaaaaggaaatttctttatt

SEQ ID NO: 601544 - DNA, 120 bp, Artificial Sequence
  ENSG00000174776_23 (sequence is synthesized)
ttctaaggaggaatcttgtttagacccaacagaacattctctacttaataagaaaaacaaagatgactcaacatacaatgtcagaccatcagaagatataaatttagatataaaatataa

SEQ ID NO: 601545 - DNA, 120 bp, Artificial Sequence
  ENSG00000174776_24 (sequence is synthesized)
ggaaagaagtacctgcatgaaagaaacacaaaaaccttattatggtgaagttataaaaaaatcattcagtacatttaggtcattaaacattggagccctggaagagctgcctgaagtgaa

SEQ ID NO: 601546 - DNA, 120 bp, Artificial Sequence
  ENSG00000174776_25 (sequence is synthesized)
taaacctgctttccttctagaccctgagaaatactttaggaaagaaccagaggaagagcgtccccaaattctggaggccccgtcactttttaaaactttgaaagctgtatttgatgagaa

SEQ ID NO: 601547 - DNA, 120 bp, Artificial Sequence
  ENSG00000174776_26 (sequence is synthesized)
aaacctgtttcccaaggaaattctgcatcatgaacgaaaagccaagcaattatgccaagaaaaaagttgtgaagtgaagaaaaataagaagtaattacaacagaaaaaccttcactgtta

SEQ ID NO: 601548 - DNA, 120 bp, Artificial Sequence
  ENSG00000174776_27 (sequence is synthesized)
gccttttattttattttatatttaaacttcaggaagttttctcttcatgggataatttagtactgcttttatctatcatctgtcaatttctctgtattcttaataaaataaatattgaac

SEQ ID NO: 601549 - DNA, 120 bp, Artificial Sequence
  ENSG00000174776_28 (sequence is synthesized)
agcctgtgggtatcatgaagggagcaagcaacatcagaggttagcctgctgcagtgatcccgtcaggcctgatggtaacagcacagcaggagccaagcagaagcaagtctccagcttaca

SEQ ID NO: 601550 - DNA, 120 bp, Artificial Sequence
  ENSG00000174776_29 (sequence is synthesized)
gccaattaaacaccttctcaatgtgaagacgacacgaatgaagacccttatgataattgacttccactcaataaatagtaatcagctctgatacagggtctactgtttccttctggatga

SEQ ID NO: 601551 - DNA, 120 bp, Artificial Sequence
  ENSG00000174780_0 (sequence is synthesized)
gcccctcgtctcctccaagatggcgagcggcggcagcgggggggtgtcagtacctgcgctgtggagtgaagtgaaccggtatggccagaacggcgacttcacgcgcgctctcaagaccgt

SEQ ID NO: 601552 - DNA, 120 bp, Artificial Sequence
  ENSG00000174780_1 (sequence is synthesized)
caataagatactacagatcaacaaagatgacgtaactgccctgcattgtaaagtggtatgccttatccagaatggaagtttcaaggaagctttgaatgtcatcaatactcacaccaaagt

SEQ ID NO: 601553 - DNA, 120 bp, Artificial Sequence
  ENSG00000174780_2 (sequence is synthesized)
gttagccaataactctctctcctttgaaaaggcatattgcgagtacaggctgaacagaattgagaatgccttgaagacaatagaaagtgccaaccagcagacagacaaactgaaggagct

SEQ ID NO: 601554 - DNA, 120 bp, Artificial Sequence
  ENSG00000174780_3 (sequence is synthesized)
ttatggacaagtgttataccgtttggaacgctatgatgaatgcttagcagtgtatagagatctcgtccgaaactcccaagatgattatgatgaggagaggaaaacaaacctttcagcagt

SEQ ID NO: 601555 - DNA, 120 bp, Artificial Sequence
  ENSG00000174780_4 (sequence is synthesized)
tgttgcagctcaaagcaattgggaaaaagtggttccagagaacctgggcctccaagaaggcacacatgagctgtgctacaacactgcatgtgcactgataggccaaggccagctgaacca

SEQ ID NO: 601556 - DNA, 120 bp, Artificial Sequence
  ENSG00000174780_5 (sequence is synthesized)
ggccatgaaaatcctacaaaaagctgaagatctttgccgccgttcattatcagaagacactgatgggactgaggaagacccacaggcagaactggccatcattcatggtcagatggctta

SEQ ID NO: 601557 - DNA, 120 bp, Artificial Sequence
  ENSG00000174780_6 (sequence is synthesized)
tattctgcagcttcagggtcgaacagaggaggctttgcaactttacaatcaaataataaaactaaaaccaacagatgtgggattactagctgtaattgcaaataacatcattaccattaa

SEQ ID NO: 601558 - DNA, 120 bp, Artificial Sequence
  ENSG00000174780_7 (sequence is synthesized)
caaggaccaaaatgtctttgactccaagaagaaagtgaaattaaccaatgcggaaggagtagagtttaagctttccaagaaacaactacaagctatagaatttaacaaagctttacttgc

SEQ ID NO: 601559 - DNA, 120 bp, Artificial Sequence
  ENSG00000174780_8 (sequence is synthesized)
tatgtacacaaaccaggctgaacaatgccgcaaaatatctgccagtttacagtcccaaagtcccgagcatctcttacctgtgttaatccaagctgcccagctctgccgtgaaaagcagca

SEQ ID NO: 601560 - DNA, 120 bp, Artificial Sequence
  ENSG00000174780_9 (sequence is synthesized)
cacaaaagcaatagagctgcttcaggaattttcagatcagcatccagaaaatgcagctgaaattaagctgaccatggcacagttgaaaatttctcaaggtaatatttctaaagcatgtct

SEQ ID NO: 601561 - DNA, 120 bp, Artificial Sequence
  ENSG00000174780_10 (sequence is synthesized)
aatattgagaagcatagaggagttaaagcataaaccaggcatggtatctgcattagttaccatgtatagccatgaagaagatattgatagtgccattgaggtcttcacacaagctatcca

SEQ ID NO: 601562 - DNA, 120 bp, Artificial Sequence
  ENSG00000174780_11 (sequence is synthesized)
gtggtatcaaaaccatcagccaaaatctcctgctcatttgtccttgataagagaagctgcaaacttcaaactcaaatatgggcggaagaaggaggcaattagtgacctacaacagctgtg

SEQ ID NO: 601563 - DNA, 120 bp, Artificial Sequence
  ENSG00000174780_12 (sequence is synthesized)
gaaacaaaatccaaaagatattcacaccctggcacagcttatttctgcttactcacttgtagatccagagaaagccaaagctcttagtaaacacttgccatcgtcagatagtatgtctct

SEQ ID NO: 601564 - DNA, 120 bp, Artificial Sequence
  ENSG00000174780_13 (sequence is synthesized)
aaaagtagatgttgaggctcttgaaaattctgctggtgctacatacattcggaagaagggtggaaaagttactggagatagtcaaccaaaggaacaaggacagggagatttgaaaaagaa

SEQ ID NO: 601565 - DNA, 120 bp, Artificial Sequence
  ENSG00000174780_14 (sequence is synthesized)
gaaaaagaaaaagaagggaaaattgcctaagaattatgacccaaaagttaccccagatccagaaagatggctgccaatgcgagaacgttcttactaccggggaagaaagaagggtaaaaa

SEQ ID NO: 601566 - DNA, 120 bp, Artificial Sequence
  ENSG00000174780_15 (sequence is synthesized)
gaaggatcagattggaaaagggacccagggagcaactgcaggagcttcatctgaactggatgccagtaaaactgtgagcagcccacccacctccccaagacctggcagtgctgcaacagt

SEQ ID NO: 601567 - DNA, 120 bp, Artificial Sequence
  ENSG00000174780_16 (sequence is synthesized)
taacatcatacccccaagacaccagaaacctgcaggggctccagcaacaaaaaagaaacagcaacagaaaaagaagaaaggtggaaaaggtggctggtgatgagaatattcttgttgcag

SEQ ID NO: 601568 - DNA, 120 bp, Artificial Sequence
  ENSG00000174780_17 (sequence is synthesized)
gctgtttttaaactagtgtcagtgacactaggaatataataaaggtaacacagcaagaagcacagaactactccctcttcatctccatattttcataatttcttgtgtttcaaataggga

SEQ ID NO: 601569 - DNA, 120 bp, Artificial Sequence
  ENSG00000174780_18 (sequence is synthesized)
aacatcttcctcaaagtctgcctagtgagatatggcctactggttgcctcatagctttgtacagattatgaggactgaaaataattgggcatttacccatcttggtatctgttgtatcct

SEQ ID NO: 601570 - DNA, 120 bp, Artificial Sequence
  ENSG00000174780_19 (sequence is synthesized)
ttatctgtgtgtgctgatttgatcttttttcagtttcacataccttatctaaggtttcccaggatttaaacagaaactacttctatgatttcagctggagtctgaagatacttgtttctg

SEQ ID NO: 601571 - DNA, 120 bp, Artificial Sequence
  ENSG00000174780_20 (sequence is synthesized)
ttcaagtcccactttaaattatgtcttaggagactgaaagtggaatcttctgagcattcctaaatatctgcttagaaatatcatgtgataaagagggaccttcttaatacactgatgttc

SEQ ID NO: 601572 - DNA, 120 bp, Artificial Sequence
  ENSG00000174780_21 (sequence is synthesized)
ttcactaaatggatggccacaagaaaaataaagtaaatgtcttaaataatttaaccataaattttctgtcatgtgatactggaatatgggatacttttcatgtttatatatatatatata

SEQ ID NO: 601573 - DNA, 120 bp, Artificial Sequence
  ENSG00000174780_22 (sequence is synthesized)
tatatatatacatatatatatatatataaacatgaaatatatatatatggctcctttgtgccccatgtcattttcagattatggtagcatgctgatacagcaccatgaaagaactcaagg

SEQ ID NO: 601574 - DNA, 120 bp, Artificial Sequence
  ENSG00000174780_23 (sequence is synthesized)
aaggaaaatatatcaatgtaagaagttcactcttagacccagtgttctgaggtcacatgggtttggactgtctcaatcagaaagattaatgactgttatcaagaacatgaacattggctt

SEQ ID NO: 601575 - DNA, 120 bp, Artificial Sequence
  ENSG00000174780_24 (sequence is synthesized)
cctccatagagaagaaatcagtatctgagttgcataccaggcagtattaaaatctaacaggtctgtttggcccattgatagatactcaaatggtgtctccttctggttatggattttgac

SEQ ID NO: 601576 - DNA, 120 bp, Artificial Sequence
  ENSG00000174780_25 (sequence is synthesized)
cattgattacctttctcaatgtaatgaagtattttacagtcaatttgtggtgtaaatgttgctcttgtctttccttgcttacaaactactttcacattgaacagctgtgagacagacata

SEQ ID NO: 601577 - DNA, 120 bp, Artificial Sequence
  ENSG00000174780_26 (sequence is synthesized)
ttgagatgcctgcccttgttagtattcattttatgctgcccaagatatcatttaatttagacttaacaagtatttccttgtgattatattactctgtccttgttaataaagtgctgctgt

SEQ ID NO: 601578 - DNA, 120 bp, Artificial Sequence
  ENSG00000174780_27 (sequence is synthesized)
gtttgactctgaacatactaccaaaacttcttcaaagagttttttatgaaagactttcctcctttacaagaaagaaatggggtgctgcctttctgtttagtaaaagcagaatttgcagtg

SEQ ID NO: 601579 - DNA, 120 bp, Artificial Sequence
  ENSG00000174780_28 (sequence is synthesized)
gcatctaaagagatcttttttaaataaaaattatgtattgtggcataatcctttttttgagctctacagagaacagtcttttggtaatagtggcaggtatttattccttctgaatatata

SEQ ID NO: 601580 - DNA, 120 bp, Artificial Sequence
  ENSG00000174780_29 (sequence is synthesized)
ccccattataggaataactgttacttatttaggattccatcattgaaaattttgacccaaggcacagcagtgaaatttatagttctcaatttagttgtcattattgacaggcattggtat

SEQ ID NO: 601581 - DNA, 120 bp, Artificial Sequence
  ENSG00000174780_30 (sequence is synthesized)
tattagtcattgctaagcaactaaaacttcatcagttcaaataagttttaattgtcaaatgaagtataaacacatgaactttctagaaatatttcctcttttggataggtctttaaccag

SEQ ID NO: 601582 - DNA, 120 bp, Artificial Sequence
  ENSG00000174780_31 (sequence is synthesized)
ttcatatatatactttgtcaaatatatggatgtgtatgtgtacatttataagaaccagtatggatacatccattcactgtggtacattttaaaataaaatattttagcagtgaatatgga

SEQ ID NO: 601583 - DNA, 120 bp, Artificial Sequence
  ENSG00000174780_32 (sequence is synthesized)
caagggtaatatttttcattgtaacgttctctaatgctgattttaaattagacaaggaataaaaaatacattctcatagaaatttcatgtgaataaagttctagttctctttgttccttt

SEQ ID NO: 601584 - DNA, 120 bp, Artificial Sequence
  ENSG00000174780_33 (sequence is synthesized)
aaggttggaagtttgttaaacttatctgtaaatataacgtgcatataactttgtagagtatcttctaaaattgcatttgacttctgtgaaattattaaatggaagttattgatgcagtga

SEQ ID NO: 601585 - DNA, 120 bp, Artificial Sequence
  ENSG00000174780_34 (sequence is synthesized)
ttcttgatcatacccaatgaagaacattctcatacattgtgggtttgaatgtaagagtaatacagacttttcagtgagcagtttggtgatgtgtagcagattttaaatttacctaccctt

SEQ ID NO: 601586 - DNA, 120 bp, Artificial Sequence
  ENSG00000174780_35 (sequence is synthesized)
tgatccaataatttcacttctagaaacttgaggaaatgattagataaatttacgtatgtgtctgtgtgaatgttcattgaaggaatattcataagaacagaaatttagaaacagcataaa

SEQ ID NO: 601587 - DNA, 120 bp, Artificial Sequence
  ENSG00000174780_36 (sequence is synthesized)
gttctgtactattaaaggattggctaaattttaccataatcacaaagtaattacagtcactacaaccaataacattaaaaaagatacagtaatgtagatctatgtttattgtaacaaaga

SEQ ID NO: 601588 - DNA, 120 bp, Artificial Sequence
  ENSG00000174780_37 (sequence is synthesized)
tatccacaggatattgaatggggaagggaggtttcaaaatagtatgcaccgtgtctcactttcattttaaaatgcagctgtgcatttacataaaactaagccaggtatggtggctcacag

SEQ ID NO: 601589 - DNA, 120 bp, Artificial Sequence
  ENSG00000174780_38 (sequence is synthesized)
ggtggctcacagctatagtcccagctacttgggaggcggaggtgggagggtcacttgagcccagaatttcaaggctgcagtgagctatgattaagccactgcactccagcctgggcaaca

SEQ ID NO: 601590 - DNA, 120 bp, Artificial Sequence
  ENSG00000174780_39 (sequence is synthesized)
caactttaaaaacaaacaaaaaaaatattaaaaaactaaataactgaaatgctagtagtgtttatctctgggtggtaggattgtttatttttatacttttctataattgatttttcgcaa

SEQ ID NO: 601591 - DNA, 120 bp, Artificial Sequence
  ENSG00000174780_40 (sequence is synthesized)
acacaacaaatgaaagcaaagtgccaaagagctgggaaagtcaagagactgataatatatatgtagtatatttgatgctaatgtaaatttcacaactgcttgttactacgattatcttgg

SEQ ID NO: 601592 - DNA, 120 bp, Artificial Sequence
  ENSG00000174780_41 (sequence is synthesized)
aatcttctgcttaggaatttagatcttgctctttggaatagtgaaagaaatgggatttacccagcaatactacttttaaaacaatttttctcctgtagatctttgccgccgttcattatc

SEQ ID NO: 601593 - DNA, 120 bp, Artificial Sequence
  ENSG00000174780_42 (sequence is synthesized)
agaagacactgtaagtattccatcattgttaaacctaaattttacacttctgactatgatagattactgaggcttcattgtactatttattgactttttttagaagatggcaattcatta

SEQ ID NO: 601594 - DNA, 120 bp, Artificial Sequence
  ENSG00000174780_43 (sequence is synthesized)
agtaggaatcacactagaaaccaccctctagtatcagttatttgatgaagtctactagagtgagaaatcacaatacaaaaaattttgacataaccttaagcacttgattatacatttata

SEQ ID NO: 601595 - DNA, 120 bp, Artificial Sequence
  ENSG00000174780_44 (sequence is synthesized)
taatgtaaatttattcccccattttaggatgtaggactaaggtctttgaggactggtctgctcctaggagttccatgtatatttcttatgtagtgacataattcaacattcccaatttac

SEQ ID NO: 601596 - DNA, 120 bp, Artificial Sequence
  ENSG00000174780_45 (sequence is synthesized)
acttttggtttttctttttaagtgtaacaatatcttaaatacagttggtaagcacttccattatagagtccttatgttttttttttgttgtttgttttttaccaatctcttaccattttt

SEQ ID NO: 601597 - DNA, 120 bp, Artificial Sequence
  ENSG00000174780_46 (sequence is synthesized)
cttaaatgtccagcagtgtcttattgtagaaacatttctaagggcttattctcaacttctgtacttaccaaaccatttgtgaactggcactgctttaaaggaaagttttattttacagat

SEQ ID NO: 601598 - DNA, 120 bp, Artificial Sequence
  ENSG00000174780_47 (sequence is synthesized)
atctaccttcatatttggaaaacacggttgttcatggtatttctagaagtaaagttaactatgttctctaaagggagtagcttttatgataaatcaggtattagcggagagcctttattt

SEQ ID NO: 601599 - DNA, 120 bp, Artificial Sequence
  ENSG00000174780_48 (sequence is synthesized)
gctatttcttcagcgttttttattttcaaaagcggtattctgggagtgaagggggagttcactaatttatacctttggctgtgtaggtatctgcattagttaccatgtatagccatgaag

SEQ ID NO: 601600 - DNA, 120 bp, Artificial Sequence
  ENSG00000174788_0 (sequence is synthesized)
aggatcggcggggaccatggcgggctccccagaccaggagggcttcttcaatctgctgagccacgtgcagggcgaccggatggagggacagcgctgttcactgcaagccgggccgggcca

SEQ ID NO: 601601 - DNA, 120 bp, Artificial Sequence
  ENSG00000174788_1 (sequence is synthesized)
acagtcagcagcctgcccggcttccagcccgtggggtccaaggacggagcacagaaacgagctgggaccctcagtccccaacccctgctcacccctcaggacccgaccgctctcggcttc

SEQ ID NO: 601602 - DNA, 120 bp, Artificial Sequence
  ENSG00000174788_2 (sequence is synthesized)
cgtcggaacagcagcccccagcccccgacacaagccccctgagggcctgaggcatcctgggtctcactcggcccccaaaaactgataaaagaataaaacacttaaatgaataacaaggaa

SEQ ID NO: 601603 - DNA, 120 bp, Artificial Sequence
  ENSG00000174788_3 (sequence is synthesized)
agtcattgctgctgggcacagcgaggtccaagctcaggtcgccctgccccctacccaccatgccagatccagcatcgttgtgggcaaacaattatctggatgatctttatggggcttaag

SEQ ID NO: 601604 - DNA, 120 bp, Artificial Sequence
  ENSG00000174788_4 (sequence is synthesized)
cttgggtgggagcagatggggcatgagctggggatttggggatggggggaatccacacccccacgtcctggacgtttaaaaggccctctctggcactgggccggggcagaggccagcaga

SEQ ID NO: 601605 - DNA, 120 bp, Artificial Sequence
  ENSG00000174791_0 (sequence is synthesized)
attctcttcctgaagcgaaggagctcccagccatggaaagccctggagagtcaggcgcgggctctcctggagcccccagcccgtccagcttcactactgggcacctggcgagagaaaagc

SEQ ID NO: 601606 - DNA, 120 bp, Artificial Sequence
  ENSG00000174791_1 (sequence is synthesized)
cagcccaggacccactgtatgacgtgcccaatgccagcggcgggcaggcaggcgggccgcagcggccggggcgcgttgtgagcctgcgggagcgcctgctgctcacccggcccgtgtggc

SEQ ID NO: 601607 - DNA, 120 bp, Artificial Sequence
  ENSG00000174791_2 (sequence is synthesized)
tgcagctgcaagccaacgcagcggccgcactgcacatgctgaggaccgagcccccggggacgttcctcgtgcggaaatctaacacccgccagtgccaggccctgtgcatgcggttgcctg

SEQ ID NO: 601608 - DNA, 120 bp, Artificial Sequence
  ENSG00000174791_3 (sequence is synthesized)
aagccagtggcccctccttcgtctccagccactacatcctggagagccctggcggcgtctccttggagggctcggagctcatgttcccagacctagtccagctcatctgtgcctactgcc

SEQ ID NO: 601609 - DNA, 120 bp, Artificial Sequence
  ENSG00000174791_4 (sequence is synthesized)
acacccgggacatccttctcctcccgctgcagctccccagagccatccaccacgcagccactcacaaagagctggaggccatctcccatctgggcattgagttctggagctcctccctca

SEQ ID NO: 601610 - DNA, 120 bp, Artificial Sequence
  ENSG00000174791_5 (sequence is synthesized)
acatcaaggctcagcggggcccggctggaggcccagtgttgccccagctgaaggcccggtcccctcaagagctggaccagggcaccggagccgccttgtgcttcttcaaccccctgttcc

SEQ ID NO: 601611 - DNA, 120 bp, Artificial Sequence
  ENSG00000174791_6 (sequence is synthesized)
cgggggacctagggcccaccaagcgggagaaattcaagagaagcttcaaagtgcgcgtgtccacagagacctccagccccctgtctccacctgccgtgccacctccccccgtccccgtgc

SEQ ID NO: 601612 - DNA, 120 bp, Artificial Sequence
  ENSG00000174791_7 (sequence is synthesized)
tgccaggggcagtccccagccagacagagcggctgcccccttgccagctgctacggagggagagctcagtggggtaccgcgtgccagcaggcagtggccctagccttccgcctatgccct

SEQ ID NO: 601613 - DNA, 120 bp, Artificial Sequence
  ENSG00000174791_8 (sequence is synthesized)
ccctccaagaggtggactgcggctcccccagcagctccgaggaggagggggtgccagggtcccgggggagcccagcgacctcaccccacctgggccgccgacgacctctgcttcggtcca

SEQ ID NO: 601614 - DNA, 120 bp, Artificial Sequence
  ENSG00000174791_9 (sequence is synthesized)
tgagcgccgccttctgctccctactggcaccggagcggcaggtgggccgggctgcggcagcactgatgcaggaccgacacacagccgcgggccagctggtgcaggacctactgacccagg

SEQ ID NO: 601615 - DNA, 120 bp, Artificial Sequence
  ENSG00000174791_10 (sequence is synthesized)
tgcgggctgggcccgagccccaggagctgcagggcatccgtcaggcgctgagccgggcccgggccatgctgagtgcggagctgggccctgagaagctgctgtcgcctaagaggctggaac

SEQ ID NO: 601616 - DNA, 120 bp, Artificial Sequence
  ENSG00000174791_11 (sequence is synthesized)
atgtcctggagaagtcattgcattgctctgtgctcaagcctctccggcccatcctggcagcccgcctgcggcgccggcttgccgcagacggctccctgggccgcctagctgagggcctcc

SEQ ID NO: 601617 - DNA, 120 bp, Artificial Sequence
  ENSG00000174791_12 (sequence is synthesized)
gcctggcccgggcccagggccccggagccttcgggtcccacctgagcctgccctccccagtagagttggagcaagtgcgccagaagctgctgcagctgctccgcacctactcacccagcg

SEQ ID NO: 601618 - DNA, 120 bp, Artificial Sequence
  ENSG00000174791_13 (sequence is synthesized)
cccaggtcaagcggctcctgcaggcctgcaagctgctctacatggccctgaggacccaggaaggggagggcgcgggtgccgacgagttcctgcctctgctgagcctcgtcttggcccact

SEQ ID NO: 601619 - DNA, 120 bp, Artificial Sequence
  ENSG00000174791_14 (sequence is synthesized)
gtgaccttcctgagctgctgctggaggccgagtacatgtcggagctgctggagcccagcctgcttactggagagggtggctactacctgaccagcctctctgccagcctggccctgctga

SEQ ID NO: 601620 - DNA, 120 bp, Artificial Sequence
  ENSG00000174791_15 (sequence is synthesized)
gtggcctgggtcaggcccacaccctcccactgagccccgtgcaggagctacggcgctccctcagcctctgggagcagcgccgcctgcctgccacccactgcttccagcacctcctccgag

SEQ ID NO: 601621 - DNA, 120 bp, Artificial Sequence
  ENSG00000174791_16 (sequence is synthesized)
tagcctatcaggatcccagcagtggctgcacctccaagaccctggccgtgcccccagaagcctcgattgccaccctgaaccagctctgtgccaccaagttccgagtgacccagcccaaca

SEQ ID NO: 601622 - DNA, 120 bp, Artificial Sequence
  ENSG00000174791_17 (sequence is synthesized)
cttttggcctcttcctgtacaaggagcagggctaccaccgcctgccccctggggccctggcccacaggctgcccaccactggctacctcgtctaccgccgggcggagtggcctgagaccc

SEQ ID NO: 601623 - DNA, 120 bp, Artificial Sequence
  ENSG00000174791_18 (sequence is synthesized)
ccagccccagggacattcgggaacagtctgagacaactgctgaagggggccagggtcaagcccaggaaggccctgctcagccaggggaaccagaggcagagggaagccgggcagcagagg

SEQ ID NO: 601624 - DNA, 120 bp, Artificial Sequence
  ENSG00000174791_19 (sequence is synthesized)
agtagcttgaagtggccagaagggtcattcggggcgggagaccctgagcctgctgagaaatccttttagcgccagcaagccccacccagggccctgtcctgtgtctgccaccacctttgt

SEQ ID NO: 601625 - DNA, 120 bp, Artificial Sequence
  ENSG00000174791_20 (sequence is synthesized)
ctgatacttgtttccagggaagctgggggaactgccacatctgaggaactggaataaagatgagggggcttcgggggcccccagactgtgtgcccaaggccccttgcctcttgttcttct

SEQ ID NO: 601626 - DNA, 120 bp, Artificial Sequence
  ENSG00000174791_21 (sequence is synthesized)
cccccagctgagggtgagccagcctgcaatgagggtgtgccaagtgggggcgaatccgacagatgcccaacctctgacgtggggagggtgacggtctcagctccttttacccttcccctc

SEQ ID NO: 601627 - DNA, 120 bp, Artificial Sequence
  ENSG00000174791_22 (sequence is synthesized)
atgggcatggctgaggcagggctccacccaagtatctcccaccaggctgggacttccagaccctaaaaggttccaatggctcttaggtgtcaggaggatttagagaggccacagaacagc

SEQ ID NO: 601628 - DNA, 120 bp, Artificial Sequence
  ENSG00000174791_23 (sequence is synthesized)
agcaaaggcttggggcccacccctgtcctggacaccagaaggacctgcacctgcaagcctcagtactctcatctgtaaagtggggacactattgctgccctgctcggctcccagaagtgt

SEQ ID NO: 601629 - DNA, 120 bp, Artificial Sequence
  ENSG00000174791_24 (sequence is synthesized)
cccagtgatcaaaatgggtgattttgctacaagcagagctcatggcagaaagggagggagagagctgggctgctaactctctcccggagtccgctctctgccagacagggctcccacctg

SEQ ID NO: 601630 - DNA, 120 bp, Artificial Sequence
  ENSG00000174791_25 (sequence is synthesized)
ctgatgcccagttcagggaggttattcccctggaaatcaggccctggggagaaagtacccaagttacagtctctccccaagatttggagtcctcccaggccctccagcatctctggggag

SEQ ID NO: 601631 - DNA, 120 bp, Artificial Sequence
  ENSG00000174791_26 (sequence is synthesized)
atccaccagctggcagataagcttccagaatggagagggggctcagaaaccatgctctctgcactaaactcttggccctcacaaaagctttacttggccatgacttgttgggcccactga

SEQ ID NO: 601632 - DNA, 120 bp, Artificial Sequence
  ENSG00000174791_27 (sequence is synthesized)
gggtcaggaaagtgactcccaggatgtcatatagcaagtccttaagggttcccccgcccaaaccagggcatcaggttccaactccaccctccattctaagccacccacaaaggccggggc

SEQ ID NO: 601633 - DNA, 120 bp, Artificial Sequence
  ENSG00000174791_28 (sequence is synthesized)
agcccccaaggaagcccagagcaggcagcaaatccaaacaaggaaaagtgccgaccaccaaccacgagggggtgtgcacggcccgggaatctgccgagagggtgaccacccaggggtgag

SEQ ID NO: 601634 - DNA, 120 bp, Artificial Sequence
  ENSG00000174791_29 (sequence is synthesized)
ggcgcctccaaggctgcagcagcagagggggtcccgggccttgcagtccagcagcatcaggcaacctggggacagcgcaggggccaaggccactggcccccaggtcccttagattctggg

SEQ ID NO: 601635 - DNA, 120 bp, Artificial Sequence
  ENSG00000174791_30 (sequence is synthesized)
gtctgggtaaggccagcctcttgggggccatccccaggaaggaaggaattgtccccttatggaggatgaccccagaggctctctcctcgggcactgagcacagaggggacgtcagcccaa

SEQ ID NO: 601636 - DNA, 120 bp, Artificial Sequence
  ENSG00000174791_31 (sequence is synthesized)
ctctcctcgggcactgagcacagaggggacgtcagcccaaatgtcagacatgacaactgggaggtagaaatcgtggacattggctttttgggtttttttgtttgtttgtttgtttgagat

SEQ ID NO: 601637 - DNA, 62 bp, Artificial Sequence
  ENSG00000174791_32 (sequence is synthesized)
ggagttttgctctgtcgctctggctaaagtgcagtggtgccatctcggctcacagcaacctt

SEQ ID NO: 601638 - DNA, 120 bp, Artificial Sequence
  ENSG00000174791_33 (sequence is synthesized)
attgactttcagatgagcagtccagatacagcccagttgcacggctcccattttttttgtcactaggccaccagcagctcttccctccccacttccacgccctcccaaggttctcgctga

SEQ ID NO: 601639 - DNA, 120 bp, Artificial Sequence
  ENSG00000174791_34 (sequence is synthesized)
taggaagtgtcccgttggctcttctattcccctccctgtttcaccactcacccctagtgcctcacacagtccaatgctgagcacaaatgccataggtgttcaataaatgttgttcactga

SEQ ID NO: 601640 - DNA, 120 bp, Artificial Sequence
  ENSG00000174791_35 (sequence is synthesized)
gttcaggaatgagtcatctatggacagtagagggtgctctcccacaaggctgacctgaggccaggggcagatgagcaactgaccacagagccaaaggtgcccccagagcatggctggggc

SEQ ID NO: 601641 - DNA, 120 bp, Artificial Sequence
  ENSG00000174791_36 (sequence is synthesized)
ctggtgtccacgggccctgctccttgggacagcccatccttcccgccctcttcggccctcactcccttctgctcccctctctggcctcagggacatccttctcctcccgctgcagctccc

SEQ ID NO: 601642 - DNA, 120 bp, Artificial Sequence
  ENSG00000174791_37 (sequence is synthesized)
ggattctcttcctgaagcgaaggagctcccagccatggaaagccctggagagtcaggcgcgggctctcctggagcccccagcccgtccagcttcactactgggcacctggcgagagaaaa

SEQ ID NO: 601643 - DNA, 120 bp, Artificial Sequence
  ENSG00000174791_38 (sequence is synthesized)
ccttggtgaagagtccagactctgtagacagatcctgggttctaatcctggctctgccactgggttgtggggacttgggcgagttacttaactacttcgtgcctcagttttctcatcagt

SEQ ID NO: 601644 - DNA, 120 bp, Artificial Sequence
  ENSG00000174791_39 (sequence is synthesized)
ggtaataggacctacctcctggggttgaggtgaagattaaatgagttaatgcaggagagtgcttggggcacaaattactcactatcaaatcttcatctcaggcttgtgagcgccccactg

SEQ ID NO: 601645 - DNA, 120 bp, Artificial Sequence
  ENSG00000174791_40 (sequence is synthesized)
ggctgtccttgcacctgcggctgtggcccacaagccgacccctggagcacatagagcttttgccgcttggttctcccactggatctccacctacccaccctgtccctgcacagcccagaa

SEQ ID NO: 601646 - DNA, 120 bp, Artificial Sequence
  ENSG00000174792_0 (sequence is synthesized)
atcaggttcaacgcagtgactgctcagtagaagccatggctcgcagacactgcttctcctactggttactggtatgctggttggtggtaactgtggcagaaggacaagaagaggtattta

SEQ ID NO: 601647 - DNA, 120 bp, Artificial Sequence
  ENSG00000174792_1 (sequence is synthesized)
cgcctcctggagattcacaaaataatgcggacgctaccgactgccagatctttacactcacccctccacctgccccgaggagtccggtcacaagggcccagcccatcacaaagacaccca

SEQ ID NO: 601648 - DNA, 120 bp, Artificial Sequence
  ENSG00000174792_2 (sequence is synthesized)
ggtgtcccttccatttttttccacgaaggcccagaatccattttaggtttccaaacagacctttcgtcccttcaaggtgtaaccaccgttttccattccagccattttattggccacacc

SEQ ID NO: 601649 - DNA, 120 bp, Artificial Sequence
  ENSG00000174792_3 (sequence is synthesized)
gttaccttacttataggtatttccccagaagaagactccagagaggaagctcatctgaggaaagctgagagggaagagaaacccaaacatactgaagcaaaaaaaagcctatccttcaga

SEQ ID NO: 601650 - DNA, 120 bp, Artificial Sequence
  ENSG00000174792_4 (sequence is synthesized)
aaaaagcaacaaaaagatttctgttttatctttcgaaactaaaactattggatttgaagattaagtatcctaaacatcactgactagaaactgttctctttgtcagcagtgaagatattg

SEQ ID NO: 601651 - DNA, 120 bp, Artificial Sequence
  ENSG00000174792_5 (sequence is synthesized)
gatcataggttattgatggttgcaaaattggacaataaccacgttatttttatcctcaacctcttatggtcacaggatatttatgcaaataaaatctttaaatgggtggctctagtaatt

SEQ ID NO: 601652 - DNA, 120 bp, Artificial Sequence
  ENSG00000174792_6 (sequence is synthesized)
cctatccatactaagatgctgagagaatccatctcctcctctaaattaaacaggatttaaataaattgagatcattataaaccacacgaagaaactgatgacaccgtttttatactcatt

SEQ ID NO: 601653 - DNA, 120 bp, Artificial Sequence
  ENSG00000174792_7 (sequence is synthesized)
gttatgaggagtctgactgtagctaatactttaaagatataaactgacttgtctaacccaaataataataattattattattttcttggagacagaatttcactcttgttacccaggctg

SEQ ID NO: 601654 - DNA, 120 bp, Artificial Sequence
  ENSG00000174792_8 (sequence is synthesized)
ctgcgcccagccccaaataattacttttaaactatagtatctaaatttactttaatgttgacttcaactgatgcaaattaatttgataattttctcactgtttcccgttatcattacata

SEQ ID NO: 601655 - DNA, 120 bp, Artificial Sequence
  ENSG00000174792_9 (sequence is synthesized)
gatgctggctaaaataatatacttcctctcaaacttttaacgtaattccaggttcaaaatgcctgattaaactgctacaagaatattctggtacctctagaactccacagagataagttc

SEQ ID NO: 601656 - DNA, 120 bp, Artificial Sequence
  ENSG00000174792_10 (sequence is synthesized)
actcaactcttggaaccttgtattctcagggtgcaatatgagaaacaaatcccacagattgcattgattggttatttgttttggccactctgtaaaacacatcttcctgtttatgccact

SEQ ID NO: 601657 - DNA, 120 bp, Artificial Sequence
  ENSG00000174792_11 (sequence is synthesized)
tatcttgcctgtaacataagaactttagttctgcatatgtggtcagtggtttgcactttttcctcccaagatctacatgcaaaagttgctgttgctgctgctgctacaaaaacagaaaaa

SEQ ID NO: 601658 - DNA, 120 bp, Artificial Sequence
  ENSG00000174792_12 (sequence is synthesized)
aaaaaatcaggatgaagacatgaaaggactttgggaatggttgccctaaaaaaggaaagagagataaaatcatcatgctatgtttctttgctttattaaaatgatcaaaaaagaaaaaaa

SEQ ID NO: 601659 - DNA, 120 bp, Artificial Sequence
  ENSG00000174792_13 (sequence is synthesized)
gactgctcagtagaagccatggctcgcagacactgcttctcctactggttactggtatgctggttggtggtaactgtggcagaagcactgtccactttctatctccagcagcatattaat

SEQ ID NO: 601660 - DNA, 120 bp, Artificial Sequence
  ENSG00000174792_14 (sequence is synthesized)
atcaggttcaacgcagtgactgctcagtagaagccatggctcgcagacactgcttctcctactggttactggtatgctggttggtggtaactgtggcagaagtagagacggggtttcacc

SEQ ID NO: 601661 - DNA, 65 bp, Artificial Sequence
  ENSG00000174792_15 (sequence is synthesized)
tgccaaatccgcacatcttaaaggacaagaagaggtatttacgcctcctggagattcacaaaata

SEQ ID NO: 601662 - DNA, 120 bp, Artificial Sequence
  ENSG00000174796_0 (sequence is synthesized)
agacgcagtctccgtcgttgacgttagtcgcagtcttcgctgctaacgttttgttatgagttgctaaaatggtgaaatgctgctccgccattggatgtgcttctcgctgcttgccaaatt

SEQ ID NO: 601663 - DNA, 120 bp, Artificial Sequence
  ENSG00000174796_1 (sequence is synthesized)
cgaagttaaaaggactgacatttcacgtattccccacagatgaaaacatcaaaaggaaatgggtattagcaatgaaaagacttgatgtgaatgcagccggcatttgggagcctaaaaaag

SEQ ID NO: 601664 - DNA, 120 bp, Artificial Sequence
  ENSG00000174796_2 (sequence is synthesized)
gagatgtgttgtgttcgaggcactttaagaagacagattttgacagaagtgctccaaatattaaactgaaacctggagtcataccttctatctttgattctccatatcacctacagggga

SEQ ID NO: 601665 - DNA, 120 bp, Artificial Sequence
  ENSG00000174796_3 (sequence is synthesized)
aaagagaaaaacttcattgtagaaaaaacttcaccctcaaaaccgttccagccactaactacaatcaccatcttgttggtgcttcctcatgtattgaagaattccaatcccagttcattt

SEQ ID NO: 601666 - DNA, 120 bp, Artificial Sequence
  ENSG00000174796_4 (sequence is synthesized)
ttgaacatagctacagtgtaatggacagtccaaagaaacttaagcataaattagatcatgtgatcggcgagctagaggatacaaaggaaagtctacggaatgttttagaccgagaaaaac

SEQ ID NO: 601667 - DNA, 120 bp, Artificial Sequence
  ENSG00000174796_5 (sequence is synthesized)
gttttcagaaatcattgaggaagacaatcagggaattaaaggatgaatgtctgatcagccaagaaacagcaaatagactggacactttctgttgggactgttgtcaggagagcatagaac

SEQ ID NO: 601668 - DNA, 120 bp, Artificial Sequence
  ENSG00000174796_6 (sequence is synthesized)
aggactatatttcatgaaataatttcatgttacgttccacctaaaattgtcattggtacaaatttttataaaatctcatttaccatcactaaataatatccatcatttaaagtgctgctt

SEQ ID NO: 601669 - DNA, 120 bp, Artificial Sequence
  ENSG00000174796_7 (sequence is synthesized)
tggattctctggagcattatgcattatagttgttatccaaagacttttttgaaaatatgcagaaatttgtggtaattatgtatttgtgtcttgtgacaattatgttttatagacctacac

SEQ ID NO: 601670 - DNA, 120 bp, Artificial Sequence
  ENSG00000174796_8 (sequence is synthesized)
tagtgccaggtcactattgtaagatgttaaaatctcaagaaaatttcacagagctaaagaaatgatgtcaaattagtcacattaagctatagtagaaggaattggacacttctccagata

SEQ ID NO: 601671 - DNA, 120 bp, Artificial Sequence
  ENSG00000174796_9 (sequence is synthesized)
tttggcttcaaaggagtacctttacttacatgtgctttatggtaagtacattgaattttactttaaatgcattttactacaaagcacaattcatttgtaatgcatatccatcttggattc

SEQ ID NO: 601672 - DNA, 120 bp, Artificial Sequence
  ENSG00000174796_10 (sequence is synthesized)
aatccaaggtgctttagctatcagtagtaccaaaggatctttttacaaggcttcctgtggtattgactctgagaataacacatagtgaagatctgtgggcttttaaaattgttcacagcc

SEQ ID NO: 601673 - DNA, 120 bp, Artificial Sequence
  ENSG00000174796_11 (sequence is synthesized)
aatttaagaagacccctcatgaagtctcagttttcagtacagtacatcattcctcctcactaggagcactttgatgtaaaccagaatagctttaaaaagacaaaaaggatcgtagatctg

SEQ ID NO: 601674 - DNA, 120 bp, Artificial Sequence
  ENSG00000174796_12 (sequence is synthesized)
atttttaaatggttggttgctctgacagatctgaacactttgcttcatgactatttcgtcataaaggtatatgtttaaaatctgaatggcagtactagctctatacttttaatactgctt

SEQ ID NO: 601675 - DNA, 120 bp, Artificial Sequence
  ENSG00000174796_13 (sequence is synthesized)
tgtattttatatgtaaagtagtattgctgacattttaaaaaaatacaaaatacaaaagaaaccattagaaattaataactgtggctcttccagttgaaataggaattggagagaaaggat

SEQ ID NO: 601676 - DNA, 120 bp, Artificial Sequence
  ENSG00000174796_14 (sequence is synthesized)
cagcagctttagaatagcttcttactgaatatgcaaaagaataattccttgttatttcctaattgatccaagtctcataaatttagcttttgtcataattccttaccgaaaacaactgaa

SEQ ID NO: 601677 - DNA, 120 bp, Artificial Sequence
  ENSG00000174796_15 (sequence is synthesized)
attgagagtcataaatactgtgggttagaataaaaaccatttgccaaagcaacactctacttagaagcacatgtacatacatggacctcattcagaagtccatgttgtagcagttagaat

SEQ ID NO: 601678 - DNA, 120 bp, Artificial Sequence
  ENSG00000174796_16 (sequence is synthesized)
ttgagtatcagccatttcattgtagtaacaaaaattgaattgcattttgtgctcagttgtttattgtaattttatttttgttacattaatattagttaagatatggtcacttgaattttt

SEQ ID NO: 601679 - DNA, 120 bp, Artificial Sequence
  ENSG00000174796_17 (sequence is synthesized)
tgtatttaagaattttctgttttaatgcatgttatacttttatgtaggattccaaaccttccctctaaatgggatttaacccacatctgcgagatcagcgttatgctaagaggaaatcac

SEQ ID NO: 601680 - DNA, 120 bp, Artificial Sequence
  ENSG00000174796_18 (sequence is synthesized)
agcgttatgctaagaggaaatcactgaggccatatctttttacaatctgaaaaaaaagtagtaaaaaggtagttaaaaaaaaaaaaggccgggtggtggctcatacctgtaatcctagca

SEQ ID NO: 601681 - DNA, 120 bp, Artificial Sequence
  ENSG00000174796_19 (sequence is synthesized)
actttcattaattacccattatttattttagttacttaattttgagttcataaatggccaccctaatggaaagtttgggtatgatcttaggttttatggagatgttttcaatagagatta

SEQ ID NO: 601682 - DNA, 120 bp, Artificial Sequence
  ENSG00000174796_20 (sequence is synthesized)
tttttccctcaccctatttgtgaatatataaattaaagtaagacaatggagtaagtaagagggtagatccaaacacagtatgtctaaattctagcactctactggctgcttagaatacac

SEQ ID NO: 601683 - DNA, 120 bp, Artificial Sequence
  ENSG00000174796_21 (sequence is synthesized)
caaacctggaagacctttccaagagtaaaatcccagtctgccactatcaaaattgccacagtcacttttactacttgtgttcatagtagactcagcacttctttttcactggacctagta

SEQ ID NO: 601684 - DNA, 120 bp, Artificial Sequence
  ENSG00000174796_22 (sequence is synthesized)
taactgagaaataaataactgtgtgcaaaatattggtatcattaaggacccagagctgcccattttctctttgttctaatagggaagcaattactgatagaaatgtgagattaaaaatag

SEQ ID NO: 601685 - DNA, 120 bp, Artificial Sequence
  ENSG00000174796_23 (sequence is synthesized)
ggtcctccctgctgctccaaacaaatgcctaaacacagtatgtatctcagtcctctgttcccagagattccaccctagcccaggaaagaactggcctgtgtaaagcaaaacccaagtcat

SEQ ID NO: 601686 - DNA, 120 bp, Artificial Sequence
  ENSG00000174796_24 (sequence is synthesized)
ccccctccagaaatttctctggcagccaagcctgaccctaagggttccactttgctttaaaagctaggagtggcctctagagccaggaacacattaatacaacagttcaacctcagcacc

SEQ ID NO: 601687 - DNA, 120 bp, Artificial Sequence
  ENSG00000174796_25 (sequence is synthesized)
aagtcaggtacgaagcgcttgatacgtggaatttttctctatatcaagtttaaatttctggaaatagactttggttgctaatgacaattacagttataccatagtctgtaatttgagaaa

SEQ ID NO: 601688 - DNA, 120 bp, Artificial Sequence
  ENSG00000174796_26 (sequence is synthesized)
ggtaataactcttaggttgcctgttttcccccaatcgctacccgcccaaatctcagggcgtagttcggcgcgaggttggcggcagcggcgcggagacgctggttggccccagaggaaagg

SEQ ID NO: 601689 - DNA, 120 bp, Artificial Sequence
  ENSG00000174796_27 (sequence is synthesized)
acgctcactgggcgcatcgttacctgtgacgggtcctccctctctccctccggtggcggggagcctggagaaaggggcggagctcggcccgggccctgggctcagcgggtcccgcgcgct

SEQ ID NO: 601690 - DNA, 120 bp, Artificial Sequence
  ENSG00000174796_28 (sequence is synthesized)
gctcttggacgccagggtgctcgctggcacctcgaagtgcttcttgcttcctccctttcccgtttacttgctgttctttcaaaatatgtactgacattcactattgccagtcaccagcta

SEQ ID NO: 601691 - DNA, 120 bp, Artificial Sequence
  ENSG00000174796_29 (sequence is synthesized)
aaccgtgaggacaaaaagtaaggaaaaatagacacactccaccatgacctcatggaactaacaagactggtggaggaggaagacattaataagagcaatcactgcaataaatttttgtta

SEQ ID NO: 601692 - DNA, 120 bp, Artificial Sequence
  ENSG00000174796_30 (sequence is synthesized)
gaaatgtttgttcaaggcaaaaaattatttctcagtaaccatcatagctaacatttataaggtgccaatctttattcaaagcacttaaactttattaactcatttaacttcacaacaacc

SEQ ID NO: 601693 - DNA, 61 bp, Artificial Sequence
  ENSG00000174796_31 (sequence is synthesized)
gcacttaaactttattaactcatttaacttcacaacaaccctatacactccgtcgcccagg

SEQ ID NO: 601694 - DNA, 120 bp, Artificial Sequence
  ENSG00000174796_32 (sequence is synthesized)
cagagaaaagctaggtaatttgcccaaggtttcacagctggtataacgatgtcttcatatcattatatgaagtcacgttgttgtttgttctgatctacaatgcaagagccagagactttt

SEQ ID NO: 601695 - DNA, 120 bp, Artificial Sequence
  ENSG00000174796_33 (sequence is synthesized)
gttttgttttgttttgtctttttttatttattctggagacccagagactttgattcactcattgttgaattgttgctgaacattcacaatgtcttaaaggccagacttcagtcactccat

SEQ ID NO: 601696 - DNA, 120 bp, Artificial Sequence
  ENSG00000174796_34 (sequence is synthesized)
ttggaagctccagttggggcatttagaggctgaaggataaaatgtgaactcatcttgtgtctgaagctgaggaaagcccatagttactcattaccacaatctggatctgtctgatgctac

SEQ ID NO: 601697 - DNA, 120 bp, Artificial Sequence
  ENSG00000174796_35 (sequence is synthesized)
aatattgcttcctagagtcattgtaatttatatatatgcaacagcaaaatagaggtagttaatcctttggttacatatgtagttcactgaagaaggcttttgcaaggatatttctaccaa

SEQ ID NO: 601698 - DNA, 120 bp, Artificial Sequence
  ENSG00000174796_36 (sequence is synthesized)
ggaaataattcttccctctaactgctataatttccgtatgaaatatgtaataaaaaatagctatttaagttttctcagtcatacacatacagagtattcaagcttgcatttatttattca

SEQ ID NO: 601699 - DNA, 120 bp, Artificial Sequence
  ENSG00000174796_37 (sequence is synthesized)
tctcattgcttattcatgttagaggcaggcatggaatctagatctcttttactatcttgattaatacaggtttataataattttttctatttttgtgggtacatagtaggtatgtatatt

SEQ ID NO: 601700 - DNA, 120 bp, Artificial Sequence
  ENSG00000174796_38 (sequence is synthesized)
tataggatacatgagatttatttaggtatacaatgcatgataatcacattagggtaaatagggtatccatcacattaagcatttatcttttatgttacaaaaaatccaattatactttta

SEQ ID NO: 601701 - DNA, 120 bp, Artificial Sequence
  ENSG00000174796_39 (sequence is synthesized)
gttatttttaaatatacaataaattattgttggctatcgtcaccccattgtactatcaaatactagatcttagtctgtctaactatatttctgtacccattaaccatccccacctccccc

SEQ ID NO: 601702 - DNA, 63 bp, Artificial Sequence
  ENSG00000174796_40 (sequence is synthesized)
agaggaaatgtttgttcaaggcaaaaaattatttctcagtaaccatcatagctaacatttata

SEQ ID NO: 601703 - DNA, 82 bp, Artificial Sequence
  ENSG00000174796_41 (sequence is synthesized)
gctcactttttatgatactattgaagaaccttcaccactcttgctaacatttttattgtttgcttattcatttgaagtctgt

SEQ ID NO: 601704 - DNA, 120 bp, Artificial Sequence
  ENSG00000174796_42 (sequence is synthesized)
gctaacatttttattgtttgcttattcatttgaagtctgttcttgaagttttaaatttgtagactgcatcttcaacttttgtaatgtgtagtaggagtattttaccagtaaccactcata

SEQ ID NO: 601705 - DNA, 120 bp, Artificial Sequence
  ENSG00000174796_43 (sequence is synthesized)
aatatttgtatattactaaggtttgatgaagtgggctgactttaggaattagcataactgaagatttttgtctaaaaatggaagttaacgtaagaaggttgaactgatgttccaagttgg

SEQ ID NO: 601706 - DNA, 120 bp, Artificial Sequence
  ENSG00000174796_44 (sequence is synthesized)
cagtccttaacactggggcagaagtcaggagtagaaccactaacaggactaaagtacttgtaagagccacatacatgcaagcataaagtctaggtaggatcaaaaggaagaaaaccaaaa

SEQ ID NO: 601707 - DNA, 78 bp, Artificial Sequence
  ENSG00000174796_45 (sequence is synthesized)
taaccatcatagctaacatttataagggtcttactctgtcacccaggctgatgtgcagtggtaccatcagctcactgt

SEQ ID NO: 601708 - DNA, 120 bp, Artificial Sequence
  ENSG00000174796_46 (sequence is synthesized)
ctgaacagacaaaccaatgaataattccgtcttggttgacaattggttgggacaagttcacatgccaagatgtcactgaaccacaagatcctacagtcactgacaactatttcctaacat

SEQ ID NO: 601709 - DNA, 120 bp, Artificial Sequence
  ENSG00000174796_47 (sequence is synthesized)
atagtgctcgcagccccgctgacctcgctcttgaccgctggcgccatcttcccgggccgtcgccgccatctcctccacctcccctcacattccaccgatccttcccccaggataaaaacc

SEQ ID NO: 601710 - DNA, 120 bp, Artificial Sequence
  ENSG00000174796_48 (sequence is synthesized)
acgcccagagaagctgcgcctctctagcacacccctcccagccccagcggccactagcgacaatatggctcctaagcacgtgacccggggcagacggatttccggttcccggggctacga

SEQ ID NO: 601711 - DNA, 120 bp, Artificial Sequence
  ENSG00000174799_0 (sequence is synthesized)
attttcaaactgctctagcgccggagcccgtgcctggacggaaggagctagtgggggactcgaggcctgagggcaatgcggctggaggcggaggcaacggcggctggagctgccggactt

SEQ ID NO: 601712 - DNA, 120 bp, Artificial Sequence
  ENSG00000174799_1 (sequence is synthesized)
taatttttggaagtgaataaaacttgttttagaagacgagatgactacagctgtagagagaaagtatattaatattaggaaaaggctggatcagctgggataccgccagactctgacagt

SEQ ID NO: 601713 - DNA, 120 bp, Artificial Sequence
  ENSG00000174799_2 (sequence is synthesized)
ggagtgtttacctttggtagaaaaacttttcagcgacttagttcatacaactgagagccttcggcaatcaaaattatctgctgtgaaagctgaaaaagaaagtgccaattttgattttgt

SEQ ID NO: 601714 - DNA, 120 bp, Artificial Sequence
  ENSG00000174799_3 (sequence is synthesized)
tttggaaccctataaacttgaaaatgcaagattgagtagagaaaataatgaattatacctagagttaatgaaactgagagaacattcagaccaacacgttaaagagttgaaaacttcatt

SEQ ID NO: 601715 - DNA, 120 bp, Artificial Sequence
  ENSG00000174799_4 (sequence is synthesized)
gaagaaatgtgcacgtgaaacagctgatctgaaatttctgaataaccaatatgctcataaactcaaactgttggagaaagagagcaaagctaagaatgaaagaattcaacaacttcaaga

SEQ ID NO: 601716 - DNA, 120 bp, Artificial Sequence
  ENSG00000174799_5 (sequence is synthesized)
aaagaatttgcatgctgtagtacaaactccaggtggcaagaaaagaagtattgctttcaggcgccagcgtatgcaaattgatgaaccggttcctccctctgaagtcagttcatatccagt

SEQ ID NO: 601717 - DNA, 120 bp, Artificial Sequence
  ENSG00000174799_6 (sequence is synthesized)
tcctcaaccagatgacccttacattgcagacctccttcaagtggctgataacaggattcaagaacttcaacaggaagtccaccagctacaagaaaagttagcaatgatggaaagtggggt

SEQ ID NO: 601718 - DNA, 120 bp, Artificial Sequence
  ENSG00000174799_7 (sequence is synthesized)
gagagactatagcaagcagattgagctaagagaacgagagatagaacgactgtcagttgctttggatggtggtcggtcccctgatgtcctttctctggagtctagaaataaaaccaatga

SEQ ID NO: 601719 - DNA, 120 bp, Artificial Sequence
  ENSG00000174799_8 (sequence is synthesized)
aaagcttattgctcatttaaatattcaggttgactttcttcagcaagctaataaagacctggagaagcgtatacgagagcttatggaaaccaaggaaacagtgacatctgaagtcgttaa

SEQ ID NO: 601720 - DNA, 120 bp, Artificial Sequence
  ENSG00000174799_9 (sequence is synthesized)
tttaagtaacaaaaatgaaaaactctgccaagaattaactgaaatagatcagttagcacagcagttggaaagacataaagaagaagtgcttgagactgctgataaagagcttggggaagc

SEQ ID NO: 601721 - DNA, 120 bp, Artificial Sequence
  ENSG00000174799_10 (sequence is synthesized)
aaagaaagagattaaaagaaagctctctgaaatgcaggatcttgaagaaacaatggcaaaacttcagctggaattgaacttatgccagaaagaaaaggagagactgagtgatgaactcct

SEQ ID NO: 601722 - DNA, 120 bp, Artificial Sequence
  ENSG00000174799_11 (sequence is synthesized)
tgtaaaatcagacctagaaactgttgttcatcagcttgaacaagaaaagcaaagacttagcaaaaaagttgaaagttttgcagttacagaacgacaacttactctggaggttgagaggat

SEQ ID NO: 601723 - DNA, 120 bp, Artificial Sequence
  ENSG00000174799_12 (sequence is synthesized)
gagactagaacatggaataaaacgtcgagacaggtcaccttctcgtttagatacatttctgaaaggtatagaagaagaacgagattattataagaaagagctagagagactccaacatat

SEQ ID NO: 601724 - DNA, 120 bp, Artificial Sequence
  ENSG00000174799_13 (sequence is synthesized)
aatacagcgaagatcttgctctacaagttatagcgcacgtgaaaaaagttcaatatttagaacaccagaaaagggtgattacaattcagaaattcatcagatcacaagagaaagagatga

SEQ ID NO: 601725 - DNA, 120 bp, Artificial Sequence
  ENSG00000174799_14 (sequence is synthesized)
acttcagcgtatgctagaaagatttgaaaaatatatggaagatatacagtccaatgttaaattattgacagcagaaagagataaactaagtgtcttatataatgaagctcaggaagaatt

SEQ ID NO: 601726 - DNA, 120 bp, Artificial Sequence
  ENSG00000174799_15 (sequence is synthesized)
atctgccctaagaaaggaatccacccaaaccacagcaccccataatattgttagtcttatggaaaaggaaaaagaacttgcgttatctgacttaagaagaattatggcagaaaaggaagc

SEQ ID NO: 601727 - DNA, 120 bp, Artificial Sequence
  ENSG00000174799_16 (sequence is synthesized)
tttaagagaaaaattagagcatattgaagaagtgagtctttttggaaaatcagaattagagaaaactattgaacatttgacatgtgttaatcatcagcttgaaagcgaaaaatatgaatt

SEQ ID NO: 601728 - DNA, 120 bp, Artificial Sequence
  ENSG00000174799_17 (sequence is synthesized)
aaagtctaaagtgttaataatgaaagaaacaatagagtcgttagagaacaaattaaaagtccaagctcaaaaatttagccatgtggctggtgactcatctcatcagaaaacagaggtgaa

SEQ ID NO: 601729 - DNA, 120 bp, Artificial Sequence
  ENSG00000174799_18 (sequence is synthesized)
ctcacttaggatagtgaatgagcagctacagcggtcagttgatgactatcagcaccgactttccataaaaagaggtgaacttgaatcagcccaagcacaaattaaaatactggaggaaaa

SEQ ID NO: 601730 - DNA, 120 bp, Artificial Sequence
  ENSG00000174799_19 (sequence is synthesized)
gatagatgaactaaaccttaagatgacttcacaggatgaggaggctcatgtaatgaaaaagaccattggtgttattgataaagaaaaagactttctccaggagactgtagatgagaagac

SEQ ID NO: 601731 - DNA, 120 bp, Artificial Sequence
  ENSG00000174799_20 (sequence is synthesized)
agaaaagattgcaaatttgcaagaaaacctagctaataaagaaaaagctgttgctcaaatgaagataatgatctcagagtgtgaatcatctgtgaaccagctgaaagaaacattggttaa

SEQ ID NO: 601732 - DNA, 120 bp, Artificial Sequence
  ENSG00000174799_21 (sequence is synthesized)
tcgagatcgtgagataaacagcctccggcgccagcttgatgcagctcacaaagaactcgatgaagtaggaagatctagagaaatcgcttttaaggaaaacagaagactgcaagatgacct

SEQ ID NO: 601733 - DNA, 120 bp, Artificial Sequence
  ENSG00000174799_22 (sequence is synthesized)
ggctacaatggcaagagaaaatcaagaaatctcattggaattggaagcagcagtgcaagaaaaagaagaaatgaagagcagagttcataaatacataacagaggtgtcacgatgggagag

SEQ ID NO: 601734 - DNA, 120 bp, Artificial Sequence
  ENSG00000174799_23 (sequence is synthesized)
tgggaggtcaaagcccatcaagctgagggagaaagcagctcagttcgactggaacttctttctattgacactgagaggagacatcttcgagaaagagtggagctattagaaaaagaaatt

SEQ ID NO: 601735 - DNA, 120 bp, Artificial Sequence
  ENSG00000174799_24 (sequence is synthesized)
caagagcacataaatgcccatcatgcttatgaatctcagatctcatcaatggcaaaagccatgtctcgattagaagaagagctgagacatcaagaagatgagaaagcaacagtattaaat

SEQ ID NO: 601736 - DNA, 120 bp, Artificial Sequence
  ENSG00000174799_25 (sequence is synthesized)
gacttgtcatctcttagagaactttgcattaaacttgattcaggcaaagatattatgacccagcaattgaattcgaaaaaccttgagtttgagagggttgtggtggaattagaaaatgta

SEQ ID NO: 601737 - DNA, 120 bp, Artificial Sequence
  ENSG00000174799_26 (sequence is synthesized)
aagtcagagtcagacctactgaaaaaacaactttcaaatgagagacatacagttaaaaacctcgaatcattgttggctacaaacagagataaagaatttcattctcacttaacctcccac

SEQ ID NO: 601738 - DNA, 120 bp, Artificial Sequence
  ENSG00000174799_27 (sequence is synthesized)
gagaaggatacagaaatccagctacttaaggagaagttaaccctttctgaaagcaaattaactagtcaaagccgggaaaacaccatgcttcgagctaaagtggcacagttacaaacagat

SEQ ID NO: 601739 - DNA, 120 bp, Artificial Sequence
  ENSG00000174799_28 (sequence is synthesized)
tatgatgctctgaaaaggcagatctcaactgaaagatacgaacgagaacgagcaatccaagagatgcgtcgacatggtcttgctacaccaccccttagttccactctgaggtctccttca

SEQ ID NO: 601740 - DNA, 120 bp, Artificial Sequence
  ENSG00000174799_29 (sequence is synthesized)
cattctcctgaacatagaaatgtgtaattatcagaaagaataatggctttcaatgagttcctatgtggatttttaaaagaacagaacagtaatgaaatatttgaagtacttgttgctgaa

SEQ ID NO: 601741 - DNA, 120 bp, Artificial Sequence
  ENSG00000174799_30 (sequence is synthesized)
aatcatgaacatggacacaaattctacctctgtcaacttttatttaaatcagtgaatatgttaaaaagtttggtttaaaagaactatatctatatgtatattttcatatatatgacagaa

SEQ ID NO: 601742 - DNA, 120 bp, Artificial Sequence
  ENSG00000174799_31 (sequence is synthesized)
tgtttattaataagccatgatatgtgtatgtaaatattcttacagtacttgtttttagttgtcatgcctatgtttagaccatatcttaatgtattcacaaagaattatcaactttgatgc

SEQ ID NO: 601743 - DNA, 120 bp, Artificial Sequence
  ENSG00000174799_32 (sequence is synthesized)
tatgctgtcatgcttaactttttcttcttaaaattattcatagatctactgtctgttgtcaaggggaatatattcaggtctagtcttcttataatagcagaggtcttggtaaaataacta

SEQ ID NO: 601744 - DNA, 120 bp, Artificial Sequence
  ENSG00000174799_33 (sequence is synthesized)
ccatatataacgtgttattgccatctagaagaactatgatgagaaagatacatttatatattatgtaaaatgttaactatcatcatatggactctatgtaacacaaattcaaaagcaaac

SEQ ID NO: 601745 - DNA, 120 bp, Artificial Sequence
  ENSG00000174799_34 (sequence is synthesized)
taaaagctatatgcagagttttgtataaaacaatagaacagaaatttgggacatttttctaggaaataaaattcctcggtgtattaatctaaggtttcaaagtataaaagtatatggggt

SEQ ID NO: 601746 - DNA, 120 bp, Artificial Sequence
  ENSG00000174799_35 (sequence is synthesized)
ttgcactccagcctgggtgacagagtaacactctgtctcagaaaaaaaaaaaaagaaaaatatatggggtaaatacagtaaaacgttttgttaaattccaatatacattcagtgatacca

SEQ ID NO: 601747 - DNA, 120 bp, Artificial Sequence
  ENSG00000174799_36 (sequence is synthesized)
accactctttttcttctaagcctgtgtgttataatttaccagttccccaaaatgccatttttaacgccgaactgtgtaatatacatggaaaacagctttttacaattaattttcaaagtt

SEQ ID NO: 601748 - DNA, 120 bp, Artificial Sequence
  ENSG00000174799_37 (sequence is synthesized)
gtaattttaaagaatttgggtgtatacctatgttaatgaaacaacagaagtacaaaaaagaatatcagatacaaaaatcaatcgtgaagaaaatctgttcttaatatatttcattatgat

SEQ ID NO: 601749 - DNA, 120 bp, Artificial Sequence
  ENSG00000174799_38 (sequence is synthesized)
attatgattgaaaaacataaaaactaacataggaaagtgaatgatcagttacttatgatatattttgtttcctcttgtggtttaataaagtgaagtgtgtgtgtgtgtgtgtgtgtgtat

SEQ ID NO: 601750 - DNA, 120 bp, Artificial Sequence
  ENSG00000174799_39 (sequence is synthesized)
gtgggcagtgctctttttctaaaactaatatggcttatatatctgaattatgccctttttagtgtgtattaggatgtgggctggtttgcttttctaccacctttgtaattttatgtatcc

SEQ ID NO: 601751 - DNA, 120 bp, Artificial Sequence
  ENSG00000174799_40 (sequence is synthesized)
catctcctttgtgtgaattcatatattatagcaaaatacaagagacatgggactgtttgcaataccatatggaaatcttttaataaatatatgtaaataaaataaaaaatatttgtctcc

SEQ ID NO: 601752 - DNA, 120 bp, Artificial Sequence
  ENSG00000174799_41 (sequence is synthesized)
accttttccccaaaagcaacagcaagacatattttgttagatattttatttttaatgttttctataatttaaaaatgtatagcctgccaaatgttgttttcataaccatgatattgtttt

SEQ ID NO: 601753 - DNA, 120 bp, Artificial Sequence
  ENSG00000174799_42 (sequence is synthesized)
gaaaaaattttatcttaaaatactgaatgttctgaccttttatagatgtttttgattttgttttaaataattttaaattatggagcttgacctagatttgccaataaactttctagccta

SEQ ID NO: 601754 - DNA, 120 bp, Artificial Sequence
  ENSG00000174799_43 (sequence is synthesized)
attgctgatactgagtttttatacagctttcctctttttcatcaggtttgttaatagagttaatagctggaatggcttaggtggctttacttacttagcctgtctcttcaaaaaatttaa

SEQ ID NO: 601755 - DNA, 120 bp, Artificial Sequence
  ENSG00000174799_44 (sequence is synthesized)
tacttgggaggctgaggtgggaggattaatggattgaagagcacttatttactcgattctcttcactattcattgaggtgaatagtagttttttgtttggtttttcttttagctgaatca

SEQ ID NO: 601756 - DNA, 120 bp, Artificial Sequence
  ENSG00000174799_45 (sequence is synthesized)
aatagtagttttttgtttggtttttcttttagctgaatcatctatctccccaaatataattttataaccatattaccgttttcatctcaggagacattttattaagtgtgctatgtttta

SEQ ID NO: 601757 - DNA, 120 bp, Artificial Sequence
  ENSG00000174799_46 (sequence is synthesized)
taattgtatttttgtgatttttctactcttattatatattttgtcatattgaacaccagtctcttagaaagttactcttttgtgttgctaatttttttgtttgttttctctataagcaca

SEQ ID NO: 601758 - DNA, 120 bp, Artificial Sequence
  ENSG00000174799_47 (sequence is synthesized)
agtcctcatacaacagttttctgaagaatcaggagaattagtagatgcagagttatattataaccatagcaagctttgtcttttcataatttctattgatgtcttggctaaattttgatt

SEQ ID NO: 601759 - DNA, 120 bp, Artificial Sequence
  ENSG00000174799_48 (sequence is synthesized)
tgggtaattataggcttgttttcttaatatgcttcttgaaggttaaattgggtaacatgtttttcattttctgcattgactgcattttttttgagtgatctgcacacacaaatatagatg

SEQ ID NO: 601760 - DNA, 120 bp, Artificial Sequence
  ENSG00000174799_49 (sequence is synthesized)
caaatatagatgtaacttaggtgttggtataactaaatctttaaagtgttttgaagattagttggataaaaatggagttaaagaaaattgaccaggcgtggtggctcatgcctgtaatcg

SEQ ID NO: 601761 - DNA, 120 bp, Artificial Sequence
  ENSG00000174799_50 (sequence is synthesized)
tgctttggtaaagaaaagggtagctttccggaaaggctttcaatcatgaagcttatctgttttttccctgtcctcaatccaggccttccacacggcagaactctaaaggccaccactcac

SEQ ID NO: 601762 - DNA, 120 bp, Artificial Sequence
  ENSG00000174799_51 (sequence is synthesized)
gctgtactgttcaaagtcaacatttctgggggttttctctgtgaatggaattacagttttttgggtttctgatataattgagagacacttttcccttaagttctttttttttccccccct

SEQ ID NO: 601763 - DNA, 120 bp, Artificial Sequence
  ENSG00000174799_52 (sequence is synthesized)
aattaaatacctagcttttatctacttacgtagtggattcctttgccatgcatttgacctaaggctgaaagagcaggagagttccatgcagtatgacacaggaactttagaaattttggt

SEQ ID NO: 601764 - DNA, 120 bp, Artificial Sequence
  ENSG00000174799_53 (sequence is synthesized)
atgacagagttgcctgggctacaaacagaatatagtaagtaaaaaatatcaacagtagctctagaggagtgctgtcccatagaaatatgatatgagccatatatgtaatttaaatttttc

SEQ ID NO: 601765 - DNA, 120 bp, Artificial Sequence
  ENSG00000174799_54 (sequence is synthesized)
tagtagcagcttgatttaaaaaaataaaaagaggtgaaattaattgtaacaatatatttaccccagtatgtccaaaatattataatttcaaccagtaatgtttttacatacctatttttt

SEQ ID NO: 601766 - DNA, 120 bp, Artificial Sequence
  ENSG00000174799_55 (sequence is synthesized)
tgtttgtattatctttgaaatcctgtgtatattttacagttatagcacatctcagtttacactagccacatttcagatgctcagtagccacatgtggttgctagaggctactatattgaa

SEQ ID NO: 601767 - DNA, 120 bp, Artificial Sequence
  ENSG00000174799_56 (sequence is synthesized)
caacacagtctattatcatcttgatattcttgttgtatagaactctgtattgggaaaaagttcacacaaatttcttgtcctttctatgcttgaaaatcaaagtcaatggatatgtacttt

SEQ ID NO: 601768 - DNA, 120 bp, Artificial Sequence
  ENSG00000174799_57 (sequence is synthesized)
cattacactgcacatggtcagttttgtaaataacaatataaatttgcaaatataaaatagctgtagttttaatcttcaataatttttaaaatatagttttttgaagtattatttggaaag

SEQ ID NO: 601769 - DNA, 120 bp, Artificial Sequence
  ENSG00000174799_58 (sequence is synthesized)
taatgaatgatatgtgtagattgtgagagtgttcattaattctcctagcacacggtaagcttgatcccttttgatatctgcattcaggtttttggtttattttgtgtgtctgtttttgtt

SEQ ID NO: 601770 - DNA, 120 bp, Artificial Sequence
  ENSG00000174799_59 (sequence is synthesized)
tttttgctttggtaattcagggttttctgaagtgttgtttacaccctgtaaatgattgtagttgttttagttgtttgagtgtctctctgaagcacacctattcttaggatggatctccaa

SEQ ID NO: 601771 - DNA, 120 bp, Artificial Sequence
  ENSG00000174799_60 (sequence is synthesized)
actctagtctgttttccttcacgatttttatctctgcccctttatctatgcattgtgagagagcttttaaagtttcccctctatgtcatttttgctcaagaatcctttttttttgagaca

SEQ ID NO: 601772 - DNA, 69 bp, Artificial Sequence
  ENSG00000174799_61 (sequence is synthesized)
ctatgtcatttttgctcaagaatcctttttttttgagacagaatcccgtctccccagttcaagtgattc

SEQ ID NO: 601773 - DNA, 120 bp, Artificial Sequence
  ENSG00000174804_0 (sequence is synthesized)
gagagctgcgcagcgctggctgctggctggcctcgcggagacgccgaacggacgcggccggcgccggcttgtgggctcgccgcctgcagccatgaccctcgcagcctgtccctcggcctc

SEQ ID NO: 601774 - DNA, 120 bp, Artificial Sequence
  ENSG00000174804_1 (sequence is synthesized)
ggcccgggacgtctaaaatcccacacagtcgcgcgcagctgctggagagccggccgctgccccctcgtcgccgcatcacactcccgtcccgggagctgggagcagcgcgggcagccggcg

SEQ ID NO: 601775 - DNA, 120 bp, Artificial Sequence
  ENSG00000174804_2 (sequence is synthesized)
cgtcccgggagctgggagcagcgcgggcagccggcgcccccgtgcaaactgggggtgtctgccagagcagccccagccgctgccgctgctacccccgatgctggccatggcctggcgggg

SEQ ID NO: 601776 - DNA, 120 bp, Artificial Sequence
  ENSG00000174804_3 (sequence is synthesized)
cggtctcagtctggggttgctcctgcagttgctgctgctcctggggccggcgcggggcttcggggacgaggaagagcggcgctgcgaccccatccgcatctccatgtgccagaacctcgg

SEQ ID NO: 601777 - DNA, 120 bp, Artificial Sequence
  ENSG00000174804_4 (sequence is synthesized)
ctacaacgtgaccaagatgcccaacctggttgggcacgagctgcagacggacgccgagctgcagctgacaactttcacaccgctcatccagtacggctgctccagccagctgcagttctt

SEQ ID NO: 601778 - DNA, 120 bp, Artificial Sequence
  ENSG00000174804_5 (sequence is synthesized)
cctttgttctgtttatgtgccaatgtgcacagagaagatcaacatccccattggcccatgcggcggcatgtgtctttcagtcaagagacgctgtgaacccgtcctgaaggaatttggatt

SEQ ID NO: 601779 - DNA, 120 bp, Artificial Sequence
  ENSG00000174804_6 (sequence is synthesized)
tgcctggccagagagtctgaactgcagcaaattcccaccacagaacgaccacaaccacatgtgcatggaagggccaggtgatgaagaggtgcccttacctcacaaaacccccatccagcc

SEQ ID NO: 601780 - DNA, 120 bp, Artificial Sequence
  ENSG00000174804_7 (sequence is synthesized)
tggggaagagtgtcactctgtgggaaccaattctgatcagtacatctgggtgaaaaggagcctgaactgtgtgctcaagtgtggctatgatgctggcttatacagccgctcagccaagga

SEQ ID NO: 601781 - DNA, 120 bp, Artificial Sequence
  ENSG00000174804_8 (sequence is synthesized)
gttcactgatatctggatggctgtgtgggccagcctgtgtttcatctccactgccttcacagtactgaccttcctgatcgattcttctaggttttcctaccctgagcgccccatcatatt

SEQ ID NO: 601782 - DNA, 120 bp, Artificial Sequence
  ENSG00000174804_9 (sequence is synthesized)
tctcagtatgtgctataatatttatagcattgcttatattgtcaggctgactgtaggccgggaaaggatatcctgtgattttgaagaggcagcagaacctgttctcatccaagaaggact

SEQ ID NO: 601783 - DNA, 120 bp, Artificial Sequence
  ENSG00000174804_10 (sequence is synthesized)
taagaacacaggatgtgcaataattttcttgctgatgtacttttttggaatggccagctccatttggtgggttattctgacactcacttggtttttggcagcaggactcaaatggggtca

SEQ ID NO: 601784 - DNA, 120 bp, Artificial Sequence
  ENSG00000174804_11 (sequence is synthesized)
tgaagccattgaaatgcacagctcttatttccacattgcagcctgggccatccccgcagtgaaaaccattgtcatcttgattatgagactggtggatgcagatgaactgactggcttgtg

SEQ ID NO: 601785 - DNA, 120 bp, Artificial Sequence
  ENSG00000174804_12 (sequence is synthesized)
ctatgttggaaaccaaaatctcgatgccctcaccgggttcgtggtggctcccctctttacttatttggtcattggaactttgttcattgctgcaggtttggtggccttgttcaaaattcg

SEQ ID NO: 601786 - DNA, 120 bp, Artificial Sequence
  ENSG00000174804_13 (sequence is synthesized)
gtcaaatcttcaaaaggatgggacaaagacagacaagttagaaagactgatggtcaagattggggtgttctcagtactgtacacagttcctgcaacgtgtgtgattgcctgttattttta

SEQ ID NO: 601787 - DNA, 120 bp, Artificial Sequence
  ENSG00000174804_14 (sequence is synthesized)
tgaaatctccaactgggcactttttcggtattctgcagatgattccaacatggctgttgaaatgttgaaaatttttatgtctttgttggtgggcatcacttcaggcatgtggatttggtc

SEQ ID NO: 601788 - DNA, 120 bp, Artificial Sequence
  ENSG00000174804_15 (sequence is synthesized)
tgccaaaactcttcacacgtggcagaagtgttccaacagattggtgaattctggaaaggtaaagagagagaagagaggaaatggttgggtgaagcctggaaaaggcagtgagactgtggt

SEQ ID NO: 601789 - DNA, 120 bp, Artificial Sequence
  ENSG00000174804_16 (sequence is synthesized)
ataaggctagtcagcctccatgctttcttcattttgaaggggggaatgccagcattttggaggaaattctactaaaagttttatgcagtgaatctcagtttgaacaaactagcaacaatt

SEQ ID NO: 601790 - DNA, 120 bp, Artificial Sequence
  ENSG00000174804_17 (sequence is synthesized)
aagtgacccccgtcaacccactgcctcccaccccgaccccagcatcaaaaaaccaatgattttgctgcagactttggaatgatccaaaatggaaaagccagttagaggctttcaaagctg

SEQ ID NO: 601791 - DNA, 120 bp, Artificial Sequence
  ENSG00000174804_18 (sequence is synthesized)
tgaaaaatcaaaacgttgatcactttagcaggttgcagcttggagcgtggaggtcctgcctagattccaggaagtccagggcgatactgttttcccctgcagggtgggatttgagctgtg

SEQ ID NO: 601792 - DNA, 120 bp, Artificial Sequence
  ENSG00000174804_19 (sequence is synthesized)
agttggtaactagcagggagaaatattaacttttttaaccctttaccattttaaatactaactgggtctttcagatagcaaagcaatctataaacactggaaacgctgggttcagaaaag

SEQ ID NO: 601793 - DNA, 120 bp, Artificial Sequence
  ENSG00000174804_20 (sequence is synthesized)
tgttacaagagttttatagtttggctgatgtaacataaacatcttctgtggtgcgctgtctgctgtttagaactttgtggactgcactcccaagaagtggtgttagaatctttcagtgcc

SEQ ID NO: 601794 - DNA, 120 bp, Artificial Sequence
  ENSG00000174804_21 (sequence is synthesized)
tttgtcataaaacagttatttgaacaaacaaaagtactgtactcacacacataaggtatccagtggatttttcttctctgtcttcctctcttaaatttcaacatctctcttcttggctgc

SEQ ID NO: 601795 - DNA, 120 bp, Artificial Sequence
  ENSG00000174804_22 (sequence is synthesized)
tgctgttttcttcattttatgttaatgactcaaaaaaggtatttttatagaatttttgtactgcagcatgcttaaagaggggaaaaggaagggtgattcactttctgacaatcacttaat

SEQ ID NO: 601796 - DNA, 120 bp, Artificial Sequence
  ENSG00000174804_23 (sequence is synthesized)
tcagaggaaaatgagatttactaagttgacttacctgacggaccccagagacctattgcattgagcagtggggacttaatatattttacttgtgtgattgcatctatgcagacgccagtc

SEQ ID NO: 601797 - DNA, 120 bp, Artificial Sequence
  ENSG00000174804_24 (sequence is synthesized)
tggaagagctgaaatgttaagtttcttggcaactttgcattcacacagattagctgtgtaatttttgtgtgtcaattacaattaaaagcacattgttggaccatgacatagtatactcaa

SEQ ID NO: 601798 - DNA, 120 bp, Artificial Sequence
  ENSG00000174804_25 (sequence is synthesized)
ctgactttaaaactatggtcaacttcaacttgcattctcagaatgatagtgcctttaaaaatttttttattttttaaagcataagaatgttatcagaatctggtctacttaggacaatgg

SEQ ID NO: 601799 - DNA, 120 bp, Artificial Sequence
  ENSG00000174804_26 (sequence is synthesized)
agactttttcagttttataaagggaactgaggacagctaatccaactacttggtgcgtaattgtttcctagtaattggcaaaggctccttgtaagatttcactggaggcagtgtggcctg

SEQ ID NO: 601800 - DNA, 120 bp, Artificial Sequence
  ENSG00000174804_27 (sequence is synthesized)
gagtatttatatggtgcttaatgaatctccagaatgccagccagaagcctgattggttagtagggaataaagtgtagaccatatgaaatgaactgcaaactctaatagcccaggtcttaa

SEQ ID NO: 601801 - DNA, 120 bp, Artificial Sequence
  ENSG00000174804_28 (sequence is synthesized)
ttgcctttagcagaggtatccaaagcttttaaaatttatgcatacgttcttcacaagggggtacccccagcagcctctcgaaaattgcacttctcttaaaactgtaactggcctttctct

SEQ ID NO: 601802 - DNA, 120 bp, Artificial Sequence
  ENSG00000174804_29 (sequence is synthesized)
taccttgccttaggcgttctaatcatgagatcttggggacaaattgactatgtcacaggttgctctccttgtaactcatacctgtctgcttcagcaactgctttgcaatgacatttattt

SEQ ID NO: 601803 - DNA, 120 bp, Artificial Sequence
  ENSG00000174804_30 (sequence is synthesized)
ctttgtggaaaaacatttccagggactcaaaattccaaaaaggtggtcaaattctggaagtaagcatttcctcttttttaaaaatttggtttgagccttatgcccatagtttgacatttc

SEQ ID NO: 601804 - DNA, 120 bp, Artificial Sequence
  ENSG00000174804_31 (sequence is synthesized)
cctttcttctttcctttttgtttttgtgtggttcttgagctctctgacatcaagatgcatgtaaagtcgattgtatgttttggaaggcaaagtcttggcttttgagactgaagttaagtg

SEQ ID NO: 601805 - DNA, 120 bp, Artificial Sequence
  ENSG00000174804_32 (sequence is synthesized)
ggcacaggtggcccctgctgctgtgcccagtctgagtaccttggctagactctaggtcaggctccaggagcatgagaattgatccccagaagaaccattttaactccatctgatactcca

SEQ ID NO: 601806 - DNA, 120 bp, Artificial Sequence
  ENSG00000174804_33 (sequence is synthesized)
ttgcctatgaaatgtaaaatgtgaactccctgtgctgcttgtagacagttcccataactgtccacggccctggagcacgcacccaggggcagagcctgcccttactcacgctctgctctg

SEQ ID NO: 601807 - DNA, 120 bp, Artificial Sequence
  ENSG00000174804_34 (sequence is synthesized)
gtgtcttgggagttgtgcagggactctggcccaggcaggggaaggaagaccaggcggtaggggactggtcttgctgttagagtatagaggtttgtaatgcagttttcttcataatgtgtc

SEQ ID NO: 601808 - DNA, 120 bp, Artificial Sequence
  ENSG00000174804_35 (sequence is synthesized)
agtgattgtgtgaccaaggcagcatctagcagaaagccaggcatggagtaggtgatcgatacttgtcaatgactaaataataacaataaaagagcacttgggtgaatctgggcacctgat

SEQ ID NO: 601809 - DNA, 120 bp, Artificial Sequence
  ENSG00000174804_36 (sequence is synthesized)
ttctgagttttgagttctggagctagtgttttgacaatgctttgggttttgacatgccttttccacaaatctcttgccttttcagggcaaagtgtatttgatcagaagtggccatttgga

SEQ ID NO: 601810 - DNA, 120 bp, Artificial Sequence
  ENSG00000174804_37 (sequence is synthesized)
ttagtagccttagcaatgctacagggttataggcctctcctttcacattccagacaatggagagtgtttatggtttcaggaaaagaactttgtggctgaggggtcagttaccagtgacct

SEQ ID NO: 601811 - DNA, 120 bp, Artificial Sequence
  ENSG00000174804_38 (sequence is synthesized)
tcaatcaactccatcacttcttaaatcggtatttgttaaaaaaatcagttattttatttattgagtgccgactgtagtaaagccctgaaatagataatctctgttcttctaactgatcta

SEQ ID NO: 601812 - DNA, 120 bp, Artificial Sequence
  ENSG00000174804_39 (sequence is synthesized)
ggatggggacgcacccaggtctgctgaactttactgttcctctgggaaaggagcagggacctctggaattcccatctgtttcactgtctccattccataaatctcttcctgtgtgagcca

SEQ ID NO: 601813 - DNA, 120 bp, Artificial Sequence
  ENSG00000174804_40 (sequence is synthesized)
ccacacccagcctgggtctctctacttttaacacatctctcatccctttcccaggattccttccaagtcagttacaggtggttttaacagaaagcatcagctctgcttcgtgacagtctc

SEQ ID NO: 601814 - DNA, 120 bp, Artificial Sequence
  ENSG00000174804_41 (sequence is synthesized)
tggagaaatcccttaggaagactatgagagtaggccacaaggacatgggcccacacatctgctttggctttgccggcaattcagggcttggggtattccatgtgacttgtataggtatat

SEQ ID NO: 601815 - DNA, 120 bp, Artificial Sequence
  ENSG00000174804_42 (sequence is synthesized)
ttgaggacagcatcttgctagagaaaaggtgagggttgtttttctttctctgaaacctacagtaaatgggtatgattgtagcttcctcagaaatcccttggcctccagagattaaacatg

SEQ ID NO: 601816 - DNA, 120 bp, Artificial Sequence
  ENSG00000174804_43 (sequence is synthesized)
gtgcaatggcacctctgtccaacctcctttctggtagattcctttctcctgcttcatataggccaaacctcagggcaagggaacatgggggtagagtggtgctggccagaaccatctgct

SEQ ID NO: 601817 - DNA, 120 bp, Artificial Sequence
  ENSG00000174804_44 (sequence is synthesized)
tgagctacttggttgattcatatcctctttcctttatggagacccatttcctgatctctgagactgttgctgaactggcaacttacttgggcctgaaactggagaaggggtgacattttt

SEQ ID NO: 601818 - DNA, 120 bp, Artificial Sequence
  ENSG00000174804_45 (sequence is synthesized)
ttaatttcagagatgctttctgattttcctctcccaggtcactgtctcacctgcactctccaaactcaggttccgggaagcttgtgtgtctagatactgaattgagattctgttcagcac

SEQ ID NO: 601819 - DNA, 120 bp, Artificial Sequence
  ENSG00000174804_46 (sequence is synthesized)
cttttagctctatactctctggctcccctcatcctcatggtcactgaattaaatgcttattgtattgagaaccaagatgggacctgaggacacaaagatgagctcaacagtctcagccct

SEQ ID NO: 601820 - DNA, 120 bp, Artificial Sequence
  ENSG00000174804_47 (sequence is synthesized)
agaggaatagactcagggatttcaccaggtcggtgcagtatttgatttctggtgaggtgaccacagctgcagttagggaagggagccattgagcacagactttggaaggaaccttttttt

SEQ ID NO: 601821 - DNA, 66 bp, Artificial Sequence
  ENSG00000174804_48 (sequence is synthesized)
gagctgggactacaggtgcgtgctaccacgcccagctacttctgtatttttagtagagacggggtt

SEQ ID NO: 601822 - DNA, 84 bp, Artificial Sequence
  ENSG00000174804_49 (sequence is synthesized)
ggaaggaacctcttaaaatcagtttacgtcttgtattttgttctgtgatggaggacactggagagagttgctattccagtcaat

SEQ ID NO: 601823 - DNA, 120 bp, Artificial Sequence
  ENSG00000174804_50 (sequence is synthesized)
gtgatggaggacactggagagagttgctattccagtcaatcatgtcgagtcactggactctgaaaatcctattggttcctttattttatttgagtttagagttcccttctgggtttgtat

SEQ ID NO: 601824 - DNA, 120 bp, Artificial Sequence
  ENSG00000174804_51 (sequence is synthesized)
tatgtctggcaaatgacctgggttatcacttttcctccagggttagatcatagatcttggaaactccttagagagcattttgctcctaccaaggatcagatactggagccccacataata

SEQ ID NO: 601825 - DNA, 120 bp, Artificial Sequence
  ENSG00000174804_52 (sequence is synthesized)
gatttcatttcactctagcctacatagagctttctgttgctgtctcttgccatgcacttgtgcggtgattacacacttgacagtaccaggagacaaatgacttacagatcccccgacatg

SEQ ID NO: 601826 - DNA, 120 bp, Artificial Sequence
  ENSG00000174804_53 (sequence is synthesized)
cctcttccccttggcaagctcagttgccctgatagtagcatgtttctgtttctgatgtaccttttttctcttcttctttgcatcagccaattcccagaatttccccaggcaatttgtaga

SEQ ID NO: 601827 - DNA, 120 bp, Artificial Sequence
  ENSG00000174804_54 (sequence is synthesized)
ggacctttttggggtcctatatgagccatgtcctcaaagcttttaaacctccttgctctcctacaatattcagtacatgaccactgtcatcctagaaggcttctgaaaagaggggcaaga

SEQ ID NO: 601828 - DNA, 120 bp, Artificial Sequence
  ENSG00000174804_55 (sequence is synthesized)
gccactctgcgccacaaaggttgggtccatcttctctccgaggttgtgaaagttttcaaattgtactaataggctggggccctgacttggctgtgggctttgggaggggtaagctgcttt

SEQ ID NO: 601829 - DNA, 120 bp, Artificial Sequence
  ENSG00000174804_56 (sequence is synthesized)
ctagatctctcccagtgaggcatggaggtgtttctgaattttgtctacctcacagggatgttgtgaggcttgaaaaggtcaaaaaatgatggccccttgagctctttgtaagaaaggtag

SEQ ID NO: 601830 - DNA, 120 bp, Artificial Sequence
  ENSG00000174804_57 (sequence is synthesized)
atgaaatatcggatgtaatctgaaaaaaagataaaatgtgacttcccctgctctgtgcagcagtcgggctggatgctctgtggcctttcttgggtcctcatgccaccccacagctccagg

SEQ ID NO: 601831 - DNA, 120 bp, Artificial Sequence
  ENSG00000174804_58 (sequence is synthesized)
aaccttgaagccaatctgggggactttcagatgtttgacaaagaggtaccaggcaaacttcctgctacacatgccctgaatgaattgctaaatttcaaaggaaatggaccctgcttttaa

SEQ ID NO: 601832 - DNA, 120 bp, Artificial Sequence
  ENSG00000174804_59 (sequence is synthesized)
ggatgtacaaaagtatgtctgcatcgatgtctgtactgtaaatttctaatttatcactgtacaaagaaaaccccttgctatttaattttgtattaaaggaaaataaagttttgtttgtta

SEQ ID NO: 601833 - DNA, 120 bp, Artificial Sequence
  ENSG00000174807_0 (sequence is synthesized)
ggcatcgcgatgctgctgcgcctgttgctggcctgggcggccgcagggcccacactgggccaggacccctgggctgctgagccccgtgccgcctgcggccccagcagctgctacgctctc

SEQ ID NO: 601834 - DNA, 120 bp, Artificial Sequence
  ENSG00000174807_1 (sequence is synthesized)
acgctctcttcccacggcgccgcaccttcctggaggcctggcgggcctgccgcgagctggggggcgacctggccactcctcggacccccgaggaggcccagcgtgtggacagcctggtgg

SEQ ID NO: 601835 - DNA, 120 bp, Artificial Sequence
  ENSG00000174807_2 (sequence is synthesized)
gtgcgggcccagccagccggctgctgtggatcgggctgcagcggcaggcccggcaatgccagctgcagcgcccactgcgcggcttcacgtggaccacaggggaccaggacacggctttca

SEQ ID NO: 601836 - DNA, 120 bp, Artificial Sequence
  ENSG00000174807_3 (sequence is synthesized)
ccaactgggcccagccagcctctggaggcccctgcccggcccagcgctgtgtggccctggaggcaagtggcgagcaccgctggctggagggctcgtgcacgctggctgtcgacggctacc

SEQ ID NO: 601837 - DNA, 120 bp, Artificial Sequence
  ENSG00000174807_4 (sequence is synthesized)
tgtgccagtttggcttcgagggcgcctgcccggcgctgcaagatgaggcgggccaggccggcccagccgtgtataccacgcccttccacctggtctccacagagtttgagtggctgccct

SEQ ID NO: 601838 - DNA, 120 bp, Artificial Sequence
  ENSG00000174807_5 (sequence is synthesized)
tcggctctgtggccgctgtgcagtgccaggctggcaggggagcctctctgctctgcgtgaagcagcctgagggaggtgtgggctggtcacgggctgggcccctgtgcctggggactggct

SEQ ID NO: 601839 - DNA, 120 bp, Artificial Sequence
  ENSG00000174807_6 (sequence is synthesized)
gcagccctgacaacgggggctgcgaacacgaatgtgtggaggaggtggatggtcacgtgtcctgccgctgcactgagggcttccggctggcagcagacgggcgcagttgcgaggacccct

SEQ ID NO: 601840 - DNA, 120 bp, Artificial Sequence
  ENSG00000174807_7 (sequence is synthesized)
gtgcccaggctccgtgcgagcagcagtgtgagcccggtgggccacaaggctacagctgccactgtcgcctgggtttccggccagcggaggatgatccgcaccgctgtgtggacacagatg

SEQ ID NO: 601841 - DNA, 120 bp, Artificial Sequence
  ENSG00000174807_8 (sequence is synthesized)
agtgccagattgccggtgtgtgccagcagatgtgtgtcaactacgttggtggcttcgagtgttattgtagcgagggacatgagctggaggctgatggcatcagctgcagccctgcagggg

SEQ ID NO: 601842 - DNA, 120 bp, Artificial Sequence
  ENSG00000174807_9 (sequence is synthesized)
ccatgggtgcccaggcttcccaggacctcggagatgagttgctggatgacggggaggatgaggaagatgaagacgaggcctggaaggccttcaacggtggctggacggagatgcctggga

SEQ ID NO: 601843 - DNA, 120 bp, Artificial Sequence
  ENSG00000174807_10 (sequence is synthesized)
ctttgccctggcctatagaccgagcttcccagaggacagagagccacagataccctacccggagcccacctggccacccccgctcagtgcccccagggtcccctaccactcctcagtgct

SEQ ID NO: 601844 - DNA, 120 bp, Artificial Sequence
  ENSG00000174807_11 (sequence is synthesized)
ctccgtcacccggcctgtggtggtctctgccacgcatcccacactgccttctgcccaccagcctcctgtgatccctgccacacacccagctttgtcccgtgaccaccagatccccgtgat

SEQ ID NO: 601845 - DNA, 120 bp, Artificial Sequence
  ENSG00000174807_12 (sequence is synthesized)
cgcagccaactatccagatctgccttctgcctaccaacccggtattctctctgtctctcattcagcacagcctcctgcccaccagccccctatgatctcaaccaaatatccggagctctt

SEQ ID NO: 601846 - DNA, 120 bp, Artificial Sequence
  ENSG00000174807_13 (sequence is synthesized)
ccctgcccaccagtcccccatgtttccagacacccgggtcgctggcacccagaccaccactcatttgcctggaatcccacctaaccatgcccctctggtcaccaccctcggtgcccagct

SEQ ID NO: 601847 - DNA, 120 bp, Artificial Sequence
  ENSG00000174807_14 (sequence is synthesized)
accccctcaagccccagatgcccttgtcctcagaacccaggccacccagcttcccattatcccaactgcccagccctctctgaccaccacctccaggtcccctgtgtctcctgcccatca

SEQ ID NO: 601848 - DNA, 120 bp, Artificial Sequence
  ENSG00000174807_15 (sequence is synthesized)
aatctctgtgcctgctgccacccagcccgcagccctccccaccctcctgccctctcagagccccactaaccagacctcacccatcagccctacacatccccattccaaagccccccaaat

SEQ ID NO: 601849 - DNA, 120 bp, Artificial Sequence
  ENSG00000174807_16 (sequence is synthesized)
cccaagggaagatggccccagtcccaagttggccctgtggctgccctcaccagctcccacagcagccccaacagccctgggggaggctggtcttgccgagcacagccagagggatgaccg

SEQ ID NO: 601850 - DNA, 120 bp, Artificial Sequence
  ENSG00000174807_17 (sequence is synthesized)
gtggctgctggtggcactcctggtgccaacgtgtgtctttttggtggtcctgcttgcactgggcatcgtgtactgcacccgctgtggcccccatgcacccaacaagcgcatcactgactg

SEQ ID NO: 601851 - DNA, 120 bp, Artificial Sequence
  ENSG00000174807_18 (sequence is synthesized)
ctatcgctgggtcatccatgctgggagcaagagcccaacagaacccatgccccccaggggcagcctcacaggggtgcagacctgcagaaccagcgtgtgatggggtgcagacccccctca

SEQ ID NO: 601852 - DNA, 120 bp, Artificial Sequence
  ENSG00000174807_19 (sequence is synthesized)
tggagtatggggcgctggacacatggccggggctgcaccagggacccatgggggctgcccagctggacagatggcttcctgctccccaggcccagccagggtcctctctcaaccactaga

SEQ ID NO: 601853 - DNA, 120 bp, Artificial Sequence
  ENSG00000174807_20 (sequence is synthesized)
cttggctctcaggaactctgcttcctggcccagcgctcgtgaccaaggatacaccaaagcccttaagacctcagggggcgggtgctggggtcttctccaataaatggggtgtcaacctta

SEQ ID NO: 601854 - DNA, 120 bp, Artificial Sequence
  ENSG00000174808_0 (sequence is synthesized)
attcacggagccggccggcctcccgccctgggtgtttccctgccttgtagccagggtgccagcctgggaagtagtttcgtttccttctgcctccgggattagtttccaggcaccctctca

SEQ ID NO: 601855 - DNA, 120 bp, Artificial Sequence
  ENSG00000174808_1 (sequence is synthesized)
ggcgcccgaggcccgggaagggggcgaagaaggagggagacttgtctaggggctgcccggcccggcagagcggggttgatggaccgggccgcccggtgcagcggcgccagctccctgcca

SEQ ID NO: 601856 - DNA, 120 bp, Artificial Sequence
  ENSG00000174808_2 (sequence is synthesized)
ctgctcctggcccttgccctgggtctagtgatccttcactgtgtggtggcagatgggaattccaccagaagtcctgaaactaatggcctcctctgtggagaccctgaggaaaactgtgca

SEQ ID NO: 601857 - DNA, 120 bp, Artificial Sequence
  ENSG00000174808_3 (sequence is synthesized)
gctaccaccacacaatcaaagcggaaaggccacttctctaggtgccccaagcaatacaagcattactgcatcaaagggagatgccgcttcgtggtggccgagcagacgccctcctgtgtc

SEQ ID NO: 601858 - DNA, 120 bp, Artificial Sequence
  ENSG00000174808_4 (sequence is synthesized)
tgtgatgaaggctacattggagcaaggtgtgagagagttgacttgttttacctaagaggagacagaggacagattctggtgatttgtttgatagcagttatggtagtttttattattttg

SEQ ID NO: 601859 - DNA, 120 bp, Artificial Sequence
  ENSG00000174808_5 (sequence is synthesized)
gtcatcggtgtctgcacatgctgtcaccctcttcggaaacgtcgtaaaagaaagaagaaagaagaagaaatggaaactctgggtaaagatataactcctatcaatgaagatattgaagag

SEQ ID NO: 601860 - DNA, 120 bp, Artificial Sequence
  ENSG00000174808_6 (sequence is synthesized)
acaaatattgcttaaaaggctatgaagttacctccaggttggtggcaagctgcaaagtgccttgctcatttgaaaatggacagaatgtgtctcaggaaaacagctagtagacatgaattt

SEQ ID NO: 601861 - DNA, 120 bp, Artificial Sequence
  ENSG00000174808_7 (sequence is synthesized)
taaataatgtatttactttttatttgcaactttagtttgtgttattattttttaataagaacattaattatatgtatattgtctagtaattgggaaaaaagcaactggttaggtagcaac

SEQ ID NO: 601862 - DNA, 120 bp, Artificial Sequence
  ENSG00000174808_8 (sequence is synthesized)
aacagaagggaaatttcaataacctttcacttaagtattgtcaccaggattactagtcaaacaaaaaagaaaagtagaaaggaggttaggtcttaggaattgaattaataataaagctac

SEQ ID NO: 601863 - DNA, 120 bp, Artificial Sequence
  ENSG00000174808_9 (sequence is synthesized)
catttatcaagcatttaccatgtgctaataagtttgaaatatattatttcctttattcctttcagcaatccatgagatagctattataatcctcatttcctacatatggaaacagggcca

SEQ ID NO: 601864 - DNA, 120 bp, Artificial Sequence
  ENSG00000174808_10 (sequence is synthesized)
aagaagtcaagtcaaataatctaatccagatttagagagttggagattggtagagacagactagaaatcaagatttatctaaatcaaaatctatgctcttaaccatcatttttgttagtc

SEQ ID NO: 601865 - DNA, 120 bp, Artificial Sequence
  ENSG00000174808_11 (sequence is synthesized)
cctaactcaataatataacccaaggttttatactgaactgtgttttggtatgattgtgagatgtcaagaccgtcttcccacaggcacacagaatgagaaatcctggcctatattgctgtt

SEQ ID NO: 601866 - DNA, 120 bp, Artificial Sequence
  ENSG00000174808_12 (sequence is synthesized)
accatcatgctttctatagaattggcttttattatgtttctttgctcctttataaattctcaatgatgtgactacatttttacattattaaagcaaatagattggccccataactaggga

SEQ ID NO: 601867 - DNA, 120 bp, Artificial Sequence
  ENSG00000174808_13 (sequence is synthesized)
aatgaatagagatggaaaagtaaatgcttggcattccttaagccctgggtaagtgtttatgctcaataaaatataaataatattactgaaagaggctgtttatatgggagtaatggtcag

SEQ ID NO: 601868 - DNA, 120 bp, Artificial Sequence
  ENSG00000174808_14 (sequence is synthesized)
tgacaacactggagagaccaggtagggaccggttgtgaccatatcctcatttatgttcttgatgacagcatatatgattgctctcaggtaaattttgatgcagtaaattcatgaccataa

SEQ ID NO: 601869 - DNA, 120 bp, Artificial Sequence
  ENSG00000174808_15 (sequence is synthesized)
catctattacttgggaccatcttgccaagtgctcctttactccatgaaatatttaataaacactgctttaaacctggaaaagcacaatctacatttagtgaatatttcatagaatattta

SEQ ID NO: 601870 - DNA, 120 bp, Artificial Sequence
  ENSG00000174808_16 (sequence is synthesized)
actttttacattgattacgtggttcacttacaaaaatcgatggaagatgccccccaacttgtgcctgtcggccaagcagcttcttttttagaatctttgcaaattttactttgcaatgta

SEQ ID NO: 601871 - DNA, 120 bp, Artificial Sequence
  ENSG00000174808_17 (sequence is synthesized)
gattccatagtgaagtggagaattcagacaaatgctgaaatcgcatattaccttctagcatccatggtgttttgagtgaagctggggctgtacttacatatgatacataaatagctcccc

SEQ ID NO: 601872 - DNA, 120 bp, Artificial Sequence
  ENSG00000174808_18 (sequence is synthesized)
tattagtaaaagctaagccaaacaactgataattttcaaaatctattttttctcctgatttaatggtcatacttgaaacacaattatatccaactgatccatgttgtatatgccttattt

SEQ ID NO: 601873 - DNA, 120 bp, Artificial Sequence
  ENSG00000174808_19 (sequence is synthesized)
tcaaaagtctcatttaagctcattcatgccctttctcttatgtagtcttcttcgatacgaaaggagcttggaataaatatccattagagcttttaaaaacacaaaacaatgctttaatgt

SEQ ID NO: 601874 - DNA, 120 bp, Artificial Sequence
  ENSG00000174808_20 (sequence is synthesized)
ttcttttttcctggactgagtttggctgaccaacaaaatctctcaagccattttgttttgatcctaaaatatcaatggtggctctcgaaatttggtagatctgatatcaagaaagaattt

SEQ ID NO: 601875 - DNA, 120 bp, Artificial Sequence
  ENSG00000174808_21 (sequence is synthesized)
agatctgatatcaagaaagaatttcaaagatttttatatcttttcaaaatgtattttatagttgctttgcatacactaaataactttgtttatgtaaactgtcaatattatcatgtaata

SEQ ID NO: 601876 - DNA, 120 bp, Artificial Sequence
  ENSG00000174827_0 (sequence is synthesized)
tggtgcgatctcggctcacagcaacctctctgcctccagaaatgacctccaccttcaacccccgagaatgtaaactgtccaagcaagaagggcaaaactatggcttcttcctgcgaattg

SEQ ID NO: 601877 - DNA, 120 bp, Artificial Sequence
  ENSG00000174827_1 (sequence is synthesized)
agggcaaaactatggcttcttcctgcgaattgagaaggacaccgagggccacctggtccgggtggttgagaagtgtagcccagcagagaaggctggccttcaagatggagacagagttct

SEQ ID NO: 601878 - DNA, 120 bp, Artificial Sequence
  ENSG00000174827_2 (sequence is synthesized)
taggatcaatggtgtctttgtggacaaagaagaacatatgcaggttgtggatctggtcagaaagagtgggaattcagtgactttactagttctggatggggattcctatgagaaagcagt

SEQ ID NO: 601879 - DNA, 120 bp, Artificial Sequence
  ENSG00000174827_3 (sequence is synthesized)
gaaaacacgggtggacttgaaagagttgggtcaaagtcagaaggagcaaggtttgagtgataatatactttcccctgtgatgaatggaggtgtgcaaacttggacccagccccggctctg

SEQ ID NO: 601880 - DNA, 120 bp, Artificial Sequence
  ENSG00000174827_4 (sequence is synthesized)
ctatctcgtgaaggaaggaggcagctatggcttctctctgaaaactgtccaaggtaaaaagggggtgtacatgactgatattacacctcaaggtgtggctatgagagctggagttctggc

SEQ ID NO: 601881 - DNA, 120 bp, Artificial Sequence
  ENSG00000174827_5 (sequence is synthesized)
tgatgatcacttgattgaagtgaatggagagaatgtagaggatgccagccatgaggaagtggttgaaaaggtgaagaagtcaggaagccgtgtcatgttcctgctggtggacaaagaaac

SEQ ID NO: 601882 - DNA, 120 bp, Artificial Sequence
  ENSG00000174827_6 (sequence is synthesized)
tgacaagcgtcatgttgagcagaagatacaattcaaaagagaaacagccagtttgaaactgttaccccaccagccccgaattgtggagatgaagaaaggaagcaatggctatggtttcta

SEQ ID NO: 601883 - DNA, 120 bp, Artificial Sequence
  ENSG00000174827_7 (sequence is synthesized)
tctgagggcaggctcagaacagaaaggtcaaatcatcaaggacatagattctggaagtccagcagaggaggctggcttgaagaacaatgatctggtagttgctgtcaacggcgagtctgt

SEQ ID NO: 601884 - DNA, 120 bp, Artificial Sequence
  ENSG00000174827_8 (sequence is synthesized)
gtggagatcagacttcactgttggtggtagacaaagagacggacaacatgtacagactggctcatttttctccatttctctactatcaaagtcaagaactgcccaatggctctgtcaagg

SEQ ID NO: 601885 - DNA, 120 bp, Artificial Sequence
  ENSG00000174827_9 (sequence is synthesized)
aggctccagctcctactcccacttctctggaagtctcaagtccaccagatactacagaggaagtagatcataagcctaaactctgcaggctggctaaaggtgaaaatggctatggctttc

SEQ ID NO: 601886 - DNA, 120 bp, Artificial Sequence
  ENSG00000174827_10 (sequence is synthesized)
acttaaatgcgattcggggtctgccaggctcattcatcaaagaggtacagaagggcggtcctgctgacttggctgggctagaggatgaggatgtcatcattgaagtgaatggggtgaatg

SEQ ID NO: 601887 - DNA, 120 bp, Artificial Sequence
  ENSG00000174827_11 (sequence is synthesized)
tgctagatgaaccctatgagaaggtggtggatagaatccagagcagtgggaagaatgtcacacttctagtctgtggaaagaaggcctatgattatttccaagctaagaaaatccctattg

SEQ ID NO: 601888 - DNA, 120 bp, Artificial Sequence
  ENSG00000174827_12 (sequence is synthesized)
tttcctccctggctgatccacttgacacccctccagattctaaagaaggaatagtggtggagtcaaaccatgactcgcacatggcaaaagaacgggcccacagtacagcctcacattctt

SEQ ID NO: 601889 - DNA, 120 bp, Artificial Sequence
  ENSG00000174827_13 (sequence is synthesized)
cttccaattctgaagatacagagatgtgatgaaaacaagtaatagctttggctgtttatttgatagctgtttctgggtatttaataggaatcctttctcaaggaatgagttgtgacctgt

SEQ ID NO: 601890 - DNA, 120 bp, Artificial Sequence
  ENSG00000174827_14 (sequence is synthesized)
ttactgtctctttagaagaaaaactccactggaaaccattcaccatgtgtgattgtcttctgttatcatttgtcttacaggcggctattgcagacggctaatttatgcttaacttaggaa

SEQ ID NO: 601891 - DNA, 120 bp, Artificial Sequence
  ENSG00000174827_15 (sequence is synthesized)
gagataaggcaagagctagatttttttcatgtgatcttttccaagcttcaacttaacttaactacatttctctgtatgatgatgtctcttacttctacaggttccttgagcaccaaagat

SEQ ID NO: 601892 - DNA, 120 bp, Artificial Sequence
  ENSG00000174827_16 (sequence is synthesized)
gattcataactctgtataggtgacagctgcttataaaagcatcttagcagataagcctattaaaattgtgcttttgtaacaatgttgtggttgctagaataaataccattaacaaatgcc

SEQ ID NO: 601893 - DNA, 120 bp, Artificial Sequence
  ENSG00000174827_17 (sequence is synthesized)
tccagtgagttgcaagcttaatgctcacctgcagagacagaattcctgagtgaacgaacagagcagctcctcttccatctccagaaatgacctccaccttcaacccccgagaatgtaaac

SEQ ID NO: 601894 - DNA, 120 bp, Artificial Sequence
  ENSG00000174827_18 (sequence is synthesized)
tgatagtgcttttgttttggattcactttttatgctttaaccttcatttgcctctagaaacccaaaacacaataaagtacagaataagaccttagtaataaaattcagaattttcttaaa

SEQ ID NO: 601895 - DNA, 120 bp, Artificial Sequence
  ENSG00000174827_19 (sequence is synthesized)
gcaaggcagcaggatggaggggtttgtaaaaatgccttccacctaccctgctgggcttgcccgagaggctctgagtgtgtgaaggggaagacaattatcgctaggctggagaatagaaag

SEQ ID NO: 601896 - DNA, 120 bp, Artificial Sequence
  ENSG00000174837_0 (sequence is synthesized)
cttttctttgaatgacagaactacagcataatgcgtggcttcaacctgctcctcttctggggatgttgtgttatgcacagctgggaagggcacataagacccacacggaaaccaaacaca

SEQ ID NO: 601897 - DNA, 120 bp, Artificial Sequence
  ENSG00000174837_1 (sequence is synthesized)
aagggtaataactgtagagacagtaccttgtgcccagcttatgccacctgcaccaatacagtggacagttactattgcgcttgcaaacaaggcttcctgtccagcaatgggcaaaatcac

SEQ ID NO: 601898 - DNA, 120 bp, Artificial Sequence
  ENSG00000174837_2 (sequence is synthesized)
ttcaaggatccaggagtgcgatgcaaagatattgatgaatgttctcaaagcccccagccctgtggtcctaactcatcctgcaaaaacctgtcagggaggtacaagtgcagctgtttagat

SEQ ID NO: 601899 - DNA, 120 bp, Artificial Sequence
  ENSG00000174837_3 (sequence is synthesized)
ggtttctcttctcccactggaaatgactgggtcccaggaaagccgggcaatttctcctgtactgatatcaatgagtgcctcaccagcagcgtctgccctgagcattctgactgtgtcaac

SEQ ID NO: 601900 - DNA, 120 bp, Artificial Sequence
  ENSG00000174837_4 (sequence is synthesized)
tccatgggaagctacagttgcagctgtcaagttggattcatctctagaaactccacctgtgaagacgtggatgaatgtgcagatccaagagcttgcccagagcatgcaacttgtaataac

SEQ ID NO: 601901 - DNA, 120 bp, Artificial Sequence
  ENSG00000174837_5 (sequence is synthesized)
actgttggaaactactcttgtttctgcaacccaggatttgaatccagcagtggccacttgagtttccagggtctcaaagcatcgtgtgaagatattgatgaatgcactgaaatgtgcccc

SEQ ID NO: 601902 - DNA, 120 bp, Artificial Sequence
  ENSG00000174837_6 (sequence is synthesized)
atcaattcaacatgcaccaacactcctgggagctacttttgcacctgccaccctggctttgcaccaagcaatggacagttgaatttcacagaccaaggagtggaatgtagagatattgat

SEQ ID NO: 601903 - DNA, 120 bp, Artificial Sequence
  ENSG00000174837_7 (sequence is synthesized)
gagtgccgccaagatccatcaacctgtggtcctaattctatctgcaccaatgccctgggctcctacagctgtggctgcattgcaggctttcatcccaatccagaaggctcccagaaagat

SEQ ID NO: 601904 - DNA, 120 bp, Artificial Sequence
  ENSG00000174837_8 (sequence is synthesized)
ggcaacttcagctgccaaagggttctcttcaaatgtaaggaagatgtgatacccgataataagcagatccagcaatgccaagagggaaccgcagtgaaacctgcatatgtctccttttgt

SEQ ID NO: 601905 - DNA, 120 bp, Artificial Sequence
  ENSG00000174837_9 (sequence is synthesized)
gcacaaataaataacatcttcagcgttctggacaaagtgtgtgaaaataaaacgaccgtagtttctctgaagaatacaactgagagctttgtccctgtgcttaaacaaatatccacgtgg

SEQ ID NO: 601906 - DNA, 120 bp, Artificial Sequence
  ENSG00000174837_10 (sequence is synthesized)
actaaattcaccaaggaagagacgtcctccctggccacagtcttcctggagagtgtggaaagcatgacactggcatctttttggaaaccctcagcaaatatcactccggctgttcggacg

SEQ ID NO: 601907 - DNA, 120 bp, Artificial Sequence
  ENSG00000174837_11 (sequence is synthesized)
gaatacttagacattgagagcaaagttatcaacaaagaatgcagtgaagagaatgtgacgttggacttggtagccaagggggataagatgaagatcgggtgttccacaattgaggaatct

SEQ ID NO: 601908 - DNA, 120 bp, Artificial Sequence
  ENSG00000174837_12 (sequence is synthesized)
agctgaagatgaattctcgagtcgttgggggcataatgactggagagaagaaagacggcttctcagatccaatcatctacactctggagaacattcagccaaagcagaagtttgagaggc

SEQ ID NO: 601909 - DNA, 120 bp, Artificial Sequence
  ENSG00000174837_13 (sequence is synthesized)
ccatctgtgtttcctggagcactgatgtgaagggtggaagatggacatcctttggctgtgtgatcctggaagcttctgagacatataccatctgcagctgtaatcagatggcaaatcttg

SEQ ID NO: 601910 - DNA, 120 bp, Artificial Sequence
  ENSG00000174837_14 (sequence is synthesized)
ccgttatcatggcgtctggggagctcacgatggacttttccttgtacatcattagccatgtaggcattatcatctccttggtgtgcctcgtcttggccatcgccacctttctgctgtgtc

SEQ ID NO: 601911 - DNA, 120 bp, Artificial Sequence
  ENSG00000174837_15 (sequence is synthesized)
gctccatccgaaatcacaacacctacctccacctgcacctctgcgtgtgtctcctcttggcgaagactctcttcctcgccggtatacacaagactgacaacaagatgggctgcgccatca

SEQ ID NO: 601912 - DNA, 120 bp, Artificial Sequence
  ENSG00000174837_16 (sequence is synthesized)
tcgcgggcttcctgcactaccttttccttgcctgcttcttctggatgctggtggaggctgtgatactgttcttgatggtcagaaacctgaaggtggtgaattacttcagctctcgcaaca

SEQ ID NO: 601913 - DNA, 120 bp, Artificial Sequence
  ENSG00000174837_17 (sequence is synthesized)
tcaagatgctgcacatctgtgcctttggttatgggctgccgatgctggtggtggtgatctctgccagtgtgcagccacagggctatggaatgcataatcgctgctggctgaatacagaga

SEQ ID NO: 601914 - DNA, 120 bp, Artificial Sequence
  ENSG00000174837_18 (sequence is synthesized)
cagggttcatctggagtttcttggggccagtttgcacagttatagtgatcaactcccttctcctgacctggaccttgtggatcctgaggcagaggctttccagtgttaatgccgaagtct

SEQ ID NO: 601915 - DNA, 120 bp, Artificial Sequence
  ENSG00000174837_19 (sequence is synthesized)
caacgctaaaagacaccaggttactgaccttcaaggcctttgcccagctcttcatcctgggctgctcctgggtgctgggcatttttcagattggacctgtggcaggtgtcatggcttacc

SEQ ID NO: 601916 - DNA, 120 bp, Artificial Sequence
  ENSG00000174837_20 (sequence is synthesized)
tgttcaccatcatcaacagcctgcagggggccttcatcttcctcatccactgtctgctcaacggccaggtacgagaagaatacaagaggtggatcactgggaagacgaagcccagctccc

SEQ ID NO: 601917 - DNA, 120 bp, Artificial Sequence
  ENSG00000174837_21 (sequence is synthesized)
agtcccagacctcaaggatcttgctgtcctccatgccatccgcttccaagacgggttaaagtcctttcttgctttcaaatatgctatggagccacagttgaggacagtagtttcctgcag

SEQ ID NO: 601918 - DNA, 120 bp, Artificial Sequence
  ENSG00000174837_22 (sequence is synthesized)
gagcctaccctgaaatctcttctcagcttaacatggaaatgaggatcccaccagccccagaaccctctggggaagaatgttgggggcggtcttcctgtggttgtatgcactgatgagaaa

SEQ ID NO: 601919 - DNA, 120 bp, Artificial Sequence
  ENSG00000174837_23 (sequence is synthesized)
tcaggcgtttctgctccaaacgaccattttatcttcgtgctctgcaacttcttcaattccagagtttctgagaacagacccaaattcaatggcatgaccaagaacacctggctaccattt

SEQ ID NO: 601920 - DNA, 120 bp, Artificial Sequence
  ENSG00000174837_24 (sequence is synthesized)
tgttttctcctgcccttgttggtgcatggttctaagcatgcccctccagagcctatcatacgcctgatacagagaacctctcaataaatgatttgtcgcctgtctgactgatttacccta

SEQ ID NO: 601921 - DNA, 120 bp, Artificial Sequence
  ENSG00000174837_25 (sequence is synthesized)
ttattatttacctacttaattaattaagggtcatctcactggaagaccatatgagaaagggattttctcatgtagggataagaaaattggggctcagagaggtaaaaatatatagttgct

SEQ ID NO: 601922 - DNA, 120 bp, Artificial Sequence
  ENSG00000174837_26 (sequence is synthesized)
tatatctttttctatccctttactttgagcctgtgggtgtctttacatgctaggtaggtctcttgtagccagcacatggttgggtctttttaaaaaattttttatctggtttaacaatct

SEQ ID NO: 601923 - DNA, 120 bp, Artificial Sequence
  ENSG00000174837_27 (sequence is synthesized)
atatcttttaagtggagcattaggccatttctattcaaggttaatattgatatttgagggttttgttcctgtcacagcattgctagctagtattgctagcaaacatgatttccttccttc

SEQ ID NO: 601924 - DNA, 120 bp, Artificial Sequence
  ENSG00000174839_0 (sequence is synthesized)
aagcgcgctctgcggcgcggtccgctgtggaggcggcgcgaacggtcagggggcggccgatggctttgaggggccctgcgggcttggggcccggctctcgaaggccgttggacgaagcgg

SEQ ID NO: 601925 - DNA, 120 bp, Artificial Sequence
  ENSG00000174839_1 (sequence is synthesized)
tggcaggggccgagggccgcgaggcgccggcccttgtggcggcgggaggcgcgccagaggacgatgaagaggacgatggccgtggccggggcctgctgcgctgggacagcttctccgcct

SEQ ID NO: 601926 - DNA, 120 bp, Artificial Sequence
  ENSG00000174839_2 (sequence is synthesized)
ggctgcactgcgtgtgtgtggtgggcttcgacctggagctgggccaggccgtggaggtaatttatcctcagcattccaaacttactgacagagaaaaaaccaatatttgctatttgtctt

SEQ ID NO: 601927 - DNA, 120 bp, Artificial Sequence
  ENSG00000174839_3 (sequence is synthesized)
ttccagattcaaattcaggttgtcttggagatacccagttttgttttagatttcgacagtcttctgggaggagggtgtcgctgcattgtctcctggatcaatttgacaaagatttaccag

SEQ ID NO: 601928 - DNA, 120 bp, Artificial Sequence
  ENSG00000174839_4 (sequence is synthesized)
tttacttaaagaaggatcctgcttatttttatggatatgtgtatttccgacaagttcgagataaaactctaaaaagaggctactttcagaagtccttggttttgatcagcaaactacctt

SEQ ID NO: 601929 - DNA, 120 bp, Artificial Sequence
  ENSG00000174839_5 (sequence is synthesized)
atattcatttttttcacactgtgctcaaacagatagcaccagagtattttgaaaagaatgaaccttatttggaagcagcttgtaatgatgttgatcgatggcctgccccagtgccaggga

SEQ ID NO: 601930 - DNA, 120 bp, Artificial Sequence
  ENSG00000174839_6 (sequence is synthesized)
aaacattacacctgccaatcatgggggtggtaatgaaggtacggattcccacatgtcatgacaagcctgggacaactcaaatagtgcagttaactcagcaggtggacacaaatatatctg

SEQ ID NO: 601931 - DNA, 120 bp, Artificial Sequence
  ENSG00000174839_7 (sequence is synthesized)
ttattttacctactgttcatgaggtggatattttcaggtgtttctgcccagttttccttcatagtcagatgctctgggagctggtgctgttgggggagccccttgtggttatggcgccat

SEQ ID NO: 601932 - DNA, 120 bp, Artificial Sequence
  ENSG00000174839_8 (sequence is synthesized)
caccatcggaatcatcagagactgtattggcacttgttaactgtatttctccattaaagtacttcagtgatttccgaccttatttcactattcatgatagtgaattcaaagaatatacta

SEQ ID NO: 601933 - DNA, 120 bp, Artificial Sequence
  ENSG00000174839_9 (sequence is synthesized)
cccgtacccaagctccgccctcagttatattaggagtaaccaaccctttttttgctaagacactccagcactggccacacattattcgaataggagaccttaaacctacaggtgaaattc

SEQ ID NO: 601934 - DNA, 120 bp, Artificial Sequence
  ENSG00000174839_10 (sequence is synthesized)
ctaagcaggttaaagtgaaaaaactgaagaatctaaagactctggattccaaacctggagtttatacttcatataagccatatttaaatagagatgaagagatcataaaacaattacaga

SEQ ID NO: 601935 - DNA, 120 bp, Artificial Sequence
  ENSG00000174839_11 (sequence is synthesized)
agggtgtacaacagaaacgtccttctgaggctcaaagtgttattcttcgacgctattttttggaactgacacaaagtttcatcattccattagaaagatatgtggcaagcttgatgcctt

SEQ ID NO: 601936 - DNA, 120 bp, Artificial Sequence
  ENSG00000174839_12 (sequence is synthesized)
tgcagaaaagtatttccccatggaagagtccacctcaattaagacagtttcttccagaagaatttatgaaaacacttgagaaaacaggacctcagctaacctctagaataaaaggcgatt

SEQ ID NO: 601937 - DNA, 120 bp, Artificial Sequence
  ENSG00000174839_13 (sequence is synthesized)
ggattggactttaccggcatttcctaaagtctccaaattttgatggctggtttaagacccggaggaaggaaatgacccaaaaattggaggcactccatctagaagctctttgtgaagagg

SEQ ID NO: 601938 - DNA, 120 bp, Artificial Sequence
  ENSG00000174839_14 (sequence is synthesized)
acttacttctctggatccagaaacacacagaagtagaaacagtagaccttgtcttgaagctgaaaaataagctgttgcaggctgatcgagagcacttacctgtgaaacctgacactatgg

SEQ ID NO: 601939 - DNA, 120 bp, Artificial Sequence
  ENSG00000174839_15 (sequence is synthesized)
aaaagttacggacacacatagatgccattatcttagcattgccagaggacttgcaaggcatactgctcaaaacgggcatgacatgatatttgccaagattttccagccaaaaaggattat

SEQ ID NO: 601940 - DNA, 120 bp, Artificial Sequence
  ENSG00000174839_16 (sequence is synthesized)
gcatcatgaagcatactgacatttcaaccagacgcacaaaggagatctctcagtggcagcggagtggaaaattgccatgaatgctagttacagggtagaaagactgtattgtataaacag

SEQ ID NO: 601941 - DNA, 120 bp, Artificial Sequence
  ENSG00000174839_17 (sequence is synthesized)
acctttttagtgcattactttttaaagtggatatctgtggtggttccactttaatactgaaacaccgaaaggcatttctatatttttaatcatgttctaaagtgctcttatgagagactt

SEQ ID NO: 601942 - DNA, 120 bp, Artificial Sequence
  ENSG00000174839_18 (sequence is synthesized)
gtgggccatcagtattagtgatttcatactgcagtgctggcattgcagatatttttttaaattggtgctgctttgcccaatcatgttaaaactcagggggatataaaaataacattcaca

SEQ ID NO: 601943 - DNA, 120 bp, Artificial Sequence
  ENSG00000174839_19 (sequence is synthesized)
atgtttcacagttcagctgctagtcttgaagcttttccttagcttcattatgatacgtaattttataaggtattctgttgagtgatcattgtttaaaaaaaaagtttcttgctacccatt

SEQ ID NO: 601944 - DNA, 120 bp, Artificial Sequence
  ENSG00000174839_20 (sequence is synthesized)
gtgtttattaatagacatgatgggtttttttcagttgtcatatagattttcattattttcccttccattttcaaaatttaatgttaccagtttctccaaagacaagaaggcatctagtat

SEQ ID NO: 601945 - DNA, 86 bp, Artificial Sequence
  ENSG00000174839_21 (sequence is synthesized)
atgttaccagtttctccaaagacaagaaggcatctagtattaatgatggaagagtttattttctcttaccctttactaatttaaac

SEQ ID NO: 601946 - DNA, 120 bp, Artificial Sequence
  ENSG00000174839_22 (sequence is synthesized)
ggaggttgcagtgagctgagattacacccctggactccagcttgggtgacacagtgagactgtgtctcaacaaaaataaaaaattaaataaatactaatttaaatattattaaatgttta

SEQ ID NO: 601947 - DNA, 120 bp, Artificial Sequence
  ENSG00000174839_23 (sequence is synthesized)
aatttaaatattattaaatgtttaaactaatgaacttggctgcttttcaaagacattttaattataaatctcataatcagctatttttttaaactgaactattcttatttcaaaggcatt

SEQ ID NO: 601948 - DNA, 120 bp, Artificial Sequence
  ENSG00000174839_24 (sequence is synthesized)
catgagttttttatgtgatacttatttgagtgatgataagattgatttctggcattatttgtttggtagcgttttatttttcccaacattaatgtttcttaaaacacttttcctactatt

SEQ ID NO: 601949 - DNA, 120 bp, Artificial Sequence
  ENSG00000174839_25 (sequence is synthesized)
gtttgacatgggaactttcgcctgagtcactgtcatggttagcttttgttgttgttgtttttgtttctgttttgtttaaacaatactaccttgccaaaaatagaagaatgtgatttggta

SEQ ID NO: 601950 - DNA, 89 bp, Artificial Sequence
  ENSG00000174839_26 (sequence is synthesized)
caatactaccttgccaaaaatagaagaatgtgatttggtagagtagggttgtttggtttgtgtttgaataagagtatcctacagaagcc

SEQ ID NO: 601951 - DNA, 120 bp, Artificial Sequence
  ENSG00000174839_27 (sequence is synthesized)
aaaataggcacacatgacacagcatgtggttaatagctgtgtcttgaattatcctctaaataaccaaatttagttgtatgtatttgtaaaggatatggcttcagaagctatcttttgttc

SEQ ID NO: 601952 - DNA, 120 bp, Artificial Sequence
  ENSG00000174839_28 (sequence is synthesized)
tctgtcgatataactcttaagggcattcctgacccaagaaagactccttgcgtttgtaactgtggtctaatacccaaatgtgccctgttcttatggatacagtctcttgaagcatacctc

SEQ ID NO: 601953 - DNA, 120 bp, Artificial Sequence
  ENSG00000174839_29 (sequence is synthesized)
aaagtcatagagagaatatggcatttgaaagaaatcgtttgccttggatcatatgagttattttgtgaaacaacagctgacttttcagaaaaggagcaactacttttatatgctaaaagt

SEQ ID NO: 601954 - DNA, 120 bp, Artificial Sequence
  ENSG00000174839_30 (sequence is synthesized)
atttcataactttctgggaaaccttatttaggtataaatggtcatcttattatttttcaaaaaggtatattttaataattgtacaatttatatacagtttgtgaccagaatttgtaagtt

SEQ ID NO: 601955 - DNA, 120 bp, Artificial Sequence
  ENSG00000174839_31 (sequence is synthesized)
gttggtgtcatatcaaggatcttttaaattatgccactacaggatgtatcatttcaagtctattttgcacagctaaacagtagcaaaagatgccaattagcatgataatggtgtcttcat

SEQ ID NO: 601956 - DNA, 120 bp, Artificial Sequence
  ENSG00000174839_32 (sequence is synthesized)
ttttactgtatttaactgaaacctaacacatgttgaaaaccatatcatacctagtttatctcttaatttcaaactatgtacttgtaaaaatgatgtaaatttgcactgggaacctgggaa

SEQ ID NO: 601957 - DNA, 120 bp, Artificial Sequence
  ENSG00000174839_33 (sequence is synthesized)
agagtgactgataatttttggtgcgtgatttttagatttgtctttttttttttaagaagaatttgttactatgtaaaccctgacattaaatgttttatctctaccagcatcaggaggaat

SEQ ID NO: 601958 - DNA, 120 bp, Artificial Sequence
  ENSG00000174839_34 (sequence is synthesized)
cactgctttaagggtattatgtaatgcctagtgccttctatttacagtgaaaaagaggttttgtgaaggcatttatggtcattaccaaaaactaaattaaaggccttggattttaaagca

SEQ ID NO: 601959 - DNA, 120 bp, Artificial Sequence
  ENSG00000174839_35 (sequence is synthesized)
ctttagaactcatttattcagttaccgctgacaccattcagaaatattttgcttttgttttgctactatattatatagctgaatttccaaagtgagtcttattcataaggattcagcatc

SEQ ID NO: 601960 - DNA, 120 bp, Artificial Sequence
  ENSG00000174839_36 (sequence is synthesized)
atctaagatttagttgaatttttatttgaaatctgacttcccaagtcagtctaaatttagctatatctcttgtggggagtgatggagttgttgctgtccattgaaagggcatatgattaa

SEQ ID NO: 601961 - DNA, 120 bp, Artificial Sequence
  ENSG00000174840_0 (sequence is synthesized)
gcgagatctgaatgagtcaaagccggcggcctcggctcctcagctccacctgacagtaggccgctgatcggccgcgggtcttgtcgaccgctaggccaccaggttcatgtggaggctccc

SEQ ID NO: 601962 - DNA, 120 bp, Artificial Sequence
  ENSG00000174840_1 (sequence is synthesized)
aggcgcccgcgccgcgcttcgggtgatccggacggcggtggagaagctgagccgggctgaagcggggagccagacagcggcgggagcgatggagcgcgctgtagtgcgctgcgtaccttc

SEQ ID NO: 601963 - DNA, 120 bp, Artificial Sequence
  ENSG00000174840_2 (sequence is synthesized)
ggaacccaagctgagcctgtcattcgctttggctgatggtagccacaagaacatgcagcgcgaccagagcgagccgctgggtcgagtcctcagccgcatcgctaccaatgccctaaaggg

SEQ ID NO: 601964 - DNA, 120 bp, Artificial Sequence
  ENSG00000174840_3 (sequence is synthesized)
tcacgctaaggcggccgccgccaagaagagcaggaagagccggccgaatgctagcggcggtgcggcctgttcagggccggggcctgagccggctgtgttctgcgagcccgtggtgaagct

SEQ ID NO: 601965 - DNA, 120 bp, Artificial Sequence
  ENSG00000174840_4 (sequence is synthesized)
gtactaccgggaagaggcagtggctgaggacgtgctcaacgtggatgcctggcaagacggcgcggtgctgcagatcggcgatgttaagtacaaggtggagcgcaacccgcccgccttcac

SEQ ID NO: 601966 - DNA, 120 bp, Artificial Sequence
  ENSG00000174840_5 (sequence is synthesized)
cgaactgcagttgccgcgctacatcatggccgggttccctgtgtgccccaaactcagcctcgaatttggggatcccgccagctcccttttccgctggtataaggaagccaagcccggagc

SEQ ID NO: 601967 - DNA, 120 bp, Artificial Sequence
  ENSG00000174840_6 (sequence is synthesized)
ggcggagcccgaggtcggtgtcccctcgtcattgtctccctcctcaccttcttcttcttggactgagactgatgtggaggagcgtgtctacaccccgtccaatgccgacatcgggctaag

SEQ ID NO: 601968 - DNA, 120 bp, Artificial Sequence
  ENSG00000174840_7 (sequence is synthesized)
gctcaagcttcactgcaccccaggcgatgggcagcgctttgggcacagccgggagttggaaagtgtgtgtgtggtagaggctgggcctggcacctgcacttttgaccaccggcatctcta

SEQ ID NO: 601969 - DNA, 120 bp, Artificial Sequence
  ENSG00000174840_8 (sequence is synthesized)
cacgaagaaggtgactgaggacgctctcatccgcactgtctcttacaacatcctggcagacacgtacgcgcagactgagttctcgcgaacggttctgtacccatactgtgccccctacgc

SEQ ID NO: 601970 - DNA, 120 bp, Artificial Sequence
  ENSG00000174840_9 (sequence is synthesized)
cctggagctcgactaccgccagaaccttatccagaaggaactcaccggctacaacgccgatgtcatctgtttgcaggaggttgaccgcgcagtgttttctgacagcttggtacccgccct

SEQ ID NO: 601971 - DNA, 120 bp, Artificial Sequence
  ENSG00000174840_10 (sequence is synthesized)
agaggccttcgggctcgagggggtgtttcgaatcaagcagcacgaaggcctggccactttctaccgaaagtctaagttcagccttcttagccagcatgacatttcattctacgaagccct

SEQ ID NO: 601972 - DNA, 120 bp, Artificial Sequence
  ENSG00000174840_11 (sequence is synthesized)
cgagtccgacccacttcacaaagaactgctggagaaactagttttgtacccatcagcgcaggagaaggtgctccagagatcttctgttcttcaggtttcagttcttcagtctacaaagga

SEQ ID NO: 601973 - DNA, 120 bp, Artificial Sequence
  ENSG00000174840_12 (sequence is synthesized)
ctcttctaaaaggatatgtgttgctaatacccatctttactggcatcctaaaggtgggtatattcgcctcattcaaatggcagtagccttggctcacataagacatgtttcatgtgatct

SEQ ID NO: 601974 - DNA, 120 bp, Artificial Sequence
  ENSG00000174840_13 (sequence is synthesized)
gtatcctggcataccagttatattttgtggggactttaatagtacaccatcaacaggaatgtatcattttgtcatcaatggcagcattccagaggatcatgaagactgggcttccaatgg

SEQ ID NO: 601975 - DNA, 120 bp, Artificial Sequence
  ENSG00000174840_14 (sequence is synthesized)
ggaggaggaaagatgcaatatgtctcttacacatttcttcaagctgaaaagtgcttgtggtgaacctgcttacacaaattatgttggtggctttcatggatgtctagattacattttcat

SEQ ID NO: 601976 - DNA, 120 bp, Artificial Sequence
  ENSG00000174840_15 (sequence is synthesized)
tgacttaaatgctttagaggttgaacaggtgattccattacctagtcatgaagaagttaccacccaccaggccttacctagtgtttcccatccctctgatcacatagcacttgtatgtga

SEQ ID NO: 601977 - DNA, 120 bp, Artificial Sequence
  ENSG00000174840_16 (sequence is synthesized)
tttaaaatggaaatagatgtgtgtttaatggaattgaagtctgaaaaggaagtagttattttagcagaaaatttaatatgaatcaaagcttatatgtaaacttcaaggaggaatggtaaa

SEQ ID NO: 601978 - DNA, 120 bp, Artificial Sequence
  ENSG00000174840_17 (sequence is synthesized)
atgttcagccctcctagttatgttcctgatgtcttcgttatgaaactgttgatgtttgcatcatacatcttctctttccttgttttcctctacaattggaggagaaacaaatatatttct

SEQ ID NO: 601979 - DNA, 120 bp, Artificial Sequence
  ENSG00000174840_18 (sequence is synthesized)
ggagaaacaaatatatttcttactagcaaaatagaaaattgaattatttttctccaaattgagactctcagaaaaggaagattgaattagcgtgttttttgtttgtttgtttttgttttt

SEQ ID NO: 601980 - DNA, 120 bp, Artificial Sequence
  ENSG00000174840_19 (sequence is synthesized)
caggcgtgagccaccgcacccggcccttgtgtacatttttataagagaatttttttagctaggagttcagaatttttaaagtaccatttgaatgatcttaatttttctttcatgacaaca

SEQ ID NO: 601981 - DNA, 120 bp, Artificial Sequence
  ENSG00000174840_20 (sequence is synthesized)
ttcatgacaacacattccaaaatgaatcatgcttatgtactaagagggaaaatgtatttaagttaagggtgagagacttaagttataggtgaccttagagacctaaggtgagagacttga

SEQ ID NO: 601982 - DNA, 120 bp, Artificial Sequence
  ENSG00000174840_21 (sequence is synthesized)
cacatggaaggagtaacattagggtctacctctacctcaatttagttagcgatttactacaatttcagagctttaacaaaagataaaaataaatcgtcaccaattgttattgcttctcat

SEQ ID NO: 601983 - DNA, 120 bp, Artificial Sequence
  ENSG00000174840_22 (sequence is synthesized)
ctttcatttttcaatgaacaagtaaggtattttcattcttatttttaggattttagtttttagtgtatggtacaaatgaacacagtttatattctaattcttactgcagctcattttaat

SEQ ID NO: 601984 - DNA, 120 bp, Artificial Sequence
  ENSG00000174840_23 (sequence is synthesized)
ttttaggatgcaagcacaatttagtattcaaagtgagtagcaacatattcaacttgatcccattgtcttcagttactcttgcccatgaaaaatgttcataaatgaacagggtatttgacc

SEQ ID NO: 601985 - DNA, 120 bp, Artificial Sequence
  ENSG00000174840_24 (sequence is synthesized)
atatgatattagaaaatacagcacattactttatgagaaactacctactgatatgggcttgaaattttggatgaatcattgagcatttctacactagaagtaatttcaaaattgttggtt

SEQ ID NO: 601986 - DNA, 120 bp, Artificial Sequence
  ENSG00000174840_25 (sequence is synthesized)
tttataaacaggaaaaaggttgagtagtgggacttttaagcatctctgaaataaaaaacttctttttacagacaagcattatagtttgagttacagacaacagtgtgtatatatgtaata

SEQ ID NO: 601987 - DNA, 120 bp, Artificial Sequence
  ENSG00000174840_26 (sequence is synthesized)
tatatatagtaaaatgaaatttaaatatgaagccaaactttttaaaattagaaactacaaatggttatactgattagtgtctagcctagagtggtaaccatgctttactaattcagttat

SEQ ID NO: 601988 - DNA, 120 bp, Artificial Sequence
  ENSG00000174840_27 (sequence is synthesized)
gaaatacattatttataatgcattagctgtattagctgttgcttttttgatgttcaggataactatgttatctcatttctgcatttaattaatagctcgagtattaaaagcccactccct

SEQ ID NO: 601989 - DNA, 120 bp, Artificial Sequence
  ENSG00000174840_28 (sequence is synthesized)
tcaagaaaagctttgattttccccagtcatgaaagcccttgtttcaaattctttaatctctgaacctagtatcataagaatttcctcttttgataacatctgtactttcatattctgctc

SEQ ID NO: 601990 - DNA, 120 bp, Artificial Sequence
  ENSG00000174840_29 (sequence is synthesized)
actatcaaatgtattgttaacacttagtaagtttgaaaatgaaggggttttatctgcatttgacattgaaccttgaagtactttaagtactccaaggggaaaattaaagtggaagtttct

SEQ ID NO: 601991 - DNA, 120 bp, Artificial Sequence
  ENSG00000174840_30 (sequence is synthesized)
tcggatcttgtttagaaaaaactataaataaaaaattgatgctaccaaattgtgccttcctaaataacatttttgagagcattttaacagcagtttacaaatatgtaaataatagattaa

SEQ ID NO: 601992 - DNA, 120 bp, Artificial Sequence
  ENSG00000174840_31 (sequence is synthesized)
aaccaaatcttgattctcttgtgaatttttttttcattttaaaaatatgtttttgggctgttttcaaagaaagatgttgatagaacccttagagtgacttgggagaaaacaaagtgtcac

SEQ ID NO: 601993 - DNA, 120 bp, Artificial Sequence
  ENSG00000174840_32 (sequence is synthesized)
atcaaaaagttgagaaacattttgaaagaaaaaattcgaacatgcccatgaaaaaagcatacagcttccacattaacactggctagattaaactctagtcagaaaaactcagcacttaac

SEQ ID NO: 601994 - DNA, 120 bp, Artificial Sequence
  ENSG00000174840_33 (sequence is synthesized)
agacattccatgtcctatatccttaattttgatgttttctgactaaacaatatactcagattgtatacaggcatttcacattattaggacatggaatgttattgtgaagtgccatatact

SEQ ID NO: 601995 - DNA, 120 bp, Artificial Sequence
  ENSG00000174840_34 (sequence is synthesized)
cggatacgttaaaatgattggagtccaaaggtagggaacactaagaaaatgtataaatagcatacacatttctttgtactcatgagttagaatgcagtgttattcagaaatgtctgttta

SEQ ID NO: 601996 - DNA, 120 bp, Artificial Sequence
  ENSG00000174840_35 (sequence is synthesized)
aagcacctatgtgattgcatttttctattacatttggattttttagtacatttaattttaagaaaacatgggaaatctagcgactttctatggtaaaccacattttataatgtcacaagt

SEQ ID NO: 601997 - DNA, 120 bp, Artificial Sequence
  ENSG00000174840_36 (sequence is synthesized)
tcttgctataggaattaacattctagaattttatattgattataaaagagtatttcagaacatattattctgttaaaatgaactcttgcacagttgccgctacagcaaatgtgtctgcca

SEQ ID NO: 601998 - DNA, 120 bp, Artificial Sequence
  ENSG00000174840_37 (sequence is synthesized)
ataatcaaaattcatgagcaaacaatcgtttctggctgtaatgtatgttctttttgaaattctgtatgctaaaatcagttgtttcaaaatttcaagaattccactgagtagtgatttttc

SEQ ID NO: 601999 - DNA, 120 bp, Artificial Sequence
  ENSG00000174840_38 (sequence is synthesized)
tgagtactaagctatgatctcatcagaatgtgctggtttcagtctggagatagatttctgaggagcctaatacaagggagagaatgtccaaagaacactactgtggaaagttcttacgat

SEQ ID NO: 602000 - DNA, 120 bp, Artificial Sequence
  ENSG00000174840_39 (sequence is synthesized)
ggaaattgacatcttttgtatctcattctccagccgtgaaataaaggcagaggttccctgcaaactagtttggttgggataaatccaatatttatatataatgaaaaataaaagtttgca

SEQ ID NO: 602001 - DNA, 120 bp, Artificial Sequence
  ENSG00000174840_40 (sequence is synthesized)
aaaataaaagtttgcattattagtttatcacaagacccatgtgacaactcagaaaatattctcagcataatttttttaagagatagagtctcactgttacccaggctggagtgcagtggt

SEQ ID NO: 602002 - DNA, 120 bp, Artificial Sequence
  ENSG00000174840_41 (sequence is synthesized)
acagcctcaaactgcggggctcaaatgatcctcctgcctcagcgtcccaagtagttgagattacaagcccaaccttccataactgaaaactaactttctttttttctttttttattatta

SEQ ID NO: 602003 - DNA, 120 bp, Artificial Sequence
  ENSG00000174840_42 (sequence is synthesized)
tatccctcccccagccctgaaaatgaattttttaaacacaaataaaaaatatttcagtgttttgagaattttaataatttgcttaatatagtacaggaaggcaacactatctagagggcc

SEQ ID NO: 602004 - DNA, 82 bp, Artificial Sequence
  ENSG00000174840_43 (sequence is synthesized)
ggctgaggcaggaggatcacttgagctgaggagttcaagaccagccttggcaacattgtgagaccctatctctgcaaaaaat

SEQ ID NO: 602005 - DNA, 89 bp, Artificial Sequence
  ENSG00000174840_44 (sequence is synthesized)
agctgctcaatgaggtcaagcctgcagtgagttgtgatcaaggtgcgctgcactccagcctgggtaatagagcaagaccctgtcttcaa

SEQ ID NO: 602006 - DNA, 120 bp, Artificial Sequence
  ENSG00000174840_45 (sequence is synthesized)
gcactccagcctgggtaatagagcaagaccctgtcttcaaaaaaccactctagatttcatgttgtagggggtagggaggacaatttttaacagctttaactgacatgggtaatatataag

SEQ ID NO: 602007 - DNA, 120 bp, Artificial Sequence
  ENSG00000174840_46 (sequence is synthesized)
ttctgtgttctcactttatatgaaagtacttttttaaatgttaaaaatactagagctgtattaacttcgtgattttatttttcttcttagcactaacttcaaaataaccatacagtactg

SEQ ID NO: 602008 - DNA, 120 bp, Artificial Sequence
  ENSG00000174840_47 (sequence is synthesized)
atgagccacggtacccggcctaaattttaattttatatataaatggcaaaataatcttaaatatagtaaatctgttcacctatctgctatgctagcaaattctgggttgtcaaaaatcca

SEQ ID NO: 602009 - DNA, 120 bp, Artificial Sequence
  ENSG00000174840_48 (sequence is synthesized)
tgttcatactgtcagtgttagatttttactcataatttaaaatttccccgcaaaatttcacagaaaactgaattattcatctctatcttctgtccaatttatgtaatgaatgtatgtcaa

SEQ ID NO: 602010 - DNA, 120 bp, Artificial Sequence
  ENSG00000174840_49 (sequence is synthesized)
agcatttatataacacagtccattttgcccagtaattcactttaatgatgttatcatgaagtattgatgtactttttttttagtgtattgaagtattcctaggttgcatttgtgctagtt

SEQ ID NO: 602011 - DNA, 120 bp, Artificial Sequence
  ENSG00000174840_50 (sequence is synthesized)
tcataccatttgtgttccttatatattgaagatggttcagtaggggaaatggataggctttatttagttggctttcttatactggataatataaacactttttttttcttttttgagaca

SEQ ID NO: 602012 - DNA, 120 bp, Artificial Sequence
  ENSG00000174840_51 (sequence is synthesized)
gggtctggctttgtcacccaggcttggagggcactggtgccatcacggcttactgcaacctccacctcctgggcttatgcaatcctcccaccacagcctccccaaatagctgggactaca

SEQ ID NO: 602013 - DNA, 120 bp, Artificial Sequence
  ENSG00000174840_52 (sequence is synthesized)
caccacagcctccccaaatagctgggactacaggtgcgcaccgccacacctggctaatttttgtatattttataggcaaaaaaaaaaaaaaaaatggtttcaccatgttgcccaggctgg

SEQ ID NO: 602014 - DNA, 120 bp, Artificial Sequence
  ENSG00000174840_53 (sequence is synthesized)
cctcggcctcccaaagtgctgatattacagacatgagccaccccacccagtcagcacacattttttttttttttaaataagacagggtgttgctgttgcccaggctggagcgcagtggca

SEQ ID NO: 602015 - DNA, 120 bp, Artificial Sequence
  ENSG00000174840_54 (sequence is synthesized)
cctggctaattttttaaattgtttgtagagatgggggtctctctatgttgcccagactggtcttaaactcctgggctcaaatgactctcccgcttcagcctcccaaagtactgggattat

SEQ ID NO: 602016 - DNA, 120 bp, Artificial Sequence
  ENSG00000174840_55 (sequence is synthesized)
agccctttttttaaaaaaattaaaaacaaattttttctccagaaaaaaacatatttatcaacttttaaaaacattttatgggtacatagtaggtgtatatatttatgtgggacatatttc

SEQ ID NO: 602017 - DNA, 120 bp, Artificial Sequence
  ENSG00000174840_56 (sequence is synthesized)
gatagagtaaattgagtattcatcacatcaagcattcatttgtgttacgaacattccaattgtactctctcagttattctaaaatgtgatatacacacttttaaaaggatttattgcgct

SEQ ID NO: 602018 - DNA, 120 bp, Artificial Sequence
  ENSG00000174840_57 (sequence is synthesized)
gtctcaaaaataaaataaaataaaattttaaaaaaaggatttattgcatataattcttatatcccctgtggaatagtttggagaaatggtacatccaaagataaaatcagttagaaataa

SEQ ID NO: 602019 - DNA, 120 bp, Artificial Sequence
  ENSG00000174840_58 (sequence is synthesized)
atccaaagataaaatcagttagaaataaacagtggccttcctcagaaaagctgggctatagtgttttgggtatcttaaaccaagaaagggtatttctatcccagctgtagagtttttaat

SEQ ID NO: 602020 - DNA, 120 bp, Artificial Sequence
  ENSG00000174840_59 (sequence is synthesized)
aattctattataaataatggaatcaggccagcacagtggctcacgtcacataatcccactctccttaagagctttttttgtcactgcatatcaactcagttgacaaggactggcccccaa

SEQ ID NO: 602021 - DNA, 120 bp, Artificial Sequence
  ENSG00000174840_60 (sequence is synthesized)
aagaagctgcatactcacttggcagtcactccccattctccctagctcctggcaacaacttaacctgtctctgtggatttgcctattctggacatttcatataaattgaatcataattta

SEQ ID NO: 602022 - DNA, 120 bp, Artificial Sequence
  ENSG00000174840_61 (sequence is synthesized)
tgtagtcttttgtgactggcttcttttacttaggatgtttttaaggttcttactgttgtaggatgtatcaggagtttgtttttatgatgaatgttccatcttatggacgtaccacatttg

SEQ ID NO: 602023 - DNA, 120 bp, Artificial Sequence
  ENSG00000174840_62 (sequence is synthesized)
tccattcattagttgacagacatttgaattgcttccacttcctggcttctatgaataatgctgccataaacatttgtgataagtttttgagtgaatatgtgtttttgtttctcttgggca

SEQ ID NO: 602024 - DNA, 120 bp, Artificial Sequence
  ENSG00000174840_63 (sequence is synthesized)
catacagggaatggaattgttgggtgctgtgataaccttttgaggaactgccagacttacggaaagcagttgcactattttgcattcccaccaagcaatatgagggttccagtttccctc

SEQ ID NO: 602025 - DNA, 120 bp, Artificial Sequence
  ENSG00000174840_64 (sequence is synthesized)
catcctcattaacactttattatctttttgattataggcatcctagtgtcaagtggcatcttattgtggttttgatttgcatttccatgatggttaacgatgttaagcatcttttcatgt

SEQ ID NO: 602026 - DNA, 120 bp, Artificial Sequence
  ENSG00000174840_65 (sequence is synthesized)
gctcgttggccatctatatatctctggagaaatgtcttttgaaatactttgcccatttaaaaatgttatttgttgtttagccacccctccttaaaaaataaataatataataatccatca

SEQ ID NO: 602027 - DNA, 120 bp, Artificial Sequence
  ENSG00000174840_66 (sequence is synthesized)
gcatcctaaaggtaggttttatttggtatcacaagtgacttaaacacgcttaaagttgtttaaagtgttttacacaaatgcatatcttgaacgtcacccagagactgtaatttgtgtagt

SEQ ID NO: 602028 - DNA, 120 bp, Artificial Sequence
  ENSG00000174842_0 (sequence is synthesized)
agaagagcgggctaagacgccggaggaggtggcggcggctgggagaggcgagggttctggccgattttagcatcgaaactaggagaaataagaatggctgtagaggaacttcagtctata

SEQ ID NO: 602029 - DNA, 120 bp, Artificial Sequence
  ENSG00000174842_1 (sequence is synthesized)
ataaagagatgtcaaatcctagaagagcaagactttaaagaagaggattttggcctatttcagttagctgggcaaagatgcatagaagaagggcacacagaccagctattagaaattatt

SEQ ID NO: 602030 - DNA, 120 bp, Artificial Sequence
  ENSG00000174842_2 (sequence is synthesized)
caaaatgaaaagaataaggtcatcatcaagaatatgggctggaatctcgttggtcctgttgttcgatgccttttgtgtaaagataaagaggatagtaaaagaaaagtttattttttgatc

SEQ ID NO: 602031 - DNA, 120 bp, Artificial Sequence
  ENSG00000174842_3 (sequence is synthesized)
tttgatttattggtaaagttatgcaatccaaaggaattattgttgggtttgcttgaactgattgaagagccctctggaaaacagatatcccaaagtattcttcttttgcttcagccatta

SEQ ID NO: 602032 - DNA, 120 bp, Artificial Sequence
  ENSG00000174842_4 (sequence is synthesized)
caaacagtgattcagaaacttcataacaaggcatattcaattggattagcattgtctaccctttggaatcagctatctcttcttcctgttccatactcaaaagaacaaatacaaatggat

SEQ ID NO: 602033 - DNA, 120 bp, Artificial Sequence
  ENSG00000174842_5 (sequence is synthesized)
gactatggcctttgtcagtgttgcaaggccttaatagagttcactaagccttttgtggaagaagtcattgataacaaagaaaactcactggaaaatgaaaagttaaaggatgaattactg

SEQ ID NO: 602034 - DNA, 120 bp, Artificial Sequence
  ENSG00000174842_6 (sequence is synthesized)
aaattttgtttcaaaagcttgaaatgccctttgctgacagcacaattctttgaacagtctgaagaaggtggaaatgatcctttcaggtattttgcatcagaaataataggttttttatca

SEQ ID NO: 602035 - DNA, 120 bp, Artificial Sequence
  ENSG00000174842_7 (sequence is synthesized)
gcaattggacaccctttccccaaaatgatttttaatcatggaaggaaaaagagaacttggaattaccttgaatttgaagaagaagaaaataaacagttagcagactcaatggcttctctg

SEQ ID NO: 602036 - DNA, 120 bp, Artificial Sequence
  ENSG00000174842_8 (sequence is synthesized)
gcacattgaagtctttttgcaaagaacagaagagtctgttatctccaaaggattggagctgctggagaatagtttattgagaatagaagacaatagtctactttaccagtacttagaaat

SEQ ID NO: 602037 - DNA, 120 bp, Artificial Sequence
  ENSG00000174842_9 (sequence is synthesized)
caagagttttcttactgtacctcagggcttagtgaaagtaatgacactttgccccattgagacactgaggaaaaagagtttagctatgcttcagctgtatattaacaagttggattcaca

SEQ ID NO: 602038 - DNA, 120 bp, Artificial Sequence
  ENSG00000174842_10 (sequence is synthesized)
aggcaaatatacattatttaggtgcttattgaatacaagtaatcactcaggtgtggaggcttttattattcaaaatatcaaaaatcaaattgacatgtcattaaagagaacacgtaacaa

SEQ ID NO: 602039 - DNA, 120 bp, Artificial Sequence
  ENSG00000174842_11 (sequence is synthesized)
caaatggtttacaggaccacagttgatttcccttcttgatttggtactttttctcccagagggtgcagaaacagatttactgcaaaactcagataggattatggcttcattaaatttatt

SEQ ID NO: 602040 - DNA, 120 bp, Artificial Sequence
  ENSG00000174842_12 (sequence is synthesized)
gaggtatttggttatcaaagataatgaaaatgacaatcaaactggattatggacagaacttggaaatattgagaataatttcttaaagccacttcatataggacttaatatgtcaaaagc

SEQ ID NO: 602041 - DNA, 120 bp, Artificial Sequence
  ENSG00000174842_13 (sequence is synthesized)
acattatgaagcagaaattaaaaatagccaagaggcccagaaatctaaagatctttgttctataactgtaagtggagaagagatccctaatatgcctcctgaaatgcagcttaaggtcct

SEQ ID NO: 602042 - DNA, 120 bp, Artificial Sequence
  ENSG00000174842_14 (sequence is synthesized)
gcattcagctcttttcacatttgatttgattgaaagtgttctagctcgagtggaagaactcattgaaataaaaacaaagtctacctctgaagaaaatattgggataaagtgaaagttcca

SEQ ID NO: 602043 - DNA, 120 bp, Artificial Sequence
  ENSG00000174842_15 (sequence is synthesized)
tattgggataaagtgaaagttccatttcctaaataaaaactaataaaatatagtactttccattatgattcatttaatacctttataaaaaatttttctgtaaaaatttactgcttgaaa

SEQ ID NO: 602044 - DNA, 120 bp, Artificial Sequence
  ENSG00000174842_16 (sequence is synthesized)
ataaagagatgtgtaagtattaatttttgtaaaattaaatacctttcaaaatatgggaagggcacagattgtttttaattatatttgtggtcactcaaattgtttatcttctttaatcct

SEQ ID NO: 602045 - DNA, 120 bp, Artificial Sequence
  ENSG00000174842_17 (sequence is synthesized)
taatcctgatccttttcatagatttcactggtacagtagatttcaaggtcacttattaaagtatttattagggtaatcctaattttgatacgtgtgttatttacgttacatttatctaga

SEQ ID NO: 602046 - DNA, 120 bp, Artificial Sequence
  ENSG00000174842_18 (sequence is synthesized)
tgtgttatttacgttacatttatctagaatttaaacagatttccttttttcatagataaatcaagaagttattgtatttaatttttatttgcatatacttttttttgtttgttttttggg

SEQ ID NO: 602047 - DNA, 120 bp, Artificial Sequence
  ENSG00000174842_19 (sequence is synthesized)
gtaggaaagggaaagcatcctctagaactagatccgtggtgtggatatcaattgaaaggccatacttgggatgaaggcataaataaggtagagtcattgtggagatggctcatagaggaa

SEQ ID NO: 602048 - DNA, 120 bp, Artificial Sequence
  ENSG00000174842_20 (sequence is synthesized)
gagacgtctgtgaatttatcctcaaataattttctcataaataaaacttaacaagttaatagatctcaaaacctggagctatccaaatggtgcagtgataagcgtagtgccccaagtaca

SEQ ID NO: 602049 - DNA, 120 bp, Artificial Sequence
  ENSG00000174842_21 (sequence is synthesized)
tttttcttttaattggtattcacataactagctatagtaataattattaaatagtgaagtccattgtgaaaagcaagggccatgtttcatttatttttgttttttgagcttttatcgcgt

SEQ ID NO: 602050 - DNA, 120 bp, Artificial Sequence
  ENSG00000174844_0 (sequence is synthesized)
gcccttctccagctactcgtttgagagccggtggcgttccggaggtttctccctcgttatccccctgcctttcacctgaggagaggctctgactgtctctctctctctctggcgtctgcg

SEQ ID NO: 602051 - DNA, 120 bp, Artificial Sequence
  ENSG00000174844_1 (sequence is synthesized)
cagcggggaagtagtgagaaacaatcagagtacagagtattttaatctttaggggatcaagatgtcagatgcaaacaaagctgccattgcagcagaaaaggaagctctgaacttgaagtt

SEQ ID NO: 602052 - DNA, 120 bp, Artificial Sequence
  ENSG00000174844_2 (sequence is synthesized)
accccccattgtccatctcccagaaaacataggcgttgatacaccaacacaaagtaagctgctaaaatacagaagatccaaggagcagcagcagaaaattaatcagttagtaattgatgg

SEQ ID NO: 602053 - DNA, 120 bp, Artificial Sequence
  ENSG00000174844_3 (sequence is synthesized)
agccaaaagaaatttagacagaacactgggtaaaagaacacctctattaccaccacctgattatcctcaaactatgaccagtgaaatgaaaaaaaaaggattcaactatatttatatgaa

SEQ ID NO: 602054 - DNA, 120 bp, Artificial Sequence
  ENSG00000174844_4 (sequence is synthesized)
gcaatgtgtagaaagtagtcctttagtacctattcagcaggaatggctggatcacatgttaaggctgatacctgagtctttaaaggaagggaaagaaagagaagaacttcttgaaagtct

SEQ ID NO: 602055 - DNA, 120 bp, Artificial Sequence
  ENSG00000174844_5 (sequence is synthesized)
cataaatgaggtgtcaagtgactttgaaaacagcatgaagagatatttggtgcagagcgttcttgtgaaaccaccagttaaatcgcttgaagatgaaggaggtcctttacctgaatctcc

SEQ ID NO: 602056 - DNA, 120 bp, Artificial Sequence
  ENSG00000174844_6 (sequence is synthesized)
tgtaggcctagattattctaatccttggcattctagctatgtgcaggcaagaaatcaaatattctctaatttgcacattattcatccaactatgaaaatgttactggaccttggttatac

SEQ ID NO: 602057 - DNA, 120 bp, Artificial Sequence
  ENSG00000174844_7 (sequence is synthesized)
aacatttgctgatacagttttgttggacttcacaggaattagagctaaaggtccaattgactgtgaatcactgaaaactgatctatcaatacaaactagaaacgcagaagagaagataat

SEQ ID NO: 602058 - DNA, 120 bp, Artificial Sequence
  ENSG00000174844_8 (sequence is synthesized)
gaatacatggtatccaaaggttataaatctctttaccaagaaggaggcactagaaggtgttaaacctgaaaaattggatgcattttatagctgtgtttccacacttatgtcaaatcagct

SEQ ID NO: 602059 - DNA, 120 bp, Artificial Sequence
  ENSG00000174844_9 (sequence is synthesized)
aaaggatctattaaggagaactgtagaaggatttgtaaaactctttgacccaaaagatcaacaaaggctgccaatatttaagatagaattgacatttgatgacgacaaaatggaatttta

SEQ ID NO: 602060 - DNA, 120 bp, Artificial Sequence
  ENSG00000174844_10 (sequence is synthesized)
tcctacctttcaagatttggaagataatgtcttgagtttggtggaacgaatagccgaagctctgcagaatgtccaaacaatcccctcttggctatcaggaacttcaacaccagtaaatct

SEQ ID NO: 602061 - DNA, 120 bp, Artificial Sequence
  ENSG00000174844_11 (sequence is synthesized)
tgacacagaacttcctgaacacgtgttacactgggctgttgatacactgaaggcagcagtacatcggaacttagaaggtgcaagaaagcattatgagacatatgttgaaaaatataattg

SEQ ID NO: 602062 - DNA, 120 bp, Artificial Sequence
  ENSG00000174844_12 (sequence is synthesized)
gctccttgatgggactgcagttgagaatatagagacttttcagacagaagatcatacttttgatgaatatacagagtttatagaaaaatttctcagtcttgcctcagaaataatgctttt

SEQ ID NO: 602063 - DNA, 120 bp, Artificial Sequence
  ENSG00000174844_13 (sequence is synthesized)
gcctcagtggattcattacactatggtgcgtttggattgtgaagatttgaagacaggcctgacaaataaagcaaaagcctttgcaaacatattattaaatgacatagcttcaaaatatag

SEQ ID NO: 602064 - DNA, 120 bp, Artificial Sequence
  ENSG00000174844_14 (sequence is synthesized)
aaaagaaaatgaatgtatttgcagtgaatttgaagcaattaaagaacatgcattaaaagtccctgaaacaacagaagagatgatggatctgatatcttatgtagaaaaagcccggactgt

SEQ ID NO: 602065 - DNA, 120 bp, Artificial Sequence
  ENSG00000174844_15 (sequence is synthesized)
aggaatcgaagagttgattttaaggatccaggaatctaaacgccaaatgagttactttttagatgttttcctatttcctcaagaagacttagctttaaatgcaactgtcctcatgtggcc

SEQ ID NO: 602066 - DNA, 120 bp, Artificial Sequence
  ENSG00000174844_16 (sequence is synthesized)
taggaaaattaatcccatctttgatgaaaatgatgagctaattgagaatgctaaacataaaaaagaaaatgaactaatggccaagagagagaaacttattttggaaatagaaaaagaatc

SEQ ID NO: 602067 - DNA, 120 bp, Artificial Sequence
  ENSG00000174844_17 (sequence is synthesized)
acgccgcatggaggagtttacagaatttgcagagctggagcgcatgcaacagtatgtgacagatgtaagacaactacaaaaacgtattcaggaatctgaagaagcagtgcagtttattaa

SEQ ID NO: 602068 - DNA, 120 bp, Artificial Sequence
  ENSG00000174844_18 (sequence is synthesized)
taaagaagaggaacttttcaagtgggaattgacaaaatatcctgaactggataaattaaaagttaacattgagccctatcagaagttttttaattttgttttgaagtggcagcgatcaga

SEQ ID NO: 602069 - DNA, 120 bp, Artificial Sequence
  ENSG00000174844_19 (sequence is synthesized)
aaaacggtggatggatggagggtttttggacctcaatggggaaagcatggaggctgatgtggaagagttttcccgagaaatttttaagacactaaaatttttccaaacgaagctaaagaa

SEQ ID NO: 602070 - DNA, 120 bp, Artificial Sequence
  ENSG00000174844_20 (sequence is synthesized)
agaattacaagaaaaaagaaaggcagcaagaaaacggtctttggaagaagagaaaattgaagaagaaccaaaagacaatgctactattactatgtgcagtacagtcatggaacagataaa

SEQ ID NO: 602071 - DNA, 120 bp, Artificial Sequence
  ENSG00000174844_21 (sequence is synthesized)
agcttttaaggaatatattcctactgtctccattctgtgcaatccaggaatgagagctcgtcactggaaacagatatcagaaattgtaggctatgacttgactccagactctggaactac

SEQ ID NO: 602072 - DNA, 120 bp, Artificial Sequence
  ENSG00000174844_22 (sequence is synthesized)
actgagaaaagttttaaaattaaaccttaccccatacttggaacaatttgaagtgataagtgcaggtgcaagcaaggaattttcattagagaaagccatgaatacaatgataggaacttg

SEQ ID NO: 602073 - DNA, 120 bp, Artificial Sequence
  ENSG00000174844_23 (sequence is synthesized)
ggaagatattgcttttcatataagtctgtatcgtgacactggagtctgtattctttcttcggtggatgagattcaggccatccttgatgatcaaattataaaaactcagacaatgagagg

SEQ ID NO: 602074 - DNA, 120 bp, Artificial Sequence
  ENSG00000174844_24 (sequence is synthesized)
ctcacctttcatcaaaccatttgaacatgagatcaaggcctgggaggaccgcttgattcgaatacaagaaacaattgatgaatggttaaaagtacaagctcaatggctgtacttagagcc

SEQ ID NO: 602075 - DNA, 120 bp, Artificial Sequence
  ENSG00000174844_25 (sequence is synthesized)
catcttttgttctgaggatatcatgcaacagatgccagaagaagggcgtcaatttcagacagtagacagacactggagagatatcatgaagttttgtgctaaagatccaaaggttcttgc

SEQ ID NO: 602076 - DNA, 120 bp, Artificial Sequence
  ENSG00000174844_26 (sequence is synthesized)
tgccacttctttaacaggtttattggaaaaactacagaactgcaatgaacttttggagaaaattatgaaaggtcttaacgcatatcttgaaaagaaacgtcttttcttccctcgtttttt

SEQ ID NO: 602077 - DNA, 120 bp, Artificial Sequence
  ENSG00000174844_27 (sequence is synthesized)
cttcttatctaatgatgaaatgttagagattttatcagagaccaaagatccacttagagttcagccacatttaaaaaaatgctttgagggcattgctaaattagagttccttcccaattt

SEQ ID NO: 602078 - DNA, 120 bp, Artificial Sequence
  ENSG00000174844_28 (sequence is synthesized)
ggacattaaagccatgtatagctctgagggcgagcgagtggagctgattgcactcatttccacgtctgcagcgcggggtgctgtggaaaagtggctcattcaagtggaagacctaatgct

SEQ ID NO: 602079 - DNA, 120 bp, Artificial Sequence
  ENSG00000174844_29 (sequence is synthesized)
ccggagtgttcacgatgtgatcgctgcagccaggctggcttatccagaatctgcaagaagagactgggttcgagagtggcctggccaagttgtactttgtatttctcaaatgttctggac

SEQ ID NO: 602080 - DNA, 120 bp, Artificial Sequence
  ENSG00000174844_30 (sequence is synthesized)
atctgagacacaggaagtgataagtggcgggacggagggattaaagaagtattataaggaacttcagaaccaactgaatgagattgtagagctggtaagaggaaagttgtctaagcagac

SEQ ID NO: 602081 - DNA, 120 bp, Artificial Sequence
  ENSG00000174844_31 (sequence is synthesized)
caggaccactctgggggctttggttactattgatgtccatgctagagatgtggtcatggacatgattaaaatgggtgtctcacatgatacagatttcctgtggcttgctcagctccgata

SEQ ID NO: 602082 - DNA, 120 bp, Artificial Sequence
  ENSG00000174844_32 (sequence is synthesized)
ttattgggaaaatgagaatgcccgagttcgtatcattaattgcaatgtaaaatatgcttatgaatatcttggtaactcacctcgacttgtcattacgcctctaactgacaggtgttacag

SEQ ID NO: 602083 - DNA, 120 bp, Artificial Sequence
  ENSG00000174844_33 (sequence is synthesized)
aacattgataggtgctttctatttaaaccttggaggtgctccagaggggccagcaggcacaggaaaaaccgaaaccaccaaggacttggctaaagctcttgctgtacagtgtgtggtgtt

SEQ ID NO: 602084 - DNA, 120 bp, Artificial Sequence
  ENSG00000174844_34 (sequence is synthesized)
caactgttctgatgggctagattatctagcaatgggaaagttttttaaaggactggcttcttctggtgcttgggcttgctttgatgaattcaatcgaattgagttggaagtgttgtcagt

SEQ ID NO: 602085 - DNA, 120 bp, Artificial Sequence
  ENSG00000174844_35 (sequence is synthesized)
ggtagctcaacagatcctttgcattcagagagctattcaacagaagttggttgtgtttgtttttgaagggacagaacttaagctcaatccgaattgttttgtagctattaccatgaatcc

SEQ ID NO: 602086 - DNA, 120 bp, Artificial Sequence
  ENSG00000174844_36 (sequence is synthesized)
tggctatgcaggacgctctgaattgccggacaatcttaaggttctttttagaacagtggctatgatggttccaaactatgcgcttatagcagaaatctccctctactcttacggattttt

SEQ ID NO: 602087 - DNA, 120 bp, Artificial Sequence
  ENSG00000174844_37 (sequence is synthesized)
gaatgcaagacctctgtctgtgaaaatagtaatgacctataggctttgctcagagcagctctcatcgcaatttcattacgactatggaatgcgagcagtaaaagccgttttagtggctgc

SEQ ID NO: 602088 - DNA, 120 bp, Artificial Sequence
  ENSG00000174844_38 (sequence is synthesized)
tggcaatctaaaactaaaatacccaaatgaaaatgaagatatacttcttcttcgatcaattaaagatgtaaatgaaccaaagtttttatcacatgatatacctttatttaatggaataac

SEQ ID NO: 602089 - DNA, 120 bp, Artificial Sequence
  ENSG00000174844_39 (sequence is synthesized)
tagtgacttatttcctggtattaaacttcctgaagctgactatcacgaatttttggaatgtgctcatgaagcctgcaatgtacataatcttcagcctgttaaattttttcttgaaaaaat

SEQ ID NO: 602090 - DNA, 120 bp, Artificial Sequence
  ENSG00000174844_40 (sequence is synthesized)
aattcaaacatatgaaatgatgattgttagacatggttttatgttagtaggagagccttttgctgctaagacaaaagttctgcatgtgctggcggatacgctaactttaatgaatgaaca

SEQ ID NO: 602091 - DNA, 120 bp, Artificial Sequence
  ENSG00000174844_41 (sequence is synthesized)
tggctatggagaggaagaaaaggtcatttatagaactgtaaaccccaaatctattactatgggccaactttttggacagtttgacccagtgtctcatgagtggactgatggtattgtggc

SEQ ID NO: 602092 - DNA, 120 bp, Artificial Sequence
  ENSG00000174844_42 (sequence is synthesized)
taacacttttagagaatttgccttatcagaaacacctgaccggaaatgggttgtatttgatggtcctattgacactttgtggatagagagcatgaacacagtattggatgataataaaaa

SEQ ID NO: 602093 - DNA, 120 bp, Artificial Sequence
  ENSG00000174844_43 (sequence is synthesized)
gctttgccttatgagtggagaaatcattcagatgtccccccaaatgagcctcatctttgaaacaatggacctttcccaggcatcccctgccactgtaagtcgttgtggtatgatttattt

SEQ ID NO: 602094 - DNA, 120 bp, Artificial Sequence
  ENSG00000174844_44 (sequence is synthesized)
ggagccttcacagttaggatgggaaccacttgtgtcttcttggttgaattcactgaaaggacctctgtgtgaaccagaatatcaagctcttctgagaggactttttgcctggttaatacc

SEQ ID NO: 602095 - DNA, 120 bp, Artificial Sequence
  ENSG00000174844_45 (sequence is synthesized)
accctctttaaaccagcgtaagaaaaaatgcaaggaactgattcctacaagcaacagcaacgtggttgtatctctcacacgcctctttgaagtgctactttgcaatgtggtagaaaatga

SEQ ID NO: 602096 - DNA, 120 bp, Artificial Sequence
  ENSG00000174844_46 (sequence is synthesized)
tcctactagcaagcacattcgtgtttggattatggcttgctttatattctctttgatttggtcgattggaggaagttgtgatacagatggccgtcgtgtttttgatactttcatacgatt

SEQ ID NO: 602097 - DNA, 120 bp, Artificial Sequence
  ENSG00000174844_47 (sequence is synthesized)
aatcatactgggaaaagatgatgaaaacccagtgccagattctgtgggtaaatgggaatgcccatttgatgaaaaaggcctggtctatgactacatgtatgagttgaaaaacaaaggtcg

SEQ ID NO: 602098 - DNA, 120 bp, Artificial Sequence
  ENSG00000174844_48 (sequence is synthesized)
ctgggtccattggaatgaattaattaaaaatactaatttaggagataaacaaatcaagattcaagatatcatagtccctacgatggacacaattagatatacgtttctaatggatttgag

SEQ ID NO: 602099 - DNA, 120 bp, Artificial Sequence
  ENSG00000174844_49 (sequence is synthesized)
tattacctatgcaaagccactcctttttgtgggtccaacgggtacaggaaaatctgtgtatgtgaaggataagctaatgaatcacttggaaaaggaccagtactttcctttttatattaa

SEQ ID NO: 602100 - DNA, 120 bp, Artificial Sequence
  ENSG00000174844_50 (sequence is synthesized)
aggttcagaacattatcatggctagattggataaaagacgcaaaggagtctttggaccacctatgggaaagaagtgtataatttttatagatgatatgaatatgcctgcattggagaagt

SEQ ID NO: 602101 - DNA, 120 bp, Artificial Sequence
  ENSG00000174844_51 (sequence is synthesized)
atggagctcaaccacctattgaattattacgacagttttttgactgtggacattggtacgaccttaaggacacaagtaaaatcacgctggtggacatagagctgattgctgcaatgggcc

SEQ ID NO: 602102 - DNA, 120 bp, Artificial Sequence
  ENSG00000174844_52 (sequence is synthesized)
ctccaggtggtggaagaaatccagttactccccgttgtattcgacatttcaacatctgcagtattaattcttttagtgatgaaactatggtccgaatcttctcatctattgtagcattct

SEQ ID NO: 602103 - DNA, 120 bp, Artificial Sequence
  ENSG00000174844_53 (sequence is synthesized)
accttagaactcatgaatttcctccagagtactttgtaattgggaaccagatagtcaatgggactatggagatatataaacaatctgtggaaaatcttttacccactcccacaaaatccc

SEQ ID NO: 602104 - DNA, 120 bp, Artificial Sequence
  ENSG00000174844_54 (sequence is synthesized)
attatactttcaacttgcgtgatttttcacgcgtcatccggggctgtttactcattgaaagagacgccgtggcgaacaaacacactatgatccgtctgtttgtgcatgaggttctccgag

SEQ ID NO: 602105 - DNA, 120 bp, Artificial Sequence
  ENSG00000174844_55 (sequence is synthesized)
tgttttatgatcgcctcattaatgatgatgatcgaagatggctgttccagttaactaaaactgttataaaggaccattttaaagaatcatttcacagtatcttttcacatttgaggaaac

SEQ ID NO: 602106 - DNA, 120 bp, Artificial Sequence
  ENSG00000174844_56 (sequence is synthesized)
aaaatgcaccagtaactgaagaagacttaagaaatctcatgtttggtgattatatgaatcctgaccttgaaggagatgatagagtttatattgaaattccaaatattcatcattttagtg

SEQ ID NO: 602107 - DNA, 120 bp, Artificial Sequence
  ENSG00000174844_57 (sequence is synthesized)
atgttgtggaccagtgcttagatgagtataatcaaacacacaaaacaagaatgaatcttgtcatttttaggtatgttttggaacatttatcaagaatatgtcgagttctaaagcaatctg

SEQ ID NO: 602108 - DNA, 120 bp, Artificial Sequence
  ENSG00000174844_58 (sequence is synthesized)
gtggaaatgctttgcttgttggtcttggaggaagtggtcgtcaatctttaactcgtctggctacatccatggcaaaaatgcatattttccaaccagaaatttctaagagctatggtatga

SEQ ID NO: 602109 - DNA, 120 bp, Artificial Sequence
  ENSG00000174844_59 (sequence is synthesized)
atgaatggagagaggatatgaagggtctgttaaggaatgtgggcatgaagggccagaagaccgtctttcttatcacggacactcagattaaagaggaagctttcctagaggatatcgaca

SEQ ID NO: 602110 - DNA, 120 bp, Artificial Sequence
  ENSG00000174844_60 (sequence is synthesized)
gtgtgctcaatacaggagaagtgcctaacatttttgcagcagatgagaagcaggaagtgatggagggtgttcgcccagtagctcaggctggcaataaacatgatgaactcagtcccttag

SEQ ID NO: 602111 - DNA, 120 bp, Artificial Sequence
  ENSG00000174844_61 (sequence is synthesized)
ctctgtttgctttctttgtgaatcgctgcaaagataatcttcatgtcgtggtggcctttagccccattggagatgcctttcgaaatcgcttgagacagttcccatccctcatcaattgct

SEQ ID NO: 602112 - DNA, 120 bp, Artificial Sequence
  ENSG00000174844_62 (sequence is synthesized)
gtaccattgactggtttcagtcatggcctgaagatgctcttgaacgtgtagctgtgaaattcttagaaacactggagcttactgaggttgaacaacaagagatagttccaatctgtaaac

SEQ ID NO: 602113 - DNA, 120 bp, Artificial Sequence
  ENSG00000174844_63 (sequence is synthesized)
actttcacacctccattatggatctttcagaaaggttcttgcatgagttaggacgacataactatgttactgctacttcttatcttgaactcattggctcatttcgacagcttttgacac

SEQ ID NO: 602114 - DNA, 120 bp, Artificial Sequence
  ENSG00000174844_64 (sequence is synthesized)
agaagcgacaagctgtcatggaagcaaaacaacgatacatgaatgggcttgacaaattagcttttgctgagtctcaggttggtgaaatgcaaatggagcttgttgaattacagcccaaat

SEQ ID NO: 602115 - DNA, 120 bp, Artificial Sequence
  ENSG00000174844_65 (sequence is synthesized)
tggaggaagctaaaattgaaaatgcaaatatgatgcaggttattgagatagagtctgtacaagtggaagcgaaaagacaatttgtgaaattggatgaagagatagccagtgggaaagctg

SEQ ID NO: 602116 - DNA, 120 bp, Artificial Sequence
  ENSG00000174844_66 (sequence is synthesized)
aagaagcccaagctctgaaaaatgagtgtgaaagtgacctagctgaggcgattccagccttggaagcagctctgtctgcactggatacacttaagccagccgacattacgattgtgaaat

SEQ ID NO: 602117 - DNA, 120 bp, Artificial Sequence
  ENSG00000174844_67 (sequence is synthesized)
caatgaagaatcctccatctggtgttaaactagttatggctgctgtttgtgtcatgaaagatataaaaccagaaaaaatttcagatccttcagggactggaggcaagatattagattact

SEQ ID NO: 602118 - DNA, 120 bp, Artificial Sequence
  ENSG00000174844_68 (sequence is synthesized)
ggggacctagcaaaaaacttctgggagatatgaatttcttaagagatttgaaagaatatgacaaggacaacattccagtgactgttatgcagaagattcgtagtgaatacttaatgaacc

SEQ ID NO: 602119 - DNA, 120 bp, Artificial Sequence
  ENSG00000174844_69 (sequence is synthesized)
ctgaatttgatccccctaaggttgctaaagcttcttctgcagctgagggtctgtgtaagtggatcatggccatggaagtgtacgacagagttgcaaaggtagtggctcctaagaaagctc

SEQ ID NO: 602120 - DNA, 120 bp, Artificial Sequence
  ENSG00000174844_70 (sequence is synthesized)
gcttatcagaagctcagaagtctttagctgagacaatggagcttttgaatcagaagagagcagaactggcagaagtagaacatcatctggaaaatttacaaatgacatttcttgagaaaa

SEQ ID NO: 602121 - DNA, 120 bp, Artificial Sequence
  ENSG00000174844_71 (sequence is synthesized)
cagaggaaaaggctgctttagaagaccaggtggaactctgtgctaagaagcttgaaagagcctcacaattaattggaggactgggtggagaaaaatcaagatgggcccaagctgcagatg

SEQ ID NO: 602122 - DNA, 120 bp, Artificial Sequence
  ENSG00000174844_72 (sequence is synthesized)
accttcagataacatatgaaaatttaactggcgatgtcttagtatcagcaggagtaatagcttaccttggtgctttcacttctggctttcgacaaacatgtacaaaagattggagcatgt

SEQ ID NO: 602123 - DNA, 120 bp, Artificial Sequence
  ENSG00000174844_73 (sequence is synthesized)
tgtgcaagaagaaaaaaatcccgtgttcagaggagttcttgttgagtaaaaccctgggtgatccagtaaaaattagagcttggaatattgctggtttaccaacagatacattttccatag

SEQ ID NO: 602124 - DNA, 120 bp, Artificial Sequence
  ENSG00000174844_74 (sequence is synthesized)
ataacggagtgatcgttaacaactgtaggcgttggcctttaatgattgacccccagggtcaagccaataagtggatcaaaaactctgaaaaagaaaatcagcttagtgttattaagctat

SEQ ID NO: 602125 - DNA, 120 bp, Artificial Sequence
  ENSG00000174844_75 (sequence is synthesized)
cagattcagactatatgagaacattggaaaactgtattcagtttggaactccacttctattagaaaatgttggtgaagaactggatccatctttggagcctttactactcagacaaactt

SEQ ID NO: 602126 - DNA, 120 bp, Artificial Sequence
  ENSG00000174844_76 (sequence is synthesized)
ttaaacaaggtggcattgattgcatcagacttggtgaggtcattattgagtattcctttgatttcaaattttatatcaccacaaaactgagaaacccgcactatatgccagaactggcta

SEQ ID NO: 602127 - DNA, 120 bp, Artificial Sequence
  ENSG00000174844_77 (sequence is synthesized)
caaaagtgtctttgctcaatttcatgataactccagaaggacttgaagatcaattactaggtattgttgttgcaaaggagagaccagaattagaagaggaacgaaatgccctgattcttc

SEQ ID NO: 602128 - DNA, 120 bp, Artificial Sequence
  ENSG00000174844_78 (sequence is synthesized)
agtctgcagctaacaagaaacagctgaaagacatagagaaaaaaattttagaaacattatcatcatcagaaggaaacattttagaagatgaaagtgcaattaaagtcttagactctgcca

SEQ ID NO: 602129 - DNA, 120 bp, Artificial Sequence
  ENSG00000174844_79 (sequence is synthesized)
aaatgatgtccaatgaaataacaaagaaacagcagattgcagaaaaaacagaactcaaaatagcagagtctcgagaaggctatagacccatcgccaaacactcgtcagtgttattcttta

SEQ ID NO: 602130 - DNA, 120 bp, Artificial Sequence
  ENSG00000174844_80 (sequence is synthesized)
gcattgcagacctggctaatattgatcccatgtatcagtactctctcacgtggtttgtgaacctttatatcaactctattcatgacagtaacaaatccaagattttggaaaagcgcctac

SEQ ID NO: 602131 - DNA, 120 bp, Artificial Sequence
  ENSG00000174844_81 (sequence is synthesized)
gatatttaaatgaccacttcacatacaacttatattgtaatatatgccgatcactatttgagaaggacaagctgttattttcctttttattatgtgccaatcttcttctggcaaggaaag

SEQ ID NO: 602132 - DNA, 120 bp, Artificial Sequence
  ENSG00000174844_82 (sequence is synthesized)
agattgaataccaggaactgatgtttcttttaactggaggagtaagtcttaaaagtgctgagaaaaatcctgatccaacttggctacaggacaaaagctgggaggaaatctgtcgggcaa

SEQ ID NO: 602133 - DNA, 120 bp, Artificial Sequence
  ENSG00000174844_83 (sequence is synthesized)
gtgaatttcctgccttcagaggactcaggcaacatttttgtgaacatatatatgaatggcgagaaatctatgacagtaaagagccacataatgctaaatttccagcaccaatggataaga

SEQ ID NO: 602134 - DNA, 120 bp, Artificial Sequence
  ENSG00000174844_84 (sequence is synthesized)
acctaaatgaactacagaaaataataattcttcggtgtttaagacctgataagataaccccagctataacaaactatgtaactgacaaactagggaaaaagtttgtagagcctccaccat

SEQ ID NO: 602135 - DNA, 120 bp, Artificial Sequence
  ENSG00000174844_85 (sequence is synthesized)
ttgatttgacaaagagttacttggattcaaattgcaccattcccttaatttttgttctatctccaggagcagatcctatggccagcctgctgaaatttgcaaatgataaatctatgtctg

SEQ ID NO: 602136 - DNA, 120 bp, Artificial Sequence
  ENSG00000174844_86 (sequence is synthesized)
gaaataagtttcaagctatttcactgggacagggacaaggaccgattgcagcaaaaatgattaaagcagcaattgaagaaggaacttgggtgtgcctacagaattgccatcttgcagtgt

SEQ ID NO: 602137 - DNA, 120 bp, Artificial Sequence
  ENSG00000174844_87 (sequence is synthesized)
cctggatgcccatgttggaaaaaatatgtgaagattttacctctgaaacctgtaactcatcctttaggctttggctgacaagctatccatcttcaaaattcccagtaacaattctacaga

SEQ ID NO: 602138 - DNA, 120 bp, Artificial Sequence
  ENSG00000174844_88 (sequence is synthesized)
atggagtaaaaatgactaatgaacctcccacgggtcttcggctgaatctccttcaatcatatctcactgatccagtttctgatcctgagtttttcaagggatgccgtggaaaggaactgg

SEQ ID NO: 602139 - DNA, 120 bp, Artificial Sequence
  ENSG00000174844_89 (sequence is synthesized)
cctgggagaagttactgtttggagtttgtttttttcatgcccttgtgcaagagagaaagaaatttggtcctcttggttggaatattccatatggatttaatgaatctgacttgcgcatca

SEQ ID NO: 602140 - DNA, 120 bp, Artificial Sequence
  ENSG00000174844_90 (sequence is synthesized)
gtatccgacaactgcagttatttatcaatgaatatgatacaattccatttgaagctatatcttacctgactggggagtgtaattatggaggaagagtgacagacgattgggacagacgtc

SEQ ID NO: 602141 - DNA, 120 bp, Artificial Sequence
  ENSG00000174844_91 (sequence is synthesized)
ttctattaaccatgctggctgacttttataatctgtacatagttgaaaaccctcattataagttttctcccagtggaaactattttgcacctcctaaaggcacttatgaggactacattg

SEQ ID NO: 602142 - DNA, 120 bp, Artificial Sequence
  ENSG00000174844_92 (sequence is synthesized)
aattcattaagaaacttccatttactcaacaccctgagatatttggattacatgaaaacgttgacatctccaaggatcttcaacaaacaaaaaccctctttgagtccttgctcctcaccc

SEQ ID NO: 602143 - DNA, 120 bp, Artificial Sequence
  ENSG00000174844_93 (sequence is synthesized)
agggaggctccaaacagacaggagcctcaggaagtactgatcagattctgttagaaattaccaaagatatcctcaacaagctccctagtgatttcgacattgaaatggcactacggaagt

SEQ ID NO: 602144 - DNA, 120 bp, Artificial Sequence
  ENSG00000174844_94 (sequence is synthesized)
atcctgtgagatatgaagaaagcatgaatactgtgttagtacaagaaatggaaagatttaacaatttaattataactatacgtaacactctacgggaccttgaaaaagctattaagggtg

SEQ ID NO: 602145 - DNA, 120 bp, Artificial Sequence
  ENSG00000174844_95 (sequence is synthesized)
tggttgtgatggattctgcattggaggcactctccggtagcttacttgttggaaaggttccagaaatatgggccaaacgttcatacccaagccttaagcccctgggaagttacatcacag

SEQ ID NO: 602146 - DNA, 120 bp, Artificial Sequence
  ENSG00000174844_96 (sequence is synthesized)
atttcctagcccggttgaactttttacaggactggtataattcaggaaaaccttgtgtgttttggctgtcaggtttctttttcactcaggcctttttaactggagctatgcagaattatg

SEQ ID NO: 602147 - DNA, 120 bp, Artificial Sequence
  ENSG00000174844_97 (sequence is synthesized)
ccagaaaatataccacccctattgatttgctaggatatgaatttgaggttatcccatctgatacatctgacacatcaccagaagatggtgtttatatccacggactgtatctcgatggcg

SEQ ID NO: 602148 - DNA, 120 bp, Artificial Sequence
  ENSG00000174844_98 (sequence is synthesized)
cacgctgggaccgagaaagtggattgcttgctgaacaatatcccaaacttctgtttgacctgatgcccatcatatggataaaaccaactcaaaaatctcggattataaagtcggatgcct

SEQ ID NO: 602149 - DNA, 120 bp, Artificial Sequence
  ENSG00000174844_99 (sequence is synthesized)
atgtctgtcccctctacaagacaagtgaacgtaaaggaactctttccactacgggacattctactaactttgtcattgcaatgttgttaaaaacagaccaacctactcggcactggatca

SEQ ID NO: 602150 - DNA, 120 bp, Artificial Sequence
  ENSG00000174844_100 (sequence is synthesized)
agcgcggggttgctttgctttgtcagttggatgactaaattggacaaatttataaaacatccaaaagtttaaaaaaaaaaaaacctgtcctacttaaaatatatacattataaaaccaag

SEQ ID NO: 602151 - DNA, 120 bp, Artificial Sequence
  ENSG00000174844_101 (sequence is synthesized)
accagcgggttgaattattccagctaaactatttgtatacaaccatagtgtctaaaattttaaaaattctaattactttccgtatttcaaattattttaaatatgtgcctctaaaaactc

SEQ ID NO: 602152 - DNA, 86 bp, Artificial Sequence
  ENSG00000174844_102 (sequence is synthesized)
agtctcagctactcaggaggctgaggtgaaaggattactggagcctaggagttcgagtacttgagtgacagagcaaaactctttgt

SEQ ID NO: 602153 - DNA, 120 bp, Artificial Sequence
  ENSG00000174844_103 (sequence is synthesized)
acttgagtgacagagcaaaactctttgtctcaaaaaacagaagaaacttaaatttctttcaaagttgttataccatttacaatctcaccagcagtgtatgagatttccagttcttccaca

SEQ ID NO: 602154 - DNA, 120 bp, Artificial Sequence
  ENSG00000174844_104 (sequence is synthesized)
tccttttcaacctttgggcttatcagtcttttactttttactattgttttattttttcccactgcactttcacatctagattatcagtctttttaatttcatgtgtatattggtatccca

SEQ ID NO: 602155 - DNA, 120 bp, Artificial Sequence
  ENSG00000174844_105 (sequence is synthesized)
ctgtggttttaatttgcatttccctgatgactaatgatgtttagcatcttttaacatgtcatgttccatctgtgtatctttttactaataaaaataaagtgtcttttgtttgtacatttt

SEQ ID NO: 602156 - DNA, 120 bp, Artificial Sequence
  ENSG00000174844_106 (sequence is synthesized)
taagatgtctaatgatggttgcttttgagtgggatgatataataaagcatcaaataatttacatttggcttttgcagaagatttgactcttcaaactatgtttcattcacgttaatgctc

SEQ ID NO: 602157 - DNA, 120 bp, Artificial Sequence
  ENSG00000174844_107 (sequence is synthesized)
aagaggtgagagggccaaggtaggctgtgtgtttgacgtcagggaagagggcctcgtgatggaaaatgtgggcaacataagcaaaaaccagaatcaggaattgtacatcaggtggcactt

SEQ ID NO: 602158 - DNA, 120 bp, Artificial Sequence
  ENSG00000174844_108 (sequence is synthesized)
gatttcgacattgaaatggcactacggaagtatcctgtgagatatgaagaaagcatgaatactgtgttagtacaagaaatggaaagatttaacaagactggtataattcaggaaaacctt

SEQ ID NO: 602159 - DNA, 120 bp, Artificial Sequence
  ENSG00000174851_0 (sequence is synthesized)
gacgccacggacatggtggccgagaccggcggggtgggggacgtgtcgcgcggccgggtggcctcggtcggtaccctgggcgcggagcagctgcctcattagtattcgtacccacgaggc

SEQ ID NO: 602160 - DNA, 120 bp, Artificial Sequence
  ENSG00000174851_1 (sequence is synthesized)
ggcgcagcgggccctcggggacagcgagcgtcgcggccatggcttatcactcgggctacggagcccacggctccaagcacagggcccgggcagccccggatccccctcccctcttcgatg

SEQ ID NO: 602161 - DNA, 120 bp, Artificial Sequence
  ENSG00000174851_2 (sequence is synthesized)
acacaagcggtggttattccagccagcccgggggatacccagccacaggagcagacgtggccttcagtgtcaaccacttgcttggggacccaatggccaatgtggctatggcctatggca

SEQ ID NO: 602162 - DNA, 120 bp, Artificial Sequence
  ENSG00000174851_3 (sequence is synthesized)
gctccatcgcatcccatgggaaggacatggtgcacaaggagctgcaccgttttgtgtctgtgagcaaactcaagtatttttttgctgtggacacagcctacgtggccaagaagctagggc

SEQ ID NO: 602163 - DNA, 120 bp, Artificial Sequence
  ENSG00000174851_4 (sequence is synthesized)
acacaccagaactgggaagtgcagtacagtcgtgatgctcctctgcccccccggcaagacctcaacgcccctgacctctatatccccacgatggccttcattacttacgtgctcctggct

SEQ ID NO: 602164 - DNA, 120 bp, Artificial Sequence
  ENSG00000174851_5 (sequence is synthesized)
gggatggcactgggcattcagaaaaggttctccccggaggtgctgggcctgtgtgcaagcacagcgctggtgtgggtggtgatggaggtgctggccctgctcctgggcctctacctggcc

SEQ ID NO: 602165 - DNA, 120 bp, Artificial Sequence
  ENSG00000174851_6 (sequence is synthesized)
accgtgcgcagtgacctgagcacctttcacctgctggcctacagtggctacaaatacgtgggaatgatcctcagtgtgctcacggggctgctgttcggcagcgatggctactacgtggcg

SEQ ID NO: 602166 - DNA, 120 bp, Artificial Sequence
  ENSG00000174851_7 (sequence is synthesized)
ctggcctggacctcatcggcgctcatgtacttcattgtgcgctctttgcggacagcagccctgggccccgacagcatggggggccccgtcccccggcagcgtctccagctctacctgact

SEQ ID NO: 602167 - DNA, 120 bp, Artificial Sequence
  ENSG00000174851_8 (sequence is synthesized)
ctgggagctgcagccttccagcccctcatcatatactggctgactttccacctggtccggtgaccccctggccccagatggcactgagtttttcattcattgaagatttgatttccttga

SEQ ID NO: 602168 - DNA, 120 bp, Artificial Sequence
  ENSG00000174851_9 (sequence is synthesized)
ctccctagggcatatgtggtggtccccagctcaccctctgttgccccagtctctcttcctcacccctgcctcaggatgcctggctctgagccacccctgctttggcgcaggttctccccg

SEQ ID NO: 602169 - DNA, 120 bp, Artificial Sequence
  ENSG00000174851_10 (sequence is synthesized)
ggacacccaggcgatggccttcattacttacgtgctcctggctgggatggcactgggcattcagaaaagaatgatcctcagtgtgctcacggggctgctgttcggcagcgatggctacta

SEQ ID NO: 602170 - DNA, 120 bp, Artificial Sequence
  ENSG00000174851_11 (sequence is synthesized)
gcatagctgtagcctcgaactgtgaccctggacatgtctcggcccctagtgacctctagcactgctctgttaagagggagcagctgtctccagcagtctcctgaggatctgcgtgccatg

SEQ ID NO: 602171 - DNA, 120 bp, Artificial Sequence
  ENSG00000174851_12 (sequence is synthesized)
cagaggttggggaggtgttgagagtcactctgcgagtcttggggagagaagggggtctcagatccaggtcctggggctgagtcctgggccttccatatccctttggggtctgggtccctg

SEQ ID NO: 602172 - DNA, 120 bp, Artificial Sequence
  ENSG00000174851_13 (sequence is synthesized)
tagggccaatctcaggcctagacccctgggggtcaccaaccctttcctcctcccacccccagaatgatcctcagtgtgctcacggggctgctgttcggcagcgatggctactacgtggcg

SEQ ID NO: 602173 - DNA, 120 bp, Artificial Sequence
  ENSG00000174851_14 (sequence is synthesized)
cgtggtggggtggggtcgggggggacttgtgccttgagggatgaatgggaagagaggcgcagctactgagtcagcatctgttcttggtgctttgtgtatgtgtggcagttgcaagacacc

SEQ ID NO: 602174 - DNA, 120 bp, Artificial Sequence
  ENSG00000174851_15 (sequence is synthesized)
aggcaggcagtgcagggtgaccagtaaggagcttcctgaatgcgccttcagtgtccccaggacacccttttgagaccttcctgtttcttgatttggactgtatccctccccagcctggag

SEQ ID NO: 602175 - DNA, 120 bp, Artificial Sequence
  ENSG00000174851_16 (sequence is synthesized)
ctctgggtttagacctggctttgcagactccagctatgggatttcaggctggttatttgtacttttcagtaaaacaggactaatgtagtccctaccccaaaggactgttggagagattca

SEQ ID NO: 602176 - DNA, 120 bp, Artificial Sequence
  ENSG00000174851_17 (sequence is synthesized)
cagaaaaggatgcctggctctgagccacccctgctttggcgcaggttctccccggaggtgctgggcctgtgtgcaagcacagcgctggtgtgggtggtgatggaggtgctggccctgctc

SEQ ID NO: 602177 - DNA, 120 bp, Artificial Sequence
  ENSG00000174851_18 (sequence is synthesized)
gcagaatttttggctagggctggggcatcatgggattccacccgattcctcacagtgccctcagggatggagcacacagaggggcaccctgaggcctggggtgcggcttgcccacagctt

SEQ ID NO: 602178 - DNA, 80 bp, Artificial Sequence
  ENSG00000174871_0 (sequence is synthesized)
gccccgccggcttcgcgggctggagagcgagggagccgcgggcgagggatcgcaggatgagcgatcggggcccgggcagc

SEQ ID NO: 602179 - DNA, 80 bp, Artificial Sequence
  ENSG00000174871_1 (sequence is synthesized)
ccacggccccgcggtcccggtcccggccgcatcacccacgtcccccgagccccacgggccatgcccggccggccctaagc

SEQ ID NO: 602180 - DNA, 120 bp, Artificial Sequence
  ENSG00000174871_2 (sequence is synthesized)
cccgcgctggcgccccccgggccgccgcccggcgcgggggccatggcgttcaccttcgccgcgttctgctacatgctcaccctggtgctgtgcgcctccctcatcttctttgtcatctgg

SEQ ID NO: 602181 - DNA, 120 bp, Artificial Sequence
  ENSG00000174871_3 (sequence is synthesized)
cacatcatagcctttgatgagctgcggaccgacttcaagaaccccatcgaccaggggaaccctgcgcgggcacgcgagcgtttaaaaaacatcgaacgcatctgctgcctcctgaggaag

SEQ ID NO: 602182 - DNA, 120 bp, Artificial Sequence
  ENSG00000174871_4 (sequence is synthesized)
ctggtggtcccagaatactccatccacggcctcttctgtctgatgtttctgtgtgcagcagagtgggtgaccctgggcctcaacatccccctcctcttctaccacctctggaggtacttc

SEQ ID NO: 602183 - DNA, 120 bp, Artificial Sequence
  ENSG00000174871_5 (sequence is synthesized)
gctgacattctcaactactgccagaaggagtcctggtgcaaacttgccttctacctgctctccttcttctattacctgtacagtatggtttatacgttggtgagtttctaagggggaagc

SEQ ID NO: 602184 - DNA, 120 bp, Artificial Sequence
  ENSG00000174871_6 (sequence is synthesized)
cggccagggagcgagcccagaacggaccggacgcctgtgcacccccagccctgccccttggccgcagaggcctcagccctggggagggagggggcactggtgcccccagcctctccaacc

SEQ ID NO: 602185 - DNA, 120 bp, Artificial Sequence
  ENSG00000174871_7 (sequence is synthesized)
cccaaactgctgctgcggggaaccccccccaccccgccttcagagccctcccccttggactagagcggctgggcagagctctaaacaggggcaggggctcctctgccagcctgtgggcat

SEQ ID NO: 602186 - DNA, 120 bp, Artificial Sequence
  ENSG00000174871_8 (sequence is synthesized)
ggcagtcattcctggaaggggcaggacctccggccttgtccatttcgggggaaacttgggccctgccaaggggcagagcttgaccctggaaattctgggccatccccctccacccccacc

SEQ ID NO: 602187 - DNA, 120 bp, Artificial Sequence
  ENSG00000174871_9 (sequence is synthesized)
ctgaggctccccctgcaggtgggggggtacccgcaccgggaatgagcaggctcagcaggggggcagccccacccctagtctgccctcccctctcccccaggctctttctccagccctgtc

SEQ ID NO: 602188 - DNA, 120 bp, Artificial Sequence
  ENSG00000174871_10 (sequence is synthesized)
tccatctgccccaacctcagcccaccttgtctcttggacctattttctatgtcgcctggaggagtccggcaccccctccccggccatttgtgacaaaatatgaataaactactgcaaata

SEQ ID NO: 602189 - DNA, 120 bp, Artificial Sequence
  ENSG00000174871_11 (sequence is synthesized)
cccctgaggactgagggcagcccagggtgtgaccaggtgggcatctgggtggctgtgtgtgtgcagggctaggctcactggctcatcttcctacagtatggtttatacgttggtgagttt

SEQ ID NO: 602190 - DNA, 120 bp, Artificial Sequence
  ENSG00000174871_12 (sequence is synthesized)
cgcggctgcttcccggccgtgccgacagtgccgcagagatcgctctggcgccccctggcggccacatgtggagcggtgggagctgctccagtacctgcttctccgccaccccatcgcggc

SEQ ID NO: 602191 - DNA, 120 bp, Artificial Sequence
  ENSG00000174871_13 (sequence is synthesized)
tgactgtcagtgagctcggatttcctgccccaccaatcctgagacatggaccaatcctaagacatggacctgaccaccccactctgctgctgtgtactcttcaatgcctccccccaaaat

SEQ ID NO: 602192 - DNA, 120 bp, Artificial Sequence
  ENSG00000174871_14 (sequence is synthesized)
ttttgtgttaaaatcatagcctttgatgagctgcggaccgacttcaagaaccccatcgaccaggggaaccctgcgcgggcacgcgagcgtttaaaaaacatcgaacgcatctgctgcctc

SEQ ID NO: 602193 - DNA, 120 bp, Artificial Sequence
  ENSG00000174871_15 (sequence is synthesized)
ccttctacctgctctccttcttctattacctgtacagggacccagaccccaaagggatatggaaggcccaggactcagccccaggacctggatctgagacccccttctctccccaagact

SEQ ID NO: 602194 - DNA, 120 bp, Artificial Sequence
  ENSG00000174871_16 (sequence is synthesized)
cgcagagtgactctcaacacctccccaacctctgcatggcacgcagatcctcaggagactgctggagacagctgctccctcttaacagagcagtgctagaggtcactaggggccgagaca

SEQ ID NO: 602195 - DNA, 120 bp, Artificial Sequence
  ENSG00000174876_0 (sequence is synthesized)
tggcttggtgagtctgtgtggtcagcagtctctgatccgtgcagggtattaatgtgtcagggctgagtgttctgagatttatctagaggctgggaagggctcctgaaccagttgtttccg

SEQ ID NO: 602196 - DNA, 120 bp, Artificial Sequence
  ENSG00000174876_1 (sequence is synthesized)
tcttgtcggtctgtcagggttggaaagtccaagccataggacccagtttcctttcttagcttacgttatctaccagagcaccgtgggctgttacttgccttgagttggaagcggttcgca

SEQ ID NO: 602197 - DNA, 120 bp, Artificial Sequence
  ENSG00000174876_2 (sequence is synthesized)
tttataccggaatataaatagtttctggaaaggacactgacaacttcaaagcaaaatgaagctcttttggttgcttttcaccattgggttctgctgggctcagtattcctcaaatacaca

SEQ ID NO: 602198 - DNA, 120 bp, Artificial Sequence
  ENSG00000174876_3 (sequence is synthesized)
acaaggacgaacatctattgttcatctgtttgaatggcgatgggttgatattgctcttgaatgtgagcgatatttagctcccaagggatttggaggggttcaggtctctccaccaaatga

SEQ ID NO: 602199 - DNA, 120 bp, Artificial Sequence
  ENSG00000174876_4 (sequence is synthesized)
aaatgttgccattcacaaccctttcagaccttggtgggaaagataccaaccagttagctataaattatgcacaagatctggaaatgaagatgaatttagaaacatggtgactagatgcaa

SEQ ID NO: 602200 - DNA, 120 bp, Artificial Sequence
  ENSG00000174876_5 (sequence is synthesized)
caatgttggggttcgtatttatgtggatgctgtaattaatcatatgtgtggtaatgctgtgagtgcaggaacaagcagtacctgtggaagttacttcaaccctggaagtagggactttcc

SEQ ID NO: 602201 - DNA, 120 bp, Artificial Sequence
  ENSG00000174876_6 (sequence is synthesized)
agcagtcccatattctggatgggattttaatgatggtaaatgtaaaactggaagtggagatatcgagaactataatgatgctactcaggtcagagattgtcgtctgtctggtcttctcga

SEQ ID NO: 602202 - DNA, 120 bp, Artificial Sequence
  ENSG00000174876_7 (sequence is synthesized)
acattggtgttgcagggttcagaattgatgcttccaagcacatgtggcctggagacataaaggcaattttggacaaactgcataatctaaacagtaactggttcccggaaggtagtaaac

SEQ ID NO: 602203 - DNA, 120 bp, Artificial Sequence
  ENSG00000174876_8 (sequence is synthesized)
ctttcatttaccaggaggtaattgatctgggtggtgagccaattaaaagcagtgactactttggtaatggccgggtgacagaattcaagtatggtgcaaaactcggcacagttattcgca

SEQ ID NO: 602204 - DNA, 120 bp, Artificial Sequence
  ENSG00000174876_9 (sequence is synthesized)
agtggaatggagagaagatgtcttacttaaagaactggggagaaggttggggtttcatgccttctgacagagcgcttgtctttgtggataaccatgacaatcaacgaggacatggcgctg

SEQ ID NO: 602205 - DNA, 120 bp, Artificial Sequence
  ENSG00000174876_10 (sequence is synthesized)
gaggagcctctatacttaccttctgggatgctaggctgtacaaaatggcagttggatttatgcttgctcatccttatggatttacacgagtaatgtcaagctaccgttggccaagatatt

SEQ ID NO: 602206 - DNA, 120 bp, Artificial Sequence
  ENSG00000174876_11 (sequence is synthesized)
ttgaaaatggaaaagatgttaatgattgggttgggccaccaaatgataatggagtaactaaagaagttactattaatccagacactacttgtggcaatgactgggtctgtgaacatcgat

SEQ ID NO: 602207 - DNA, 120 bp, Artificial Sequence
  ENSG00000174876_12 (sequence is synthesized)
ggcgccaaataaggaacatggttaatttccgcaatgtagtggatggccagccttttacaaactggtatgataatgggagcaaccaagtggcttttgggagaggaaacagaggattcattg

SEQ ID NO: 602208 - DNA, 120 bp, Artificial Sequence
  ENSG00000174876_13 (sequence is synthesized)
ttttcaacaatgatgactggacattttctttaactttgcaaactggtcttcctgctggcacatactgtgatgtcatttctggagataaaattaatggcaactgcacaggcattaaaatct

SEQ ID NO: 602209 - DNA, 120 bp, Artificial Sequence
  ENSG00000174876_14 (sequence is synthesized)
acgtttctgatgatggcaaagctcatttttctattagtaactctgctgaagatccatttattgcaattcatgctgaatctaaattgtaaaatttaaaattaaatgcaaatccgcaaagca

SEQ ID NO: 602210 - DNA, 120 bp, Artificial Sequence
  ENSG00000174876_15 (sequence is synthesized)
tctcttctcaatatcagcactggattgtagaacttgttgctgattttggcctggcattcaagttaactcttccccttggtatctgtacatacctttgatgtcagtgtttagtacacgtgg

SEQ ID NO: 602211 - DNA, 70 bp, Artificial Sequence
  ENSG00000174876_16 (sequence is synthesized)
ttctaaatcataagttgatttgtaactactgggtttaggccaaccaggcccaggcctggttttgtgcctt

SEQ ID NO: 602212 - DNA, 120 bp, Artificial Sequence
  ENSG00000174885_0 (sequence is synthesized)
atggaccagccagaggccccctgctccagcacggggccgcgcctcgcggtggcccgcgagctgctcctggctgcgctggaggaactgagccaagagcagctgaagcgcttccgccacaag

SEQ ID NO: 602213 - DNA, 120 bp, Artificial Sequence
  ENSG00000174885_1 (sequence is synthesized)
ctgcgcgacgtgggcccggacggacgcagcatcccgtgggggcggctggagcgcgcggacgccgtggacctcgcggagcagctggcccagttctacggcccggagcctgccctggaggtg

SEQ ID NO: 602214 - DNA, 120 bp, Artificial Sequence
  ENSG00000174885_2 (sequence is synthesized)
gcccgcaagaccctcaagagggcggacgcgcgcgacgtggcggcgcagctccaggagcggcggctgcagcggctcgggctcggctccgggacgctgctctccgtgtccgagtacaagaag

SEQ ID NO: 602215 - DNA, 120 bp, Artificial Sequence
  ENSG00000174885_3 (sequence is synthesized)
aagtaccgggagcacgtgctgcagctgcacgctcgggtgaaggagaggaacgcccgctccgtgaagatcaccaagcgcttcaccaagctgctcatcgcgcccgagagcgccgccccggag

SEQ ID NO: 602216 - DNA, 120 bp, Artificial Sequence
  ENSG00000174885_4 (sequence is synthesized)
gaggcgatggggcccgcggaagagcctgagccggggcgcgcgcggcgctcggacacgcacactttcaaccgcctcttccgccgcgacgaggagggccggcggccgctgaccgtggtgctg

SEQ ID NO: 602217 - DNA, 120 bp, Artificial Sequence
  ENSG00000174885_5 (sequence is synthesized)
cagggcccggcgggcatcggcaagaccatggcggccaaaaagatcctgtacgactgggcggcgggcaagctgtaccagggccaggtggacttcgccttcttcatgccctgcggcgagctg

SEQ ID NO: 602218 - DNA, 120 bp, Artificial Sequence
  ENSG00000174885_6 (sequence is synthesized)
ctggagaggccgggcacgcgcagcctggctgacctgatcctggaccagtgccccgaccgcggcgcgccggtgccgcagatgctggcccagccgcagcggctgctcttcatcctggacggc

SEQ ID NO: 602219 - DNA, 120 bp, Artificial Sequence
  ENSG00000174885_7 (sequence is synthesized)
cttcatcctggacggcgcggacgagctgccggcgctggggggccccgaggccgcgccctgcacagaccccttcgaggcggcgagcggcgcgcgggtgctaggcgggctgctgagcaaggc

SEQ ID NO: 602220 - DNA, 120 bp, Artificial Sequence
  ENSG00000174885_8 (sequence is synthesized)
ctcctgctggtgaccacgcgcgccgccgcccccgggaggctgcagggccgcctgtgttccccgcagtgcgccgaggtgcgcggcttctccgacaaggacaagaagaagtatttctacaag

SEQ ID NO: 602221 - DNA, 120 bp, Artificial Sequence
  ENSG00000174885_9 (sequence is synthesized)
tatttccgggatgagaggagggccgagcgcgcctaccgcttcgtgaaggagaacgagacgctgttcgcgctgtgcttcgtgcccttcgtgtgctggatcgtgtgcaccgtgctgcgccag

SEQ ID NO: 602222 - DNA, 120 bp, Artificial Sequence
  ENSG00000174885_10 (sequence is synthesized)
cagctggagctcggtcgggacctgtcgcgcacgtccaagaccaccacgtcagtgtacctgcttttcatcaccagcgttctgagctcggctccggtagccgacgggccccggttgcagggc

SEQ ID NO: 602223 - DNA, 120 bp, Artificial Sequence
  ENSG00000174885_11 (sequence is synthesized)
ctcggacgcagggcgcagtttgccgagaaggaactggagcaactggagcttcgtggctccaaagtgcagacgctgtttctcagcaaaaaggagctgccgggcgtgctggagacagaggtc

SEQ ID NO: 602224 - DNA, 120 bp, Artificial Sequence
  ENSG00000174885_12 (sequence is synthesized)
acctaccagttcatcgaccagagcttccaggagttcctcgcggcactgtcctacctgctggaggacggcggggtgcccaggaccgcggctggcggcgttgggacactcctgcgtggggac

SEQ ID NO: 602225 - DNA, 120 bp, Artificial Sequence
  ENSG00000174885_13 (sequence is synthesized)
gcccagccgcacagccacttggtgctcaccacgcgcttcctcttcggactgctgagcgcggagcggatgcgcgacatcgagcgccacttcggctgcatggtttcagagcgtgtgaagcag

SEQ ID NO: 602226 - DNA, 120 bp, Artificial Sequence
  ENSG00000174885_14 (sequence is synthesized)
gaggccctgcggtgggtgcagggacagggacagggctgccccggagtggcaccagaggtgaccgagggggccaaagggctcgaggacaccgaagagccagaggaggaggaggagggagag

SEQ ID NO: 602227 - DNA, 120 bp, Artificial Sequence
  ENSG00000174885_15 (sequence is synthesized)
gagcccaactacccactggagttgctgtactgcctgtacgagacgcaggaggacgcgtttgtgcgccaagccctgtgccggttcccggagctggcgctgcagcgagtgcgcttctgccgc

SEQ ID NO: 602228 - DNA, 120 bp, Artificial Sequence
  ENSG00000174885_16 (sequence is synthesized)
atggacgtggctgttctgagctactgcgtgaggtgctgccctgctggacaggcactgcggctgatcagctgcagattggttgctgcgcaggagaagaagaagaagagcctggggaagcgg

SEQ ID NO: 602229 - DNA, 120 bp, Artificial Sequence
  ENSG00000174885_17 (sequence is synthesized)
ctccaggccagcctgggtggcggcagcagttctcaaggcaccacaaaacaactgccagcctcccttcttcatccactctttcaggcaatgactgacccactgtgccatctgagcagcctc

SEQ ID NO: 602230 - DNA, 120 bp, Artificial Sequence
  ENSG00000174885_18 (sequence is synthesized)
acgctgtcccactgcaaactccctgacgcggtctgccgagacctttctgaggccctgagggcagcccccgcactgacggagctgggcctcctccacaacaggctcagtgaggcgggactg

SEQ ID NO: 602231 - DNA, 120 bp, Artificial Sequence
  ENSG00000174885_19 (sequence is synthesized)
cgtatgctgagtgagggcctagcctggccgcagtgcagggtgcagacggtcagggtacagctgcctgacccccagcgagggctccagtacctggtgggtatgcttcggcagagccctgcc

SEQ ID NO: 602232 - DNA, 120 bp, Artificial Sequence
  ENSG00000174885_20 (sequence is synthesized)
ctgaccaccctggatctcagcggctgccaactgcccgcccccatggtgacctacctgtgtgcagtcctgcagcaccagggatgcggcctgcagaccctcagtctggcctctgtggagctg

SEQ ID NO: 602233 - DNA, 120 bp, Artificial Sequence
  ENSG00000174885_21 (sequence is synthesized)
agcgagcagtcactacaggagcttcaggctgtgaagagagcaaagccggatctggtcatcacacacccagcgctggacggccacccacaacctcccaaggaactcatctcgaccttctga

SEQ ID NO: 602234 - DNA, 120 bp, Artificial Sequence
  ENSG00000174885_22 (sequence is synthesized)
aaacggagcccttaaagggcaatgctctgcgtgtgccacggtgcccaacagcatctcgtgccagctgagctgcggtgtgtggacccggggaatggaccgggctggacaacctctaagact

SEQ ID NO: 602235 - DNA, 120 bp, Artificial Sequence
  ENSG00000174885_23 (sequence is synthesized)
agagctcagatcagcggcggccagtgcccacttcaccctcagagggcgaagaacaccaagacgccccgacccgggtccggggacgggggagggaaaagtctggggtcactccccgttgcc

SEQ ID NO: 602236 - DNA, 120 bp, Artificial Sequence
  ENSG00000174885_24 (sequence is synthesized)
ccctcccgccaccccatggatccagacgatgcttggcccgggactccctgaggccctgcccgcggtgggttctccggcgccagagtcgggggcgggcgggggtcacccgagggccgctcc

SEQ ID NO: 602237 - DNA, 120 bp, Artificial Sequence
  ENSG00000174886_0 (sequence is synthesized)
gcttcccgagctggcggggtccgtggtgcgggatcgagattgcgggctatggcgccgaaggtttttcgtcagtactgggatatccccgatggcaccgattgccaccgcaaagcctacagc

SEQ ID NO: 602238 - DNA, 120 bp, Artificial Sequence
  ENSG00000174886_1 (sequence is synthesized)
accaccagtattgccagcgtcgctggcctgaccgccgctgcctacagagtcacactcaatcctccgggcaccttccttgaaggagtggctaaggttggacaatacacgttcactgcagct

SEQ ID NO: 602239 - DNA, 120 bp, Artificial Sequence
  ENSG00000174886_2 (sequence is synthesized)
cgacgaccccctgaactacttcctcggtggctgcgccggaggcctgactctgggagcacgcacgcacaactacgggattggcgccgccgcctgcgtgtactttggcatagcggcctccct

SEQ ID NO: 602240 - DNA, 120 bp, Artificial Sequence
  ENSG00000174886_3 (sequence is synthesized)
ggtcaagatgggccggctggagggctgggaggtgtttgcaaaacccaaggtgtgagccctgtgcctgccgggacctccagcctgcagaatgcgtccagaaataaattctgtgtctgtgtg

SEQ ID NO: 602241 - DNA, 120 bp, Artificial Sequence
  ENSG00000174886_4 (sequence is synthesized)
cagccgactcgtggcatctctctccatccagacactggcagtgagcgcccaagaggctcctgctgtgcccgtctcgaggcccttgctcttcccgtctaccccgcagctgctgtcggggcc

SEQ ID NO: 602242 - DNA, 120 bp, Artificial Sequence
  ENSG00000174886_5 (sequence is synthesized)
caccagtattgccagcgtcgctggtagggactgaaggttggagaagcatattaactgctccagggtcatttgaagctgggctgcaagtccaggtcggctgacctgctcctaggggtctct

SEQ ID NO: 602243 - DNA, 120 bp, Artificial Sequence
  ENSG00000174886_6 (sequence is synthesized)
ctccctgagctgggactagcgaaatctgtctgcactgatcgcagtcgtcctcagtttcaccctctaggaatcggcctggggatgcacgtgctactctcttcctccaggccggtccccggc

SEQ ID NO: 602244 - DNA, 120 bp, Artificial Sequence
  ENSG00000174886_7 (sequence is synthesized)
gcgtgcgcgcgatccatgtccatgtccgcgcctatcaataaagttgctcacttgttgccggcccgctagcccgaaaggttgcgcgcgcagcccgagaagtctcgcgatagccagccgcgg

SEQ ID NO: 602245 - DNA, 73 bp, Artificial Sequence
  ENSG00000174886_8 (sequence is synthesized)
ggcgcggtggctcacacctgtaatccggcgctcaggaggccaaaatagcaagatccccatctctgcaaaaaag

SEQ ID NO: 602246 - DNA, 120 bp, Artificial Sequence
  ENSG00000174886_9 (sequence is synthesized)
gccggaggcctgactctgggagcacgcagtacagtcctgccccagggcctttgcatgggcagtgcactgcgtggaatgctgttcccctcactgtcctgaccaccctgtgtacaagccagc

SEQ ID NO: 602247 - DNA, 120 bp, Artificial Sequence
  ENSG00000174886_10 (sequence is synthesized)
atccccgccgccctcgctctgtgccgccttccttctgtgtgccttgtcagaggacacaggtcaccaaggtcaccccctgtctctgccactggcctgtgagtcagagaggaggatggatgg

SEQ ID NO: 602248 - DNA, 120 bp, Artificial Sequence
  ENSG00000174886_11 (sequence is synthesized)
agtctcgccctgccatctctctccctgcacctggagccctgcaggggagctgcccccgcaaccttcactttacagaaaagggtattagggctcagggagggaattaagtggcccgaggtc

SEQ ID NO: 602249 - DNA, 120 bp, Artificial Sequence
  ENSG00000174886_12 (sequence is synthesized)
cactcctgccctcccatgggcccgggctcagcgtcagtgcccgcctgtgcccctggcctacccccagcccgccaaggctcgggccctcagggccagcgggaggagtgaacgagccctctt

SEQ ID NO: 602250 - DNA, 120 bp, Artificial Sequence
  ENSG00000174886_13 (sequence is synthesized)
gcagctcagccgctctggcctggcatgttgggagtgatgaatggcaggttccaggcaggcagagagggagggtgcgagggcagggcgtacgccgtcactgctgtctctgcgtcaagacct

SEQ ID NO: 602251 - DNA, 120 bp, Artificial Sequence
  ENSG00000174886_14 (sequence is synthesized)
tggggaggccttgtccctccccagctcccactggaactggtcagaggttgcaggtgggttgaggtcttgactgtagcccagctcaggctggaactgctccctgtccccaagccagcctcc

SEQ ID NO: 602252 - DNA, 120 bp, Artificial Sequence
  ENSG00000174886_15 (sequence is synthesized)
ctgtctctcttcaaagagtgtgagtccctttaggtcctggtgtgtggggacacacctccttcctcctctggcccggaggcttcggagcaggagagcctggagaagtgggggcactgtcgg

SEQ ID NO: 602253 - DNA, 120 bp, Artificial Sequence
  ENSG00000174886_16 (sequence is synthesized)
ggctcctcggtacacagaccacgggacagatgcgtggcctggccctggcatccatgggcaaaggagagactgagacacaccgatgtgtcaccatggcccggtgcccagccttgccccagc

SEQ ID NO: 602254 - DNA, 120 bp, Artificial Sequence
  ENSG00000174886_17 (sequence is synthesized)
cccagctgggggcagcacggtgtcctcgcagggggaagtcagtgtggggcgggatgaggacccacagcctgggttcctgctgggaagcaacctggactccggcctccctctgtgcatcag

SEQ ID NO: 602255 - DNA, 120 bp, Artificial Sequence
  ENSG00000174886_18 (sequence is synthesized)
tttccacatctccagagtctagggccctcttcctgagtgacttaatccctgaagagagtgtcctgtcaggggtctcagtctggctcccagggtgggcaccggccagggcgtggagcgtct

SEQ ID NO: 602256 - DNA, 120 bp, Artificial Sequence
  ENSG00000174886_19 (sequence is synthesized)
actctgggagcacgcagtgagtggccccctccccacccccaccctcctcccagcctggcagaatgacccctgacctctgctcatcctccaccctctctgttccatcccggacaagaagta

SEQ ID NO: 602257 - DNA, 120 bp, Artificial Sequence
  ENSG00000174886_20 (sequence is synthesized)
aagcagccttcttgaacaccagccatttcagtcatagcgacagctgctgctgctgcttaagcacctactgtggccctccctgacctgccctgtcccctccccaccctcccctcctcactc

SEQ ID NO: 602258 - DNA, 120 bp, Artificial Sequence
  ENSG00000174886_21 (sequence is synthesized)
tgcgccggaggcctgactctgggagcacgcaagacaggatctcactgtgttgtgcaggctggtctcaaactcctggcctcgagcagtcctcacacctcagcctcccagagtgctgggatt

SEQ ID NO: 602259 - DNA, 120 bp, Artificial Sequence
  ENSG00000174886_22 (sequence is synthesized)
ataggcatgagccactgtgtacagagattctgggtcccttcttccagcgcctgcctcgaagtcctctctggagagagcacagatgtccacgcgtgttccagcacaaggggggcatgcaac

SEQ ID NO: 602260 - DNA, 120 bp, Artificial Sequence
  ENSG00000174886_23 (sequence is synthesized)
agctcagggtcacgtccacttccggagctgggtgcccgggcctcgggctccctgagaaagggcggacacacccaccccgcacccagaggggcaggggccctgacacctgtccaagcccta

SEQ ID NO: 602261 - DNA, 120 bp, Artificial Sequence
  ENSG00000174886_24 (sequence is synthesized)
atagagtcattgttaaacactctgggttcgaaccccagaacttgattctttccttgttctgtcctcagaggacggcagcacccaggcctcagctttcccacctggtaaatgggaataagg

SEQ ID NO: 602262 - DNA, 120 bp, Artificial Sequence
  ENSG00000174886_25 (sequence is synthesized)
gcccctcagagatgccccacaaagaaagacgattccacctccctgcaggcatcccatccactcacgggcatcgcatccactcgagggcaccggcctctgtctctactgcggccggcaggg

SEQ ID NO: 602263 - DNA, 120 bp, Artificial Sequence
  ENSG00000174886_26 (sequence is synthesized)
ggcagcgcccaccacagcacggcctgctgggcagtgtggacccgggcggtcatccccaggcccccagccccgcggtgaccacaggcgtcagattccatcccttcctccgcactccaggcc

SEQ ID NO: 602264 - DNA, 120 bp, Artificial Sequence
  ENSG00000174886_27 (sequence is synthesized)
ttgtctgtccctcatcccccttccttcccatgcatcctgcccaccgcagccgggaagtgatggcttctaggaatgggcaatacagccccaaacctccagccaaggacaccgaaggctgga

SEQ ID NO: 602265 - DNA, 120 bp, Artificial Sequence
  ENSG00000174886_28 (sequence is synthesized)
gaaagactagtccacgtccccacgacggtcaccctcagccctgcaccatggccgcttctgggactggttccacgcaggcctccgccccctgcaagcccttccccggccctccaggcccgt

SEQ ID NO: 602266 - DNA, 120 bp, Artificial Sequence
  ENSG00000174886_29 (sequence is synthesized)
gtgcggcccaaaccctgtaccagatctcttagccctcttccacggatgcgcgcgctgaggcccaccctgggtagtggagcttgaaatttaaaggccgcacgccccttcgcacctcccagc

SEQ ID NO: 602267 - DNA, 120 bp, Artificial Sequence
  ENSG00000174886_30 (sequence is synthesized)
cccaggtgcctccctgtgttcaagggagccgacggctcagaccaggagctgtgctcgccgcccacccagcccattccgggctagccgccagggttggcgcaggcctgccaggcgccccca

SEQ ID NO: 602268 - DNA, 120 bp, Artificial Sequence
  ENSG00000174886_31 (sequence is synthesized)
cctcgcctgcaggacgggccccccagaatggaacacgagggggtggtctcttgctgggctccagggaaccccaaagccgaggccccccggcccataaacatttactaggttgtggagggc

SEQ ID NO: 602269 - DNA, 120 bp, Artificial Sequence
  ENSG00000174886_32 (sequence is synthesized)
tgacgtcactcccaccccacacacaagagggcccccgtctggaacatcggtcccagcaggctccctgaggggctgtgggggacccttcctgagtttaccttgaacttcatggagcccttc

SEQ ID NO: 602270 - DNA, 120 bp, Artificial Sequence
  ENSG00000174886_33 (sequence is synthesized)
ccagccccaggcagtcagggctggaactgaggaggggcagagcctccctggggagctaggagggcttcctagaggaggaggcggcacagcagagagggcccaaggatgaagaggcttttc

SEQ ID NO: 602271 - DNA, 120 bp, Artificial Sequence
  ENSG00000174886_34 (sequence is synthesized)
catgtgtacccagcgggaggctggtccaggcagagcacacagcaacagcagaggcctgctgtgagggagagcagtgggcgatcaggggcctcctggtccaggagaggtgcctgggggctg

SEQ ID NO: 602272 - DNA, 120 bp, Artificial Sequence
  ENSG00000174886_35 (sequence is synthesized)
gctgcagggcacacacttgcttcccgagaatccatccctggagacacatccccagcagagacaaggctccaagaacaccggcctggccctgcgccgtggctcaggcctgtaatcccagta

SEQ ID NO: 602273 - DNA, 120 bp, Artificial Sequence
  ENSG00000174891_0 (sequence is synthesized)
gatgcactcgatatctcggctgaagctgcctggcgctagaaccaggaaggcgctgagcttaaactgaagcaagttcggtggacgccggcggcgccctgatctaaagaaacgactcaggga

SEQ ID NO: 602274 - DNA, 120 bp, Artificial Sequence
  ENSG00000174891_1 (sequence is synthesized)
ctgcggcgcttgcacgtcaacgggaggtgtgagcccaaagaaatgggacgtcggtcatcagatactgaagaagaaagcagaagcaagagaaaaaagaaacaccgtagacggtcctcctcg

SEQ ID NO: 602275 - DNA, 120 bp, Artificial Sequence
  ENSG00000174891_2 (sequence is synthesized)
agcagttcttcagatagtagaacatacagccgaaagaaaggaggaaggaaatcaagatcaaagtcaagatcttggtccagagatcttcagcctcgttcacattcttatgatagaagacgc

SEQ ID NO: 602276 - DNA, 120 bp, Artificial Sequence
  ENSG00000174891_3 (sequence is synthesized)
aggcatcgatcaagcagtagctcttcttatggctccagaaggaaacgaagtcgaagtcgttcaaggggtcgagggaaatcctatagagttcagaggtctaggtcaaaaagcagaacaaga

SEQ ID NO: 602277 - DNA, 120 bp, Artificial Sequence
  ENSG00000174891_4 (sequence is synthesized)
aggtccaggtcaagacctcgtctccgttctcatagtcgtagcagtgaaaggtccagtcacagaagaacgcgtagtcggtctcgggatagagaacgacgtaagggcagagataaagagaaa

SEQ ID NO: 602278 - DNA, 120 bp, Artificial Sequence
  ENSG00000174891_5 (sequence is synthesized)
agagaaaaggagaaggataaagggaaggacaaggaattacataacatcaaacgtggggaatctggaaacatcaaagctggattagaacatctgccaccagctgaacaggccaaagccaga

SEQ ID NO: 602279 - DNA, 120 bp, Artificial Sequence
  ENSG00000174891_6 (sequence is synthesized)
ctacagctggttcttgaagctgctgcaaaagctgatgaagcattgaaagccaaagaaagaaatgaggaagaagcaaagagaagaaaggaggaagaccaagccaccctggtagaacaagta

SEQ ID NO: 602280 - DNA, 120 bp, Artificial Sequence
  ENSG00000174891_7 (sequence is synthesized)
gcagacattcagatcaagtaaagaagtcaaaaagtcagtggaacctagtgaagtgaaacaagcaacttcaacatcaggaccagcatcagcagttgctgatccacccagtactgaaaaaga

SEQ ID NO: 602281 - DNA, 120 bp, Artificial Sequence
  ENSG00000174891_8 (sequence is synthesized)
aatagatcctaccagcatccctactgctatcaagtaccaagatgacaattccctggcccatccaaatttatttatcgagaaagctgatgctgaggaaaaatggttcaagagattaattgc

SEQ ID NO: 602282 - DNA, 120 bp, Artificial Sequence
  ENSG00000174891_9 (sequence is synthesized)
tctccgacaagaaagactaatgggcagtcctgtggcctaagtaatatacatatagttggattggattgtcagcagtaacattggaaatttaggtttttaaatcccaatattaacttttta

SEQ ID NO: 602283 - DNA, 120 bp, Artificial Sequence
  ENSG00000174891_10 (sequence is synthesized)
ctcttaaaaagaattttgctgattatatataaaggtagtctcatttcatttgtctctcatgtaggcttgaatatttgttaatttgaattaaatcaaacattgtaaaaattaaaacaaaat

SEQ ID NO: 602284 - DNA, 120 bp, Artificial Sequence
  ENSG00000174891_11 (sequence is synthesized)
ttaagattgcatgaaaatgttatactgttaataaagctaaacataaataagtctgttaaaatgaatggtagacactagtgtttcttagtgcaattcaaaaaatgtcaagatgtcatttaa

SEQ ID NO: 602285 - DNA, 120 bp, Artificial Sequence
  ENSG00000174891_12 (sequence is synthesized)
agacacaattttgattaattatgcatacatgagaattgaattacatgctataaatatgagatttcatcttccgtatggtattcaaccatttttaaatattttatttcaccatattgcaaa

SEQ ID NO: 602286 - DNA, 120 bp, Artificial Sequence
  ENSG00000174891_13 (sequence is synthesized)
tttttaggcacaataaaaagcaccctaaacaatgtaagcagaatgtgcatgttaaagaacatatttatggaaaaaaaatttttgaaacttaaataaattggtgattttgcttagagatca

SEQ ID NO: 602287 - DNA, 120 bp, Artificial Sequence
  ENSG00000174891_14 (sequence is synthesized)
cggactgccgggctgctgcggtcgtcgcggcccgcctcggtgcagccggtcggctccttggccccgcgcagcggcccgctctccagcacctcccggtacgtgatcgcctccttcttctcc

SEQ ID NO: 602288 - DNA, 120 bp, Artificial Sequence
  ENSG00000174891_15 (sequence is synthesized)
gaaatcacatgttcatgctagacctaaccagttggccaaatacctatgatggagaaatcatttctgagaaaactgataagagctctcacttcagtcttacttaccccactgctattccct

SEQ ID NO: 602289 - DNA, 120 bp, Artificial Sequence
  ENSG00000174891_16 (sequence is synthesized)
gtggagaaagccggctaattgttttgataaggctatctgccattgtagaatacctttctctagtagctgaatgacaatcaactatacgttccatactaaacatgccagagataggacttt

SEQ ID NO: 602290 - DNA, 90 bp, Artificial Sequence
  ENSG00000174891_17 (sequence is synthesized)
actatacgttccatactaaacatgccagagataggacttttaggccttgctttacaaaactggtttttaacagctgacatgaatatttcc

SEQ ID NO: 602291 - DNA, 120 bp, Artificial Sequence
  ENSG00000174891_18 (sequence is synthesized)
gtttcaccattttagccaggatggtctattttcttctgttgtccagtcactaatttagtctctgcgaagactgtagctcagaacaaaagataagcaaaaaaagtcttcagggtaggactg

SEQ ID NO: 602292 - DNA, 120 bp, Artificial Sequence
  ENSG00000174891_19 (sequence is synthesized)
aaaaaagtcttcagggtaggactgccaacatataggacattttaatgccatcttctttatatttctgggacattaaaattcaaatctctgttgaaaatgaaaaatgtaaaacttagttgc

SEQ ID NO: 602293 - DNA, 120 bp, Artificial Sequence
  ENSG00000174891_20 (sequence is synthesized)
aaacagtatagaaaataagtgatgatgaaatatttgttttcatacaaacatgctttcccattctaaatagatgctagttttcttttttccttggctgtaaataaaagtgccccaaatgaa

SEQ ID NO: 602294 - DNA, 120 bp, Artificial Sequence
  ENSG00000174891_21 (sequence is synthesized)
agcttaaactgaagcaagttcggtggacgccggcggcgccctgatctaaagaaacgactcagggactgcggcgcttgcacgtcaacgggagaaatgggacgtcggtcatcagatactgaa

SEQ ID NO: 602295 - DNA, 120 bp, Artificial Sequence
  ENSG00000174891_22 (sequence is synthesized)
aaactgtgctgcaaaaatgattcccatgatgcatatatgattcctgtctgtggaatcagaagctgaagatggattagttaataccatgcaaagtcttatactatacttcaccatagtctt

SEQ ID NO: 602296 - DNA, 120 bp, Artificial Sequence
  ENSG00000174891_23 (sequence is synthesized)
tgcaaaatgaaacagtatagcagagatcaaatagaatggttatagctaaagcctgtataatatgtttgaatgatctacacttattgagaagaaaactgatgttgagttaaataagctggc

SEQ ID NO: 602297 - DNA, 120 bp, Artificial Sequence
  ENSG00000174891_24 (sequence is synthesized)
aacactgtctacctgtcaagttatcttacatttaatttttagcagaaataggagatatatctatttactaaagataaaaaacataccagtgttcacatcaagagaacaagttggtaagtg

SEQ ID NO: 602298 - DNA, 120 bp, Artificial Sequence
  ENSG00000174891_25 (sequence is synthesized)
tatcaagtaccaagatgacaattccctggcccatccaaatgtaatatccttaaactttacgaatgtcagttgaagtctaatttactgaaattatttcaatctgttatccttttgtgctaa

SEQ ID NO: 602299 - DNA, 120 bp, Artificial Sequence
  ENSG00000174891_26 (sequence is synthesized)
caccaaggagaccattggaggaaacaggttcatattcccttgctaaaaataggcatctggcccccaggcctttagaactgttatctatatttgaatacagtagggtccaactcatgttgc

SEQ ID NO: 602300 - DNA, 120 bp, Artificial Sequence
  ENSG00000174891_27 (sequence is synthesized)
tagagaaaacgagaaaattgtggacgagcaaaactgggcaacattgttcttggacagatagtctgaaagtgagccgtttgcttgaggataataagttgagtgtaagatgggtcacacata

SEQ ID NO: 602301 - DNA, 120 bp, Artificial Sequence
  ENSG00000174891_28 (sequence is synthesized)
ggctccggactccttgggtcaaggctggtggctgtagggtgggtgggtggccgcaggcctcaagcttggccttctgtcttgaggacatgtcggagagttcgccgactcctcccctcgccc

SEQ ID NO: 602302 - DNA, 120 bp, Artificial Sequence
  ENSG00000174891_29 (sequence is synthesized)
acaaggaattacataacatcaaacgtggggaatctggaaacatcaaagctggattagaacatctgatgggagtcttgctcagtctcccaggcaggagagcagtggtgcaatcttggctca

SEQ ID NO: 602303 - DNA, 78 bp, Artificial Sequence
  ENSG00000174891_30 (sequence is synthesized)
accggccaccatgcctggctaatttttatatgtttagtagagaccaacatgattttaccatgttggccaggctggcct

SEQ ID NO: 602304 - DNA, 120 bp, Artificial Sequence
  ENSG00000174891_31 (sequence is synthesized)
ctcagatgatccgccctcctcggcctccagaatgctgggattacaggcatgagcaaccacgcccagtgactccatgttttttcttccattatgttttaaagttctggataatgtagtgag

SEQ ID NO: 602305 - DNA, 120 bp, Artificial Sequence
  ENSG00000174891_32 (sequence is synthesized)
ttatttttccaattaaggaaaaaatacaggagatagaaccttgccatttgatgacaatacagctattattattttataagcaaactataaaaatgatgctatccttttctcttgggagaa

SEQ ID NO: 602306 - DNA, 120 bp, Artificial Sequence
  ENSG00000174891_33 (sequence is synthesized)
ggatttagatcagaaaatattaagtcgagctgtatgaaaaattacttttttaggtcaaaatagttttgtgggttgtttctggcttgaaagaaggacagctgtgctatgccccctttggca

SEQ ID NO: 602307 - DNA, 120 bp, Artificial Sequence
  ENSG00000174891_34 (sequence is synthesized)
aggaatgaaatgaattatcctgatcagtatgatgtttctaaagcttcctttgttctcttttctgaaaagtcaaataaatagaagtggcttgtagtaactgtacagggtgatctggggcag

SEQ ID NO: 602308 - DNA, 120 bp, Artificial Sequence
  ENSG00000174891_35 (sequence is synthesized)
tgcttcaccatctttaatgtacatatgagtcacctgggattcttgcttaaagcacattctgattctttgggtctggggcacgatttgaaattatgcatttcaacaagctcctaagcaagg

SEQ ID NO: 602309 - DNA, 120 bp, Artificial Sequence
  ENSG00000174891_36 (sequence is synthesized)
tttgtctgtattgtgccggacagggcttgctgtgagaagtgtggctatgcaaatacatactcacaaaagaatatttacatatgatgttatatttaagtgtgtaaacaaatatacctctaa

SEQ ID NO: 602310 - DNA, 120 bp, Artificial Sequence
  ENSG00000174898_0 (sequence is synthesized)
attgatgcgcatgcgcagggcttcagcctgcacgtactcggattgtgcagcgactccccgtggcggttgaggggcagtggtggcggcggaagcccaagtcgatgctgatgttgatgctgg

SEQ ID NO: 602311 - DNA, 120 bp, Artificial Sequence
  ENSG00000174898_1 (sequence is synthesized)
tggcggctgtgaccatgtggctccgaccgctggtcacagctcagctctgtcgttctcgcacagtgaggacaggaaaagtgtttaatctgatacaggacgttcaaggggaccgcctgtatt

SEQ ID NO: 602312 - DNA, 120 bp, Artificial Sequence
  ENSG00000174898_2 (sequence is synthesized)
ttcatcctacaacaacacgcttgattaaacatccttgcgagaaaaatatagcactatatctagggaaacaagtttttttcacaatggataactttgagactagtctccttccatttacca

SEQ ID NO: 602313 - DNA, 120 bp, Artificial Sequence
  ENSG00000174898_3 (sequence is synthesized)
tccctacatcaatgcaggtcggcgtaccagaagtgacatcagcacattttgctggttcgttattgctgttagtagtggatcaaaaagtctatatttatgattatgaaaataattcttgga

SEQ ID NO: 602314 - DNA, 120 bp, Artificial Sequence
  ENSG00000174898_4 (sequence is synthesized)
gcatgtctttaggtataaaacaccctgttacacatgtctctggtgataattgttgttatactggaagtttgttttgtgtgcatgtcagtaatttggtttttgcatatttccgtggagatc

SEQ ID NO: 602315 - DNA, 120 bp, Artificial Sequence
  ENSG00000174898_5 (sequence is synthesized)
agatatcccagacttatatatattattcaaatactgggggattcagtttttggaagtatcactatgacagacaggcagaaatcattgggtctttaggcggaatcttccactttttttctt

SEQ ID NO: 602316 - DNA, 120 bp, Artificial Sequence
  ENSG00000174898_6 (sequence is synthesized)
tgtcacaggttgcgatgcttgtagtgaatcaagggaagggcatgttcaagtactcagatcaccccctcaaccggagtttcgggctgtcttttgactataatgggactctagacatcctca

SEQ ID NO: 602317 - DNA, 120 bp, Artificial Sequence
  ENSG00000174898_7 (sequence is synthesized)
tcgcccccggccagagaggcatcctgctcctatggtttgagaacagcctgttgttttcccataatgcaggtcagctcgtcgacaccgtccgggtgaaaaaaggagaccagaccttgtttt

SEQ ID NO: 602318 - DNA, 120 bp, Artificial Sequence
  ENSG00000174898_8 (sequence is synthesized)
cttccatttttgaagccaagatcaccatccacaacattgctgtcactgaaaatgaactggcagttataactcgggaggataatttgtattatggcaatctgggcatcgtgccaagttcca

SEQ ID NO: 602319 - DNA, 120 bp, Artificial Sequence
  ENSG00000174898_9 (sequence is synthesized)
taatcaaatttgcagaccaatacatctggtcagaagacgtggccctgatgttcaggagcccagggactctggaaatactgaccccactgcgtgacacagcctttccagcttttgatttcc

SEQ ID NO: 602320 - DNA, 120 bp, Artificial Sequence
  ENSG00000174898_10 (sequence is synthesized)
accctgaactccacgttggaaagtgcaagatagagtttctgacaggagaatttatatacaggatgtataccattgacatgcacagccagctggaattgactgcttcgttgataccccagc

SEQ ID NO: 602321 - DNA, 120 bp, Artificial Sequence
  ENSG00000174898_11 (sequence is synthesized)
caggcacatccctgattcctctggtgatggtgagcaacccccactccctggggttccaggccaccttctacgagaacggttacacatcagatgggaacaccaagtacaaactggatattt

SEQ ID NO: 602322 - DNA, 120 bp, Artificial Sequence
  ENSG00000174898_12 (sequence is synthesized)
tcctaaaacagcagcagcactggggcaggaccgactccaacttcacttccagtttaaagaaagccaccatgtctaccttaactgtggacatagcaaacaaggaaatttcatgtgtggata

SEQ ID NO: 602323 - DNA, 120 bp, Artificial Sequence
  ENSG00000174898_13 (sequence is synthesized)
tcaagccactgtcgacactgatttcagttggctgcgacctggataaaaagatcgtcatccagaacaaagtttccgcctgttccatgggcatcctggaccccttgaccctgcaagacaatt

SEQ ID NO: 602324 - DNA, 120 bp, Artificial Sequence
  ENSG00000174898_14 (sequence is synthesized)
acagcttcatcatcgagaaggaattctacgaccccggcttccaggggcagcagtcctccgaggacctgcacgtgttttactcctaccagcagctgggctgtcctctcctcgtctactatg

SEQ ID NO: 602325 - DNA, 120 bp, Artificial Sequence
  ENSG00000174898_15 (sequence is synthesized)
acaccctatggaagcccgtggtggagctgtggcgaaaagacagtttccaggaggtcatcgacgccgagtatgtgttactggaggtgaacgggcagttctcatactcctattccctgacgg

SEQ ID NO: 602326 - DNA, 120 bp, Artificial Sequence
  ENSG00000174898_16 (sequence is synthesized)
cccagtcggccatgtgtacctcccagccgcagaactggaccaccatgataaaggaattcggggggcccttcttctggaacagagagaactatgtgagctgccacgaccccaacaacaatg

SEQ ID NO: 602327 - DNA, 120 bp, Artificial Sequence
  ENSG00000174898_17 (sequence is synthesized)
cccctttgaggtggccagacgtccagtatcagatcttgggcggccggacagcaaaccagatcattttcggccacaatggcttttatgtcttctacatttcgatcgtggatccgtactaca

SEQ ID NO: 602328 - DNA, 120 bp, Artificial Sequence
  ENSG00000174898_18 (sequence is synthesized)
gctactgtcaactggagaccatctttagcatctacgtgtatggagcattccccgtgcagctggtctctgctggagtcgtcatcctactgatcatctccagcatcctggggtccgtttggc

SEQ ID NO: 602329 - DNA, 120 bp, Artificial Sequence
  ENSG00000174898_19 (sequence is synthesized)
tggcctacaagacccccaagctgctacgcacagcacgcggccgcaggatcaagaagtgtgcgacacagctgtgtaggagatgcaagacggtctgccagttcagggcctcagccacagcca

SEQ ID NO: 602330 - DNA, 120 bp, Artificial Sequence
  ENSG00000174898_20 (sequence is synthesized)
gggcaggcacagagcccccgggacgccaccgcactcctcacggaggcaggtctgaccactgaggccggtccacagggtcccaaccccttgtcttcaaataaagtataatgtaacatagca

SEQ ID NO: 602331 - DNA, 85 bp, Artificial Sequence
  ENSG00000174898_21 (sequence is synthesized)
gccagactctgtctcaaaaaaaaaaaaagaaacagaaagaggtcaggcgcagtggctcacaactgtaacctcatgcccaggaatt

SEQ ID NO: 602332 - DNA, 120 bp, Artificial Sequence
  ENSG00000174899_0 (sequence is synthesized)
cccgccccgcgtgctcaggctgaacagcttttcttccctgatctctcggaggcgccggctgctggccaacgcagggcagcctcctgcgtgcgtgctgtgggtttctccttcagtttcctc

SEQ ID NO: 602333 - DNA, 120 bp, Artificial Sequence
  ENSG00000174899_1 (sequence is synthesized)
tcattgcctgaggttgggcccgaacacggcggtacatttccttgagagtcttctacattcatgctgtagaagctatgaaagtcgtgggaaactatagagtcaacactgcaaactcaagca

SEQ ID NO: 602334 - DNA, 120 bp, Artificial Sequence
  ENSG00000174899_2 (sequence is synthesized)
ctgatacgtccggagagcacttgacctgccttagaagtcagctctttgtagcctacagaaatggaagagtggatgaagcagtctctctgggttttctggattgctggataggtggagacc

SEQ ID NO: 602335 - DNA, 120 bp, Artificial Sequence
  ENSG00000174899_3 (sequence is synthesized)
tgacaaatttcaaaggctgctacctgactaaccaactgcctattcagatttttacagccatcttcgacatgaacacggatgtaatcatactctcacaattcatgtactacaggttaaaga

SEQ ID NO: 602336 - DNA, 120 bp, Artificial Sequence
  ENSG00000174899_4 (sequence is synthesized)
atcagaagaaaaaaatgatattccaacctcagttattcaaagactccatcaccagagagaaagtcagattgtcactttggggagtcctctgccctgtatatatcccatattctttcagat

SEQ ID NO: 602337 - DNA, 120 bp, Artificial Sequence
  ENSG00000174899_5 (sequence is synthesized)
aagtgaaattagcatgcctgggtattacagttgtttatgccatactactataaatacttctaagagaagatttatcttgacttaagacttggaattttgttaaattaatgcacaaatgta

SEQ ID NO: 602338 - DNA, 120 bp, Artificial Sequence
  ENSG00000174899_6 (sequence is synthesized)
agaatgtttaaaaaatttatctttctattttccaatagtgtggtaaatgtaaagtgcttagcactttgcgtgacacatggtagggcctcaaaaaatattagctattatcattataaacca

SEQ ID NO: 602339 - DNA, 120 bp, Artificial Sequence
  ENSG00000174899_7 (sequence is synthesized)
cagaggccctgttatgtggcagtttgtatctctctcttgactaatagaagcactttgcagatgatatgtcacacaatctagaaaggtagtgcttaaaggaatagacttatctccttattt

SEQ ID NO: 602340 - DNA, 120 bp, Artificial Sequence
  ENSG00000174899_8 (sequence is synthesized)
tacaaatgaggacattgaggccctaggaagttaaatgacttagacaaaatcacaaaggtaaagtggaaagcccaggagaaatcccctggccttcagcctgctgtgatttctaccaactat

SEQ ID NO: 602341 - DNA, 120 bp, Artificial Sequence
  ENSG00000174899_9 (sequence is synthesized)
agattagaacttttcagacaagtggcacctgcaagtgtcttcgagcaaggcctcaacctccagcacagctcttgccacctacaaacaccagggaagagcaagattgagttacatggcttg

SEQ ID NO: 602342 - DNA, 120 bp, Artificial Sequence
  ENSG00000174899_10 (sequence is synthesized)
gaagaagagtgaaacacctcgcaagacccagagaaaactccacatccatttgcagctaattttaaagcccaaataaaagcacaatctttggaatcactctatctttggtcaggcaaatgt

SEQ ID NO: 602343 - DNA, 120 bp, Artificial Sequence
  ENSG00000174899_11 (sequence is synthesized)
ttaaagagcaatattatatacatctagggtaagaacaattcattaatttagatgaatgaattgtcaaaaggttgttttgcctgtaaatgtgagtaaattgaatatcaagtcatcatgaaa

SEQ ID NO: 602344 - DNA, 120 bp, Artificial Sequence
  ENSG00000174899_12 (sequence is synthesized)
ctacggaaggaacttcatttctgctgtttgcattggccatgattgggaacttcacgtatggacttggtgtggttttaaaggcaccagctgctacgtgtcacaagaatacttactttgtgc

SEQ ID NO: 602345 - DNA, 120 bp, Artificial Sequence
  ENSG00000174899_13 (sequence is synthesized)
atcatcttccttggcttattgcaagttttggaatcttattccttaactcttttgtgtcttttgccatcagattgccattagagaataaacatgtatagctacttaatatatcacccaaaa

SEQ ID NO: 602346 - DNA, 120 bp, Artificial Sequence
  ENSG00000174899_14 (sequence is synthesized)
tatatattctaagaagtgtaaatagctaatgctatagtcatttcattattatatttgaaatgttcatttataaggaaagtcttctctctcccaaagtctcctaattattattattctagc

SEQ ID NO: 602347 - DNA, 120 bp, Artificial Sequence
  ENSG00000174899_15 (sequence is synthesized)
ctaattattattattctagcaaacgatcaaattcagatgaagatttcttggtttctttggttcttctgataaaaaaaaaaaagtggggccaagtttagaagcattgaaattaacacatct

SEQ ID NO: 602348 - DNA, 120 bp, Artificial Sequence
  ENSG00000174899_16 (sequence is synthesized)
tagatattaaattttattaaaattataatagcagatattaagaaaaaaccataccatctctgaaaatctctacagagaacactttgaattaataaatgataactgatgccttgccttttg

SEQ ID NO: 602349 - DNA, 120 bp, Artificial Sequence
  ENSG00000174899_17 (sequence is synthesized)
agatttgtgtgactgggactttatggatttggcatctcctgcaagatgtgtgtccaactcctgggaatactgtagcatgattatagaattggtttctattgtctgttttctgtttgttgc

SEQ ID NO: 602350 - DNA, 120 bp, Artificial Sequence
  ENSG00000174899_18 (sequence is synthesized)
tctctcataagttaagaatcttggatttcaagtctatagtgtaacactcttgttcataatttcttatttaaaaaaatgtttaaatatttctatattaagtattttttcaaactatttggg

SEQ ID NO: 602351 - DNA, 120 bp, Artificial Sequence
  ENSG00000174899_19 (sequence is synthesized)
cttgctattgaacaaatgttctctttgtattgtatattttgaaggtgctaaaaagcatcactaaaacattttggaatataacagaaagatggttaatacattatactgactacttttttc

SEQ ID NO: 602352 - DNA, 120 bp, Artificial Sequence
  ENSG00000174899_20 (sequence is synthesized)
ttcatcagtcctaaggatgagcagaagggtacaaatctgcctttgggaaatacatctgaaatgcagagataaacaagtttgcatctatgaaaggagaattggagagaggggagaattgaa

SEQ ID NO: 602353 - DNA, 120 bp, Artificial Sequence
  ENSG00000174899_21 (sequence is synthesized)
aacacaccagtggttagaacagaagaggaaagtccactgccctttaagttgaaacagaaggaaagacatgaaggaaagccttgaatgaaatgaaataaacactgaaaccatactcagaaa

SEQ ID NO: 602354 - DNA, 120 bp, Artificial Sequence
  ENSG00000174899_22 (sequence is synthesized)
ctgatacgtccggagagcacttgacctgccttagaagatttgaaaacaatttgtagccaacttcagtatgaatcaaagcattgttttaaaaggaaagattccttctgacattaaattgca

SEQ ID NO: 602355 - DNA, 120 bp, Artificial Sequence
  ENSG00000174899_23 (sequence is synthesized)
ggatttggcatctcctgcaagatgtgtgtccaactcctgggaatactgtagcatgattatagaattggtttctattgtctgttttctgtttgttgctctctctcagctctttgtagccta

SEQ ID NO: 602356 - DNA, 120 bp, Artificial Sequence
  ENSG00000174899_24 (sequence is synthesized)
tcagaagaaaaaaatgagtagaagcctgcagaatttatgtgtgacttgggtgccagtgtgcattatgctgtcggtggatgctgttggcatagttgaaatgttaggctttatttgtggcta

SEQ ID NO: 602357 - DNA, 120 bp, Artificial Sequence
  ENSG00000174903_0 (sequence is synthesized)
agagtcgactgggagcgaccgagcgggccgccgccgccgccatgaaccccgaatatgactacctgtttaagctgcttttgattggcgactcaggcgtgggcaagtcatgcctgctcctgc

SEQ ID NO: 602358 - DNA, 120 bp, Artificial Sequence
  ENSG00000174903_1 (sequence is synthesized)
ggtttgctgatgacacgtacacagagagctacatcagcaccatcggggtggacttcaagatccgaaccatcgagctggatggcaaaactatcaaacttcagatctgggacacagcgggcc

SEQ ID NO: 602359 - DNA, 120 bp, Artificial Sequence
  ENSG00000174903_2 (sequence is synthesized)
aggaacggttccggaccatcacttccagctactaccggggggctcatggcatcatcgtggtgtatgacgtcactgaccaggaatcctacgccaacgtgaagcagtggctgcaggagattg

SEQ ID NO: 602360 - DNA, 120 bp, Artificial Sequence
  ENSG00000174903_3 (sequence is synthesized)
accgctatgccagcgagaacgtcaataagctcctggtgggcaacaagagcgacctcaccaccaagaaggtggtggacaacaccacagccaaggagtttgcagactctctgggcatcccct

SEQ ID NO: 602361 - DNA, 120 bp, Artificial Sequence
  ENSG00000174903_4 (sequence is synthesized)
tcttggagacgagcgccaagaatgccaccaatgtcgagcaggcgttcatgaccatggctgctgaaatcaaaaagcggatggggcctggagcagcctctgggggcgagcggcccaatctca

SEQ ID NO: 602362 - DNA, 120 bp, Artificial Sequence
  ENSG00000174903_5 (sequence is synthesized)
agatcgacagcacccctgtaaagccggctggcggtggctgttgctaggaggggcacatggagtgggacaggagggggcaccttctccagatgatgtccctggagggggcaggaggtacct

SEQ ID NO: 602363 - DNA, 120 bp, Artificial Sequence
  ENSG00000174903_6 (sequence is synthesized)
ccctctccctctcctggggcatttgagtctgtggctttggggtgtcctgggctccccatctccttctggcccatctgcctgctgccctgagccccggttctgtcagggtccctaagggag

SEQ ID NO: 602364 - DNA, 120 bp, Artificial Sequence
  ENSG00000174903_7 (sequence is synthesized)
ggctcttctgtcggtgtccctcccacccccatgtatgctgcactgggttctctccttcttcttcctgctgtcctgcccaagaactgagggtctccccggcctctactgccctggctgcag

SEQ ID NO: 602365 - DNA, 120 bp, Artificial Sequence
  ENSG00000174903_8 (sequence is synthesized)
tcagtgcccagggcgaggaatgtggccaggggatccaggacctgggatccagggccctgggctggacctcaggacaggcatggaggccacaggggcccagcagcccaccctttcctctcc

SEQ ID NO: 602366 - DNA, 120 bp, Artificial Sequence
  ENSG00000174903_9 (sequence is synthesized)
ccactgcctcctctcccttcctacactcccagctcgagccgtccagctgcggtgggatctgagtatatctagggcgggtgggcgggtagcagtgctgggcctgtgtcttgagcctggagg

SEQ ID NO: 602367 - DNA, 120 bp, Artificial Sequence
  ENSG00000174903_10 (sequence is synthesized)
gagtctgctcctgccgccctctgccctgccagagacagacccatgcgctgcctgcccaccgtgcccctttgtccccatgtcaggcggaggcggaaggcccaccgtgccagaggctgggca

SEQ ID NO: 602368 - DNA, 120 bp, Artificial Sequence
  ENSG00000174903_11 (sequence is synthesized)
ccagccttaaccctcactctgctagcacctcctccctttccccaaggtagcacatctggctcactccccactccgtctctggagcccaccagggaaggccctcatcccctgccgctactt

SEQ ID NO: 602369 - DNA, 120 bp, Artificial Sequence
  ENSG00000174903_12 (sequence is synthesized)
ctctggggaatgtgggttccatccaggattgggggcctctctgctcacccactctgcacccaggatcctagtcccctgccctctggcacagctgcttcctgcaagaaagcaagtctttgg

SEQ ID NO: 602370 - DNA, 120 bp, Artificial Sequence
  ENSG00000174903_13 (sequence is synthesized)
tctccctgagaagccatgtccctcgtgctgtctcttgcctgtcccacctgtgccctgccctccagcttgtatttaagtccctgggctgcccccttggggtgccccccgctcccaggttcc

SEQ ID NO: 602371 - DNA, 120 bp, Artificial Sequence
  ENSG00000174903_14 (sequence is synthesized)
cctctggtgtcatgtcaggcattttgcaaggaaaagccacttggggaaagatggaaaaggacaaaaaaaattaataaatttccattggccctcgggtgagctgagggtttttgcaaggaa

SEQ ID NO: 602372 - DNA, 120 bp, Artificial Sequence
  ENSG00000174914_0 (sequence is synthesized)
atgcagaggagcaatcatacagtgactgagtttatactgctgggcttcaccacagacccaggaatgcagctgggcctcttcgtggtgttcctgggcgtgtactctctcactgtggtagga

SEQ ID NO: 602373 - DNA, 120 bp, Artificial Sequence
  ENSG00000174914_1 (sequence is synthesized)
aatagcaccctcatcgtgttgatctgtaatgactcctgcctccacacacccatgtattttttcactggaaatctgtcgtttctggatctctggtattcttctgtctacaccccaaagatc

SEQ ID NO: 602374 - DNA, 120 bp, Artificial Sequence
  ENSG00000174914_2 (sequence is synthesized)
ctagtgacctgcatctctgaagacaaaagcatctcctttgctggctgcctgtgtcagttcttcttctctgcagggctggcctatagtgagtgctacctgctggctgccgtggcttatgac

SEQ ID NO: 602375 - DNA, 120 bp, Artificial Sequence
  ENSG00000174914_3 (sequence is synthesized)
tcatattgtggtggctttattaactcttcaatcatcaccaagaaaacgttttcctttaacttctgccgtgaaaacatcattgatgactttttctgtgatttgcttcccttggtggagctg

SEQ ID NO: 602376 - DNA, 120 bp, Artificial Sequence
  ENSG00000174914_4 (sequence is synthesized)
gcctgtggcgagaagggcggctataaaattatgatgtacttcctgctggcctccaatgtcatctgccccgcagtgctcatcctggcctcctacctctttatcatcaccagtgtcttgagg

SEQ ID NO: 602377 - DNA, 120 bp, Artificial Sequence
  ENSG00000174914_5 (sequence is synthesized)
atctcctcctccaagggctacctcaaagccttctccacatgctcctcccacctgacctctgtcactttatactatggctccattctctacatctacgctctccccagatctagctattct

SEQ ID NO: 602378 - DNA, 120 bp, Artificial Sequence
  ENSG00000174914_6 (sequence is synthesized)
tttgatatggacaaaatagtttctacattttacactgtggtattccccatgttgaatctcatgatctacagcctaaggaataaggatgtgaaagaggctctgaaaaaacttctcccataa

SEQ ID NO: 602379 - DNA, 120 bp, Artificial Sequence
  ENSG00000174914_7 (sequence is synthesized)
gtgttgtgtatttcaaacagagttaccattgtgctttatcgtgatcagtccccttcttgacacgtgagagttacagacatgtacaataagaaaattaggaaaatttcggacaaaaacatc

SEQ ID NO: 602380 - DNA, 120 bp, Artificial Sequence
  ENSG00000174914_8 (sequence is synthesized)
tgaatatataagaatttgaattgaatttcctatctctcttattaaaaacaaacataaaccttaagcccaaaacctctcctataccttcataaagtgaggaacagcctacctcattagcct

SEQ ID NO: 602381 - DNA, 120 bp, Artificial Sequence
  ENSG00000174914_9 (sequence is synthesized)
aagatttggctaactgatacatatagaagagtatctatatagttcctagaactaggaagaattgtgctcaatttttaatattttcctatgtttaactggatgaaattcatcactttccat

SEQ ID NO: 602382 - DNA, 120 bp, Artificial Sequence
  ENSG00000174914_10 (sequence is synthesized)
tccctgaacagaatatcttaaacattgttctacatgctttccccccacaagaagaattagcacaaagatccagaggcacccaagaaataactcagtacaaatgagacccagaaaggcatg

SEQ ID NO: 602383 - DNA, 120 bp, Artificial Sequence
  ENSG00000174914_11 (sequence is synthesized)
accttgctatgcctcttacataagtttcttgatgaagaaaaaattcatcaagatgccatatatatgatttttgtaattcactgtataactcccagagctcctctttattttacaggggtg

SEQ ID NO: 602384 - DNA, 120 bp, Artificial Sequence
  ENSG00000174914_12 (sequence is synthesized)
aacttacaaggacttttacattaaaattgtgaccttctgagcatcaaagggcaattatcatcatttaaaaaataattattattttggctaagtgaaacaatttcaaaaataaaagtctat

SEQ ID NO: 602385 - DNA, 120 bp, Artificial Sequence
  ENSG00000174914_13 (sequence is synthesized)
gatcaacagatattttatttttatttttaatagatattttatagagagaatatgtatgtacaggtgtgattcaacaaaaggatatttcacttagcataatgtcttctaggtttattcacg

SEQ ID NO: 602386 - DNA, 120 bp, Artificial Sequence
  ENSG00000174914_14 (sequence is synthesized)
ttgttgtaggtgacagaattacatttcttgtaaggctgattattattccattgtgtactatatgccactttttcttttatcgatttatctgttgatgggcacttacgttgtttctaattg

SEQ ID NO: 602387 - DNA, 120 bp, Artificial Sequence
  ENSG00000174914_15 (sequence is synthesized)
ttagctattgtgaataatactgcaatgaacatgaaagcacagatatctcctcaacatacctatatcaattcctgtaagcatctacccagaagtggaattgttagatcatatggtaattct

SEQ ID NO: 602388 - DNA, 120 bp, Artificial Sequence
  ENSG00000174914_16 (sequence is synthesized)
atttttagtttttggagagacctctatattgtttttcaaaatggctgtgctaatgtacattcccatcaatggagtataagagttccctttactccacatcctggccaatgcttgataatt

SEQ ID NO: 602389 - DNA, 120 bp, Artificial Sequence
  ENSG00000174914_17 (sequence is synthesized)
ttcatctttttgataatgaccattgtaatataatgcataatgtataatatacgaagtgatatttcattatgataagtgaaataagccaggcacagaagaaaacatattgaatcatcccac

SEQ ID NO: 602390 - DNA, 120 bp, Artificial Sequence
  ENSG00000174914_18 (sequence is synthesized)
ttatgagtgggttctaaaagttagaactcctacaagtagagaatacaatagtagttgccagtgactggggcagggtgggtggagaaaggagaagtgttgatcaaagggtacaaagtttca

SEQ ID NO: 602391 - DNA, 120 bp, Artificial Sequence
  ENSG00000174914_19 (sequence is synthesized)
tgtaggcaggaggaataagttctggtgaactattgcaggacaaggtgactacagttaacagtaatgtattgtgtatttcaaaatcatttaaaaagtggatcttacatgttctcaccacaa

SEQ ID NO: 602392 - DNA, 120 bp, Artificial Sequence
  ENSG00000174914_20 (sequence is synthesized)
agcagtggtaagtatatgaggtgatggacataataattagtcgaagatgttcaatctacaatgtatacatgtactgaagcattgtcttttaccccatacatatataaaattatggtttat

SEQ ID NO: 602393 - DNA, 120 bp, Artificial Sequence
  ENSG00000174914_21 (sequence is synthesized)
caatatgaataaaatttaaaaaacaaaaagatgaatatgacaagtggcatttaattttcattagtttttcaatgtaagatagtactaatgtaatttatgcttataaacacaaattctctc

SEQ ID NO: 602394 - DNA, 120 bp, Artificial Sequence
  ENSG00000174914_22 (sequence is synthesized)
tggtttgaattggcacaagcagtaaagggagaaaatgcaagaaactgaattaggcaggtagacccagaaaatgtacaagattcacacagagtagaaagagtaaatccacactggcaatca

SEQ ID NO: 602395 - DNA, 120 bp, Artificial Sequence
  ENSG00000174914_23 (sequence is synthesized)
tggacattacaaagtaagtgggtgcaagaaataaaatcaatgcaagttgcaacacacagtaacacagccgaaacagagtccaacagtgtaattccaagatgctcgtgtcagccgttctaa

SEQ ID NO: 602396 - DNA, 120 bp, Artificial Sequence
  ENSG00000174914_24 (sequence is synthesized)
aaaggaacgctatatatgccaactcagtcttctggttttctaaaatacatgttctatttcccactaatgatattaaaattcctataaaacacattcttcattttttaaagtaatgttaac

SEQ ID NO: 602397 - DNA, 120 bp, Artificial Sequence
  ENSG00000174914_25 (sequence is synthesized)
agactcaattagtatattgcagtggcagtaaatcaattattttatgtttcttgaccgaaactagaaagtacatcattccagagggaagcatcaattgcagaaagtaaaactgatgtgaca

SEQ ID NO: 602398 - DNA, 120 bp, Artificial Sequence
  ENSG00000174914_26 (sequence is synthesized)
catctaatcttaaaacaccgtggtatcataaaccctgacatgtaactatagaagagagtctcaaactacttgacggcttctattctaatatttttatgggagcctaccagaattcattct

SEQ ID NO: 602399 - DNA, 120 bp, Artificial Sequence
  ENSG00000174914_27 (sequence is synthesized)
tcaaataagaataagaatatgcccatatatccatatattgtaaacatagctcgctaagtgcatattcatattattttatacttggaagttagctctagaattatgtctaagtaatattac

SEQ ID NO: 602400 - DNA, 120 bp, Artificial Sequence
  ENSG00000174915_0 (sequence is synthesized)
acaatgcaccgcacaccctttactggccggccccgcgctgctctcctaagaccccgcgggccagcgccgcgaccccttcccagcgctcctcgcgctgtgtgcggcgcgtcctctcgccgg

SEQ ID NO: 602401 - DNA, 120 bp, Artificial Sequence
  ENSG00000174915_1 (sequence is synthesized)
cgcgtcctctcgccggtgacccggtgtgcgtggggtcgaggcgccgggcggagtggctccgggccgaaacgccatgcggaggggcgagcgcagggacgccggaggtccgcggcccgagtc

SEQ ID NO: 602402 - DNA, 120 bp, Artificial Sequence
  ENSG00000174915_2 (sequence is synthesized)
agggcctcgctggaggagccgcctgacgggccgtctgccggccaagccaccgggccgggcgagggccgccgcagcaccgagtccgaggtctacgacgacggcaccaacaccttcttctgg

SEQ ID NO: 602403 - DNA, 120 bp, Artificial Sequence
  ENSG00000174915_3 (sequence is synthesized)
cgagcccacaccttaaccgtgctcttcatcctcacctgtacgcttggctatgtgacgctgctggaggaaacacctcaggacacggcctacaacaccaagagaggtattgtggccagtatt

SEQ ID NO: 602404 - DNA, 120 bp, Artificial Sequence
  ENSG00000174915_4 (sequence is synthesized)
ttggttttcttatgttttggagtcacacaagctaaagacgggccattttccagacctcatccagcttactggaggttttggctctgcgtgagtgtggtctacgagctgtttctcatcttt

SEQ ID NO: 602405 - DNA, 120 bp, Artificial Sequence
  ENSG00000174915_5 (sequence is synthesized)
atactcttccagactgtccaggacggccggcagtttctaaagtatgttgaccccaagctgggagtcccactgccagagagagactacgggggaaactgcctcatctacgacccagacaat

SEQ ID NO: 602406 - DNA, 120 bp, Artificial Sequence
  ENSG00000174915_6 (sequence is synthesized)
gagactgacccctttcacaacatctgggacaagttggatggctttgttcccgcgcactttcttggctggtacctgaagaccctgatgatccgagactggtggatgtgcatgatcatcagc

SEQ ID NO: 602407 - DNA, 120 bp, Artificial Sequence
  ENSG00000174915_7 (sequence is synthesized)
gtgatgttcgagttcctggagtacagcctggagcaccagctgcccaacttcagcgagtgctggtgggatcactggatcatggacgtgctcgtctgcaacgggctgggcatctactgcggc

SEQ ID NO: 602408 - DNA, 120 bp, Artificial Sequence
  ENSG00000174915_8 (sequence is synthesized)
atgaagacccttgagtggctgtccctgaagacgtacaagtggcagggcctctggaacattccgacctacaagggcaagatgaagaggatcgccttccagttcacgccgtacagctgggtt

SEQ ID NO: 602409 - DNA, 120 bp, Artificial Sequence
  ENSG00000174915_9 (sequence is synthesized)
cgcttcgagtggaagccggcctccagcctgcgtcgctggctggccgtgtgcggcatcatcctggtgttcctgttggcagaactgaacacgttctacctgaagtttgtgctgtggatgccc

SEQ ID NO: 602410 - DNA, 120 bp, Artificial Sequence
  ENSG00000174915_10 (sequence is synthesized)
ccatgcgtgagatctacgacttcatggatgacccgaagccccacaagaagctgggcccgcaggcctggctggtggcggccatcacggccacggagctgctcatcgtggtgaagtacgacc

SEQ ID NO: 602411 - DNA, 120 bp, Artificial Sequence
  ENSG00000174915_11 (sequence is synthesized)
cccacacgctcaccctgtccctgcccttctacatctcccagtgctggaccctcggctccgtcctggcgctcacctggaccgtctggcgcttcttcctgcgggacatcacattgaggtaca

SEQ ID NO: 602412 - DNA, 120 bp, Artificial Sequence
  ENSG00000174915_12 (sequence is synthesized)
aggagacccggtggcagaagtggcagaacaaggatgaccagggcagcaccgtcggcaacggggaccagcacccactggggctggacgaagacctgctggggcctggggtggccgagggcg

SEQ ID NO: 602413 - DNA, 120 bp, Artificial Sequence
  ENSG00000174915_13 (sequence is synthesized)
agggagcaccaactccaaactgacctgggccgtggctgcctcgtgagcctcccagagcccaggcctccgtggcctcctcctgtgtgagtcccaccaggagccacgtgcccggccttgccc

SEQ ID NO: 602414 - DNA, 120 bp, Artificial Sequence
  ENSG00000174915_14 (sequence is synthesized)
tcaaggttttttgcttttctcctgtgcacctggcgaggctgaaggcgaggggtggaggaggccccagcacagcctcatctccatgtgtacacgtgtgtacgtgtgtatgcgtgtgtgtac

SEQ ID NO: 602415 - DNA, 120 bp, Artificial Sequence
  ENSG00000174915_15 (sequence is synthesized)
gcgtgtgtacgcgcgtgtgtacacatgcgtggccgcctgtggtgtgcacgtgtgctctgggctccgaggcttctccagagctgggagctggctggcgtggcaagggcatgctctggggca

SEQ ID NO: 602416 - DNA, 120 bp, Artificial Sequence
  ENSG00000174915_16 (sequence is synthesized)
gtgtgtccctcaggaaccagggtcctccctcccctttctgcctggtcagccccgtggcctctggcccaccaagctccctgtcacccagccatggtgtggtccaggcagggacatctcggt

SEQ ID NO: 602417 - DNA, 120 bp, Artificial Sequence
  ENSG00000174915_17 (sequence is synthesized)
accctttctgcactccgtgggccctgggtgcgctgaggcctggaggcgtctacactggctccacatccacttcccccgcagctcgtgtgggcgctcgtccacaaacactccgtggctgag

SEQ ID NO: 602418 - DNA, 120 bp, Artificial Sequence
  ENSG00000174915_18 (sequence is synthesized)
aggcagcggatccaggcagcgatgctgagccacctcctccgagccttcctttcacacagaccaccccggaggacacgtggatgatggggtcagagatcactgagctgcccctcaaggggg

SEQ ID NO: 602419 - DNA, 120 bp, Artificial Sequence
  ENSG00000174915_19 (sequence is synthesized)
cctggaacccgggtgctggggtcatgctgcctccgtggctccaaggtgagggtcatcttcacgagcaaagagaaccaataaagtgacaacgaacgtctgaggcttccagccctcccccca

SEQ ID NO: 602420 - DNA, 120 bp, Artificial Sequence
  ENSG00000174915_20 (sequence is synthesized)
ttccagaatggaatcgtggggtgggcagcctcttcccaccctgcacagtgcctctgaggttcacccaggatcatgcggtgggcagcctcttcccgccctgcacagtgcctctgaggttca

SEQ ID NO: 602421 - DNA, 120 bp, Artificial Sequence
  ENSG00000174915_21 (sequence is synthesized)
caggatcatgcggtgggcagcctcttcccgccctgcacagtgcctctgaggttcacccaggatcatgcggtgggcagcctcttcccgccctgcacagtgcctctgaggttcacccaggat

SEQ ID NO: 602422 - DNA, 120 bp, Artificial Sequence
  ENSG00000174915_22 (sequence is synthesized)
catgcggtgggcagcctcttcccgccctgcacagtgcctctgaggttcatccaggttgcatgtgtcttcctgcgctcctctttcttttactatttattttttgagacgacgtcttactct

SEQ ID NO: 602423 - DNA, 120 bp, Artificial Sequence
  ENSG00000174915_23 (sequence is synthesized)
tttttatagagatggggtctcactgtgttacccagtctggtcctgaacgcctgggctcaagcaatcctcttgtctcagcctcccaaagcgttgggactacagacgcgtgcagcctacaaa

SEQ ID NO: 602424 - DNA, 120 bp, Artificial Sequence
  ENSG00000174915_24 (sequence is synthesized)
gttttatcagatatatgtattgtgaatattttctcccagtttgtgacttgccttttcatttctttagggcacaaatagtttacatttcatggaggcaagtcctgggcaacatgctttaag

SEQ ID NO: 602425 - DNA, 120 bp, Artificial Sequence
  ENSG00000174915_25 (sequence is synthesized)
tgcattgttcacttaattttcatgatgtccttggaagtcagaagcttccccatttagatatgaggaaactgaggcacggaggggtgcatcatctctccaaggacacactccagtggatgt

SEQ ID NO: 602426 - DNA, 120 bp, Artificial Sequence
  ENSG00000174915_26 (sequence is synthesized)
aggacctgggttagacgtgaggacacactccggtgaatgtaggacctgggttagacgtgaggggacactccggtggatgtcggacctgggttagacgtgaggacacactccggtggatgt

SEQ ID NO: 602427 - DNA, 120 bp, Artificial Sequence
  ENSG00000174915_27 (sequence is synthesized)
cggacctgggttagacgtgaggacacactccggtggatgtcggacctgggttagacgtgaggacacactccggtggatgtcggacctgggttagacgtgaggacacactccggtggatgt

SEQ ID NO: 602428 - DNA, 120 bp, Artificial Sequence
  ENSG00000174915_28 (sequence is synthesized)
cggacctgggttagacgtgaggacacactccggtggatgtcggacctgggttagacgtgaggacacactccggtggatgtaggacctgggttagacgtgaggacacactctggtggatgt

SEQ ID NO: 602429 - DNA, 120 bp, Artificial Sequence
  ENSG00000174915_29 (sequence is synthesized)
aggacctgggttagacatgaggaaactgaggcacagaggggtgcatcatctctccgaggacacactccgatggatgtaggaactaggtctctgcctccatttgcagatggtcatgcagag

SEQ ID NO: 602430 - DNA, 120 bp, Artificial Sequence
  ENSG00000174915_30 (sequence is synthesized)
ggggtctcaggcgagtgtctggcacaggcagtggctggggtctggtggcccccagttctgatactaggctggttgtgggcttttccaccagcgatgggacaggacaagactgcaaaggga

SEQ ID NO: 602431 - DNA, 120 bp, Artificial Sequence
  ENSG00000174915_31 (sequence is synthesized)
gcgccctgcctcctcctcccacgtctgggctctgacaggccagaggacgggcagacccacggctcgtggctcactccagctagcagcggtcactctgcaggcctctgctcaggccccttc

SEQ ID NO: 602432 - DNA, 120 bp, Artificial Sequence
  ENSG00000174915_32 (sequence is synthesized)
tcagctcttggtgtcttgggctgctgcactgaatctcagatgttatttcatgaacccaaagagttgttgtctcggcttgtcttgcgcagtgaaaagcgcgtgttttacgtgtccagttgc

SEQ ID NO: 602433 - DNA, 120 bp, Artificial Sequence
  ENSG00000174915_33 (sequence is synthesized)
tcttaatagcagatacctgccctggacgccagtggcagcatgtgccctctgagcagcggccttcagcttcccaggaacacggggctcttcctgtccagcctcctgggggctggtctcagc

SEQ ID NO: 602434 - DNA, 120 bp, Artificial Sequence
  ENSG00000174915_34 (sequence is synthesized)
cctgactggccagcagacgcagggtcatctcggagttacccagctagggactcgcagccagttgctggttgggagttggagagtggagtttaagccctctccttgacgtagagaggattt

SEQ ID NO: 602435 - DNA, 120 bp, Artificial Sequence
  ENSG00000174915_35 (sequence is synthesized)
ggtttatctccacaggcaggcaggctagaccttgggtgtgtcctctgcctgaattccatggattctgacgccagtctcagaagtgcgtgtggaagagaagctggttttagagcctgtgaa

SEQ ID NO: 602436 - DNA, 120 bp, Artificial Sequence
  ENSG00000174915_36 (sequence is synthesized)
caggcatggtgacaaaggaggccttgcccacacagccctcgagtgatgggaggaagcagggctagacccccacaaagtaggccgagctgcggggggtctccaggagcatctgtgcggccc

SEQ ID NO: 602437 - DNA, 120 bp, Artificial Sequence
  ENSG00000174915_37 (sequence is synthesized)
ttgagtgatggggggcagcaaagctagaccttcaaaacgtaggccgagctgcggggggcctccaggagcatctgctggtggggcgctgactgtggccatttagcagggccacacttaagg

SEQ ID NO: 602438 - DNA, 120 bp, Artificial Sequence
  ENSG00000174915_38 (sequence is synthesized)
ggggagcagagcctgggaggccggagcctgggcaagtccgcctggaggaccctgcggggcccgggacgctgaaccccctgctgcccctgcaggaagccccacaagaagctgggcccgcag

SEQ ID NO: 602439 - DNA, 120 bp, Artificial Sequence
  ENSG00000174915_39 (sequence is synthesized)
ttccttggggccagggaccccagtggggccggtacatctccccgccccggcctctgcaccctggagggacggcaggagggctctctgtgcagtttgagagaacacccatacgcaggaaat

SEQ ID NO: 602440 - DNA, 120 bp, Artificial Sequence
  ENSG00000174915_40 (sequence is synthesized)
gggggcccctgctctctaggctgtcgtggacgtggtctccacaggccacggcagcacctgtgagtccctggccttcttcccggggtctggcaggtgctgctcaggtgtgggctgatctgc

SEQ ID NO: 602441 - DNA, 120 bp, Artificial Sequence
  ENSG00000174915_41 (sequence is synthesized)
ctacaacaccaagaggtaagctgccctcttgtcctgccttctgaaactgccctgtgccccgtgtggtgggtgtggcacccttactgctcgggctgccgggggctcagaaggccttcacca

SEQ ID NO: 602442 - DNA, 120 bp, Artificial Sequence
  ENSG00000174915_42 (sequence is synthesized)
ggctgcccttggtgctgcgtggcgttcccggtcagcccccgtcgcctgtcactgggagccaggagtctgtgtcatctccacgtgaccggcagcctgtgctgcgtttcctctgagttttgc

SEQ ID NO: 602443 - DNA, 120 bp, Artificial Sequence
  ENSG00000174915_43 (sequence is synthesized)
atgttgaggttggaacgagctgcagcagctacagggctgagcccttgagtttgggcgtctccgggggtgaggttcctgcggtggccgcgtgctggttccgttagccagcggggctcttgc

SEQ ID NO: 602444 - DNA, 120 bp, Artificial Sequence
  ENSG00000174915_44 (sequence is synthesized)
cgcgcacagggtgtgtctgcccagggctgcctcctgcccagcaaggctgctgacaccatcagggcctggccccacttgctccggcgggatggtgggaggaagccggagcagggtctgaga

SEQ ID NO: 602445 - DNA, 120 bp, Artificial Sequence
  ENSG00000174917_0 (sequence is synthesized)
ccgggcccttggtcccccgcgcgggcgcgggtggatctctcgggctctgacttgttttcgggtcaccttcaggcttcagccaggcacctgacgcctctttcccctcacggtgccagggcc

SEQ ID NO: 602446 - DNA, 120 bp, Artificial Sequence
  ENSG00000174917_1 (sequence is synthesized)
gggccgaactacatttcccaggaggctccgcggccaggtgcaaacagcgccgtgctgactacatttcccagacagccttgcggcggcccgggccttaaagcgtccatttcccagcggccc

SEQ ID NO: 602447 - DNA, 120 bp, Artificial Sequence
  ENSG00000174917_2 (sequence is synthesized)
tccgctgcgagaccgcagcccttctctggagtctcagagccgcaagacaccacgactcccagaggaccttgcgtcgggcaagaaagactacaccttccagaggcctctgcggcgccgcga

SEQ ID NO: 602448 - DNA, 120 bp, Artificial Sequence
  ENSG00000174917_3 (sequence is synthesized)
gcccgggtgtggtcgctgatgaggttcctcatcaagggaagtgtggctgggggcgccgtctacctggtgtacgaccaggagctgctggggcccagcgacaagagccaggcagccctacag

SEQ ID NO: 602449 - DNA, 120 bp, Artificial Sequence
  ENSG00000174917_4 (sequence is synthesized)
aaggctggggaggtggtcccccccgccatgtaccagttcagccagtacgtgtgtcagcagacaggcctgcagataccccagctcccagcccctccaaagatttactttcccatccgtgac

SEQ ID NO: 602450 - DNA, 120 bp, Artificial Sequence
  ENSG00000174917_5 (sequence is synthesized)
tcctggaatgcaggcatcatgacggtgatgtcagctctgtcggtggccccctccaaggcccgcgagtactccaaggagggctgggagtatgtgaaggcgcgcaccaagtagcgagtcagc

SEQ ID NO: 602451 - DNA, 120 bp, Artificial Sequence
  ENSG00000174917_6 (sequence is synthesized)
aggggccgcctgccccggccagaacgggcagggctgccactgacctgaagactccggactgggaccccactccgagggcagctcccggccttgccggcccaataaaggacttcagaagtg

SEQ ID NO: 602452 - DNA, 120 bp, Artificial Sequence
  ENSG00000174917_7 (sequence is synthesized)
gccgggaacgaggccagggtttggcgggtggtcagctctgggaggtccctccagccctgcacgatgttgtcctccatattgatgctgacctgattctccggcctgtcctcctccctccgc

SEQ ID NO: 602453 - DNA, 120 bp, Artificial Sequence
  ENSG00000174917_8 (sequence is synthesized)
ttcccagctcccagcccctccaaagatttactttcccatccgtgactcctggaatgcaggtaaggcacccagtttctttgcttggagggagacaccccagtctagcccctctccccactt

SEQ ID NO: 602454 - DNA, 120 bp, Artificial Sequence
  ENSG00000174917_9 (sequence is synthesized)
ccagtctagcccctctccccacttcctggccattcctttctgtccatcctccttcctgcccgacacgtgtctcttagggatctaaaagggaaaggaggccgagcacagtggctcacgcct

SEQ ID NO: 602455 - DNA, 120 bp, Artificial Sequence
  ENSG00000174917_10 (sequence is synthesized)
agcgagcccttggcgttcagttcgcggtgtcagcctccgcctccgagcctcagttgtcttctctgtgaggtgggaatgccggtgaatcctgccgctggcgtggatgagaagtgaatgcgt

SEQ ID NO: 602456 - DNA, 60 bp, Artificial Sequence
  ENSG00000174917_11 (sequence is synthesized)
taaaatacaaaaattagcctggtatggtggcgcacttgtagtcccagctacttgggaggc

SEQ ID NO: 602457 - DNA, 120 bp, Artificial Sequence
  ENSG00000174928_0 (sequence is synthesized)
gctcgcaggaggccgggaacatggcggggcagcccgcggccaccggctcgccgtctgccgacaaggacggaatggagcccaacgtcgtggctcggatctcgcagtgggcagacgaccacc

SEQ ID NO: 602458 - DNA, 120 bp, Artificial Sequence
  ENSG00000174928_1 (sequence is synthesized)
tgcgcctagtccggaacatcagcactggaatggccatagctggaataatgttacttttgagaagcattcgactgacatcaaaatttacaagctcttcggatattccagtagaatttataa

SEQ ID NO: 602459 - DNA, 120 bp, Artificial Sequence
  ENSG00000174928_2 (sequence is synthesized)
gaagaaatgttaaactacgtggacgattacgccgaataactgagaatggtttagaaattgaacatatacctattactttacctattatagcttcattgagaaaagagccacgtggtgctt

SEQ ID NO: 602460 - DNA, 120 bp, Artificial Sequence
  ENSG00000174928_3 (sequence is synthesized)
tgctggttaagttggctggagtagaactcgctgaaactgggaaggcatggttacaaaaagagctaaaaccttcccaattactatggttccaacttcttggaaaggagaattcagcactct

SEQ ID NO: 602461 - DNA, 120 bp, Artificial Sequence
  ENSG00000174928_4 (sequence is synthesized)
tttgctatcttctggtgagtaagggtggatatttcagcgtgaatctgaatgaagaaattttgagaagaggccttggcaaaactgttcttgttaaagggcttaaatatgattctaaaatct

SEQ ID NO: 602462 - DNA, 120 bp, Artificial Sequence
  ENSG00000174928_5 (sequence is synthesized)
actggacagttcacagaaacttacttaaagctgaattaacagccttaaaaaaaggagaaggaatatggaaggaagactctgaaaaagaaagttacttagaaaaattcaaagattcctgga

SEQ ID NO: 602463 - DNA, 120 bp, Artificial Sequence
  ENSG00000174928_6 (sequence is synthesized)
gagaaatatggaaaaaggacagttttttaaaaacaacaggatcagatttcagcttgaaaaaagaaagttattatgaaaaacttaaaaggacttatgaaatatggaaagacaacatgaaca

SEQ ID NO: 602464 - DNA, 120 bp, Artificial Sequence
  ENSG00000174928_7 (sequence is synthesized)
ctccttaatactgaagttcagagaacttataagtcgcataaactttcgtagaaaagggtgaaacggtcaagaaatctagaggtaaccttctccaaagagtgaaatatgtaaatatatgga

SEQ ID NO: 602465 - DNA, 120 bp, Artificial Sequence
  ENSG00000174928_8 (sequence is synthesized)
cgtttttcattgaatcaaaatggaagttttgccaaatgatcaaagtgttagtccaatggtatttaaatattaaaaagagatgattattataagcataatgtcagaattaatttaaacaaa

SEQ ID NO: 602466 - DNA, 120 bp, Artificial Sequence
  ENSG00000174928_9 (sequence is synthesized)
ttataattaatgtaatatgattttaggaaggatgaaacactttatgagaagttaccaggctgaatgatttacatatatagtgctaatgtgtgaagagaaagtttaactcttcacccacta

SEQ ID NO: 602467 - DNA, 120 bp, Artificial Sequence
  ENSG00000174928_10 (sequence is synthesized)
tgtgaagagaaagtttaactcttcacccactatgttgtttttagttattttgggctgccatattgaattttttgtttgtttgttttgagaaggcgtttcgctcttgttgcccaggctgga

SEQ ID NO: 602468 - DNA, 85 bp, Artificial Sequence
  ENSG00000174928_11 (sequence is synthesized)
acccaccttggcaagcccggctttttttgttttgacatggagtttcgctcttgtcacccaggcaggagtgcagtggcgttatctt

SEQ ID NO: 602469 - DNA, 75 bp, Artificial Sequence
  ENSG00000174928_12 (sequence is synthesized)
agctaccaagcccggctttttttgttttgacatggagtttcgctcttgtcacccaggcaggagtgcagtggcgtt

SEQ ID NO: 602470 - DNA, 120 bp, Artificial Sequence
  ENSG00000174928_13 (sequence is synthesized)
ccaccaagcctggctaagttttgtattgccatattgaatttttgtttagaaaagatatgtgtttatgtttccagttttattacctttcactatttataataaaggaattctttatgcttt

SEQ ID NO: 602471 - DNA, 86 bp, Artificial Sequence
  ENSG00000174928_14 (sequence is synthesized)
cagtgggcagacgaccacctgcgcctagtccggggacacggtattcctctctggcccaatgctgctccacccacttcggccgaaaa

SEQ ID NO: 602472 - DNA, 120 bp, Artificial Sequence
  ENSG00000174937_0 (sequence is synthesized)
tcaaaaagttttgtaactgatattgacttagaattcagaaaatgctcaatttcaccgatgtgacagagttcattcttttggggctaacgagccgtcgagaatggcaagttctcttcttca

SEQ ID NO: 602473 - DNA, 120 bp, Artificial Sequence
  ENSG00000174937_1 (sequence is synthesized)
tcatctttcttgtggtctacatcatcaccatggtgggcaatatcggcatgatggtgttaatcaaggtcagtcctcagcttaacaaccccatgtactttttcctcagtcacttgtcatttg

SEQ ID NO: 602474 - DNA, 120 bp, Artificial Sequence
  ENSG00000174937_2 (sequence is synthesized)
ttgatgtgtggttttcttccaatgtcacccctaaaatgttggaaaacctgttatcagataaaaaaacaattacttatgctggttgtttagtacagtgtttcttcttcattgctcttgtcc

SEQ ID NO: 602475 - DNA, 120 bp, Artificial Sequence
  ENSG00000174937_3 (sequence is synthesized)
atgtggaaatttttattcttgctgcgatggcctttgatagatacatggcaattgggaatcctctgctttatggcagtaaaatgtcaagggttgtctgtattcgactgattactttccctt

SEQ ID NO: 602476 - DNA, 120 bp, Artificial Sequence
  ENSG00000174937_4 (sequence is synthesized)
tgcagatccacctctcatcaaaatggcctgtgctgggacctttgtaaaagaatatacaatgatcatacttgccggcattaacttcacatattccctgactgtaattatcatctcttactt

SEQ ID NO: 602477 - DNA, 120 bp, Artificial Sequence
  ENSG00000174937_5 (sequence is synthesized)
attcatcctcattgccattctgcgaatgcgctcagcagaaggaaggcagaaggccttttccacatgtgggtcccatctgacagctgtcattatattctatggtactctgatcttcatgta

SEQ ID NO: 602478 - DNA, 120 bp, Artificial Sequence
  ENSG00000174937_6 (sequence is synthesized)
tctcagacgtcccacagaggagtctgtggagcaggggaagatggtggctgtgttctataccacagtgatccccatgttgaatcccatgatctacagtctgaggaacaaggatgtgaaaaa

SEQ ID NO: 602479 - DNA, 120 bp, Artificial Sequence
  ENSG00000174937_7 (sequence is synthesized)
ggccatgatgaaagtgatcagcagatcatgttaaacaaaataaaatcaaatttgatttaattttatcttctattatttgtttggaaaaagtttattacccagtacctaggaacattaaga

SEQ ID NO: 602480 - DNA, 120 bp, Artificial Sequence
  ENSG00000174937_8 (sequence is synthesized)
gttaagggaggcttccactgtggacttttccaagtttccctttcatcaggttgaaagtgtttaccattcccatatatagcatgcgcttttcaactctgcaaccacattgggaatatttct

SEQ ID NO: 602481 - DNA, 120 bp, Artificial Sequence
  ENSG00000174937_9 (sequence is synthesized)
agattaattacatacaaataagttaattgaaactgtgatgtgtgccaaagttcataggtgtactaagggaaattgctcaaatagctgcaaccaaaagacgttttcttattgaaaagtgca

SEQ ID NO: 602482 - DNA, 120 bp, Artificial Sequence
  ENSG00000174938_0 (sequence is synthesized)
agcttctccctcccgcagctccagtgcccgagcttcggctctcccagttccccaacccaccccttcccctccccgacaagccccgctagagcccagtggagaccccctcgatcctcgacc

SEQ ID NO: 602483 - DNA, 120 bp, Artificial Sequence
  ENSG00000174938_1 (sequence is synthesized)
ccaccctaaacccccagaagctgtctttctcctccccagtcccctagcttggggtccagacagcccagtggacccaggcgcctgagcaggagggtaacccaggccacccggccccttcgg

SEQ ID NO: 602484 - DNA, 120 bp, Artificial Sequence
  ENSG00000174938_2 (sequence is synthesized)
ccctctcggccccaccccctgcagccggagccgcgccccctccaccacagagccgcgagaagaggacagaggagactgagcaaaggggggtgggctccaggcgacccctagcccaattct

SEQ ID NO: 602485 - DNA, 89 bp, Artificial Sequence
  ENSG00000174938_3 (sequence is synthesized)
caaaggggggtgggctccaggcgacccctagcccaattctgcccctccatcccaaggggcagagaaattgtctttctttgctgactcct

SEQ ID NO: 602486 - DNA, 120 bp, Artificial Sequence
  ENSG00000174938_4 (sequence is synthesized)
ccagattacttagagaggcacagaggagagagatcggggtgagtcgccatggggactcccagggcccagcacccgccgcctccccagctgctgttcctaattctgctgagctgtccctgg

SEQ ID NO: 602487 - DNA, 120 bp, Artificial Sequence
  ENSG00000174938_5 (sequence is synthesized)
atccagggtctgcccctgaaggaggaggagatattgccagagcctggaagtgagacccccacggtggcctctgaggccctggctgaactgcttcatggggccctgctgaggaggggccca

SEQ ID NO: 602488 - DNA, 120 bp, Artificial Sequence
  ENSG00000174938_6 (sequence is synthesized)
gagatgggctacctgccaggatctgatcgggaccccacgctagccacccctccggccggccagactctcgcagtgccctccctgccacgggccactgagccggggacagggcctctgaca

SEQ ID NO: 602489 - DNA, 120 bp, Artificial Sequence
  ENSG00000174938_7 (sequence is synthesized)
acagccgtcacccctaacggggtcaggggggcaggccccactgcgccagaactgctgaccccgcccccaggaaccacagccccacccccacccagccctgcctccccagggcctcccctt

SEQ ID NO: 602490 - DNA, 120 bp, Artificial Sequence
  ENSG00000174938_8 (sequence is synthesized)
gggcctgagggaggagaggaggagacgacgaccaccatcatcaccacgacaactgttaccactacggtgaccagcccagttctgtgtaataacaacatctccgagggcgaagggtatgtg

SEQ ID NO: 602491 - DNA, 120 bp, Artificial Sequence
  ENSG00000174938_9 (sequence is synthesized)
gagtctccagatctggggagccccgtcagccgcaccctggggctcctggactgcacttacagcatccatgtctaccctggctacggcattgagatccaggtgcagacgctgaacctgtca

SEQ ID NO: 602492 - DNA, 120 bp, Artificial Sequence
  ENSG00000174938_10 (sequence is synthesized)
caggaagaggagctcctggtgctggctggtgggggatccccaggcctggccccccgactcctggccaactcatccatgcttggagaaggacaagtccttcggagcccaaccaaccggctg

SEQ ID NO: 602493 - DNA, 120 bp, Artificial Sequence
  ENSG00000174938_11 (sequence is synthesized)
cttctgcacttccagagcccacgggtcccaaggggcggtggcttcaggatccactatcaggcctacctcctgagctgtggcttccctccccggccggcccatggggacgtgagtgtgacg

SEQ ID NO: 602494 - DNA, 120 bp, Artificial Sequence
  ENSG00000174938_12 (sequence is synthesized)
gacctgcaccctgggggcactgccacctttcactgtgattcgggctaccagctgcagggagaggagaccctcatctgcctcaatggcacccggccatcctggaacggtgaaacccccagc

SEQ ID NO: 602495 - DNA, 120 bp, Artificial Sequence
  ENSG00000174938_13 (sequence is synthesized)
tgcatggcatcctgtggtggcaccatccacaatgccaccctgggccgcatcgtgtccccagagcctgggggagccgtagggcccaacctcacctgccgttgggtcattgaagcagctgag

SEQ ID NO: 602496 - DNA, 120 bp, Artificial Sequence
  ENSG00000174938_14 (sequence is synthesized)
gggcgccggctgcacctgcactttgaaagggtctcgctggatgaggacaatgaccggctgatggtgcgctcagggggcagccccctatcccccgtgatctatgattcggacatggacgat

SEQ ID NO: 602497 - DNA, 120 bp, Artificial Sequence
  ENSG00000174938_15 (sequence is synthesized)
ttaagccttcgatttgaagcctttgaggaggatcgctgcttcgcccccttcctggcacatggaaatgtcactaccacggaccctgagtatcgcccaggggcactggcaaccttctcgtgc

SEQ ID NO: 602498 - DNA, 120 bp, Artificial Sequence
  ENSG00000174938_16 (sequence is synthesized)
ctcccaggatatgccctggagccccctgggccccccaatgccatcgaatgtgtggatcccacagaaccccactggaacgacacagagccggcctgcaaagccatgtgtggaggggagctg

SEQ ID NO: 602499 - DNA, 120 bp, Artificial Sequence
  ENSG00000174938_17 (sequence is synthesized)
tcggaaccagctggcgtggtcctctctcccgactggccccagagctatagcccgggccaagactgcgtgtggggcgtgcacgtccaggaagagaagcgcatcttgctccaagttgagata

SEQ ID NO: 602500 - DNA, 120 bp, Artificial Sequence
  ENSG00000174938_18 (sequence is synthesized)
ttgaatgtgcgggaaggggacatgctgacgctgttcgacggggacggtcccagcgcccgagtcttggcccagctgcggggacctcagccgcgccgccgccttctctcctctgggcccgac

SEQ ID NO: 602501 - DNA, 120 bp, Artificial Sequence
  ENSG00000174938_19 (sequence is synthesized)
ctcacactgcagtttcaggcaccgcccgggcccccaaatccaggcctgggccagggcttcgtattgcacttcaaagaggtcccgaggaacgacacgtgccccgagctgccacctccggag

SEQ ID NO: 602502 - DNA, 120 bp, Artificial Sequence
  ENSG00000174938_20 (sequence is synthesized)
tggggctggagaacggcatcccacggggacctgatccggggcacggtgctcacctaccagtgcgagcctggctacgagctgctaggctccgacattctcacttgccagtgggacctgtct

SEQ ID NO: 602503 - DNA, 120 bp, Artificial Sequence
  ENSG00000174938_21 (sequence is synthesized)
tggagcgccgcgccgcccgcctgccaaaagatcatgacttgtgctgaccctggcgagattgccaacgggcaccgcaccgcctcggacgccggcttccccgttggctcccacgtccagtac

SEQ ID NO: 602504 - DNA, 120 bp, Artificial Sequence
  ENSG00000174938_22 (sequence is synthesized)
cgctgcctgccagggtacagcctcgagggggcagccatgctcacctgctacagccgggacacaggcacacccaagtggagcgatagggtccccaaatgcgccttgaagtacgagccgtgc

SEQ ID NO: 602505 - DNA, 120 bp, Artificial Sequence
  ENSG00000174938_23 (sequence is synthesized)
ctgaacccgggggttcccgagaatggctaccagacgctgtacaagcaccactaccaggcgggcgagtctctgcgcttcttctgctatgagggctttgagcttatcggcgaggtcaccatc

SEQ ID NO: 602506 - DNA, 120 bp, Artificial Sequence
  ENSG00000174938_24 (sequence is synthesized)
acctgtgtgcccggccacccctcccagtggaccagccagcccccactctgcaaagtgacccagaccacagatccatcacggcagctggaaggggggaacctggccctggccatcctgctg

SEQ ID NO: 602507 - DNA, 120 bp, Artificial Sequence
  ENSG00000174938_25 (sequence is synthesized)
cctctaggcttggtcattgtcctcggcagtggcgtttacatctactacaccaagcttcagggaaagtcccttttcggcttctcgggctcccactcctacagccccatcaccgtggagtcg

SEQ ID NO: 602508 - DNA, 120 bp, Artificial Sequence
  ENSG00000174938_26 (sequence is synthesized)
gacttcagcaacccgctgtatgaagctggggatacgcgggagtatgaagtttccatctgaaccccaagactacagctgcaggacccaggacgcccctcccctcctcattcgggcagaggg

SEQ ID NO: 602509 - DNA, 120 bp, Artificial Sequence
  ENSG00000174938_27 (sequence is synthesized)
aaatacgggacccggtctctgcctcctggctgccctcctccctggctgtgtaaatagtctccctatcccacgagggggctttgatggccctggagatcctacagtaaataaaccagcatc

SEQ ID NO: 602510 - DNA, 120 bp, Artificial Sequence
  ENSG00000174938_28 (sequence is synthesized)
ctgccgcccaaagccgcctcttctcagttgccaaacgaggggcctgccccccgccctaccggcttttggattctgggaggggaactctgcctccctgcaaatcttgcagcccctcctgcc

SEQ ID NO: 602511 - DNA, 120 bp, Artificial Sequence
  ENSG00000174938_29 (sequence is synthesized)
cagggcacccctcaaggactgcccccgatagctctactgttcccttggccacgaaggtgcccccctcccagatgccctggccctaggcctgactccggccaggagggtcagaagaaggac

SEQ ID NO: 602512 - DNA, 120 bp, Artificial Sequence
  ENSG00000174938_30 (sequence is synthesized)
aaaggggagagctgggacaaggccttgcccccttcctgccatctccccaacccacagtctctccacctttgcttctgaattcttgtttttgagcaataaacagaaaatcgccacttgtaa

SEQ ID NO: 602513 - DNA, 120 bp, Artificial Sequence
  ENSG00000174938_31 (sequence is synthesized)
tgccactacttgctctgtgaccttggacaggttacttgatctttctatgccctaatatcctcatctataaaataaaggataataatagtgtctgactcaagagttcttgtgaaaattaaa

SEQ ID NO: 602514 - DNA, 120 bp, Artificial Sequence
  ENSG00000174938_32 (sequence is synthesized)
tgagatagaatgtgtaagggcttagaagagtgcgtggcatatagttatgtgtgatgataacagctataaaaataagttaggaaagcaggcaaggggtgaggcagcttgtgagggagattg

SEQ ID NO: 602515 - DNA, 120 bp, Artificial Sequence
  ENSG00000174939_0 (sequence is synthesized)
acccggctgatttgctgtgccactgggagggttcgggggtggctgagctgagagggctccgggaaggagtgacgtcagggtgagtgggagcccaggaaggagcgagtaggagagagggag

SEQ ID NO: 602516 - DNA, 120 bp, Artificial Sequence
  ENSG00000174939_1 (sequence is synthesized)
cgagagccaggcaggaccgcagggtcggggctagtgaggagcgagggcaaggagagagcagtgaggccggagagaaagaagctgccgcggaggaagacaggctgcgggttcccgggactg

SEQ ID NO: 602517 - DNA, 120 bp, Artificial Sequence
  ENSG00000174939_2 (sequence is synthesized)
caggtccaggcagggtaggaaccgctgcccaggggagctaggaggaagcggggagagagagcgagcgaaaagcgggggtggggaggaaagggggagattgaggtgggagagagaagcaga

SEQ ID NO: 602518 - DNA, 120 bp, Artificial Sequence
  ENSG00000174939_3 (sequence is synthesized)
gcgagagagaggaggctgctggaaggagaaagaagagggtgaggaggcgacagagggagaggaggaagaagaggtagaaggagagagaaaggggagagaaaggagagaggagggttggag

SEQ ID NO: 602519 - DNA, 120 bp, Artificial Sequence
  ENSG00000174939_4 (sequence is synthesized)
gtgcatgaaggaggggagagggagcttcagcgtggagagaggaccgcggaaggagagagagacagcccagagtggaatgtggaagggaaacagtccagcggggagccagggggcagccat

SEQ ID NO: 602520 - DNA, 120 bp, Artificial Sequence
  ENSG00000174939_5 (sequence is synthesized)
ggaagggacaggtggggagctggggggacaggggaactggggtccggaggacgccccaggcctcttggccagggcctccctgatcatgctcccgtggccactacccctggcctcctcggc

SEQ ID NO: 602521 - DNA, 120 bp, Artificial Sequence
  ENSG00000174939_6 (sequence is synthesized)
cctcaccttgctcttcggggccctcacttccctgttcctctggtactgctaccgcctgggctcccaagacatgcaggccctaggggctgggagccgagctgggggtgttcgtggtgggcc

SEQ ID NO: 602522 - DNA, 120 bp, Artificial Sequence
  ENSG00000174939_7 (sequence is synthesized)
gccggcgggccaagcccagggggtcctggggatcccggggaaggacctaggacggaaggcctagtgagccggcggcttcgggcctacgcaaggcgctactcctgggctgggatgggtaga

SEQ ID NO: 602523 - DNA, 120 bp, Artificial Sequence
  ENSG00000174939_8 (sequence is synthesized)
gtgaggcgggcagctcagggtggcccaggccctgggagagggccaggggtcctaggtattcagcgcccaggcctgcttttcctaccagacctgccttcagccccctttgtgccgcgggac

SEQ ID NO: 602524 - DNA, 120 bp, Artificial Sequence
  ENSG00000174939_9 (sequence is synthesized)
gcccagcggcacgacgtggagctcctggagagcagcttccctgccattttgcgggacttcggggctgtgagctgggacttctcagggactacccctccgcctcggggctggtccccacct

SEQ ID NO: 602525 - DNA, 120 bp, Artificial Sequence
  ENSG00000174939_10 (sequence is synthesized)
ctggcccccgggtgctaccagctcctgctgtaccaagcaggccggtgccaacccagcaactgccgccggtgcccgggggcctatcgggcactgagggggcttcgaagctttatgagtgcc

SEQ ID NO: 602526 - DNA, 120 bp, Artificial Sequence
  ENSG00000174939_11 (sequence is synthesized)
aacaccttcggcaatgccggcttttccgttctcctgcctggggcccggctcgagggccgctgtgggcccaccaatgcccgggtcagatgccatctgggcctaaagatccctcctggctgt

SEQ ID NO: 602527 - DNA, 120 bp, Artificial Sequence
  ENSG00000174939_12 (sequence is synthesized)
gagctggtggtcggcggtgagccccagtgctgggctgaggggcactgtctactggtggacgactcttttctacacacagtggctcacaatggctcccccgaagatgggcctcgagtggtc

SEQ ID NO: 602528 - DNA, 120 bp, Artificial Sequence
  ENSG00000174939_13 (sequence is synthesized)
ttcatcgtggacctctggcaccccaacgtggcaggggctgagcgccaggccctcgactttgtcttcgccccagacccttgaaggaaggtgctcccttcacacacccaggctggagagaca

SEQ ID NO: 602529 - DNA, 120 bp, Artificial Sequence
  ENSG00000174939_14 (sequence is synthesized)
ctgcgctcagggacggcttgatggtagccaggacctcctctctactgcgggggtgggcgggggcggaggatgggaactggctagtgagcactgaaatataaattctgaatcctctcctaa

SEQ ID NO: 602530 - DNA, 120 bp, Artificial Sequence
  ENSG00000174939_15 (sequence is synthesized)
tgtcttctcctagtacaaccaaacagataaccagatgcaacgtgaagatctagactggaccctggtttgatgaaccagctgtaaaaacacatttctggaacaactggagaaaccggagta

SEQ ID NO: 602531 - DNA, 120 bp, Artificial Sequence
  ENSG00000174939_16 (sequence is synthesized)
tgccctggactggatattaaataaaaatttattgacatgtaaagatggcaattattaacaacaacaaaaaacagattataaaacatttcatacaacacgattgtattttggcaagcaaac

SEQ ID NO: 602532 - DNA, 120 bp, Artificial Sequence
  ENSG00000174939_17 (sequence is synthesized)
acacacacacacacatactctcacacaggaaacgacctggaagaatatttggtgcttttattttttagattatttgtgtttctgaaatttctacaattaataaatactgctttaaaataa

SEQ ID NO: 602533 - DNA, 120 bp, Artificial Sequence
  ENSG00000174939_18 (sequence is synthesized)
ctcagggacggcttgatgataaccagatgcaacgtgaagatctagactggaccctggtttgatgaaccagctgtaaaaacacatttctggaacaactggagaaaccggagtatgccctgg

SEQ ID NO: 602534 - DNA, 120 bp, Artificial Sequence
  ENSG00000174943_0 (sequence is synthesized)
agctgcccggcgccggcttccgggtggtgcgagcgagatggggcggagggccggtcttgcagagtagctgcggtgagtgggcgtgtgcgccgagcggtctggcccaagggctgggggccg

SEQ ID NO: 602535 - DNA, 120 bp, Artificial Sequence
  ENSG00000174943_1 (sequence is synthesized)
agggtcttcgggagcaggccgcagggcgcggagagatcctgggatcgccgtccgccgctgctacccggcatgtcggcggaggcctcgggcccggctgccgccgcggccccgtccctggaa

SEQ ID NO: 602536 - DNA, 120 bp, Artificial Sequence
  ENSG00000174943_2 (sequence is synthesized)
ggaagcccccaagccctcgggtctcgagcctggccccgccgcctacggtctcaagccgctgaccccgaacagcaaatacgtgaagctgaacgtgggcggctcgttgcactacaccacgct

SEQ ID NO: 602537 - DNA, 120 bp, Artificial Sequence
  ENSG00000174943_3 (sequence is synthesized)
gcgcaccctcacgggacaggacaccatgctcaaagccatgttcagcggccgcgtggaggtgctgaccgatgccggaggttgggtgctgattgaccggagcggccgtcactttggtacaat

SEQ ID NO: 602538 - DNA, 120 bp, Artificial Sequence
  ENSG00000174943_4 (sequence is synthesized)
cctcaattacctgcgggatgggtctgtgccactgccggagagtacgagagaactgggggagctgctgggcgaagcacgctactacctggtgcagggcctgattgaggactgccagctggc

SEQ ID NO: 602539 - DNA, 120 bp, Artificial Sequence
  ENSG00000174943_5 (sequence is synthesized)
gctgcagcaaaaaagggagacgctgtccccgctgtgcctcatccccatggtgacatctccccgggaggagcagcagctcctggccagcacctccaagcccgtggtgaagctcctgcacaa

SEQ ID NO: 602540 - DNA, 120 bp, Artificial Sequence
  ENSG00000174943_6 (sequence is synthesized)
ccgcagtaacaacaagtactcctacaccagcacttcagatgacaacctacttaagaacatcgagctgttcgacaagctggccctgcgcttccacgggcggctactcttcctcaaggatgt

SEQ ID NO: 602541 - DNA, 120 bp, Artificial Sequence
  ENSG00000174943_7 (sequence is synthesized)
gcagggccgcaaaatcgccgaggtgtgctgcacctccattgtctatgctacggagaagaagcagaccaaggtggaatttccagaggcccggatcttcgaggagaccctgaacatcctcat

SEQ ID NO: 602542 - DNA, 120 bp, Artificial Sequence
  ENSG00000174943_8 (sequence is synthesized)
ctacgagactccccggggcccagacccagccctcctggaggccacagggggagcagctggagctggtggggctggccgcggggaggatgaagagaaccgagagcaccgtgtccgcaggat

SEQ ID NO: 602543 - DNA, 120 bp, Artificial Sequence
  ENSG00000174943_9 (sequence is synthesized)
ccatgtccggcgccatatcacccacgacgagcgtcctcatggccaacaaattgtcttcaaggactgacctctgaccctccccctgccttcctcttgccttgggacccagtccctctctct

SEQ ID NO: 602544 - DNA, 120 bp, Artificial Sequence
  ENSG00000174943_10 (sequence is synthesized)
ttccctccccttcccagacttttgccccggctctgctggccaagtcgtgggtcctcctctgtcccttcattgcatggcacagctcactttggcccttctccacccatcccaaccccattg

SEQ ID NO: 602545 - DNA, 120 bp, Artificial Sequence
  ENSG00000174943_11 (sequence is synthesized)
ctaacaacatggtacattccggccccaccactcagagccttccgaagccaacacttgtccccaccctggccctgcgtccttccctctccagctggttaagagggatttagaattcccttt

SEQ ID NO: 602546 - DNA, 120 bp, Artificial Sequence
  ENSG00000174943_12 (sequence is synthesized)
ctctttttttagtgcatcgtccatgccaaagtgtgcggcccttcctgacatcaccacagtctgagcagcctcccgcgtcctgcagggtagtccgccccctcctccccaccatcctcccta

SEQ ID NO: 602547 - DNA, 120 bp, Artificial Sequence
  ENSG00000174943_13 (sequence is synthesized)
cctccttaactttgtactagactggcctgggcctgcccagctcagcgttatcagtctgtttcatattatttattattttaattttctattaaattattgaaataaagttaagttgagaaa

SEQ ID NO: 602548 - DNA, 120 bp, Artificial Sequence
  ENSG00000174943_14 (sequence is synthesized)
ctttggctggccataaccccagagaatttgaggtgccatcttctgcatccctgccgcctcaggcagcacccccaccccagcctcatgccaggacctttgcaatggttaaatagctgctct

SEQ ID NO: 602549 - DNA, 120 bp, Artificial Sequence
  ENSG00000174943_15 (sequence is synthesized)
ctacttcccactgttcctatgcagccagtccagctgttacactcgcacctgagtaattatctttcagcacaaccccgatctattctctctcttgcttagaaatcctaaatagctccctca

SEQ ID NO: 602550 - DNA, 120 bp, Artificial Sequence
  ENSG00000174943_16 (sequence is synthesized)
tgtcactagggaaaaacatctaaatttaaattgaaatataataacctctgcgatctggccctatcctgggaggcagcattctcccatggcttccgccccccaggagctttctaattcttt

SEQ ID NO: 602551 - DNA, 120 bp, Artificial Sequence
  ENSG00000174943_17 (sequence is synthesized)
tttttttttaaacagtgaaattctttattcaaatgaaatctcacagaagcagggccactcccagtaaaacagggttggggattctagagaccccacctgctaggctccacttttgtggac

SEQ ID NO: 602552 - DNA, 120 bp, Artificial Sequence
  ENSG00000174943_18 (sequence is synthesized)
cccttagggttctgaggagcagagcttggaaagtgaagccaggacataagggttctgtgtcacctctgtcacagctgactcagtgaccttcagtgagtccattcctacctctgggattct

SEQ ID NO: 602553 - DNA, 120 bp, Artificial Sequence
  ENSG00000174943_19 (sequence is synthesized)
gtcctcgggttccgaaagacagggaagggagaaaaataagtacaaagtagtgagttttacataaagcctgttattctgttctatttttacaatgttaaaaatgtcctttcttttatgtta

SEQ ID NO: 602554 - DNA, 120 bp, Artificial Sequence
  ENSG00000174943_20 (sequence is synthesized)
caatagtaagagaagattataaaagtttctttttgaatgccctttatagattaaaaggttgcctccctgaacaacttttgtctcagggaatacttactggttcttgaagcccaaaggtgt

SEQ ID NO: 602555 - DNA, 120 bp, Artificial Sequence
  ENSG00000174943_21 (sequence is synthesized)
agaactcctttggacaatatccatgtttttcaaactttttgattgcctgccatagggaaaaaatgcattttagtactcattatatataactgaaataacagttctataaaaagatacttt

SEQ ID NO: 602556 - DNA, 120 bp, Artificial Sequence
  ENSG00000174943_22 (sequence is synthesized)
tagtgaaatgtactctgataatctttctttttaatgctgtttgggacccattacttatttcatgacccattaataaattaccacttgcatttgagaaacattcattgtactagatcttgg

SEQ ID NO: 602557 - DNA, 73 bp, Artificial Sequence
  ENSG00000174943_23 (sequence is synthesized)
ccacttgcatttgagaaacattcattgtactagatcttggaagtgcattcctgctctgtagcatttttgtttt

SEQ ID NO: 602558 - DNA, 72 bp, Artificial Sequence
  ENSG00000174943_24 (sequence is synthesized)
ggcgcctgctaccacgctttaggctggtgtcgaactcctgacctcacgtgatccatccgccttggcccccca

SEQ ID NO: 602559 - DNA, 120 bp, Artificial Sequence
  ENSG00000174943_25 (sequence is synthesized)
atgttaaaactaaagttttaaaacccggcctgtagttttaaatttactaatgtcatcatgtacccactgtgtgtcaggagcaattctgctatctgcttgtgtatacatcttgtatccttg

SEQ ID NO: 602560 - DNA, 120 bp, Artificial Sequence
  ENSG00000174943_26 (sequence is synthesized)
tttgacgtaaaaagaaacgcgagggagcttggaagacgtgtccaaggtgaaagagctgggaagcagcagagctcagatttgaccccaggctacctgactatctgaccttcagcctcccaa

SEQ ID NO: 602561 - DNA, 120 bp, Artificial Sequence
  ENSG00000174943_27 (sequence is synthesized)
gagctgtacttttctatactcctgctctctcctttccaggttccctctgcacctcacgcagctcagcacactcctcagtgtgtggcacttcatcaatattggtctatgcaaaccttttgt

SEQ ID NO: 602562 - DNA, 120 bp, Artificial Sequence
  ENSG00000174943_28 (sequence is synthesized)
cttttagttttatttctttcccttcattcccagtcccctgcctactttcctttttcccaggggcacccatccaattttaatgttttgatacatatgctcgaaaagctaaagcattgttct

SEQ ID NO: 602563 - DNA, 120 bp, Artificial Sequence
  ENSG00000174943_29 (sequence is synthesized)
gcatatgtgtgcattttaaatgtccataaatggcattgaagctgtgaatcagtttctgttgcattgtgtttttttaattcagcactttttttcaagatctattcatgctgctccaagtac

SEQ ID NO: 602564 - DNA, 120 bp, Artificial Sequence
  ENSG00000174943_30 (sequence is synthesized)
atctagttctttgcttctaacagctgcagagaaatctgcggtgttcattcaccatattttgttcatacattcccctgaggttggagacctagattgccttccagttcctgcccctacaaa

SEQ ID NO: 602565 - DNA, 120 bp, Artificial Sequence
  ENSG00000174943_31 (sequence is synthesized)
ccgtgtcaccatgagcatcctggtacatgctcccttctgattctgtgccagtctcctgtcattgtagctgggagtagaattgctggataacaggacacctgcaaacggcgttttagtaaa

SEQ ID NO: 602566 - DNA, 120 bp, Artificial Sequence
  ENSG00000174943_32 (sequence is synthesized)
tatcatctaattgctctcccgaatggttataatactttatcctcataatgagcagtgcataagagattacatttctgcatgtcctcatcaagacatggcatcatccagctttctaatttt

SEQ ID NO: 602567 - DNA, 120 bp, Artificial Sequence
  ENSG00000174943_33 (sequence is synthesized)
gccaatccaatgagtgtagcgtgatctcattttcatttgcatgcctctgattactaatgaggttcagcatcttttcatatactcactagtgtttttttgtttcccttcctgtgaattgct

SEQ ID NO: 602568 - DNA, 120 bp, Artificial Sequence
  ENSG00000174943_34 (sequence is synthesized)
tattcatgttctttaccagattttctgcttttttctttttcatgttgcttagcaggagatccttgcatattttagtttagttcctagggataattaagccctactgcatatgggtatgtc

SEQ ID NO: 602569 - DNA, 120 bp, Artificial Sequence
  ENSG00000174943_35 (sequence is synthesized)
ttatacattccctagggcatggattatatacataacaaattaacctctaagcctgtagcatgggactatttacctactgttctcagcaaagttcagaaaacactcaaattatttgctgtt

SEQ ID NO: 602570 - DNA, 70 bp, Artificial Sequence
  ENSG00000174943_36 (sequence is synthesized)
tttgtttttgtttttcgcgatcttacctcactgcaacctccctctctggggttcaagtgattctcctgcc

SEQ ID NO: 602571 - DNA, 120 bp, Artificial Sequence
  ENSG00000174943_37 (sequence is synthesized)
tggggttcaagtgattctcctgcctcagctttccgggtagctgggactacatgtgtgcactacaatgcctggctaattttatcatatttttggtagagatggagtttcgccatgttggcc

SEQ ID NO: 602572 - DNA, 120 bp, Artificial Sequence
  ENSG00000174943_38 (sequence is synthesized)
aagtgctgggattcaggcgtgagccaccgtgcctggccatatttgctggtttttgagattcagatgaggaacttcagttgaaaaagtctgttctagataaaaatttctagtcaatgtaga

SEQ ID NO: 602573 - DNA, 120 bp, Artificial Sequence
  ENSG00000174943_39 (sequence is synthesized)
agtctgttctagataaaaatttctagtcaatgtagatatcgccaatattttttcttagaatgtcacccacttgtggcatctagcattgaatggaaatccttgattttttaaaattacaaa

SEQ ID NO: 602574 - DNA, 120 bp, Artificial Sequence
  ENSG00000174943_40 (sequence is synthesized)
taaccattgattattttaaagcagtatttattaattgtagaaatttcagaaacacaaataatctaaaaaataaaagcaccaaatattcttccaggtcgtttcctgtgtgagagtatgtgt

SEQ ID NO: 602575 - DNA, 120 bp, Artificial Sequence
  ENSG00000174943_41 (sequence is synthesized)
gtgtgtgtgtgtttgcttgccaaaatacaatcgtgttgtatgaaatgttttataatctgttttttgttgttgttaataattgccatctttacatgtcaataaatttttatttaatatcca

SEQ ID NO: 602576 - DNA, 120 bp, Artificial Sequence
  ENSG00000174943_42 (sequence is synthesized)
ggcagagtcctcccccttgaggtcagtactgttgtgagctccattttacagatgaggaggtcgggacaccaagaggtgaagtaacttgcctagtgtcacccagttaaaaaatggggacac

SEQ ID NO: 602577 - DNA, 120 bp, Artificial Sequence
  ENSG00000174943_43 (sequence is synthesized)
ccggtttctccagttgttccagaaatgtgtttttacagctggttcatcaaaccagggtccagtctagatcttcacgttgcatctggttatctgcaagttaacaatggaaagcatgacttt

SEQ ID NO: 602578 - DNA, 120 bp, Artificial Sequence
  ENSG00000174943_44 (sequence is synthesized)
tgaccgccggggtgcggggcactgggcgggaccctgggatgcagcacagccctgcttctgcccaaggcgagggccacggccacacggggggcctacaagaacatctgtgcctgctcgcag

SEQ ID NO: 602579 - DNA, 120 bp, Artificial Sequence
  ENSG00000174943_45 (sequence is synthesized)
tgtggcttcccttctgagacccgtttagcctggccccaggggtggaggaggctctctgttgagcaccaaagccctgggcaggagcagaggactgggaatgcatccaggcccgtcttctgg

SEQ ID NO: 602580 - DNA, 120 bp, Artificial Sequence
  ENSG00000174943_46 (sequence is synthesized)
tggtcctagggcattggagaagttatgcggcttgttcaaggtcatgcagctggaagatggtggtggtaggacaggaagtccgttgggcctgattctgctgccttctagtcaacgctcctt

SEQ ID NO: 602581 - DNA, 120 bp, Artificial Sequence
  ENSG00000174943_47 (sequence is synthesized)
gaggcactgtgtgacctgcgatctgaatggcatgacggacacgccacgctgacagctgagcaaagaagcatcccgggcaggggcacagccagtggccggggcaggcacaagctggatgtg

SEQ ID NO: 602582 - DNA, 120 bp, Artificial Sequence
  ENSG00000174943_48 (sequence is synthesized)
tgaagcagcaaggtgtccgtgggaccaaggcccagcaagcaaagggagagtggcagagaggctggcggagcttggagcctgcagagccctgcggaccactgaggagtctggagttgttcc

SEQ ID NO: 602583 - DNA, 120 bp, Artificial Sequence
  ENSG00000174944_0 (sequence is synthesized)
agaagtcagcctaacacccacagagattaaaacgtctcttccttcctctttgtttccacgtcccagtcttcaataaattctatctgacaacagcagcagagggacccactatcttgtggt

SEQ ID NO: 602584 - DNA, 120 bp, Artificial Sequence
  ENSG00000174944_1 (sequence is synthesized)
ttctgtcaagttcctgattttcatccgtagttgaagatgagcaagaactctgtaacagtgttaccttggagcctacaatgagaggtatttcaaaatgagtgaagcatgactctcacagat

SEQ ID NO: 602585 - DNA, 120 bp, Artificial Sequence
  ENSG00000174944_2 (sequence is synthesized)
gaaggcctagacgcaggatctttaatgaaaaaacacttgggccacttcaagacgacaaacgctcactgggcaaaacaccttcactgaaaagagacctcatattatgcaaaaaaaatctta

SEQ ID NO: 602586 - DNA, 120 bp, Artificial Sequence
  ENSG00000174944_3 (sequence is synthesized)
aaaggcctctgccttcagaagttacaagatgatcaattcaacctccacacagcctccagatgaatcctgctctcagaacctcctgatcactcagcagatcattcctgtgctgtactgtat

SEQ ID NO: 602587 - DNA, 120 bp, Artificial Sequence
  ENSG00000174944_4 (sequence is synthesized)
ggtcttcattgcaggaatcctactcaatggagtgtcaggatggatattcttttacgtgcccagctctaagagtttcatcatctatctcaagaacattgttattgctgactttgtgatgag

SEQ ID NO: 602588 - DNA, 120 bp, Artificial Sequence
  ENSG00000174944_5 (sequence is synthesized)
cctgacttttcctttcaagatccttggtgactcaggccttggtccctggcagctgaacgtgtttgtgtgcagggtctctgccgtgctcttctacgtcaacatgtacgtcagcattgtgtt

SEQ ID NO: 602589 - DNA, 120 bp, Artificial Sequence
  ENSG00000174944_6 (sequence is synthesized)
ctttgggctcatcagctttgacagatattataaaattgtaaagcctctttggacttctttcatccagtcagtgagttacagcaaacttctgtcagtgatagtatggatgctcatgctcct

SEQ ID NO: 602590 - DNA, 120 bp, Artificial Sequence
  ENSG00000174944_7 (sequence is synthesized)
ccttgctgttccaaatattattctcaccaaccagagtgttagggaggttacacaaataaaatgtatagaactgaaaagtgaactgggacggaagtggcacaaagcatcaaactacatctt

SEQ ID NO: 602591 - DNA, 120 bp, Artificial Sequence
  ENSG00000174944_8 (sequence is synthesized)
cgtggccatcttctggattgtgtttcttttgttaatcgttttctatactgctatcacaaagaaaatctttaagtcccaccttaagtcaagtcggaattccacttcggtcaaaaagaaatc

SEQ ID NO: 602592 - DNA, 120 bp, Artificial Sequence
  ENSG00000174944_9 (sequence is synthesized)
tagccgcaacatattcagcatcgtgtttgtgttttttgtctgttttgtaccttaccatattgccagaatcccctacacaaagagtcagaccgaagctcattacagctgccagtcaaaaga

SEQ ID NO: 602593 - DNA, 120 bp, Artificial Sequence
  ENSG00000174944_10 (sequence is synthesized)
tttatttctttctatgccagccgtttagggaaatcttatgtaagaaattgcacattccattaaaagctcagaatgacctagacatttccagaatcaaaagaggaaatacaacacttgaaa

SEQ ID NO: 602594 - DNA, 120 bp, Artificial Sequence
  ENSG00000174944_11 (sequence is synthesized)
gcacagatactttgtgagttcctaccctcttccaaagaaagaccacgtgtgcatgttgtcatcttcaattacataacagaaatcaataagatatgtgccctcatcataaatatcatctct

SEQ ID NO: 602595 - DNA, 120 bp, Artificial Sequence
  ENSG00000174944_12 (sequence is synthesized)
agcactgccatccaatttagttcaataaaattcaaatataagtttccatgcttttttgtaacatcaaagaaaacatacccatcagtaatttctctaatactgacctttctattctctatt

SEQ ID NO: 602596 - DNA, 120 bp, Artificial Sequence
  ENSG00000174944_13 (sequence is synthesized)
aattattcaattctattatattaaaataagttaaagtttataaccactagtctggtcagttaatgtagaaatttaaatagtaaataaaacacaacataatcaaagacaactcactcaggc

SEQ ID NO: 602597 - DNA, 120 bp, Artificial Sequence
  ENSG00000174944_14 (sequence is synthesized)
caaagacaactcactcaggcatcttctttctctaaataccagaatctagtatgtaattgttttcaacactgtccttaaagactaacttgaaagcaggcacagtttgatgaagggctagag

SEQ ID NO: 602598 - DNA, 120 bp, Artificial Sequence
  ENSG00000174944_15 (sequence is synthesized)
agctgtttgcaataaaaagtcaggtttttttcctgatttgaagaagcaggaaaagctgacacccagacaatcacttaagaaaccccttattgatgtatttcatggcactgcaaaggaaga

SEQ ID NO: 602599 - DNA, 120 bp, Artificial Sequence
  ENSG00000174944_16 (sequence is synthesized)
ggaatattaattgtatacttagcaagaaaattttttttttctgatagcactttgaggatattagatacatgctaaatatgttttctacaaagacttacgtcatttaatgagcctggggtt

SEQ ID NO: 602600 - DNA, 120 bp, Artificial Sequence
  ENSG00000174944_17 (sequence is synthesized)
ctggtgttagaatatttttaagtaggctttactgagagaaactaaatattggcatacgttatcagcaacttcccctgttcaatagtatgggaaaaataagatgactgggaaaaagacaca

SEQ ID NO: 602601 - DNA, 120 bp, Artificial Sequence
  ENSG00000174944_18 (sequence is synthesized)
cccacaccgtagaacatatattaatctactggcgaatgggaaaggagaccattttcttagaaagcaaataaacttgatttttttaaatctaaaatttacattaatgagtgcaaaataaca

SEQ ID NO: 602602 - DNA, 120 bp, Artificial Sequence
  ENSG00000174944_19 (sequence is synthesized)
cataaaatgaaaattcacacatcacatttttctggaaaacagacggattttacttctggagacatggcatacggttactgacttatgagctaccaaaactaaattctttctctgctatta

SEQ ID NO: 602603 - DNA, 120 bp, Artificial Sequence
  ENSG00000174944_20 (sequence is synthesized)
actggctagaagacattcatctatttttcaaatgttctttcaaaacatttttataagtaatgtttgtatctatttcatgctttactgtctatatactaataaagaaatgttttaatactg

SEQ ID NO: 602604 - DNA, 120 bp, Artificial Sequence
  ENSG00000174944_21 (sequence is synthesized)
aagcatatattagagctgggctccaaagaatactggacatctgtagtacctgacattcaagcatttggcgagatgtcaatatttcagagagcactttaaatgttttgatttgaaagctaa

SEQ ID NO: 602605 - DNA, 120 bp, Artificial Sequence
  ENSG00000174944_22 (sequence is synthesized)
tgcagtgtttcccactggtcaacacgagcagtccagcagagagcaaaatctatttccctcaacatcaaatgctacactcagttgctgatcctatcttgcctacagagaacctaaaagact

SEQ ID NO: 602606 - DNA, 120 bp, Artificial Sequence
  ENSG00000174944_23 (sequence is synthesized)
aacagtgttaccttggagcctacaatgagaggtatttcaaaatgagtgaagcatgactctcacagatgaaggcctagacgcaggaattacctagcaagccatggccaccatccctcttac

SEQ ID NO: 602607 - DNA, 120 bp, Artificial Sequence
  ENSG00000174945_0 (sequence is synthesized)
gattggtgctgtgacctgcggcagcacagccgcctgcgttgagcgcccacggtgggctggactttgcactaggtgctgacaggaccggcagaggtggccactgccctcgtccccagcctg

SEQ ID NO: 602608 - DNA, 120 bp, Artificial Sequence
  ENSG00000174945_1 (sequence is synthesized)
cactcctgggcgaaggctgacgctgaacagggtgctgtgggcccagaagcgcccatgcctgagagcgtccaggaccaggcagagctgggccttaagggcccttggaccagtgtctgtctg

SEQ ID NO: 602609 - DNA, 120 bp, Artificial Sequence
  ENSG00000174945_2 (sequence is synthesized)
cagggagcccccggtagccactcggatcagcccgagggaagattctggacgagaccgtggccgtcccccgggtggcccatggacagcagcaggggctcccaggagtggccaggccctgcc

SEQ ID NO: 602610 - DNA, 120 bp, Artificial Sequence
  ENSG00000174945_3 (sequence is synthesized)
cgcccaccatgctgcagtgtagacccgcacaggagttcagcttcgggccccgggccttgaaggacgctctggtctccactgacgcagccctgcagcagctgtatgtgtccgccttctccc

SEQ ID NO: 602611 - DNA, 120 bp, Artificial Sequence
  ENSG00000174945_4 (sequence is synthesized)
ctgccgagcggctcttcctggccgaggcctacaacccgcagaggacgctcttctgcaccctgctcatccgcacgggcttcgactggctcctgagccgacccgaggctcccgaggacttcc

SEQ ID NO: 602612 - DNA, 120 bp, Artificial Sequence
  ENSG00000174945_5 (sequence is synthesized)
agaccttccacgcctccctgcagcaccggaagccccgcctggctcggaagcacatctacctacagccgatagacctgagcgaggagccggtgggaagctccctgctgcaccagctgtgca

SEQ ID NO: 602613 - DNA, 120 bp, Artificial Sequence
  ENSG00000174945_6 (sequence is synthesized)
gctgcacagaggccttcttcctgggcctgcgcgtcaagtgcctgccgtcggtggcagccgcgtccatccgctgctcctcgcggcccagccgggactctgacaggctccagctccacacag

SEQ ID NO: 602614 - DNA, 120 bp, Artificial Sequence
  ENSG00000174945_7 (sequence is synthesized)
acggcatcctgtccttcttgaagaacaacaagccaggggacgcgctgtgtgtgctgggcctcacactgtctgacctgtacccccatgaggcctggagcttcaccttcagcaagttccttc

SEQ ID NO: 602615 - DNA, 120 bp, Artificial Sequence
  ENSG00000174945_8 (sequence is synthesized)
cagggcacgaagtgggcgtctgcagcttcgcccggttctcaggggaattcccgaagtcggggcccagcgcccctgatctggccctggtagaggcagcagcagacggccccgaggcccccc

SEQ ID NO: 602616 - DNA, 120 bp, Artificial Sequence
  ENSG00000174945_9 (sequence is synthesized)
tgcaggacaggggctgggccctgtgcttcagtgccctggggatggttcagtgctgcaaggtcacgtgccacgagctctgccaccttctgggcctggggaactgccgctggctccgctgcc

SEQ ID NO: 602617 - DNA, 120 bp, Artificial Sequence
  ENSG00000174945_10 (sequence is synthesized)
tcatgcagggtgcgctcagcctggacgaggccctgcggcggcccctggacctctgtcccatctgcctgaggaagctgcagcatgtcctgggtttcaggctcatcgagaggtaccagagac

SEQ ID NO: 602618 - DNA, 120 bp, Artificial Sequence
  ENSG00000174945_11 (sequence is synthesized)
tctacacctggactcaggcggtggtggggacgtggcccagccaggaggcgggggagccgtcagtgtgggaggacaccccgcctgccagcgccgactcgggcatgtgctgtgagagtgact

SEQ ID NO: 602619 - DNA, 120 bp, Artificial Sequence
  ENSG00000174945_12 (sequence is synthesized)
cggagcccggcaccagtgtgtcggagcccctcacccctgatgccgggagtcacaccttcgcctcggggccagaggaagggctgagctacctggcagcctcagaggctccgctgccacctg

SEQ ID NO: 602620 - DNA, 120 bp, Artificial Sequence
  ENSG00000174945_13 (sequence is synthesized)
ggggccctgcggaggccatcaaggagcatgaacggtggctggccatgtgcatccaggccctgcagcgggaagtggcagaggaggacctggtgcaggtggacagagccgtggacgccctcg

SEQ ID NO: 602621 - DNA, 120 bp, Artificial Sequence
  ENSG00000174945_14 (sequence is synthesized)
accgctgggagatgttcacgggccagctcccggccaccaggcaggacccacccagcagcagggacagcgtggggctgcgcaaggtgctgggggacaagttctcctccctgaggaggaagc

SEQ ID NO: 602622 - DNA, 120 bp, Artificial Sequence
  ENSG00000174945_15 (sequence is synthesized)
tgagtgcccgaaaactcgccagagcagagtcggccccccgtccctgggatggggaagagagttagtacagcaggggctgccctacgtctccttccctaaggatgctggccagcactgtcc

SEQ ID NO: 602623 - DNA, 120 bp, Artificial Sequence
  ENSG00000174945_16 (sequence is synthesized)
agtagctgaggccactactgacctgccagggataaagaggaagggtctgcctgggtggtggctcaggcctgtcatcccatcactttgagaggccaggagtttgagaccagactgggcaac

SEQ ID NO: 602624 - DNA, 89 bp, Artificial Sequence
  ENSG00000174945_17 (sequence is synthesized)
gactctgcctctacaaaagaaaaattaaaaaattagctggatgaagtggttcatgcctgtgttcccagctattcaggaggctgaggtgg

SEQ ID NO: 602625 - DNA, 120 bp, Artificial Sequence
  ENSG00000174945_18 (sequence is synthesized)
cgaggctgcagtgggatgtgatcataccactgtactgcagtctgggccacacagaaagactgtctccagaaaaaaaaaagttctttggagaagccacagaccacctgtcttcaggcgcct

SEQ ID NO: 602626 - DNA, 120 bp, Artificial Sequence
  ENSG00000174945_19 (sequence is synthesized)
ccttcaactcctgagtcccagccagccgctcccaggggcctgcacacatggagaggcctccctgatcctgggtgcttctcgtggagtacaagccggactgtgctgaggttgggacagagc

SEQ ID NO: 602627 - DNA, 120 bp, Artificial Sequence
  ENSG00000174945_20 (sequence is synthesized)
cccctcccctgcagaggcagaaggaagcagcgtgcgtcctgtctccttccaggctgtgggcctgcccttcagttatttatagctggagctggagaggctggctcagatgaggagtgaccc

SEQ ID NO: 602628 - DNA, 120 bp, Artificial Sequence
  ENSG00000174945_21 (sequence is synthesized)
cgggggcacacaggctccacactgccacccagcttccaaggctgagtctcctccctaacggggaagtgacggggttttgtctctatcatctcaggcgtcaaccacatgcacacacacact

SEQ ID NO: 602629 - DNA, 120 bp, Artificial Sequence
  ENSG00000174945_22 (sequence is synthesized)
agaggcccccttattcctgaggcggctacagctcaccgtggggaagatcaactgtggtgatgtttttgggacagtttcttggcaaaggtggccgcgctgtcagtaccaagtagctggagg

SEQ ID NO: 602630 - DNA, 120 bp, Artificial Sequence
  ENSG00000174945_23 (sequence is synthesized)
tggtgatcagatgatctgtctttcctttttttttcggtctagttctgtcagttgctgagagaggggtattattgccatggctgggcgtttgatctgtctccctttagttttgccggattt

SEQ ID NO: 602631 - DNA, 120 bp, Artificial Sequence
  ENSG00000174945_24 (sequence is synthesized)
tgcttcctgcactttgaagctcctttacgtccctgcacatttgattgttgtgtcttcctgaggaattgacccttttattgtcacacgtaccccctcagcctgtggtggagggtctctggg

SEQ ID NO: 602632 - DNA, 120 bp, Artificial Sequence
  ENSG00000174945_25 (sequence is synthesized)
agagagacttccggttctgacagcggaatcccttcggagtgacgagggcggggtcacagctcgcgcaccctcatctggagagaggcaagaacagggcagcttggaccttttgtgggtggg

SEQ ID NO: 602633 - DNA, 120 bp, Artificial Sequence
  ENSG00000174945_26 (sequence is synthesized)
tggctcacacggttatggagggcttctaagaaaaacaaaatacaaaactaaaactagaagggctatgcaggtgaggtgggctgaggcttccttgtgaatctgacattggtggaggccgac

SEQ ID NO: 602634 - DNA, 120 bp, Artificial Sequence
  ENSG00000174945_27 (sequence is synthesized)
tgaaggctcccggtcctggtcccactccgtgttgacttcagagaagcaaagatgcagctcagaagtagcattaggatcttcgtcccgttctcttttgcgtagcttcaaaaaggcgtaaca

SEQ ID NO: 602635 - DNA, 120 bp, Artificial Sequence
  ENSG00000174945_28 (sequence is synthesized)
gtgacctgggaggggagatgaagagctaggcctttcagaaagtgaccaatggaaggtgccggcagagcaccctgcagtaacagaaggtgaaagccggagcctggtggctgttgctgcaaa

SEQ ID NO: 602636 - DNA, 120 bp, Artificial Sequence
  ENSG00000174945_29 (sequence is synthesized)
caaccacccaaaacttagtggcttaaaatcaccacagtctagctcatgaatctgtaacttgggcagagctcggtggagacggtttgcccctgtggctcgactggagtgttcgttcacacg

SEQ ID NO: 602637 - DNA, 120 bp, Artificial Sequence
  ENSG00000174945_30 (sequence is synthesized)
gctgccaagtggaatttggctgggaatctcaggccttggttcctgcccacgtgagactctccatggaggaggggcatcttcttaggaaggcagctgccataccgtgaggaaacccgacaa

SEQ ID NO: 602638 - DNA, 120 bp, Artificial Sequence
  ENSG00000174945_31 (sequence is synthesized)
acagggcagccagagccagacagcaggctcctggtcccagtcccggaaaatgcaaagggacaagtatgtgttgatttcagagaagctcagatgtagcattaggaccttcatccataccct

SEQ ID NO: 602639 - DNA, 120 bp, Artificial Sequence
  ENSG00000174945_32 (sequence is synthesized)
tctcttttgcatggcttctaaagggcatgacagtgacctgggaggtaactgtgccagaataaagaggggagacgaaaaaaagagggtcactttcagaaagggacctgggcttcctcacaa

SEQ ID NO: 602640 - DNA, 120 bp, Artificial Sequence
  ENSG00000174945_33 (sequence is synthesized)
tatggcggttgccctcctaaggtggacatcgggagggtcagatggaagctctgtggcctttcctaactcggcctcacgtcacagagcgtcacctttcctgcactccacggcggcagtgac

SEQ ID NO: 602641 - DNA, 120 bp, Artificial Sequence
  ENSG00000174945_34 (sequence is synthesized)
aaggaccccaccccaggttcacggggaggggacgtggcagggaatgtgagacaacacaatattgctgtggccattcatgaacagtcagtcagccccactcggcgttcactgtggggattt

SEQ ID NO: 602642 - DNA, 120 bp, Artificial Sequence
  ENSG00000174945_35 (sequence is synthesized)
ggctggtgcacctgcgaggtggcctgacctgttttccgatttccttcatcttctgcaaaaggttaaccgctggagtgatgcgagattaaacagaggtgataaaaatagaatgcctggctc

SEQ ID NO: 602643 - DNA, 120 bp, Artificial Sequence
  ENSG00000174945_36 (sequence is synthesized)
atgctgagggtgggagcccactggggttatgaccaaagcctcggcgctctctgtacccgtgtcctttgaccctcagctgtgatgtgtgtcccaaaaaagcgttttgaagtgggaaggagc

SEQ ID NO: 602644 - DNA, 120 bp, Artificial Sequence
  ENSG00000174945_37 (sequence is synthesized)
aaaccactaaaaaaaactccttttatccgcagcgtttaccaacttgcagatgtcagtgaaattttttaagacagctgttagaaggactgttttgaaatgcaactttgaggaagagaaatt

SEQ ID NO: 602645 - DNA, 120 bp, Artificial Sequence
  ENSG00000174945_38 (sequence is synthesized)
ggtttccctcctctcccccgtgttagccccaggttctgtctgtgctgtggtgaagagtgacttgggacagtcaccaggaaagacgcaaggcagaggagagagaatgagggctgccttctc

SEQ ID NO: 602646 - DNA, 120 bp, Artificial Sequence
  ENSG00000174945_39 (sequence is synthesized)
gaggaaggtcacagctcacgaatctttctaaacttaagtgctgcagaagttgaactgagattaaatttagagatgatggtttccaagacacacagggccacggttctttcagtttttaaa

SEQ ID NO: 602647 - DNA, 120 bp, Artificial Sequence
  ENSG00000174945_40 (sequence is synthesized)
cacgtgcaaagtccactgaattgctttctcgtctcatctgtcagaagcccctgcattcacaaggatgggtcttccagcttgacgatgacctctcttcggagagcctcacccatcttggta

SEQ ID NO: 602648 - DNA, 120 bp, Artificial Sequence
  ENSG00000174945_41 (sequence is synthesized)
agccaagtcagcggggcctcatggagctaaaaatagtttcaggtcatgacagatgttatctgtattgctgtgtgtgcgatgagtctggggaagctaacacatgccttctgaagtggctag

SEQ ID NO: 602649 - DNA, 120 bp, Artificial Sequence
  ENSG00000174945_42 (sequence is synthesized)
aatacacactcccacgtcacagccatgctatgatgaaggggtgagaagcagtgtcccctctgaggcaaatctctcttcaggcagccccgcagtcctcttccgaaatctcattcttttccc

SEQ ID NO: 602650 - DNA, 120 bp, Artificial Sequence
  ENSG00000174945_43 (sequence is synthesized)
tctcttcctccccaaaaagcccaaactcattgtcagagtggggagaggggagaagcagcatcctgactcctgtccatggtgtgaaccctgagggcacgggacagtgagtggagctctgcc

SEQ ID NO: 602651 - DNA, 120 bp, Artificial Sequence
  ENSG00000174945_44 (sequence is synthesized)
accacccgtttccagagcatgggtgaggagggagggatgccgacctgttaatatttgcttcagacctttccccgatgaacgaaatctccaaaagccttaaacataaaatggcttagtcaa

SEQ ID NO: 602652 - DNA, 120 bp, Artificial Sequence
  ENSG00000174945_45 (sequence is synthesized)
ctctgcatttccctcctttcctgggtgaggctgatgctgctggcctggagtcctggcagctgatttctcactggtctcctggcctctacccttggtccttgtccatctgtcctcctgacc

SEQ ID NO: 602653 - DNA, 120 bp, Artificial Sequence
  ENSG00000174945_46 (sequence is synthesized)
tgtgatctggtgtgtgcatcccttcaggggctgccctgggagctccctgctgcctctccagcctcgacctgcacccttgtgtgctactctgccccagccaggctggcattttgcagccat

SEQ ID NO: 602654 - DNA, 120 bp, Artificial Sequence
  ENSG00000174945_47 (sequence is synthesized)
gcagcctggctctgtgtcctgctgtctgccccagccaggctggcattttgcagccatgcagcctggctctgtgtcctgctgtctgccccagtcaggctggcattttgcagcgaggtggct

SEQ ID NO: 602655 - DNA, 120 bp, Artificial Sequence
  ENSG00000174945_48 (sequence is synthesized)
tgctgcccggggctcggtgcccggcgcggcctctgccggctccggcgggcgcgggactgcgagggtgctgtgggcccagaagcgcccatgcctgagagcgtccaggaccaggcagagctg

SEQ ID NO: 602656 - DNA, 120 bp, Artificial Sequence
  ENSG00000174945_49 (sequence is synthesized)
ccctcggtgtttgcccttttgaaaaagtcatgctttccatcccttttctaagcctgacgctctgcttgctgtcaggacctgagcgaggagccggtgggaagctccctgctgcaccagctg

SEQ ID NO: 602657 - DNA, 120 bp, Artificial Sequence
  ENSG00000174945_50 (sequence is synthesized)
tgaagtccctctcattctcccagcgtgagccggcggaccctgaagggaacactgagactgaccacagctggacttgcgccgcctcgtcctcttagtgaatgaggtcctcagaggcttaag

SEQ ID NO: 602658 - DNA, 120 bp, Artificial Sequence
  ENSG00000174945_51 (sequence is synthesized)
cacgcgttagttatccaaaatgcttctgttcaggtgaatgcacaaagcgttgaggtaggtcaactgcattttgtacggtggaaaagtaataagcagtttgctttttgtattataatgaaa

SEQ ID NO: 602659 - DNA, 120 bp, Artificial Sequence
  ENSG00000174945_52 (sequence is synthesized)
atgaaaacctttccttaaaggaaaggaagcataatctcagaaatctgaatccagggaatcccaaataacccccccaaattttaatccttgacattcataatcacttggattaaaatctaa

SEQ ID NO: 602660 - DNA, 120 bp, Artificial Sequence
  ENSG00000174945_53 (sequence is synthesized)
gagccagggcctgtcagctggtctcatcagagctgaggctgccctcgaggtggggttctgtctgaatgcatctgagttttgctttatttctctgtaaactgtaggtgagctgggtgaacc

SEQ ID NO: 602661 - DNA, 120 bp, Artificial Sequence
  ENSG00000174945_54 (sequence is synthesized)
tgttcaggtgaatgcacaaagcgttgagcctcatttagggttagatacggtcatattaagttgatgggaaggagacagagccagcctgaatgtcctgggtgatgaggattgaagtcatgg

SEQ ID NO: 602662 - DNA, 120 bp, Artificial Sequence
  ENSG00000174945_55 (sequence is synthesized)
ggtctaaaaaggttctggaagacgaagagtgggaacgacaaaccgagaggaggaaaatcatctgcaaataaagcctccattgctgatcccttctatctcagccacagcagctcaggagga

SEQ ID NO: 602663 - DNA, 120 bp, Artificial Sequence
  ENSG00000174945_56 (sequence is synthesized)
atatgcgattgtcactgctgtcctttcatctgtgcatgaatctttcctctgtgtccctcggtgtttgcccttttgaaaaagtcatgctttccatcccttttctaagcctgacgctctgct

SEQ ID NO: 602664 - DNA, 120 bp, Artificial Sequence
  ENSG00000174945_57 (sequence is synthesized)
tgctgtcagggtaggtccacattggccttgttcacccagcaggccggtgtctgcgagtgattcccggggagagggtcccaggcgggcaggggcgtcgcagggctgacggtgctgctctcc

SEQ ID NO: 602665 - DNA, 120 bp, Artificial Sequence
  ENSG00000174946_0 (sequence is synthesized)
agtaaagccagcagcctgcaatggggttgctactgctgcggctaaccaaacagctcatgcttctctgaagacttgcagcaaggcttgctgaggctcacagaagatagccccagtgttttg

SEQ ID NO: 602666 - DNA, 120 bp, Artificial Sequence
  ENSG00000174946_1 (sequence is synthesized)
gagtggttttgaatgtgattctgagatcagactgactgagctggaatcctggctttatatcttaccagctacacaaccttggagtcttagaaattttttcttttcaataagcagtcatcc

SEQ ID NO: 602667 - DNA, 120 bp, Artificial Sequence
  ENSG00000174946_2 (sequence is synthesized)
ttactttccctcaagatgacaaacagttcgttcttctgcccagtttataaagatctggagccattcacgtattttttttatttagttttccttgttggaattattggaagttgttttgca

SEQ ID NO: 602668 - DNA, 120 bp, Artificial Sequence
  ENSG00000174946_3 (sequence is synthesized)
acctgggcttttatacagaagaatacgaatcacaggtgtgtgagcatctacttaattaatttgcttacagccgatttcctgcttactctggcattaccagtgaaaattgttgttgacttg

SEQ ID NO: 602669 - DNA, 120 bp, Artificial Sequence
  ENSG00000174946_4 (sequence is synthesized)
ggtgtggcaccttggaagctgaagatattccactgccaagtaacagcctgcctcatctatatcaatatgtatttatcaattatcttcttagcatttgtcagcattgaccgctgtcttcag

SEQ ID NO: 602670 - DNA, 120 bp, Artificial Sequence
  ENSG00000174946_5 (sequence is synthesized)
ctgacacacagctgcaagatctaccgaatacaagaacccggatttgccaaaatgatatcaaccgttgtgtggctaatggtccttcttataatggtgccaaatatgatgattcccatcaaa

SEQ ID NO: 602671 - DNA, 120 bp, Artificial Sequence
  ENSG00000174946_6 (sequence is synthesized)
gacatcaaggaaaagtcaaatgtgggttgtatggagtttaaaaaggaatttggaagaaattggcatttgctgacaaatttcatatgtgtagcaatatttttaaatttctcagccatcatt

SEQ ID NO: 602672 - DNA, 120 bp, Artificial Sequence
  ENSG00000174946_7 (sequence is synthesized)
attgccttgtaattcgacagctctacagaaacaaagataatgaaaattacccaaatgtgaaaaaggctctcatcaacatacttttagtgaccacgggctacatcatatgctttgttcctt

SEQ ID NO: 602673 - DNA, 120 bp, Artificial Sequence
  ENSG00000174946_8 (sequence is synthesized)
accacattgtccgaatcccgtataccctcagccagacagaagtcataactgattgctcaaccaggatttcactcttcaaagccaaagaggctacactgctcctggctgtgtcgaacctgt

SEQ ID NO: 602674 - DNA, 120 bp, Artificial Sequence
  ENSG00000174946_9 (sequence is synthesized)
gctttgatcctatcctgtactatcacctctcaaaagcattccgctcaaaggtcactgagacttttgcctcacctaaagagaccaaggctcagaaagaaaaattaagatgtgaaaataatg

SEQ ID NO: 602675 - DNA, 120 bp, Artificial Sequence
  ENSG00000174946_10 (sequence is synthesized)
aaaaattaagatgtgaaaataatgcataaaagacaggattttttgtgctaccaattctggccttactggaccataaagttaattatagctttgaaagataaaaaaaaaaaaaacaaaaaa

SEQ ID NO: 602676 - DNA, 120 bp, Artificial Sequence
  ENSG00000174946_11 (sequence is synthesized)
tagctagcaaatatggacaggtttacttagaaatcctgtttctaaatgcaagtcaagctttattgttaggcttgctgctactcattaacccaaatatttgtacaaaaaactaaagagtct

SEQ ID NO: 602677 - DNA, 120 bp, Artificial Sequence
  ENSG00000174946_12 (sequence is synthesized)
cattgaacgaatgtaaaatcctgcaatatccttgaaatccaaaagaggtccatgacatagacccaaaggtattcatgagttattcatttaaatgcctggaactgacttcttgataaaaat

SEQ ID NO: 602678 - DNA, 120 bp, Artificial Sequence
  ENSG00000174946_13 (sequence is synthesized)
ataaaaaataatttccatgtaagttaccagaaagcccaccagcaacataattttaaagcctttcagattacttttaaaaaatgcagcttacatataacaacttgtgcctattttatttct

SEQ ID NO: 602679 - DNA, 120 bp, Artificial Sequence
  ENSG00000174946_14 (sequence is synthesized)
aatctatcacttcaaaagatggtaatctttcaactcattattcctccaatttttaatgtcgaatttttttctaacacaataaccaaaagcttttatttataaaaaggcttgaaaaatata

SEQ ID NO: 602680 - DNA, 120 bp, Artificial Sequence
  ENSG00000174946_15 (sequence is synthesized)
aagatagccccagagtcttagaaattttttcttttcaataagcagtcatccttactttccctcaagatgacaaacagttcgttcttctgcccagtttataaagatctggagccattcacg

SEQ ID NO: 602681 - DNA, 120 bp, Artificial Sequence
  ENSG00000174948_0 (sequence is synthesized)
tctctctctctgtctctctctctctctccaccttcaaagctgaaacctacctgacaatctcctgcctttgaatccagctctggaaccaaatgcatcattttactgctcttaaaagtgaac

SEQ ID NO: 602682 - DNA, 120 bp, Artificial Sequence
  ENSG00000174948_1 (sequence is synthesized)
tggaaccaaatgcatcattttactgctcttaaaagtgaacagagtttgattatctcaagctacaagctgctttgctccataagaaggaccccaaaggatccagacatcattggtttttaa

SEQ ID NO: 602683 - DNA, 120 bp, Artificial Sequence
  ENSG00000174948_2 (sequence is synthesized)
tgtacctgaagagttttgttttgtttatttttttggctttcttccctgaaacttgatggtgggaaggagtttttgctttgtttttaattggaatgttgaaaagttatctgttcgggtttt

SEQ ID NO: 602684 - DNA, 120 bp, Artificial Sequence
  ENSG00000174948_3 (sequence is synthesized)
tttttttttatgcttgaaatggaacctaatttttaaatatagcttgagtcagatctaaaggagacatggctgaccattttctgcaggactgacaaggagaacatctagaggggaacttgg

SEQ ID NO: 602685 - DNA, 120 bp, Artificial Sequence
  ENSG00000174948_4 (sequence is synthesized)
taggaggaatgaaatctgatttgcagcagccggtctttcttttgagaaaattatcagactcattgataagggaaattaaatattgaccaaggacaatgtctttatttctcagtaacttat

SEQ ID NO: 602686 - DNA, 120 bp, Artificial Sequence
  ENSG00000174948_5 (sequence is synthesized)
caacaaatgactctagcctgtggaaagagaatcataattctacggaccttttaaatccgccaggaaccctgaatatctatcttttttgcttgacatgtctcatgacttttgcagccttgg

SEQ ID NO: 602687 - DNA, 120 bp, Artificial Sequence
  ENSG00000174948_6 (sequence is synthesized)
tgggcagcatttattcactaatttccctgctgaaaatgcagaacagaactgttgtgtccatgcttgtggcttcctggtctgtggatgatctcatgagcgtcctgtcggtgaccatcttca

SEQ ID NO: 602688 - DNA, 120 bp, Artificial Sequence
  ENSG00000174948_7 (sequence is synthesized)
tgtttttgcagtggccaaacgaggtccccggttacttccaatttctgtgcaccacctctgccttaatgtatttatgccagggcctctctagcaacttgaaggcgactctcctagtctctt

SEQ ID NO: 602689 - DNA, 120 bp, Artificial Sequence
  ENSG00000174948_8 (sequence is synthesized)
acaacttttatacgatgcacagaggtgtggggagccagacagcctccagaagatcgggccaggtgctcggcgtggtgctgaccgtgtgggcagccagtctgctgctctcggcgctcccgc

SEQ ID NO: 602690 - DNA, 120 bp, Artificial Sequence
  ENSG00000174948_9 (sequence is synthesized)
tgtgcggctggggcgccttcgtgcgcacgccctggggctgcctggtggactgctccagctcctacgtactattcctctctatcgtgtacgctttggccttcggactcctcgtgggcctct

SEQ ID NO: 602691 - DNA, 120 bp, Artificial Sequence
  ENSG00000174948_10 (sequence is synthesized)
cagtcccactcactcaccgattgctgtgttcggaggagccgccgagactccactccaactaccaggaaatttcccgtggagcttcaattcctgggacccctcctactgcggggagagtgg

SEQ ID NO: 602692 - DNA, 120 bp, Artificial Sequence
  ENSG00000174948_11 (sequence is synthesized)
tttccctgtccccagaggatgctccaggcccgagtctgcggcgctctgggggatgctctccgagctccgacaccgtgttcggaccgggtgcgcccgctgccgctggggctgaagcctgca

SEQ ID NO: 602693 - DNA, 120 bp, Artificial Sequence
  ENSG00000174948_12 (sequence is synthesized)
ggcgtgagaaccgggggactctctatggcaccaggagcttcaccgtgagcgtagcgcagaagcgcttcgctttgatcctagcgcttacaaaagtcgtcctttggctgcccatgatgatgc

SEQ ID NO: 602694 - DNA, 120 bp, Artificial Sequence
  ENSG00000174948_13 (sequence is synthesized)
acatggtggtccagaacgtcgtggggtttcagagccttcccttggagacattcagctttctacttaccctgctggccaccactgtaaccccagtgtttgtcttgtccaaacgctggaccc

SEQ ID NO: 602695 - DNA, 120 bp, Artificial Sequence
  ENSG00000174948_14 (sequence is synthesized)
acttgccctgtggctgcatcatcaactgcaggcagaacgcatatgcagtggcgtccgatgggaaaaaaatcaagagaaaaggctttgaattcaatctatcattccaaaaaagttatggga

SEQ ID NO: 602696 - DNA, 120 bp, Artificial Sequence
  ENSG00000174948_15 (sequence is synthesized)
tttataaaatagcacatgaagattactatgatgatgatgaaaattccatattctatcacaacctgatgaactctgagtgtgaaactacaaaagaccctcagagagacaaccgtaacatct

SEQ ID NO: 602697 - DNA, 120 bp, Artificial Sequence
  ENSG00000174948_16 (sequence is synthesized)
tcaatgctataaaagtagaaatcagcaccacgccctctctggacagctccacacaaagaggcatcaacaaatgcacaaatactgatattacagaagctaaacaggattccaacaacaaaa

SEQ ID NO: 602698 - DNA, 120 bp, Artificial Sequence
  ENSG00000174948_17 (sequence is synthesized)
aggatgcgttttctgacaaaacaggaggtgatattaactatgaagaaactaccttttctgaagggccagaaagaagactgtctcatgaagagagtcagaaaccagatctttcagactggg

SEQ ID NO: 602699 - DNA, 120 bp, Artificial Sequence
  ENSG00000174948_18 (sequence is synthesized)
agtggtgtaggagtaaatcagaaagaacccctcgtcagcgttccggttatgcccttgccattcccttgtgtgcattccaggggactgtgtctctccatgcacctacagggaaaaccctat

SEQ ID NO: 602700 - DNA, 120 bp, Artificial Sequence
  ENSG00000174948_19 (sequence is synthesized)
ctctttctacctatgaggtaagcgcagaagggcaaaaaataactccagcctctaagaaaatagaagtctatcgatccaaaagtgttggccatgaaccaaactcagaagattcttcatcca

SEQ ID NO: 602701 - DNA, 120 bp, Artificial Sequence
  ENSG00000174948_20 (sequence is synthesized)
cgtttgtggacaccagtgtgaaaatacacttggaggttcttgaaatttgtgataatgaagaggccttggacactgtgtcaatcattagtaacatcagtcagtcctccacacaagtcagat

SEQ ID NO: 602702 - DNA, 120 bp, Artificial Sequence
  ENSG00000174948_21 (sequence is synthesized)
ctccatccctacgttactccaggaaagaaaacagatttgtttcatgtgacctaggggaaacagcctcatactccctctttttgcccaccagtaatcctgatggtgatattaatatctcca

SEQ ID NO: 602703 - DNA, 120 bp, Artificial Sequence
  ENSG00000174948_22 (sequence is synthesized)
ttccagacacagtagaagcacacaggcagaacagtaaaaggcagcatcaagagagggatggctaccaggaggaaatccagttgttaaataaagcttacagaaaaagagaggaagaaagca

SEQ ID NO: 602704 - DNA, 120 bp, Artificial Sequence
  ENSG00000174948_23 (sequence is synthesized)
ttagtgggtatttggtctaacaggagcaagaatggatctgcaacgtcaactgtgaaactaacacctttgttatgagactgatttccttttatttgttggcttacattagttttactgatt

SEQ ID NO: 602705 - DNA, 120 bp, Artificial Sequence
  ENSG00000174948_24 (sequence is synthesized)
taatagttaatttttttgtgggaacaactggaactagtgtaaacacttaagtgcatttgatgtgttacctaaagatcacacactgtggtaatgaaaagattttacttcttatctgacttc

SEQ ID NO: 602706 - DNA, 120 bp, Artificial Sequence
  ENSG00000174948_25 (sequence is synthesized)
taaaaaatattttctaaatcaaatcttggcctagtttaccaatgtttttgcttgtcaacttcctagtaaacagaaaattgtataaactcagtgaatatactgttccatgcatatgtttct

SEQ ID NO: 602707 - DNA, 120 bp, Artificial Sequence
  ENSG00000174948_26 (sequence is synthesized)
atatacaatgttggcctttactgcaaaggggaaaaaagaggaattctgggaatggaagaaatgtaacaaaaccccaaattatatttgaaggaacttgcctaaatgtggctagcaaaacaa

SEQ ID NO: 602708 - DNA, 120 bp, Artificial Sequence
  ENSG00000174948_27 (sequence is synthesized)
gcttattacacttactgctttagctttacattcttctgtaaaatgaaaaattagcttccaactgagaaacacgcaggttcctagtctataaatagttgtttccttcatttctaccaaata

SEQ ID NO: 602709 - DNA, 120 bp, Artificial Sequence
  ENSG00000174948_28 (sequence is synthesized)
taaattgtttactgttttttctttttttcttacctataacagttttcctttcatcttttcagtatgtcaagactgtcccataaaacaaatatattgtgtgttagaggtggaattagaagt

SEQ ID NO: 602710 - DNA, 120 bp, Artificial Sequence
  ENSG00000174948_29 (sequence is synthesized)
atctttaactcaaacattattggaaaaaagttgtaattgtgtaattgtatactttatcctaaaattgtttttttttttaacttgagtggaaattgggagaaaatactggcagattcagtt

SEQ ID NO: 602711 - DNA, 120 bp, Artificial Sequence
  ENSG00000174948_30 (sequence is synthesized)
atgagaggtacatccaaacatggtaggcttctggatacagcagagcaaaatcctctaagtctaaaacaaaagtatctgtttttaaagctgaggattgggcaacctttcttagtcattctt

SEQ ID NO: 602712 - DNA, 120 bp, Artificial Sequence
  ENSG00000174948_31 (sequence is synthesized)
gaaatagaaaagtttacttcaaatattatatcaagtttagctgcttttttgtttcttctctaaagacgtgttgtctcaaagaaacagttgaacctattttattaagtgattgtaaggtat

SEQ ID NO: 602713 - DNA, 120 bp, Artificial Sequence
  ENSG00000174948_32 (sequence is synthesized)
acatttcaagataattctagaatgcattacattgcaaaaatgcaggaatcaccttggcagaataatagtaagatgtatttcaaaaattataaagtgattttccttcaaattgctttattc

SEQ ID NO: 602714 - DNA, 120 bp, Artificial Sequence
  ENSG00000174948_33 (sequence is synthesized)
taaccttcctgtaaacatatatgaaatgtattacctaaaagtttattttccaaagttactgagttgacactttacatagtcttagactttgtgcccctcacatcactcacatactttatt

SEQ ID NO: 602715 - DNA, 120 bp, Artificial Sequence
  ENSG00000174948_34 (sequence is synthesized)
tatttatttacagattgaatgaattgtgttttagaatgatttattttggtttctgttttattaggttgaattagaattcaaaattacttgacatcggctttcagaatgtttcatcttttg

SEQ ID NO: 602716 - DNA, 120 bp, Artificial Sequence
  ENSG00000174948_35 (sequence is synthesized)
ttgccacaagcatgagtcattttcaaaataattatctcaatggactttctcaatctttaacttctcaatatctagttatctaaatttgggaaacatatgtattaccactaataatgtttg

SEQ ID NO: 602717 - DNA, 120 bp, Artificial Sequence
  ENSG00000174948_36 (sequence is synthesized)
taaagcaagcctcaaataatgtgtaacatataaattcaaagtcaaatgtattctcgttacaaatatattttattttaaaagactgtatcaccaatattaacagctattttaacacagtga

SEQ ID NO: 602718 - DNA, 120 bp, Artificial Sequence
  ENSG00000174948_37 (sequence is synthesized)
caaatggacagataaatcagatattataaatcagtagcattaaatgtctttataaaagaaaaattgaattgaatattctcataatgctttgtagaagataggctttgatatcttaaactt

SEQ ID NO: 602719 - DNA, 120 bp, Artificial Sequence
  ENSG00000174948_38 (sequence is synthesized)
agatgtataattttctgaaagagaaaggtgatattgctgctttaaaatgcaatttcaggcaaaaaggaaattagacacaggatcataataaagctgaagaaaatagcaaagatttgaagg

SEQ ID NO: 602720 - DNA, 120 bp, Artificial Sequence
  ENSG00000174948_39 (sequence is synthesized)
caaacaaattctttataactgcacagcaatttgaatgggatggagattataacagaaatcaaggtttaaagagcattaagaaatagatagaagacaataatacccattttccgtctcatt

SEQ ID NO: 602721 - DNA, 120 bp, Artificial Sequence
  ENSG00000174948_40 (sequence is synthesized)
ttattttaactggacaagggcttaaactgggggaattggaaaaataattaggatattcccatttaattgcccttggttgttgaattaactgtataatggatgcacataaaaattctgctg

SEQ ID NO: 602722 - DNA, 120 bp, Artificial Sequence
  ENSG00000174948_41 (sequence is synthesized)
cattgaaacaacaccagtattatttagcccaaagtcttagtttgaaaggctaatcagcaccatattactaacctgtaacacttcaaactccaagccaacaatagctgaatatacaagaaa

SEQ ID NO: 602723 - DNA, 120 bp, Artificial Sequence
  ENSG00000174948_42 (sequence is synthesized)
aatctactagagctgtgcctaagcatgaatgacgctccaaatccttgttaagggaggagaaggttaaactacataagtttacttaagtctgcttactctttagagtgattgattataaaa

SEQ ID NO: 602724 - DNA, 120 bp, Artificial Sequence
  ENSG00000174948_43 (sequence is synthesized)
gtgtgtttctagtagaggaaatacctttctagatatcttgtgatatagccaaataccttacccttgtatagttatattgttcttcttattaataaatactatattttgtatagttttctc

SEQ ID NO: 602725 - DNA, 120 bp, Artificial Sequence
  ENSG00000174948_44 (sequence is synthesized)
ttttctctataaattgatgtatctgaaggcaaaaacttattacctaataaaaatatcaccatctggtggtgactcctataaactgcaaacacgtaatccccgagactcccaaatagtata

SEQ ID NO: 602726 - DNA, 120 bp, Artificial Sequence
  ENSG00000174948_45 (sequence is synthesized)
aacacctaatatataatccctaagacttctgagagttgtgactgacagaggcaactctttgaagatagcaaatggcacaatattacttaaaaatataataaaagagtcttagttatgcat

SEQ ID NO: 602727 - DNA, 120 bp, Artificial Sequence
  ENSG00000174950_0 (sequence is synthesized)
ggcagctgtccaccgatcccggccaccgcccccggccacccccaccccgcgagcccatggaggctccgggaccccgcgccttgcggactgcgctctgtggcggctgttgctgcctcctcc

SEQ ID NO: 602728 - DNA, 120 bp, Artificial Sequence
  ENSG00000174950_1 (sequence is synthesized)
cctcctcctatgtgcccagctggctgtggctggtaaaggagctcgaggctttgggaggggagccctgatccgcctgaatatctggccggcggtccaaggggcctgcaaacagctggaggt

SEQ ID NO: 602729 - DNA, 120 bp, Artificial Sequence
  ENSG00000174950_2 (sequence is synthesized)
ctgtgagcactgcgtggagggagacggagcgcgcaatctctccagctgcgtgtgggagcagtgccggccagaggagccaggacactgtgtggcccaatctgaggtggtcaaggaaggttg

SEQ ID NO: 602730 - DNA, 120 bp, Artificial Sequence
  ENSG00000174950_3 (sequence is synthesized)
ctccatctacaaccgctcagaggcatgtccagctgctcaccaccaccccacctatgaaccgaagacagtcacaacagggagccccccagtccctgaggcccacagccctggatttgacgg

SEQ ID NO: 602731 - DNA, 120 bp, Artificial Sequence
  ENSG00000174950_4 (sequence is synthesized)
ggccagctttatcggaggtgtcgtgctggtgttgagcctacaggcggtggctttctttgtgctgcacttcctcaaggccaaggacagcacctaccagacgctgtgagtacctggccagca

SEQ ID NO: 602732 - DNA, 120 bp, Artificial Sequence
  ENSG00000174950_5 (sequence is synthesized)
gcaagtacctgagtcccagcttacctcctggttcctgccccaccgttccccttcagtacccagggtgctgtcttctccatgggcaagccctcaggacggtgacagcgtgctccatgtgag

SEQ ID NO: 602733 - DNA, 120 bp, Artificial Sequence
  ENSG00000174950_6 (sequence is synthesized)
cctccagttggggtgtttcctttgtcagatgttggctgggaccaggactcagcctgggccagtctaggagcccagctgagccctcctgtgtcttttcccttcatgctgccagcagggaag

SEQ ID NO: 602734 - DNA, 120 bp, Artificial Sequence
  ENSG00000174950_7 (sequence is synthesized)
agaaccagtaggtgccagcccaggcaagcctgtggcccgcgtttctgtggctgtgggcaggagctgggccttgtgtctagttgggttttgctctgagaaggggagctgtgcctgaggccc

SEQ ID NO: 602735 - DNA, 120 bp, Artificial Sequence
  ENSG00000174950_8 (sequence is synthesized)
tctgtgtgccgtgtgtgctgtggggcgggtcgccacagcctgtgttaaagtgtttgctcttcctctgctgcctcctctcgaggcagggggtccttggctggctgaggcagtgtcaccttc

SEQ ID NO: 602736 - DNA, 120 bp, Artificial Sequence
  ENSG00000174950_9 (sequence is synthesized)
ctgagtgtcctctttggcctctgcagaatctgacccctttgggcctggactccatcctgaggggaaaggaggatgcagagggtggcctctgggcacccttgtgggtaagcggggggcggg

SEQ ID NO: 602737 - DNA, 120 bp, Artificial Sequence
  ENSG00000174950_10 (sequence is synthesized)
ggcgggaaaaactctggccgccagtttttggctcctgcgggcaccaagcaggctcagtgtctgatgcctgacatctcctcctgtcctgggcctggaacctgcagctgagaaaatccctca

SEQ ID NO: 602738 - DNA, 120 bp, Artificial Sequence
  ENSG00000174950_11 (sequence is synthesized)
accacctcgtctcctccatcgcccctgctgggccccccagcctgacagtgggttgtatgcctgcctctttccaccaactggcctgggcactgcccccaaataaaggaactctgcactgca

SEQ ID NO: 602739 - DNA, 120 bp, Artificial Sequence
  ENSG00000174950_12 (sequence is synthesized)
agcctctctcaggcggtggattttgctcacccatacctgggcccggtatcagttctgcctttagctcactgagaagtcccctcctctctctgcctatttcctcatctgaaaattagtaca

SEQ ID NO: 602740 - DNA, 120 bp, Artificial Sequence
  ENSG00000174950_13 (sequence is synthesized)
ggtgtgtggaggggatgggagtgttagctcttcttctagtttaaggcatagcaaggactttggaagttcagagggaatgagagggagtgcttcctggaggaggtggcatcagtaatgagc

SEQ ID NO: 602741 - DNA, 120 bp, Artificial Sequence
  ENSG00000174950_14 (sequence is synthesized)
ctggaaggtagagatggagagagagcacatctggtggagggaactgtgtggggcttgcaagtatgttggatgtctagagtagggacagggctgcatctgaatcggaagtttagcggtgag

SEQ ID NO: 602742 - DNA, 120 bp, Artificial Sequence
  ENSG00000174950_15 (sequence is synthesized)
tgggggctggggtcttgatgggagtcagggggtgggaaggctgctttgctatggatcacctgtctcctcagctgctcaccaccaccccacctatgaaccgaagacagtcacaacaggtga

SEQ ID NO: 602743 - DNA, 120 bp, Artificial Sequence
  ENSG00000174951_0 (sequence is synthesized)
gaaagtccctgactggagttggcagccaagccaggccctggagtgggcacccagagggaagacaggttggctaatttcctggagcccctaagggtgcaagggggaagaacacccacccgc

SEQ ID NO: 602744 - DNA, 120 bp, Artificial Sequence
  ENSG00000174951_1 (sequence is synthesized)
aaagccccgtagggctggaccctacgttagcctgccctgctcggggttggcgatgctggaggtgggccttggaccagagaaaatgctttaattaggtgacaagcgggcagaggcctttgt

SEQ ID NO: 602745 - DNA, 120 bp, Artificial Sequence
  ENSG00000174951_2 (sequence is synthesized)
ctctggcgccggcagccacggcccccgctgacggcgtgggaaacagaccctgttccactccggtctccagccttggaatggttgccttcgtgcagtgcaggaggacgcggcagagggcgg

SEQ ID NO: 602746 - DNA, 120 bp, Artificial Sequence
  ENSG00000174951_3 (sequence is synthesized)
acgatcgctccactcgccgggaccaggtgcgggggccctgcccagccgctggggcgtggccaggctcgaagcacccaggtgtcgggggccgactctaagccctggcaccggaagagagag

SEQ ID NO: 602747 - DNA, 120 bp, Artificial Sequence
  ENSG00000174951_4 (sequence is synthesized)
ggcggcggattggacctcccggctccagcattgcaactgggcgctccgtctcctggtccacgcaatgatgctgcggctgctcagaagccaggtagcctgccctgggtgaagccttcgcgc

SEQ ID NO: 602748 - DNA, 120 bp, Artificial Sequence
  ENSG00000174951_5 (sequence is synthesized)
aggtcaatgacggggcggaggggcagggcgcggtcccctgcatccccgatctggggagcggtgggcccaggggccatcgccttagcccctggcgctggggctcggcgccaagtgacgggc

SEQ ID NO: 602749 - DNA, 120 bp, Artificial Sequence
  ENSG00000174951_6 (sequence is synthesized)
ggggctccaccttccagccatccgcccggcccgggagggcggacgctgcgagactcccggccgcgccctctccttcctctcctccccaagccctcgctgccagtccggacaggctgcgcg

SEQ ID NO: 602750 - DNA, 120 bp, Artificial Sequence
  ENSG00000174951_7 (sequence is synthesized)
gaggggagggctgccgggccggatagccggacgcctggcgttccaggggcggccggatgtggcctgcctttgcggagggtgcgctccggccacgaaaagcggactgtggatctgccacct

SEQ ID NO: 602751 - DNA, 120 bp, Artificial Sequence
  ENSG00000174951_8 (sequence is synthesized)
gcaagcagctcggccatgtggctccggagccatcgtcagctctgcctggccttcctgctagtctgtgtcctctctgtaatcttcttcctccatatccatcaagacagctttccacatggc

SEQ ID NO: 602752 - DNA, 120 bp, Artificial Sequence
  ENSG00000174951_9 (sequence is synthesized)
ctaggcctgtcgatcctgtgtccagaccgccgcctggtgacacccccagtggccatcttctgcctgccgggtactgcgatgggccccaacgcctcctcttcctgtccccagcaccctgct

SEQ ID NO: 602753 - DNA, 120 bp, Artificial Sequence
  ENSG00000174951_10 (sequence is synthesized)
tccctctccggcacctggactgtctaccccaatggccggtttggtaatcagatgggacagtatgccacgctgctggctctggcccagctcaacggccgccgggcctttatcctgcctgcc

SEQ ID NO: 602754 - DNA, 120 bp, Artificial Sequence
  ENSG00000174951_11 (sequence is synthesized)
atgcatgccgccctggccccggtattccgcatcaccctgcccgtgctggccccagaagtggacagccgcacgccgtggcgggagctgcagcttcacgactggatgtcggaggagtacgcg

SEQ ID NO: 602755 - DNA, 120 bp, Artificial Sequence
  ENSG00000174951_12 (sequence is synthesized)
gacttgagagatcctttcctgaagctctctggcttcccctgctcttggactttcttccaccatctccgggaacagatccgcagagagttcaccctgcacgaccaccttcgggaagaggcg

SEQ ID NO: 602756 - DNA, 120 bp, Artificial Sequence
  ENSG00000174951_13 (sequence is synthesized)
cagagtgtgctgggtcagctccgcctgggccgcacaggggaccgcccgcgcacctttgtcggcgtccacgtgcgccgtggggactatctgcaggttatgcctcagcgctggaagggtgtg

SEQ ID NO: 602757 - DNA, 120 bp, Artificial Sequence
  ENSG00000174951_14 (sequence is synthesized)
gtgggcgacagcgcctacctccggcaggccatggactggttccgggcacggcacgaagcccccgttttcgtggtcaccagcaacggcatggagtggtgtaaagaaaacatcgacacctcc

SEQ ID NO: 602758 - DNA, 120 bp, Artificial Sequence
  ENSG00000174951_15 (sequence is synthesized)
cagggcgatgtgacgtttgctggcgatggacaggaggctacaccgtggaaagactttgccctgctcacacagtgcaaccacaccattatgaccattggcaccttcggcttctgggctgcc

SEQ ID NO: 602759 - DNA, 120 bp, Artificial Sequence
  ENSG00000174951_16 (sequence is synthesized)
tacctggctggcggagacactgtctacctggccaacttcaccctgccagactctgagttcctgaagatctttaagccggaggcggccttcctgcccgagtgggtgggcattaatgcagac

SEQ ID NO: 602760 - DNA, 120 bp, Artificial Sequence
  ENSG00000174951_17 (sequence is synthesized)
tttctgaagtagcctgatctttctagagccagcagtacgtggcttcagaggcctggcatcttctggagaagcttgtggtgttcctgaagcaaatgggtgcccgtatccagagtgattcta

SEQ ID NO: 602761 - DNA, 120 bp, Artificial Sequence
  ENSG00000174951_18 (sequence is synthesized)
gttgggagagttggagagaagggggacgtttctggaactgtctgaatattctagaactagcaaaacatcttttcctgatggctggcaggcagttctagaagccacagtgcccacctgctc

SEQ ID NO: 602762 - DNA, 120 bp, Artificial Sequence
  ENSG00000174951_19 (sequence is synthesized)
ttcccagcccatatctacagtacttccagatggctgcccccaggaatggggaactctccctctggtctactctagaagaggggttacttctcccctgggtcctccaaagactgaaggagc

SEQ ID NO: 602763 - DNA, 120 bp, Artificial Sequence
  ENSG00000174951_20 (sequence is synthesized)
atatgattgctccagagcaagcattcaccaagtccccttctgtgtttctggagtgattctagagggagacttgttctagagaggaccaggtttgatgcctgtgaagaaccctgcagggcc

SEQ ID NO: 602764 - DNA, 120 bp, Artificial Sequence
  ENSG00000174951_21 (sequence is synthesized)
accaggtttgatgcctgtgaagaaccctgcagggcccttatggacaggatggggttctggaaatccagataactaaggtgaagaatctttttagttttttttttttttttttggagacag

SEQ ID NO: 602765 - DNA, 63 bp, Artificial Sequence
  ENSG00000174951_22 (sequence is synthesized)
tggtctcgatctcctgaccttgtcagcccggatattttttttttaattatttatttatttatt

SEQ ID NO: 602766 - DNA, 65 bp, Artificial Sequence
  ENSG00000174951_23 (sequence is synthesized)
tgggattactggcatgagccactgtgcccagcccggatattttttttttacagagtgcagtggcg

SEQ ID NO: 602767 - DNA, 87 bp, Artificial Sequence
  ENSG00000174951_24 (sequence is synthesized)
actggcccggataattttttttaatttttgtagagacgaggtcttgtgatattgcccaggctgttcttcaactcctgggctcaagca

SEQ ID NO: 602768 - DNA, 120 bp, Artificial Sequence
  ENSG00000174951_25 (sequence is synthesized)
agcagtcctcccaccttggcctcccagaatgctgggtttatagatgtgagccagcacaccgggccaagtgaagaatctaatgaatgtgcaacctaattgtagcatctaatgaatgttcca

SEQ ID NO: 602769 - DNA, 120 bp, Artificial Sequence
  ENSG00000174951_26 (sequence is synthesized)
tgtgcaacctaattgtagcatctaatgaatgttccaccattgctggaaaaattgagatggaaaacaaaccatctctagttggccagcgtcttgctctgttcacagtctctggaaaagctg

SEQ ID NO: 602770 - DNA, 120 bp, Artificial Sequence
  ENSG00000174951_27 (sequence is synthesized)
gggtagttggtgagcagagcgggactctgtccaacaagccccacagcccctcaaagacttttttttgtttgttttgagcagacaggctaaaatgtgaacgtggggtgagggatcactgcc

SEQ ID NO: 602771 - DNA, 120 bp, Artificial Sequence
  ENSG00000174951_28 (sequence is synthesized)
aaaatggtacagcttctggagcagaactttccagggatccagggacacttttttttaaagctcataaactgccaagagctccatatattgggtgtgagttcaggttgcctctcacaatga

SEQ ID NO: 602772 - DNA, 120 bp, Artificial Sequence
  ENSG00000174951_29 (sequence is synthesized)
aggaagttggtctttgtctgcaggtgggctgctgagggtctgggatctgttttctggaagtgtgcaggtataaacacaccctctgtgcttgtgacaaactggcaggtaccgtgctcattg

SEQ ID NO: 602773 - DNA, 120 bp, Artificial Sequence
  ENSG00000174951_30 (sequence is synthesized)
ctaaccactgtctgtccctgaactcccagaaccactacatctggctttgggcaggtctgagataaaacgatctaaaggtaggcagaccctggacccagcctcagatccaggcaggagcac

SEQ ID NO: 602774 - DNA, 120 bp, Artificial Sequence
  ENSG00000174951_31 (sequence is synthesized)
gaggtctggccaaggtggacggggttgtcgagatctcaggagccccttgctgttttttggagggtgaaagaagaaaccttaaacatagtcagctctgatcacatcccctgtctactcatc

SEQ ID NO: 602775 - DNA, 120 bp, Artificial Sequence
  ENSG00000174951_32 (sequence is synthesized)
cagaccccatgcctgtaggcttatcagggagttacagttacaattgttacagtactgttcccaactcagctgccacgggtgagagagcaggaggtatgaattaaaagtctacagcactaa

SEQ ID NO: 602776 - DNA, 120 bp, Artificial Sequence
  ENSG00000174953_0 (sequence is synthesized)
acagtggcttccgggcccggacgccatttccagcggttgctggttctgacgggttgtagtctgccaggacaatgagttatgactaccatcagaactggggccgtgatgggggtccccgca

SEQ ID NO: 602777 - DNA, 120 bp, Artificial Sequence
  ENSG00000174953_1 (sequence is synthesized)
gctccggtgggggctatggaggggggccagcagggggtcatggaggtaaccgaggctccggaggaggcggcggcggcggagggggtggtcgaggcggcaggggccggcatcccgggcacc

SEQ ID NO: 602778 - DNA, 120 bp, Artificial Sequence
  ENSG00000174953_2 (sequence is synthesized)
tgaaaggccgcgaaatcggcatgtggtacgcgaaaaaacaggggcagaagaacaaggaagcggagaggcaagagagagctgtagtacacatggatgaacgacgagaagaacaaattgtac

SEQ ID NO: 602779 - DNA, 120 bp, Artificial Sequence
  ENSG00000174953_3 (sequence is synthesized)
agttactgaattctgttcaagcgaagaatgataaagagtcagaagcacagatatcctggtttgctcctgaggatcatggatacggtactgaagtttctactaagaacacaccatgctcag

SEQ ID NO: 602780 - DNA, 120 bp, Artificial Sequence
  ENSG00000174953_4 (sequence is synthesized)
agaacaaacttgacatccaggaaaagaagttgataaatcaagaaaaaaaaatgtttagaatcaggaacagatcatatattgaccgagattctgagtatctcttgcaagaaaatgaaccag

SEQ ID NO: 602781 - DNA, 120 bp, Artificial Sequence
  ENSG00000174953_5 (sequence is synthesized)
atggaactttagaccaaaaattattggaagatttacaaaagaaaaaaaatgaccttcggtatattgaaatgcagcatttcagagaaaagctgccttcgtatggaatgcaaaaggaattgg

SEQ ID NO: 602782 - DNA, 120 bp, Artificial Sequence
  ENSG00000174953_6 (sequence is synthesized)
taaatttaattgataaccatcaggtaacagtaataagtggtgaaactggttgtggcaaaaccactcaagttactcagttcattttggataactacattgaaagaggaaaaggatctgctt

SEQ ID NO: 602783 - DNA, 120 bp, Artificial Sequence
  ENSG00000174953_7 (sequence is synthesized)
gcagaatagtttgtactcagccaagaagaattagtgccatttcagttgcggaaagagtagctgcagaaagggcagaatcttgtggcagtggtaatagtactggatatcaaattcgtctcc

SEQ ID NO: 602784 - DNA, 120 bp, Artificial Sequence
  ENSG00000174953_8 (sequence is synthesized)
agagtcggttgccaaggaaacagggttctatcttatactgtacaacaggaatcatccttcagtggctccagtcagacccgtatttgtccagtgttagtcatatcgtacttgatgaaatcc

SEQ ID NO: 602785 - DNA, 120 bp, Artificial Sequence
  ENSG00000174953_9 (sequence is synthesized)
atgaaagaaatctgcagtcagatgttttaatgactgttgttaaagaccttctcaattttcgatctgacttgaaagtaatattgatgagtgcaacattgaatgcagaaaagttttcagaat

SEQ ID NO: 602786 - DNA, 120 bp, Artificial Sequence
  ENSG00000174953_10 (sequence is synthesized)
attttggtaactgtccaatgatacatatacctggttttacctttccggttgtggaatatcttttggaagatgtaattgaaaaaataaggtatgttccagaacaaaaagaacacagatccc

SEQ ID NO: 602787 - DNA, 120 bp, Artificial Sequence
  ENSG00000174953_11 (sequence is synthesized)
agtttaagaggggtttcatgcaagggcatgtaaatagacaagaaaaagaagaaaaagaagcaatatataaagaacgttggccagattatgtaagggaactgcgaagaaggtattctgcaa

SEQ ID NO: 602788 - DNA, 120 bp, Artificial Sequence
  ENSG00000174953_12 (sequence is synthesized)
gtactgtagatgttatagaaatgatggaggatgataaagttgatctgaatttgattgttgccctcatccgatacattgttttggaagaagaggatggtgcgatactggtctttctgccag

SEQ ID NO: 602789 - DNA, 120 bp, Artificial Sequence
  ENSG00000174953_13 (sequence is synthesized)
gctgggacaatatcagcactttacatgatctcttgatgtcacaagtaatgtttaaatcagataaatttttaattatacctttacattcactgatgcctacagttaaccagacacaggtgt

SEQ ID NO: 602790 - DNA, 120 bp, Artificial Sequence
  ENSG00000174953_14 (sequence is synthesized)
ttaaaagaacccctcctggtgttcggaaaatagtaattgctaccaacattgcggagactagcattaccatagatgatgtcgtttatgtgatagatggaggaaaaataaaagagacgcatt

SEQ ID NO: 602791 - DNA, 120 bp, Artificial Sequence
  ENSG00000174953_15 (sequence is synthesized)
ttgatactcagaacaatatcagtacaatgtccgctgagtgggttagtaaagctaatgccaaacagagaaaaggtcgagctggaagagttcaacctggtcattgctatcatctgtataatg

SEQ ID NO: 602792 - DNA, 120 bp, Artificial Sequence
  ENSG00000174953_16 (sequence is synthesized)
gtcttagagcaagtcttctagatgactatcaactgccagaaattttgagaactcctttggaagaactttgtttacaaataaagattttaaggctaggtggaattgcttattttctgagta

SEQ ID NO: 602793 - DNA, 120 bp, Artificial Sequence
  ENSG00000174953_17 (sequence is synthesized)
gattaatggacccaccatcaaatgaggcagtgttactctccataagacacctgatggagctgaacgctttggataaacaagaagaattgacacctcttggagtccacttggcacgattac

SEQ ID NO: 602794 - DNA, 120 bp, Artificial Sequence
  ENSG00000174953_18 (sequence is synthesized)
ccgttgagccacatattggaaaaatgattctttttggagcactgttctgctgcttagacccagtactcactattgctgctagtctcagtttcaaagatccatttgtcattccactgggaa

SEQ ID NO: 602795 - DNA, 120 bp, Artificial Sequence
  ENSG00000174953_19 (sequence is synthesized)
aagaaaagattgcagatgcaagaagaaaggaattggcaaaggatactagaagtgatcacttaacagttgtgaatgcgtttgagggctgggaagaggctaggcgacgtggtttcagatacg

SEQ ID NO: 602796 - DNA, 120 bp, Artificial Sequence
  ENSG00000174953_20 (sequence is synthesized)
aaaaggactattgctgggaatattttctgtcttcaaacacactgcagatgctgcataacatgaaaggacagtttgctgagcatcttcttggagctggatttgtaagcagtagaaatccta

SEQ ID NO: 602797 - DNA, 120 bp, Artificial Sequence
  ENSG00000174953_21 (sequence is synthesized)
aagatccagaatctaatataaattcagataatgagaagataattaaagctgtcatctgtgctggtttatatcccaaagttgctaaaattcgactaaatttgggtaaaaaaagaaaaatgg

SEQ ID NO: 602798 - DNA, 120 bp, Artificial Sequence
  ENSG00000174953_22 (sequence is synthesized)
taaaagtttacacaaaaaccgatggcctggttgctgttcatcctaaatctgttaatgtggagcaaacagactttcactacaactggcttatctatcacctaaagatgagaacaagcagta

SEQ ID NO: 602799 - DNA, 120 bp, Artificial Sequence
  ENSG00000174953_23 (sequence is synthesized)
tatacttgtatgactgcacagaggtttccccatactgtctcttgttttttggaggtgacatttccatccagaaggataacgatcaggaaactattgctgtagatgagtggattgtatttc

SEQ ID NO: 602800 - DNA, 120 bp, Artificial Sequence
  ENSG00000174953_24 (sequence is synthesized)
agtctccagcaagaattgcccatcttgttaaggaattaagaaaggaactagatattcttctgcaagagaagattgaaagtcctcatcctgtagactggaatgacactaaatccagagact

SEQ ID NO: 602801 - DNA, 120 bp, Artificial Sequence
  ENSG00000174953_25 (sequence is synthesized)
gtgcagtactgtcagctattatagacttgatcaaaacacaggaaaaggcaactcccaggaactttccgccacgattccaggatggatattacagctgacagcttttcaggggtggtctga

SEQ ID NO: 602802 - DNA, 120 bp, Artificial Sequence
  ENSG00000174953_26 (sequence is synthesized)
aaagccagtttgacagccattcttcatcattgtttaaattttggctggatgccaaaccctgggacatgaacaattttcatgtgtaaggtagaagccttcagtaggtagtaaagacttaat

SEQ ID NO: 602803 - DNA, 120 bp, Artificial Sequence
  ENSG00000174953_27 (sequence is synthesized)
gtgcatgacttgatgttatatgtagagatatatatatatatatatatataccataaaagcaatatgttctctgatcatatactctgctgtggtcatgcccactctttgggagtatattcc

SEQ ID NO: 602804 - DNA, 120 bp, Artificial Sequence
  ENSG00000174953_28 (sequence is synthesized)
tatatatattgagtattgtaccacttgagaaattcctttgttctgttatacaaaattaatctttctgctcataatgattgatgataccaccagtaaaaataggatgtttaccccaaaaca

SEQ ID NO: 602805 - DNA, 120 bp, Artificial Sequence
  ENSG00000174953_29 (sequence is synthesized)
agtgtcaattaagaatttgaacacaaccacattttttaaaatgaaacttctatcggaagtaaattaatttgttgtaataaagtccagtatttaataaaatgtacaatgttaaatctcagc

SEQ ID NO: 602806 - DNA, 120 bp, Artificial Sequence
  ENSG00000174953_30 (sequence is synthesized)
caacctcttggattggtttctacattttcacctatggcttggttcatttgatatttttactatttttaaaacacgtgccctttttatatcaccctgtgcctcataatacagcaattgaga

SEQ ID NO: 602807 - DNA, 120 bp, Artificial Sequence
  ENSG00000174953_31 (sequence is synthesized)
gcacggtctggagcctgattacctcagttccagtctcagctctgtcagttagtcagtgtcttggcttctctcctttttccttatcttgtaagatacagttggcccttcatatccatgcat

SEQ ID NO: 602808 - DNA, 120 bp, Artificial Sequence
  ENSG00000174953_32 (sequence is synthesized)
tccacatctgtggattcaaacaactgtggatagaagatatttggggaaaaaaaggatggttgtgtctatactgaacatgtgcagacttttttccttgtcattccctaaacaatacagttt

SEQ ID NO: 602809 - DNA, 120 bp, Artificial Sequence
  ENSG00000174953_33 (sequence is synthesized)
attgtattaggtattataaataatctagagatgacttaaagaatatgggaggttgtgcctaggtaacatgcaaatactacgccattttattataaaagacttgagcatccatggatttag

SEQ ID NO: 602810 - DNA, 120 bp, Artificial Sequence
  ENSG00000174953_34 (sequence is synthesized)
agacttgagcatccatggatttaggtatttgaggggttggggttggaaaccagtcccccacagatactgagggacaactgtacatgtaacagttgtgaggatgaagtacattaatacatg

SEQ ID NO: 602811 - DNA, 120 bp, Artificial Sequence
  ENSG00000174953_35 (sequence is synthesized)
taaagcacataggctagtgcctgtactctctgaatcttagttgttatttgtccctgaaatattttcgtaaatgtctaacaatctattatattacactttttattttattgctacttatct

SEQ ID NO: 602812 - DNA, 120 bp, Artificial Sequence
  ENSG00000174953_36 (sequence is synthesized)
tcttcgccaaggaatagtgtaacaacacatgctgtacattttcagccctatcagattgtgataaatactgttggttgccggccagcaactattttgtccctcccttcttgcttgcttatt

SEQ ID NO: 602813 - DNA, 120 bp, Artificial Sequence
  ENSG00000174953_37 (sequence is synthesized)
ctggtgttcccttctgtgcagctctgtgtccaggtatgttggaccctttccctaagggtgaatcctgctgttctaaatgaatcacatgtggtcttatcccccttataagtaattgataag

SEQ ID NO: 602814 - DNA, 120 bp, Artificial Sequence
  ENSG00000174953_38 (sequence is synthesized)
gcatgagtacataaacatgtcctagtgaatggcagctgagaagtgatcttcaagggggtgtctgaaaaatgttttactcactaataggcttagaggaggaaatcctgctctctctggaca

SEQ ID NO: 602815 - DNA, 120 bp, Artificial Sequence
  ENSG00000174953_39 (sequence is synthesized)
ttgtcttttctgactctgatagttggaactgctgcagccaactaatgatcacaaggagacacggactcagactgaggttagctcagtggaaagatagaactcaccagagcctttgataat

SEQ ID NO: 602816 - DNA, 120 bp, Artificial Sequence
  ENSG00000174953_40 (sequence is synthesized)
gccggtaagcttcagaattaacccattctagagctgctttacatgtggacttatgttgatataataaaaacccttcaattgtttaagccacttttaataggatattgttagttttttgtt

SEQ ID NO: 602817 - DNA, 60 bp, Artificial Sequence
  ENSG00000174953_41 (sequence is synthesized)
gttttgttttgttttgttttttgttttttggagacaggacttcctgggttcaagtgatcc

SEQ ID NO: 602818 - DNA, 88 bp, Artificial Sequence
  ENSG00000174953_42 (sequence is synthesized)
cagcctcccaaatagctgggactataggcatgcatcaccacacccagctaatttctgtattttttgtagagacacactcctgtgctca

SEQ ID NO: 602819 - DNA, 120 bp, Artificial Sequence
  ENSG00000174953_43 (sequence is synthesized)
aaaactcctgtgctcaagcagtctgcccgccttggcttcccaaagtgctgacattacaggtatgagccactgcacccggtccctagtagggtatttttaacttggcaaaaagggtattaa

SEQ ID NO: 602820 - DNA, 120 bp, Artificial Sequence
  ENSG00000174953_44 (sequence is synthesized)
tcagaaacatacactatccatcactgagtattatactcttgattttgcaatgtaagagttttaacctatttgtctgacagaaggtgtaaaagtgctggacatgctgcagaaagaaacagg

SEQ ID NO: 602821 - DNA, 120 bp, Artificial Sequence
  ENSG00000174953_45 (sequence is synthesized)
aaaagcatcttgctgcactccaaagaatgcaaattttaatgtgccttccaataaatgcaaggaaaccgaaagagttaatagtatcatacaatgactgggatgtattgataatgctacagt

SEQ ID NO: 602822 - DNA, 120 bp, Artificial Sequence
  ENSG00000174953_46 (sequence is synthesized)
gatccattaacagcacttgttcaggtactgctcccaatcctgggaatgtgtgttacctgttatgtctcaaatcctttatcttggctgttcttctaaaagtgatctgtctgtcattgaatg

SEQ ID NO: 602823 - DNA, 120 bp, Artificial Sequence
  ENSG00000174953_47 (sequence is synthesized)
ctggcattagagtcatgtcacaatattagagcatactggttttgcctctaacgtcgaggtgaccatctggtctttcttgctctgtaagagtttctgtttgtgcttttttttcccttactt

SEQ ID NO: 602824 - DNA, 120 bp, Artificial Sequence
  ENSG00000174953_48 (sequence is synthesized)
ttattatccagtttaaatccagtcagttggccaaaatggtcttggaagaaaggatttagagattctgtaaaaaagattattagttggttctgtgtttgcaaaccagtatgtaattcccat

SEQ ID NO: 602825 - DNA, 120 bp, Artificial Sequence
  ENSG00000174953_49 (sequence is synthesized)
atgaatggggaaaatgttcctgaggaattatttaattgatgaggcattcacagagattaaagcagttattgttacctccaatttatgtcttctgcacagctgattaggttggacatttta

SEQ ID NO: 602826 - DNA, 120 bp, Artificial Sequence
  ENSG00000174953_50 (sequence is synthesized)
atccaaggtgctacttacattctgtttcttttgtttacaaaatagggcattactgagtagaaaatacattccaggtctaagaactgtttgttctttagtggattttaaagaataagacat

SEQ ID NO: 602827 - DNA, 120 bp, Artificial Sequence
  ENSG00000174953_51 (sequence is synthesized)
taaattaagaaggaaaatctgtttgattcatcattttgagtaatgcagagaataactcttaaaaaaaaaacctgaaacagaaactttcaggaaaaaaacaaaagaaattaaactactgaa

SEQ ID NO: 602828 - DNA, 120 bp, Artificial Sequence
  ENSG00000174953_52 (sequence is synthesized)
taatctttcaaaagcatcgttgaacagtgagcacatgtgatgccttcccaattaattaatttgggcaaaagctctagataaacttacaccaattgttgcaaggcattctctattactgca

SEQ ID NO: 602829 - DNA, 120 bp, Artificial Sequence
  ENSG00000174953_53 (sequence is synthesized)
tttttaaaacaaagtcctcccctaaaagttatgaattatacaaaagctttaggaggaattttagtactcctttacccaaaataaatagtggtaaatttccttctgttcttagctctgagt

SEQ ID NO: 602830 - DNA, 120 bp, Artificial Sequence
  ENSG00000174953_54 (sequence is synthesized)
ttgtatttatttataagtcattgtgatcatgtatacttatatatttttaatatgctaattgcttttaaatgggatttttgttctgattttaaaataatacatcctccctggacaatattt

SEQ ID NO: 602831 - DNA, 120 bp, Artificial Sequence
  ENSG00000174953_55 (sequence is synthesized)
atacatcctccctggacaatatttggaaatgtagcaaagtaaatcatgttaccattgttccattttgatatatataaactttaggtattattttatatataataaattttaagatattat

SEQ ID NO: 602832 - DNA, 120 bp, Artificial Sequence
  ENSG00000174953_56 (sequence is synthesized)
aaatataaatatatttttttgcaaaaataaactgaattattctctggaatttttttagattccgggatttgtttggtttttaccaagctcttctatcagtttttcaagtagtgtaaaaaa

SEQ ID NO: 602833 - DNA, 120 bp, Artificial Sequence
  ENSG00000174953_57 (sequence is synthesized)
taaatagattaacatttcttgctctatttcagcagagcaaataattttgaaaaaatgattcctggtttttctgaattgtgttttgaggtggtaacagaccagccattctaaatggctcag

SEQ ID NO: 602834 - DNA, 120 bp, Artificial Sequence
  ENSG00000174953_58 (sequence is synthesized)
gtatttcccattaccccattgtggtaggtgttcttataagtaaaaaattaagtgtgaagattttcattaaaactgaaagcatttctaaaattgaagatataaacctttgtggtagttaat

SEQ ID NO: 602835 - DNA, 120 bp, Artificial Sequence
  ENSG00000174953_59 (sequence is synthesized)
tattaattactcgtaattctcttcttaaacttttgaaatctgctcatgtaacaaggcttatattataaatttgttcttattcatatgtgggttatattcttgttcttttaatcatttcag

SEQ ID NO: 602836 - DNA, 120 bp, Artificial Sequence
  ENSG00000174953_60 (sequence is synthesized)
agaaggtgaactgtttagccattggtatcactttccctcacaacacatcctggaatcacctctttgataacccattattcacaaagaatgctaccacatgataccagtgtaaatattaga

SEQ ID NO: 602837 - DNA, 120 bp, Artificial Sequence
  ENSG00000174953_61 (sequence is synthesized)
agagccagcctgctagtaaataccagtggctggataaaaattgcttagagtagattttatttcagaaacttttttcctcttgccttataaatggataacttagctctttgaataacattg

SEQ ID NO: 602838 - DNA, 120 bp, Artificial Sequence
  ENSG00000174953_62 (sequence is synthesized)
tgatttcactattttgagaaataaagtgtaataatatatttacaggtagcctcagtagtaattggagacaacagtgaagcatgagctagaatgagctcattctagctaaaggatacagag

SEQ ID NO: 602839 - DNA, 120 bp, Artificial Sequence
  ENSG00000174953_63 (sequence is synthesized)
aaactaagagtcacaaatggccagtagtgtggttgctgctattttggaagacactctgtattagaattatgattgaatcattaaaatagtcagtgacccagtgcatgagtttttaatttg

SEQ ID NO: 602840 - DNA, 120 bp, Artificial Sequence
  ENSG00000174953_64 (sequence is synthesized)
atagatgtgtcttaaggaagtaatttcaaatgttttctaacagctatattgtaaataatatagatttctagtagccatgggaaaattgtggttttataatactgtaatgcatctccatag

SEQ ID NO: 602841 - DNA, 120 bp, Artificial Sequence
  ENSG00000174953_65 (sequence is synthesized)
gtgggcattaaaacagtcattgtgtagtaacatgtaaagtatttaaactgatgttaaatgaaagttggatattctagaattataaacatgaaaaaataaagactttaaagataggccaaa

SEQ ID NO: 602842 - DNA, 120 bp, Artificial Sequence
  ENSG00000174953_66 (sequence is synthesized)
ttctcaactggcatgattttgcccccaaaggggacattggaaagtgtctggagatacttgtggttgtcataacagtgtgtcagtagtactaaagtcaagaaaccctattccaaggtataa

SEQ ID NO: 602843 - DNA, 120 bp, Artificial Sequence
  ENSG00000174953_67 (sequence is synthesized)
agtaatgggtagctgatgaattttaatcattgtggttggattattcacattttaagtgacctaagtactttttcaaaataatacttggccagaaatttttttgtatgtgtgtacctaact

SEQ ID NO: 602844 - DNA, 120 bp, Artificial Sequence
  ENSG00000174953_68 (sequence is synthesized)
ttacaggtagcttaacagtgagtcactttgaaattcattttattttcctctctgccatcctgggagggctttctgaaaaaatgtagttttctttggactggtgcattgttttggtccaga

SEQ ID NO: 602845 - DNA, 120 bp, Artificial Sequence
  ENSG00000174953_69 (sequence is synthesized)
ctaggggtcagcaaattttgacctataggccaaaaacttgtttttgtcctttttttgttggaacacaaacatgttgttttcatgttgtctattctgctttccttctacactagcagagtt

SEQ ID NO: 602846 - DNA, 120 bp, Artificial Sequence
  ENSG00000174953_70 (sequence is synthesized)
ctttccttctacactagcagagttggacagaaattatagagccccaaatatagaccctaaaatatttactctctggtcctgtatagaaatttgctgggccaggcacagtggctcacacct

SEQ ID NO: 602847 - DNA, 78 bp, Artificial Sequence
  ENSG00000174953_71 (sequence is synthesized)
agtgagtcaagatcacaccactgcacgttgagagatcatgctactgcagaaaaaagaaatttgtgaagttctactgct

SEQ ID NO: 602848 - DNA, 120 bp, Artificial Sequence
  ENSG00000174953_72 (sequence is synthesized)
tcaaaaaaaagaaaaaagaaatttgtgaagttctactgctctagttatgcagggtggcaggatggcattggtaaattgacttgaagtgagaaaaaataatttctggttttattctaagta

SEQ ID NO: 602849 - DNA, 120 bp, Artificial Sequence
  ENSG00000174953_73 (sequence is synthesized)
ttctggttttattctaagtatttaaaactgtaaattcataaccatgattcatgattttgattacaagtcttatgaattcttagaacttcagaagtggccgggtgtggtggctcacacctg

SEQ ID NO: 602850 - DNA, 120 bp, Artificial Sequence
  ENSG00000174953_74 (sequence is synthesized)
agatcttgtggcaaccgtatgagataaaatctttgaggcattcatactttaagtttgacttaactgagatcacagctctaaaatggcagtaccagattttctgactgcagatattacttg

SEQ ID NO: 602851 - DNA, 120 bp, Artificial Sequence
  ENSG00000174953_75 (sequence is synthesized)
ttttaagttttctcttacactcaaaggcaagtatatcctgaaatttttgattctgctccagtacttaatgtattagtaaatagtgcactgttgggtgggaaaaacataatatagaaatca

SEQ ID NO: 602852 - DNA, 120 bp, Artificial Sequence
  ENSG00000174953_76 (sequence is synthesized)
agtaatttagcaattattagaatactgttagaggacagatccgatttcattttactgccactgacttaaagcattgtctctattttgctggatgtaatggagttctggttttgaatgttt

SEQ ID NO: 602853 - DNA, 120 bp, Artificial Sequence
  ENSG00000174953_77 (sequence is synthesized)
cagacataaaaggaattggtaaattattctttataatgtttttacacaagccatgagataataaaaatactttcggattctagccaatttaccctgtgatgtatcctaaataccatgatt

SEQ ID NO: 602854 - DNA, 120 bp, Artificial Sequence
  ENSG00000174953_78 (sequence is synthesized)
ataatttgattacatatcttctgtgaaaatttaaaactttttttaaatttcagcatttcagagaaaagctgccttcgtatggaatgcaaaaggaattggtaaatttaattgataaccatc

SEQ ID NO: 602855 - DNA, 120 bp, Artificial Sequence
  ENSG00000174953_79 (sequence is synthesized)
ctagaagcagggtatttgagaatgtccaagaaagtgggaaataatcaaaattctatgataaaagaaaatagtcatgaaaaaaatgtgttttgagattctccaggcaaggagtgaaataaa

SEQ ID NO: 602856 - DNA, 120 bp, Artificial Sequence
  ENSG00000174953_80 (sequence is synthesized)
gtgaagcgtggtagaactagaagaaggttgttgagggggagagaggcatcctacaaaaaggcaagatccaagtttggaattaagagagctgtagtacacatggatgaacgacgagaagaa

SEQ ID NO: 602857 - DNA, 120 bp, Artificial Sequence
  ENSG00000174953_81 (sequence is synthesized)
ttttcttacactttataaaaatgtatgtatggttagaggtagctgcatggcatagatcagtgagatcctcaacaagacatccctgtgggaattaatttcttttcgaatggtagagaaaag

SEQ ID NO: 602858 - DNA, 120 bp, Artificial Sequence
  ENSG00000174953_82 (sequence is synthesized)
cagtgggaatggaagttacacataacctacagtatcctatctcatccacagaagcttatgtggtgagaagaaatgtttgagaaatgctagtgccaatgaaaaaaaaacttactcttcagc

SEQ ID NO: 602859 - DNA, 120 bp, Artificial Sequence
  ENSG00000174953_83 (sequence is synthesized)
ttttctaggccagtttagtgaggtgccatgtgcagtaaaggcagttaaaattgtaaagcttgttccagattacttaatacatcttctttttatagatgataaaattaaatatttcaaaaa

SEQ ID NO: 602860 - DNA, 120 bp, Artificial Sequence
  ENSG00000174957_0 (sequence is synthesized)
atggctgatgataattttacagttgtcactgagtttattcttttgggattgacagatcatgctgaactaaaagctgtgctttttgtggtgttcctggtgatttacgccattaccttgttg

SEQ ID NO: 602861 - DNA, 120 bp, Artificial Sequence
  ENSG00000174957_1 (sequence is synthesized)
aggaatctgggcatgatcctcttaatccaaatcacctccaaactccacacacccatgtactttttactcagctgtctttcatttgtggatgcctgctattcatctgcaattgcacccaaa

SEQ ID NO: 602862 - DNA, 120 bp, Artificial Sequence
  ENSG00000174957_2 (sequence is synthesized)
atgctggtgaacctcctggttgtgaaggcaacaatttctttctctgcttgcatggtacagcatttgtgtttcggagtgttcatcaccacagaaggcttcttactgtcagtgatggcctat

SEQ ID NO: 602863 - DNA, 120 bp, Artificial Sequence
  ENSG00000174957_3 (sequence is synthesized)
gttaacacattaatccacacaatcagcttgaggagactgtccttttgtaggctaaatgctgtcagccacttcttctgtgacattccttcactgctaaagctgtcatgttctgacacctcc

SEQ ID NO: 602864 - DNA, 120 bp, Artificial Sequence
  ENSG00000174957_4 (sequence is synthesized)
atgaatgagttgttgctgttaaccttctccggagtcattgccatggccaccttcttgactgtgatcatttcctacatcttcattgcttttgctagcctaaggatccactcagcatcaggc

SEQ ID NO: 602865 - DNA, 120 bp, Artificial Sequence
  ENSG00000174957_5 (sequence is synthesized)
agacagcaagccttctccacctgtgcctctcacctgactgctgtgaccatattctatggtaccttaatctttagctacattcagccaagctcccagtattttgtggaacaagagaaagtg

SEQ ID NO: 602866 - DNA, 120 bp, Artificial Sequence
  ENSG00000174957_6 (sequence is synthesized)
gtttctatgttctatacgctagggattcccatgttaaacctgttgatacacagtttgagaaacaaggacgtaaaggaggcagtgaaaagggccatagaaatgaaacatttcctctgttaa

SEQ ID NO: 602867 - DNA, 120 bp, Artificial Sequence
  ENSG00000174963_0 (sequence is synthesized)
acacaacaagggaggggacctaaggggggaagggtagctgttgggagggggagagggaaaataattcttcaaaaaagaaaagtcagtcttctcctctccagtccgtggaaaatccaacgg

SEQ ID NO: 602868 - DNA, 120 bp, Artificial Sequence
  ENSG00000174963_1 (sequence is synthesized)
ggacgttgacaagagggtatttttaggaaacacatccaaatatacagggtaagagtgaatgtgagaaaaaaaaaagttgtgggttgtagaagttatcaagtgggatttgcggcgctctct

SEQ ID NO: 602869 - DNA, 120 bp, Artificial Sequence
  ENSG00000174963_2 (sequence is synthesized)
gcaggaaacgcgaacggctccagttcaaagccacatgcaccaacgtgacatataagccattaaaatatcatcctgacggctcatttctgcttcatcatacattccctaactgcttcctga

SEQ ID NO: 602870 - DNA, 120 bp, Artificial Sequence
  ENSG00000174963_3 (sequence is synthesized)
aagctggaaaaggagaagtgaaggatgaccgcctcgctggaaccacaaaagagaggcttggaggggtttgtggtcccctctcagccaccccgaaatgatgtgcagaaatgaggcgatcct

SEQ ID NO: 602871 - DNA, 120 bp, Artificial Sequence
  ENSG00000174963_4 (sequence is synthesized)
ggcaacaggtggagtggggctcaaagtcagaaaatgagatacaagacatccttggtgatgaggaaacgattacggctttaccgaaacactcttaaagagtcaagtagcagctctggacac

SEQ ID NO: 602872 - DNA, 120 bp, Artificial Sequence
  ENSG00000174963_5 (sequence is synthesized)
catggcccccagctcaccgccgcctccagcccctcggtgttcccgggcctccacgaggagcctccccaggcctcccccagccgtcctttgaatggactcctgcgtctggggctccctgga

SEQ ID NO: 602873 - DNA, 120 bp, Artificial Sequence
  ENSG00000174963_6 (sequence is synthesized)
gacatgtacgcgcggccggagcccttcccgccagggcctgcggcccgcagcgacgccctggcagctgccgcagccctgcatggctacgggggcatgaacctgacggtgaacctcgctgcg

SEQ ID NO: 602874 - DNA, 120 bp, Artificial Sequence
  ENSG00000174963_7 (sequence is synthesized)
ccccacggtcctggcgctttcttccgctacatgcgccagcccatcaaacaggagctcatctgcaagtggctggcggccgacggcaccgcgaccccgagcctctgctccaaaactttcagc

SEQ ID NO: 602875 - DNA, 120 bp, Artificial Sequence
  ENSG00000174963_8 (sequence is synthesized)
accatgcacgagctggtcacgcacgtcaccgtggagcacgtcggcggcccggaacaggccaaccacatttgcttctgggaggagtgtccgcgccagggaaagcccttcaaagccaaatac

SEQ ID NO: 602876 - DNA, 120 bp, Artificial Sequence
  ENSG00000174963_9 (sequence is synthesized)
aaacttgtaaatcacatccgcgtgcacacgggcgagaagcccttcccttgtcctttcccggggtgtgggaaggtctttgctagatcagaaaatctcaaaatacacaaacgaactcacaca

SEQ ID NO: 602877 - DNA, 120 bp, Artificial Sequence
  ENSG00000174963_10 (sequence is synthesized)
ggcgagaagcccttcagatgcgagttcgagggctgcgagcggcgcttcgccaacagcagcgaccgtaagaagcattcgcacgtgcacactagcgacaagccatacacgtgcaaggtgcgg

SEQ ID NO: 602878 - DNA, 120 bp, Artificial Sequence
  ENSG00000174963_11 (sequence is synthesized)
ggctgcgacaagtgctacacgcaccccagctcgctgcgtaagcacatgaaggtgcacgggcgctcgccgccgcccagctctggctacgattcggctacaccgtctgccctcgtgtcgccc

SEQ ID NO: 602879 - DNA, 120 bp, Artificial Sequence
  ENSG00000174963_12 (sequence is synthesized)
tcgtcggactgcggccacaagtcccaggtggcctcctcggcggcggtggcggcgcgtaccgccgacttgagcgaatgatgtccaccgcgttgctcgcaaggtaatctcgctccgcgcagc

SEQ ID NO: 602880 - DNA, 120 bp, Artificial Sequence
  ENSG00000174963_13 (sequence is synthesized)
tgagcgccccgcatctcgcgcctgctacatcaaagggcccgcgcacaaagcagtgtttcttcgccacggtgcatcttcatggtaagttaggatttctatggcaatgtgcaagtcgcactg

SEQ ID NO: 602881 - DNA, 120 bp, Artificial Sequence
  ENSG00000174963_14 (sequence is synthesized)
aaatcctgaaaggccaagcctggagcccgtccaggcttttcattaaggacataatatttacgtctaacagaccttttttcttgtgtatacaagtatatatttttgtttgacgcggactaa

SEQ ID NO: 602882 - DNA, 120 bp, Artificial Sequence
  ENSG00000174963_15 (sequence is synthesized)
atcattttcatttaatttccggtaaacaaaacccacgcgaatgggcacttgtacccgatcataataaaaatggataataatgtgaaggaagaaaagagccgcttgaatcgccgctcagcc

SEQ ID NO: 602883 - DNA, 120 bp, Artificial Sequence
  ENSG00000174963_16 (sequence is synthesized)
ccctttgtttctgctttctgcggtgatcagagggcgcgtttgggtttgatggcgagtttctaaaggcgaggaaatggtttgtaagaggggaaagaaaaggagaaaggtctaatcaagctc

SEQ ID NO: 602884 - DNA, 120 bp, Artificial Sequence
  ENSG00000174963_17 (sequence is synthesized)
gggttgttcaaagagtcgggttttggggttgaaagtgtgagtttgacggtgcatcagcatgccgcgttaggctcgccatggaaatacgcgcggggagcggccgcttcaaaggcggcacac

SEQ ID NO: 602885 - DNA, 120 bp, Artificial Sequence
  ENSG00000174963_18 (sequence is synthesized)
cactctattaagatacatttgcgctgacctttgctttcacgccatttaatactgtcactgcgctctccagtatatacttcctttctagaacccgacttgcccacgtttaggggttcactc

SEQ ID NO: 602886 - DNA, 120 bp, Artificial Sequence
  ENSG00000174963_19 (sequence is synthesized)
tgcaccctgatgtgggaggctttggcgcaggggacactttcaggaaagggaggagcacaaggactctgtgcatcttgactgcaccccaaagaggctccaggatcaggagtgaaagatttt

SEQ ID NO: 602887 - DNA, 120 bp, Artificial Sequence
  ENSG00000174963_20 (sequence is synthesized)
aaagcagcctccgaagcttaacaaatgagcattccaagctcagttttgtgcaaatcgcctttctgactcttgagtaggatggaggcttaaatttaatggcgacttggggggaagggagcc

SEQ ID NO: 602888 - DNA, 120 bp, Artificial Sequence
  ENSG00000174963_21 (sequence is synthesized)
accctgggggagtctgaggagttcagactgtgcccttgggaatttccactctggctttccgtgccactcttcttcctttccatcccaaaagtctcttgcggcccctgaaacttgtttctt

SEQ ID NO: 602889 - DNA, 120 bp, Artificial Sequence
  ENSG00000174963_22 (sequence is synthesized)
tctaaggcagggtgtgtggtacccttaggcctggactagtcctagatgcaaactcaagagcccaaggccaaggggatgtggggaagatggcaggaaagttagaagtccatgttcccttaa

SEQ ID NO: 602890 - DNA, 120 bp, Artificial Sequence
  ENSG00000174963_23 (sequence is synthesized)
ttgtcttgttgtttattttatccaagtaccccagtgaataggggaaaaataaacacagtgaaaaaaaaaatcaaacagtggagtcttctttagtgccagtccttgtggttgaataaaaag

SEQ ID NO: 602891 - DNA, 120 bp, Artificial Sequence
  ENSG00000174963_24 (sequence is synthesized)
gatggtccgctttctattgagctgagaaatctttgaagtgggagttattatctgagacattcctgcttgtcgtcctaacaacgctgatgaaacgtaaaaggttctttgtcagcgatttgt

SEQ ID NO: 602892 - DNA, 120 bp, Artificial Sequence
  ENSG00000174963_25 (sequence is synthesized)
tctcctctctgtcaaactccctctgccccgttagtttcaaaccgtttctaaagagataaaaatcaaacttcttttaaaacaatatccacacactgcatcaatacataactttaggtctaa

SEQ ID NO: 602893 - DNA, 120 bp, Artificial Sequence
  ENSG00000174963_26 (sequence is synthesized)
gtcttgctaagggataaacaaaagcaatgcctagacatcagggtcagggcctggtctggtgaagtatgcagaagttggggggccctcgggacaagctttgggacatgaggaaaagaatgc

SEQ ID NO: 602894 - DNA, 120 bp, Artificial Sequence
  ENSG00000174963_27 (sequence is synthesized)
agagagggtgcaagcagaatacataccctaagtccataattgtgtttctgcttctttctgctctggtttgcattcaatcagcccaagttgggtcacatagatgggtttcctttgggtacc

SEQ ID NO: 602895 - DNA, 120 bp, Artificial Sequence
  ENSG00000174963_28 (sequence is synthesized)
cctcaggctcctaatattcttgcccaggatccttggaacttaagaatgcagccaagcaattgttaatatctcctgctccttcaaagccacctctgctaaaaatagacccattgtgtgttt

SEQ ID NO: 602896 - DNA, 120 bp, Artificial Sequence
  ENSG00000174963_29 (sequence is synthesized)
cttctcactagcagcaatcaacaagccctttctgccgttaataagaaggagaatagctgaaggagagagatattttattaatttcctgtttccttcagaatcttggcaattgaagtttag

SEQ ID NO: 602897 - DNA, 120 bp, Artificial Sequence
  ENSG00000174963_30 (sequence is synthesized)
aaggtttggtctacaacacagtgatcgaaaatgcatgtaaatgcccatccttcccttcattcacgtgtgaagttgttcattttatattgtgcccagcaaagaaactttcacccagttcag

SEQ ID NO: 602898 - DNA, 120 bp, Artificial Sequence
  ENSG00000174963_31 (sequence is synthesized)
gtttccccaaaactcctgtggtggttttaaaggtggtttaaataaataaggatgtgctggtccccctactctgtgtgtgctgaataaatggcttgtaaagaagtttttccaagctgtaac

SEQ ID NO: 602899 - DNA, 120 bp, Artificial Sequence
  ENSG00000174963_32 (sequence is synthesized)
ccatgctgttattatagttgctgcaaaatgttcttcctgatattgattttatttgttaactgaaggtctccatatgtttgtttatattgctaatttatgagaaaatgtaataattgcaat

SEQ ID NO: 602900 - DNA, 120 bp, Artificial Sequence
  ENSG00000174963_33 (sequence is synthesized)
gaatgtgaattatacagacaggcaaacattttgtaatcataattcacatatacacaaaagcctggctgaaatctttagactatttgtaccctctctacccacactgtttgtgatttatca

SEQ ID NO: 602901 - DNA, 120 bp, Artificial Sequence
  ENSG00000174963_34 (sequence is synthesized)
tctgtctctttagtgtcagttaaattatgaactaacttgaaaataaaagttgtttgactgaaagtgattgttgaatgaacaacaaagttgaaagccatggcttgatcttgtaaatatata

SEQ ID NO: 602902 - DNA, 120 bp, Artificial Sequence
  ENSG00000174963_35 (sequence is synthesized)
aatgtaaatgatattaaatctgtgattccttttccctccaaaggcttttgtgtacatggcgctgcatttggctattttctttggaaataaataatgtgatgtttctcttcctcttttgaa

SEQ ID NO: 602903 - DNA, 120 bp, Artificial Sequence
  ENSG00000174963_36 (sequence is synthesized)
gaaagaaagctaggactggctcaaaggttggatctgaaagttggggttgatgaatggcccatgtcaaagtcttaggaaagcggaggggcttttggagggttgcacttcggccgtcaccgt

SEQ ID NO: 602904 - DNA, 120 bp, Artificial Sequence
  ENSG00000174963_37 (sequence is synthesized)
gagaagtgatccagacctcttagaagttgggttggggctgccttatgggtggacagggatctctagggaacctcacacccatttcccccagaagcaaaagagtaaattctattattgcca

SEQ ID NO: 602905 - DNA, 120 bp, Artificial Sequence
  ENSG00000174963_38 (sequence is synthesized)
accaaccaggacttttccatgccagacatcctgccatgaggaaatttcagagcgaggacgcccagcatgccgcccttctgtaggaatgcaaagttaggcctcctttctttcctgatttgt

SEQ ID NO: 602906 - DNA, 120 bp, Artificial Sequence
  ENSG00000174963_39 (sequence is synthesized)
ccggccaatattgtcactctaacgtgcactcgcgccttccctcggctctacagggcatcgcagccaccgatcccagcccctccccggcctatgccagccgcctggtggccctccgggctg

SEQ ID NO: 602907 - DNA, 120 bp, Artificial Sequence
  ENSG00000174963_40 (sequence is synthesized)
cggagccaggcctggcctgacagcagcagctgttttcttcccgaagccgcagcgctcaagggcgtggttgcggtagacacctcggatcccatttggcctgtgcggaccctaccgcgccaa

SEQ ID NO: 602908 - DNA, 120 bp, Artificial Sequence
  ENSG00000174963_41 (sequence is synthesized)
gtggcggtcacagcgatcccggaacaatggtgcctcggggagggaggcgcgggccagcaaccgcgctcggcctggccaccgccacccagctcctctccagggacccctcggccggggccg

SEQ ID NO: 602909 - DNA, 120 bp, Artificial Sequence
  ENSG00000174963_42 (sequence is synthesized)
ccacttggatttggcctgtggttcaacaagttaaacaactgcttgttctgtgggcagacatccccattgacagaggacttgctgtgtttgtccagcctgagaccttttcaatgactgttt

SEQ ID NO: 602910 - DNA, 120 bp, Artificial Sequence
  ENSG00000174963_43 (sequence is synthesized)
ttctttctaggccaaattgagggtgggggccggatagatgcttctgtctggctgctcaactgcctcagccttgcctgacagatgcagaggtcctcaggatggctttaagtatttaaggcg

SEQ ID NO: 602911 - DNA, 120 bp, Artificial Sequence
  ENSG00000174963_44 (sequence is synthesized)
atttattccgcatctttctatcactgttttataaaatggtgccagtgtcccgcgaaatggcaggtgccaacaccttccagactgttcagtgtactagctgtgctcctgtagggtgggaat

SEQ ID NO: 602912 - DNA, 120 bp, Artificial Sequence
  ENSG00000174963_45 (sequence is synthesized)
ccagcgaccaggtggtgccggagacccgggctcaggagccgctgattgcgcagaagcgcaggttgtgcgcaaacctctctgtccgagcctcaacagggctcgggaattggggctttgttt

SEQ ID NO: 602913 - DNA, 120 bp, Artificial Sequence
  ENSG00000174963_46 (sequence is synthesized)
gttctaaccagccccaaagcgcctgtttttcctggatgcggcgggagaagcaactacaaaggcaacagttctccagctgcgcgtcttcctcctcagctagacgctaggtagccggtccct

SEQ ID NO: 602914 - DNA, 120 bp, Artificial Sequence
  ENSG00000174963_47 (sequence is synthesized)
taactcagagcgctgggaggcagccatttgtttaaagcgcccagaaaccttcttcccccatttccgcagcacttgcagctccggcaggaatctaggcttccgggttctcggggtcctttc

SEQ ID NO: 602915 - DNA, 120 bp, Artificial Sequence
  ENSG00000174963_48 (sequence is synthesized)
atcgcaagtcagtgcggactgggagggccagctgcccacagcacggtctccaggaagcctctggagcagcgtaatgaaatattattactggcgagcgtatctggagggatcccggaaggt

SEQ ID NO: 602916 - DNA, 120 bp, Artificial Sequence
  ENSG00000174963_49 (sequence is synthesized)
ttaggcaagatttgaagaatgctgctaaatgtttgccctcagggggtagaaggaaagagggagggggctccattcctgtaaaaatctcttctgaagtgaatcattgctcagaatacctct

SEQ ID NO: 602917 - DNA, 120 bp, Artificial Sequence
  ENSG00000174963_50 (sequence is synthesized)
ccctgcagcacgaatccactttatgcacacacaatgtgcatcggctgcgcatccttaaattatttcatcgctttggcgtttgcgcaaaacctactttaggaaacaatttgggccaggatg

SEQ ID NO: 602918 - DNA, 120 bp, Artificial Sequence
  ENSG00000174963_51 (sequence is synthesized)
ggggtgggtgggggggatgaacggctgggcggggtagcggcagagaagttagtctgaaacagcaactttaaatcgagcagatgtgagcttccccgttaactatattgtgagctcctccgt

SEQ ID NO: 602919 - DNA, 120 bp, Artificial Sequence
  ENSG00000174963_52 (sequence is synthesized)
taatgtatttccgagcagaggtgcttctggttccaagtggagaaaatttggaggaaacaacccgagtggatcaggattttcgaggatggaaactcgactaagatggagtcactgtcgctc

SEQ ID NO: 602920 - DNA, 120 bp, Artificial Sequence
  ENSG00000174963_53 (sequence is synthesized)
ctcctccataccctccccatgagcccagaggaggaaggcgggagggatggaggcgttcaagagagggcaccgggggcgctctctgcacgagggaaaggggtgctcgacctgaggcgccgt

SEQ ID NO: 602921 - DNA, 120 bp, Artificial Sequence
  ENSG00000174963_54 (sequence is synthesized)
ttcctggccctgccactgatgaattttcttctgctctatcctcttcagacgcaattagacaattagcactcctgcccgcagcccccacaactttcatcagatgaaataacatcctaactg

SEQ ID NO: 602922 - DNA, 120 bp, Artificial Sequence
  ENSG00000174963_55 (sequence is synthesized)
gagtggaactattttcatgactccaaataaaaaatgcagtcttccaaatacacctttagtgaatccgtccttgagaaagggggactgaaattcctgcctacacctaatacaatagggccc

SEQ ID NO: 602923 - DNA, 120 bp, Artificial Sequence
  ENSG00000174963_56 (sequence is synthesized)
tgaaacaccaaccccaccactaaggtgcagagggcatttgcggaacttgctgcttctgccaatgtttaaaaagtcccccttcctgaaatgtccaccgcgttgctcgcaaggtaatctcgc

SEQ ID NO: 602924 - DNA, 120 bp, Artificial Sequence
  ENSG00000174963_57 (sequence is synthesized)
gcagaggatgagtccatcccttcttcccaggaggagggaaaaggggtacaaatggggctcccactggcacaggaaccaggagcagtttgttgcctgcctgccttcccttctctccttgtg

SEQ ID NO: 602925 - DNA, 120 bp, Artificial Sequence
  ENSG00000174963_58 (sequence is synthesized)
aattgcctgggtgccccaccgtgggcacaagaatggaagtcgtggcccagagcttccctcgcgaaaaatgagcaaggcgggtgccgggagggggcctttacaggaggctcaaagtcagaa

SEQ ID NO: 602926 - DNA, 120 bp, Artificial Sequence
  ENSG00000174963_59 (sequence is synthesized)
atggaacttctccgccccaacctgacggcagatgccgcctgagtccacctcagggcggctccttgccctccctcaccctggtcctgcctcaggaagctgactgctgggatctgctctctg

SEQ ID NO: 602927 - DNA, 120 bp, Artificial Sequence
  ENSG00000174963_60 (sequence is synthesized)
cgcgcggccagcagtgggttcgggacttggctttctttatctccaatgcgaacaagagcagcaactagctctctggggagcaggccgcagctcctaggattctggcccctagcctagacc

SEQ ID NO: 602928 - DNA, 120 bp, Artificial Sequence
  ENSG00000174963_61 (sequence is synthesized)
caggggcattggaaattaggggccaatgaggagggaatagagctgagctgtgaaagaaagctaggactggctcaaaggttggatctgaaagttggggttgatgaatggcccatgtcaaag

SEQ ID NO: 602929 - DNA, 120 bp, Artificial Sequence
  ENSG00000174963_62 (sequence is synthesized)
acttctgtagtgtgcaggatttcgcgtaggcattaatagccaagggggtgggcgcgcccaaatccaaaccttgggaagaagaagagaaagaaagaaagaaaaaaaaaactttacagaagt

SEQ ID NO: 602930 - DNA, 120 bp, Artificial Sequence
  ENSG00000174963_63 (sequence is synthesized)
ttttttgtgtggttttcctttcccctccccactgtcaggtggcagtggtgttagcggcccggtacagggagctccggggagcgtgggtcggcaagcagccggccgccctctcctagccaa

SEQ ID NO: 602931 - DNA, 120 bp, Artificial Sequence
  ENSG00000174963_64 (sequence is synthesized)
gcggggcactgaaaatatatatggctggggcgcttcagaaccaccaccacctccaacatcatcatttctgtcacctccactccccgcagggcatcgtgccccggagagccccggggtgtt

SEQ ID NO: 602932 - DNA, 120 bp, Artificial Sequence
  ENSG00000174963_65 (sequence is synthesized)
agccgccaaagtgcgcttggggctcagctcctacccctctggagcagaacccccagcaacccacagactcagccctgcgccttccattaccccttacatctactctgccgctaccatccc

SEQ ID NO: 602933 - DNA, 120 bp, Artificial Sequence
  ENSG00000174963_66 (sequence is synthesized)
tctctagctcatggcgcggcgggggacttggcccaacagcaattcggcccaatggcggcggaggtgtttggccttgctctgtccaccgggttcactgctggcgctgtctggctctgagtt

SEQ ID NO: 602934 - DNA, 120 bp, Artificial Sequence
  ENSG00000174963_67 (sequence is synthesized)
ccacggctgactgcagaggccgtagtgcggcagggctgggcctgccccccggggcccagggaagagcgcgcagcccacgccacccgttctcatgcgcgctatttgtttcgacaacaggta

SEQ ID NO: 602935 - DNA, 120 bp, Artificial Sequence
  ENSG00000174970_0 (sequence is synthesized)
tctgcagatggagagcaaactaaaagagaaaaatcaaatgtgactacaataatggaatttgttcttttggggttttctgatattcccaatctccactggatgctttttagtatattttta

SEQ ID NO: 602936 - DNA, 120 bp, Artificial Sequence
  ENSG00000174970_1 (sequence is synthesized)
cttatgtatttgatgatcctgatgtgcaatggcatcataatactactaataaaaattcaccccgctctccagactcccatgtatttttttcttagcaatttttcccttttggaaatctgt

SEQ ID NO: 602937 - DNA, 120 bp, Artificial Sequence
  ENSG00000174970_2 (sequence is synthesized)
tatgtaacaatcattatcccaagaatgctcatggacatttggactcagaaaggaaatatttctttgtttgcttgtgctacacaaatgtgtttttttcttatgcttggaggcacggagtgt

SEQ ID NO: 602938 - DNA, 120 bp, Artificial Sequence
  ENSG00000174970_3 (sequence is synthesized)
ctccttctgacagtgatggcctatgaccgctacgtggctatttgtaagcctttgcagtatcctctagtgatgaaccacaaagtctgcattcagctgataatagcttcctggaccatcaca

SEQ ID NO: 602939 - DNA, 120 bp, Artificial Sequence
  ENSG00000174970_4 (sequence is synthesized)
taacacaattaatcatttcttttgtgacatcccgccaatactcaagcttgcttgtggaaacatatttgtgaatgagataacagtccatgtagtagcggtggtgtttatcacggtgccatt

SEQ ID NO: 602940 - DNA, 120 bp, Artificial Sequence
  ENSG00000174970_5 (sequence is synthesized)
tctgttgattgttgtctcttatggcaaaattatctccaacattttgaaattgtcatcagccagaggaaaggctaaagccttctccacctgctcatctcacctaatagttgtaatcttatt

SEQ ID NO: 602941 - DNA, 120 bp, Artificial Sequence
  ENSG00000174970_6 (sequence is synthesized)
ctttggagcaggtactatcacttatttacagcccaaaccacatcagtttcaaaggatggggaaactgatttctcttttctacaccattctgattccaactttgaatcctattatatatac

SEQ ID NO: 602942 - DNA, 120 bp, Artificial Sequence
  ENSG00000174970_7 (sequence is synthesized)
cctgaggaacaaagatatcatggtggcattgagaaaattactagctaagttattaacatgagatgaagacttgaaattacagaaataatttctttataggtttgtcatgtggcttcagtg

SEQ ID NO: 602943 - DNA, 120 bp, Artificial Sequence
  ENSG00000174970_8 (sequence is synthesized)
gtccctatggtattcaataatgagtactgaaatttaaatacaaacttacattatgtcaaggggtgttttattcacagaatatagttatgtgctactgtgcagttggagcacaatttaact

SEQ ID NO: 602944 - DNA, 120 bp, Artificial Sequence
  ENSG00000174970_9 (sequence is synthesized)
aaggtgccaagatctcattctgaagatcaatggttaactgttgattaagagaccacctgagcaataaaatgaaaaataactgagtgagtcatataattaggggttaggatcaggctctgt

SEQ ID NO: 602945 - DNA, 120 bp, Artificial Sequence
  ENSG00000174970_10 (sequence is synthesized)
tttctctgacccttgggtttggatttaactgattagaaacaccaaaaatagctaagatggtggaaacaaaggatatgggattttctttgcattttaccctacttgtttctcatatctttg

SEQ ID NO: 602946 - DNA, 120 bp, Artificial Sequence
  ENSG00000174970_11 (sequence is synthesized)
tccatatatttttaaatctaaatatcctgagaatgtttattcctctaactgcctacatcttactcgtctctgataacatattttctttccttgtagcttcaggtcttgctttgttaatat

SEQ ID NO: 602947 - DNA, 120 bp, Artificial Sequence
  ENSG00000174970_12 (sequence is synthesized)
ttagttttcatcctaaactagccttacctatgtgtgttgggttgaatgttggaccctcaaaatagaaatctccaactagaaccttcaaatttaatcttatttagaaaaacaaagactttc

SEQ ID NO: 602948 - DNA, 120 bp, Artificial Sequence
  ENSG00000174970_13 (sequence is synthesized)
agctatagtgaagctaaagattgtaaatgaaagtaccatgatttaggttgcacatgaagtccaacgacaagtgttattataaaagacaaagaggcagaagaagtttgaggggaaaaaagg

SEQ ID NO: 602949 - DNA, 120 bp, Artificial Sequence
  ENSG00000174970_14 (sequence is synthesized)
tgcagagaaacagagaaggacatcatgtaaaggtgaaggcagagactggaatgattcaaccacaaaccaaagatggtcaagattcaccaaaacaaaaaggggcaaggaatgagtcatcct

SEQ ID NO: 602950 - DNA, 120 bp, Artificial Sequence
  ENSG00000174970_15 (sequence is synthesized)
taaagcctttgaaggaagtgagttcctgccaacgttgtgattttggaggagcctagagaactgatgagtgactaatctgctattgccttaagccacccaatttgcagtaagttgttaaga

SEQ ID NO: 602951 - DNA, 120 bp, Artificial Sequence
  ENSG00000174970_16 (sequence is synthesized)
taaaccaggggaaataatatatcacacaaattgtcctcttatttaagttttttatttgaatatctggaatgaattctgtattccaccttgcctcagctgattcagctgatatgccattcc

SEQ ID NO: 602952 - DNA, 120 bp, Artificial Sequence
  ENSG00000174970_17 (sequence is synthesized)
ttccaccttgcctcagctgattcagctgatatgccattccaccctacccttcaattgttgcatgcattttgggcagtaaattgacttctgtttaaaaaaaaaaatatatatatatatata

SEQ ID NO: 602953 - DNA, 120 bp, Artificial Sequence
  ENSG00000174970_18 (sequence is synthesized)
atcttgtagaggtaatatattttcaatagttattacaaacgtgttttttcaaaaacttttataacgaaatttgttttattgatgcaaaacaaatttgggagtaaagggaagtcactctca

SEQ ID NO: 602954 - DNA, 120 bp, Artificial Sequence
  ENSG00000174970_19 (sequence is synthesized)
gagtatatgaagacactggagtacatctttaccttacagtaatgcacagcctctcaagataatgtctcagaactgctcaattgaagaaattcctacttccctaatatgtaagaatgcata

SEQ ID NO: 602955 - DNA, 120 bp, Artificial Sequence
  ENSG00000174970_20 (sequence is synthesized)
tgtacttaaaaaatataacatcatttttgtaaaaccaataataatagcaactataatttcatatagcattttacatgtgcatattaggaatgggatgtttgcatattagcagtgtctagg

SEQ ID NO: 602956 - DNA, 120 bp, Artificial Sequence
  ENSG00000174970_21 (sequence is synthesized)
aggatatgcatcagaagagaatattggcttcttcatactggcaagaattcagaagatttctgttttattatattttaatttacaatttatatttactacatggggaatataaagttagat

SEQ ID NO: 602957 - DNA, 120 bp, Artificial Sequence
  ENSG00000174982_0 (sequence is synthesized)
atggaaaaaataaacaacgtaactgaattcattttctggggtctttctcagagcccagagattgagaaagtttgttttgtggtgttttctttcttctacataatcattcttctgggaaat

SEQ ID NO: 602958 - DNA, 120 bp, Artificial Sequence
  ENSG00000174982_1 (sequence is synthesized)
ctcctcatcatgctgacagtttgcctgagcaacctgtttaagtcacccatgtatttctttctcagcttcttgtcttttgtggacatttgttactcttcagtcacagctcccaagatgatt

SEQ ID NO: 602959 - DNA, 120 bp, Artificial Sequence
  ENSG00000174982_2 (sequence is synthesized)
gttgacctgttagcaaaggacaaaaccatctcctatgtggggtgcatgttgcaactgtttggagtacatttctttggttgcactgagatcttcatccttactgtaatggcctatgatcgt

SEQ ID NO: 602960 - DNA, 120 bp, Artificial Sequence
  ENSG00000174982_3 (sequence is synthesized)
cactccattatccaagtggctctggtagtccaactacccttttgtggacccaatgagatagatcactacttttgtgatgttcaccctgtgttgaaacttgcctgcacagaaacatacatt

SEQ ID NO: 602961 - DNA, 120 bp, Artificial Sequence
  ENSG00000174982_4 (sequence is synthesized)
gttggtgttgttgtgacagccaacagtggtaccattgctctggggagttttgttatcttgctaatctcctacagcatcatcctagtttccctgagaaagcagtcagcagaaggcaggcgc

SEQ ID NO: 602962 - DNA, 120 bp, Artificial Sequence
  ENSG00000174982_5 (sequence is synthesized)
aaagccctctccacctgtggctcccacattgccatggtcgttatctttttcggcccctgtacttttatgtacatgcgccctgatacgaccttttcagaggataagatggtggctgtattt

SEQ ID NO: 602963 - DNA, 120 bp, Artificial Sequence
  ENSG00000174982_6 (sequence is synthesized)
tacaccattatcactcccatgttaaatcctctgatttatacactgagaaatgcagaagtaaagaatgcaatgaagaaactgtggggcagaaatgttttcttggaggctaaagggaaatag

SEQ ID NO: 602964 - DNA, 120 bp, Artificial Sequence
  ENSG00000174982_7 (sequence is synthesized)
caaagaccctgtgaaatggcaggtatcattaggtgagaaaaccaggaacaacaaagactcatttctaccagcctttcagtttggggggtcaggtattttccggtactaattattcacaaa

SEQ ID NO: 602965 - DNA, 120 bp, Artificial Sequence
  ENSG00000174982_8 (sequence is synthesized)
ggaattccctaggcatcactgttactttaccttgggaagctgcacccaaattaactcaagaagagatagaaacataaagtgaactcaagctctggaaaatactggtaatttaattgtctc

SEQ ID NO: 602966 - DNA, 120 bp, Artificial Sequence
  ENSG00000174982_9 (sequence is synthesized)
catctgtgcaatcaagacaataacaacctcatgggatttggagtggaaaaatgagacaataacacattcaaaagagtaaggtattatttttcattattatagcatttttatactatttca

SEQ ID NO: 602967 - DNA, 120 bp, Artificial Sequence
  ENSG00000174982_10 (sequence is synthesized)
taattagataacttcctgaaatatctatgacacagaaatattattaaacttagaatcacaaaagtgcagaagagcaattcctcttggctttcctttgaggacagatttctattaccctac

SEQ ID NO: 602968 - DNA, 120 bp, Artificial Sequence
  ENSG00000174982_11 (sequence is synthesized)
cttgctattcactggttttatcatcatccctgaaagcagaaactcaccatatgtataaagtggaggaaataaattttaaaaaatttagaatttccaaaagtgtgggaagtgttttcatat

SEQ ID NO: 602969 - DNA, 120 bp, Artificial Sequence
  ENSG00000174982_12 (sequence is synthesized)
ttttgggcttaaattgtgaggtttcgggcagtacagtatcactcatatatttccttctaaataaacaatcctctaccctgctgcctaggctatgtatagagtagtggggaattgataagg

SEQ ID NO: 602970 - DNA, 120 bp, Artificial Sequence
  ENSG00000174982_13 (sequence is synthesized)
ttgtaatgtgtgctgactgctgacatctggggagcagcaagaggaaagggcctcatagttcacactgtagatttcacttatccttgtgcatgcgtgtttcatcactgtcctccacattaa

SEQ ID NO: 602971 - DNA, 120 bp, Artificial Sequence
  ENSG00000174982_14 (sequence is synthesized)
tactgggaattatttagctcagtctttcaaaagaataaacctccaatcttttgtgaagtaatatagaggaattcttacctgtctgtgtagaaaatggcctgtggaaataaaataattttc

SEQ ID NO: 602972 - DNA, 120 bp, Artificial Sequence
  ENSG00000174982_15 (sequence is synthesized)
atgtaatacaatgtatgtttcactcctacattctgtagaatcgtatgctacaagcatttagcatctcaggagttttgcaagtgaactaacttgctagttttctctgtccttgctcagatg

SEQ ID NO: 602973 - DNA, 120 bp, Artificial Sequence
  ENSG00000174982_16 (sequence is synthesized)
gctataacttcccccacaatgctaagttaactacttagtaacactgttctctatttctcaaaaaatgtgtgaaaatctttcaccagctggtatttcctgtttgcttttttgtcattgtgg

SEQ ID NO: 602974 - DNA, 120 bp, Artificial Sequence
  ENSG00000174989_0 (sequence is synthesized)
ccggccgcggcggacacttccctgggcgggactgtctcgtggcacccggtggaaccgaggagaacgtggagcgccgggagcggcgaatatggacgactacagcctggatgagttccgtcg

SEQ ID NO: 602975 - DNA, 120 bp, Artificial Sequence
  ENSG00000174989_1 (sequence is synthesized)
tggatgagttccgtcggcgctggcaggaggagctggcgcaggcccaggcgccgaagaagcggcgacggcccgaggctgccgagaggcgggctcggcggccggaggtgggctccgggcgcg

SEQ ID NO: 602976 - DNA, 80 bp, Artificial Sequence
  ENSG00000174989_2 (sequence is synthesized)
aggcccccggcggcgcgggcgactcgggccgaggggcaggacgtagcgagccgctcacgttctcctctggcccgcgaggg

SEQ ID NO: 602977 - DNA, 120 bp, Artificial Sequence
  ENSG00000174989_3 (sequence is synthesized)
cgccgggggcggggagcagctggtggaccagctcatccgcgacctgaatgaaatgaatgatgtgcctttctttgatatccaactgccttacgaattggcaatcaatatatttcagtatct

SEQ ID NO: 602978 - DNA, 120 bp, Artificial Sequence
  ENSG00000174989_4 (sequence is synthesized)
ggacaggaaagaactaggaagatgtgcacaggtgagcaagacgtggaaggtgattgcagaggatgaggtgctgtggtacaggctgtgccagcaggaagggcaccttccggatagcagcat

SEQ ID NO: 602979 - DNA, 120 bp, Artificial Sequence
  ENSG00000174989_5 (sequence is synthesized)
ctctgactattcttgctggaagctcatcttccaagagtgccgagccaaggaacacatgttacgaaccaactggaagaatcgcaaaggtgccgtgagcgagctggagcatgttcctgacac

SEQ ID NO: 602980 - DNA, 120 bp, Artificial Sequence
  ENSG00000174989_6 (sequence is synthesized)
agttttgtgtgatgtgcattctcacgatggtgtggtcattgcgggatatacatcaggggatgtgagagtgtgggacacccgcacctgggactacgtagcccccttcctggaatcagagga

SEQ ID NO: 602981 - DNA, 120 bp, Artificial Sequence
  ENSG00000174989_7 (sequence is synthesized)
cgaggaggatgagcctggaatgcagccaaatgtctcctttgtgaggataaacagctcgttggcagtagcagcttatgaggatgggtttcttaatatttgggatttaaggaccggaaagta

SEQ ID NO: 602982 - DNA, 120 bp, Artificial Sequence
  ENSG00000174989_8 (sequence is synthesized)
ccctgttcatcgttttgagcacgatgcaagaatacaggcactagccctcagccaggacgatgcaaccgtggccacagcttctgcttttgatgtcgtgatgttatcccccaatgaggaggg

SEQ ID NO: 602983 - DNA, 120 bp, Artificial Sequence
  ENSG00000174989_9 (sequence is synthesized)
gtactggcagatagctgcggaatttgaagttccgaaactggttcagtaccttgaaatagttccagaaaccagaaggtaccctgtggcagtagccgctgctggagatctgatgtacctgct

SEQ ID NO: 602984 - DNA, 120 bp, Artificial Sequence
  ENSG00000174989_10 (sequence is synthesized)
caaagccgaagactccgccagaaccctcctttacgcccacggcccgcctgtcacatgtctagacgtctcggccaaccaagttgcttttggtgtacagggtctgggatgggtgtacgaagg

SEQ ID NO: 602985 - DNA, 120 bp, Artificial Sequence
  ENSG00000174989_11 (sequence is synthesized)
aagcaagatcctggtgtatagcctggaagcaggacgccgcctcttgaagctgggtaacgttctccgtgacttcacgtgtgtcaacctcagcgacagccctcccaacctcatggtcagtgg

SEQ ID NO: 602986 - DNA, 120 bp, Artificial Sequence
  ENSG00000174989_12 (sequence is synthesized)
caacatggacgggagggtgaggatccacgacctccgcagtggtaacatcgccctgtcgctctccgcccatcagctcagggtctctgctgtgcagatggatgactggaagatcgtcagtgg

SEQ ID NO: 602987 - DNA, 120 bp, Artificial Sequence
  ENSG00000174989_13 (sequence is synthesized)
aggcgaggaaggcctggtgtccgtgtgggattatcggatgaaccagaagctgtgggaggtgtattccgggcacccggtgcagcacatctcattcagcagccacagcctcatcacggccaa

SEQ ID NO: 602988 - DNA, 120 bp, Artificial Sequence
  ENSG00000174989_14 (sequence is synthesized)
cgtgccttaccagacggtaatgcgaaacgccgacctggacagcttcactactcacaggagacaccgggggctgatccgcgcctatgagtttgcggtggaccagctggccttccagagccc

SEQ ID NO: 602989 - DNA, 120 bp, Artificial Sequence
  ENSG00000174989_15 (sequence is synthesized)
tctccctgtctgccgttcatcctgtgacgccatggccactcactactacgacctcgcactggcctttccctataaccatgtttagggatgtgcctcagttgggagcaaggagaaaaatgg

SEQ ID NO: 602990 - DNA, 120 bp, Artificial Sequence
  ENSG00000174989_16 (sequence is synthesized)
gaagaaccagttttatccatcttaaaacgccaggcacctcttcacaggtggtaaacatttaggggaagaaagcagcccagggtgccatgcctgacagcacgcatctccctgacccctgca

SEQ ID NO: 602991 - DNA, 120 bp, Artificial Sequence
  ENSG00000174989_17 (sequence is synthesized)
cttcccccagcgcctggggcaagctggcgtgtgccagggctcgagtcccacgtgctgccaactcaaacatagcctccttccccacccagctggccaccctggcctcagctccctcaggac

SEQ ID NO: 602992 - DNA, 120 bp, Artificial Sequence
  ENSG00000174989_18 (sequence is synthesized)
gcctcagggatctcgctgcgcggtcctatacggtccctgcttagccagcttctgtgtgtccgccctcccagctccagccctgcaggccgtcttttccgtctccagccccttacctctttt

SEQ ID NO: 602993 - DNA, 120 bp, Artificial Sequence
  ENSG00000174989_19 (sequence is synthesized)
cctccgagggcctttggatgtgcttgttcctggcctccaaggcaataacctccatgtccttttccctgtatttacttggggtgctcttctgtgacacttgccaccaccaccttccagtag

SEQ ID NO: 602994 - DNA, 120 bp, Artificial Sequence
  ENSG00000174989_20 (sequence is synthesized)
atacagtttagtcatcaatgactattttgcttactattgtgtctatgatatgtgatacaaagcaaatattttctaaatattcattgactaaacagccatcaagatgaaacaggacaggag

SEQ ID NO: 602995 - DNA, 120 bp, Artificial Sequence
  ENSG00000174989_21 (sequence is synthesized)
agaactgttcagtgtgatacagagctgccatttccaaagtattctggaagcaagccattgccttactcttgattttcaacagttctaaacagcaacagcatccacctaatataccttcag

SEQ ID NO: 602996 - DNA, 120 bp, Artificial Sequence
  ENSG00000174989_22 (sequence is synthesized)
aatatcaaagcgaaaactgatagaactacaaagagaaataaaatccattctcacggcaggcaaatcagtgagaaaaatgtaaagatctggaggatttacttagtatcgctaacaagctgg

SEQ ID NO: 602997 - DNA, 120 bp, Artificial Sequence
  ENSG00000174989_23 (sequence is synthesized)
atccagtagatgcgtatggaatttcaaatacacatagacgatgcacaaaaaaccaccctgtacgaaggccacaaagaacagctcagatgcacaaagattcacaccatacaggccaaatta

SEQ ID NO: 602998 - DNA, 120 bp, Artificial Sequence
  ENSG00000174989_24 (sequence is synthesized)
tagaatcccccaaccccaagacactgcaccctatgggctataccctcaggcagggccctgcttttctaggaattgactccaatgcagaatagtgagaaatcaacaaaaagcaaaataaga

SEQ ID NO: 602999 - DNA, 120 bp, Artificial Sequence
  ENSG00000174989_25 (sequence is synthesized)
caattccagacactcctgaatttacttggatttaaagaggttaataaaaacaaactataaactctctagactgggctgacagtaaaagcacagaatacaaaacccaggggatggggctgg

SEQ ID NO: 603000 - DNA, 120 bp, Artificial Sequence
  ENSG00000174989_26 (sequence is synthesized)
gaggggctgtgaggggctggcacctcagctcagaaaaggtagcagcaatcccaaagcagcagaaggcaggggttaaatcaggataaaaacagacatcagtggaatcgaaaaccaatagtt

SEQ ID NO: 603001 - DNA, 120 bp, Artificial Sequence
  ENSG00000174989_27 (sequence is synthesized)
acatcagtggaatcgaaaaccaatagttagttaatataaagccagaaggttttgttttttttcaggtggggtctcgctctgtcacctagactagactggagtgcaatggcctgatctcgg

SEQ ID NO: 603002 - DNA, 74 bp, Artificial Sequence
  ENSG00000174989_28 (sequence is synthesized)
ctgagtagctgggattacaggcgtccgctaccacaactggctaatttttacatttttagtagagacgggggata

SEQ ID NO: 603003 - DNA, 86 bp, Artificial Sequence
  ENSG00000174989_29 (sequence is synthesized)
acccagcccaaaagcagtttaaaaaaaaaaaagacaaaatatacaactcttgataaaacataaaggtacagtggtctatgaggaag

SEQ ID NO: 603004 - DNA, 120 bp, Artificial Sequence
  ENSG00000174989_30 (sequence is synthesized)
ctcttgataaaacataaaggtacagtggtctatgaggaagagaaaaggtacctgaggatgcagaagtacctaccacatgggaaccgtttgtccacactcattccagagaaaaccgagtcc

SEQ ID NO: 603005 - DNA, 120 bp, Artificial Sequence
  ENSG00000174989_31 (sequence is synthesized)
tctcagttgcacacgtgtacgtatcagtgggaagtgcttgccattactccaaagcctagaaccttcacgtcatgaaggttctggaaggtttttcagattgcttaagatacgcagccattc

SEQ ID NO: 603006 - DNA, 120 bp, Artificial Sequence
  ENSG00000174989_32 (sequence is synthesized)
catattcatctccaactacacaggggaacggagcagatagagctgcgactgggaagcgtcaccttcccgtccagagcgctttctttcagaccctgcctacctgcaggcagatggaccgga

SEQ ID NO: 603007 - DNA, 120 bp, Artificial Sequence
  ENSG00000174989_33 (sequence is synthesized)
gggttttctgcttcctttcaaccagataacttcctaagtggagatggcctgtaggtagcaaatgcaggattttgtttactttcatcatgtcatgtggtggtcagactgctcgctggtggc

SEQ ID NO: 603008 - DNA, 120 bp, Artificial Sequence
  ENSG00000174989_34 (sequence is synthesized)
ctcgctttagaaggttttcatcaagccccgccctttctctctcatagtcttaatgcgtctggaccactggggaaaatatttttcttttcaaaaagcagccccttcagtctgcgttcccag

SEQ ID NO: 603009 - DNA, 120 bp, Artificial Sequence
  ENSG00000174989_35 (sequence is synthesized)
ttcattttgcaggcgcattcgcccttcctagtttgcagcaattaaagataacggagtgtaaagtcattagacccagaattagagcagccagcagctggcccagtgtaaaaatgtcccaag

SEQ ID NO: 603010 - DNA, 120 bp, Artificial Sequence
  ENSG00000174989_36 (sequence is synthesized)
tgtagcccctcccaccgcagagcctgtttctaacgtacctgccattcgtggaagtcgcctgggttttgtaaaggagaattttttggactcaagctgtcatcttcaagcacgccaacttca

SEQ ID NO: 603011 - DNA, 120 bp, Artificial Sequence
  ENSG00000174989_37 (sequence is synthesized)
ggcagtgttttctactgcaaacctccacatcctggaatcaatcacactgacagggaaaggataaatgctcctttataagccaacatgtatccaaattaagcccccttacctttatccaga

SEQ ID NO: 603012 - DNA, 120 bp, Artificial Sequence
  ENSG00000174989_38 (sequence is synthesized)
ccctttcacaaacaagttctgagtttttagccaattgatcctctactttccttctttagtccctctcagggacgcctccatccccggctcccctaaaggtagaagatactcgagcatgct

SEQ ID NO: 603013 - DNA, 120 bp, Artificial Sequence
  ENSG00000174989_39 (sequence is synthesized)
gccaggggagctggatggtgaaacacctgaagatctcatatcgcctctcaaaacactgtcggacttgctttctgctttatgatgtccgtagttgttctaatattaaatgctttgaatttc

SEQ ID NO: 603014 - DNA, 120 bp, Artificial Sequence
  ENSG00000174989_40 (sequence is synthesized)
taaaatgcagattccagaatgttttctgtttattttctgccttaggcaacagagctgtagcgctgtggtcagcgggaaagcaggatggcatgccacagtagctgcagtaacaagaaactt

SEQ ID NO: 603015 - DNA, 120 bp, Artificial Sequence
  ENSG00000174989_41 (sequence is synthesized)
cagcctttttcctttttcgtgaccctccgtggtttagctgttctttatgacccttgtctacactgatactaatctcccaccggcacctcttccatgaagagcaaaaacttttgtcctgtc

SEQ ID NO: 603016 - DNA, 120 bp, Artificial Sequence
  ENSG00000174990_0 (sequence is synthesized)
agtggtcctgatcaaagtgagaacagacagcagggaacatcaccctcttcagactggagtcagtgggaacagacccaagatgttggggaggaacacttggaagacctcagctttctcctt

SEQ ID NO: 603017 - DNA, 120 bp, Artificial Sequence
  ENSG00000174990_1 (sequence is synthesized)
cttggttgagcagatgtgggcccctctctggagtcgttcgatgaggccagggcgatggtgttctcagcgttcctgtgcatggcaaaccagcaataacactttgcacccactctggacggt

SEQ ID NO: 603018 - DNA, 120 bp, Artificial Sequence
  ENSG00000174990_2 (sequence is synthesized)
cccggtctccgtgccagggggcacccggcagtctcctattaacatccagtggagggacagcgtctatgacccccagctgaagccactcagggtctcctatgaagcggcatcctgcctgta

SEQ ID NO: 603019 - DNA, 120 bp, Artificial Sequence
  ENSG00000174990_3 (sequence is synthesized)
catctggaacactggctacctcttccaggtggaatttgacgatgccaccgaggcatcaggaattagtggtgggcccttggaaaaccactacagactgaagcaatttcacttccactgggg

SEQ ID NO: 603020 - DNA, 120 bp, Artificial Sequence
  ENSG00000174990_4 (sequence is synthesized)
ggacggccacgcgtaccccgcagagctgcatttagttcactggaattctgtgaaataccaaaattacaaggaagctgtcgtgggagagaatggtttggctgtgataggcgtgtttttaaa

SEQ ID NO: 603021 - DNA, 120 bp, Artificial Sequence
  ENSG00000174990_5 (sequence is synthesized)
gctcggggcccatcatcagacgctgcagaggctggtggacatcttgccggaaataaaacataaggacgcgcgggcggccatgcgccccttcgacccctccactctgctgcccacctgctg

SEQ ID NO: 603022 - DNA, 120 bp, Artificial Sequence
  ENSG00000174990_6 (sequence is synthesized)
ggattactggacctacgcgggctcgctcaccaccccgccgctgaccgagtcggtcacctggatcatccagaaggagcccgttgaagtggccccaagccagctctctgcatttcgtactct

SEQ ID NO: 603023 - DNA, 120 bp, Artificial Sequence
  ENSG00000174990_7 (sequence is synthesized)
cctgttttctgcacttggtgaagaggagaagatgatggtgaacaactatcgcccacttcaacccttgatgaaccggaaggtctgggcgtccttccaggccactaatgagggcacaaggtc

SEQ ID NO: 603024 - DNA, 120 bp, Artificial Sequence
  ENSG00000174990_8 (sequence is synthesized)
ctagagacattaggtccacatgaatagcagaactgactttgaaggaaggaagcgttgtttcccaagtttcacaatgtgattgtacatgacttctgaaattaaaaagagagcatgaggtta

SEQ ID NO: 603025 - DNA, 120 bp, Artificial Sequence
  ENSG00000174990_9 (sequence is synthesized)
tcggttgctgacccagcccgagcctcggctatcttgtcggcaccaggggcacagcactccgtctgtaggacgcgcgggcggccatgcgccccttcgacccctccactctgctgcccacct

SEQ ID NO: 603026 - DNA, 120 bp, Artificial Sequence
  ENSG00000174990_10 (sequence is synthesized)
tcctgaaaaatggcctttgtcagttatttttaaaaactggtgctaatcctgagacacggagatactcccgggaagccatccgagcctggacacactgagatgaaaccacaaacacgccga

SEQ ID NO: 603027 - DNA, 120 bp, Artificial Sequence
  ENSG00000174990_11 (sequence is synthesized)
gaggaaaagacattgattccagccctcaaagcaacgggacaaaaaacaaacaggaggcttccctcccgccccaggggcagcggccggtgtctgcggctctgcgggaagggctctcactgt

SEQ ID NO: 603028 - DNA, 120 bp, Artificial Sequence
  ENSG00000174990_12 (sequence is synthesized)
gaccagattgtggcttctgattgtattgtagaatttctggcccagcttttaaggttcaaggcttcctccctttgcttttatcttattttcttgtttaataaagatacgcctgtgtgagaa

SEQ ID NO: 603029 - DNA, 120 bp, Artificial Sequence
  ENSG00000174990_13 (sequence is synthesized)
aggtggaatttgacgatgccaccgaggcatcaggactggctgccaggtcctacctggtgttttcccagcaccagctggtgtcactgtaagctgctttcatgcggaacgcctgctctccct

SEQ ID NO: 603030 - DNA, 120 bp, Artificial Sequence
  ENSG00000174990_14 (sequence is synthesized)
caaagtgctgagattacaggggtgagctactgcgccccaagaaatgacttcaaaaggaaaaatgtgagcaccaacgtaagctggtgtaatgtaacgtaattcccaccaatgtaagttggc

SEQ ID NO: 603031 - DNA, 120 bp, Artificial Sequence
  ENSG00000174990_15 (sequence is synthesized)
aggaatccttgctctgtatagaagggtcacattttctcatcactgcttgcaagtgtgacagcagtggcctcatggccttatctgggggaaagcacttccttccaagcaccatgaaggcct

SEQ ID NO: 603032 - DNA, 120 bp, Artificial Sequence
  ENSG00000174990_16 (sequence is synthesized)
cacgtgctgagacaagatggaagctcctagtctcccctgaggactgacacgtcctgtgcttctcggtctctcaggacgcgcgggcggccatgcgccccttcgacccctccactctgctgc

SEQ ID NO: 603033 - DNA, 120 bp, Artificial Sequence
  ENSG00000174992_0 (sequence is synthesized)
ataaaacatctggaagtttccagggggctgctttgcatctgaaactgtcagccccagaatgttgacagtcgctctcctagcccttctctgtgcctcagcctctggcaatgccattcaggc

SEQ ID NO: 603034 - DNA, 120 bp, Artificial Sequence
  ENSG00000174992_1 (sequence is synthesized)
caggtcttcctcctatagtggagagtatggaggtggtggtggaaagcgattctctcattctggcaaccagttggacggccccatcaccgccctccgggtccgagtcaacacatactacat

SEQ ID NO: 603035 - DNA, 120 bp, Artificial Sequence
  ENSG00000174992_2 (sequence is synthesized)
cgtaggtcttcaggtgcgctatggcaaggtgtggagcgactatgtgggtggtcgcaacggagacctggaggagatctttctgcaccctggggaatcagtgatccaggtttctgggaagta

SEQ ID NO: 603036 - DNA, 120 bp, Artificial Sequence
  ENSG00000174992_3 (sequence is synthesized)
caagtggtacctgaagaagctggtatttgtgacagacaagggccgctatctgtcttttgggaaagacagtggcacaagtttcaatgccgtccccttgcaccccaacaccgtgctccgctt

SEQ ID NO: 603037 - DNA, 120 bp, Artificial Sequence
  ENSG00000174992_4 (sequence is synthesized)
catcagtggccggtctggttctctcatcgatgccattggcctgcactgggatgtttaccccagtagctgcagcagatgctgagcctcctctccttggcaggggcactgtgatgaggagta

SEQ ID NO: 603038 - DNA, 120 bp, Artificial Sequence
  ENSG00000174992_5 (sequence is synthesized)
agaactcccttatcactaacccccatccaaatggctcaataaaaaaaatatggttaaggctagtctgtgtgggggcatctgtggctgggatatctgcctcctgacttagccggggacgtg

SEQ ID NO: 603039 - DNA, 120 bp, Artificial Sequence
  ENSG00000174992_6 (sequence is synthesized)
caaatctcacttctggctggctttggacatctgtctggaagatgggaagatgagggagaggtatgtaagaatcctgggctttgtgctataatttatcaagaggagatgagattctggctt

SEQ ID NO: 603040 - DNA, 120 bp, Artificial Sequence
  ENSG00000174992_7 (sequence is synthesized)
gcatcaacgctcttcaaggacagctccttggaacattgatccaaactggagtcatgggtctgagggcaaggcctagttgtggcttacaccaaaaccccagatgtcccactctccagctct

SEQ ID NO: 603041 - DNA, 120 bp, Artificial Sequence
  ENSG00000174992_8 (sequence is synthesized)
cctcacccctggtcctccccttgagaaagtggtgaactcacttgctgtgtgtgggtggccaggaccattagcctttgttctttcccagaacccacctgactcctgaaacttagctgaagt

SEQ ID NO: 603042 - DNA, 120 bp, Artificial Sequence
  ENSG00000174992_9 (sequence is synthesized)
ctgtgcccgaggaccctgccctgttaccaggcccagttcctcctcacctctacccatgagccccggtgtcctgctaagccctctcagatctgggattcctccttcctcaggaagccacca

SEQ ID NO: 603043 - DNA, 120 bp, Artificial Sequence
  ENSG00000174992_10 (sequence is synthesized)
ccttctcagcagtggaaaccctgcccacactatgctcttaggctttagccatcagaaggttacagtggactgcgggaggctgacactaggctgaactcattaaggaatgaatgggaggtg

SEQ ID NO: 603044 - DNA, 120 bp, Artificial Sequence
  ENSG00000174992_11 (sequence is synthesized)
agaagacacaggcagcaagaatcgagtgtttcaagaagtttggctgtggtttgccagaaataggcaagtcagttttcgggggtgtaaggaaaaagggttttgtgtctttttaaaatccta

SEQ ID NO: 603045 - DNA, 120 bp, Artificial Sequence
  ENSG00000174992_12 (sequence is synthesized)
tatgtagttggggaaagaaattttaagaagggaagaaaattaaaatgagtgaaggtatacgttagttttgtaaaagttatcaatatctggctgggcacagtgctcacacctgtaatccca

SEQ ID NO: 603046 - DNA, 79 bp, Artificial Sequence
  ENSG00000174992_13 (sequence is synthesized)
ggctgaggcatgagaatcacttgaatgctggaggcagaggttacaatgagttgagacagcacaactgcaccggaatgtt

SEQ ID NO: 603047 - DNA, 120 bp, Artificial Sequence
  ENSG00000174992_14 (sequence is synthesized)
ctaaaaaaaaaaggaatgttatcagtatcaaaatggagtaacatatgtcacatcctaacaaaatggaaccaacctgacacctaaattaagcattgcacctgataacaccatggaggactg

SEQ ID NO: 603048 - DNA, 120 bp, Artificial Sequence
  ENSG00000174992_15 (sequence is synthesized)
ggtggagaatcagcagacaatggcagggagaggcagtctgtggaccaagttcaggtgaaaggatcacccatcatgttgggcatcagatcaggcaggttcacacactacctgaggaagctg

SEQ ID NO: 603049 - DNA, 120 bp, Artificial Sequence
  ENSG00000174992_16 (sequence is synthesized)
gtctttgtgacagacaagagctgctctgcctcttgggaaacacaggcaccagttttagtgccatcttcttgcacccaaatgctgtcctttaactcatcagttacagtgctggatccctca

SEQ ID NO: 603050 - DNA, 120 bp, Artificial Sequence
  ENSG00000174992_17 (sequence is synthesized)
tcactgccaatacggggctagcaatatgtctgccccagtgaatgcagccgccacggagccccagcctcctctatggcaggggccctgtggtggggaatgaggacttctctatcattaacc

SEQ ID NO: 603051 - DNA, 120 bp, Artificial Sequence
  ENSG00000174992_18 (sequence is synthesized)
tccatgcagttggctcaagaaaaggatatggtagttgggcaagggggctcacacctgtaatcccagcacacttgtaatcccaggagggtcgcttgagcccaggagtttaaggccagcccg

SEQ ID NO: 603052 - DNA, 120 bp, Artificial Sequence
  ENSG00000174992_19 (sequence is synthesized)
ggcaacatagcaacctgtttgtaggcaaaatgaggagttgaagttccccgtaggatcttctagggctcaaccagccttcatgtgcagtgggactggcaagaaatctgtcatccctgttac

SEQ ID NO: 603053 - DNA, 120 bp, Artificial Sequence
  ENSG00000174992_20 (sequence is synthesized)
cactttgaaggtctcagtgtgtatgcaggtcctgaaaagttcaagtcccacctgaaacgcaacacagcatcatgctctgattcatcagtgattccctaatcaatgccattggcttgcatt

SEQ ID NO: 603054 - DNA, 120 bp, Artificial Sequence
  ENSG00000174992_21 (sequence is synthesized)
gggactatctatcccagcctatccagtgacttcagcagctgcagagccccagcctcttctttggcaggggcactgtggtgaggaggaaggattcccttatcacaaatctccatccaattg

SEQ ID NO: 603055 - DNA, 80 bp, Artificial Sequence
  ENSG00000174992_22 (sequence is synthesized)
aggaggaaggattcccttatcacaaatctccatccaattggttctataaacagatatggtggcccaatggagccacagct

SEQ ID NO: 603056 - DNA, 120 bp, Artificial Sequence
  ENSG00000174992_23 (sequence is synthesized)
gacatttaccagttcccaaaattaatacttttatactttcttatgcctgtctttactgcaatcactaaacataaattgtgaagatttcatgaacatttatcagttcccaaataatactct

SEQ ID NO: 603057 - DNA, 120 bp, Artificial Sequence
  ENSG00000174996_0 (sequence is synthesized)
gtgtttcgccccctccgacgccaccgaggtagcggcttcacctttaaggcggcgcgggggctgctgggaaggccggcgggatggaggcggcgggaccggctcgcgggtgcgggtccgggt

SEQ ID NO: 603058 - DNA, 120 bp, Artificial Sequence
  ENSG00000174996_1 (sequence is synthesized)
gaagcgggaggcagccagagtcggagccgggcccgagcaccaggcgcaggcccggcgcccgcctgcccgcaccctcgtcctcacagacgccacagccatggccatgatggtgtttccgcg

SEQ ID NO: 603059 - DNA, 120 bp, Artificial Sequence
  ENSG00000174996_2 (sequence is synthesized)
ggaggagaagctgagccaggatgagatcgtgctgggcaccaaggctgtcatccagggactggagactctgcgtggggagcatcgtgccctgctggctcctctggttgcacctgaggccgg

SEQ ID NO: 603060 - DNA, 120 bp, Artificial Sequence
  ENSG00000174996_3 (sequence is synthesized)
cgaagccgagcctggctcgcaggagcgctgcatcctcctgcgtcgctccctggaagccattgagcttgggctgggggaggcccaggtgatcttggcattgtcgagccacctgggggctgt

SEQ ID NO: 603061 - DNA, 120 bp, Artificial Sequence
  ENSG00000174996_4 (sequence is synthesized)
agaatcagagaagcagaagctgcgggcgcaggtgcggcgtctggtgcaggagaaccagtggctgcgtgaggagctggcggggacacagcagaagctgcagcgcagtgagcaggccgtggc

SEQ ID NO: 603062 - DNA, 120 bp, Artificial Sequence
  ENSG00000174996_5 (sequence is synthesized)
ccagctcgaggaggagaagcagcacttgctgttcatgagccagatccgcaagttggatgaagacgcctcccctaacgaggagaagggggacgtccccaaagacacactggatgacctgtt

SEQ ID NO: 603063 - DNA, 120 bp, Artificial Sequence
  ENSG00000174996_6 (sequence is synthesized)
ccccaatgaggatgagcagagcccagcccctagcccaggaggaggggatgtgtctggtcagcatgggggctacgagatcccggcccggctccgcaccctgcacaacctggtgatccaata

SEQ ID NO: 603064 - DNA, 120 bp, Artificial Sequence
  ENSG00000174996_7 (sequence is synthesized)
cgcctcacagggccgctacgaggtagctgtgccactctgcaagcaggcactcgaagacctggagaagacgtcaggccacgaccaccctgacgttgccaccatgctgaacatcctggcact

SEQ ID NO: 603065 - DNA, 120 bp, Artificial Sequence
  ENSG00000174996_8 (sequence is synthesized)
ggtctatcgggatcagaacaagtacaaggaggctgcccacctgctcaatgatgctctggccatccgggagaaaacactgggcaaggaccacccagccgtggctgcgacactaaacaacct

SEQ ID NO: 603066 - DNA, 120 bp, Artificial Sequence
  ENSG00000174996_9 (sequence is synthesized)
ggcagtcctgtatggcaagaggggcaagtacaaggaggctgagccattgtgcaagcgggcactggagatccgggagaaggtcctgggcaagtttcacccagatgtggccaagcagctcag

SEQ ID NO: 603067 - DNA, 120 bp, Artificial Sequence
  ENSG00000174996_10 (sequence is synthesized)
caacctggccctgctgtgccagaaccagggcaaagctgaggaggtggaatattactatcggcgggcactggagatctatgctacacgcctcgggcccgatgaccccaatgtggccaagac

SEQ ID NO: 603068 - DNA, 120 bp, Artificial Sequence
  ENSG00000174996_11 (sequence is synthesized)
caagaacaacctggcttcctgctacctgaagcagggcaagtaccaggatgcggagaccttgtacaaggagatcctcacccgcgctcatgagaaagagtttggctctgtcaatggggacaa

SEQ ID NO: 603069 - DNA, 120 bp, Artificial Sequence
  ENSG00000174996_12 (sequence is synthesized)
gccccacagtcaacaccaccctgcgcagcttgggggccctataccggcgccagggcaagctggaagccgcgcacacactagaggactgtgccagccgtaaccgcaagcagggtttggacc

SEQ ID NO: 603070 - DNA, 120 bp, Artificial Sequence
  ENSG00000174996_13 (sequence is synthesized)
ccgcaagccagaccaaggtggtagaactgctgaaagatggcagtggcaggcggggagaccgccgcagcagccgagacatggctgggggtgccgggcctcggtctgagtctgacctcgagg

SEQ ID NO: 603071 - DNA, 120 bp, Artificial Sequence
  ENSG00000174996_14 (sequence is synthesized)
acgtgggacctacagctgagtggaatggggatggcagtggctccttgaggcgcagcggttcctttgggaaactccgggatgccctgaggcgcagcagtgagatgctggtaaagaagctgc

SEQ ID NO: 603072 - DNA, 120 bp, Artificial Sequence
  ENSG00000174996_15 (sequence is synthesized)
aggggggcaccccccaggagccccctaaccccaggatgaagcgggccagttccctcaacttcctcaacaagagcgtggaagagccgacccagcctggaggcacaggtctctctgacagcc

SEQ ID NO: 603073 - DNA, 120 bp, Artificial Sequence
  ENSG00000174996_16 (sequence is synthesized)
gcactctcagctccagctccatggacctctcccgacgaagctccctggtgggctaatgctgaaggggcagccagtcaccagagcgcccacctggcacacccccctcaccccagccctgcg

SEQ ID NO: 603074 - DNA, 120 bp, Artificial Sequence
  ENSG00000174996_17 (sequence is synthesized)
catgggcctgctgcttgtcccgcctgtctctcccacagcccctgtcttttctgttcaatctcagggtaaccttctcccttgtcatctcagcctgagccctggaggctgggcctgcccact

SEQ ID NO: 603075 - DNA, 120 bp, Artificial Sequence
  ENSG00000174996_18 (sequence is synthesized)
ccagctccatcccttatttattccttccagcagggccctcttccctaggttcgggccagcaggaggtgccggctggagtctccaccatagactcagtggcctggcctccccagaccccag

SEQ ID NO: 603076 - DNA, 120 bp, Artificial Sequence
  ENSG00000174996_19 (sequence is synthesized)
agccaagaacactaagcactcgccggcccttcggcaccctcgccctccctcccgactcaacccggccgttgcttctgtatatagagaaataagttattggccgcgcgcctcccttcagtc

SEQ ID NO: 603077 - DNA, 120 bp, Artificial Sequence
  ENSG00000174996_20 (sequence is synthesized)
cacggtactacccgggcctcccctcgtccctcttctagtggtaccgcccaggccttaatcacccccattccgtgcggtggtatctcccaggctctacattctcgggagcggcgcctccca

SEQ ID NO: 603078 - DNA, 120 bp, Artificial Sequence
  ENSG00000174996_21 (sequence is synthesized)
agggggtcctgggaccttctcgcgctcctcctggcctctgagggatgcgtcctacccgcgccatcgccccgtggcccaggacggggacctccccttagtccgtcctcccaccgccgggcc

SEQ ID NO: 603079 - DNA, 80 bp, Artificial Sequence
  ENSG00000174996_22 (sequence is synthesized)
ccgcccaggcacggccgaccccgccccgggcaccgcccaccgagccatcctgcctcgcctccccccacgcctgcagcttc

SEQ ID NO: 603080 - DNA, 120 bp, Artificial Sequence
  ENSG00000174996_23 (sequence is synthesized)
cttctcgcgaggggcggcgacggtcccctggtggcaggaggggctccccctgttgcgggtgaggcggctgctctcatattttcagatgttgctgtagaaataaagacggtttaaatctga

SEQ ID NO: 603081 - DNA, 120 bp, Artificial Sequence
  ENSG00000174996_24 (sequence is synthesized)
gcgagccagataacagcggcactcacttctcgggtcttcgtgagcattaagtcaatgaacccagggcaccaaagcgcgcaacacgcagtaggcgctcagttagtggcgcctcgctctgta

SEQ ID NO: 603082 - DNA, 120 bp, Artificial Sequence
  ENSG00000174996_25 (sequence is synthesized)
ctccaggaagcccaaccttctccctgcgcctcagtttctcccgacgtcctcgatggcgccatggcgccacactaggcccggcgcccgcctgcccgcaccctcgtcctcacagacgccaca

SEQ ID NO: 603083 - DNA, 120 bp, Artificial Sequence
  ENSG00000174996_26 (sequence is synthesized)
ctcgatggccccgccccgtccccctcccgctggagccggcccggcccgcgctcctttaaggcagcgaacgggccaagagaagcgtgtttcgccccctccgacgccaccgaggcccggcgc

SEQ ID NO: 603084 - DNA, 120 bp, Artificial Sequence
  ENSG00000174996_27 (sequence is synthesized)
ctcgatggccccgccccgtccccctcccgctggagccggcccggcccgcgctcctttaaggcagcgaacgggccaagagaagcgtgtttcgccccctccgacgccaccgagacgccacag

SEQ ID NO: 603085 - DNA, 120 bp, Artificial Sequence
  ENSG00000174996_28 (sequence is synthesized)
tgacatcctagtgtgttagagcttcaagaacagttgtacgtgctgctgcttctcacatccccccagctctgtggtgagcagacatcacaattagctgtggagtcaccagcctggcttcca

SEQ ID NO: 603086 - DNA, 120 bp, Artificial Sequence
  ENSG00000174996_29 (sequence is synthesized)
gtgctgctctgccactagcttccctgacccttgggagagttctcttcctctccgaatcacctctgaaggaggcacatgcagacagccacaatggggccagtgcctgctttgctgatggta

SEQ ID NO: 603087 - DNA, 120 bp, Artificial Sequence
  ENSG00000174996_30 (sequence is synthesized)
ctggttatgcatcggggcctccactctgtacacagggacacaggctcagaggttaggcagcttgccccaggacacagagcctgaagtactggagctgggcctctaccccctctttctatg

SEQ ID NO: 603088 - DNA, 120 bp, Artificial Sequence
  ENSG00000174996_31 (sequence is synthesized)
gccttttcagggaaggcctcagggcgttgcgctggcctaggggaggggtcgtcgtgggcgtagcctggaaggactgggggccgcgtactcagcccctctagtgggagcgcctccgcaggg

SEQ ID NO: 603089 - DNA, 120 bp, Artificial Sequence
  ENSG00000174996_32 (sequence is synthesized)
tcggctcgtcgggaggatgggctccgcggcttggcctgccttttggggatggggctgtccgaggggctgggcccggatcgccggaggggccagggtctcctgcacaggagtgagccccca

SEQ ID NO: 603090 - DNA, 120 bp, Artificial Sequence
  ENSG00000174996_33 (sequence is synthesized)
cgttccccatacctgtcctggttagggggtccccggggaaacccggacactgagccgcctaagtcggcctgagccggtggtctggggccgaagcaggatccggctgcaccgcattgcgtc

SEQ ID NO: 603091 - DNA, 120 bp, Artificial Sequence
  ENSG00000174996_34 (sequence is synthesized)
tcccaggcctagacaagctaggcgcgccctctgtaggccaagcgcgggcacggtgcgggctgccggctgggggacctgggcacacgggagactcaggcgtccggggaccgcctgtttacc

SEQ ID NO: 603092 - DNA, 120 bp, Artificial Sequence
  ENSG00000174996_35 (sequence is synthesized)
gccagctgtggtggtgtgcacccgtagtcccagttactcaggaggctgagggggaaggaccacttgagcctggaaggtagaggctgcagtgagctgtgacggtgccatagcccttcggcc

SEQ ID NO: 603093 - DNA, 120 bp, Artificial Sequence
  ENSG00000174996_36 (sequence is synthesized)
caggtgacagagtgagacattgtcttaaattaaaaaaaaaaaaaaaaaagagagagcaagaagggaggttggaccctaggcaggaaggcaggaagagactggaaactaaggaaaggagtt

SEQ ID NO: 603094 - DNA, 120 bp, Artificial Sequence
  ENSG00000174996_37 (sequence is synthesized)
gcagaggctggggagaggggtgggggttgaggccaaggcctttggatacttttcctgcccctgtggctcctcatgccaactgagcatttgggacacatgccccttccctacctgggagct

SEQ ID NO: 603095 - DNA, 120 bp, Artificial Sequence
  ENSG00000174996_38 (sequence is synthesized)
gcagaaaggcaggggatgctgtggcccctcagcagaagtggggatggagtctttgggtggtccttcagccatctagcagagttctgtgggcaagcgctagccctgaggcagggagcagta

SEQ ID NO: 603096 - DNA, 120 bp, Artificial Sequence
  ENSG00000174996_39 (sequence is synthesized)
acctactggctgtggcagcagaggcttgagtacaacccagggagagacgaaggaaggggctagtagctcagggaaagcacagcaccccaactagcccttttggggttctcctgatcctag

SEQ ID NO: 603097 - DNA, 120 bp, Artificial Sequence
  ENSG00000174996_40 (sequence is synthesized)
aaggaaggaactggggactcccaagcctcctgggtttgggctttgcattatggtgtgtcgggggccttgaggagattctcccttgacaagcagagaaaagacctgcagctcctcactgta

SEQ ID NO: 603098 - DNA, 120 bp, Artificial Sequence
  ENSG00000174996_41 (sequence is synthesized)
gggccaggcctggcccttcactgggtgccagagcccaactaggcccaggctacagtcataggcgagggggtcgacaggcctccgacccttacctgggctggttgcacaggtgatcttggc

SEQ ID NO: 603099 - DNA, 120 bp, Artificial Sequence
  ENSG00000174996_42 (sequence is synthesized)
atgcgtgctgccaagcttccctccagcatgcctcttcatccagcaacagttcctggctctgtctcaggcctactttgggctggacaacggggagacacgaggggaacccagcctctcctg

SEQ ID NO: 603100 - DNA, 120 bp, Artificial Sequence
  ENSG00000174996_43 (sequence is synthesized)
ggggtggacgtgtaaacggccagtgctaacaccgtcactgtggagatggacgggagtgtcagggcaccagggtgtggccttgggtcagaactgccattgcctctgcccagctcagggatt

SEQ ID NO: 603101 - DNA, 120 bp, Artificial Sequence
  ENSG00000174996_44 (sequence is synthesized)
ccggctgcctctgccaggtcagaccccttcaggccagggaggcacagactggcagcagcacagggctgagccacctgccccctctgcccacagcctggaggcacaggtctctctgacagc

SEQ ID NO: 603102 - DNA, 120 bp, Artificial Sequence
  ENSG00000175003_0 (sequence is synthesized)
acacttggacagcaaactgatttcaaaccactccttttcaaagatctctgagggagacattgcacctggccactgcagcccagagcaggtctggccacggccatgagcatgctgagccat

SEQ ID NO: 603103 - DNA, 120 bp, Artificial Sequence
  ENSG00000175003_1 (sequence is synthesized)
catgcccaccgtggatgacattctggagcaggttggggagtctggctggttccagaagcaagccttcctcatcttatgcctgctgtcggctgcctttgcgcccatctgtgtgggcatcgt

SEQ ID NO: 603104 - DNA, 120 bp, Artificial Sequence
  ENSG00000175003_2 (sequence is synthesized)
cttcctgggtttcacacctgaccaccactgccagagtcctggggtggctgagctgagccagcgctgtggctggagccctgcggaggagctgaactatacagtgccaggcctggggcccgc

SEQ ID NO: 603105 - DNA, 120 bp, Artificial Sequence
  ENSG00000175003_3 (sequence is synthesized)
gggcgaggccttccttggccagtgcaggcgctatgaagtggactggaaccagagcgccctcagctgtgtagaccccctggctagcctggccaccaacaggagccacctgccgctgggtcc

SEQ ID NO: 603106 - DNA, 120 bp, Artificial Sequence
  ENSG00000175003_4 (sequence is synthesized)
ctgccaggatggctgggtgtatgacacgcccggctcttccatcgtcactgagttcaacctggtgtgtgctgactcctggaagctggacctctttcagtcctgtttgaatgcgggcttctt

SEQ ID NO: 603107 - DNA, 120 bp, Artificial Sequence
  ENSG00000175003_5 (sequence is synthesized)
gtttggctctctcggtgttggctactttgcagacaggtttggccgtaagctgtgtctcctgggaactgtgctggtcaacgcggtgtcgggcgtgctcatggccttctcgcccaactacat

SEQ ID NO: 603108 - DNA, 120 bp, Artificial Sequence
  ENSG00000175003_6 (sequence is synthesized)
gtccatgctgctcttccgcctgctgcagggcctggtcagcaagggcaactggatggctggctacaccctaatcacagaatttgttggctcgggctccagaagaacggtggcgatcatgta

SEQ ID NO: 603109 - DNA, 120 bp, Artificial Sequence
  ENSG00000175003_7 (sequence is synthesized)
ccagatggccttcacggtggggctggtggcgcttaccgggctggcctacgccctgcctcactggcgctggctgcagctggcagtctccctgcccaccttcctcttcctgctctactactg

SEQ ID NO: 603110 - DNA, 120 bp, Artificial Sequence
  ENSG00000175003_8 (sequence is synthesized)
gtgtgccggagtcccctcggtggctgttatcacaaaaaagaaacactgaagcaataaagataatggaccacatcgctcaaaagaatgggaagttgcctcctgctgatttaaagatgcttt

SEQ ID NO: 603111 - DNA, 120 bp, Artificial Sequence
  ENSG00000175003_9 (sequence is synthesized)
ccctcgaagaggatgtcaccgaaaagctgagcccttcatttgcagacctgttccgcacgccgcgcctgaggaagcgcaccttcatcctgatgtacctgtggttcacggactctgtgctct

SEQ ID NO: 603112 - DNA, 120 bp, Artificial Sequence
  ENSG00000175003_10 (sequence is synthesized)
atcaggggctcatcctgcacatgggcgccaccagcgggaacctctacctggatttcctttactccgctctggtcgaaatcccgggggccttcatagccctcatcaccattgaccgcgtgg

SEQ ID NO: 603113 - DNA, 120 bp, Artificial Sequence
  ENSG00000175003_11 (sequence is synthesized)
gccgcatctaccccatggccatgtcaaatttgttggcgggggcagcctgcctcgtcatgatttttatctcacctgacctgcactggttaaacatcataatcatgtgtgttggccgaatgg

SEQ ID NO: 603114 - DNA, 120 bp, Artificial Sequence
  ENSG00000175003_12 (sequence is synthesized)
gaatcaccattgcaatacaaatgatctgcctggtgaatgctgagctgtaccccacattcgtcaggaacctcggagtgatggtgtgttcctccctgtgtgacataggtgggataatcaccc

SEQ ID NO: 603115 - DNA, 120 bp, Artificial Sequence
  ENSG00000175003_13 (sequence is synthesized)
ccttcatagtcttcaggctgagggaggtctggcaagccttgcccctcattttgtttgcggtgttgggcctgcttgccgcgggagtgacgctacttcttccagagaccaagggggtcgctt

SEQ ID NO: 603116 - DNA, 120 bp, Artificial Sequence
  ENSG00000175003_14 (sequence is synthesized)
tgccagagaccatgaaggacgccgagaaccttgggagaaaagcaaagcccaaagaaaacacgatttaccttaaggtccaaacctcagaaccctcgggcacctgagagagatgttttgcgg

SEQ ID NO: 603117 - DNA, 120 bp, Artificial Sequence
  ENSG00000175003_15 (sequence is synthesized)
cgatgtcgtgttggagggatgaagatggagttatcctctgcagaaattcctagacgccttcacttctctgtattcttcctcatacttgcctacccccaaattaatatcagtcctaaagaa

SEQ ID NO: 603118 - DNA, 120 bp, Artificial Sequence
  ENSG00000175003_16 (sequence is synthesized)
ctgtcctggagggcagaggcagaaaaggtggaagaggtagaagaagagacaggcacactcggtgtaaattttattgaaaaaaaaaaatctgtaagtggacccgcgcagttcaaacccatg

SEQ ID NO: 603119 - DNA, 120 bp, Artificial Sequence
  ENSG00000175003_17 (sequence is synthesized)
ttgttcgagggttagttgcatttgatatttgctgagtgattcatcagaaactttgaatttgtcttatgaaaatgtagtaggagaaaactctgtgaaacagcccagggataccgagtttga

SEQ ID NO: 603120 - DNA, 120 bp, Artificial Sequence
  ENSG00000175003_18 (sequence is synthesized)
gcaatacaaatgatctgcctggtgaatgctgagctgtaccccacattcgtcagaaaagcaaagcccaaagaaaacacgatttaccttaaggtccaaacctcagaaccctcgggcacctga

SEQ ID NO: 603121 - DNA, 120 bp, Artificial Sequence
  ENSG00000175018_0 (sequence is synthesized)
acccgcaccttcccctcctggaagaggctgagaagtaaagatcaggaacaaggaggaggaggagcttcccagacgtgtagagcttatgaagtttaggaagcagcttcccagacatgtaga

SEQ ID NO: 603122 - DNA, 120 bp, Artificial Sequence
  ENSG00000175018_1 (sequence is synthesized)
gcttatggagaggtgagggagccaatctcagccacattcagcttcctggagagaatgaccaaagggcgacgcttcaacccaccttcagacaaggatgggagatggttccctcacatcggg

SEQ ID NO: 603123 - DNA, 120 bp, Artificial Sequence
  ENSG00000175018_2 (sequence is synthesized)
ctaacgcaaaagacaccagaatccatcaccagtgctacgtcaaaagagccccagagtccacacttgcctcggcaagcggaggggaagctgccgcccatatacaaagtccgggagaagcaa

SEQ ID NO: 603124 - DNA, 120 bp, Artificial Sequence
  ENSG00000175018_3 (sequence is synthesized)
tccagataagaggcaacatgtttcaagaaattttaatctctgggcatgtgactatgttccatcttgtcttgatggcttttcaaataaccaaatatcatacgtatataaagaagccatggt

SEQ ID NO: 603125 - DNA, 120 bp, Artificial Sequence
  ENSG00000175018_4 (sequence is synthesized)
ggtctcaagcttcagacgctttccacgatgctataaagagatatggaacgcttttacatttcttcctgagagaagctatacagaggttttgaaaaagaagcccaaagtaaggttcactgt

SEQ ID NO: 603126 - DNA, 120 bp, Artificial Sequence
  ENSG00000175018_5 (sequence is synthesized)
tgacaaaaaggttgtttcttcactggagtcctaatcctcccagaagatttttgatgaattttgtaatactggtatttcatcagacatcctaaaagtatatgttttctgatccagcaccac

SEQ ID NO: 603127 - DNA, 120 bp, Artificial Sequence
  ENSG00000175018_6 (sequence is synthesized)
tatttaatttttaaagtacttttatgatttttataaggtcaaaaaacattcaaatccttgtgaaatgaatttgtgatgacatacgcatgtgtaaataaacttttcagatggccacattta

SEQ ID NO: 603128 - DNA, 120 bp, Artificial Sequence
  ENSG00000175018_7 (sequence is synthesized)
tgactccgaaagaatgacagcaacggacccacagggagaaccagacaagagacaagagttctatgagccggtgaggacccagtccattcctcatccaggcctgagaactaatgcacccct

SEQ ID NO: 603129 - DNA, 120 bp, Artificial Sequence
  ENSG00000175018_8 (sequence is synthesized)
ccttgcagtgtgagctctttgggagcaagtttctgtcacccattccccagagtcctgactaatagaatgtgtattagttgggaagaaaaggaccttttgtcttagcctagctagttagta

SEQ ID NO: 603130 - DNA, 120 bp, Artificial Sequence
  ENSG00000175018_9 (sequence is synthesized)
accaccaggatttattcagcattcttggaaaaataaatttccagctatggagaaatcctcttattctgcttgcctgtgtgggcgcaggtattaatagggctatctccctggcaggaagaa

SEQ ID NO: 603131 - DNA, 80 bp, Artificial Sequence
  ENSG00000175029_0 (sequence is synthesized)
cccggaggagccggcggcggcccgaggagcgagggaccgaaccgggagccatgccgcgctgagggggggccgcacagccg

SEQ ID NO: 603132 - DNA, 120 bp, Artificial Sequence
  ENSG00000175029_1 (sequence is synthesized)
aggggcgggagacgccgccgccgccgcctccagggtgggcgcctttcgccgtggacgccgaccgtccgggacgagggtttcatcaccttaaatggttttgaaccaatgaaggtgtattcc

SEQ ID NO: 603133 - DNA, 120 bp, Artificial Sequence
  ENSG00000175029_2 (sequence is synthesized)
cttaaaaagacggacagcccatcgtgtgaactatagagtttgtggacagatttatattgggttcatagtggcgtcatgcacgcagactcctgcaagttcccctaagttcttagaggactg

SEQ ID NO: 603134 - DNA, 120 bp, Artificial Sequence
  ENSG00000175029_3 (sequence is synthesized)
ctttgccttttgatctgagagttgcaaagttccataaagaatggcccttgtggataagcacaaagtcaagagacagcgattggacagaatttgtgaaggtatccgcccccagatcatgaa

SEQ ID NO: 603135 - DNA, 120 bp, Artificial Sequence
  ENSG00000175029_4 (sequence is synthesized)
cggccccctgcacccccgccccctggtggcgctgctggacggccgcgactgcactgtggagatgcccatcctgaaggacctggccactgtggccttctgtgacgcgcagtcgacgcagga

SEQ ID NO: 603136 - DNA, 120 bp, Artificial Sequence
  ENSG00000175029_5 (sequence is synthesized)
aatccacgagaaggttctaaacgaagccgtgggcgccatgatgtaccacaccatcaccctcaccagggaggacctggagaagttcaaggccctgagagtgatcgtgcggataggcagtgg

SEQ ID NO: 603137 - DNA, 120 bp, Artificial Sequence
  ENSG00000175029_6 (sequence is synthesized)
ctatgacaacgtggacatcaaggctgccggcgagctcggaattgccgtgtgcaacatcccgtctgcagccgtggaagagacagcggactctaccatctgccacatcctcaacctgtaccg

SEQ ID NO: 603138 - DNA, 120 bp, Artificial Sequence
  ENSG00000175029_7 (sequence is synthesized)
gaggaacacgtggctgtaccaggcactgcgggaaggcacgcgggttcagagcgtggagcagatccgcgaggtggcctcgggagcggcccgcatccgtggggagacgctgggcctcattgg

SEQ ID NO: 603139 - DNA, 120 bp, Artificial Sequence
  ENSG00000175029_8 (sequence is synthesized)
ctttggtcgcacggggcaggcggttgcagttcgagccaaggcctttggattcagcgtcatattttatgacccctacttgcaggatgggatcgagcggtccctgggcgtgcagagggtcta

SEQ ID NO: 603140 - DNA, 120 bp, Artificial Sequence
  ENSG00000175029_9 (sequence is synthesized)
caccctgcaggatttgctgtatcagagcgactgcgtctccttgcactgcaatctcaacgaacataaccaccacctcatcaatgactttaccataaagcagatgaggcagggagcattcct

SEQ ID NO: 603141 - DNA, 120 bp, Artificial Sequence
  ENSG00000175029_10 (sequence is synthesized)
tgtgaacgcagcccgtggcggcctggtggacgagaaagccttagcacaagccctcaaggagggcaggatacgaggggcagccctcgacgtgcatgagtcagagcccttcagctttgctca

SEQ ID NO: 603142 - DNA, 120 bp, Artificial Sequence
  ENSG00000175029_11 (sequence is synthesized)
gggtccgttgaaagatgccccgaatctcatctgcactcctcacactgcctggtacagtgagcaggcgtcactggagatgagggaggcagctgccaccgagatccgccgagccatcacagg

SEQ ID NO: 603143 - DNA, 120 bp, Artificial Sequence
  ENSG00000175029_12 (sequence is synthesized)
tcgcatcccagaaagcttaagaaattgtgtgaacaaggaattctttgtcacatcagcgccttggtcagtaatagaccagcaagcaattcatcctgagctcaatggtgccacatacagata

SEQ ID NO: 603144 - DNA, 120 bp, Artificial Sequence
  ENSG00000175029_13 (sequence is synthesized)
tccgccaggcatcgtgggtgtggctccaggaggacttcctgcagccatggaagggatcatccctggaggcatcccagtgactcacaacctcccgacagtggcacatccttcccaagcgcc

SEQ ID NO: 603145 - DNA, 120 bp, Artificial Sequence
  ENSG00000175029_14 (sequence is synthesized)
ctctcccaaccagcccacaaaacacggggacaatcgagagcaccccaacgagcaatagcagagaatgccagaaggtaatcactcagatacacttgggaccaagagacagtgaaaaataga

SEQ ID NO: 603146 - DNA, 120 bp, Artificial Sequence
  ENSG00000175029_15 (sequence is synthesized)
tgaactaagagaaaaagaatcggatggtctttgtaactgattctggacatatgcatcattgatgttgcagtgttgaaactacaagagctagaaaactgaagatgtcgtctgcttacggaa

SEQ ID NO: 603147 - DNA, 120 bp, Artificial Sequence
  ENSG00000175029_16 (sequence is synthesized)
gcgctgaaagactaggatgtgatttattaacgaccaacttctgttattgtgtgttaagtttttcatctgtgcatcaaatcacaaaaagaataaatagagctttttcctttatcagtccct

SEQ ID NO: 603148 - DNA, 120 bp, Artificial Sequence
  ENSG00000175029_17 (sequence is synthesized)
tgggcacagcaggtcctgaacaccctgctctacaatgttgcatcaagagttcaaacaacaaaataaaaaatattaagaggaaatccccatcctgtgacttgagtcccttaagtctacagg

SEQ ID NO: 603149 - DNA, 120 bp, Artificial Sequence
  ENSG00000175029_18 (sequence is synthesized)
ggctggtgacctctttttgctaataggaaaatcacattactacaaaatggggagaaaactgtttgcctgtggtagacacctgcacgcataggattgaagacagtacaggctgctgtacag

SEQ ID NO: 603150 - DNA, 120 bp, Artificial Sequence
  ENSG00000175029_19 (sequence is synthesized)
agaagcgcctctcacatctgaactgcatactgagcgggcaagtcggttgtaagttcagtaaaaccctctgatgatgcaaaaaaaaaaaaaaaagtattaagtttcacaagctgtttgtac

SEQ ID NO: 603151 - DNA, 120 bp, Artificial Sequence
  ENSG00000175029_20 (sequence is synthesized)
tcaaatatattttctcagtttcagatcctctgctattttattgagtggaaagtcttgagctaaaagggttcaagaagaataatgttgcatttccttatgtctcaggaaacactttttatg

SEQ ID NO: 603152 - DNA, 120 bp, Artificial Sequence
  ENSG00000175029_21 (sequence is synthesized)
gtaacttgtcagattgtctatgaacaaacccacttttttagacattgataaagtcttcttttcttcacgtgatattttatacaagaacacttcagatgtattagatgtgactgattttaa

SEQ ID NO: 603153 - DNA, 120 bp, Artificial Sequence
  ENSG00000175029_22 (sequence is synthesized)
caaatcctattagatttgtatcaactagttacatgttctattcatagtcttttgtgaatcattgcctttttgtttaaaaagatggcctattttgagcctttgtataggtacattcctgtt

SEQ ID NO: 603154 - DNA, 120 bp, Artificial Sequence
  ENSG00000175029_23 (sequence is synthesized)
tttgtgacaaaagaaaaactttaaaattgtcccaaacagaaaaataatggctatcagaagtatgttttgttttagtgtgagttaccgttactgtatttgtttattgtaaaggtggacatt

SEQ ID NO: 603155 - DNA, 120 bp, Artificial Sequence
  ENSG00000175029_24 (sequence is synthesized)
tagcgttcagtgcagttttcaataaaaagtaattaaaatttgttaagttctgaaattcaagtacatctcactaatgtaaatgttctctacttgagatgtttaaggcaattgcattgtcaa

SEQ ID NO: 603156 - DNA, 120 bp, Artificial Sequence
  ENSG00000175029_25 (sequence is synthesized)
ttagccaatttccagctcttgttactacagggttccataaccagactcaagaccgctgacaattaattacctgtgataacaaaaagtttaattgaaaaatcaaaacctcacacaagtcca

SEQ ID NO: 603157 - DNA, 120 bp, Artificial Sequence
  ENSG00000175029_26 (sequence is synthesized)
tcattatcacgtcatgccatccttaagatgcaatggtgggttagtgctaaatcaattcaaaaaaaaacaaagttgctcaacttttagagttctgactttaatctaccccaaagcaaaatg

SEQ ID NO: 603158 - DNA, 120 bp, Artificial Sequence
  ENSG00000175029_27 (sequence is synthesized)
acctggacctggttcaagggagggaagtgaaccttgaaactgttttgccaataacctaacaaacaaaatgatatttacaaagaagtgttgcaaatagtcccatgagttaagagcttgatt

SEQ ID NO: 603159 - DNA, 120 bp, Artificial Sequence
  ENSG00000175029_28 (sequence is synthesized)
ctcttccttatacttcccttcccaattaaaacaaaacaagaaaatcatggtgtcttaaagcctttggcttgcctggccttgtctgctcactcattttaaggtggtggccccatcccaact

SEQ ID NO: 603160 - DNA, 120 bp, Artificial Sequence
  ENSG00000175029_29 (sequence is synthesized)
ctaccataaaagtgtctattaacacaagctcacatggagagagacggcgctcatagttactgacctattaccccagggaacaaaaaggtagtttaacgtcttcgtaaccactcatcaaag

SEQ ID NO: 603161 - DNA, 120 bp, Artificial Sequence
  ENSG00000175029_30 (sequence is synthesized)
aggcaatgaaatatgcgtgaaaaggaggccaagcgcacacagaatatcttaccttcacgaatatgtgaagaagtctgggacacgatgaacctaagagtcaaaaacataaaaaggcaggtc

SEQ ID NO: 603162 - DNA, 120 bp, Artificial Sequence
  ENSG00000175029_31 (sequence is synthesized)
tgaatccatggtccacctgggttttaattattagatcttggtcgcccaaacaaaaatttatatatatatatataaatttgaccccaaggaagaacaagtcaaaacaaaatgccacgctct

SEQ ID NO: 603163 - DNA, 120 bp, Artificial Sequence
  ENSG00000175029_32 (sequence is synthesized)
gtttgctctagaaaaagaaccatcaagtccacagagtgcaggtatgacttactctccagagtcagtcattaatgtctgtcacctagccacgtataatcatctttgaaaaaggactatatt

SEQ ID NO: 603164 - DNA, 120 bp, Artificial Sequence
  ENSG00000175029_33 (sequence is synthesized)
ctatcttgggacaataattatggctgttttaatagttcaagagcataatatagcattgatttaccaaaatttttggcctttaacagccagtctatgaaaaccatttagagccccattcct

SEQ ID NO: 603165 - DNA, 120 bp, Artificial Sequence
  ENSG00000175029_34 (sequence is synthesized)
gtctgtagcctaggaaatggaaccatctttaattctttcccacagggaagaatgctgcacctatcacactatgtggtcagggtcactgattgataataaataaataaataatagagcgct

SEQ ID NO: 603166 - DNA, 120 bp, Artificial Sequence
  ENSG00000175029_35 (sequence is synthesized)
caggggaaacaacactcaccagaccacaacacacagtagaagctaagtgctgagcgtgtactctggacaacgctggctgcaatgcagactgcaatggctacatgcttttccctctaacaa

SEQ ID NO: 603167 - DNA, 120 bp, Artificial Sequence
  ENSG00000175029_36 (sequence is synthesized)
ttctctttggctttttcaattgggagggcagattttgcttaacaggcaactagaacaggatctctgcccactaaaaaattatccctatacatagagaaattactacagatgctaagtagt

SEQ ID NO: 603168 - DNA, 120 bp, Artificial Sequence
  ENSG00000175029_37 (sequence is synthesized)
cagaatgctaacattttctacaaacttgattacttattggccaaaatgaaagcaaacagccaatttttaacaacacattcaccacttgaaacaaacagcagcatttacattatatcaaag

SEQ ID NO: 603169 - DNA, 120 bp, Artificial Sequence
  ENSG00000175029_38 (sequence is synthesized)
attcatttctacagaatcgtactaaaaaatcatttttcctgcaagatttagcatgcagcaaaaaatgatcttttcatcctgggaacacctttttactgagttttcggggggaaagaacta

SEQ ID NO: 603170 - DNA, 120 bp, Artificial Sequence
  ENSG00000175029_39 (sequence is synthesized)
aagacatgacagttttgtgggtatttttctatttttagtattctggcagcaaatttgaggttgtacacatttcattatcaactaaacaaaacaagaagcaagcaaatactttaaggtttt

SEQ ID NO: 603171 - DNA, 78 bp, Artificial Sequence
  ENSG00000175029_40 (sequence is synthesized)
gtgtcgtctttccaaattcctggccacatcaatagtctagaaagtgcttatcaggacaccaaatatttctgtgttcct

SEQ ID NO: 603172 - DNA, 120 bp, Artificial Sequence
  ENSG00000175029_41 (sequence is synthesized)
agaaagtgcttatcaggacaccaaatatttctgtgttcctgagataggtctgaaatttttacccagtattgaatgtatacctgaagtggtcaaataatacttcttataaaaaagtttttc

SEQ ID NO: 603173 - DNA, 120 bp, Artificial Sequence
  ENSG00000175029_42 (sequence is synthesized)
tacctaagattatagttttaactttaaattaaagaatggccacaattaaccaacatgcaaaaattctcagactaaacactgagaaattcttcatacaatgcatttgccaccttattgcat

SEQ ID NO: 603174 - DNA, 120 bp, Artificial Sequence
  ENSG00000175029_43 (sequence is synthesized)
ttttaaaatctttattctgtagtgaattggtattcccaatctgcctaagcaaaggcatgcccttctaacaagatttgcttagagcagaggtgatagaaggaagaatccgaagaccctctg

SEQ ID NO: 603175 - DNA, 120 bp, Artificial Sequence
  ENSG00000175029_44 (sequence is synthesized)
gcatggcaatctgggagcagcacattgttgatggagtccaagtgagcacatttcacacaattcatttagtgacaagtgggcttgctcccttttcatccaggaaaaaaactactcacagac

SEQ ID NO: 603176 - DNA, 120 bp, Artificial Sequence
  ENSG00000175029_45 (sequence is synthesized)
cactgcccagaatctggaataagaaccctcattttaaggtattcttcccaacaaataaatatctaaatattgaaagggggcatatcagaaaacttaaagacacaataaccaaaaccaaaa

SEQ ID NO: 603177 - DNA, 120 bp, Artificial Sequence
  ENSG00000175029_46 (sequence is synthesized)
ccctcttcaaaacaagtaagcaatgtctgtatttagttcactctaaaacattcttagcttttcttgcagtttgttcctaaaagatttgattgggcacaagaggaacgaaattattaataa

SEQ ID NO: 603178 - DNA, 120 bp, Artificial Sequence
  ENSG00000175029_47 (sequence is synthesized)
aataaaagcttatttttgttttgctgtggataatcggtacaaaacgtttccagatctgagacttagatggatcttttaaggtgaaagtagaatgccaggttctactgaaataatatctga

SEQ ID NO: 603179 - DNA, 120 bp, Artificial Sequence
  ENSG00000175029_48 (sequence is synthesized)
aaggaacaaagagccatttgccatgtgctttttctaagtgcccatgctggaaaaaattttctcaataatatgaagatgctggtacaacttttcctattaaacaatgtcttacacaaccac

SEQ ID NO: 603180 - DNA, 120 bp, Artificial Sequence
  ENSG00000175029_49 (sequence is synthesized)
atgcgttacatttatagacagatttacaatttggaaggaaaaaaagttctgtcttaataaaattagttttttttacaaactgtagtccaactaaagttctctgtctcctcacgcagcaga

SEQ ID NO: 603181 - DNA, 120 bp, Artificial Sequence
  ENSG00000175029_50 (sequence is synthesized)
ggcattatctccataaggtgtgtgtggtccaggaaaacacttccccgagcagatcctgccagatttggttcattccatgatgtcgactctgcttggagcaccacactaactttagggtca

SEQ ID NO: 603182 - DNA, 120 bp, Artificial Sequence
  ENSG00000175029_51 (sequence is synthesized)
ttacagatctgatgccttggtcttctgctgtttgattttttttttcattcatcttcatcatcctcatcttcctctccatcagacagggatgtacacggccggatctgtcggtagcggtca

SEQ ID NO: 603183 - DNA, 120 bp, Artificial Sequence
  ENSG00000175029_52 (sequence is synthesized)
agccatttttctaccatctgagtgaccagggggtgatttcgccgccgagaactcttctgcatggcaaccagaactcccccctccgtcacacagcagtccagccactccctgagcagtttt

SEQ ID NO: 603184 - DNA, 120 bp, Artificial Sequence
  ENSG00000175029_53 (sequence is synthesized)
tcttgctgttcctcattacctagcttttggaggaatatgaagacaaagggaaaatcatacaacagatcagagacttggtaggaatgtgacatggaaacctacagctggtatgctaactca

SEQ ID NO: 603185 - DNA, 120 bp, Artificial Sequence
  ENSG00000175029_54 (sequence is synthesized)
tgaaaaggccaaagcaatcaacttttcacatggttttgacctcttggaagttttgtgattaaagtccagtttgctctggttaaatttaaaaagacataaatgggaaatttctcagaaaaa

SEQ ID NO: 603186 - DNA, 120 bp, Artificial Sequence
  ENSG00000175029_55 (sequence is synthesized)
aactaaagaggagcacactagagggtaatttgttagataaaataaaaaacaaatgtcctaataaactgatcctggcaagccacagcttcaaacacatgacaaggtaagtttacttagtca

SEQ ID NO: 603187 - DNA, 120 bp, Artificial Sequence
  ENSG00000175029_56 (sequence is synthesized)
attatgtacaagctgaaattatacaagttacggtctatgaactttttttcttcatgttgtgattataaacgttttataattactagtatattaaataaaagaccaatacttttataagaa

SEQ ID NO: 603188 - DNA, 120 bp, Artificial Sequence
  ENSG00000175029_57 (sequence is synthesized)
cgcctcccgcctagctcctgcgcagccagcgggtaccgggagctgcggccagcgccgcttctttcctttccttttctctccgttttccttctccttccccggaggagaaaacaaataaag

SEQ ID NO: 603189 - DNA, 120 bp, Artificial Sequence
  ENSG00000175029_58 (sequence is synthesized)
aagagcaaatagccgggaggcgctcggcatccaggacgttccctcccccgatccaagttggaattagcatcctctcggggggtttcatcaccttaaatggttttgaaccaatgaaggtgt

SEQ ID NO: 603190 - DNA, 120 bp, Artificial Sequence
  ENSG00000175029_59 (sequence is synthesized)
aaatccccgctctgcgtgctcgtggtggaggctgctggcaatggcctacgtcgtcataccgggcttccttgccctgtccgggggtttcatcaccttaaatggttttgaaccaatgaaggt

SEQ ID NO: 603191 - DNA, 120 bp, Artificial Sequence
  ENSG00000175029_60 (sequence is synthesized)
gtagtggggacccctcgggaaaggcaaccccagcctgctcttgaggagccagggcaggcagggccagcaccctccccgtgttgcacggggtaggagatcggagtcaagacccatcaggca

SEQ ID NO: 603192 - DNA, 120 bp, Artificial Sequence
  ENSG00000175029_61 (sequence is synthesized)
accagaagctccggcgacactgagattataagggagccagggctttgcggatgatttgctccagatggaattaatgctgcagttgttagaagagcatctctggctccgcttctgaagcta

SEQ ID NO: 603193 - DNA, 120 bp, Artificial Sequence
  ENSG00000175029_62 (sequence is synthesized)
cgaagaggtggccctgcctgcgctcctcctggctgcagagtaccccaccagcgcattttgatttgcaatctaggaagaggattctggaagaatgggaagaaggacaactctgcatctatt

SEQ ID NO: 603194 - DNA, 120 bp, Artificial Sequence
  ENSG00000175029_63 (sequence is synthesized)
aattttagttttatgttattcgcgtttttcctctcatccttatctcctccagcccttccttcctgtaaaaggatcctttctaaacatacaaataaagacatgcttagaatttcagcacat

SEQ ID NO: 603195 - DNA, 120 bp, Artificial Sequence
  ENSG00000175029_64 (sequence is synthesized)
gaatcccccacagcggtccacgccccttgccaacttccttccactatcctggttctgttgttactcctgccgactgcagtgctgttccgtgagcttcttgaatgacatcgtacagtatct

SEQ ID NO: 603196 - DNA, 120 bp, Artificial Sequence
  ENSG00000175029_65 (sequence is synthesized)
ccgacgcacaggttcatagtggcgtcatgcacgcagactcctgcaagttcccctaagttcttagaggactgctttgccttttgatctgagagttgcaaagttccataaagaatggccctt

SEQ ID NO: 603197 - DNA, 120 bp, Artificial Sequence
  ENSG00000175029_66 (sequence is synthesized)
aaaccccgagcgcggcggcgtccggagggcagcggcggcggcggcggcggcgtctcggcgacggttccctgggcgcccccggctcctgctccctgagcccgccttagaccagaacactgc

SEQ ID NO: 603198 - DNA, 120 bp, Artificial Sequence
  ENSG00000175029_67 (sequence is synthesized)
gtgacaagtagagctggtcatgtcgacagccccctcttacctcgtcgcgtctcagcagatgtccatggggtcgtattgggagtgacttttgtaccagttggcttggctgattttggaaag

SEQ ID NO: 603199 - DNA, 120 bp, Artificial Sequence
  ENSG00000175029_68 (sequence is synthesized)
agtggaagaacccccttcaccttggtttcatcaccttaaatggttttgaaccaatgaaggtgtattcccttaaaaagacggacagcccatcgtgtgaactatagagtttgtggacagatt

SEQ ID NO: 603200 - DNA, 120 bp, Artificial Sequence
  ENSG00000175029_69 (sequence is synthesized)
gagccgatttgtagtgaggagtatctgaagggggcgaggccggcccatgtggggttgtgtcattggtttgcaaaaagagaccccgcctttgccccccccccccaaaaacaggagcgagga

SEQ ID NO: 603201 - DNA, 120 bp, Artificial Sequence
  ENSG00000175029_70 (sequence is synthesized)
cccggcctcgtgtcccccctcggcgcccgggggtggacgctggctcgggggtccccgcccgcccccgccaccgattgcgcccgctggccgccgtttgcgccaggatttttgttgttgtga

SEQ ID NO: 603202 - DNA, 120 bp, Artificial Sequence
  ENSG00000175029_71 (sequence is synthesized)
tgagagttgatgaatgcgaagtaggcggtcaccttccttcccatcagggttgaaaaaaaaaaaaaaagaaaccccgagcgcggcggcgtccggagggcagcggcggcggcggcggcggcg

SEQ ID NO: 603203 - DNA, 120 bp, Artificial Sequence
  ENSG00000175029_72 (sequence is synthesized)
gtgacaatggcctctcaggctccccagacgcatcagcggctctggattcccaccttgcgcccagcgtggttttcctgtgtggctaccatttaacgaacagcttggatttcttataatcag

SEQ ID NO: 603204 - DNA, 120 bp, Artificial Sequence
  ENSG00000175029_73 (sequence is synthesized)
gcactctctccgataaccatcctgccagcacccctgaaagtgaagttggggtgttcctcactgtgtgtgggcgaccgcctggggcatgagaccaggacttccaggccccacagggttgtg

SEQ ID NO: 603205 - DNA, 120 bp, Artificial Sequence
  ENSG00000175029_74 (sequence is synthesized)
cgctcagacctcaagtaggggccagaagagtgtactgaaacagaaggaatcttgtggaatttggcagttgtaccattttcttagcagaaaacaggagcccaggtgggagccatgtgtgtc

SEQ ID NO: 603206 - DNA, 120 bp, Artificial Sequence
  ENSG00000175029_75 (sequence is synthesized)
gggttcctcgtcaggtgacggtgctgttgcggatctcgcggatgagctgagggggtatccagctttgtgctgcacgcttcctgtccactcatacaggtcgtgggctggtatccgccccca

SEQ ID NO: 603207 - DNA, 120 bp, Artificial Sequence
  ENSG00000175029_76 (sequence is synthesized)
gagcacaccagccaggaagggggacctggcaggctggggacagcctcctctccgggactgagctgtaaggaacagacctctctggctatcgttggggagtgaggcaaagttaccgtgagt

SEQ ID NO: 603208 - DNA, 120 bp, Artificial Sequence
  ENSG00000175029_77 (sequence is synthesized)
cttatgttttgtctgctaaggtttcggaggattaataattcaggccatgctttgaaacagaaaacccccagttggttgtccctgccgtctcggaagggttagcacacagccaggtctgtt

SEQ ID NO: 603209 - DNA, 120 bp, Artificial Sequence
  ENSG00000175029_78 (sequence is synthesized)
tttgatgtatgtaattgaagatttataaagaaaagcttctcctctgcctcatccgcagtcattttttttccaatgccagttcccagcaggcatataaatattggtcgttctcagagctgg

SEQ ID NO: 603210 - DNA, 120 bp, Artificial Sequence
  ENSG00000175029_79 (sequence is synthesized)
gatgctgctgggtggtacgagggcccctgggagaacgccgagtccctgcggcctctggggaggagaagctccctgacgtatggcacagcagaggggacttggtttgagccaaaccaccga

SEQ ID NO: 603211 - DNA, 120 bp, Artificial Sequence
  ENSG00000175029_80 (sequence is synthesized)
ccacaggacgctgccctgcccgtggccgccgagccctacctgtaccgggaggccgtttataactcagtggctgcaagaaaggggtctactcctgacttcaccttctacgacagcagacag

SEQ ID NO: 603212 - DNA, 120 bp, Artificial Sequence
  ENSG00000175029_81 (sequence is synthesized)
gcagtgatgtctggtcgcagccccctgctgccacgggagtactacagtgatccgtctggagctgctagggtacccaaagagcctcccctctatcgggacccaggagtcagccggccggtc

SEQ ID NO: 603213 - DNA, 120 bp, Artificial Sequence
  ENSG00000175029_82 (sequence is synthesized)
cccagctacggagtgcttggcagcagaacgtcatgggatccaatgcaaggccggtcacctgccctgcaggacgccggtcacctgtaccgggatcctggaggtaaaatgatccctcagggg

SEQ ID NO: 603214 - DNA, 120 bp, Artificial Sequence
  ENSG00000175029_83 (sequence is synthesized)
cggcagacacagagcagggctgcatctcccgggcggtatggacgggagcagcccgacaccaggtatggggcggaggtgcctgcctaccccctcagccaggtcttcagcgacatcagcgaa

SEQ ID NO: 603215 - DNA, 120 bp, Artificial Sequence
  ENSG00000175029_84 (sequence is synthesized)
agacccattgaccctgcccctgccagacaggtggccccgacgtgcctggttgtggaccccagttcagctgctgcccccgaaggcagcacaggggtggccccaggggccctgaatcgtggc

SEQ ID NO: 603216 - DNA, 120 bp, Artificial Sequence
  ENSG00000175029_85 (sequence is synthesized)
tacgggcctgcccgggaaagcatcccatccaagatggcttacgagacttacgaagctgacctgtccaccttccagggtcctggtggcaagaggaccgtgctccctgagttcctggccttt

SEQ ID NO: 603217 - DNA, 120 bp, Artificial Sequence
  ENSG00000175029_86 (sequence is synthesized)
ctgcgggcggaggggctggcagaggccacgctgggagccctactgcagcagggctttgactccccggccgtcctggctaccctggaggacgcggatatcaagtctgtcgcacccaacctg

SEQ ID NO: 603218 - DNA, 120 bp, Artificial Sequence
  ENSG00000175029_87 (sequence is synthesized)
ggccaggcccgtgttctgagccgcctggccaatagctgcaggaccgaaatgcagctgcggaggcaggaccgggggggcccgctgccccgggcgcggtccagcagcttcagccaccgaagc

SEQ ID NO: 603219 - DNA, 120 bp, Artificial Sequence
  ENSG00000175029_88 (sequence is synthesized)
gaactgctccatggtgacttggcttctctgggcgctgcggctcctctgcagacagcatccccccgagctggagacccggctcgccgtccctccagcgcaccatctcagcacctcctggag

SEQ ID NO: 603220 - DNA, 120 bp, Artificial Sequence
  ENSG00000175029_89 (sequence is synthesized)
acggcagccacctattctgcccctggcgtgggcacccatgccccacacttcccctccaactccgggtacagctctcccaccccttgcgccctgacagcgcgtctgagccccacgtacccc

SEQ ID NO: 603221 - DNA, 120 bp, Artificial Sequence
  ENSG00000175029_90 (sequence is synthesized)
ctgcaggcaggggtggccttgactaacccgggcccctcaaacccccttcacccaggccccagaacagcctactccacggcatacacggtgcccatggagctgctaaagagggagcgcaac

SEQ ID NO: 603222 - DNA, 120 bp, Artificial Sequence
  ENSG00000175029_91 (sequence is synthesized)
gtggccgcctctccgctgcccagccctcacggcagcccccaggtcttgcggaagccaggtgcacccctggggccatccaccctgccgccggccagccagagcctccacacgcctcactca

SEQ ID NO: 603223 - DNA, 120 bp, Artificial Sequence
  ENSG00000175040_0 (sequence is synthesized)
gcagaggctggtccgagcgcgttgcgggcgcccggcgtaaggggagtcgggtagcagcatcctcctgggcgccgctttcgcgcggcggcggcggctgcggcggggtctttctttgcttaa

SEQ ID NO: 603224 - DNA, 120 bp, Artificial Sequence
  ENSG00000175040_1 (sequence is synthesized)
atacctcgttggccagaagcgctggtaccgggggcgggttgggtcgggtcgggcagtgctgcacacctgggtttccttgcctagagctgtgtgttcggggtcctttggtccagtcggagg

SEQ ID NO: 603225 - DNA, 120 bp, Artificial Sequence
  ENSG00000175040_2 (sequence is synthesized)
ctgcggagcggcgggggttgcctgcgctgtccgcccgggcatcctcccggtgatggaagcagccgccgccgccgctgcggggtcgcgctgtgccccatccaccgctgccagagaggtggg

SEQ ID NO: 603226 - DNA, 120 bp, Artificial Sequence
  ENSG00000175040_3 (sequence is synthesized)
aaaattcgccgcacggaggccgaaagcgagaggggctgcgccgctatgccgggagctgagtcccatataagccgcccccagccatcgcccccagccggcttcgttcccctgagcgagaca

SEQ ID NO: 603227 - DNA, 120 bp, Artificial Sequence
  ENSG00000175040_4 (sequence is synthesized)
ggaagctgcggtcccgagaaagcggaggagacgtcgctggagccgggaggcgccgggttcggcggagcgcggagcggggctctgggccgcgtgaaagtttttcttcccgagccgcagggc

SEQ ID NO: 603228 - DNA, 120 bp, Artificial Sequence
  ENSG00000175040_5 (sequence is synthesized)
gcccgctgcccggaaactgcccagggataagtcggccgactccccagacccctcgaaggtgcggggacccccagcggaagcgagagggagcgaaatcgaggaacgagtgacagccggaca

SEQ ID NO: 603229 - DNA, 120 bp, Artificial Sequence
  ENSG00000175040_6 (sequence is synthesized)
gacagccggacagtccgccgggcggtgatccggggccgctcccgggcgcgccctcggctccaggtcctacccggagccgctgccatgggagagccagccttgggcgctggggaccagccg

SEQ ID NO: 603230 - DNA, 120 bp, Artificial Sequence
  ENSG00000175040_7 (sequence is synthesized)
ccgagtcccggcgccagcagccagcccgctgcgtccccttcccgggctgcagggctgcctccgccgcgccgccggcccggattgtgcctgtgatgagccgcagcccgcagcgagctctgc

SEQ ID NO: 603231 - DNA, 120 bp, Artificial Sequence
  ENSG00000175040_8 (sequence is synthesized)
gcgctccctcggctgctccaggctgcgcctgcagccgcgccgcgtgccctgctcccgcagtggccccggcgcccaggacgccgctggcccgcgtcccctctcggaatgaaggtgttccgt

SEQ ID NO: 603232 - DNA, 120 bp, Artificial Sequence
  ENSG00000175040_9 (sequence is synthesized)
tcggaatgaaggtgttccgtaggaaggcgctggtgttgtgcgcgggctatgcactgctgctggtgctcactatgctcaacctcctggactacaagtggcacaaggagccgctgcagcagt

SEQ ID NO: 603233 - DNA, 120 bp, Artificial Sequence
  ENSG00000175040_10 (sequence is synthesized)
ctcctggactacaagtggcacaaggagccgctgcagcagtgcaaccccgatgggccgctgggtgccgcagcgggggcagccggaggcagctgggggcgcccagggccgcctccggccggg

SEQ ID NO: 603234 - DNA, 120 bp, Artificial Sequence
  ENSG00000175040_11 (sequence is synthesized)
ctgccgccgtcggggcggctcctgcagccgcggcagggatggcgggggttgcggcccctccaggcaatggcactcggggcaccgggggcgtcggggacaagcggcagctggtgtacgtgt

SEQ ID NO: 603235 - DNA, 120 bp, Artificial Sequence
  ENSG00000175040_12 (sequence is synthesized)
tggtgtacgtgttcaccacgtggcgctctggctcgtcgttcttcggcgagctattcaaccagaatcccgaggtgttctttctctacgagccagtgtggcatgtatggcaaaaactgtatc

SEQ ID NO: 603236 - DNA, 120 bp, Artificial Sequence
  ENSG00000175040_13 (sequence is synthesized)
cgggggacgccgtttccctgcagggggcagcgcgggacatgctgagcgctctttaccgctgcgacctctctgtcttccagttgtatagccccgcgggcagcggggggcgcaacctcacca

SEQ ID NO: 603237 - DNA, 120 bp, Artificial Sequence
  ENSG00000175040_14 (sequence is synthesized)
cgctgggcatcttcggcgcagccaccaacaaggtggtgtgctcgtcaccactctgccccgcctaccgcaaggaggtcgtggggttggtggacgaccgcgtgtgcaagaagtgcccgccac

SEQ ID NO: 603238 - DNA, 120 bp, Artificial Sequence
  ENSG00000175040_15 (sequence is synthesized)
agcgcctggcgcgtttcgaggaggagtgccgcaagtaccgcacactagtcataaagggtgtgcgcgtcttcgacgtggcggtcttggcgccactgctgcgagacccggccctggacctca

SEQ ID NO: 603239 - DNA, 120 bp, Artificial Sequence
  ENSG00000175040_16 (sequence is synthesized)
aggtcatccacttggtgcgtgatccccgcgcggtggcgagttcacggatccgctcgcgccacggcctcatccgtgagagcctacaggtggtgcgcagccgagacccgcgagctcaccgca

SEQ ID NO: 603240 - DNA, 120 bp, Artificial Sequence
  ENSG00000175040_17 (sequence is synthesized)
gcagactaccacgctctgggcgctatggaggtcatctgcaatagtatggctaagacgctgcagacagccctgcagccccctgactggctgcagggccactacctggtggtgcggtacgag

SEQ ID NO: 603241 - DNA, 120 bp, Artificial Sequence
  ENSG00000175040_18 (sequence is synthesized)
gacctggtgggagaccccgtcaagacactacggagagtgtacgattttgtgggactgttggtgagccccgaaatggagcagtttgccctgaacatgaccagtggctcgggctcctcctcc

SEQ ID NO: 603242 - DNA, 120 bp, Artificial Sequence
  ENSG00000175040_19 (sequence is synthesized)
aagcctttcgtggtatctgcacgcaatgccacgcaggccgccaatgcctggcggaccgccctcaccttccagcagatcaaacaggtggaggagttttgctaccagcccatggccgtcctg

SEQ ID NO: 603243 - DNA, 120 bp, Artificial Sequence
  ENSG00000175040_20 (sequence is synthesized)
ggctatgagcgggtcaacagccctgaggaggtcaaagacctcagcaagaccctgcttcggaagccccgtctctaaaaggggttcccaggagacctgattccctgtggtgatacctataaa

SEQ ID NO: 603244 - DNA, 120 bp, Artificial Sequence
  ENSG00000175040_21 (sequence is synthesized)
gaggatcgtagtgtgtttaaataaacacagtccagactcaaacggaggaagcccacatattctattatagatatataaataatcacacacacacttgctgtcaatgttttgagtcagtgc

SEQ ID NO: 603245 - DNA, 120 bp, Artificial Sequence
  ENSG00000175040_22 (sequence is synthesized)
atttcaaggaacagccacaaaatacacacccctaagaaaaggcaagacttgaacgttctgaccaggtgcccctcttcttctttgccttctcttgtcctctttctcctatttcttaccctg

SEQ ID NO: 603246 - DNA, 120 bp, Artificial Sequence
  ENSG00000175040_23 (sequence is synthesized)
tcctccacctgccttccattttgaagtgggatgttaatgaaatcaagttccagtaacccaaatcttgtttacaaaatattcgtggtatctgtgaacatgttaagagtaatttggatgtgg

SEQ ID NO: 603247 - DNA, 120 bp, Artificial Sequence
  ENSG00000175040_24 (sequence is synthesized)
gggtgggggtggagaaaggggaagtggtccagaaacaaaaagccccattgggcatgataagccgaggaggcattcttctaaagcagacttttgtgtaaaaagcaaaggttacatgtgagt

SEQ ID NO: 603248 - DNA, 120 bp, Artificial Sequence
  ENSG00000175040_25 (sequence is synthesized)
attaataaagaagataataaataatattctttttaatatttgcctccattactttggattcacctgtgttacttgtcctcagcttcagatagaatctccttcccctccctcgtttccatt

SEQ ID NO: 603249 - DNA, 120 bp, Artificial Sequence
  ENSG00000175040_26 (sequence is synthesized)
tttccagtctctttcctgaaaggcagctaaactgggtgggagcaatttttgcctccttggtaataacctgggggatgttttctcacatgtaaatctcagcctgttaggtgtccaggagtg

SEQ ID NO: 603250 - DNA, 120 bp, Artificial Sequence
  ENSG00000175040_27 (sequence is synthesized)
aaacacatctttgtattctaaaggcagaaaccaaacagggcagtggaagaaaaagcacactactctcttcaactttgaacacaggaagaagcaactccttcaggacttgaaggcatttgg

SEQ ID NO: 603251 - DNA, 120 bp, Artificial Sequence
  ENSG00000175040_28 (sequence is synthesized)
tttttcattcctcttcagttaaaatggggaaccttgaagcagagaccaatgttttggtgctgaggctggttcagaaaaaggatttttaaaaaaagtatgtaatttttaaaagttctgatg

SEQ ID NO: 603252 - DNA, 120 bp, Artificial Sequence
  ENSG00000175040_29 (sequence is synthesized)
attagaacacagacctcaggaaagtagcgtgaacatactgctggcgatggtagcagcttcgttggtttagcaaagtgacagaagtatctatttggagtgtttttctgaccctgacacggt

SEQ ID NO: 603253 - DNA, 120 bp, Artificial Sequence
  ENSG00000175040_30 (sequence is synthesized)
atgtggaggtggatgaaagcagcgaagtttcatctgagaaccgtaagggttttcccttttcttacttgcttcccatttaaatcagtgcaagagagaatatgaatttataatgctttactt

SEQ ID NO: 603254 - DNA, 120 bp, Artificial Sequence
  ENSG00000175040_31 (sequence is synthesized)
gggatgcctgtggaatatgttgcttttctttatcatgtttcctaaaagtaaatttgcaaagaaagtaacatgctgcagacagtataaggcttcagccaagagcttcttttagatatgata

SEQ ID NO: 603255 - DNA, 120 bp, Artificial Sequence
  ENSG00000175040_32 (sequence is synthesized)
atgaattgtggtaaagaggaaatgaaaatgaactagtgtgtaggattttgaaatttggtattttccagggagaaaaccgttacattttcctgtagtggttatgatgttgtgtcctgaacc

SEQ ID NO: 603256 - DNA, 120 bp, Artificial Sequence
  ENSG00000175040_33 (sequence is synthesized)
catttggtactgaaacattctgcagaatgttatactatgagaagaaattgtgaagcccaaatgggaacaagagacagtgtagttgtatatgacagtaaatacagtacaagttcactatca

SEQ ID NO: 603257 - DNA, 120 bp, Artificial Sequence
  ENSG00000175048_0 (sequence is synthesized)
gagccttgcaaacaagtgtctgtgctgtgtccccgcggccctcctcgcgccggggccgcttcctccgggtaggagggagcaagggagccctcgccgcgcggcccgcgagccgccgccgcc

SEQ ID NO: 603258 - DNA, 120 bp, Artificial Sequence
  ENSG00000175048_1 (sequence is synthesized)
ctcggcccgcgcatccccgcgcgggggccgcggattcgactaggctgccaggcgcagcgacaccgggtcgcggtgcgagcggcgccccggctctcgccgagaggctcctgacagaaaaac

SEQ ID NO: 603259 - DNA, 120 bp, Artificial Sequence
  ENSG00000175048_2 (sequence is synthesized)
gtgcgtggttgtccccacccctgggaggggttgccggtgccgcgcgcggccgcccagtcgccagcgctctctcctgggaggatccgctgccggaggaaggagtggacccaacctggccgc

SEQ ID NO: 603260 - DNA, 120 bp, Artificial Sequence
  ENSG00000175048_3 (sequence is synthesized)
gaggaaggagtggacccaacctggccgcgccgcagaagtggctcccgaggaagccggcgccggggccgccgcctcgtgtcccctcggggcgcagtgctcgggggtcggcgggccagagcc

SEQ ID NO: 603261 - DNA, 80 bp, Artificial Sequence
  ENSG00000175048_4 (sequence is synthesized)
cgggctgagccccgcgccccgggacgcgggctggaagcgacggaggagtgctgccgcgggctgcggaccagcgccgtccc

SEQ ID NO: 603262 - DNA, 120 bp, Artificial Sequence
  ENSG00000175048_5 (sequence is synthesized)
ggaccagcgccgtcccctcacggagcggggattctgctatgacagttgggctccccggagggttaacctgggtgtcctcggcaaagttgtcgccgagccgggagcccgtgtaggggccgc

SEQ ID NO: 603263 - DNA, 80 bp, Artificial Sequence
  ENSG00000175048_6 (sequence is synthesized)
gccggggggctcctgggggtgtgcgcccccagccggctgccctcgtggatgcctcccggcggcggcgggcccatgaaaga

SEQ ID NO: 603264 - DNA, 120 bp, Artificial Sequence
  ENSG00000175048_7 (sequence is synthesized)
cggcggcggcgggcccatgaaagactgcgagtacagccagatcagcacccacagctcctcccccatggagtcgccccacaagaagaagaaaatcgcggcccggaggaaatgggaggtgtt

SEQ ID NO: 603265 - DNA, 120 bp, Artificial Sequence
  ENSG00000175048_8 (sequence is synthesized)
cccgggaagaaacaagttcttctgtaacgggaggatcatgatggcccggcagacgggcgtcttctacctgacgctcgtcctcatcctggtcactagcggactcttcttcgccttcgactg

SEQ ID NO: 603266 - DNA, 120 bp, Artificial Sequence
  ENSG00000175048_9 (sequence is synthesized)
tccgtacctggcggtgaaaatcacccctgccatccctgcagtcgctggcatcctgttcttctttgtgatggggaccctgctccgcaccagcttcagcgaccccggagtcctcccacgagc

SEQ ID NO: 603267 - DNA, 120 bp, Artificial Sequence
  ENSG00000175048_10 (sequence is synthesized)
cacgcctgatgaagccgccgatctggaaaggcaaatagatatcgcaaacggcaccagttcaggggggtaccgcccgcctcccagaaccaaagaagtcatcatcaatggccagaccgtgaa

SEQ ID NO: 603268 - DNA, 120 bp, Artificial Sequence
  ENSG00000175048_11 (sequence is synthesized)
acttaaatactgtttcacctgcaagattttccggccccctcgcgcctcccattgcagcctttgtgataactgcgtagaacggtttgatcaccactgtccctgggtaggcaactgtgtggg

SEQ ID NO: 603269 - DNA, 120 bp, Artificial Sequence
  ENSG00000175048_12 (sequence is synthesized)
gaaaagaaactacagatttttttatatgtttattttatctctgtcttttctgacagtctttatatttgcattcgttatcacccacgtcattcttcgttcacagcaaacaggattcctaaa

SEQ ID NO: 603270 - DNA, 120 bp, Artificial Sequence
  ENSG00000175048_13 (sequence is synthesized)
tgcccttaaggacagtcctgcaagcgtcctggaggctgtggtgtgcttcttctctgtctggtccatcgttggcctctcaggattccacacctacttgatcagctccaaccagacaacaaa

SEQ ID NO: 603271 - DNA, 120 bp, Artificial Sequence
  ENSG00000175048_14 (sequence is synthesized)
tgaggacattaaaggatcctggtcaaataaaagaggtaaagaaaattacaatccctacagctacggaaatatctttaccaactgctgtgttgccctgtgtgggcccatctcaccaagcct

SEQ ID NO: 603272 - DNA, 120 bp, Artificial Sequence
  ENSG00000175048_15 (sequence is synthesized)
gatcgacagaagagggtacatccagcccgacacgccgcagccagcagcaccctccaatggcatcaccatgtacggggccacgcagtcacagagtgacatgtgcgaccaagaccagtgcat

SEQ ID NO: 603273 - DNA, 120 bp, Artificial Sequence
  ENSG00000175048_16 (sequence is synthesized)
tcagagcaccaaattcgttttgcaggctgcagccacgcccctgctgcagagcgagcccagcctcaccagcgacgagctgcacctgcccgggaagcctggcctgggcacgccctgcgccag

SEQ ID NO: 603274 - DNA, 120 bp, Artificial Sequence
  ENSG00000175048_17 (sequence is synthesized)
cctcacactgggcccgcccacaccgcccgcctccatgcccaacctcgccgaggccacgctcgcggacgtgatgccccggaaagatgagcacatgggccaccagttcctgacgcccgatga

SEQ ID NO: 603275 - DNA, 120 bp, Artificial Sequence
  ENSG00000175048_18 (sequence is synthesized)
ggcgccctcgccccccaggctactggcggcgggcagccccctggcgcacagccgcaccatgcacgtgctgggcctggccagccaggactccctgcatgaggactctgtgcgcggcctggt

SEQ ID NO: 603276 - DNA, 120 bp, Artificial Sequence
  ENSG00000175048_19 (sequence is synthesized)
gaagctcagctccgtgtgacccacatggccccaggccgggggacaccagaggctcctccatgggcagcaggagtgagcggaggggtgtgtcccacagcgactttcccagccaatgccacg

SEQ ID NO: 603277 - DNA, 120 bp, Artificial Sequence
  ENSG00000175048_20 (sequence is synthesized)
gtggagatgacagccccaggtctggggtacagagaccacttaggatggcacagggtggctggccccggatgctgagagcttggtttcatttgaattttcttccccaacctgagtgctttg

SEQ ID NO: 603278 - DNA, 120 bp, Artificial Sequence
  ENSG00000175048_21 (sequence is synthesized)
acaacaatggaaatagagaagtggctgctttcttttggtgaccctccaggggtggaatcggagtgtgtctgcccgcccttgtgacagacacacggaaggcttctgacgcttgtggccaga

SEQ ID NO: 603279 - DNA, 120 bp, Artificial Sequence
  ENSG00000175048_22 (sequence is synthesized)
ctgcaattgcacttatgtgttatgctactaatatttgaaacagacctgccattccatttgttaattaaaaaaaaaaaaaatcctaaagggaaaaaaccgaccaggtgtggatctgcatgc

SEQ ID NO: 603280 - DNA, 120 bp, Artificial Sequence
  ENSG00000175048_23 (sequence is synthesized)
cacgctgccgtctgtgttacagtggtgttgctatttccaaggaagtgctgctttctttttctttttttaattttgtgaattttcaagtgctgttttgttggaagacagtgcaacgaactg

SEQ ID NO: 603281 - DNA, 120 bp, Artificial Sequence
  ENSG00000175048_24 (sequence is synthesized)
agactaatggacagtgtcatcactcagcttactgggctgaggcgtctgtggagaggtggcaccggggctgcagagggcggctggggttccgtcgtgtcgggtgtcacttcaccttctgtt

SEQ ID NO: 603282 - DNA, 120 bp, Artificial Sequence
  ENSG00000175048_25 (sequence is synthesized)
tggccgctcgatgaggtctcgtgttgagatattgtgtgccacaacccccacagtcttcacctccgtgtgtgatgaaacttcccgtggacagccaataaaatgacgtcctctgttattttg

SEQ ID NO: 603283 - DNA, 120 bp, Artificial Sequence
  ENSG00000175048_26 (sequence is synthesized)
gatctgcgtacggttatccttaatagcataaatgaaaacaaagtcatccagatggggagagtttttcttgaaatgtccctagcgaggaatggtccccagacaaccaaaagtcaaatcttt

SEQ ID NO: 603284 - DNA, 120 bp, Artificial Sequence
  ENSG00000175048_27 (sequence is synthesized)
gaactgggagatatttatagaataatttcttagataagaggcaagttttccatcatttattttctttaattatctctttttgacaccatcttagtggaatttgctctacgtttgcagttt

SEQ ID NO: 603285 - DNA, 120 bp, Artificial Sequence
  ENSG00000175048_28 (sequence is synthesized)
gccgtgcaacagttgatcggaagtagggagaggggaggggacgctcagggagaaggttctgtcgggcgtcttctgggcttccttctgtgttaacgtgtcactcaatcccagaagtgcaac

SEQ ID NO: 603286 - DNA, 120 bp, Artificial Sequence
  ENSG00000175048_29 (sequence is synthesized)
ttgaggtcctagtaaaggtatcagaaaatgaggaggagaaatcggcttacagtctaagctgagatcatgtaggtcatcatccttcctagacactgatcagaatgaaattaagaaaatgac

SEQ ID NO: 603287 - DNA, 120 bp, Artificial Sequence
  ENSG00000175048_30 (sequence is synthesized)
tcattggtcacctagaagggaacgaactggctctggacttagggagtgtgtcactatgggggcagccacaggggacacagcaactcctctcctggcttctttccagaccataaatctaac

SEQ ID NO: 603288 - DNA, 120 bp, Artificial Sequence
  ENSG00000175048_31 (sequence is synthesized)
agctaaagctactcaagttcaaagccatggccttgctccttataaccatatgaaagacaagacacattgaccaatgatacaagtaacccaagtgatttgcatttatggaaaaaggctatt

SEQ ID NO: 603289 - DNA, 120 bp, Artificial Sequence
  ENSG00000175048_32 (sequence is synthesized)
actcctgagaaagagttgccattttatataaaagaaaagaagataggaaaaagaaaagcacacaagttttatttggaatgaaggcaattcacaggtcacaaaataattcatgctgaaagg

SEQ ID NO: 603290 - DNA, 120 bp, Artificial Sequence
  ENSG00000175048_33 (sequence is synthesized)
gcctgcagagttcttgcactgtgatgtcttcgagccatctttattgtcatgctgcatgcacgtatagaaaatggaataggtccattctatgtagccatttttgattttctgaaccaccta

SEQ ID NO: 603291 - DNA, 120 bp, Artificial Sequence
  ENSG00000175048_34 (sequence is synthesized)
actacttgtacccacctgcaatgtgtaattcatggggcagtgccctccttacacaaccgcacacgctcacaggcaccaactcacagggattctccttgtccacgctacctgtgagcccaa

SEQ ID NO: 603292 - DNA, 120 bp, Artificial Sequence
  ENSG00000175048_35 (sequence is synthesized)
agtgacagccccacaaaggagcttccacaacttcccaaaccgtctctgctccttgctttcttccacctgctccccagaggccccaggaaggagttggccctgatgagaacggtgctccat

SEQ ID NO: 603293 - DNA, 120 bp, Artificial Sequence
  ENSG00000175048_36 (sequence is synthesized)
gggtgaccgcgaatccggcttagccctcactccggtcccacgtgtggcccagtccattctcagctcattcccctggaaagcaagatcatggtcttcagaggcctcccgcttctaacattt

SEQ ID NO: 603294 - DNA, 120 bp, Artificial Sequence
  ENSG00000175048_37 (sequence is synthesized)
cctaactcagtggttgccactctcctgtgaccagcccttcttcccacctcactgtgaaaaattcccagaagccaggatcacgactcacttgtcttcacataatggatatttacttaatat

SEQ ID NO: 603295 - DNA, 120 bp, Artificial Sequence
  ENSG00000175048_38 (sequence is synthesized)
ttattatcaatttccccacctccaaccctgtccctggcacacacttggcatcatttatccaataggggactgggaattttggtgaagtgaatcaaggctattcagggtcaagagagagat

SEQ ID NO: 603296 - DNA, 120 bp, Artificial Sequence
  ENSG00000175048_39 (sequence is synthesized)
taacttgaatgggccaatttgctagataattaatgtcttaaaaaccaaaaccagagagaagcccacagccctgtcctctgtggcttgaaaaagaaacccagcatcagaggaatgagcgat

SEQ ID NO: 603297 - DNA, 120 bp, Artificial Sequence
  ENSG00000175048_40 (sequence is synthesized)
gatgccccctggggcgcccacttctgtttgtcaggagggatggtcggaggggcagctcacctggcgaggtgatggctctgcatttcccacgaacatatatgtgacatgtacataaatata

SEQ ID NO: 603298 - DNA, 120 bp, Artificial Sequence
  ENSG00000175048_41 (sequence is synthesized)
aatacttatgtttataaatgttgaatggttccttctagctgtggctgagtagacgttggtgtttctaacttctttcagtgtgttagagattgattacatgctagctataaaaagtaaaat

SEQ ID NO: 603299 - DNA, 120 bp, Artificial Sequence
  ENSG00000175048_42 (sequence is synthesized)
aaatattttaccatgctattaaagcttggaccattatcaaacacacacaaacacacactcattctgctgtttaaaaattcatctgcgttcgttctcccaggagtgctccagggaaccaca

SEQ ID NO: 603300 - DNA, 120 bp, Artificial Sequence
  ENSG00000175048_43 (sequence is synthesized)
ggcttcccggcacttgaaggctgaactgagcgtgagtgccctggtccccaggaagcaggcggatgctgcaggaaggtggcagacagcctgcatccaggagggccccaggaagtggggatg

SEQ ID NO: 603301 - DNA, 120 bp, Artificial Sequence
  ENSG00000175048_44 (sequence is synthesized)
ctgcaggaaggcggcacaaagcctgcatccgggagggccccaggaagcagggggatgctgcaggaaggtggcagacagactgcatccaggagggcacagtgacctgtcactccgttctgc

SEQ ID NO: 603302 - DNA, 120 bp, Artificial Sequence
  ENSG00000175048_45 (sequence is synthesized)
agaaattggcccagcagttgcgttatgcccaaccaaaagatgctcgttccagctttcaaatgtgatgatttcagcctgtgaggacaatgccatgtccccaccctaagccagcaaaatgcg

SEQ ID NO: 603303 - DNA, 120 bp, Artificial Sequence
  ENSG00000175048_46 (sequence is synthesized)
aaatctctgttctggcccagaatggcacaagggaggagtctttgcagagttccacgccaccccccagcttactgcggccttcaccggctctgtctaggattgccagctgtggttccaagt

SEQ ID NO: 603304 - DNA, 120 bp, Artificial Sequence
  ENSG00000175048_47 (sequence is synthesized)
gaggagcaaacccattttatgagccatgttcctgcggagacctgatgggccaggccttctgtggctttgaaaacccctaagctcttcacctcctgggcctaggccttcttgtctgactca

SEQ ID NO: 603305 - DNA, 120 bp, Artificial Sequence
  ENSG00000175048_48 (sequence is synthesized)
acagcaagaaaaatgaacttgccaaaattggcagtaggtgtccttgacacaggggcttctgatggcatcgcccagaaaatgctggaaccagaactggtcagagactttgaagggcacagc

SEQ ID NO: 603306 - DNA, 120 bp, Artificial Sequence
  ENSG00000175048_49 (sequence is synthesized)
ctggcgggctactccccaagggtctcaggtctctgcccacctgactaccctgcagcaaacgcttctctgtaacctgacttctcccttcagacctcagcctacaaccatcctcttcatgcc

SEQ ID NO: 603307 - DNA, 120 bp, Artificial Sequence
  ENSG00000175048_50 (sequence is synthesized)
aggaaccaactgcttctcagcctcggcttagggtcttaagttcaccagaagggatcggggtttgcgttgatattataaggaatcttcccagaaggagctgcccttcatccatccacaaga

SEQ ID NO: 603308 - DNA, 120 bp, Artificial Sequence
  ENSG00000175048_51 (sequence is synthesized)
atacattgagttcatttagttcttgaccaggtaagaaaagaataaaggagaacaaatattaaatactcttttctaattgatgccttactactgttttgaagctgagccgaaatcaaattg

SEQ ID NO: 603309 - DNA, 120 bp, Artificial Sequence
  ENSG00000175048_52 (sequence is synthesized)
atgtttacattttctatcaagtacacatgagctgtgggagtctagcatattcttgtccaaaagagagagactttcaaatgaattcctattcctcttggtcccctccacctattttggagg

SEQ ID NO: 603310 - DNA, 120 bp, Artificial Sequence
  ENSG00000175048_53 (sequence is synthesized)
tctgcatgtggagttgtatgctattttccaaggtacctcatttaaaaaaaaaaaaaaaaaaaaactgcctctcatttgttcccttaaaacgtctctctctctcataaaactaagttatca

SEQ ID NO: 603311 - DNA, 120 bp, Artificial Sequence
  ENSG00000175048_54 (sequence is synthesized)
ttgaaatattaaacgatctgaagcgtctttttttttttcaaataaatgtcaaagatggtaatagtttgtaaatcagtaaatcctctgtccatctgcccattgtccatggtcctgataata

SEQ ID NO: 603312 - DNA, 120 bp, Artificial Sequence
  ENSG00000175048_55 (sequence is synthesized)
gagccaagatggattttcacatgtaaggtgttagtccattaatccagccattaaaagtagttgggagattgaagattagatggtttctggagcaaccgaatttgcagctgccacaaaact

SEQ ID NO: 603313 - DNA, 120 bp, Artificial Sequence
  ENSG00000175048_56 (sequence is synthesized)
agataaatagccacaactggagttattttttgatctcataaaccccaggaattacacacagaatggattgaaaagcagacaagcatcttgtgctattgcagagacttttctacccaggaa

SEQ ID NO: 603314 - DNA, 120 bp, Artificial Sequence
  ENSG00000175048_57 (sequence is synthesized)
gtgttgaatttttaaaagaaacttgatattggtgataaaggtatgaatgaacaactctcttacttgccctcgatgtttcaagatgcctggtgaaaccgagaggccacatggcatgtccaa

SEQ ID NO: 603315 - DNA, 120 bp, Artificial Sequence
  ENSG00000175048_58 (sequence is synthesized)
ggagacatgctttctgggttctatatgaatagagatggttttagcctgcaattaaaaaaaaaaaaaaaaacggttgaagccttgctaactttttcccagagcattctgggttgatatttc

SEQ ID NO: 603316 - DNA, 120 bp, Artificial Sequence
  ENSG00000175048_59 (sequence is synthesized)
acagtcaaacgttttggcatggaaaaaaaaaaaagcattttaaactcttagtgaattcaaagctctaaatccaaacaatggtgaacacatgtacataacatttcatgttttcagagatac

SEQ ID NO: 603317 - DNA, 120 bp, Artificial Sequence
  ENSG00000175048_60 (sequence is synthesized)
gtatgcttatttaagtgcctttcatgttttaatcaatgtttgcagaatttatcttaaacctgagatgaattaaaaaatttttctccttcaataaaaactgctaatggcataaaatgtaaa

SEQ ID NO: 603318 - DNA, 120 bp, Artificial Sequence
  ENSG00000175048_61 (sequence is synthesized)
aatgtttccgtaagtatctgcacaacggcttcacttccttcccaggccgcggtgctcaaaccacaaatggcgtgggctgggctcaggctcacgttaggagtacatcttcctccctttctc

SEQ ID NO: 603319 - DNA, 120 bp, Artificial Sequence
  ENSG00000175048_62 (sequence is synthesized)
ttctggtgggttcgtatgggggtggggaagtgggtgggagagaatgttttgcattcattctttttgaatattagtcaaattgggccgttaaatggaacatcccaaattttcataggtact

SEQ ID NO: 603320 - DNA, 120 bp, Artificial Sequence
  ENSG00000175048_63 (sequence is synthesized)
ttcaatcctagttgccattctttctgactataatctttcatccaaacgtgacacaaatgtgtaatatgtgcttgagagccatgacttggtgggcttgcaagaggacaatggacacccgcc

SEQ ID NO: 603321 - DNA, 120 bp, Artificial Sequence
  ENSG00000175048_64 (sequence is synthesized)
ttttccacatcagctgggcaggatgcagacaggggcaccctctccctctattttcaaagtcctcaaaatggcaaaaatgtggctagggtcctatctgtgcattaatagacaaaagaagca

SEQ ID NO: 603322 - DNA, 120 bp, Artificial Sequence
  ENSG00000175048_65 (sequence is synthesized)
gagagaatgactagggcattatatgttattttcaaagaagcagttgttgacacaactagggaagaaatacgaaccgatcctccagcacacacgtaacactgaaaagcagtgtttagacat

SEQ ID NO: 603323 - DNA, 84 bp, Artificial Sequence
  ENSG00000175048_66 (sequence is synthesized)
tccagcacacacgtaacactgaaaagcagtgtttagacattatttatttttatttttgagatggagtgtcgctctgttgcctca

SEQ ID NO: 603324 - DNA, 65 bp, Artificial Sequence
  ENSG00000175048_67 (sequence is synthesized)
tcccaggttcaagcaattctcctgcctcgagtagctgggattacaggcgtgggccacagactggt

SEQ ID NO: 603325 - DNA, 120 bp, Artificial Sequence
  ENSG00000175048_68 (sequence is synthesized)
tacaggcgtgagccaccccacccggcctagacattgtatttttatatcacctttcacaacctcaagatgcttttgtgtgtattatgggattgtatttatggccttgtccctgcattgtgg

SEQ ID NO: 603326 - DNA, 120 bp, Artificial Sequence
  ENSG00000175048_69 (sequence is synthesized)
tatggccttgtccctgcattgtggatgtcaagggccagttgccacgtgcttagtcatatacctaaactcagggaacacacacacgcatgcttatggactcacacacactcacactcttac

SEQ ID NO: 603327 - DNA, 120 bp, Artificial Sequence
  ENSG00000175048_70 (sequence is synthesized)
ccacactcattctagccacactcacactcatatatactcaccaatacgctcacactcacacatatccttacacacccacactctcacatacccttacacacccacacacccttacacact

SEQ ID NO: 603328 - DNA, 120 bp, Artificial Sequence
  ENSG00000175048_71 (sequence is synthesized)
cacactcacggtagccacactcatgtataaccaatatgctcacacatgtacccttacacacccacactcatactagccatactcacactcatatatactcaccaataagctcacacacat

SEQ ID NO: 603329 - DNA, 120 bp, Artificial Sequence
  ENSG00000175048_72 (sequence is synthesized)
acccttacacacccacacaccgccttacacacacatactcgtacacgcccacacacacccttacacacccacacacatacccttacacagccacacacatacccttggacacccacactc

SEQ ID NO: 603330 - DNA, 120 bp, Artificial Sequence
  ENSG00000175048_73 (sequence is synthesized)
actctagccactcatatatactcaccaataagctcacacacacatagccttacacacacatccttacccacatttacacactcatacccttacactgtcacactcacatgtacccttaca

SEQ ID NO: 603331 - DNA, 120 bp, Artificial Sequence
  ENSG00000175048_74 (sequence is synthesized)
cacccacactcacacacacccttacccacactcacacacacccttacacacccacactctcacacctttacacacccactcacacacatacccttacccccacacacccttatacaccca

SEQ ID NO: 603332 - DNA, 120 bp, Artificial Sequence
  ENSG00000175048_75 (sequence is synthesized)
cactcacactctagctacacccacactcatatatagtcaccaatatgctcacactctcgcactcacatgctgtcgtgctcgctcacataccgttgcacactcacatgctctcacacactc

SEQ ID NO: 603333 - DNA, 120 bp, Artificial Sequence
  ENSG00000175048_76 (sequence is synthesized)
tcacggtgaaatctgtgcctgccaccacactcaggttgcgatgtgtgtttcacttttagctcctctaaggttttactcacctggctccaccaaactggattttaccatagtctatactta

SEQ ID NO: 603334 - DNA, 120 bp, Artificial Sequence
  ENSG00000175048_77 (sequence is synthesized)
aatactgttcatctcttcttctacacaaaagtattaagaatttacctgcctgcaagttattggaatatcctgggcaaaagcaaataaaactttcccttttcccttgtttgacaccccctc

SEQ ID NO: 603335 - DNA, 120 bp, Artificial Sequence
  ENSG00000175048_78 (sequence is synthesized)
atcagtgacccccacgacacgaccccaccaccctatctggcttggcatgtgatgcttcaggaagggcacagggtttccacggctcctgttaccctcttaagcctcagaaaacattggcac

SEQ ID NO: 603336 - DNA, 120 bp, Artificial Sequence
  ENSG00000175048_79 (sequence is synthesized)
aggcagagaggagagctgtcatctgagtctctctgtgggatcctgggctcttagggaaaggccagacagggaggggcgggagagatttctgtggcctccaagattcctgggaaggcgaag

SEQ ID NO: 603337 - DNA, 120 bp, Artificial Sequence
  ENSG00000175048_80 (sequence is synthesized)
tctggatttccttggagaggaaggagggcttaggccagccacataattagggtgcagtagacaaacagaaatcatttcttttggtccctcatctgcctcaaggctgtgtttgctccacat

SEQ ID NO: 603338 - DNA, 120 bp, Artificial Sequence
  ENSG00000175048_81 (sequence is synthesized)
ggccgcacaggcacttgcgtctgtgccctttggggctggcagagatggaggagaaagccttaagcaccatctctcctgattagcgctccacgcagcttctcttcacagcccctcccacac

SEQ ID NO: 603339 - DNA, 120 bp, Artificial Sequence
  ENSG00000175048_82 (sequence is synthesized)
gtggggcacatggggacacggtggccactcaccccctgccactgagtcccacagtgcagctgggcctgtggtcagatgccacagggacaccatagcacccgtagagtgtgtcatttcctt

SEQ ID NO: 603340 - DNA, 120 bp, Artificial Sequence
  ENSG00000175048_83 (sequence is synthesized)
ggtgcacgagggccggatgatgtccccagaggctcactggcttcccacagcacagagggacctggcaccgctaccctaagatggaattgttaaaactacctccatttttatttttaaaag

SEQ ID NO: 603341 - DNA, 120 bp, Artificial Sequence
  ENSG00000175048_84 (sequence is synthesized)
tatgatgtcaatgcataaaataaaaattgctttctgtcagatgcttctttattcaagcccctaaagaaatgttttcttgcctaagacagctcatattaaaatgtctaaagcccaagagaa

SEQ ID NO: 603342 - DNA, 120 bp, Artificial Sequence
  ENSG00000175048_85 (sequence is synthesized)
gtctaataaatttcagctttatgactttgtttactctgggtgtagaaaaagaattcttttatacgtagcctagtttccagaacttccagggtcaaaagttaacaaatttggggaaaacag

SEQ ID NO: 603343 - DNA, 120 bp, Artificial Sequence
  ENSG00000175048_86 (sequence is synthesized)
aagagaaaagatagcatacagtattctgttttcctattaaaatgaggaaaacaaaggagtcatcagaactataatttacgggaaagtgtgcagacatccatctgcttttattgaaaaaat

SEQ ID NO: 603344 - DNA, 120 bp, Artificial Sequence
  ENSG00000175048_87 (sequence is synthesized)
accctgcagatgttgggcctaattatgaatcctccattttcttgatgaaaaactttagtggcatctcaatctctgatcggtaaactgggtgtcgtagcacttacaaaatagaattatttc

SEQ ID NO: 603345 - DNA, 120 bp, Artificial Sequence
  ENSG00000175048_88 (sequence is synthesized)
attgatctttagccatctattatttttttgtagatgagagagcattcagcatgaaggctgtttctatctgaatactaaatgttggtttcattcccacaggttcacagcaaacaggattcc

SEQ ID NO: 603346 - DNA, 120 bp, Artificial Sequence
  ENSG00000175048_89 (sequence is synthesized)
ttcgtaagtatgctggcgaaatcagattacgtatgtaaccatttgcctgactttgattttcctatttgattttgatttaatattttggtcatttcgggctttctctttccctttctttct

SEQ ID NO: 603347 - DNA, 120 bp, Artificial Sequence
  ENSG00000175054_0 (sequence is synthesized)
gtggttgactagtgcctcgcagcctcagcatgggggaacatggcctggagctggcttccatgatccccgccctgcgggagctgggcagtgccacaccagaggaatataatacagttgtac

SEQ ID NO: 603348 - DNA, 120 bp, Artificial Sequence
  ENSG00000175054_1 (sequence is synthesized)
agaagccaagacaaattctgtgtcaattcattgaccggatacttacagatgtaaatgttgttgctgtagaacttgtaaagaaaactgactctcagccaacctccgtgatgttgcttgatt

SEQ ID NO: 603349 - DNA, 120 bp, Artificial Sequence
  ENSG00000175054_2 (sequence is synthesized)
tcatccagcatatcatgaaatcctccccacttatgtttgtaaatgtgagtggaagccatgaggccaaaggcagttgtattgaattcagtaattggatcataacgagacttctgcggattg

SEQ ID NO: 603350 - DNA, 120 bp, Artificial Sequence
  ENSG00000175054_3 (sequence is synthesized)
cagcaactccctcctgtcatttgttacacaagaaaatctgtgaagtcatctgttcattattatttctttttaaaagcaagagtcctgctatttttggggtactcacaaaagaattattac

SEQ ID NO: 603351 - DNA, 120 bp, Artificial Sequence
  ENSG00000175054_4 (sequence is synthesized)
aactttttgaagacttggtttacctccatagaagaaatgtgatgggtcatgctgtggaatggccagtggtcatgagccgatttttaagtcaattagatgaacacatgggatatttacaat

SEQ ID NO: 603352 - DNA, 120 bp, Artificial Sequence
  ENSG00000175054_5 (sequence is synthesized)
cagctcctttgcagttgatgagtatgcaaaatttagaatttattgaagtcactttattaatggttcttactcgtattattgcaattgtgttttttagaaggcaagaactcttactttggc

SEQ ID NO: 603353 - DNA, 120 bp, Artificial Sequence
  ENSG00000175054_6 (sequence is synthesized)
agataggttgtgttctgctagagtatggtagtccaaaaattaaatccctagcaattagctttttaacagaactttttcagcttggaggactaccagcacaaccagctagcacttttttca

SEQ ID NO: 603354 - DNA, 120 bp, Artificial Sequence
  ENSG00000175054_7 (sequence is synthesized)
gctcatttttggaattattaaaacaccttgtagaaatggatactgaccaattgaaactctatgaagagccattatcaaagctgataaagacactatttccctttgaagcagaagcttata

SEQ ID NO: 603355 - DNA, 120 bp, Artificial Sequence
  ENSG00000175054_8 (sequence is synthesized)
gaaatattgaacctgtctatttaaatatgctgctggaaaaactctgtgtcatgtttgaagacggtgtgctcatgcggcttaagtctgatttgctaaaagcagctttgtgccatttactgc

SEQ ID NO: 603356 - DNA, 120 bp, Artificial Sequence
  ENSG00000175054_9 (sequence is synthesized)
agtatttccttaaatttgtgccagctgggtatgaatctgctttacaagtcaggaaggtctatgtgagaaatatttgtaaagctcttttggatgtgcttggaattgaggtagatgcagagt

SEQ ID NO: 603357 - DNA, 120 bp, Artificial Sequence
  ENSG00000175054_10 (sequence is synthesized)
acttgttgggcccactttatgcagctttgaaaatggaaagtatggaaatcattgaggagattcaatgccaaactcaacaggaaaacctcagcagtaatagtgatggaatatcacccaaaa

SEQ ID NO: 603358 - DNA, 120 bp, Artificial Sequence
  ENSG00000175054_11 (sequence is synthesized)
ggcgtcgtctcagctcgtctctaaacccttctaaaagagcaccaaaacagactgaggaaattaaacatgtggacatgaaccaaaagagcatattatggagtgcactgaaacagaaagctg

SEQ ID NO: 603359 - DNA, 120 bp, Artificial Sequence
  ENSG00000175054_12 (sequence is synthesized)
aatcccttcagatttcccttgaatacagtggcctaaagaatcctgttattgagatgttagaaggaattgctgttgtcttacaactgactgctctgtgtactgttcattgttctcatcaaa

SEQ ID NO: 603360 - DNA, 120 bp, Artificial Sequence
  ENSG00000175054_13 (sequence is synthesized)
acatgaactgccgtactttcaaggactgtcaacataaatccaagaagaaaccttctgtagtgataacttggatgtcattggatttttacacaaaagtgcttaagagctgtagaagtttgt

SEQ ID NO: 603361 - DNA, 120 bp, Artificial Sequence
  ENSG00000175054_14 (sequence is synthesized)
tagaatctgttcagaaactggacctggaggcaaccattgataaggtggtgaaaatttatgatgctttgatttatatgcaagtaaacagttcatttgaagatcatatcctggaagatttat

SEQ ID NO: 603362 - DNA, 120 bp, Artificial Sequence
  ENSG00000175054_15 (sequence is synthesized)
gtggtatgctctcacttccatggatttattcccattctgatgatggctgtttaaagttgaccacatttgccgctaatcttctaacattaagctgtaggatttcagatagctattcaccac

SEQ ID NO: 603363 - DNA, 120 bp, Artificial Sequence
  ENSG00000175054_16 (sequence is synthesized)
aggcacaatcacgatgtgtgtttcttctgactctgtttccaagaagaatattccttgagtggagaacagcagtttacaactgggccctgcagagctcccatgaagtaatccgggctagtt

SEQ ID NO: 603364 - DNA, 120 bp, Artificial Sequence
  ENSG00000175054_17 (sequence is synthesized)
gtgttagtggattttttatcttattgcagcagcagaattcttgtaacagagttcccaagattcttatagataaagtcaaagatgattctgacattgtcaagaaagaatttgcttctatac

SEQ ID NO: 603365 - DNA, 120 bp, Artificial Sequence
  ENSG00000175054_18 (sequence is synthesized)
ttggtcaacttgtctgtactcttcacggcatgttttatctgacaagttctttaacagaacctttctctgaacacggacatgtggacctcttctgtaggaacttgaaagccacttctcaac

SEQ ID NO: 603366 - DNA, 120 bp, Artificial Sequence
  ENSG00000175054_19 (sequence is synthesized)
atgaatgttcatcttctcaactaaaagcttctgtctgcaagccattccttttcctactgaaaaaaaaaatacctagtccagtaaaacttgctttcatagataatctacatcatctttgta

SEQ ID NO: 603367 - DNA, 120 bp, Artificial Sequence
  ENSG00000175054_20 (sequence is synthesized)
agcatcttgattttagagaagatgaaacagatgtaaaagcagttcttggaactttattaaatttaatggaagatccagacaaagatgttagagtggcttttagtggaaatatcaagcaca

SEQ ID NO: 603368 - DNA, 120 bp, Artificial Sequence
  ENSG00000175054_21 (sequence is synthesized)
tattggaatccttggactctgaagatggatttataaaggagctttttgtcttaagaatgaaggaagcatatacacatgcccaaatatcaagaaataatgagctgaaggataccttgattc

SEQ ID NO: 603369 - DNA, 120 bp, Artificial Sequence
  ENSG00000175054_22 (sequence is synthesized)
ttacaacaggggatattggaagggccgcaaaaggagatttggtaccatttgcactcttacacttattgcattgtttgttatccaagtcagcatctgtctctggagcagcatacacagaaa

SEQ ID NO: 603370 - DNA, 120 bp, Artificial Sequence
  ENSG00000175054_23 (sequence is synthesized)
ttagagctctggttgcagctaaaagtgttaaactgcaaagttttttcagccagtataagaaacccatctgtcagtttttggtagaatcccttcactctagtcagatgacagcacttccga

SEQ ID NO: 603371 - DNA, 120 bp, Artificial Sequence
  ENSG00000175054_24 (sequence is synthesized)
atactccatgccagaatgctgacgtgcgaaaacaagatgtggctcaccagagagaaatggctttaaatacgttgtctgaaattgccaacgttttcgactttcctgatcttaatcgttttc

SEQ ID NO: 603372 - DNA, 120 bp, Artificial Sequence
  ENSG00000175054_25 (sequence is synthesized)
ttactaggacattacaagttctactacctgatcttgctgccaaagcaagccctgcagcttctgctctcattcgaactttaggaaaacaattaaatgtcaatcgtagagagattttaataa

SEQ ID NO: 603373 - DNA, 120 bp, Artificial Sequence
  ENSG00000175054_26 (sequence is synthesized)
acaacttcaaatatattttttctcatttggtctgttcttgttccaaagatgaattagaacgtgcccttcattatctgaagaatgaaacagaaattgaactggggagcctgttgagacaag

SEQ ID NO: 603374 - DNA, 120 bp, Artificial Sequence
  ENSG00000175054_27 (sequence is synthesized)
atttccaaggattgcataatgaattattgctgcgtattggagaacactatcaacaggtttttaatggtttgtcaatacttgcctcatttgcatccagtgatgatccatatcagggcccga

SEQ ID NO: 603375 - DNA, 120 bp, Artificial Sequence
  ENSG00000175054_28 (sequence is synthesized)
gagatatcatatcacctgaactgatggctgattatttacaacccaaattgttgggcattttggctttttttaacatgcagttactgagctctagtgttggcattgaagataagaaaatgg

SEQ ID NO: 603376 - DNA, 120 bp, Artificial Sequence
  ENSG00000175054_29 (sequence is synthesized)
ccttgaacagtttgatgtctttgatgaagttaatgggacccaaacatgtcagttctgtgagggtgaagatgatgaccacactgagaactggccttcgattcaaggatgattttcctgaat

SEQ ID NO: 603377 - DNA, 120 bp, Artificial Sequence
  ENSG00000175054_30 (sequence is synthesized)
tgtgttgcagagcttgggactgctttgttcgctgcctggatcatgcttgtctgggctcccttctcagtcatgtaatagtagctttgttacctcttatacacatccagcctaaagaaactg

SEQ ID NO: 603378 - DNA, 120 bp, Artificial Sequence
  ENSG00000175054_31 (sequence is synthesized)
cagctatcttccactacctcataattgaaaacagggatgctgtgcaagattttcttcatgaaatatattttttacctgatcatccagaattaaaaaagataaaagccgttctccaggaat

SEQ ID NO: 603379 - DNA, 120 bp, Artificial Sequence
  ENSG00000175054_32 (sequence is synthesized)
acagaaaggagacctctgagagcactgatcttcagacaactcttcagctctctatgaaggccattcaacatgaaaatgtcgatgttcgtattcatgctcttacaagcttgaaggaaacct

SEQ ID NO: 603380 - DNA, 120 bp, Artificial Sequence
  ENSG00000175054_33 (sequence is synthesized)
tcggttgctctgtggggaatgtttaggggaattgggggcgatagatccaggtcgattagatttctcaacaactgaaactcaaggaaaagattttacatttgtgactggagtagaagattc

SEQ ID NO: 603381 - DNA, 120 bp, Artificial Sequence
  ENSG00000175054_34 (sequence is synthesized)
aagctttgcctatggattattgatggagctaacaagagcttaccttgcgtatgctgataatagccgagctcaagattcagctgcctatgccattcaggagttgctttctatttatgactg

SEQ ID NO: 603382 - DNA, 120 bp, Artificial Sequence
  ENSG00000175054_35 (sequence is synthesized)
tagagagatggagaccaacggcccaggtcaccaattgtggaggagatttcctgagcatgttcgggaaatactagaacctcatctaaataccagatacaagagttctcagaagtcaaccga

SEQ ID NO: 603383 - DNA, 120 bp, Artificial Sequence
  ENSG00000175054_36 (sequence is synthesized)
ttggtctggagtaaagaagccaatttacttaagtaaattgggtagtaactttgcagaatggtcagcatcttgggcaggttatcttattacaaaggttcgacatgatcttgccagtaaaat

SEQ ID NO: 603384 - DNA, 120 bp, Artificial Sequence
  ENSG00000175054_37 (sequence is synthesized)
tttcacctgctgtagcattatgatgaagcatgatttcaaagtgaccatctatcttcttccacatattctggtgtatgtcttactgggttgtaatcaagaagatcagcaggaggtttatgc

SEQ ID NO: 603385 - DNA, 120 bp, Artificial Sequence
  ENSG00000175054_38 (sequence is synthesized)
agaaattatggcagttctaaagcatgacgatcagcataccataaatacccaagacattgcatctgatctgtgtcaactcagtacacagactgtgttctccatgcttgaccatctcacaca

SEQ ID NO: 603386 - DNA, 120 bp, Artificial Sequence
  ENSG00000175054_39 (sequence is synthesized)
gtgggcaaggcacaaatttcaggcactgaaagctgagaaatgtccacacagcaaatcaaacagaaataaggtagactcaatggtatctactgtggattatgaagactatcagagtgtaac

SEQ ID NO: 603387 - DNA, 120 bp, Artificial Sequence
  ENSG00000175054_40 (sequence is synthesized)
ccgttttctagacctcataccccaggatactctggcagtagcttcctttcgctccaaagcatacacacgagctgtaatgcactttgaatcatttattacagaaaagaagcaaaatattca

SEQ ID NO: 603388 - DNA, 120 bp, Artificial Sequence
  ENSG00000175054_41 (sequence is synthesized)
ggaacatcttggatttttacagaaattgtatgctgctatgcatgaacctgatggagtggccggagtcagtgcaattagaaaggcagaaccatctctaaaagaacagatccttgaacatga

SEQ ID NO: 603389 - DNA, 120 bp, Artificial Sequence
  ENSG00000175054_42 (sequence is synthesized)
aagccttggcttgctgagggatgccactgcttgttatgacagggctattcagctagaaccagaccagatcattcattatcatggtgtagtaaagtccatgttaggtcttggtcagctgtc

SEQ ID NO: 603390 - DNA, 120 bp, Artificial Sequence
  ENSG00000175054_43 (sequence is synthesized)
tactgttatcactcaggtgaatggagtgcatgctaacaggtccgagtggacagatgaattaaacacgtacagagtggaagcagcttggaaattgtcacagtgggatttggtggaaaacta

SEQ ID NO: 603391 - DNA, 120 bp, Artificial Sequence
  ENSG00000175054_44 (sequence is synthesized)
tttggcagcagatggaaaatctacaacatggagtgtcagactgggacagctattattatcagccaaaaaaagagatatcacagctttttatgactcactgaaactagtgagagcagaaca

SEQ ID NO: 603392 - DNA, 120 bp, Artificial Sequence
  ENSG00000175054_45 (sequence is synthesized)
aattgtacctctttcagctgcaagctttgaaagaggctcctaccaacgaggatatgaatatattgtgagattgcacatgttatgtgagttggagcatagcatcaaaccacttttccagca

SEQ ID NO: 603393 - DNA, 120 bp, Artificial Sequence
  ENSG00000175054_46 (sequence is synthesized)
ttctccaggtgacagttctcaagaagattctctaaactgggtagctcgactagaaatgacccagaattcctacagagccaaggagcctatcctggctctccggagggctttactaagcct

SEQ ID NO: 603394 - DNA, 120 bp, Artificial Sequence
  ENSG00000175054_47 (sequence is synthesized)
caacaaaagaccagattacaatgaaatggttggagaatgctggctgcagagtgccagggtagctagaaaggctggtcaccaccagacagcctacaatgctctccttaatgcaggggaatc

SEQ ID NO: 603395 - DNA, 120 bp, Artificial Sequence
  ENSG00000175054_48 (sequence is synthesized)
acgactcgctgaactgtacgtggaaagggcaaagtggctctggtccaagggtgatgttcaccaggcactaattgttcttcaaaaaggtgttgaattatgttttcctgaaaatgaaacccc

SEQ ID NO: 603396 - DNA, 120 bp, Artificial Sequence
  ENSG00000175054_49 (sequence is synthesized)
acctgagggtaagaacatgttaatccatggtcgagctatgctactagtgggccgatttatggaagaaacagctaactttgaaagcaatgcaattatgaaaaaatataaggatgtgaccgc

SEQ ID NO: 603397 - DNA, 120 bp, Artificial Sequence
  ENSG00000175054_50 (sequence is synthesized)
gtgcctgccagaatgggaggatgggcatttttaccttgccaagtactatgacaaattgatgcccatggtcacagacaacaaaatggaaaagcaaggtgatctcatccggtatatagttct

SEQ ID NO: 603398 - DNA, 120 bp, Artificial Sequence
  ENSG00000175054_51 (sequence is synthesized)
tcattttggcagatctctacaatatggaaatcagttcatatatcagtcaatgccacgaatgttaactctatggcttgattatggtacaaaggcatatgaatgggaaaaagctggccgctc

SEQ ID NO: 603399 - DNA, 120 bp, Artificial Sequence
  ENSG00000175054_52 (sequence is synthesized)
cgatcgtgtacaaatgaggaatgatttgggtaaaataaacaaggttatcacagagcatacaaactatttagctccatatcaatttttgactgctttttcacaattgatctctcgaatttg

SEQ ID NO: 603400 - DNA, 120 bp, Artificial Sequence
  ENSG00000175054_53 (sequence is synthesized)
tcattctcacgatgaagtttttgttgtcttgatggaaataatagccaaagtatttctagcctatcctcaacaagcaatgtggatgatgacagctgtgtcaaagtcatcttatcccatgcg

SEQ ID NO: 603401 - DNA, 120 bp, Artificial Sequence
  ENSG00000175054_54 (sequence is synthesized)
tgtgaacagatgcaaggaaatcctcaataaagctattcatatgaaaaaatccttagagaagtttgttggagatgcaactcgcctaacagataagcttctagaattgtgcaataaaccggt

SEQ ID NO: 603402 - DNA, 120 bp, Artificial Sequence
  ENSG00000175054_55 (sequence is synthesized)
tgatggaagtagttccacattaagcatgagcactcattttaaaatgcttaaaaagctggtagaagaagcaacatttagtgaaatcctcattcctctacaatcagtcatgatacctacact

SEQ ID NO: 603403 - DNA, 120 bp, Artificial Sequence
  ENSG00000175054_56 (sequence is synthesized)
tccatcaattctgggtacccatgctaaccatgctagccatgaaccatttcctggacattgggcctatattgcagggtttgatgatatggtggaaattcttgcttctcttcagaaaccaaa

SEQ ID NO: 603404 - DNA, 120 bp, Artificial Sequence
  ENSG00000175054_57 (sequence is synthesized)
gaagatttctttaaaaggctcagatggaaagttctacatcatgatgtgtaagccaaaagatgacctgagaaaggattgtagactaatggaattcaattccttgattaataagtgcttaag

SEQ ID NO: 603405 - DNA, 120 bp, Artificial Sequence
  ENSG00000175054_58 (sequence is synthesized)
aaaagatgcagagtctcgtagaagagaacttcatattcgaacatatgcagttattccactaaatgatgaatgtgggattattgaatgggtgaacaacactgctggtttgagacctattct

SEQ ID NO: 603406 - DNA, 120 bp, Artificial Sequence
  ENSG00000175054_59 (sequence is synthesized)
gaccaaactatataaagaaaagggagtgtatatgacaggaaaagaacttcgccagtgtatgctaccaaagtcagcagctttatctgaaaaactcaaagtattccgagaatttctcctgcc

SEQ ID NO: 603407 - DNA, 120 bp, Artificial Sequence
  ENSG00000175054_60 (sequence is synthesized)
caggcatcctcctatttttcatgagtggtttctgagaacattccctgatcctacatcatggtacagtagtagatcagcttactgccgttccactgcagtaatgtcaatggttggttatat

SEQ ID NO: 603408 - DNA, 120 bp, Artificial Sequence
  ENSG00000175054_61 (sequence is synthesized)
tctggggcttggagaccgtcatggtgaaaatattctctttgattctttgactggtgaatgcgtacatgtagatttcaattgtcttttcaataagggagaaacctttgaagttccagaaat

SEQ ID NO: 603409 - DNA, 120 bp, Artificial Sequence
  ENSG00000175054_62 (sequence is synthesized)
tgtgccatttcgcctgactcataatatggttaatggaatgggtcctatgggaacagagggtctttttcgaagagcatgtgaagttacaatgaggctgatgcgtgatcagcgagagccttt

SEQ ID NO: 603410 - DNA, 120 bp, Artificial Sequence
  ENSG00000175054_63 (sequence is synthesized)
aatgagtgtcttaaagacttttctacatgatcctcttgtggaatggagtaaaccagtgaaagggcattccaaagcgccactgaatgaaactggagaagttgtcaatgaaaaggccaagac

SEQ ID NO: 603411 - DNA, 120 bp, Artificial Sequence
  ENSG00000175054_64 (sequence is synthesized)
ccatgttcttgacattgagcagcgactacaaggtgtaatcaagactcgaaatagagtgacaggactgccgttatctattgaaggacatgtgcattaccttatacaggaagctactgatga

SEQ ID NO: 603412 - DNA, 120 bp, Artificial Sequence
  ENSG00000175054_65 (sequence is synthesized)
aaacttactatgccagatgtatcttggttggactccatatatgtgaaatgaaattatgtaaaagaatatgttaataatctaaaagtaatgcatttggtatgaatctgtggttgtatctgt

SEQ ID NO: 603413 - DNA, 120 bp, Artificial Sequence
  ENSG00000175054_66 (sequence is synthesized)
tcaattctaaagtacaacataaatttacgttctcagcaactgttatttctctctgatcattaattatatgtaaaataatatacattcagttattaagaaataaactgctttcttaataca

SEQ ID NO: 603414 - DNA, 120 bp, Artificial Sequence
  ENSG00000175054_67 (sequence is synthesized)
atatattgaagcttttctctaggcttattctttattgcacctactacttttgtcccttcattggtgtcttcataaagagatgcaaaataaacattttttttgtataatggataaagtatt

SEQ ID NO: 603415 - DNA, 120 bp, Artificial Sequence
  ENSG00000175054_68 (sequence is synthesized)
ttaaaattttttgttcaaactttaactcaactttgatagcatgtcctccaagaagtttttttctgagcactacttctaactgcttagaactggcttggttattcctttattctctcttag

SEQ ID NO: 603416 - DNA, 120 bp, Artificial Sequence
  ENSG00000175054_69 (sequence is synthesized)
tactaagtgttctgcatttcatctatcatagaggctattaaactgtgctctaatcattggtttgtctatattctttcctacagtagtttttaaactacaggtcataacccactagtgggt

SEQ ID NO: 603417 - DNA, 120 bp, Artificial Sequence
  ENSG00000175054_70 (sequence is synthesized)
acaggtcataacccactagtgggttatgaaattaggcaattatcagcatttaaaacaagatgaaataaactagaaaatatcataggctgggcacgatgtctcacgcctgtaatcccagca

SEQ ID NO: 603418 - DNA, 120 bp, Artificial Sequence
  ENSG00000175054_71 (sequence is synthesized)
ggcaacatggcaaaatcctgtctctaccaaaaccaaaccaaaccaaaccaaaacaaaacagaaaaacattagctgaacatggtggcacatgcctgtggtacaagctacttggaaggctga

SEQ ID NO: 603419 - DNA, 120 bp, Artificial Sequence
  ENSG00000175054_72 (sequence is synthesized)
gcacatgcctgtggtacaagctacttggaaggctgaggcacactaattgctttagcctgggaggcagagattgcagtgagctaagaccatgccgttgcactccagcctgggtaacagagt

SEQ ID NO: 603420 - DNA, 120 bp, Artificial Sequence
  ENSG00000175054_73 (sequence is synthesized)
atagtacattgtatgtaataagagtaagtactatttaatgaaccttttgttttaaatatttaaataaaatgcatgtatatgtactgggtcatgatataaaatgttatttctttgttgcag

SEQ ID NO: 603421 - DNA, 120 bp, Artificial Sequence
  ENSG00000175054_74 (sequence is synthesized)
tcaaaaagctcaagaaactgtactgtgagattcatgaggacaggactatgactgatttattcttgtgtacctgagacagagtcaccactcaaattttagttgaaagaatgacaatagcta

SEQ ID NO: 603422 - DNA, 120 bp, Artificial Sequence
  ENSG00000175054_75 (sequence is synthesized)
ccctttattgaacatttattttactttggaactgtgctgagtatttcatgtgcattttcttatttggtcctcacagtaacccataacatagatagcattattctccttatacatgaaatt

SEQ ID NO: 603423 - DNA, 120 bp, Artificial Sequence
  ENSG00000175054_76 (sequence is synthesized)
acagaggttcagagaaatgaaaagtttatacaactagtaagtggaaagctaggaccttgcctgtctgactccaaagttgttacaggcatacctcagaaatattgtgggttcagttccaga

SEQ ID NO: 603424 - DNA, 72 bp, Artificial Sequence
  ENSG00000175054_77 (sequence is synthesized)
tacaggcatacctcagaaatattgtgggttcagttccagaccactacaataaagtgaatattgcaataaagt

SEQ ID NO: 603425 - DNA, 120 bp, Artificial Sequence
  ENSG00000175054_78 (sequence is synthesized)
acaatgtatgtaccctaattaaaaatactttattactaaaaaatgctaacgattatatcatccttcaacaagttgtaatatttgtgctggtggagtgtcttgccttgatgttgagggcct

SEQ ID NO: 603426 - DNA, 120 bp, Artificial Sequence
  ENSG00000175054_79 (sequence is synthesized)
agggaatgttgtggctggtttgatcttctttttttcctactggaaatttcctcatcttttaacgatttgatcttctattcagagtacaaaaactttctccataccagcaataaggctgtt

SEQ ID NO: 603427 - DNA, 120 bp, Artificial Sequence
  ENSG00000175054_80 (sequence is synthesized)
ctccataccagcaataaggctgtttcactttctcatcaatggtgcgttcagtggagtagtacttttaatttcctccaaaaactttttctttgttttaacaagttggttgtttggtgaaag

SEQ ID NO: 603428 - DNA, 120 bp, Artificial Sequence
  ENSG00000175054_81 (sequence is synthesized)
aggcctagctttcaacttgtcttggctttcaacatgccttcctcagtaggcttaatcatttctagcttttgatttgaagtgagagatgtgtgactcttcctttcatttgaacacatagag

SEQ ID NO: 603429 - DNA, 120 bp, Artificial Sequence
  ENSG00000175054_82 (sequence is synthesized)
gccattgtaagggttattaattaacctaatttcaatactgtgtctcagggaatagggagacacaaggagagggagagagatggggaactgctggtcggtgggtcagaacacatacattta

SEQ ID NO: 603430 - DNA, 120 bp, Artificial Sequence
  ENSG00000175054_83 (sequence is synthesized)
tccattaagtttgccaccttatatcggtgtggttcatgacagctccaaacaattacaatagtaacatcaaacgtcactgatcacagatcaccataacagatacgataataatgaaaatgt

SEQ ID NO: 603431 - DNA, 120 bp, Artificial Sequence
  ENSG00000175054_84 (sequence is synthesized)
ttgaaatattttgagaattaccaaaatgtgatacagagacatgaagtgaccacatgctattggaaaaatggcactgatacacttgcttgatgcagagttaccacaaccttcaatttgtga

SEQ ID NO: 603432 - DNA, 120 bp, Artificial Sequence
  ENSG00000175054_85 (sequence is synthesized)
caaatgcagtatctgcaacgtgcaataaaactgggtatgcctgtgttctaaactattatgtttccattgtgaagagaatgttttacactcttgttagtgaagtttattctttaaaagtca

SEQ ID NO: 603433 - DNA, 120 bp, Artificial Sequence
  ENSG00000175054_86 (sequence is synthesized)
aatgtaataataagaaaatagaatatctttaatagtaatttatatttggaacataatgattttcatagtgtagtctggctcactattatggacttttactttgatttcagaaggatttgt

SEQ ID NO: 603434 - DNA, 120 bp, Artificial Sequence
  ENSG00000175054_87 (sequence is synthesized)
tcattaagttggtaatgaactgccaatggagtagaatgtttctaagtagaatctgtgaagtgtaaatgtatttgttgcattattaattaaaagggggcagttaccaacttaattgcagaa

SEQ ID NO: 603435 - DNA, 120 bp, Artificial Sequence
  ENSG00000175054_88 (sequence is synthesized)
gctttggtcaatcagattatgtgtctgacaagttataatcaatcacttttagaaaacctatgaatgattaatcatgccaaattatgcgcttttttctatttggactgtgggagtcaggta

SEQ ID NO: 603436 - DNA, 120 bp, Artificial Sequence
  ENSG00000175054_89 (sequence is synthesized)
atacaataaaatcatcagagatgcagtaacttgattaaatattttagtttattaatcttgctggattaaagttacatgaagaaagttggtaattcccttacagaattttttataagggaa

SEQ ID NO: 603437 - DNA, 120 bp, Artificial Sequence
  ENSG00000175054_90 (sequence is synthesized)
ttaaaatttatagcattttggtaagaggaaaaacaggatgtagagagaaggatttgtttaaaccttctaagactatagaaccatagtctatatatagacttaaataatatagatcaattt

SEQ ID NO: 603438 - DNA, 120 bp, Artificial Sequence
  ENSG00000175054_91 (sequence is synthesized)
agatgtttattttgctttatgagactctaaaagtagtttcactagaaaacacctaacatctaatacattcttgctgcctatgaataatataaatatattttctaaggaatatttctggaa

SEQ ID NO: 603439 - DNA, 120 bp, Artificial Sequence
  ENSG00000175054_92 (sequence is synthesized)
gccgtgattcttctttaaaacaggcatagataacatgtttttataaagtcacatttaatttctttgggttcacagacctcagaccatcgtttatagatctctgtgttaagaatttctgct

SEQ ID NO: 603440 - DNA, 120 bp, Artificial Sequence
  ENSG00000175054_93 (sequence is synthesized)
tatccaatgatcattatgatagtatttcaaatgtctttatttttatttaaaagagatatgattaaggaaaagttataattaatgacttattttgtgcttctgtagtaaacagttcatttg

SEQ ID NO: 603441 - DNA, 120 bp, Artificial Sequence
  ENSG00000175054_94 (sequence is synthesized)
cctcccaactgtccgtaagttataccactggcccccctgtatttttgtcttaaatttaattcagaattctgagttattggaattgcttacctctgaatttatgtgtgttcagttggctct

SEQ ID NO: 603442 - DNA, 120 bp, Artificial Sequence
  ENSG00000175054_95 (sequence is synthesized)
ttttcttccttgctctttgttcaaattaagcatgcagctatttttacaatgggcttagttattattcaggaattaactctgctctaatatatggcacactttaatttgttgaagaatgtc

SEQ ID NO: 603443 - DNA, 120 bp, Artificial Sequence
  ENSG00000175054_96 (sequence is synthesized)
attttaaatggtgtatcagaagtaattagtgaaaaaatatttttgaaggatggaaagattaaaattttctggatagtttctggatagagataattattttatatctaagaacaaaataca

SEQ ID NO: 603444 - DNA, 120 bp, Artificial Sequence
  ENSG00000175054_97 (sequence is synthesized)
atataatgcaaattcaataaatataataaatagagtatgtaaaccaatgaaaaatctctgaatgtcaccttaaataaattaaagtttagttgatatgggtttcttttaataggtccgagt

SEQ ID NO: 603445 - DNA, 120 bp, Artificial Sequence
  ENSG00000175054_98 (sequence is synthesized)
ttgatatgcagctatagttctcatctctatgcatgagaactgcttggaaatactgttagtgactattgattactctgaaatctagttctctagtatcacaatgccataagttttctttat

SEQ ID NO: 603446 - DNA, 120 bp, Artificial Sequence
  ENSG00000175054_99 (sequence is synthesized)
tgtcagtaatgttaacagtattcgcatttgtataataaaagttcatggcacacttgtttaaccatagacaattcacagttatgagatacagtaggaaaaactatagtacaaattgcctga

SEQ ID NO: 603447 - DNA, 120 bp, Artificial Sequence
  ENSG00000175054_100 (sequence is synthesized)
acttacagaacaacaggtctgagctttaatatcatgataccagtatgtcacaagctatgttaacaaatgcagcaattcacttcttacttagttgaagctgcaaagtttgcagatagtttt

SEQ ID NO: 603448 - DNA, 60 bp, Artificial Sequence
  ENSG00000175054_101 (sequence is synthesized)
cttagcctcccaagtagctgggattataagcgtgcaccaccacagctggctaattattca

SEQ ID NO: 603449 - DNA, 120 bp, Artificial Sequence
  ENSG00000175054_102 (sequence is synthesized)
gtcttgaacccctggcttcaagtgatccacccacctcagcatcccaaaatgcagggattataggcataagccactgtgcctagctcagatagttgtttttaataagttagaatagattga

SEQ ID NO: 603450 - DNA, 120 bp, Artificial Sequence
  ENSG00000175054_103 (sequence is synthesized)
ggattcgttttttttggtggggggcactcttacatctttaataagtcttgtacaggcttactaaatacaatgaattataccaactatatgctaataaagattaaaaatttacattccagt

SEQ ID NO: 603451 - DNA, 120 bp, Artificial Sequence
  ENSG00000175054_104 (sequence is synthesized)
taactacctaaagagtttaagtccactttcatcctactgatatagctcgaggaaggctagacctgtacgcccccatccttcatgtcatccttaaccctttgtcttgagaaagaaggttta

SEQ ID NO: 603452 - DNA, 120 bp, Artificial Sequence
  ENSG00000175054_105 (sequence is synthesized)
gctgcttctttagttcttctaaaagaactaaaagaaaaatttctttttcttgctctattatcttcatctgtagggtgagattaatatttccagaattgtggaaaaattcactctgtagca

SEQ ID NO: 603453 - DNA, 120 bp, Artificial Sequence
  ENSG00000175054_106 (sequence is synthesized)
gttgaagagcagatggtctctgggacatgttccttttcgttaagtgatagatatacttggcttgtactggataccttttactgagggattccaatatctgaccagttcttgaacctgtta

SEQ ID NO: 603454 - DNA, 120 bp, Artificial Sequence
  ENSG00000175054_107 (sequence is synthesized)
aaacttctgctcgctccatttctgttctaaacagctgaaagagctctagcaggatcacactcaagctatatacatatctaactggacaaagccagccctggtctctacaaatagtttttg

SEQ ID NO: 603455 - DNA, 63 bp, Artificial Sequence
  ENSG00000175054_108 (sequence is synthesized)
actggacaaagccagccctggtctctacaaatagtttttgtttttttttaattagctgggctc

SEQ ID NO: 603456 - DNA, 120 bp, Artificial Sequence
  ENSG00000175054_109 (sequence is synthesized)
ccagcctgggcaacagagtgagacccttggcatcatactcagatccttccaactgctgggatgaagcatacagacaagtgcccactctggatataggtgttggtgttctctttctgtttc

SEQ ID NO: 603457 - DNA, 120 bp, Artificial Sequence
  ENSG00000175054_110 (sequence is synthesized)
tctgtttctatgggtccagtctgtgttcttttgtaagatgtctgggcaagccagaccaaagtctcctatttttacttgctgatcagggccatgaagaaaaatatttctaggcttcagatc

SEQ ID NO: 603458 - DNA, 120 bp, Artificial Sequence
  ENSG00000175054_111 (sequence is synthesized)
tctgtttacaatacccatgttatgtatgtaaaacacaccttccactaaatcttgaaaattttttgttgcaacactggccataaggacaggcaaacttgcccacacactcttggccctgtt

SEQ ID NO: 603459 - DNA, 120 bp, Artificial Sequence
  ENSG00000175054_112 (sequence is synthesized)
tgtttctctcagctagccagtcccacagctggagcttgcacacctgcatctggatgtgcagcatcaggtggtactgcacctcgatccccaacaagttgaagttttctttggaagattcct

SEQ ID NO: 603460 - DNA, 120 bp, Artificial Sequence
  ENSG00000175054_113 (sequence is synthesized)
cagtggatgtgaaattctcctctaggagggaattacacctgagcagcaggggctgtttcacaattgaccaggtagacaaaccagccaggccattttcctggagctccagggatgattcat

SEQ ID NO: 603461 - DNA, 120 bp, Artificial Sequence
  ENSG00000175054_114 (sequence is synthesized)
attcactggtgtctcttaagacggaattgatggtgtagttcacagcttgttgttctgattttgagtgtcagattctgcaaagggtttttcttttctgaggtgagctccgcgaagataatg

SEQ ID NO: 603462 - DNA, 120 bp, Artificial Sequence
  ENSG00000175054_115 (sequence is synthesized)
ggtgagctgctattttcaccatttttaacaccgtattggtatctgtctgcttggtcggagaacacttccagaaatggcaactgaacggaagctctgtctgcttgtggttggaccacttga

SEQ ID NO: 603463 - DNA, 120 bp, Artificial Sequence
  ENSG00000175054_116 (sequence is synthesized)
acatgttctgtccacgcagtgtgataacgaatgatattagggtgctgaagacctgccagcaccttcattccccgtagttctttcatgtaatgtgtttttgttgcacccttaatcaggatt

SEQ ID NO: 603464 - DNA, 120 bp, Artificial Sequence
  ENSG00000175054_117 (sequence is synthesized)
ttttaaattgcataatactgaccatctaatttattcctgaccttgtatactcttccatatccaccttttcctaagatggcaagttcttcaaattcatttaagtaacgtgaagtttgtgct

SEQ ID NO: 603465 - DNA, 120 bp, Artificial Sequence
  ENSG00000175054_118 (sequence is synthesized)
tcaaagggtacttcccttgatctgattttctggatatgagaaatagcctcacaaggatcctgatgaactctctctttagtggacctcattaagtgagtaatagctctgtggtgatgtagt

SEQ ID NO: 603466 - DNA, 120 bp, Artificial Sequence
  ENSG00000175054_119 (sequence is synthesized)
ctcaatgagctaaacttgtcacaagtgaaagaagacagcagccccattttgataaaggtctggcaaagtaacttaaacactgtcttgaatgaactgggtttggttcacgcacatggctca

SEQ ID NO: 603467 - DNA, 120 bp, Artificial Sequence
  ENSG00000175054_120 (sequence is synthesized)
agtgcttcaccaaagaaataagcggcagctggtttgcaactgcaaaagggaaagttggctgttgtaggggttattttaatacctggagttctgctggaacataagtcatatttggagtcc

SEQ ID NO: 603468 - DNA, 120 bp, Artificial Sequence
  ENSG00000175054_121 (sequence is synthesized)
aggctcttggcggaaaagtcgatggcagatggcacagcaacagtctccaccccgtggccctcctctttgtgctcgtgggctgcagcgcagcccaccagcccacccagcaccacctctgag

SEQ ID NO: 603469 - DNA, 120 bp, Artificial Sequence
  ENSG00000175054_122 (sequence is synthesized)
aattattcttctaataacgttattcttccttttgcattcagatatgcttaagaaattgtacagttccaagtagctcacttagaacacccatttgcatgtactaacataatgtaaatatta

SEQ ID NO: 603470 - DNA, 120 bp, Artificial Sequence
  ENSG00000175054_123 (sequence is synthesized)
ggcagtacagcattgttatttgaatattcattgaaatgtttaagtcctaaacacttccaaagcagatttaaaaaattatttttctagaattgtaatgtgtaaataattccctggtatttc

SEQ ID NO: 603471 - DNA, 120 bp, Artificial Sequence
  ENSG00000175054_124 (sequence is synthesized)
acgtagtccagaaacatgtccaagcagttgatgttgaatcaatcttgcgagcctccaaatcagtatcacaagctaactgtatttgtttaatttcttcttttcctgtatttgctcttacaa

SEQ ID NO: 603472 - DNA, 120 bp, Artificial Sequence
  ENSG00000175054_125 (sequence is synthesized)
aaggggtattggtcagtaaaatggtattaacatttattaaatgtcaaaatataaagaaaggtagtaattccaaattattaacatctgtttttggttttatgtttcttctttttaggccaa

SEQ ID NO: 603473 - DNA, 120 bp, Artificial Sequence
  ENSG00000175054_126 (sequence is synthesized)
taaacatgagtccatactgatataaacagatatttgagtaaataaataaatagggaagtgggaatagttcttccttatgtactaatagaatttcaatgaataaatgtagaaaggatgatg

SEQ ID NO: 603474 - DNA, 120 bp, Artificial Sequence
  ENSG00000175054_127 (sequence is synthesized)
gaaatgggaaatcagcaattagcaaacactatagtaattattattgcaggcagtgattattaatggatgctaaaattaataggcaaaagatgagaaacaggttatttgaagaatcttgaa

SEQ ID NO: 603475 - DNA, 120 bp, Artificial Sequence
  ENSG00000175054_128 (sequence is synthesized)
gtatctccctatcagatacttaacaattataaagggaaaagtatagtaactttacagtagagaaatataaatataactggtccgaactccttacaaatgtcaaagtaatgaattcccaga

SEQ ID NO: 603476 - DNA, 120 bp, Artificial Sequence
  ENSG00000175054_129 (sequence is synthesized)
tttgatgacattaaggagttgacatttgatgacaactaaatgtaatgtgtaatcctggattggatcctgacccctaaacaaagtgtgctagtgggacagctggtgaaatttgaataaggt

SEQ ID NO: 603477 - DNA, 120 bp, Artificial Sequence
  ENSG00000175054_130 (sequence is synthesized)
cagaggtttggttaataatactgtaataataagaatttcctgatttgaataattgtactattgttacgcaagatatgaacattaaggaaagctgggtgaagaatatgtgggaactccgta

SEQ ID NO: 603478 - DNA, 120 bp, Artificial Sequence
  ENSG00000175054_131 (sequence is synthesized)
tcattgatgcaactttttgtaacatctaaacttgttttaaaataagacgtttttaaagttcatatggtgtaatacattaaaaatgaatagatcaagttgtcaaagtgaagtagaaaataa

SEQ ID NO: 603479 - DNA, 120 bp, Artificial Sequence
  ENSG00000175054_132 (sequence is synthesized)
gtatatgttttcatacataatttgtatggtatttgccataacaaattactgcaaactaagcgagtttaaacaatagaaatttatcatctcacggttctggaggctaaagatacaatatca

SEQ ID NO: 603480 - DNA, 120 bp, Artificial Sequence
  ENSG00000175054_133 (sequence is synthesized)
agttgtcattaggaccatgatctctctgaaggctaatgttccttgcctttctcttaaccttctggtgttctgtggcttctggatgtattgtaccacattgcctttattgttacatagcat

SEQ ID NO: 603481 - DNA, 120 bp, Artificial Sequence
  ENSG00000175054_134 (sequence is synthesized)
tctctctatgtctctgtgtctctattttctcataagaacaccagtcactggattattgaattaagggcccaccttaatgactttatcttaacaacattacatctgcaaagatcctgttac

SEQ ID NO: 603482 - DNA, 120 bp, Artificial Sequence
  ENSG00000175054_135 (sequence is synthesized)
tgaataagctcacattcccaggtaccaagaattaggatttcagcatatttttttgagagataaagttcaatttataacattaagtaatactgataaatcactatataatgggtattgtgc

SEQ ID NO: 603483 - DNA, 120 bp, Artificial Sequence
  ENSG00000175054_136 (sequence is synthesized)
caagtatgttatgtacattattttatttattattgttaacacgcctgattatccatccctattttatggacagtgccagagaacttacgtaacttgtctaagttcacagttgcaaaactg

SEQ ID NO: 603484 - DNA, 120 bp, Artificial Sequence
  ENSG00000175054_137 (sequence is synthesized)
aaactcagagacacttgagtcagagttcaaagaacttgctgttgactattttatttatgagcatgacatattgtatatgtctgagtttggatttgaaaatatattttttcttgataattt

SEQ ID NO: 603485 - DNA, 120 bp, Artificial Sequence
  ENSG00000175054_138 (sequence is synthesized)
aaataagttcattcatatgggacttaattttgagtcttgtattctggaactatttgatttcacaacactggttttaactgacattaattttcatcaataagaggcttcacttgggtaagt

SEQ ID NO: 603486 - DNA, 120 bp, Artificial Sequence
  ENSG00000175054_139 (sequence is synthesized)
acggtggtccctccttatctggaggattgcttccagaataccctcacataccaaaatccacacatactcaagtctcagtcagccctgcagaacctgcatgtatgaaaagtcagccttcag

SEQ ID NO: 603487 - DNA, 120 bp, Artificial Sequence
  ENSG00000175054_140 (sequence is synthesized)
tatatactgattttacatcccatgtttttgatccatgtttggttgaaaaaaatcacatgtaagtggacccacacagttcaaactcatgttgttcaagggtcatctgtattaagggaagat

SEQ ID NO: 603488 - DNA, 120 bp, Artificial Sequence
  ENSG00000175054_141 (sequence is synthesized)
aatgtggtttattattttattatacaatcagtaactttatgtatgcttaattgaaaaatgttcctttattcttgtttttcaataacaatttgaataaaagtagatgtttcttgtccaatt

SEQ ID NO: 603489 - DNA, 120 bp, Artificial Sequence
  ENSG00000175054_142 (sequence is synthesized)
gatttcaattgtcttttcaataaggtatgtgatatgagttactcttactaattgtgttttctctcaatttccttttctcaacaactgtatcttccttgacatacctgttagtagcagtta

SEQ ID NO: 603490 - DNA, 120 bp, Artificial Sequence
  ENSG00000175054_143 (sequence is synthesized)
tactcacagttgagttatactgagaatttgttgactagttttcatcagtggatcatgtagtaatgcgtattaggatggagagaacttagaagagtgatactgtaaagctagtactgaatt

SEQ ID NO: 603491 - DNA, 120 bp, Artificial Sequence
  ENSG00000175054_144 (sequence is synthesized)
tgaagtccaagagcataggtttaggttctgactcaattagttattagttatgtgaataagggcagatcagttcattttactgagactcagttttagagagacagagtagtttaatacgat

SEQ ID NO: 603492 - DNA, 120 bp, Artificial Sequence
  ENSG00000175054_145 (sequence is synthesized)
atacccaggagattcagattctgtaggtccagagtgggacctgggaataaattgaggcaattggacccatctttaaggccccctacaattttccaatattataatcctgcagggcagact

SEQ ID NO: 603493 - DNA, 120 bp, Artificial Sequence
  ENSG00000175054_146 (sequence is synthesized)
ggtaggttagcgcactattttcttcacctccatcatctacaggttgccttgtgctgtcacaagaaaccaagaaagatcatagatccaactgagaacaaatcagagataaaatactggcat

SEQ ID NO: 603494 - DNA, 120 bp, Artificial Sequence
  ENSG00000175054_147 (sequence is synthesized)
gggttaaaccatacaagagaggaatttagggtaactgattggacaagggatgaaaggtccctagaaaaggcagattagaggacagcagaaaatgaacaactggacttcattatatgacat

SEQ ID NO: 603495 - DNA, 120 bp, Artificial Sequence
  ENSG00000175054_148 (sequence is synthesized)
gttttatttcctttatgaggggatgtgagcatctgacccttggctgcttctgttgttttaagatgaaagtgttaaagaaaagtagaaatatatgagaatatttgtatttcatattattca

SEQ ID NO: 603496 - DNA, 120 bp, Artificial Sequence
  ENSG00000175054_149 (sequence is synthesized)
agaaagacattaaagaagttaatatgagactaaatattgaatgcataaaatttctctgtaatactgcttattcactgtactaaactcagtgaaaggtaagtccacttatctcctagatct

SEQ ID NO: 603497 - DNA, 120 bp, Artificial Sequence
  ENSG00000175054_150 (sequence is synthesized)
tatccaagatcaagtatggtttcagttctgtaaaagcaaaggcagagctacatggctccttcatgttacaaacttctaaagtaattacaacataaatattttgagggtatttttgctttt

SEQ ID NO: 603498 - DNA, 120 bp, Artificial Sequence
  ENSG00000175054_151 (sequence is synthesized)
tccttttaaaagtcctagctattgtaaggattcacttgaagaacaaaattatatggaataaatactgtgggcaaggcgttgtgccagacttgtgcatagagctaccctctcctgccctcc

SEQ ID NO: 603499 - DNA, 120 bp, Artificial Sequence
  ENSG00000175054_152 (sequence is synthesized)
atacatcttacttccaaataccctctaatatttctaaaagttcttcttagtgtgaattaagaattttccgagagtagatatccatgtttctcagcaatttttagtagagaatatgaaata

SEQ ID NO: 603500 - DNA, 120 bp, Artificial Sequence
  ENSG00000175054_153 (sequence is synthesized)
aaatataagtatgtaaaatattctaagttacttatggtagtctatgattatatcatatctttaaactttcaaaattcatatacattattaaactacacttacgatagggaagagggttgg

SEQ ID NO: 603501 - DNA, 120 bp, Artificial Sequence
  ENSG00000175054_154 (sequence is synthesized)
agggttggggttttgcttttcattcttttagtacacatttcagtgcctatgaggggacaagcactatgctaagggaaacaagatgaataaaatctattctcatgcctgaggtgcttacag

SEQ ID NO: 603502 - DNA, 120 bp, Artificial Sequence
  ENSG00000175054_155 (sequence is synthesized)
tcttttagggaactaagcagatggttatctagagtaataagtacttttttcggtagatttgtgactaaagtaggaacatggttacaggagtaaccccataattctacctaagtattagag

SEQ ID NO: 603503 - DNA, 120 bp, Artificial Sequence
  ENSG00000175054_156 (sequence is synthesized)
aaaaacccccaaggatgtataggaaagataaaagtgggaggtgggggtggttataaggagggagagagaagttctttaataaggtacatagctagacttcacttgacaaatattcagagt

SEQ ID NO: 603504 - DNA, 120 bp, Artificial Sequence
  ENSG00000175054_157 (sequence is synthesized)
gcatcagtgtttatagatgaaaagatacagactatttctcacctttcctttatcaataaacatctcaaaagggtaatctgcatttattatctccattaatcccatttgacctctgatgca

SEQ ID NO: 603505 - DNA, 120 bp, Artificial Sequence
  ENSG00000175054_158 (sequence is synthesized)
cttgacattatcaaaaacagtgttatggtggccaacatttattaaaacactaacactgttgtaagtgctttacatgtacaggtttccagttctttatctgaaacctttgtggcaagctac

SEQ ID NO: 603506 - DNA, 120 bp, Artificial Sequence
  ENSG00000175054_159 (sequence is synthesized)
acttagaaatttaggatttttaagattttagtgcatatttaatatttgatatttccactgagggtaacctgttggagtatcccataatcaaacacataactgtttcttcagtgagagttt

SEQ ID NO: 603507 - DNA, 120 bp, Artificial Sequence
  ENSG00000175054_160 (sequence is synthesized)
aatttacagagctctttggattttctaatatttgataatagattataggcctctactctctcctttaatcattaaacaatcctatgatgtaggtactattattaatgaggtaaatgacag

SEQ ID NO: 603508 - DNA, 120 bp, Artificial Sequence
  ENSG00000175054_161 (sequence is synthesized)
aggttaaaatgggatgattaggaaatacttagaaaaccacagactgctgaacctttgtaatcaaaatattgtaaaagtgaaatttttgttatagtggaatttaaggtaaaaacaaattaa

SEQ ID NO: 603509 - DNA, 120 bp, Artificial Sequence
  ENSG00000175054_162 (sequence is synthesized)
acttcagttttatatgactatgattttaaaatttagttgttaaaaacttcaaattaagataaaaagtgtatttcacaaaatctacgtgaatcttatttgtgaagaaaaataattggaaat

SEQ ID NO: 603510 - DNA, 120 bp, Artificial Sequence
  ENSG00000175054_163 (sequence is synthesized)
aagagtaaaactaaactcatttgtactgatggcaaaaaaattcagtgattaaaaaaagttctgattcatgattcacattcaccgtaacgttttgatttttcaaatgctcctgttgtttta

SEQ ID NO: 603511 - DNA, 82 bp, Artificial Sequence
  ENSG00000175054_164 (sequence is synthesized)
accgtaacgttttgatttttcaaatgctcctgttgttttagtatgactataatctttattttttcacaaaaacagggtctca

SEQ ID NO: 603512 - DNA, 120 bp, Artificial Sequence
  ENSG00000175054_165 (sequence is synthesized)
acggggtttcgtcatgttgcccaggctagtcttgaactcctaggctcaagccattctcctgctcagccttcccaagtgttagtgtaacaaacatgagccactgtacccagtctatgcttt

SEQ ID NO: 603513 - DNA, 120 bp, Artificial Sequence
  ENSG00000175054_166 (sequence is synthesized)
tacacttaattttgaaggagtttgttttttcaaaaatcaaactacttttaattgataaagcttgaaaaacagagtctcaggctccgcagaaagatcctgaaaagatgtttcaaaaatctt

SEQ ID NO: 603514 - DNA, 120 bp, Artificial Sequence
  ENSG00000175054_167 (sequence is synthesized)
ttaaacattttgactgctttgaaggggggtgtctaaatttgaatatgtaagtacttgtattggcgatgaagtaatctttttatgtcatagctatttttaatgggtgaaaatgtttctgtt

SEQ ID NO: 603515 - DNA, 120 bp, Artificial Sequence
  ENSG00000175054_168 (sequence is synthesized)
tgaaaatgtttctgttcatagacagtcattcttttcataggtcatagataattaaaataaaagatttttaaaatacaaattcactacataatatagctggtaatattctttttttttttt

SEQ ID NO: 603516 - DNA, 120 bp, Artificial Sequence
  ENSG00000175054_169 (sequence is synthesized)
tccagggcgtctctcctgtattagattagtaattttaaatatttttttaaagagagaaatttatagcattatatcttaatatttggatatatttaccatatgaaatgaagtaactagtat

SEQ ID NO: 603517 - DNA, 120 bp, Artificial Sequence
  ENSG00000175054_170 (sequence is synthesized)
aagatcaaataattcagcatgtgttttctttatgaagtctagtaaacagttaatgcttgatgcaaaatggttacctatgttttcacaaatattttaatccaaactacctgaatttttatt

SEQ ID NO: 603518 - DNA, 120 bp, Artificial Sequence
  ENSG00000175054_171 (sequence is synthesized)
tctgttgcccaggctggaatgcagtggtgggatcatagctcagtgcagcctcaaagtcctgggttcaagtgatcctcttgcctcagcttcccagtagctaggatgatagcggtgtgtcac

SEQ ID NO: 603519 - DNA, 120 bp, Artificial Sequence
  ENSG00000175054_172 (sequence is synthesized)
agtagctaggatgatagcggtgtgtcaccatgtacagttaatttttaaattctttttgtagagatgggatcttgctgtgttgctcaggctgggctcaaactcttgggctcaagtgatctt

SEQ ID NO: 603520 - DNA, 120 bp, Artificial Sequence
  ENSG00000175054_173 (sequence is synthesized)
aaagtgctggaattacaggcatgagctatcgtgccccgccagtacctgaattattaatactaaaaaaccgttattgcatcattaatgggaattcatatgttggtcaatatatgtaataag

SEQ ID NO: 603521 - DNA, 120 bp, Artificial Sequence
  ENSG00000175054_174 (sequence is synthesized)
caatatatgtaataagtaaatgtttagagaatttagacaatacagagacataaaacaaaaattaaaattcacaccttgggccattcattaatgttttgatgtaattttatttgtatattt

SEQ ID NO: 603522 - DNA, 120 bp, Artificial Sequence
  ENSG00000175054_175 (sequence is synthesized)
ccattcattaatgttttgatgtaattttatttgtatattttctagcatattttaacactaaatttaattatgttgccgtacaatttcatatttttcactttattgtttccatgttattaa

SEQ ID NO: 603523 - DNA, 120 bp, Artificial Sequence
  ENSG00000175054_176 (sequence is synthesized)
aaaatagccttcaataacttatttaactgtttagttaatcattaaggttatttctatttttcttgcaattgtaacacatctagatatgtctatgtttattctcacttgtaattatttctc

SEQ ID NO: 603524 - DNA, 120 bp, Artificial Sequence
  ENSG00000175054_177 (sequence is synthesized)
cagggcagatccctataactttataattcacaaagttatagggtggcaatatttgtatggctcttgatagcattgccaaataaattttcagaaaatttgtatcatataaactctcatcat

SEQ ID NO: 603525 - DNA, 120 bp, Artificial Sequence
  ENSG00000175054_178 (sequence is synthesized)
tcataatcttagtgcttataaactgatgttgggtaattatgtatataatttgagcagattttttcatttgattaattaaattaaaattctaactataggtgtacacatatatcaaaatgt

SEQ ID NO: 603526 - DNA, 120 bp, Artificial Sequence
  ENSG00000175054_179 (sequence is synthesized)
ccactacctcataattgaaaacaggtattgtaactgaaattaatagtaaaataataactttttaaactgtatttttatgtctcaaaattactgatggtaatgtggaaactgtcacttttt

SEQ ID NO: 603527 - DNA, 120 bp, Artificial Sequence
  ENSG00000175054_180 (sequence is synthesized)
tatcaataaacaaaagtaattggcatgtaattacatattgaaatgatgctatttcagttgtggcattgcttctattataattatttccaaagctcactaataggtcaccagttaaaaatt

SEQ ID NO: 603528 - DNA, 120 bp, Artificial Sequence
  ENSG00000175054_181 (sequence is synthesized)
acttttcattaattctgtaaatgtgtaacctaatttacctttcttttcacagtcaaaaggcagatagttgaatagcatgagaaaggttaggagagatacctactttctgcagcttacctt

SEQ ID NO: 603529 - DNA, 120 bp, Artificial Sequence
  ENSG00000175054_182 (sequence is synthesized)
agttgaaacccttattacctcattgcgttaagctttgaaccagcctctcttcctttaagctttcatcacttttcttgatattgttactagaactgtgttttaaaaatatctctttattgg

SEQ ID NO: 603530 - DNA, 120 bp, Artificial Sequence
  ENSG00000175054_183 (sequence is synthesized)
tgtcattccagcatacaaaggcattctgagattctccatttcctaattgataaattccaaattgcttagcttgatattgaaggctttctaaaaatgtggccacagactatttcttactat

SEQ ID NO: 603531 - DNA, 120 bp, Artificial Sequence
  ENSG00000175054_184 (sequence is synthesized)
cttcccccataatttttcaaaacaggcattaggctatagccagtgtggattactattgacagaacatgcattattctttcccatttgtatttttgattcaggctgctttttagactggga

SEQ ID NO: 603532 - DNA, 120 bp, Artificial Sequence
  ENSG00000175054_185 (sequence is synthesized)
tgtctttttatatatttaattttttttctgtgattttacttaatgttgtatataatcattcctttgcttgtgaaaagttgggattgaagtactacttatttacctactcacccatatgct

SEQ ID NO: 603533 - DNA, 120 bp, Artificial Sequence
  ENSG00000175054_186 (sequence is synthesized)
attgctggtccctttagtcagttgcagtaactgtctaatgagggagaaatcatagaagaaggaaaagttaatgtgtttttatttagttaaaatacttttatttttgatatttttatattt

SEQ ID NO: 603534 - DNA, 120 bp, Artificial Sequence
  ENSG00000175054_187 (sequence is synthesized)
tgtgcatgataaaacaacaaaatcactaatttagattttgggactacttttcaagtaccttttaaatttttttgtacatagtcatgtctttgctgtttattgcagaagtgtcatttctct

SEQ ID NO: 603535 - DNA, 120 bp, Artificial Sequence
  ENSG00000175054_188 (sequence is synthesized)
acctttctcataatcataagaaaaatcctgaccaggcatggtggctcatgccaacaataccaatactttgggaggacaaggctggaggattgcttgaggccaggagcctgggcaacatag

SEQ ID NO: 603536 - DNA, 120 bp, Artificial Sequence
  ENSG00000175054_189 (sequence is synthesized)
gatgaaaagtggaacttcaattaaaaaaaaaattgtcagtgatcctgtgtatttcccatcacatttcatgtaatattaaaaattaataaaccacacaaatatttaaggcaggaacagcaa

SEQ ID NO: 603537 - DNA, 120 bp, Artificial Sequence
  ENSG00000175054_190 (sequence is synthesized)
aaagaaatgacaaaggagactaagtgagagtggccagaaagagaggagaaaacttggaagatggtggcctcacagaagtcaagggatgaaagcatttgaaataagtgacttggacaacag

SEQ ID NO: 603538 - DNA, 120 bp, Artificial Sequence
  ENSG00000175054_191 (sequence is synthesized)
aaacatattgaagagagttcaaatgagatcagagttgtaaaatatctcttggatttaaggagctccttagtggagtggtgaagactgaagctgaaaagacatagttttaggaatcaatgt

SEQ ID NO: 603539 - DNA, 120 bp, Artificial Sequence
  ENSG00000175054_192 (sequence is synthesized)
gaggtagagaatcctttttagaagcctgcttctgaaggaattgagagaaagggcaataacttgtgagagatcttggagaaaaacaaaatatgtgatttttattttaccaaaatttttatg

SEQ ID NO: 603540 - DNA, 120 bp, Artificial Sequence
  ENSG00000175054_193 (sequence is synthesized)
ctttttaaagtcctacactctttagagacttgatattacttctgctttgaagatttttaaaaatgcctttcatgatatatgtgtatatacacacacacacatatcatatatatgtataaa

SEQ ID NO: 603541 - DNA, 120 bp, Artificial Sequence
  ENSG00000175054_194 (sequence is synthesized)
aaaatttaacccatccagacactactttgatgtatcttttaaagtggtgacataaatggagttttctcctaagttgcgaattcttccagcactatttcatgttgggcagtgggcaaccca

SEQ ID NO: 603542 - DNA, 120 bp, Artificial Sequence
  ENSG00000175054_195 (sequence is synthesized)
ccagaacaaatcagccctcctgagaaaacctttacaagaagttagctattccttttccacatcaaagattgagtctgcttttgactttgctctgcctagataaaggtcacatacttttga

SEQ ID NO: 603543 - DNA, 120 bp, Artificial Sequence
  ENSG00000175054_196 (sequence is synthesized)
ataggcacatgctactgtgcctggcttcagtttttgtaaacaaagttttattagaacacagccatgctcattcttttacttattgtctgtgactactacaaaggcaacttgggcactcaa

SEQ ID NO: 603544 - DNA, 120 bp, Artificial Sequence
  ENSG00000175054_197 (sequence is synthesized)
aaagcacatgtataaaaataaccaggaaatttttttgacttttcagtgagtatataagtatatggattatcacaaaataaatatactcatgaaactgccaccacatcaagaaatagaata

SEQ ID NO: 603545 - DNA, 120 bp, Artificial Sequence
  ENSG00000175054_198 (sequence is synthesized)
ttatttgagctctataaccccactacccttcatcccagtaatcactattctcaccctctgtctcaaagttaactacatcctagcctgaaaatttttcagcaaaaccaatttataacttct

SEQ ID NO: 603546 - DNA, 120 bp, Artificial Sequence
  ENSG00000175054_199 (sequence is synthesized)
ttactaggtattaaactttatatagatggtgttgtaagagatatacctctcaataatccatgggtcaatgaaaactttcaatggaaattgaaaagtactttgaactgaatgataataaaa

SEQ ID NO: 603547 - DNA, 120 bp, Artificial Sequence
  ENSG00000175054_200 (sequence is synthesized)
atggcatatcatatcctgtgcagctaaagccattcttaaaagggatttaaatttttatttgcatatattcgaagaaaataaaggttcaaaattaacgagttaagtatctatcccaaagag

SEQ ID NO: 603548 - DNA, 120 bp, Artificial Sequence
  ENSG00000175054_201 (sequence is synthesized)
ttagaaaaggaactaaaaaagtagggagagaaataaaaaagtagaagaaaggaaataataaagcaaagagcaggtggctagaatttgtgggacagattaactgagagaaaaaagttaaac

SEQ ID NO: 603549 - DNA, 120 bp, Artificial Sequence
  ENSG00000175054_202 (sequence is synthesized)
agagtagttcctatctgcataggaattgtgttcgctgaataccagcctgcacatgaataattcagaattctatgaggccaagctaggaataactgctggggaaagaataaacatgcagag

SEQ ID NO: 603550 - DNA, 120 bp, Artificial Sequence
  ENSG00000175054_203 (sequence is synthesized)
gctataagaacaatttccagagctcacacgggattgagattcattcagattacaggattgagagttattcagtccaccagccagattaagaggcctcattgcataatatggagcattcag

SEQ ID NO: 603551 - DNA, 120 bp, Artificial Sequence
  ENSG00000175054_204 (sequence is synthesized)
taaagaccttaaaagggccacaccttagaagtaggactaaattagtcctaggctaaaaactactctatatccatactagaagggcagtaaaacaagctttaagatgattacactgatctt

SEQ ID NO: 603552 - DNA, 120 bp, Artificial Sequence
  ENSG00000175054_205 (sequence is synthesized)
caagtaaccttactgcctgccagatcaaagcctaacactctttaaagcaagacaacaaaatctaaaacttgacaatgtaaaaatatatccagcatccattaaaaaattactctgtgaatg

SEQ ID NO: 603553 - DNA, 120 bp, Artificial Sequence
  ENSG00000175054_206 (sequence is synthesized)
aagaagcaggaatatttgagccacagataggaaaaaaaataaatcagtagaaatagttctagaaatgacaggatttaaaaacagctattgtatataggctccataagtttaagaacataa

SEQ ID NO: 603554 - DNA, 120 bp, Artificial Sequence
  ENSG00000175054_207 (sequence is synthesized)
acaaaaataagagcatgatgagaagagagagaaatcaaagatacaagaaagacctaaatgggaccaacagccaaagcaaatggcacagacagtgctaatctttagatccaggaagtgttg

SEQ ID NO: 603555 - DNA, 120 bp, Artificial Sequence
  ENSG00000175054_208 (sequence is synthesized)
cattctgatgaagataaataggagtccagctcctgttccttggttacaagaagatgtcatgccacctaagaaactaaccttgatttgcattaaaaactatattatcctaaagggcagtga

SEQ ID NO: 603556 - DNA, 120 bp, Artificial Sequence
  ENSG00000175054_209 (sequence is synthesized)
taatgaggcaagttctgaaaccatacttgtaagtttcaccttcccagttagagagatcttctgaatttattctagtatgtaagacacaacaacttatgaggcacacaaaaactcaccagt

SEQ ID NO: 603557 - DNA, 120 bp, Artificial Sequence
  ENSG00000175054_210 (sequence is synthesized)
acttaacagcagaatttgatagcaaatattccagttctcccatctctgcctgggtactaaagccagggttagggaagagagatgttgtcagactaccaacttttcaggttctgtttcttc

SEQ ID NO: 603558 - DNA, 120 bp, Artificial Sequence
  ENSG00000175054_211 (sequence is synthesized)
tgcatacacccctaatttcctgtcataaaggcctcagtagctgcttctcttgttctggttgcctatacatgatgtagacagaaatgagtagagaaaagaatagaggctgactactgtaga

SEQ ID NO: 603559 - DNA, 120 bp, Artificial Sequence
  ENSG00000175054_212 (sequence is synthesized)
atgacatgcagatccaaggggccacatattgcatgattccacttacatgaaatggccagaataagcaaatccatagagacagaaggtagattaatgggtactagagactgaggttggggc

SEQ ID NO: 603560 - DNA, 120 bp, Artificial Sequence
  ENSG00000175063_0 (sequence is synthesized)
gcagttgcagtcgtgttctccgagttcctgtctctctgccaacgccgcccggatggcttcccaaaaccgcgacccagccgccactagcgtcgccgccgcccgtaaaggagctgagccgag

SEQ ID NO: 603561 - DNA, 120 bp, Artificial Sequence
  ENSG00000175063_1 (sequence is synthesized)
cgggggcgccgcccggggtccggtgggcaaaaggctacagcaggagctgatgaccctcatgatgtctggcgataaagggatttctgccttccctgaatcagacaaccttttcaaatgggt

SEQ ID NO: 603562 - DNA, 120 bp, Artificial Sequence
  ENSG00000175063_2 (sequence is synthesized)
agggaccatccatggagcagctggaacagtatatgaagacctgaggtataagctctcgctagagttccccagtggctacccttacaatgcgcccacagtgaagttcctcacgccctgcta

SEQ ID NO: 603563 - DNA, 120 bp, Artificial Sequence
  ENSG00000175063_3 (sequence is synthesized)
gtctgccctgtatgatgtcaggaccattctgctctccatccagagccttctaggagaacccaacattgatagtcccttgaacacacatgctgccgagctctggaaaaaccccacagcttt

SEQ ID NO: 603564 - DNA, 120 bp, Artificial Sequence
  ENSG00000175063_4 (sequence is synthesized)
taagaagtacctgcaagaaacctactcaaagcaggtcaccagccaggagccctgacccaggctgcccagcctgtccttgtgtcgtctttttaatttttccttagatggtctgtccttttt

SEQ ID NO: 603565 - DNA, 120 bp, Artificial Sequence
  ENSG00000175063_5 (sequence is synthesized)
gtgatttctgtataggactctttatcttgagctgtggtatttttgttttgtttttgtcttttaaattaagcctcggttgagcccttgtatattaaataaatgcatttttgtcctttttta

SEQ ID NO: 603566 - DNA, 120 bp, Artificial Sequence
  ENSG00000175063_6 (sequence is synthesized)
ggtgagattcgagagatgggggacaggccaggagctcagaccgctctttgagactctcccgaaggagaatgggagggtaggggcgctgccagactccttccctggtgggcctagatgaag

SEQ ID NO: 603567 - DNA, 120 bp, Artificial Sequence
  ENSG00000175063_7 (sequence is synthesized)
acgctcaaggaccctcgtgacttggccgagacaggggaagggagaagttgagtcgggcaaggaagagatgctaaagcctggggaattaagaacatgccagaatcatcccgagggagtctg

SEQ ID NO: 603568 - DNA, 120 bp, Artificial Sequence
  ENSG00000175063_8 (sequence is synthesized)
cttccctgaatcagacaaccttttcaaatgggtagggaccatccatggagcagctggaacaagaaactcaagattctagcaagccccttgtgtggggcttgggttgggacatgaggctgc

SEQ ID NO: 603569 - DNA, 120 bp, Artificial Sequence
  ENSG00000175065_0 (sequence is synthesized)
caccacagttatcacccatgccctcctaaaagggtgtctcaaagcatatctttctgtagagcagaattcggaactgagaagacgagggctcaaattgaatctcacaggatttgcgtgcaa

SEQ ID NO: 603570 - DNA, 120 bp, Artificial Sequence
  ENSG00000175065_1 (sequence is synthesized)
gagaaacccaaaggaatggattggctcttcttcagaaacatttgccttttgatcattctaatggtggtgatggaagtaaacagtgaatttattgttgaggtgaaggaatttgacattgaa

SEQ ID NO: 603571 - DNA, 120 bp, Artificial Sequence
  ENSG00000175065_2 (sequence is synthesized)
aatggcactacaaaatggcaaacagtcagaagacaaaagcgggagtggatcaagtttgccgcagcctgtcgagaaggagaggacaactcgaagaggaaccccattgccaaaattcgatca

SEQ ID NO: 603572 - DNA, 120 bp, Artificial Sequence
  ENSG00000175065_3 (sequence is synthesized)
gactgcgaatcgaaccagaagataacataccggatttctggagtagggattgatcgaccaccatatggggtattcaccattaatcctcgcactggggaaattaacatcacttcagtggta

SEQ ID NO: 603573 - DNA, 120 bp, Artificial Sequence
  ENSG00000175065_4 (sequence is synthesized)
gacagagaaataactccacttttcttgatctattgccgggctctgaattcacggggtgaagatttagaaaggcctcttgagcttagagtcaaagttatggacataaatgataacgctcca

SEQ ID NO: 603574 - DNA, 120 bp, Artificial Sequence
  ENSG00000175065_5 (sequence is synthesized)
gtcttttcgcaaagtgtatacacagccagcattgaagaaaatagtgatgccaatacattggtagtaaagttatgtgccacagatgcagatgaagaaaatcatctgaattctaaaattgcc

SEQ ID NO: 603575 - DNA, 120 bp, Artificial Sequence
  ENSG00000175065_6 (sequence is synthesized)
tacaagatcgtctctcaggagccatcaggtgcacccatgttcattctgaataggtacactggagaagtctgcaccatgtccagtttcttggacagagagcaacacagtatgtacaacctg

SEQ ID NO: 603576 - DNA, 120 bp, Artificial Sequence
  ENSG00000175065_7 (sequence is synthesized)
gttgtgagaggctcagatcgggatggagctgcagatggactgtcttctgagtgtgactgtagaatcaaggttttagacgtcaacgataatttccccaccttagagaaaacttcatactca

SEQ ID NO: 603577 - DNA, 120 bp, Artificial Sequence
  ENSG00000175065_8 (sequence is synthesized)
gccagtattgaagagaattgtttaagttcggaactgatacgattacaagcaattgatcttgatgaagaaggcactgataactggttggctcaatatttaattctctctggaaatgatggg

SEQ ID NO: 603578 - DNA, 120 bp, Artificial Sequence
  ENSG00000175065_9 (sequence is synthesized)
aattggttcgatattcaaacagatccacaaaccaatgaaggcattttgaaagttgtcaagatgctggattatgaacaagcacctaacattcagcttagtatcggagttaaaaaccaagct

SEQ ID NO: 603579 - DNA, 120 bp, Artificial Sequence
  ENSG00000175065_10 (sequence is synthesized)
gattttcactactccgttgcttctcaattccaaatgcacccaacccctgtgagaattcaagttgttgatgtgagagaaggacctgcatttcatccaagtactatggcttttagtgtgcgg

SEQ ID NO: 603580 - DNA, 120 bp, Artificial Sequence
  ENSG00000175065_11 (sequence is synthesized)
gaaggaataaaaggaagttccttattgaattatgtgcttggcacatatacagccatagatttggacacaggaaaccctgcaacagatgtcagatatatcatagggcatgatgcaggcagc

SEQ ID NO: 603581 - DNA, 120 bp, Artificial Sequence
  ENSG00000175065_12 (sequence is synthesized)
tggttaaaaattgattcaagaactggtgagatacaattttctagagaatttgataagaagtcaaaatatattatcaatgggatatacacagcagagatcctggctatagatgatggctct

SEQ ID NO: 603582 - DNA, 120 bp, Artificial Sequence
  ENSG00000175065_13 (sequence is synthesized)
ggaaaaacagctacaggaaccatatgtattgaggttcctgatatcaatgattattgtccaaacatttttcctgaaagaagaaccatctgcattgactctccatcagtccttatctctgtt

SEQ ID NO: 603583 - DNA, 120 bp, Artificial Sequence
  ENSG00000175065_14 (sequence is synthesized)
aatgaacattcttatgggtctccgtttactttctgtgttgttgatgagccaccaggaatagctgacatgtgggatgtcagatcaacaaatgctacctcggcaatccttacggctaagcag

SEQ ID NO: 603584 - DNA, 120 bp, Artificial Sequence
  ENSG00000175065_15 (sequence is synthesized)
gttttatctccaggattttatgaaatcccaatcctggtgaaggacagctataacagagcatgtgaattggcacaaatggtgcagttatatgcctgtgattgcgatgacaaccacatgtgc

SEQ ID NO: 603585 - DNA, 120 bp, Artificial Sequence
  ENSG00000175065_16 (sequence is synthesized)
ctggactctggtgccgcgggcatctacacagaggacataactggtgacacgtatgggcctgtcactgaagaccaagctggagtttcaaatgttggtcttggaccagcagggattggcatg

SEQ ID NO: 603586 - DNA, 120 bp, Artificial Sequence
  ENSG00000175065_17 (sequence is synthesized)
atggttctgggcatcctgctactgattttggctccactcttgctgctcctgtgttgctgcaaacagagacagccagaaggcctgggaacaagatttgctcctgtgcctgagggcggagaa

SEQ ID NO: 603587 - DNA, 120 bp, Artificial Sequence
  ENSG00000175065_18 (sequence is synthesized)
ggagtgatgcagtcttggagaattgaaggggcccatcccgaggacagggatgtgtcaaatatatgtgcacccatgacagcctcaaatacccaggatcggatggattcctctgaaatctac

SEQ ID NO: 603588 - DNA, 120 bp, Artificial Sequence
  ENSG00000175065_19 (sequence is synthesized)
gcagccgggggcacggtggaaggaggtgtatcgggagtggagctcaacacaggtatggggacagccgttggcctcatggccgcaggggccgcaggagcctcaggggccgcaaggaagagg

SEQ ID NO: 603589 - DNA, 120 bp, Artificial Sequence
  ENSG00000175065_20 (sequence is synthesized)
agctctaccatgggaaccctgcgggactacgctgacgcagacatcaacatggctttcttggacagctacttctcggagaaagcgtatgcttatgcagatgaagatgaaggtcgaccagcc

SEQ ID NO: 603590 - DNA, 120 bp, Artificial Sequence
  ENSG00000175065_21 (sequence is synthesized)
aatgactgcttgctcatttatgaccacgagggagtcgggtctcccgtaggctctattggttgttgcagttggattgtggatgacttagatgaaagctgcatggaaactttagatccaaaa

SEQ ID NO: 603591 - DNA, 120 bp, Artificial Sequence
  ENSG00000175065_22 (sequence is synthesized)
tttaggactcttgctgagatctgcttaaacacagaaattgaaccatttccttcacaccaggcttgtataccaatcagtactgacctccctttgctcggacctaattactttgttaatgaa

SEQ ID NO: 603592 - DNA, 120 bp, Artificial Sequence
  ENSG00000175065_23 (sequence is synthesized)
tcttcaggattgactccctcagaagttgaattccaagaagaaatggcagcatctgaacccgtggtccatggggatattattgtgactgagacttacggtaatgctgatccatgtgtgcaa

SEQ ID NO: 603593 - DNA, 120 bp, Artificial Sequence
  ENSG00000175065_24 (sequence is synthesized)
cccactacaattatttttgatcctcagcttgcacccaatgttgtagtaaccgaagcagtaatggcacctgtctatgatattcaagggaatatttgtgtacctgctgagttagcagattac

SEQ ID NO: 603594 - DNA, 120 bp, Artificial Sequence
  ENSG00000175065_25 (sequence is synthesized)
aacaatgtaatctatgctgagagagtactggctagtcctggtgtgcctgacatgagcaatagtagcacgactgagggttgtatgggacctgtgatgagcggcaatattttagtagggcca

SEQ ID NO: 603595 - DNA, 120 bp, Artificial Sequence
  ENSG00000175065_26 (sequence is synthesized)
gaaattcaagtgatgcaaatgatgagtccagaccttcccataggccaaaccgttggctccacatcccccatgacatctcgacacagagtaacacgatacagtaacatacattacacccaa

SEQ ID NO: 603596 - DNA, 120 bp, Artificial Sequence
  ENSG00000175065_27 (sequence is synthesized)
cagtaagtgctttatggtcagtattctatgtggagaccttgcaccttgtaatcatcaatacatccaccaaaaatatataatgtaccatatatattaatagtcaacaaatactcagatatt

SEQ ID NO: 603597 - DNA, 120 bp, Artificial Sequence
  ENSG00000175065_28 (sequence is synthesized)
ctaaggtcaatgccattatttgattataccattttgagggtgaatatggctaggcactttagataagcctttttaaaattctttctgattttaaataatgcgtcaaaaaatgtgcagaaa

SEQ ID NO: 603598 - DNA, 120 bp, Artificial Sequence
  ENSG00000175065_29 (sequence is synthesized)
atgtattgcatcccttgatactgtctaacgaatagcacataactcatattgtgaatcctatgggtcttgaggcctgtagaaccaatcttgtaaaccaagatgccttgttcttggaagtta

SEQ ID NO: 603599 - DNA, 120 bp, Artificial Sequence
  ENSG00000175065_30 (sequence is synthesized)
caaaagaagccctgtctacatccaccagccatatttttcgttagggaaatatttatattaaaatttttaattgaaaagttgaatgaaatgtacattctgaaaggaaattgaaaaggaacg

SEQ ID NO: 603600 - DNA, 120 bp, Artificial Sequence
  ENSG00000175065_31 (sequence is synthesized)
tagagtatctgtcaatatctttagatatctgaagtcatttgtctcttcaaaagatttttcaatattatgcgctattaagcaataggagatgcttaatataataagaaaagagtttgccaa

SEQ ID NO: 603601 - DNA, 120 bp, Artificial Sequence
  ENSG00000175065_32 (sequence is synthesized)
ctgaaagcatggctggaaatggttcatcaaagaaaaatatatatttttattgaactttattgatttatatgattaactgtaaattaatctagaatagcaaaaaaaaatgacaatcctaaa

SEQ ID NO: 603602 - DNA, 120 bp, Artificial Sequence
  ENSG00000175065_33 (sequence is synthesized)
gtagaaagagttattggggaaatattagagttttccccacttacagggaattttttccctactgttgccaattatgtcagaaaaatacatgaaatatggcttaaccaatttcattgacct

SEQ ID NO: 603603 - DNA, 120 bp, Artificial Sequence
  ENSG00000175065_34 (sequence is synthesized)
gaatcgtagagctttcaattggcaaccagatattctccaaaagcactctgtagttattcatatattctacaatatttacttagaagcaactaggtgttgggtgctagtcttggctctgtg

SEQ ID NO: 603604 - DNA, 120 bp, Artificial Sequence
  ENSG00000175065_35 (sequence is synthesized)
aatatacaggtaaagaagacagacatggtttctgccttcatagagcttctattcatttctagacttaaaataaaactctgggatatggctttaagttcctaacaacaataattaaccaac

SEQ ID NO: 603605 - DNA, 120 bp, Artificial Sequence
  ENSG00000175065_36 (sequence is synthesized)
tacttaagtccattaccaagttgtgtttctctttgcaacactactgtttatgttgaataaataaaatggaaacacattgcttacttttcgtaggcataaagctgacttgagaaaaagaat

SEQ ID NO: 603606 - DNA, 120 bp, Artificial Sequence
  ENSG00000175065_37 (sequence is synthesized)
ctctagccaggtaattttacttaattctgtaaaatatgtatacagtagcagcaataatgtgactgagataatgtaaatgaaataaacttattttcaaggcttaatccttttgaaaggaaa

SEQ ID NO: 603607 - DNA, 120 bp, Artificial Sequence
  ENSG00000175066_0 (sequence is synthesized)
aggcctctctaggctctccggctgagccgggttggggcccgggttgggccgcccggggactctggagcattgggatttgtagcgcgccctctgggtaggcggctgtagcggagaggcgtg

SEQ ID NO: 603608 - DNA, 120 bp, Artificial Sequence
  ENSG00000175066_1 (sequence is synthesized)
cgggatcgggatgtcggggctgctcacggacccggagcagagagcgcaggagccgcggtaccccggcttcgtgctggggctggatgtgggcagttctgtgatccgctgccacgtctatga

SEQ ID NO: 603609 - DNA, 120 bp, Artificial Sequence
  ENSG00000175066_2 (sequence is synthesized)
ccgggcggcgcgggtctgcggctccagcgtgcagaaggtagaaaatctttatcctcaaattggctgggtagaaattgatcctgatgttctttggattcaatttgttgccgtaataaaaga

SEQ ID NO: 603610 - DNA, 120 bp, Artificial Sequence
  ENSG00000175066_3 (sequence is synthesized)
agcagtcaaagctgcaggaatacagatgaatcaaattgttggtcttggcatttcaacacagagagcaacttttattacgtggaacaagaaaacaggaaatcattttcacaactttataag

SEQ ID NO: 603611 - DNA, 120 bp, Artificial Sequence
  ENSG00000175066_4 (sequence is synthesized)
ttggcaagacttaagagctgttgaacttgtaaaatcttggaataattctcttcttatgaagatatttcacagttcttgccgagtgcttcactttttcactagaagtaaacgactttttac

SEQ ID NO: 603612 - DNA, 120 bp, Artificial Sequence
  ENSG00000175066_5 (sequence is synthesized)
agccagtttgttcactttcacaacccagcagacttctttgagattggtctggattttacagaacttgactgaggtgcaaaaggcagttgaagaagaaaattgctgctttgggactattga

SEQ ID NO: 603613 - DNA, 120 bp, Artificial Sequence
  ENSG00000175066_6 (sequence is synthesized)
tacctggttgttatataagctcacaaaaggttctgtatatgccacagatttttcaaatgctagtacaactggactttttgacccatataagatgtgttggagtgggatgattacctctct

SEQ ID NO: 603614 - DNA, 120 bp, Artificial Sequence
  ENSG00000175066_7 (sequence is synthesized)
aatttcgataccactttctctcctacctcctgtgagggacacaagccacaattttggatcagtggatgaagagatatttggtgtgcctataccaatagttgccttggttgctgaccagca

SEQ ID NO: 603615 - DNA, 120 bp, Artificial Sequence
  ENSG00000175066_8 (sequence is synthesized)
atcagccatgtttggagagtgctgcttccagacaggtgatgtgaaattaaccatgggaactgggacatttttggatattaacactggaaatagccttcaacagactactggaggctttta

SEQ ID NO: 603616 - DNA, 120 bp, Artificial Sequence
  ENSG00000175066_9 (sequence is synthesized)
tccattaattgggtggaagattgggcaagaagtcgtatgcttagctgaaagcaatgcaggagacactggtactgccataaaatgggctcagcagttagaccttttcacagatgctgctga

SEQ ID NO: 603617 - DNA, 120 bp, Artificial Sequence
  ENSG00000175066_10 (sequence is synthesized)
gactgaaaaaatggccaaaagtttggaggattctgaaggagtttgttttgttccatcttttagtggattacaggctccattaaatgacccctgggcatgtgcctcttttatgggtttgaa

SEQ ID NO: 603618 - DNA, 120 bp, Artificial Sequence
  ENSG00000175066_11 (sequence is synthesized)
gccttctaccagtaaataccatcttgtacgagcaatattggagtcaatagctttcagaaacaaacagttatatgagatgatgaagaaagagattcatattcctgtaagaaaaatccgggc

SEQ ID NO: 603619 - DNA, 120 bp, Artificial Sequence
  ENSG00000175066_12 (sequence is synthesized)
agatggaggagtttgtaagaatggttttgtcatgcagatgacttcagacctgattaatgagaatatagacagacctgccgacattgacatgtcatgcctgggtgcagcttctctagctgg

SEQ ID NO: 603620 - DNA, 120 bp, Artificial Sequence
  ENSG00000175066_13 (sequence is synthesized)
ccttgctgttgggttttggactgacaaggaggaactaaagaaactgagacaaagtgaagtggttttcaagccacagaagaaatgtcaagaatatgaaatgagtctggaaaactgggccaa

SEQ ID NO: 603621 - DNA, 120 bp, Artificial Sequence
  ENSG00000175066_14 (sequence is synthesized)
agcagtgaaacgctccatgaattggtataacaagacataacactaaatgaaatgatcaaaaccataggtagctggtttatgtgacgtgcagatgagatgaagctcagggataacccatat

SEQ ID NO: 603622 - DNA, 120 bp, Artificial Sequence
  ENSG00000175066_15 (sequence is synthesized)
gacaatgactaagaggagaaaattttaaataagcttcataacttaagaagcattgcttttaaaaaaacaaaacggaacaaaaaactcttatttttttcccctaaaccatggtaaggcagc

SEQ ID NO: 603623 - DNA, 120 bp, Artificial Sequence
  ENSG00000175066_16 (sequence is synthesized)
aatacctcaaaactttatatcttctattttgtagcaaattccaaaggacattagtcatttccaaccacattttgacagttatgggtcctcttcctttttatactgggtcagtggtacata

SEQ ID NO: 603624 - DNA, 120 bp, Artificial Sequence
  ENSG00000175066_17 (sequence is synthesized)
ggaacataatgatttaccatccaagctaatagttctgggtcaagtaccatgcacatattgttccaaaattatgtgaaacgtatttctttaattctttaagtgggctatttgaagtacata

SEQ ID NO: 603625 - DNA, 120 bp, Artificial Sequence
  ENSG00000175066_18 (sequence is synthesized)
tagctaaaaagaaagaataactgagaaaatgtggaattttgaaacattaatattttatgtttaaagccataatttcctaatattatatccaaatatgagcttaatatgtccctctcagat

SEQ ID NO: 603626 - DNA, 120 bp, Artificial Sequence
  ENSG00000175066_19 (sequence is synthesized)
aagcttatgagatagttaatgctttcctttactggtcttaaagacactgccttaatttttccttgttcaaccaaaatctgagcattctttctatgttgaaaacactgaaaaactaatttt

SEQ ID NO: 603627 - DNA, 120 bp, Artificial Sequence
  ENSG00000175066_20 (sequence is synthesized)
agttaatgaactagaaagaatattgatttttaagaaacagaaaaatactacttattttccttctcaaataacgtttctttcaaaaacttctggctgaagtataacatgctggtagttaac

SEQ ID NO: 603628 - DNA, 120 bp, Artificial Sequence
  ENSG00000175066_21 (sequence is synthesized)
ataaatcttgtctttctcttgttctttatctttctttgttatttagatgcttgtataaatgtcttttgtttttattaagtgcctaattgacagagcttaatttgaagaagtgccctaatt

SEQ ID NO: 603629 - DNA, 120 bp, Artificial Sequence
  ENSG00000175066_22 (sequence is synthesized)
tattgaccacttaagaattgcctttattggggtattttatttgttcctgcgtctttttgatgtttgttcagtctactcatccctgtgagtatgtgtgggggacagctgatagaagggagg

SEQ ID NO: 603630 - DNA, 120 bp, Artificial Sequence
  ENSG00000175066_23 (sequence is synthesized)
agagtgtgtctatgctcaggattgccctttagccactcagccagagatccacagggagcaacaaggacagtttcacatgcttagactttcttggaagaaacagtgaggaggagtaagtcg

SEQ ID NO: 603631 - DNA, 120 bp, Artificial Sequence
  ENSG00000175066_24 (sequence is synthesized)
tgagtagtgtcaagctggatgtagaattgtcctaaggcagttgaccccaccttccaacatgttttcactttatttgcccctccctacatttgggttaggttccatttggatttgcagcaa

SEQ ID NO: 603632 - DNA, 120 bp, Artificial Sequence
  ENSG00000175066_25 (sequence is synthesized)
taatgactttatttctctcttggtcaggatttggcacataaaatccttttattatagaactagctattttagttacatagtaatgtaactaatggagagatttatagagaattttgtttt

SEQ ID NO: 603633 - DNA, 120 bp, Artificial Sequence
  ENSG00000175066_26 (sequence is synthesized)
tgctgtcatatatgtccattttggagacagatatgatagaactagaaattaagttgcatttctgcaagtgccatttgaatgaacttcaagtatcttcttaattattaaattttctgatga

SEQ ID NO: 603634 - DNA, 120 bp, Artificial Sequence
  ENSG00000175066_27 (sequence is synthesized)
attaatatttggaaatattaataaataggtattttatttactgtaaaaagtcaaacttcattatgtagataaatcttattcttttcattctttcccctgtttacatcctttttacaaagc

SEQ ID NO: 603635 - DNA, 120 bp, Artificial Sequence
  ENSG00000175066_28 (sequence is synthesized)
tcattctttcccctgtttacatcctttttacaaagcttagtcaccaattaaagctttcctatcaaaatcacatggaagctgctctgttgttttactgttacacattctgtttctcagtgg

SEQ ID NO: 603636 - DNA, 120 bp, Artificial Sequence
  ENSG00000175066_29 (sequence is synthesized)
gttacacattctgtttctcagtgggtgtaatttttttttctttttctttttttgtagagacagggtcttgctgtgttgcccagggtagtctttaattcctggcctcaagtgatcctccca

SEQ ID NO: 603637 - DNA, 120 bp, Artificial Sequence
  ENSG00000175066_30 (sequence is synthesized)
ttgcagccgtgaaccactgcacccagccaatgggtgtaatttcataggaaataattctttttgtcagaatgtactgaattgtaatattaatacctgaaaatttgttagttcacttctttt

SEQ ID NO: 603638 - DNA, 120 bp, Artificial Sequence
  ENSG00000175066_31 (sequence is synthesized)
gtaatattaatacctgaaaatttgttagttcacttcttttccacgttcttctttcccaacatataaccacaaaataaaggataaatactttgggctgtgtgcagtggctcatgcctgtaa

SEQ ID NO: 603639 - DNA, 62 bp, Artificial Sequence
  ENSG00000175066_32 (sequence is synthesized)
tcccagcactttggcaggctgaagtgggcggatcatttgaggtcaggagtccaacctggtca

SEQ ID NO: 603640 - DNA, 120 bp, Artificial Sequence
  ENSG00000175066_33 (sequence is synthesized)
gatcatgccactgcactgtagcctgggcaacagagcgacactgcgtctcaaaaaaaaaaaaaaaggatcaatacttttcagataatgttggaaagtaactttgaatgtccctcatcggaa

SEQ ID NO: 603641 - DNA, 120 bp, Artificial Sequence
  ENSG00000175066_34 (sequence is synthesized)
gataatgttggaaagtaactttgaatgtccctcatcggaattgagcatctcctcaagtgtcagtggctatttttttcttctgtgaatctaaaaactaatattttatttttaatatttgtg

SEQ ID NO: 603642 - DNA, 120 bp, Artificial Sequence
  ENSG00000175066_35 (sequence is synthesized)
gccatttttagtgataagactttaataaatatttttggacttaactaaaatcagaaacatgaccacatttgcttttgtggttgcagaaacagttgataagatcaattgagcaacaaaatt

SEQ ID NO: 603643 - DNA, 77 bp, Artificial Sequence
  ENSG00000175066_36 (sequence is synthesized)
ttgcagaaacagttgataagatcaattgagcaacaaaattgtcctttcttttttttttttttttttgagacattgtc

SEQ ID NO: 603644 - DNA, 120 bp, Artificial Sequence
  ENSG00000175066_37 (sequence is synthesized)
acaggcgtgagccaccatgcctggcttgtcctttctgtcttccaagtttgtttttcatttgtatgctaatatttgaagtttagaaaaatttgtgctacttctcagcatgttttattttcc

SEQ ID NO: 603645 - DNA, 120 bp, Artificial Sequence
  ENSG00000175066_38 (sequence is synthesized)
tagaaaaatttgtgctacttctcagcatgttttattttcccattatagatctatcagatatttttagaaggtctgcaactgtctgataaaggaagagaatgttcctgttcaatctatctt

SEQ ID NO: 603646 - DNA, 120 bp, Artificial Sequence
  ENSG00000175066_39 (sequence is synthesized)
tttggactggataaatctttattttgggatgctatgctgtactttataggatgtttagcaatatccctgacctctgccctctagctacaagtaccatccccctagttgttatggccaaaa

SEQ ID NO: 603647 - DNA, 120 bp, Artificial Sequence
  ENSG00000175066_40 (sequence is synthesized)
atgtcttcaaacattgccattctgagaggcaaaattgcccccagttgagagccactgatacaggctgttagaagaaaatcgaagactcagtgaatatagtgtcatactccttttctttct

SEQ ID NO: 603648 - DNA, 120 bp, Artificial Sequence
  ENSG00000175066_41 (sequence is synthesized)
gcctcattttaccttaggaaatggttgttagcaaaaaaattagttaatcgtatcttgaaataaatagggtatctattttgctgattaataaagaaaaaataaatctcagctgggcacagt

SEQ ID NO: 603649 - DNA, 85 bp, Artificial Sequence
  ENSG00000175066_42 (sequence is synthesized)
aggcggatcactggcgaatccctatctctacaaaaaatacacaaattagctgggtgtggtgacacacacatatagtcccagctaa

SEQ ID NO: 603650 - DNA, 120 bp, Artificial Sequence
  ENSG00000175066_43 (sequence is synthesized)
ttagctgggtgtggtgacacacacatatagtcccagctaattagggggctgaggtgggaagatcacttgagctccaggaggtggaggctgcagtgagccaagttggtgtcactgtactct

SEQ ID NO: 603651 - DNA, 120 bp, Artificial Sequence
  ENSG00000175066_44 (sequence is synthesized)
tcaatcaatcaatcaatcaatcaatcaatatctcatgctgtaattgtcttctgatgttttcatccacccagccccacctctgcagccttaattactggagtaggtccatgatttcagtgt

SEQ ID NO: 603652 - DNA, 120 bp, Artificial Sequence
  ENSG00000175066_45 (sequence is synthesized)
tactggagtaggtccatgatttcagtgtagggttaatgtattctgcagatcatctttgatttgacctgcttttttgcttcctttttatctctgaacaaaggagatcatcattctctttaa

SEQ ID NO: 603653 - DNA, 120 bp, Artificial Sequence
  ENSG00000175066_46 (sequence is synthesized)
tctgccttctgtgtaaatctctaccagactggaagctccctgaaagcagaaactgtctgcttccccagaacttagcactgtgctttcatgtatgtgggataaatttttactttgttagtg

SEQ ID NO: 603654 - DNA, 120 bp, Artificial Sequence
  ENSG00000175066_47 (sequence is synthesized)
caactttgtttgtacacgttatccttgatattacatacatttgttgatgggggcaatttatatttgttgtgagtaaaatacttttttgttggattaagaagaactatactcttcccagca

SEQ ID NO: 603655 - DNA, 79 bp, Artificial Sequence
  ENSG00000175066_48 (sequence is synthesized)
cttttttgttggattaagaagaactatactcttcccagcactttgggaggccaaggaggacggattacctgaggttagt

SEQ ID NO: 603656 - DNA, 74 bp, Artificial Sequence
  ENSG00000175066_49 (sequence is synthesized)
tgaggcaggagaaccgcttgaacccctgaggcagaggttgcggtaaactccatttcaaaaaaacaaaaacaaaa

SEQ ID NO: 603657 - DNA, 82 bp, Artificial Sequence
  ENSG00000175066_50 (sequence is synthesized)
ctactctgtagtgagagctagaatcctcatgttgtttatttaaaatttttggccaagtacagtggctcatgcctgtaatccc

SEQ ID NO: 603658 - DNA, 120 bp, Artificial Sequence
  ENSG00000175066_51 (sequence is synthesized)
gggaggctgaggccagaggatcacttgaagccaggagttcagttacagcttgggcagcaaagtgagaccttgtctctacaaaaaaattttttttaaattagccaggtgtggtggtatgcc

SEQ ID NO: 603659 - DNA, 120 bp, Artificial Sequence
  ENSG00000175066_52 (sequence is synthesized)
attagccaggtgtggtggtatgcccctgtagtcccagctactcaggaaaccgaagcaggagaatcgcttgaacacaggagtttgagggtgctatgagctatgattgtgccactgcactcc

SEQ ID NO: 603660 - DNA, 120 bp, Artificial Sequence
  ENSG00000175066_53 (sequence is synthesized)
agcctgggcaacagggcaaggccctgtcttaataaaataaaataaaattcttaatatgtttatatatttgaaaaactatttgtgtagagacacatgtctgtaaatacacatagatatatt

SEQ ID NO: 603661 - DNA, 120 bp, Artificial Sequence
  ENSG00000175066_54 (sequence is synthesized)
aactttttaagctttaattgaagcctttctcttcacaggttttatatatttgactgcagatgactaacagattgaattttaagagtgcgaaacactctggtgctatagggaaggaacttc

SEQ ID NO: 603662 - DNA, 120 bp, Artificial Sequence
  ENSG00000175066_55 (sequence is synthesized)
ataaatagcccctcctgtaagggaccagtctttaatttaaaacagtccagcccaggaatcttgcaagaattttgtaattatttgaggagagatgtagatataccctggagttctttgact

SEQ ID NO: 603663 - DNA, 120 bp, Artificial Sequence
  ENSG00000175066_56 (sequence is synthesized)
ttaagttattctagagtcatcccagagatggcctagaagacttgaatgtaccccaaaggattctgaatccctttgggaaatttagactatgattttcagtaagaattaaaagccccagga

SEQ ID NO: 603664 - DNA, 89 bp, Artificial Sequence
  ENSG00000175066_57 (sequence is synthesized)
gactatgattttcagtaagaattaaaagccccaggataatttgtgaggccaaggcgggaggatcgcttgagctcaggagttcgagacca

SEQ ID NO: 603665 - DNA, 85 bp, Artificial Sequence
  ENSG00000175066_58 (sequence is synthesized)
gagagagagagagagagagagaaagccccaaacataccttgggcctttacaacctacttggtcccagaatcgtcttattgtaaac

SEQ ID NO: 603666 - DNA, 120 bp, Artificial Sequence
  ENSG00000175066_59 (sequence is synthesized)
tttacaacctacttggtcccagaatcgtcttattgtaaacccaaagccaggtcttctggttcgaaccagtcaaaatgggtaatctaaaaaagttaaatagatgattcaaaatcgtgttgg

SEQ ID NO: 603667 - DNA, 120 bp, Artificial Sequence
  ENSG00000175066_60 (sequence is synthesized)
tggttttttctttttaaatcccctttccaagtaaaaggaatcttttttttttttttaagttttgaagcctcatagccataaatattttggcaccagcatctattggcacctaagtcattg

SEQ ID NO: 603668 - DNA, 120 bp, Artificial Sequence
  ENSG00000175066_61 (sequence is synthesized)
gctgtatcatattcccatgggacccttgttcctagaggaatgcaggaatgatcttggagtgggaaggacagaaacaggtgcttgcaaaatcagatatttctgaaattctctgttattcta

SEQ ID NO: 603669 - DNA, 120 bp, Artificial Sequence
  ENSG00000175066_62 (sequence is synthesized)
tttctactgtctttccccactttactataaatttgatctgttataaaatggctgtgtttagatagatacccgtgatgtttaggaaacaaatgatatagagactcccatttaaatgaatct

SEQ ID NO: 603670 - DNA, 120 bp, Artificial Sequence
  ENSG00000175066_63 (sequence is synthesized)
tatctttataagaaacagccaaactgttttccagactggctataccatcttacattcccaccaggaatgtatgagtgatccagtttctctgcatgctcgccagcatttggtgttgtcact

SEQ ID NO: 603671 - DNA, 120 bp, Artificial Sequence
  ENSG00000175066_64 (sequence is synthesized)
cagcatttggtgttgtcactatttcttatttcaaccattctgtttatccttttcagtgaaatatctgttcatatcttttgcccatttgccaattgaggcaggaggatcacttgagcccag

SEQ ID NO: 603672 - DNA, 120 bp, Artificial Sequence
  ENSG00000175066_65 (sequence is synthesized)
atatgatcactaaatgtttgcttaatgagccatatctttaaatatcttttttaaagtttttaaaagtcagtccagtggtttatgtgattatgtgggattttttaaatctttccaggcaaa

SEQ ID NO: 603673 - DNA, 120 bp, Artificial Sequence
  ENSG00000175066_66 (sequence is synthesized)
atgtgtatagcattttgaacatatttacactgtactgagcccaagagttctcatattctttctttgctcattatagagtatggtactaatactgtataatagtaaattttcaaagatacc

SEQ ID NO: 603674 - DNA, 120 bp, Artificial Sequence
  ENSG00000175066_67 (sequence is synthesized)
tttatttagaatgttagagtatacagatatatactttgtacatagttatcataatgtttctaacctttttatttaaagcaggctgatttgtgtaaaggtttcagaatgattttgttaata

SEQ ID NO: 603675 - DNA, 120 bp, Artificial Sequence
  ENSG00000175066_68 (sequence is synthesized)
agttattagaaactttcctatttgtacaagatggtaaatgtagattccaatttgtatgcctcagtaaattcataatcttatttctctgatgtgagccactgtgcctggccttctgtgatg

SEQ ID NO: 603676 - DNA, 120 bp, Artificial Sequence
  ENSG00000175066_69 (sequence is synthesized)
ctcttaatgaattttgcagttttattaaattgtcattgagaacctcataaatcattgttaagatctatacaaaaaatcaaggatccacagtaatagaatatttttcatctgcatatgaat

SEQ ID NO: 603677 - DNA, 120 bp, Artificial Sequence
  ENSG00000175066_70 (sequence is synthesized)
ttttcccttccctttttgtctacttttagatttaaaaaaaattaccaggacattcttattaaatactattacctgttttggtttctgcacattaagaaagtcacagagaagccagacaca

SEQ ID NO: 603678 - DNA, 90 bp, Artificial Sequence
  ENSG00000175066_71 (sequence is synthesized)
gctatatcctgggcaacatggtgaaacttggcaaaaacaaaaacaaggccgggcatggtggctcacacgtgtagtcccagcactttggga

SEQ ID NO: 603679 - DNA, 85 bp, Artificial Sequence
  ENSG00000175066_72 (sequence is synthesized)
gggcaacatggtgaaacttggcaaaaacaaaaacaaggccgggcatggtggctcacacgtgtagtcccagcactttgggaggcca

SEQ ID NO: 603680 - DNA, 120 bp, Artificial Sequence
  ENSG00000175066_73 (sequence is synthesized)
aaaaaaaaacaaaaacaacaacaacaacaacaaaaaacaaccagagaaatagcacttgttaactacaattgtgactctaggtaaacttgggccttaatatggttagacaagaagggtttt

SEQ ID NO: 603681 - DNA, 120 bp, Artificial Sequence
  ENSG00000175066_74 (sequence is synthesized)
gtaaacttgggccttaatatggttagacaagaagggttttaggtaacttgcctttttagatcctatttaggcttattagtctatattctacattcttgcacgatggaaattactagagaa

SEQ ID NO: 603682 - DNA, 120 bp, Artificial Sequence
  ENSG00000175066_75 (sequence is synthesized)
agaagtgggataattctttgttgtggggaaaataaaatttgttgtgaaaatatactgtattttaaaatatttagaaagattataaataactggagaaaagataatttcatatactaatat

SEQ ID NO: 603683 - DNA, 120 bp, Artificial Sequence
  ENSG00000175066_76 (sequence is synthesized)
gaattagcctagcagatgttaaaaatcctttctgaaaattataatctaaaattatttgggaaattacaatggaactgaataatctgtacgttggtatattaaagccatttttatattgtg

SEQ ID NO: 603684 - DNA, 120 bp, Artificial Sequence
  ENSG00000175066_77 (sequence is synthesized)
accattgagccagtattctatcatggaagtactttataaccttttctgacttgcttgtatattgtttatcagaaaacttaaattaaaaaaaattttttttaattctgagtggtatttagt

SEQ ID NO: 603685 - DNA, 120 bp, Artificial Sequence
  ENSG00000175066_78 (sequence is synthesized)
ttacatttggtactctgagacaaaacacagtgatggggcgaatatttatgttctgtttgataatgtgtaaccacaaacagtgttagggcaacttaaactagcagagaaagttgtatgtac

SEQ ID NO: 603686 - DNA, 120 bp, Artificial Sequence
  ENSG00000175066_79 (sequence is synthesized)
actagcagagaaagttgtatgtacatttaataaagtccttagccatcatctaccagtaaataagtttgtagaataatgaaatatttgccatttttgatttttttttttttttttgagaca

SEQ ID NO: 603687 - DNA, 120 bp, Artificial Sequence
  ENSG00000175066_80 (sequence is synthesized)
ggagtgcagtggtataatcatgcctcactgcagcctcggcttcctgggctcaggtgattcttccaccccagcctcccaagtagccaagaccacaggtgtgtgccacgacacctggctaat

SEQ ID NO: 603688 - DNA, 120 bp, Artificial Sequence
  ENSG00000175066_81 (sequence is synthesized)
tggctaattttttgtatttttggtagacataggattttgctgtgttcccctggctgatctcgaactcctagactggggccttctgccacctttgcctcccaaagtgctgggactacaggc

SEQ ID NO: 603689 - DNA, 120 bp, Artificial Sequence
  ENSG00000175066_82 (sequence is synthesized)
ctgtgccaagcctgtttttgatttttaagagtcctttcacattgcctttgatttcctgtggcagcttaagcaggaggtagagaccacctgttgcaagatgtgcagtctccacagtagctg

SEQ ID NO: 603690 - DNA, 120 bp, Artificial Sequence
  ENSG00000175066_83 (sequence is synthesized)
ggggagcagctgagggaaagggaatttaatttccaagttacaaaatcattatcatttagagaggatcggtcttattcaatctaggcataggtgcagggttagattaaggtatggctggaa

SEQ ID NO: 603691 - DNA, 86 bp, Artificial Sequence
  ENSG00000175066_84 (sequence is synthesized)
ctaggcataggtgcagggttagattaaggtatggctggaagagttaccaattagtgacagagggttctttaaatgattcactcttg

SEQ ID NO: 603692 - DNA, 66 bp, Artificial Sequence
  ENSG00000175066_85 (sequence is synthesized)
gtcctagctgaagtttgaggctgcagtgagctgtgatcttactgcactctagcctgggtgacagag

SEQ ID NO: 603693 - DNA, 120 bp, Artificial Sequence
  ENSG00000175066_86 (sequence is synthesized)
tgacagagcaagaccctgtctctaaaaaacaaaacaaaacaacaacaaaccaaaataaaaacaattcctgaggcatgtcagttatctgcagagtattagtcctagggagactcctatcct

SEQ ID NO: 603694 - DNA, 120 bp, Artificial Sequence
  ENSG00000175066_87 (sequence is synthesized)
ttaattttaaggaaaaggaaaaagaaacgaagatgtttaatcatgagagtacaataagtgagacaatgctctataataaaattggccactgttaagggcaatgggtttacatttgaacat

SEQ ID NO: 603695 - DNA, 120 bp, Artificial Sequence
  ENSG00000175066_88 (sequence is synthesized)
aaatcttggaataattctcttcttatgaaggacattaagaagacatacgcacacactccccattccagtgaagtttaataatagccaatcaaaggcgtatgtggtagacttcagtacttg

SEQ ID NO: 603696 - DNA, 120 bp, Artificial Sequence
  ENSG00000175066_89 (sequence is synthesized)
tacctcaggaagttctaaggaggtttgtggtggaccagagtttcacatgttagtgagaatttgtgtttctgtccttgagaaatggaaaagatacagactagatgaatgaaatgcccaaat

SEQ ID NO: 603697 - DNA, 120 bp, Artificial Sequence
  ENSG00000175066_90 (sequence is synthesized)
ttcatcttttataaaagctcaggatggatattgagatattatagataactagcagactgttagaagctcttatcattacaggcatgatggctcgcgcctgtaatctcaacactttggaag

SEQ ID NO: 603698 - DNA, 88 bp, Artificial Sequence
  ENSG00000175066_91 (sequence is synthesized)
ttttagtggattacagaccctaacgcgatcacggctcattgcagcctcaaacccctgggcacaagcaatccttccacctcagcctccc

SEQ ID NO: 603699 - DNA, 120 bp, Artificial Sequence
  ENSG00000175066_92 (sequence is synthesized)
tgagagttttcttgcaaactcttccttacagatagcatttctcctctcaaattacaaaattctagagagtctggaaagccttggcgtccattaaactccatacacatatgcatattactc

SEQ ID NO: 603700 - DNA, 120 bp, Artificial Sequence
  ENSG00000175066_93 (sequence is synthesized)
gctgttgaacttgtaaaatcttggaataattctcttcttatgaaggtaatctttttcttgtgtgatttggatattgttggttttttttttctgtaaatgtcccttaattgtattatttcc

SEQ ID NO: 603701 - DNA, 89 bp, Artificial Sequence
  ENSG00000175066_94 (sequence is synthesized)
ttgggcaacatgatatttcacagttcttgccgagtgcttcactttttcactagaagtaaacgactttttacagccagtttgttcacttt

SEQ ID NO: 603702 - DNA, 120 bp, Artificial Sequence
  ENSG00000175073_0 (sequence is synthesized)
gtgtctgagggagagagagcgagagtgagtgagtgtgagtgcggggtggggtggtggccgttacgttcggggcaacggctacggcagtggagaagtaagaagagaaacaacgtccggcgc

SEQ ID NO: 603703 - DNA, 120 bp, Artificial Sequence
  ENSG00000175073_1 (sequence is synthesized)
ttccgccttcgcttaggaggaggaagagctggtagggaaaggaaagtgcttcgccctgggcctggactggaccgagtcgggttggtgggggtctgggctatgagcttttgagggtcgcct

SEQ ID NO: 603704 - DNA, 120 bp, Artificial Sequence
  ENSG00000175073_2 (sequence is synthesized)
gggacgcggagcgagacacgagagccaggagctatgtctcagccgccgccgccgccgcctccgttgccgccgccacctcctccccctgaggctccacagactccgtcgtccttggcgtcg

SEQ ID NO: 603705 - DNA, 120 bp, Artificial Sequence
  ENSG00000175073_3 (sequence is synthesized)
gcggctgcttcgggggggcttttgaagcggagagaccggagaatcctttccgggagctgcccggatccgaagtgtcaggcgcgtctatttttcccggcctccggttctgtcagcatcgag

SEQ ID NO: 603706 - DNA, 120 bp, Artificial Sequence
  ENSG00000175073_4 (sequence is synthesized)
tgtaccgagtgcggccagcggcacgagcagcaacagctgctgggggttgaggaggtgaccgacccggacgtagtgctacacaacctgctgcggaacgcgctgctcggggttacgggggca

SEQ ID NO: 603707 - DNA, 120 bp, Artificial Sequence
  ENSG00000175073_5 (sequence is synthesized)
cccaagaagaacacggaactggtaaaggtgatgggcctttccaactatcactgcaaattgttgtcgcccatattagctcgctatggaatggacaaacagacaggccgggccaagcttctc

SEQ ID NO: 603708 - DNA, 120 bp, Artificial Sequence
  ENSG00000175073_6 (sequence is synthesized)
cgggacatgaaccagggcgaactgttcgattgcgccttactgggtgaccgcgccttcctcatagaaccagagcatgttaacactgtgggctatggcaaggaccgctccggaagcctcctg

SEQ ID NO: 603709 - DNA, 120 bp, Artificial Sequence
  ENSG00000175073_7 (sequence is synthesized)
tatttgcatgacactctggaggacattaagcgggccaataaaagccaggaatgtctcattccagtgcatgtggacggggatggacactgcttggtgcatgctgtgtctcgggctctagta

SEQ ID NO: 603710 - DNA, 120 bp, Artificial Sequence
  ENSG00000175073_8 (sequence is synthesized)
ggccgagagctcttctggcatgccttaagagagaatcttaaacagcactttcagcagcacctggcccgatatcaagctctgttccatgacttcattgatgctgctgagtgggaggacatt

SEQ ID NO: 603711 - DNA, 120 bp, Artificial Sequence
  ENSG00000175073_9 (sequence is synthesized)
atcaatgagtgtgaccctctgtttgtaccacctgagggtgttcccttgggcctgaggaatatccacatatttggtcttgccaatgtgctacatcgtcctattattctgttagattccctc

SEQ ID NO: 603712 - DNA, 120 bp, Artificial Sequence
  ENSG00000175073_10 (sequence is synthesized)
agtggcatgagaagctctggtgattattcagccacctttctacctgggctcatccctgcagagaagtgcactgggaaagatggtcatttgaacaaaccaatctgtattgcatggagcagc

SEQ ID NO: 603713 - DNA, 120 bp, Artificial Sequence
  ENSG00000175073_11 (sequence is synthesized)
tccggtagaaaccattatatccccttggtaggcataaaaggggctgctttgcccaaactgcctatgaatttgcttcctaaagcatggggtgtgcctcaggaccttattaaaaagtacata

SEQ ID NO: 603714 - DNA, 120 bp, Artificial Sequence
  ENSG00000175073_12 (sequence is synthesized)
aaacttgaagaggatggtggttgtgttattggaggtgacagaagtttgcaagataaatacttacttaggcttgttgctgctatggaagaagtctttatggacaaacatggtatccatcct

SEQ ID NO: 603715 - DNA, 120 bp, Artificial Sequence
  ENSG00000175073_13 (sequence is synthesized)
agtttggttgctgatgtccatcagtatttctacagaaggactggagtgataggagttcagcctgaggaagtcacagcagctgctaaaaaagcagtaatggataatcgccttcacaaatgt

SEQ ID NO: 603716 - DNA, 120 bp, Artificial Sequence
  ENSG00000175073_14 (sequence is synthesized)
ttgctctgtggtgccctttctgaacttcatgttcctccagagtggttggctcctggagggaaattgtataacctggcaaaaagtactcatggacagctgaggactgacaaaaattacagc

SEQ ID NO: 603717 - DNA, 120 bp, Artificial Sequence
  ENSG00000175073_15 (sequence is synthesized)
tttcccttgaacaatttggtttgctcatatgattcagtgaaagatgttctggtaccagactatggaatgagtaacctaacagcttgtaattggtgccatggcacatctgtgcgaaaggtc

SEQ ID NO: 603718 - DNA, 120 bp, Artificial Sequence
  ENSG00000175073_16 (sequence is synthesized)
agaggagatgggtctattgtgtatttggatggagacagaactaattctaggtccactggtggcaaatgtggttgtggattcaaacacttttgggatggtaaggagtatgacaatctacca

SEQ ID NO: 603719 - DNA, 120 bp, Artificial Sequence
  ENSG00000175073_17 (sequence is synthesized)
gaagctttccctattactttagaatggggtggaagagtggtcagagaaacagtatattggttccagtatgaaagtgattcatctttgaatagtaatgtttacgatgttgcaatgaaactt

SEQ ID NO: 603720 - DNA, 120 bp, Artificial Sequence
  ENSG00000175073_18 (sequence is synthesized)
gttaccaagcactttccaggtgaatttgggagtgaaatcctagttcagaaagttgtccacactatattgcatcagactgccaaaaagaatcccgatgattatactcctgtaaatatagat

SEQ ID NO: 603721 - DNA, 120 bp, Artificial Sequence
  ENSG00000175073_19 (sequence is synthesized)
ggtgctcacgcccaaagagttggagatgttcaaggacaagaatcagagtctcagctcccaactaaaattattcttactggacagaaaacaaaaactttgcacaaggaggagttaaacatg

SEQ ID NO: 603722 - DNA, 120 bp, Artificial Sequence
  ENSG00000175073_20 (sequence is synthesized)
agtaaaactgaaagaactattcaacagaatattacggaacaggcttctgtaatgcagaaacggaaaacagagaagttaaaacaagaacaaaaagggcaacccaggactgtttctcccagt

SEQ ID NO: 603723 - DNA, 120 bp, Artificial Sequence
  ENSG00000175073_21 (sequence is synthesized)
accattcgtgatggtccatcctctgcacctgctacacctaccaaggctccctattcaccgacaacttctaaggagaagaagatccgaatcacaactaatgatggacgacagtccatggtt

SEQ ID NO: 603724 - DNA, 120 bp, Artificial Sequence
  ENSG00000175073_22 (sequence is synthesized)
acccttaagtcttcaacaaccttttttgaacttcaggaaagtatagccagagaattcaacattcctccatatttacagtgtattcgatacgggtttcctcctaaagagttaatgccacca

SEQ ID NO: 603725 - DNA, 120 bp, Artificial Sequence
  ENSG00000175073_23 (sequence is synthesized)
caggcaggaatggaaaaggaaccagttcctttacagcatggcgacagaattacaatagaaattctaaaaagtaaagctgaaggtggtcagtctgctgcagcacactcagcccacactgtg

SEQ ID NO: 603726 - DNA, 120 bp, Artificial Sequence
  ENSG00000175073_24 (sequence is synthesized)
aaacaagaagatattgctgttactggtaaactgtcatctaaggaacttcaggagcaagctgaaaaagaaatgtactccttgtgtcttttagcaacattaatgggagaagatgtatggtct

SEQ ID NO: 603727 - DNA, 120 bp, Artificial Sequence
  ENSG00000175073_25 (sequence is synthesized)
tatgcaaagggacttcctcacatgtttcagcagggtggtgtattctacagtattatgaagaaaaccatgggtatggctgatggcaagcattgtacttttccacatctgcctggcaaaacc

SEQ ID NO: 603728 - DNA, 120 bp, Artificial Sequence
  ENSG00000175073_26 (sequence is synthesized)
tttgtctataatgcttctgaagatagactggaattgtgtgtggatgctgcaggacatttccccattggtcctgatgttgaagatttagttaaagaggctgtaagtcaggttcgagcagag

SEQ ID NO: 603729 - DNA, 120 bp, Artificial Sequence
  ENSG00000175073_27 (sequence is synthesized)
gctactacaagaagtagggaatcaagtccctcacatgggctattaaaactaggtagtggtggagtagtgaaaaagaaatctgagcaacttcataacgtaactgcctttcagggaaaaggg

SEQ ID NO: 603730 - DNA, 120 bp, Artificial Sequence
  ENSG00000175073_28 (sequence is synthesized)
cattctttaggaactgcatctggtaacccacaccttgatccaagagctagggaaacttcagttgtaagaaagcataatacagggacagactttagtaatagttccactaaaacagagcct

SEQ ID NO: 603731 - DNA, 120 bp, Artificial Sequence
  ENSG00000175073_29 (sequence is synthesized)
tctgtattcacagcttcttctagtaatagtgagcttattcgaatagctcctggagtagtaacaatgagagacggcaggcagcttgatcctgatttggttgaggcccagcgaaaaaaattg

SEQ ID NO: 603732 - DNA, 120 bp, Artificial Sequence
  ENSG00000175073_30 (sequence is synthesized)
caggaaatggtttcttctattcaggcttcaatggacaggcaccttcgggatcaaagtacagagcagtcaccatctgatcttcctcaaaggaaaacagaagttgtgagttcttctgcaaag

SEQ ID NO: 603733 - DNA, 120 bp, Artificial Sequence
  ENSG00000175073_31 (sequence is synthesized)
tctgggagtcttcagactggtttgcctgaatcttttcctttaactggtggtactgaaaatttgaatacagaaacaactgatggctgtgtagcagatgcactgggagcagcctttgccaca

SEQ ID NO: 603734 - DNA, 120 bp, Artificial Sequence
  ENSG00000175073_32 (sequence is synthesized)
aggtcaaaagcacaaaggggaaattccgtggaggagcttgaagagatggatagtcaagatgctgagatgactaacacaactgagccaatggatcactcttgatttaattagaggctaata

SEQ ID NO: 603735 - DNA, 120 bp, Artificial Sequence
  ENSG00000175073_33 (sequence is synthesized)
aaggcagaatgtttattgtgaatatgtaatatttgttggctgggccacgtaacttgattagtcattaaaaatcttgtacgtatataattcaaagattatatcttgttattcagtgcatga

SEQ ID NO: 603736 - DNA, 120 bp, Artificial Sequence
  ENSG00000175073_34 (sequence is synthesized)
tagcaagtgtgtgattggccatagcttttaatatactgctgcccaggctggctctgaatttctataaattagctgttagatctgctgagatgactttcttccatatatgtggttcattgg

SEQ ID NO: 603737 - DNA, 120 bp, Artificial Sequence
  ENSG00000175073_35 (sequence is synthesized)
aagttctttgtaattttaattccatgaaagtcttaatgtttccaacatgaaaattctcttacttaaatacgtttgatttctgaaaagcctacaaatggaggggaaatgagattgtgctaa

SEQ ID NO: 603738 - DNA, 120 bp, Artificial Sequence
  ENSG00000175073_36 (sequence is synthesized)
tgttgatgtcatcaaggtaaccatctcatatactagtgtcaaaaggtttatgtaaacttgaattttatctgaactaaattgtatcttaaaattcatacaattatttattagacagtggaa

SEQ ID NO: 603739 - DNA, 120 bp, Artificial Sequence
  ENSG00000175073_37 (sequence is synthesized)
tgcaaatgtttctatgaacgtaaacacattcatagagatttcttggcgaaaatatcttgagaatagaatgtaacgatataacattttgctgatttgtgcaagattggggaaaaatttctt

SEQ ID NO: 603740 - DNA, 120 bp, Artificial Sequence
  ENSG00000175073_38 (sequence is synthesized)
ctagattgatgaggtcaatgtgattcagttgtgttgctgtctgagccacagccaattgtgtgtgctctattaatatgttaccattatttttgattcctggcttggtcaagaacaacctga

SEQ ID NO: 603741 - DNA, 120 bp, Artificial Sequence
  ENSG00000175073_39 (sequence is synthesized)
tttttttttttttaatcttgcagaaaagttgattgcaaagtgtggtagaaaaagaaataatggtagcagtagagaatttataaataagagtttatctttatgaatgagttaattgttcta

SEQ ID NO: 603742 - DNA, 120 bp, Artificial Sequence
  ENSG00000175073_40 (sequence is synthesized)
caattttgatcagtggtatttaagcctgtatatgctaagtgtatttatgcccctttgagccaaaatttttttttttttttcagaatccataagagtttatttgttggcttcacttgggtt

SEQ ID NO: 603743 - DNA, 120 bp, Artificial Sequence
  ENSG00000175073_41 (sequence is synthesized)
caacagaagagtgtttatcctgagattggtattgcactattttattttattctgcaaatctgtatcctgaagtgtacatttcaacccatattcttctctgttcactgaaattaagttgaa

SEQ ID NO: 603744 - DNA, 120 bp, Artificial Sequence
  ENSG00000175073_42 (sequence is synthesized)
tttgaatggctgaaagacaaaatatatgttaatacaatctcttacctagagcattcaaagcctggctgtctctgtttgcacatgtaacagatgcagaactgtgtttgtaattctaagaaa

SEQ ID NO: 603745 - DNA, 120 bp, Artificial Sequence
  ENSG00000175073_43 (sequence is synthesized)
atgtatgtcagaaagtattttatcagatgtttaaaaatctctgcctgttgattcataagggatatagacagtactttaacttgtgtttccagataaggcagattttggtcatctttctgt

SEQ ID NO: 603746 - DNA, 120 bp, Artificial Sequence
  ENSG00000175073_44 (sequence is synthesized)
gaaagtatctctaactgaatccacttcttaaacaaactactctattttaaataaggaaagaatggagaatctagacattttacaggtgtatctgagcaaaatatatatttgggttagttt

SEQ ID NO: 603747 - DNA, 120 bp, Artificial Sequence
  ENSG00000175073_45 (sequence is synthesized)
ttatcacattatcacgtttgtctttatattttatcttcatcctaaattttctccctatcaaaacagcaggaaatttttaaacttttatattgtacactatttttgcataaaataagagct

SEQ ID NO: 603748 - DNA, 120 bp, Artificial Sequence
  ENSG00000175073_46 (sequence is synthesized)
gtagctaccaaatactatttactacttagtaaaggtggcttctgtgtattaaactacgaattacaaatatcacttcactaaccactataattatttttggctttttcagccactggaact

SEQ ID NO: 603749 - DNA, 120 bp, Artificial Sequence
  ENSG00000175073_47 (sequence is synthesized)
ttttttggggggatttaaatacaggaaaactgtttaagcaaaaaatgcactgctttcatgtaaaatgatataatcttctttaacaaatattttcttcattgataactgacagatatctca

SEQ ID NO: 603750 - DNA, 120 bp, Artificial Sequence
  ENSG00000175073_48 (sequence is synthesized)
tagcattaacataaaataccagaaacaaactttatctccctattcttacatttagtgcaaattggaatgcgtatgtgaatgttagaagatggacttaatctctgacaactttattaattt

SEQ ID NO: 603751 - DNA, 120 bp, Artificial Sequence
  ENSG00000175073_49 (sequence is synthesized)
ctctagctacagcaatgctatttaaaagccagttaggtatgaatagtacagtaatagtttgggttctcccttgataaatgaataaaaggctcaattctgataagtgatcaaatttcttga

SEQ ID NO: 603752 - DNA, 120 bp, Artificial Sequence
  ENSG00000175073_50 (sequence is synthesized)
aattctttcaaatcagctgaaaatttggttggggtgaattgatggtttttgagaagtaggccaggtatcctcacaaagaagttttagaatagggtttcttttaagtttttaaatatcatc

SEQ ID NO: 603753 - DNA, 120 bp, Artificial Sequence
  ENSG00000175073_51 (sequence is synthesized)
ctttgtctttccatatggttttcataaccaaatacatgactatagcatggttatttttctagtactgccatttgtgatatagccacatcttggcgtgcaagctagacatctcaggtaaat

SEQ ID NO: 603754 - DNA, 120 bp, Artificial Sequence
  ENSG00000175073_52 (sequence is synthesized)
ttgtttttttttttttttttagccctagaggtaacattataactaaaatgcattcctgcaattctgtttgcagtgcttcactaaacattgaaataaagttgtaaattttttcttcagtaa

SEQ ID NO: 603755 - DNA, 120 bp, Artificial Sequence
  ENSG00000175073_53 (sequence is synthesized)
tccattttatagttaatcataccaaatttaagttgatgacctaaagtccaggtagtgttgaagatagtatgtatctagaatactggtaatgagaaattgttgtaaattgaagaaaacaag

SEQ ID NO: 603756 - DNA, 120 bp, Artificial Sequence
  ENSG00000175073_54 (sequence is synthesized)
atgctgccatatattaagatagaatataattaactccatgagaatggttactcaggaactagttaaagagcaaacccatttctcccgcttcactctgtttcagatatttttattggaaaa

SEQ ID NO: 603757 - DNA, 120 bp, Artificial Sequence
  ENSG00000175073_55 (sequence is synthesized)
tgttagggtagaggcctgagaaagttagcaaatgctattgactgatactggctctgtgtcttccagtgatttttagtttggtttttacagtcaagcctactgcttgcaattaagatatca

SEQ ID NO: 603758 - DNA, 120 bp, Artificial Sequence
  ENSG00000175073_56 (sequence is synthesized)
atctgaaatgcatctgtaattcctggccacaggtccttattgccattatttttaagtatcttcattggagatgaacactgacttttgcatatggtctcttacctcagggaagatcacttg

SEQ ID NO: 603759 - DNA, 120 bp, Artificial Sequence
  ENSG00000175073_57 (sequence is synthesized)
ctagcaactcatactactaatgacaggtttttgagaattgtactgacatcacatgttagctactaaatgcaaaatgtataaaagtattgttttatgtagttacctaccaatactatctgc

SEQ ID NO: 603760 - DNA, 120 bp, Artificial Sequence
  ENSG00000175073_58 (sequence is synthesized)
tactgaataactctctaaatatgtagacctcactaataactaacctttaggtaaaaaatttacttctgtcattaattacacttcaactggtcaatatagtggcagcataaagtgtttatt

SEQ ID NO: 603761 - DNA, 120 bp, Artificial Sequence
  ENSG00000175073_59 (sequence is synthesized)
tcagaatatcaatacagttttgtcttcatttttcaacagtaatttcaattggttcatacttaaaatactacacagattttgagttttatggttctcaaagcaaggtttccatcttaagat

SEQ ID NO: 603762 - DNA, 120 bp, Artificial Sequence
  ENSG00000175073_60 (sequence is synthesized)
ttttataaacacaaagcctttgcaaaattggattaaattccacctatcttaatgtgaattaaaaaccaccatttataataataatagcgccatattctaagttgagtaaatgcatcctac

SEQ ID NO: 603763 - DNA, 120 bp, Artificial Sequence
  ENSG00000175073_61 (sequence is synthesized)
cattcaaggttatcatataatttaacaaaattgtacaaccttaaggctcttcacagtataaattaatttttcaaaccagagctgttcacatgaaaatattccttagtagaatgtatattt

SEQ ID NO: 603764 - DNA, 120 bp, Artificial Sequence
  ENSG00000175073_62 (sequence is synthesized)
aagaaataaaacaacaaaggggaactatatcacccatgtaagttatagagttaattacaagttctaccattcttgataattctttgagatgctaagtgtttcagttcatatttaatgata

SEQ ID NO: 603765 - DNA, 120 bp, Artificial Sequence
  ENSG00000175073_63 (sequence is synthesized)
cttaaatcgtgggaattttaatgtttgttccaaaatagcagaaattgtaaaaattatgaattattggagaaaatgccattacttgtatatctgacatttaattttttaattatggagact

SEQ ID NO: 603766 - DNA, 120 bp, Artificial Sequence
  ENSG00000175073_64 (sequence is synthesized)
acatgcttttgtagtataatattaatgattattctcttgtaaaagaaaaggaaaaattagtaaagaaaaaagttttagttgatgttacctgcttgtgagtatcaattacttagtttttaa

SEQ ID NO: 603767 - DNA, 120 bp, Artificial Sequence
  ENSG00000175073_65 (sequence is synthesized)
atttttaaggtattgcctacttttctttagaatgcagaaatctcgtcctgagcccttattatgcctgtggtagagcaatgcaagactgaaaaggttgccagtattttcaggcttatttga

SEQ ID NO: 603768 - DNA, 120 bp, Artificial Sequence
  ENSG00000175073_66 (sequence is synthesized)
ctaagaattagtgccaagaactggaaagtctactttttggagggaaatgatacttagaatttgtaaacataagcagtaatagtgtaaatatttagaaaaatagcaagtgctttaactgct

SEQ ID NO: 603769 - DNA, 120 bp, Artificial Sequence
  ENSG00000175073_67 (sequence is synthesized)
caataaaatagtatagatgttatttcacccttaaggcactggctgttgcccattattttccgatttcgtgattactgtatatattacatttgagtaatgaataattggtaatagtgtatt

SEQ ID NO: 603770 - DNA, 120 bp, Artificial Sequence
  ENSG00000175073_68 (sequence is synthesized)
atagtgttctacagcacaccttactgtacagtatttgaagttttcttttatatcaataataaaactataagttaatactgattttcccctgaaattctccacattagcttttaaaggtaa

SEQ ID NO: 603771 - DNA, 120 bp, Artificial Sequence
  ENSG00000175073_69 (sequence is synthesized)
ttttatgttctttagtttcctggaattataatgcatgaacatatagttcagttttataaagaaattcttaaataataaagttttcttgttgaacttaagcgggttatcgtacaggaatag

SEQ ID NO: 603772 - DNA, 120 bp, Artificial Sequence
  ENSG00000175073_70 (sequence is synthesized)
tgatttttccccttaatgtagatttcattgctagatgaaatggacccagtgaaaaaagagtgcgcaatttaaaaaaaaaccaaaacggtctcactctgctgcccatgctggattgccgtg

SEQ ID NO: 603773 - DNA, 79 bp, Artificial Sequence
  ENSG00000175073_71 (sequence is synthesized)
atagggttttgccatgttgcccaggccggtcttgaacccctgagctcaagtgatctgccctcctctgcctcttgcaaaa

SEQ ID NO: 603774 - DNA, 120 bp, Artificial Sequence
  ENSG00000175073_72 (sequence is synthesized)
cagcaaaatttctttagacatattacataattgggccataatgcttactgaatatttaaaaatgaaggcaaattctaacagagaacttgattttgtggtggtttaaaaaaatactggtta

SEQ ID NO: 603775 - DNA, 120 bp, Artificial Sequence
  ENSG00000175073_73 (sequence is synthesized)
gtgataaggaaatgaaaggaaatacagataatagtactaaataacgtttgtgtagcttagcagtcaacacgtttacttccaagttttattgtatatgcttaatatacattttattagatc

SEQ ID NO: 603776 - DNA, 120 bp, Artificial Sequence
  ENSG00000175073_74 (sequence is synthesized)
atttaactcaataatttagagtatagccttagacaccagactgcctaggtctgactcctggtacgctgctttctgtgacctctctgtgcattcctctctgcgaggatgatgatcacatct

SEQ ID NO: 603777 - DNA, 120 bp, Artificial Sequence
  ENSG00000175073_75 (sequence is synthesized)
gctcccagggtggctgtcttaaatgagttaacacgtatctgatgattagaagagtgcctgacacatagtaaacactcaaatatttgctatgttatatgttaatgtaatgtggtagagttc

SEQ ID NO: 603778 - DNA, 120 bp, Artificial Sequence
  ENSG00000175073_76 (sequence is synthesized)
agttgccattaagtgggataaatcctcacagggcacacattatttaaataatttgttacattaaaacttattttacttgtacataattgactaaaaaatggggggttgtacattcaaaca

SEQ ID NO: 603779 - DNA, 120 bp, Artificial Sequence
  ENSG00000175073_77 (sequence is synthesized)
tttatgaccatgtgcaacactgagaatctcaaaccgacagtgtgctctgtgacccaaggcaagtcttggagcctttcaaggcctcaatttcttctgtaaccttgtggtttcacaattgtc

SEQ ID NO: 603780 - DNA, 120 bp, Artificial Sequence
  ENSG00000175073_78 (sequence is synthesized)
aaccttttgttctgccgaccattgtcgtcatagtcttacttgcagagggcatagtgctgatgggacaagtgacatgggtatgagccccatgtaaactaaaacataattacctttccttta

SEQ ID NO: 603781 - DNA, 120 bp, Artificial Sequence
  ENSG00000175073_79 (sequence is synthesized)
ggtgttggctacagttatcccaaacttggacttgaggtcttgtatatgcatgccattggtcacataccatcagaatagaattctcaaaaactctttagtaaataagataaacatcctact

SEQ ID NO: 603782 - DNA, 120 bp, Artificial Sequence
  ENSG00000175073_80 (sequence is synthesized)
tataacagctcattatggattttatttttattgtctggctctttcagaccccagcaactgcaattctgacttaataatcaattgtttctaatcattaaaaatgtatatagaaaaactgaa

SEQ ID NO: 603783 - DNA, 120 bp, Artificial Sequence
  ENSG00000175077_0 (sequence is synthesized)
gctgggtcctgcttcctcctggtcttgtcgatgaggatttttagaccgtggagactgcgctgccctgccctgcacctaccctcactctccgtgttctcactaaggtggaaattgccttcc

SEQ ID NO: 603784 - DNA, 120 bp, Artificial Sequence
  ENSG00000175077_1 (sequence is synthesized)
ctcactactgacgagaccatgtgtaaaagcgtgaccacagatgagtggaagaaagtcttctatgagaagatggaggaggcaaagccggctgacagctgggacctcatcatagaccccaac

SEQ ID NO: 603785 - DNA, 120 bp, Artificial Sequence
  ENSG00000175077_2 (sequence is synthesized)
ctcaagcacaatgtgctgagccctggttggaagcagtacctggaattgcatgcttcaggcaggttccactgctcctggtgctggcacacctggcagtcgccctacgtggtcatcctcttc

SEQ ID NO: 603786 - DNA, 120 bp, Artificial Sequence
  ENSG00000175077_3 (sequence is synthesized)
cacatgttcctggaccgcgcccagcgggcgggctcggtgcgcatgcgcgtcttcaagcagctgtgctatgagtgcggcacggcgcggctggacgagtccagcatgctggaggagaacatc

SEQ ID NO: 603787 - DNA, 120 bp, Artificial Sequence
  ENSG00000175077_4 (sequence is synthesized)
gagggcctggtggacaacctcatcaccagcctgcgcgagcagtgctacggcgagcgtggcggccagtaccgcatccacgtggccagccgccaggacaaccggcggcaccgcggagagttc

SEQ ID NO: 603788 - DNA, 120 bp, Artificial Sequence
  ENSG00000175077_5 (sequence is synthesized)
tgcgaggcctgccaggagggcatcgtgcactggaagcccagcgagaagctgctggaggaggaggcgaccacctacaccttctcccgggcgcccagccccaccaagtcgcaggaccagacg

SEQ ID NO: 603789 - DNA, 120 bp, Artificial Sequence
  ENSG00000175077_6 (sequence is synthesized)
ggctcaggctggaacttctgctctatcccctggtgcttgttttgggccacggtcctgctgctgatcatctacctgcagttctctttccgtagctccgtataagattccgtggttgggccc

SEQ ID NO: 603790 - DNA, 120 bp, Artificial Sequence
  ENSG00000175077_7 (sequence is synthesized)
agagcctgtcgagggtgccagttagctgatgcgagggtagaggagagacgtgggttgagaatagtgtaaacttctagcgctggtgatgtcactgactcagtggggatcttggacaaatta

SEQ ID NO: 603791 - DNA, 120 bp, Artificial Sequence
  ENSG00000175077_8 (sequence is synthesized)
tacagtttttccatctataaaactcagggtttgggcaagatcattggtttatcatagtgaaacccaggaccccaaagttctgcgtaggtgcctcagggacttttggatttggaaagtagg

SEQ ID NO: 603792 - DNA, 120 bp, Artificial Sequence
  ENSG00000175077_9 (sequence is synthesized)
acctcctcctcttgcttcgatcagaacagctttactttagatagggttccatttaagatttttgtaccaaaaaaaaaaaaaaaaaaagtttaactacttttaaaaagtttgaaaattaga

SEQ ID NO: 603793 - DNA, 120 bp, Artificial Sequence
  ENSG00000175077_10 (sequence is synthesized)
ggactgggtgatctcaaaagggctttccacagtaatgagctcgaccttgctcttattagtccctcacccctgcccctcatgatctcccactttctctagctgcagccttaaattagcttc

SEQ ID NO: 603794 - DNA, 120 bp, Artificial Sequence
  ENSG00000175077_11 (sequence is synthesized)
tttgcccaccctgtgagcctcatccgtgattctgccttcacacacgcagcagaggtttcccttgaagtgcaagaggtgggagatcaggctgttcctttgctgccaggtacacagggtctc

SEQ ID NO: 603795 - DNA, 120 bp, Artificial Sequence
  ENSG00000175077_12 (sequence is synthesized)
ttttttttgtttctcagattccagcttctttccactcagggcagattctggggtctgcctgcctgaaagatggtggttggggtggggtctcatagagttaggcttctcacccactgcgta

SEQ ID NO: 603796 - DNA, 120 bp, Artificial Sequence
  ENSG00000175077_13 (sequence is synthesized)
ttaactggcagagaatttaggggaggttcagaagacagagttttagaagcaaagcacaaaatctctgggaggcattataatggagggtcttcagagttcggggaccaagtctagcagatt

SEQ ID NO: 603797 - DNA, 120 bp, Artificial Sequence
  ENSG00000175077_14 (sequence is synthesized)
ctcagcagtgctgatggccagaattcaggagcaggggcctggcctcctgggttctttgctgaaattatagttgaatggctttctcacattggccaagcatgaggcctcttgccaaagatc

SEQ ID NO: 603798 - DNA, 120 bp, Artificial Sequence
  ENSG00000175077_15 (sequence is synthesized)
agctgtccccctaaagccacagggatggggtatcttcagcaagagagagggcgttaaagatgtaaaatgctttgtccatggggaagtgcacagatatgtgggagaaccttacaaggctct

SEQ ID NO: 603799 - DNA, 120 bp, Artificial Sequence
  ENSG00000175077_16 (sequence is synthesized)
aaaatgagatgtgatatggcttgaaatgggaggagacactttctgacagtggggggtctggaatggaattggtggggacaggcagcaagctgcacttttgaggggcctcatttaccccac

SEQ ID NO: 603800 - DNA, 120 bp, Artificial Sequence
  ENSG00000175077_17 (sequence is synthesized)
ctctgttaaaaacttgactactctcctctttaatagaaagtcaccatcatctgtagtgatggaggaagggggtcacttatataaagatgggacactttaataaagacaggatatcttcca

SEQ ID NO: 603801 - DNA, 120 bp, Artificial Sequence
  ENSG00000175084_0 (sequence is synthesized)
gtctcccctcgccgcatccactctccggccggccgcctgcccgccgcctcctccgtgcgcccgccagcctcgcccgcgccgtcaccatgagccaggcctactcgtccagccagcgcgtgt

SEQ ID NO: 603802 - DNA, 120 bp, Artificial Sequence
  ENSG00000175084_1 (sequence is synthesized)
cctcctaccgccgcaccttcggcggggccccgggcttcccactcggctccccgctgagttcgcccgtgttcccgcgggcgggtttcggctctaagggctcctccagctcggtgacgtccc

SEQ ID NO: 603803 - DNA, 120 bp, Artificial Sequence
  ENSG00000175084_2 (sequence is synthesized)
gcgtgtaccaggtgtcgcgcacgtcgggcggggccgggggcctggggtcgctgcgggccagccggctggggaccacccgcacgccctcctcctacggcgcaggcgagctgctggacttct

SEQ ID NO: 603804 - DNA, 120 bp, Artificial Sequence
  ENSG00000175084_3 (sequence is synthesized)
cactggccgacgcggtgaaccaggagtttctgaccacgcgcaccaacgagaaggtggagctgcaggagctcaatgaccgcttcgccaactacatcgagaaggtgcgcttcctggagcagc

SEQ ID NO: 603805 - DNA, 120 bp, Artificial Sequence
  ENSG00000175084_4 (sequence is synthesized)
agaacgcggcgctcgccgccgaagtgaaccggctcaagggccgcgagccgacgcgagtggccgagctctacgaggaggagctgcgggagctgcggcgccaggtggaggtgctcactaacc

SEQ ID NO: 603806 - DNA, 120 bp, Artificial Sequence
  ENSG00000175084_5 (sequence is synthesized)
agcgcgcgcgcgtcgacgtcgagcgcgacaacctgctcgacgacctgcagcggctcaaggccaagctgcaggaggagattcagttgaaggaagaagcagagaacaatttggctgccttcc

SEQ ID NO: 603807 - DNA, 120 bp, Artificial Sequence
  ENSG00000175084_6 (sequence is synthesized)
gagcggacgtggatgcagctactctagctcgcattgacctggagcgcagaattgaatctctcaacgaggagatcgcgttccttaagaaagtgcatgaagaggagatccgtgagttgcagg

SEQ ID NO: 603808 - DNA, 120 bp, Artificial Sequence
  ENSG00000175084_7 (sequence is synthesized)
ctcagcttcaggaacagcaggtccaggtggagatggacatgtctaagccagacctcactgccgccctcagggacatccgggctcagtatgagaccatcgcggctaagaacatttctgaag

SEQ ID NO: 603809 - DNA, 120 bp, Artificial Sequence
  ENSG00000175084_8 (sequence is synthesized)
ctgaggagtggtacaagtcgaaggtgtcagacctgacccaggcagccaacaagaacaacgacgccctgcgccaggccaagcaggagatgatggaataccgacaccagatccagtcctaca

SEQ ID NO: 603810 - DNA, 120 bp, Artificial Sequence
  ENSG00000175084_9 (sequence is synthesized)
gccagtggctaccaggacaacattgcgcgcctggaggaggaaatccggcacctcaaggatgagatggcccgccatctgcgcgagtaccaggacctgctcaacgtgaagatggccctggat

SEQ ID NO: 603811 - DNA, 120 bp, Artificial Sequence
  ENSG00000175084_10 (sequence is synthesized)
gtggagattgccacctaccggaagctgctggagggagaggagagccggatcaatctccccatccagacctactctgccctcaacttccgagaaaccagccctgagcaaaggggttctgag

SEQ ID NO: 603812 - DNA, 120 bp, Artificial Sequence
  ENSG00000175084_11 (sequence is synthesized)
gtccataccaagaagacggtgatgatcaagaccatcgagacacgggatggggaggtcgtcagtgaggccacacagcagcagcatgaagtgctctaaagacagagaccctctgccaccaga

SEQ ID NO: 603813 - DNA, 120 bp, Artificial Sequence
  ENSG00000175084_12 (sequence is synthesized)
gaccgtcctcacccctgtcctcactgctccctgaagccagccttcttccatcccaggacaccacacccagcctcagtcctcccctcacagcctctgacccctcctcactggccatccctc

SEQ ID NO: 603814 - DNA, 120 bp, Artificial Sequence
  ENSG00000175084_13 (sequence is synthesized)
gtggtccccaacagcgacatagcccatccctgcctggtcacagggcatgccccggccacctctgcggaccccagctgtgagccttggctgttggcagtgagtgagcctggctcttgtgct

SEQ ID NO: 603815 - DNA, 120 bp, Artificial Sequence
  ENSG00000175084_14 (sequence is synthesized)
ggatggagcccaggcgggagcggtggccctgtccctcccacctctgtgacctcaggcactagcctttggctctggagacagccccagagcagggtgttgggatactgcagggccaggact

SEQ ID NO: 603816 - DNA, 120 bp, Artificial Sequence
  ENSG00000175084_15 (sequence is synthesized)
gagccccgcagacctccccagcccctagcccaggagagagaaagccaggcaggtagccagggggactagcccctgtggagactggggggcttgaaattgtccccgtggtctcttactttc

SEQ ID NO: 603817 - DNA, 120 bp, Artificial Sequence
  ENSG00000175084_16 (sequence is synthesized)
ctttccccagcccagggtggacttagaaagcaggggctacaagagggaatccccgaaggtgctggaggtgggagcaggagattgagaaggagagaaagtgggtgagatgctggagaagag

SEQ ID NO: 603818 - DNA, 120 bp, Artificial Sequence
  ENSG00000175084_17 (sequence is synthesized)
aggagaggagagaggcagagagcggtctcaggctggtgggaggggcgcccacctccccacgccctcccctcccctgctgcaggggctctggagagaaacaataaagagattcacacacaa

SEQ ID NO: 603819 - DNA, 120 bp, Artificial Sequence
  ENSG00000175084_18 (sequence is synthesized)
tcttgaagaagtaacaagcctgtcttgaggggggttggggtctgctagggctctgcccaatgtggccccagatggactcccagcccctggtatagcccagcctggacttggtcaggctga

SEQ ID NO: 603820 - DNA, 120 bp, Artificial Sequence
  ENSG00000175087_0 (sequence is synthesized)
gactggaggcggcggcagcggaggcgcgagctgcccgataatggcggcctgcagagcccatgagagggagaagcggcagcgtctaccctgagaaacctcgaccttgaagatggtgagtag

SEQ ID NO: 603821 - DNA, 120 bp, Artificial Sequence
  ENSG00000175087_1 (sequence is synthesized)
ccagccaaagtacgatctaatacgggaggtaggccgaggtagttacggtgttgtgtatgaagcagtcatcagaaagacctctgcacgggtggcagtgaagaaaattcgatgtcacgcacc

SEQ ID NO: 603822 - DNA, 120 bp, Artificial Sequence
  ENSG00000175087_2 (sequence is synthesized)
tgaaaatgttgaactagcccttcgtgagttctgggcactaagcagtatcaagagccaacatccaaatgtgattcacttggaggaatgcatcctacaaaaggatgggatggtgcaaaagat

SEQ ID NO: 603823 - DNA, 120 bp, Artificial Sequence
  ENSG00000175087_3 (sequence is synthesized)
gtcccacggctctaattcttccctttatttacagcttgtagaaacttcattaaaaggagaaattgcctttgatcccagaagcgcctattatttgtggtttgtgatggatttttgtgacgg

SEQ ID NO: 603824 - DNA, 120 bp, Artificial Sequence
  ENSG00000175087_4 (sequence is synthesized)
aggagatatgaatgagtatctgttgtccaggaaacccaatcgtaaaactaacaccagcttcatgcttcagctgagcagtgccctggctttcttgcataaaaaccagatcatccaccgaga

SEQ ID NO: 603825 - DNA, 120 bp, Artificial Sequence
  ENSG00000175087_5 (sequence is synthesized)
tcttaagcctgataacatcctgatttctcaaaccaggttggataccagtgacttggaacctaccctcaaagtggctgattttggtctaagtaaagtttgttcagcctctgggcagaaccc

SEQ ID NO: 603826 - DNA, 120 bp, Artificial Sequence
  ENSG00000175087_6 (sequence is synthesized)
agaagaacctgtcagtgtaaacaagtgtttcctttccacagcatgtggaacagatttttacatggctcctgaagtttgggaaggacattacacagcaaaagctgacatctttgctctggg

SEQ ID NO: 603827 - DNA, 120 bp, Artificial Sequence
  ENSG00000175087_7 (sequence is synthesized)
gattatcatctgggcaatgctggaaaggatcacattcatagacacagagacaaagaaggaactcttggggagttatgtaaaacaaggaactgagattgtgcctgttggggaggcacttct

SEQ ID NO: 603828 - DNA, 120 bp, Artificial Sequence
  ENSG00000175087_8 (sequence is synthesized)
ggaaaatcccaaaatggaacttctcattcctgtgaagaaaaaatctatgaatgggcgaatgaaacaactgattaaggaaatgctggctgcaaaccctcaggatcgtccagatgcttttga

SEQ ID NO: 603829 - DNA, 120 bp, Artificial Sequence
  ENSG00000175087_9 (sequence is synthesized)
actagaactcagattagtacaaattgcatttaaagatagcagctgggaaacgtgacacatattatttgcaaataccatggatgatatgctgcttctgtttaacagtgatgcaacattatg

SEQ ID NO: 603830 - DNA, 120 bp, Artificial Sequence
  ENSG00000175087_10 (sequence is synthesized)
tggctgaaaaagaatataaaaagctagactctaccctctaagggtttagattttttgtgggattttttttttcctcatttttcttaaatccaagttggccgttttattagtatgtttcaa

SEQ ID NO: 603831 - DNA, 120 bp, Artificial Sequence
  ENSG00000175087_11 (sequence is synthesized)
atgtgtattaccaatgtgggtgtaaatttttaaaaaatgattattgatagaagtttggcaggaaaattctttaagagctaacaagagaagagagtccagttttctggaaatatgtcttta

SEQ ID NO: 603832 - DNA, 120 bp, Artificial Sequence
  ENSG00000175087_12 (sequence is synthesized)
agtattttagacattcctcgtcagtattaggaatttccatgggaaaagaggtttgcatgctggtaatgcaacctttgaaactttgtaaaggaaacatatatgtatatatttatgtatatg

SEQ ID NO: 603833 - DNA, 120 bp, Artificial Sequence
  ENSG00000175087_13 (sequence is synthesized)
taagtatgtgaatgtgcgcattttgcattccatatgaaaaaaatgccacgtctgtttaaattatttgatgtaggtttgggtttttgagatttgctggtgaagtcagtgacgaaaaataaa

SEQ ID NO: 603834 - DNA, 120 bp, Artificial Sequence
  ENSG00000175087_14 (sequence is synthesized)
ccttcccttatcttcctactctgcccctccccctaatgaaatcatattaagttgtttttttttttttttgtaatatacagctttttttttaaggcatcattttcgagggtctaaaattat

SEQ ID NO: 603835 - DNA, 120 bp, Artificial Sequence
  ENSG00000175087_15 (sequence is synthesized)
ctggtaaaacaaatgaaattaagtgatccaaagctgctgaagtatgtttgaactctccagtgccctatagctgcaagagttgaattagtcatgcagtcatatggcagcaggttggtgatt

SEQ ID NO: 603836 - DNA, 120 bp, Artificial Sequence
  ENSG00000175087_16 (sequence is synthesized)
cagtccgaccttctttaggtaaccgagcatttatttaaccaactataccactgcattgggacgtctgcacttgagcttctacaatctgatataaatctgaatacaggattattctgtttg

SEQ ID NO: 603837 - DNA, 120 bp, Artificial Sequence
  ENSG00000175087_17 (sequence is synthesized)
tacatttttggtttgaagactttgtctaagcctcattatactgaagttgaagaaaccaaatgagctccaccctcactttgcctgccctgatatgatcacttgttgagtcactggagttcc

SEQ ID NO: 603838 - DNA, 120 bp, Artificial Sequence
  ENSG00000175087_18 (sequence is synthesized)
tttcattttggcactgatgctgttttctcttgtctgatttgaaacagtactggtaataatatggttgttgaaaatgtgatcacctttatctaaagtgggagaagatacatacacagtatg

SEQ ID NO: 603839 - DNA, 120 bp, Artificial Sequence
  ENSG00000175087_19 (sequence is synthesized)
gcaaatggataaaatattgtggcatcaactacttttaaagtagaaaagctatccattttatacaatcactgatacagtctatgtcaaaaaaccaacagaccattattcctcttgaagtta

SEQ ID NO: 603840 - DNA, 120 bp, Artificial Sequence
  ENSG00000175087_20 (sequence is synthesized)
gtttgattttatctttgtatggttgtctacaatttgttttcctgtaaatgcagatagttaaaatctaaaggatagaatgctttcctaaaacagaacattagcctttaaggttaaatagac

SEQ ID NO: 603841 - DNA, 120 bp, Artificial Sequence
  ENSG00000175087_21 (sequence is synthesized)
tttacattgtatctaagttaatctttataaagcactagaatttttggtcaaaagtcaaaatagtattagaatattgaaattattgatagctttcataatctcagcttttttgaacttcca

SEQ ID NO: 603842 - DNA, 120 bp, Artificial Sequence
  ENSG00000175087_22 (sequence is synthesized)
caatttttggaatatgtcataatttttttccctgtttcaaatgtgttcagaggaaatagaatgtaaaacatcacaaaaaaaattgcagtacataaaatttctggactatgttagttactt

SEQ ID NO: 603843 - DNA, 120 bp, Artificial Sequence
  ENSG00000175087_23 (sequence is synthesized)
gatctggaagtttaaaatttggactaaaaggttttattgaaataaagcctcttaaaatgaaaaatcatatacttttaacatcacttttaagctaataaatataagaattcttttggaaat

SEQ ID NO: 603844 - DNA, 120 bp, Artificial Sequence
  ENSG00000175087_24 (sequence is synthesized)
tagaggtggaaacacactggaacctcatgataattgaccctctggatcaccagattagtttaatttaacagatatgtccaaggaagttgagctatagggagtaagaaaaagcatcatgat

SEQ ID NO: 603845 - DNA, 120 bp, Artificial Sequence
  ENSG00000175087_25 (sequence is synthesized)
aacgtctagtcaataacatggcacttcagcagagattcatagatgatggtatgcccatgcatcatttgctcttcaaatatctatgtgcttggagccacagtttcctaagcgcatagtttt

SEQ ID NO: 603846 - DNA, 120 bp, Artificial Sequence
  ENSG00000175087_26 (sequence is synthesized)
tggtcctgcctcatgtaaaatagttaatgattatcatttacttggaaagattttacctgtgaagtgaaattctttcattgggggtaagggtatgaggtgatcaggaagtttcttctggaa

SEQ ID NO: 603847 - DNA, 120 bp, Artificial Sequence
  ENSG00000175087_27 (sequence is synthesized)
ttttatcaagtccttgtattctaaaatagccaagcaaaatgatagtaaattctttgtctttgttctttcagtcagaggtatttattaagtacctactgtgtgctcagcactaaaggtttg

SEQ ID NO: 603848 - DNA, 120 bp, Artificial Sequence
  ENSG00000175087_28 (sequence is synthesized)
ttgataaaatgacaattaaaaaatggcatttagccaaaggccttttcagccaggagtaagaaaagatggttagtgatatttggaaatacctggatatttgctagaggaaaaatgaaagca

SEQ ID NO: 603849 - DNA, 120 bp, Artificial Sequence
  ENSG00000175087_29 (sequence is synthesized)
aaacttcgtacacagtgccttgcccataataggtactcaataagcaattgttcctcatagagtcttttgccatgatttatggtgttttttgaaatttgtcttaattgaaaaaagaccaaa

SEQ ID NO: 603850 - DNA, 120 bp, Artificial Sequence
  ENSG00000175087_30 (sequence is synthesized)
tatttcaaatgagcttataggcagctgtggccagtgaaaatatggggttgtacagttagttcctagaatgttattttgcactagttgtcacttagaaagatggggttcctgtagattttt

SEQ ID NO: 603851 - DNA, 120 bp, Artificial Sequence
  ENSG00000175087_31 (sequence is synthesized)
tggtgctaagggatactttgtcattatgatgaagtaagtgttaagtgtcagataaatagcacacagaatagttctttctgctggtctgttttttctcttcgttgttgttgtttttaattg

SEQ ID NO: 603852 - DNA, 120 bp, Artificial Sequence
  ENSG00000175087_32 (sequence is synthesized)
taaattgttatcaatcaaactattgtagcagctacaaagtaattcaccagcatgacaaaatggtcaaaaaataagtcatcagcacttaagaaatgaaagcaacttttgaaattttctgtt

SEQ ID NO: 603853 - DNA, 120 bp, Artificial Sequence
  ENSG00000175087_33 (sequence is synthesized)
tttctgttaaaattgtcaaatatattttatgaagaatttataaaaggggaaaatgattgtaatttattgttcatgacttttttttttaaataaagtgagtttcaacaaaaaaaaaactga

SEQ ID NO: 603854 - DNA, 120 bp, Artificial Sequence
  ENSG00000175087_34 (sequence is synthesized)
ggcagcggaggcgcgagctgcccgataatggcggcctgcagagcccatgagagggagaagcggcagcgtctaccctgaggaaggtgctcttccccatggggactgtaccaggctggagag

SEQ ID NO: 603855 - DNA, 120 bp, Artificial Sequence
  ENSG00000175087_35 (sequence is synthesized)
gacatggcactgcttcagagacacgaaccaccttgagtggatgtgattggcgatccccgtagagcaggaaagctcgtctgctgtgcagccggcgcagaggattctgtggcaggaaattag

SEQ ID NO: 603856 - DNA, 120 bp, Artificial Sequence
  ENSG00000175087_36 (sequence is synthesized)
agatgatcgcacccagccccgcgccgccgccgccgccgccgtctccgcaactgcaccgcccgcaaacatggctcagtgactcggagaaaagctgcagtctccctcccggcggggcggacg

SEQ ID NO: 603857 - DNA, 120 bp, Artificial Sequence
  ENSG00000175087_37 (sequence is synthesized)
ccaggcctccttggtcgggccgcacctccccgcaggcccgccaaagagcaccgcgccccgcaggcacccgagacccgcgcggaagatgcaccgggcgttccaccccagcgagccccgcac

SEQ ID NO: 603858 - DNA, 80 bp, Artificial Sequence
  ENSG00000175093_0 (sequence is synthesized)
agatcggctttcagctgcagcctccgggccggccgggaaggcggggagcgggcggcggcggcggaggagggggaggcggc

SEQ ID NO: 603859 - DNA, 120 bp, Artificial Sequence
  ENSG00000175093_1 (sequence is synthesized)
gccccgcgcacaaaagcacccagccccaggggagggcgatgaacacaccacatcccgggcccgggccccagctgctgctaccgctgcgtgcgctcagggcgctggggaagacgcccggcg

SEQ ID NO: 603860 - DNA, 120 bp, Artificial Sequence
  ENSG00000175093_2 (sequence is synthesized)
gccagcggccgaggcgcggcccgtgcgccctgagcgcgggactcgtcgccctccgggtcaggcgccaagcttccaagcggctagagcgcgggccttggagcgcccccaggatcgcttcag

SEQ ID NO: 603861 - DNA, 120 bp, Artificial Sequence
  ENSG00000175093_3 (sequence is synthesized)
cgcttcagtaaggcgcttccccactccaggcccgacccccggcgcctgagcgccaacttcgccaagaacgctcctaactccaggccatcctgcagcgcagagggggcgctgctgccgggc

SEQ ID NO: 603862 - DNA, 120 bp, Artificial Sequence
  ENSG00000175093_4 (sequence is synthesized)
atcagccgtgaggacgcgcccctggccgtgcggagagagccggcatttgcgggtcactcgggcgcccctgagtgggcggcggcggcagcagacccctctccagggagtccaggacctgcc

SEQ ID NO: 603863 - DNA, 120 bp, Artificial Sequence
  ENSG00000175093_5 (sequence is synthesized)
agcgctggggattcttcccgaacaggcgcttgccctctcttttatggagcttgggcccctgccgcagcccggtagaggctgtggaggtctaccgtccggaagcctggttcccagccccgt

SEQ ID NO: 603864 - DNA, 120 bp, Artificial Sequence
  ENSG00000175093_6 (sequence is synthesized)
ggcccattcctggctacggggagtggaggctcccacgaggtagcggtggcctgcagcggcctcctccccgcagtgaagcatgggccagaagctctcggggagcctcaagtcagtggaggt

SEQ ID NO: 603865 - DNA, 120 bp, Artificial Sequence
  ENSG00000175093_7 (sequence is synthesized)
tcaagtcagtggaggtgcgagagccggcgctgcggccggccaagcgggagctgcggggtgcagagcccgggcggccggcgcggctggaccagctgttggacatgccagcggcggggctgg

SEQ ID NO: 603866 - DNA, 120 bp, Artificial Sequence
  ENSG00000175093_8 (sequence is synthesized)
cgcgtggaaccccgaggaccgctcgctcaacgtcttcgtcaaggacgacgaccggctcaccttccaccggcaccccgtggcccagagcaccgacggcatccgcggcaaggtgggccacgc

SEQ ID NO: 603867 - DNA, 120 bp, Artificial Sequence
  ENSG00000175093_9 (sequence is synthesized)
ccgcggcctgcacgcctggcagatcaactggccggctcggcagcgcggcacccacgctgtagttggtgtggccacggcccgtgctcccctgcactccgtgggctacacggcgctggtagg

SEQ ID NO: 603868 - DNA, 120 bp, Artificial Sequence
  ENSG00000175093_10 (sequence is synthesized)
cagtgacgccgagtcgtggggctgggacctgggccgcagccgcctctaccacgacggcaagaaccagcccggcgtggcctacccggcctttctggggcccgacgaggcctttgcgctgcc

SEQ ID NO: 603869 - DNA, 120 bp, Artificial Sequence
  ENSG00000175093_11 (sequence is synthesized)
cgactcgctgctcgtggtgctggacatggatgagggcacactcagcttcatcgtggatggccagtacctgggcgtggccttccgaggtctcaagggcaagaagctgtacccggtggtgag

SEQ ID NO: 603870 - DNA, 120 bp, Artificial Sequence
  ENSG00000175093_12 (sequence is synthesized)
ggagatccatccgctcggccctgggccgccagcgcctgcaggacatcagctccctgcccctgcctcagtctctcaaaaactatctgcagtaccagtgagccaagcctgatgggcagcaca

SEQ ID NO: 603871 - DNA, 120 bp, Artificial Sequence
  ENSG00000175093_13 (sequence is synthesized)
gacacagacacacaccgcagggcccgaccctcctgtcattcacagtcccatggcacataggggaaaggatctacccttctcctggctccccaggacactcagttctttcaaagaccagga

SEQ ID NO: 603872 - DNA, 120 bp, Artificial Sequence
  ENSG00000175093_14 (sequence is synthesized)
tgtggtaccaactttggaaacgaaaggtctcttgccaacagtatctactgccctcgaggcagccctcccaagtcagacacctccttcggagccacagagagcctggagtctgcacctcct

SEQ ID NO: 603873 - DNA, 120 bp, Artificial Sequence
  ENSG00000175093_15 (sequence is synthesized)
ggaaatcctgccaccaaccaggacacagcagccaccgtattgatcagagagcctgtttccttattcaagagaatgaataaaacatttaggcaggagactttctattgtgtgccccgttgc

SEQ ID NO: 603874 - DNA, 120 bp, Artificial Sequence
  ENSG00000175093_16 (sequence is synthesized)
agacagggccagggagaaattagccagtgcagggggaaaattgcctctgaataatgaatgatgaaagcctgacgccgtgcccctcctggcccatacgccttgccagggcggcaggattgt

SEQ ID NO: 603875 - DNA, 120 bp, Artificial Sequence
  ENSG00000175093_17 (sequence is synthesized)
cacaccgttttaggactctgtgccactttgagagactgttcccaggaggcccaaccgcagacctggcaagtggacagtgcagtgtggagacaccttccggcttacctctttgaacgttgt

SEQ ID NO: 603876 - DNA, 120 bp, Artificial Sequence
  ENSG00000175093_18 (sequence is synthesized)
ttacctacccctttccacgtgctccccttcccagccactgactcacagttctctggatgcccagacacctctcttcagggaagatgagtctgactggtttgccccagggaagagcatatc

SEQ ID NO: 603877 - DNA, 120 bp, Artificial Sequence
  ENSG00000175093_19 (sequence is synthesized)
cttaccattattttaagtagcatttgcattttaaaagaggaatgcggagaggacagtacttagtccaaaggtgctaacgggggaactgggggcattgtgacacccaagtctgatgtgtcc

SEQ ID NO: 603878 - DNA, 120 bp, Artificial Sequence
  ENSG00000175093_20 (sequence is synthesized)
tgggttggggggccttcctggagtgtcagggtctctgggcaacgtccattcagggtgcggcatggctgtcacaaagctttatttgagcaaattattttttcactttaggagacttctaca

SEQ ID NO: 603879 - DNA, 120 bp, Artificial Sequence
  ENSG00000175093_21 (sequence is synthesized)
agtttgtttcctgtttcaaatgtgtgtgtgatgtgctgtttatttatcagcttgaggtccatgggggcagccttgtgactggaagggtggatatgggagacacattctctacctgctccg

SEQ ID NO: 603880 - DNA, 120 bp, Artificial Sequence
  ENSG00000175093_22 (sequence is synthesized)
agcctggtcctctcgcaggaatgctgctgctgcctccgccgccactgctgctgccacctcttatatgtttcagacactctctgcccagactcatttttaactggaaatcatcacagcagt

SEQ ID NO: 603881 - DNA, 120 bp, Artificial Sequence
  ENSG00000175093_23 (sequence is synthesized)
gggatatcagagccccagacagcactgcctcttcctccccaccccactgcccccaccttaatgtgaatttgactgatgaatgaagagcgtttctaataaagtttgtcattcagtccttca

SEQ ID NO: 603882 - DNA, 120 bp, Artificial Sequence
  ENSG00000175093_24 (sequence is synthesized)
cccggtggtgagtgccgtgtggggccactgtgaagtcaccatgcgctacatcaacggccttgaccatggagtctcactcggttgccctggccaaagtgcagtggcacgatctcggctcac

SEQ ID NO: 603883 - DNA, 120 bp, Artificial Sequence
  ENSG00000175093_25 (sequence is synthesized)
gggggatggggtttaagtgagcggggagagccaatgccctgccaggctggcggcagcctttatttacagggtcgggagccagctgatttgctttggttaaagcaagggggcggttagcgt

SEQ ID NO: 603884 - DNA, 120 bp, Artificial Sequence
  ENSG00000175093_26 (sequence is synthesized)
gagttacggcctcgcccagacactaataaggctgcttgtctgaggcattccataattcaagcaaaggctgtgccgcttaatggcccttcttcgtcagatcttccaggactcggtgcctcc

SEQ ID NO: 603885 - DNA, 120 bp, Artificial Sequence
  ENSG00000175093_27 (sequence is synthesized)
actgccgtgcaggctctccccggttcttcatccttctcagcggctgctttctataaatagagccgtgagttctgcttcgtgacccgcctgctgggagccccagtgggcgcctggtgtctc

SEQ ID NO: 603886 - DNA, 120 bp, Artificial Sequence
  ENSG00000175093_28 (sequence is synthesized)
ccatccctcttgtctcccacgcccatgatctcactgaaaactgaattccaggctttttaagaaagcatagagttccctgggtctactaagaaccatctggcagtccagccaagaaaaggg

SEQ ID NO: 603887 - DNA, 120 bp, Artificial Sequence
  ENSG00000175093_29 (sequence is synthesized)
accttgtcatcatcccagctttgaagtcatttaagtagatgcttctgagtcgatccagggagccacagctgacttccagatcttgtcctctttgttgatgtttctccctcaaaatgcaat

SEQ ID NO: 603888 - DNA, 120 bp, Artificial Sequence
  ENSG00000175093_30 (sequence is synthesized)
tcatgaggaggtcccaggaaaactgaattccaggctttttaagaaagcatagagttccctgggtctactaagaaccatctggcagtccagccaagaaaaggggcctctgtaaagcagtga

SEQ ID NO: 603889 - DNA, 120 bp, Artificial Sequence
  ENSG00000175097_0 (sequence is synthesized)
actctctttacagtcagccttctgcttgccacagtcatagtgggcagtcagtgaatcttccccaagtgctgacaattaatacctggtttagcggcaaagattcagagaggcgtgagcagc

SEQ ID NO: 603890 - DNA, 120 bp, Artificial Sequence
  ENSG00000175097_1 (sequence is synthesized)
ccctctggccttcagacaaaaatctacgtaccatcagaaactatgtctctgcagatggtaacagtcagtaataacatagccttaattcagccaggcttctcactgatgaattttgatgga

SEQ ID NO: 603891 - DNA, 120 bp, Artificial Sequence
  ENSG00000175097_2 (sequence is synthesized)
caagttttcttctttggacaaaaaggctggcccaaaagatcctgccccactggagttttccatctggatgtaaagcataaccatgtcaaactgaagcctacaattttctctaaggattcc

SEQ ID NO: 603892 - DNA, 120 bp, Artificial Sequence
  ENSG00000175097_3 (sequence is synthesized)
tgctacctccctcctcttcgctacccagccacttgcacattcaaaggcagcttggagtctgaaaagcatcaatacatcatccatggagggaaaacaccaaacaatgaggtttcagataag

SEQ ID NO: 603893 - DNA, 120 bp, Artificial Sequence
  ENSG00000175097_4 (sequence is synthesized)
atttatgtcatgtctattgtttgcaagaacaacaaaaaggttacttttcgctgcacagagaaagacttggtaggagatgttcctgaagccagatatggtcattccattaatgtggtgtac

SEQ ID NO: 603894 - DNA, 120 bp, Artificial Sequence
  ENSG00000175097_5 (sequence is synthesized)
agccgagggaaaagtatgggtgttctctttggaggacgctcatacatgccttctacccacagaaccacagaaaaatggaatagtgtagctgactgcctgccctgtgttttcctggtggat

SEQ ID NO: 603895 - DNA, 120 bp, Artificial Sequence
  ENSG00000175097_6 (sequence is synthesized)
tttgaatttgggtgtgctacatcatacattcttccagaacttcaggatgggctatcttttcatgtctctattgccaaaaatgacaccatctatattttaggaggacattcacttgccaat

SEQ ID NO: 603896 - DNA, 120 bp, Artificial Sequence
  ENSG00000175097_7 (sequence is synthesized)
aatatccggcctgccaacctgtacagaataagggttgatcttcccctgggtagcccagctgtgaattgcacagtcttgccaggaggaatctctgtctccagtgcaatcctgactcaaact

SEQ ID NO: 603897 - DNA, 120 bp, Artificial Sequence
  ENSG00000175097_8 (sequence is synthesized)
aacaatgatgaatttgttattgttggtggctatcagcttgaaaatcaaaaaagaatgatctgcaacatcatctctttagaggacaacaagatagaaattcgtgagatggagaccccagat

SEQ ID NO: 603898 - DNA, 120 bp, Artificial Sequence
  ENSG00000175097_9 (sequence is synthesized)
ttctatttctatatgttgaaatgtgctgaagatgatactaatgaagagcagacaacattcacaaacagtcaaacatcaacagaagatccaggggattccactccctttgaagactctgaa

SEQ ID NO: 603899 - DNA, 120 bp, Artificial Sequence
  ENSG00000175097_10 (sequence is synthesized)
gaattttgtttcagtgcagaagcaaatagttttgatggtgatgatgaatttgacacctataatgaagatgatgaagaagatgagtctgagacaggctactggattacatgctgccctact

SEQ ID NO: 603900 - DNA, 120 bp, Artificial Sequence
  ENSG00000175097_11 (sequence is synthesized)
tgtgatgtggatatcaacacttgggtaccattctattcaactgagctcaacaaacccgccatgatctactgctctcatggggatgggcactgggtccatgctcagtgcatggatctggca

SEQ ID NO: 603901 - DNA, 120 bp, Artificial Sequence
  ENSG00000175097_12 (sequence is synthesized)
gaacgcacactcatccatctgtcagcaggaagcaacaagtattactgcaatgagcatgtggagatagcaagagctctacacactccccaaagagtcctacccttaaaaaagcctccaatg

SEQ ID NO: 603902 - DNA, 120 bp, Artificial Sequence
  ENSG00000175097_13 (sequence is synthesized)
aaatccctccgtaaaaaaggttctggaaaaatcttgactcctgccaagaaatcctttcttagaaggttgtttgattagttttgcaaaagcctttcagattcaggtgtatggaatttttga

SEQ ID NO: 603903 - DNA, 120 bp, Artificial Sequence
  ENSG00000175097_14 (sequence is synthesized)
atctatttttaaaatcataacattgattttaaaaatacatttttgtttatttaaaatgcctatgttttcttttagttacatgaattaagggccagaaaaaagtgtttataatgcaatgat

SEQ ID NO: 603904 - DNA, 120 bp, Artificial Sequence
  ENSG00000175097_15 (sequence is synthesized)
aaataaagtcattctagaccctatacattttgaaaatattttacccaaatactcaatttactaatttattcttcactgaggatttctgatctgattttttattcaacaaaccttaaacac

SEQ ID NO: 603905 - DNA, 120 bp, Artificial Sequence
  ENSG00000175097_16 (sequence is synthesized)
ccagaagcagtaataatcatcgaggtatgtttatatttattatataagtcttggtaacaaataacctataaagtgtttatgacaaatttagccaataaagaaattaacacccaaaagaat

SEQ ID NO: 603906 - DNA, 120 bp, Artificial Sequence
  ENSG00000175097_17 (sequence is synthesized)
taaattgattattttgtgcaacataacaattcggcagttggccaaaacttaaaagcaagatctactacatcccacattagtgttctttatataccttcaagcaaccctttggattatgcc

SEQ ID NO: 603907 - DNA, 120 bp, Artificial Sequence
  ENSG00000175097_18 (sequence is synthesized)
catgaacaagttagtttctcatagctttacagatgtagatataaatataaatatatgtatacatatagatagataatgttctccactgacacaaaagaagaaataaataatctacatcaa

SEQ ID NO: 603908 - DNA, 120 bp, Artificial Sequence
  ENSG00000175097_19 (sequence is synthesized)
acaggagtaaaaacagtgaagaaaacaaaggaccttcaaagtgcactcgttaaaacctaataactgtatttctattactaaatgtagaagtggtaaacatctttaacaggcaatgtctcc

SEQ ID NO: 603909 - DNA, 120 bp, Artificial Sequence
  ENSG00000175097_20 (sequence is synthesized)
cctgcactctagggattcaaagatccatctttcggttctgtaagacagtcacggcttttgtaacctcggtgcccccttcaacctcccgccccaagcacctccagggtcgtcaggggtgta

SEQ ID NO: 603910 - DNA, 120 bp, Artificial Sequence
  ENSG00000175097_21 (sequence is synthesized)
gggagtcccttcagactgcggtctccaggtaaccgcactccaacagaagcagttgtgcttcctatcgggtcacctgttcaaaagtccccaggagaggctccagcaataccagggtagcgg

SEQ ID NO: 603911 - DNA, 120 bp, Artificial Sequence
  ENSG00000175097_22 (sequence is synthesized)
tttgcccgacaccgctccgggcgctgcagccttccggcaacccggacgttgggtcggtgtcagccactctcacctcccattccctagttttcctcctttgctcccgtctagtcacttcgc

SEQ ID NO: 603912 - DNA, 120 bp, Artificial Sequence
  ENSG00000175097_23 (sequence is synthesized)
ctggccttcaggtaaagatccatcagctccctcagagcctcgtgcctctcctcggaaggaattaactcacaaactgcatccacagtctctttggtcatgagcttcctggcaaagttgcca

SEQ ID NO: 603913 - DNA, 120 bp, Artificial Sequence
  ENSG00000175097_24 (sequence is synthesized)
ccagtgtggcctgccaccttttcctttcctctttggaagcattgggattcttatacacttcccctatctctagctggaagatcttgtagaactcagctgcattgccaatgtcacagtgga

SEQ ID NO: 603914 - DNA, 120 bp, Artificial Sequence
  ENSG00000175097_25 (sequence is synthesized)
gtgcatctatggaagggactgtctcaatgaaaggtttagctgagacccctttcacccgatcccgcagttcttccacagactcatggtaagggttggaacgccagacctcataacgttcca

SEQ ID NO: 603915 - DNA, 120 bp, Artificial Sequence
  ENSG00000175097_26 (sequence is synthesized)
tctggccttcagaattattaaagaattacccaaaagttcttggactggaaagatgtgaaaaagccactaactctattttcctagaatgaagatgaaaagaagatgtgtttaggaaccttc

SEQ ID NO: 603916 - DNA, 120 bp, Artificial Sequence
  ENSG00000175104_0 (sequence is synthesized)
gcagtggcgtccgcagctggggcttggcctgcgggcggccagcgaaggtggcgaaggctcccactggatccagagtttgccgtccaagcagcctcgtctcggcgcgcagtgtctgtgtcc

SEQ ID NO: 603917 - DNA, 120 bp, Artificial Sequence
  ENSG00000175104_1 (sequence is synthesized)
gtcctctaccagcgccttggctgagcggagtcgtgcggttggtgggggagccctgccctcctggttcggcctccccgcgcactagaacgatcatgaacttctgaagggacccagctttct

SEQ ID NO: 603918 - DNA, 120 bp, Artificial Sequence
  ENSG00000175104_2 (sequence is synthesized)
ttgtgtgctccaagtgatttgcacaaataataatatatatatttattgaaggagagaatcagagcaagtgataatcaagttactatgagtctgctaaactgtgaaaacagctgtggatcc

SEQ ID NO: 603919 - DNA, 120 bp, Artificial Sequence
  ENSG00000175104_3 (sequence is synthesized)
agccagtctgaaagtgactgctgtgtggccatggccagctcctgtagcgctgtaacaaaagatgatagtgtgggtggaactgccagcacggggaacctctccagctcatttatggaggag

SEQ ID NO: 603920 - DNA, 120 bp, Artificial Sequence
  ENSG00000175104_4 (sequence is synthesized)
atccagggatatgatgtagagtttgacccacccctggaaagcaagtatgaatgccccatctgcttgatggcattacgagaagcagtgcaaacgccatgcggccataggttctgcaaagcc

SEQ ID NO: 603921 - DNA, 120 bp, Artificial Sequence
  ENSG00000175104_5 (sequence is synthesized)
tgcatcataaaatcaataagggatgcaggtcacaaatgtccagttgacaatgaaatactgctggaaaatcaactatttccagacaattttgcaaaacgtgagattctttctctgatggtg

SEQ ID NO: 603922 - DNA, 120 bp, Artificial Sequence
  ENSG00000175104_6 (sequence is synthesized)
aaatgtccaaatgaaggttgtttgcacaagatggaactgagacatcttgaggatcatcaagcacattgtgagtttgctcttatggattgtccccaatgccagcgtcccttccaaaaattc

SEQ ID NO: 603923 - DNA, 120 bp, Artificial Sequence
  ENSG00000175104_7 (sequence is synthesized)
catattaatattcacattctgaaggattgtccaaggagacaggtttcttgtgacaactgtgctgcatcaatggcatttgaagataaagagatccatgaccagaactgtcctttggcaaat

SEQ ID NO: 603924 - DNA, 120 bp, Artificial Sequence
  ENSG00000175104_8 (sequence is synthesized)
gtcatctgtgaatactgcaatactatactcatcagagaacagatgcctaatcattatgatctagactgccctacagccccaattccatgcacattcagtacttttggttgccatgaaaag

SEQ ID NO: 603925 - DNA, 120 bp, Artificial Sequence
  ENSG00000175104_9 (sequence is synthesized)
atgcagaggaatcacttggcacgccacctacaagagaacacccagtcacacatgagaatgttggcccaggctgttcatagtttgagcgttatacccgactctgggtatatctcagaggtc

SEQ ID NO: 603926 - DNA, 120 bp, Artificial Sequence
  ENSG00000175104_10 (sequence is synthesized)
ccttgtaagacaagaccatcaaatccgggagctgactgctaaaatggaaactcagagtatgtatgtaagtgagctcaaacgaaccattcgaacccttgaggacaaagttgctgaaatcga

SEQ ID NO: 603927 - DNA, 120 bp, Artificial Sequence
  ENSG00000175104_11 (sequence is synthesized)
agcacagcagtgcaatggaatttatatttggaagattggcaactttggaatgcatttgaaatgtcaagaagaggagaaacctgttgtgattcatagccctggattctacactggcaaacc

SEQ ID NO: 603928 - DNA, 120 bp, Artificial Sequence
  ENSG00000175104_12 (sequence is synthesized)
cgggtacaaactgtgcatgcgcttgcaccttcagttaccgactgctcagcgctgtgcaaactatatatccctttttgtccacacaatgcaaggagaatatgacagccacctcccttggcc

SEQ ID NO: 603929 - DNA, 120 bp, Artificial Sequence
  ENSG00000175104_13 (sequence is synthesized)
cttccagggtacaatacgccttacaattcttgatcagtctgaagcacctgtaaggcaaaaccacgaagagataatggatgccaaaccagagctgcttgctttccagcgacccacaatccc

SEQ ID NO: 603930 - DNA, 120 bp, Artificial Sequence
  ENSG00000175104_14 (sequence is synthesized)
acggaacccaaaaggttttggctatgtaacttttatgcatctggaagccctaagacaaagaactttcattaaggatgacacattattagtgcgctgtgaggtctccacccgctttgacat

SEQ ID NO: 603931 - DNA, 120 bp, Artificial Sequence
  ENSG00000175104_15 (sequence is synthesized)
gggtagccttcggagggagggttttcagccacgaagtactgatgcaggggtatagcttgccctcacttgctcaaaaacaactacctggagaaaacagtgcctttccttgccctgttctca

SEQ ID NO: 603932 - DNA, 120 bp, Artificial Sequence
  ENSG00000175104_16 (sequence is synthesized)
ataacatgcaaacaaacaagccacgggaaatatgtaatatctactagtgagtgttgttagagaggtcacttactatttcttcctgttacaaatgatctgaggcagttttttcctgggaat

SEQ ID NO: 603933 - DNA, 120 bp, Artificial Sequence
  ENSG00000175104_17 (sequence is synthesized)
ccacacgttccatgctttttcagaaatgttaggcctgaagtgcctgtggcatgttgcagcagctattttgccagttagtatacctctttgttgtactttcttgggcttttgctctggtgt

SEQ ID NO: 603934 - DNA, 120 bp, Artificial Sequence
  ENSG00000175104_18 (sequence is synthesized)
attttattgtcagaaagtccagactcaagagtactaaacttttaataataatggattttccttaaaacttcagtctttttgtagtattatatgtaatatattaaaagtgaaaatcactac

SEQ ID NO: 603935 - DNA, 120 bp, Artificial Sequence
  ENSG00000175104_19 (sequence is synthesized)
cgccttgtgctagtgccctcgagaagagttattgctctagaaagttgagttctcatttttttaacctgttatagatttcagaggatttgaaccataatccttggaaaacttaagttctca

SEQ ID NO: 603936 - DNA, 120 bp, Artificial Sequence
  ENSG00000175104_20 (sequence is synthesized)
ttcaccccagtttttcctccaggttgttactaaggatattcagggatgagtttaaaccctaaatataaccttaattatttagtgtaaacatgtctgttgaataatacttgtttaagtgtt

SEQ ID NO: 603937 - DNA, 120 bp, Artificial Sequence
  ENSG00000175104_21 (sequence is synthesized)
tagcatcttccccagagtttataatgctgagaaccacgtggataccaactgctcattgttatgctatgtaaccctttttgtctattcagtgcagagtgaatttcacagctctgcatatgt

SEQ ID NO: 603938 - DNA, 120 bp, Artificial Sequence
  ENSG00000175104_22 (sequence is synthesized)
cttcatttgtttaatgcttacaagacaggagatgcacacatacaatcagcaacataaaaattaaaagtgacccaagtagtcagcgcatgtggcatctcattggtggtgacagaagctatg

SEQ ID NO: 603939 - DNA, 120 bp, Artificial Sequence
  ENSG00000175104_23 (sequence is synthesized)
tgagccagaagttttcagctcttttgaataccctctggtttatttcgattaaaaagaacaaaattgatttcctaaaatcagaattttttaaaacttgggagatgattggagatacctagg

SEQ ID NO: 603940 - DNA, 120 bp, Artificial Sequence
  ENSG00000175104_24 (sequence is synthesized)
aggtcaccaaactaggattagaagtcacagtggttgtatcacaacttagcttgagtatgttgctgtagcctaacaactgcaggttctgagaaggatcctgtagaatcctggaagtaacca

SEQ ID NO: 603941 - DNA, 120 bp, Artificial Sequence
  ENSG00000175104_25 (sequence is synthesized)
gattttcctaatagggagatgatttttttgtgtgccatcatgtatttgttaaaggcctatatatagatataaaatatcgtggaatctagttctcagggagacccgcaactagtataagct

SEQ ID NO: 603942 - DNA, 120 bp, Artificial Sequence
  ENSG00000175104_26 (sequence is synthesized)
tataaaggatctaaagatccatccaccatttaaagttgtctggtaatgagagatgacattgtatcccccagagaggccaaatcagagtcgccagccagcgttctagatcagccttaattt

SEQ ID NO: 603943 - DNA, 120 bp, Artificial Sequence
  ENSG00000175104_27 (sequence is synthesized)
caagagaaagccaaggacctcatctgcaggggagtgtggttttcagccccagcgagtgtcactttgaactttccctttgcttttttctctcttctccctccccacccacccttaggctcc

SEQ ID NO: 603944 - DNA, 120 bp, Artificial Sequence
  ENSG00000175104_28 (sequence is synthesized)
tgatctggtgagtttgttatggagtgaaaataaaagtcaagcagagaccttgtttcccgtgccaccattagtaccacaagctcatggctagttaccacattacttcctggcagtttgtgt

SEQ ID NO: 603945 - DNA, 120 bp, Artificial Sequence
  ENSG00000175104_29 (sequence is synthesized)
ccctcagctgtgccttccaaccagcgcctgagaatcactgcataccaccctctaggtagggaaacctacactgctgctgttcctgtgattattttacaatgaataaataattgtcaagtt

SEQ ID NO: 603946 - DNA, 120 bp, Artificial Sequence
  ENSG00000175104_30 (sequence is synthesized)
ccatttaaaaactgaacagtagtatttttgtatttgcgtagaaaaagcctgaaggaaatatactaaactttttgttggcttattttcctttgcgcttgcttatattttttacattttcta

SEQ ID NO: 603947 - DNA, 120 bp, Artificial Sequence
  ENSG00000175104_31 (sequence is synthesized)
caataaatgtgtacttttatcggagaaaaaaattaaatgttgccacaaaacatttaatctccacgcccccagctcaaaaaaggaaatgatatttaaaagcttcctggtcagatttctatt

SEQ ID NO: 603948 - DNA, 120 bp, Artificial Sequence
  ENSG00000175104_32 (sequence is synthesized)
tattaaaaaaaaaagttgttttgcctaatttcagcttttagcaagcttcccatctgtaaaatgatttggaccagatatttctagagtcccctccagccataacattctgtctcaaattaa

SEQ ID NO: 603949 - DNA, 120 bp, Artificial Sequence
  ENSG00000175104_33 (sequence is synthesized)
gttccaaccagcagaacaatgacaatacttaggaaagtattttgccagtataaaatgtctttaacttactctttgctgacactgatactttcctctaatttagtgtctatcagctgggtc

SEQ ID NO: 603950 - DNA, 120 bp, Artificial Sequence
  ENSG00000175104_34 (sequence is synthesized)
acatcttaagtaaaatgagcaattttaacccccaacatttggcattttgtcataaaccagccagttattttatgctggtcattcatcttgactacaaagtagaatagtcaagctgtcatt

SEQ ID NO: 603951 - DNA, 120 bp, Artificial Sequence
  ENSG00000175104_35 (sequence is synthesized)
ccaaatagaaaactttttacttcaatcagaattaagccttaacctggaaagttggtttcttccttacattttcccaatctcctactctattcttaaacatgctagtttcactcagttggg

SEQ ID NO: 603952 - DNA, 120 bp, Artificial Sequence
  ENSG00000175104_36 (sequence is synthesized)
tatacaagcctttgggctttatgttgtatgttactaaccaccttttaccatatttatcttttggcatcattctgggacattgctaaattaaaaaagaaattgtttccacttttttctgga

SEQ ID NO: 603953 - DNA, 120 bp, Artificial Sequence
  ENSG00000175104_37 (sequence is synthesized)
taaaaaagaaattgtttccacttttttctggagatgttcaactaaaggttgttttgttttgttttttgttttgagacagtctcaccctgacgctcaggctggagtgcagtggtgcaacct

SEQ ID NO: 603954 - DNA, 67 bp, Artificial Sequence
  ENSG00000175104_38 (sequence is synthesized)
gagtagagaccgggtttcaccatattggccagtctcgtctggaactcctgacctcagatgatccgcc

SEQ ID NO: 603955 - DNA, 78 bp, Artificial Sequence
  ENSG00000175104_39 (sequence is synthesized)
tccaacccactgttggatgaaacttgctgcacgtcatacattttgctgttggcaaacaagtctgaatgttgatttgaa

SEQ ID NO: 603956 - DNA, 120 bp, Artificial Sequence
  ENSG00000175104_40 (sequence is synthesized)
cattttgctgttggcaaacaagtctgaatgttgatttgaagtttggtagtttattactatctattggcagcaaagactgtttattggtatactacaatatgatttaacttttattttggg

SEQ ID NO: 603957 - DNA, 120 bp, Artificial Sequence
  ENSG00000175104_41 (sequence is synthesized)
gataaatagtagaaaaaagtgaaacagaatgaaggcaggtgttttttattctaatgatggaataatacagagatactggacgatctctagcagttaattattgtgacccatataaaatta

SEQ ID NO: 603958 - DNA, 120 bp, Artificial Sequence
  ENSG00000175104_42 (sequence is synthesized)
tacaggtcacagtataattctctattaccgtttttacaccagtaagtcttagataaactaagcatgcttatgaattatgtatacagttagaatgcattatttttacagaggaacaattgc

SEQ ID NO: 603959 - DNA, 120 bp, Artificial Sequence
  ENSG00000175104_43 (sequence is synthesized)
ttatttttacagaggaacaattgcttgtatgtactaacactgttctcttggcttgcctcaagttctactcattattttatataaaatactattaggctgggcacggtggctcacgcctat

SEQ ID NO: 603960 - DNA, 83 bp, Artificial Sequence
  ENSG00000175104_44 (sequence is synthesized)
agcacagcctgggtgacagagtgcaacactgtctcacaaaacaaaacaaaaacatcagattctgtttgtgatgcctagttgct

SEQ ID NO: 603961 - DNA, 120 bp, Artificial Sequence
  ENSG00000175104_45 (sequence is synthesized)
aaacaaaaacatcagattctgtttgtgatgcctagttgcttacaacctaaacagtgcaatgccttaaggaaatgaaaaggagccataagtagtcatttatatttttattttgaagtgtgc

SEQ ID NO: 603962 - DNA, 120 bp, Artificial Sequence
  ENSG00000175104_46 (sequence is synthesized)
tttttctaaactcccagattgacatgatggactgtaagttagtttctctgtttctgtctttgtgcctgtagagtgtacttggcacttacaaattcccagtatccagaaagatgatctgat

SEQ ID NO: 603963 - DNA, 120 bp, Artificial Sequence
  ENSG00000175104_47 (sequence is synthesized)
gaaatcaaattggatggatcttggcagactgtgacactcaattacagccttcactttcagtcaaaaacggacacttggcaaggaggtgcctggttgtttcactaaatgtcacttgtgtgt

SEQ ID NO: 603964 - DNA, 120 bp, Artificial Sequence
  ENSG00000175104_48 (sequence is synthesized)
gtaatattttaaagctttttccccacaggaaattcgggtcataaaatcctgaaaaataattctaggtgggaaaagcattttaggaaatgagagatgtggtgctgcttttcttctctcaga

SEQ ID NO: 603965 - DNA, 120 bp, Artificial Sequence
  ENSG00000175104_49 (sequence is synthesized)
gtgctttctcagcaggacactagccctgcctttaagatggggaagttggggcatgtgcctctgctcttactgtctgcagctctgaaggtaggtgctgtcccactcggacaatcgcccaag

SEQ ID NO: 603966 - DNA, 120 bp, Artificial Sequence
  ENSG00000175104_50 (sequence is synthesized)
cagcagtgaccatagttctcttctatgcaagtccccaggagaaggtaaactgtgtggaatggggatgtgttctggttgctgctgaatcccctcttcttaccacagtgcctggcacgttgc

SEQ ID NO: 603967 - DNA, 120 bp, Artificial Sequence
  ENSG00000175104_51 (sequence is synthesized)
acacactcaaatacgtaataatgaacatttattgaaagcagcagttgaagctgaccaatttctggtaccttgtcatgtaaattttagatggtaaggcgcagatgttactttttttgcttt

SEQ ID NO: 603968 - DNA, 120 bp, Artificial Sequence
  ENSG00000175104_52 (sequence is synthesized)
ttttcttcagcacttgatgaaatttcccaaacatgcagaaatgttgaaagacttgtatagtgaacatctacgacctagaatctgcagtaatattatgttacatttgctttatcacttgat

SEQ ID NO: 603969 - DNA, 120 bp, Artificial Sequence
  ENSG00000175104_53 (sequence is synthesized)
agatgttacttttaatgagacttcaagtttggtttctctaaacaaaatattctaaaataactgaacaactttaatcaatttgtcttaagttctttgggggaacttgggacatttgctttg

SEQ ID NO: 603970 - DNA, 120 bp, Artificial Sequence
  ENSG00000175104_54 (sequence is synthesized)
taactggaattgcagccctcacgttaagctaattttaaactttgcaaatttgttatgctgaatttcagtcttatttattttgcctgaaggggtattttttgtaatggatttatttgaagg

SEQ ID NO: 603971 - DNA, 120 bp, Artificial Sequence
  ENSG00000175104_55 (sequence is synthesized)
tccttgataaattgtgcagaatattctcgtgttctttttgcacttgataaattatctaatttctgtggtgagaatgtaatttggggcctattttgtttatacaagcttccagaattatgt

SEQ ID NO: 603972 - DNA, 120 bp, Artificial Sequence
  ENSG00000175104_56 (sequence is synthesized)
tctcagagggatgaaaaggtgtaatttagcatataggtcactaaattaggagctaagacacattttctcctgactgaccatgggtcaatcagttttgtcttcgtgtccttttccttgtaa

SEQ ID NO: 603973 - DNA, 120 bp, Artificial Sequence
  ENSG00000175104_57 (sequence is synthesized)
agtagaaactagaatttgaaatttaaatattaaataatgggtaacattcattaatgtatgactctattaagaaagacactgtgaatccagggaggattctcataattctgtaaactgtat

SEQ ID NO: 603974 - DNA, 120 bp, Artificial Sequence
  ENSG00000175104_58 (sequence is synthesized)
gacaagctgtggaatgaaatctgacttttgaaaattgaaagacatccagtggtcttatcacaaagcctgcttttcctcagaacttaactattgccatggaatttgtaagcagttatccta

SEQ ID NO: 603975 - DNA, 120 bp, Artificial Sequence
  ENSG00000175104_59 (sequence is synthesized)
atccatctggactctgaaaatgcatcctttatgagagggagtgaatgcaaagataagggtggggaaacactaatcatgaaaagaatgaaaatcagtgttcagttttaagagcaggttgta

SEQ ID NO: 603976 - DNA, 120 bp, Artificial Sequence
  ENSG00000175104_60 (sequence is synthesized)
ttgaaggaagggattaaaggaattatccagatttgaggtggcacatcttccaccactccctgcaccatcagcatgcacggagcgcataaaacaagccctgctcctaatggcagtgaaacc

SEQ ID NO: 603977 - DNA, 120 bp, Artificial Sequence
  ENSG00000175104_61 (sequence is synthesized)
tcggatggcctccatcaggtcaatacaactgaattgctgggctgacttaagattgaaggactccattttagtaagtagagaagtgtgacctttctcaacccaggttgtgaatgtggattc

SEQ ID NO: 603978 - DNA, 120 bp, Artificial Sequence
  ENSG00000175104_62 (sequence is synthesized)
acacttatctcaaaaaggcacctggagttttaactttatgtcatgtctcagtactggttgcaaggtatgaccaaaagtgttccttgaatggcacctttttgaatattaatttagaagaaa

SEQ ID NO: 603979 - DNA, 120 bp, Artificial Sequence
  ENSG00000175104_63 (sequence is synthesized)
acatgccagactgacatacttaccccctccgcactgttactacttccttaccagccctatgtactgcatcaatgtctacaagaaagcactcttcattaaaatgaaatatatatattaaaa

SEQ ID NO: 603980 - DNA, 120 bp, Artificial Sequence
  ENSG00000175105_0 (sequence is synthesized)
agcctaggcatctacggcggcggcggcggcgcaggggctggtacgcgctgggcggcgagagcctcatggcggaggaagagagcgaccaagaggccgaacgcctcggagaagagcttgtgg

SEQ ID NO: 603981 - DNA, 120 bp, Artificial Sequence
  ENSG00000175105_1 (sequence is synthesized)
ccattgtggagtccccgctgggccctgtggggcttagagctgcgggcgacggcagaggcggcgctggcagcggcaactgcggcggcggcgtcggaatcagcagtcgggattactgccgac

SEQ ID NO: 603982 - DNA, 120 bp, Artificial Sequence
  ENSG00000175105_2 (sequence is synthesized)
gcttctgtcaggtggttgaagattatgctggaagatggcaggtccctttgccacagcttcaggttcttcagactgccctttgttgttttacaacagccagtgcatcattcccagatgaat

SEQ ID NO: 603983 - DNA, 120 bp, Artificial Sequence
  ENSG00000175105_3 (sequence is synthesized)
gtgagcatgtacaatatgttttgagtagccttgctgtgagtttctttgagttgctgctgttctttggaagagatgagttttatgaagagcccttaaaggatattcttggatcattccagg

SEQ ID NO: 603984 - DNA, 120 bp, Artificial Sequence
  ENSG00000175105_4 (sequence is synthesized)
aatgccagaatcacctccgcagatatggaaatgtgaatctggaactggtgactcgaatcattagagatggtggcccatgggaagatccagtgttgcaagctgtccttaaagctcagccag

SEQ ID NO: 603985 - DNA, 120 bp, Artificial Sequence
  ENSG00000175105_5 (sequence is synthesized)
catctcaggagatagtgaacaaatatttaagttctgaaaatccactgttctttgaactacgtgccagatacctaattgcttgtgaacgcatacccgaagcaatggctcttattaaatctt

SEQ ID NO: 603986 - DNA, 120 bp, Artificial Sequence
  ENSG00000175105_6 (sequence is synthesized)
gtataaatcacccagaaatcagtaaagacttatacttccatcaagcactcttcacatgtctgtttatgtcacctgtagaagatcagctattccgggagcatttattgaaaactgattgta

SEQ ID NO: 603987 - DNA, 120 bp, Artificial Sequence
  ENSG00000175105_7 (sequence is synthesized)
agagtggaattgatatcatctgtaatgctgaaaaagaaggcaaaactatgttagccttgcaactctgtgaatcctttcttattccacagctccagaatggggatatgtactgtatctggg

SEQ ID NO: 603988 - DNA, 120 bp, Artificial Sequence
  ENSG00000175105_8 (sequence is synthesized)
agttgattttcatatggagtaaactacagcttaaatctaatccttcaaaacaagtttttgtagatcaatgctaccagcttttaagaacagcaactaatgtgagagtcatatttcctttca

SEQ ID NO: 603989 - DNA, 120 bp, Artificial Sequence
  ENSG00000175105_9 (sequence is synthesized)
tgaaaatcatcaaagatgaggttgaagaagaaggcttgcaaatttgtgttgaaatatgtggttgtgctctacaactcgaccttcatgatgatcccaaaactaaatgtctaatttataaaa

SEQ ID NO: 603990 - DNA, 120 bp, Artificial Sequence
  ENSG00000175105_10 (sequence is synthesized)
caattgcacattttttgccaaatgatttggagatcctcaggatttgtgcactctcaatattttttctggagcgctccttagaagcgtatcgtactgttgaagagctttacaaacgtccag

SEQ ID NO: 603991 - DNA, 120 bp, Artificial Sequence
  ENSG00000175105_11 (sequence is synthesized)
atgaagaatataatgaaggcacaagtagtgttcaaaatcgtgttcgttttgaattgcttccaattttgaaaaagggattgttttttgaccctgaattttggaacttcgtaatgattaaga

SEQ ID NO: 603992 - DNA, 120 bp, Artificial Sequence
  ENSG00000175105_12 (sequence is synthesized)
aaaactgtgtagcattattgagtgataaatcagcagttagatttctaaatgaaagcacactggaaaataatgcaggtaatctaaaaaggacggaggaacagcaaggtttggatgaagggt

SEQ ID NO: 603993 - DNA, 120 bp, Artificial Sequence
  ENSG00000175105_13 (sequence is synthesized)
ttgactctcttacagatcagagcactggagagactgatcctgatgatgtatctggagtgcagcctaaaggtcatattaatacgaagaaaaatcttacagctctcagtacttccaaagtag

SEQ ID NO: 603994 - DNA, 120 bp, Artificial Sequence
  ENSG00000175105_14 (sequence is synthesized)
atcacaatgtcccaaggcatcgttgtatgttatgtaacaaggaatttttaggtggtcacattgtaaggcatgcccaggctcatcagaaaaaaggcagttttgcatgtgtaatatgtggta

SEQ ID NO: 603995 - DNA, 120 bp, Artificial Sequence
  ENSG00000175105_15 (sequence is synthesized)
ggaaatttagaaacagaggacttatgcagaagcatttgaagaatcatgttaagaagatacagaggcagcaaattgctgcagctcaacaggatgatcaggaagtcactgctttggaagaaa

SEQ ID NO: 603996 - DNA, 120 bp, Artificial Sequence
  ENSG00000175105_16 (sequence is synthesized)
taaattgttctagttcttccatttcatttgaaaatgggaattctgatagtaaggatttggaagtggagacacttactgcttctagtgaaggaaacaaagaagtcatccctgagcatgtgg

SEQ ID NO: 603997 - DNA, 120 bp, Artificial Sequence
  ENSG00000175105_17 (sequence is synthesized)
ctgaattcattgaaattcccataagtgtaccagaagatgttattgaaaatgttattgaaaatggcagtcctaataattctttaaataatgttttcaagcctttaactgaatgtggggatg

SEQ ID NO: 603998 - DNA, 120 bp, Artificial Sequence
  ENSG00000175105_18 (sequence is synthesized)
attatgaggaggaagaggatgaagaaggtgattatgaagaagatgattatgacctgaatcaagaaacttcagtaattcataaaatcaatggaactgtgtgccatccaaaagacatatatg

SEQ ID NO: 603999 - DNA, 120 bp, Artificial Sequence
  ENSG00000175105_19 (sequence is synthesized)
ccacagatcaagaaggaaactttaagtgtcctgctcttggttgtgtccggatatttaaaagaattgggtttctaaataaacatgcaatgaccgtacatccaaccgatttaaatgtgcgac

SEQ ID NO: 604000 - DNA, 120 bp, Artificial Sequence
  ENSG00000175105_20 (sequence is synthesized)
aaacagtaatgaagtggagcaaaggaaaatgcaaattttgtcaaaggcaatttgaagattctcaacattttatagaccaccttaatagacatagctatccaaatgtgtatttttgtttgc

SEQ ID NO: 604001 - DNA, 120 bp, Artificial Sequence
  ENSG00000175105_21 (sequence is synthesized)
attttaattgcaacgagtcgtttaagctgccgttccagcttgcccagcacacaaaaagtcacaggatatttcaggctcagtgtagttttccagaatgccatgagctttttgaagatcttc

SEQ ID NO: 604002 - DNA, 120 bp, Artificial Sequence
  ENSG00000175105_22 (sequence is synthesized)
ctctgctgtatgaacatgaagctcaacactatttaagtaaaacaccagagtcatctgcacaaccaagtgaaacaattctttgggatgttcagacagactcaaatcctaatcaggaaaaag

SEQ ID NO: 604003 - DNA, 120 bp, Artificial Sequence
  ENSG00000175105_23 (sequence is synthesized)
actcatctagtaatgagaaacaaactattagtctgccagtttctactagcaaatcaaggaaagagtctacagaaccaaagacatgtatagaaagtatggaaaagaaaacagacagtttag

SEQ ID NO: 604004 - DNA, 120 bp, Artificial Sequence
  ENSG00000175105_24 (sequence is synthesized)
ttcagaatggaaacgaacgttctgatgacactgtttcaaatataagcttgatagaccaaaagatgcctgacatagagccaaattctgaaaataattgtagtagtagtgatatagtcaatg

SEQ ID NO: 604005 - DNA, 120 bp, Artificial Sequence
  ENSG00000175105_25 (sequence is synthesized)
gacacagtgaaatagagcaaacacctttagtttcatcagatcctgctttgaaaattgatacaaacagaatcaggacagaaaatggttccattttgcccagtgttgtaccacaagaacaca

SEQ ID NO: 604006 - DNA, 120 bp, Artificial Sequence
  ENSG00000175105_26 (sequence is synthesized)
tcccagttaccttgatgaacggtatcttagtatgccaaaacgcagaaaatttctgactgatagagtagatgcctgttctgatcaagataacgtgtataaaaaatcagtgaaaagattaag

SEQ ID NO: 604007 - DNA, 120 bp, Artificial Sequence
  ENSG00000175105_27 (sequence is synthesized)
atgtggcaaatgcctgaccacctactgtaatgcagaagcacttgaggctcatcttgcacaaaagaaatgtcagacactctttggatttgattcagatgatgaaagtgcctgatgaaaacg

SEQ ID NO: 604008 - DNA, 120 bp, Artificial Sequence
  ENSG00000175105_28 (sequence is synthesized)
gttcagaaagatctgtcaatcaagcagtagtgtgaaaaaagcactataagaaaatgcatcatcagtttgctatttccctgatggccttaattttagagtggtcttggattactaaagata

SEQ ID NO: 604009 - DNA, 120 bp, Artificial Sequence
  ENSG00000175105_29 (sequence is synthesized)
aagacaaagcacattttctagaatgaactcacagagatgtgctggcttagactccaaaaggattataaaactcccaaagtaccagttttccagaaaaccacattttacagtttatgatga

SEQ ID NO: 604010 - DNA, 120 bp, Artificial Sequence
  ENSG00000175105_30 (sequence is synthesized)
ttaatagcagcagcatgttcagtttcgcttatatgagaaacatgtttaggcaactagtcagaaaaccagctatggccttacagaaagggaaaaattaacccattattaaaaagtgtgtgt

SEQ ID NO: 604011 - DNA, 120 bp, Artificial Sequence
  ENSG00000175105_31 (sequence is synthesized)
ggggaggggggctggtttacaatattaaaccatttaaagtattttattctacaaatggggtttgttttcttgtcatgcataatcagattatgtcccctcccttctggttaaacatggttt

SEQ ID NO: 604012 - DNA, 120 bp, Artificial Sequence
  ENSG00000175105_32 (sequence is synthesized)
aaggaaccgctgctgtttggtttgtgattgatttagaaacttatacattaacttaccacagtgctatcaattaaagattgtaacaggtttccagatgattaattaggtcaaagttcaatg

SEQ ID NO: 604013 - DNA, 120 bp, Artificial Sequence
  ENSG00000175105_33 (sequence is synthesized)
aatggcacgccagcattgaaaattaaaaaacaaaacaaaaaaaaccacagtgctttgctaataagctcttgatagaacctcccactaaccacttttgtggtacaaattagttaacattta

SEQ ID NO: 604014 - DNA, 120 bp, Artificial Sequence
  ENSG00000175105_34 (sequence is synthesized)
aagggcagcagtgtcaataaaatagaaaaaaaccgatcagtactctggggagagatgaaaggaatctaagactttacaggctttgtagttgaaggaaaacactgaattgcaaattattca

SEQ ID NO: 604015 - DNA, 120 bp, Artificial Sequence
  ENSG00000175105_35 (sequence is synthesized)
atgtgaataatggtaaaagcacactgggatacttctgtttgtgtatatgttgggacattgcttgatgattcatagtaaggtcctttagacattaatgtgagttatctaagtacagtccta

SEQ ID NO: 604016 - DNA, 120 bp, Artificial Sequence
  ENSG00000175105_36 (sequence is synthesized)
ttaaaataactggctcaaaaaatcagctaagaatcaggttgagaaatcattcattttattctattaggagaggtaattccaaaataagccatactattcctgtttttttaattcattagt

SEQ ID NO: 604017 - DNA, 120 bp, Artificial Sequence
  ENSG00000175105_37 (sequence is synthesized)
gatgactctggtctgaacagtaatttttatatgtaaaaggaagtatttacacaaaacatttgcacaagaacacagtaagagatacattcaagcattgttttccttagtgatgttattttc

SEQ ID NO: 604018 - DNA, 120 bp, Artificial Sequence
  ENSG00000175105_38 (sequence is synthesized)
ctaagaagattttaacttaataaagtgttaaaacaataaatatttttaaaaataccctctcagatgttttccatttgtccattattgaaaggaagatgcttaaagacttccttttactaa

SEQ ID NO: 604019 - DNA, 120 bp, Artificial Sequence
  ENSG00000175105_39 (sequence is synthesized)
tagtgtgtaaatctaaaacagggattaaaataacaaaaaggcagtgtttcaaaacagatctcctaatgtcccaatgtcaaatattccagttattctaaataataaaatctttgttcaagg

SEQ ID NO: 604020 - DNA, 120 bp, Artificial Sequence
  ENSG00000175105_40 (sequence is synthesized)
cagataatctcatcagaccctattagagcttcttgaatgaggctattacggaagtggggaatttcttccaggtagcatccatattttattaaattaggatttccagatcatgatagatca

SEQ ID NO: 604021 - DNA, 120 bp, Artificial Sequence
  ENSG00000175105_41 (sequence is synthesized)
gatgatttttttttaatttcccggttttattggtttatcatcagcattcactactatgcaatgatggtcataagtccattccaaatttaaatttgtttctgttatgtagcctatattagg

SEQ ID NO: 604022 - DNA, 120 bp, Artificial Sequence
  ENSG00000175105_42 (sequence is synthesized)
ctgtggaatttacatttaggtaactaaacacagctcataattaaaatcttttctttaaggtcagctaaaaaaaatgtttcctgtatttcttgatactaaaaatgtaatgatttttatttt

SEQ ID NO: 604023 - DNA, 120 bp, Artificial Sequence
  ENSG00000175105_43 (sequence is synthesized)
agttcattctaaaagtatgtcttgtaataaaaagtctgtttggaaactggttcatttggacagtgaagtcttttgaaatatttctgctttgtacattttccagaagtttaatattttatc

SEQ ID NO: 604024 - DNA, 120 bp, Artificial Sequence
  ENSG00000175105_44 (sequence is synthesized)
acattttccacaagttgtaacaattgatataaatccatgcccacaaagtattccattttcattacttttactgttcatgccaagatgtttcaaatatattccatttgtaatctgtcttta

SEQ ID NO: 604025 - DNA, 120 bp, Artificial Sequence
  ENSG00000175105_45 (sequence is synthesized)
acttgaggtttatttctacttttgtgttgctaaaattatttctgcaagactgagatcaaactggtttatatataactaaatcaaggaatgttttataaaattctatttgaccacactgtc

SEQ ID NO: 604026 - DNA, 120 bp, Artificial Sequence
  ENSG00000175105_46 (sequence is synthesized)
ttaacctcggtttatatacttctcaaatagctattgaaagaatgtgttcattttattacatctgtcttttaaaacataaacctacatcattttgcttttatagggtgcataaacttccaa

SEQ ID NO: 604027 - DNA, 120 bp, Artificial Sequence
  ENSG00000175105_47 (sequence is synthesized)
cagttctaatttgagcgcttcagaagaaaaggaagcttgcttcttattcctcagattcttctttttttctgttttgaggatgtattcatcctacatggaccaagtttcaaatctttgttt

SEQ ID NO: 604028 - DNA, 120 bp, Artificial Sequence
  ENSG00000175105_48 (sequence is synthesized)
ttaaataaaaatttccttcaaaaaattaaatgttaaatttctgctgtgtgtcagtaaggtgaagaaaatagcaaatctgaatttttgctgctcagatattatggaggaggtaaaaagggg

SEQ ID NO: 604029 - DNA, 120 bp, Artificial Sequence
  ENSG00000175105_49 (sequence is synthesized)
aatctccgtggacaaggacactggtactttgggctttagccatattcatttttttgaaaccaccaattatataatacttaaataatttatatcattgaacttgtgattcttttcaaatca

SEQ ID NO: 604030 - DNA, 120 bp, Artificial Sequence
  ENSG00000175105_50 (sequence is synthesized)
cactgaaggttcagccgtactcctttcatgtttggtttaatactgttgtatggatgaaaaacctaaaagggatgatagtgtttattttttaatttatttggtactgtaaaacaccttttc

SEQ ID NO: 604031 - DNA, 120 bp, Artificial Sequence
  ENSG00000175105_51 (sequence is synthesized)
agaatgagtaaatgctgcatatgcattttggagttgttaatatgtgaaagatattacagattcagcaagaaaggaaatttgtgcttccttgttgaatgttaaattattttactttgcatt

SEQ ID NO: 604032 - DNA, 120 bp, Artificial Sequence
  ENSG00000175105_52 (sequence is synthesized)
ttataagagtacaaattaaaactgagccattgaactgcaataaatcaacaatagtgtctcatttcaagaaattttttgtactgtacatagatttgttcaataaaacgtccttgttggtaa

SEQ ID NO: 604033 - DNA, 120 bp, Artificial Sequence
  ENSG00000175105_53 (sequence is synthesized)
ttgaatctcttttgataaaatttatttgattttaaaactgaaggaaaggaggattttaaggccacattctccatacattacattctcctctgccctaactccaaactctcaacatgggag

SEQ ID NO: 604034 - DNA, 120 bp, Artificial Sequence
  ENSG00000175105_54 (sequence is synthesized)
gctgatttattgttacttaaaatttaacatggaagcaattgcttccattacaaccttttttcttataattaaatatttgttactttcaatattatcctaaatcccatttatagaatctta

SEQ ID NO: 604035 - DNA, 120 bp, Artificial Sequence
  ENSG00000175106_0 (sequence is synthesized)
gctccctcaaagcggaggtgaggccggactgaggctcttacagtggtccctgctggcccttggtgacgggtcgcgtcagttccgacccggacccgtacgctgctgcgctgacgtggctcc

SEQ ID NO: 604036 - DNA, 120 bp, Artificial Sequence
  ENSG00000175106_1 (sequence is synthesized)
tggaagcagggctggcgtagggccgccatgttgcagcaggatagtaatgatgacactgaagatgtttcactgtttgatgcggaagaggagacgactaatagaccaagaaaagccaaaatc

SEQ ID NO: 604037 - DNA, 120 bp, Artificial Sequence
  ENSG00000175106_2 (sequence is synthesized)
agacatccagtagcatcgtttttccacttattctttcgagtcagtgcaatcatcgtctgtcttctctgtgagttgctcagcagcagctttattacctgtatggttacaattatcttgttg

SEQ ID NO: 604038 - DNA, 120 bp, Artificial Sequence
  ENSG00000175106_3 (sequence is synthesized)
ttgtcgtgtgacttttgggcagtgaagaatgtcacaggtagactaatggttggcctacgttggtggaatcacattgatgaagatggaaagagccattgggtgtttgaatctagaaaggag

SEQ ID NO: 604039 - DNA, 120 bp, Artificial Sequence
  ENSG00000175106_4 (sequence is synthesized)
tcctctcaagagaataaaactgtgtcagaggctgaatcaagaatcttttggttgggacttattgcctgttcagtactgtgggtgatatttgcctttagtgcactcttctccttcacagta

SEQ ID NO: 604040 - DNA, 120 bp, Artificial Sequence
  ENSG00000175106_5 (sequence is synthesized)
aagtggctggcggtggttattatgggtgtggtgctacaaggtgccaacctgtatggttacatcaggtgtaaggtgcgcagcagaaagcatttaaccagcatggctacttcatattttgga

SEQ ID NO: 604041 - DNA, 120 bp, Artificial Sequence
  ENSG00000175106_6 (sequence is synthesized)
aagcagtttttaagacaaaacactggagatgatcagacttcctgaatagagaaagcttatgtgctttgttacattggggaacaactgaagagattcttgactcaaccttttagagcttag

SEQ ID NO: 604042 - DNA, 120 bp, Artificial Sequence
  ENSG00000175106_7 (sequence is synthesized)
ctagaaagtatatgttggcactagaaacattgttaagatttgttctgtggtgtaggtatgcacattccataggtatgcacacggccatgtaatacctgtatatcccaagttaatgaaagt

SEQ ID NO: 604043 - DNA, 120 bp, Artificial Sequence
  ENSG00000175106_8 (sequence is synthesized)
gttcatttacacagataatggagacctttgcattttgatccatagaacataggaggatgttcttagtctgtctcaaagctctatatgtttacatattatttctgtagattgttttcagga

SEQ ID NO: 604044 - DNA, 120 bp, Artificial Sequence
  ENSG00000175106_9 (sequence is synthesized)
gaaagttttgcttctatggtaagagtgagcactttggcttatgtataagttagaaataattgttagtttttaatatgtacttcatggggaaatttcttagacgtatgcaagcaagtgaaa

SEQ ID NO: 604045 - DNA, 120 bp, Artificial Sequence
  ENSG00000175106_10 (sequence is synthesized)
acaattagggccagtggtattaactactttataaaattttatttttgtttgtaagaagttatctacttaaggcccagttaatataagtggaatcatcatagtttaaggaatacccagaga

SEQ ID NO: 604046 - DNA, 120 bp, Artificial Sequence
  ENSG00000175106_11 (sequence is synthesized)
ttgctgctattctatttattttacagaaaggatagctagattgaaagttcttcagtggaccttgagctaatagatcttttaccactaaaagagcattattctcatgtcataatgagaata

SEQ ID NO: 604047 - DNA, 120 bp, Artificial Sequence
  ENSG00000175106_12 (sequence is synthesized)
ataatttacatacttggcataataaatgcctaaaagacattttattttctgaatctatttttttcttgctataatggggatattgtaaattatgcatttgtattaatggtatttcttaaa

SEQ ID NO: 604048 - DNA, 120 bp, Artificial Sequence
  ENSG00000175106_13 (sequence is synthesized)
gcaatctatgtaactgtaaattaaaccaatctacaaactattgtaggcatctgtaaattctgttgtaggtattataaactttgttgaagtcttaatcagcagattatgttgtgaatatat

SEQ ID NO: 604049 - DNA, 120 bp, Artificial Sequence
  ENSG00000175106_14 (sequence is synthesized)
ttgtacattgttaaaatagtttttaagattatttgtttaattgaataagtgtcttattggagtgatagctttgaaggtgcaaaactttatatttgtataaaattctactatttacaaggc

SEQ ID NO: 604050 - DNA, 120 bp, Artificial Sequence
  ENSG00000175106_15 (sequence is synthesized)
ggctcaagagatcctcccgcttccgccttccaaagcgctgggataacaggcgtgagccgctgcccgggccatccctcgaggaagtttcatcaggtagacattaattctttcacgaggatc

SEQ ID NO: 604051 - DNA, 120 bp, Artificial Sequence
  ENSG00000175106_16 (sequence is synthesized)
cccgcccgcctatttctctccttgcggctttgggcctggaggggaggtggggagagtcccaatagcagaggaactggtgagcccgggccaaaatttcatctggcatccggaatgcattaa

SEQ ID NO: 604052 - DNA, 120 bp, Artificial Sequence
  ENSG00000175106_17 (sequence is synthesized)
aaacaacccacaaatctgaagctcctcgcaggagagagagagagagagagagaggagagagaggagagaggagagagggagggaagagagtgacggagaaggagagaaagagacgggaga

SEQ ID NO: 604053 - DNA, 120 bp, Artificial Sequence
  ENSG00000175106_18 (sequence is synthesized)
gaggagagagaaagagagagagaggagagagagaaagaacgaacgaacagggaacttgtaaaactaaggggaaaagggcagaagagaggcagcagcgtggtccctgcaagcgtccgcttt

SEQ ID NO: 604054 - DNA, 120 bp, Artificial Sequence
  ENSG00000175106_19 (sequence is synthesized)
cctggccaagcagcccccagcacgcctgctttgtggggcagggccatgcggccccgaggaaggatgcggtgagccagagggttccagacaaaggaggggatccccaaggctctgggccag

SEQ ID NO: 604055 - DNA, 120 bp, Artificial Sequence
  ENSG00000175106_20 (sequence is synthesized)
ccagtccctgttttactggcaccacggtccctcctaggcgaggacgaagagggaaggggtggagacctccaccttctctgcgtgtggctgcgtccctttacagaatgacaggcccttact

SEQ ID NO: 604056 - DNA, 120 bp, Artificial Sequence
  ENSG00000175106_21 (sequence is synthesized)
tccgagggcggggactaatgtgtaaggcttaacagatccaattccagaaattatctgtgtttttttcaatcaccctcttgtgcccccccaccccccattaaatttcatcttttatctttt

SEQ ID NO: 604057 - DNA, 120 bp, Artificial Sequence
  ENSG00000175106_22 (sequence is synthesized)
ctgagggcgcgctgggagggtggcggctcctgggactggctctgcaggttccgtgggactggagcccgcgtcccccgcgcccgctactcgaactcgaggaggagcggggcggccgggagt

SEQ ID NO: 604058 - DNA, 120 bp, Artificial Sequence
  ENSG00000175106_23 (sequence is synthesized)
ggagggctgtgggtagttgtctgaggagggctgctgggggttctgaggccgctgggggaggcgtgacccgtgcggcgcagagcaagtacttcttgcggctgtggggacgcccattgttaa

SEQ ID NO: 604059 - DNA, 120 bp, Artificial Sequence
  ENSG00000175106_24 (sequence is synthesized)
ccagcgcgagtgggggtctctctttcctcaacccttattgccggggtggagttgaggaggagcggcctgcgggcctcttagcttcctgacacccaggggtgcgatgctatcttgtaggaa

SEQ ID NO: 604060 - DNA, 120 bp, Artificial Sequence; identical to SEQ ID NO: 580832
  ENSG00000175106_25 (sequence is synthesized)

SEQ ID NO: 604061 - DNA, 120 bp, Artificial Sequence; identical to SEQ ID NO: 580833
  ENSG00000175106_26 (sequence is synthesized)

SEQ ID NO: 604062 - DNA, 120 bp, Artificial Sequence
  ENSG00000175106_27 (sequence is synthesized)
gtaggcccagggatagggttgtgaccagtacagacaggtttcttgccccgtattttcgggttagggaagtgggttctaggagatgggggttgggtggggagacacgataaattgtataac

SEQ ID NO: 604063 - DNA, 120 bp, Artificial Sequence
  ENSG00000175106_28 (sequence is synthesized)
caaagatattttcagataattgcaaaggcagggtgatgaaataacaagtgtccgaggataggacaactaagatttatggtcaggaaagactgcttatgaggagatgccttgagtggagaa

SEQ ID NO: 604064 - DNA, 120 bp, Artificial Sequence; identical to SEQ ID NO: 580836
  ENSG00000175106_29 (sequence is synthesized)

SEQ ID NO: 604065 - DNA, 120 bp, Artificial Sequence
  ENSG00000175106_30 (sequence is synthesized)
gcaggagaatcgcttgaactggggaggccgaggttgcagtgagccgcgggccactgcactccatccagcctggctacagagggagactccgtctcaaacaaaacaaaaaaagtcttggat

SEQ ID NO: 604066 - DNA, 120 bp, Artificial Sequence; identical to SEQ ID NO: 580839
  ENSG00000175106_31 (sequence is synthesized)

SEQ ID NO: 604067 - DNA, 120 bp, Artificial Sequence; identical to SEQ ID NO: 580840
  ENSG00000175106_32 (sequence is synthesized)

SEQ ID NO: 604068 - DNA, 120 bp, Artificial Sequence
  ENSG00000175106_33 (sequence is synthesized)
acttattttttaaaaattacttttaagttcagttgtttttcatcaattatgggagctttaagtgaatgcccttgcagaatgtatgttgtatgtttttatttttattttttgagacagagt

SEQ ID NO: 604069 - DNA, 73 bp, Artificial Sequence
  ENSG00000175106_34 (sequence is synthesized)
gttgtttttcatcaattatgggagctttaagtgaatgcccttgcagaatgtatgttgtatgtttttattttta

SEQ ID NO: 604070 - DNA, 120 bp, Artificial Sequence
  ENSG00000175106_35 (sequence is synthesized)
ccacggcgcctggccgtgactaggtctttatatgagtaataccttgcatttggttagtacagtaggttgggcaagtgatattatgtaggacagggattcttaaactcgaacatacatgag

SEQ ID NO: 604071 - DNA, 120 bp, Artificial Sequence
  ENSG00000175106_36 (sequence is synthesized)
aatcacctagagggcacaagattgctgggttccacctccagactccttattcagtagatctgggggtggagtctcataatttgcatttctcccaagtttctgggtggtactgagggcact

SEQ ID NO: 604072 - DNA, 120 bp, Artificial Sequence
  ENSG00000175106_37 (sequence is synthesized)
ggtccagggattacattttagataactaaagccccgagaaattaaattatttacttaagattatacagctaatagtggtacaaagctagatcttaaacccagccctctgtactcaaaatt

SEQ ID NO: 604073 - DNA, 120 bp, Artificial Sequence
  ENSG00000175106_38 (sequence is synthesized)
gacacacagaggaaggaccgtgtgaagacgaagggggaagatgccgtccacaagccaaggagagaggccttagaggaaaccagccctgctgacaccttgatcttgggcttccagtctcca

SEQ ID NO: 604074 - DNA, 120 bp, Artificial Sequence
  ENSG00000175106_39 (sequence is synthesized)
gaacttgcttagagcatgaaagttttctgccgtctttggaatcttgtttgcaaacagctcaaaggagatgcggcccaagggctccccgttgatggcgatgttgaagaacatggtggggtt

SEQ ID NO: 604075 - DNA, 120 bp, Artificial Sequence
  ENSG00000175110_0 (sequence is synthesized)
tgataatcatggcgcccctcggaacaactgtattgctgtggagcctcttgaggagttctccgggcgtggaacgggtctgtttccgggctcgaatccagccctggcacggtggcctgctcc

SEQ ID NO: 604076 - DNA, 120 bp, Artificial Sequence
  ENSG00000175110_1 (sequence is synthesized)
aaccgctaccttgctctttcgagatggggctgccacgccgccggttcagctccgaggccgcagaatctggtagcccagagaccaagaaacctacatttatggatgaggaagttcaaagca

SEQ ID NO: 604077 - DNA, 120 bp, Artificial Sequence
  ENSG00000175110_2 (sequence is synthesized)
tactcacgaaaatgacaggcttgaacttgcagaagacttttaagccagctatacaagaactgaagccaccaacctataagctaatgactcaggcacagttggaagaggctacaagacagg

SEQ ID NO: 604078 - DNA, 120 bp, Artificial Sequence
  ENSG00000175110_3 (sequence is synthesized)
cagttgaggcagctaaagtacgattaaaaatgccaccagttctggaagagcgagtaccaataaatgatgtgttagctgaagataagattttggaaggaacagaaacaaccaaatatgtgt

SEQ ID NO: 604079 - DNA, 120 bp, Artificial Sequence
  ENSG00000175110_4 (sequence is synthesized)
tattgtcgtcagagaaccaagtggcacactacgcaaagcctcttgggaagaacgggaccgaatgatacaagtttatttcccaaaagaaggtcgtaaaattttgacaccaataattttcaa

SEQ ID NO: 604080 - DNA, 120 bp, Artificial Sequence
  ENSG00000175110_5 (sequence is synthesized)
ggaagaaaatcttaggactatgtatagccaggacaggcatgttgatgtcctcaatctctgctttgcccagtttgagccagattccacagagtatatcaaggttcatcacaagacctatga

SEQ ID NO: 604081 - DNA, 120 bp, Artificial Sequence
  ENSG00000175110_6 (sequence is synthesized)
agatatagataaacgtggaaaatatgaccttttacgttcaacaagatactttggtggaatggtgtggtattttgtaaataataaaaagattgatggtttgctgattgaccagattcagag

SEQ ID NO: 604082 - DNA, 120 bp, Artificial Sequence
  ENSG00000175110_7 (sequence is synthesized)
agatttaatcgatgatgcaaccaacttggtccagctgtatcacgtgctccatccagatggccagtcggctcaaggggccaaggatcaggctgctgagggaataaatttaatcaaggtctt

SEQ ID NO: 604083 - DNA, 120 bp, Artificial Sequence
  ENSG00000175110_8 (sequence is synthesized)
tgcaaaaacagaagcacagaagggagcctatatagaactaacactgcagacttatcaagaagcactcagtcgccattctgcagcttcctaaaaatattttaaaaatacatttattttact

SEQ ID NO: 604084 - DNA, 120 bp, Artificial Sequence
  ENSG00000175110_9 (sequence is synthesized)
cctcttcctgggcggcgatctctgggacagatgcgcagaagacttcctgctcaacgacgacgtcctccctgagagcgcccaggaaaacgtccacttccagcccagcagacgagtcgtcct

SEQ ID NO: 604085 - DNA, 120 bp, Artificial Sequence
  ENSG00000175110_10 (sequence is synthesized)
gcgctcctgagcgttcgtcgacagagctcaggaggacctctgggatcaggatgagggtgtgtccatcgagagacactcgcaggatcgacgttggcgggagctccagcaccaggtcgacgt

SEQ ID NO: 604086 - DNA, 120 bp, Artificial Sequence
  ENSG00000175110_11 (sequence is synthesized)
cgtccaggggcacacgcagggcacagcccgcggccaggaccactatggagcactttgagtatatcatcccactgtctcctggagggcaagattcagccttaagggggttcccttgtatgt

SEQ ID NO: 604087 - DNA, 120 bp, Artificial Sequence
  ENSG00000175110_12 (sequence is synthesized)
ggaaggtcagggaagggttcctggcaaatatgaccaaagctgagatctggttagccatgctaaggagaaagcaagaagcttctcaagcataggggacagtagcagatgtccagaaatgag

SEQ ID NO: 604088 - DNA, 120 bp, Artificial Sequence
  ENSG00000175110_13 (sequence is synthesized)
gagatggggctgccacgccgccggttcagctccgaggccgcttcttatttactaaagtccattttagcagaatctggtagcccagagaccaagaaacctacatttatggatgaggaagtt

SEQ ID NO: 604089 - DNA, 120 bp, Artificial Sequence
  ENSG00000175110_14 (sequence is synthesized)
gccacgaagcttccttttgagaagctgcttgtgttctgggcccccacccatgcagcgaatgaatgagcgttgaagttgagtttggacgtggttgcttcagtatccagcggtccttcccta

SEQ ID NO: 604090 - DNA, 120 bp, Artificial Sequence
  ENSG00000175110_15 (sequence is synthesized)
gcaacacaggccatttaggagcaccacctaaggcttcttccccttcctacagatggattgctgagttgatgagaggaggaactctgggacctgtgcctctgggaaagcagaatctttcag

SEQ ID NO: 604091 - DNA, 120 bp, Artificial Sequence
  ENSG00000175110_16 (sequence is synthesized)
agtgaggactgagaagctggaaaagagagatggctgatgctgagtgctcagaggtggcttctggaagaaaaagacttgagctgagatggttcaaacaggcaggagtgaaggcattccagg

SEQ ID NO: 604092 - DNA, 120 bp, Artificial Sequence
  ENSG00000175110_17 (sequence is synthesized)
ctgggagcagagtatgagcaaaggcagggagattcctggcagtgactcagaatctggtagcccagagaccaagaaacctacatttatggatgaggaagttcaaagcatactcacgaaaat

SEQ ID NO: 604093 - DNA, 120 bp, Artificial Sequence
  ENSG00000175110_18 (sequence is synthesized)
atatatcatatagcataccacaccggtgttgatggaagtttcatctatgttatcttcagaacacatttagagactcctacacctctgaaaacttgagagtcagtactgtttggttaattt

SEQ ID NO: 604094 - DNA, 120 bp, Artificial Sequence
  ENSG00000175110_19 (sequence is synthesized)
aagatatcaatttgtagttctccctacaaagcaaaaattattaccctactcacttttcgtaggctacaaggatatttgagtgcctggttatgaatttctcaaatcatgttagatgagcgt

SEQ ID NO: 604095 - DNA, 120 bp, Artificial Sequence
  ENSG00000175110_20 (sequence is synthesized)
ggagcacagagtggccagtatgtgggtgggcaggcctgtcatgacatcaggacaggtgctgaacttcagtgttctcatgtgatgctaactctgctgtgtggttttagactatgtatagcc

SEQ ID NO: 604096 - DNA, 120 bp, Artificial Sequence
  ENSG00000175110_21 (sequence is synthesized)
aagatttttaatctagctcaatgaatttcgttgtaagttttgatacaggggaaagggaagagaaatacctgaaaatctattgagtacagttgtgtgccagatatatattttataatcaca

SEQ ID NO: 604097 - DNA, 120 bp, Artificial Sequence
  ENSG00000175110_22 (sequence is synthesized)
acaacccttgattaaagatgagggaatttaagcttgtagaattaagtagcttgctgaaagttgcatagctactaagtggtagggttaggacccaagtttgatgacaaagcctattctctt

SEQ ID NO: 604098 - DNA, 120 bp, Artificial Sequence
  ENSG00000175110_23 (sequence is synthesized)
ttcagtttaccgtataggaatcaaattatttactaaaattttgctgaagtacagtgtgtttgtcttacagctcagtaagtattcattagtaccttctatgtgtaaggtattatcttgggt

SEQ ID NO: 604099 - DNA, 120 bp, Artificial Sequence
  ENSG00000175110_24 (sequence is synthesized)
agtataggtgatgccacgaactaggatagagtatgctgtgccaaagccagcagtccggatatggctgtggggaaaggtgctagtaagtatacaaataattatctcctcaggcctaaaatg

SEQ ID NO: 604100 - DNA, 120 bp, Artificial Sequence
  ENSG00000175110_25 (sequence is synthesized)
ctagacactaagagaagattacaaattctttgaagaaagccttcataggggtgtaaaggagggttctagaagtgcaggaaatgttgtggcaggtggagctgggtgaggtgtttcaggtag

SEQ ID NO: 604101 - DNA, 120 bp, Artificial Sequence
  ENSG00000175110_26 (sequence is synthesized)
agagaacagtataagcaacaggcaggaaaaaaggaggcttgagaaacggccagtgatctggtttgcttatatatgccatgtatatgtaggggagtgattaaagattaagttaggaaggtg

SEQ ID NO: 604102 - DNA, 120 bp, Artificial Sequence
  ENSG00000175110_27 (sequence is synthesized)
gatgtagccacatcataggtgacctcagatgctaggctgaggaatctggaattcagtcagcagacctttgaaagccttttgaacagaggaatgcccccatcagaaccttcatttaggaag

SEQ ID NO: 604103 - DNA, 120 bp, Artificial Sequence
  ENSG00000175110_28 (sequence is synthesized)
atcaatctggaaggaggactgaaggacctttagttaataagatggaatgggctagctggtagaatagggtagttgatggggggagggataggggaaagggagagtagtgaaaaaatactt

SEQ ID NO: 604104 - DNA, 120 bp, Artificial Sequence
  ENSG00000175110_29 (sequence is synthesized)
gatttcttttctgccatagtgaccaagaagtgggtgctacattatttccagtggtctctatatgcataatcggtgcttaataaattgtagttggcctgccaaaaagtacttaatatggct

SEQ ID NO: 604105 - DNA, 120 bp, Artificial Sequence
  ENSG00000175110_30 (sequence is synthesized)
ataaatgtttggtattttgcttcaggctgccacatacttctacagtggagaaggcacagacttgctgtcatttagacaaattcttctcttttaatttttttaaagacagggtcttattct

SEQ ID NO: 604106 - DNA, 120 bp, Artificial Sequence
  ENSG00000175110_31 (sequence is synthesized)
aatttttttaaagacagggtcttattctgtggcctgccatgcccagctaattttttaaaaaattttcctagagatgaggactgctcaagcagtcctcccacctcagcttcccaaagtgtt

SEQ ID NO: 604107 - DNA, 120 bp, Artificial Sequence
  ENSG00000175110_32 (sequence is synthesized)
ggccaaaattctttcttaatagaatcctccttcccacctaaggtgggttgtactaggaatggtttaaatcataccaattggttaatgatatggaggcaactgtaagtagacctggtttta

SEQ ID NO: 604108 - DNA, 89 bp, Artificial Sequence
  ENSG00000175110_33 (sequence is synthesized)
agtggtgatgatttatttgtagaaccagttggctttgtgccttgatccagataaacatttctaatgataacttgaccttttgcccaggc

SEQ ID NO: 604109 - DNA, 69 bp, Artificial Sequence
  ENSG00000175110_34 (sequence is synthesized)
aggctggtcttgaactcctgacctcgggattcgcaccccccccccgcaatcttctttcttaatagaatc

SEQ ID NO: 604110 - DNA, 120 bp, Artificial Sequence
  ENSG00000175110_35 (sequence is synthesized)
cctggccgacttctttcttaatagaatcctccttaccacccaagatgggttgtactagggttctctcataattggcttagctggaatttgaatctaggtgtgacaattacaaagcctgtg

SEQ ID NO: 604111 - DNA, 120 bp, Artificial Sequence
  ENSG00000175110_36 (sequence is synthesized)
agatgccaaaggaagccattcttctggaagaagactttctcctgaaagcctcctggaggcaaagttctggcagaacgaggcaatttccctccctgcaggcggaaggaaggcaattagagc

SEQ ID NO: 604112 - DNA, 120 bp, Artificial Sequence
  ENSG00000175110_37 (sequence is synthesized)
gggagctagggctgagagaggggaaatgatgcagacactgccacccagcaagtgagaggaaggactgaacatggacagaagggcttgagacattgagccttggctgctttcacccatccc

SEQ ID NO: 604113 - DNA, 120 bp, Artificial Sequence
  ENSG00000175110_38 (sequence is synthesized)
tggcctgctgtgcccctgagaagagctgtcccaggcacacagagacaacatttggaagtggaaaatgcctctggagcagtcagagtgttgggaagtctcatcccattctccgtttcagga

SEQ ID NO: 604114 - DNA, 120 bp, Artificial Sequence
  ENSG00000175110_39 (sequence is synthesized)
accttccctcagcaacagcagagcagaagggaactcagttcagcataactcgagtgctgcaagaactgggtgtgactcggaatccctcccaaccacttccggcgcaagtggcttctgata

SEQ ID NO: 604115 - DNA, 120 bp, Artificial Sequence
  ENSG00000175110_40 (sequence is synthesized)
agatgatgtgacctggctgtctctgatgcgtccaaaccagatttcctctgactgggtgagacccttctggaagatatactatatgagggatgagaaatgcagaccagccccacatcatgg

SEQ ID NO: 604116 - DNA, 80 bp, Artificial Sequence
  ENSG00000175115_0 (sequence is synthesized)
acccgtgtcggcctcgcgagccgcaacaggcagcggcggtcgagcgcgaggcccgcgcgcccagaggccccgcgcgtgcg

SEQ ID NO: 604117 - DNA, 80 bp, Artificial Sequence
  ENSG00000175115_1 (sequence is synthesized)
ggaggctgccgcgcccccgccgccgccgccgcgggggaagcctgggagccagatcggcgtcgcctcggcctccgtaaccc

SEQ ID NO: 604118 - DNA, 120 bp, Artificial Sequence
  ENSG00000175115_2 (sequence is synthesized)
cggccagcggggatccggggtcgcccagtcccctcagcagccgccgccgcagcagcagcagcagcagccgccgcagcagccgacgccccccaagctggcccaggccacctcgtcgtcctc

SEQ ID NO: 604119 - DNA, 120 bp, Artificial Sequence
  ENSG00000175115_3 (sequence is synthesized)
agctggcccaggccacctcgtcgtcctcgtccacctcggcggcggctgcctcctcctcgtcctcgtctacctccacctccatggccgtggcggtggcctcgggctccgcgcctcccggtg

SEQ ID NO: 604120 - DNA, 120 bp, Artificial Sequence
  ENSG00000175115_4 (sequence is synthesized)
gcccggggccaggccgcacccccgccccggtgcagatgaacctgtacgccacctgggaggtggaccggagctcgtccagctgcgtgcctaggctattcagcttgaccctgaagaaactcg

SEQ ID NO: 604121 - DNA, 120 bp, Artificial Sequence
  ENSG00000175115_5 (sequence is synthesized)
tcatgctaaaagaaatggacaaagatcttaactcagtggtcatcgctgtgaagctgcagggttcaaaaagaattcttcgctccaacgagatcgtccttccagctagtggactggtggaaa

SEQ ID NO: 604122 - DNA, 120 bp, Artificial Sequence
  ENSG00000175115_6 (sequence is synthesized)
cagagctccaattaaccttctcccttcagtaccctcatttccttaagcgagatgccaacaagctgcagatcatgctgcaaaggagaaaacgttacaagaatcggaccatcttgggctata

SEQ ID NO: 604123 - DNA, 120 bp, Artificial Sequence
  ENSG00000175115_7 (sequence is synthesized)
agaccttggccgtgggactcatcaacatggcagaggtgatgcagcatcctaatgaaggcgcactggtgcttggcctacacagcaacgtgaaggatgtctctgtgcctgtggcagaaataa

SEQ ID NO: 604124 - DNA, 120 bp, Artificial Sequence
  ENSG00000175115_8 (sequence is synthesized)
agatctactccctgtccagccaacccattgaccatgaaggaatcaaatccaagctttctgatcgttctcctgatattgacaattattctgaggaagaggaagagagtttctcatcagaac

SEQ ID NO: 604125 - DNA, 120 bp, Artificial Sequence
  ENSG00000175115_9 (sequence is synthesized)
aggaaggcagtgatgatccattgcatgggcaggacttgttctacgaagacgaagatctccggaaagtgaagaagacccggaggaaactaacctcaacctctgccatcacaaggcaaccta

SEQ ID NO: 604126 - DNA, 120 bp, Artificial Sequence
  ENSG00000175115_10 (sequence is synthesized)
acatcaaacagaagtttgtggccctcctgaagcggtttaaagtttcagatgaggtgggctttgggctggagcatgtgtcccgcgagcagatccgggaagtggaagaggacttggatgaat

SEQ ID NO: 604127 - DNA, 120 bp, Artificial Sequence
  ENSG00000175115_11 (sequence is synthesized)
tgtatgacagtctggagatgtacaaccccagcgacagtggccctgagatggaggagacagaaagcatcctcagcacgccaaagcccaagctcaagcctttctttgaggggatgtcgcagt

SEQ ID NO: 604128 - DNA, 120 bp, Artificial Sequence
  ENSG00000175115_12 (sequence is synthesized)
ccagctcccagacggagattggcagcctcaacagcaaaggcagcctcggaaaagacaccaccagccctatggaattggctgctctagaaaaaattaaatctacttggattaaaaaccaag

SEQ ID NO: 604129 - DNA, 120 bp, Artificial Sequence
  ENSG00000175115_13 (sequence is synthesized)
atgacagcttgactgaaacagacactctggaaatcactgaccaggacatgtttggagatgccagcacgagtctggttgtgccggagaaagtcaaaactcccatgaagtccagtaaaacgg

SEQ ID NO: 604130 - DNA, 120 bp, Artificial Sequence
  ENSG00000175115_14 (sequence is synthesized)
atctccagggctctgcctcccccagcaaagtggagggggtgcacacaccccggcagaagaggagcacgcccctgaaggagcggcagctctccaagcccctaagtgagaggaccaacagtt

SEQ ID NO: 604131 - DNA, 120 bp, Artificial Sequence
  ENSG00000175115_15 (sequence is synthesized)
ccgacagcgagcgctccccagatctgggccacagcacgcagattccaagaaaggtggtgtatgaccagctcaatcagatcctggtgtcagatgcagccctcccagaaaatgtcattctgg

SEQ ID NO: 604132 - DNA, 120 bp, Artificial Sequence
  ENSG00000175115_16 (sequence is synthesized)
tgaacaccactgactggcagggccagtatgtggctgagctgctccaggaccagcggaagcctgtggtgtgcacctgctccaccgtggaggtccaggccgtgctgtccgccctgctcaccc

SEQ ID NO: 604133 - DNA, 120 bp, Artificial Sequence
  ENSG00000175115_17 (sequence is synthesized)
ggatccagcgctactgcaactgcaactcttccatgccgaggccagtgaaggtggctgctgtgggaggccagagctacctgagctccatcctcaggttctttgtcaagtccctggccaaca

SEQ ID NO: 604134 - DNA, 120 bp, Artificial Sequence
  ENSG00000175115_18 (sequence is synthesized)
agacctccgactggcttggctacatgcgcttcctcatcatccccctcggttctcaccctgtggccaaatacttggggtcagtcgacagtaaatacagtagttccttcctggattctggtt

SEQ ID NO: 604135 - DNA, 120 bp, Artificial Sequence
  ENSG00000175115_19 (sequence is synthesized)
ttcagtcgctcggagccaccagtgtcagagcaactggacgtggcagggcgggtgatgcagtacgtcaacggggcagccacgacacaccagcttcccgtggccgaagccatgctgacttgc

SEQ ID NO: 604136 - DNA, 120 bp, Artificial Sequence
  ENSG00000175115_20 (sequence is synthesized)
cggcataagttccctgatgaagactcctatcagaagtttattcccttcattggcgtggtgaaggtgggtctggttgaagactctccctccacagcaggcgatggggacgattctcctgtg

SEQ ID NO: 604137 - DNA, 120 bp, Artificial Sequence
  ENSG00000175115_21 (sequence is synthesized)
gtcagccttactgtgccctccacatcaccaccctccagctcgggcctgagccgagacgccacggccacccctccctcctccccatctatgagcagcgccctggccatcgtggggagccct

SEQ ID NO: 604138 - DNA, 120 bp, Artificial Sequence
  ENSG00000175115_22 (sequence is synthesized)
aatagcccatatggggacgtgattggcctccaggtggactactggctgggccaccccggggagcggaggagggaaggcgacaagagggacgccagctcgaagaacaccctcaagagtgtc

SEQ ID NO: 604139 - DNA, 120 bp, Artificial Sequence
  ENSG00000175115_23 (sequence is synthesized)
ttccgctcagtgcaggtgtcccgcctgccccatagtggggaggcccagctttctggcaccatggccatgactgtggtcaccaaagaaaagaacaagaaagttcccaccatcttcctgagc

SEQ ID NO: 604140 - DNA, 120 bp, Artificial Sequence
  ENSG00000175115_24 (sequence is synthesized)
aagaaaccccgagaaaaggaggtggattctaagagccaggtcattgaaggcatcagccgcctcatctgctcagccaagcagcagcagactatgctgagagtgtccatcgatggggtcgag

SEQ ID NO: 604141 - DNA, 120 bp, Artificial Sequence
  ENSG00000175115_25 (sequence is synthesized)
tggagtgacatcaagttcttccagctggcagcccagtggcccacccatgtcaagcactttccagtgggactcttcagtggcagcaaggccacctgaggccctgtctcccagccactttcc

SEQ ID NO: 604142 - DNA, 120 bp, Artificial Sequence
  ENSG00000175115_26 (sequence is synthesized)
ctcctggcactgccaccagcctcaccgcctgcgggcagggggaggccagcaggcccgggcccagcaccccttccctggcaccagggtctgcctctcactcgcccaggtcccgaaggacac

SEQ ID NO: 604143 - DNA, 120 bp, Artificial Sequence
  ENSG00000175115_27 (sequence is synthesized)
tgccacagggacgccttccctcccctcccctccagcccacccctgcacagcccctcctccttcccgcttttccccttctccctcctgctccaggcccaaggcgtgttggttttgccttct

SEQ ID NO: 604144 - DNA, 120 bp, Artificial Sequence
  ENSG00000175115_28 (sequence is synthesized)
ggtgcccatagtcccctggactgagtcccccaggccttccttcacccgacttccaaactcttccttgtggtatcagtttccttctcggaaatgagaaagctggaatcctggtccccagca

SEQ ID NO: 604145 - DNA, 120 bp, Artificial Sequence
  ENSG00000175115_29 (sequence is synthesized)
ggagagcctagtcctcccccagcccctccagccaccagggtgtcctctaggatgcagctgccagatccactcactctgctgcctccagcaggacccaaggccactttcaactcttatggg

SEQ ID NO: 604146 - DNA, 120 bp, Artificial Sequence
  ENSG00000175115_30 (sequence is synthesized)
gttctccacctgccccagagcttctcaagggagggtaagggggcaccctgagcccacaggacccctacttcacagctcacaggggcaggaggcagctcccctgcctccaggaccctgttg

SEQ ID NO: 604147 - DNA, 120 bp, Artificial Sequence
  ENSG00000175115_31 (sequence is synthesized)
ctatggtgacacagcgtttctaggacagaggggcctcccagtctccccccaccacccgtgcacgacttcctcaccacccccaggttccctgcagatgtcgtgtgtgtcctgagtgtttct

SEQ ID NO: 604148 - DNA, 120 bp, Artificial Sequence
  ENSG00000175115_32 (sequence is synthesized)
ttggttctttgcacgccaagtctcttggttgtaccatgtgacacaccctgtgcactggtcgctgtcttcgtggcttccacccttgttaatgatgctcctgcctctgcctcccagcccctc

SEQ ID NO: 604149 - DNA, 120 bp, Artificial Sequence
  ENSG00000175115_33 (sequence is synthesized)
acccagcacagctctgcctggacttggagagatgggaggcagacccccaccaccatacatgctgtctgtggcccctcagacattctgtttcatctcccattcatctccctcctcccaccg

SEQ ID NO: 604150 - DNA, 120 bp, Artificial Sequence
  ENSG00000175115_34 (sequence is synthesized)
tgtcagtttttctgcctttccctgctctgttcttccccctccttaggccccagcctgggcccagacccatcctcccagccaggtttccctccagcaggctccttccctccctgtcacctc

SEQ ID NO: 604151 - DNA, 120 bp, Artificial Sequence
  ENSG00000175115_35 (sequence is synthesized)
cctctcaccaacccggggtctgagcccctcattcctgaccgtccgtgttctcaggagtggttgaggacacagggccccagcccagccctctgcaccccccagcccggccatctgcgcccc

SEQ ID NO: 604152 - DNA, 120 bp, Artificial Sequence
  ENSG00000175115_36 (sequence is synthesized)
acagcccctttggagcttttctcttgtcctctcactccttcccagaagtttttgcacagaacttcattttgaaagtgtttttctcattctccatacctcccccaagctctcctccagccc

SEQ ID NO: 604153 - DNA, 120 bp, Artificial Sequence
  ENSG00000175115_37 (sequence is synthesized)
ttcccagggctcagccctgctgtcctgagcgtctcctgggccagagagaggagatgggggtgggagggactgagttgatgttgggtttttcattcaataaattggtgatttcttaccgac

SEQ ID NO: 604154 - DNA, 120 bp, Artificial Sequence
  ENSG00000175115_38 (sequence is synthesized)
gcgattttccttcggctgaggcaggagctttaggaccacttgctttcaggaaaagaaaatgagtaactctctcttcaggatggtgatggggcctggccagtccaaggaggctcctgggtg

SEQ ID NO: 604155 - DNA, 120 bp, Artificial Sequence
  ENSG00000175115_39 (sequence is synthesized)
aacacagggtcatcccttcaacgattccaatgaacgctctatatcctcaccaccgcccaattagactcactgttgttgggaaccacaattactgataagagtgttatatccttcaggtta

SEQ ID NO: 604156 - DNA, 120 bp, Artificial Sequence
  ENSG00000175115_40 (sequence is synthesized)
tcgtcagatagaaaaaaggaggagaacccttcttgtagaattcagaacagatagtggtccatcagggaacagaccgcctcccacccactccagtggctgcttcatgtcacatgctgtcct

SEQ ID NO: 604157 - DNA, 120 bp, Artificial Sequence
  ENSG00000175115_41 (sequence is synthesized)
ctaggagtagcactagttttaatcatgtgctgaacttaggcagagataataggctagtcatggggtgctcctatgaccctgggcttgctaagctttaattacatcagatatcgttcctgc

SEQ ID NO: 604158 - DNA, 120 bp, Artificial Sequence
  ENSG00000175115_42 (sequence is synthesized)
cttaacggatccataaccttggagaccaggtgccttttgatacttttcctccataagacttcctcaagagtcactgttttgatgacatttgagtcctgaactaagaagctaaaaacctga

SEQ ID NO: 604159 - DNA, 120 bp, Artificial Sequence
  ENSG00000175115_43 (sequence is synthesized)
attcctaggtggtctttgacagattctggagtgcctgcatgaagtgtgggagggccagaagtgctgggagcatttccgaaggggaattcacagctccatttacccagaggcatcctgatt

SEQ ID NO: 604160 - DNA, 120 bp, Artificial Sequence
  ENSG00000175115_44 (sequence is synthesized)
ctccccagtgcagagctagcctagggaccaaacccctgagagccgagatgcccaccccttcagggatgaaacggaggccagatcactctcccatcacaatgaggtgtcactggacttcag

SEQ ID NO: 604161 - DNA, 120 bp, Artificial Sequence
  ENSG00000175115_45 (sequence is synthesized)
gtaaatccgtgagactgtgacctggatttcccatccagtcagcaactagggagcgggaggactgtttccttgtcctcaggtatccacctctcaattggtgctccaaatggtccccatgag

SEQ ID NO: 604162 - DNA, 120 bp, Artificial Sequence
  ENSG00000175115_46 (sequence is synthesized)
gtgtgtcaccagtaccccaaatgcttgacctccattgcactctggaaatagggagtggctgtaggatctctctctagtcagcccctactgctgaggctttctttttcctgctctgtaacc

SEQ ID NO: 604163 - DNA, 120 bp, Artificial Sequence
  ENSG00000175115_47 (sequence is synthesized)
agaaagcggccctattttcttcccaacgggtgcccccagagcttcataagtcacctcttcctacgtggggtctcttccttggcatgaccctggcacatgactggagttcagtgctcctgc

SEQ ID NO: 604164 - DNA, 120 bp, Artificial Sequence
  ENSG00000175115_48 (sequence is synthesized)
taatgtatactcccccagaggtgtttctttttaagctgcaggcactttccagttctatcccagagactcagtgacctcccttagtgcctgtctcctctgtgcatgcgcattcttctctcc

SEQ ID NO: 604165 - DNA, 120 bp, Artificial Sequence
  ENSG00000175115_49 (sequence is synthesized)
caccaagaacacagatgtacttgaccttctgtgaacatgtctcatgctgctctgtcactgggagctcgactttttttctctgctgtgaatgccctttctgccctttctctgaagacctat

SEQ ID NO: 604166 - DNA, 120 bp, Artificial Sequence
  ENSG00000175115_50 (sequence is synthesized)
cagcctcgcaagttcattgttttcatccccagatggcgagtctgtcattcaggcaggaagtacatacaaccacaggctaagcatcgtgcccagagacaaagagatagggcccagtccatg

SEQ ID NO: 604167 - DNA, 120 bp, Artificial Sequence
  ENSG00000175115_51 (sequence is synthesized)
ccatcaagcgcacagtgtctagtgacaccacacatttcaacaaataattacagcccagtaggacaggtgccataagacagagctttgcaatgacaccaggggactgtggccacctgtccc

SEQ ID NO: 604168 - DNA, 120 bp, Artificial Sequence
  ENSG00000175115_52 (sequence is synthesized)
aggagtgccaggacagcttcccagatgagatgctgagagatgggttttttaaaataaaacttcaccaagtggatttggggaaaatttttattcaaggcagaagataccctatataaagac

SEQ ID NO: 604169 - DNA, 61 bp, Artificial Sequence
  ENSG00000175115_53 (sequence is synthesized)
aaaatttttattcaaggcagaagataccctatataaagacccagtacaaggtcaggagatc

SEQ ID NO: 604170 - DNA, 120 bp, Artificial Sequence
  ENSG00000175115_54 (sequence is synthesized)
gcagagaccaagtcctccagtcttcgtgtcttcccacagctcgtcatgaaagtgggctctggtgggtgtttattgacttgaattgaccccaagtggacgttgctgagaactgtcatgcga

SEQ ID NO: 604171 - DNA, 120 bp, Artificial Sequence
  ENSG00000175115_55 (sequence is synthesized)
tttgtccctacagcaacctaacatcaaacagaagtttgtggccctcctgaagcggtttaaagtttcagatgaggtgggctttgggctggagcatgtgtcccgcgagcagatccgggaagt

SEQ ID NO: 604172 - DNA, 120 bp, Artificial Sequence
  ENSG00000175115_56 (sequence is synthesized)
ctgtttctctgagcacctgctggccgccctctgcctctcccttcctggttcttacgctgctgcccctcctgccacccacaccgtttcccatccgcgaggcttgctgcacctccatcctct

SEQ ID NO: 604173 - DNA, 120 bp, Artificial Sequence
  ENSG00000175115_57 (sequence is synthesized)
ccacctgccctggcaggacaaccgctgtggctttgttcctcatctccatgtgtcctctaaggactcgctttgctgcttctttctcctcctttccatcgtggtctggccagtgggagactg

SEQ ID NO: 604174 - DNA, 120 bp, Artificial Sequence
  ENSG00000175115_58 (sequence is synthesized)
agtctccctcccaaagtcctgatatctgttctctctaacacccctgctccagagactccccatgcaccagtccagcagccctgtcctcaggctccccagggactccctaacaagagacac

SEQ ID NO: 604175 - DNA, 120 bp, Artificial Sequence
  ENSG00000175115_59 (sequence is synthesized)
ctcaccgtgtgatgtctggcagctgatgccagctattagctgggacctccatgagaactgtggctggaacacctgttatggcctttccacgtggctgcttggcttcctcacggctattca

SEQ ID NO: 604176 - DNA, 120 bp, Artificial Sequence
  ENSG00000175115_60 (sequence is synthesized)
aaagatgaaaattgttgagagcgattgcttcgccttcctgtgagctgtaaggagggtaggaagaacccacatgggcgatgggcctcgggattcctcagctgtccctcctggcacagcttc

SEQ ID NO: 604177 - DNA, 120 bp, Artificial Sequence
  ENSG00000175115_61 (sequence is synthesized)
acagtgtggagcggtggcaggaactggggggaaggtggcctcaccatgtccccgccctcaggctggatcatggaaatgacgtgaaggttactccagccagtgtgaagctctggcatgtcc

SEQ ID NO: 604178 - DNA, 120 bp, Artificial Sequence
  ENSG00000175115_62 (sequence is synthesized)
agaccagtcactgcttggatactgaggagagagcagtgaacaaaacagacagaaattccagctcttgcggagcttaccttctggggacagggtgggcagcaggcagtagtgagtgagtga

SEQ ID NO: 604179 - DNA, 120 bp, Artificial Sequence
  ENSG00000175115_63 (sequence is synthesized)
gcaaatattagggtgtgttggacgggaagaataaagctggatggggataagtgggcagaggaaagaggtcacggttttaaacaaggtggtctagaaagacctcagaaagcgagccggcca

SEQ ID NO: 604180 - DNA, 120 bp, Artificial Sequence
  ENSG00000175115_64 (sequence is synthesized)
ctttattctccccagctttgttctcagatcagcctgattctcctctcctacatgagctgctctgtgtggctggagggaacagagctgcagccttcctcagcctgccctcccggggactgg

SEQ ID NO: 604181 - DNA, 120 bp, Artificial Sequence
  ENSG00000175115_65 (sequence is synthesized)
tgcaggtcgggtggcaccagctgctgtcctgaggctgcactggagccgcccgcaggggcttctgccgggctcaggccttctctccagctcgaggctcagtttggcccaggctttgcctgc

SEQ ID NO: 604182 - DNA, 120 bp, Artificial Sequence
  ENSG00000175115_66 (sequence is synthesized)
gtggcatgtcagggctcgacgctctggccctctgcatctctgatcagggctcatgttgtgaccttagaaaagtggccccattggctgggcatggtggatcacaactgtaatcctggcact

SEQ ID NO: 604183 - DNA, 120 bp, Artificial Sequence
  ENSG00000175115_67 (sequence is synthesized)
taagttgtaagtttgactttgaggggtttcttaaaaataggttgggtgggttagaggaatcttgagtcttccttgctttctcacattttccttctccacatgctatattccttcatagga

SEQ ID NO: 604184 - DNA, 120 bp, Artificial Sequence
  ENSG00000175115_68 (sequence is synthesized)
acaggcataagccaccacgcccagcccagatttgcaaagattttaaagtcggcaataaaataatgtgtagtgatggctcttgtgccaccaatgtgtttctggttggatcagaacatgcct

SEQ ID NO: 604185 - DNA, 120 bp, Artificial Sequence
  ENSG00000175121_0 (sequence is synthesized)
ctttcctctcctgactaagtttctctggcttccctgaggctgcaggtgttaatctggggggccctgggccctgagccggcagcagaaatatgaggacccagagccttctcctcctggggg

SEQ ID NO: 604186 - DNA, 120 bp, Artificial Sequence
  ENSG00000175121_1 (sequence is synthesized)
ccctcctggctgtggggagtcagctgcctgctgtctttggcaggaagaagggagagaaatcggggggctgcccgccagatgatgggccctgcctcctatcggtgcctgaccagtgcgtgg

SEQ ID NO: 604187 - DNA, 120 bp, Artificial Sequence
  ENSG00000175121_2 (sequence is synthesized)
aagacagccagtgtcccttgaccaggaagtgctgctacagagcttgcttccgccagtgtgtccccagggtctctgtgaagctgggcagctgcccagaggaccaactgcgctgcctcagcc

SEQ ID NO: 604188 - DNA, 120 bp, Artificial Sequence
  ENSG00000175121_3 (sequence is synthesized)
ccatgaaccacctgtgtcacaaggactcagactgctcgggcaaaaagcgatgctgccacagcgcctgcgggcgggattgccgggatcctgccagaggctaattctgatttaggatctgtg

SEQ ID NO: 604189 - DNA, 120 bp, Artificial Sequence
  ENSG00000175121_4 (sequence is synthesized)
tgcccgctggacagcactatctctaccagcggtggttccagccttctgataatcactggcctgctgacacttccctgcaacccatccacccctggtttctcctcctgggagtcaaagtcc

SEQ ID NO: 604190 - DNA, 120 bp, Artificial Sequence
  ENSG00000175121_5 (sequence is synthesized)
atagcctgagctcggaggaaggcctctgtatcaccccagtactctgcaccactgccatacgagcttcccacccttcctaacgctttcacaccaatccgtacatgctgcttcctccaccaa

SEQ ID NO: 604191 - DNA, 120 bp, Artificial Sequence
  ENSG00000175121_6 (sequence is synthesized)
aaatgcccaattcaggcagaccctgacctctccctcaggcagcccaaccatccagaatgaatattcttgcagagttttccaaacatcagtcattcacctctttcatgattttcaccatac

SEQ ID NO: 604192 - DNA, 120 bp, Artificial Sequence
  ENSG00000175121_7 (sequence is synthesized)
ctacaaaatagcaccatgataggttgcacgctgcctgtaccaccatttacttaatgttttctttaaatggctcacttttgtatataaataaattcatttcaaaagaaaattgatatcact

SEQ ID NO: 604193 - DNA, 80 bp, Artificial Sequence
  ENSG00000175130_0 (sequence is synthesized)
ggcattctggcgcggagcggagcggcggcgggcgcagctagcgggtcggccgcggagcggaggtgcagctcggcttcccc

SEQ ID NO: 604194 - DNA, 120 bp, Artificial Sequence
  ENSG00000175130_1 (sequence is synthesized)
cggccgggccgaccccgccgtactatcccctgcggcgcgagcccggggcggctccaagcgccccccagcagacccccatcatgggcagccagagctccaaggctccccggggcgacgtga

SEQ ID NO: 604195 - DNA, 120 bp, Artificial Sequence
  ENSG00000175130_2 (sequence is synthesized)
ccgccgaggaggcagcaggcgcttcccccgcgaaggccaacggccaggagaatggccacgtgaaaagcaatggagacttatcccccaagggtgaaggggagtcgccccctgtgaacggaa

SEQ ID NO: 604196 - DNA, 120 bp, Artificial Sequence
  ENSG00000175130_3 (sequence is synthesized)
cagatgaggcagccggggccactggcgatgccatcgagccagcaccccctagccagggtgctgaggccaagggggaggtcccccccaaggagacccccaagaagaagaagaaattctctt

SEQ ID NO: 604197 - DNA, 120 bp, Artificial Sequence
  ENSG00000175130_4 (sequence is synthesized)
tcaagaagcctttcaaattgagcggcctgtccttcaagagaaatcggaaggagggtgggggtgattcttctgcctcctcacccacagaggaagagcaggagcagggggagatcggtgcct

SEQ ID NO: 604198 - DNA, 120 bp, Artificial Sequence
  ENSG00000175130_5 (sequence is synthesized)
gcagcgacgagggcactgctcaggaagggaaggccgcagccacccctgagagccaggaaccccaggccaagggggcagaggctagtgcagcctcagaagaagaggcagggccccaggcta

SEQ ID NO: 604199 - DNA, 120 bp, Artificial Sequence
  ENSG00000175130_6 (sequence is synthesized)
actgtgctgtccttgtgaggtcactgcctggacctggtgccctggctgccttcctgtgcccagaaaggaaggggctattgcctcctcccagccacgttccctttcctcctctccctcctg

SEQ ID NO: 604200 - DNA, 120 bp, Artificial Sequence
  ENSG00000175130_7 (sequence is synthesized)
tggattctcccatcagccatctggttctcctcttaaggccagttgaagatggtcccttacagcttcccaagttaggttagtgatgtgaaatgctcctgtccctggccctacctccttccc

SEQ ID NO: 604201 - DNA, 120 bp, Artificial Sequence
  ENSG00000175130_8 (sequence is synthesized)
tgtccccacccctgcataaggcagttgttggttttcttccccaattcttttccaagtaggttttgtttaccctactccccaaatccctgagccagaagtggggtgcttatactcccaaac

SEQ ID NO: 604202 - DNA, 120 bp, Artificial Sequence
  ENSG00000175130_9 (sequence is synthesized)
cttgagtgtccagccttcccctgttgtttttagtctcttgtgctgtgcctagtggcacctgggctggggaggacactgccccgtctaggtttttataaatgtcttactcaagttcaaacc

SEQ ID NO: 604203 - DNA, 120 bp, Artificial Sequence
  ENSG00000175130_10 (sequence is synthesized)
tccagcctgtgaatcaactgtgtctcttttttgacttggtaagcaagtattaggctttggggtggggggaggtctgtaatgtgaaacaacttcttgtctttttttctcccactgttgtaa

SEQ ID NO: 604204 - DNA, 120 bp, Artificial Sequence
  ENSG00000175130_11 (sequence is synthesized)
ataacttttaatggccaaaccccagatttgtactttttttttttttctaactgctaaaaccattctcttccacctggttttactgtaacatttggaaaaggaataaatgtcgtcccttta

SEQ ID NO: 604205 - DNA, 120 bp, Artificial Sequence
  ENSG00000175137_0 (sequence is synthesized)
gttggatcggcttgttgcggggagggagggggggagattgtttgcagcatagaagctccgcggacgggaaggtaaactgagctccccagagacgctcatcctacagcctcagctcgggcc

SEQ ID NO: 604206 - DNA, 120 bp, Artificial Sequence
  ENSG00000175137_1 (sequence is synthesized)
cagccttctctctccagctgccaccacagcctggaggcgcctgcctccaccctcccgaatggtgctcctcctagcaggcctcggtccaggatccaagccccctttgccccctgccttgga

SEQ ID NO: 604207 - DNA, 120 bp, Artificial Sequence
  ENSG00000175137_2 (sequence is synthesized)
gctgttgctccgggtttgtcacagtggactccctgtggcgggaagggaagaacttttgcacagacaaggcttcagctctaggaaccccactgacaacttgaatctcaacctctaacctag

SEQ ID NO: 604208 - DNA, 120 bp, Artificial Sequence
  ENSG00000175137_3 (sequence is synthesized)
tgtgaggttcttcctgtgcccaccttttctgccttttgagaagagaaactcttctcctggccatctagagcccaggaagccccaagctggggccctggtcccagcatgtcagtcctctct

SEQ ID NO: 604209 - DNA, 120 bp, Artificial Sequence
  ENSG00000175137_4 (sequence is synthesized)
tgtgcatagggctctgccctccccctgtcagcatggctgagctcagacaggttccaggagggcgggagaccccacagggggagctgcggcctgaagttgtagaggatgaagtccctagga

SEQ ID NO: 604210 - DNA, 120 bp, Artificial Sequence
  ENSG00000175137_5 (sequence is synthesized)
gcccagtcgcagaagagcctggaggaggtggaagcagcagcagtgaggccaaattgtccccaagagaggaggaagaactggatcctagaatacaggaggagttggagcacctgaaccagg

SEQ ID NO: 604211 - DNA, 120 bp, Artificial Sequence
  ENSG00000175137_6 (sequence is synthesized)
ccagcgaggagatcaaccaggtggaactacagctggatgaggccaggaccacctatcggaggatcctacaggagtcggcgaggaaactgaatacacagggttcccacttggggagctgca

SEQ ID NO: 604212 - DNA, 120 bp, Artificial Sequence
  ENSG00000175137_7 (sequence is synthesized)
tcgagaaagcccggccctactatgaggctcggcggctggctaaggaggctcagcaggagacacagaaggcagcgctgcggtacgagcgggccgtaagcatgcacaacgctgctcgagaaa

SEQ ID NO: 604213 - DNA, 120 bp, Artificial Sequence
  ENSG00000175137_8 (sequence is synthesized)
tggtgtttgtggctgagcagggcgtcatggctgacaagaaccgactggaccccacgtggcaggagatgctgaaccatgctacctgcaaggtgaatgaggcggaggaagagcggcttcgag

SEQ ID NO: 604214 - DNA, 120 bp, Artificial Sequence
  ENSG00000175137_9 (sequence is synthesized)
gtgagcgggagcaccagcgagtgactcggctgtgccaacaggctgaggctcgggtccaagccctgcagaagaccctccggagggccatcggcaagagccgcccctactttgagctcaagg

SEQ ID NO: 604215 - DNA, 120 bp, Artificial Sequence
  ENSG00000175137_10 (sequence is synthesized)
cccagttcagccagatcctggaggagcacaaggccaaggtgacagaactggagcagcaggtagctcaggccaagacgcgctactccgtggcccttcgtaacctggagcagatcagcgagc

SEQ ID NO: 604216 - DNA, 120 bp, Artificial Sequence
  ENSG00000175137_11 (sequence is synthesized)
agattcacgcacggcgccgcgggggtctgcctccccaccccctgggccctcggcgctcctcccccgtgggggccgaggcaggacccgaggacatggaggacggagacagcgggattgagg

SEQ ID NO: 604217 - DNA, 120 bp, Artificial Sequence
  ENSG00000175137_12 (sequence is synthesized)
gggccgagggtgcggggctggaggagggcagcagcctggggcccggccccgcccccgacaccgataccctgagtctgctgagcctgcgcacggtggcttcagacctgcagaagtgcgact

SEQ ID NO: 604218 - DNA, 120 bp, Artificial Sequence
  ENSG00000175137_13 (sequence is synthesized)
ccacgtcagtctggacggccaagagctgggaacgcggagtggagggcgccggggcagcgacggcggagcccgtgggggtcggcaccagcgcagcgtcagcctgtagccgaggggccaggg

SEQ ID NO: 604219 - DNA, 120 bp, Artificial Sequence
  ENSG00000175137_14 (sequence is synthesized)
ttcctggcttgaatctgccaccacgggccggttggggcccacagtcttctcacgccctctcctctggggcctcgtcttcccgaaggtccccttctccagtgcttccctgggagaggccag

SEQ ID NO: 604220 - DNA, 120 bp, Artificial Sequence
  ENSG00000175137_15 (sequence is synthesized)
ctgtgttcgagtcctctgtgcctgccctggcgttctcacagcctcccccttcccctcagcaggcggctctctttgccttacccattcagaaggctcgccctcggcgctctgtctgcctct

SEQ ID NO: 604221 - DNA, 120 bp, Artificial Sequence
  ENSG00000175137_16 (sequence is synthesized)
gcctgccagctcatcacgatctgcagggcattgaccctttgctttccctttctgctccctctctttccatctgtttggctttttccctcagggaacttggtctagaaggcactgggaagc

SEQ ID NO: 604222 - DNA, 120 bp, Artificial Sequence
  ENSG00000175137_17 (sequence is synthesized)
tcatcagagaaaatgggtgctgggcctgagtactcccgtcggaggggatggacagtcacccctcccgttggtttccagccccgccccccttcccaaggcaactctggagggtaccctagg

SEQ ID NO: 604223 - DNA, 120 bp, Artificial Sequence
  ENSG00000175137_18 (sequence is synthesized)
tatgctgctgagccctgccccccgtcctgctccagcctgcccgtgtgtaacctgtaagatgtactgtgtgcctccggaagacaccacctttcccttcagcattccctttcatgacctgag

SEQ ID NO: 604224 - DNA, 120 bp, Artificial Sequence
  ENSG00000175137_19 (sequence is synthesized)
gcactctgcgatgtgtgccccaaagcagaacttacagggcctgcaggaagctggtgtcagggagagaaacccaaccccactgtcaacatagggagcatcaccaactccagactggctcct

SEQ ID NO: 604225 - DNA, 120 bp, Artificial Sequence
  ENSG00000175137_20 (sequence is synthesized)
gtgggtatggtgtttccgctgggctgggtcctcaacattgccaaggtgctagtgggtccctaagagggcccatgttgggggtgaagtcatgaggtcctgaaggcttaggcccctgtcatt

SEQ ID NO: 604226 - DNA, 120 bp, Artificial Sequence
  ENSG00000175137_21 (sequence is synthesized)
cccaccctcactcttgctgcacagttgtgtttactttttctgggtagaggatgctgaactgactcagcaccctcctgcaggacggggttagggaatttggtgctcaattgctctcccttg

SEQ ID NO: 604227 - DNA, 120 bp, Artificial Sequence
  ENSG00000175137_22 (sequence is synthesized)
ctcttccccaaactgaaaatacctactgcaggatccctcggggcacactgaagcttggctgccaaccctcttacttcctttgttacagggaggggttggcttggggtgaaaagttctgcc

SEQ ID NO: 604228 - DNA, 120 bp, Artificial Sequence
  ENSG00000175137_23 (sequence is synthesized)
ctccgcagggagcagctccagctgcctggcagtgctcccagtttgtagggaagccacaccagatctgggtgccttgggagaaccagtccttccttttgacccaccccaggaagatggagt

SEQ ID NO: 604229 - DNA, 120 bp, Artificial Sequence
  ENSG00000175137_24 (sequence is synthesized)
gctcttttctaggcccatgttctgccagcaaccgggatgcgtgggcaactggactctgcacgggggtctacaggttgagggaggttggtcacaatgagaacctcggggtttgaggtggcc

SEQ ID NO: 604230 - DNA, 120 bp, Artificial Sequence
  ENSG00000175137_25 (sequence is synthesized)
atgggcagacagccgaaagggagggagggtgtgggtgtgcgtgtgtgcatgtgctggtgtgtaagggggaaagggtctttcctggttttatttaaataaagtagtttatgtaacagttaa

SEQ ID NO: 604231 - DNA, 120 bp, Artificial Sequence
  ENSG00000175137_26 (sequence is synthesized)
aggagatggaggagagcctaggggtgcagaggaaagtctcgaaggcgctggttgaggagggcctgggtcgagaggagctgggacgggggaagagtagaatctaaagtccttgagggctaa

SEQ ID NO: 604232 - DNA, 120 bp, Artificial Sequence
  ENSG00000175137_27 (sequence is synthesized)
ggagagaagttgaggtagggactggtcggaatacatgggtgggggcgtggtgagagtgtagtttttgggaggctgtagagttggaaggggctggtggctgcggttttgatgctgacatga

SEQ ID NO: 604233 - DNA, 120 bp, Artificial Sequence
  ENSG00000175137_28 (sequence is synthesized)
gtggattcctgctcagcctttccctgggtgtcgcctagtagtaacaacttatgctgagccatccaatccattgatgatcttgtcaggagctggaagttgatgactggaagcatttgaggc

SEQ ID NO: 604234 - DNA, 120 bp, Artificial Sequence
  ENSG00000175137_29 (sequence is synthesized)
catggaatccagtggggatcccgtcttggactttgatttgccacatgaacattgcagggtggcctttaccaactgaccccccacaatcaatgtttgttgcatttccaatccctgtccttt

SEQ ID NO: 604235 - DNA, 120 bp, Artificial Sequence
  ENSG00000175137_30 (sequence is synthesized)
tcctacgtgggctgtggttttcctagattacagcacttctttctttactgagatgtccttccagtggtgtcctcattcccaggagggtggtcacagtggaaggaaagtgagatcaaaggt

SEQ ID NO: 604236 - DNA, 120 bp, Artificial Sequence
  ENSG00000175137_31 (sequence is synthesized)
cggtcctggatccagacccaagtctgtcactaattttccgcctggttgtttctcatctatcaaatgcaaagttgctgagaaagaatattccagcaggaggtgctgaaagaactggtcact

SEQ ID NO: 604237 - DNA, 120 bp, Artificial Sequence
  ENSG00000175137_32 (sequence is synthesized)
ctcggcggctggctaaggaggggaaaaggctagcagcctttgggagtgctggatttcacacatctaccctccactggcaaaatttttatttcttctagtccatatccttatgaaatattc

SEQ ID NO: 604238 - DNA, 120 bp, Artificial Sequence
  ENSG00000175137_33 (sequence is synthesized)
gccctactatgaggctcggcggctggctaaggaggtatggctggctgaccacgtttgaggaaggctacgtgctgagcctggccctggattcttctgtctctatatggagtgagagacaaa

SEQ ID NO: 604239 - DNA, 120 bp, Artificial Sequence
  ENSG00000175137_34 (sequence is synthesized)
tgggctcaggaggttcctttaccacgtgggctctgggcttatggtctataaaatggtgagggtggctgtgggagaatatttagttcagccctgctaatgtttaagtgccttctgtgtatc

SEQ ID NO: 604240 - DNA, 120 bp, Artificial Sequence
  ENSG00000175137_35 (sequence is synthesized)
aggaatcaggctttagggtatatcagatatgtcagttctaacatcctgttgttttcatctgcgcccatttcctcttccctttggttcatgtctctcttctgaatcttttctttgcttact

SEQ ID NO: 604241 - DNA, 120 bp, Artificial Sequence
  ENSG00000175137_36 (sequence is synthesized)
cctcactcttttccccatcccacaccccttttttctgtaacaaattacttttaacaaataatatgtgttcaccattggaaaaacataataaaacaagaaggaaacaaaaatcacccaaaa

SEQ ID NO: 604242 - DNA, 120 bp, Artificial Sequence
  ENSG00000175137_37 (sequence is synthesized)
ctgaggattcaacattcacattttattatgtttagctgtgtgactcctcgcttctgttttcagagtctgctccctttcctgcttttgagctctgacagtacacctcgagttttgaagtat

SEQ ID NO: 604243 - DNA, 120 bp, Artificial Sequence
  ENSG00000175137_38 (sequence is synthesized)
aatttatgtatcatttccaagctcctgaaaggggactggggagcggaaggatctctgccgttggccctgtctgccaccttcagcttgcacagggcaggtgtcagcaactcgagggggtgt

SEQ ID NO: 604244 - DNA, 120 bp, Artificial Sequence
  ENSG00000175137_39 (sequence is synthesized)
ttgtggcttgtgattcttcatctgcccctcacacagaacaggcacctcacttctactctagagctcatgcaaatgagagcacacagcacggggggaggggttaggggatggtgtatagtg

SEQ ID NO: 604245 - DNA, 120 bp, Artificial Sequence
  ENSG00000175137_40 (sequence is synthesized)
tagagctacacctgaacagggagcaggtgagggctccagccgctttgtctaccaggacaagtgggccaactgtacaacaccctgagcagaagcacgccagagccccatccaacctcggcc

SEQ ID NO: 604246 - DNA, 120 bp, Artificial Sequence
  ENSG00000175137_41 (sequence is synthesized)
cacttgtcctggacggtgcccacatagggtgtggaaacctggagaacccagcgcacagctgtggctccccacacaggctcttctcactcccagatccctaaccattggcgctgagggctc

SEQ ID NO: 604247 - DNA, 120 bp, Artificial Sequence
  ENSG00000175137_42 (sequence is synthesized)
cctgaagagaatggctgctgcagatgtgtgatgtgctgacagacattcccctgatgctctcaagtggttgagtgggcaccagcatccctttcctggcagcagcaaagctgagtagccagt

SEQ ID NO: 604248 - DNA, 120 bp, Artificial Sequence
  ENSG00000175137_43 (sequence is synthesized)
ggtgcaggtgacactaggcaagaacatggggaagacgtggctcagaggcatgtgcctgtgatgtggtcctcgacggtcaggcagcagatccaagagagacagaaataagctgtcttgagg

SEQ ID NO: 604249 - DNA, 120 bp, Artificial Sequence
  ENSG00000175137_44 (sequence is synthesized)
ctcatagaccccgtgttcccctgcgtgtctcgggctctgtacacagttgggggtttgcagaggatgttcctgtttgggttccccccagggcgttgttcagattggcagcctggggcagat

SEQ ID NO: 604250 - DNA, 120 bp, Artificial Sequence
  ENSG00000175143_0 (sequence is synthesized)
gccaagcatacttctgctcttcaaaggcatttagatgttctgcaagcttaattgaaatgcacagttttttctgagaatttctactaagtaacaatcctttcaagtcaaaggatacttggg

SEQ ID NO: 604251 - DNA, 120 bp, Artificial Sequence
  ENSG00000175143_1 (sequence is synthesized)
ggaaaagatagactttaactgctgatgtaacttcactgggagcacctgggtttacagaccttttctgaagatcaggagatattaccttatatcggcacaactgtaggatcaatggaagag

SEQ ID NO: 604252 - DNA, 120 bp, Artificial Sequence
  ENSG00000175143_2 (sequence is synthesized)
tacaacacatcctctacagacttcactttcatggggctgttcaacagaaaggaaacctcaggtcttatttttgccatcatctctatcatcttcttcaccgcactgatggccaatggggtt

SEQ ID NO: 604253 - DNA, 120 bp, Artificial Sequence
  ENSG00000175143_3 (sequence is synthesized)
atgatcttcctgatccaaacagatttgcgccttcatacacccatgtacttcctcctcagccacctttccttaattgacatgatgtatatttccactattgtgcctaagatgctggttaat

SEQ ID NO: 604254 - DNA, 120 bp, Artificial Sequence
  ENSG00000175143_4 (sequence is synthesized)
tacctgctggatcaaaggaccatttcctttgtggggtgcacagctcaacacttcctctaccttacccttgtgggagctgaattcttcctgctgggcctcatggcctatgaccgctatgtg

SEQ ID NO: 604255 - DNA, 120 bp, Artificial Sequence
  ENSG00000175143_5 (sequence is synthesized)
gccatttgcaaccctctgagataccctgtcctcatgagccgccgggtctgttggatgattatagcaggttcctggtttgggggctctttggatggcttcctcctaacccccatcaccatg

SEQ ID NO: 604256 - DNA, 120 bp, Artificial Sequence
  ENSG00000175143_6 (sequence is synthesized)
agctttcccttctgcaattcccgggagattaaccacttcttctgtgaggcaccagcagtcctgaagttggcatgtgcagacacagccctctacgagacagtgatgtatgtgtgctgtgtt

SEQ ID NO: 604257 - DNA, 120 bp, Artificial Sequence
  ENSG00000175143_7 (sequence is synthesized)
ttgatgctgctgattcctttctctgtagtccttgcttcctatgcccgaatcctgactacagttcagtgcatgagctcagtggagggcaggaagaaggcatttgccacttgctcatcccac

SEQ ID NO: 604258 - DNA, 120 bp, Artificial Sequence
  ENSG00000175143_8 (sequence is synthesized)
acaagccagcccaggacaaagtcctctctgtgttttacaccattctcacacccatgctgaaccccctcatctacagccttagaaacaaggatgtgactggagctctgaagagggccttgg

SEQ ID NO: 604259 - DNA, 120 bp, Artificial Sequence
  ENSG00000175143_9 (sequence is synthesized)
ggaggttcaagggtcctcaaagggtgtcaggaggtgtcttttgacagtcgactccttcccatgcatatggtaaatgggggactctgtggtcactgtggctgtgctttcatcaaaagatga

SEQ ID NO: 604260 - DNA, 120 bp, Artificial Sequence
  ENSG00000175143_10 (sequence is synthesized)
agcaaaaagggagggagtcatatgattacaatattggttttttggctagggtttctggttcataactccatagttatgatgttgtggttttttaggcctcagaaaactgaatctctctct

SEQ ID NO: 604261 - DNA, 120 bp, Artificial Sequence
  ENSG00000175143_11 (sequence is synthesized)
gtgatcttcgccttccctcttttcacctgcttctttttctccccaaagaaagccttagaaactaaaaatataatccaatctttccccgcttttggtcacaaagaaattatctgactacct

SEQ ID NO: 604262 - DNA, 120 bp, Artificial Sequence
  ENSG00000175143_12 (sequence is synthesized)
tgtctgactgtatgtcataagacctctgtttcaaaagaggtcttctctcataccctgggggagggaatgctatacagagaggccaagaaaaatccgatcagacaggccttcgtgggtgtc

SEQ ID NO: 604263 - DNA, 120 bp, Artificial Sequence
  ENSG00000175143_13 (sequence is synthesized)
cccactcactctatcaacattaggtcatactctttgttcaatcatatttctgtgcaattgtccatgcttcaatcatgactattcaataaagtctccatataagggccaaaaggagaggac

SEQ ID NO: 604264 - DNA, 120 bp, Artificial Sequence
  ENSG00000175143_14 (sequence is synthesized)
agaaaacttctggacagctaaactcatgaagctgaacaggagggtgataagaacccatccatgtgcctggagggtggcatgtcccaactccacagaggcagaagctcttatgctcttcca

SEQ ID NO: 604265 - DNA, 120 bp, Artificial Sequence
  ENSG00000175143_15 (sequence is synthesized)
gacctcaccctctgtgtcttttcatctgactgtttctgtgtatcctttgtaatatcatttataacaagtggtaaacataggtaagtgtttccttgaattctgtgagcctttatagtaaac

SEQ ID NO: 604266 - DNA, 120 bp, Artificial Sequence
  ENSG00000175143_16 (sequence is synthesized)
taactgaacccaaggaagggccgtgggatccccaatttacaatcacttggtcaaaagtacaggacaacttggggcttttaattggcactggaaatggaaggcagtgttatgggactgagc

SEQ ID NO: 604267 - DNA, 120 bp, Artificial Sequence
  ENSG00000175143_17 (sequence is synthesized)
atgtggcaagaatactattttttaaatgttttcttcccacttttaaaagtttgctgcctaacaattaattcacatgttgttattttactgccctgggaatgctatcatcttatttggaag

SEQ ID NO: 604268 - DNA, 120 bp, Artificial Sequence
  ENSG00000175155_0 (sequence is synthesized)
ggacccggagggatgcggagtggcggccgcggcggtggcggagactgtggctttaagagcgtgccgggagcccgagccccagccgggccgcgcttcgccgctgcgcaccccagcggagcc

SEQ ID NO: 604269 - DNA, 120 bp, Artificial Sequence
  ENSG00000175155_1 (sequence is synthesized)
cccagcggagccaagccccacgctggccggacagggccgcctgtcgccgggctgctgagaactagccctagacctctgcgtgagggttcttctgccgaagacatcaccagtgtgtggagc

SEQ ID NO: 604270 - DNA, 120 bp, Artificial Sequence
  ENSG00000175155_2 (sequence is synthesized)
ctgccacacccacccgctgccaaaccacggcctttacctgtgtcttccggtgtttcccgtgcgacccatcctgtgggagtgcctcgtgggctgccccagagttcaccccacactcagcag

SEQ ID NO: 604271 - DNA, 120 bp, Artificial Sequence
  ENSG00000175155_3 (sequence is synthesized)
caccaatggtgaagatgacaagatcgaagactttccaggcatatctgccctcctgccaccggacctacagctgcattcactgcagagctcacttggccaatcatgatgaactaatttcca

SEQ ID NO: 604272 - DNA, 120 bp, Artificial Sequence
  ENSG00000175155_4 (sequence is synthesized)
agtcattccaaggaagtcaaggacgagcatacctctttaactcagtagttaatgtgggctgtgggcctgcagaagagcgagtgttgctaacaggactgcatgcagtcgcagacatttact

SEQ ID NO: 604273 - DNA, 120 bp, Artificial Sequence
  ENSG00000175155_5 (sequence is synthesized)
gtgaaaactgcaaaaccactctgggctggaaatacgaacatgcttttgaaagcagccagaaatataaagaaggcaaatacatcattgaactagcacacatgatcaaggacaatggctggg

SEQ ID NO: 604274 - DNA, 120 bp, Artificial Sequence
  ENSG00000175155_6 (sequence is synthesized)
actgattggacagcatctacccaacccagtgtccacgtgaacgccattcaaccgaacattcttcccaagcgtgagagagtgactgacacttggttccatccatttaggggccttgccatc

SEQ ID NO: 604275 - DNA, 120 bp, Artificial Sequence
  ENSG00000175155_7 (sequence is synthesized)
cggggcatcctcccaccctgacgccatctttctggtgaccggcctctaaatcgctgtctctctgtctctttgctttgtatctgtttgtgagttgatcctggcttctctctctgttctagt

SEQ ID NO: 604276 - DNA, 120 bp, Artificial Sequence
  ENSG00000175155_8 (sequence is synthesized)
tttggctgaaaacaaaacaacaaaaggaacagatccttgaccgcatggcggcagcccaccttggtaagggccccagggcccatgcgagagctgcctgatggcctcttgtcaggagagcag

SEQ ID NO: 604277 - DNA, 120 bp, Artificial Sequence
  ENSG00000175155_9 (sequence is synthesized)
tggcacgggggcgtgaggaagagggaaaggggaaactctaagggtcctggcgcggggaaggggtggaagggtggaggtaggaacaaaattgcgccgctcctggagacctgataacttagg

SEQ ID NO: 604278 - DNA, 120 bp, Artificial Sequence
  ENSG00000175155_10 (sequence is synthesized)
cttgaaataattgacttgtctaaaaggacaaagagaaaaaaaaaatacctcatgactgcattctctctgactagaagcttctgttcctgacaccaaatgtgccaggttagcaaatgagca

SEQ ID NO: 604279 - DNA, 120 bp, Artificial Sequence
  ENSG00000175155_11 (sequence is synthesized)
caagatgtggccctgattctagttggtggggcaagggcctggttctcctgggctgagtgggggagtgtcctggcagcagcgagtgacctgggcagtggccaggtgggtgcgatgactctg

SEQ ID NO: 604280 - DNA, 120 bp, Artificial Sequence
  ENSG00000175155_12 (sequence is synthesized)
atgcctcactcagtctctgggcaatcatcatctttgcctctagccaccgtagataaggtgtgaagggactgctgtttgcaatgggcttaccatccaaatatcccaaaggctttgaccagc

SEQ ID NO: 604281 - DNA, 120 bp, Artificial Sequence
  ENSG00000175155_13 (sequence is synthesized)
aaccaagtaaaatcagtaattgaggagagcagggcacaaaggggctgcagtttgggagctcctgaagaaatggctcagatattgagtcagagaaataaaaagtaggatcagttagcaatt

SEQ ID NO: 604282 - DNA, 120 bp, Artificial Sequence
  ENSG00000175155_14 (sequence is synthesized)
ctaactgcccttccttctgacccctcataagaggagtgtggtgagggaggggactgggtaggggtcatcccaggaggaggggtttacattggaaccagttcaggttcggtgcatctttcc

SEQ ID NO: 604283 - DNA, 120 bp, Artificial Sequence
  ENSG00000175155_15 (sequence is synthesized)
tcttcggttttacagtggcttccgtgggatcgtcaatttcttgttcttagagtttcgggtgtttttctccagtcttgttactgtagactgtagaaagcacgggccccaggctctgagctt

SEQ ID NO: 604284 - DNA, 120 bp, Artificial Sequence
  ENSG00000175155_16 (sequence is synthesized)
agtaataacctggctggtagattcctcatgcccctaattgtcccacttaggcctgaatgtcttgcatggagagaaatctcctgtcagtgtggtccagcagcagggaggagttctgcccaa

SEQ ID NO: 604285 - DNA, 120 bp, Artificial Sequence
  ENSG00000175155_17 (sequence is synthesized)
attccgatatcaccccttcccccatccaagcatccttcgattagggaagtggagagcacatccctgtaaggcccataagagaaagaggagtttgttacatttaatcaacactgtgaagtc

SEQ ID NO: 604286 - DNA, 120 bp, Artificial Sequence
  ENSG00000175155_18 (sequence is synthesized)
tgttctacagcaattcagccattacacagtatatgactgaaactcatttaactgggttaatttcatttcttagactgaatatattattgttaagatacgtgtgcgtgttaggtaattctc

SEQ ID NO: 604287 - DNA, 120 bp, Artificial Sequence
  ENSG00000175155_19 (sequence is synthesized)
agcatctcctccaagtaggccgaccttctcggaaaattcaccctaaaagtctcacaaaagaatgagttcatggggagattctgtaaagtgatgaactgagatgaaagcagccaacagccc

SEQ ID NO: 604288 - DNA, 120 bp, Artificial Sequence
  ENSG00000175155_20 (sequence is synthesized)
aggagcttttcagaatagcgtctgcagcagaaccagtttccattcagagcgcgtccttggtggaaatgcttttttgtgtgtctccacgcgctgatggtggaatgggagccccaagacgtg

SEQ ID NO: 604289 - DNA, 120 bp, Artificial Sequence
  ENSG00000175155_21 (sequence is synthesized)
gtagactgaagttcagaagaaatactgaatttctgctcccagaagaatagtttctctggctcacaggcccaagttctcaatgaaatcgttttttaactttcacattcctaagctggcttc

SEQ ID NO: 604290 - DNA, 120 bp, Artificial Sequence
  ENSG00000175155_22 (sequence is synthesized)
ccggcacagaagccatggatttcccctctctcccttccccctcctcaaggaaatagtcttcctttatggattttcattggactctttcctcagcgattgtcctggctgtttattgatagt

SEQ ID NO: 604291 - DNA, 120 bp, Artificial Sequence
  ENSG00000175155_23 (sequence is synthesized)
ccttcccataagaaaatggggttaaacatggggtaggtattttgtctttcaaactacaaatggaatgtggtgacataaactagacatggggtgccctcaagtttccaaggggaccaatgt

SEQ ID NO: 604292 - DNA, 120 bp, Artificial Sequence
  ENSG00000175155_24 (sequence is synthesized)
gccactgttcttccttggggatgaggcctttgactgttggatggatcagagcaggctccagtcagaccctggttctgaatgttttttttttcggtgactatccagtgagccttcagtggg

SEQ ID NO: 604293 - DNA, 120 bp, Artificial Sequence
  ENSG00000175155_25 (sequence is synthesized)
tgcaaggcgccatacttgctgtgagagagctgagtagagtgttggtttttccataactacagggggaaaaaaagtcattaggctttccctttgtgtcagtgaaaccaaaagtgcttctta

SEQ ID NO: 604294 - DNA, 120 bp, Artificial Sequence
  ENSG00000175155_26 (sequence is synthesized)
caacgttcgctctgttcatgggttgtctatctaacattgagcagcattggagaggccacagctgagctatggagatgctaaattaactcatggcctcagtcagttcattctttaatttcc

SEQ ID NO: 604295 - DNA, 120 bp, Artificial Sequence
  ENSG00000175155_27 (sequence is synthesized)
tcaccaaattattgacttagagcataaccaaagacctcattcattcaccccaggtgggttggggtaattggagtttgttggtgaagtttgggggcggggtgttgggagtagagacagggt

SEQ ID NO: 604296 - DNA, 120 bp, Artificial Sequence
  ENSG00000175155_28 (sequence is synthesized)
aaggggacgtgagaaaggaaaaggcatgaagttctatacctcagccagcagctgccttcgtttggaactgaagtccagccagcagactctctagctccatctcccctgtgccaccctagg

SEQ ID NO: 604297 - DNA, 120 bp, Artificial Sequence
  ENSG00000175155_29 (sequence is synthesized)
tcatatgaccttggccaccttggagtagacccagacccctcgggacccgggacattagtctcaggctgctgatggattgatttgacatgaaccaaacacagccaaactcgatacccacaa

SEQ ID NO: 604298 - DNA, 120 bp, Artificial Sequence
  ENSG00000175155_30 (sequence is synthesized)
gctgtcagctgaacctgactgagtgttcttcctgagttcacgaggataggctagagtgcatttttactggtggatcagtgtgtgcgaaagagatgaccctttataaagagattttcaagt

SEQ ID NO: 604299 - DNA, 120 bp, Artificial Sequence
  ENSG00000175155_31 (sequence is synthesized)
ggatatatataaaagaaacagttgcttgtaaaatatacttttgtaaataatatttaattttttaaataatatatttggtgctgttttctcagatcccctgagagcactttttattttcct

SEQ ID NO: 604300 - DNA, 120 bp, Artificial Sequence
  ENSG00000175155_32 (sequence is synthesized)
tttaaattctatggtttcctttgcatttcttgaagtatattttaagggaaacagtgatcaccaatacatgttttcagttttttttttttttaaggtctctatcactttaatctggatcaa

SEQ ID NO: 604301 - DNA, 120 bp, Artificial Sequence
  ENSG00000175155_33 (sequence is synthesized)
ggctttgaagcaatgcctctctgcattttttccccagtggaacagactctgcagtacattaatcaggttgagaattgaaatattttcttgcatcagtattggctagaaaagaaaataaat

SEQ ID NO: 604302 - DNA, 120 bp, Artificial Sequence
  ENSG00000175155_34 (sequence is synthesized)
aaaaccaagttaatttagtagtaacaacttacagtgattcttcctgttggaagaatttccaacaaatcagaatcacgtttttagttgtgcgtgtgcgcgcacacgtgtgtaaaaagcact

SEQ ID NO: 604303 - DNA, 120 bp, Artificial Sequence
  ENSG00000175155_35 (sequence is synthesized)
ttcgattgtgcctcctgttttctcgagtggggacactttaactacagtttacacctcgggcgcataaagtttttcttctctttctctctggttgtttctgtttctgagtggaccaacagc

SEQ ID NO: 604304 - DNA, 120 bp, Artificial Sequence
  ENSG00000175155_36 (sequence is synthesized)
agaacccacgaggatttgttttgagtatggagctgttgcgggtttgctcctttttcttgctttgcgtgctcagtttttacagactgtaaaggagatgtgttgtttgtgaagatggagcag

SEQ ID NO: 604305 - DNA, 120 bp, Artificial Sequence
  ENSG00000175155_37 (sequence is synthesized)
agtcaaatctgtgcttctaactgagatgagagtgtattaatcacgtatcgcagggctccagctgttttagaagccacatcatgttaaacattaactggtttggattaaaagaacattaat

SEQ ID NO: 604306 - DNA, 120 bp, Artificial Sequence
  ENSG00000175155_38 (sequence is synthesized)
attataatacacatatcttagtggtaaacagctttttttttttaaggtcagattgcctcaggtttagaaagaggctgagaaatcaaatcttgaacacaatcaacttacatattttaaagg

SEQ ID NO: 604307 - DNA, 120 bp, Artificial Sequence
  ENSG00000175155_39 (sequence is synthesized)
aatctgcctcaaatgagaaaatatgctagttatctagatagaggaaagagatatttacttttttaaaaattaaaatagttatgaaatctggcagaaaaggtaaagcctagaagaaactat

SEQ ID NO: 604308 - DNA, 120 bp, Artificial Sequence
  ENSG00000175155_40 (sequence is synthesized)
gaaagctattctcatgttaccaaattctatctgcgcatatgtttttgtataacatttcggtgacagtgggagtcggttccctttcccaacctgcagagactatcttccaatacagaatct

SEQ ID NO: 604309 - DNA, 120 bp, Artificial Sequence
  ENSG00000175155_41 (sequence is synthesized)
gtctatttatgcttgtgtttacaaactgtatttgttgggtttgggtttttgttttctttggtggcatttttcaggtcactttgcttctataacaaaggtaattgttttcaaataatttgt

SEQ ID NO: 604310 - DNA, 120 bp, Artificial Sequence
  ENSG00000175155_42 (sequence is synthesized)
cttcaccttttcctgtatttgtacatagtgattcagtattagagaaaagtgcattgtttctgtcatatttccaatctgtgttggtgctcatttgagaaaataaaagttttcaaatattaa

SEQ ID NO: 604311 - DNA, 120 bp, Artificial Sequence
  ENSG00000175155_43 (sequence is synthesized)
ttcggcaggcagagcatcactactacatggaaccaggactttaaaggctgagagaattctagagatcatgtaggattatcatctgacgtataagcccccgaaaccaagactagaccctgc

SEQ ID NO: 604312 - DNA, 120 bp, Artificial Sequence
  ENSG00000175155_44 (sequence is synthesized)
cagaggtttacaagctctcaagaatatttgtactccatctttgtacagggagggctgacccacgtgaccgtctcactcaactgagaaaaactctgagttggagggacagagtagtcattt

SEQ ID NO: 604313 - DNA, 120 bp, Artificial Sequence
  ENSG00000175155_45 (sequence is synthesized)
aatttgttattttggaaatgaggtgtcatccttgttggaggctttgggagctggcagcttgcaagccagagaagggaggggctggggattgatgggagccttgttctcagcttgcttggt

SEQ ID NO: 604314 - DNA, 120 bp, Artificial Sequence
  ENSG00000175155_46 (sequence is synthesized)
ttaggttggcggacgaagagtgaagagtgctccctgctcagaaggtgaattctgataaagcaggggaatgtcttgtaagaggggttccttagcaagatgagagagccaccaggaagttgt

SEQ ID NO: 604315 - DNA, 120 bp, Artificial Sequence
  ENSG00000175155_47 (sequence is synthesized)
gagactgtggaattactaaaatgggtggcttttggcagggaccaaaagtggcttgttgaagagctgaccttctggcctgtgggggccgttagggctcatacatgaggtaatatggcatga

SEQ ID NO: 604316 - DNA, 120 bp, Artificial Sequence
  ENSG00000175155_48 (sequence is synthesized)
catttgatcatgatcagaagaatggaaccctgtttttcctgaggtgcttaggcagctgctttctaaagttggggctgggggattattaataagtaaataaaccaacatgccagttgtgca

SEQ ID NO: 604317 - DNA, 120 bp, Artificial Sequence
  ENSG00000175155_49 (sequence is synthesized)
gttcaggaaatggatccttcagggagcgttctcaggggaactgcttccctcctggccctagattcccaggggaagagaaacaggttttactaggctgcatgacaaagagaaagagataat

SEQ ID NO: 604318 - DNA, 120 bp, Artificial Sequence
  ENSG00000175155_50 (sequence is synthesized)
gggagacttttcccttacaaaagcatctttacccagaacctggacttcacgccattaaagtaaaaaaaaaaaccaacccatctttacgcagaccgagacgaagttttttgttttgttttt

SEQ ID NO: 604319 - DNA, 120 bp, Artificial Sequence
  ENSG00000175155_51 (sequence is synthesized)
aaatgtgttcctcatctgtttacaagacctgctggaaaaggtggctgttgctttctttgcctctggtttggtagccccagccagagaggaatgaaggatctagtcagctcttgtagaaca

SEQ ID NO: 604320 - DNA, 120 bp, Artificial Sequence
  ENSG00000175155_52 (sequence is synthesized)
gtcctctccagctggctgatttgacctaggaggtgaagaaagctgcccaaacaaacacatctgtagtagtgaggcttttcaaatcgggcctgaggaccgaacctcttgttctagccttac

SEQ ID NO: 604321 - DNA, 120 bp, Artificial Sequence
  ENSG00000175155_53 (sequence is synthesized)
aatctgccccactttcctttctttatggttctgctaattcctctcctttatgctgcttatgtttcagccagcctttagcttccttctcagcttcccttcgaattttggggaaccccttga

SEQ ID NO: 604322 - DNA, 120 bp, Artificial Sequence
  ENSG00000175155_54 (sequence is synthesized)
gtctggaagtttgaatgtgtggaggtgtcagtgagagaagagaggagttggtctcttggacgttggaattgggtttgcaaagttgtaggggaattgtgagttgtccttttttttttttcc

SEQ ID NO: 604323 - DNA, 120 bp, Artificial Sequence
  ENSG00000175155_55 (sequence is synthesized)
ccccctttggaaatctccagagaaattatttgcctgtatctactggggaagccaaggcatcatttttttaatgcaaggaagcagtgccatgtatcataagaaattgaggtaccaataagg

SEQ ID NO: 604324 - DNA, 120 bp, Artificial Sequence
  ENSG00000175155_56 (sequence is synthesized)
tattttagcaccctttatgtactaaaaactgcaacttgacactttatcaatgttaacttaaccttcatatgaagtctttaaggtagttgacatgagtcatactttatgcggatgaagaag

SEQ ID NO: 604325 - DNA, 120 bp, Artificial Sequence
  ENSG00000175155_57 (sequence is synthesized)
ctgaaactcataaaacttgtccaagatgtcaaatcagaggttcagagaagagtgattactttgagtgggtgttcaggagggattgctggaggagatggttctttgatctgggccttgtaa

SEQ ID NO: 604326 - DNA, 120 bp, Artificial Sequence
  ENSG00000175155_58 (sequence is synthesized)
gatgggcagaagttgagtatgtggagatggtaatggccttcagaatttatgtcttatctgtttggcctggcatacaaggcctttgacaatttggcagagtctggcttttttggtaggtct

SEQ ID NO: 604327 - DNA, 120 bp, Artificial Sequence
  ENSG00000175155_59 (sequence is synthesized)
ccagccagctcttcactttgtttcagccacttggaaccaagccacatcgcctgaatatgcaggtatgggtgtttcagggctctgtgccttagccaagagtgtccgttctccttcacctcc

SEQ ID NO: 604328 - DNA, 120 bp, Artificial Sequence
  ENSG00000175155_60 (sequence is synthesized)
ctcctcctacacctccctcctctttctcctgagctctttcttatacatccttgggcatggcctatatctgctttacatctcggggtcagaacctgacccatggcaagagctcagtaaatg

SEQ ID NO: 604329 - DNA, 120 bp, Artificial Sequence
  ENSG00000175155_61 (sequence is synthesized)
ataaatgaatagatggaggttgagccttggagaagacaagtaatgagaaaaaaaaatactttgttggcctcatgtccttcctgtcccttttggggcagaaaggctcattcacaagtccag

SEQ ID NO: 604330 - DNA, 120 bp, Artificial Sequence
  ENSG00000175155_62 (sequence is synthesized)
gccaaagtcagcacaggcttcaatttcattggctcaggccggtacacagatggggtgcattagagcttgatgatttaaagggttgggtgaaatgcctgactgtggggagagctgagggag

SEQ ID NO: 604331 - DNA, 120 bp, Artificial Sequence
  ENSG00000175155_63 (sequence is synthesized)
ctgtggctggcattgcacaaagcttcctttatttcactccacagccacccccggcgttaaataatctatagattcttatgcaggtctgcctaatggaaagatcattgccccagcctcctc

SEQ ID NO: 604332 - DNA, 120 bp, Artificial Sequence
  ENSG00000175155_64 (sequence is synthesized)
cttggaaaataggcctttcttttcatttttccctccctcttccatttaagaaagttcaaggagagaatgtctctcctgttctcctctcttgacttaatctcctatgcagtttcagaatct

SEQ ID NO: 604333 - DNA, 120 bp, Artificial Sequence
  ENSG00000175155_65 (sequence is synthesized)
gcccagtgggagttaggagctgggaagcagataactggagctggatcagcagtgtaattaaatgatactttgtactggtaatagggcctttcatctgaaagcttgacattcgtttggtgc

SEQ ID NO: 604334 - DNA, 120 bp, Artificial Sequence
  ENSG00000175155_66 (sequence is synthesized)
gcctacataagcctgataaactgtaaaaatgaaaatctggcctgtggcttgagctgggcaccctgtgaaggagtagagcctattcagcacccagggatcactcattcctgtatcaggacc

SEQ ID NO: 604335 - DNA, 120 bp, Artificial Sequence
  ENSG00000175155_67 (sequence is synthesized)
acactgtgctatcatgtgtggcatcttcagcttcattcagtcctcagtaagctgtgaggacctgtgcccatggctgtggacttcacagtgtggctgtcagcttgtccccctaagtcacag

SEQ ID NO: 604336 - DNA, 120 bp, Artificial Sequence
  ENSG00000175155_68 (sequence is synthesized)
ctagaacttgcagatctgaatttccttccagctgagatatttccctgtggccaccttttggggattggtttagatctgctcagctcagggttggctccccttgggacagcctttcccagt

SEQ ID NO: 604337 - DNA, 120 bp, Artificial Sequence
  ENSG00000175155_69 (sequence is synthesized)
taatttttgctggaagctcagcttgaatgcctgatgtgcgtgtcactaactacccactctctcttcttgtgcctcgacatagagttaatgtgggctgtgggcctgcagaagagcgagtgt

SEQ ID NO: 604338 - DNA, 120 bp, Artificial Sequence
  ENSG00000175161_0 (sequence is synthesized)
gccccgctcaccagcatctacttgccccctcgttccttccccagccctttagagaagggaccatgatttggaaacgcagcgccgttctccgcttctacagtgtctgcgggctcctgctac

SEQ ID NO: 604339 - DNA, 120 bp, Artificial Sequence
  ENSG00000175161_1 (sequence is synthesized)
aaggcagccaagggcagtttccactaacacagaatgtaaccgttgttgaaggtggaactgcaattttgacctgcagggttgatcaaaatgataacacctccctccagtggtcaaatccag

SEQ ID NO: 604340 - DNA, 120 bp, Artificial Sequence
  ENSG00000175161_2 (sequence is synthesized)
ctcaacagactctgtactttgacgacaagaaagctttaagggacaataggatcgagctggttcgcgcttcctggcatgaattgagtattagtgtcagtgatgtgtctctctctgatgaag

SEQ ID NO: 604341 - DNA, 120 bp, Artificial Sequence
  ENSG00000175161_3 (sequence is synthesized)
gacagtacacctgttctttatttacaatgcctgtcaaaacttccaaggcatatctcaccgttctgggtgttcctgaaaagcctcagattagtggattctcatcaccagttatggagggtg

SEQ ID NO: 604342 - DNA, 120 bp, Artificial Sequence
  ENSG00000175161_4 (sequence is synthesized)
acttgatgcagctgacttgcaaaacatctggtagtaaacctgcagctgatataagatggttcaaaaatgacaaagagattaaagatgtaaaatatttaaaagaagaggatgcaaatcgca

SEQ ID NO: 604343 - DNA, 120 bp, Artificial Sequence
  ENSG00000175161_5 (sequence is synthesized)
ctcaggtagccatgcaggtgctagaaatacactatacaccatcagttaagattataccatcgactccttttccacaagaaggacagcctttaattttgacttgtgaatccaaaggaaaac

SEQ ID NO: 604344 - DNA, 120 bp, Artificial Sequence
  ENSG00000175161_6 (sequence is synthesized)
cactgccagaacctgttttgtggacaaaggatggcggagaattaccagatcctgaccgaatggttgtgagtggtagggagctaaacattcttttcctgaacaaaacggataatggtacat

SEQ ID NO: 604345 - DNA, 120 bp, Artificial Sequence
  ENSG00000175161_7 (sequence is synthesized)
atcgatgtgaagccacaaacaccattggccaaagcagtgcggaatatgttctcattgtgcatgatgttcccaacactttgcttcccactactatcatcccctcccttaccactgcaacag

SEQ ID NO: 604346 - DNA, 120 bp, Artificial Sequence
  ENSG00000175161_8 (sequence is synthesized)
tcacaaccactgtagccataacaaccagcccaaccacatctgcaacaaccagcagcatcagagatcctaatgctttggctggccagaatggccctgaccatgctctcataggaggaatag

SEQ ID NO: 604347 - DNA, 120 bp, Artificial Sequence
  ENSG00000175161_9 (sequence is synthesized)
tggctgtagttgtatttgtcacgctgtgttctatctttctgcttggtcgatatctggcaaggcataaaggaacgtatttaacaaatgaagctaaaggagctgaagatgcaccagatgctg

SEQ ID NO: 604348 - DNA, 120 bp, Artificial Sequence
  ENSG00000175161_10 (sequence is synthesized)
atacagccattatcaatgctgaaggcagccaagtcaatgctgaagagaaaaaagagtatttcatttaagatgcaggccaagattctgagttttactaccaggctgaatgctggagaaaac

SEQ ID NO: 604349 - DNA, 120 bp, Artificial Sequence
  ENSG00000175161_11 (sequence is synthesized)
ggtgcttcgtagagctgccgccgtcgccgctgccgctgccgccacagccgccgctgcagccggagcatccgggagccgccactgccgccgccgctgccgctgctaccgccactagcgctg

SEQ ID NO: 604350 - DNA, 120 bp, Artificial Sequence
  ENSG00000175161_12 (sequence is synthesized)
cttccactgcttctacctcccctcccaggaccccgagacaccccgggcgcgagcggcagtgctgcttgcttgctcctcctctcccccagcccttcccctccgtgacctacccactccttg

SEQ ID NO: 604351 - DNA, 120 bp, Artificial Sequence
  ENSG00000175161_13 (sequence is synthesized)
cagccctcgcccgcaccttctccaacaccccggcatccctgcaccacctgctcgggcagccccggcgggctctgggacttgctgtgcgcgccgagaggaaggcaagctccaaacccctgc

SEQ ID NO: 604352 - DNA, 120 bp, Artificial Sequence
  ENSG00000175161_14 (sequence is synthesized)
ctggaagacgggctgtcgcggctgcaccaccagcaggaggaggaggagaagaaactatttcgcgataccccattctgcgggtgctttgccgctgccgcttctgctgccgccgatccgagt

SEQ ID NO: 604353 - DNA, 120 bp, Artificial Sequence
  ENSG00000175161_15 (sequence is synthesized)
ctaccatcgtctgctacccttattaactcccatactgtactgctatcagtagccagtgtataccaacaatcagctgttgaaagcatcattctttaattactgtaccatccataatgcagg

SEQ ID NO: 604354 - DNA, 120 bp, Artificial Sequence
  ENSG00000175161_16 (sequence is synthesized)
acatttcttactgcctaaatttcacaccattgctcttttaacatacagtgcttgaatatacagccttaacaatgttaatcatctccttggatcattatattgagtggtttttatacatta

SEQ ID NO: 604355 - DNA, 120 bp, Artificial Sequence
  ENSG00000175161_17 (sequence is synthesized)
aaaaatgtatgcagagtttttttcccccattttttcccctttaagtcatagaccttatcagtttgccattggacagctttcacaagtaacaggattagggaaggacataatgtatttaag

SEQ ID NO: 604356 - DNA, 120 bp, Artificial Sequence
  ENSG00000175161_18 (sequence is synthesized)
aataagtgaaggttagaggtttacaattaatgttttctacatgtctgtcttcaaagacaacatgctttggaaacatatgtcctagaaaacataaaattaaaaaaaaacactatagtgtag

SEQ ID NO: 604357 - DNA, 120 bp, Artificial Sequence
  ENSG00000175161_19 (sequence is synthesized)
tttttggaatgttggagattatactggtaaagctgtatcgatttgctattgaaatatagtatttgatacaggagccatgtgtacgaattgcaatcatgacatggtattttctataattat

SEQ ID NO: 604358 - DNA, 120 bp, Artificial Sequence
  ENSG00000175161_20 (sequence is synthesized)
agagatcttactattaggatattgtagcttcatttaccaataaattattccaaatgatttactgcttttggaatcacaaatatttaattcatttctctaatttgattctataatttattt

SEQ ID NO: 604359 - DNA, 120 bp, Artificial Sequence
  ENSG00000175161_21 (sequence is synthesized)
gcttcataaagattcacctgcctaaacaatattgaagtatccatagggcacaattttcagacattttagtatctgtatatagtgcatataataaatccaattaaacattatttgatacat

SEQ ID NO: 604360 - DNA, 120 bp, Artificial Sequence
  ENSG00000175161_22 (sequence is synthesized)
atttaacttttttggctgtatgtaattcagtcataagtaagcattttctaacgtccattatatccctttaggtattacttaaaccaatattataagtagataacatgtattagtattttt

SEQ ID NO: 604361 - DNA, 120 bp, Artificial Sequence
  ENSG00000175161_23 (sequence is synthesized)
gtctgtatgtcctagcactgttcaacaacaaatttttctagttcttgttaatttttatttgttatacaatggaagcacaatgttataaggaaaggtaattttaagctaacaaccagtgca

SEQ ID NO: 604362 - DNA, 120 bp, Artificial Sequence
  ENSG00000175161_24 (sequence is synthesized)
cagcctcaggttttaaattacaaccacagttgaataataacctaaaaataaattttagtttgctaaaaatttacaaattttcattttgcagttccagagctgcttacctatgttggtttg

SEQ ID NO: 604363 - DNA, 120 bp, Artificial Sequence
  ENSG00000175161_25 (sequence is synthesized)
ccaaaaagaagtgtttaagatatgttttctgtataaatgaactaattctttatattaaattcctgtctatgcattttgtgaggtacaaactgatgaaacagtgagtgatagagaatttct

SEQ ID NO: 604364 - DNA, 120 bp, Artificial Sequence
  ENSG00000175161_26 (sequence is synthesized)
gccatgcttttaactccaaagtgaaagtctctttctctggattattttaaaattttggcgtgtttaaccattaagaaatgctgtattcttaaatatgaaacagttaatctaaagtcttat

SEQ ID NO: 604365 - DNA, 120 bp, Artificial Sequence
  ENSG00000175161_27 (sequence is synthesized)
tatttcttctagtaaaataaaatattgttagattagttctcattaaatttattatatgctaaagaataaaactccagttagatttaaaaaaatcccatttacaagcattgcacctttaag

SEQ ID NO: 604366 - DNA, 120 bp, Artificial Sequence
  ENSG00000175161_28 (sequence is synthesized)
aagaaaacaaatatgacagtatggtagctatacttgtgatgtctgacgcatgatggcctatggttttaaaaatagtattgtggaatatatttttgggtaataagaatggttgagtgcaac

SEQ ID NO: 604367 - DNA, 120 bp, Artificial Sequence
  ENSG00000175161_29 (sequence is synthesized)
atcatgtattaatatcaaatgaaagacaagggtgctgtatctttgattatttatcaaaaaagtataaatcttttaaggaaaatgttagaattttaaagtttttttttgattgttgaagca

SEQ ID NO: 604368 - DNA, 120 bp, Artificial Sequence
  ENSG00000175161_30 (sequence is synthesized)
tttatcttgttgatttcttacaaaagaaaaaggacgatgtcagtcaagcagcactttttcagaatatacagaacataaataatatgatgtggttgagtgttaacataataaatcatatac

SEQ ID NO: 604369 - DNA, 120 bp, Artificial Sequence
  ENSG00000175161_31 (sequence is synthesized)
agtatgacattttaaggaaataagtctgcattgatgtgattgcatgcttgtttttacagttcactccataccatctgtggaaaaatgcaataatatgttaatatagtatggtagtttgag

SEQ ID NO: 604370 - DNA, 120 bp, Artificial Sequence
  ENSG00000175161_32 (sequence is synthesized)
agaatcaggtaggtgctactagacacattgaaactagaataggtttataaactgttcatatctttcaatgcataatctttagaaagactccacaaagcaaaattcatcctgttagtacaa

SEQ ID NO: 604371 - DNA, 120 bp, Artificial Sequence
  ENSG00000175161_33 (sequence is synthesized)
aatggaaaggttcttattacagaagtaagttgtacaaactgcatcatcaattactatgtaaagcctaatttcaggatgcacttacaaaattgctactcttcatcgatgccgtatttacat

SEQ ID NO: 604372 - DNA, 120 bp, Artificial Sequence
  ENSG00000175161_34 (sequence is synthesized)
ccctcttcatttcatctatattctacttggctccaacaactaaattgttgcctaaataactcaatcattatttatagcactgtaaaattagaaatccaaaattggttgcatttcatgatt

SEQ ID NO: 604373 - DNA, 120 bp, Artificial Sequence
  ENSG00000175161_35 (sequence is synthesized)
tttgactcttttaacccttcagagtaatataaaatctcattagaactcttataaaaccagttagctaaaacaactagattattatactagttataaatgctggtatattataatttgtgg

SEQ ID NO: 604374 - DNA, 120 bp, Artificial Sequence
  ENSG00000175161_36 (sequence is synthesized)
gatctaattaaatgtttgcctattaaatatagtttgatttaaatgagacaccatgttctgaactggagaaaacaatatcaatgaagtcatattttcatacctttaaaaattatttaattt

SEQ ID NO: 604375 - DNA, 120 bp, Artificial Sequence
  ENSG00000175161_37 (sequence is synthesized)
tcaaccaaacaaaaaataaattgtaaaaattatgctcatttctattccaacaagtcagaaaataatgacataatatttctaaatgagaatgatgtcaatttcattgtctggaacatgcac

SEQ ID NO: 604376 - DNA, 120 bp, Artificial Sequence
  ENSG00000175161_38 (sequence is synthesized)
gcacatagagtcaatttctgtctcttctaagtgagcacagtaggtagggaactcaatggaagcagtgtgcacacacacacacccttagtagaatatggagcattattctttaccaaaagt

SEQ ID NO: 604377 - DNA, 120 bp, Artificial Sequence
  ENSG00000175161_39 (sequence is synthesized)
agctattctctgccagtgtactgtttacagtgtaaattgattgtcctccgtcaaaatcaagtctaagcggcattttacttttcttttcttttttattttccatttttgggtgttctagat

SEQ ID NO: 604378 - DNA, 120 bp, Artificial Sequence
  ENSG00000175161_40 (sequence is synthesized)
aggattattatcaaaagtaggaggaaaaagaaatgtttgtgagtgcaagattaaagacagagcgcatgagcagagtactgatggtgtgcgtgtttgtgtgtgtgtatatgtgtgtgtata

SEQ ID NO: 604379 - DNA, 120 bp, Artificial Sequence
  ENSG00000175161_41 (sequence is synthesized)
agagagaaagagaaatcgaaaagagagagaaatttcaacttgttttcttttaccagagaatccaagaagcagtttaaggaacctgatattggagtttaatctagaaactggatgatctca

SEQ ID NO: 604380 - DNA, 120 bp, Artificial Sequence
  ENSG00000175161_42 (sequence is synthesized)
tattgattcatgatgcttaatctttcattgaaactccacaattaaaataacaaatagagaaagaaaactaactttcctaaatatggcaaagaaactaacacctcatttatttttatttct

SEQ ID NO: 604381 - DNA, 120 bp, Artificial Sequence
  ENSG00000175161_43 (sequence is synthesized)
ttgtaaaaatataaatatctcaatcaaaagtacaggctcatttgtaattatgtactcatgattgtaacagcattgagatttcatataggcacatgtatagcagctgtttgacagtgatgg

SEQ ID NO: 604382 - DNA, 120 bp, Artificial Sequence
  ENSG00000175161_44 (sequence is synthesized)
ctcttccatgtaacatagcagttatcgtgtaatttagtgccacttattgcaaagtgttaccaaggggaacatttcaaatgccttttgtttttctttggacatcaaggtaatttagtggac

SEQ ID NO: 604383 - DNA, 120 bp, Artificial Sequence
  ENSG00000175161_45 (sequence is synthesized)
aacaaatattaaattttacattatgctttttaattgtggagaaaatgcaaaacctcatgtcttaccacaactttcccatggtattgctaattacttagagtctctaaaattgcccaatat

SEQ ID NO: 604384 - DNA, 120 bp, Artificial Sequence
  ENSG00000175161_46 (sequence is synthesized)
tatttccctttgcaaatggtaatttctgataaaacaatacaaaacaaaaaaaaagcagtaatcacagccaaataaatgaaacacctaatgagaattactgttgagtaatgctttttatta

SEQ ID NO: 604385 - DNA, 120 bp, Artificial Sequence
  ENSG00000175161_47 (sequence is synthesized)
agtggcacaaagtacacactaaaaactatgcaaaatataggtaactacagtgtacgtacatgtaagtatcttgtacttgctgtgtatggatgttggaaacccatgtaattataatatgca

SEQ ID NO: 604386 - DNA, 120 bp, Artificial Sequence
  ENSG00000175161_48 (sequence is synthesized)
ttttgaatattgggaaagaggaaatcttagtgtagataatagaatttgttttgaaatatacactggcaatattgaaatatactcagtgcaatatctgcagttctattgctggatacttaa

SEQ ID NO: 604387 - DNA, 120 bp, Artificial Sequence
  ENSG00000175161_49 (sequence is synthesized)
tgcaaagggattttaaagaattcttcagcaagatccaagaggttgctaatcttcacctctcacatactaaagcattcattaaaaatacaactaattcaaggacaagttaagtttttctta

SEQ ID NO: 604388 - DNA, 120 bp, Artificial Sequence
  ENSG00000175161_50 (sequence is synthesized)
ttaatgtgacacagtaacatttttatttggattagtttttggtgttattgcagagaaagaaataacctgagttttaaatttcgattcatatctcattgaattgggaattcttcaattttg

SEQ ID NO: 604389 - DNA, 120 bp, Artificial Sequence
  ENSG00000175161_51 (sequence is synthesized)
tttgaaatgtgtgcatgttttcatagattgtagcaagtacaaatgtattcaatgaaagaacatagggtagttttaatagttaaagtcactatatcttaatgggaattttaaaatatcttt

SEQ ID NO: 604390 - DNA, 120 bp, Artificial Sequence
  ENSG00000175161_52 (sequence is synthesized)
tctttttctattcattttttccctttctctctctattctacccccaaacaagccctttgcactcatacccttccaaaggcaatggattgaaagtagcaagataataaagagagttaaagg

SEQ ID NO: 604391 - DNA, 120 bp, Artificial Sequence
  ENSG00000175161_53 (sequence is synthesized)
ggacaacatataacaatgggttctaaaatcatcagcatttttatgtattgagattattaatattgaatgcaatagttattggatatagctggtaagttctctgccatgcatacttacaat

SEQ ID NO: 604392 - DNA, 120 bp, Artificial Sequence
  ENSG00000175161_54 (sequence is synthesized)
aatccttctacctctcacttttaacatgggctatgatacttcaatataaatagaggaaataattatttaccagatatcccaggaagcattcttatggaactattataacagtgcactccc

SEQ ID NO: 604393 - DNA, 120 bp, Artificial Sequence
  ENSG00000175161_55 (sequence is synthesized)
caccccctgggaaatctcaaaagccaagttcttcagtgtattctatggtgtatgaatctgcatttgtttttccttttctatcattagcttttcctaaaggcaaaatattataactttata

SEQ ID NO: 604394 - DNA, 120 bp, Artificial Sequence
  ENSG00000175161_56 (sequence is synthesized)
agaatagtccttctcctgcctatttaatatttcaatgttaatataattgtattggtttttaaaaataattaaaatggcaacactttgcgatccaatctgatatttaatttttaaaatgta

SEQ ID NO: 604395 - DNA, 120 bp, Artificial Sequence
  ENSG00000175161_57 (sequence is synthesized)
acaatttcttataaattcatgctgtgttttaagtaaaaatcatgtatatgaattattttaccaagtagtattatctgcacgagacaaatttaagtattttaaaaatcatccttattaata

SEQ ID NO: 604396 - DNA, 120 bp, Artificial Sequence
  ENSG00000175161_58 (sequence is synthesized)
aataatcctcatataatgcacagtattgccacaaatgcccacttcattttgtctgcatagacatattaagaatttttcaatgatgtaatttaattatcctaaaagaaatgacagattctt

SEQ ID NO: 604397 - DNA, 120 bp, Artificial Sequence
  ENSG00000175161_59 (sequence is synthesized)
ctgtaggaaaaaataaaaacatgaatatctcaaattataatggttaatctctaaaatatgcttaaagtaagatgtttctatgttatgtggttatgttatcaataatatttggttgatctt

SEQ ID NO: 604398 - DNA, 120 bp, Artificial Sequence
  ENSG00000175161_60 (sequence is synthesized)
cacatattttatatgcatatatatatcaagaagttatatatatataactcaagaaactcaagttatatatatatgtcaagaaatgtatgattattttggagagaatgggcccaaatgtga

SEQ ID NO: 604399 - DNA, 120 bp, Artificial Sequence
  ENSG00000175161_61 (sequence is synthesized)
acaaaaaaaacaaaaaaaaaacactattttcccctacgaaatatactgtatatttcaaaagaagaaaagttaaaagatatttgaagattgcaggggcaaaacaaaaacctaccagggctc

SEQ ID NO: 604400 - DNA, 120 bp, Artificial Sequence
  ENSG00000175161_62 (sequence is synthesized)
aaacctaccagggctcagcacttaagcacttttcccacatccagggtcaaagcagcagtaactacatggacttttaagtgcggtatgaaatgcaacattacgcttacaaacagtactgtc

SEQ ID NO: 604401 - DNA, 120 bp, Artificial Sequence
  ENSG00000175161_63 (sequence is synthesized)
aaacctcaaatgctttctttcttcagatgctttttcgtgtacatgatactagtagacacttttctctttatatttactgatagtgaaaatcatacgcaataaaatattgatgtttgaagg

SEQ ID NO: 604402 - DNA, 120 bp, Artificial Sequence
  ENSG00000175161_64 (sequence is synthesized)
cagtggtcaccaattggttaaaaaactatgaaatgtaaactgaattgttatatctctatcctttttgcttttctctgtgtttttaatgtatggaataaatctcataaatagaaagaaaaa

SEQ ID NO: 604403 - DNA, 120 bp, Artificial Sequence
  ENSG00000175161_65 (sequence is synthesized)
taatctagaaatttttcaaagctagtactctttctccttataaatgtacacaattttaatctttttacaaatttatttaactgtacctactgtacttattgtagattcaatgacgcagtt

SEQ ID NO: 604404 - DNA, 120 bp, Artificial Sequence
  ENSG00000175161_66 (sequence is synthesized)
aagtcatcacccaaggatttatgaatttgagattactgacctgttttcttcatattgcattcacatcaatatttgtgaatttgttgttcagcttttcattcaaacaaaaaatattccctc

SEQ ID NO: 604405 - DNA, 120 bp, Artificial Sequence
  ENSG00000175161_67 (sequence is synthesized)
aagaaagctccatttttatcataaacatttcaacataaccaacattagaacaagtctgccatgttaaaaataatttaaagacttatctctgaaaacggtatccagaaacgcaggtgttcc

SEQ ID NO: 604406 - DNA, 120 bp, Artificial Sequence
  ENSG00000175161_68 (sequence is synthesized)
cagtaatgtagcttcaaaaataaaatgtgctatttatatgacatgaaattcataacttttggaagggtatatttatgacagcataaaaaataaattctgtgctataaagaagatccaaca

SEQ ID NO: 604407 - DNA, 120 bp, Artificial Sequence
  ENSG00000175161_69 (sequence is synthesized)
aattaaccatataagcacagaaaatagagaaacacagttattgaatctactcttgtcattaacattttcaaaaaacaaaatgcatattgtaatatttggtacatgacacttgcatgttga

SEQ ID NO: 604408 - DNA, 120 bp, Artificial Sequence
  ENSG00000175161_70 (sequence is synthesized)
tatgcctatatacttacaaagtattcaatgtgtacttagcggcgcttaaaatatgtcatgtacaactcttataaacatttttacagggttcccatttgcacttcatctttcagtaaagtc

SEQ ID NO: 604409 - DNA, 120 bp, Artificial Sequence
  ENSG00000175161_71 (sequence is synthesized)
ttgtcagaaaaaaattgtctgataaatatggaaaaataaaatttgaattttagttatctgttggacattactgaattgtctattcatttagtacattttcttaaccttgaaaacagacat

SEQ ID NO: 604410 - DNA, 120 bp, Artificial Sequence
  ENSG00000175161_72 (sequence is synthesized)
tgaaagatggaactttcttttttccagtgacaggtcattaaatcgatggtacaaaacatacttctttatgccaaacacattattttgaatacctttttttcaacttcatacattatccat

SEQ ID NO: 604411 - DNA, 120 bp, Artificial Sequence
  ENSG00000175161_73 (sequence is synthesized)
ccattttagttttcctcgatgatgcccattttctttgtaaatttctaagtggaagttttaaaaattaagcatcagtaaaataaatgttatcttatttgtacaacatttaatcgttattcc

SEQ ID NO: 604412 - DNA, 120 bp, Artificial Sequence
  ENSG00000175161_74 (sequence is synthesized)
ttggaatatatgaaccttgtaaagtgatgactaagggtcaaaaaaaatgttgctgacttagggaaatttgcttgagaatgccaaaattttaaaactctgtaaaggtaattttacattcac

SEQ ID NO: 604413 - DNA, 120 bp, Artificial Sequence
  ENSG00000175161_75 (sequence is synthesized)
ttatgtgtgtttactaatgttgagtaggaacagaagcaaaaatacctaaacctattttttttaaccttcacactctaaccagtattatatatttcagctacctaagataatgcaattaat

SEQ ID NO: 604414 - DNA, 120 bp, Artificial Sequence
  ENSG00000175161_76 (sequence is synthesized)
catatatccaacctaagcttctgccaataaggatttcagataagcttttaaatttatggaggattttctttgtgtctttggaagttcacttaccataaagtattttatagtctactttaa

SEQ ID NO: 604415 - DNA, 120 bp, Artificial Sequence
  ENSG00000175161_77 (sequence is synthesized)
ataacagattttgttacacagggtaagccaaaggctgtacaagatttagtgtcattgggtctcatatttgtgttagaccatgaaatattccattaaaatttatctgtaaatacaaggcaa

SEQ ID NO: 604416 - DNA, 120 bp, Artificial Sequence
  ENSG00000175161_78 (sequence is synthesized)
cagcagcgacagcaccgtgtgcattgcaataacatccccgggggggaaatgtgttctgagacgtgtcatttacctaggaagagagaggggactctgtctgggatttaaaaaaaaagaaaa

SEQ ID NO: 604417 - DNA, 120 bp, Artificial Sequence
  ENSG00000175161_79 (sequence is synthesized)
gaaaagaaaaagaaaggaaaaagaataagaaaaaagaaaaaatgagtgaatgaatgaataaataaaccaagaatttaagaaaggggagaaaaggcaaaaaaattaaaagacccaaaccca

SEQ ID NO: 604418 - DNA, 120 bp, Artificial Sequence
  ENSG00000175164_0 (sequence is synthesized)
ggaggccgagaccagacgcggagccatggccgaggtgttgcggacgctggccggaaaaccaaaatgccacgcacttcgacctatgatccttttcctaataatgcttgtcttggtcttgtt

SEQ ID NO: 604419 - DNA, 120 bp, Artificial Sequence
  ENSG00000175164_1 (sequence is synthesized)
tggttacggggtcctaagccccagaagtctaatgccaggaagcctggaacgggggttctgcatggctgttagggaacctgaccatctgcagcgcgtctcgttgccaaggatggtctaccc

SEQ ID NO: 604420 - DNA, 120 bp, Artificial Sequence
  ENSG00000175164_2 (sequence is synthesized)
ccagccaaaggtgctgacaccgtgtaggaaggatgtcctcgtgaccccttggctggctcccattgtctgggagggcacattcaacatcgacatcctcaacgagcagttcaggctccagaa

SEQ ID NO: 604421 - DNA, 120 bp, Artificial Sequence
  ENSG00000175164_3 (sequence is synthesized)
caccaccattgggttaactgtgtttgccatcaagaaatacgtggctttcctgaagctgttcctggagacggcggagaagcacttcatggtgggccaccgtgtccactactatgtcttcac

SEQ ID NO: 604422 - DNA, 120 bp, Artificial Sequence
  ENSG00000175164_4 (sequence is synthesized)
cgcgcctacaagcgctggcaggacgtgtccatgcgccgcatggagatgatcagtgacttctgcgagcggcgcttcctcagcgaggtggattacctggtgtgcgtggacgtggacatggag

SEQ ID NO: 604423 - DNA, 120 bp, Artificial Sequence
  ENSG00000175164_5 (sequence is synthesized)
ttccgcgaccacgtgggcgtggagatcctgactccgctgttcggcaccctgcaccccggcttctacggaagcagccgggaggccttcacctacgagcgccggccccagtcccaggcctac

SEQ ID NO: 604424 - DNA, 120 bp, Artificial Sequence
  ENSG00000175164_6 (sequence is synthesized)
atccccaaggacgagggcgatttctactacctgggggggttcttcggggggtcggtgcaagaggtgcagcggctcaccagggcctgccaccaggccatgatggtcgaccaggccaacggc

SEQ ID NO: 604425 - DNA, 120 bp, Artificial Sequence
  ENSG00000175164_7 (sequence is synthesized)
atcgaggccgtgtggcacgacgagagccacctgaacaagtacctgctgcgccacaaacccaccaaggtgctctcccccgagtacttgtgggaccagcagctgctgggctggcccgccgtc

SEQ ID NO: 604426 - DNA, 120 bp, Artificial Sequence
  ENSG00000175164_8 (sequence is synthesized)
ctgaggaagctgaggttcactgcggtgcccaagaaccaccaggcggtccggcgtgagcggctgccaggggctctgggagggctgccggcagccccgtccccctcccgcccttggttttag

SEQ ID NO: 604427 - DNA, 120 bp, Artificial Sequence
  ENSG00000175164_9 (sequence is synthesized)
ggggctctgggagggctgccggcagccccgtccccctcccgcccttggttttagcagaacgggtaaactctgtttcctttgtccgtcctgttgtgagtaactgaagcctaggccccgtcc

SEQ ID NO: 604428 - DNA, 120 bp, Artificial Sequence
  ENSG00000175164_10 (sequence is synthesized)
ccacctcaaatcacacacaccccctccccaccacagagacaccattacatacacagacacacacagaaagacacacacagacacaaaatcacacacacaccctccccgccacagagacac

SEQ ID NO: 604429 - DNA, 120 bp, Artificial Sequence
  ENSG00000175164_11 (sequence is synthesized)
cattacatacacagacacacacagaaagacacagacacaaaatcacacacacaccctccccgccacagagacacaccattacatacacagacacgcaatcgcagatacgcccttccggcc

SEQ ID NO: 604430 - DNA, 120 bp, Artificial Sequence
  ENSG00000175164_12 (sequence is synthesized)
acagaaacacaccattacacacacatacacagaaagacacacacagacacacaatcacacgcagcccctccccgccacagagacacaccattacatacacagacacacacagaaagacac

SEQ ID NO: 604431 - DNA, 120 bp, Artificial Sequence
  ENSG00000175164_13 (sequence is synthesized)
ggaggccgagaccagacgcggagccatggccgaggtgttgcggacgctggccgtctcacaggtccttccccaggtccaagaggctcttctgtgtcctgatgacaagtagctgcctagccg

SEQ ID NO: 604432 - DNA, 120 bp, Artificial Sequence
  ENSG00000175164_14 (sequence is synthesized)
gcccactcccccagccatcggaatggacccctcctcttggccagggcactccaaagttaacctgaaaaaccggttcaggctgtgaagagaaggtggagtggacatgcctcatttatgtcc

SEQ ID NO: 604433 - DNA, 120 bp, Artificial Sequence
  ENSG00000175164_15 (sequence is synthesized)
tcctcccttttggaattcagcaaagctgaccagcatgaacattaacacagaccttaagtctgattagtggcatttacaatctatactctctgaagcgtgctacctggagtcttcctttgc

SEQ ID NO: 604434 - DNA, 120 bp, Artificial Sequence
  ENSG00000175164_16 (sequence is synthesized)
cccgccacagagacacaccattacatacacagacacacacagacacacaatcacagataccccctcccggccatagagacacaccgttacacacacatacacagaaagacacacacagcc

SEQ ID NO: 604435 - DNA, 120 bp, Artificial Sequence
  ENSG00000175164_17 (sequence is synthesized)
cctccccgccacagagacacaccattacatacacagacacacacacacacacaatcacacacacaccccccgccacagagacacaccgttacatacacagacatacacacacacacagac

SEQ ID NO: 604436 - DNA, 120 bp, Artificial Sequence
  ENSG00000175164_18 (sequence is synthesized)
atacaccagacacgcaaagacacacagacacagatacacagatacaaagacacagacatatagacacacagacatgcacagagacacatggagacacatgcaaaaatgcacagagaaaga

SEQ ID NO: 604437 - DNA, 120 bp, Artificial Sequence
  ENSG00000175164_19 (sequence is synthesized)
catacagaagtgtacacacagacacatagaccacacagacacacagacatgcatgcaaacacacagacatgcagacatgcacacaaacacagactcacgcacacagacttaggcagccca

SEQ ID NO: 604438 - DNA, 120 bp, Artificial Sequence
  ENSG00000175164_20 (sequence is synthesized)
aattcagcgcctggggcataagttcctggaggggtggccaccttcagcccccacggtaaggtcctgaggaaccttccccttagacaagggatcatggaggaggtctcttccggagcctgg

SEQ ID NO: 604439 - DNA, 120 bp, Artificial Sequence
  ENSG00000175164_21 (sequence is synthesized)
agggaggcctcaagtggtccttccacctcggcatcccaaagtgctaggattataagcatgagccactgcacctggccccaacatcatttattgaacagactgtcgtttccacattgtgtt

SEQ ID NO: 604440 - DNA, 120 bp, Artificial Sequence
  ENSG00000175164_22 (sequence is synthesized)
tcttggcatttctgtcaaaaatcagttgaccgtaaatgcatggattcacttccgggctctctattctgtttcattggtctgtttgtttttatgccaataccatgatgttttgattattat

SEQ ID NO: 604441 - DNA, 81 bp, Artificial Sequence
  ENSG00000175164_23 (sequence is synthesized)
taggggtctttgtggccattactgacagttaaaatggccctggctcatgtctcctgggcctctacagtactttaggtgggg

SEQ ID NO: 604442 - DNA, 120 bp, Artificial Sequence
  ENSG00000175164_24 (sequence is synthesized)
ggctcatgtctcctgggcctctacagtactttaggtggggaagtactgtggcccacatgtcccaacaggctgtgtgtggcacctgacagtgctttgtgccactgtggagcaggtgttact

SEQ ID NO: 604443 - DNA, 120 bp, Artificial Sequence
  ENSG00000175164_25 (sequence is synthesized)
ccctcatacgaattttaggattattttatttatttcagtgaaaaatgtcaatgaaattttgatagggattgcattgaatctgtagattgtttggggttgtatggacattttaacaatatt

SEQ ID NO: 604444 - DNA, 120 bp, Artificial Sequence
  ENSG00000175164_26 (sequence is synthesized)
aattcttccaattcatgaacatgggatgtcttttttttggcacctgatctcagatatgggacagctttctaattatttgtatcttcaatttctttcacaaatgttttatagttttcagca

SEQ ID NO: 604445 - DNA, 120 bp, Artificial Sequence
  ENSG00000175164_27 (sequence is synthesized)
tacagatctttcacttccttggttggatttatttgcaagtattttttgtagctattgtaaatgacattgttttcttgatttctttgttagggtatagaaatgctacagattgttgtatgt

SEQ ID NO: 604446 - DNA, 120 bp, Artificial Sequence
  ENSG00000175164_28 (sequence is synthesized)
tccaatttggataccttttatttcttcctcttgcctaattattttggctgagggccaacttgttgggtttgttgttgttggtttttgtctgtgtcttttggtgtttcgtgttgctggctt

SEQ ID NO: 604447 - DNA, 120 bp, Artificial Sequence
  ENSG00000175164_29 (sequence is synthesized)
ttccagcacacagtcacagatatatgaggcagaaagaaaacccagggaactcctgtcatgtcattcctcaggtcccaaggtccctacatggtctgccttcttctctccaccttttagtgt

SEQ ID NO: 604448 - DNA, 120 bp, Artificial Sequence
  ENSG00000175164_30 (sequence is synthesized)
ttgatatacatacgtttatgtatgtagttatatatgtatgtgtaatacccagggaaatatacagagattttaactgtccttagtgtagggcgtggggacaggtgcatctattctaccttg

SEQ ID NO: 604449 - DNA, 120 bp, Artificial Sequence
  ENSG00000175164_31 (sequence is synthesized)
cttggaagtggaaaaatcttcaagaaatcaatttatcaccaactggcatgacagaactcctggtttagtgtctagctgtctccactaaaatcaatcaccatgccatcaggcactctcttc

SEQ ID NO: 604450 - DNA, 120 bp, Artificial Sequence
  ENSG00000175164_32 (sequence is synthesized)
cctctggtgtgtactggtacctgaaacagcgtccagcaccctgagagcacagaacgcagcttcttatgtgccccacccaataatcccaaatcgagcacagacctgggagctgaagagaca

SEQ ID NO: 604451 - DNA, 120 bp, Artificial Sequence
  ENSG00000175164_33 (sequence is synthesized)
agctggaggtcaggcagttctattacttaagcctggttcttcctgactccaaaagccaggcgccaccccatgctccttcccagcagaagctggttttcaccgggtcaggaggacaggatg

SEQ ID NO: 604452 - DNA, 120 bp, Artificial Sequence
  ENSG00000175164_34 (sequence is synthesized)
gctattcctgaccgttgtacagcagtgccacatctcctagtttccagaacatttaatgtgttgctgtggaggcctggcagctctgaagtagccccttgcgcccaggacaaaccgggcctg

SEQ ID NO: 604453 - DNA, 120 bp, Artificial Sequence
  ENSG00000175164_35 (sequence is synthesized)
gaggggtggggtggggtaagctgaagcttccagtatcccacgtgggcattctgttgctgagggcaaccgcccctccctgcaagggaggggaaggagcaggcaggcacacccttcctccct

SEQ ID NO: 604454 - DNA, 120 bp, Artificial Sequence
  ENSG00000175164_36 (sequence is synthesized)
ccacatttcactggagttgacctgtgtcctactgtggttgcacctggaccagcccagagggactggagtgactcttcccgcaggtagggcacagccagcctgggcacagggcctcactgc

SEQ ID NO: 604455 - DNA, 120 bp, Artificial Sequence
  ENSG00000175164_37 (sequence is synthesized)
aatccctgcgccccgcctccctgggggatttccaggggttgtcctgctgcttggtgagctgggggtgtgggggaccacagatgaggcaggcgcctaaattgcttgggcggagtccggctg

SEQ ID NO: 604456 - DNA, 120 bp, Artificial Sequence
  ENSG00000175164_38 (sequence is synthesized)
ctctctccctccaggccctttcctgtgtcctcgggcccctcgggtccctgcaccaggccagcagcaatcgggtgtcagaggttcaagtccaggctgactcctgggacgcaccgactttgc

SEQ ID NO: 604457 - DNA, 120 bp, Artificial Sequence
  ENSG00000175164_39 (sequence is synthesized)
ccaggagggctggggagagggcagccccaaagtgtcatctttgattattctttgtccccaaagccagccttgggcatgtgcccagcacagggagagctgctgcctctgtgggcttgagtc

SEQ ID NO: 604458 - DNA, 120 bp, Artificial Sequence
  ENSG00000175164_40 (sequence is synthesized)
atttttgcttccttgcccctctctgctctgtttggtttaaaaaacaaaaaccaacacccatgggtgaggcgaggcgaggcgaggcttgccttgatccacccgcttcctcccctgcagcct

SEQ ID NO: 604459 - DNA, 120 bp, Artificial Sequence
  ENSG00000175164_41 (sequence is synthesized)
cgggccccatcctcccgcgtggccgcactaggggtgctgggggcggagtggggaccagacctgagtgggttctgggttcagcttcgcagcaggagcagctggggcatcatcagttgggca

SEQ ID NO: 604460 - DNA, 120 bp, Artificial Sequence
  ENSG00000175164_42 (sequence is synthesized)
ggtgacccaggatctgagcaggaatcttccaggtggaggtggggccgcccctctgcttgccacagctgccttctgctctgggggcagcactggctgagaatccagtgaagtaaggccttt

SEQ ID NO: 604461 - DNA, 120 bp, Artificial Sequence
  ENSG00000175164_43 (sequence is synthesized)
tccagtgaagtaaggcctttgaaatggttttgattgtaaaagtaatgtttatgtttagccattcctttttttattttttattttttgagacgggtctccctctgtcacccaggctggagt

SEQ ID NO: 604462 - DNA, 120 bp, Artificial Sequence
  ENSG00000175164_44 (sequence is synthesized)
atgttggccaggctggtctcaaactcatatcctcaagtgatccaccctcctcgtcctcccaaagtgctgggattttgccatgagccaccacgctcagccatgtttagccatttttaaaag

SEQ ID NO: 604463 - DNA, 120 bp, Artificial Sequence
  ENSG00000175164_45 (sequence is synthesized)
tttaaaaggtgtgaacagataattaagtctattagcaacattagaaaatttaagttaaaatttaaatgactctagcaagaattagcctttaggtgccctgggtccccctcctcaccgccc

SEQ ID NO: 604464 - DNA, 120 bp, Artificial Sequence
  ENSG00000175164_46 (sequence is synthesized)
cccaccccgccgccttctgagaagcgttttgtaatttttcttatttataaaatgggtttgattcaaaactgacttttcctcttcacagtctcacaggtccttccccaggtccaagaggct

SEQ ID NO: 604465 - DNA, 120 bp, Artificial Sequence
  ENSG00000175164_47 (sequence is synthesized)
aataaaaaaattttgaatctacctataacctggaacctccccgctccaccttcgagttgtcctacctttctggacagaagcaatgtggatcttgcatgtatttgattgatgtctcatgtc

SEQ ID NO: 604466 - DNA, 120 bp, Artificial Sequence
  ENSG00000175164_48 (sequence is synthesized)
atgtatacaattaggctgtgcccagatcaccctgggcacatgttctcaggccctcctgaggtctctgtctcgggccattggtcactcagattcggctcagaataaatctcttcaaatatt

SEQ ID NO: 604467 - DNA, 120 bp, Artificial Sequence
  ENSG00000175166_0 (sequence is synthesized)
gcagcgggccggcagtggcggcggagatggaggagggaggccgggacaaggcgccggtgcagccccagcagtctccagcggcggcccccggcggcacggacgagaagccgagcggcaagg

SEQ ID NO: 604468 - DNA, 120 bp, Artificial Sequence
  ENSG00000175166_1 (sequence is synthesized)
agcggcgggatgccggggacaaggacaaagaacaggagctgtctgaagaggataaacagcttcaagatgaactggagatgctcgtggaacgactaggggagaaggatacatccctgtatc

SEQ ID NO: 604469 - DNA, 120 bp, Artificial Sequence
  ENSG00000175166_2 (sequence is synthesized)
gaccagcgctggaggaattgcgaaggcagattcgttcttctacaacttccatgacttcagtgcccaagcctctcaaatttctgcgtccacactatggcaaactgaaggaaatctatgaga

SEQ ID NO: 604470 - DNA, 120 bp, Artificial Sequence
  ENSG00000175166_3 (sequence is synthesized)
acatggcccctggggagaataagcgttttgctgctgacatcatctccgttttggccatgaccatgagtggggagcgtgagtgcctcaagtatcggctagtgggctcccaggaggaattgg

SEQ ID NO: 604471 - DNA, 120 bp, Artificial Sequence
  ENSG00000175166_4 (sequence is synthesized)
catcatggggtcatgagtatgtcaggcatctggcaggagaagtggctaaggagtggcaggagctggatgacgcagagaaggtccagcgggagcctctgctcactctggtgaaggaaatcg

SEQ ID NO: 604472 - DNA, 120 bp, Artificial Sequence
  ENSG00000175166_5 (sequence is synthesized)
tcccctataacatggcccacaatgcagagcatgaggcttgcgacctgcttatggaaattgagcaggtggacatgctggagaaggacattgatgaaaatgcatatgcaaaggtctgccttt

SEQ ID NO: 604473 - DNA, 120 bp, Artificial Sequence
  ENSG00000175166_6 (sequence is synthesized)
atctcaccagttgtgtgaattacgtgcctgagcctgagaactcagccctactgcgttgtgccctgggtgtgttccgaaagtttagccgcttccctgaagctctgagattggcattgatgc

SEQ ID NO: 604474 - DNA, 120 bp, Artificial Sequence
  ENSG00000175166_7 (sequence is synthesized)
tcaatgacatggagttggtagaagacatcttcacctcctgcaaggatgtggtagtacagaaacagatggcattcatgctaggccggcatggggtgttcctggagctgagtgaagatgtcg

SEQ ID NO: 604475 - DNA, 120 bp, Artificial Sequence
  ENSG00000175166_8 (sequence is synthesized)
aggagtatgaggacctgacagagatcatgtccaatgtacagctcaacagcaacttcttggccttagctcgggagctggacatcatggagcccaaggtgcctgatgacatctacaaaaccc

SEQ ID NO: 604476 - DNA, 120 bp, Artificial Sequence
  ENSG00000175166_9 (sequence is synthesized)
acctagagaacaacaggtttgggggcagtggctctcaggtggactctgcccgcatgaacctggcctcctcttttgtgaatggctttgtgaatgcagcttttggccaagacaagctgctaa

SEQ ID NO: 604477 - DNA, 120 bp, Artificial Sequence
  ENSG00000175166_10 (sequence is synthesized)
cagatgatggcaacaaatggctttacaagaacaaggaccacggaatgttgagtgcagctgcatctcttgggatgattctgctgtgggatgtggatggtggcctcacccagattgacaagt

SEQ ID NO: 604478 - DNA, 120 bp, Artificial Sequence
  ENSG00000175166_11 (sequence is synthesized)
acctgtactcctctgaggactacattaagtcaggagctcttcttgcctgtggcatagtgaactctggggtccggaatgagtgtgaccctgctctggcactgctctcagactatgttctcc

SEQ ID NO: 604479 - DNA, 120 bp, Artificial Sequence
  ENSG00000175166_12 (sequence is synthesized)
ttgggctaggcttggcttatgctggctcaaatcgtgaagatgtcctaacactgctgctgcctgtgatgggagattcaaagtccagcatggaggtggcaggtgtcacagctttagcctgtg

SEQ ID NO: 604480 - DNA, 120 bp, Artificial Sequence
  ENSG00000175166_13 (sequence is synthesized)
gaatgatagcagtagggtcctgcaatggagatgtaacttccactatccttcagaccatcatggagaagtcagagactgagctcaaggatacttatgctcgttggcttcctcttggactgg

SEQ ID NO: 604481 - DNA, 120 bp, Artificial Sequence
  ENSG00000175166_14 (sequence is synthesized)
gtctcaaccacctggggaagggtgaggccatcgaggcaatcctggctgcactggaggttgtgtcagagccattccgcagttttgccaacacactggtggatgtgtgtgcatatgcaggct

SEQ ID NO: 604482 - DNA, 120 bp, Artificial Sequence
  ENSG00000175166_15 (sequence is synthesized)
ctgggaatgtgctgaaggtgcagcagctgctccacatttgtagcgaacactttgactccaaagagaaggaggaagacaaagacaagaaggaaaagaaagacaaggacaagaaggaagccc

SEQ ID NO: 604483 - DNA, 120 bp, Artificial Sequence
  ENSG00000175166_16 (sequence is synthesized)
ctgctgacatgggagcacatcagggagtggctgttctggggattgcccttattgctatgggggaggagattggtgcagagatggcattacgaacctttggccacttgctgagatatgggg

SEQ ID NO: 604484 - DNA, 120 bp, Artificial Sequence
  ENSG00000175166_17 (sequence is synthesized)
agcctacactccggagggctgtacctttagcactggccctcatctctgtttcaaatccacgactcaacatcctggataccctaagcaaattctctcatgatgctgatccagaagtttcct

SEQ ID NO: 604485 - DNA, 120 bp, Artificial Sequence
  ENSG00000175166_18 (sequence is synthesized)
ataactccatttttgccatgggcatggtgggcagtggtaccaataatgcccgtctggctgcaatgctgcgccagttagctcaatatcatgccaaggacccaaacaacctcttcatggtgc

SEQ ID NO: 604486 - DNA, 120 bp, Artificial Sequence
  ENSG00000175166_19 (sequence is synthesized)
gcttggcacagggcctgacacatttagggaagggcacccttaccctctgcccctaccacagcgaccggcagcttatgagccaggtggccgtggctggactgctcactgtgcttgtctctt

SEQ ID NO: 604487 - DNA, 120 bp, Artificial Sequence
  ENSG00000175166_20 (sequence is synthesized)
tcctggatgttcgaaacattattctaggcaaatcacactatgtattgtatgggctggtggctgccatgcagccccgaatgctggttacgtttgatgaggagctgcggccattgccagtgt

SEQ ID NO: 604488 - DNA, 120 bp, Artificial Sequence
  ENSG00000175166_21 (sequence is synthesized)
ctgtccgtgtgggccaggcagtggatgtggtgggccaggctggcaagccgaagactatcacagggttccagacgcatacaaccccagtgttgttggcccacggggaacgggcagaattgg

SEQ ID NO: 604489 - DNA, 120 bp, Artificial Sequence
  ENSG00000175166_22 (sequence is synthesized)
ccactgaggagtttcttcctgttacccccattctggaaggttttgttatccttcggaagaaccccaattatgatctctaagtgaccaccaggggctctgaactgcagctgatgttatcag

SEQ ID NO: 604490 - DNA, 120 bp, Artificial Sequence
  ENSG00000175166_23 (sequence is synthesized)
caggccatgcatcctgctgccaagggtggacacggctgcagacttctgggggaattgtcgcctcctgctcttttgttactgagtgagataaggttgttcaataaagacttttatccccaa

SEQ ID NO: 604491 - DNA, 120 bp, Artificial Sequence
  ENSG00000175166_24 (sequence is synthesized)
tctagtgcctagcagtgcctctctttcactgatgaggtctgcccagtttttaactctagttaataagggtgctgcagtgaggcccatgttgcatcctttgcggtgaggaagatagagtat

SEQ ID NO: 604492 - DNA, 120 bp, Artificial Sequence
  ENSG00000175166_25 (sequence is synthesized)
atctacagaagagctgaaaggaaggtcagcttctcagaagacactgtttctgtcatgtgtattggactttggggtttcattagcatggtctacttttaaccgttttgctgctgacatcat

SEQ ID NO: 604493 - DNA, 120 bp, Artificial Sequence
  ENSG00000175166_26 (sequence is synthesized)
tgatgaaaatgcatatgcaaaggtctgcctttatctcaccaggtgagtgaacatggtagggaagggtggcaggcatgccctcctcagcacctctctctcaattgcgcctcctctattttc

SEQ ID NO: 604494 - DNA, 120 bp, Artificial Sequence
  ENSG00000175166_27 (sequence is synthesized)
ccagagcatttgctcaagcatagcatcacgctgtagttaatcttttgatgtgtgtgagtttcttgaggacagagactttgtgtcttcttagtagttctaacatctagcacagtgcctggt

SEQ ID NO: 604495 - DNA, 120 bp, Artificial Sequence
  ENSG00000175166_28 (sequence is synthesized)
cggggacaaggacaaagaacaggagctggtgaggcgcgaccccgagagtcggcgaaggaggctgcggggctgagtcacggcggctccgcaggcctcaggcccgacacccaactaccccac

SEQ ID NO: 604496 - DNA, 120 bp, Artificial Sequence
  ENSG00000175166_29 (sequence is synthesized)
cgcgccagggagagggcggttggggcgaccctcgggactcccggcaccttgcctctctgctcctcattctccgttccgcgctgtcacctccgccgtccccaccaaccctcaccaccgccg

SEQ ID NO: 604497 - DNA, 120 bp, Artificial Sequence
  ENSG00000175166_30 (sequence is synthesized)
tcccattcccactcggtttccttgtccacctggcccctcctaaggaggcaggcttattcttcacctgccccgggtaagtgggaggaggacgtctttgggattccttctcttcatgagctg

SEQ ID NO: 604498 - DNA, 120 bp, Artificial Sequence
  ENSG00000175166_31 (sequence is synthesized)
gttccatctttgggtaaggttcctcgcttgtctttctggtagtgctcagcctgtacactctggagaacaggaactgggcccttttcacccatattgccaagggctaccactgtgcctatt

SEQ ID NO: 604499 - DNA, 120 bp, Artificial Sequence
  ENSG00000175166_32 (sequence is synthesized)
gggtatctggctcttggtgaatgtttgttgaaatggtgaatgaatgaccgattctccttttgttcttttcttgctgcatcgttgggtatgtgttggggaccgcctttccatggcttttgc

SEQ ID NO: 604500 - DNA, 120 bp, Artificial Sequence
  ENSG00000175166_33 (sequence is synthesized)
tctcaaactggagaatgtacatatacttgctttgctgaaactggcgtgggcggtggcttgtcgctacttttccatctctcttttcaattttcttaccctacaggcagtggatgtggtggg

SEQ ID NO: 604501 - DNA, 120 bp, Artificial Sequence
  ENSG00000175166_34 (sequence is synthesized)
cttgtggagtacaatctgtcttggagcatcagtgtattgaatttcccagacgctggattccttgacccacagagaagtgcttcccctgaagctgtgctctcttaatcgtctgggactatc

SEQ ID NO: 604502 - DNA, 120 bp, Artificial Sequence
  ENSG00000175166_35 (sequence is synthesized)
attgggggaagatttgaagccccttttttcacttctgtaatgcttaacatttccaggtaccaataatgcccgtctggctgcaatgctgcgccagttagctcaatatcatgccaaggaccc

SEQ ID NO: 604503 - DNA, 120 bp, Artificial Sequence
  ENSG00000175166_36 (sequence is synthesized)
cctgatagacctaagccgtgatctatttgagcagagttcatcacagtcaaaatatctacagaagagctgaaaggaaggtcagcttctcagaagacactgtttctgtcatgtgtattggac

SEQ ID NO: 604504 - DNA, 120 bp, Artificial Sequence
  ENSG00000175175_0 (sequence is synthesized)
ctctccaggcaacctagtgctgatcgctcgtgccggtgcggccgttaaccgcccttgccggagccctaggctcaaaagcagccccttacccttcctgggcttcccccaacccctttcccg

SEQ ID NO: 604505 - DNA, 120 bp, Artificial Sequence
  ENSG00000175175_1 (sequence is synthesized)
gtctgccctggggcatgagcagcgatggccggctgcatccctgaggagaaaacttaccggcgcttcctggagctattcctgggcgagtttcgcggaccgtgcggcggcggcgagccggag

SEQ ID NO: 604506 - DNA, 120 bp, Artificial Sequence
  ENSG00000175175_2 (sequence is synthesized)
ccggaacccgaacccgaacccgaacccgaacccgagtccgagcccgagcccgaacctgaactggtagaagctgaggcggccgaggcttcggtagaggaacccggggaggaggcggccacg

SEQ ID NO: 604507 - DNA, 120 bp, Artificial Sequence
  ENSG00000175175_3 (sequence is synthesized)
gtagccgcgacggaggagggggaccaggagcaagacccggagcccgaggaggaggcggcggttgagggtgaggaggaggaggagggcgcggcgacggcggcggcagccccggggcactcg

SEQ ID NO: 604508 - DNA, 120 bp, Artificial Sequence
  ENSG00000175175_4 (sequence is synthesized)
gccgtgccgccgccgccgccccagctgccgcctttgcccccgctcccgcgaccgctgtcagagcgcatcacccgcgaggaggtggagggcgaaagcctggacctgtgcctgcagcagctc

SEQ ID NO: 604509 - DNA, 120 bp, Artificial Sequence
  ENSG00000175175_5 (sequence is synthesized)
tacaaatataattgcccttcctttttggctgctgctttagccagagccacatcagatgaagtccttcagagtgatctttctgcacattatatcccaaaggaaacggatggcacagaaggg

SEQ ID NO: 604510 - DNA, 120 bp, Artificial Sequence
  ENSG00000175175_6 (sequence is synthesized)
actgtggagattgagacagtgaaattggcccgttctgtcttcagcaaactacacgagatttgctgcagctgggtgaaagacttccccctccgcaggagaccccagctttattatgagaca

SEQ ID NO: 604511 - DNA, 120 bp, Artificial Sequence
  ENSG00000175175_7 (sequence is synthesized)
tcaatccatgccatcaaaaacatgcgcaggaaaatggaggacaaacatgtctgcattcctgactttaatatgctcttcaacctagaggaccaggaagaacaagcttactttgcagtgttt

SEQ ID NO: 604512 - DNA, 120 bp, Artificial Sequence
  ENSG00000175175_8 (sequence is synthesized)
gatggccatgggggagtagatgctgctatttatgcctccattcacctccacgttaacttagtccgccaggagatgttcccccatgatcctgctgaggccctgtgcagggccttccgggtc

SEQ ID NO: 604513 - DNA, 120 bp, Artificial Sequence
  ENSG00000175175_9 (sequence is synthesized)
actgatgagcggtttgtgcagaaagcagccagggagagcttaagatgtgggaccacaggagtggtgactttcatcagaggcaacatgctacatgtggcctgggtgggtgattcccaggtt

SEQ ID NO: 604514 - DNA, 120 bp, Artificial Sequence
  ENSG00000175175_10 (sequence is synthesized)
atgcttgtgagaaagggccaagctgttgaactaatgaagccacacaaaccagacagagaggatgaaaagcagagaattgaggcccttggaggttgcgtagtctggtttggtgcctggagg

SEQ ID NO: 604515 - DNA, 120 bp, Artificial Sequence
  ENSG00000175175_11 (sequence is synthesized)
gtgaatggaagtctgtcggtttccagagctattggagatgctgaacataagccatatatctgtggggatgcagattctgcctccactgttctggatgggaccgaagactacctcattctg

SEQ ID NO: 604516 - DNA, 120 bp, Artificial Sequence
  ENSG00000175175_12 (sequence is synthesized)
gcctgtgatggcttctatgacaccgtgaaccctgatgaggcagtgaaagttgtgtccgaccacctgaaagagaataatggagacagcagcatggttgcccacaaattagtggcatcagct

SEQ ID NO: 604517 - DNA, 120 bp, Artificial Sequence
  ENSG00000175175_13 (sequence is synthesized)
cgtgatgctgggtcaagtgataacatcacggttattgtggtattcctgagggacatgaacaaagctgtaaatgttagtgaggaatcagattggacagagaactcttttcaaggagggcaa

SEQ ID NO: 604518 - DNA, 120 bp, Artificial Sequence
  ENSG00000175175_14 (sequence is synthesized)
gaagatggtggggatgataaggagaatcatggagagtgcaaacgcccttggcctcagcaccagtgctcagcaccagccgacctaggctatgatgggcgtgtggattcattcactgataga

SEQ ID NO: 604519 - DNA, 120 bp, Artificial Sequence
  ENSG00000175175_15 (sequence is synthesized)
actagcctgagcccagggtcccaaatcaacgtgctggaagacccaggctacctagatctcacacaaatagaagcaagcaaacctcacagtgcccagtttttgctaccagttgagatgttt

SEQ ID NO: 604520 - DNA, 120 bp, Artificial Sequence
  ENSG00000175175_16 (sequence is synthesized)
ggtcctggtgcaccaaagaaagcaaatcttattaatgagttaatgatggagaaaaaatcagttcagtcatcattgcctgaatggagtggtgctggagagtttcccactgctttcaatttg

SEQ ID NO: 604521 - DNA, 120 bp, Artificial Sequence
  ENSG00000175175_17 (sequence is synthesized)
ggttcaacaggggagcagatatacagaatgcagagcttgtctcctgtctgttcagggttggaaaatgaacagttcaaatccccgggaaacagagtttctagattgtctcatttacgccac

SEQ ID NO: 604522 - DNA, 120 bp, Artificial Sequence
  ENSG00000175175_18 (sequence is synthesized)
cactactcaaagaagtggcacagattcaggtttaatccaaagttttattcatttctctctgctcaagagccttcccacaaaataggcactagcctgtcctcacttactggaagtgggaag

SEQ ID NO: 604523 - DNA, 120 bp, Artificial Sequence
  ENSG00000175175_19 (sequence is synthesized)
agaaataggataagaagttctctgccatggaggcaaaatagttggaaagggtacagtgaaaacatgaggaagctcagaaagactcatgatattccatgcccagatcttccttggagctat

SEQ ID NO: 604524 - DNA, 120 bp, Artificial Sequence
  ENSG00000175175_20 (sequence is synthesized)
aaaatagaataatttttctttcaagtaggttagctagctctcccccaataaaaataccactatcagagtagaaacaaggtagacatttctaaaacatatgtgcttcattatgaatccatg

SEQ ID NO: 604525 - DNA, 120 bp, Artificial Sequence
  ENSG00000175175_21 (sequence is synthesized)
gatggctcaattcttaaatgtaaatagatctctaggaaactcaaagtacagtgttttcaatctaaaaagaagtattggcagtttcacttgcaaaattacacagctggtccctgtgatgtg

SEQ ID NO: 604526 - DNA, 120 bp, Artificial Sequence
  ENSG00000175175_22 (sequence is synthesized)
tctcgacaccaatacacaacccccttcccaccatccttcatgtcactagatacacaacccccttcccaccatcccttcagtcactagtggaagctttcaagttagttatttcagtcagga

SEQ ID NO: 604527 - DNA, 120 bp, Artificial Sequence
  ENSG00000175175_23 (sequence is synthesized)
tatacagtgttgaaatctcaatgcagttgaaatctggtctgatgtgcctaatttatctgtggaaaatttaatgctgaattacatttggttgggaaatgtccctcaaaatcctgggcacta

SEQ ID NO: 604528 - DNA, 120 bp, Artificial Sequence
  ENSG00000175175_24 (sequence is synthesized)
tgaaggaaccccctgccccctcacctttttgggtaggtaaaagactaaaagccatatggattttaactgataacaatgaaagtggtaaatcagtgtaaaagtgtcatattctcagacttg

SEQ ID NO: 604529 - DNA, 120 bp, Artificial Sequence
  ENSG00000175175_25 (sequence is synthesized)
tgaggcggtttatagtcagaaagatttacggatttttttcctgtaacataaaagattgtgaactttttttaattaaaaaatatttcctagggctgtagttatttgggagtttcataacct

SEQ ID NO: 604530 - DNA, 120 bp, Artificial Sequence
  ENSG00000175175_26 (sequence is synthesized)
gttatggtgcttttggtggaaatttttattatttagcattttaggagaccgctgtcaactggttttaatctatgatgctaatgtgttttccactgtaccctcatctcaggaataaaactg

SEQ ID NO: 604531 - DNA, 120 bp, Artificial Sequence
  ENSG00000175175_27 (sequence is synthesized)
attttgtctttttttagttcagacagcaaaggcatgtactactataaaatacaaagtgattttagagaatgaaaaatgctacttttatcttctctaaaattatttcccccaaggtagtga

SEQ ID NO: 604532 - DNA, 120 bp, Artificial Sequence
  ENSG00000175175_28 (sequence is synthesized)
agtaattggaatgaaggaggctgaaagtattgtctaaagtgagcccagaggccactgagaatgcagattactgacagccaggtctgtttagttgtaattggaagacacatgagtgtcctg

SEQ ID NO: 604533 - DNA, 120 bp, Artificial Sequence
  ENSG00000175175_29 (sequence is synthesized)
cttacatgtagcttcagactgcagagacaggacgtgtgcttttcatttcaatatttagttatatttgatattttgaaactgtctgctttttgctatttctgcagtttcaagttagttaga

SEQ ID NO: 604534 - DNA, 120 bp, Artificial Sequence
  ENSG00000175175_30 (sequence is synthesized)
agcatgttgtcaactaaagacaacaaactatcagattcattcattcagtgaagcagcctctgattctctaagagtcacgaatgtcttagtgttaccctcccctagtcaacagcagaccag

SEQ ID NO: 604535 - DNA, 120 bp, Artificial Sequence
  ENSG00000175175_31 (sequence is synthesized)
cctggccaatgcctatgggtggcccctctggagtgctcactaacaagggtgagtgctctcgctaagaagtgtcccccgcctaatcatgtgtttataggatagtacacgttccccaggccc

SEQ ID NO: 604536 - DNA, 120 bp, Artificial Sequence
  ENSG00000175175_32 (sequence is synthesized)
ataacagaggactaaaatctctgaattttaaagacacagatgactggcatattttggataccagtatagctatatcaaatagacaaaaacagcttcactttagcaatgatcagattgtta

SEQ ID NO: 604537 - DNA, 120 bp, Artificial Sequence
  ENSG00000175175_33 (sequence is synthesized)
atctacagattttattttttaaaatttggatgtaagtagagactttcagtatttgttttctcttgattttgaagtcatttcttcttctcacgtctgtgacaaatggttgaaaaggagtca

SEQ ID NO: 604538 - DNA, 120 bp, Artificial Sequence
  ENSG00000175175_34 (sequence is synthesized)
acatggccccaactatagtgccggaaccttttcatcattctgaggctttgccccacacatggtcctcactcatatctgtcaccttctgaagcctagatcttgttaacccatcaggtgcag

SEQ ID NO: 604539 - DNA, 120 bp, Artificial Sequence
  ENSG00000175175_35 (sequence is synthesized)
tgtcagtttcaaatcaaattatctaagaaaacaagaaaacaaaggcagcagactattggtacacattatagtccaaagtgcttagcgaagtaaaaaaaaaagctttttaaaatttctatt

SEQ ID NO: 604540 - DNA, 120 bp, Artificial Sequence
  ENSG00000175175_36 (sequence is synthesized)
gttgtctattggtaatgtttttgatcagaataaagagggtaaagggaaaaagttactacacatgctaggctttctcagtggggaaaaaaatggctggatagaactgggacaaacacagac

SEQ ID NO: 604541 - DNA, 120 bp, Artificial Sequence
  ENSG00000175175_37 (sequence is synthesized)
ccatctttaggggtctggattttgtaggtccgactacacagcagtgttaactcatttctcatgccattagctctctacaaaataaagcaaagtagttctagtgtggtcgttataaaccaa

SEQ ID NO: 604542 - DNA, 120 bp, Artificial Sequence
  ENSG00000175175_38 (sequence is synthesized)
tattgtgaaaaatagcaactattcatttgttcacaacatgcgtatttatagagtagttaggtaccatttgtaaggtaaatcctttaaaattctataatacatactaaaatagtggttatt

SEQ ID NO: 604543 - DNA, 120 bp, Artificial Sequence
  ENSG00000175175_39 (sequence is synthesized)
ggtctgatatatgctgctcttggttctataaactagataaaagcagtgctttgtgaaatgcagtgttctctcttaacgccactggtgataggaagtagttcccttcagttcaaatcctgt

SEQ ID NO: 604544 - DNA, 120 bp, Artificial Sequence
  ENSG00000175175_40 (sequence is synthesized)
gcccttatttgctgcttgctgacgtaagcaataagtaaccctctaactaatggtatctacatatttctgtaacttgtatttaatgatggtgtacctggtgattgtaaaaatattagacag

SEQ ID NO: 604545 - DNA, 120 bp, Artificial Sequence
  ENSG00000175175_41 (sequence is synthesized)
atataaaagtatctatataatatctataaactgttaatgctgaggtatagtctgtgaattatgtgttttgtatttttattcattgtgtaatttagtggtggtgaaagttctacactcaat

SEQ ID NO: 604546 - DNA, 120 bp, Artificial Sequence
  ENSG00000175175_42 (sequence is synthesized)
ccttaaagagtggcagtatccctttttcaatttaacatggtctgcatcaatctgtttgcctgctaaacaagttagaataggaaatagtaaaataaatccaaacaagagtgtaatattggt

SEQ ID NO: 604547 - DNA, 120 bp, Artificial Sequence
  ENSG00000175175_43 (sequence is synthesized)
tagggaaacaaacttcaggtcaccaactgaagtcattacaaactccttgtacattcactgtgagtttcaaagggagtcagtccctaatttacaggtttcctttgttcactttctagatgt

SEQ ID NO: 604548 - DNA, 120 bp, Artificial Sequence
  ENSG00000175175_44 (sequence is synthesized)
gtacttttgagggacatgaggttaggcaacattacagcaacacacactggggctattaatcccatttaggtctgtactaaagaggatgggtagaaacacatatgtatataccttttcttt

SEQ ID NO: 604549 - DNA, 120 bp, Artificial Sequence
  ENSG00000175175_45 (sequence is synthesized)
acctagaagtgccatccattgtccttgaattattatgattaaagttactgttgcatttaggaggctccttgaaagtaacaccttttccaaggacaatggcaacaatgtcaatgtcaacac

SEQ ID NO: 604550 - DNA, 120 bp, Artificial Sequence
  ENSG00000175175_46 (sequence is synthesized)
tgagtctaattttgaccacatttatagtggtatagtgtcaatactgcattttcatgacaaccacactccactgttgaaacactgtgccagtgagaagtgcaacatccagtgggcagatga

SEQ ID NO: 604551 - DNA, 120 bp, Artificial Sequence
  ENSG00000175175_47 (sequence is synthesized)
aaatgatgcatggccaagttcagtgtttacagataaaactgctgtggttcaagtgcttccttccccatcaaatccttgataaggctttgtgggaaaatgatctaaattattgttttaatt

SEQ ID NO: 604552 - DNA, 120 bp, Artificial Sequence
  ENSG00000175175_48 (sequence is synthesized)
tttaaacctaatttattcactcagtgaacattcttacctaagcaaggctataaaagggaatactacagttttgtccacactttaatttgagaccatttttctttgaatcgtaagttagca

SEQ ID NO: 604553 - DNA, 120 bp, Artificial Sequence
  ENSG00000175175_49 (sequence is synthesized)
aaagaaatttttttcacctttgaaaatcacgtgatgttaaaggacaaatgcccactcttctattctgatctgcaaatagcttaaatgtctcttgcaaaacaaagtaagataccaccagta

SEQ ID NO: 604554 - DNA, 120 bp, Artificial Sequence
  ENSG00000175175_50 (sequence is synthesized)
ttacaacacaatgattttccagacaaatggtatggtgttgaaaaataactgttacttcttaaagcagcattttatcttctattttgaagactatttattgtaataattagaaaacatgaa

SEQ ID NO: 604555 - DNA, 120 bp, Artificial Sequence
  ENSG00000175175_51 (sequence is synthesized)
atagggaactccagactgacacagcagttgtttttgaaaaggaaataaactttgatgaattagataatccagatacatcattgtaaactcttactctaggtgctctttggtgagagacag

SEQ ID NO: 604556 - DNA, 120 bp, Artificial Sequence
  ENSG00000175175_52 (sequence is synthesized)
gctttgttctcttgttcataacatttctctgcaaagaattctctatggagtgaagcgaatgaagtgaataatttcttaccaaataaatttatcaatttacaaatctgctctacatctcac

SEQ ID NO: 604557 - DNA, 120 bp, Artificial Sequence
  ENSG00000175175_53 (sequence is synthesized)
ttttgagttcagttgtagtcatgagtgatccttcatattttattaaaagtgttcattcaggtaaggtgtatgttgaaattttgccaattatcttaataaaacctggcaatttaaaaacca

SEQ ID NO: 604558 - DNA, 120 bp, Artificial Sequence
  ENSG00000175182_0 (sequence is synthesized)
gcttttggttctctgcatcaacacagccagcatgcctatgatttctgtgctgggcaaaatgtttctgtggcagcgtgaagggcctggaggacgatggacttgtcagacaagtcgcagagt

SEQ ID NO: 604559 - DNA, 120 bp, Artificial Sequence
  ENSG00000175182_1 (sequence is synthesized)
gtcctcggaccccgcttgggctgtggagtggatcgaacttcctcggggtctctctctatcctctttgggatctgctcgaaccctccgaggctggagcaggtcctcccgcccttcctcggt

SEQ ID NO: 604560 - DNA, 120 bp, Artificial Sequence
  ENSG00000175182_2 (sequence is synthesized)
ggacagtcaggacttgccagaggtgaatgttggagacacagtcgcgatgctgcccaagtcccggcgagccctaactatccaggagatcgctgcgctggccaggtcctccctgcatggtat

SEQ ID NO: 604561 - DNA, 120 bp, Artificial Sequence
  ENSG00000175182_3 (sequence is synthesized)
ttcccaggtggtgaaggaccacgtgaccaagcctaccgccatggcccagggccgagtggctcacctcattgagtggaagggctggagcaagccgagtgactcacctgctgccctggaatc

SEQ ID NO: 604562 - DNA, 120 bp, Artificial Sequence
  ENSG00000175182_4 (sequence is synthesized)
agccttttcctcctattcagacctcagcgagggcgaacaagaggctcgctttgcagcaggagtggctgagcagtttgccatcgcggaagccaagctccgagcatggtcttcggtggatgg

SEQ ID NO: 604563 - DNA, 120 bp, Artificial Sequence
  ENSG00000175182_5 (sequence is synthesized)
cgaggactccactgatgactcctatgatgaggactttgctgggggaatggacacagacatggctgggcagctgcccctggggccgcacctccaggacctgttcaccggccaccggttctc

SEQ ID NO: 604564 - DNA, 120 bp, Artificial Sequence
  ENSG00000175182_6 (sequence is synthesized)
ccggcctgtgcgccagggctccgtggagcctgagagcgactgctcacagaccgtgtccccagacaccctgtgctctagtctgtgcagcctggaggatgggttgttgggctccccggcccg

SEQ ID NO: 604565 - DNA, 120 bp, Artificial Sequence
  ENSG00000175182_7 (sequence is synthesized)
gctggcctcccagctgctgggcgatgagctgcttctcgccaaactgccccccagccgggaaagtgccttccgcagcctgggcccactggaggcccaggactcactctacaactcgcccct

SEQ ID NO: 604566 - DNA, 120 bp, Artificial Sequence
  ENSG00000175182_8 (sequence is synthesized)
cacagagtcctgcctttcccccgcggaggaggagccagccccctgcaaggactgccagccactctgcccaccactaacgggcagctgggaacggcagcggcaagcctctgacctggcctc

SEQ ID NO: 604567 - DNA, 120 bp, Artificial Sequence
  ENSG00000175182_9 (sequence is synthesized)
ttctggggtggtgtccttagatgaggatgaggcagagccagaggaacagtgacccacatcatgcctggcagtggcatgcatcccccggctgctgccaggggcagagcctctgtgcccaag

SEQ ID NO: 604568 - DNA, 120 bp, Artificial Sequence
  ENSG00000175182_10 (sequence is synthesized)
gagggctcctgggagcgctcgcttctccgttgtgtgttttgcatgaaagtgtttggagaggaggcaggggctgggctgggggcgcatgtcctgcccccactcccggggcttgccgggggt

SEQ ID NO: 604569 - DNA, 120 bp, Artificial Sequence
  ENSG00000175182_11 (sequence is synthesized)
tgcccggggcctctggggcatggctacagctgtggcagacagtgatgttcatgttcttaaaatgccacacacacatttcctcctcggataatgtgaaccactaagggggttgtgactggg

SEQ ID NO: 604570 - DNA, 120 bp, Artificial Sequence
  ENSG00000175182_12 (sequence is synthesized)
ctgtgtgagggtggggtgggagggggcccagcaaccccccaccctccccatgcctctctcttctctgcttttcttctcacttccgagtccatgtgcagtgcttgatagaatcacccccac

SEQ ID NO: 604571 - DNA, 120 bp, Artificial Sequence
  ENSG00000175182_13 (sequence is synthesized)
ctggaggggctggctcctgccctcccggagcctatgggttgagccgtccctcaagggcccctgcccagctgggctcgtgctgtgcttcattcacctctccatcgtctctaaatcttcctc

SEQ ID NO: 604572 - DNA, 120 bp, Artificial Sequence
  ENSG00000175182_14 (sequence is synthesized)
ttttttcctaaagacagaaggtttttggtctgttttttcagtcggatcttctcttctctgggaggctttggaatgatgaaagcatgtaccctccacccttttcctggccccctaatgggg

SEQ ID NO: 604573 - DNA, 120 bp, Artificial Sequence
  ENSG00000175182_15 (sequence is synthesized)
cctgggccctttcccaacccctcctaggatgtgcgggcagtgtgctggcgcctcacagccagccgggctgcccattcacgcagagctctctgagcgggaggtggaagaaaggatggctct

SEQ ID NO: 604574 - DNA, 120 bp, Artificial Sequence
  ENSG00000175182_16 (sequence is synthesized)
ggttgccacagagctgggacttcatgttcttctagagagggccacaagagggccacaggggtggccgggagttgtcagctgatgcctgctgagaggcaggaattgtgccagtgagtgaca

SEQ ID NO: 604575 - DNA, 120 bp, Artificial Sequence
  ENSG00000175182_17 (sequence is synthesized)
gtcatgagggagtgtctcttcttggggaggaaagaaggtagagcctttctgtctgaatgaaaggccaaggctacagtacagggccccaccccagccagggtgttaatgcccacgtagtgg

SEQ ID NO: 604576 - DNA, 120 bp, Artificial Sequence
  ENSG00000175182_18 (sequence is synthesized)
aggcctctggcagatcctgcattccaaggtcactggactgtacgtttttatggttgtgggaagggtgggtggctttagaattaagggccttgtaggctttggcaggtaagagggcccaag

SEQ ID NO: 604577 - DNA, 120 bp, Artificial Sequence
  ENSG00000175182_19 (sequence is synthesized)
gtaagaacgagagccaacgggcacaagcattctatatataagtggctcattaggtgtttattttgttctatttaagaatttgttttattaaattaatataaaaatctttgtaaatctcta

SEQ ID NO: 604578 - DNA, 120 bp, Artificial Sequence
  ENSG00000175182_20 (sequence is synthesized)
gctgggattacaggcatgagccactgacgcctggccagcctatgcatttttaagaaattattctgtattaggtgctgtgctaaacattgggcactacagtgaccaaaacagactgaattc

SEQ ID NO: 604579 - DNA, 120 bp, Artificial Sequence
  ENSG00000175182_21 (sequence is synthesized)
cccaagagccaaagaccagtgagggagaccaacaagaaacaggaaatgcaaaagagaccattattactcactatgactaagggccacaaatggggtacgttgatggagagtgatttgtta

SEQ ID NO: 604580 - DNA, 120 bp, Artificial Sequence
  ENSG00000175182_22 (sequence is synthesized)
agagactacagagggaggacagactaccaagaggggggccaggaaagctcctctgacgaggtggtatttcagcccaaactggaagaatgagaaagagctagccagccatcagaatagtcc

SEQ ID NO: 604581 - DNA, 120 bp, Artificial Sequence
  ENSG00000175182_23 (sequence is synthesized)
agaagagatggggagcactacactcactacactttggcctgagaaaatagcatgggattggaggaggctgggggaacaccacttctgccgacctgggcaggaggcattgagggcttgaga

SEQ ID NO: 604582 - DNA, 120 bp, Artificial Sequence
  ENSG00000175182_24 (sequence is synthesized)
aagggcaatggcagtagcagtagaaaggacagggtaggagcagggactttgcaggtggaatcattaggtcttatcaacagatatgggcaagcaaagccaggggagaattgatggtaatgc

SEQ ID NO: 604583 - DNA, 120 bp, Artificial Sequence
  ENSG00000175182_25 (sequence is synthesized)
tgaggtttggagccaggctagatgggacagtggtgggtgatgcaaaggaaagaggtcaggaagcagggccagacgtggggagaaggtgtgggggtttggtttccatcttgccgagtctgc

SEQ ID NO: 604584 - DNA, 120 bp, Artificial Sequence
  ENSG00000175182_26 (sequence is synthesized)
cggaatgtggatgggaagaccaagaggaggagcaaggggcagaggggaagggaatcttaaagaagtcctggatgccacactcttcttccttcctcctcttccctctcctcagaggtctca

SEQ ID NO: 604585 - DNA, 120 bp, Artificial Sequence
  ENSG00000175182_27 (sequence is synthesized)
ctcgtggttcttcatttcctgccctgcctccatctcctctgggtgctgggaaagtggaggattagctgaagttttgcttctcggggcctgtctgaatctccattgctttctgggaggaca

SEQ ID NO: 604586 - DNA, 120 bp, Artificial Sequence
  ENSG00000175182_28 (sequence is synthesized)
taattcacctgtcctagcttcttatcatcttacatttccctgtagccactgggacatatgtggtgttccttcctagctcctgtctcctcctcatgcctttgctgggtatgggcatgttag

SEQ ID NO: 604587 - DNA, 120 bp, Artificial Sequence
  ENSG00000175182_29 (sequence is synthesized)
ggggaaggtcattgctgtcagaggggcactgactttctaatggtgttacccaaggtgaatgttggagacacagtcgcgatgctgcccaagtcccggcgagccctaactatccaggagatc

SEQ ID NO: 604588 - DNA, 120 bp, Artificial Sequence
  ENSG00000175182_30 (sequence is synthesized)
gctgcgctggccaggtcctccctgcatggtatgcagcccctcccatgtttctggccactttgtcctttctcctcccgtttgcacatccctttggaactgtttcctgtgagtacatgctgg

SEQ ID NO: 604589 - DNA, 120 bp, Artificial Sequence
  ENSG00000175182_31 (sequence is synthesized)
ggtctcccctttcttcccttgctcaggtgaatctcagccccttctcccacccaaaggttcacatggatcctaactactgccacccttccacctccctgcacctgtgctccctggcctggt

SEQ ID NO: 604590 - DNA, 120 bp, Artificial Sequence
  ENSG00000175182_32 (sequence is synthesized)
ggttccctctccggggagcggcggcggacgcgcggctcccacccctcccctctcacgggctctcccctccccagtgtggccgcgaccctaccctctgcaaggcgatggcccgcgccccga

SEQ ID NO: 604591 - DNA, 120 bp, Artificial Sequence
  ENSG00000175182_33 (sequence is synthesized)
gcgcaggctagcgtgcctgggtgcccggccatgggctgtatcggctctcggagcccggcgggtcaggcatttctggggaccaacagctggccgaggctcagggatagagacggctgctcc

SEQ ID NO: 604592 - DNA, 120 bp, Artificial Sequence
  ENSG00000175182_34 (sequence is synthesized)
ccacccacgcctggccagccagcttctggctcccttttccggcgggcggaggcgctatccggcggcgggccgggaggccgcccccgtgccggtctgctctgctcggcgctgtgccagcag

SEQ ID NO: 604593 - DNA, 120 bp, Artificial Sequence
  ENSG00000175182_35 (sequence is synthesized)
gcggagagctcgcgccttccgcgctgacgtcagcgcatcccgggccgtatcccgggagaccctgttgcgtggtgatgggttgccagggagacatacaccttttctctgggcctgggccgc

SEQ ID NO: 604594 - DNA, 120 bp, Artificial Sequence
  ENSG00000175182_36 (sequence is synthesized)
agctgcgcggagcgccgggcacggatggcggcggctgaggggagcgaagcgagggagggagagcaagctaagaaacacccagcaggtgctcccccgcctaggcctggctggaggctactg

SEQ ID NO: 604595 - DNA, 120 bp, Artificial Sequence
  ENSG00000175182_37 (sequence is synthesized)
gcgccaccctgggggccctgtcagccaggtacccaaggggagggatcgagggtgggcctcaggtcaaggggcagtgttggctgcccttgtgagggacgggaacgtgatagaagagagctg

SEQ ID NO: 604596 - DNA, 120 bp, Artificial Sequence
  ENSG00000175182_38 (sequence is synthesized)
ggcaatgccggggagggatgtgtgcctccaacttcattaagtgagggaaacatttgctggggcttgtcagggagccctgagccaggtacagggtggagttaggaacttacgtgcatcaga

SEQ ID NO: 604597 - DNA, 120 bp, Artificial Sequence
  ENSG00000175182_39 (sequence is synthesized)
cttaggccttgccatcctgagctccctcgggagacagacaagggcaatgatgggggcggggtgtgtcagagaaaagaagaggctgtcggctgaaagcattatttgcaggtgacacttgag

SEQ ID NO: 604598 - DNA, 120 bp, Artificial Sequence
  ENSG00000175182_40 (sequence is synthesized)
atgggccttaagtgatggcaagcattttttcacgtaaggatggcattcttggcccagaggaaagctgagttccttttcctggaggcaggcgggctgcttgctgacagggattggtggaga

SEQ ID NO: 604599 - DNA, 71 bp, Artificial Sequence
  ENSG00000175182_41 (sequence is synthesized)
ggaggcaggcgggctgcttgctgacagggattggtggagaagggtttttgttttttgttatttatttttat

SEQ ID NO: 604600 - DNA, 69 bp, Artificial Sequence
  ENSG00000175182_42 (sequence is synthesized)
aaggggggttttattgggcagaggagatcagcagtggattcaaaggaggcttggaaggaggcaagggtg

SEQ ID NO: 604601 - DNA, 120 bp, Artificial Sequence
  ENSG00000175182_43 (sequence is synthesized)
ctagacaagattttagagatgtgttgtgaccagctgcactccaggaaaactgtttacattatatcttacctcattcatccagcctttgcatttttgtttgcttgtttttgagacagagtc

SEQ ID NO: 604602 - DNA, 120 bp, Artificial Sequence
  ENSG00000175182_44 (sequence is synthesized)
aggggtgagtttggctgacctcaggactggcctcgagagccctggttaggtaccagttgggggccagggatggcctgtaacctcctgttttccttctggttggtagcatttctggggacc

SEQ ID NO: 604603 - DNA, 120 bp, Artificial Sequence
  ENSG00000175182_45 (sequence is synthesized)
aacagctggccgaggctcagggatagagacggctgctccagctaaaggtcagttgtgatgtacattgcctgttggcactgtctagggaatgggcctcagctccccgagtcccagagagct

SEQ ID NO: 604604 - DNA, 120 bp, Artificial Sequence
  ENSG00000175182_46 (sequence is synthesized)
tggctgagccctggtgttcccacctcctcagagccatgaggcaggaatgttctccttatgtgactaggcacaggttccaaatggggaggggactggctcagcatccggagccaaaacagg

SEQ ID NO: 604605 - DNA, 120 bp, Artificial Sequence
  ENSG00000175182_47 (sequence is synthesized)
gcagggcctatcttcctgcctctggaagacttgttgcaggtgggtagtgggtcagattccaggtaggatgaactgggagaagctggcaccccaggtctggagggggctggggtgcagcct

SEQ ID NO: 604606 - DNA, 120 bp, Artificial Sequence
  ENSG00000175182_48 (sequence is synthesized)
ccagctgtagctgcctcctgccttccgaaggcagaaggaatgaaagatgcacattctgggctgacgggcatggctagcaccatcctaggccacccacgaggggctcattggcatttgtcg

SEQ ID NO: 604607 - DNA, 120 bp, Artificial Sequence
  ENSG00000175182_49 (sequence is synthesized)
tcgctgtcggaagggctgccctcccgggggaggccatgacgggagtggggcccccagagtgcatgcacctcagtggtctccgtgtcactgctgctggtggcactgtctcggaagctggcg

SEQ ID NO: 604608 - DNA, 120 bp, Artificial Sequence
  ENSG00000175182_50 (sequence is synthesized)
aggggcggccggactttcacaccctgtgctgtgacagagccctcgatggccttccggagctggaaaggtgagagggacagatgtctggacccagatgtcagactcctccccgccttcctc

SEQ ID NO: 604609 - DNA, 120 bp, Artificial Sequence
  ENSG00000175182_51 (sequence is synthesized)
cccaggtgagctggacataagcctccatgactttttggaagtggagcagctttggaggccaccatcacctcacctcctttagagtaacgattccaatgagtctgccaatactggtgacat

SEQ ID NO: 604610 - DNA, 120 bp, Artificial Sequence
  ENSG00000175182_52 (sequence is synthesized)
aagcatggtccactcccagcagtgagaagatagtgtgagtctgcagtgtggggagaaaagcgattggacttgatggacgaggggcagctctaaatgacaggccacaggggcccaggacaa

SEQ ID NO: 604611 - DNA, 120 bp, Artificial Sequence
  ENSG00000175182_53 (sequence is synthesized)
ggttggtgtggaataggaggggtgccccagattgggagggaaggagacaggactgctggagggaaaataataacaatcgtaataataatgagaatgtttctgtgtccaggcctcaggaac

SEQ ID NO: 604612 - DNA, 120 bp, Artificial Sequence
  ENSG00000175182_54 (sequence is synthesized)
ttgatactcaaaatccttatattgcttacactgacggagaaataggatgggggagtaattcttagtcccatgttagaaagggggacgtgggacagaacaactgttcacacgtgaaatcta

SEQ ID NO: 604613 - DNA, 120 bp, Artificial Sequence
  ENSG00000175182_55 (sequence is synthesized)
gtgattggccaggctccgtgctaggtcttacattatcatttaattccagtactgtcctgagaactaagcattaggagaagcagcatggggctcaacagtgaagtgacttgttccaggcgg

SEQ ID NO: 604614 - DNA, 120 bp, Artificial Sequence
  ENSG00000175182_56 (sequence is synthesized)
gtcctcaggagtggctgtgcagccccagtcacttttcatcacaccggagagggacgcacaaccccagtcctgtttagttgcagatataccgagaagggagagcccacaccgaccttaagg

SEQ ID NO: 604615 - DNA, 120 bp, Artificial Sequence
  ENSG00000175182_57 (sequence is synthesized)
gcacttgggccctgaatcctatgcctctcgttccactgcttctcagttgccctcctacctggctggccaggtttggagtctctctcccctgctctggcattccagtcttggcctgaagca

SEQ ID NO: 604616 - DNA, 120 bp, Artificial Sequence
  ENSG00000175182_58 (sequence is synthesized)
cgctatgcctctcatacagtctgccttttctagggtccaagcagcatcccaagttctgttgagatgcagcttgcagtccaggaggacaacggtcacccccatcttcccatgtttttcttg

SEQ ID NO: 604617 - DNA, 120 bp, Artificial Sequence
  ENSG00000175182_59 (sequence is synthesized)
ctttaagccctcccctaagctttcacatataatcaccaggggttcagaaattgtcagccagttctccttatgctttaagtagattttcttggggccagatgtcttgaaaaacgctctcct

SEQ ID NO: 604618 - DNA, 120 bp, Artificial Sequence
  ENSG00000175182_60 (sequence is synthesized)
gactcagcagttcctggaatttttggcctatcatttatctcactgttctgagtttacttgtaagcctcttcgcttaatgtttgaatcaagatgagcagtaataacagcttcttgtgtacc

SEQ ID NO: 604619 - DNA, 120 bp, Artificial Sequence
  ENSG00000175182_61 (sequence is synthesized)
aattactcagaactcacttaaattgccttaacactttttaaatgttcttacacatttgaaattctttagggagggatttccagaactttcctaaatttctccacccatggcatgacagta

SEQ ID NO: 604620 - DNA, 88 bp, Artificial Sequence
  ENSG00000175182_62 (sequence is synthesized)
cagaactttcctaaatttctccacccatggcatgacagtacttagaggggcaagaagttcaattttagaataagctcttctgggcgcg

SEQ ID NO: 604621 - DNA, 120 bp, Artificial Sequence
  ENSG00000175182_63 (sequence is synthesized)
actagcctgcaatatgcgaaaccctgtctccacaaaaagccagacatagtggtgcatgcctgcagtcccagctacttgggggcgctgagttgtgaggatcacctgagcccaggaggcaga

SEQ ID NO: 604622 - DNA, 120 bp, Artificial Sequence
  ENSG00000175182_64 (sequence is synthesized)
tgatagaccttggcattctttcagagccacatccagaacactctcagcctttgcaaggggagggagagggacagactcagtccaggcaggcctggacactccagggacaggaaggctgtc

SEQ ID NO: 604623 - DNA, 120 bp, Artificial Sequence
  ENSG00000175182_65 (sequence is synthesized)
cacactcatgggtgggaaatgagcagacagaaatggattcgttcctttcccacaggtgctgaggcttctctgcctgtctgcacagttgtgccttgcagtcctcaaaaaaaaaaaaaaaaa

SEQ ID NO: 604624 - DNA, 120 bp, Artificial Sequence
  ENSG00000175183_0 (sequence is synthesized)
gggatctcggactccctggaccctccctccagcccagcctcgctagctccgcctgcggtacgtgctcccgcctccgactcaaaatgcctgtctggggaggtggaaacaagtgtggggcct

SEQ ID NO: 604625 - DNA, 120 bp, Artificial Sequence
  ENSG00000175183_1 (sequence is synthesized)
gtgggaggaccgtgtaccacgcagaagaggtgcagtgtgatggcaggagcttccaccgctgctgctttctctgcatggtttgcaggaaaaatttagatagcacaacagtggcaattcacg

SEQ ID NO: 604626 - DNA, 120 bp, Artificial Sequence
  ENSG00000175183_2 (sequence is synthesized)
atgaagagatctactgcaaatcctgctacggaaagaagtatgggccaaaaggctacggttatggccagggcgctggcacgcttaacatggaccgtggcgagaggctgggcatcaaaccag

SEQ ID NO: 604627 - DNA, 120 bp, Artificial Sequence
  ENSG00000175183_3 (sequence is synthesized)
gctgagaagtgttccagatgtggggattctgtatatgctgccgagaagataattggagctggaaagccctggcacaaaaactgtttccgatgtgcaaagtgtgggaagagtcttgaatca

SEQ ID NO: 604628 - DNA, 120 bp, Artificial Sequence
  ENSG00000175183_4 (sequence is synthesized)
acaactctgactgaaaaagaaggtgaaatctattgtaaaggatgctatgcaaagaactttgggcccaagggatttggctatggccaaggagcaggggctcttgttcatgcccagtaagat

SEQ ID NO: 604629 - DNA, 120 bp, Artificial Sequence
  ENSG00000175183_5 (sequence is synthesized)
gtaaaccctgaactaaacatcacacactgagaatctcttcataatctaggcacagataatctttaacactaaactactgtgaaattctaccagcattaagtactgtatatcgccctgtac

SEQ ID NO: 604630 - DNA, 120 bp, Artificial Sequence
  ENSG00000175183_6 (sequence is synthesized)
ttggataggctggctaactcgtaggaagagagcactgtatggtatccttttgctttattcaccagcattttgggggaacatttcttttacattttaaataaaacttcagcttgatttggg

SEQ ID NO: 604631 - DNA, 120 bp, Artificial Sequence
  ENSG00000175183_7 (sequence is synthesized)
agcttccaccgctgctgctttctctgcagtaagtagctctccatgctccacctttgacggaatttgtatgtacagagcttcaatatgtctatttaaggaaaaattgtggttttgccaaca

SEQ ID NO: 604632 - DNA, 120 bp, Artificial Sequence
  ENSG00000175183_8 (sequence is synthesized)
ttacctgtcttcttagatgttgtaaatgccaagcctagcagcgaagacaggaggggtggcccaagacacccagcctccctttgtgtccccatagcttttggcctccattttggcctttat

SEQ ID NO: 604633 - DNA, 120 bp, Artificial Sequence
  ENSG00000175183_9 (sequence is synthesized)
tttgttaacacatctgcctcccccacctcactgagtgctgggtgtcacttatgtggtctggcacctagcacagtttctggcacattacaagggcttagctcccatttttgagtaaatgat

SEQ ID NO: 604634 - DNA, 120 bp, Artificial Sequence
  ENSG00000175183_10 (sequence is synthesized)
tgctcctcatccaccccagctttctctttctcaggttccctttaatgacaacaaagtcttcggttttaaaactgtagagtagcaacttaaagcacttcattaatcatcttctgatttaat

SEQ ID NO: 604635 - DNA, 120 bp, Artificial Sequence
  ENSG00000175183_11 (sequence is synthesized)
ttaaatggtagagaaatgtgctgtgtgaatcatgagaggtgtttctcatgtgcaattgttcagcctcacaggcctacaacaaatccaaacacttctaaatttgctcagaaatatggaggt

SEQ ID NO: 604636 - DNA, 120 bp, Artificial Sequence
  ENSG00000175183_12 (sequence is synthesized)
acttgttttggttcatacaggtttttcaaaacagtatttacatttattctctctgttaagggtagttgtccttcagcagtgcatggtgttaggttaactatggtttaagatatagttatc

SEQ ID NO: 604637 - DNA, 120 bp, Artificial Sequence
  ENSG00000175183_13 (sequence is synthesized)
tttaggcacatgtatttcagcacttgagcctcaacagttagattccagagtagatgccatttcattctaccatagaagactttagtttaagataatagactaaattttaaaccagccagc

SEQ ID NO: 604638 - DNA, 120 bp, Artificial Sequence
  ENSG00000175183_14 (sequence is synthesized)
tagtcctgcttccctcccctcctctttgctgtccttccttttgtcctccttcctttttattcaacccccccccttttatttttcttacttttaatttttatgggtacatagtaggtatat

SEQ ID NO: 604639 - DNA, 120 bp, Artificial Sequence
  ENSG00000175183_15 (sequence is synthesized)
atatttatggggtacatgagatgttttgctacaggcatacaatgtatgttaatcacatcatcttaaatggggtatccattacctcaagcatttattatttttttgttaccaacattccag

SEQ ID NO: 604640 - DNA, 88 bp, Artificial Sequence
  ENSG00000175183_16 (sequence is synthesized)
acctcaagcatttattatttttttgttaccaacattccagttaatactgtcttatttttaaatgtacaatgattgttgacagtaatca

SEQ ID NO: 604641 - DNA, 120 bp, Artificial Sequence
  ENSG00000175183_17 (sequence is synthesized)
tccttcccgacaccctacccttccgagcttctggtaaccatcattctactctgaatcatcatacaattgtcttttaaataaggggaagaaattctgatctttgatttccagctgccagat

SEQ ID NO: 604642 - DNA, 120 bp, Artificial Sequence
  ENSG00000175183_18 (sequence is synthesized)
tgtgctaccagtgagtttcctcacaatttacttttttctcaagcttaattgaagttttagaaaatgaaataatgtctggatgaaactcgatgacatttggcagttttatgaagtgggaca

SEQ ID NO: 604643 - DNA, 120 bp, Artificial Sequence
  ENSG00000175183_19 (sequence is synthesized)
cgtggaaatgtcctgtggcaagagatccatcaagaaagaatgcattctcctttgggacagaagggaaaacaaatgcagactttaaagcacttgacgattttcaggcagactcatcactgc

SEQ ID NO: 604644 - DNA, 120 bp, Artificial Sequence
  ENSG00000175183_20 (sequence is synthesized)
tggagaagctgctggggagaggaaagtgtgatacttcccagtctagactagtgatgaaaactagaattcaggatttaaaactattattatcccaggaggtgcttttgggggaggaaaggc

SEQ ID NO: 604645 - DNA, 120 bp, Artificial Sequence
  ENSG00000175183_21 (sequence is synthesized)
tacagaggcaagtccccgaaggcactgagcttcccttctgttctgtattaggttgtgatttaacagtacttggttaagagaaggctgaaaagattaagagtgttgagggttgggagcaag

SEQ ID NO: 604646 - DNA, 120 bp, Artificial Sequence
  ENSG00000175183_22 (sequence is synthesized)
gtggtgttttattccttttgtttaagcatttttatagccacctttgaaacttttctcccttaatatgatctcccagaaagggaaatcatagtaagagtttgatcagcaccacaggaaagg

SEQ ID NO: 604647 - DNA, 120 bp, Artificial Sequence
  ENSG00000175183_23 (sequence is synthesized)
gaataaaaaataaacgaaacaaactaaaaataaagcttgaggcttctggatgttatattctgatacatttctgaagcaactgtcatatccatggaggaatgtaaataatcctcgaatgta

SEQ ID NO: 604648 - DNA, 120 bp, Artificial Sequence
  ENSG00000175183_24 (sequence is synthesized)
gctggccagtccagatgctgtctcatggcttttgggaagccacaggataaaccaggaatgtgagggagcctcagccttcaccatttgtaggccatgtgtctgtgccaccattgttctaag

SEQ ID NO: 604649 - DNA, 120 bp, Artificial Sequence
  ENSG00000175183_25 (sequence is synthesized)
taccttcagaaatgagttgcgacagttagtgccgcttgctgaacaggaacctggcagtctccagatttttagttgaaactaagcaaataaaatgggactctgattttctaatgtcaacta

SEQ ID NO: 604650 - DNA, 120 bp, Artificial Sequence
  ENSG00000175183_26 (sequence is synthesized)
gttcaaaatattgagttttggacctaacaaagttcttattaataattccagtgatttctacttctggctttatagcattccaagctgtatcaaggagtcgtgttctcaaaagcaagtgat

SEQ ID NO: 604651 - DNA, 120 bp, Artificial Sequence
  ENSG00000175183_27 (sequence is synthesized)
aaattcctaagtcactccttctatgtaaacatttttcatcaagaaatcacttttctctaacttaaaattttttacttaaaaatggaaattacttcttatttttgattctttgagagagta

SEQ ID NO: 604652 - DNA, 120 bp, Artificial Sequence
  ENSG00000175183_28 (sequence is synthesized)
gtgttaaactttaaaggctttgttgccaacgtatcaaggtgctaaatttgtgaaagttcacttagtatttcatattcaggttaaataacttatttgtttagaattccccccacacacttt

SEQ ID NO: 604653 - DNA, 80 bp, Artificial Sequence
  ENSG00000175183_29 (sequence is synthesized)
ttaaataacttatttgtttagaattccccccacacacttttttttttcttttttgtcacagaatctcactctgtcaccca

SEQ ID NO: 604654 - DNA, 80 bp, Artificial Sequence
  ENSG00000175183_30 (sequence is synthesized)
tacttatctcggcctcccaaagtgcatggaataacaggcatgagccaccgtgcccaacctggaatttcctcctaactcct

SEQ ID NO: 604655 - DNA, 120 bp, Artificial Sequence
  ENSG00000175183_31 (sequence is synthesized)
tgagccaccgtgcccaacctggaatttcctcctaactcctacttttaacccagtgattccactatttgaacttcacattttcacatccattttatattgagaagtccaaaattggtgtaa

SEQ ID NO: 604656 - DNA, 120 bp, Artificial Sequence
  ENSG00000175183_32 (sequence is synthesized)
tagtccaacaaaatggcctttggacaagaccataaaccatgccagccaccgtgcagcattagcatatgttaactcgtgtaatcctcacaacagtcctacaacatagggcttcctctcttt

SEQ ID NO: 604657 - DNA, 120 bp, Artificial Sequence
  ENSG00000175183_33 (sequence is synthesized)
cttcagaacagatgaagacaagaaaaattaagtaaaaactttgcccaaagtcacactgttagttaattgtagagcctggaacttaacctagtctaactccaaaccttatgacctgaatga

SEQ ID NO: 604658 - DNA, 120 bp, Artificial Sequence
  ENSG00000175183_34 (sequence is synthesized)
aacgtggtgcttggcttggctaaaataataattaccatgtattgagtccctgttgtctgttgaacatttatcttcattctgtataatccttagagtaactctgaggtatactttgtccat

SEQ ID NO: 604659 - DNA, 120 bp, Artificial Sequence
  ENSG00000175183_35 (sequence is synthesized)
ttatagatgacgacactaagagtcgggtcacacaaataagtgagggagccaggatttgaatcaatgtccatttggttccaaaatctgttctcttcctactgcagtatgtactacattgag

SEQ ID NO: 604660 - DNA, 120 bp, Artificial Sequence
  ENSG00000175183_36 (sequence is synthesized)
gctcacctctgtgttctttgagcttcttccaccctcagagtttctgggccatgatgcccagcttacctttttatctttgttaaaatttattttacttgttctgctctccttttccatctt

SEQ ID NO: 604661 - DNA, 120 bp, Artificial Sequence
  ENSG00000175183_37 (sequence is synthesized)
gttacatctatttttgtgttttaaaggttttgttgaaaacctttcaaaatccatatcccctcactcaacctgcatctccctcaatccaaaccagatttatccatgaccccaaaagtaagt

SEQ ID NO: 604662 - DNA, 120 bp, Artificial Sequence
  ENSG00000175183_38 (sequence is synthesized)
tcaatccaaaccagatttatccatgaccccaaaagtaagtcagtgactatggccatagttttaaagcacaaagaccagtgaaccctcctttttttaaaaaaaaaaaaaaatatatatata

SEQ ID NO: 604663 - DNA, 120 bp, Artificial Sequence
  ENSG00000175183_39 (sequence is synthesized)
tcgaactcctgagttcaagttatccttccacattggcctcccaaagtgctaggaagacattgtttttccagtaggaaaaattaacagttgtggagtgctatcattttatctgctcagcta

SEQ ID NO: 604664 - DNA, 120 bp, Artificial Sequence
  ENSG00000175183_40 (sequence is synthesized)
atttataaggttctaagagggcttaaaaaaaaaaaagtcttctcaaagcccgagaatgttctgcacatactaggtacaccttactgaatggaaacagttcctactgatagcaagaaatat

SEQ ID NO: 604665 - DNA, 120 bp, Artificial Sequence
  ENSG00000175183_41 (sequence is synthesized)
ggtttactcagtgatctgtaaatagtgacaaaaataccacccttaccagagaaaaatgaaagataaacagattgcatagtaataatcaaaatttataaaatatttttccatgaagaaagt

SEQ ID NO: 604666 - DNA, 120 bp, Artificial Sequence
  ENSG00000175183_42 (sequence is synthesized)
tggctattcacactttcctttattcaagatatactgggagactaagtaatctataaaacatgcttaaatttcttagttacagaccaaagttaacttacctatttgtggaatttttaaact

SEQ ID NO: 604667 - DNA, 120 bp, Artificial Sequence
  ENSG00000175183_43 (sequence is synthesized)
acttaatagtggtttttccgactcctgtgaagtaaaaagctaggtatgattccagtgatattattctggagtaaaaatatatgctctggtaagtttttataaaccgtaacataattgctt

SEQ ID NO: 604668 - DNA, 120 bp, Artificial Sequence
  ENSG00000175183_44 (sequence is synthesized)
agtggagaggccaacactgaggagtaaatgaattctgtttagactcagagggacagatctttacgtttgggtccctatctggttttttgaaataataatgagcccatagataggttcaag

SEQ ID NO: 604669 - DNA, 120 bp, Artificial Sequence
  ENSG00000175183_45 (sequence is synthesized)
tagtaactctggctggcacctgagtcacttcttctttattccctcccctgtgctggcctgcaaaggcttccagctttgaggcagtgtagcggttaagtcccagagttctattgttcctgc

SEQ ID NO: 604670 - DNA, 120 bp, Artificial Sequence
  ENSG00000175189_0 (sequence is synthesized)
acacttcttccagggcctctggcagccaggacagagttgagaccacagctgttgagaccctgagccctgagtctgtattgctcaagaagggccttccccagcaatgacctcctcattgct

SEQ ID NO: 604671 - DNA, 120 bp, Artificial Sequence
  ENSG00000175189_1 (sequence is synthesized)
tctggcctttctcctcctggctccaaccacagtggccactcccagagctggcggtcagtgtccagcatgtggggggcccaccttggaactggagagccagcgggagctgcttcttgatct

SEQ ID NO: 604672 - DNA, 120 bp, Artificial Sequence
  ENSG00000175189_2 (sequence is synthesized)
ggccaagagaagcatcttggacaagctgcacctcacccagcgcccaacactgaaccgccctgtgtccagagctgctttgaggactgcactgcagcacctccacggggtcccacagggggc

SEQ ID NO: 604673 - DNA, 120 bp, Artificial Sequence
  ENSG00000175189_3 (sequence is synthesized)
acttctagaggacaacagggaacaggaatgtgaaatcatcagctttgctgagacaggcctctccaccatcaaccagactcgtcttgattttcacttctcctctgatagaactgctggtga

SEQ ID NO: 604674 - DNA, 120 bp, Artificial Sequence
  ENSG00000175189_4 (sequence is synthesized)
cagggaggtccagcaggccagtctcatgttctttgtgcagctcccttccaataccacttggaccttgaaagtgagagtccttgtgctgggtccacataataccaacctcaccttggctac

SEQ ID NO: 604675 - DNA, 120 bp, Artificial Sequence
  ENSG00000175189_5 (sequence is synthesized)
tcagtacctgctggaggtggatgccagtggctggcatcaactccccctagggcctgaagctcaagctgcctgcagccaggggcacctgaccctggagctggtacttgaaggccaggtagc

SEQ ID NO: 604676 - DNA, 120 bp, Artificial Sequence
  ENSG00000175189_6 (sequence is synthesized)
ccagagctcagtcatcctgggtggagctgcccataggccttttgtggcagcccgggtgagagttgggggcaaacaccagattcaccgacgaggcatcgactgccaaggagggtccaggat

SEQ ID NO: 604677 - DNA, 120 bp, Artificial Sequence
  ENSG00000175189_7 (sequence is synthesized)
gtgctgtcgacaagagttttttgtggacttccgtgagattggctggcacgactggatcatccagcctgagggctacgccatgaacttctgcatagggcagtgcccactacacatagcagg

SEQ ID NO: 604678 - DNA, 120 bp, Artificial Sequence
  ENSG00000175189_8 (sequence is synthesized)
catgcctggtattgctgcctcctttcacactgcagtgctcaatcttctcaaggccaacacagctgcaggcaccactggagggggctcatgctgtgtacccacggcccggcgccccctgtc

SEQ ID NO: 604679 - DNA, 120 bp, Artificial Sequence
  ENSG00000175189_9 (sequence is synthesized)
tctgctctattatgacagggacagcaacattgtcaagactgacatacctgacatggtagtagaggcctgtgggtgcagttagtctatgtgtggtatgggcagcccaaggttgcatgggaa

SEQ ID NO: 604680 - DNA, 120 bp, Artificial Sequence
  ENSG00000175189_10 (sequence is synthesized)
aacacgcccctacagaagtgcacttccttgagaggagggaatgacctcattctctgtccagaatgtggactccctcttcctgagcatcttatggaaattaccccacctttgacttgaaga

SEQ ID NO: 604681 - DNA, 120 bp, Artificial Sequence
  ENSG00000175189_11 (sequence is synthesized)
aaccttcatctaaagcaagtcactgtgccatcttcctgaccactaccctctttcctagggcatagtccatcccgctagtccatcccgctagccccactccagggactcagacccatctcc

SEQ ID NO: 604682 - DNA, 120 bp, Artificial Sequence
  ENSG00000175189_12 (sequence is synthesized)
aaccatgagcaatgccatctggttcccaggcaaagacacccttagctcacctttaatagaccccataacccactatgccttcctgtcctttctactcaatggtccccactccaagatgag

SEQ ID NO: 604683 - DNA, 120 bp, Artificial Sequence
  ENSG00000175189_13 (sequence is synthesized)
ccaaaatagaggcttacctacccccctctttgttgtgagcccctgtccttcttagttgtccaggtgaactactaaagctctctttgcataccttcatccattttttgtccttctctgcct

SEQ ID NO: 604684 - DNA, 120 bp, Artificial Sequence
  ENSG00000175189_14 (sequence is synthesized)
ttctctatgcccttaagggctgacttgcctgagctctatcacctgagctcccctgccctctggcttcctgctgaggtcagggcatttcttatccctgttccctctctgtctaggtgtcat

SEQ ID NO: 604685 - DNA, 120 bp, Artificial Sequence
  ENSG00000175189_15 (sequence is synthesized)
ggttctgtgtaactgtggctattctgtgtccctacactacctggctacccccttccatggccccagctctgcctacattctgatataactgcttcaacactagggggtcctaaaggcttt

SEQ ID NO: 604686 - DNA, 120 bp, Artificial Sequence
  ENSG00000175189_16 (sequence is synthesized)
ctatcttgctagtccctggggcctcaacatctcatactggttcccttaactctgcctatacctctgtaaataattccttcactaagttctcttgatgaagcaaaaacagacagctgaaaa

SEQ ID NO: 604687 - DNA, 120 bp, Artificial Sequence
  ENSG00000175189_17 (sequence is synthesized)
gtcctctatctcctacaagggccctaactggcaccccagatgacacagagcctgcctgcttatgctgtagtctgcctactctgctgtctcttcacatggtctcctcagaactgaactatt

SEQ ID NO: 604688 - DNA, 120 bp, Artificial Sequence
  ENSG00000175189_18 (sequence is synthesized)
gtatccatctcacactttatgcctcttctttcttaggcaccccgtccctccatccttccagaaccatctttgaggtctcatggctaataaaaacctaggctttacctgttccctctgtaa

SEQ ID NO: 604689 - DNA, 120 bp, Artificial Sequence
  ENSG00000175189_19 (sequence is synthesized)
tccctccaaaagatgagacagatctatgcttggtcatccagtaaactgaccagctgtgggcacgcaagtgtgggaggcagaggcatgctcagagctggctgccaggacctctgacttgcc

SEQ ID NO: 604690 - DNA, 120 bp, Artificial Sequence
  ENSG00000175189_20 (sequence is synthesized)
ttcctttcacccacccccagtgctccacccaggagtcctgcctggaagctggaatgggcaagggctgctggagtgggacagggagaagaggaaggcctggatgaggagagggtggcattt

SEQ ID NO: 604691 - DNA, 120 bp, Artificial Sequence
  ENSG00000175189_21 (sequence is synthesized)
gctctgagactgggtcctttttagacctttgcccgtcctcccccacatctcctccctttggctggacagtcctgaaccatgaggtcgataatgtctgcagcccaaggccgagtttgcgca

SEQ ID NO: 604692 - DNA, 120 bp, Artificial Sequence
  ENSG00000175189_22 (sequence is synthesized)
aaacccatgtgttctttggtaaacgtgatgtctgtgtttgctcagtttatgaccccctcctatgagggtaagaggtccctgaaataggaaccctagaggagaaagtctgaaaaggactgc

SEQ ID NO: 604693 - DNA, 120 bp, Artificial Sequence
  ENSG00000175189_23 (sequence is synthesized)
ctgggggactgtaaatctgagcttgagggcttcctgagcaacccatggaagttatcccacctttgacttgaggagaccttcatctaaggagaatctaaggaggccttctggtgtctcccc

SEQ ID NO: 604694 - DNA, 120 bp, Artificial Sequence
  ENSG00000175189_24 (sequence is synthesized)
cacacatccccgacccccagatctaacctccttcccaattacagcttagtctccagggctaggactggggtaaagcaaagtgagtcattcacctgggggggctaaattttaagggggtgg

SEQ ID NO: 604695 - DNA, 120 bp, Artificial Sequence
  ENSG00000175189_25 (sequence is synthesized)
tgaacaatttattaatcaagataggactttaatgcaatattattttaaagtcaaaattaatgcaaaaaatccatgatgaacaaaatagcctacttttaaataaaaacaggatcagcatta

SEQ ID NO: 604696 - DNA, 120 bp, Artificial Sequence
  ENSG00000175193_0 (sequence is synthesized)
ggaagtagttgcgcagctggggttggtaaggtcgggccatggtggggcagaggttgggaagatggcgtggcgaggctgggcgcagagaggctggggctgcggccaggcgtggggtgcgtc

SEQ ID NO: 604697 - DNA, 120 bp, Artificial Sequence
  ENSG00000175193_1 (sequence is synthesized)
ggtgggcggccgcagctgcgaggagctcactgcggtcctaaccccgccgcagctcctcggacgcaggtttaacttctttattcaacaaaaatgcggattcagaaaagcacccaggaaggt

SEQ ID NO: 604698 - DNA, 120 bp, Artificial Sequence
  ENSG00000175193_2 (sequence is synthesized)
tgaacctcgaagatcagacccagggacaagtggtgaagcatacaagagaagtgctttgattcctcctgtggaagaaacagtcttttatccttctccctatcctataaggagtctcataaa

SEQ ID NO: 604699 - DNA, 120 bp, Artificial Sequence
  ENSG00000175193_3 (sequence is synthesized)
acctttattttttactgttgggtttacaggctgtgcatttggatcagctgctatttggcaatatgaatcactgaaatccagggtccagagttattttgatggtataaaagctgattggtt

SEQ ID NO: 604700 - DNA, 120 bp, Artificial Sequence
  ENSG00000175193_4 (sequence is synthesized)
ggatagcataagaccacaaaaagaaggagacttcagaaaggagattaacaagtggtggaataacctaagtgatggccagcggactgtgacaggtattatagctgcaaatgtccttgtatt

SEQ ID NO: 604701 - DNA, 120 bp, Artificial Sequence
  ENSG00000175193_5 (sequence is synthesized)
tcaacattcagtcatttctccttatttcacatggcagcaaatatgtatgttttgtggagcttctcttccagcatagtgaacattctgggtcaagagcagttcatggcagtgtacctatct

SEQ ID NO: 604702 - DNA, 120 bp, Artificial Sequence
  ENSG00000175193_6 (sequence is synthesized)
gcaggtgttatttccaattttgtcagttacgtgggtaaagttgccacaggaagatatggaccatcacttggtgcatctggtgccatcatgacagtcctcgcagctgtctgcactaagatc

SEQ ID NO: 604703 - DNA, 120 bp, Artificial Sequence
  ENSG00000175193_7 (sequence is synthesized)
ccagaagggaggcttgccattattttccttccgatgttcacgttcacagcagggaatgccctgaaagccattatcgccatggatacagcaggaatgatcctgggatggaaattttttgat

SEQ ID NO: 604704 - DNA, 120 bp, Artificial Sequence
  ENSG00000175193_8 (sequence is synthesized)
catgcggcacatcttgggggagctctttttggaatatggtatgttacttacggtcatgaactgatttggaagaacagggagccgctagtgaaaatctggcatgaaataaggactaatggc

SEQ ID NO: 604705 - DNA, 120 bp, Artificial Sequence
  ENSG00000175193_9 (sequence is synthesized)
cccaaaaaaggaggtggctctaagtaaaactgggattggacagtagtggtgcatctggtccttgccgcctgagagccccaggagacatcggctagagtgaccatggctatgctcccgtct

SEQ ID NO: 604706 - DNA, 120 bp, Artificial Sequence
  ENSG00000175193_10 (sequence is synthesized)
ggaagatgccagcatctggcctcccactgttttcagctgtgtcccccagtccgtgtctttttagaatgtgaatgatgataaagttgtgaaataaaggtttctatctagtttgtaagcaga

SEQ ID NO: 604707 - DNA, 120 bp, Artificial Sequence
  ENSG00000175193_11 (sequence is synthesized)
gtagctgtggacccagtccttaattagtttggtggatactgcctaggaaaagaaatgatagccactgtgtgaggccaacaggttgatctttgcacctgcctggttcccagagaacctgag

SEQ ID NO: 604708 - DNA, 120 bp, Artificial Sequence
  ENSG00000175193_12 (sequence is synthesized)
cattcaagggaagagaaatcaaaccaaaaggtacagtatgtcacaagcaatggctcttgtaccatgctcaccagtggtttagaagacagtctctgtactgataggctaatgtaatagtat

SEQ ID NO: 604709 - DNA, 120 bp, Artificial Sequence
  ENSG00000175193_13 (sequence is synthesized)
atgtttccataagctggcagtaagtttaagaagcataccatgccctgaggaaaaagaagtaatgttagctcttctactcttggccaaagaacctaattctgtatattacttctgtctttg

SEQ ID NO: 604710 - DNA, 120 bp, Artificial Sequence
  ENSG00000175193_14 (sequence is synthesized)
gtttggctattatagacaataaattattgatctgattataattgagaaaagtaagctcttctaaagaagtaaaatatggatctagggaaaggaagttagctcccagagcatttacaattt

SEQ ID NO: 604711 - DNA, 120 bp, Artificial Sequence
  ENSG00000175193_15 (sequence is synthesized)
cccaggaattctgtgactttaccaaccctaggcagtgctgatactttaaaagcattcatttcacttgcttttttttggctcaccccctatcccccaggtatacagtactcttacataatt

SEQ ID NO: 604712 - DNA, 120 bp, Artificial Sequence
  ENSG00000175193_16 (sequence is synthesized)
tttcatttttaacctccctaaattataaatatttattttgtaggtattatagctgcaaatgtccttgtattctgtttatggagagtaccttctctgcagcggacaatgatcagatatttc

SEQ ID NO: 604713 - DNA, 120 bp, Artificial Sequence
  ENSG00000175197_0 (sequence is synthesized)
gaggtcagagacttaagtctaaggcactgagcgtatcatgttaaagatgagcgggtggcagcgacagagccaaaatcagagctggaacctgaggagagagtgttcaagaaggaagtgtat

SEQ ID NO: 604714 - DNA, 120 bp, Artificial Sequence
  ENSG00000175197_1 (sequence is synthesized)
cttcatacatcaccacacctgaaagcagatgtgcttttccagactgatccaactgcagagatggcagctgagtcattgcctttctccttcgggacactgtccagctgggagctggaagcc

SEQ ID NO: 604715 - DNA, 120 bp, Artificial Sequence
  ENSG00000175197_2 (sequence is synthesized)
tggtatgaggacctgcaagaggtcctgtcttcagatgaaaatgggggtacctatgtttcacctcctggaaatgaagaggaagaatcaaaaatcttcaccactcttgaccctgcttctctg

SEQ ID NO: 604716 - DNA, 120 bp, Artificial Sequence
  ENSG00000175197_3 (sequence is synthesized)
ccagattccagtcagagctccctggctcaggaggaagaggaggaagaccaagggagaaccaggaaacggaaacagagtggtcattccccagcccgggctggaaagcagcgcatgaaggag

SEQ ID NO: 604717 - DNA, 120 bp, Artificial Sequence
  ENSG00000175197_4 (sequence is synthesized)
aaagaacaggagaatgaaaggaaagtggcacagctagctgaagagaatgaacggctcaagcaggaaatcgagcgcctgaccagggaagtagaggcgactcgccgagctctgattgaccga

SEQ ID NO: 604718 - DNA, 120 bp, Artificial Sequence
  ENSG00000175197_5 (sequence is synthesized)
atggtgaatctgcaccaagcatgaacaattgggagcatcagtcccccacttgggccacactacccacctttcccagaagtggctactgactaccctctcactagtgccaatgatgtgacc

SEQ ID NO: 604719 - DNA, 120 bp, Artificial Sequence
  ENSG00000175197_6 (sequence is synthesized)
ctcaatcccacatacgcagggggaaggcttggagtagacaaaaggaaaggtctcagcttgtatatagagattgtacatttatttattactgtccctatctattaaagtgactttctatga

SEQ ID NO: 604720 - DNA, 120 bp, Artificial Sequence
  ENSG00000175197_7 (sequence is synthesized)
ggtacagcaagagagggtcttggagaaagccataggagtaccgtgggggaaaataggtggccaaacagaatcgggtccactgggcaaaatacatgacttctggcaggctgagggcttacc

SEQ ID NO: 604721 - DNA, 120 bp, Artificial Sequence
  ENSG00000175197_8 (sequence is synthesized)
cttcatacatcaccacacctgaaagcagcaccaaagcagccataaacaatatgtaaataaacagatgtggctgtattccagtacaactttacctacaaaaacaggcatcagaccagcttg

SEQ ID NO: 604722 - DNA, 120 bp, Artificial Sequence
  ENSG00000175197_9 (sequence is synthesized)
acatcaccacacctgaaagcaggtaaacttaacctacccttttccaaaaattttaaacggcaggacagtaaatattttagatgttaaaagtcctatagtctctagcgtgactcttcatct

SEQ ID NO: 604723 - DNA, 120 bp, Artificial Sequence
  ENSG00000175198_0 (sequence is synthesized)
agcagaggggcggtctgcggggacaacaatggcggggttctgggtcgggacagcaccgctggtcgctgccggacggcgtgggcggtggccgccgcagcagctgatgctgagcgcggcgct

SEQ ID NO: 604724 - DNA, 120 bp, Artificial Sequence
  ENSG00000175198_1 (sequence is synthesized)
gcggaccctgaagcatgttctgtactattcaagacagtgcttaatggtgtcccgtaatcttggttcagtgggatatgatcctaatgaaaaaacttttgataaaattcttgttgctaatag

SEQ ID NO: 604725 - DNA, 120 bp, Artificial Sequence
  ENSG00000175198_2 (sequence is synthesized)
aggagaaattgcatgtcgggttattagaacttgcaagaagatgggcattaagacagttgccatccacagtgatgttgatgctagttctgttcatgtgaaaatggcggatgaggctgtctg

SEQ ID NO: 604726 - DNA, 120 bp, Artificial Sequence
  ENSG00000175198_3 (sequence is synthesized)
tgttggcccagctcccaccagtaaaagctacctcaacatggatgccatcatggaagccattaagaaaaccagggcccaagctgtacatccaggttatggattcctttcagaaaacaaaga

SEQ ID NO: 604727 - DNA, 120 bp, Artificial Sequence
  ENSG00000175198_4 (sequence is synthesized)
atttgccagatgtttggcagcagaagatgtcgttttcattggacctgacacacatgctattcaagccatgggcgacaagattgaaagcaaattattagctaagaaagcagaggttaatac

SEQ ID NO: 604728 - DNA, 120 bp, Artificial Sequence
  ENSG00000175198_5 (sequence is synthesized)
aatccctggctttgatggagtagtcaaggatgcagaagaagctgtcagaattgcaagggaaattggctaccctgtcatgatcaaggcctcagcaggtggtggtgggaaaggcatgcgcat

SEQ ID NO: 604729 - DNA, 120 bp, Artificial Sequence
  ENSG00000175198_6 (sequence is synthesized)
tgcttgggatgatgaagagaccagggatggttttagattgtcatctcaagaagctgcttctagttttggcgatgatagactactaatagaaaaatttattgataatcctcgtcatataga

SEQ ID NO: 604730 - DNA, 120 bp, Artificial Sequence
  ENSG00000175198_7 (sequence is synthesized)
aatccaggttctaggtgataaacatgggaatgctttatggcttaatgaaagagagtgctcaattcagagaagaaatcagaaggtggtggaggaagcaccaagcatttttttggatgcgga

SEQ ID NO: 604731 - DNA, 120 bp, Artificial Sequence
  ENSG00000175198_8 (sequence is synthesized)
gactcgaagagcgatgggagaacaagctgtagctcttgccagagcagtaaaatattcctctgctgggaccgtggagttccttgtggactctaagaagaatttttatttcttggaaatgaa

SEQ ID NO: 604732 - DNA, 120 bp, Artificial Sequence
  ENSG00000175198_9 (sequence is synthesized)
tacaagactccaggttgagcatcctgtcacagaatgcattactggcctggacctagtccaggaaatgatccgtgttgctaagggctaccctctcaggcacaaacaagctgatattcgcat

SEQ ID NO: 604733 - DNA, 120 bp, Artificial Sequence
  ENSG00000175198_10 (sequence is synthesized)
gtaccaagaaccgttacatctacctggtgtccgagtggacagtggcatccaaccaggaagtgatattagcatttattatgatcctatgatttcaaaactaatcacatatggctctgatag

SEQ ID NO: 604734 - DNA, 120 bp, Artificial Sequence
  ENSG00000175198_11 (sequence is synthesized)
aactgaggcactgaagagaatggcagatgcactggataactatgttattcgaggtgttacacataatattgcattacttcgagaggtgataatcaactcacgctttgtaaaaggagacat

SEQ ID NO: 604735 - DNA, 120 bp, Artificial Sequence
  ENSG00000175198_12 (sequence is synthesized)
cagcactaaatttctctccgatgtgtatcctgatggcttcaaaggacacatgctaaccaagagtgagaagaaccagttattggcaatagcatcatcattgtttgtggcattccagttaag

SEQ ID NO: 604736 - DNA, 120 bp, Artificial Sequence
  ENSG00000175198_13 (sequence is synthesized)
agcacaacattttcaagaaaattcaagaatgcctgttattaaaccagacatagccaactgggagctctcagtaaaattgcatgataaagttcataccgtagtagcatcaaacaatgggtc

SEQ ID NO: 604737 - DNA, 120 bp, Artificial Sequence
  ENSG00000175198_14 (sequence is synthesized)
agtgttctcggtggaagttgatgggtcgaaactaaatgtgaccagcacgtggaacctggcttcgcccttattgtctgtcagcgttgatggcactcagaggactgtccagtgtctttctcg

SEQ ID NO: 604738 - DNA, 120 bp, Artificial Sequence
  ENSG00000175198_15 (sequence is synthesized)
agaagcaggtggaaacatgagcattcagtttcttggtacagtgtacaaggtgaatatcttaaccagacttgccgcagaattgaacaaatttatgctggaaaaagtgactgaggacacaag

SEQ ID NO: 604739 - DNA, 120 bp, Artificial Sequence
  ENSG00000175198_16 (sequence is synthesized)
cagtgttctgcgttccccgatgcccggagtggtggtggccgtctctgtcaagcctggagacgcggtagcagaaggtcaagaaatttgtgtgattgaagccatgaaaatgcagaatagtat

SEQ ID NO: 604740 - DNA, 120 bp, Artificial Sequence
  ENSG00000175198_17 (sequence is synthesized)
gacagctgggaaaactggcacggtgaaatctgtgcactgtcaagctggagacacagttggagaaggggatctgctcgtggagctggaatgaaggatttataacctttcagtcatcaccca

SEQ ID NO: 604741 - DNA, 120 bp, Artificial Sequence
  ENSG00000175198_18 (sequence is synthesized)
atttaattagccatttgcatgatgctttcacacacaattgattcaagcattatacaggaacacccctgtgcagctacgtttacgtcgtcatttattccacagagtcaagaccaatattct

SEQ ID NO: 604742 - DNA, 120 bp, Artificial Sequence
  ENSG00000175198_19 (sequence is synthesized)
gccaaaaaatcaccaatggaaattttcattgatataaatacttgtacatatgatttgtacttctgctgtgagattccctagtgtcaaaattaaatcaataaaactgagcatttgtctaaa

SEQ ID NO: 604743 - DNA, 120 bp, Artificial Sequence
  ENSG00000175198_20 (sequence is synthesized)
tgcagttggctttcctttaaccttttagtctttcagggtaattttctttctttttttttttgagactcccaacaagtttattattttttaaattgtggtaaaatgcttataaggaaactt

SEQ ID NO: 604744 - DNA, 120 bp, Artificial Sequence
  ENSG00000175198_21 (sequence is synthesized)
cattaagtacattcacattgttgtgcagccatcactataatctatctccagaactctcttcatattccaaactgaaactctgtacccatttaacagtaactccccattccaggctcgcca

SEQ ID NO: 604745 - DNA, 120 bp, Artificial Sequence
  ENSG00000175198_22 (sequence is synthesized)
cccatttaacagtaactccccattccaggctcgccacagtctctggcaaccactattctactttcaggataattttcattggttagtaatgtttggataatttgattagatttggtggat

SEQ ID NO: 604746 - DNA, 120 bp, Artificial Sequence
  ENSG00000175198_23 (sequence is synthesized)
actgaagactggccgggttatgtaagctgttgctactttcagccaaggagtgcatctagtccgtattacatcatccttggagtgttctacccagtgtcttgcattgaaggacatcagaag

SEQ ID NO: 604747 - DNA, 120 bp, Artificial Sequence
  ENSG00000175198_24 (sequence is synthesized)
gaaaactcctgtattctcagtcgtggctttaatttgtgcctggtgctgacctgatgctgtgcagggacactcactgcatccctccattcagtccctctaattatcccaacttcctgggga

SEQ ID NO: 604748 - DNA, 120 bp, Artificial Sequence
  ENSG00000175198_25 (sequence is synthesized)
cttctctggaaaaatgggatgttggcttgaagatatttcttagtattctgtgttttctttctggtttttctatgttgttttaatcatattatcataccttgtcatttcaggtaacatagc

SEQ ID NO: 604749 - DNA, 120 bp, Artificial Sequence
  ENSG00000175198_26 (sequence is synthesized)
ataagttatagtaattagtttcaagagaaacatatgttagaatttgtgttttgtgtttggatcctatctgtgtacttgaaagatacacgtatatgtagatggatagtgagttccatcagg

SEQ ID NO: 604750 - DNA, 120 bp, Artificial Sequence
  ENSG00000175198_27 (sequence is synthesized)
atgctcagcgttgaaagcataggagggaactgtgctgagcgtgtgaggtttggcgattgtgctcttttatcttctttctttcttgagtttttagcaagataagacatgtaactactgtaa

SEQ ID NO: 604751 - DNA, 120 bp, Artificial Sequence
  ENSG00000175198_28 (sequence is synthesized)
aatgagaggtaatttttaaaatagccactgggttaaccaaaaaccttttaaatagctgtggcatccagtgtgggcaagggtcacatagttttgttcctggaagtgtaaattgtttcagac

SEQ ID NO: 604752 - DNA, 120 bp, Artificial Sequence
  ENSG00000175198_29 (sequence is synthesized)
ctcccccggcccccagaaatttgctagtatttatcaaaatttaaaacatctatatgttctttaatttaacagttccacccttaagaatctcacttacaaagatatacttgagaaaatgtt

SEQ ID NO: 604753 - DNA, 120 bp, Artificial Sequence
  ENSG00000175198_30 (sequence is synthesized)
catggtaaggtgtttcataatagcaaaatttagaaagtgttcaaaagtaaaatgtggagaatggtggcttccctgcagggtcattggtcctcagttacaaggctgcagtccatgatgtgt

SEQ ID NO: 604754 - DNA, 120 bp, Artificial Sequence
  ENSG00000175198_31 (sequence is synthesized)
tatagtttaaagtgtgttgtaagcactttgtaactaatactaaaattctgaagttagcaagtttgccagtgactttgtttaacaatttttttgtttataaaataaagtggattaaaaatg

SEQ ID NO: 604755 - DNA, 120 bp, Artificial Sequence
  ENSG00000175198_32 (sequence is synthesized)
tctgtcaagcctggagacgcggcaacctcgagtctgtctgtagagatctgcctattctggacatttcaggtagcagaaggtcaagaaatttgtgtgattgaagccatgaaaatgcagaat

SEQ ID NO: 604756 - DNA, 120 bp, Artificial Sequence
  ENSG00000175198_33 (sequence is synthesized)
gaggttaatacaatccctggctttgatggagtagtcaaggatgcagaagaagctgtcagaattgcaagggaaattgatggagttttgctgtcattgcccaggctggagtgcaatggcacg

SEQ ID NO: 604757 - DNA, 120 bp, Artificial Sequence
  ENSG00000175198_34 (sequence is synthesized)
taaaaatattcttggcggtcatgagaactatttttggtatctgctaattgagaaaatgtgtaagggcatgctattatatggattaacaatattgttaaataactttgcaggtttaataat

SEQ ID NO: 604758 - DNA, 120 bp, Artificial Sequence
  ENSG00000175198_35 (sequence is synthesized)
caaatcagtaattgtatacatttgacagaaatttgtacagatgagagaaattaggcaatgcttgtagggatcccagcgtcttctcagcattcctgtacgcctcagtccaagcatctcatc

SEQ ID NO: 604759 - DNA, 120 bp, Artificial Sequence
  ENSG00000175198_36 (sequence is synthesized)
gtgccacacgaacatttctgtaggcctgttttctcactaagattatttagatctattttctgcctctagagagcatttgatttggcaaagctcatatagttgtgatatgtagaaatatct

SEQ ID NO: 604760 - DNA, 120 bp, Artificial Sequence
  ENSG00000175198_37 (sequence is synthesized)
tattggtctggaagtgatcacttgtactagtaagcgtgttctttgcaaatgggacagtctaacttagcaggtctttagtgacctgaaaagcagtttggcttattgcacccttgtttgtag

SEQ ID NO: 604761 - DNA, 120 bp, Artificial Sequence
  ENSG00000175198_38 (sequence is synthesized)
ttggtactgtctaaattatttgggctttgcccatcattaagtgtgttttgttgtttgctttgcaaaaatctatcttattgatataggtcctggatttaagaccagaccatagaaaatctt

SEQ ID NO: 604762 - DNA, 120 bp, Artificial Sequence
  ENSG00000175198_39 (sequence is synthesized)
attttatctgactacctcatctcttcattttttttttcagaatcattaacatttcaaaaagcctatcagtacttcataggaacatttgctcgactgctaaataaactggactatatagaa

SEQ ID NO: 604763 - DNA, 120 bp, Artificial Sequence
  ENSG00000175198_40 (sequence is synthesized)
ctgcggcctggtggctggctcagcaggaggcctgggattgaaagctctcggtttgtacaagctcttttggatttgtaacacttttattttaaatctccaataaatgtaaatattttggtc

SEQ ID NO: 604764 - DNA, 120 bp, Artificial Sequence
  ENSG00000175198_41 (sequence is synthesized)
tcagttgtcaacaaaatcagtaagtgttattaaataccccatggtgtgtggttctggcactgaaatggggctgtttcctaaggctctgtccatggccacctctgtctatttctgcattct

SEQ ID NO: 604765 - DNA, 120 bp, Artificial Sequence
  ENSG00000175198_42 (sequence is synthesized)
gtcttgcattgcttctgttgcctatatcctggtcagcacagtttatggtgaatcattgcttattgaaatagagacggcaataatgaagccagctattataaattagagcaaatatacaca

SEQ ID NO: 604766 - DNA, 120 bp, Artificial Sequence
  ENSG00000175198_43 (sequence is synthesized)
tccaatacgttttaaacgcatgtgatctctggagtagtatcactaggtagcttccatttcagttcgcctttggtatattactgtactccaaagaatatcatttttccctctgtaaaattt

SEQ ID NO: 604767 - DNA, 120 bp, Artificial Sequence
  ENSG00000175198_44 (sequence is synthesized)
tcctcatgaaaatggtcaccataggtctgatttactttttggatcagtaacaggtcacagcataaatcccattcctgcatcaaggcggaacaagaccctcacactttggagggagctgag

SEQ ID NO: 604768 - DNA, 120 bp, Artificial Sequence
  ENSG00000175198_45 (sequence is synthesized)
ttcctgtttagaagaacatgcacagttagataaatctgttcacacggcttagatgatcagagccaacatctgatgactatgagcaaggcacttttctaaacatttttagtattttctgaa

SEQ ID NO: 604769 - DNA, 120 bp, Artificial Sequence
  ENSG00000175198_46 (sequence is synthesized)
cagttttgttgaggtatactttacagataacattcacctcttgagctgcagttcaatgagttctcgtaaactgagttgtgcagccatcaccacgttccagttttagcacatttccatcac

SEQ ID NO: 604770 - DNA, 120 bp, Artificial Sequence
  ENSG00000175198_47 (sequence is synthesized)
cccaaaagttcctttctgcctgtttgcagccaatccctgctccctggccagccacaggcaagcgctgtcaatgtttggacagtgttggattacctaatggactcttcaagacagtccttt

SEQ ID NO: 604771 - DNA, 120 bp, Artificial Sequence
  ENSG00000175198_48 (sequence is synthesized)
agggcactcagggtggtttcaaatgaccgaggccaggtgctcagggcccagaaccctcttaccccctccaacttcagtgagcttcaaaatcacctgctgagcttgtttgaccacagactt

SEQ ID NO: 604772 - DNA, 120 bp, Artificial Sequence
  ENSG00000175198_49 (sequence is synthesized)
gtgggctccacccttgaattcctgacgccctaggtctgggatggggcttgacaatttgcatttgtaaaaagttcctgaatgctgctgctgctgctggtcagggaaccctgctttaagacc

SEQ ID NO: 604773 - DNA, 120 bp, Artificial Sequence
  ENSG00000175198_50 (sequence is synthesized)
tcctggtttatgcaatttcaaacattgtaagaaatagtcactcatgtgattggtttgtgtgcttggtgtagactgtacgaggatttttcaaaagtaagtattgttcattctaaaggaagg

SEQ ID NO: 604774 - DNA, 120 bp, Artificial Sequence
  ENSG00000175198_51 (sequence is synthesized)
aaatgtatgttatgagatagaattatataataaacagaaccattaaatgccatctgaaaagtggtgttttcaatggcaggaagtagcattgctgcgtattttgtgtgtgtgcgcaactca

SEQ ID NO: 604775 - DNA, 120 bp, Artificial Sequence
  ENSG00000175198_52 (sequence is synthesized)
gctttgtgtcattgtgtaactttaatttgaaagaacatcacgtgactgctgttttcatttctgccttttaaaaagcagacagctattcagaacagcaagaagcagacccaaactttgttt

SEQ ID NO: 604776 - DNA, 120 bp, Artificial Sequence
  ENSG00000175198_53 (sequence is synthesized)
gtatgcccctagtcataggcaaaaatggaaagggtaatttaccaaaaaagaagaaaatagataaaaaggaaaagaatggaaagaaagtactgactcactgcaaacagctgcaaaatgttg

SEQ ID NO: 604777 - DNA, 120 bp, Artificial Sequence
  ENSG00000175198_54 (sequence is synthesized)
cccttgggatagaggttaactcggttgtgaaataatggccaaagcggtgcactcttaataacttttttgtagccctggagaaagcttctggattgactgtgagaagcttggcagaaggtg

SEQ ID NO: 604778 - DNA, 120 bp, Artificial Sequence
  ENSG00000175202_0 (sequence is synthesized)
agacgacgaggcaagcggaagtcgtagggctgtggaggactgtgaggaagcgggggaaggaagtaaatcgccgagtgacctaaggaatcagggggaggattagggtctgctccacagaag

SEQ ID NO: 604779 - DNA, 120 bp, Artificial Sequence
  ENSG00000175202_1 (sequence is synthesized)
gcttacctctgaaagagtcggggagggaatgcgcagccactcgctgcctttatcccgagaagcccctaacacccctcgccgtggtctgtacatggtctgtacctccggccgcgctggctg

SEQ ID NO: 604780 - DNA, 120 bp, Artificial Sequence
  ENSG00000175202_2 (sequence is synthesized)
gtaggccagccacctgggatggcagcctagttctcccgccaccttaccctgccctgactctaatctgcatttaattcagtccttcttccgggagatttcggcggagaatttctttctcgc

SEQ ID NO: 604781 - DNA, 120 bp, Artificial Sequence
  ENSG00000175202_3 (sequence is synthesized)
cttagctactgaggtcaaacctgaaataggctgtagactccaccagctgggtaagaatgggaagaagatcagaaaacctaaactttggttgatggactattttgcccaggcaaaagcagg

SEQ ID NO: 604782 - DNA, 120 bp, Artificial Sequence
  ENSG00000175202_4 (sequence is synthesized)
ctgtggcctaggcatggcgactctcggctttgtgactccggaggccccctttgaatcatcgaagccccccatctttgaggggcttagccccactgtttacagcaatccagagggtttcaa

SEQ ID NO: 604783 - DNA, 120 bp, Artificial Sequence
  ENSG00000175202_5 (sequence is synthesized)
ggaaaagttccttcgcaagacccgcgagaatccggtggtacccataggtttcctgtgcacggcggccgtcctcaccaacggcctctactgcttccaccagggcaacagccaatgttcacg

SEQ ID NO: 604784 - DNA, 120 bp, Artificial Sequence
  ENSG00000175202_6 (sequence is synthesized)
gcttatgatgcacacccagatcgccgcccagggcttcaccattgcagccatcttgctgggtctagctgccaccgctatgaagtctccaccctgagcccagggtcttgaaaactctgcaga

SEQ ID NO: 604785 - DNA, 120 bp, Artificial Sequence
  ENSG00000175202_7 (sequence is synthesized)
aatcattccaaaacccaggagcaaccactggccctaccatgggacttactctctcctctcctttgagaggtccctgtgtcgttgggggaggaagtgacccttcctgtaaccataactgaa

SEQ ID NO: 604786 - DNA, 120 bp, Artificial Sequence
  ENSG00000175202_8 (sequence is synthesized)
agattttttcaaaaatcccagattctgttgtttgaatgttacatatttctatttgtgccacatcttccctccactcccctgcttaataaactctaaaaataagaaaaaagtaaaaaatta

SEQ ID NO: 604787 - DNA, 120 bp, Artificial Sequence
  ENSG00000175203_0 (sequence is synthesized)
aacccagcctctcccctacccgaacaccggccccggctccaccgaggcccgggtcccccagcccgtctcgccgccgccatggcggaccctaaatacgccgaccttcccggcattgccagg

SEQ ID NO: 604788 - DNA, 120 bp, Artificial Sequence
  ENSG00000175203_1 (sequence is synthesized)
aatgagccagatgtttatgaaactagcgacctacctgaggatgatcaagcggagttcgatgcgtttgcacaagagctggaggagctgacaagcacaagtgtggaacacatcattgtcaat

SEQ ID NO: 604789 - DNA, 120 bp, Artificial Sequence
  ENSG00000175203_2 (sequence is synthesized)
cctaatgctgcctatgacaagttcaaggacaagagagtggggacaaagggacttgatttctcagatcgtattggaaaaaccaagaggacaggatatgaatctggagaatatgagatgctt

SEQ ID NO: 604790 - DNA, 120 bp, Artificial Sequence
  ENSG00000175203_3 (sequence is synthesized)
ggagagggtctgggagtgaaggagacaccccagcaaaagtaccagcgcctactgcatgaggtccaagagctgacaactgaagttgaaaaaatcaagacgacagtgaaggagtcagccaca

SEQ ID NO: 604791 - DNA, 120 bp, Artificial Sequence
  ENSG00000175203_4 (sequence is synthesized)
gaggagaagctgacccctgtgttgctggctaaacagctggcagccctgaagcagcagctggttgcttcccacctggagaagctgctgggaccagatgctgcaatcaaccttaccgacccc

SEQ ID NO: 604792 - DNA, 120 bp, Artificial Sequence
  ENSG00000175203_5 (sequence is synthesized)
gatggcgccctggctaagcgcctactactgcagctggaagcaacaaagaacagcaaagggggatcagggggaaaaaccactgggacccccccagatagcagccttgtcacttatgaacta

SEQ ID NO: 604793 - DNA, 120 bp, Artificial Sequence
  ENSG00000175203_6 (sequence is synthesized)
tctgcaggtctacagggagcctgtctcatggagactgtagagctgttgcaagcaaaggtgagcgccctagaccttgcagttttggatcaagtggaggctcggctacagagtgtcctggga

SEQ ID NO: 604794 - DNA, 120 bp, Artificial Sequence
  ENSG00000175203_7 (sequence is synthesized)
aaggtgaacgagattgccaagcataaagcctctgtagaagatgcagatacacaaagcaaggtgcaccagctatatgaaactatacagcgctggagccccattgcctccaccctccctgag

SEQ ID NO: 604795 - DNA, 120 bp, Artificial Sequence
  ENSG00000175203_8 (sequence is synthesized)
ctggtgcagagacttgtcaccatcaagcagctgcacgagcaagccatgcagtttggtcagctcctgacacacttggataccacccagcagatgattgctaattccttgaaggacaatacc

SEQ ID NO: 604796 - DNA, 120 bp, Artificial Sequence
  ENSG00000175203_9 (sequence is synthesized)
accctcttgacccaggtgcagacaaccatgcgtgaaaacctggccacagttgaggggaactttgccagcattgatgaacggatgaagaagctgggaaagtgagcacatttgggagctgga

SEQ ID NO: 604797 - DNA, 120 bp, Artificial Sequence
  ENSG00000175203_10 (sequence is synthesized)
gaacaggggttatccctacccctgtgaactctgttaacagcttacatagggtttcccctttactataactctagcatccccatcccatttgacactgggggcaagggttcttcttgcatg

SEQ ID NO: 604798 - DNA, 120 bp, Artificial Sequence
  ENSG00000175203_11 (sequence is synthesized)
tggggtttatacccctcccctgatgaatacagagtggtagctaggggttggttatcatcagaaggtggtctcccctcaggcctgggggataaggacgtgggcccagccacatgccaactc

SEQ ID NO: 604799 - DNA, 120 bp, Artificial Sequence
  ENSG00000175203_12 (sequence is synthesized)
atgtccaatactgctttgcctggtgtggggaaggattgggtcttgtcccccaacacagcttctgtggctgactgtaatactgtacaactgtttctgaccattaaatgctgttgtactctg

SEQ ID NO: 604800 - DNA, 120 bp, Artificial Sequence
  ENSG00000175203_13 (sequence is synthesized)
aatcctaggcggcgtcccctggccattacctcattccctggcctcgttctccccaatcccggcctctccaggggtgtggcagcagggctgttctcgcgacttttgctttacccttctgct

SEQ ID NO: 604801 - DNA, 120 bp, Artificial Sequence
  ENSG00000175203_14 (sequence is synthesized)
tacaagagatggatttaaattgtaacctgttcttaccaaagaactaaataaaaaatgagtacagagccagagccagagtttcaaaatattctcatctgttaaattaagagtgtctcccat

SEQ ID NO: 604802 - DNA, 120 bp, Artificial Sequence
  ENSG00000175203_15 (sequence is synthesized)
ggctaaacagctggcagccctgaagcagcagctggttgcttcccacctggagaagctgctgggaccagatgctgcaatcaaccttaccgaccccgatggcgccctggctaagtgggtacc

SEQ ID NO: 604803 - DNA, 120 bp, Artificial Sequence
  ENSG00000175203_16 (sequence is synthesized)
ctactttgttgaaaaatcattgctgactggggttgtggatggactcagccagctactgacaggggtgctaagtggcagagaagtggcttagatgtttcttaatgctgattatgaggcaaa

SEQ ID NO: 604804 - DNA, 120 bp, Artificial Sequence
  ENSG00000175203_17 (sequence is synthesized)
aactagcgacctacctgaggatgatcaagcggagttcgatgcggagctggtaagaagcctgacctttcatctgctttttaacggggaggagctgacaagcacaagtgtggaacacatcat

SEQ ID NO: 604805 - DNA, 120 bp, Artificial Sequence
  ENSG00000175203_18 (sequence is synthesized)
ttttaactcttttgattttctcacctctggggaaaccacaaggagctggtaagaagcctgacctttcatctgctttttaacggggtgtgctatgatgagcagttgtttctctgtccttta

SEQ ID NO: 604806 - DNA, 120 bp, Artificial Sequence
  ENSG00000175203_19 (sequence is synthesized)
gactctactaaatctttcattcatctattcagtcccacacccagccttttcctatctcacaagtcactgtaattatactgcccccaactcatgccccagatcttcaagacactgctggag

SEQ ID NO: 604807 - DNA, 120 bp, Artificial Sequence
  ENSG00000175203_20 (sequence is synthesized)
taatctgagccttagatcctgcaactctaggccttaaggtctacaacattccacataagcctgggaggagtcatcaaagggcttcagttacagggatcagctagtgggttcccagctaga

SEQ ID NO: 604808 - DNA, 120 bp, Artificial Sequence
  ENSG00000175203_21 (sequence is synthesized)
ctccctctgctcccagttgaatgagggtgttaatatttatacaactgaggctccaaatttaccaggaagcttcagtttcctaggttaagcctgggtaggcgccttggaatagagccaccc

SEQ ID NO: 604809 - DNA, 120 bp, Artificial Sequence
  ENSG00000175203_22 (sequence is synthesized)
tggtttggggattttgtggggtagagtaagttctagagtgggaatgagtgtgtccctggcctaaactacctgttcttgcaggaggagctgacaagcacaagtgtggaacacatcattgtc

SEQ ID NO: 604810 - DNA, 120 bp, Artificial Sequence
  ENSG00000175203_23 (sequence is synthesized)
gaagctgggtggggggaagactggaggataagcatgagaagtggtttcctgtcctaaagtcttagtgagttgtgcttgggggaaggggtccctcatggagatattttatggaagccctca

SEQ ID NO: 604811 - DNA, 120 bp, Artificial Sequence
  ENSG00000175203_24 (sequence is synthesized)
cagtcacctgagaccatgactgccttgggcctagatcaggccctcagttccatcttcttttcttggcagatttctcagatcgtattggaaaaaccaagaggacaggatatgaatctggag

SEQ ID NO: 604812 - DNA, 120 bp, Artificial Sequence
  ENSG00000175203_25 (sequence is synthesized)
gatttctcagatcgtattggaaaaaccaagaggacaggatatgaatctggagaatatgagatggtttgttgtgtgtgtgtgtgtgttgatgggaatggtgtagtgaccctatctagcaga

SEQ ID NO: 604813 - DNA, 120 bp, Artificial Sequence
  ENSG00000175203_26 (sequence is synthesized)
catgtagtagggagatcaagggatacaggcgggattctgttcctcctctgttcctgaggaagcagcaggatgcagccagggaaactctgccctactgctgtttgttctggagagcctcca

SEQ ID NO: 604814 - DNA, 120 bp, Artificial Sequence
  ENSG00000175203_27 (sequence is synthesized)
cagtcaccttcttaacccctgacaacagcattctccgccttaatcttcagtttattttcaactttaattttatcagtttttaaagtaggtaatgtatgcacagggaacagaggattcaag

SEQ ID NO: 604815 - DNA, 120 bp, Artificial Sequence
  ENSG00000175203_28 (sequence is synthesized)
gaacgagattgccaagcataaagcctctgtagaagatgcagatacacaaagcaaggtcaggaagacaccttccccatctcctttccactccctcaggttctccgagtggcagtgtcaaag

SEQ ID NO: 604816 - DNA, 120 bp, Artificial Sequence
  ENSG00000175203_29 (sequence is synthesized)
catgagaacacactgactcctcaggtccccatcttcataagctcttatgaagagcttatcagcttggaaagtcagggcactgcttccctctgcccacttgatcctttcccccattacggt

SEQ ID NO: 604817 - DNA, 120 bp, Artificial Sequence
  ENSG00000175203_30 (sequence is synthesized)
gaaatagcagtctgtacatactgacctggctgcctcagccatcccctctgggccccattgtgtcccttcaggtgcaccagctatatgaaactatacagcgctggagccccattgcctcca

SEQ ID NO: 604818 - DNA, 120 bp, Artificial Sequence
  ENSG00000175206_0 (sequence is synthesized)
gagacagggacagacgtaggccaagagaggggaaccagagaggaaccagaggggagagacagagcagcaagcagtggattgctccttgacgacgccagcatgagctccttctccaccacc

SEQ ID NO: 604819 - DNA, 120 bp, Artificial Sequence
  ENSG00000175206_1 (sequence is synthesized)
accgtgagcttcctccttttactggcattccagctcctaggtcagaccagagctaatcccatgtacaatgccgtgtccaacgcagacctgatggatttcaagaatttgctggaccatttg

SEQ ID NO: 604820 - DNA, 120 bp, Artificial Sequence
  ENSG00000175206_2 (sequence is synthesized)
gaagaaaagatgcctttagaagatgaggtcgtgcccccacaagtgctcagtgagccgaatgaagaagcgggggctgctctcagccccctccctgaggtgcctccctggaccggggaagtc

SEQ ID NO: 604821 - DNA, 120 bp, Artificial Sequence
  ENSG00000175206_3 (sequence is synthesized)
gatggaggtgccctcgggcggggcccctgggactcctctgatcgatctgccctcctaaaaagcaagctgagggcgctgctcactgcccctcggagcctgcggagatccagctgcttcggg

SEQ ID NO: 604822 - DNA, 120 bp, Artificial Sequence
  ENSG00000175206_4 (sequence is synthesized)
ggcaggatggacaggattggagcccagagcggactgggctgtaacagcttccggtactgaagataacagccagggaggacaagcagggctgggcctagggacagactgcaagaggctcct

SEQ ID NO: 604823 - DNA, 120 bp, Artificial Sequence
  ENSG00000175206_5 (sequence is synthesized)
gtcccctggggtctctgctgcatttgtgtcatcttgttgccatggagttgtgatcatcccatctaagctgcagcttcctgtcaacacttctcacatcttatgctaactgtagataaagtg

SEQ ID NO: 604824 - DNA, 120 bp, Artificial Sequence
  ENSG00000175206_6 (sequence is synthesized)
gtttgatggtgacttcctcgcctctcccaccccatgcattaaattttaaggtagaacctcacctgttactgaaagtggtttgaaagtgaataaacttcagcaccatggacagaagacaaa

SEQ ID NO: 604825 - DNA, 120 bp, Artificial Sequence
  ENSG00000175206_7 (sequence is synthesized)
ggactgccaggggtgaaggcagccctgtctgaggccagaggtctgcccacgtggcggatgaggcaggtgtgaggccagcttgagcatctggatccatttgtctcgggctgctggctgcct

SEQ ID NO: 604826 - DNA, 120 bp, Artificial Sequence
  ENSG00000175206_8 (sequence is synthesized)
gccatttcctcctctccacccttatttggaggccctgacagctgagccacaaacaaaccaggggagctgggcaccagccaagcgtcaccctctgtttccccgcacgggtaccagcgtcga

SEQ ID NO: 604827 - DNA, 120 bp, Artificial Sequence
  ENSG00000175213_0 (sequence is synthesized)
aggctttctgacccggaatggaggaggcggaggagctgctcttggaggggaagaaggcgctgcaactcgcccgcgagccgcgcctgggcctggacttaggatggaacccttccggagaag

SEQ ID NO: 604828 - DNA, 120 bp, Artificial Sequence
  ENSG00000175213_1 (sequence is synthesized)
gctgtacgcagggcctcaaagacgtcccacccgagccgacccgagacatcctcgctttaaagagccttccccggggcttggcccttggcccctcactcgccaaggaacagcgcttggggg

SEQ ID NO: 604829 - DNA, 120 bp, Artificial Sequence
  ENSG00000175213_2 (sequence is synthesized)
tctggtgtgtcggggaccccctgcagcccggcctgctgtgggggccgctggaagaggagtctgcctccaaggagaagggcgagggagtaaagccacggcaggaggagaacctgtcattag

SEQ ID NO: 604830 - DNA, 120 bp, Artificial Sequence
  ENSG00000175213_3 (sequence is synthesized)
gcccatggggagacgtgtgtgcctgtgagcagagttctggctggactagcttggtacaacggggcaggctggagagtgagggaaatgtggccccagtgcggatcagcgagaggcttcatc

SEQ ID NO: 604831 - DNA, 120 bp, Artificial Sequence
  ENSG00000175213_4 (sequence is synthesized)
tgcaagtgtaccagctggtgctgccaggctctgaactgctgctgtggccccagccttcctctgagggcccaagtctcacccagcctgggctggacaaagaggcagctgtagcagtggtga

SEQ ID NO: 604832 - DNA, 120 bp, Artificial Sequence
  ENSG00000175213_5 (sequence is synthesized)
cagaagtggagtctgctgtacagcaggaagtggcctcccctggggaggatgcagcagaaccttgcatagatcctggttcccagtcaccctctggcatccaggcagagaatatggtgagcc

SEQ ID NO: 604833 - DNA, 120 bp, Artificial Sequence
  ENSG00000175213_6 (sequence is synthesized)
ctggacttaagttcccaacccaggaccgaatttccaaggatagccagccacttggcccattgcttcaggatggcgacgtggatgaggaatgcccggcccaggcacagatgccacctgaac

SEQ ID NO: 604834 - DNA, 120 bp, Artificial Sequence
  ENSG00000175213_7 (sequence is synthesized)
ttcagagcaattcggctacccagcaggacccagatggcagtggagccagtttctcatcttctgccaggggcacccagccgcatggctacctggccaagaagttacacagccccagtgatc

SEQ ID NO: 604835 - DNA, 120 bp, Artificial Sequence
  ENSG00000175213_8 (sequence is synthesized)
agtgcccacccagagcaaagaccccagagcctggagcccagcagtctggcttccctacactctcgcggagccctcctggcccagcaggaagctccccaaagcaggggcgacggtaccggt

SEQ ID NO: 604836 - DNA, 120 bp, Artificial Sequence
  ENSG00000175213_9 (sequence is synthesized)
acaagccctttctttgcactgagtgtggcaagagctatagctcagaggagagcttcaaagcccatatgctgggccaccgtggggtgcggcccttcccctgtccacaatgcgacaaggcct

SEQ ID NO: 604837 - DNA, 120 bp, Artificial Sequence
  ENSG00000175213_10 (sequence is synthesized)
atggcacccagcgagacctcaaagagcaccaggtggtacattcaggtgcccggccctttgcttgtgaccagtgtggcaaggcctttgcccgccggccctccctgcggctgcatcgcaaga

SEQ ID NO: 604838 - DNA, 120 bp, Artificial Sequence
  ENSG00000175213_11 (sequence is synthesized)
cccaccaggtgccagctgcccctgccccttgcccatgccctgtgtgtgggcggcccctggccaaccagggctccctgcggaaccatatgaggctccatacaggagaaaagcctttcctgt

SEQ ID NO: 604839 - DNA, 120 bp, Artificial Sequence
  ENSG00000175213_12 (sequence is synthesized)
gcccgcactgtggccgggcgtttcgtcagcggggcaacctgcgtgggcatttgcggctccacaccggggagcgtccttaccgctgcccacactgtgccgatgccttcccccagctgcctg

SEQ ID NO: 604840 - DNA, 120 bp, Artificial Sequence
  ENSG00000175213_13 (sequence is synthesized)
aactgcggcgccatctcatctcacacaccggggaggcccacttgtgcccggtgtgtggcaaggccctccgagacccacacacgctccgagctcacgagcgcctgcactccggagagaggc

SEQ ID NO: 604841 - DNA, 120 bp, Artificial Sequence
  ENSG00000175213_14 (sequence is synthesized)
cctttccctgtccccagtgtggccgtgcttacacgctggccaccaagctgcggcgccacctcaaatctcacttggaggacaagccctaccgctgccccacctgtggcatgggctacaccc

SEQ ID NO: 604842 - DNA, 120 bp, Artificial Sequence
  ENSG00000175213_15 (sequence is synthesized)
tcccgcagagcctcaggcggcatcagctcagtcaccggcctgaggcaccctgcagcccaccctctgtgccttctgctgcttctgagcccactgtggtgctcctgcaggctgagccacaac

SEQ ID NO: 604843 - DNA, 120 bp, Artificial Sequence
  ENSG00000175213_16 (sequence is synthesized)
tgctggacacacacagagaggaggaagtctcccccgccagggatgttgttgaggtcaccatttcagaaagccaggagaagtgctttgtggtgccagaggagccagatgccgcccccagcc

SEQ ID NO: 604844 - DNA, 120 bp, Artificial Sequence
  ENSG00000175213_17 (sequence is synthesized)
tggtgctaatccataaggacatgggcctcggcgcctgggcagaggtggtggaggtggagatgggcacctgacagctttgccttttgctgacacagctccataaagactcgtgctttctca

SEQ ID NO: 604845 - DNA, 120 bp, Artificial Sequence
  ENSG00000175213_18 (sequence is synthesized)
actgtcatttcctattcagtgctcttttgcagtgaatgttccaaaggcacggcgtcctttaggacccagactgcttggggactggggctttcggggaagaccacttgaatagtgagcatc

SEQ ID NO: 604846 - DNA, 120 bp, Artificial Sequence
  ENSG00000175213_19 (sequence is synthesized)
acggcaggaggaggtattgaaggatagagcgacttccctccgcccttgaaaatgtaggggaggtttggacattgctagacagcttttcaatttgaagaaagagagtatttcaagagatag

SEQ ID NO: 604847 - DNA, 120 bp, Artificial Sequence
  ENSG00000175213_20 (sequence is synthesized)
gagatagtcttgtcccttctcttcaggactgtctcctctcagcagcagtagttaaagaatcgaggtttgaaaagttgttgaaagctggaatcatacagtgtcagcagtgagtgaggaagg

SEQ ID NO: 604848 - DNA, 120 bp, Artificial Sequence
  ENSG00000175213_21 (sequence is synthesized)
agtgccctcagagtcgctgggggcttctgaagagcccttgagcctcctcaaaactttcagggccctccttagagccctcacctgtccctcgggctccgcaggcccacctggacctgcggt

SEQ ID NO: 604849 - DNA, 120 bp, Artificial Sequence
  ENSG00000175213_22 (sequence is synthesized)
ttcctcccacacttttccccacctcccaccttcttgggtggctccctcactgtcttcccttctctctgcagcccgcgagccgcgcctgggcctggacttaggatggaacccttccggaga

SEQ ID NO: 604850 - DNA, 120 bp, Artificial Sequence
  ENSG00000175215_0 (sequence is synthesized)
ctcttgttttcgctccggattctccatgttggacccaaactgaggagcccggagctgccgctgggggatcggggccgggggcacccgggggagccgctgcccgggccgcccgccctttgt

SEQ ID NO: 604851 - DNA, 120 bp, Artificial Sequence
  ENSG00000175215_1 (sequence is synthesized)
acaggccgcctcccttcccggtccggggaggaaacgagaggggggatgtgaacagctgtggaagtcggagtctcgggagccggagcgggcccccgcccaggccccccagcccagcccagc

SEQ ID NO: 604852 - DNA, 120 bp, Artificial Sequence
  ENSG00000175215_2 (sequence is synthesized)
ccgcgcgcccgcccgtcctcccgcccagccagcccgggcccgcgggattgttagatggaacacggctccatcatcacccaggcgcggagggaagacgccctggtgctcaccaagcaaggc

SEQ ID NO: 604853 - DNA, 120 bp, Artificial Sequence
  ENSG00000175215_3 (sequence is synthesized)
ctggtctccaagtcctctcctaagaagcctcgtggacgtaacatcttcaaggcccttttctgctgttttcgcgcccagcatgttggccagtcaagttcctccactgagctcgctgcgtat

SEQ ID NO: 604854 - DNA, 120 bp, Artificial Sequence
  ENSG00000175215_4 (sequence is synthesized)
aaggaggaagcaaacaccattgctaagtcggatctgctccagtgtctccagtaccagttctaccagatcccagggacctgcctgctcccagaggtgacagaggaagatcaaggaaggatc

SEQ ID NO: 604855 - DNA, 120 bp, Artificial Sequence
  ENSG00000175215_5 (sequence is synthesized)
tgtgtggtcattgacctcgatgaaacccttgtgcatagctcctttaagccaatcaacaatgctgacttcatagtgcctatagagattgaggggaccactcaccaggtgtatgtgctcaag

SEQ ID NO: 604856 - DNA, 120 bp, Artificial Sequence
  ENSG00000175215_6 (sequence is synthesized)
aggccttatgtggatgagttcctgagacgcatgggggaactctttgaatgtgttctcttcactgccagcctggccaagtatgccgaccctgtgacagacctgctggaccggtgtggggtg

SEQ ID NO: 604857 - DNA, 120 bp, Artificial Sequence
  ENSG00000175215_7 (sequence is synthesized)
ttccgggcccgcctattccgtgagtcttgcgtgttccaccagggctgctacgtcaaggacctcagccgcctggggagggacctgagaaagaccctcatcctggacaactcgcctgcttct

SEQ ID NO: 604858 - DNA, 120 bp, Artificial Sequence
  ENSG00000175215_8 (sequence is synthesized)
tacatattccaccccgagaatgcagtgcctgtgcagtcctggtttgatgacatggcagacactgagttgctgaacctgatcccaatctttgaggagctgagcggagcagaggacgtctac

SEQ ID NO: 604859 - DNA, 120 bp, Artificial Sequence
  ENSG00000175215_9 (sequence is synthesized)
accagccttgggcagctgcgggccccttagcctgccctgcttccaagcgacggccatcccagtaggggactttcccacactgtgcctttacgatcagcgtgacagagtagaagctggagt

SEQ ID NO: 604860 - DNA, 120 bp, Artificial Sequence
  ENSG00000175215_10 (sequence is synthesized)
gcctcaccacacggcccggaaacagcgggaagtaactggaaagagctttaggacagcttagatgccgagtgggcgaatgccagaccaatgatacccagagctacctgccgccaacttgtt

SEQ ID NO: 604861 - DNA, 120 bp, Artificial Sequence
  ENSG00000175215_11 (sequence is synthesized)
gagatgtgtgtttgactgtgagagagtgtgtgtttgtgtgtgtgttttgccatgaactgtggccccagtgtatagtgtttcagtgggggagaagctgaaagaccaagactcttcccaagt

SEQ ID NO: 604862 - DNA, 120 bp, Artificial Sequence
  ENSG00000175215_12 (sequence is synthesized)
tagcttgtctcctctcctgtcaccctaagagccactgagttgtgtagggatgaagactattgaagactccattgccaaaccatggcctttcctcagtgttgtaaggcctatgccaaggat

SEQ ID NO: 604863 - DNA, 120 bp, Artificial Sequence
  ENSG00000175215_13 (sequence is synthesized)
aaaggaagggtatgcctttgggtactccaggcacacacctttctgaaatccttctccagccagctgctgcagacaaaagatcacatttctgggaagatgagaacttgtttccagaccagc

SEQ ID NO: 604864 - DNA, 120 bp, Artificial Sequence
  ENSG00000175215_14 (sequence is synthesized)
atccagtggccatcaggtcttgtggcccaaaggctatgcttgcctccggctgagtgcctgggataggccttttctatgtctccccaaggctggggtgctgagcctgccttcctcaccacc

SEQ ID NO: 604865 - DNA, 120 bp, Artificial Sequence
  ENSG00000175215_15 (sequence is synthesized)
tagccatagtctcaaacctgtggggaaggaggttttctccctgcccgggaagaggacagataactgatttccgttcttttgactgtgttttaaaattctctttctaaacacagagtgttg

SEQ ID NO: 604866 - DNA, 120 bp, Artificial Sequence
  ENSG00000175215_16 (sequence is synthesized)
ggcctggtttgtttctgacaaagttacagtcctgggcctgtaatgaatgtcggcggcgctggggttgcagggaaaagacaaatcctcaaagcgtggacgtgtgtccccatggcttgtgga

SEQ ID NO: 604867 - DNA, 120 bp, Artificial Sequence
  ENSG00000175215_17 (sequence is synthesized)
tcagctaagctcgggatcatttccataagtctgcttttcagggattctctgctggtgctggtgcaaggacttctgttccaaaggctgggaaaaactaagctgtcccagcccctcccattt

SEQ ID NO: 604868 - DNA, 120 bp, Artificial Sequence
  ENSG00000175215_18 (sequence is synthesized)
cttgggcagggctcttttcctgttgtgtcttcccccagggcctgtcctgtaccgagctctgtctgttccagccttcatccttcctggctgttgcttttcctcttaagggcctcagaactc

SEQ ID NO: 604869 - DNA, 120 bp, Artificial Sequence
  ENSG00000175215_19 (sequence is synthesized)
cactctgggtgtctcctgctttcaaaggttcttaatagtgaatgctttaaaattaaagtcatcacgaaatggaagttttcccagggtggaaaataagaggaagtgctgctgtaattggga

SEQ ID NO: 604870 - DNA, 120 bp, Artificial Sequence
  ENSG00000175215_20 (sequence is synthesized)
gcacaaggggcctcccaaaaaggagccccacctcagcatcactgccttaatcgtggcctccctggggtgggtggggttctctcctccctccctccctcctcctggggtgggagggcgctc

SEQ ID NO: 604871 - DNA, 120 bp, Artificial Sequence
  ENSG00000175215_21 (sequence is synthesized)
ctgttcccatctctgtgttccctggaggcaggtatcacaaagcatttgtgaattgctttaggtgcagggacaccacccactcaggactcttccccatcatcccttccattgccacaccct

SEQ ID NO: 604872 - DNA, 120 bp, Artificial Sequence
  ENSG00000175215_22 (sequence is synthesized)
agatccagcctcaggaactaacaagttttgagaaaagcaggtagtagagcagcagcttcgtgctctcagcggtggctggctggcatttttctctagcgttgtggtgccaccttcccttct

SEQ ID NO: 604873 - DNA, 120 bp, Artificial Sequence
  ENSG00000175215_23 (sequence is synthesized)
tgtcccaaggttataaggccttgtctttctctttggaatcataaagtggaacagagtccccagaactcatgtggccatttccgccagcatcactccccggtgcctatggggtcccggtgt

SEQ ID NO: 604874 - DNA, 120 bp, Artificial Sequence
  ENSG00000175215_24 (sequence is synthesized)
acctaaagggagaaggaccccatgtgctagccagaaatatactgtctcttgaaggaaagcaggagctcagactcttagagccagctgtggcttcggacccaaggcctgacctaggctgct

SEQ ID NO: 604875 - DNA, 120 bp, Artificial Sequence
  ENSG00000175215_25 (sequence is synthesized)
atcctaatattgcaggaggggcctctcttccaagccccaccctaagggttagcccttggccaaatcttttgccgtctaggcccagccaggcttttctgactaaataagcaataagaggct

SEQ ID NO: 604876 - DNA, 120 bp, Artificial Sequence
  ENSG00000175215_26 (sequence is synthesized)
ctaagctgactgagttgcaaggaccctttccgccctcccttggatctccatgtttttccagatggcggaagagcatgtgccaccccctttcctaacagacttgtccaagtgcttggcgtg

SEQ ID NO: 604877 - DNA, 120 bp, Artificial Sequence
  ENSG00000175215_27 (sequence is synthesized)
ggacccatgaccaaagcccaggatggcttggtgggagtgtccctgctgcatctgcatgaagcccctgctttttaggcctcactcccatcagaaccctgcctgcccacctgcaactccccc

SEQ ID NO: 604878 - DNA, 120 bp, Artificial Sequence
  ENSG00000175215_28 (sequence is synthesized)
ccaacaatgccattcccacttgccccagagaagctactcggccaaacctagccagggtctgttcttgtggaccagagccagcctagtcattatttgctgtcgggtttccagtttcaccgt

SEQ ID NO: 604879 - DNA, 120 bp, Artificial Sequence
  ENSG00000175215_29 (sequence is synthesized)
gtgttagggtgagggatgattgtaaaatttgctcctcaaaggaatcaggccagactcaattttggagggcaagacagggaggaggccgcttcatcccagactctcttctagggcttccca

SEQ ID NO: 604880 - DNA, 120 bp, Artificial Sequence
  ENSG00000175215_30 (sequence is synthesized)
ccatcagcccctcccacttgagactggtctttgggaggcaataggccaccatgcctggtcagcaccaattcaagccatgccaggaatctgcctacctgccaggttcagttcttttaaggt

SEQ ID NO: 604881 - DNA, 120 bp, Artificial Sequence
  ENSG00000175215_31 (sequence is synthesized)
gcctcttcagggacacagtgtgtctctctgattgggcttctaaatcaaaagcctgatgttcgtgtccctctcatagggggagctttggacacaggaccagtttggaaaagggtcaggtaa

SEQ ID NO: 604882 - DNA, 120 bp, Artificial Sequence
  ENSG00000175215_32 (sequence is synthesized)
gggtttccactctgcacattgtagagggaacactctgtaggcccatgggtcccttactagagaggttgagtgaatttgccttcagttaacatgggaccttctgtttagcttcctcttgct

SEQ ID NO: 604883 - DNA, 120 bp, Artificial Sequence
  ENSG00000175215_33 (sequence is synthesized)
tcccaaagattttaagcattttgtaaatgtataaactcacctctggtaacagtggcccagacgctgctttgtgctaaaagcatgggaaatgtaaaggcagtctttctctgggaaatggat

SEQ ID NO: 604884 - DNA, 120 bp, Artificial Sequence
  ENSG00000175215_34 (sequence is synthesized)
gctattctattctgctgcccctacctgttcctgaggcctcatttagaaagaaaatcccctcagaaggctgtctggcacccagtgtcctagccaggccaagtatatgagaaaggtaagtcc

SEQ ID NO: 604885 - DNA, 120 bp, Artificial Sequence
  ENSG00000175215_35 (sequence is synthesized)
attttccccttcaggtcctcagtggattacttaaccactgctgtccctcggtccctttttcctaaacgggtttagttctgtcttttttctccttttttctaaatgctggtaaatatttac

SEQ ID NO: 604886 - DNA, 120 bp, Artificial Sequence
  ENSG00000175215_36 (sequence is synthesized)
attcagccagggaagaggaggccagaggtcgggccagctgccccattcttttaacgttgtagggcctgcccatggagcggaccctcctctttgggcctcgtgagcttttttgcttatcat

SEQ ID NO: 604887 - DNA, 120 bp, Artificial Sequence
  ENSG00000175215_37 (sequence is synthesized)
gttccatttcgtgccgctttcccccttcaagatgccatttggagggtaggggatctgcttcccactgtgactgggctatgggattctgactaccttgcttacagattcatggtttgataa

SEQ ID NO: 604888 - DNA, 120 bp, Artificial Sequence
  ENSG00000175215_38 (sequence is synthesized)
atttgttgtattcaaaaacttgaaatgcaggacgccattaagtgtctgtttatatttttggaatatttgtattacttacaattaattaataaaagtgggtttaaaaaacctttccaggaa

SEQ ID NO: 604889 - DNA, 120 bp, Artificial Sequence
  ENSG00000175215_39 (sequence is synthesized)
gagggcctgctatgtgcaaggcattagattttaggggacagctggtgctccatgccctcttcccacagctgctgtccatcccacacctgccctggccaccacctccaatgtccagatcac

SEQ ID NO: 604890 - DNA, 120 bp, Artificial Sequence
  ENSG00000175215_40 (sequence is synthesized)
tcctgggttggtgattgtgtctccacaaacaacccagctcttcccataattatgccaaggggtacaattgggctttcttggtaggcagatctcagcaacctggcttggttttagatccca

SEQ ID NO: 604891 - DNA, 120 bp, Artificial Sequence
  ENSG00000175215_41 (sequence is synthesized)
ggttgaggttgggaccactgatccattggaagcctggtgaggggtacagccagttctccgggtctgtggggtctcagggggccgcaggcttccagccaggtagcccaggaggctgggctg

SEQ ID NO: 604892 - DNA, 120 bp, Artificial Sequence
  ENSG00000175216_0 (sequence is synthesized)
gcggcggcccaagcggtttcaaacggcttagagcaggccgcttggttctgacccagctgaggaaatactcttaattctaaggaaaacctggaagcacaatgggagatgacagtgagtggt

SEQ ID NO: 604893 - DNA, 120 bp, Artificial Sequence
  ENSG00000175216_1 (sequence is synthesized)
tgaaactgccagttgatcagaaatgtgaacacaagctgtggaaagcaaggttaagtgggtatgaagaggccctgaagatcttccagaaaataaaggatgaaaagagcccagagtggtcca

SEQ ID NO: 604894 - DNA, 120 bp, Artificial Sequence
  ENSG00000175216_2 (sequence is synthesized)
aatttttaggattgatcaaaaaatttgtcactgattccaatgcagtggttcaattgaaaggattagaagctgcacttgtttatgttgaaaatgcccatgtagcaggaaaaaccacaggag

SEQ ID NO: 604895 - DNA, 120 bp, Artificial Sequence
  ENSG00000175216_3 (sequence is synthesized)
aagttgtgtcaggtgttgtaagtaaggtgttcaatcaacctaaagctaaagccaaggagctgggcatagagatctgtcttatgtacatagagattgagaaaggagaggctgttcaagaag

SEQ ID NO: 604896 - DNA, 120 bp, Artificial Sequence
  ENSG00000175216_4 (sequence is synthesized)
agctcctgaaaggcttggacaataagaatcccaagatcatagtggcctgtatagagacactgaggaaagccttaagtgaatttggttccaaaatcatcttgcttaagccaattatcaaag

SEQ ID NO: 604897 - DNA, 120 bp, Artificial Sequence
  ENSG00000175216_5 (sequence is synthesized)
tgttgccaaaactctttgagtctcgagagaaggctgttcgagatgaagccaaactaattgctgtggagatttacagatggattcgggatgctctgagacccccattacaaaatataaact

SEQ ID NO: 604898 - DNA, 120 bp, Artificial Sequence
  ENSG00000175216_6 (sequence is synthesized)
ctgttcagttgaaagaactagaagaagaatgggtcaaactgccaacaagtgctcctagacctactcgatttcttcgttcccaacaagaactagaagctaaattggaacaacaacagtctg

SEQ ID NO: 604899 - DNA, 120 bp, Artificial Sequence
  ENSG00000175216_7 (sequence is synthesized)
ctggtggagatgctgaaggaggtggtgatgatggtgatgaggtgccacaaatagatgcttatgagcttttagaagctgtagaaatcctttccaaacttcccaaagacttttatgacaaaa

SEQ ID NO: 604900 - DNA, 120 bp, Artificial Sequence
  ENSG00000175216_8 (sequence is synthesized)
ttgaggcaaaaaaatggcaagagagaaaagaggccctggagtctgtagaagtactaataaaaaaccccaaactggaagctggcgattatgcagatttagtaaaagcattaaagaaggttg

SEQ ID NO: 604901 - DNA, 120 bp, Artificial Sequence
  ENSG00000175216_9 (sequence is synthesized)
ttggaaaggacaccaatgtcatgttggtggctttggcagcaaaatgtcttactggcctggctgttgggctaaggaagaaatttggacaatatgcaggacatgttgtgccaaccatcttgg

SEQ ID NO: 604902 - DNA, 120 bp, Artificial Sequence
  ENSG00000175216_10 (sequence is synthesized)
agaaattcaaagagaagaaacctcaagtggtacaagccctgcaggaggcaattgatgcaatcttccttactaccacactacagaacatcagtgaggatgttttagcagtaatggataata

SEQ ID NO: 604903 - DNA, 120 bp, Artificial Sequence
  ENSG00000175216_11 (sequence is synthesized)
aaaatccaaccatcaagcagcagacatctctttttattgcaagaagtttccgccactgcactgcttctaccctgccaaagagcttgctaaagcccttttgtgctgcactacttaagcaca

SEQ ID NO: 604904 - DNA, 120 bp, Artificial Sequence
  ENSG00000175216_12 (sequence is synthesized)
tcaatgattctgctcctgaagtcagagatgccgcatttgaagcattgggtactgctttgaaggtggttggcgagaaagcagtaaacccattcctagctgatgtggacaaactcaagcttg

SEQ ID NO: 604905 - DNA, 120 bp, Artificial Sequence
  ENSG00000175216_13 (sequence is synthesized)
ataagatcaaagaatgttcagaaaaggtagaactgatacatggtaagaaagctggactagctgctgataagaaggaattcaaacctctgcctggaaggactgctgcttcaggggctgcag

SEQ ID NO: 604906 - DNA, 120 bp, Artificial Sequence
  ENSG00000175216_14 (sequence is synthesized)
gagataaggacacaaaggacatttctgcacccaaaccaggacctctaaaaaaggcacctgctgctaaggctggtgggccaccaaaaaaggggaaaccagctgcaccaggaggcgcaggga

SEQ ID NO: 604907 - DNA, 120 bp, Artificial Sequence
  ENSG00000175216_15 (sequence is synthesized)
atactggaaccaagaacaagaaaggactggagactaaagaaatagtggagcctgagctctcgatagaagtatgtgaagaaaaagcttcagctgttcttccccctacctgtatacagcttc

SEQ ID NO: 604908 - DNA, 120 bp, Artificial Sequence
  ENSG00000175216_16 (sequence is synthesized)
ttgacagcagtaactggaaagaaaggctggcttgtatggaagagttccagaaggctgttgagctaatggaccgaactgaaatgccatgccaggcattagtgaggatgctagccaagaaac

SEQ ID NO: 604909 - DNA, 120 bp, Artificial Sequence
  ENSG00000175216_17 (sequence is synthesized)
ctggatggaaagaaactaattttcaggtgatgcaaatgaagcttcatatagttgctttgattgcccagaagggaaatttttccaaaacgtcagctcaggttgtattagatggccttgtgg

SEQ ID NO: 604910 - DNA, 120 bp, Artificial Sequence
  ENSG00000175216_18 (sequence is synthesized)
acaagattggagatgtgaaatgtgggaacaatgcaaaagaagctatgacagcaatagccgaagcctgtatgttaccatggactgctgaacaggttgtgtcaatggctttctcacaaaaga

SEQ ID NO: 604911 - DNA, 120 bp, Artificial Sequence
  ENSG00000175216_19 (sequence is synthesized)
atcccaaaaatcagtcagaaactctgaattggctatcaaatgccataaaagaatttggtttttctgggttgaatgtcaaagctttcattagcaatgtgaagacagctcttgctgcaacaa

SEQ ID NO: 604912 - DNA, 120 bp, Artificial Sequence
  ENSG00000175216_20 (sequence is synthesized)
acccagctgtgaggactgctgccataaccctgcttggcgtgatgtatctgtatgttggtccctctttgcgaatgttctttgaggatgagaagcctgccctcctatcccagatagatgcag

SEQ ID NO: 604913 - DNA, 120 bp, Artificial Sequence
  ENSG00000175216_21 (sequence is synthesized)
aatttgagaagatgcagggacaaagtccacctgctccaaccagaggaatttccaagcatagcacaagtggtacagatgaaggagaagatggagatgaaccagatgacgggagcaatgatg

SEQ ID NO: 604914 - DNA, 120 bp, Artificial Sequence
  ENSG00000175216_22 (sequence is synthesized)
tcgttgatcttttgccgaggacggagatcagtgataaaatcacttcagagttggtatctaagattggtgataagaattggaagattaggaaagaaggcctagatgaagtggcaggtatta

SEQ ID NO: 604915 - DNA, 120 bp, Artificial Sequence
  ENSG00000175216_23 (sequence is synthesized)
ttaatgacgcaaaatttatccaaccgaatataggtgaacttccaactgccttgaagggtcgactcaatgattcaaataaaatcttggtacagcaaacgctgaatatcctgcaacaactgg

SEQ ID NO: 604916 - DNA, 120 bp, Artificial Sequence
  ENSG00000175216_24 (sequence is synthesized)
cagtagccatgggcccaaatattaagcaacatgtaaaaaatttaggcatccctatcatcacagtccttggagacagcaagaacaatgttcgagctgctgccctagcgactgtgaatgctt

SEQ ID NO: 604917 - DNA, 120 bp, Artificial Sequence
  ENSG00000175216_25 (sequence is synthesized)
gggcagaacagactggcatgaaggaatggctggaaggagaagatctttctgaagagctcaaaaaggaaaatcctttcttgaggcaagagcttctgggctggctggctgagaaactaccta

SEQ ID NO: 604918 - DNA, 120 bp, Artificial Sequence
  ENSG00000175216_26 (sequence is synthesized)
ctcttcgttccacccctacagaccttatcctttgtgttcctcatctctactcctgcctagaagatcgaaatggagatgtgcgaaagaaggcccaagatgccttgccattcttcatgatgc

SEQ ID NO: 604919 - DNA, 120 bp, Artificial Sequence
  ENSG00000175216_27 (sequence is synthesized)
atttaggatatgaaaaaatggccaaggctactgggaaactaaagccaacttctaaagatcaggtattggccatgctagagaaagccaaagttaacatgccagccaagcctgctccaccca

SEQ ID NO: 604920 - DNA, 120 bp, Artificial Sequence
  ENSG00000175216_28 (sequence is synthesized)
ctaaagcaacttctaaaccaatgggagggtccgctccagccaaattccagcctgcatcagcacctgctgaagattgtatttccagcagtacagaacccaaacctgatccaaaaaaggcca

SEQ ID NO: 604921 - DNA, 120 bp, Artificial Sequence
  ENSG00000175216_29 (sequence is synthesized)
cctatttttattgttgttccaaatggaaaagagcaaaggatgaaagatgaaaaaggattgaaggtgctaaagtggaattttactaccccacgggatgaatacattgagcaactaaagact

SEQ ID NO: 604922 - DNA, 120 bp, Artificial Sequence
  ENSG00000175216_30 (sequence is synthesized)
caaatgtctagctgtgtggctaaatggttacaagatgagatgtttcactcagactttcagcatcataacaaagcccttgctgttatggttgatcacttggagagtgaaaaagaaggagtt

SEQ ID NO: 604923 - DNA, 120 bp, Artificial Sequence
  ENSG00000175216_31 (sequence is synthesized)
attggttgcctggatcttatcttaaagtggcttaccctgaggttttttgacaccaatacaagcgtcctgatgaaagcactagaatatttaaaattgctcttcaccttgctaagtgaagaa

SEQ ID NO: 604924 - DNA, 120 bp, Artificial Sequence
  ENSG00000175216_32 (sequence is synthesized)
gaatatcatcttactgagaatgaagcatcttccttcatcccctatcttgtcgtcaaggttggagaaccaaaggatgtcattcgtaaagatgttcgtgccatcctgaaccggatgtgcctt

SEQ ID NO: 604925 - DNA, 120 bp, Artificial Sequence
  ENSG00000175216_33 (sequence is synthesized)
gtctacccagctagcaagatgtttccctttatcatggaaggaaccaaatccaaaaactctaagcagagagcagagtgcctggaagagctgggatgtctggttgagtcctatggcatgaat

SEQ ID NO: 604926 - DNA, 120 bp, Artificial Sequence
  ENSG00000175216_34 (sequence is synthesized)
gtttgccaaccaaccccaggaaaagccttaaaggaaatagctgttcacataggagaccgtgacaatgctgtacgcaatgctgcactcaacaccattgtaacggtgtacaatgtacatggg

SEQ ID NO: 604927 - DNA, 120 bp, Artificial Sequence
  ENSG00000175216_35 (sequence is synthesized)
gatcaggtgttcaaactgattggaaatctttctgaaaaggatatgagcatgctcgaggagaggattaagcggtcagcaaagagaccctctgctgcaccaataaaacaggtggaagagaaa

SEQ ID NO: 604928 - DNA, 120 bp, Artificial Sequence
  ENSG00000175216_36 (sequence is synthesized)
cctcagcgtgcacagaacataagctccaatgccaacatgttacgcaagggaccagctgaggacatgtcttccaaactcaaccaagcccgaagcatgagtgggcatcctgaggcagcccag

SEQ ID NO: 604929 - DNA, 120 bp, Artificial Sequence
  ENSG00000175216_37 (sequence is synthesized)
atggtccgccgagaattccagctggatctagatgagattgagaatgacaatggtacagtccgatgtgaaatgccagaacttgttcagcacaaactggatgacatttttgagccagtcctt

SEQ ID NO: 604930 - DNA, 120 bp, Artificial Sequence
  ENSG00000175216_38 (sequence is synthesized)
attcctgaacccaagatccgggctgtttctccacacttcgatgacatgcacagtaatacagcatccacaatcaatttcattatctcccaagtagccagtggtgacatcaacacaagtatc

SEQ ID NO: 604931 - DNA, 120 bp, Artificial Sequence
  ENSG00000175216_39 (sequence is synthesized)
caagctctgacacagatcgatgaggtcctgagacaggaagacaaagctgaagccatgtccggccatattgatcagtttctgatagccacttttatgcagctaagactcatctacaacaca

SEQ ID NO: 604932 - DNA, 120 bp, Artificial Sequence
  ENSG00000175216_40 (sequence is synthesized)
cacatggcagatgagaaattggagaaggacgagatcatcaagttgtatagctgtatcattggcaacatgatttcgctgtttcagatagagagccttgcccgggaggcctccactggagta

SEQ ID NO: 604933 - DNA, 120 bp, Artificial Sequence
  ENSG00000175216_41 (sequence is synthesized)
ctaaaagacctaatgcatggcctcatcaccttaatgctggattctcggattgaagatcttgaggaaggacaacaggtcatccgctctgtgaacctcttggtggtgaaggttctggagaag

SEQ ID NO: 604934 - DNA, 120 bp, Artificial Sequence
  ENSG00000175216_42 (sequence is synthesized)
tcagaccagaccaacatcctgagtgccctacttgttttgctccaagacagcctgctagcaacagccagttctcccaaattctcagagcttgttatgaagtgtctctggagaatggttcga

SEQ ID NO: 604935 - DNA, 120 bp, Artificial Sequence
  ENSG00000175216_43 (sequence is synthesized)
ctgttgcctgataccatcaatagcattaacctagacagaattcttctggatatccacattttcatgaaggtcttccccaaagagaaactgaagcaatgcaaaagtgaatttcccataagg

SEQ ID NO: 604936 - DNA, 120 bp, Artificial Sequence
  ENSG00000175216_44 (sequence is synthesized)
accctaaagaccctgctacacaccttatgcaaattaaaagggcccaagatcctggaccacctaacgatgatcgacaacaaaaacgagtctgagctggaggcccatctctgccggatgatg

SEQ ID NO: 604937 - DNA, 120 bp, Artificial Sequence
  ENSG00000175216_45 (sequence is synthesized)
aagcacagtatggaccagactgggagcaagtctgataaggaaacagaaaagggagcatctcgaatagatgaaaaatcatcaaaggccaaagtgaatgatttcttagctgagatttttaag

SEQ ID NO: 604938 - DNA, 120 bp, Artificial Sequence
  ENSG00000175216_46 (sequence is synthesized)
aagattggctctaaagaaaacactaaagagggactagcagagttatatgaatataagaagaaatactcagatgctgacattgaaccatttctgaaaaattcctcacagttcttccagagc

SEQ ID NO: 604939 - DNA, 120 bp, Artificial Sequence
  ENSG00000175216_47 (sequence is synthesized)
tatgtcgaaagaggccttcgggtgattgagatggagagggagggcaaaggtcgtatttccacttcaacaggcatctcccctcagatggaagtcacatgtgtgcccacgcccacaagcaca

SEQ ID NO: 604940 - DNA, 120 bp, Artificial Sequence
  ENSG00000175216_48 (sequence is synthesized)
gtgtcctccataggtaacacaaatggggaagaagtggggccatctgtctacttggaaaggctaaagatcctccgacagcgatgtggtctggacaacacaaagcaagatgaccgacctcct

SEQ ID NO: 604941 - DNA, 120 bp, Artificial Sequence
  ENSG00000175216_49 (sequence is synthesized)
ttgacctctttgctctccaaaccagcagttcctactgtcgcctcttccacagacatgctccacagcaaactctctcagctccgggagtcacgggagcagcaccagcattcagacctggat

SEQ ID NO: 604942 - DNA, 120 bp, Artificial Sequence
  ENSG00000175216_50 (sequence is synthesized)
tctaaccagactcactcttcaggaactgtgacctcctcctcctccacagctaacatagacgacttgaaaaaaagactggagagaataaagagcagtcgcaaatgaagctgccccactccc

SEQ ID NO: 604943 - DNA, 120 bp, Artificial Sequence
  ENSG00000175216_51 (sequence is synthesized)
ccggcaccctgcagctttagtttactaaactagaagtcctcatagtttaaaatggcctcagcaggcctagtgtatacaaactggttgtatgtatcatgccgtggagctagggggaggagt

SEQ ID NO: 604944 - DNA, 120 bp, Artificial Sequence
  ENSG00000175216_52 (sequence is synthesized)
cattgtggcacaagtatttgtacatactctgcttctctctgtcagcgtcctgctgctctagaagactgtccgtggatgagtttagtgtacagacttgtaaacagctgccccctctctgct

SEQ ID NO: 604945 - DNA, 120 bp, Artificial Sequence
  ENSG00000175216_53 (sequence is synthesized)
cagtctagttcccagatccttttcttttctttttaattgctcatttgtaaaattgtcctaatctttcctagctttttaatagttaatattagaaactctttaatagttttcctttcagtt

SEQ ID NO: 604946 - DNA, 120 bp, Artificial Sequence
  ENSG00000175216_54 (sequence is synthesized)
tgtgagctcttctctgtcgccctgaagggtcactgtattctgtatgaatgcatggcatgatacaactaatttaagagtcttttataaataaagtttgcattaactatacctgactcccaa

SEQ ID NO: 604947 - DNA, 120 bp, Artificial Sequence
  ENSG00000175216_55 (sequence is synthesized)
gatgctccatatcatggagtgttgggcagcaattttttaacttttggtaccagctgggtattcagccagttagagaaaggttaattactgcttacagagcttccctttttcttggctcac

SEQ ID NO: 604948 - DNA, 120 bp, Artificial Sequence
  ENSG00000175216_56 (sequence is synthesized)
agacttggagctgtcttttattcctttggaatggaaggaactctccttccctgctctccacaaacagctcctagggagcagaaaaatctcatccttccttgttttgagattttggtcatg

SEQ ID NO: 604949 - DNA, 120 bp, Artificial Sequence
  ENSG00000175216_57 (sequence is synthesized)
atttccctccaattatcaccagtcgtttcaagaagctcttgggcatcctaccactttgctgaccaaaggcacacaagattgcgcccagagattggctgggcttcagtggttctcacacta

SEQ ID NO: 604950 - DNA, 120 bp, Artificial Sequence
  ENSG00000175216_58 (sequence is synthesized)
caactagatttgtgttcatttgactaatggagtttgggaaatcttagtggtttgctgcttggttgtatgagtctcttttggtccaggctaacagttgcttcacattcagtcagagtaagg

SEQ ID NO: 604951 - DNA, 120 bp, Artificial Sequence
  ENSG00000175216_59 (sequence is synthesized)
aatgctgctgccgccgccgccgccgcctgccgggtattcctgctgatcctgctcggaccttagcttccctgacctctccctgcccggggagcgaaatactcttaattctaaggaaaacct

SEQ ID NO: 604952 - DNA, 120 bp, Artificial Sequence
  ENSG00000175216_60 (sequence is synthesized)
ggacactgcggggtgtgcggcggcccaagcggtttcaaacggcttagagcaggccgcttggttctgacccagctgaggaaaacctggaagcacaatgggagatgacagtgagtggttgaa

SEQ ID NO: 604953 - DNA, 120 bp, Artificial Sequence
  ENSG00000175216_61 (sequence is synthesized)
actgccagttgatcagaaatgtgaacacaaggtaagattcttctggaattcgattttcagtgtcgttggcttgttttgtgagcagttatactatcatcttacttagaagtgtgtgaaaac

SEQ ID NO: 604954 - DNA, 120 bp, Artificial Sequence
  ENSG00000175216_62 (sequence is synthesized)
gaaagaattcaaagaaaagatattagtgaagtgaaaagtaagtggtatctatgaaaagtaactggctagttttttcatctccttgtatatacagtacaatatacttctggtacctaagta

SEQ ID NO: 604955 - DNA, 120 bp, Artificial Sequence
  ENSG00000175216_63 (sequence is synthesized)
cttactaatattttattatatagagactcttcttttgagatgtgttctgaatttggccttagaaatccagcattttttaggttctctgatttatatgatcggcattccaatatttaccct

SEQ ID NO: 604956 - DNA, 120 bp, Artificial Sequence
  ENSG00000175216_64 (sequence is synthesized)
cagaatctaccaatctttattttctagtttatgctagtaagatacaatttattacatcatgtcattatttggtgggcatcctttcagattatcttattttttccccaactatacctctag

SEQ ID NO: 604957 - DNA, 120 bp, Artificial Sequence
  ENSG00000175216_65 (sequence is synthesized)
gcagttcagggagggtagtcacaagcaggtccgaggcaggctggcccacagagaagtggcttagtcttgctgtagttctggagctgcatcttgacctgcttgacctgaccttagacaatc

SEQ ID NO: 604958 - DNA, 120 bp, Artificial Sequence
  ENSG00000175216_66 (sequence is synthesized)
tctctccttctctcaatagcaagatgaccgacctcctttgacctctttgctctccaaaccagcagttcctactgtcgcctcttccacagacatgctccacagcaaactctctcagctccg

SEQ ID NO: 604959 - DNA, 120 bp, Artificial Sequence
  ENSG00000175216_67 (sequence is synthesized)
ataatgtgtgtgacttctctgacaccatgtactgcctcccttacttcagtggtatttcaaaactaggagctcaatcatttgtttgacagaggatttgttcataagctttgtatgacttta

SEQ ID NO: 604960 - DNA, 120 bp, Artificial Sequence
  ENSG00000175216_68 (sequence is synthesized)
ataagctccaatgccaacatgttacgcaagggaccagctgaggacatgtcttccaaactcaaaattatgtatcgcacttataggatccaagcccgaagcatgagtgggcatcctgaggca

SEQ ID NO: 604961 - DNA, 120 bp, Artificial Sequence
  ENSG00000175216_69 (sequence is synthesized)
gctatcaaatgccataaaagaatttggtttttctgggtaagtcagaacgaaatcaagtggaaaatagttaaatgttctgtcagtctctaagtcgtgctgtttataataatagctattgct

SEQ ID NO: 604962 - DNA, 120 bp, Artificial Sequence
  ENSG00000175216_70 (sequence is synthesized)
agtcgtagtcagtatcttgttaaattgacacagatgcagctactacccgtgagtttagataagtgctgggctttgtgggttgtggcataggagggcagtaatataagcagtgctagagga

SEQ ID NO: 604963 - DNA, 120 bp, Artificial Sequence
  ENSG00000175216_71 (sequence is synthesized)
gaatcgactgagactctgaattgaagcttaaccattattagatgactgaagtggcagcctcaaggccagaagctccctcagaagaatggttctcagaagaatgcagtagcattcacaatt

SEQ ID NO: 604964 - DNA, 120 bp, Artificial Sequence
  ENSG00000175220_0 (sequence is synthesized)
gttccaccgcggagccggatgtttgccgagccttgacaggcgtggcagagggagcagtgcccgagcgcggtttctcttaaggttctgcagggcaaggctgtctgggacaggcttggccat

SEQ ID NO: 604965 - DNA, 120 bp, Artificial Sequence
  ENSG00000175220_1 (sequence is synthesized)
ggatccgctctcagagctgcaggatgatctgaccttggatgacaccagcgaggctctgaaccagctgaagctggcctccatcgatgagaagaactggccctcggatgaaatgcctgactt

SEQ ID NO: 604966 - DNA, 120 bp, Artificial Sequence
  ENSG00000175220_2 (sequence is synthesized)
ccccaagtcagatgactccaaaagcagctccccggaacttgtcacacacctgaagtgggatgacccatactatgacatcgcccggcaccagatcgtggaggtggcaggagatgacaagta

SEQ ID NO: 604967 - DNA, 120 bp, Artificial Sequence
  ENSG00000175220_3 (sequence is synthesized)
tgggcggaagatcattgtgtttagtgcctgtcgaatgccccccagccaccagctcgaccacagcaagctcctggggtacctgaagcacaccctggaccagtacgtggagagtgactacac

SEQ ID NO: 604968 - DNA, 120 bp, Artificial Sequence
  ENSG00000175220_4 (sequence is synthesized)
acttctgtatctgcaccacggcctgaccagcgacaacaagccctccctcagctggctccgtgatgcctaccgggagtttgaccgcaagtacaagaaaaacatcaaggccttgtacatcgt

SEQ ID NO: 604969 - DNA, 120 bp, Artificial Sequence
  ENSG00000175220_5 (sequence is synthesized)
gcatccaaccatgttcatcaaaactctgctcatcctcttcaagcccctcatcagcttcaagttcgggcagaagatcttctatgtgaattacctgagcgagctgagcgagcacgtgaagct

SEQ ID NO: 604970 - DNA, 120 bp, Artificial Sequence
  ENSG00000175220_6 (sequence is synthesized)
ggagcagctggggatccctcgccaagtgctcaaatatgacgacttcctgaaatccacacagaagagccccgcgacagcccccaagcccatgcccccacggccccccctgcccaaccagca

SEQ ID NO: 604971 - DNA, 120 bp, Artificial Sequence
  ENSG00000175220_7 (sequence is synthesized)
gtttggagtctcgctgcagcacctccaggagaagaatccagagcaggagcccattcccattgtactcagggagactgttgcctacttacaggcccacgctctcaccaccgagggcatctt

SEQ ID NO: 604972 - DNA, 120 bp, Artificial Sequence
  ENSG00000175220_8 (sequence is synthesized)
ccggaggtcggccaacacccaagtggtccgggaagtgcagcagaagtacaacatggggctgcctgtggatttcgaccagtacaatgagctgcacctgccagcagtcatcctcaagacctt

SEQ ID NO: 604973 - DNA, 120 bp, Artificial Sequence
  ENSG00000175220_9 (sequence is synthesized)
cctccgggagcttcctgagcccctgctcacctttgacctctacccccatgtggtgggcttcctcaacattgatgaaagccagagggtgccagcgacactgcaggtcctccagacgctgcc

SEQ ID NO: 604974 - DNA, 120 bp, Artificial Sequence
  ENSG00000175220_10 (sequence is synthesized)
cgaggagaactaccaggtgcttcgtttcctgactgctttcctggtgcagatttctgcacacagtgaccagaacaagatgaccaacactaacctggctgttgttttcggccctaacctgct

SEQ ID NO: 604975 - DNA, 120 bp, Artificial Sequence
  ENSG00000175220_11 (sequence is synthesized)
gtgggccaaggatgcggccatcaccctcaaggccattaatcccatcaacaccttcaccaagttccttctggatcaccaaggggagctgttcccaagcccggaccccagcgggctctgaac

SEQ ID NO: 604976 - DNA, 120 bp, Artificial Sequence
  ENSG00000175220_12 (sequence is synthesized)
ctggcccctgccccaccagccccttctctggtagcccgggtttggactcttcctcctggcatcaggggccatgaagccccctggagagagatgttggagccacccatcaggcatgctctc

SEQ ID NO: 604977 - DNA, 120 bp, Artificial Sequence
  ENSG00000175220_13 (sequence is synthesized)
ccccacctctgtccagcccgcctcacggccctggcggcctcgctgttaccagaagacgtttttctctgccttacacttctcactgcctctctggacaccgggcttttgctgggctctcca

SEQ ID NO: 604978 - DNA, 120 bp, Artificial Sequence
  ENSG00000175220_14 (sequence is synthesized)
gagccccagtaacccctttcctgctttttcctgcctctgtttccctagcaagtgtggatgaatcaaatgactgccggctgggctggtagcaggggccagtcctcccctcttgattgctgg

SEQ ID NO: 604979 - DNA, 120 bp, Artificial Sequence
  ENSG00000175220_15 (sequence is synthesized)
gaatgagcagctgagctctttggtgtggacaccgccccaagctgaggtgcctccctatctggtaggctgccctgctttgcagaagccccactgcatgaaggcctgagtgcaagcaccctt

SEQ ID NO: 604980 - DNA, 120 bp, Artificial Sequence
  ENSG00000175220_16 (sequence is synthesized)
gctcctgtactgcccccagcagcgcagtctggggtatttcccctgctgaggagtgacagggctggagactgtgtctgctttctgcctcctcttccacacatcctgggtcagcctttccca

SEQ ID NO: 604981 - DNA, 120 bp, Artificial Sequence
  ENSG00000175220_17 (sequence is synthesized)
agtgatactgcccctggggtgtcctaaccccttggttgtgcagggactggtagcttggatgacatggctcagagtcccagcatccacttgaaacctccctctccacctccccgcccccga

SEQ ID NO: 604982 - DNA, 120 bp, Artificial Sequence
  ENSG00000175220_18 (sequence is synthesized)
gagctacagcgtgtgatggaatcagtgaccggccaggttagcctctcccctcttggcctcctttcccacacgggcagatcatcagccttcatgttcttgtggacctgtctgttacggagt

SEQ ID NO: 604983 - DNA, 120 bp, Artificial Sequence
  ENSG00000175220_19 (sequence is synthesized)
cacactggcccctgccccagccagaggtgactcagtgcctcaggatcttatggctccttcctccagctgggggactcttaaaggggctggggtagagactaagagtgcccgtaggagggg

SEQ ID NO: 604984 - DNA, 120 bp, Artificial Sequence
  ENSG00000175220_20 (sequence is synthesized)
ccgtaggaggggcagagattgtgctgataggtcagtccagataggtgggttctagcaatttccccaggggattaaggggctctagggccacctttttttttttttttctgagatggagtc

SEQ ID NO: 604985 - DNA, 120 bp, Artificial Sequence
  ENSG00000175220_21 (sequence is synthesized)
gcacccggccagccctgttgtctttcaaagaacctcggccccagtgatggctgatctcactcccactgtctcgtagaattacactccttcctggggatccctcttcctgcagccttgtcc

SEQ ID NO: 604986 - DNA, 120 bp, Artificial Sequence
  ENSG00000175220_22 (sequence is synthesized)
ttggggagtacagggaagtacctgcagtgaccctgcccccatgaccttggccaggcaggatgattccagagcccgtactgtggggatcctcactgaccagcccagccccatccgcaagcc

SEQ ID NO: 604987 - DNA, 120 bp, Artificial Sequence
  ENSG00000175220_23 (sequence is synthesized)
aggctgggcctgggcataacttcgctgggctctcccaagaccatcagcagtgcatccagccccctggggcctgggctgctgctggttcttcatcagtcccttggtctctagcctcggcca

SEQ ID NO: 604988 - DNA, 120 bp, Artificial Sequence
  ENSG00000175220_24 (sequence is synthesized)
gggctgctctgctctccgccctcctttgtgtatcaagtgtcgctcacagccccattcactggggagcctttcggatctatttggtctttctcatgtcccccactggtctgtaccccaggg

SEQ ID NO: 604989 - DNA, 120 bp, Artificial Sequence
  ENSG00000175220_25 (sequence is synthesized)
agcgggtgcttgtactgtgtgaatccagtgttcacattcacacttaatgacttccttggcaccaatcatgtatttcaccgtttgcactttttgtatttcaataaaaatgttgatgcaaaa

SEQ ID NO: 604990 - DNA, 120 bp, Artificial Sequence
  ENSG00000175220_26 (sequence is synthesized)
ccgctggccctggtgctcctggcatgtggggagccatgtggcctagtggctttgaagtcagaaagccctgggtttgatctccagctctgctctttgaactctaatttcttccttgtgggt

SEQ ID NO: 604991 - DNA, 120 bp, Artificial Sequence
  ENSG00000175220_27 (sequence is synthesized)
tacaataatgaatgcatgtcagggcctagcccagagccagaacacagttggccttgaataagtagccttcccttcccctcgttctattgccctcctacccctccaccctaatgttggctt

SEQ ID NO: 604992 - DNA, 120 bp, Artificial Sequence
  ENSG00000175220_28 (sequence is synthesized)
ttccaccctatcagttactggggaggatgaggagtgccagtccttcctgggaaattgtagccctagggaagtctggaatgggcagagcctctttccaaaaatggggagggggcacatggc

SEQ ID NO: 604993 - DNA, 120 bp, Artificial Sequence
  ENSG00000175220_29 (sequence is synthesized)
tccctggagcaccagattcctggcagatatgctgccctgctgagagtgggtacagagccccgcttaggtctctgtctcagggagctccctccctcctgttcataaggggggacccagaag

SEQ ID NO: 604994 - DNA, 120 bp, Artificial Sequence
  ENSG00000175220_30 (sequence is synthesized)
gttgctgcccattagggctgagggcagaggtgcctacccccaggctgcatgcggctgcagccttctggccagattccagacctacagaaacccagcttggtggtcgagtctgccttgtgc

SEQ ID NO: 604995 - DNA, 120 bp, Artificial Sequence
  ENSG00000175220_31 (sequence is synthesized)
ctgccggagctgctgttctgctggtgacctcctcatctcagcaccccagacatcacgagcatccccctttcccatctgcgccctccaatccttagggccgtcaacctttccaccttgaaa

SEQ ID NO: 604996 - DNA, 120 bp, Artificial Sequence
  ENSG00000175220_32 (sequence is synthesized)
catccagggcccttggctgtgatgtgatgtgtgcaggaggttgtcaagtggcctcagagcccagagtctgtggctctgggatggcagctctccccctcttcttcctgcccacccccaggg

SEQ ID NO: 604997 - DNA, 120 bp, Artificial Sequence
  ENSG00000175220_33 (sequence is synthesized)
cttgtctgctctccttatctgccctgctgattctctgaccatatatgtcagttttggggctccaggaatgcagctggacatggagcagcctcttccctggggttagactgaataggttga

SEQ ID NO: 604998 - DNA, 120 bp, Artificial Sequence
  ENSG00000175220_34 (sequence is synthesized)
cccattgtagcctaatgccacgttctttactgtccctccctgcctgtgggtgctaggccacctgccttaatgccttccctcttctcatgaaggagctggtttatatttaggggagagcac

SEQ ID NO: 604999 - DNA, 120 bp, Artificial Sequence
  ENSG00000175220_35 (sequence is synthesized)
gcctcgctttcctcacctttcaaaagggataataatataggcctctttccttgtaggagtgacaaacagcacatgaaaaggaaggacttttgtccagatgtgatgattgactgttataat

SEQ ID NO: 605000 - DNA, 120 bp, Artificial Sequence
  ENSG00000175220_36 (sequence is synthesized)
cctatggtgtttctgagatggttgcagttgtttatcgtttataggactcattagtgttgtcttattttgtgcctttggtgtcagtggtttctataccgatgtgggttctggggccaaaca

SEQ ID NO: 605001 - DNA, 120 bp, Artificial Sequence
  ENSG00000175220_37 (sequence is synthesized)
tatgtaatagctctggccggtccagacatgtcctgattcatgtctgaaggctggttgaatgccaaggcttgaaagactcatttatggttgagccagctctgggcccacaggcgagcaaac

SEQ ID NO: 605002 - DNA, 120 bp, Artificial Sequence
  ENSG00000175220_38 (sequence is synthesized)
tcacttcctgctgctgtcctcggggtgtgtagtagagtgagaccatcttgcccttctttctgttttctcggcaaattttagaaagatgcagttctttcctgaccagtttgaagcactctc

SEQ ID NO: 605003 - DNA, 120 bp, Artificial Sequence
  ENSG00000175220_39 (sequence is synthesized)
tgaaatgtaaaatcctggcactgtcccaagcagctctttgagaccctgaatggttgcgtgcgagcaggaggaggtgtgggcttagggacagacccagagggcagccgcagaaggagaagg

SEQ ID NO: 605004 - DNA, 120 bp, Artificial Sequence
  ENSG00000175220_40 (sequence is synthesized)
gcctgaatttggagtctcagccagtcctggcaagccagggccacaggctgagtcttccagcgtcatctaggaattctatctctctggccttctgaaccctcttcccactgctcttcagac

SEQ ID NO: 605005 - DNA, 120 bp, Artificial Sequence
  ENSG00000175220_41 (sequence is synthesized)
aaggcaggcagagccttgtccaagcccgccgcacggcccagccagaatgggcaagagcttggcctggggctggtggaggcacatggccttttctctagttctttctatgtctgatgtacc

SEQ ID NO: 605006 - DNA, 120 bp, Artificial Sequence
  ENSG00000175220_42 (sequence is synthesized)
aggtgacagcctcctgcccagataataagtgaagtgggaggaagtcagtggatgtgggtggaaagcacctggttttcaggagacagcttgccagggaaggccacacccaccccagggcgt

SEQ ID NO: 605007 - DNA, 120 bp, Artificial Sequence
  ENSG00000175220_43 (sequence is synthesized)
ccttggcttcaggaagtcctcaacatcagctgctgcttgtcctccatcacttccgtcctagtcacagtccctgctgagggcagtggggtgcttccatcatggagcactttgtcccatttt

SEQ ID NO: 605008 - DNA, 120 bp, Artificial Sequence
  ENSG00000175220_44 (sequence is synthesized)
ggagcactttgtcccattttcagtcagattatctcagatgtggctcttcccagctgtccacccagatccaggaggttgaaatagaaagtgcctgagcgccactgcactctagcctgggcg

SEQ ID NO: 605009 - DNA, 120 bp, Artificial Sequence
  ENSG00000175220_45 (sequence is synthesized)
ggctgcaatgagctgagatcacactccagcctgggtgaaggagactctgtctcaaaaaaaaaaagtatgcactgggaccctagcgtggcacctgtcccaccacgcctgctcctgagttgt

SEQ ID NO: 605010 - DNA, 120 bp, Artificial Sequence
  ENSG00000175221_0 (sequence is synthesized)
aggcgactggttgttaccgaggaagatggcggcgccagacccgaggcgctagggaagatcgcaccgcggacgcccgctgagcttggcgcacgggccgaccaggagctggtgactgccctc

SEQ ID NO: 605011 - DNA, 120 bp, Artificial Sequence
  ENSG00000175221_1 (sequence is synthesized)
atgtgtgatttgcggcggccagcggcaggtgggatgatggacttggcctacgtctgtgagtgggagaaatggtccaagagcacccactgcccatcggtgcccctggcctgcgcctggtcc

SEQ ID NO: 605012 - DNA, 120 bp, Artificial Sequence
  ENSG00000175221_2 (sequence is synthesized)
tgccgaaatctcatcgccttcaccatggacctgcgcagcgatgaccaggacctgacccgcatgatccacatcctggacacggagcacccctgggacctgcactcgatcccctcagagcac

SEQ ID NO: 605013 - DNA, 120 bp, Artificial Sequence
  ENSG00000175221_3 (sequence is synthesized)
cacgaggccatcacctgcctggagtgggaccagtcaggctcccggctcctgtcagcagatgccgacgggcagatcaagtgctggagcatggcggaccacctggctaatagctgggagagc

SEQ ID NO: 605014 - DNA, 120 bp, Artificial Sequence
  ENSG00000175221_4 (sequence is synthesized)
tcagtgggcagcctagtggagggggaccccattgtggccctgtcctggctgcacaatggtgtgaaactggccctgcacgtggagaagtcgggcgcctccagcttcggggagaagttctcc

SEQ ID NO: 605015 - DNA, 120 bp, Artificial Sequence
  ENSG00000175221_5 (sequence is synthesized)
cgagtcaagttctcaccgtcgctcacgctgttcggcggcaagcccatggagggctggatcgcggtgacggtcagcggcctggtcaccgtgtccctgctgaagcccagcgggcaggtgctg

SEQ ID NO: 605016 - DNA, 120 bp, Artificial Sequence
  ENSG00000175221_6 (sequence is synthesized)
acgtccaccgagagcctgtgccggctgcgcggccgcgtggccctggccgacatcgccttcaccggcggcggcaacatcgtggtggccacggcggacggcagcagcgcgtcgcccgtgcag

SEQ ID NO: 605017 - DNA, 120 bp, Artificial Sequence
  ENSG00000175221_7 (sequence is synthesized)
ttctacaaggtgtgcgtgagcgtggtgagcgagaagtgccgtatcgacacggagatcctgccctccctgttcatgcgctgcaccaccgacctcaaccgcaaggacaagtttcccgccatc

SEQ ID NO: 605018 - DNA, 120 bp, Artificial Sequence
  ENSG00000175221_8 (sequence is synthesized)
acccacctcaagttcctggcccgggacatgtcggagcaggtgcttttgtgcgcgtccagccagaccagcagcatcgtggagtgctggtccctgcgcaaggagggactccccgtgaacaac

SEQ ID NO: 605019 - DNA, 120 bp, Artificial Sequence
  ENSG00000175221_9 (sequence is synthesized)
atcttccagcagatctcccccgtggttggcgacaaacagcccacaattctcaaatggcggatcctatcggccaccaacgatctggaccgtgtgtcggccgtggcgctgcccaagctgccc

SEQ ID NO: 605020 - DNA, 120 bp, Artificial Sequence
  ENSG00000175221_10 (sequence is synthesized)
atctcgctcaccaacaccgacctcaaggtggccagcgacacacagttctaccctggcctcgggctggccctggccttccacgacggcagcgtccacatcgtgcaccggctctcactgcag

SEQ ID NO: 605021 - DNA, 120 bp, Artificial Sequence
  ENSG00000175221_11 (sequence is synthesized)
accatggccgtcttctacagctccgcggccccgaggcctgtggatgagccggccatgaagcgcccccgcaccgcgggccccgccgtccacttaaaggctatgcagctatcgtggacgtca

SEQ ID NO: 605022 - DNA, 120 bp, Artificial Sequence
  ENSG00000175221_12 (sequence is synthesized)
gggattgacagccacgggaagctgagcgtgctccgcctctcaccttccatgggccacccgctggaggtggggctggcgctgcggcacctgctcttcctgctggagtactgcatggtgacc

SEQ ID NO: 605023 - DNA, 120 bp, Artificial Sequence
  ENSG00000175221_13 (sequence is synthesized)
ggctacgactggtgggacatcctgctgcacgtgcagcccagtatggtacagagcctggtggagaagctgcacgaggagtacacgcgccagaccgctgccctgcagcaggtcctctccacc

SEQ ID NO: 605024 - DNA, 120 bp, Artificial Sequence
  ENSG00000175221_14 (sequence is synthesized)
cggatcctggccatgaaggcctcgctctgcaagctgtcgccctgcacggtgacccgcgtgtgcgactaccacaccaagctcttcctcatcgccatcagctccaccctgaagtcgctgctg

SEQ ID NO: 605025 - DNA, 120 bp, Artificial Sequence
  ENSG00000175221_15 (sequence is synthesized)
cgcccccactttctcaacacgcctgacaagagccccggcgaccggctgaccgagatctgcaccaagatcaccgacgtcgacattgacaaggtcatgatcaacctcaagacggaggaattt

SEQ ID NO: 605026 - DNA, 120 bp, Artificial Sequence
  ENSG00000175221_16 (sequence is synthesized)
gtgctggacatgaacacactgcaggcgctgcagcagctcttgcagtgggtgggcgacttcgtgctgtacctgctggccagcctacccaaccagggttccctgctgaggccgggccacagc

SEQ ID NO: 605027 - DNA, 120 bp, Artificial Sequence
  ENSG00000175221_17 (sequence is synthesized)
tttctgcgggacggcacctcgctgggcatgcttcgggaattgatggtggtcatccgcatctggggccttctgaagcccagctgcctgcccgtgtatacggccacctcggatacccaggac

SEQ ID NO: 605028 - DNA, 120 bp, Artificial Sequence
  ENSG00000175221_18 (sequence is synthesized)
agcatgtccctgctcttccgcctgctcaccaagctctggatctgctgtcgcgatgagggcccagcgagcgagccggacgaggcgctggtggatgaatgctgcctgctgcccagccagctg

SEQ ID NO: 605029 - DNA, 120 bp, Artificial Sequence
  ENSG00000175221_19 (sequence is synthesized)
cttatccccagcctggactggctgccagccagcgacggcctggttagccgcctgcagcccaagcagccccttcgtctgcagtttggccgggcgcccacgctgcctggcagtgctgccacc

SEQ ID NO: 605030 - DNA, 120 bp, Artificial Sequence
  ENSG00000175221_20 (sequence is synthesized)
ctgcagctcgacggcctcgccagggccccaggccagcccaagatcgaccacctgcggaggctgcaccttggcgcttgccccacggaggaatgcaaggcctgcaccaggtgcggctgtgtc

SEQ ID NO: 605031 - DNA, 120 bp, Artificial Sequence
  ENSG00000175221_21 (sequence is synthesized)
accatgctcaagtcgcccaacagaaccacggcggtgaagcagtgggagcagcgctggatcaagaactgcctggctgttgaaggccgtgggccggacgcctgcgtgaccagcagagcttct

SEQ ID NO: 605032 - DNA, 120 bp, Artificial Sequence
  ENSG00000175221_22 (sequence is synthesized)
gaggaagcccctgcctttgtccagctgggcccgcagtccacacaccactctcccaggacccccagatccctggaccatctgcatccagaggaccgtccgtgacggccgggggtccaggcg

SEQ ID NO: 605033 - DNA, 120 bp, Artificial Sequence
  ENSG00000175221_23 (sequence is synthesized)
gaccttgtggtgacccggctcgggcgtctcctcggtttccttgcctcacccgcggagagcgctgaacctggacaagcagcggctgggaaggacaggtccaataaacgccctctgcgccca

SEQ ID NO: 605034 - DNA, 120 bp, Artificial Sequence
  ENSG00000175221_24 (sequence is synthesized)
tgaagcagtgggagcagcgctggatcaagaactgcctgtgcggtgggctctggtggcgggtgcccctcagctacccctgagcccagctgcccctcagctactcctcagctacccctcagc

SEQ ID NO: 605035 - DNA, 120 bp, Artificial Sequence
  ENSG00000175221_25 (sequence is synthesized)
tgcccctgagcccggctgctgcaagagccaccgctcgccctggactctcctcggcgcggttaacctcagcccgccctgcagggctgttgaaggccgtgggccggacgcctgcgtgaccag

SEQ ID NO: 605036 - DNA, 120 bp, Artificial Sequence
  ENSG00000175221_26 (sequence is synthesized)
tcagcatttatggggcacctagtggatgccgagtctgggggtatccaaagtgagcagtggggacaggacacagcaggccggtggatgggatggggcggccatcgtcagggtggcttctgt

SEQ ID NO: 605037 - DNA, 120 bp, Artificial Sequence
  ENSG00000175221_27 (sequence is synthesized)
ccaggcatctgcctttcagtgtgttgtctgcctgtctctatactgtctctgcgtgctctccttgtttctgcgtgtctctggtatctctgcacttctctgtgtatggtctctgtgtctctg

SEQ ID NO: 605038 - DNA, 120 bp, Artificial Sequence
  ENSG00000175221_28 (sequence is synthesized)
cctgcgcagcgatgaccagggcctgctctgttcctgcggggggacagcctgttccctgagctgtcgactcggctgacagcagttctgtgaccttcctggggtgggacacacaccggctta

SEQ ID NO: 605039 - DNA, 120 bp, Artificial Sequence
  ENSG00000175221_29 (sequence is synthesized)
cgcatgatccacatcctggacacggagcacccctgggacctgcactcgatcccctcagagcaccacgaggccatcacctgcctggagtgggaccagtcagtcgggcgcctccagcttcgg

SEQ ID NO: 605040 - DNA, 120 bp, Artificial Sequence
  ENSG00000175221_30 (sequence is synthesized)
ggggcctaaggagagtttggggcgaggctgaaggcgcttggtgggacttcgggggcggggcctggagtgggtttggggtcgccggggtggagcctggggactggggggctgtagaggcag

SEQ ID NO: 605041 - DNA, 120 bp, Artificial Sequence
  ENSG00000175221_31 (sequence is synthesized)
ggcctggagactgcggggttatcggtgcggggcctggagagggaatagggtccctagggtggagactggggactgcggagttataggggtctggagagggtagggggtccctgggatgga

SEQ ID NO: 605042 - DNA, 120 bp, Artificial Sequence
  ENSG00000175221_32 (sequence is synthesized)
agaggctatggggtccctgggatgaagcctcgtatttgggggcaataggggaagggcctggagagtacgtggggtccccggggtggagtctggggactggggagttttaggggttgggcc

SEQ ID NO: 605043 - DNA, 120 bp, Artificial Sequence
  ENSG00000175224_0 (sequence is synthesized)
caaacactaacgatggcggcgccgggaagcgaccggctgctgggcttaaggcgggagtgaccgcttaaccagtgagggaagcactgaagagcgccagtcgacgtgggtgcgacaactcgc

SEQ ID NO: 605044 - DNA, 120 bp, Artificial Sequence
  ENSG00000175224_1 (sequence is synthesized)
ggagtcttaggagcaaaacgtctggggcctgcgagccaggacccttctgaagccttaggtgtctatcggcgacgtgtacggtcactgcagctccggagcgcggaaccctcagccaggagg

SEQ ID NO: 605045 - DNA, 120 bp, Artificial Sequence
  ENSG00000175224_2 (sequence is synthesized)
tcagccaggaggcgcggctggtcggtcccaggtcccggcctccgtaatgagagcccggaaccactctttgtgccgcagcttcgcagcatcttggactcaagtgattctcctgcctcagcc

SEQ ID NO: 605046 - DNA, 120 bp, Artificial Sequence
  ENSG00000175224_3 (sequence is synthesized)
gggactacagattcctataggcaatggaaactgatctcaattcccaggacagaaaggacctggacaagtttattaaattttttgccctcaagactgtccaagtgattgtccaggctcggc

SEQ ID NO: 605047 - DNA, 120 bp, Artificial Sequence
  ENSG00000175224_4 (sequence is synthesized)
ttggtgaaaagatttgcactcgttcatcatcttctccaacgggttcagattggttcaacttagcaatcaaagacatcccagaggttacacatgaagcaaagaaggcactggcaggacagc

SEQ ID NO: 605048 - DNA, 120 bp, Artificial Sequence
  ENSG00000175224_5 (sequence is synthesized)
tgcctgcagtcgggaggtccatgtgtgtggagatttcacttaagacttctgagggagattccatggagctggaaatatggtgtcttgaaatgaatgaaaagtgtgataaagaaatcaaag

SEQ ID NO: 605049 - DNA, 120 bp, Artificial Sequence
  ENSG00000175224_6 (sequence is synthesized)
tttcctacacggtgtacaacagactgtcattgctgctgaagtcccttcttgctataactagggtgacaccagcctataggctctccaggaaacaagggcatgaatatgtcatattataca

SEQ ID NO: 605050 - DNA, 120 bp, Artificial Sequence
  ENSG00000175224_7 (sequence is synthesized)
ggatatattttggagaagttcagctgagtggcttaggagaaggcttccagacagttcgtgttgggacagtgggcacccctgtgggcaccatcactctttcttgtgcttacagaattaact

SEQ ID NO: 605051 - DNA, 120 bp, Artificial Sequence
  ENSG00000175224_8 (sequence is synthesized)
tggcattcatgtctaccaggcaatttgagaggaccccacctatcatggggattattattgatcactttgtggaccgtccctatcccagctcctctcccatgcacccctgcaattacagaa

SEQ ID NO: 605052 - DNA, 120 bp, Artificial Sequence
  ENSG00000175224_9 (sequence is synthesized)
ctgctggtgaggacactggagtaatatacccgtctgtagaagactctcaagaagtgtgtaccacctctttttccacctccccaccatcccagctgatggttcctgggaaggaaggtgggg

SEQ ID NO: 605053 - DNA, 120 bp, Artificial Sequence
  ENSG00000175224_10 (sequence is synthesized)
taccccttgctcccaaccagcctgtccatggtacccaggctgaccaggagagactggcaacctgcaccccttctgacagaacccactgtgctgccacaccctccagtagtgaggatactg

SEQ ID NO: 605054 - DNA, 120 bp, Artificial Sequence
  ENSG00000175224_11 (sequence is synthesized)
aaaccgtatcaaacagcagtgagggacgggcctcccctcacgatgtcttggagaccatctttgtccgaaaagtgggggcttttgtcaacaaacccattaaccaggtgaccctgacgagtt

SEQ ID NO: 605055 - DNA, 120 bp, Artificial Sequence
  ENSG00000175224_12 (sequence is synthesized)
tggatataccctttgccatgtttgctcccaagaatttggagctggaggataccgatccaatggtgaatcctccagattccccagagactgaatctcctctccagggcagcctgcactcag

SEQ ID NO: 605056 - DNA, 120 bp, Artificial Sequence
  ENSG00000175224_13 (sequence is synthesized)
atggctccagcgggggcagcagtggcaatacccatgatgactttgttatgatagactttaaaccagctttttctaaagatgacattcttccgatggacctggggaccttctatcgggagt

SEQ ID NO: 605057 - DNA, 120 bp, Artificial Sequence
  ENSG00000175224_14 (sequence is synthesized)
ttcagaacccacctcagctgagcagcctctccatagatattggagcacagtccatggctgaagacttggactcattaccagagaagctggctgtgcatgagaagaatgtccgcgagtttg

SEQ ID NO: 605058 - DNA, 120 bp, Artificial Sequence
  ENSG00000175224_15 (sequence is synthesized)
atgcctttgtggaaaccctgcagtaaaagtatccttgagtcccagcagcaccccctttttgtggccccagggcataagcagcctcccatgcatcagctgctcccacccctcatcctgctc

SEQ ID NO: 605059 - DNA, 120 bp, Artificial Sequence
  ENSG00000175224_16 (sequence is synthesized)
tcttggacctcctggagactccgtggcggcagtcaagcccagtgcccagttggagaagactcacgtgctggccttggagatgggaagaaccttcgtacgaaaaagccctcagcagggcca

SEQ ID NO: 605060 - DNA, 120 bp, Artificial Sequence
  ENSG00000175224_17 (sequence is synthesized)
tctgtgtgccctgcccatcaccaactgcttcccaagggtgtcatcctgttcctcctgctgccggcctcctgcctgggcctgccttgcagctggccccttccctgcctgctgtcaccatcc

SEQ ID NO: 605061 - DNA, 120 bp, Artificial Sequence
  ENSG00000175224_18 (sequence is synthesized)
actgtttgacattccagctggtggccaagagattggtgtggagtcgcagaaagaggaaggagacagtgccaggaggaagaaggaaggagtcccttagctctcttcattgtcccctttact

SEQ ID NO: 605062 - DNA, 120 bp, Artificial Sequence
  ENSG00000175224_19 (sequence is synthesized)
tcctgctatcttcttctcctcttcttctctctcttgcctctatgcctgtatttctggcaatatgacaggcctgcctacccaagatcagaactccaaaaccactcccacccctgaaggtcg

SEQ ID NO: 605063 - DNA, 120 bp, Artificial Sequence
  ENSG00000175224_20 (sequence is synthesized)
ggagggtctgagcagccctggtggctgcctgtgctcaggtcctcagctccatgggaaataaaaatggcaccctgaatctctaggattttgtcacttggagtcacagcaaagttctcttcc

SEQ ID NO: 605064 - DNA, 120 bp, Artificial Sequence
  ENSG00000175224_21 (sequence is synthesized)
tcttgtccccccgttgctgctccttggttatagaacatggtaaatatttattactttcagagaaaccagatattttatagaggaaatatgtttgaggtgagttgtttttcacttggagaa

SEQ ID NO: 605065 - DNA, 120 bp, Artificial Sequence
  ENSG00000175224_22 (sequence is synthesized)
ggcggagggctcttcctgggacggagacctcctcctccggaggttattgagaatccgggctgctgctttgaggatcttcccaccatacagacagcgagatccaagaagagggctggccgg

SEQ ID NO: 605066 - DNA, 120 bp, Artificial Sequence
  ENSG00000175224_23 (sequence is synthesized)
gggcaaagtcacctcccagtgtggctgcactggaactgactaaaggctttaccttggatagttgcgtattcctggtgagagccttacatctcccacagtttctgcagagtgactgactcc

SEQ ID NO: 605067 - DNA, 120 bp, Artificial Sequence
  ENSG00000175224_24 (sequence is synthesized)
attctggcagcccaggaagtcctgggtgctaaatgtgatggccacatgtagtggttaggggatgttgtgtgtgtcccccaactgcctgggtacttgttcctgatccctggggctgtcctg

SEQ ID NO: 605068 - DNA, 120 bp, Artificial Sequence
  ENSG00000175224_25 (sequence is synthesized)
tggagcttttcctcctgcttgggcctagctaccatctccctctaatcccaggttctctacactgccctggggtttaccagctggattggcttctggttgagaaatcaaagctgggcgtat

SEQ ID NO: 605069 - DNA, 120 bp, Artificial Sequence
  ENSG00000175224_26 (sequence is synthesized)
gattgacttaacccttcaggtattgttacttgaataagtcaagtgcctagcctcacccacctatgatctgtcctttcccagcctcgctggtagtcctggtcaaggagatctaggtctact

SEQ ID NO: 605070 - DNA, 120 bp, Artificial Sequence
  ENSG00000175224_27 (sequence is synthesized)
ccattcctcctggcccacctggggcattcactggcagcagctgtgcttcagtggagcaggtggttctcagctgcttgttagtatactgcatgtgacactgttcccacatacaaggctgac

SEQ ID NO: 605071 - DNA, 120 bp, Artificial Sequence
  ENSG00000175224_28 (sequence is synthesized)
ttctgaggattggagcaggctctggcggggaccagagctctgcgtgctgctgctgccaccaagaagtgttagcagaagcagtagcagccaactggccctcctgactttggcccagagcac

SEQ ID NO: 605072 - DNA, 120 bp, Artificial Sequence
  ENSG00000175224_29 (sequence is synthesized)
atgcgtggcttgctgaacccaggctcaggtttatccccaaggccccagctttgagaagggggaaggcccctggtaagttattgatgcccccatatttcagctactgctctctttccaagg

SEQ ID NO: 605073 - DNA, 120 bp, Artificial Sequence
  ENSG00000175224_30 (sequence is synthesized)
ccttgcatggaaaggcctagccattgtctgaggcagcaatctttggcatctacaggtggcagcagcctttcaccagggctccatctgtgaagagtctcagccatgactttgagctgagct

SEQ ID NO: 605074 - DNA, 120 bp, Artificial Sequence
  ENSG00000175224_31 (sequence is synthesized)
tgggagaagtaaagcaactgttaaggccagcccttgcccctcagacctgccatgaaaggaatgagccctagactgactcctgcagcacccccgggacaggctgggaccagctgtttgtct

SEQ ID NO: 605075 - DNA, 120 bp, Artificial Sequence
  ENSG00000175224_32 (sequence is synthesized)
ccaggtgtcagagtccctcctcctcctccaacctctccaacctactttgtttggaaataccgagctacacttcaaaatgtattcaagggatttccaataaatttttttctgtactttaca

SEQ ID NO: 605076 - DNA, 120 bp, Artificial Sequence
  ENSG00000175224_33 (sequence is synthesized)
cctccccaccatcccagctctcaagctctcgcctttcctatcagcctgctgccctgggcgttggatcagctgacctggcttatccagtagtgtttgctgctggcttaaatgctacacacc

SEQ ID NO: 605077 - DNA, 120 bp, Artificial Sequence
  ENSG00000175224_34 (sequence is synthesized)
gtgcaggtctgggaaaggggagagtggtgcgttgtgaagcgcagaaagacctcaagtgtctgggcaagcctgttttgagtcgggtgtggcctcttaggggctgtataccctggggtttcc

SEQ ID NO: 605078 - DNA, 120 bp, Artificial Sequence
  ENSG00000175224_35 (sequence is synthesized)
tgggtcaggaaacttcttagtatttctctttccctggtcccctatcaggggcttgaatttgaatattcagttggagaatgcatttaaaatacacccatagtaaaatctccataaaatgca

SEQ ID NO: 605079 - DNA, 120 bp, Artificial Sequence
  ENSG00000175224_36 (sequence is synthesized)
tcggcttacgggtttgtagccagcattaagttcttcccagaattttcagattgtttacagtaacttgaatctgggtcacagcatcagccctaatcctgccttgctatgaaacaggtgaat

SEQ ID NO: 605080 - DNA, 120 bp, Artificial Sequence
  ENSG00000175224_37 (sequence is synthesized)
agactataaaccatggcccctcggcttacgggtgaatcctccagattccccagagactgaatctcctctccagggcagcctgcactcagatggctccagcgggggcagcagtggcaatac

SEQ ID NO: 605081 - DNA, 120 bp, Artificial Sequence
  ENSG00000175224_38 (sequence is synthesized)
tacctatattcctataggcaatggaaactgatctcaattcccaggacagaaaggacctggacaagtttattaaattttttgccctcaagactgtccaagtgattgtccaggctcggcttg

SEQ ID NO: 605082 - DNA, 120 bp, Artificial Sequence
  ENSG00000175224_39 (sequence is synthesized)
gtgaaaaaagggacccatggttcacgactgtcttcttactggcagtggaacgacctgtggaaacctgtgatccattctcattaaataaatctctggtcattctgctatgatatagaacac

SEQ ID NO: 605083 - DNA, 120 bp, Artificial Sequence
  ENSG00000175224_40 (sequence is synthesized)
gtgtccaaatttagctacaatcccttttaatagtggtggtgattgtttcaaaggggttactttgaggggtaagagagagccttcttgtccagaagatagtatttctagtctgtaattatt

SEQ ID NO: 605084 - DNA, 120 bp, Artificial Sequence
  ENSG00000175224_41 (sequence is synthesized)
cataaccttcaagattacatttagcccttaccttcctggtgacatcttaaaattccctagaacatcagtcacagaattccaaatgcattctgacaccagagattttgtctaacttacact

SEQ ID NO: 605085 - DNA, 120 bp, Artificial Sequence
  ENSG00000175224_42 (sequence is synthesized)
tgttaacttcatagctacttctctattgagtggtaaatttcatttctaataatggaagaggccccaaagagccaaaaattatttagcataaaatgacagggagaaaccagtagtacagct

SEQ ID NO: 605086 - DNA, 120 bp, Artificial Sequence
  ENSG00000175224_43 (sequence is synthesized)
tttctttatagttgacacagatttctgcttgtgtgtattccttatccagacatttttaaccattaacttttccacttcagtcttcagtggcaaacccagtttcataaaacacaggctcca

SEQ ID NO: 605087 - DNA, 120 bp, Artificial Sequence
  ENSG00000175224_44 (sequence is synthesized)
ctgggctgtgtcgtcccaaagatactaagtaacaggcagaattggatatggcacaaatttctgtttaaagagatgcggtctcgctctgttgcccaggctgttgtgcagtggtattcacag

SEQ ID NO: 605088 - DNA, 120 bp, Artificial Sequence
  ENSG00000175224_45 (sequence is synthesized)
tatcaacggttgaaaaacatcgtagtgttcagagctctcctaacttcagagatgatcttcgtttctacttgttataatatgtagattgtcatcttaatatgcataatacaagtaaagaaa

SEQ ID NO: 605089 - DNA, 72 bp, Artificial Sequence
  ENSG00000175224_46 (sequence is synthesized)
aacctttatgtccaagaattggaggactggttggataaaatgatagtcatatgggagattccatggagctgg

SEQ ID NO: 605090 - DNA, 90 bp, Artificial Sequence
  ENSG00000175224_47 (sequence is synthesized)
ctttgtcacccaggctggagtgcaatgacatgatcacagctcactgcagccatacctcctgggttcgagtgatcttcccacatgtgtcgt

SEQ ID NO: 605091 - DNA, 120 bp, Artificial Sequence
  ENSG00000175224_48 (sequence is synthesized)
tgtgtcgtcccaaagatactaagtaacaggcagaattggatatggcacaaatttctgtttaaagagatgcggtctcgctctgttgcccaggctgttgtgcagtggtattcacagtcatga

SEQ ID NO: 605092 - DNA, 120 bp, Artificial Sequence
  ENSG00000175224_49 (sequence is synthesized)
atgaaattaaggctgctgcacttaacatgctaagtggataatgccagagattacacaataggccaaataattcagggaaagacggtctgggggcagtgtcagtattctctgcaaaagaag

SEQ ID NO: 605093 - DNA, 120 bp, Artificial Sequence
  ENSG00000175224_50 (sequence is synthesized)
acccctactcctgtggtgacggacaccctgagggtccccatggcaggactggccttttcccatcaagtgagtccataatgggaagaaggggatataatcagatggcatccttttatttaa

SEQ ID NO: 605094 - DNA, 120 bp, Artificial Sequence
  ENSG00000175224_51 (sequence is synthesized)
catgtctaccaggtgaggaagagccctggaatccaaaagaactcttccgaaaatgttaaagttttttttctcctaaactttaagactaaacctacaattcagctttgctgaaagcagtac

SEQ ID NO: 605095 - DNA, 120 bp, Artificial Sequence
  ENSG00000175224_52 (sequence is synthesized)
tttagggattgtgatagttaaagctctggtagtgcctgccaacagatgtaaggtgaggggccctctgaggactttgtgggggctggaaaggcattctaacaaatactggaatctgcttat

SEQ ID NO: 605096 - DNA, 120 bp, Artificial Sequence
  ENSG00000175224_53 (sequence is synthesized)
tgtattacaggcaatttgagaggaccccacctatcatggggattattattgatcactttgtggaccgtccctatcccagctcctctcccatgcacccctgcaattacagaactgctggtg

SEQ ID NO: 605097 - DNA, 69 bp, Artificial Sequence
  ENSG00000175224_54 (sequence is synthesized)
gctggtcggtcccaggtcccggcctccgtaatgagagcccggaaccactctttgtgccgcagcttcgct

SEQ ID NO: 605098 - DNA, 120 bp, Artificial Sequence
  ENSG00000175224_55 (sequence is synthesized)
gtgtttactgtcacaaaggcacattttcagacccctactcctgtggtgacggacaccctgagggtccccatggcaggactggccttttcccatcaactgatggttcctgggaaggaaggt

SEQ ID NO: 605099 - DNA, 120 bp, Artificial Sequence
  ENSG00000175229_0 (sequence is synthesized)
gatcccatccaggcgctgagaggcaagccaccggcactcggcgcgcagggccccgggcaccctcggaccccgtgcggatttcgagacaagggtccagagatagcggcggccgcccccaac

SEQ ID NO: 605100 - DNA, 120 bp, Artificial Sequence
  ENSG00000175229_1 (sequence is synthesized)
ccgggccagaggcagagcccaggcgtgcggtgcttctcgggaacactggccctgctaccagagccgcaggatcccccatgagtgcctgtgaagggagtcctggatagtgaggccctggct

SEQ ID NO: 605101 - DNA, 120 bp, Artificial Sequence
  ENSG00000175229_2 (sequence is synthesized)
ggtccaggggtgggtactccgccatgccacccatcctccagcgcctgcagcaggccaccaagatgatgagccgccggaaaatcctgctgctggtgctagggtgcagcaccgtaagccttc

SEQ ID NO: 605102 - DNA, 120 bp, Artificial Sequence
  ENSG00000175229_3 (sequence is synthesized)
tcatccaccagggggcgcagctcagctggtaccccaagctgttccccttgagctgccctcctctgcggaactcgccgccgcgccccaagcacatgactgtggccttcctgaagactcaca

SEQ ID NO: 605103 - DNA, 120 bp, Artificial Sequence
  ENSG00000175229_4 (sequence is synthesized)
agacggcaggcacgacggtgcagaacatcctgtttcgctttgccgagcgccacaacctgacggtggccctgccgcacccgagctgcgagcaccagttctgctacccccgcaacttctcgg

SEQ ID NO: 605104 - DNA, 120 bp, Artificial Sequence
  ENSG00000175229_5 (sequence is synthesized)
cgcacttcgtgcacccggccacgcggccgccgcacgtgctggccagccacctgcgcttcgaccgtgcggagctggagcgcctcatgccgcccagcaccgtctatgtcaccatcctgcgcg

SEQ ID NO: 605105 - DNA, 120 bp, Artificial Sequence
  ENSG00000175229_6 (sequence is synthesized)
agccggccgccatgttcgagtcgctcttcagctactacaaccagtactgcccggccttccggcgcgtacccaacgcctcgctcgaggccttcctgcgcgcgcccgaggcatactaccgcg

SEQ ID NO: 605106 - DNA, 120 bp, Artificial Sequence
  ENSG00000175229_7 (sequence is synthesized)
ctggcgagcacttcgccatgttcgcacacaacacgctggcctacgacctgggcggcgacaatgagcgcagcccgcgcgacgacgccgcctacctggcgggcctcatccgccaggtggagg

SEQ ID NO: 605107 - DNA, 120 bp, Artificial Sequence
  ENSG00000175229_8 (sequence is synthesized)
aggttttctcgctcgtcatgatcgccgagtacttcgacgagtcgctagtgctgctgcggcgcctactggcctgggacctggacgacgtgctctacgccaagctcaacgcgcgcgccgcca

SEQ ID NO: 605108 - DNA, 120 bp, Artificial Sequence
  ENSG00000175229_9 (sequence is synthesized)
gccagctcgcgcctggccgccatccccgcggcgctggcgcgggcggcgcgcacctggaacgccctggacgccggcctctacgaccacttcaacgccaccttctggcgccacgtggcgcgc

SEQ ID NO: 605109 - DNA, 120 bp, Artificial Sequence
  ENSG00000175229_10 (sequence is synthesized)
gccgcgcgtgcgtggagcgcgaggcgcgcgagctgcgcgaggcccgccagcgcctactgcggcgctgcttcggggacgagccactgctgcggcctgccgcgcagatccgcaccaagcagc

SEQ ID NO: 605110 - DNA, 120 bp, Artificial Sequence
  ENSG00000175229_11 (sequence is synthesized)
tgcagccgtggcagcccagccgcaaggtggacattatgggctatgacctgcccggcggcggcgccggcccggccaccgaggcctgcctcaagctggccatgcccgaggtccagtactcga

SEQ ID NO: 605111 - DNA, 120 bp, Artificial Sequence
  ENSG00000175229_12 (sequence is synthesized)
actacctgttgcgcaagcagaagcgccggggcggtgcgcgggctcggcccgagcccgtcctggacaatcccccgcctcggcccatccgagtgctgcctcgcggccctcaaggtccctgag

SEQ ID NO: 605112 - DNA, 120 bp, Artificial Sequence
  ENSG00000175229_13 (sequence is synthesized)
gcctccatgtcctgcccccatgagagccctttcttttcaaggggcttgagtccctcgctgaactttggggtacgcctccctatctgagcccccgctcccgatcgtgggctgaaccttgcc

SEQ ID NO: 605113 - DNA, 120 bp, Artificial Sequence
  ENSG00000175229_14 (sequence is synthesized)
ttcgggcacggcgctgataggctggatccagcgctgggccaccctctccttcccagctggttggtgattttgacaagaggcctgagggctgtccagaactgctcaccctgcctttttctg

SEQ ID NO: 605114 - DNA, 120 bp, Artificial Sequence
  ENSG00000175229_15 (sequence is synthesized)
ggggctgagcccccacaacctgtcttttccaagtggataagcccaggccccatggagagaggctcagccctagggaaaggctgctcttgctctccctcccagggcttgaggctccctata

SEQ ID NO: 605115 - DNA, 120 bp, Artificial Sequence
  ENSG00000175229_16 (sequence is synthesized)
cttttctgtcttccaggttctaccctccccacagacctaagctgctcccagtctcccagaaccaagagttcttgggttgggatttttgtttggttggtttttcttttttttaataaaaca

SEQ ID NO: 605116 - DNA, 120 bp, Artificial Sequence
  ENSG00000175229_17 (sequence is synthesized)
tctttaaaatgtgcgagttgtatgtcagtcatagaagccggattccccacatttgaggatgaaacggatgcccaggaggagctgtggctggacccatgaggatgggggcctggactcaag

SEQ ID NO: 605117 - DNA, 120 bp, Artificial Sequence
  ENSG00000175229_18 (sequence is synthesized)
gtcccccgccacctggcataggcctacaaccctcctcaaccgcttgaccgactgggcccccaacacagactggccaccttagccccactcactttccacatcgttctttttcacaaaatt

SEQ ID NO: 605118 - DNA, 120 bp, Artificial Sequence
  ENSG00000175229_19 (sequence is synthesized)
ctgcgacatttactgagcatcatctctgtaacttggggatacaggtgaaccagatagatagggccttattttcatggagcttatggggaaacattggaacaggagcaagacaggtaagca

SEQ ID NO: 605119 - DNA, 120 bp, Artificial Sequence
  ENSG00000175229_20 (sequence is synthesized)
aagaggaaggactggaggggttagagcacaacacctctttgggtggaaggaggatcattttcagataaggagctgcctaactcagaatttgacctcctcctgtgaatcactgacttcact

SEQ ID NO: 605120 - DNA, 120 bp, Artificial Sequence
  ENSG00000175229_21 (sequence is synthesized)
aatggcctgctttcctcacaagaagacaacttggactcagatgaagaccagtccctttctgcagtttcctttaacacagcaagatagccagcacttccaggtgaaatctcccttaagact

SEQ ID NO: 605121 - DNA, 120 bp, Artificial Sequence
  ENSG00000175229_22 (sequence is synthesized)
agcagagaattggaactttttctgttactttcttcagagctatatcgacgtatctggacaagtgataaaaaacaatagctattatggtctacggtgtgccagccactgtttaagggcttt

SEQ ID NO: 605122 - DNA, 120 bp, Artificial Sequence
  ENSG00000175229_23 (sequence is synthesized)
atgtatgttaactttggagatgggtgccgttttccaggtgagggaactgaaacttgggggaaattaagtcagggtcacacagccagaaagtggccactaggatctcaaccaaggcagtgt

SEQ ID NO: 605123 - DNA, 120 bp, Artificial Sequence
  ENSG00000175229_24 (sequence is synthesized)
ggcttcagagtttgtgctcacaagtgctgtctgtagtgccattcaaataaaaaaggtcacatgccacaagctaggctgattcccagcaccttcccccaaaagaatgtaaagggaagaacc

SEQ ID NO: 605124 - DNA, 120 bp, Artificial Sequence
  ENSG00000175229_25 (sequence is synthesized)
aggacactgctatcagcaactctttatccagtttttcatggagacaacggttgacctgtttggacaatggacattacagtgattgattggcaggatgcatgacacgctgggcttgaaaag

SEQ ID NO: 605125 - DNA, 120 bp, Artificial Sequence
  ENSG00000175229_26 (sequence is synthesized)
ggactgtttgtatggcaccccactttttaccagcagagctctgaaaaaggcaataattagaatcatgcaaaagcataattaagtttctgacattaagcagcagtaaagaattgtaccaga

SEQ ID NO: 605126 - DNA, 120 bp, Artificial Sequence
  ENSG00000175229_27 (sequence is synthesized)
agggtcctgctaggctttgctcctcccctctattctgaaagtgctttccctttagggccacacagcctccctggacagggactgctcttcaatgaaagggctgagtgacttgctcaaagt

SEQ ID NO: 605127 - DNA, 120 bp, Artificial Sequence
  ENSG00000175229_28 (sequence is synthesized)
tacagaatcagttagctgagatccgaatccagctcaactccccacagcatgcagctaagcatttccccagtggaaacaacttctcacaacttccgtagtgctgggcaaggccaagtcccc

SEQ ID NO: 605128 - DNA, 120 bp, Artificial Sequence
  ENSG00000175262_0 (sequence is synthesized)
atgtgggggtccccagcacttgcctgggccgtctggcttgcctgtgttcagcccacggtgttcccatggagcctctccttcaggtcagacacggacaagccaagctctgcagcagaagtt

SEQ ID NO: 605129 - DNA, 120 bp, Artificial Sequence
  ENSG00000175262_1 (sequence is synthesized)
ttaacagaagcatcttcttgttggacagacacagttgagtgcttctcagactacatgaccctgtggatcccaaggagccacgtggaggggctgaggcggtggctggccaggaccttgcac

SEQ ID NO: 605130 - DNA, 120 bp, Artificial Sequence
  ENSG00000175262_2 (sequence is synthesized)
ttgccaggcacctggaggtcccctgaccacctggattcttctcttgctaaatgtggctacttcctgcatctggcttcagacggtgacttcctttttcgagttcaatactcggcctgcttt

SEQ ID NO: 605131 - DNA, 120 bp, Artificial Sequence
  ENSG00000175262_3 (sequence is synthesized)
gtgcagaaagagaaagcaaattacaggctggaaatcagaatatttcagaaaggggtgatggggttggagcggagtgatcgctacataatgaagtgtccgatgctaaggtcaaggctgggc

SEQ ID NO: 605132 - DNA, 120 bp, Artificial Sequence
  ENSG00000175262_4 (sequence is synthesized)
caggaaagcgtccactgtgggcccatgttcatccaggtctcccggcccctgcccctgtggagggacaatagacagactccatggctgctgtcccttcgaggggagctggtggcttctctt

SEQ ID NO: 605133 - DNA, 120 bp, Artificial Sequence
  ENSG00000175262_5 (sequence is synthesized)
gaagacgccagcctgatgggactgtatgtggacatgaatgccaccactgtcaccgtccaaagcccgagacaaggccttcttcagaggtgggaggtgctgaacacctctgctgagctcctg

SEQ ID NO: 605134 - DNA, 120 bp, Artificial Sequence
  ENSG00000175262_6 (sequence is synthesized)
ccactatggctggtgagcggtcaccatgcctattctttagaagctgcttgcccaccggtgtcattccagccagagtcggaggtcttagttcacatccccaagcagagactgggtctagtc

SEQ ID NO: 605135 - DNA, 120 bp, Artificial Sequence
  ENSG00000175262_7 (sequence is synthesized)
aaaagaggttcctacattgaggaaaccctgagcctcagattcctccgagtccaccagtccaacatctttatggtgactgagaacaaggactttgtggtggtcagcattccggcggccggg

SEQ ID NO: 605136 - DNA, 120 bp, Artificial Sequence
  ENSG00000175262_8 (sequence is synthesized)
gtgctccaggtccagcgatgccaagaagtcggaggaaccccgggaacacaagctttctatagggtagacctgagcctggaatttgccgagatggctgccccggtcctctggacagtggag

SEQ ID NO: 605137 - DNA, 120 bp, Artificial Sequence
  ENSG00000175262_9 (sequence is synthesized)
agcttcttccagtgtgtgggttcaggaacagagtcgcctgcctcaactgctgcactgaggaccactccctccccaccatccccaggaccagagacccctccagcgggagtgccacctgct

SEQ ID NO: 605138 - DNA, 120 bp, Artificial Sequence
  ENSG00000175262_10 (sequence is synthesized)
gcttcctcccaggtgtgggctgcaggaccagctgcccaggaatggctttctcgggacctcctgcaccggccttccgacgcactggccaaaaaggggcttggaccattcctgcaaacagcc

SEQ ID NO: 605139 - DNA, 120 bp, Artificial Sequence
  ENSG00000175262_11 (sequence is synthesized)
aaccggcgagaagaggccagacatctgcctccattctccccagagtggtgcaagctcagcgaggtccccagcctcccccaggggaagcagggatccctggacaccccacacctccagcca

SEQ ID NO: 605140 - DNA, 120 bp, Artificial Sequence
  ENSG00000175262_12 (sequence is synthesized)
cgctcccctcggagcctgtagagggtgtccaggctagtccctggcggccacgtccagtcttgccaacgcacccggctctgaccctgcccgtgtcctcagatgcctcctctccttcaccgc

SEQ ID NO: 605141 - DNA, 120 bp, Artificial Sequence
  ENSG00000175262_13 (sequence is synthesized)
cagccccgaggcctgaacgacctgaatcacttctggtctcaggaccatctgtcaccctgactgaaggtctaggaactgtgaggcctgaacaggaccccgccaagtctccaggaagtcccc

SEQ ID NO: 605142 - DNA, 120 bp, Artificial Sequence
  ENSG00000175262_14 (sequence is synthesized)
tcctgctgagaggcttgtcaagcggggatgtggctgcacctgagcccatcatgggggagcccggccaagccagtgaggagttccagccattggcgaggccctggcgggccacactggctg

SEQ ID NO: 605143 - DNA, 120 bp, Artificial Sequence
  ENSG00000175262_15 (sequence is synthesized)
cagaggagctggtttctcaccgttctcccggagagccccaggaaacgtgctctggaacggaggtggagaggccacgccagacagggcctggtctccccagggagggggccagggggcaca

SEQ ID NO: 605144 - DNA, 120 bp, Artificial Sequence
  ENSG00000175262_16 (sequence is synthesized)
tggacctttcatcctcagaaccaagccaggacatagaggggccgggactctccatcctgccagcgagggatgccacattctccaccccaagtgtgaggcagccagaccccagtgcctggc

SEQ ID NO: 605145 - DNA, 120 bp, Artificial Sequence
  ENSG00000175262_17 (sequence is synthesized)
tgagttcaggacctgaactcaccgggatgcccagggtgaggctggcagcgcccctggcagttcttcctatggaacctctgccaccagaacctgttcgcccagcagctcttctgacacccg

SEQ ID NO: 605146 - DNA, 120 bp, Artificial Sequence
  ENSG00000175262_18 (sequence is synthesized)
aagcctcatctgtgggagggccagaccaggcccgatacctggagtcagcccctggctggcctgtgggccaggaggagtggggggttgcacacacgtccagccctccatccacgcaaaccc

SEQ ID NO: 605147 - DNA, 120 bp, Artificial Sequence
  ENSG00000175262_19 (sequence is synthesized)
tgagcctgtgggctcccacaggagtgttgctacccagcctggtggagcttgaataccccttccaggctggccggggggcctcactccagcaggagctgacagagcccaccttggccctca

SEQ ID NO: 605148 - DNA, 120 bp, Artificial Sequence
  ENSG00000175262_20 (sequence is synthesized)
gtgctgaaagccacaggcctcctgagcttcaagacagtgtggaggggctttctgagaggccctcacgctgagcctccatggagactccaggcagccggtaccccgctggcttggacagcc

SEQ ID NO: 605149 - DNA, 120 bp, Artificial Sequence
  ENSG00000175262_21 (sequence is synthesized)
ccagtgaccctcagtgacccagctgtccccaggctccctggcttagatgcccagctgtggctgggtacagtgttctgggccggaagagcactcactcagtgcttccctggaaaggtggac

SEQ ID NO: 605150 - DNA, 120 bp, Artificial Sequence
  ENSG00000175262_22 (sequence is synthesized)
ccccagacgcccacctccaggcagacccatcactggaagtgggatttgaaatgcagccaagaagaggagaccgtcggcaacgcccgcccggaacaagaaataaataaataaataatcagg

SEQ ID NO: 605151 - DNA, 120 bp, Artificial Sequence
  ENSG00000175262_23 (sequence is synthesized)
tggccaaagcacgtctatggctgcatcctctgcccatggtttcctccaaagagtctggtccccaagaagtatcggtagacccagctgggcctgaggcccttctctttcaccaccattctt

SEQ ID NO: 605152 - DNA, 120 bp, Artificial Sequence
  ENSG00000175262_24 (sequence is synthesized)
ccaaagagagccccactctgatccccaaccatgttacctcctcaaattcagaatatttcccatagaaagctgggcccccaagagctcccacctgagggcagcccccctcatctgtcggcc

SEQ ID NO: 605153 - DNA, 120 bp, Artificial Sequence
  ENSG00000175262_25 (sequence is synthesized)
tggatcacggcagcctcccagggccttgagacacagccaaaggaggcagcagagggtggggggtcagcagctatgcacacaaatggagggagggaaactgaggcacaccagaggactgga

SEQ ID NO: 605154 - DNA, 120 bp, Artificial Sequence
  ENSG00000175262_26 (sequence is synthesized)
ttttttttttttgagatggggtcttgctttgtcatccaggctggagtccagtggcacgatcttggcttactgcagcctccacctcccagattcaggcgatccttctgcctcagcttcccg

SEQ ID NO: 605155 - DNA, 82 bp, Artificial Sequence
  ENSG00000175262_27 (sequence is synthesized)
agtccagtggcacgatcttggcttactgcagcctccacctcccagattcaggcgatcccacgccaccacacctggctaattt

SEQ ID NO: 605156 - DNA, 120 bp, Artificial Sequence
  ENSG00000175262_28 (sequence is synthesized)
agtgatccacccgccttggcctcctattgtgttgggattacagtcgtgagccaccgcacccggtccctcgaacccatctttgggttgagattctcagggcagccggagcccatgtgttct

SEQ ID NO: 605157 - DNA, 120 bp, Artificial Sequence
  ENSG00000175262_29 (sequence is synthesized)
actccaggacgcccacctccaggcagacccatcactggaagtgggatttgaaatgcagccaagaagaggagaccgtcggcaacgcccgcccggaacaagaaataaataaataaataatca

SEQ ID NO: 605158 - DNA, 120 bp, Artificial Sequence
  ENSG00000175264_0 (sequence is synthesized)
ctcttggctcggggacgcgggcgggcgctccgagaggctctggtgcctgcggctgctgctctcctccggcgcccggggctgcggcgctccgggtcccggcccctgtcccggcatctctcg

SEQ ID NO: 605159 - DNA, 120 bp, Artificial Sequence
  ENSG00000175264_1 (sequence is synthesized)
cggcccctgtcccggcatctctcgggtccctgagccccggccccgggtcccgcgtccggccggagagaacgcactcagctgctcgagccgccccgggctcgcgcccccgggccatgaaga

SEQ ID NO: 605160 - DNA, 120 bp, Artificial Sequence
  ENSG00000175264_2 (sequence is synthesized)
catgaagaggggcccgtgaggcgcgcgcggagtcggaggaagaggagggaggagggaggccgaggaggagggcgcgggaggcggaggatgccgccgcggctgctgccgccgccgccaccc

SEQ ID NO: 605161 - DNA, 120 bp, Artificial Sequence
  ENSG00000175264_3 (sequence is synthesized)
gcgggtccccggcgaccctgactccagacccgaggatggagccggcgctgggcgctgcagctgctcccggcgcgtccccgaccaggtagctggtgtcacttcggtgtggttggaagaaga

SEQ ID NO: 605162 - DNA, 120 bp, Artificial Sequence
  ENSG00000175264_4 (sequence is synthesized)
ctttctccccagctgcattcccggaggcgccctttcgacctggaggccgggtctgctggccacagggctgccgcactggctgggactgccagctgggcctggagacgctggtggctgtgg

SEQ ID NO: 605163 - DNA, 120 bp, Artificial Sequence
  ENSG00000175264_5 (sequence is synthesized)
actccccagcttggagcagtccctctttgacctcaccccttggagaagcagccccatgaaggtgcccagccatgcaatgttcctggaaggccgtcctcctccttgccctggcctccattg

SEQ ID NO: 605164 - DNA, 120 bp, Artificial Sequence
  ENSG00000175264_6 (sequence is synthesized)
ccatccagtacacggccatccgcaccttcaccgccaagtcctttcacacctgccccgggctggcagaggccgggctggccgagcgactgtgcgaggagagccccaccttcgcctacaacc

SEQ ID NO: 605165 - DNA, 120 bp, Artificial Sequence
  ENSG00000175264_7 (sequence is synthesized)
tctcccgcaagacccacatcctcatcctggccaccacgcgcagtggctcctccttcgtgggccagctcttcaaccagcacctggacgtcttctacctgtttgagcccctctaccacgtcc

SEQ ID NO: 605166 - DNA, 120 bp, Artificial Sequence
  ENSG00000175264_8 (sequence is synthesized)
agaacacgctcatcccccgcttcacccagggcaagagcccggccgaccggcgggtcatgctaggcgccagccgcgacctcctgcggagcctctacgactgcgacctctacttcctggaga

SEQ ID NO: 605167 - DNA, 120 bp, Artificial Sequence
  ENSG00000175264_9 (sequence is synthesized)
actacatcaagccgccgccggtcaaccacaccaccgacaggatcttccgccgcggggccagccgggtcctctgctcccggcctgtgtgcgaccctccggggccagccgacctggtcctgg

SEQ ID NO: 605168 - DNA, 120 bp, Artificial Sequence
  ENSG00000175264_10 (sequence is synthesized)
aggagggggactgtgtgcgcaagtgcgggctactcaacctgaccgtggcggccgaggcgtgccgcgagcgcagccacgtggccatcaagacggtgcgcgtgcccgaggtgaacgacctgc

SEQ ID NO: 605169 - DNA, 120 bp, Artificial Sequence
  ENSG00000175264_11 (sequence is synthesized)
gcgccctggtggaagacccgcgattaaacctcaaggtcatccagctggtccgagacccccgcggcattctggcttcgcgcagcgagaccttccgcgacacgtaccggctctggcggctct

SEQ ID NO: 605170 - DNA, 120 bp, Artificial Sequence
  ENSG00000175264_12 (sequence is synthesized)
ggtacggcaccgggaggaaaccctacaacctggacgtgacgcagctgaccacggtgtgcgaggacttctccaactccgtgtccaccggcctcatgcggcccccgtggctcaagggcaagt

SEQ ID NO: 605171 - DNA, 120 bp, Artificial Sequence
  ENSG00000175264_13 (sequence is synthesized)
acatgttggtgcgctacgaggacctggctcggaaccctatgaagaagaccgaggagatctacgggttcctgggcatcccgctggacagccacgtggcccgctggatccagaacaacacgc

SEQ ID NO: 605172 - DNA, 120 bp, Artificial Sequence
  ENSG00000175264_14 (sequence is synthesized)
ggggcgaccccaccctgggcaagcacaaatacggcaccgtgcgaaactcggcggccacggccgagaagtggcgcttccgcctctcctacgacatcgtggcctttgcccagaacgcctgcc

SEQ ID NO: 605173 - DNA, 120 bp, Artificial Sequence
  ENSG00000175264_15 (sequence is synthesized)
agcaggtgctggcccagctgggctacaagatcgccgcctcggaggaggagctgaagaacccctcggtcagcctggtggaggagcgggacttccgccccttctcgtgacccgggcggtgcg

SEQ ID NO: 605174 - DNA, 120 bp, Artificial Sequence
  ENSG00000175264_16 (sequence is synthesized)
aacccctccctctcccacctcatcttcgtgtccttcctgcccccagctcaccccactcccttctgccccttttttgtctctgaaatttgcactacgtcttggacgggaatcactggggca

SEQ ID NO: 605175 - DNA, 120 bp, Artificial Sequence
  ENSG00000175264_17 (sequence is synthesized)
gagggcgcctgaagtagggtcccgccccccccccccccattcagacacatggatgttgggtctctgtgcggacggtgacaatgtttacaagcaccacatttacacatccacacacgcaca

SEQ ID NO: 605176 - DNA, 120 bp, Artificial Sequence
  ENSG00000175264_18 (sequence is synthesized)
cgggcactcgcgaggcgacttctcaagcttttgaatgggtgagtggtcgggtatctagtttttgcactgtcttactattcaaggtaagaggatacaaacaagaggaccacttgtctctaa

SEQ ID NO: 605177 - DNA, 120 bp, Artificial Sequence
  ENSG00000175264_19 (sequence is synthesized)
tttatgaatggtgtccatcctttccccatccctgcctcctgcccctgacgcccatttccccccttagagcagcgaaactgccccctcctgcccgcccttgcctgtcggtgaggcaggttt

SEQ ID NO: 605178 - DNA, 120 bp, Artificial Sequence
  ENSG00000175264_20 (sequence is synthesized)
ttactgtgaggtgaacgtggacctgtttctgtttccagtctgtggtgatgctgtctgtctgtctgagtctcgtggccgcccctggaccagtgatgactgatgaatcttatgagcttctga

SEQ ID NO: 605179 - DNA, 120 bp, Artificial Sequence
  ENSG00000175264_21 (sequence is synthesized)
ttgatctcggggtccatctgtgatatttctttgtgccaaaaagaaaaaaaaagagtggatcagtttgctaaatgaacattgaaattgaaatgctttatctgtgttttctgtaaataaaag

SEQ ID NO: 605180 - DNA, 120 bp, Artificial Sequence
  ENSG00000175264_22 (sequence is synthesized)
agtgcaataatctctgtgtgtgattgcaggacattctgaatgggtacgagagggcctcagccgggtctgggtgttcctagctttggggaggacagcgagagagaggtggaggtgggaatt

SEQ ID NO: 605181 - DNA, 120 bp, Artificial Sequence
  ENSG00000175264_23 (sequence is synthesized)
ggggaggacagcgagagagaggtggaggtgggaattaaatgacaagtctgcctttcagaactcttgtcaccctcaacactgagtttagtttaggtttttgttttgttttgttttgagaca

SEQ ID NO: 605182 - DNA, 120 bp, Artificial Sequence
  ENSG00000175264_24 (sequence is synthesized)
ctgcctcccaggttcaagcagttctcccgcctcagcctcccgagtgactgggactacaggtgcacactgccacacctggctatttttttttttttttggattttagtagagacggggttt

SEQ ID NO: 605183 - DNA, 80 bp, Artificial Sequence
  ENSG00000175264_25 (sequence is synthesized)
ctggtcgcgaactcctgagctctgggcatttgagccacctcacccagccgttttttttttccttcagtcagttgagaccg

SEQ ID NO: 605184 - DNA, 120 bp, Artificial Sequence
  ENSG00000175264_26 (sequence is synthesized)
cacccagccgttttttttttccttcagtcagttgagaccgggtaacttatagccagggataatgttcaaagtctttaacaagtggtatggcttgctgaatcagagtagctggaggtaaga

SEQ ID NO: 605185 - DNA, 120 bp, Artificial Sequence
  ENSG00000175264_27 (sequence is synthesized)
atgacatcctggaatcccttcttgtgctaaatgttacccatttagttggtgggtctgggtctaggatagccagggagggggaaacttcaaggggtggggtgcctcagggcagtggctgct

SEQ ID NO: 605186 - DNA, 120 bp, Artificial Sequence
  ENSG00000175264_28 (sequence is synthesized)
gacccacagacctggaagtatttgactatttgaataactggtacaggtttactggtgtctacactggcagagaatctgctgtgcttcctccccttcccttcgtggcaatctagcaggttg

SEQ ID NO: 605187 - DNA, 120 bp, Artificial Sequence
  ENSG00000175264_29 (sequence is synthesized)
ctccaggcagcttccccagctcttattccaagaaaacctgcccctggggtggctgcaggtcacagctttgttgtcctgggacaaaggagtgtctggtgattaggcagccccaggggtcct

SEQ ID NO: 605188 - DNA, 120 bp, Artificial Sequence
  ENSG00000175264_30 (sequence is synthesized)
agccaactggaagaagggcttcctgaggaaacacagtcctgggctattttatatgtgtcaggaggatgtagacagttcaacagctctagcaaatgccttaactaatagtggcttaatcaa

SEQ ID NO: 605189 - DNA, 120 bp, Artificial Sequence
  ENSG00000175264_31 (sequence is synthesized)
gataggtgattttcttttgtaaaaaattttactggggtaaaataacagaatgtaaaatttaccatcttaacctttttaaggtgtaccattcattaaatacattcacaacgtgtgccacca

SEQ ID NO: 605190 - DNA, 120 bp, Artificial Sequence
  ENSG00000175264_32 (sequence is synthesized)
cccagcccccactcaggtctggtagctgagccagcctccagagagggtgcctacaggatgctcaggtgggctcctggccccggactctcagcggccccattcgctctttctgcttctcca

SEQ ID NO: 605191 - DNA, 120 bp, Artificial Sequence
  ENSG00000175264_33 (sequence is synthesized)
tggtccctccccagtcccccttctgtgggcagaggggacacaggaggtaagaggggaggcccctgactccctaagatcttctttgcaggccagttcactctgtgtcagtggggattatgt

SEQ ID NO: 605192 - DNA, 120 bp, Artificial Sequence
  ENSG00000175264_34 (sequence is synthesized)
cacctccatggcctggacccttgtccctagagaccaggaacagaccctgggtgctgggaagggttgcctctcagcagaccctggacatctgtctctgctccagagactcttagagactcc

SEQ ID NO: 605193 - DNA, 120 bp, Artificial Sequence
  ENSG00000175264_35 (sequence is synthesized)
acaagccccagaagtctacatctggagtaagtggtcacctgcatccatgagttggaaggggcttgacacagttgtccaccttgcctggccgtgctggcagctcaccgaccatggtctgca

SEQ ID NO: 605194 - DNA, 120 bp, Artificial Sequence
  ENSG00000175264_36 (sequence is synthesized)
ggggtccttcatgctcaggggattggggtcagatggaggcatctgatagggactcttctttcccctagggatgggcagaggacagaggaaagaggaccacctggagaactgggcgccagc

SEQ ID NO: 605195 - DNA, 120 bp, Artificial Sequence
  ENSG00000175264_37 (sequence is synthesized)
tcgtgggggtgggagacgctggcagtgaggaggggcagtgtttgaggcaggccctcgtcatttcctcagtgtgggagtagggggagtcaggctcttgccccgtgaggcccctctaaggaa

SEQ ID NO: 605196 - DNA, 120 bp, Artificial Sequence
  ENSG00000175265_0 (sequence is synthesized)
gttgatcagcgctcgctgggatttggctgacgtggccccagccccgcctccctccccaccccacaatggcagaagaaactggacagagtaaattagctgcagccaagaaaaagttcaaag

SEQ ID NO: 605197 - DNA, 120 bp, Artificial Sequence
  ENSG00000175265_1 (sequence is synthesized)
aatattggcagagaaaccgccctggtgttccagcagcagcgaagaggaacacgaaagcaaatggcagtagccctgagacggccgcttctggtggttgccactcatctgaggcttcctcct

SEQ ID NO: 605198 - DNA, 120 bp, Artificial Sequence
  ENSG00000175265_2 (sequence is synthesized)
ccgcctcctcctctctgcatgcgcgtcagagcccgtgccaagaacaagcagcagtcctgaactcgaggtccataaaaatcagtcgactgaatgacaccatcaaatctttgaaacaacaga

SEQ ID NO: 605199 - DNA, 120 bp, Artificial Sequence
  ENSG00000175265_3 (sequence is synthesized)
ctggaagaagaaaagaaagcaaacaatgagaaacagaaagctgaaagggagctagagggtcaaatccagagattgaacacagagaaaaagaaactaaatacggacctgtatcacatgaaa

SEQ ID NO: 605200 - DNA, 120 bp, Artificial Sequence
  ENSG00000175265_4 (sequence is synthesized)
cggacctgtatcacatgaaacattctctcagatactttgaagaagagtccaaggatctggccggccgcctgcaacgttcatcgcagcgtataggagagttagagtggtctctctgtgctg

SEQ ID NO: 605201 - DNA, 120 bp, Artificial Sequence
  ENSG00000175265_5 (sequence is synthesized)
tcgccgccacacagaagaagaagccggatgggttctcgagccgcagtaaagcacttctcaagcggcagttagagcagtccatacgggagcagatactgctgaaaggacacgtgacacagt

SEQ ID NO: 605202 - DNA, 120 bp, Artificial Sequence
  ENSG00000175265_6 (sequence is synthesized)
tgaaggagtcgcttaaagaagtccagctggagagagatcaatatgctgaacaaataaaaggagagagggcccagtggcagcagaggatgaggaaaatgtcgcaggaggtttgcacattga

SEQ ID NO: 605203 - DNA, 120 bp, Artificial Sequence
  ENSG00000175265_7 (sequence is synthesized)
gagccactgcccccggatgccccagcagtgtcctctgaggtggagctgcaagacctgaggaaggagctggagagagtggcaggagagctccaggctcaggtggaaaacaatcagtgcatc

SEQ ID NO: 605204 - DNA, 120 bp, Artificial Sequence
  ENSG00000175265_8 (sequence is synthesized)
agtctcctgaaccgtgggcaaaaggagaggcttcgcgagcaggaggagaggcttcaggagcagcaggagaggcttcgggaacgggagaagaggcttcagcagctggccgagccacagagc

SEQ ID NO: 605205 - DNA, 83 bp, Artificial Sequence
  ENSG00000175265_9 (sequence is synthesized)
gggccaggtgatggagacgctcacctcggccgagaaggagccagaggcagcagtcccagcctcagggactgggggcgagtcta

SEQ ID NO: 605206 - DNA, 120 bp, Artificial Sequence
  ENSG00000175265_10 (sequence is synthesized)
gaggcagcagtcccagcctcagggactgggggcgagtctagcggccttatggacctcctggaggagaaggcggacctgagggagcatgtggagaaactggaacttggattcatccagtac

SEQ ID NO: 605207 - DNA, 120 bp, Artificial Sequence
  ENSG00000175265_11 (sequence is synthesized)
cggagagagagatgccatcagaaagtacatcgccttctaacagagccaggggacagtgccaaagatgcgtcaccgggaggaggccatcatcaggctggcccaggacaaggaggagaggaa

SEQ ID NO: 605208 - DNA, 120 bp, Artificial Sequence
  ENSG00000175265_12 (sequence is synthesized)
ggtgaagctgctggagctgcaggagatggtgttgcggcttgtggcagctacagcgaggggcacggcaaattcctggccgctgcccggaaccctgctgctgaacccagtccaggagcccca

SEQ ID NO: 605209 - DNA, 120 bp, Artificial Sequence
  ENSG00000175265_13 (sequence is synthesized)
gccccccaggagctcggggctgccgacaagcatggtgatctttgtgaggcgagcctcaccaacagcgtggagcctgcacaaggagaagccagggagggttcttcccaggacaaccctact

SEQ ID NO: 605210 - DNA, 70 bp, Artificial Sequence
  ENSG00000175265_14 (sequence is synthesized)
aggagaagccagggagggttcttcccaggacaaccctactgcacagccagtcgtgcagctccttggtgag

SEQ ID NO: 605211 - DNA, 120 bp, Artificial Sequence
  ENSG00000175265_15 (sequence is synthesized)
tgcttgagctctttgggcctctgttttcacgtctgtatgatagaggtggtattgtttgacttgtatttgtgaagtttcaatgagattgataattgtcgattttatgttaatccctagtac

SEQ ID NO: 605212 - DNA, 60 bp, Artificial Sequence
  ENSG00000175265_16 (sequence is synthesized)
tgttaatccctagtacatggcctgctgtcaacacccaggacacccaggatatggtccact

SEQ ID NO: 605213 - DNA, 120 bp, Artificial Sequence
  ENSG00000175265_17 (sequence is synthesized)
ggcagaaaagaaaatgttgccagttgatggggaagaaaggaagtcggagggctcagacactgagggggacagaacatctccatgtgcagtctcatctgctaccctgaaggatctggaggt

SEQ ID NO: 605214 - DNA, 87 bp, Artificial Sequence
  ENSG00000175265_18 (sequence is synthesized)
acccagccctaatgatcgttctctctacctctcccccaagtcctcctccgcctcctcctctctgcatgcgcgtcagagcccgtgcca

SEQ ID NO: 605215 - DNA, 73 bp, Artificial Sequence
  ENSG00000175265_19 (sequence is synthesized)
ttaatctcctacacaattcatttacttcatttgaatgttagagctactagttaaaagagagtgggtctctgtg

SEQ ID NO: 605216 - DNA, 84 bp, Artificial Sequence
  ENSG00000175265_20 (sequence is synthesized)
aaagagagtgggtccagcatttttcttttttcatttcataattgtaggtcattagcatgcatatcgagtttgcccttacgtggt

SEQ ID NO: 605217 - DNA, 120 bp, Artificial Sequence
  ENSG00000175265_21 (sequence is synthesized)
acccactctttgcacaaaactgttctcgctggtttggaataggctcccgtgcttttctaatgttattgcagcatggatgtccattacagaattcagataaaatttgctaatgttctgcta

SEQ ID NO: 605218 - DNA, 120 bp, Artificial Sequence
  ENSG00000175265_22 (sequence is synthesized)
tgctaatgttctgctatgatgtttgatctcatcttaatcacagtgagctcttctatagctcaatatgcggtttgccctcaagtgtgcactgtttattactttgtaatatgccactgtgag

SEQ ID NO: 605219 - DNA, 120 bp, Artificial Sequence
  ENSG00000175265_23 (sequence is synthesized)
ttctgtgtattggtgatgggagtgataaccttttgggggagctttctaaatctcacagaagaggaaagtggcctgctctggcaggtatgtgcaggatacagtgtgtttcatctgttccgg

SEQ ID NO: 605220 - DNA, 120 bp, Artificial Sequence
  ENSG00000175265_24 (sequence is synthesized)
aaagtggcctgctctggcaggtatgtgcaggatacagtgtgtttcatctgttccggtgccaagaatgagcagtgtactgtggcagttccctttggatttgtatgtgctctgggctcatga

SEQ ID NO: 605221 - DNA, 120 bp, Artificial Sequence
  ENSG00000175265_25 (sequence is synthesized)
catcgtgagctgcagcagttgcactctttttcagtgacctaaaaagggcttatttccgaggaatgaaaggctgccatcattggctgtgggtgtgaaaaacctttcctagcttagagcatt

SEQ ID NO: 605222 - DNA, 78 bp, Artificial Sequence
  ENSG00000175265_26 (sequence is synthesized)
tctacaatacattttaaagtcagagttcgtgttccctgttttaatcacatgactacctgtcccagtacacgaaagggc

SEQ ID NO: 605223 - DNA, 62 bp, Artificial Sequence
  ENSG00000175265_27 (sequence is synthesized)
tgttcatggagcttctttgaggcttgaagtttgattttactatctagacctctctggctaat

SEQ ID NO: 605224 - DNA, 120 bp, Artificial Sequence
  ENSG00000175265_28 (sequence is synthesized)
cttgaagtttgattttactatctagacctctctggctaatacctattcttcaaccacctcggttactctgacataggaatttacttcttttccttgagtggaaaacactttagaaagtaa

SEQ ID NO: 605225 - DNA, 120 bp, Artificial Sequence
  ENSG00000175265_29 (sequence is synthesized)
gtgagagtacttagttgaaacaaaaaggaattttagtagacagtattatattatctttgaaaatcaaggagaagtttatgcaacttaaaatgtttacacactgtggtgcaatctactgtt

SEQ ID NO: 605226 - DNA, 120 bp, Artificial Sequence
  ENSG00000175265_30 (sequence is synthesized)
tttacacactgtggtgcaatctactgtttgtgaatgtctgtattatcaggaaacatgtctatacgatcgcagagttgtatttcctcacaaacttctttacgaagagtgaaatacgttttt

SEQ ID NO: 605227 - DNA, 120 bp, Artificial Sequence
  ENSG00000175265_31 (sequence is synthesized)
gtacctctcattttcagtcagggacatactttgtgcaatatttctgtgattgtgcctatgcatgatgaatgaatgcatttcaatcatacattgcctaaatcataacttgatgatgcttgg

SEQ ID NO: 605228 - DNA, 87 bp, Artificial Sequence
  ENSG00000175265_32 (sequence is synthesized)
tgtctgtgttccaaaacacatcacattattaggttgtagggagatatgtaggtgtgctccctggggtggggagtcttggcagcctca

SEQ ID NO: 605229 - DNA, 120 bp, Artificial Sequence
  ENSG00000175265_33 (sequence is synthesized)
ctagaccatctccatttttagcacttggcagcctcatgatccttttataaatgtgagattaacaggagagcagcaatacgattttgccaatggaataacagatttgccggcattcactga

SEQ ID NO: 605230 - DNA, 120 bp, Artificial Sequence
  ENSG00000175265_34 (sequence is synthesized)
aagagggcagatattgggtccttgtaacttcaactgactcttccaaattgtatgaatttatcaatgtattacacaaatccagtttcagaatgataaaaaatgttagaccaaataatgcgg

SEQ ID NO: 605231 - DNA, 120 bp, Artificial Sequence
  ENSG00000175265_35 (sequence is synthesized)
ctaattaacagtcgtatgatttctagcccatgggtttaaaactgtatcttaaagagtcattttaaaataatataaatattaaaaaatgtaactgctatcttaatgttctgaaataaaaca

SEQ ID NO: 605232 - DNA, 85 bp, Artificial Sequence
  ENSG00000175265_36 (sequence is synthesized)
tggccaaagcgttatttgccaagttttcttagaatgaattttaccaatgtatgagttcttgttaacagaatgtgtaacggaaata

SEQ ID NO: 605233 - DNA, 120 bp, Artificial Sequence
  ENSG00000175265_37 (sequence is synthesized)
aatgtatgagttcttgttaacagaatgtgtaacggaaatactgaaagacttttgcttaaagtggcattattgactgctgatgtgatgctactgtaatgcaataaatttttaaattgttgc

SEQ ID NO: 605234 - DNA, 120 bp, Artificial Sequence
  ENSG00000175265_38 (sequence is synthesized)
cggcggcgcggcgaggacggcggcggaccggggcagccccgcgccctggccaggaataatcggtggagatggattgtgaaatggaggtgcataaatatccagtttgccaaccgagctaag

SEQ ID NO: 605235 - DNA, 120 bp, Artificial Sequence
  ENSG00000175265_39 (sequence is synthesized)
tgccaaccgagctaagaaatgctggataaaagtaaaagctctactgagatgaagaaagaaaaagaatacctgctcagctccagagacacgtaaagggacagagattgggggacagaagga

SEQ ID NO: 605236 - DNA, 120 bp, Artificial Sequence
  ENSG00000175265_40 (sequence is synthesized)
ctatctccaggaagcaggccagcaggcaagccagctgccacctcgtcctgtgcaaagcacaggcaccgtccccaaaagatttccaaagatgatgttaaacccagccacggttctgatctc

SEQ ID NO: 605237 - DNA, 120 bp, Artificial Sequence
  ENSG00000175265_41 (sequence is synthesized)
caggaaagcaattgctgtggtacaaaaggacaagggttaaaagagaacagtgggagctctctttcccagctaactcacgcagtgtgacgcagaggctttcagcacagcccagggtgcccg

SEQ ID NO: 605238 - DNA, 120 bp, Artificial Sequence
  ENSG00000175265_42 (sequence is synthesized)
ggactgaaaactccttcaccagccccctccacaggatatagaagacttagatcactacgagatgaaagcagagcccattagtgggaaaaagttggaggatgaaggaattgaaaaagaaaa

SEQ ID NO: 605239 - DNA, 120 bp, Artificial Sequence
  ENSG00000175265_43 (sequence is synthesized)
agacaagagcatttaactgcaaactgttgtcgttgtcaactgggttgtcttcctgaagtatgaatccggtatgtattgtgtggaggagcattacgtattgaacttctcacaaaacagggc

SEQ ID NO: 605240 - DNA, 120 bp, Artificial Sequence
  ENSG00000175265_44 (sequence is synthesized)
tgaagcagtgcctactcgacagaaccggtcatcgtacaaagaaatgccacgtgactcaaaggcaaagccagagtgcagcttggagcaaagaagatgatgtctcactctgtcacccaagat

SEQ ID NO: 605241 - DNA, 120 bp, Artificial Sequence
  ENSG00000175265_45 (sequence is synthesized)
ggacaggcttttggggacagggggcccaaggagcagtagagggcaatcgttaagattgtggatggactgttgggtactggtgaaggattctggatttggccgggcacagtggctcacgcc

SEQ ID NO: 605242 - DNA, 120 bp, Artificial Sequence
  ENSG00000175265_46 (sequence is synthesized)
atcacaaggtcaggagatcgagaccatccaggcaaacacggtgaaatactaaaaaatacaaaaaaaaaagccgggcgtggtggcgggcgcctgcagtcccagctgctccggagtctgagg

SEQ ID NO: 605243 - DNA, 83 bp, Artificial Sequence
  ENSG00000175265_47 (sequence is synthesized)
aggcagagagagactccgtttcaaaaaagaaaagaattctgggtttgaatcctgcctctccgtctgctagggatatgatttag

SEQ ID NO: 605244 - DNA, 120 bp, Artificial Sequence
  ENSG00000175265_48 (sequence is synthesized)
acccttctttttttttttttttttttttaacaaggatttacaggatttgtagattaaattgcccctgttctccaagaagcagcgggaacagcagcgctgcagggtgatgggctgcagagg

SEQ ID NO: 605245 - DNA, 120 bp, Artificial Sequence
  ENSG00000175265_49 (sequence is synthesized)
cctctgcagcagggtggggtctggggagacattcgggtgcctcctgtccacggcctcgataggccagggcgcctgcagcttgggccctcttcccctttcaggtggagggagctgttcatc

SEQ ID NO: 605246 - DNA, 120 bp, Artificial Sequence
  ENSG00000175267_0 (sequence is synthesized)
gagttgcttggaggagcttggagaaaccagaagtgagatccaggagaagtaaggccctggagtgccaggagcccttctcccaaagatggagaaataaatgaagaaatacaggaaaataag

SEQ ID NO: 605247 - DNA, 120 bp, Artificial Sequence
  ENSG00000175267_1 (sequence is synthesized)
cattgggtgttttgcaatggctacacaaactagtcatgtcttccatggtcaagaaaatatgtttctggaaaaccattgcattaggagaaacactggcagagattcaaagaagccactaaa

SEQ ID NO: 605248 - DNA, 120 bp, Artificial Sequence
  ENSG00000175267_2 (sequence is synthesized)
gcagaagaatatgaatggacttgggcaaaattcggacaatggattattggttacacatgttaaccagacacaggacttactgaggctgcaggggagtgagacccagtcttcagattggga

SEQ ID NO: 605249 - DNA, 120 bp, Artificial Sequence
  ENSG00000175267_3 (sequence is synthesized)
ggactctgaagactggctttcggctcacagtttaaaatgtcagaaactcaccttggctgacctgataagccagggcacagaagtgctggaggagggcaccaatgtcgtgcagaaaatatg

SEQ ID NO: 605250 - DNA, 120 bp, Artificial Sequence
  ENSG00000175267_4 (sequence is synthesized)
tttctccacccagatcatccgccattttgagtcaaagctttctgacactattgaagtctatcaagagagaattcagtggctcacagaaaacagcaagaaggcatttggcctcatcaaagg

SEQ ID NO: 605251 - DNA, 120 bp, Artificial Sequence
  ENSG00000175267_5 (sequence is synthesized)
ggccagagtcagcatcctcatagatgtgtcagccatcagcagtggccctcagaaagaagagttccaaaaggacctcatgagcctcatcgatgagcagctgagccacaaggagaagctgtt

SEQ ID NO: 605252 - DNA, 120 bp, Artificial Sequence
  ENSG00000175267_6 (sequence is synthesized)
tgtcctgtcctttggcaccaatgccgggtccctctggccagaccccatggaagtcagcgcctccaccctccaggaacttaagctctgggtaaagacgctgcagcctgatggaggcagcaa

SEQ ID NO: 605253 - DNA, 120 bp, Artificial Sequence
  ENSG00000175267_7 (sequence is synthesized)
cctgctacaagctctgaagaagatcttcactctcaagggactggattccctggtggccatcatgagaagctgcccagatcagccttctgaaatcctgtctgactacatccagcagtccac

SEQ ID NO: 605254 - DNA, 120 bp, Artificial Sequence
  ENSG00000175267_8 (sequence is synthesized)
catgggaagagacctcatcatccacttcatcacctacagatgcgatgatcagatgccccctgctgtcctgaagaaccttgcagaagctgttaggggctactaccactgctacagcccaaa

SEQ ID NO: 605255 - DNA, 120 bp, Artificial Sequence
  ENSG00000175267_9 (sequence is synthesized)
gatggagcactacaccagccgggacatggatgagctcctggcagaaattcagaaggcccagagcctcctcagccacgtgcaagccctgcagcacagcagcccctgtgaggcgctcacctg

SEQ ID NO: 605256 - DNA, 120 bp, Artificial Sequence
  ENSG00000175267_10 (sequence is synthesized)
caccatggaggagatttccacagagattacaaatgggccactcataagcctcttgcctaaacccccaaagcatgacgctcctctcaccattgagtttccaaacttggacaagacttctgc

SEQ ID NO: 605257 - DNA, 120 bp, Artificial Sequence
  ENSG00000175267_11 (sequence is synthesized)
agagtggcttaaggtcaatggtctgaaagccaagaaattaagtctatatcaggtcctggcacccaatgcattctctcctgtggaggaatttgtacctattctccagaaaacagtatcatc

SEQ ID NO: 605258 - DNA, 120 bp, Artificial Sequence
  ENSG00000175267_12 (sequence is synthesized)
gaccatccatgagaaggcaatgatacaatttgaatggcacgacgggacagtgaagaacattcatgtggacccacccttcctctataagtaccagcaacagctcagcagagctatgcggat

SEQ ID NO: 605259 - DNA, 120 bp, Artificial Sequence
  ENSG00000175267_13 (sequence is synthesized)
gtatgagaggcggattgagtggctctccctggccagcagaagaatctggggcacagtctgtgaaaaaagggtggttgtactgctcgatatctctgcgaccaattccatgtacattattca

SEQ ID NO: 605260 - DNA, 120 bp, Artificial Sequence
  ENSG00000175267_14 (sequence is synthesized)
tatccagcactccctgcggctgctgctggaggagcagttatccaacaaggactgtttcaacctcatcgcgtttggaagcacaattgaaagctggaggcctgagatggttcccgtgagtca

SEQ ID NO: 605261 - DNA, 120 bp, Artificial Sequence
  ENSG00000175267_15 (sequence is synthesized)
caacaatttacaaagtgcctggcggtgggccctgaacctgcggtgtcggggcagcaggaacgttctcagcgccctgcggaaggctgtggaagtagacttcaaggacaaagacaaacacca

SEQ ID NO: 605262 - DNA, 120 bp, Artificial Sequence
  ENSG00000175267_16 (sequence is synthesized)
atcgcagggaatctacctcttcactgggggcatccccgaccaggacatgcctacactcagtgcctacatggctgaggcctgtggcggctgcgacctccagctgaacgtgtgtctcttcta

SEQ ID NO: 605263 - DNA, 120 bp, Artificial Sequence
  ENSG00000175267_17 (sequence is synthesized)
cgtgggcgagccaaagatggacaccacaccccctgcccgctatgccagtcacactgacacagccgccgcctacaaggaggtcacccgggctgcaggtggccgcttccactggtttggaga

SEQ ID NO: 605264 - DNA, 120 bp, Artificial Sequence
  ENSG00000175267_18 (sequence is synthesized)
cacaggcatttatgagagcgatgacatcaactccatcatgtctgagatggaaaaggctctcaactactcccaaaagtgtgccttcctcatggcctccctgaagaaccattcaggaaaagt

SEQ ID NO: 605265 - DNA, 120 bp, Artificial Sequence
  ENSG00000175267_19 (sequence is synthesized)
acttcagctaagaagtcagcccaagaagctctgccctcccaggcccaccgtccccctgggggccagaatgagcattaaagatgaccctgacagagagaagagccccccgctgaaatctct

SEQ ID NO: 605266 - DNA, 120 bp, Artificial Sequence
  ENSG00000175267_20 (sequence is synthesized)
gaaatggcgtccactcagtagcagagttggcatctcaccagctgcggcccagccaacgaaagaagggatgatggaactgaggaggaagaccaagtcaagggaagcagagacatctctttt

SEQ ID NO: 605267 - DNA, 120 bp, Artificial Sequence
  ENSG00000175267_21 (sequence is synthesized)
actgttctacacagagaaagggaatgacgtgggctcagtgtacaagaagtaccctcaaggaaggggcttgagaaggactagctcttctattgacttacccagaaaggatacagtttgctc

SEQ ID NO: 605268 - DNA, 120 bp, Artificial Sequence
  ENSG00000175267_22 (sequence is synthesized)
aagccaagagtgggtggcaaaatatgggctcaaaaaattgaagctggagatttccagatgcatgggtcccaactgcactcatcaaaagtcaggacagaggtcagcatccgccaaacactg

SEQ ID NO: 605269 - DNA, 120 bp, Artificial Sequence
  ENSG00000175267_23 (sequence is synthesized)
cagcatcttccccagcgttgagatccatggagtggtgagacacatccagtggacgcccagggagatggaggtgtacatcaggcacttggagaaggtgttaaggcgctatgtccagaggct

SEQ ID NO: 605270 - DNA, 120 bp, Artificial Sequence
  ENSG00000175267_24 (sequence is synthesized)
gcagtggctgctgtccgggagccgccgactgtttggcaccgttttggagagcaaagtatgcatattgctggacacgtcagggtccatgggcccctacctgcagcaggtgaagacagagct

SEQ ID NO: 605271 - DNA, 120 bp, Artificial Sequence
  ENSG00000175267_25 (sequence is synthesized)
ggttttgctgatttgggaacagctgcggaagtgctgtgacagttttaacctgctcagctttgcagagagctttcagtcatggcaggacacgctggtggagaccacagatgcagcgtgtca

SEQ ID NO: 605272 - DNA, 120 bp, Artificial Sequence
  ENSG00000175267_26 (sequence is synthesized)
tgaggctatgcaatgggtgacccacctgcaagctcagggcagcacctccatcttgcaagcattgctgaaagctttcagtttccatgatctggaaggattgtacctcctgaccgacggaaa

SEQ ID NO: 605273 - DNA, 120 bp, Artificial Sequence
  ENSG00000175267_27 (sequence is synthesized)
gccagacacaagctgcagccttgtcctaaatgaagtccaaaaactcagggagaaaagagatgtgaaagtgcacaccatttccttgaactgctcagacagagcggcggttgagttcctgag

SEQ ID NO: 605274 - DNA, 120 bp, Artificial Sequence
  ENSG00000175267_28 (sequence is synthesized)
aaagctggcttccttcaccggcggacgctatcactgccctgtgggtgaggacacactctccaaaattcacagcctgctgaccaaaggcttcatcaatgaaaaggatcccacattgccacc

SEQ ID NO: 605275 - DNA, 120 bp, Artificial Sequence
  ENSG00000175267_29 (sequence is synthesized)
atttgaaggagatgatttaaggatcctggcccaggagatcaccaaggccagaagcttcctctggcaggcccaatccttcagatcccaactccagaagaaaaatgatgcagaaccaaaggt

SEQ ID NO: 605276 - DNA, 120 bp, Artificial Sequence
  ENSG00000175267_30 (sequence is synthesized)
cactctttcctagagaagtgttctcagaaaagtcatcctgcaaaggaccactcactgagcaaatctcagccccgagggcaggatgggatgaaatgctgtgacctgcaggaaacatgattc

SEQ ID NO: 605277 - DNA, 120 bp, Artificial Sequence
  ENSG00000175267_31 (sequence is synthesized)
ctggtaccaggactctctggaagctgaggaaggaaagactttgtcttttgtgtgaggggccattcccgggtcttaatctaactctccagccctgtcccgcagcgcactctactctccagc

SEQ ID NO: 605278 - DNA, 120 bp, Artificial Sequence
  ENSG00000175267_32 (sequence is synthesized)
cactagattgtccctctctgggaagccctaaaccaaccccctgcctaaatggtggtgcttcttgcaaaccaaccccctgcctgaacggtgcttcttgccccctctgcctggagactcctg

SEQ ID NO: 605279 - DNA, 120 bp, Artificial Sequence
  ENSG00000175267_33 (sequence is synthesized)
ctcatccatcaaggcacagctcaaatgacatcagctccctgggacctatctagagcgaggggcctccagtctttctcttgcagcatcctgaccacgcagacctctcgcactcagcactct

SEQ ID NO: 605280 - DNA, 120 bp, Artificial Sequence
  ENSG00000175267_34 (sequence is synthesized)
atgtcacgccaccttgctcgctgatctaactcttctccttgatggtgagctccttcgggatgagactggtgtcccaggatctgcaggtccccagaagctgccacataggagacacatggt

SEQ ID NO: 605281 - DNA, 120 bp, Artificial Sequence
  ENSG00000175267_35 (sequence is synthesized)
gaacagtgagcaggcggctgagctgtgagagcctagctctggaaagcagctgatggggtggtctccaccctggttcataagaggctaatgcagagtcacagtcagcccatcctgggggaa

SEQ ID NO: 605282 - DNA, 120 bp, Artificial Sequence
  ENSG00000175267_36 (sequence is synthesized)
gaagaaacaagtgagcctcagcaccaccctccatccctgcccaaccaaactgaagtgaaggctgctcatctgggttcattttctaaaattaaaaacaattaattttattctactaatagg

SEQ ID NO: 605283 - DNA, 120 bp, Artificial Sequence
  ENSG00000175267_37 (sequence is synthesized)
atcaacatgactttaactgtttgaagtgatcattggcgtgtgtgtgtgtgcataaatttttagtgacataaaactttattaaaagactcataccataataaagaatttcaataagaaaaa

SEQ ID NO: 605284 - DNA, 120 bp, Artificial Sequence
  ENSG00000175267_38 (sequence is synthesized)
cttcactgggggcatccccgaccaggacatggactggaccaggcacagagaaggccctggagaaacatggccaggctgggctgcccagagccccacagcttcaaggccctcagctgctgg

SEQ ID NO: 605285 - DNA, 120 bp, Artificial Sequence
  ENSG00000175267_39 (sequence is synthesized)
atggaggtgtacatcaggcacttggagaaggtgttaaggcgctatgtccagaggctgcagtggctgctgtccggtccagtcctctgcagtaggacctggtatagacagtccatggacagg

SEQ ID NO: 605286 - DNA, 120 bp, Artificial Sequence
  ENSG00000175274_0 (sequence is synthesized)
attacacacttgggtatcaccgccagccaaagcagtcccttccatttcaggcaccggcctgggcccgggagacaccgcaaggctatttaagatggtgtggtttgcccatctacgttgatc

SEQ ID NO: 605287 - DNA, 120 bp, Artificial Sequence
  ENSG00000175274_1 (sequence is synthesized)
gtcccaagaaaggggcaccgtctgcagaacttgccaggaaagtcatcctgggcggcgcgggccacgccagggtctccccgcgcggcttcctcccccggcgccttctctcgggcgcgcgtg

SEQ ID NO: 605288 - DNA, 80 bp, Artificial Sequence
  ENSG00000175274_2 (sequence is synthesized)
cgtgcgccccctgcaggcggcccccgggagagcctcgcgggggagccgggagcctggtttccccgccaacccccatcccg

SEQ ID NO: 605289 - DNA, 120 bp, Artificial Sequence
  ENSG00000175274_3 (sequence is synthesized)
ggaggggacggcgcgccattggcttgtgcgcggaaccgagaggagggaccagcgcgggccgccagactcgggcagctgtgattagagaagccagggccaccccggagccagcctctgagg

SEQ ID NO: 605290 - DNA, 120 bp, Artificial Sequence
  ENSG00000175274_4 (sequence is synthesized)
cttcacctcaccccgtttacactgctgtctcctctgcatagatttggctgactgaggacgcgacagcccttctgcagaggccgggctggaggagaagatggcggccaagcagcccccgcc

SEQ ID NO: 605291 - DNA, 120 bp, Artificial Sequence
  ENSG00000175274_5 (sequence is synthesized)
tctgatgaagaagcacagccagacggacctcgtgagccgcctgaagacccgcaagatcctcggcgtgggcggggaggatgacgacggggaggtgcatcgctccaagatcagccaggtctt

SEQ ID NO: 605292 - DNA, 120 bp, Artificial Sequence
  ENSG00000175274_6 (sequence is synthesized)
aggcaatgaaatcaagtttaccattcgggagcctttggggctcagggtctggcagttcgtctctgctgtgctcttctccggcattgccatcatggcgcttgccttccctgaccagctcta

SEQ ID NO: 605293 - DNA, 120 bp, Artificial Sequence
  ENSG00000175274_7 (sequence is synthesized)
tgatgcggtctttgatggagcccaggtgaccagcaagacccccatccgcctctacggcggtgccctcctcagcatctccctgatcatgtggaacgctctctacacggctgagaaggtcat

SEQ ID NO: 605294 - DNA, 120 bp, Artificial Sequence
  ENSG00000175274_8 (sequence is synthesized)
cattcgatggaccctgctcaccgaagcttgctatttcggggtccagttcttggtggtcactgccacgctagctgagacgggcctcatgtccctggggatcctgctgctcctggtcagccg

SEQ ID NO: 605295 - DNA, 120 bp, Artificial Sequence
  ENSG00000175274_9 (sequence is synthesized)
cctcctttttgtcgtcatcagcatttactactattaccaagtcggccgaagacccaagaaggcctagttgcccgctgggcctggggccctgcccatgcctgggccagagtggcgctgggg

SEQ ID NO: 605296 - DNA, 120 bp, Artificial Sequence
  ENSG00000175274_10 (sequence is synthesized)
cctcggcttccctttggctcctggaaggcaggagggtcccctgccctgccccagtcctgccccagggaggcagggggtggggggccttcctttcctcctgggcaccccgtgtgctgtgat

SEQ ID NO: 605297 - DNA, 120 bp, Artificial Sequence
  ENSG00000175274_11 (sequence is synthesized)
ctcctgggctttcaggcttgacatgctggtctggggagagacagggcctctgctgccctgttcttcaccctcacagtgatacctcctttccttgggtctcttggcctccagaccccctca

SEQ ID NO: 605298 - DNA, 120 bp, Artificial Sequence
  ENSG00000175274_12 (sequence is synthesized)
atagacactgactaaagtcaggctggagtcatgagggtagtgggctaagtcgagggtccagcctcttctgccaggaagcccttcttgcttttgagagaggctgtgaccaccccccatcct

SEQ ID NO: 605299 - DNA, 120 bp, Artificial Sequence
  ENSG00000175274_13 (sequence is synthesized)
tctccctacactcccagccaacctagtgcccaagcagctaaacttggcttccttctaatcctggaaaaccctgtacccctcctcctcaatctggccctctccacatgcacaccctgaaaa

SEQ ID NO: 605300 - DNA, 120 bp, Artificial Sequence
  ENSG00000175274_14 (sequence is synthesized)
cacacacagacacacaacacacacacatacacacccctgaacacacacacagacacacatacacccatgatgtgagcaaacacacacacgtgcgccttcatagcccagccaagggcatgc

SEQ ID NO: 605301 - DNA, 120 bp, Artificial Sequence
  ENSG00000175274_15 (sequence is synthesized)
agctagaagtcctgtccccactctcctggcctgacaagatgagctctcctgggaccttgctctagggcactctgcctctaccctaggacactggaatgccctgggagccccctccctgca

SEQ ID NO: 605302 - DNA, 120 bp, Artificial Sequence
  ENSG00000175274_16 (sequence is synthesized)
accagcctgagttcagccccacggacaaagggacacacagcccccaatggagaccattgtaagtggtggggctgggagaggaggaacagaaggaaagccatagcgctctcttgccccttg

SEQ ID NO: 605303 - DNA, 120 bp, Artificial Sequence
  ENSG00000175274_17 (sequence is synthesized)
gcatgtaccccaaggcctgatggccactgggctcagcctgtcccccactcctgcctgcttcccggtgagctgccccccacacgtgcagcccgggctgcctccagggtctggctgagtggg

SEQ ID NO: 605304 - DNA, 120 bp, Artificial Sequence
  ENSG00000175274_18 (sequence is synthesized)
atcaggtggccctccaactcagcacaggaaataagtagaaacatttcagcaggccacctcccctcatcttccccgccctgtccagcgccctggcaaaggctgacaactggctgtcttggg

SEQ ID NO: 605305 - DNA, 120 bp, Artificial Sequence
  ENSG00000175274_19 (sequence is synthesized)
gccgaacagcccctgccctgcctctgagggcccaccagcctgtgctgcatacccaccgcccagcttctccctgagggcccaccagcctgtgctgcatacccaccgcccagcttctccctg

SEQ ID NO: 605306 - DNA, 120 bp, Artificial Sequence
  ENSG00000175274_20 (sequence is synthesized)
agggcccaccagcctgtgctgtacaccccgttagtccctgatcccaaccttctccctcctgccagcacaccgatgcacacaccggaagtggcgagcccaagccctggggacaggtgtagg

SEQ ID NO: 605307 - DNA, 120 bp, Artificial Sequence
  ENSG00000175274_21 (sequence is synthesized)
gagaaaagcagccccaggcctcagactcgcttcccatcctggcatagagtgggggatggctggagggtgtctataggtacagcccgctctggctgctgccaggtgggcccctgccagggg

SEQ ID NO: 605308 - DNA, 120 bp, Artificial Sequence
  ENSG00000175274_22 (sequence is synthesized)
tcctcacccctgtccaccctgtgcctggctgtccctgcacccagatacagcaacatggcctgtacccagcagagtggtggcaccaccatggttacagcggatgccccgagactctgcttg

SEQ ID NO: 605309 - DNA, 120 bp, Artificial Sequence
  ENSG00000175274_23 (sequence is synthesized)
gtaaacgtggcagagcagaatgggaggctggaccctgaggaagggcccctctcctggcatctgtctcttgctacctaagcctgtgcctctccctaaagagctgcctccctgctgccgagc

SEQ ID NO: 605310 - DNA, 120 bp, Artificial Sequence
  ENSG00000175274_24 (sequence is synthesized)
cctggtctggccacgagccaccactgcctcccgctgctgcccacaggtggtgccgccaatgggcagtgccctcaggccgaagcctcaatcccccatctgagccaggcctaatcctctaat

SEQ ID NO: 605311 - DNA, 120 bp, Artificial Sequence
  ENSG00000175274_25 (sequence is synthesized)
agtgatggttggtttgtcctcccataactgcaggtggattccacctggggaatgaggctgcgtgtcgggcgtctgctggccctgagacatccagtcttccacactcaactgtgggatggg

SEQ ID NO: 605312 - DNA, 120 bp, Artificial Sequence
  ENSG00000175274_26 (sequence is synthesized)
agggtggcgtggccttaccccatgaggctgtccaggctctggcacacagctgtgctcacaaaatactgggtggcttggttagagctaattgtagtggagcctgcaggtgagggtgaggga

SEQ ID NO: 605313 - DNA, 120 bp, Artificial Sequence
  ENSG00000175274_27 (sequence is synthesized)
gggggctgcaggtcaggtaagatctggaagacagacgtacagcttggagggcagggggactctaaggcaaggagatttacagttgggaaggaggcagtggcagaggggtgagggacaggg

SEQ ID NO: 605314 - DNA, 120 bp, Artificial Sequence
  ENSG00000175274_28 (sequence is synthesized)
gcccttaagtccagcgaggaaagctcggtgtgggcccgctctacgctccgtttggggtgacctggaacgcctcttctcccagctccctccagccatcagcagcctcttgtcaagcttctg

SEQ ID NO: 605315 - DNA, 120 bp, Artificial Sequence
  ENSG00000175274_29 (sequence is synthesized)
cctcgccccagtctatccccaaccccaaatcaagaccacctttcttcacggtcactatttattctttgttcctttttctttttgtaagaaacattcacaaaaaccagtgcaaaaccatca

SEQ ID NO: 605316 - DNA, 90 bp, Artificial Sequence
  ENSG00000175274_30 (sequence is synthesized)
cctgtactgcccggcccggcacgggcggcgcgatgtgaggcgtccgagcccggagcctccgcctggcatcagctccacgtagcccagcgc

SEQ ID NO: 605317 - DNA, 120 bp, Artificial Sequence
  ENSG00000175274_31 (sequence is synthesized)
ccgcctggcatcagctccacgtagcccagcgccggcacgcgcgaggcccgaagtgggaatgatggctccatttcacagatgaggaaaccgagactcagagcacaaggccacacagcagga

SEQ ID NO: 605318 - DNA, 120 bp, Artificial Sequence
  ENSG00000175274_32 (sequence is synthesized)
agtctttgcccccgcagggccgcggacggaggtggtggcggagttcccgctgcccacaagtctggcccgaccttctggggtgggggcctgggggcaggggccctgggccggagaacccgg

SEQ ID NO: 605319 - DNA, 120 bp, Artificial Sequence
  ENSG00000175274_33 (sequence is synthesized)
ggccgcctaacggctcggagctcaccgccgggggacaccggcgctgaggcctgggtctcagaaagtgggaagtgggaatgatggctccatttcacagatgaggaaaccgagactcagagc

SEQ ID NO: 605320 - DNA, 120 bp, Artificial Sequence
  ENSG00000175274_34 (sequence is synthesized)
acaaggccacacagcaggaagagagaaatgaaaacttacggtcccacagaaacgcgggtttgtagcagctctattcataatcatcaacaactggaaacaacccacatggccttcagtgac

SEQ ID NO: 605321 - DNA, 120 bp, Artificial Sequence
  ENSG00000175274_35 (sequence is synthesized)
cgaatggataaacaagctgttacacgtaccccagggaatactgctctccaataaaaaggagcggactcttgatacacacagtgacttggaggaatctcaaaggcattctgctcaatgaca

SEQ ID NO: 605322 - DNA, 120 bp, Artificial Sequence
  ENSG00000175274_36 (sequence is synthesized)
ggagccagcctcaaaagatttggctgactgaggacgcgacaggtactcagcttctttctgcatctcagttgcccagcacaggggctggcacgcacccttctgcagaggccgggctggagg

SEQ ID NO: 605323 - DNA, 120 bp, Artificial Sequence
  ENSG00000175274_37 (sequence is synthesized)
gtgcactccttctttctctctccaccagcacgtctgcgaggaagtgggaatgatggctccatttcacagatgaggaaaccgagactcagagcacaaggccacacagcaggaagagggcag

SEQ ID NO: 605324 - DNA, 120 bp, Artificial Sequence
  ENSG00000175274_38 (sequence is synthesized)
agaaaacccaatcataggaccaggtaacccattaactcatgaactccatgaacacagcatcctcctgacagaaccggacatgggcaggggccaggggctcagtcctccccctttataaag

SEQ ID NO: 605325 - DNA, 120 bp, Artificial Sequence
  ENSG00000175274_39 (sequence is synthesized)
agatcgagtctcaatgcggggaagtgactcgcccagtgtcacatagggccttggaatgacaggagcaggctgaagcagcagcattgagtctggaggggacaggatcggggacagacagct

SEQ ID NO: 605326 - DNA, 120 bp, Artificial Sequence
  ENSG00000175274_40 (sequence is synthesized)
cctcctcaatgctgcgcccacaccccggcctctgatgaagctctctgctggggatgtgctgccatcttgtggccattggtggaatacacccagtgggttggagcttgcagtcgccaccat

SEQ ID NO: 605327 - DNA, 120 bp, Artificial Sequence
  ENSG00000175274_41 (sequence is synthesized)
ctgcaaggagcgctcataagtgtgtgcactgcctctgggcgttgtggtacagagatggaggaagcccaggcccagcctctaggaattcacagcctagaggagaggcagatcaattcagtg

SEQ ID NO: 605328 - DNA, 120 bp, Artificial Sequence
  ENSG00000175274_42 (sequence is synthesized)
tctgcaaaacccctcgcaccccccctattttatccccagagccacttctgtttgaaccacttctgtttcctctctaacctgagatgcacacgttaggatttggaattacaatttttaaag

SEQ ID NO: 605329 - DNA, 120 bp, Artificial Sequence
  ENSG00000175274_43 (sequence is synthesized)
ctcagcataggtaatatgcctctatttctacgaaatattctatggctccctattgcctacagaataaaggctgagctcctctggagttagggttgctggaataaaataaatgcacaccca

SEQ ID NO: 605330 - DNA, 120 bp, Artificial Sequence
  ENSG00000175274_44 (sequence is synthesized)
cccatgtgaatgaccgtcgagacaggaaaaacctcccagtgacttctgagcggtgatggaggccatcagagggcctgatccccttgcccacagcagcagcttcagacccccgggggagga

SEQ ID NO: 605331 - DNA, 120 bp, Artificial Sequence
  ENSG00000175274_45 (sequence is synthesized)
cacgcctgtgccttctccaggagcacactagatcccatggtttgtggcctgactccttctcccaggaaccctggagttttctgtcctggcatgggggcgggtggggacaattgggtccag

SEQ ID NO: 605332 - DNA, 120 bp, Artificial Sequence
  ENSG00000175274_46 (sequence is synthesized)
accctggactgcccccaaggatgctgatcctgctcctggcggggaaggaagacgtctgtgggaagcatcagctgtcaccccccaccctctcccaagcgggacctctgagcccctctcgct

SEQ ID NO: 605333 - DNA, 120 bp, Artificial Sequence
  ENSG00000175274_47 (sequence is synthesized)
gcccgcaggcgcttgccttccctgaccagctctatgatgcggtctttgatggagcccaggtgaccagcaagacccccatccgcctctacggcggtgccctcctcagtgagtactgctggg

SEQ ID NO: 605334 - DNA, 120 bp, Artificial Sequence
  ENSG00000175274_48 (sequence is synthesized)
gaagccaagattggaacccaggcaatccagcttggaaggacaaaggatggggtctctgaaacatctccagcctcagccctgctcctggccttctctctcatccagacatggctgcagcct

SEQ ID NO: 605335 - DNA, 120 bp, Artificial Sequence
  ENSG00000175274_49 (sequence is synthesized)
atccagtgcttccctgctgccagaaggagctttccagaaagcacatgtcaccacagccctctcttgctggaacccaacctctacaggagaccaagctgcctcctacagaccacaggacct

SEQ ID NO: 605336 - DNA, 120 bp, Artificial Sequence
  ENSG00000175274_50 (sequence is synthesized)
ccaagactcaccatcgccacctcttgttattcctgccctgactttcctatcaccaccatcaaaggagagtcccccagagattacatctcatggcccgggcttgcggagtgctgggctccc

SEQ ID NO: 605337 - DNA, 120 bp, Artificial Sequence
  ENSG00000175274_51 (sequence is synthesized)
agacaaatgcaatcaaaggagacatgtctcctgggaagagcctcccacaacctcaaagccccgaaagccctccgtgtttatgttcttgcttgatccccacaaccgtccagcaaagccagc

SEQ ID NO: 605338 - DNA, 120 bp, Artificial Sequence
  ENSG00000175274_52 (sequence is synthesized)
acagcagagatgattctatttccccaggagtggtgcccagagaagttaagcagtttgcctgagatgacacagccgtgttggagccgtgcttgcttgggatgaactaagtggcgcgcattt

SEQ ID NO: 605339 - DNA, 120 bp, Artificial Sequence
  ENSG00000175274_53 (sequence is synthesized)
gattttactgctgatttcacagctccttcagctaccccaagctgccatcaatgtcccatcaatttcactttgtctgctcctctctgcaatgagctttctcagctctcagcctgtgttcag

SEQ ID NO: 605340 - DNA, 120 bp, Artificial Sequence
  ENSG00000175274_54 (sequence is synthesized)
taaagagacgttgctggtcttgtgtcacgtctcctcctgcctgaataatgctcgtgtgcagcatgaaggagaggtctctcagaactcaagggcctgaagctcccagaagcttccagatcc

SEQ ID NO: 605341 - DNA, 120 bp, Artificial Sequence
  ENSG00000175274_55 (sequence is synthesized)
agaggcaacaggtgtcttccggtcccagggagggcaagtttcctgaacctcgaaggcaggcagacagtggaggcctcccttccttctcacagcatcctccagctccaaggcaggcttccc

SEQ ID NO: 605342 - DNA, 120 bp, Artificial Sequence
  ENSG00000175274_56 (sequence is synthesized)
ccaacccccagggcccaggaactgtcatcagagcagaaatcaagcccagtcccaggcctcaccccacagggcatctgccccattgatatttgcttggtaataaatactggagacagaggg

SEQ ID NO: 605343 - DNA, 120 bp, Artificial Sequence
  ENSG00000175274_57 (sequence is synthesized)
gctcttctccggcattgccatcatggcatctccctgatcatgtggaacgctctctacacggctgagaaggtcatcattcgatggaccctgctcaccgaagcttgctatttcggggtccag

SEQ ID NO: 605344 - DNA, 120 bp, Artificial Sequence
  ENSG00000175279_0 (sequence is synthesized)
gcgccgcggcgggaaaatccgacctggccgcgcaccaccgccccttctcggccctcctgcgtttgcccagggtcggcccgcagtgatggaggaggaggcggagaccgaggagcagcagcg

SEQ ID NO: 605345 - DNA, 120 bp, Artificial Sequence
  ENSG00000175279_1 (sequence is synthesized)
attctcttaccaacagaggctaaaggcagcagttcactatactgtgggttgtctttgcgaggaagttgcattggacaaagagatgcagttcagcaaacagaccattgcggccatttcgga

SEQ ID NO: 605346 - DNA, 120 bp, Artificial Sequence
  ENSG00000175279_2 (sequence is synthesized)
gctgactttccgacagtgtgaaaattttgccaaagaccttgaaatgtttgcaagacatgcgaaaagaaccacaattaacactgaagatgtgaagctcttagccaggaggagtaattcact

SEQ ID NO: 605347 - DNA, 120 bp, Artificial Sequence
  ENSG00000175279_3 (sequence is synthesized)
agaaaaagaagtcagaggatggaagcaaaaattcaaggcagccagcagaggctggagtggtggaaagtgagaattaaagtccctcgccgcttggaaagtgcagccttctacaggtagagc

SEQ ID NO: 605348 - DNA, 120 bp, Artificial Sequence
  ENSG00000175279_4 (sequence is synthesized)
cacctagaaatgcatatggctgcaaaggaaactttgaagggttaaatagagatttaaaaaaataaaataaaaaggctgggctagggtgctttttgtgctgaattctccacattgttaact

SEQ ID NO: 605349 - DNA, 120 bp, Artificial Sequence
  ENSG00000175279_5 (sequence is synthesized)
gccaaagctagttttagagaatgagaaagtcttaagcaaaatactcccaggtctcactccagaacataaaaatggtgtgtgatcaaatggtatatattagaaattacatctgttgtaatt

SEQ ID NO: 605350 - DNA, 120 bp, Artificial Sequence
  ENSG00000175279_6 (sequence is synthesized)
aaaattgtgtgagcaattaaacatggttgactttttcaagcaaaaatcagttcatcttttgatgtaattttctaggctaaatggcaatctctgaaagatgaataaagctatatttattta

SEQ ID NO: 605351 - DNA, 120 bp, Artificial Sequence
  ENSG00000175279_7 (sequence is synthesized)
gaagcggttctaggggagcgtgcgggcgccggggtccggcggcgagaggccaccttctggccttgcgatgaatcctcggtttccccttctcagatggggttttcgtgagggtacaacgtc

SEQ ID NO: 605352 - DNA, 120 bp, Artificial Sequence
  ENSG00000175279_8 (sequence is synthesized)
ggcattagacattccaggtgacgcccgtacgcggtgggcggttcgggccggagctctggaacgctggccctggaggcgtcgacccctcgttactgatgcagggacgcggtgcggaccagt

SEQ ID NO: 605353 - DNA, 120 bp, Artificial Sequence
  ENSG00000175279_9 (sequence is synthesized)
caggcccagagctcgtccttagatgtgggttcgaatctctgccccgccaacttgtgatcgtatcgactcggcccagacgcaattttcttctctgcaaaatcgtcataagaataatcactt

SEQ ID NO: 605354 - DNA, 120 bp, Artificial Sequence
  ENSG00000175279_10 (sequence is synthesized)
gttgccgtgaagaggcttaaaagcaagacccggagtggcgaccttaaagaggacggactgaagaaacgcgggaatgagctccagacgcgggagtttcctctctacaaagttacactgcag

SEQ ID NO: 605355 - DNA, 120 bp, Artificial Sequence
  ENSG00000175279_11 (sequence is synthesized)
cggaggtggagagatgggcctccgcattctccatctctttacttaattggggtcttaggaacttcactaatttttgtgtcacttttgcttaatgccctttatctaaaaggatgggctact

SEQ ID NO: 605356 - DNA, 120 bp, Artificial Sequence
  ENSG00000175279_12 (sequence is synthesized)
tagagatccctgctagtttgaagtctgaccgtgaacttctgtgtttcatcaaaactttaaataataccaaacattttggtgacttgcttctgccctttctgcagacatgcgaaaagaacc

SEQ ID NO: 605357 - DNA, 120 bp, Artificial Sequence
  ENSG00000175283_0 (sequence is synthesized)
gttgccgcggggcggtgccaagatggcgaggcccaaagaggtgaggagccggcagcgggggcggctgtaactgtgaggaaggctgcagagtggcgacgtctacgccgtaggttggaggct

SEQ ID NO: 605358 - DNA, 120 bp, Artificial Sequence
  ENSG00000175283_1 (sequence is synthesized)
gtggggggtggccgggcgccagctcccaggccgcagaagtgacctgcggtggagttccctcctcgctgctggagaacggagggagaaggttgctggccgggtgaaagtgcctccctctgc

SEQ ID NO: 605359 - DNA, 120 bp, Artificial Sequence
  ENSG00000175283_2 (sequence is synthesized)
ttgacggggctgaggggcccgaagtctagggcgtccgtagtcgccccggcctccgtgaagccccaggtctagagatatgacccgagagtgcccatctccggccccggggcctggggctcc

SEQ ID NO: 605360 - DNA, 120 bp, Artificial Sequence
  ENSG00000175283_3 (sequence is synthesized)
gctgagtggatcggtgctggcagaggcggcagtagtgtttgcagtggtgctgagcatccacgcaaccgtatgggaccgatactcgtggtgcgccgtggccctcgcagtgcaggccttcta

SEQ ID NO: 605361 - DNA, 120 bp, Artificial Sequence
  ENSG00000175283_4 (sequence is synthesized)
cgtccaatacaagtgggaccggctgctacagcagggaagcgccgtcttccagttccgaatgtccgcaaacagtggcctattgcccgcctccatggtcatgcctttgcttggactagtcat

SEQ ID NO: 605362 - DNA, 120 bp, Artificial Sequence
  ENSG00000175283_5 (sequence is synthesized)
gaaggagcggtgccagactgctgggaacccgttctttgagcgttttggcattgtggtggcagccactggcatggcagtggccctcttctcatcagtgttggcgctcggcatcactcgccc

SEQ ID NO: 605363 - DNA, 120 bp, Artificial Sequence
  ENSG00000175283_6 (sequence is synthesized)
agtgccaaccaacacttgtgtcatcttgggcttggctggaggtgttatcatttatatcatgaagcactcgttgagcgtgggggaggtgatcgaagtcctggaagtccttctgatcttcgt

SEQ ID NO: 605364 - DNA, 120 bp, Artificial Sequence
  ENSG00000175283_7 (sequence is synthesized)
ttatctcaacatgatcctgctgtacctgctgccccgctgcttcacccctggtgaggcactgctggtattgggtggcattagctttgtcctcaaccagctcatcaagcgctctctgacact

SEQ ID NO: 605365 - DNA, 120 bp, Artificial Sequence
  ENSG00000175283_8 (sequence is synthesized)
tagggatggtactcatgggcattttcttcagcactctgtttgtcttcatggactcaggcacctgggcctcctccatcttcttccacctcatgacctgtgtgctgagccttggtgtggtcc

SEQ ID NO: 605366 - DNA, 120 bp, Artificial Sequence
  ENSG00000175283_9 (sequence is synthesized)
taccctggctgcaccggctcatccgcaggaatcccctgctctggcttcttcagtttctcttccagacagacacccgcatctacctcctagcctattggtctctgctggccaccttggcct

SEQ ID NO: 605367 - DNA, 120 bp, Artificial Sequence
  ENSG00000175283_10 (sequence is synthesized)
gcctggtggtgctgtaccagaatgccaagcggtcatcttccgagtccaagaagcaccaggcccccaccatcgcccgaaagtatttccacctcattgtggtagccacctacatcccaggta

SEQ ID NO: 605368 - DNA, 120 bp, Artificial Sequence
  ENSG00000175283_11 (sequence is synthesized)
tcatctttgaccggccactgctctatgtagccgccactgtatgcctggcggtcttcatcttcctggagtatgtgcgctacttccgcatcaagcctttgggtcacactctacggagcttcc

SEQ ID NO: 605369 - DNA, 120 bp, Artificial Sequence
  ENSG00000175283_12 (sequence is synthesized)
tgtccctttttctggatgaacgagacagtggaccactcattctgacacacatctacctgctcctgggcatgtctcttcccatctggctgatccccagaccctgcacacagaagggtagcc

SEQ ID NO: 605370 - DNA, 120 bp, Artificial Sequence
  ENSG00000175283_13 (sequence is synthesized)
tgggaggagccagggccctcgtcccctatgccggtgtcctggctgtgggtgtgggtgatactgtggcctccatcttcggtagcaccatgggggagatccgctggcctggaaccaaaaaga

SEQ ID NO: 605371 - DNA, 120 bp, Artificial Sequence
  ENSG00000175283_14 (sequence is synthesized)
cttttgaggggaccatgacatctatatttgcgcagatcatttctgtagctctgatcttaatctttgacagtggagtggacctaaactacagttatgcttggattttggggtccatcagca

SEQ ID NO: 605372 - DNA, 120 bp, Artificial Sequence
  ENSG00000175283_15 (sequence is synthesized)
ctgtgtccctcctggaagcatacactacacagatagacaatctccttctgcctctctacctcctgatattgctgatggcctagctgttacagtgcagcagcagtgacggaggaaacagac

SEQ ID NO: 605373 - DNA, 120 bp, Artificial Sequence
  ENSG00000175283_16 (sequence is synthesized)
atggggagggtgaacagtccccacagcagacagctacttgggcatgaagagccaaggtgtgaaaagcagatttgatttttcagttgattcagatttaaaataaaaagcaaagctctccta

SEQ ID NO: 605374 - DNA, 120 bp, Artificial Sequence
  ENSG00000175287_0 (sequence is synthesized)
attcagaaggcatcattttggggaaggcagcagccggtttttcagagccagcgagtggccctgccagctgctgagcagggcaagctgagaagggtggtggtgtgcaagtgttattctctc

SEQ ID NO: 605375 - DNA, 120 bp, Artificial Sequence
  ENSG00000175287_1 (sequence is synthesized)
ggtggtggtgtgcaagtgttattctctctttttgtttttgtttttgttttttgagatggagtcttactctgtcgtccaggctggagtgagtgccgtggcatgatctcggctcactgcaac

SEQ ID NO: 605376 - DNA, 86 bp, Artificial Sequence
  ENSG00000175287_2 (sequence is synthesized)
actgggactacaggcacctgccaccatgctcggctagtttttggtatttttatttattatttatttatttactagtgcagtggccc

SEQ ID NO: 605377 - DNA, 79 bp, Artificial Sequence
  ENSG00000175287_3 (sequence is synthesized)
gcgcctctgcctccaaagtgctgggattacaggcccgagccgccgcacccggcctgcaggtgttgttctgaccccagct

SEQ ID NO: 605378 - DNA, 120 bp, Artificial Sequence
  ENSG00000175287_4 (sequence is synthesized)
ccgccgcacccggcctgcaggtgttgttctgaccccagctccactgtgccagcccgacttgagatgccaagtatcttgggcctgaggattgaggcctagagagaggcaggcgttcctcag

SEQ ID NO: 605379 - DNA, 120 bp, Artificial Sequence
  ENSG00000175287_5 (sequence is synthesized)
agtcacagggaatggcggcgcctggactgggactcagcccagctgcttggcctgaccctctcacagcataatttcccggcacctggaggccgcgcttagaagccgcccagtgccctgagc

SEQ ID NO: 605380 - DNA, 120 bp, Artificial Sequence
  ENSG00000175287_6 (sequence is synthesized)
gtctccatggcctgcctgagcccctcgcagctccagaagttccaacaggatggattcctggtgctggaaggattcttgtctgcggaagagtgtgtggccatgcaacaaaggattggcgag

SEQ ID NO: 605381 - DNA, 120 bp, Artificial Sequence
  ENSG00000175287_7 (sequence is synthesized)
ctgaaatggatgttcctctccactgccgcacagaattctccacccaggaagaggagcagcttcgagcccagggcagcacagactatttcttgagcagtggtgacaagattcgattcttct

SEQ ID NO: 605382 - DNA, 120 bp, Artificial Sequence
  ENSG00000175287_8 (sequence is synthesized)
ttgagaaaggcgtttttgatgagaaaggaaatttcctggtccctccggagaaatccatcaacaaaattggccacgctctgcacgcccacgaccccgtcttcaagagcatcacacactcct

SEQ ID NO: 605383 - DNA, 120 bp, Artificial Sequence
  ENSG00000175287_9 (sequence is synthesized)
tcaaggtgcagaccttggccagaagtctgggcctccagatgcccgtggtggtgcagagcatgtacatctttaagcaacctcactttggcggtgaagtctcccctcatcaggacgcctcct

SEQ ID NO: 605384 - DNA, 120 bp, Artificial Sequence
  ENSG00000175287_10 (sequence is synthesized)
tcctgtacacggagcccctgggccgggtgctgggcgtgtggatcgcagtggaggatgccacgctggagaacggctgtctctggttcatccctggctcccacaccagtggtgtgtcaagaa

SEQ ID NO: 605385 - DNA, 120 bp, Artificial Sequence
  ENSG00000175287_11 (sequence is synthesized)
ggatggtccgggcccctgttggctcagcgcctggtaccagcttccttgggtcagagccagcccgggataacagcctctttgtgcccaccccagtgcagagaggggccctggtcctcatcc

SEQ ID NO: 605386 - DNA, 120 bp, Artificial Sequence
  ENSG00000175287_12 (sequence is synthesized)
atggagaagtggtacacaagagcaagcagaacctctctgaccgctcgcgccaggcctacactttccacctcatggaggcctctggcaccacctggagcccggagaactggctccagccaa

SEQ ID NO: 605387 - DNA, 120 bp, Artificial Sequence
  ENSG00000175287_13 (sequence is synthesized)
cagctgaactgccctttccccaactgtacacctaaaggctctcgcagggcaggagccctcgcccctcccgggtgaagctgtgggctgtaaacaccagtgccttgctcagcctcctggttg

SEQ ID NO: 605388 - DNA, 120 bp, Artificial Sequence
  ENSG00000175287_14 (sequence is synthesized)
caacagggaggtcttgtctcccctcctgggctttcctcctgccctgtgggcagcagcctaggctgggtcaggggcttccctaagatcttcacctctctgcctccctactgccccaacata

SEQ ID NO: 605389 - DNA, 120 bp, Artificial Sequence
  ENSG00000175287_15 (sequence is synthesized)
gccttgaggaggcttctcagccaccaaagggttctggccccttctcactctcctctcctctcagatggaactctggttattatggtgttagttatcgaataaaaacgacttcagaatgca

SEQ ID NO: 605390 - DNA, 120 bp, Artificial Sequence
  ENSG00000175287_16 (sequence is synthesized)
tcctgtacacggagcccctgggccgggtgctgggcgtgtggatcgcagtggaggatgccacgctggagaacggctgtctctggttcatccctggctcccacaccagtgaggaaccctgtc

SEQ ID NO: 605391 - DNA, 120 bp, Artificial Sequence
  ENSG00000175287_17 (sequence is synthesized)
gagcgtctccatggcctgcctgagcccctcgcagctccagaagcagccaatattgattgctctttgctgggtgccagactccatgcctggggttggggacagggcagcaaacaagatacc

SEQ ID NO: 605392 - DNA, 120 bp, Artificial Sequence
  ENSG00000175287_18 (sequence is synthesized)
tggtcccaccttcacacagctgcaaggttgagggaagggtcagacaggagcatttgcagactggggaagcctgagtctcaagcctgcctgcagttccaacaggatggattcctggtgctg

SEQ ID NO: 605393 - DNA, 120 bp, Artificial Sequence
  ENSG00000175287_19 (sequence is synthesized)
cacccaggaagaggagcagcttcgagcccaggcccagctctgaccccaggatgctgtctcagtcctctgatgtcccctttccacagggcagcacagactatttcttgagcagtggtgaca

SEQ ID NO: 605394 - DNA, 120 bp, Artificial Sequence
  ENSG00000175287_20 (sequence is synthesized)
ctgcagatggatgcgttaattcccttccataatcctcccaggaccgagagggtttcagatcggtgctgggaggggcccagatagttctccccaggacctcttccacctttggaatgccca

SEQ ID NO: 605395 - DNA, 120 bp, Artificial Sequence
  ENSG00000175287_21 (sequence is synthesized)
tcttcagaaggagggaaagcgcttgctcctgtctgttgtaggagcctggcccggagaggaggagccaccttccattccttcccctgatagtggattgtctcccctcatcaggacgcctcc

SEQ ID NO: 605396 - DNA, 120 bp, Artificial Sequence
  ENSG00000175294_0 (sequence is synthesized)
agtctgcattgagcttggctcaggaaagaagggaaatccaggcggggcctgttgggcccaggtcttgagctcttttggctccagagttcccagcacagtcatggatcaaaactcagtgcc

SEQ ID NO: 605397 - DNA, 120 bp, Artificial Sequence
  ENSG00000175294_1 (sequence is synthesized)
tgaaaaggctcagaatgaggcagacaccaataacgcagataggttctttcgctctcactcatcacccccacaccacaggccaggccacagcagagctctccaccattacgagttgcacca

SEQ ID NO: 605398 - DNA, 120 bp, Artificial Sequence
  ENSG00000175294_2 (sequence is synthesized)
tcacggcgtgccccaccaacgtggtgaatctcaccaccctccggagttccaagacttccacgaccaagccttgtcctcccatgtccaccaatctcaccaccacagcgaggcacggaatca

SEQ ID NO: 605399 - DNA, 120 bp, Artificial Sequence
  ENSG00000175294_3 (sequence is synthesized)
cggcagagcccatggccccacaggctttggtctggctccctctcaaggcgccgtcccctcccaccgttcctacggtgaggactaccatgatgagctccaacgtgatggcaggaggcatca

SEQ ID NO: 605400 - DNA, 120 bp, Artificial Sequence
  ENSG00000175294_4 (sequence is synthesized)
tgatgggtcccaatacggtgggttccatcagcagagtgactcccattaccatagggggtctcaccatggcagaccccaatatctcggtgagaatttatcccactattcctctggcgtgcc

SEQ ID NO: 605401 - DNA, 120 bp, Artificial Sequence
  ENSG00000175294_5 (sequence is synthesized)
ccaccacggtgaggcttcccaccatggtgggtcctacctcccccatggacccaatccctacagtgagtccttccaccacagcgaggcttcccaccttagcgggctccaacacgatgagtc

SEQ ID NO: 605402 - DNA, 120 bp, Artificial Sequence
  ENSG00000175294_6 (sequence is synthesized)
ccagcatcaccaagtcccccaccgtggctggccccaccatcaccaagtccaccaccatggcaggtcccgtcatcatgaagcccaccagcatggaaagtctcctcatcacggagagaccat

SEQ ID NO: 605403 - DNA, 120 bp, Artificial Sequence
  ENSG00000175294_7 (sequence is synthesized)
ttcccctcattcctctgtggggtcctaccagcgtgggatatctgactatcacagcgagtaccaccaaggtgatcaccaccccagtgagtaccaccatggcgaccatccccaccacacaca

SEQ ID NO: 605404 - DNA, 120 bp, Artificial Sequence
  ENSG00000175294_8 (sequence is synthesized)
gcaccactaccaccagacccaccggcaccgagactaccatcagcaccaagaccaccacggcgcgtatcattccagttacctccatggcgactacgtccagagcacttcccaactctctat

SEQ ID NO: 605405 - DNA, 120 bp, Artificial Sequence
  ENSG00000175294_9 (sequence is synthesized)
cccacacacatcccggagcctgattcacgatgcccccggccctgctgcttctcgtacaggagtcttcccctatcacgtagcacacccacggggctcggctcacagcatgactcggtcctc

SEQ ID NO: 605406 - DNA, 120 bp, Artificial Sequence
  ENSG00000175294_10 (sequence is synthesized)
accaaacattcagaagactggggcaaagaagaagggcaatttcagaaacgcaaaaccggccggctccagcggacccgcaagaagggacactctaccaatctcttccagtggctgtgggaa

SEQ ID NO: 605407 - DNA, 120 bp, Artificial Sequence
  ENSG00000175294_11 (sequence is synthesized)
aagctaaccttcctcattcagggcttccgggaaatgatccggaacctgacccaatccttggcctttgaaactttcatcttcttcgttgtctgcctcaacaccgtcatgctggtggcccag

SEQ ID NO: 605408 - DNA, 120 bp, Artificial Sequence
  ENSG00000175294_12 (sequence is synthesized)
accttcgctgaagtcgagatccggggcgagtggtacttcatggccttggactccatattcttctgcatctacgtggtggaagccctgctcaagatcatcgccctgggcctctcgtacttc

SEQ ID NO: 605409 - DNA, 120 bp, Artificial Sequence
  ENSG00000175294_13 (sequence is synthesized)
tttgacttctggaacaatttggacttcttcattatggccatggccgtgctggacttcttgctgatgcagacccactccttcgccatctaccaccaaagcctcttccggatcctcaaggtc

SEQ ID NO: 605410 - DNA, 120 bp, Artificial Sequence
  ENSG00000175294_14 (sequence is synthesized)
ttcaagagcctgcgggccctgagggcaatccgggtcctgcggaggctcagcttcctgaccagcgtccaggaagtgacagggaccctgggccagtccttgccgtccatcgcagccatcctc

SEQ ID NO: 605411 - DNA, 120 bp, Artificial Sequence
  ENSG00000175294_15 (sequence is synthesized)
atcctcatgtttacctgcctcttcctcttctccgcggtcctccgggcactgttccgcaaatctgaccccaagcgcttccagaacatcttcaccaccatcttcaccctcttcaccttgctc

SEQ ID NO: 605412 - DNA, 120 bp, Artificial Sequence
  ENSG00000175294_16 (sequence is synthesized)
acgctggatgactggtccctcatctacatggacagccgtgcccagggcgcctggtacatcattcccatcctcgtaatttacatcatcatccagtacttcatcttcctcaacctggtgatt

SEQ ID NO: 605413 - DNA, 120 bp, Artificial Sequence
  ENSG00000175294_17 (sequence is synthesized)
actgtcctggtggatagcttccagacggcgctgttcaaaggccttgagaaagcgaagcaggagagggccgcccggatccaagagaagctgctggaagactcactgacggagctcagagct

SEQ ID NO: 605414 - DNA, 120 bp, Artificial Sequence
  ENSG00000175294_18 (sequence is synthesized)
gcagagcccaaagaggtggcgagtgaaggcaccatgctgaagcggctcatcgagaaaaagtttgggaccatgactgagaagcagcaggagctcctgttccattacctgcagctggtggca

SEQ ID NO: 605415 - DNA, 120 bp, Artificial Sequence
  ENSG00000175294_19 (sequence is synthesized)
agcgtggagcaggagcagcagaagttccgctcccaggcagccgtcatcgatgagattgtggacaccacatttgaggctggagaagaggacttcaggaattgaccccaggaggacaccaga

SEQ ID NO: 605416 - DNA, 120 bp, Artificial Sequence
  ENSG00000175294_20 (sequence is synthesized)
tacagacttcagcccctggcagtctgcccacctgggtgcactgggacgggtccccagatctgctggaatgattgtccgggccctgcagagcaggggccccaacagagtttttaaacccca

SEQ ID NO: 605417 - DNA, 120 bp, Artificial Sequence
  ENSG00000175305_0 (sequence is synthesized)
gtgcggggcgggaccggcccggcctatatattgggttggcgccggcgccagctgagccgagcggtagctggtctggcgaggttttatacacctgaaagaagagaatgtcaagacgaagta

SEQ ID NO: 605418 - DNA, 120 bp, Artificial Sequence
  ENSG00000175305_1 (sequence is synthesized)
gccgtttacaagctaagcagcagccccagcccagccagacggaatccccccaagaagcccagataatccaggccaagaagaggaaaactacccaggatgtcaaaaaaagaagagaggagg

SEQ ID NO: 605419 - DNA, 120 bp, Artificial Sequence
  ENSG00000175305_2 (sequence is synthesized)
tcaccaagaaacatcagtatgaaattaggaattgttggccacctgtattatctggggggatcagtccttgcattatcattgaaacacctcacaaagaaataggaacaagtgatttctcca

SEQ ID NO: 605420 - DNA, 120 bp, Artificial Sequence
  ENSG00000175305_3 (sequence is synthesized)
gatttacaaattacagatttaaaaatctttttattaatccttcacctttgcctgatttaagctggggatgttcaaaagaagtctggctaaacatgttaaaaaaggagagcagatatgttc

SEQ ID NO: 605421 - DNA, 120 bp, Artificial Sequence
  ENSG00000175305_4 (sequence is synthesized)
atgacaaacattttgaagttctgcattctgacttggaaccacagatgaggtccatacttctagactggcttttagaggtatgtgaagtatacacacttcatagggaaacattttatcttg

SEQ ID NO: 605422 - DNA, 120 bp, Artificial Sequence
  ENSG00000175305_5 (sequence is synthesized)
cacaagacttttttgatagatttatgttgacacaaaaggatataaataaaaatatgcttcaactcattggaattacctcattattcattgcttccaaacttgaggaaatctatgctccta

SEQ ID NO: 605423 - DNA, 120 bp, Artificial Sequence
  ENSG00000175305_6 (sequence is synthesized)
aactccaagagtttgcttacgtcactgatggtgcttgcagtgaagaggatatcttaaggatggaactcattatattaaaggctttaaaatgggaactttgtcctgtaacaatcatctcct

SEQ ID NO: 605424 - DNA, 120 bp, Artificial Sequence
  ENSG00000175305_7 (sequence is synthesized)
ggctaaatctctttctccaagttgatgctcttaaagatgctcctaaagttcttctacctcagtattctcaggaaacattcattcaaatagctcagcttttagatctgtgtattctagcca

SEQ ID NO: 605425 - DNA, 120 bp, Artificial Sequence
  ENSG00000175305_8 (sequence is synthesized)
ttgattcattagagttccagtacagaatactgactgctgctgccttgtgccattttacctccattgaagtggttaagaaagcctcaggtttggagtgggacagtatttcagaatgtgtag

SEQ ID NO: 605426 - DNA, 120 bp, Artificial Sequence
  ENSG00000175305_9 (sequence is synthesized)
attggatggtaccttttgtcaatgtagtaaaaagtactagtccagtgaagctgaagacttttaagaagattcctatggaagacagacataatatccagacacatacaaactatttggcta

SEQ ID NO: 605427 - DNA, 120 bp, Artificial Sequence
  ENSG00000175305_10 (sequence is synthesized)
tgctggaggaagtaaattacataaacaccttcagaaaagggggacagttgtcaccagtgtgcaatggaggcattatgacaccaccgaagagcactgaaaaaccaccaggaaaacactaaa

SEQ ID NO: 605428 - DNA, 120 bp, Artificial Sequence
  ENSG00000175305_11 (sequence is synthesized)
gtgctgtgattgattgccctagccaattcacaagttacactgccattctgattttaaaacttacaattggcactaaagaatacatttaattatttcctatgttagctgttaaagaaacag

SEQ ID NO: 605429 - DNA, 120 bp, Artificial Sequence
  ENSG00000175305_12 (sequence is synthesized)
caggacttgtttacaaagatgtcttcattcccaaggttactggatagaagccaaccacagtctataccatagcaatgtttttcctttaatccagtgttactgtgtttatcttgataaact

SEQ ID NO: 605430 - DNA, 120 bp, Artificial Sequence
  ENSG00000175305_13 (sequence is synthesized)
aggaattttgtcactggagttttggactggataagtgctaccttaaagggtatactaagtgatacagtactttgaatctagttgttagattctcaaaattcctacactcttgactagtgc

SEQ ID NO: 605431 - DNA, 120 bp, Artificial Sequence
  ENSG00000175305_14 (sequence is synthesized)
aatttggttcttgaaaattaaatttaaacttgtttacaaaggtttagttttgtaataaggtgactaatttatctatagctgctatagcaagctattataaaacttgaatttctacaaatg

SEQ ID NO: 605432 - DNA, 120 bp, Artificial Sequence
  ENSG00000175305_15 (sequence is synthesized)
gtgaaatttaatgttttttaaactagtttatttgccttgccataacacattttttaactaataaggcttagatgaacatggtgttcaacctgtgctctaaacagtgggagtaccaaagaa

SEQ ID NO: 605433 - DNA, 120 bp, Artificial Sequence
  ENSG00000175305_16 (sequence is synthesized)
attataaacaagataaatgctgtggctccttcctaactggggctttcttgacatgtaggttgcttggtaataacctttttgtatatcacaatttgggtgaaaaacttaagtaccctttca

SEQ ID NO: 605434 - DNA, 120 bp, Artificial Sequence
  ENSG00000175305_17 (sequence is synthesized)
aactatttatatgaggaagtcactttactactctaagatatccctaaggaatttttttttttaatttagtgtgactaaggctttatttatgtttgtgaaactgttaaggtcctttctaaa

SEQ ID NO: 605435 - DNA, 120 bp, Artificial Sequence
  ENSG00000175305_18 (sequence is synthesized)
ttcctccattgtgagataaggacagtgtcaaagtgataaagcttaacacttgacctaaacttctattttcttaaggaagaagagtattaaatatatactgactcctagaaatctatttat

SEQ ID NO: 605436 - DNA, 120 bp, Artificial Sequence
  ENSG00000175305_19 (sequence is synthesized)
taaaaaaagacatgaaaacttgctgtacataggctagctatttctaaatattttaaattagcttttctaaaaaaaaaatccagcctcataaagtagattagaaaactagattgctagttt

SEQ ID NO: 605437 - DNA, 120 bp, Artificial Sequence
  ENSG00000175305_20 (sequence is synthesized)
attttgttatcagatatgtgaatctcttctccctttgaagaaactatacatttattgttacggtatgaagtcttctgtatagtttgtttttaaactaatatttgtttcagtattttgtct

SEQ ID NO: 605438 - DNA, 120 bp, Artificial Sequence
  ENSG00000175305_21 (sequence is synthesized)
gaaaagaaaacaccactaattgtgtacatatgtattatataaacttaaccttttaatactgtttatttttagcccattgtttaaaaaataaaagttaaaaaaatttaactgcttaaaagt

SEQ ID NO: 605439 - DNA, 120 bp, Artificial Sequence
  ENSG00000175305_22 (sequence is synthesized)
ccgcgaggctccgtctccccggcgcggcccgctcgccgtccggctcgctcagggcctgggcagacgcggcccgcccgagctaccgcgggttccgagacgccttcgcactgctcctccacc

SEQ ID NO: 605440 - DNA, 120 bp, Artificial Sequence
  ENSG00000175305_23 (sequence is synthesized)
cgggggatctttgttcccggagctgttccccgcctcgctgctcccgccgcaaaacctgtttgcggaatacccgccgcaagtctgacttgacgatgtgcagttttgggaggttttatacac

SEQ ID NO: 605441 - DNA, 120 bp, Artificial Sequence
  ENSG00000175305_24 (sequence is synthesized)
gatggctttgatcttccaaaacagaaaagtgatgttattagaggtgtgtcaaaaattaagttttgttggtacaagtaatataaagctacctacgtgctaacaacgatacagtttaatgat

SEQ ID NO: 605442 - DNA, 120 bp, Artificial Sequence
  ENSG00000175305_25 (sequence is synthesized)
taactgaacctcttaactgtaaaacccaggagtcttggaaaaaaattaacataaagattaaccagggccactctcaaggaaagatggactgctgagccatagtttatggaattacttaag

SEQ ID NO: 605443 - DNA, 120 bp, Artificial Sequence
  ENSG00000175305_26 (sequence is synthesized)
tggcattttaatatattaagtaaattcatgtaaatttatttgaaagtataagtaagctctacatggcgatttttagagttaaactagggctccacttgttaatgtgcaaaaataactggt

SEQ ID NO: 605444 - DNA, 120 bp, Artificial Sequence
  ENSG00000175305_27 (sequence is synthesized)
aatctgtgaaatctaccccttttacactataccattccactgctactagttcagctcttattgcctagattatacagccttttaactaatctcactgcttaataaacatgttttcttcta

SEQ ID NO: 605445 - DNA, 120 bp, Artificial Sequence
  ENSG00000175305_28 (sequence is synthesized)
agcatttcgcctccacaaccccctctccccgctggtccaggagggaggcgggacgtgggggcgctgcccaagccccactcccggtgtacgggggagagggtggaggacccagaaaaaccc

SEQ ID NO: 605446 - DNA, 120 bp, Artificial Sequence
  ENSG00000175305_29 (sequence is synthesized)
gtttgaggaagatgtgcctccctgcgcgttcaaggtgtcaggagtgcttggtaaatttttggacactcgcgttccagctgtacattcagttgaggaaatgcaggcttgtatccaaaatga

SEQ ID NO: 605447 - DNA, 120 bp, Artificial Sequence
  ENSG00000175305_30 (sequence is synthesized)
attaccatgagctagctaacatagcacagaagatggcagggtcacagggcccaggcccccttcggagggactgagctttcacctgcgaatcagcgtcttactggcacttggagaatgtga

SEQ ID NO: 605448 - DNA, 120 bp, Artificial Sequence
  ENSG00000175305_31 (sequence is synthesized)
tagggtaatgcagaactgggctgggtgggtttgggggaaaaatggaggatagatgaataagaatagaattatgtgtttattgctttgcgatagattcctctgacacttttacttttaatg

SEQ ID NO: 605449 - DNA, 120 bp, Artificial Sequence
  ENSG00000175305_32 (sequence is synthesized)
cccctagaggtcagcaggaaggcgcctatctttgggtggtttctatgtgcccgaatcctactacagctgcagaataagtgccttcaagcagctggttcctttttgtaaatccctccctct

SEQ ID NO: 605450 - DNA, 120 bp, Artificial Sequence
  ENSG00000175309_0 (sequence is synthesized)
agacggggcagcgctcgagttcctgcgcgggactgccaaggcacgaccacgggccggaaggctgccaggcccagtgggcaagcgaagaaatgaaccaccgcaacgcgggcgcttcggggc

SEQ ID NO: 605451 - DNA, 120 bp, Artificial Sequence
  ENSG00000175309_1 (sequence is synthesized)
ggggccgagtgcgaacctgagccccaaatcccgacccaggcaggggcggggcccggagcggggccttggaggcccagcccgcgcggcgacgtctccgcgtggcgtcacggcaccgactga

SEQ ID NO: 605452 - DNA, 120 bp, Artificial Sequence
  ENSG00000175309_2 (sequence is synthesized)
cggccacccaccatggccgcagaccagcgcccgaaggccgacacgctggccctgaggcaacggctcatcagctcttcctgcagactcttttttcccgaggatcctgttaagattgtccgg

SEQ ID NO: 605453 - DNA, 120 bp, Artificial Sequence
  ENSG00000175309_3 (sequence is synthesized)
gcccaagggcagtacatgtacgatgaacagggggcagaatacatcgattgcatcagcaatgtggcgcacgttgggcactgccaccctctcgtggtccaagcagcacatgagcagaaccag

SEQ ID NO: 605454 - DNA, 120 bp, Artificial Sequence
  ENSG00000175309_4 (sequence is synthesized)
gtgctcaacaccaacagccggtacctgcatgacaacatcgtggactatgcgcagaggctgtcagagaccctgccggagcagctctgtgtgttctatttcctgaattctgggtcagaagcc

SEQ ID NO: 605455 - DNA, 120 bp, Artificial Sequence
  ENSG00000175309_5 (sequence is synthesized)
aatgacctggccctgaggctggctcgccactacacgggacaccaggacgtggtggtattagatcatgcgtatcacggccacctgagctccctgattgacatcagtccctacaagttccgc

SEQ ID NO: 605456 - DNA, 120 bp, Artificial Sequence
  ENSG00000175309_6 (sequence is synthesized)
aacctggatggccagaaggagtgggtccacgtggcacctctcccagacacctaccggggcccctaccgggaggaccaccccaacccagctatggcctatgccaacgaggtgaaacgtgtg

SEQ ID NO: 605457 - DNA, 120 bp, Artificial Sequence
  ENSG00000175309_7 (sequence is synthesized)
gtcagcagtgcacaggagaagggcaggaagattgcagccttcttcgctgagtctctgcccagtgtgggagggcagatcattccccctgctggctacttctcccaagtggcagagcacatc

SEQ ID NO: 605458 - DNA, 120 bp, Artificial Sequence
  ENSG00000175309_8 (sequence is synthesized)
tggctttggccgggtaggcaagcacttctgggccttccagctccagggaaaagacttcgtccctgacatcgtcaccatgggcaagtccattggcaacggccaccctgttgcctgcgtggc

SEQ ID NO: 605459 - DNA, 120 bp, Artificial Sequence
  ENSG00000175309_9 (sequence is synthesized)
cgcaacccagcctgtggcgagggcatttgaagccaccggcgttgagtacttcaacacgtttgggggcagcccagtgtcctgcgctgtggggctggccgtcctgaatgtcttggagaagga

SEQ ID NO: 605460 - DNA, 120 bp, Artificial Sequence
  ENSG00000175309_10 (sequence is synthesized)
gcagctccaggatcatgccaccagtgtaggcagcttcctgatgcagctcctcgggcagcaaaaaatcaaacatcccatcgtcggggatgtcaggggtgttgggctcttcattggtgtgga

SEQ ID NO: 605461 - DNA, 120 bp, Artificial Sequence
  ENSG00000175309_11 (sequence is synthesized)
tctgatcaaagatgaggccacaaggacaccagcaactgaagaggctgcctacttggtatcaaggctgaaggagaactacgttttgctgagcactgatggccctgggaggaacatcctgaa

SEQ ID NO: 605462 - DNA, 120 bp, Artificial Sequence
  ENSG00000175309_12 (sequence is synthesized)
gtttaagcccccaatgtgcttcagcctggacaatgcacggcaggtggtggcaaagctggatgccattctgactgacatggaagagaaggtgagaagttgtgaaacgctgaggctccagcc

SEQ ID NO: 605463 - DNA, 120 bp, Artificial Sequence
  ENSG00000175309_13 (sequence is synthesized)
ctaagccagccctgctctgcctaagtgtactccagaagaaactcatctcatccaaatacacgctattgagaaggcgagcctgacctccctcttacagataaagtcagctttcagaggctc

SEQ ID NO: 605464 - DNA, 120 bp, Artificial Sequence
  ENSG00000175309_14 (sequence is synthesized)
agggtgggggggcctgcccgaggccataatgctacccaccccctcctcctaaccactggtctgttggaataacccagatgtctgcatcccctcaagtcagtcaatttcctttctgtccac

SEQ ID NO: 605465 - DNA, 120 bp, Artificial Sequence
  ENSG00000175309_15 (sequence is synthesized)
tgggggtggaatggggtagggtgggatactttaaagtgctcctgcttaaataaattagaccagaccagtgtatttctaaagaaaatcctgacatgcacacccattaaaaatagtacattt

SEQ ID NO: 605466 - DNA, 120 bp, Artificial Sequence
  ENSG00000175309_16 (sequence is synthesized)
tacagtgtcccagtcatacttttaattggcaaattaaaataatgcaatctgatatattctatcctactaaattaaaaatactgaatataaccaactaaatatacttactcctaagactca

SEQ ID NO: 605467 - DNA, 120 bp, Artificial Sequence
  ENSG00000175309_17 (sequence is synthesized)
cacgacgcacgcacgcacgcactacgcacgcgcctccggctaggaagccgctgctacccatcccgtccggccgctgccccggccccgctggagcttctagggcccgaggcgggcggcgcc

SEQ ID NO: 605468 - DNA, 120 bp, Artificial Sequence
  ENSG00000175309_18 (sequence is synthesized)
gttgggcagtcccggcgggtggtctccggggccgcctccccgacagcgccgtctccaggccgcccagttcaggagacggccccgccctcaccgctgttcggctgtgtcagcctcgcttgg

SEQ ID NO: 605469 - DNA, 120 bp, Artificial Sequence
  ENSG00000175309_19 (sequence is synthesized)
cagcctttactccggagaagaccttcaccctggcgcctgagaggacctcacccagggtggcccgtcagcagcacctgggcctggctcgagagtgacctgggagggggctgaaagggcaga

SEQ ID NO: 605470 - DNA, 120 bp, Artificial Sequence
  ENSG00000175309_20 (sequence is synthesized)
caagggagagtcgggggagtcggttcacaggcagcacacttgacctgtgagggggccctcggtgggacggtgggtgaggtcgcctcccactggagcttagggctggcacccagcgagggg

SEQ ID NO: 605471 - DNA, 120 bp, Artificial Sequence
  ENSG00000175309_21 (sequence is synthesized)
cagcagggccacgtggctggcaaggagctgtttagggctgagagccaggcacctaatgttggtgccctggcccatcccatcgaagacacgcggccttatggagtccccatgggacggggc

SEQ ID NO: 605472 - DNA, 120 bp, Artificial Sequence
  ENSG00000175309_22 (sequence is synthesized)
agccaccttttctcaggatccgggagactgacgcggacacatgcagaaatgagcaaggaggccacagaggctgaaaatgctttcagaaacaatccgaagtttcagcgacttgttacccca

SEQ ID NO: 605473 - DNA, 120 bp, Artificial Sequence
  ENSG00000175309_23 (sequence is synthesized)
tcattataaaccagaaggaggaaatcccacctcatttcacagcagagaaaacaaccgagagagattaaatgatgagctgctgtcacatagccagtcagcagtcttgcaagaattgttgct

SEQ ID NO: 605474 - DNA, 120 bp, Artificial Sequence
  ENSG00000175309_24 (sequence is synthesized)
gactccaaagcttgtgctctttcccagcccaagaacttgggggctctgtcaggaaagttggcctcccttgtgtgtcttcaggggtggggagacgatggtcagactgggccagggagtagg

SEQ ID NO: 605475 - DNA, 120 bp, Artificial Sequence
  ENSG00000175309_25 (sequence is synthesized)
ctttttttaagacttttttttgttctgactgatgctccttcccaaaggttagtttcttcaacactggaaattctccaatgcttagcttgcacttgatggcaggaacagctatatcctccc

SEQ ID NO: 605476 - DNA, 120 bp, Artificial Sequence
  ENSG00000175309_26 (sequence is synthesized)
ttgaaacctatggggctgtatccacgtggaaccccaacccacccttgcctcttgtaaccacctagtcttatgccctaaataccagacctggagttgggctccaatccagccaataaacat

SEQ ID NO: 605477 - DNA, 120 bp, Artificial Sequence
  ENSG00000175309_27 (sequence is synthesized)
cccctgccagagcaggcttttcttcaccagccaggaggagcactattgtgccccaattcagacggccctggcactgccctagtgtgtaaagaatcccattttttcattcatcagccaaga

SEQ ID NO: 605478 - DNA, 120 bp, Artificial Sequence
  ENSG00000175309_28 (sequence is synthesized)
aggttggtgttccaaggtgtcccaggaggggacatgcctgctggggatgtaagccctcatcactgccccatcctcactccccataggcctctcattcctttctttgaaggggggctcagc

SEQ ID NO: 605479 - DNA, 120 bp, Artificial Sequence
  ENSG00000175309_29 (sequence is synthesized)
cctaggcagggcagtccttaaaggatacccccacaactgggcctgcagctggaagagcctgctgcaggagaaagccccaagtccagggcacctggcaccccccccccgcctccctcgacc

SEQ ID NO: 605480 - DNA, 120 bp, Artificial Sequence
  ENSG00000175309_30 (sequence is synthesized)
ctgagcaagaggtctcacacagcatatcccacactcacccaggcttgggggtttttaaattttatttcaaaagcttggatagcttcaatatccaggttgtggcaaaatcaggacacgtgt

SEQ ID NO: 605481 - DNA, 120 bp, Artificial Sequence
  ENSG00000175309_31 (sequence is synthesized)
aaaataccttacaatacattagattcccaaaaggtaccaaaaagtacagtaaaattaacacttccgttacaggaaatgtatgacgcaaataatataaaattaaaaggtgaaaaaaaggtg

SEQ ID NO: 605482 - DNA, 120 bp, Artificial Sequence
  ENSG00000175309_32 (sequence is synthesized)
gttaaaaaaaaaaaaaaagcagagactctagtcttagactgcttgggctcaaatccctgtcccctacttactaacttgtgatctcgggcaagttacttaattctcagtgcctcagtttgc

SEQ ID NO: 605483 - DNA, 120 bp, Artificial Sequence
  ENSG00000175309_33 (sequence is synthesized)
ttatctgtgaaagacataatgatactaggtacccactttaaggtgtttggagaattaagtgtgttaatttatgtagcttgctctgaatgtgcctggcacatggtgagctctcagtacata

SEQ ID NO: 605484 - DNA, 120 bp, Artificial Sequence
  ENSG00000175309_34 (sequence is synthesized)
ttcactgttattatccttggcctttgacaatcaagattaccaccagcccccttggctggtgaagtgaaaccagttgacagtcaccccccaccccacctttgtcatacaagcctcaaaagg

SEQ ID NO: 605485 - DNA, 120 bp, Artificial Sequence
  ENSG00000175309_35 (sequence is synthesized)
ctggagtcttggctcactgcagcttcagcctctggagctcaagtgatcctcctgcctcaccccgcaagcagctgggagtacacacatgtgccaccacgcctggctatttttattttttgt

SEQ ID NO: 605486 - DNA, 69 bp, Artificial Sequence
  ENSG00000175309_36 (sequence is synthesized)
catgtgccaccacgcctggctagaactcctcaccttaggcaactcacccatcttggcctcccaaagtgc

SEQ ID NO: 605487 - DNA, 120 bp, Artificial Sequence
  ENSG00000175309_37 (sequence is synthesized)
atgtttgtaacatctgatttaaagtctttatccagtaaggtcagtgtcagcttcctcgggcgcagtttgcattgattgctttttttcctcccgtgtctgggccatgcttctttgcatgtt

SEQ ID NO: 605488 - DNA, 120 bp, Artificial Sequence
  ENSG00000175309_38 (sequence is synthesized)
tcagaattttgttaaaagctggacattttaagtaacataatgtggcaactgtggaaatcatattctcctccctccccatggtggttcctttttcttgtttaatgtcttttctgaactaat

SEQ ID NO: 605489 - DNA, 120 bp, Artificial Sequence
  ENSG00000175309_39 (sequence is synthesized)
tatgtaaagttgtgttctttgtcatgtgtggccactatagtctctgcttgattagcttagtggtcctctaaccattagatctccttaattgcctggaacccgtaagtcactcagccaaga

SEQ ID NO: 605490 - DNA, 120 bp, Artificial Sequence
  ENSG00000175309_40 (sequence is synthesized)
gtttataactgccttagactttacttcctcattctgcagaggctcaaggtagccagtggtgagagcttagggctttctagatcttacctgagcatgcacacagcactgggcataagcaca

SEQ ID NO: 605491 - DNA, 120 bp, Artificial Sequence
  ENSG00000175309_41 (sequence is synthesized)
tccctatgcatatgaatggccttctagactcccaggagtacgtcacagcctttcaaagccccctgtagccatctcatagtaacagaaagcagatcagtggatgcctgggtccagtagtag

SEQ ID NO: 605492 - DNA, 120 bp, Artificial Sequence
  ENSG00000175309_42 (sequence is synthesized)
cgggacggttgcacaggaagtgatgaaaatgttctgcaacttcactgcgagggaggttacacaggtacatacatttgtcacctcacgttgaactttatactttaaacacagtttatatat

SEQ ID NO: 605493 - DNA, 120 bp, Artificial Sequence
  ENSG00000175309_43 (sequence is synthesized)
caggagacaccttgctcgtgatcctctaaaacacaggtctccactcagatacctgcaggatgaggacagggtgggcgagggaaaggagccagagccctccaggggtgtgaagcagctttt

SEQ ID NO: 605494 - DNA, 120 bp, Artificial Sequence
  ENSG00000175309_44 (sequence is synthesized)
cctgggtggggcttggcgtgctgcgctcactctccctggaggaggaagtgcctaatccagtcctctgggtctgggcccaggagatggggccttaaagcctctcttggtaaagactagccc

SEQ ID NO: 605495 - DNA, 120 bp, Artificial Sequence
  ENSG00000175309_45 (sequence is synthesized)
tgtgggaacaaacaggacaccctctcctctgattctgtatcttctaggggctcctactgtacttcagggatacctgacctgagttgcagtcacattagctcctggaaagccaggacagcc

SEQ ID NO: 605496 - DNA, 120 bp, Artificial Sequence
  ENSG00000175309_46 (sequence is synthesized)
catgttgaaccccacttactactgctgaggactgtgcgccctaaggggtttggggcctctgctcttgccactggccttggaacacgtgtggcagttcttctgcctcaccctcactctggg

SEQ ID NO: 605497 - DNA, 120 bp, Artificial Sequence
  ENSG00000175309_47 (sequence is synthesized)
gctcatgcctgtaattccagtactttgaggccgaggtgggaggaatgcttgagcccccagtctgggcaatatagtgagaccccatctctgcaaaaaaagaagttccagaggcccagactt

SEQ ID NO: 605498 - DNA, 120 bp, Artificial Sequence
  ENSG00000175309_48 (sequence is synthesized)
aaaaaagaagttccagaggcccagacttgctactggtgcccagggggctgtggggcagcttgggcattgagccctcatgctgtgggatctgatgctgtctctaggtagatagtgttggaa

SEQ ID NO: 605499 - DNA, 120 bp, Artificial Sequence
  ENSG00000175309_49 (sequence is synthesized)
ttgaattggaggacacccaactggtgtccgctgcagaactgattgcttgcctggtggtggggagaaatccttacatattttttggagtcacagaagtcttctgtgttgattgttgtagtg

SEQ ID NO: 605500 - DNA, 120 bp, Artificial Sequence
  ENSG00000175309_50 (sequence is synthesized)
tgaaagcagaggaaaaacaatggtttgggttttttcaaaacaactttcatgacacatacgagaatgtaaattccagaagggccaaggccatgtctgttttacctactctttttcccccag

SEQ ID NO: 605501 - DNA, 120 bp, Artificial Sequence
  ENSG00000175309_51 (sequence is synthesized)
cttctagtacataggaggcatttgatatataccaaacaaacaagcaagtgactgactagttgatgtcctgagaatcttcttgctgctggaagggtcctcctgccctcagcatttctctct

SEQ ID NO: 605502 - DNA, 120 bp, Artificial Sequence
  ENSG00000175309_52 (sequence is synthesized)
ttccttctgccagaatctcaggaactcctggatctgcctttccagaaccagcttctctctccctgctctgccttcagactgccctctttctacctctccctctagaactacatctcttct

SEQ ID NO: 605503 - DNA, 120 bp, Artificial Sequence
  ENSG00000175309_53 (sequence is synthesized)
ggctgggtttatagcttggggctgggggaggcccagtgggactggctgagtggagccagccgtgtgacggaggcggccctcttccagttgggcactgccaccctctcgtggtccaagcag

SEQ ID NO: 605504 - DNA, 120 bp, Artificial Sequence
  ENSG00000175309_54 (sequence is synthesized)
caacgaggtgaaacgtgtggtcagcagtgcacaggagaagggcaggaagggctatgtggaggatggattggaatgcggcggcttgaggtcaggtgaccgtgaagtggccagcaggcccca

SEQ ID NO: 605505 - DNA, 120 bp, Artificial Sequence
  ENSG00000175309_55 (sequence is synthesized)
agtgagctgtggggaggcctgacgggggcagtatggtggagatggagtggaggcgcagacataggagagagaggtgtgttacctacggtgacaacagagggaagactgttggcgacaggt

SEQ ID NO: 605506 - DNA, 120 bp, Artificial Sequence
  ENSG00000175309_56 (sequence is synthesized)
ctctgaaggcttcactgaaggagtgacagagccagacacaggaggtacgacaaagaaaggcagcctgtggggccagaaaggttagcagaacccgaccaggggagccttgcctgtgtgttt

SEQ ID NO: 605507 - DNA, 120 bp, Artificial Sequence
  ENSG00000175309_57 (sequence is synthesized)
caggtgctctgcgaccacttctataaaacctaaaaaaggagattgctctgattgcaacaggtgtgggggaccagtatcccatcccattggccctgccctcccacctgtaaggcagaatat

SEQ ID NO: 605508 - DNA, 120 bp, Artificial Sequence
  ENSG00000175309_58 (sequence is synthesized)
ggttgggaaatcattgccatatgcagaaggggtcactgaggggttttaaacaacagtgacatgctcagttctctgggttgaggcatcatcaccctggtggccatgtggaggatggactgg

SEQ ID NO: 605509 - DNA, 120 bp, Artificial Sequence
  ENSG00000175309_59 (sequence is synthesized)
gtggaggaggggcattcttatgccaccagctttattctgtgtggattccagggacttccatgttgccaaatccaaagcaatctctttgctgcattgtcttactctgtcccagcagtaatt

SEQ ID NO: 605510 - DNA, 120 bp, Artificial Sequence
  ENSG00000175309_60 (sequence is synthesized)
gacagttaccactctccggaagtggtctgtcatcttgcttcccgggcactgtgctctcctgttttctatcagcttctctagccactccttccctgtcttctttgctgattcctcctctgt

SEQ ID NO: 605511 - DNA, 120 bp, Artificial Sequence
  ENSG00000175309_61 (sequence is synthesized)
tccttggggctgatcctgggccacttttctctctgagccctctcctcaggtgatctcttccattctcttggtattacatagcatccatgtgttggtgactcacaaatttttttgagccca

SEQ ID NO: 605512 - DNA, 120 bp, Artificial Sequence
  ENSG00000175309_62 (sequence is synthesized)
agtgggtccacgtggtatgcactgcccaactcaacaacagtgacatgctcagttctctgggttgaggcatcatcaccctggtggccatgtggaggatggactggaaaaggcattcagtta

SEQ ID NO: 605513 - DNA, 120 bp, Artificial Sequence
  ENSG00000175309_63 (sequence is synthesized)
aaggtaaccgtgtccgcgcctgtccaatccagccaacagtgaatgtcacctccgttgtcaccgccactgtgctagatgctgggaacccagagagaaaaccaaacgaggccctgccctcca

SEQ ID NO: 605514 - DNA, 120 bp, Artificial Sequence
  ENSG00000175309_64 (sequence is synthesized)
ggcatttgaagccaccggcgttgagtacttcaacacggggtgttgggctcttcattggtgtggatctgatcaaagatgaggccacaaggacaccagcaactgaagaggctgcctacttgg

SEQ ID NO: 605515 - DNA, 120 bp, Artificial Sequence
  ENSG00000175309_65 (sequence is synthesized)
attctggagacggtcccaccccatatcctgctagaaggaatgctgctgtcatgaagcttccataaaaaccaaggggactggattcagagagcttccagataactgaacatacagaggttc

SEQ ID NO: 605516 - DNA, 120 bp, Artificial Sequence
  ENSG00000175309_66 (sequence is synthesized)
tagaagggtggtgcgcccagggagggcacaggaagctccatgcccttccttcatacctcaccctatgcatctctttatctgtatcttttataatatcctttataataaaccagtaaatgt

SEQ ID NO: 605517 - DNA, 120 bp, Artificial Sequence
  ENSG00000175311_0 (sequence is synthesized)
ctggagagacatctggccaagttctggtgagcaggaaaaatgtctactcgttaccaccaagctgctagtgatagttacctggaacttctaaaagaggctaccaagcgagatctaaatctt

SEQ ID NO: 605518 - DNA, 120 bp, Artificial Sequence
  ENSG00000175311_1 (sequence is synthesized)
tcggatgaagacggcatgactcctactctcttggcagcctaccatgggaacttggaagccctagagataatctgcagtagaggaggggaccctgataggtgtgacatctggggaaacact

SEQ ID NO: 605519 - DNA, 120 bp, Artificial Sequence
  ENSG00000175311_2 (sequence is synthesized)
cctctacattttgcagcctccaatggccatgcccactgcgtctcattcctggtcaactttggtgccaacatctttgccctggataatgacttacagactccactggatgctgctgccagc

SEQ ID NO: 605520 - DNA, 120 bp, Artificial Sequence
  ENSG00000175311_3 (sequence is synthesized)
agggagcagaatgaatgtgttgctctcctggacaaggctgccactgcacagaacatcatgaaccccaagaaggtcaccaggctgaaggagcaggctcagaagaatgccaggaggcagatc

SEQ ID NO: 605521 - DNA, 120 bp, Artificial Sequence
  ENSG00000175311_4 (sequence is synthesized)
aaagagtgtgagaggctccaggagaagcaccaaaataagatggcccacacctacagcaaggaggaatccgggactctctcttcttccaagggtaccttctccagatcatccccttcaaat

SEQ ID NO: 605522 - DNA, 120 bp, Artificial Sequence
  ENSG00000175311_5 (sequence is synthesized)
gcttctgctcctggcacattcgggtcactatctaagggcattaaagacactttcaagatcaagttcaagaagaacaaagatacagcagaacaggtggggaaggaaggcagaagtgggcag

SEQ ID NO: 605523 - DNA, 120 bp, Artificial Sequence
  ENSG00000175311_6 (sequence is synthesized)
aggaacgtgatggaagtgttcagagaggaagaggaagactcgttctcaggggacttcaaagagaagctccagttgtcagcagaggaggacggcagtgtgcaccatgaatccattctcaat

SEQ ID NO: 605524 - DNA, 120 bp, Artificial Sequence
  ENSG00000175311_7 (sequence is synthesized)
cgtccaggtctaggaagtattgtttttagaaggaacaggatatcgagtcctgaagacatctcagatagcaagagagagtttggttttaaactgcccagtgaattgcttcaaagacaagga

SEQ ID NO: 605525 - DNA, 120 bp, Artificial Sequence
  ENSG00000175311_8 (sequence is synthesized)
gcatcagaggctgatgagggtgcagctgatgaagagggagaggaaaacggcctcaaagatgatctgccgtgggatgacgatgaagtggagtgggaggaagatgtggtcgatgccacgccc

SEQ ID NO: 605526 - DNA, 120 bp, Artificial Sequence
  ENSG00000175311_9 (sequence is synthesized)
ctggaagtgttcttgctgtctcagcacctggaagaattcctgcctatcttcaagagagagcagattgatctagaagctctgctgctctgctctgatgaggaccttcagagcatacaaatg

SEQ ID NO: 605527 - DNA, 120 bp, Artificial Sequence
  ENSG00000175311_10 (sequence is synthesized)
cagctgggtcccaggaagaaagttctgaatgctatcaacaggaggaagcaggtgcttcaacagcctgggcagctggtcgacaccagcctgtgatggagagttttggcctggagcattggg

SEQ ID NO: 605528 - DNA, 120 bp, Artificial Sequence
  ENSG00000175311_11 (sequence is synthesized)
gtgatgctgtggcccgctggcagcactccaggcggcaccccctctttacccaatgccagaccactgggaatggattctagggcatcggaaatgcctacctgagagagagacccaaacttt

SEQ ID NO: 605529 - DNA, 120 bp, Artificial Sequence
  ENSG00000175311_12 (sequence is synthesized)
actctgggaggtaggctatgcccatccaaataaatctccatgagaaacttgaggagacttcataacaagaatctggcatttctcttcagttatcttatatgtacatataattgtttttgt

SEQ ID NO: 605530 - DNA, 120 bp, Artificial Sequence
  ENSG00000175311_13 (sequence is synthesized)
gttttgttttgttttgttttgttttttggagatgaaggtctcagtctcttacccaggctagggtgcagtggtatgatcatagttcactgtattctcaacctcctgggctcaaatgatctc

SEQ ID NO: 605531 - DNA, 79 bp, Artificial Sequence
  ENSG00000175311_14 (sequence is synthesized)
ttcacaccccccacacctggcttattttgtatgttttagtagaggtggggtcttgccacattgcccaggctggtctcaa

SEQ ID NO: 605532 - DNA, 120 bp, Artificial Sequence
  ENSG00000175311_15 (sequence is synthesized)
aagcaatcctcccacctcagcctcctaaagcactgggattacaggtgtgaaccaccgtacccagcctatctttttgatacttttgaataaagaaagggtcatatgcatgacaggaaaatg

SEQ ID NO: 605533 - DNA, 120 bp, Artificial Sequence
  ENSG00000175311_16 (sequence is synthesized)
gacaggaaaatgaaagaaacttcctttacttttctatctctggatttaaaattataatctcatcacattatcctgctgcttgctttccgatctgtgtaacctgggaattccaattctttt

SEQ ID NO: 605534 - DNA, 120 bp, Artificial Sequence
  ENSG00000175311_17 (sequence is synthesized)
tctctcctgagatctatgactttgcctagtggtagagactagagttctttcctggcctgcggcttgatgcccaacttaaatgcatctaaccctttaacaaatgtgtacatgtttacaagt

SEQ ID NO: 605535 - DNA, 120 bp, Artificial Sequence
  ENSG00000175311_18 (sequence is synthesized)
ggaaatgcgtctataatactcctgcctgagaatagagacagagtggtggtggggagagtgaagaaagagatagaatacaggtggtacctgttgtggactgaattgcgtcaaattcatatg

SEQ ID NO: 605536 - DNA, 120 bp, Artificial Sequence
  ENSG00000175311_19 (sequence is synthesized)
ttggagctctaacccctaatgtgactgtaattggaaataagacctttaaagaagtgattaaggttaaatgaagtcataagaatgcaaccctaatcctgtaggactggtgtcctttttttc

SEQ ID NO: 605537 - DNA, 120 bp, Artificial Sequence
  ENSG00000175311_20 (sequence is synthesized)
gcatgagccactgcacctggcctaggactggtgtcctaagaagaggaagagacacttaggtggaaggcacacagagaggccacgtgaggacacagtgagaaggtggccgtctgcaagccg

SEQ ID NO: 605538 - DNA, 120 bp, Artificial Sequence
  ENSG00000175311_21 (sequence is synthesized)
cacgtgaggacacagtgagaaggtggccgtctgcaagccgaggagggggcctcaggagaaaccaaccctgcaatcaccttgatcttgggctttcagcccccaaaggtgtgagaaaataaa

SEQ ID NO: 605539 - DNA, 120 bp, Artificial Sequence
  ENSG00000175311_22 (sequence is synthesized)
cttcggttgataaactgctgttgttgaagccatccagtctgtggcattttgttatggcagtcctagcagaataatactgtcctaagtaagagggttggggaggagaccaagaaaaataca

SEQ ID NO: 605540 - DNA, 120 bp, Artificial Sequence
  ENSG00000175311_23 (sequence is synthesized)
gaaaaaaagtctgtccaactgcaattgatgagttttgtaagggtaaacacctagtgaaacttaaggggaaaaaaaactaagttctttggagggaagatttgattgtcaaaggaaatttca

SEQ ID NO: 605541 - DNA, 120 bp, Artificial Sequence
  ENSG00000175311_24 (sequence is synthesized)
cattttcatgcttattatgtacacatggtttatttactgttgtctgtcaccattgccgcatatctgaatatgtgtaggttccacgatagaaactgacaacacttggctcatgcctgtaat

SEQ ID NO: 605542 - DNA, 120 bp, Artificial Sequence
  ENSG00000175311_25 (sequence is synthesized)
aaaaaaaaaaaaagaaaaaagaaactgacaacactgctgctgacattttttcaatggcaatcccaaattcaaactgaaaccccactgaagagctaagcttcattagatctctacaggctg

SEQ ID NO: 605543 - DNA, 120 bp, Artificial Sequence
  ENSG00000175311_26 (sequence is synthesized)
cattagatctctacaggctgacttacatcaagtggaatttactgttgattctgggtataatacagaaacagctgtttatcttcagcttgctttctgatgcacatctgtttgggttacttc

SEQ ID NO: 605544 - DNA, 120 bp, Artificial Sequence
  ENSG00000175311_27 (sequence is synthesized)
aagaggcatcatggaggattcaagtttagggaggatacagatgctcaaatctgatgaacaattggcttattcttcctcaatgaatatattcagaaagcttgttagccattgaataaacac

SEQ ID NO: 605545 - DNA, 120 bp, Artificial Sequence
  ENSG00000175311_28 (sequence is synthesized)
gttgcattaggggatgattgtttacaaataccttatcttgtggaataaactgaagttgtgctttccttcattaacgtgcacagaagcagttggcaaatagaaagtgctcaaaaaagtttg

SEQ ID NO: 605546 - DNA, 120 bp, Artificial Sequence
  ENSG00000175311_29 (sequence is synthesized)
tagtctgtgcctgccactattatatttcatcatcatagatgccagaatcccctcttcacctattgcccggaatctgcctaatgagatatttgctccaccccctgctgtaactacatcata

SEQ ID NO: 605547 - DNA, 120 bp, Artificial Sequence
  ENSG00000175311_30 (sequence is synthesized)
gcaagagagccatcactcaggttggtagaaatgaacttgaacattgactctcatccctttttaggagatatttgccactaggggtctcatcaggtacctctatgctcttcttaggggttc

SEQ ID NO: 605548 - DNA, 120 bp, Artificial Sequence
  ENSG00000175311_31 (sequence is synthesized)
ttttcttttatgattgacagaattaataggtgagcgttctccaaagttctcagcatcaaggatatagtctcttcgtcacagagtattgttatataataaaaaaaggtttataccatgtta

SEQ ID NO: 605549 - DNA, 120 bp, Artificial Sequence
  ENSG00000175315_0 (sequence is synthesized)
actcacggctctgagggctccgacggcactgacggccatggcgcgttcgaacctcccgctggcgctgggcctggccctggtcgcattctgcctcctggcgctgccacgcgacgcccgggc

SEQ ID NO: 605550 - DNA, 120 bp, Artificial Sequence
  ENSG00000175315_1 (sequence is synthesized)
ccggccgcaggagcgcatggtcggagaactccgggacctgtcgcccgacgacccgcaggtgcagaaggcggcgcaggcggccgtggccagctacaacatgggcagcaacagcatctacta

SEQ ID NO: 605551 - DNA, 120 bp, Artificial Sequence
  ENSG00000175315_2 (sequence is synthesized)
gaccacgtcgacctcaccacttgccccctggcagcaggggcgcagcaggagaagctgcgctgtgactttgaggtccttgtggttccctggcagaactcctctcagctcctaaagcacaac

SEQ ID NO: 605552 - DNA, 120 bp, Artificial Sequence
  ENSG00000175315_3 (sequence is synthesized)
tgtgtgcagatgtgataagtccccgagggcgaaggccattgggtttggggccatggtggagggcacttcaggtccgtgggccgtatctgtcacaataaatggccagtgctgcttcttgca

SEQ ID NO: 605553 - DNA, 120 bp, Artificial Sequence
  ENSG00000175318_0 (sequence is synthesized)
gggtgcaggcgccgggatgaccgctttaagccggagcgaggccaccgaggagggcggcaaccaacaaatgcacagaaagacagcttctctgaacagtcctgtgtcctgcaaagagaaacc

SEQ ID NO: 605554 - DNA, 120 bp, Artificial Sequence
  ENSG00000175318_1 (sequence is synthesized)
agacagagttgaggagcccccggactacagtctgcactggccagaaggcttgaagggtgaagagataaagaagtgtggccgagaagggataacactgaataaatacaaccagcaatacca

SEQ ID NO: 605555 - DNA, 120 bp, Artificial Sequence
  ENSG00000175318_2 (sequence is synthesized)
caagctgtttaaggatgttcccttggaggaagtggttctcaaagtgtgttcctgtgccctccagagggacttcctcctccagggccggctctacatctcccccaactggctctgcttcca

SEQ ID NO: 605556 - DNA, 120 bp, Artificial Sequence
  ENSG00000175318_3 (sequence is synthesized)
tgccagcctctttggcaaggatatcaaggtggtcattcctgtggtgtctgtgcaaatgatcaaaaaacacaagatggcacggctccttcccaatggactggccatcaccaccaacaccag

SEQ ID NO: 605557 - DNA, 120 bp, Artificial Sequence
  ENSG00000175318_4 (sequence is synthesized)
ccagaagtatatctttgtgtcactgctctcccgggacagtgtatatgacctgctgaggagagtctgcacccacctacagccttccagcaagaagagtctgagtgtaagagaattttcagg

SEQ ID NO: 605558 - DNA, 120 bp, Artificial Sequence
  ENSG00000175318_5 (sequence is synthesized)
ggaacctgagtctctggaagtcctcatccctgagatgaagtggagaaaggtatgcccttcctccaggtccctgtctctcccagacaacatcccttgtatccctccatcatccgtggactc

SEQ ID NO: 605559 - DNA, 120 bp, Artificial Sequence
  ENSG00000175318_6 (sequence is synthesized)
cacagacagtttcttcccctccaggaagcctccaatgtctgaaaagtcaagagcccaagtagcttcagaaaatggtgggaggtgggcatggcccatgccaggctggggtcctgcctgccc

SEQ ID NO: 605560 - DNA, 120 bp, Artificial Sequence
  ENSG00000175318_7 (sequence is synthesized)
taagaagatgccgaactgctctcccactgcaaagaatgctgtctatgaggaggatgagctggaggaggagcccaggagcactggggagctgaggctctgggattaccggctcctcaaggt

SEQ ID NO: 605561 - DNA, 120 bp, Artificial Sequence
  ENSG00000175318_8 (sequence is synthesized)
cttctttgtgctgatctgcttcctggtcatgtcctcatcctacctggcgttccgtatttctcggctagagcagcagttatgctccttgagttgggatgacccagtccctgggcacaggta

SEQ ID NO: 605562 - DNA, 120 bp, Artificial Sequence
  ENSG00000175318_9 (sequence is synthesized)
acagccacttggcctttgtccccattccttctccaagaagaatgttctgggtgctaagtctccaccaatgatccctgtggtttatgctgctgctgtgctaagactgcctatgaaggaaaa

SEQ ID NO: 605563 - DNA, 120 bp, Artificial Sequence
  ENSG00000175318_10 (sequence is synthesized)
tattccagatccctcctcctccccgcagctcttctcttccctctatgagagatctgaagtacgtgtttacaaagtaactggcttctacaatttttggactcaagcaaaaagccagatttt

SEQ ID NO: 605564 - DNA, 120 bp, Artificial Sequence
  ENSG00000175318_11 (sequence is synthesized)
ttggaaccaactgaggaattctgtacacaaagcttcagcaaacacttagagaaaacaaacaaacaaacaaactgggtccttggaaacagttctggcacacaggcagaacactggaggcca

SEQ ID NO: 605565 - DNA, 120 bp, Artificial Sequence
  ENSG00000175318_12 (sequence is synthesized)
cctcaaaggacagaggccatgctttcgcatttggaatgtggctctgccacacagctcactcctatggtggggtcagaggtcagaacacaaaccacccatgtgggctctgctccctcccaa

SEQ ID NO: 605566 - DNA, 120 bp, Artificial Sequence
  ENSG00000175318_13 (sequence is synthesized)
tgtcaggcttgggcaggggcctgctgagaatctgtgaatgcagaggggagggctcatggccaggattccagccagagatgaatttccatgctctgggccagggctctgtgccggcccctc

SEQ ID NO: 605567 - DNA, 120 bp, Artificial Sequence
  ENSG00000175318_14 (sequence is synthesized)
atgaggtggctggctgcattatggggagatgctgcccacggcggagatggtggcagtggctgtgaagaacagaggtacctgaattctgtgtcctcagctgtcactttccggtgagacaag

SEQ ID NO: 605568 - DNA, 120 bp, Artificial Sequence
  ENSG00000175318_15 (sequence is synthesized)
tggagcagggcctttgatcactgtggtcacagacctggtactgggttttgcccttgtgtgctcaaacatttctaaggtgtcccaagccctggaaatagggaagggaagggtggaggcttg

SEQ ID NO: 605569 - DNA, 120 bp, Artificial Sequence
  ENSG00000175318_16 (sequence is synthesized)
gatctgaggtcttgctgtccactccctgcctgcctgcccgcatctcaggcatggccaacagcagcccgttgaggggggcttgtctggacagttgcgtgtgatggtgttgagccatcacag

SEQ ID NO: 605570 - DNA, 120 bp, Artificial Sequence
  ENSG00000175318_17 (sequence is synthesized)
ggcagaggtcacttgtgtcacccccatagtcattgggttgcaggccatggaggagggacctccactccatggggcctattctccattaaggtggaagtgtccactgtgggcctagcacag

SEQ ID NO: 605571 - DNA, 120 bp, Artificial Sequence
  ENSG00000175318_18 (sequence is synthesized)
tgcaggaaccaggccagggggtctatctcatacctctggggacaggaaaggtagaggatgaggaggttggacgtggtggtggctttgccttggatattcctcttcctctatcaaggcctt

SEQ ID NO: 605572 - DNA, 120 bp, Artificial Sequence
  ENSG00000175318_19 (sequence is synthesized)
ctcttcttctctgtgtcccacaactctggcctcatcgccctgggactcccatctgctaagatagtggctttggaggttctggaagggcttagtgaggaggccagaagtatcagggaaagt

SEQ ID NO: 605573 - DNA, 120 bp, Artificial Sequence
  ENSG00000175318_20 (sequence is synthesized)
tgctggtgatggggtgggcggtgtcagaagcagccactgttttcccctcttcagacactgagagattaatcagggaatgaaatccaggtggaaattatttattgtgaagcagacgactgt

SEQ ID NO: 605574 - DNA, 120 bp, Artificial Sequence
  ENSG00000175318_21 (sequence is synthesized)
ctgtcctgtttatgacaaacccaaatgagaattggagggactaccagtaagtggtctcttcatgctctccccatcccagtttttaggatgaaatttagagcctggccttttgtgttgctt

SEQ ID NO: 605575 - DNA, 120 bp, Artificial Sequence
  ENSG00000175318_22 (sequence is synthesized)
gcaccaaatctgtatgtctcaggtgaaactcactgttccatgaatggtcatcctttttttttttttttttttggaaccagcccctttcaccctttcatccgtcttttttttttaggaaaa

SEQ ID NO: 605576 - DNA, 120 bp, Artificial Sequence
  ENSG00000175318_23 (sequence is synthesized)
taacccttcttgcttcagcacttctccctggtccttgctgaaagacagagataaaaatccattctctgagccttgcttggttgtcagaggccatgagaggtgccagttataggtggatgt

SEQ ID NO: 605577 - DNA, 120 bp, Artificial Sequence
  ENSG00000175318_24 (sequence is synthesized)
gccaagatgctggtgaacttggtcttcagctatacccaggctcagaaagggcaagagccatgctgcagcgtaggtgactttggaggtgcacttggggcccagggctttgagtgttgcggg

SEQ ID NO: 605578 - DNA, 120 bp, Artificial Sequence
  ENSG00000175318_25 (sequence is synthesized)
tgtgcctgtccctccagatagtgctctgtttctctctgttgtccccctgcctggtcctctggggccactgtgctttctgctgtgtgcatttataaatgatgtgtattttatatagacctg

SEQ ID NO: 605579 - DNA, 120 bp, Artificial Sequence
  ENSG00000175318_26 (sequence is synthesized)
cttgcattggctgatgctcctctaattccctgagtttgattcaaccacccttgggttgttttgctatggccttagcctttgaaaatattttaaaataaaaaacttgatttttctagtgta

SEQ ID NO: 605580 - DNA, 120 bp, Artificial Sequence
  ENSG00000175318_27 (sequence is synthesized)
ataagcgagtctcagggtcctccctctcagtgtgcctcctcaagggtggggctagaggcctcactcagcctggcctacgagctgcctggcactggagatgagcaaccaacaaatgcacag

SEQ ID NO: 605581 - DNA, 120 bp, Artificial Sequence
  ENSG00000175318_28 (sequence is synthesized)
aaagacagcttctctgaacagtcctgtgtcctgcaaagagaaaccagacagagttgaggagcccccggactacagtgccatccccctctcccagtgtggtagcctcagccaggtcaggtg

SEQ ID NO: 605582 - DNA, 120 bp, Artificial Sequence
  ENSG00000175318_29 (sequence is synthesized)
gctgaccagtagagcagggagcatcgtgggaagtgacatgaacagccagcccctgctttccctcaccttagctcatcagcctcctctggctcggctggccgggttttgaccatcaacatc

SEQ ID NO: 605583 - DNA, 120 bp, Artificial Sequence
  ENSG00000175318_30 (sequence is synthesized)
atctatatttggtaatatctggagaaaactctgataaacctggtgtgggctccttagggcaagtgagatcgcaagggccatggtaagatagcttctcctgtcttactgcaggaagtcctc

SEQ ID NO: 605584 - DNA, 120 bp, Artificial Sequence
  ENSG00000175318_31 (sequence is synthesized)
tttgtttggaagagaacagtggtgttttcagcaaacactgggtgctggctgtatgctggggatacagagatgtacgggacacgcccttgctggagctcagagtcaactgggggacacaga

SEQ ID NO: 605585 - DNA, 120 bp, Artificial Sequence
  ENSG00000175318_32 (sequence is synthesized)
ccttgctggagctcagagtcaactgggggacacagatgtgtaaacagacaagcacactctggtgtgaatttcactctcgtcgcccaggctggactggagtgcaatggtgtgatctcggct

SEQ ID NO: 605586 - DNA, 120 bp, Artificial Sequence
  ENSG00000175318_33 (sequence is synthesized)
agtgctgggcttacaggcataagccactacacctggccaggagttggcttttaatttaaagagacttgaaagttggccgggtttggtggctgagcctggtctgaaggcaggaaagctcct

SEQ ID NO: 605587 - DNA, 120 bp, Artificial Sequence
  ENSG00000175318_34 (sequence is synthesized)
attttcagtgtcaccctcaatatcagggccagtcttgggtgggggccagaggcagcggccatgggcatggtggggctgttagggaaaggtgtcctcatgaagcccccttcctgatatggg

SEQ ID NO: 605588 - DNA, 120 bp, Artificial Sequence
  ENSG00000175318_35 (sequence is synthesized)
gtcattttgctgtgtcccctagagaagggtcctagtctctgatctctgcctcaagcttctggctcaaggccagggcagaattggcactgaggatgcatgggcaggactggggttccttgt

SEQ ID NO: 605589 - DNA, 120 bp, Artificial Sequence
  ENSG00000175318_36 (sequence is synthesized)
tccatggcaactacttgcaaaggccagactttctgtcttcccagttccataaaaagggctcaccacagccagcagggcttctgagagctgattttttttttctcccaatccataaagaaa

SEQ ID NO: 605590 - DNA, 120 bp, Artificial Sequence
  ENSG00000175318_37 (sequence is synthesized)
ccgcagcagagctcaggccacaggaaggaggcggcagggagggcagtcctgctggcatcatggcctgtggccaggccccggcgctgtgagtctgacaccttcacctcacccacaccccaa

SEQ ID NO: 605591 - DNA, 120 bp, Artificial Sequence
  ENSG00000175318_38 (sequence is synthesized)
actgtccctattccagcactgcctgctcccctgcttaccccttggccagagaaatgggacagggtctttgacacccaggtgggaagctcctcagcatctctgggagaccaggcgcacctc

SEQ ID NO: 605592 - DNA, 120 bp, Artificial Sequence
  ENSG00000175322_0 (sequence is synthesized)
cacttcagccagagcgcggggttagggcttcattgccttgtgtcctctgctccgggagacttcggtgattctgccactcactccgtcgctctgtgacctgctggcattgaatgatttata

SEQ ID NO: 605593 - DNA, 120 bp, Artificial Sequence
  ENSG00000175322_1 (sequence is synthesized)
gctaagactccaggacacccctgaagccgagaaatggaactcttaacattcagggatgtggccatagaattctctccagaagagtggaaatgcctagaccctgcccaacagaatttatat

SEQ ID NO: 605594 - DNA, 120 bp, Artificial Sequence
  ENSG00000175322_2 (sequence is synthesized)
agagatgtgatgttggagaactacagaaacctcgtctccctggctgtgtattcttattacaaccaaggcattttaccagagcaaggcatacaagattcattcaaaaaagcaacactggga

SEQ ID NO: 605595 - DNA, 120 bp, Artificial Sequence
  ENSG00000175322_3 (sequence is synthesized)
agatatgggagctgtggccttgaaaatatatgcttatggaaaaactgggaaagtataggtgaaggtgaaggacaaaaggaatgttataatctatgtagccaatatttgacaactagtcat

SEQ ID NO: 605596 - DNA, 120 bp, Artificial Sequence
  ENSG00000175322_4 (sequence is synthesized)
aacaaacatttaactgtgaaaggagacaaagaatatagaatatttcagaagaagcctcagtttctgtcagctgctcctacagaaccatgtattcctatgaataaatatcaacataaattt

SEQ ID NO: 605597 - DNA, 120 bp, Artificial Sequence
  ENSG00000175322_5 (sequence is synthesized)
ttgaaatctgtcttttgtaataaaaatcagataaattttaaccatgactcaaatattagtaaacatcatagtactcattttctagaaaactattacaattgtaatgaatgtgaaaaagta

SEQ ID NO: 605598 - DNA, 120 bp, Artificial Sequence
  ENSG00000175322_6 (sequence is synthesized)
ttttaccaatcctcaaagcttattttccctgaaaatatccatattcaaaaaaagccttacaactctaatgaatgtggtgaaacttctgacccattctcaaagcttactcaacatcaaaga

SEQ ID NO: 605599 - DNA, 120 bp, Artificial Sequence
  ENSG00000175322_7 (sequence is synthesized)
atttatattggagagagctcacaaagatgtaataaaaaatgtataatagtctttagtcaatcacatctaaagggacataagataattaacactggagaaaaatcagtgaaatataaagaa

SEQ ID NO: 605600 - DNA, 86 bp, Artificial Sequence
  ENSG00000175322_8 (sequence is synthesized)
gataattaacactggagaaaaatcagtgaaatataaagaacgtggcaaagcttttaccaggggcttacatcttggacatcagaaaa

SEQ ID NO: 605601 - DNA, 120 bp, Artificial Sequence
  ENSG00000175322_9 (sequence is synthesized)
catcagagaatccatactggagagaagcctttcaagtgtaaggaatgtggcaaagcttttaacagaggctcataccttactcaacatcagagaatccatactggagagagagctttcaaa

SEQ ID NO: 605602 - DNA, 120 bp, Artificial Sequence
  ENSG00000175322_10 (sequence is synthesized)
tgtgaagaatgtggcaaagcctttaacagggggtcataccttactcaacaccagagaatccataccggagagaaacctttcagatgtaaggaatgtggcaaagcctttaatagaagctca

SEQ ID NO: 605603 - DNA, 120 bp, Artificial Sequence
  ENSG00000175322_11 (sequence is synthesized)
ttaacagagcttcacaccttactcaacatcagagaatccatactggagagaaacacttcaaatgtaaagaatgtggcaaagcctttaacaggggctcacaccttactcgacatcaaagaa

SEQ ID NO: 605604 - DNA, 120 bp, Artificial Sequence
  ENSG00000175322_12 (sequence is synthesized)
aatgtgaagaatgtggcaaagcttttatctggggctcacaccttactcaacatcagagagtccatactggagagaaattcttcaaatgtaaagaatgtggcaaagcttttaccaggagct

SEQ ID NO: 605605 - DNA, 89 bp, Artificial Sequence
  ENSG00000175322_13 (sequence is synthesized)
agagtccatactggagagaaattcttcaaatgtaaagaatgtggcaaagcttttaccaggagctcacaccttactcaatcaaatgtaaa

SEQ ID NO: 605606 - DNA, 120 bp, Artificial Sequence
  ENSG00000175322_14 (sequence is synthesized)
aacatcaaataattcataccaggtagaaaccctgcaagtgtaaagaatgtgctaaaaccctaaactggtgctcacaccttactcaacattagaaaatcaatactggatagaaatcccata

SEQ ID NO: 605607 - DNA, 120 bp, Artificial Sequence
  ENSG00000175322_15 (sequence is synthesized)
tgtgtaatgatttttgaaacatcaaaatgaagattaaataaaaattagaagtgtcactttagaaagaactaaggtgctagcacttccgtaaattactctgaatcagtgtgtttattataa

SEQ ID NO: 605608 - DNA, 120 bp, Artificial Sequence
  ENSG00000175322_16 (sequence is synthesized)
caaataattcaaactcaattagataattaaattgtatgtttaaaaagagggacgacattgatggagaggcataattatattcaatgttcacttatttttgtaatcacagtattcatgatt

SEQ ID NO: 605609 - DNA, 120 bp, Artificial Sequence
  ENSG00000175322_17 (sequence is synthesized)
gagaaagtattattgatgtaattaaattcaaattaaccttttttttccccactgtggttgattattgctgtctctgacatgagagtcccttctacgttaggtaggcatcattcacatgtc

SEQ ID NO: 605610 - DNA, 120 bp, Artificial Sequence
  ENSG00000175322_18 (sequence is synthesized)
tcattcacatgtcatcattcacatgtctcatgacgtcattcacaagtttcccatggaagactaagagcattggcatataggatgtatgatgaaatctaaatggagttgctctttttgttt

SEQ ID NO: 605611 - DNA, 120 bp, Artificial Sequence
  ENSG00000175322_19 (sequence is synthesized)
gacttacaacactgaatataagtcatatatgagttaggtgttcagaatattattgttctgcattaaagtgtgagacagaaacactctgagttttagatatgaatagttttaccaactacc

SEQ ID NO: 605612 - DNA, 120 bp, Artificial Sequence
  ENSG00000175322_20 (sequence is synthesized)
cattaaaaggtcttgctagtccattaatattctaatgtatcttcatagcagcaagttagaagtcctgaatgttactgtgataacaataaagaaatcacaaatatcagagagtggtgcaaa

SEQ ID NO: 605613 - DNA, 120 bp, Artificial Sequence
  ENSG00000175322_21 (sequence is synthesized)
taacttctctctggtagaacatagattattaattcaatcctctaaatacttaggctcagtttaagaaaagagagaacacatttttttaacataggtcatggtatcagaataagaatgctt

SEQ ID NO: 605614 - DNA, 120 bp, Artificial Sequence
  ENSG00000175322_22 (sequence is synthesized)
tttgaatgtttgcagtctgtaattttgatgattgaggaaactggattttgaaatgctttattcagtctgtaaacttaatttttttttaagaataaaatgaaatgtcttttaatttgttaa

SEQ ID NO: 605615 - DNA, 120 bp, Artificial Sequence
  ENSG00000175322_23 (sequence is synthesized)
agatgtgatgttggagaactacagaaacctcgtctccctggagctccacacagaacatcatcaaagaactgatggacacttcatctccctgggtgaggggcaggtgtaccatgctgtcat

SEQ ID NO: 605616 - DNA, 120 bp, Artificial Sequence
  ENSG00000175322_24 (sequence is synthesized)
ggccattcctgcctcgattggggtgtgggtgtagagatggtctctataaccagggcccagacatggctgagaaggccttctgccaggactccaccttgatgactcacaggactttgtgcc

SEQ ID NO: 605617 - DNA, 120 bp, Artificial Sequence
  ENSG00000175322_25 (sequence is synthesized)
ttggctttccctattgagtgacccacagttttaatccaagggaccctgagtctgtttccttccttcagccccaccatttcaccccagcactgttcaggtgtacaatcggctttcacatat

SEQ ID NO: 605618 - DNA, 120 bp, Artificial Sequence
  ENSG00000175322_26 (sequence is synthesized)
ttgtaagaatatctaggaaaattatttatattttactttcacttcatgttatgaccatgagtgtttttgcatttgctagggctcattgttttaattggcccccctttatccctctgagtg

SEQ ID NO: 605619 - DNA, 120 bp, Artificial Sequence
  ENSG00000175322_27 (sequence is synthesized)
cggaaataaatcagccctaaatctggatgagacctgcaggtggactccatcagtgcaggcgtggtggggcagcaggaggagcccgtggtgcccaccttccagagctgccacctcttttac

SEQ ID NO: 605620 - DNA, 120 bp, Artificial Sequence
  ENSG00000175322_28 (sequence is synthesized)
ctcctcatgttccttcctgtgcacctagagagagttcacccccacccaacagctcctggacctgctgcccaaaaggtaagtgctccatccctccacagcacaagggggactcagccacct

SEQ ID NO: 605621 - DNA, 120 bp, Artificial Sequence
  ENSG00000175322_29 (sequence is synthesized)
ctaacatgatatgattgtttcaagaactaaatgagataagctatggaaagtacttcagacttggccttgtagaaagcactgctgagggaatagattggttattcatattataaaactatt

SEQ ID NO: 605622 - DNA, 120 bp, Artificial Sequence
  ENSG00000175322_30 (sequence is synthesized)
aaactatagtaagatataagattataaaaatatcaaaactaagatattgacagtaatagaattaacctactcatctatttgcattttaccagattaattttttcttatgtgtgtgtgttc

SEQ ID NO: 605623 - DNA, 120 bp, Artificial Sequence
  ENSG00000175322_31 (sequence is synthesized)
gtgtgtgtgttctgtgcaattttattacatgtgtaggttcacctaccagaagattaactcgttttcctcttataaccacatccgcttcccttctccccaccatacccactctgattctga

SEQ ID NO: 605624 - DNA, 120 bp, Artificial Sequence
  ENSG00000175322_32 (sequence is synthesized)
ttctttgaaaccattaatttctatttctgcaaatttgtcattccaataatgttatataaatgaaatcataacctgtgcaaccttttgtaattggcccttttccttcagcataattccttg

SEQ ID NO: 605625 - DNA, 120 bp, Artificial Sequence
  ENSG00000175322_33 (sequence is synthesized)
gagattcatctaaattggtttatgttttagtttgttccttttgttattgctgtgggttttcatgtgtggatgttaccatgaaatactgtgtgtaacccttcactctttcaagaacatatt

SEQ ID NO: 605626 - DNA, 120 bp, Artificial Sequence
  ENSG00000175322_34 (sequence is synthesized)
tgttgttttcagtcagtgtgtggctattatgaataaaagtgctatgtacattcatgtactaggtttcatatgaatacatgttttcattactctggaaaatatttccagcatacaattcct

SEQ ID NO: 605627 - DNA, 120 bp, Artificial Sequence
  ENSG00000175322_35 (sequence is synthesized)
ggctcatagggtagttacaagtttaattttaatagaaactagcactctgttatccagagtgactatcattttacattcccatcatcaatgaatttctgttttttcaaatcctcttagcca

SEQ ID NO: 605628 - DNA, 120 bp, Artificial Sequence
  ENSG00000175322_36 (sequence is synthesized)
tactgactgatatgtattgatatcacattgttttaatgtacatttttctaaaggataataatgttgaactttatttaatgttctcatatgacatctgcctattatctctgatgaaatgtt

SEQ ID NO: 605629 - DNA, 120 bp, Artificial Sequence
  ENSG00000175322_37 (sequence is synthesized)
tattcatgtctgcatgttttctaattgtatttgttttcttgcaagttttgagagttctgtttatattctggttactagctcacataggcaataaataagttttttttccacaaagaaaaa

SEQ ID NO: 605630 - DNA, 120 bp, Artificial Sequence
  ENSG00000175322_38 (sequence is synthesized)
actgtctcttgagagcttctgctttgcatgaattaatttcagttcttttcttcaagaaaaaatgggagtttgctagtgtaaaaaagaaaatcttttttttttttttttaattgagacaga

SEQ ID NO: 605631 - DNA, 120 bp, Artificial Sequence
  ENSG00000175322_39 (sequence is synthesized)
agattccaggtagtaaatggtaatgatatactatcgggtatgtctagttcatgctgtctttagcatttttttacccttagtggtattaaactccaaatagtttggagaatgttgattcca

SEQ ID NO: 605632 - DNA, 120 bp, Artificial Sequence
  ENSG00000175322_40 (sequence is synthesized)
taagttattacttgttactctaacaagttccccaaggtgtgttgagtagttaattagcccttagctatttttaccaaacattaggttattaatttaaaattgtttgtttttaatgtaggt

SEQ ID NO: 605633 - DNA, 120 bp, Artificial Sequence
  ENSG00000175322_41 (sequence is synthesized)
gtttactgctatgaatttctctgaacagtttgctgcatctcatgtttcgatatgtcataacttcattttcatttatctgaaaatattttccagtttcattttttctttaacacattaatt

SEQ ID NO: 605634 - DNA, 120 bp, Artificial Sequence
  ENSG00000175322_42 (sequence is synthesized)
aggagtatttttaatttccatatatttgtgagttccccccattttctgcattcatttatttttaatttccttttactaaagtcagggaaaatactttggattattttgatcctgttaatt

SEQ ID NO: 605635 - DNA, 120 bp, Artificial Sequence
  ENSG00000175322_43 (sequence is synthesized)
ttattgacgttttcctgctgtatggcctagcatatggtctatcctggagaatgatttatgtgtacttctaattttgagtggaaaattctataaatttgagaattctatcagttcatattt

SEQ ID NO: 605636 - DNA, 120 bp, Artificial Sequence
  ENSG00000175322_44 (sequence is synthesized)
gttatgttttcctgttgatcttcccactttttctgcccattatttacattggagtatagaagtttctatacttctgataaactccaaataatggatttgattatttaatctatttatagc

SEQ ID NO: 605637 - DNA, 120 bp, Artificial Sequence
  ENSG00000175322_45 (sequence is synthesized)
ctgtaatattatcagtatagttgaatttgcatcattttgctttctatttttatgtctcacgtatttttctttattcttcctttactgctttcttattactttccatataatcttttaatt

SEQ ID NO: 605638 - DNA, 120 bp, Artificial Sequence
  ENSG00000175322_46 (sequence is synthesized)
tatataattgttcatgtttttgaagttacttccttgttttctctagcccttatataccttatcagaatctgctttatatttatattaattccaatgagatataaaatattaccactatat

SEQ ID NO: 605639 - DNA, 120 bp, Artificial Sequence
  ENSG00000175322_47 (sequence is synthesized)
agcttttttcccccaatttggattgaatttttaaaatattgtcttaatttagttttattgttttattaaaaaagctaaacttaacaaaattggttgtatattagtttaggtgaggttgtt

SEQ ID NO: 605640 - DNA, 120 bp, Artificial Sequence
  ENSG00000175322_48 (sequence is synthesized)
ggtgaggttgttttgtaatgagaaaataatttacaacatatagagaataaattattattattttaaaaagtactctacattttgtatccttaccatttcctttgatagtttaaaattgta

SEQ ID NO: 605641 - DNA, 120 bp, Artificial Sequence
  ENSG00000175322_49 (sequence is synthesized)
agagatatattcataaatgtgacttgtaaatgttgaaatttatatgtttgctttttctgcattcagtaagggtagtagtttccagcatctgtgcctctttaaagtgaaagacaggggcag

SEQ ID NO: 605642 - DNA, 90 bp, Artificial Sequence
  ENSG00000175322_50 (sequence is synthesized)
ataagtaaattcagcctgggcaacatgtgaatgaatgaatgataggatggaattaaaatagtttgaaaacacaaattaacaaaatggtgt

SEQ ID NO: 605643 - DNA, 120 bp, Artificial Sequence
  ENSG00000175322_51 (sequence is synthesized)
aattaaaatagtttgaaaacacaaattaacaaaatggtgttgacaaagattgttcatttgtggtctaccagggcataaaattctcaaaaaacataatcagtaggaaacctctttattcct

SEQ ID NO: 605644 - DNA, 120 bp, Artificial Sequence
  ENSG00000175322_52 (sequence is synthesized)
gaatattagagaatattatatgtcttaaaattattcatgttgaaaagctctgcctttcatgcatttaggagaaaaagtagagggcaggaggtttatgtagactctggtctgtgcctgatt

SEQ ID NO: 605645 - DNA, 120 bp, Artificial Sequence
  ENSG00000175322_53 (sequence is synthesized)
tggggaatggaaagactcgacagaagaggccaggtcagccaagcagggctctgttgcgtgcaagattaactgctggtttgtctttgcagagctccacacagaacatcatcaaagaactga

SEQ ID NO: 605646 - DNA, 120 bp, Artificial Sequence
  ENSG00000175322_54 (sequence is synthesized)
taagactccaggacacccctgaagccgagaaatgtggaaaagcgagattgtctttgaccatttgctatggacattgtcagggatggtgcagcctgaatgagaatgtctgcggtatttccc

SEQ ID NO: 605647 - DNA, 120 bp, Artificial Sequence
  ENSG00000175322_55 (sequence is synthesized)
gaaataagtatccctcaaggatgatactgtggacctcactcaggaagaatgtgtccttcagggaaagctgcacagagacgtgatgctggagaagcagtcatctggttactttaggtttgt

SEQ ID NO: 605648 - DNA, 120 bp, Artificial Sequence
  ENSG00000175322_56 (sequence is synthesized)
gccccaggaattcatagtcctgggcaacatagtgtgaccctgtctctacagaatttttaaaaattagccaggcttggtggtatgtgcctatagtcccagctacttgagtagctgatagag

SEQ ID NO: 605649 - DNA, 120 bp, Artificial Sequence
  ENSG00000175322_57 (sequence is synthesized)
ggaggttgaggtggttgaagcttcagtgagctaattatcgtgcctctgcactccagcctgagtgatggagagaaaaaaaaaaaaaagaggtcaaagccaaattctggtactatcaatttt

SEQ ID NO: 605650 - DNA, 120 bp, Artificial Sequence
  ENSG00000175322_58 (sequence is synthesized)
tattaaatattattttattttaaacattaccatatatatatttgttttgtggtaaaactcctaataatgacacagtttgagacttgagagaaaggagcaaagcagtctttcttatcatgt

SEQ ID NO: 605651 - DNA, 120 bp, Artificial Sequence
  ENSG00000175322_59 (sequence is synthesized)
ctgccactgcctcaaccaggaaccactgttgtcagttctgtggcaagagtcagggaaactctcgtaaaaatccatttacacataattatgtgagttgaaaaaatagttcggtgaatctat

SEQ ID NO: 605652 - DNA, 120 bp, Artificial Sequence
  ENSG00000175322_60 (sequence is synthesized)
tgttatgtagtattcttttttaaaactatatatcttgaatctgttttcatgttagcaaatattgaaatacttgctttcttagttctgtttgcaaacatttcatgcttaataagaatttat

SEQ ID NO: 605653 - DNA, 120 bp, Artificial Sequence
  ENSG00000175322_61 (sequence is synthesized)
attatgctgttcagcatgcttattattaaatattttattctgagatataatgctatgattatttctgatttttaatcttttgatttaactaataaactaaagtggtgttctaattatgaa

SEQ ID NO: 605654 - DNA, 120 bp, Artificial Sequence
  ENSG00000175322_62 (sequence is synthesized)
ttggttttggatacataggaatatttgtatttttgaggagttctatgttaaagtatctttttcagatattctttttgcatcatgtctaaaatgtgtaaggtgagtaggggacatactggg

SEQ ID NO: 605655 - DNA, 120 bp, Artificial Sequence
  ENSG00000175322_63 (sequence is synthesized)
atttggttcagaaatcccagcaacaccagggacagatgttgcatcttttccgcttaataatttttaatcctgtagaggttgcaaatgtgattctacaaaaatccttactcagcaatttta

SEQ ID NO: 605656 - DNA, 120 bp, Artificial Sequence
  ENSG00000175322_64 (sequence is synthesized)
tcagaacaataagcatttttctaaatatgaaaaaatgtaatgttattttacctcaaagtgttactgctttagaataaattgagatttgtaatttaaactctatatgtgcagattttcaaa

SEQ ID NO: 605657 - DNA, 120 bp, Artificial Sequence
  ENSG00000175322_65 (sequence is synthesized)
aagaatgagtgtccaaccttttggcttccccgggtcacattggaagaagaaacattgtcttgggccacacataaaatacacgaacactaatgatagctgatgtgctaaaaagaaaaaagg

SEQ ID NO: 605658 - DNA, 120 bp, Artificial Sequence
  ENSG00000175322_66 (sequence is synthesized)
ttcatgcagttttcatgatattcgtcaccacagataagcaaaaagtcctctcattcaaagagctggttggacaccactgattaaaagtatctactcaccttctagattttttaaatgccc

SEQ ID NO: 605659 - DNA, 120 bp, Artificial Sequence
  ENSG00000175322_67 (sequence is synthesized)
tgtgtcattaatgagcttagaacattgctaagcaaatattaagccatctattatcttattttttaataactattatcttataattttgtcttatttagtagggagcctgctgggactgtg

SEQ ID NO: 605660 - DNA, 120 bp, Artificial Sequence
  ENSG00000175322_68 (sequence is synthesized)
cctgaaggaggagagagaagaaagaagagtcagaactagcactttcccagcatgaatgagagatcctttcgcttcacgtctttgccagcatttggtgttgtcagtgttctagattttggc

SEQ ID NO: 605661 - DNA, 120 bp, Artificial Sequence
  ENSG00000175322_69 (sequence is synthesized)
cattatagtacatgacttcaggctcctatgtgcagaagtcctcaacccccaggctgcagaccagtacctgtccatggcctgttaggaaactggccgcacagcaggaggtgaaatgattat

SEQ ID NO: 605662 - DNA, 120 bp, Artificial Sequence
  ENSG00000175322_70 (sequence is synthesized)
tgcagtttcgaggggagatgatgtcacaagatctcgaacccatatctcagaaccgcctgcctcctcccacacactctggctgtcctgaccatcacttcaagcccaccagccctgcagcaa

SEQ ID NO: 605663 - DNA, 120 bp, Artificial Sequence
  ENSG00000175322_71 (sequence is synthesized)
aaaaaatcaaacgagtagttcagaaggcaaagtctgcaagggaaggaagtatattgggaggtacagtaagtattcctgtctggagaaggtcttctttggggctagaaactgagccagtgc

SEQ ID NO: 605664 - DNA, 120 bp, Artificial Sequence
  ENSG00000175322_72 (sequence is synthesized)
taaagccatgcaggaaggaggaaataatcagtgagccacgggctgaacttgtggaaaagaaatggagggcaaggtcacaaaccagtccctaactgcttctaatttaatgtaatcctcact

SEQ ID NO: 605665 - DNA, 120 bp, Artificial Sequence
  ENSG00000175322_73 (sequence is synthesized)
gtttgtcattattgcttttgatggccatgaaatctgttttttcccagttctctagtgtaatttggaattaatttcccagctgctttattttttttctagaagagtcggggacattttcag

SEQ ID NO: 605666 - DNA, 120 bp, Artificial Sequence
  ENSG00000175322_74 (sequence is synthesized)
gattagtagaggtgtttctacaacaccttcatgccttcgatagtgtgtaagagttcaccaattgaattaccttattctgttcagaagtagtaactatggagtttaaccactctggacata

SEQ ID NO: 605667 - DNA, 120 bp, Artificial Sequence
  ENSG00000175322_75 (sequence is synthesized)
ttatatacttaatggagaccatagctgtgtggtgactgaaaacatgcattgtctactccttatggtgagactgctttccttcatgaagtcagtaaagaagggtaacttttctgtagattt

SEQ ID NO: 605668 - DNA, 120 bp, Artificial Sequence
  ENSG00000175322_76 (sequence is synthesized)
ttgtatttttaaaaaaggtcaagatcttcggcagttttctgaattgaattgtttgtgatatttgctctgtttttaaaatcttctaaggccattaccaggttcagtgcttatcttagtaca

SEQ ID NO: 605669 - DNA, 120 bp, Artificial Sequence
  ENSG00000175322_77 (sequence is synthesized)
atttaaattgattccgtgaataatttttcctgcctccagtttcccttttacatagtgggctcatgttttaatatgttaaacaattctgacattgaaataattttattttatatttttgca

SEQ ID NO: 605670 - DNA, 120 bp, Artificial Sequence
  ENSG00000175322_78 (sequence is synthesized)
tccacaaatactaattttctccatatattaatggtgatgtagtttctcctctgcaatattttattgcctactcatgttttatgtcccctggattacagcactgtcattccactgtgccct

SEQ ID NO: 605671 - DNA, 120 bp, Artificial Sequence
  ENSG00000175322_79 (sequence is synthesized)
atttcttggttatgatgaaaagactcttaattccagtatgaaatcatttctgcattccataaatttcatttggcatctgtggaattaaggcatcttcattgtatttggatctctgaatca

SEQ ID NO: 605672 - DNA, 120 bp, Artificial Sequence
  ENSG00000175322_80 (sequence is synthesized)
atcataagtgatatttgcctataaattaagcaatgatatttaaataagagattaccacaatcatattttataaatatacaaccatttttaaaaacctgacaaaatctacaaaaaaaagaa

SEQ ID NO: 605673 - DNA, 120 bp, Artificial Sequence
  ENSG00000175322_81 (sequence is synthesized)
aaatatatgtggagttttagaaaagactgactaggtccaaggttgaggcacatagtggttaagcacattgtcagctccggactctgcctcttacaaggaaggagggggctttagatgtta

SEQ ID NO: 605674 - DNA, 120 bp, Artificial Sequence
  ENSG00000175322_82 (sequence is synthesized)
tttagctgttatttagcctttctacacctaagttcccctcacctgtaaaaaaaaaaataataataaattgcttactttgtagaatcattgtaaatgttctatgtaaaatatgaatatagt

SEQ ID NO: 605675 - DNA, 120 bp, Artificial Sequence
  ENSG00000175322_83 (sequence is synthesized)
actcacagtaaatatgtgtgtgtgtggtgtgtggtgtgtggtgtgtagttcagcaatagaaaatggaatttaataagaacgttatgagttgaaaacaatggtctgtggacaatattgaat

SEQ ID NO: 605676 - DNA, 120 bp, Artificial Sequence
  ENSG00000175322_84 (sequence is synthesized)
ttcagttgccaaaataaaatagacctcatgtttcccttcaggatcctctaactctgaatatgaatagaagtatcagtcactggaaaagaacaaatgtcctctagggatgtggcaatagga

SEQ ID NO: 605677 - DNA, 120 bp, Artificial Sequence
  ENSG00000175322_85 (sequence is synthesized)
ataatcttatctcagaccataattgggttcctgatgaaaatattttttctttagcattgtatttctctttatttcaccaaatgcacattaaggtctacagatctgattctcaaacacctg

SEQ ID NO: 605678 - DNA, 120 bp, Artificial Sequence
  ENSG00000175322_86 (sequence is synthesized)
gctgtagccacctcctttgtgatactttataaaggagccccacagagaatgcctgcttttgggttgaaacattttctcaatcataattaggtacaaacttgttttctatgttcacaaagt

SEQ ID NO: 605679 - DNA, 120 bp, Artificial Sequence
  ENSG00000175322_87 (sequence is synthesized)
gggcagggctgtgtgcattggcaccacttgccttttgaatatcttctaggccatcacagtcagccccatgtactcctgctgggcagacctgaaactacaagctcccaaatagaatgggtg

SEQ ID NO: 605680 - DNA, 120 bp, Artificial Sequence
  ENSG00000175322_88 (sequence is synthesized)
ctccaacatcctctgctggattgtgatatgctggtaaccgcacgtgactggcaagtggaatggcgaaaacaacacaaagaaggatttggttactgttctgcagtagttaataactgatat

SEQ ID NO: 605681 - DNA, 120 bp, Artificial Sequence
  ENSG00000175322_89 (sequence is synthesized)
gttactgttctgcagtagttaataactgatatggtttggctatgtccccactcaaacctcatcttgaattcctatgtgttgtgggaggaacttggtgggaggtgattgaattatgggggc

SEQ ID NO: 605682 - DNA, 120 bp, Artificial Sequence
  ENSG00000175322_90 (sequence is synthesized)
atgagtctcatgagacctgatggttttaaaaacaggagtttccctgtacaagctctctctttgcctgctcccatccatgtaagacctgacttgctcctgcttaccttccgccatgattgt

SEQ ID NO: 605683 - DNA, 84 bp, Artificial Sequence
  ENSG00000175322_91 (sequence is synthesized)
tgaaagtttgttaaaccttatgtgaaaaaaaatggactaatacagcaaagtggtatcagtagagtggggtgctgctgaaaagat

SEQ ID NO: 605684 - DNA, 88 bp, Artificial Sequence
  ENSG00000175322_92 (sequence is synthesized)
agttggaagcgactttggaactgggtaacagggaaaggttggaatacttgagatggctcaaaagaagaaaggaaaatgtgggaaagtt

SEQ ID NO: 605685 - DNA, 120 bp, Artificial Sequence
  ENSG00000175322_93 (sequence is synthesized)
gcattcattttttaaatcaatacctcctgaagtcctcctgagagcgccagatatgcattcgggccacatggagcagaaaaggagggctccatcactccctgctggccatcagggtgcagt

SEQ ID NO: 605686 - DNA, 120 bp, Artificial Sequence
  ENSG00000175322_94 (sequence is synthesized)
gcaggacactcagagctcaatacttagttgtttcccagtgccccctgctagacctcctaccgaatcctgaaattctcaatttcttgatctgtctgctcctttggctgaacatgcgtcaaa

SEQ ID NO: 605687 - DNA, 120 bp, Artificial Sequence
  ENSG00000175322_95 (sequence is synthesized)
tccacgggagcatcacaaaaggattctttctcagtcatgcctgtgtgataggaccttcttccagtttctttcaaaaattgaaaaaaacatctgaatgatgcagtctacacttctatcctc

SEQ ID NO: 605688 - DNA, 120 bp, Artificial Sequence
  ENSG00000175322_96 (sequence is synthesized)
agactctgctgcagagcttcatcctgcaggacacagatgactacagggctgtttgagatggaatcttcctttctaaatcttctaggtttgatcacagtcacaaatgagcagagcagatga

SEQ ID NO: 605689 - DNA, 120 bp, Artificial Sequence
  ENSG00000175322_97 (sequence is synthesized)
aagtgaaaaatcttctggcttgtccctatttggggagagctctccagaagtattttcaagaaattagtagctattcgagggagtgaaatacagctggtttgccttcgagaaaggaaagtg

SEQ ID NO: 605690 - DNA, 120 bp, Artificial Sequence
  ENSG00000175322_98 (sequence is synthesized)
aagtgtgcttttgtttcctctcatttaacagttgcaaaaggcaaattataaaataggaatactcatgacactttcttataaatactgctaaacaaaataatctacattcatatttttgta

SEQ ID NO: 605691 - DNA, 120 bp, Artificial Sequence
  ENSG00000175322_99 (sequence is synthesized)
ctggtaaaatatctgaaagcaaaatcatgggaagatatttaagtatattatacatcatgaatttcaaaaacagagtgaagatcatgatacaggtttcttatatgaataactgtatggttt

SEQ ID NO: 605692 - DNA, 120 bp, Artificial Sequence
  ENSG00000175322_100 (sequence is synthesized)
cttatatgaataactgtatggtttatattttccttcgccttttgaaatactcaggaaatgtttgttgtacacagaatttgaataaaaattgtccaggccaggtgcagtggctcacaccta

SEQ ID NO: 605693 - DNA, 87 bp, Artificial Sequence
  ENSG00000175322_101 (sequence is synthesized)
agaccagcctgaccaatatggtgaaaccttgcctctactaaaaatgcaaacattagctgggcgtgatggcaaataggagaattgctt

SEQ ID NO: 605694 - DNA, 120 bp, Artificial Sequence
  ENSG00000175322_102 (sequence is synthesized)
ataaataaataaatataaaaataaaaatttccatgcaaacttttcttcaatatatttttgttacagttaacgtaaaattagctgttgtaatagacaaacctgaatttatcagcagtttga

SEQ ID NO: 605695 - DNA, 120 bp, Artificial Sequence
  ENSG00000175322_103 (sequence is synthesized)
aacctgaatttatcagcagtttgatcatcatgtaatatttatcattgctggcatataccacctcaacacaggctttcaaatgtcatgtgactctgcttgtggattttcctccaaatatgg

SEQ ID NO: 605696 - DNA, 120 bp, Artificial Sequence
  ENSG00000175322_104 (sequence is synthesized)
atttagggacccccataccttctattggtgtatttctcattgctaacctgtgtcttcaaatctggctatggtgcttgggaaaatttcatgcagttgtatggcaaaaaatatttggggctt

SEQ ID NO: 605697 - DNA, 120 bp, Artificial Sequence
  ENSG00000175322_105 (sequence is synthesized)
cacagagggtgttttcacaggtcaggcctgtaccaggtaaatgtcgtttccacccactcagctaggatgcttgtatggccagacctcagaacaaaaagcctggggaagggagtcttgaac

SEQ ID NO: 605698 - DNA, 120 bp, Artificial Sequence
  ENSG00000175322_106 (sequence is synthesized)
tgtgagaccagcgggaatacaagattggtctggtgaataagaccactgtttttcttacactatgtgaaaaaaatgctgttaatatgagcaacagccggttttcctgctttcatacattta

SEQ ID NO: 605699 - DNA, 120 bp, Artificial Sequence
  ENSG00000175322_107 (sequence is synthesized)
cgcaagaaaatgtgacttaaaatctaattccacagattaaacctagagaatatatttcagggaagagggcaaaaaggtcaatcaataaggctcacactgttgaccatctgaaaggggatt

SEQ ID NO: 605700 - DNA, 120 bp, Artificial Sequence
  ENSG00000175322_108 (sequence is synthesized)
cccattgaatcccaaaagcacagagtagagttgaaatattccctagacaagtgttgtcaaaaaaaatatgaaagtacattacatatgtaggaatatttagatatgaactgacactagtgc

SEQ ID NO: 605701 - DNA, 120 bp, Artificial Sequence
  ENSG00000175322_109 (sequence is synthesized)
caacactcagtcaccacgagaggccctcaagcatccaggatagcctgttcttccctcagcataaccataatgtaacaagctaaccttttcacaaagggtggctatgattataaaccgagt

SEQ ID NO: 605702 - DNA, 120 bp, Artificial Sequence
  ENSG00000175322_110 (sequence is synthesized)
atcagtaatgagttaacacaggcaacgataatatcttgctactgtaacttaaaaacgtgtttttatgtccatcaaaatcaagtagtgattgtgcataaaattttgtaatatttaagggtt

SEQ ID NO: 605703 - DNA, 120 bp, Artificial Sequence
  ENSG00000175322_111 (sequence is synthesized)
aggtatccatcaaacatgttacagaccaggcagttactccagaaatacctttaaaaggagagaattattgcaaaccacataagatatttagtctgcattaggaaatgaaaatgcaagaaa

SEQ ID NO: 605704 - DNA, 120 bp, Artificial Sequence
  ENSG00000175322_112 (sequence is synthesized)
cattctgcaatgtggaatgaacaaatatgattccttaaaatgcataaaactcagcaaggacagaaaaccacgctgtttctccactgtgctgcaaacacagtggtcaacaaaaccacatta

SEQ ID NO: 605705 - DNA, 120 bp, Artificial Sequence
  ENSG00000175322_113 (sequence is synthesized)
acattttgccatgcctttgtcaataacttttcttggcagcctcagatatagccttcacttgcaagacaagttgaaagggtcttgtaacatctttctcttttgaaaaccaatttatcaaaa

SEQ ID NO: 605706 - DNA, 120 bp, Artificial Sequence
  ENSG00000175322_114 (sequence is synthesized)
tgaaaaccttttattgttgatttcaccataaagttagtagaatctcagaaaagatacagataatgcatatgtgtctgagaaagagctcctgtaaagcccaacaccaaatacaggtcatat

SEQ ID NO: 605707 - DNA, 120 bp, Artificial Sequence
  ENSG00000175322_115 (sequence is synthesized)
catagaagtattggtgtcctgcattttgctcttgtaattatacctgcgtttattactctggggagattctcaggaccagcattgctgcattttgcttttctatattttagttgttaatag

SEQ ID NO: 605708 - DNA, 120 bp, Artificial Sequence
  ENSG00000175322_116 (sequence is synthesized)
atattgtttggttgccaacccctaaatgtggaacactttataatcgtaatatgcaaggtatgagaacacagtacttctttcatcatctgtgatgtatgattattcaccctaattttcttg

SEQ ID NO: 605709 - DNA, 120 bp, Artificial Sequence
  ENSG00000175322_117 (sequence is synthesized)
agtctgagcagtttaacggaggtatatttttattagttcactattgtttaaatttcttgtcttttcatgctaaaaggaaagttgatatttatctatatctatgtctgtatatgcatgtat

SEQ ID NO: 605710 - DNA, 120 bp, Artificial Sequence
  ENSG00000175322_118 (sequence is synthesized)
atctatagaagtagatccatttgtttgaacaaccctctgtaattaattgtgatgaattatgcctgttttagaaagtattttgtacacatatttttaataaaaattttccccccgaatatt

SEQ ID NO: 605711 - DNA, 120 bp, Artificial Sequence
  ENSG00000175322_119 (sequence is synthesized)
taaccagtatgacattaaaagagtcaggaatttgtctctcactttattttctttttgtggatcaccaattatttttggattattcattaaataaagaatcctctcactgaggttaaatct

SEQ ID NO: 605712 - DNA, 120 bp, Artificial Sequence
  ENSG00000175324_0 (sequence is synthesized)
aatatggaggagcttccggcagcccccggcggctgaaagccggggcagaagtgctggtctcggtcgggattccgggcttggtcccaccgaggcggcgactgcggtaggagggaagaggtt

SEQ ID NO: 605713 - DNA, 120 bp, Artificial Sequence
  ENSG00000175324_1 (sequence is synthesized)
ttggacgcgctggcctcccgccgctgtgcattgcagcattatttcagttcaaaatgaactatatgcctggcaccgccagcctcatcgaggacattgacaaaaagcacttggttctgcttc

SEQ ID NO: 605714 - DNA, 120 bp, Artificial Sequence
  ENSG00000175324_2 (sequence is synthesized)
gagatggaaggacacttataggctttttaagaagcattgatcaatttgcaaacttagtgctacatcagactgtggagcgtattcatgtgggcaaaaaatacggtgatattcctcgaggga

SEQ ID NO: 605715 - DNA, 120 bp, Artificial Sequence
  ENSG00000175324_3 (sequence is synthesized)
cacccctccagcaagtatccattgaagaaattctagaagaacaaagggtggaacagcagaccaagctggaagcagagaagttgaaagtgcaggccctgaaggaccgaggtctttccattc

SEQ ID NO: 605716 - DNA, 120 bp, Artificial Sequence
  ENSG00000175324_4 (sequence is synthesized)
ctcgagcagatactcttgatgagtactaatcttttgcccagaggctgttggctcttgaagagtaggggctgtcactgagtgaaagtgacatcctggccacctcacgcatttgatcacaga

SEQ ID NO: 605717 - DNA, 120 bp, Artificial Sequence
  ENSG00000175324_5 (sequence is synthesized)
ctgtagagttttgaaaagtcacttttatttttaattattttacatatgcaacatgaagaaatcgtgtaggtgggttttttttttaataacaaaatcactgtttaaagaaacagtggcata

SEQ ID NO: 605718 - DNA, 120 bp, Artificial Sequence
  ENSG00000175324_6 (sequence is synthesized)
gactccttcacacatcactgtggcaccagcaactacttctttatattgttcttcatatcccaaattagagtttacagggacagtcttcatttacttgtaaataaaatatgaatctcaaaa

SEQ ID NO: 605719 - DNA, 120 bp, Artificial Sequence
  ENSG00000175324_7 (sequence is synthesized)
tctgctgccgaaccccgaaagctgagggacggaggtcagtgactctggggtctcgggaacccggagacgaaggaagacaccgtgttccttaagagggagtatacgtttcctcgccattta

SEQ ID NO: 605720 - DNA, 120 bp, Artificial Sequence
  ENSG00000175324_8 (sequence is synthesized)
gacccttcctcccgggcgggcgcctcttccgaagaagcttgtagaatgagtcccgggcggggccggtgtgttctgagctcaatccgggcgttccgcgtcgatgtcctccacagctgcggt

SEQ ID NO: 605721 - DNA, 120 bp, Artificial Sequence
  ENSG00000175324_9 (sequence is synthesized)
acacaccgcttgcccacccagtagcctgctgctacttctgcccctcgcagcctccgccagccctctagctggtgagccccaagcgatggaactcattcttgcttccgtggatcgcggcag

SEQ ID NO: 605722 - DNA, 120 bp, Artificial Sequence
  ENSG00000175324_10 (sequence is synthesized)
cgaacacgaaagaagcccggggagggggggggcttctcccccgtccactcctgcctgcagtatttcgaagtatcagcgtgttaccggtggatggatcggaatacctagagagaggattca

SEQ ID NO: 605723 - DNA, 120 bp, Artificial Sequence
  ENSG00000175325_0 (sequence is synthesized)
gcatcccggtggggagaagggccaggcagagaaaagtagtcagaaacagagcaacaggtgaggctgaggcaggagattgagctgacactcaagccaaggaagggggaattaggaaacaat

SEQ ID NO: 605724 - DNA, 120 bp, Artificial Sequence
  ENSG00000175325_1 (sequence is synthesized)
tagaaaaaaagtaaagacagtgaaaaagtcagagacagctgcctgcacctacacacacattcagagacagagtcccagagggtggcatacacagagggagaaggggagggaacaggtgtg

SEQ ID NO: 605725 - DNA, 120 bp, Artificial Sequence
  ENSG00000175325_2 (sequence is synthesized)
gagaggagctgcggaagcagagaaatctcaagtcagagattcagggacacttggtccccgtggcgagccatggaagcagaaaggaggcgccaggctgagaagccaaagaaggggcgagtc

SEQ ID NO: 605726 - DNA, 120 bp, Artificial Sequence
  ENSG00000175325_3 (sequence is synthesized)
ggcagcaacctgttgcctgagagacacccggccactgggaccccgaccaccacggtggactcgagtgctccaccctgcagaaggctccctggtgcaggaggggggagatcaaggttctcc

SEQ ID NO: 605727 - DNA, 120 bp, Artificial Sequence
  ENSG00000175325_4 (sequence is synthesized)
ccgcaaggaggacagaggggccgcccgcactcccggcgccgccaccgcaccaccttcagcccagtgcagttggaacagctggagtcagcctttgggaggaaccagtaccccgacatctgg

SEQ ID NO: 605728 - DNA, 120 bp, Artificial Sequence
  ENSG00000175325_5 (sequence is synthesized)
gcccgagagagtcttgcccgggacactggcctcagtgaggcccgaatccaggtctggttccagaaccgcagagctaagcaacggaagcaagagcgctcactgcttcagcctctggcccat

SEQ ID NO: 605729 - DNA, 120 bp, Artificial Sequence
  ENSG00000175325_6 (sequence is synthesized)
ttcttgccagagtccactgcttgcccctattcttacgcagcaccaccaccaccagtgacctgcttccctcacccctacagccatgccctcccttcccagccctccacaggaggcgccttt

SEQ ID NO: 605730 - DNA, 120 bp, Artificial Sequence
  ENSG00000175325_7 (sequence is synthesized)
gctttgtcacaccagtctgaggactggtaccctaccttgcacccagcccctgccggccatctgccctgccccccaccccctcccatgctccccctcagccttgagccatccaagtcctgg

SEQ ID NO: 605731 - DNA, 120 bp, Artificial Sequence
  ENSG00000175325_8 (sequence is synthesized)
aactgaggtcaaacaagtaccaccaaggtgatccccagcctgcggccctcgtgaaaagacaagaaaatggggtggcttcctttccatctatgggtgaagcagatgcatggtgagggtcag

SEQ ID NO: 605732 - DNA, 120 bp, Artificial Sequence
  ENSG00000175325_9 (sequence is synthesized)
ctcagcgattagaaatttaaaaatgggagatcatggtgaattctcactggggtgattagtggaggaagtctggggaggtgagctactggaagagacagggcaagatgcctcggtggagct

SEQ ID NO: 605733 - DNA, 120 bp, Artificial Sequence
  ENSG00000175325_10 (sequence is synthesized)
gcctgctgaagggtgatattgatgaagacagttgctggtgagtggagatgattgaagggctaggaggtgagggccttcattaattgagatcacgattgaagaagatcccagctctttctg

SEQ ID NO: 605734 - DNA, 120 bp, Artificial Sequence
  ENSG00000175325_11 (sequence is synthesized)
gctgatttcagtaaggcttctgacttaagagtctacctatacatcccttccccattgcccaccccgccatctcaatcagtcactgacttttgtttattctgtcctagaaatacctttttt

SEQ ID NO: 605735 - DNA, 120 bp, Artificial Sequence
  ENSG00000175329_0 (sequence is synthesized)
agatcaacaactgtcagctcccagtcagagagaaagggcctcttcagtctgtctcaggagactgggagaaacagcataaaggaccccacaaggaagggagaggtaccctgggtcaggcgc

SEQ ID NO: 605736 - DNA, 120 bp, Artificial Sequence
  ENSG00000175329_1 (sequence is synthesized)
ttgtggagagagggcttcgcatgtaaagtgacgtcagggaaaatagaacagaaaaaaagccagggccagcccagaggcacctgagaagaatcagacccacagctcagcccagccctggca

SEQ ID NO: 605737 - DNA, 120 bp, Artificial Sequence
  ENSG00000175329_2 (sequence is synthesized)
cagagaagagacaggcctggcagcacccagggaccccctttcctcagcctccacctgcaggacagcaggagcactgatgcgctgaaggtacgttctggagtctggaagcagcagaactga

SEQ ID NO: 605738 - DNA, 120 bp, Artificial Sequence
  ENSG00000175329_3 (sequence is synthesized)
aggaagtaaacacgggtgtctgggaagacccctcaagctgcagtaaagcccaggactgaattggccacctgaggccaagggtggcactccaacctcctcctaaaggctggctagagccac

SEQ ID NO: 605739 - DNA, 120 bp, Artificial Sequence
  ENSG00000175329_4 (sequence is synthesized)
aggaaagggccagaagccagagaaagggcaaaggtggacccctgcctccaaacctcctctggagactgacctcctctttcctgtgccttattgtttctccctcttctctttgttcgccac

SEQ ID NO: 605740 - DNA, 120 bp, Artificial Sequence
  ENSG00000175329_5 (sequence is synthesized)
tgggcggtgacctcagggatcctggcctaacctggtgattgtgcaggcaactgtgtccgagaagacccttctctggaagattgaaccccaattcagccatggtgactcctttgatgtcaa

SEQ ID NO: 605741 - DNA, 120 bp, Artificial Sequence
  ENSG00000175329_6 (sequence is synthesized)
actggtaagggctgagccgtgggcacaggataccactccttccagctcttctgctgtgacctgcccatggaagtccctgtggacacgaaatcctgtttggatcatctaactggaggctct

SEQ ID NO: 605742 - DNA, 120 bp, Artificial Sequence
  ENSG00000175329_7 (sequence is synthesized)
ctgttcttcacctccacgcgccctcttgaccccaggaggttcaggggaggaagtacgccactctccactggcaccctccttggcctacacagagtcacccctgagcccctcaatgtgtgc

SEQ ID NO: 605743 - DNA, 120 bp, Artificial Sequence
  ENSG00000175329_8 (sequence is synthesized)
tgaggtgggccctgctctctgcaggggtatggagagaaatagcttggggtgctgtgaggccccgaagaagctgagcctgtccttctccattgaggcgatcctaaagaggcctgccaggag

SEQ ID NO: 605744 - DNA, 120 bp, Artificial Sequence
  ENSG00000175329_9 (sequence is synthesized)
gagtgatatggacagaccagaagggccaggtgaagagggccccggagaagctgcggcctcaggctctgggctagaaaagcctccaaaggaccagccccaggaaggaaggaagagcaagcg

SEQ ID NO: 605745 - DNA, 120 bp, Artificial Sequence
  ENSG00000175329_10 (sequence is synthesized)
gagggttcgtaccaccttcaccactgagcagctgcatgagctggagaagatcttccactttacccactacccagacgttcacatccgcagccagctggcagccaggatcaacctcccaga

SEQ ID NO: 605746 - DNA, 120 bp, Artificial Sequence
  ENSG00000175329_11 (sequence is synthesized)
agctcgggtgcagatctggttccagaatcagcgagccaagtggcggaagcaggagaagattggcaacctgggggctccacagcagctgagtgaagccagtgtggccctgcccacaaatct

SEQ ID NO: 605747 - DNA, 120 bp, Artificial Sequence
  ENSG00000175329_12 (sequence is synthesized)
ggatgtggctgggcccacgtggacatccactgctctgcgcaggctggctcctcccacgagctgttgtccatcggctcaagatcagctggcctctgcctggttccctgcctggatcaccct

SEQ ID NO: 605748 - DNA, 120 bp, Artificial Sequence
  ENSG00000175329_13 (sequence is synthesized)
cctcccagcgcacccatgggaaacacagcctgtcccaggtcttcccatccatcaaacttgcatccctgtgctatgcatccttccacctccacaccccaaatggggcagcatctgtgctac

SEQ ID NO: 605749 - DNA, 120 bp, Artificial Sequence
  ENSG00000175329_14 (sequence is synthesized)
ctccccaaatgagccactttcctctccaggtgaaggcaggtagcagatgtgccctgggcctctggggaaatcgatttcacaatccaaaaatggcccacagcccaggaagctaccctgaac

SEQ ID NO: 605750 - DNA, 120 bp, Artificial Sequence
  ENSG00000175329_15 (sequence is synthesized)
atgccagttggaaggctgcaccagactcaaaagcaaactaaacaataaaggacagctctcttctctcctggctaaagctgctctcctggttcagaagacaggctggatgagatctcaggc

SEQ ID NO: 605751 - DNA, 120 bp, Artificial Sequence
  ENSG00000175329_16 (sequence is synthesized)
cgagctctgaaatagggaggtaatcctccagcacctgtgtttcctctaacttgctgtgtgacctccagccggtcactcaccctctctggacctcatctgtaagaggagccagctggataa

SEQ ID NO: 605752 - DNA, 120 bp, Artificial Sequence
  ENSG00000175329_17 (sequence is synthesized)
gatgatttctgaagacgcttccatggtgggcactgaggcacagaggaggccaaggagaggttgtttgttcatgcatgcattcatccgtgacacatgagtacctactgaggactccataaa

SEQ ID NO: 605753 - DNA, 120 bp, Artificial Sequence
  ENSG00000175329_18 (sequence is synthesized)
cagaacgggatacagagataaacaatttgggttctgtccacgtttgtcaaaaggtggtgctggcccacctctgaaagcagaacacttgctcaacaaccttgctgttggcccaagtctaac

SEQ ID NO: 605754 - DNA, 120 bp, Artificial Sequence
  ENSG00000175329_19 (sequence is synthesized)
acattctttatgactgtgagcatctcagagtgagagaaaaatgtagaaagttttttaaattctaaacaggatttagtgtctttagttatcttgctggatgggaaagggatgttgtcattt

SEQ ID NO: 605755 - DNA, 120 bp, Artificial Sequence
  ENSG00000175329_20 (sequence is synthesized)
ctggcacaaatgaaaagtaggacggaaagctcctttcattcagtttatctttccaggatatatgaaaagggaccagctggaagactagcctcactctgtcctcgaaagcctgagctttca

SEQ ID NO: 605756 - DNA, 120 bp, Artificial Sequence
  ENSG00000175329_21 (sequence is synthesized)
ttcaactccctatttccatgcaaagacgctgggcaaaccacatgttctgtctgagcctcagttttcctatccataaaatgaaggtagccaggcctgcctcaaagagcattcaggaggctc

SEQ ID NO: 605757 - DNA, 120 bp, Artificial Sequence
  ENSG00000175329_22 (sequence is synthesized)
tgagaggacatgagagtattttgcaaagtgagggcaaggcccagtgtggagtgatattgttattccaagattccactgcaaaagtggctgctttggatgccagcccaggatgagtagttc

SEQ ID NO: 605758 - DNA, 120 bp, Artificial Sequence
  ENSG00000175329_23 (sequence is synthesized)
ctgttctcagggaggtcatccgctgagcatcccttctgcacagatgtctctgattcttgtccttgcaggtggaggacagggcctgctcccctaagctgggaagcctggaatgacctcttg

SEQ ID NO: 605759 - DNA, 120 bp, Artificial Sequence
  ENSG00000175329_24 (sequence is synthesized)
cacaagcctaaattccaggaatcttccccaaatcccagatcctctgcaatctacctgcacccctgacccacccaggagttggaccgggagttgggaagcctaggtcttagtcctacactc

SEQ ID NO: 605760 - DNA, 120 bp, Artificial Sequence
  ENSG00000175329_25 (sequence is synthesized)
cttctaatttgctgtgtaaccttaccattaatctctctgggtctcagttttctcatctgtattggaggtagcagtgctagctctgccttcaggcatgcaatatgccagaactacagacaa

SEQ ID NO: 605761 - DNA, 120 bp, Artificial Sequence
  ENSG00000175329_26 (sequence is synthesized)
cagcccacaggatgcaaaagtgctttgccatcttaaaaatgccagatcactcagagcctatgaatgtggatatcaacaccaggtctctagcaccgctggatgaaaggagaaggctagagg

SEQ ID NO: 605762 - DNA, 120 bp, Artificial Sequence
  ENSG00000175329_27 (sequence is synthesized)
ctgagggaggaaagagcagttaacaaacaaaggcagtagctcatcacttgggtagcaggtacccattttaggaccctacactcaaatgtgcaaaataaaatttctatcattttgctataa

SEQ ID NO: 605763 - DNA, 120 bp, Artificial Sequence
  ENSG00000175334_0 (sequence is synthesized)
agtggcttgaggtatccgcaggagcggccgggtggcgggaggaaccgttacgggaactgaagttgcggattaagcctgatcaagatgacaacctcccaaaagcaccgagacttcgtggca

SEQ ID NO: 605764 - DNA, 120 bp, Artificial Sequence
  ENSG00000175334_1 (sequence is synthesized)
gagcccatgggggagaagccagtggggagcctggctgggattggtgaagtcctgggcaagaagctggaggaaaggggttttgacaaggcctatgttgtccttggccagtttctggtgcta

SEQ ID NO: 605765 - DNA, 120 bp, Artificial Sequence
  ENSG00000175334_2 (sequence is synthesized)
aagaaagatgaagacctcttccgggaatggctgaaagacacttgtggcgccaacgccaagcagtcccgggactgcttcggatgccttcgagagtggtgcgacgccttcttgtgatgctct

SEQ ID NO: 605766 - DNA, 120 bp, Artificial Sequence
  ENSG00000175334_3 (sequence is synthesized)
tcaatccccagccctcatccagagtttgcagccgagtagggactcctcccctgtcctctacgaaggaaaagattgctattgtcgtactcacctccgacgtactccggggtcttttgggag

SEQ ID NO: 605767 - DNA, 120 bp, Artificial Sequence
  ENSG00000175334_4 (sequence is synthesized)
ttttctcccctaaccatttcaacttttttttggattctcgctcttgcatgcctcccccgtcctttttcccttgccagttccctggtgacagttaccagctttcctgaatggattcccggc

SEQ ID NO: 605768 - DNA, 120 bp, Artificial Sequence
  ENSG00000175334_5 (sequence is synthesized)
cccatccctcacccccaccctcactttcaatccgtttgataccatttggctccttttttggcagaacagtcactgtccttgtaaagttttttagatcaataaagtcagtggctttcatga

SEQ ID NO: 605769 - DNA, 120 bp, Artificial Sequence
  ENSG00000175334_6 (sequence is synthesized)
gtcaagcctaagtccttgagttccgggtccgggcagcagagaaaggaagtcctctccctggaggcctatctccctcagaactgcgcgagaagcgagaccttagaaggcagggcttcccgc

SEQ ID NO: 605770 - DNA, 120 bp, Artificial Sequence
  ENSG00000175334_7 (sequence is synthesized)
gaaggaccggaaaggagcgcctactaaggacgccgtcgaggtccggggcgcctcaactctatagctctaactggctagaagtgcccaacgtggaatgtttcttttttaaaggcggctctt

SEQ ID NO: 605771 - DNA, 120 bp, Artificial Sequence
  ENSG00000175334_8 (sequence is synthesized)
gaaccccgcgggcggggagcgggtgtgcgcagcgctaggtgtgcgcttcgccctgtaggtagagagaccctttggttagctttccacgccaagtggccgttccaggcaggcagtgtcgtc

SEQ ID NO: 605772 - DNA, 120 bp, Artificial Sequence
  ENSG00000175334_9 (sequence is synthesized)
ttggttcagccaaggtcacagagggagtgatagcttccgcgcagccctggctacggactctgggcatctttccactgccccgcttgcgccacctgttaggcaggatcgtttttcctctgg

SEQ ID NO: 605773 - DNA, 120 bp, Artificial Sequence
  ENSG00000175334_10 (sequence is synthesized)
gccgcggagcagggccctgattggaggccagaggggttgcggggagaaggggaggagaggggtcgcaggcgctgtggcgggccctgggggagagcttggccgcgctgcggggagggggcg

SEQ ID NO: 605774 - DNA, 120 bp, Artificial Sequence
  ENSG00000175334_11 (sequence is synthesized)
ttaagcctgatcaagatgacaacctcccaaaagcaccgagacttcgtggcagagcccatgggggagaagccagtggggagcctggctgggattggcctatgttgtccttggccagtttct

SEQ ID NO: 605775 - DNA, 120 bp, Artificial Sequence
  ENSG00000175334_12 (sequence is synthesized)
aagcggaagtggaagaaagttctagtggcttgaggtatccgcaggagcggccgggtggcgggaggaaccgttacgggaactgaagttgcgggcctatgttgtccttggccagtttctggt

SEQ ID NO: 605776 - DNA, 120 bp, Artificial Sequence
  ENSG00000175336_0 (sequence is synthesized)
atccttcactgatcataggggaaagcaaatatctcctttcctcatgggacacagaactaggcagaacaggatcaggaagcgatcaaacctaccaaggcagtctcacttctcaatgactgg

SEQ ID NO: 605777 - DNA, 120 bp, Artificial Sequence
  ENSG00000175336_1 (sequence is synthesized)
actgtgtgggtactctgctccagacatgcgtggcctcagactcatcatgataccagttgagctgctactttgctacctcctgctgcaccctgtggatgccacttcatatggaaagcagac

SEQ ID NO: 605778 - DNA, 120 bp, Artificial Sequence
  ENSG00000175336_2 (sequence is synthesized)
aaatgtcttgatgcactttcccttgtccttggaatcccagacaccctcctcagaccccttgtcctgccaatttctgcacccaaagtcactgcctggtttcagccacatggcccctctacc

SEQ ID NO: 605779 - DNA, 120 bp, Artificial Sequence
  ENSG00000175336_3 (sequence is synthesized)
caagttcttggtaagcctggctctaaggaatgccctggaggaagctggttgtcaggctgatgtttgggctctacagctacagctctaccgccagggtggtgtgaatgctacacaggtcct

SEQ ID NO: 605780 - DNA, 120 bp, Artificial Sequence
  ENSG00000175336_4 (sequence is synthesized)
catccagcatcttcgagggctccagaaaggcagaagcacagagaggaacgtgtcagtggaagccctggcctctgctctgcagctgttagccagggagcagcaaagcacaggaagggtcgg

SEQ ID NO: 605781 - DNA, 120 bp, Artificial Sequence
  ENSG00000175336_5 (sequence is synthesized)
gcgctccctcccgacagaggactgtgagaatgagaaggagcaagctgtgcacaatgtagtccagctgctgccaggagtgggaaccttctacaacctgggcacagctttgtattatgctac

SEQ ID NO: 605782 - DNA, 120 bp, Artificial Sequence
  ENSG00000175336_6 (sequence is synthesized)
tcaaaactgcctgggcaaggccagggaacgaggccgagatggggccatagatctgggatatgaccttctgatgaccatggctgggatgtcaggggggcctatgggtctagcgatcagtgc

SEQ ID NO: 605783 - DNA, 120 bp, Artificial Sequence
  ENSG00000175336_7 (sequence is synthesized)
aacatctctcagccggagaccaccaaggagggtttgagggccatctcagatgtgagtgacttggaagaaacaactactctggcttctttcatatcagaagtagtaagttcagctccctac

SEQ ID NO: 605784 - DNA, 120 bp, Artificial Sequence
  ENSG00000175336_8 (sequence is synthesized)
tgggggtgggccataatcaagagctatgacttagatcctggggctgggagtcttgagatataaaagaatgtggtaaccacagaattaataactgtactaccctgacaagctatatacatg

SEQ ID NO: 605785 - DNA, 120 bp, Artificial Sequence
  ENSG00000175336_9 (sequence is synthesized)
tcttcaaaattttaatctgatttatccaggaggaaggctgtacagtaaaacgtaagaacgtaaatgtttgggtgttgaagtcacagggtttggtttcgaatctaggctccacttgttaga

SEQ ID NO: 605786 - DNA, 120 bp, Artificial Sequence
  ENSG00000175336_10 (sequence is synthesized)
gcctcggtgatcactgaatagtaacttctttcttgaactaagatcagttttgaagtttctaaaggagatagaatgattttaacctcaatgagttgccctgtaaatttaaaatgatacaat

SEQ ID NO: 605787 - DNA, 80 bp, Artificial Sequence
  ENSG00000175336_11 (sequence is synthesized)
aacctcaatgagttgccctgtaaatttaaaatgatacaatgaatctaaaatgcttatcacagtactttcaataaatagct

SEQ ID NO: 605788 - DNA, 120 bp, Artificial Sequence
  ENSG00000175336_12 (sequence is synthesized)
gcaacatggcgaaaccccgtctctacaataaatacaaaaaattatcctggcggagttatgcacgcttgtagtcccaactacctgggaggctgaggcgggagaatcacctgagcctgggag

SEQ ID NO: 605789 - DNA, 87 bp, Artificial Sequence
  ENSG00000175336_13 (sequence is synthesized)
cttgtagtcccaactacctgggaggctgaggcgggagaatcacctgagcctgggaggtcgaggctgcagcgagccgagatcgcgcca

SEQ ID NO: 605790 - DNA, 120 bp, Artificial Sequence
  ENSG00000175344_0 (sequence is synthesized)
gcctctgtggccgcaggcgcaggcccgggcgacagccgagacgtggagcgcgccggctcgctgcagctccgggactcaacatgcgctgctcgccgggaggcgtctggctggcgctggccg

SEQ ID NO: 605791 - DNA, 120 bp, Artificial Sequence
  ENSG00000175344_1 (sequence is synthesized)
cgtcgctcctgcacgtgtccctgcaaggcgagttccagaggaagctttacaaggagctggtcaagaactacaatcccttggagaggcccgtggccaatgactcgcaaccactcaccgtct

SEQ ID NO: 605792 - DNA, 120 bp, Artificial Sequence
  ENSG00000175344_2 (sequence is synthesized)
acttctccctgagcctcctgcagatcatggacgtggatgagaagaaccaagttttaaccaccaacatttggctgcaaatgtcttggacagatcactatttacagtggaatgtgtcagaat

SEQ ID NO: 605793 - DNA, 120 bp, Artificial Sequence
  ENSG00000175344_3 (sequence is synthesized)
atccaggggtgaagactgttcgtttcccagatggccagatttggaaaccagacattcttctctataacagtgctgatgagcgctttgacgccacattccacactaacgtgttggtgaatt

SEQ ID NO: 605794 - DNA, 120 bp, Artificial Sequence
  ENSG00000175344_4 (sequence is synthesized)
cttctgggcattgccagtacctgcctccaggcatattcaagagttcctgctacatcgatgtacgctggtttccctttgatgtgcagcactgcaaactgaagtttgggtcctggtcttacg

SEQ ID NO: 605795 - DNA, 120 bp, Artificial Sequence
  ENSG00000175344_5 (sequence is synthesized)
gaggctggtccttggatctgcagatgcaggaggcagatatcagtggctatatccccaatggagaatgggacctagtgggaatccccggcaagaggagtgaaaggttctatgagtgctgca

SEQ ID NO: 605796 - DNA, 120 bp, Artificial Sequence
  ENSG00000175344_6 (sequence is synthesized)
aagagccctaccccgatgtcaccttcacagtgaccatgcgccgcaggacgctctactatggcctcaacctgctgatcccctgtgtgctcatctccgccctcgccctgctggtgttcctgc

SEQ ID NO: 605797 - DNA, 120 bp, Artificial Sequence
  ENSG00000175344_7 (sequence is synthesized)
ttcctgcagattccggggagaagatttccctggggataacagtcttactctctcttaccgtcttcatgctgctcgtggctgagatcatgcccgcaacatccgattcggtaccattgatag

SEQ ID NO: 605798 - DNA, 120 bp, Artificial Sequence
  ENSG00000175344_8 (sequence is synthesized)
cccagtacttcgccagcaccatgatcatcgtgggcctctcggtggtggtgacagtgatcgtgctgcagtaccaccaccacgaccccgacgggggcaagatgcccaagtggaccagagtca

SEQ ID NO: 605799 - DNA, 120 bp, Artificial Sequence
  ENSG00000175344_9 (sequence is synthesized)
tccttctgaactggtgcgcgtggttcctgcgaatgaagaggcccggggaggacaaggtgcgcccggcctgccagcacaagcagcggcgctgcagcctggccagtgtggagatgagcgccg

SEQ ID NO: 605800 - DNA, 120 bp, Artificial Sequence
  ENSG00000175344_10 (sequence is synthesized)
tggcgccgccgcccgccagcaacgggaacctgctgtacatcggcttccgcggcctggacggcgtgcactgtgtcccgacccccgactctggggtagtgtgtggccgcatggcctgctccc

SEQ ID NO: 605801 - DNA, 120 bp, Artificial Sequence
  ENSG00000175344_11 (sequence is synthesized)
ccacgcacgatgagcacctcctgcacggcgggcaaccccccgagggggacccggacttggccaagatcctggaggaggtccgctacattgccaaccgcttccgctgccaggacgaaagcg

SEQ ID NO: 605802 - DNA, 120 bp, Artificial Sequence
  ENSG00000175344_12 (sequence is synthesized)
aggcggtctgcagcgagtggaagttcgccgcctgtgtggtggaccgcctgtgcctcatggccttctcggtcttcaccatcatctgcaccatcggcatcctgatgtcggctcccaacttcg

SEQ ID NO: 605803 - DNA, 120 bp, Artificial Sequence
  ENSG00000175344_13 (sequence is synthesized)
tggaggccgtgtccaaagactttgcgtaaccacgcctggttctgtacatgtggaaaactcacagatgggcaaggcctttggcttggcgagatttgggggtgctaatccaggacagcatta

SEQ ID NO: 605804 - DNA, 120 bp, Artificial Sequence
  ENSG00000175344_14 (sequence is synthesized)
cacgccacaactccagtgttcccttctggctgtcagtcgtgttgcttacggtttctttgttactttaggtagtagaatctcagcactttgtttcatattctcagatgggctgatagatat

SEQ ID NO: 605805 - DNA, 120 bp, Artificial Sequence
  ENSG00000175344_15 (sequence is synthesized)
ccttggcacatccgtaccatcggtcagcagggccactgagtagtcattttgcccattagcccactgcctggaaagcccttcggagagctccccatggctcctcaccaccgagacagttgg

SEQ ID NO: 605806 - DNA, 120 bp, Artificial Sequence
  ENSG00000175344_16 (sequence is synthesized)
ttttgcatgtctgcatgaaggtctacctgaaaattcaacatttgctttttgcttgtgtacaaacccagattgaagctaaaataaaccagactcactaaatcctttccaataattgactgg

SEQ ID NO: 605807 - DNA, 120 bp, Artificial Sequence
  ENSG00000175344_17 (sequence is synthesized)
tggaaggaaaacaaaaaacaaaaactaaaaacctcttagcttttctgcaattcaactttttatttttatttttatttctatcaaagacggtagagagaaacagcttgatgctgtttctac

SEQ ID NO: 605808 - DNA, 120 bp, Artificial Sequence
  ENSG00000175344_18 (sequence is synthesized)
attaaaaaaaaaaaaaaaagacagactgttggtcttactaaggatgtttttaccagcctgcctgacttctgcaaacctaccctgtcaaggagatcaaagggacgcaggtttctgtttatt

SEQ ID NO: 605809 - DNA, 120 bp, Artificial Sequence
  ENSG00000175344_19 (sequence is synthesized)
ctgaacaagggccaggccccgcggagtgtctttggtggatcccagataactcctaggtgctgctctcagacactgaggagttgagcaaatctgttctattctgcagaacccacaggacaa

SEQ ID NO: 605810 - DNA, 120 bp, Artificial Sequence
  ENSG00000175344_20 (sequence is synthesized)
ataagagttctactagaattaacagcccaaaagaatagctacagctaagtgaagccacttacgtgggctttaaaaaaataatgtgttagctgattcacatgcactggagttaattagtct

SEQ ID NO: 605811 - DNA, 120 bp, Artificial Sequence
  ENSG00000175344_21 (sequence is synthesized)
tagaaatgtgtgcatccatacaaatgcacaacataaagtgaacatattcctaggccctttctgcctgtgtcagggccaggaagtagaggctgggaactcttctggtccccagtatggcag

SEQ ID NO: 605812 - DNA, 120 bp, Artificial Sequence
  ENSG00000175344_22 (sequence is synthesized)
gcgccagggaggggatggtgtggcccatcccttctctggatacctggccagtggcaggcagcagggaggagctggccgaccctcagtgactgacaagccagcaattctgagttctggcct

SEQ ID NO: 605813 - DNA, 120 bp, Artificial Sequence
  ENSG00000175344_23 (sequence is synthesized)
ttgggagtctgcctgctccaagccagtccaccccagctgcagccccaaaagctggctcaaagtccttgggtggattcactggagatgggcaacttaaaacaagagaaactttaattttta

SEQ ID NO: 605814 - DNA, 72 bp, Artificial Sequence
  ENSG00000175344_24 (sequence is synthesized)
ggagatgggcaacttaaaacaagagaaactttaatttttaaacctaagtgatgatacagctcttcccttaga

SEQ ID NO: 605815 - DNA, 88 bp, Artificial Sequence
  ENSG00000175344_25 (sequence is synthesized)
atttcttattctttaatgagatcagagggtaattcaccaagaaagacctctcctgttccattgtgtcatccaacaactgctcagagct

SEQ ID NO: 605816 - DNA, 120 bp, Artificial Sequence
  ENSG00000175344_26 (sequence is synthesized)
tctcctgttccattgtgtcatccaacaactgctcagagctcaaaattatagaaggcttctgagcccctagagatttttaatttgcttctaatccctgaggtgggaacatcatgagggaag

SEQ ID NO: 605817 - DNA, 120 bp, Artificial Sequence
  ENSG00000175344_27 (sequence is synthesized)
atttgattttcagagttaaataaattgtatgtgcttttccagccatctggctcactcatttctgggtaatgcacatgactttgtttgcactggaggaagatggaagcttgcgtgtgtgcg

SEQ ID NO: 605818 - DNA, 120 bp, Artificial Sequence
  ENSG00000175344_28 (sequence is synthesized)
gtgtgtgtgtgtgtgtaagtgtgaggtaccttgtgtgtgacaagagacctcacttacgagaaagttggtggatcaggacattccagcctcaggcggcttggagcaggatcattcctcagc

SEQ ID NO: 605819 - DNA, 120 bp, Artificial Sequence
  ENSG00000175344_29 (sequence is synthesized)
aggcattccttccacatgctatggatgaaccatgcacaagattttcggtttttttttttttttctgttacagtgtctttagaaacaagtagaagtgttttgatatataaaaggaatgctt

SEQ ID NO: 605820 - DNA, 120 bp, Artificial Sequence; identical to SEQ ID NO: 535102
  ENSG00000175344_30 (sequence is synthesized)

SEQ ID NO: 605821 - DNA, 120 bp, Artificial Sequence
  ENSG00000175344_31 (sequence is synthesized)
tctcaaataacttctctgtcctttaataaagtaataataaggaatagatgtgcacatagttagaaaagtatgagtggttaaaaacaacagtctcccatactgcctgttttctctctcaga

SEQ ID NO: 605822 - DNA, 120 bp, Artificial Sequence; identical to SEQ ID NO: 535104
  ENSG00000175344_32 (sequence is synthesized)

SEQ ID NO: 605823 - DNA, 120 bp, Artificial Sequence; identical to SEQ ID NO: 535105
  ENSG00000175344_33 (sequence is synthesized)

SEQ ID NO: 605824 - DNA, 120 bp, Artificial Sequence; identical to SEQ ID NO: 535106
  ENSG00000175344_34 (sequence is synthesized)

SEQ ID NO: 605825 - DNA, 120 bp, Artificial Sequence; identical to SEQ ID NO: 535107
  ENSG00000175344_35 (sequence is synthesized)

SEQ ID NO: 605826 - DNA, 120 bp, Artificial Sequence; identical to SEQ ID NO: 535108
  ENSG00000175344_36 (sequence is synthesized)

SEQ ID NO: 605827 - DNA, 120 bp, Artificial Sequence; identical to SEQ ID NO: 535109
  ENSG00000175344_37 (sequence is synthesized)

SEQ ID NO: 605828 - DNA, 120 bp, Artificial Sequence; identical to SEQ ID NO: 535110
  ENSG00000175344_38 (sequence is synthesized)

SEQ ID NO: 605829 - DNA, 120 bp, Artificial Sequence; identical to SEQ ID NO: 535111
  ENSG00000175344_39 (sequence is synthesized)

SEQ ID NO: 605830 - DNA, 120 bp, Artificial Sequence; identical to SEQ ID NO: 535112
  ENSG00000175344_40 (sequence is synthesized)

SEQ ID NO: 605831 - DNA, 120 bp, Artificial Sequence; identical to SEQ ID NO: 535113
  ENSG00000175344_41 (sequence is synthesized)

SEQ ID NO: 605832 - DNA, 120 bp, Artificial Sequence; identical to SEQ ID NO: 535114
  ENSG00000175344_42 (sequence is synthesized)

SEQ ID NO: 605833 - DNA, 120 bp, Artificial Sequence; identical to SEQ ID NO: 535115
  ENSG00000175344_43 (sequence is synthesized)

SEQ ID NO: 605834 - DNA, 120 bp, Artificial Sequence
  ENSG00000175344_44 (sequence is synthesized)
atttggctatcattttcaatagaatgatttattccactttattttctattttatcccattgtataagaaagtagttggtttttatgtatgaatgttataatcaaccacaaattgtgattc

SEQ ID NO: 605835 - DNA, 120 bp, Artificial Sequence; identical to SEQ ID NO: 535117
  ENSG00000175344_45 (sequence is synthesized)

SEQ ID NO: 605836 - DNA, 120 bp, Artificial Sequence; identical to SEQ ID NO: 535118
  ENSG00000175344_46 (sequence is synthesized)

SEQ ID NO: 605837 - DNA, 120 bp, Artificial Sequence; identical to SEQ ID NO: 535119
  ENSG00000175344_47 (sequence is synthesized)

SEQ ID NO: 605838 - DNA, 120 bp, Artificial Sequence; identical to SEQ ID NO: 535120
  ENSG00000175344_48 (sequence is synthesized)

SEQ ID NO: 605839 - DNA, 120 bp, Artificial Sequence; identical to SEQ ID NO: 535121
  ENSG00000175344_49 (sequence is synthesized)

SEQ ID NO: 605840 - DNA, 120 bp, Artificial Sequence
  ENSG00000175344_50 (sequence is synthesized)
gcctgccgtggtatatttctggattttgctcatcaggcaagttaggtcctcgagcccttctagagtccattttaatgacacttttaaaaataaaattaattccatccacttttcaacata

SEQ ID NO: 605841 - DNA, 120 bp, Artificial Sequence
  ENSG00000175344_51 (sequence is synthesized)
atggccagatttggaaaccagacattcttctctataacagcagttatgaccaacagcaggaagtgctggcctatgggatgcactgctggagcccacagtttggacccacatcctcgtcta

SEQ ID NO: 605842 - DNA, 120 bp, Artificial Sequence
  ENSG00000175344_52 (sequence is synthesized)
ctgggtaagcgccccagtgtctggcgggagtctgagactggagaccttctgctgagatcagctctggagggctcacagcagacagcgcaggactccatcagggttcctggggattccctg

SEQ ID NO: 605843 - DNA, 120 bp, Artificial Sequence
  ENSG00000175344_53 (sequence is synthesized)
aggtccctgattcgggctccgtgctggacggctgtgtaatcctgagaatactggaggaccctcagaggatgggggatgcacagggagggggccagctccattctgccttgagaggcctgt

SEQ ID NO: 605844 - DNA, 120 bp, Artificial Sequence
  ENSG00000175344_54 (sequence is synthesized)
gctttcttccctcctgccaccccacctgttcctcaatggcgactggtcatcgagggaacaatttagcttagtatcagcttgcatttgtatgttacagtacccagtgtaattcttacgatc

SEQ ID NO: 605845 - DNA, 120 bp, Artificial Sequence
  ENSG00000175344_55 (sequence is synthesized)
gagtgcttcctgagtcttcacctgcctcctttcgtcctgactctgcgtttcaccatcagggctcaggatttgcattgtcgggtgtcggaagcactatccctgtgacaaaataaaaattca

SEQ ID NO: 605846 - DNA, 120 bp, Artificial Sequence
  ENSG00000175344_56 (sequence is synthesized)
aatctgaaaacattcctttagaaattctgagaggttcccatgcagctgcacagtattgctttatggaaataaatattccacatttctccagcctggttcttagtccagtggaaataagtg

SEQ ID NO: 605847 - DNA, 120 bp, Artificial Sequence
  ENSG00000175344_57 (sequence is synthesized)
aattccttttttcgaagtattcttacagtgaaaacttctaaggcaaaacagttattcatttggctagaagtaacccatctactgcaggaggagaaggctcggggacatgcagagggttgg

SEQ ID NO: 605848 - DNA, 120 bp, Artificial Sequence
  ENSG00000175344_58 (sequence is synthesized)
aattaactttaatgataccatctgaatgtgttcatggtgacagcagaaccttaaatgtgagttttatgctcttcacagtcattttggaaaggatttttgaattcccattttcattatatt

SEQ ID NO: 605849 - DNA, 120 bp, Artificial Sequence
  ENSG00000175344_59 (sequence is synthesized)
ttataaatagcaattcagttataataaatgtctggaattctctttggttttgcacttacctaataatcgcttatgagaaatattagtagccaaggaagtgaagtgctgctaatgtcattg

SEQ ID NO: 605850 - DNA, 120 bp, Artificial Sequence
  ENSG00000175344_60 (sequence is synthesized)
attcctactcccagcaaccactgatctgctttctgtctctagaaattctctgtctgtctcgggccattatttcgtagaaatgggctcatgaagttacaaagctttccaactaactggcag

SEQ ID NO: 605851 - DNA, 120 bp, Artificial Sequence
  ENSG00000175344_61 (sequence is synthesized)
caatgactcgcaaccactcaccgtctacttctccctgagcctcctgcagatcatggacgtggatgagaagaaccaagttttaaccaccaacatttggctgcaaatgaatatccaggggtg

SEQ ID NO: 605852 - DNA, 120 bp, Artificial Sequence
  ENSG00000175344_62 (sequence is synthesized)
atctgttgctatgaagaagatactgccgggtgcagtggcattatgtgacatttgcacagccagaaacaaaactgtagcctaacagaagaggtcaagagcacagtttgaggagtgccaaga

SEQ ID NO: 605853 - DNA, 120 bp, Artificial Sequence
  ENSG00000175344_63 (sequence is synthesized)
ggataattttatcttttaaatgctttggctttgaaagttaatgattcaggccatggaattcaaaatggacttggcagagtgtatcgtatgagcttgagatgtgcactgggggacgtgtag

SEQ ID NO: 605854 - DNA, 120 bp, Artificial Sequence
  ENSG00000175344_64 (sequence is synthesized)
ccactggatgcaggcacactcactgccctgcagcctcccaggagagctggctcaggctttctggtgccttcccagaggggtggggttgtgcgagttttgaagagaatcttacagaccctt

SEQ ID NO: 605855 - DNA, 120 bp, Artificial Sequence
  ENSG00000175344_65 (sequence is synthesized)
tgacagatgagactgggaaaggctaaacatgtgaagtgacataaccacttacttactcattgtacatcgttgggccagtttattagcctctttgaacctcagtttgttggtctgtaaagt

SEQ ID NO: 605856 - DNA, 120 bp, Artificial Sequence
  ENSG00000175344_66 (sequence is synthesized)
gaggggattatactcatttcaccggaccctgaaaggcccaagtgagatgacttgtctcatgagccttgtatggacggcccaactcacccaaggtttcacctggggccatatgtccctgct

SEQ ID NO: 605857 - DNA, 120 bp, Artificial Sequence
  ENSG00000175344_67 (sequence is synthesized)
ccttactgatcataaaaaaccctccaaggtcagcagacccaacctttccaggacacgcagagtgccgcctgcttgtaaagtacaatgggaaacaaagggttatttttatagctgcaatga

SEQ ID NO: 605858 - DNA, 120 bp, Artificial Sequence
  ENSG00000175344_68 (sequence is synthesized)
aactggtcttgtgcttccctgttcttgtccccagacctgtttgttgcagttatctttgataagatgttataaaaagatgaccaagaatgaaagctctgcagatacgaactgcacaattta

SEQ ID NO: 605859 - DNA, 120 bp, Artificial Sequence
  ENSG00000175344_69 (sequence is synthesized)
tactgtggtattgcaggatcacaggtggttaaagcagaggctcagccccaggacgccaccccttgtcactctgggtgaagtccatgtccttgtcttcctccttgtagggaccctgttttc

SEQ ID NO: 605860 - DNA, 120 bp, Artificial Sequence
  ENSG00000175344_70 (sequence is synthesized)
ctgttttccctccctccgtgatccttgttaccatttgttgttatatgttgttataagtgtatcattattgtgttgtagaatcctacctcatccccccccaccaacacacacacacacaca

SEQ ID NO: 605861 - DNA, 120 bp, Artificial Sequence
  ENSG00000175344_71 (sequence is synthesized)
cacacacacacactttttattctaggagctcaggagcaatattaatttccactgcacacatcaggcaagcataatgctggggacaggaggtgttccataaatgttgcatgaacgaatgaa

SEQ ID NO: 605862 - DNA, 120 bp, Artificial Sequence
  ENSG00000175344_72 (sequence is synthesized)
tgaaaactcggctggaccatggcttgtagcaatggcttgtgcacttcactcaagattcttgacttgatcctttgggcagtgcagttggaggagggtgatctgatcatatggatggtcaga

SEQ ID NO: 605863 - DNA, 120 bp, Artificial Sequence
  ENSG00000175344_73 (sequence is synthesized)
aagtccggtgtgaagatgagtagaggacagcctctgtgtgtgtgcacctgcgtgtgcataggggcagcaggctgcacagtgggaatgggaaggaggtgagggaccttgtcactgcaaaca

SEQ ID NO: 605864 - DNA, 120 bp, Artificial Sequence
  ENSG00000175344_74 (sequence is synthesized)
gagagccaagagactcagaccgtgtgtggcccggacaggtgccaagaggagggagattgttctgggagcatggttcctcatgccctcctctctccctcttgagtctttgtggggggttcc

SEQ ID NO: 605865 - DNA, 120 bp, Artificial Sequence
  ENSG00000175344_75 (sequence is synthesized)
cctaacgggtatccctgcatgctcaggtggtggtggctgctgcttgttgattacagtttgaaaagctgcacttggtcccaagttgccacacaccactgaaattcagtgttctctaatggg

SEQ ID NO: 605866 - DNA, 120 bp, Artificial Sequence
  ENSG00000175344_76 (sequence is synthesized)
gtttctgttagaatgttggaaagaagaaagccttttaattagattcgtagtaattgagctcccaaaccacagaagcctttctctcagcagatgaagacacaaatgcaattaaaagaagga

SEQ ID NO: 605867 - DNA, 120 bp, Artificial Sequence
  ENSG00000175344_77 (sequence is synthesized)
aaggcacctaaatggaacccttgctaattttaagtccattaaaaacaacaactccttaataagttgaggcaacagatacacgttctgaagagttttaacagtgcttcccaataatattgg

SEQ ID NO: 605868 - DNA, 120 bp, Artificial Sequence
  ENSG00000175344_78 (sequence is synthesized)
agcttgaactggaactggagtgctccagccacttaaatggatagctctgttggggatcatttgctcagtgcagagtacagagacatgttagctctacagcttttcccaccaaaaactcct

SEQ ID NO: 605869 - DNA, 120 bp, Artificial Sequence
  ENSG00000175344_79 (sequence is synthesized)
ggcacattttattaggaaaatgggatatattttttcctgtaactgaataaatgttcagcatcttgtggacattgcctctggcctggggtcccctgagacatcatcccatgtccctcccca

SEQ ID NO: 605870 - DNA, 120 bp, Artificial Sequence
  ENSG00000175344_80 (sequence is synthesized)
ggcagccctctcctctctgtgggatttgccccacctggcccatctcaccccagaggtgcccaacatgtgagcaactgggctggggcactgatgtccctgtcaactgcttacatgctgaac

SEQ ID NO: 605871 - DNA, 120 bp, Artificial Sequence
  ENSG00000175344_81 (sequence is synthesized)
gcattttcattttaatgagaggcagcattcgtttttcatttgcatccctgctcactgacatgccccagcagatgccacgttctttctgcctttgggtctttttttttttgaaacttccca

SEQ ID NO: 605872 - DNA, 120 bp, Artificial Sequence
  ENSG00000175344_82 (sequence is synthesized)
tcggtgaaccaggccaagtagattctattgcgggagcttgaggtttcagcttctgggaacatcttcacaggggcattaattaatattttccctggagagggtgtcaattgctaattcaca

SEQ ID NO: 605873 - DNA, 120 bp, Artificial Sequence
  ENSG00000175344_83 (sequence is synthesized)
agaattcactcatttgcctcctttcactgggcttggtcagccgtactaaaacgcaagttgcctcccatttggaaaggccagtcttgacgggtctcttctctgtacgtcctgtgctggagc

SEQ ID NO: 605874 - DNA, 120 bp, Artificial Sequence
  ENSG00000175344_84 (sequence is synthesized)
aaagtcacagctggtacactagccaagctccctgattagtgcataggcttagctggaggcagaactcagggaggtgttttggaaatgtaggaaaataagctctggagtcagaaagatcca

SEQ ID NO: 605875 - DNA, 120 bp, Artificial Sequence
  ENSG00000175344_85 (sequence is synthesized)
agtttgaatggctgcttctaaagtcacctcatctttctcacctttagtttatcacctgggtaggctttaccttcaggtgtatttcaagagcccgatgtgcctcctagaagttagaggttg

SEQ ID NO: 605876 - DNA, 120 bp, Artificial Sequence
  ENSG00000175344_86 (sequence is synthesized)
agagaaaagcccagatctgcagggacaaggcagagtcatggccctcatggcaccactcacacagggtgcagcagctccacacagggccatggcccctttcctgggggagggaggcataac

SEQ ID NO: 605877 - DNA, 120 bp, Artificial Sequence
  ENSG00000175344_87 (sequence is synthesized)
atacttgtatttgtttaaaagcatatatattttggaaacaaacctgactttaaaaacttgtattttcacctacttttatgtttttttttaagcatatgaattatttaaaaatacaaagat

SEQ ID NO: 605878 - DNA, 120 bp, Artificial Sequence
  ENSG00000175344_88 (sequence is synthesized)
aaatagctaaatcattagcaggcatcatttctggatggtaaggttgcagagttttaattttcttctttatacttttccatcttttttaagtgctgtataataaatgtgtcttactttgga

SEQ ID NO: 605879 - DNA, 120 bp, Artificial Sequence
  ENSG00000175344_89 (sequence is synthesized)
ataaatagaaaagcttaactctagggaaatgctgcttgcatatattggaagtgcttggtgcattctaatttccacacacaacaacgctctcgacagtcagatccccatgtgaataattgt

SEQ ID NO: 605880 - DNA, 120 bp, Artificial Sequence
  ENSG00000175344_90 (sequence is synthesized)
ctcattctttcttttgtaaaccatattatttatgctgctgctttttttttttttttgaaggatgagaagaaccaagttttaaccaccaacatttggctgcaaatggtaagttaagagaat

SEQ ID NO: 605881 - DNA, 120 bp, Artificial Sequence
  ENSG00000175344_91 (sequence is synthesized)
gacaatctctcccatgggctgcaagatcttgcacccaagattcttgttctgatacctgagatgcttgcttctgagaggtcctgtttaggaaaaaaaaccaaaaaaacaaaaggccatggc

SEQ ID NO: 605882 - DNA, 120 bp, Artificial Sequence
  ENSG00000175344_92 (sequence is synthesized)
tgtcacaccaactccacacctgccaacaatgaatgctggctgtatgacactacagtctgcagtgctcaacacatgcacaagatcaacacataggacaaggtaatgtggggacacttcaga

SEQ ID NO: 605883 - DNA, 120 bp, Artificial Sequence
  ENSG00000175344_93 (sequence is synthesized)
agcacttcaggcaagacaagaagatacagggctgtgtgtagatgtccacaacctgcaccacagccagtccccaggactcagaagctccatccctgccctctgtggcctccggagctgcat

SEQ ID NO: 605884 - DNA, 120 bp, Artificial Sequence
  ENSG00000175344_94 (sequence is synthesized)
gtttgaatcaggtggagtgttccgaaaccagaggccctcgtactttgtgctctagcaatgcttataagaatcttgaaatgctacctatcatttgtagatttttaacttgacatctgcaat

SEQ ID NO: 605885 - DNA, 120 bp, Artificial Sequence
  ENSG00000175344_95 (sequence is synthesized)
actaatctaaatttgattaattgcaaatgatgccacttaacatccaattgtaaatattaacactgaaaaatgaaacagtcagtctctattttaaatggaattcaaaataccataataatt

SEQ ID NO: 605886 - DNA, 120 bp, Artificial Sequence
  ENSG00000175344_96 (sequence is synthesized)
tggtgcccatctcattcaaacaccatatgaacaagcctttttttaaactgtcagatatttaacgtagtcccttttttctctttgcacatgcatttctattctagtttctatacggaattt

SEQ ID NO: 605887 - DNA, 120 bp, Artificial Sequence
  ENSG00000175344_97 (sequence is synthesized)
gggtcctcttctgtcccgtgcgtagtttgttatttcgctcttcacgataaatcttgctactgctcacgctttgggtccgcaccacctttaagagctgtaacactccgtgaggaggtccac

SEQ ID NO: 605888 - DNA, 120 bp, Artificial Sequence
  ENSG00000175344_98 (sequence is synthesized)
gaggaggtccacggcttcgtttttgaagttagtgagaccacgaacccactgtcaggcagaaacatctgaaggaacaaacttcggacataacatctttaagagctgtaacactcactgtga

SEQ ID NO: 605889 - DNA, 84 bp, Artificial Sequence
  ENSG00000175344_99 (sequence is synthesized)
ttttcagcggaaactcttccttcaagcaccatctcttcagcttaaacctatctatctgttctaactttttttcttacagacaga

SEQ ID NO: 605890 - DNA, 120 bp, Artificial Sequence
  ENSG00000175344_100 (sequence is synthesized)
tgtctcaaaaaaaaaaaaaaaaagatatatatgtgaagcacaaaccaagtgtgggtccgcttcaagaggctggaactagagctttggacacagcgagtgaaaaccctgccccatgaggct

SEQ ID NO: 605891 - DNA, 120 bp, Artificial Sequence
  ENSG00000175344_101 (sequence is synthesized)
gcgagtgaaaaccctgccccatgaggctcacagggtggcagcgtgcctcacccaccctctgttcttctagacaccatgaaaatgtcacatctgccgatgtcctccagagttgtttacagg

SEQ ID NO: 605892 - DNA, 120 bp, Artificial Sequence
  ENSG00000175344_102 (sequence is synthesized)
tttcatttggttaagagcttggttttatatacattgtgagaaaaatcaccagttcggtgtgaaaattgaaatgggggtagacactggcccttccaagctgtgcccggggaagacctccca

SEQ ID NO: 605893 - DNA, 120 bp, Artificial Sequence
  ENSG00000175344_103 (sequence is synthesized)
ggccagtcccagtggtgctctcaggcagcgtgtggggttgtgaggacagacaggggcccctctcaaggtctttgctgctccatcaaagacagaccccagggcttcgggaaatccacagcc

SEQ ID NO: 605894 - DNA, 120 bp, Artificial Sequence
  ENSG00000175344_104 (sequence is synthesized)
ggtagaaatcattcccaaacccatatcttctgagtatgaggttcagaaaggttgaatgttgtatctaaggtcacatagctagttgagtagcaaacgtaagacctgaaatcaggtctcctg

SEQ ID NO: 605895 - DNA, 120 bp, Artificial Sequence
  ENSG00000175344_105 (sequence is synthesized)
actgcatattttctttttcctgctacgtgaaactacttctcaataatattttacagagaatatgagagataattgtgccaagttaaatttttcagtttgtgttgatgcttttaaaattct

SEQ ID NO: 605896 - DNA, 120 bp, Artificial Sequence
  ENSG00000175344_106 (sequence is synthesized)
gggtcctaaacttgtctccataagagactcctttgggactctggtaagtggcatggaatgtcccctggaaaatgcacacgcccatacatagggaaaacgtgcattccacgacattccccc

SEQ ID NO: 605897 - DNA, 120 bp, Artificial Sequence
  ENSG00000175344_107 (sequence is synthesized)
cagcgcctccctttcttttgagtgtcaggttaggagccctcgttagacagaattgaggccttcttgtctgtttttgtctgaggaaccgctgtgtgtttatgttttagggataacagtctt

SEQ ID NO: 605898 - DNA, 120 bp, Artificial Sequence
  ENSG00000175344_108 (sequence is synthesized)
tacagggatactccacatttaaacatgaaataaagaacccagtgaggctggggaattgccagagaagtgttcgtcagtgacttacagggtggtatttacctcaacacacttatttcggaa

SEQ ID NO: 605899 - DNA, 120 bp, Artificial Sequence
  ENSG00000175344_109 (sequence is synthesized)
gaaaaacagctttgcaaagtggtcacgtcatcacaagagatgtggtaatctgatgttggaagcctgaagtgcttcaagcttcaagtttacctggtgtctcatggatatcctgggattgca

SEQ ID NO: 605900 - DNA, 120 bp, Artificial Sequence
  ENSG00000175344_110 (sequence is synthesized)
ggccccagggacatcagctttgctgccctctgttgatggaaattcagtctgggcaatcctttgacccccatctctccagaggtggttggtctgctcaggctgccgtgacaaaatactatg

SEQ ID NO: 605901 - DNA, 120 bp, Artificial Sequence
  ENSG00000175344_111 (sequence is synthesized)
gacttaggggcttaaataactaacagaaatttattttctcacagttgcactgctgaaagtccaagaccaaggggccattagggatggtttaacctgagacctctccccctggcttgcaga

SEQ ID NO: 605902 - DNA, 120 bp, Artificial Sequence
  ENSG00000175344_112 (sequence is synthesized)
caaccactttcacaatgctttgtcctcccctggtagttcctctgtgcacctgcatccctggtgtctctctgtgtgtccaaattttctcttcttcattaaaagaacaccagtcagattgga

SEQ ID NO: 605903 - DNA, 120 bp, Artificial Sequence
  ENSG00000175344_113 (sequence is synthesized)
gagagagaatttacatatcatgcattttaagtacatgattcaacaacttttagtatatttacagacttatgcaaccattaccacagtctagttttagaacattcccatcaccccacaaag

SEQ ID NO: 605904 - DNA, 120 bp, Artificial Sequence
  ENSG00000175344_114 (sequence is synthesized)
caaagcatacttaaaggaacttcaggggacaaaatgtgtatcttttcccaactcggttgtggggtggggtccttgtgtgcaaggctgtggaggcccttcctgcgtgcactctttctgtaa

SEQ ID NO: 605905 - DNA, 120 bp, Artificial Sequence
  ENSG00000175344_115 (sequence is synthesized)
ctcagtaacagaagtttgcagagtgccagccctgccccaggaacacctggacaccgagtctgtgcctgtcttcttgtgccatgcagccttcctctgggcagggaagagcacatgagtgta

SEQ ID NO: 605906 - DNA, 120 bp, Artificial Sequence
  ENSG00000175344_116 (sequence is synthesized)
acagattctaggtgtgttccccaggctggagtgcaggggctcgatcatagctcacttcactttagcctcaaactcctgggctcaagcaatgctcctgccttagccttctgagtagctggg

SEQ ID NO: 605907 - DNA, 120 bp, Artificial Sequence
  ENSG00000175344_117 (sequence is synthesized)
ttagagatgtctcactatgttgcccagtccggtctcaaactcctagtctcaagtgaccctcccacgtcaatgtcttagagtcactgggattacgggcatgagacactgtgcccagcttgt

SEQ ID NO: 605908 - DNA, 120 bp, Artificial Sequence
  ENSG00000175344_118 (sequence is synthesized)
tctgttcttcatctagaatttaaattagttaaaattctagctttaaccagaattctagattgtatttctcgataatcatgtgttcttcccatttttaacctaaagaaaatgcctacctca

SEQ ID NO: 605909 - DNA, 120 bp, Artificial Sequence
  ENSG00000175344_119 (sequence is synthesized)
cacacacacacacacacacacaccttttagattctatttctaacttcatcatcagggttatcaacttctctgagatattttgcattctttacttttattatttagagtctgaagatgctc

SEQ ID NO: 605910 - DNA, 120 bp, Artificial Sequence
  ENSG00000175344_120 (sequence is synthesized)
tttagagtctgaagatgctcatggtaaatgcagattatagagctaactttttgcacaaaaagcccacaaaacagtctttgagagagcatgtcagtgttacgtttggattttaaaagacag

SEQ ID NO: 605911 - DNA, 120 bp, Artificial Sequence
  ENSG00000175344_121 (sequence is synthesized)
tgaagcttagctgagattctgttttacagattttgcgaataaataaaaagacagattccatttgctctggactgtgttagctgcagtgcggagggcggaaccggctgaaggaactgctgt

SEQ ID NO: 605912 - DNA, 120 bp, Artificial Sequence
  ENSG00000175344_122 (sequence is synthesized)
gactaaccgcctggaagaaagctttcctattcctgggcaagctttaaaagtttgggattttccactgtcctttccggtgcgagcatttattgaattttgcagtagtctccataatttact

SEQ ID NO: 605913 - DNA, 120 bp, Artificial Sequence
  ENSG00000175344_123 (sequence is synthesized)
gagagctacaggaggagaaacagaaaacagttaggatatgccatgctttccaagaggaactggcaactgcagtgaggatgcatttaaacaaaccagtgtgaggatagatctctctacgtt

SEQ ID NO: 605914 - DNA, 120 bp, Artificial Sequence
  ENSG00000175344_124 (sequence is synthesized)
atgcagatccactccatttctaaaagcaagttgaacagcaaatttcagttgatgggaacctatatttgattattttaaaataggaaaacagtgattacatttataacagtgtaaaattgg

SEQ ID NO: 605915 - DNA, 120 bp, Artificial Sequence
  ENSG00000175344_125 (sequence is synthesized)
taatgtattatttataattattataatcatgtgtttccaatccaccaaaagaatatgtaccaatttggccaactatcactaaaatactcttaactctatagtaaatcaacaaggttttat

SEQ ID NO: 605916 - DNA, 120 bp, Artificial Sequence
  ENSG00000175344_126 (sequence is synthesized)
tcaagctaattacaaccccccccttttttttttttagcactttgcaaactttaggactgtgcttgtgtgtggtatacacattgaaataaacagggtaatttattgtattctaacaatggc

SEQ ID NO: 605917 - DNA, 120 bp, Artificial Sequence
  ENSG00000175344_127 (sequence is synthesized)
tgtgcccaggatttcccagcagatgaaactagaagaaatagggctgcactgcccccattttctctggaaggtgatgatttgctgtaactattcagagtcacccaggcccaagtaagggga

SEQ ID NO: 605918 - DNA, 120 bp, Artificial Sequence
  ENSG00000175344_128 (sequence is synthesized)
atgccccccttcccctcataattctcctcctcatgcttgctttgaagccagatatttcatcgttagagatgcatcattttagcttaagatgttgttttcccacaaagcctttgttaaaat

SEQ ID NO: 605919 - DNA, 120 bp, Artificial Sequence
  ENSG00000175344_129 (sequence is synthesized)
gggagaagcacacagttactgtgtcctgagataactcaatgtctctgtataaaagtttctagggaaatatgaatgagaaaaatatattttgcacaggtataaggcatgatcctctaccca

SEQ ID NO: 605920 - DNA, 120 bp, Artificial Sequence
  ENSG00000175344_130 (sequence is synthesized)
gggagggacaacaaaaacaagtctccactcccactgggcagggaaggttggaaggaggtatacagactgtcattacacctgctggcccctgctgtttgaggacctatgctgtgtctacct

SEQ ID NO: 605921 - DNA, 120 bp, Artificial Sequence
  ENSG00000175344_131 (sequence is synthesized)
gggggtgggctagagggagagccctacctggatacccccaggctttaggaaccaagcagcaaaggcccttctttgtggaactccctgtatgtgcagtattttggccagagaaactgttgg

SEQ ID NO: 605922 - DNA, 120 bp, Artificial Sequence
  ENSG00000175344_132 (sequence is synthesized)
tatgaaaagcctttgtgggtatcatttttctcttggtaccatccagacagggaagaaccacctttccacctgattctgactccattctttctaccttccagcacactgctttcagtagag

SEQ ID NO: 605923 - DNA, 120 bp, Artificial Sequence
  ENSG00000175344_133 (sequence is synthesized)
cttaccctgatgacctaattgtacttaattacctccttaaagaccctatctccaagtacagtcacattctagggtactaggggttggggcttcaacatatgaattctagggggaagcata

SEQ ID NO: 605924 - DNA, 120 bp, Artificial Sequence
  ENSG00000175344_134 (sequence is synthesized)
attcagctcataagggtcacggtttgctccagtctccttccttttctcaggggccctgatgctaactttaggtctcaaacttccagctctggcagagctcctcccaggtacctcttggtc

SEQ ID NO: 605925 - DNA, 120 bp, Artificial Sequence
  ENSG00000175344_135 (sequence is synthesized)
tttgtaggaaggcagtgagttccttcctggcgtgagggcctgtgagggctagctgaatgcttagcgccctgtaccctgatgctttccgcttagagttcagccccttgagtggacagccac

SEQ ID NO: 605926 - DNA, 120 bp, Artificial Sequence
  ENSG00000175344_136 (sequence is synthesized)
accaaaggtttaataattagagctgcccactaaagaatgccccctcctttctcctagacatcttggcctgtgtaattgctcatcattgcacaaatcctgcaaggaagaagttcctatttt

SEQ ID NO: 605927 - DNA, 120 bp, Artificial Sequence
  ENSG00000175344_137 (sequence is synthesized)
aatggaggctaccgtaacaaattgctgtagtctgggggcctaagcaacagacatttatttctcagagttctgcaaggctgcacgtcctcgataagggtggcagcagggctctggtgaggg

SEQ ID NO: 605928 - DNA, 120 bp, Artificial Sequence
  ENSG00000175344_138 (sequence is synthesized)
gccactccctggtttacagctggccctcttctcgctgtggcctcacgtggcaaaaagagagtgaattagctctttagcctctttttatgaaggactctaatcccattcatgagggctgca

SEQ ID NO: 605929 - DNA, 120 bp, Artificial Sequence
  ENSG00000175344_139 (sequence is synthesized)
ccctcaggacctgttgaaggcccctgagaaaatcactcaccatttctctacttacacaacacttctgacaccaaagcggggcgtttctcccacatcgaccaattcttggaaaccagctgg

SEQ ID NO: 605930 - DNA, 120 bp, Artificial Sequence
  ENSG00000175344_140 (sequence is synthesized)
gcgtcctacagtgagttcacttcagtcctgacaccacctggagttagcacagcactcacagattaaggctcacaagaccatttctacttgagatgccagttagaagttccggcttcccat

SEQ ID NO: 605931 - DNA, 120 bp, Artificial Sequence
  ENSG00000175344_141 (sequence is synthesized)
gcttctgaccaagtgtctataaatcggggagttcccaaaagcacatctttgagttcagccatttactagagtgactcactctagtaaactcagggaaacattttactgatatttattcat

SEQ ID NO: 605932 - DNA, 120 bp, Artificial Sequence
  ENSG00000175344_142 (sequence is synthesized)
taattataaagcacagatgaatagtcagatgaaagaaatgcatagggcaaggtatttgggaaggggcatggaactgccatgccctctctgccctccaaacacctccccgtgttcagcact

SEQ ID NO: 605933 - DNA, 120 bp, Artificial Sequence
  ENSG00000175344_143 (sequence is synthesized)
gggaaggtctccacagaactccatccttttgggtttttatggaggcttcactacataggcatgattgattacatcattggccactggcgatccactcaaccgtcagtacctctttcctcc

SEQ ID NO: 605934 - DNA, 120 bp, Artificial Sequence
  ENSG00000175344_144 (sequence is synthesized)
ccaggggtcaagggttgggagaggggacagagcttgaaggttccaactctctaattacttggctggttcccctggcaaccaaaccccatcctgagggtatccaggaacctcagccataaa

SEQ ID NO: 605935 - DNA, 120 bp, Artificial Sequence
  ENSG00000175344_145 (sequence is synthesized)
tcatttcattagcatataaaaagacactgatgacttcagagattcaaaggttttaggagctgtgtgccaggaaatgggaggaagactaaatacatatttcttattataaatcacaatctc

SEQ ID NO: 605936 - DNA, 120 bp, Artificial Sequence
  ENSG00000175344_146 (sequence is synthesized)
atacctcccaaagccccacctccagataccatcccagttaggactagggttttaacccatgaacttcgtggggacacaaacgtcatcctttgtaccacccccattggagagctgaggccc

SEQ ID NO: 605937 - DNA, 120 bp, Artificial Sequence
  ENSG00000175344_147 (sequence is synthesized)
gaagaggctgagcatccactccaaactcacagccagtagctagtggaccaggatggaagcactcagatgctccatgctgcccctcacctgggcccaggtggaaggacacccatgacccat

SEQ ID NO: 605938 - DNA, 120 bp, Artificial Sequence
  ENSG00000175344_148 (sequence is synthesized)
tagaaccaaagctgagactgaagttctcgtcctgaaaagtccctgccactgaccccttcctcaggctggacagctggcagccaggtggtgtgcaggtttgccctcattgtgcccctggag

SEQ ID NO: 605939 - DNA, 120 bp, Artificial Sequence
  ENSG00000175344_149 (sequence is synthesized)
cacagtagaggcctgcatcatgaacactggatggttcccatgccctcacatccagtatttacccacaggaacaagcttatcaccatcctgccaggcgatgctagctcttattgactgaca

SEQ ID NO: 605940 - DNA, 120 bp, Artificial Sequence
  ENSG00000175344_150 (sequence is synthesized)
agtcggccagagtgcatggaagtgcaatgaagtgagggaaggtcactccgtgggcgggaagtcagaccacactggctggttttgcccacccagaatgtgggctgcaggcctggacacatg

SEQ ID NO: 605941 - DNA, 120 bp, Artificial Sequence
  ENSG00000175344_151 (sequence is synthesized)
ggcatcactgcaccctgaggccctgacggtcagagaacctgatcagggtgtgcctgtcctgtgacgtgcagtgccacaggatccccgggtctcaccctgcatctgttctctccacagccc

SEQ ID NO: 605942 - DNA, 120 bp, Artificial Sequence
  ENSG00000175344_152 (sequence is synthesized)
agtacttcgccagcaccatgatcatcgtgggcctctcggtggtggtgacagtgatcgtgctgcagtaccaccaccacgaccccgacgggggcaagatgcccaagtgggtacgttcctccc

SEQ ID NO: 605943 - DNA, 120 bp, Artificial Sequence
  ENSG00000175344_153 (sequence is synthesized)
acccccgatggagtcggagcccccctgtaaaggaggctcctcctagggtttatttttaaaatcacacaaaaaatgggcattcctaaagaaatagctttgggttttttgtttgtttttttg

SEQ ID NO: 605944 - DNA, 120 bp, Artificial Sequence
  ENSG00000175344_154 (sequence is synthesized)
cccttcaattgctggacaagggacccttgcctgaggacgccctcggatccctcctgtgagacaaggagctgcagataaccccaacctctacacagacagaaaggagcagatttcataaaa

SEQ ID NO: 605945 - DNA, 70 bp, Artificial Sequence
  ENSG00000175344_155 (sequence is synthesized)
gaacagctggaattacaggcaggcaccaccacacccggctagtttttgtattttttagtagagacagggt

SEQ ID NO: 605946 - DNA, 120 bp, Artificial Sequence
  ENSG00000175344_156 (sequence is synthesized)
gagccaccgtgcagggccgaaagtcttttattaatcgtgccttggttttttcaaatgtaaatatttacacaagaattattcctttacaccgtaagtattaaattttgtttcttttggatt

SEQ ID NO: 605947 - DNA, 120 bp, Artificial Sequence
  ENSG00000175344_157 (sequence is synthesized)
gatttaagtttgctattgttattggtattataattcatcaaggtgacataaattaaaatttttaagtaattataaaacataaatttttattggcaatttatatctctgcccaagatgagt

SEQ ID NO: 605948 - DNA, 120 bp, Artificial Sequence
  ENSG00000175344_158 (sequence is synthesized)
ttgttttaaattagttcatgtatccacagatgactttttattacttgaatggagagaatgatagttttcacttcaattctgttgctgttttttaactaggtgtagtaacatgagtagttg

SEQ ID NO: 605949 - DNA, 120 bp, Artificial Sequence
  ENSG00000175344_159 (sequence is synthesized)
gacatgaaagccactttgttaaagcaatgttactcaatctttgaacttcttctaggttatatgccaaaaataatgtagtttttatcaaatgtatcagctgacagcttgattagtttctcc

SEQ ID NO: 605950 - DNA, 120 bp, Artificial Sequence
  ENSG00000175344_160 (sequence is synthesized)
ttcaattttgttgaaaacaaagaaaagaatttaaacccacctgacctttgaaagtatttgccacccaatttgtaaggtaattcacacagacacaaacgctgatacttgaattgaccattt

SEQ ID NO: 605951 - DNA, 120 bp, Artificial Sequence
  ENSG00000175344_161 (sequence is synthesized)
gtttggttcttgagtcagtgtcccaagatgggagttgaggtaagataagagaaatgtgcccttctttataaagttgaatgggagaagtgaaaatggaggcaaaggatagtcccatgtggt

SEQ ID NO: 605952 - DNA, 120 bp, Artificial Sequence
  ENSG00000175344_162 (sequence is synthesized)
atggaggcaaaggatagtcccatgtggttcttgggcagttgagttatcctgcgaatacacgtggagttgagggatagaaaatggatctgcatccagcctggccaacatggtgcaaccctg

SEQ ID NO: 605953 - DNA, 120 bp, Artificial Sequence
  ENSG00000175348_0 (sequence is synthesized)
agacggaagtgcgggcggaggatccccagccgggtcccaagcctgtgcctgagcctgagcctgagcctgagcccgagccgggagccggtcgcgggggctccgggctgtgggaccgctggg

SEQ ID NO: 605954 - DNA, 120 bp, Artificial Sequence
  ENSG00000175348_1 (sequence is synthesized)
cccccagcgatggcgaccctgtggggaggccttcttcggcttggctccttgctcagcctgtcgtgcctggcgctttccgtgctgctgctggcgcagctgtcagacgccgccaagaatttc

SEQ ID NO: 605955 - DNA, 120 bp, Artificial Sequence
  ENSG00000175348_2 (sequence is synthesized)
gaggatgtcagatgtaaatgtatctgccctccctataaagaaaattctgggcatatttataataagaacatatctcagaaagattgtgattgccttcatgttgtggagcccatgcctgtg

SEQ ID NO: 605956 - DNA, 120 bp, Artificial Sequence
  ENSG00000175348_3 (sequence is synthesized)
cgggggcctgatgtagaagcatactgtctacgctgtgaatgcaaatatgaagaaagaagctctgtcacaatcaaggttaccattataatttatctctccattttgggccttctacttctg

SEQ ID NO: 605957 - DNA, 120 bp, Artificial Sequence
  ENSG00000175348_4 (sequence is synthesized)
tacatggtatatcttactctggttgagcccatactgaagaggcgcctctttggacatgcacagttgatacagagtgatgatgatattggggatcaccagccttttgcaaatgcacacgat

SEQ ID NO: 605958 - DNA, 120 bp, Artificial Sequence
  ENSG00000175348_5 (sequence is synthesized)
gtgctagcccgctcccgcagtcgagccaacgtgctgaacaaggtagaatatgcacagcagcgctggaagcttcaagtccaagagcagcgaaagtctgtctttgaccggcatgttgtcctc

SEQ ID NO: 605959 - DNA, 120 bp, Artificial Sequence
  ENSG00000175348_6 (sequence is synthesized)
agctaattgggaattgaattcaaggtgactagaaagaaacaggcagacaactggaaagaactgactgggttttgctgggtttcattttaataccttgttgatttcaccaactgttgctgg

SEQ ID NO: 605960 - DNA, 120 bp, Artificial Sequence
  ENSG00000175348_7 (sequence is synthesized)
tgttaacgtaataatagagacatttttaaaagcacacagctcaaagtcagccaataagtcttttcctatttgtgacttttactaataaaaataaatctgcctgtaaattatcttgaagtc

SEQ ID NO: 605961 - DNA, 120 bp, Artificial Sequence
  ENSG00000175348_8 (sequence is synthesized)
ctttacctggaacaagcactctctttttcaccacatagttttaacttgactttcaagataattttcagggtttttgttgttgttgttttttgtttgtttgttttggtgggagaggggagg

SEQ ID NO: 605962 - DNA, 120 bp, Artificial Sequence
  ENSG00000175348_9 (sequence is synthesized)
gatgcctgggaagtggttaacaacttttttcaagtcactttactaaacaaacttttgtaaatagaccttaccttctattttcgagtttcatttatattttgcagtgtagccagcctcatc

SEQ ID NO: 605963 - DNA, 120 bp, Artificial Sequence
  ENSG00000175348_10 (sequence is synthesized)
aaagagctgacttactcatttgacttttgcactgactgtattatctgggtatctgctgtgtctgcacttcatggtaaacgggatctaaaatgcctggtggcttttcacaaaaagcagatt

SEQ ID NO: 605964 - DNA, 120 bp, Artificial Sequence
  ENSG00000175348_11 (sequence is synthesized)
ttcttcatgtactgtgatgtctgatgcaatgcatcctagaacaaactggccatttgctagtttactctaaagactaaacatagtcttggtgtgtgtggtcttactcatcttctagtacct

SEQ ID NO: 605965 - DNA, 120 bp, Artificial Sequence
  ENSG00000175348_12 (sequence is synthesized)
ttaaggacaaatcctaaggacttggacacttgcaataaagaaattttattttaaacccaagcctccctggattgataatatatacacatttgtcagcatttccggtcgtggtgagaggca

SEQ ID NO: 605966 - DNA, 120 bp, Artificial Sequence
  ENSG00000175348_13 (sequence is synthesized)
gctgtttgagctccaatgtgtgcagctttgaactagggctggggttgtgggtgcctcttctgaaaggtctaaccattattggataactggcttttttcttcctatgtcctctttggaatg

SEQ ID NO: 605967 - DNA, 120 bp, Artificial Sequence
  ENSG00000175348_14 (sequence is synthesized)
taacaataaaaataatttttgaaacatccatcagtgtatctatctatgtctcctagttttttcctcctccctcttttgctgtataatgagattgaagatataaagacattttgtaccctg

SEQ ID NO: 605968 - DNA, 120 bp, Artificial Sequence
  ENSG00000175348_15 (sequence is synthesized)
gctgcaggctggaccaaggggaggcacatggggagctccacagggaggccacgcccacgagggcagctcacagaattagaaagccgacggggtgctgtggtcaggaggcgcgtgggcggc

SEQ ID NO: 605969 - DNA, 120 bp, Artificial Sequence
  ENSG00000175348_16 (sequence is synthesized)
ggaagctcctcccctaccaccggccttgcggaaactgggtctgccaacctgctccttggcccattcctgacagccatacgcctggcctcacagctccggcagacccccgccgccaccagc

SEQ ID NO: 605970 - DNA, 120 bp, Artificial Sequence
  ENSG00000175348_17 (sequence is synthesized)
cccgcccctcccgactgcccggcggcactctcgccctcagccccgacagcctggcaggcagcgccccacgatacttagtcacctgttcctccacctcttgaaacttgttttgttggtagt

SEQ ID NO: 605971 - DNA, 120 bp, Artificial Sequence
  ENSG00000175348_18 (sequence is synthesized)
gccagtccctgtcatcattcgatgtgaagtgcaagtgaaaaatagtcatatatagatgttcacgtgctgaagcagatcctcaactagagaagctaaaaacagctctgatttcagtatata

SEQ ID NO: 605972 - DNA, 120 bp, Artificial Sequence
  ENSG00000175348_19 (sequence is synthesized)
cctctttatgaagaaattgcttgatgaagccataaatgtgatgatttaaacgatgatctttggtgagcatgctatacagggccttgctttcagtaccaaaggcacaattttattgccatt

SEQ ID NO: 605973 - DNA, 120 bp, Artificial Sequence
  ENSG00000175348_20 (sequence is synthesized)
ccctgtttacattgagaaaagtatcagagatggttttctctccaagctctcctgcctgaaacaccttctctgtcaatatcaccaaatattttagaaggcagagaggttttcatcaaggga

SEQ ID NO: 605974 - DNA, 120 bp, Artificial Sequence
  ENSG00000175348_21 (sequence is synthesized)
agtgtgaagatcatgatgttcttttcttaatgaagtacaacttgataacctgctgatgttttatatttcctttttttctactgcttaaaaaaaaatctgtgggccaggtgtgggggcata

SEQ ID NO: 605975 - DNA, 120 bp, Artificial Sequence
  ENSG00000175352_0 (sequence is synthesized)
gctggaggagctcgaggctgaggctgccggggggctgtgggctaccgggccgccggcgcctcagcgatgttttactcagggctcctcactgagggcggccgcaaggagaccgacatgcgg

SEQ ID NO: 605976 - DNA, 120 bp, Artificial Sequence
  ENSG00000175352_1 (sequence is synthesized)
gaggcggcgtcactgcgacagcagcgccggatgaagcaggcggtgcagttcatccacaaggactccgccgacctgctgcccctggacggcctcaagaagctgggctcgtccaaggacatg

SEQ ID NO: 605977 - DNA, 120 bp, Artificial Sequence
  ENSG00000175352_2 (sequence is synthesized)
caacctcataatattctgcagaggcgcctcatggaaaccaacctgtctaagctccgaagcggtccccgtgtcccttgggcctctaagacgaacaaactcaatcaggctaagtctgagggg

SEQ ID NO: 605978 - DNA, 120 bp, Artificial Sequence
  ENSG00000175352_3 (sequence is synthesized)
ctaaagaagtctgaggaggatgacatgattttggtttcttgccagtgtgctggaaaggatgtgaaagccttggttgacacaggctgcctatataatctcatctctttggcctgtgtggac

SEQ ID NO: 605979 - DNA, 120 bp, Artificial Sequence
  ENSG00000175352_4 (sequence is synthesized)
agattgggactcaaggagcatgtcaaatcccacaagcatgaaggagaaaagctttctctaccccggcatctcaaagtagtgggccagattgagcacctagtgatcacactgggctccctc

SEQ ID NO: 605980 - DNA, 120 bp, Artificial Sequence
  ENSG00000175352_5 (sequence is synthesized)
cgcctggactgcccagcagctgtggttgatgacaatgagaaaaacttgtcccttggtctacagactctccgatctctgaagtgcatcataaacttggataagcaccggctgatcatgggg

SEQ ID NO: 605981 - DNA, 120 bp, Artificial Sequence
  ENSG00000175352_6 (sequence is synthesized)
aagacagacaaggaagaaatcccttttgtggagacagtctctttgaatgaagacaacacttcagaagcataactacagcctgcagcatgtctgcacgtgtgcatgcatacacaccgggtt

SEQ ID NO: 605982 - DNA, 120 bp, Artificial Sequence
  ENSG00000175352_7 (sequence is synthesized)
gacagatagagaaaactgggtttgaaccaaatgccgtagtgacttgctgtggaccaagtccttccatctaatagaagctccaggggctccttcccattcagacctctctagactatagtc

SEQ ID NO: 605983 - DNA, 120 bp, Artificial Sequence
  ENSG00000175352_8 (sequence is synthesized)
tatgcttagagatcttgtctggttatggccattgttttttactactttgatcacttaacttatagaccttttttgacactgccagtctcacttgtggcctatttctctgcttcttccagg

SEQ ID NO: 605984 - DNA, 120 bp, Artificial Sequence
  ENSG00000175352_9 (sequence is synthesized)
aatttgcttttattagtcaagtataggggctgccaggttctgtgtctccatagatatatgtgcttcttttcctatagctaaatgtataataaacaggaacctgacctttacctcctttca

SEQ ID NO: 605985 - DNA, 120 bp, Artificial Sequence
  ENSG00000175352_10 (sequence is synthesized)
gctgtttcaaacaggtgccaggatacctatgtcttagaattagagtttcttcaaattgattcattgatttctcaagtatggattatgtgaaagagcccagggacattatccattacagtt

SEQ ID NO: 605986 - DNA, 120 bp, Artificial Sequence
  ENSG00000175352_11 (sequence is synthesized)
taactctttcatttaaaggtccagagaggcaagtgaattgtctaagttcatatattaggtcagtgactgaagggaccaagaacgcagacctgatttccaagccaagactcccatgctgcc

SEQ ID NO: 605987 - DNA, 120 bp, Artificial Sequence
  ENSG00000175352_12 (sequence is synthesized)
tcatttgtattcaagcctttaacaggagggcaaagaggtgagaatgtgttaaaaaaaaaaaaaaaaaggcagagcatgggaggaatattctctggagatggatgctaggatgatttgggt

SEQ ID NO: 605988 - DNA, 120 bp, Artificial Sequence
  ENSG00000175352_13 (sequence is synthesized)
agctctccctcctgtgtgccaagcccagtaaaagttccttgccccaaactgtcacatttaggccctcatcttggtgcctaaaaacgagcgtacaaagatgaatgaaatggtttctcactg

SEQ ID NO: 605989 - DNA, 120 bp, Artificial Sequence
  ENSG00000175352_14 (sequence is synthesized)
tgaacctcttggaggaaaggaggaaccacagacagaggaatattaatccctctctgatatggaattgaaggcttaagtaaatcagagtgtcactgtcagacgttgattactcccaagatc

SEQ ID NO: 605990 - DNA, 120 bp, Artificial Sequence
  ENSG00000175352_15 (sequence is synthesized)
actgaagtagctggaaaccaggagtagagaaagatggggggaaaaaaagagcaaggccagaatagaagggagtagactgagtagaatcagttggtggagaggcctatctagataaacctt

SEQ ID NO: 605991 - DNA, 120 bp, Artificial Sequence
  ENSG00000175352_16 (sequence is synthesized)
tctgggaggcagggaatgacattttcaggcagggaattgagatgttcagttctgtcctgatacaaggaaagaggcagagcaggagccggcaatgttaaggacaactttttataactgccc

SEQ ID NO: 605992 - DNA, 120 bp, Artificial Sequence
  ENSG00000175352_17 (sequence is synthesized)
agtatttcctgacccctgtcaaaggttggggagaatacaaggtttcttgaagctttttgactggggtgtcacattaggcacacaggtgtctataatggaatctccccttcagtttggtca

SEQ ID NO: 605993 - DNA, 120 bp, Artificial Sequence
  ENSG00000175352_18 (sequence is synthesized)
tagaagtgcttggacaagtcagaaaaatagctagctgtgggtatccctttaagatattcccaagtctaccctgtgtcatagcagtagttctcagagtgtttgtttaaaggatcccacttt

SEQ ID NO: 605994 - DNA, 120 bp, Artificial Sequence
  ENSG00000175352_19 (sequence is synthesized)
gaactttgccaagtactaccaactaccttgtctggtgttcagcaactgcccctactgaacagccctttggaactctgaatgatttgggcctcacagaagctccctaaagcctaggaactt

SEQ ID NO: 605995 - DNA, 120 bp, Artificial Sequence
  ENSG00000175352_20 (sequence is synthesized)
ggtgactatcatttgaacaactaggcagccatactgcagtcagttgtcatggggtcattccctaggcccccttcctatcagcctctacctaaagaagctagataggaagctaagcacagc

SEQ ID NO: 605996 - DNA, 120 bp, Artificial Sequence
  ENSG00000175352_21 (sequence is synthesized)
catggttgggaggctatatctaaagctcatgaggggtgatcccggggttaccagccttcagcactccctctagcaacaccccattctcttacctagcggggatttgtacctttccactga

SEQ ID NO: 605997 - DNA, 120 bp, Artificial Sequence
  ENSG00000175352_22 (sequence is synthesized)
ggcctctccatgctccttccctacctttcatggcaatactttggcctgcctcttatcctggtactaagttgaagtaaagctcaccctttacttccctacttgaaagttctactctgagcc

SEQ ID NO: 605998 - DNA, 79 bp, Artificial Sequence
  ENSG00000175352_23 (sequence is synthesized)
tcaccctttacttccctacttgaaagttctactctgagccttgactcttagccacagtgaggcatgttgaaggttcctg

SEQ ID NO: 605999 - DNA, 120 bp, Artificial Sequence
  ENSG00000175352_24 (sequence is synthesized)
ctttaaatgcctccaagttgattattctcctagctcatatctccttgatgtgcatgagggagcactgggtctaatttttgggggctgagaaggtaagaaggtgaggtcagtttttcccag

SEQ ID NO: 606000 - DNA, 120 bp, Artificial Sequence
  ENSG00000175352_25 (sequence is synthesized)
gagtcctaaaaaattctggtaccttacattgagggtgtgggagaaagggtgtcatagttctgaaaataggcagtagcatgaagcaccagacctgtctcattccttattagatgtctatct

SEQ ID NO: 606001 - DNA, 120 bp, Artificial Sequence
  ENSG00000175352_26 (sequence is synthesized)
caaataacagagtttgaaaaatattggttttatcatttgatatttccatgcctgactcgggaaaataacattttctgacttctttctattttcttgccctgcacagaccctacctggtac

SEQ ID NO: 606002 - DNA, 120 bp, Artificial Sequence
  ENSG00000175352_27 (sequence is synthesized)
aattttctatttcttagctcaaagtgtctatacaatgggttgcctggtatgtcagctgccctcactcttgtgtaatagaaatatattgccaggctggggacgtggaggagacgaactgga

SEQ ID NO: 606003 - DNA, 120 bp, Artificial Sequence
  ENSG00000175352_28 (sequence is synthesized)
ttcctccctcctcctgttgccaggcctctctgcattggcactttatcctttcagtgtttctggctgtgttgggttcatttgtgagactgatgtaacaataaagtgaaatcttcccctctg

SEQ ID NO: 606004 - DNA, 120 bp, Artificial Sequence
  ENSG00000175352_29 (sequence is synthesized)
ctacaaatccacccttccccacacccagagttcatcaccccacaaaactctgtagtgcacacatcagaatgagcaatggtgatgccacacagagtggtagggaaatgactagctttgaaa

SEQ ID NO: 606005 - DNA, 120 bp, Artificial Sequence
  ENSG00000175352_30 (sequence is synthesized)
gcaaaattttacttgccttcagcttaactttttttgaatttggcattatttctcctgatatttatttctcatttcagcacttcagaagcataactacagcctgcagcatgtctgcacgtg

SEQ ID NO: 606006 - DNA, 120 bp, Artificial Sequence
  ENSG00000175354_0 (sequence is synthesized)
gcatgcgccgcagcgccagcgctctccccggatcgtgcggggcctgagcctctccgccggcgcaggctctgctcgcgccagctcgctcccgcagccatgcccaccaccatcgagcgggag

SEQ ID NO: 606007 - DNA, 120 bp, Artificial Sequence
  ENSG00000175354_1 (sequence is synthesized)
ttcgaagagttggatactcagcgtcgctggcagccgctgtacttggaaattcgaaatgagtcccatgactatcctcatagagtggccaagtttccagaaaacagaaatcgaaacagatac

SEQ ID NO: 606008 - DNA, 120 bp, Artificial Sequence
  ENSG00000175354_2 (sequence is synthesized)
agagatgtaagcccatatgatcacagtcgtgttaaactgcaaaatgctgagaatgattatattaatgccagtttagttgacatagaagaggcacaaaggagttacatcttaacacagggt

SEQ ID NO: 606009 - DNA, 120 bp, Artificial Sequence
  ENSG00000175354_3 (sequence is synthesized)
ccacttcctaacacatgctgccatttctggcttatggtttggcagcagaagaccaaagcagttgtcatgctgaaccgcattgtggagaaagaatcggttaaatgtgcacagtactggcca

SEQ ID NO: 606010 - DNA, 120 bp, Artificial Sequence
  ENSG00000175354_4 (sequence is synthesized)
acagatgaccaagagatgctgtttaaagaaacaggattcagtgtgaagctcttgtcagaagatgtgaagtcgtattatacagtacatctactacaattagaaaatatcaatagtggtgaa

SEQ ID NO: 606011 - DNA, 120 bp, Artificial Sequence
  ENSG00000175354_5 (sequence is synthesized)
accagaacaatatctcactttcattatactacctggccagattttggagtccctgaatcaccagcttcatttctcaatttcttgtttaaagtgagagaatctggctccttgaaccctgac

SEQ ID NO: 606012 - DNA, 120 bp, Artificial Sequence
  ENSG00000175354_6 (sequence is synthesized)
catgggcctgcggtgatccactgtagtgcaggcattgggcgctctggcaccttctctctggtagacacttgtcttgttttgatggaaaaaggagatgatattaacataaaacaagtgtta

SEQ ID NO: 606013 - DNA, 120 bp, Artificial Sequence
  ENSG00000175354_7 (sequence is synthesized)
ctgaacatgagaaaataccgaatgggtcttattcagaccccagatcaactgagattctcatacatggctataatagaaggagcaaaatgtataaagggagattctagtatacagaaacga

SEQ ID NO: 606014 - DNA, 120 bp, Artificial Sequence
  ENSG00000175354_8 (sequence is synthesized)
tggaaagaactttctaaggaagacttatctcctgcctttgatcattcaccaaacaaaataatgactgaaaaatacaatgggaacagaataggtctagaagaagaaaaactgacaggtgac

SEQ ID NO: 606015 - DNA, 120 bp, Artificial Sequence
  ENSG00000175354_9 (sequence is synthesized)
cgatgtacaggactttcctctaaaatgcaagatacaatggaggagaacagtgagagtgctctacggaaacgtattcgagaggacagaaaggccaccacagctcagaaggtgcagcagatg

SEQ ID NO: 606016 - DNA, 120 bp, Artificial Sequence
  ENSG00000175354_10 (sequence is synthesized)
aaacagaggctaaatgagaatgaacgaaaaagaaaaaggtggttatattggcaacctattctcactaagatggggtttatgtcagtcattttggttggcgcttttgttggctggacactg

SEQ ID NO: 606017 - DNA, 120 bp, Artificial Sequence
  ENSG00000175354_11 (sequence is synthesized)
ttttttcagcaaaatgccctataaacaattaattttgcccagcaagcttctgcactagtaactgacagtgctacattaatcataggggtttgtctgcagcaaacgcctcatatcccaaaa

SEQ ID NO: 606018 - DNA, 120 bp, Artificial Sequence
  ENSG00000175354_12 (sequence is synthesized)
acggtgcagtagaatagacatcaaccagataagtgatatttacagtcacaagcccaacatctcaggactcttgactgcaggttcctctgaaccccaaactgtaaatggctgtctaaaata

SEQ ID NO: 606019 - DNA, 120 bp, Artificial Sequence
  ENSG00000175354_13 (sequence is synthesized)
aagacattcatgtttgttaaaaactggtaaattttgcaactgtattcatacatgtcaaacacagtatttcacctgaccaacattgagatatcctttatcacaggatttgtttttggaggc

SEQ ID NO: 606020 - DNA, 120 bp, Artificial Sequence
  ENSG00000175354_14 (sequence is synthesized)
tgacatgggcatcaacacttttattcttaagcatttcagggtaaatatattttataagtatctatttaatcttttgtagttaactgtactttttaagagctcaatttgaaaaatctgtta

SEQ ID NO: 606021 - DNA, 120 bp, Artificial Sequence
  ENSG00000175354_15 (sequence is synthesized)
ctaaaaaaataaattgtatgtcgattgaattgtactggatacattttccatttttctaaagagaagtttgatatgagcagttagaagttggaataagcaatttctactatatattgcatt

SEQ ID NO: 606022 - DNA, 120 bp, Artificial Sequence
  ENSG00000175354_16 (sequence is synthesized)
tcttttatgttttacagttttccccattttaaaaagaaaagcaaacaaagaaacaaaagtttttcctaaaaatatctttgaaggaaaattctccttactgggatagtcaggtaaacagtt

SEQ ID NO: 606023 - DNA, 120 bp, Artificial Sequence
  ENSG00000175354_17 (sequence is synthesized)
ggtcaagactttgtaaagaaattggtttctgtaaatcccattattgatatgtttatttttcatgaaaatttcaatgtagttggggtagattatgatttaggaagcaaaagtaagaagcag

SEQ ID NO: 606024 - DNA, 120 bp, Artificial Sequence
  ENSG00000175354_18 (sequence is synthesized)
cattttatgattcataatttcagtttactagactgaagttttgaagtaaacacttttcagtttctttctacttcaataaatagtatgattatatgcaaaccttacattgtcattttaact

SEQ ID NO: 606025 - DNA, 120 bp, Artificial Sequence
  ENSG00000175354_19 (sequence is synthesized)
taatgaatattttttaaagcaaactgtttaatgaatttaactgctcatttgaatgctagctttcctcagatttcaacattccattcagtgtttaatttgtcttacttaaacttgaaattg

SEQ ID NO: 606026 - DNA, 120 bp, Artificial Sequence
  ENSG00000175354_20 (sequence is synthesized)
ttgttacaaatttaattgctaggaggcatggatagcatacattattatggatagcataccttatttcagtggttttcaaactatgctcattggatgtccaggtgggtcaagaggttactt

SEQ ID NO: 606027 - DNA, 120 bp, Artificial Sequence
  ENSG00000175354_21 (sequence is synthesized)
tcaaccacagcatctctgccttgtctctttatatgccacataagatttctgcataaggcttaagtattttaaagggggcagttatcatttaaaaacagtttggtcgggcgcggtggctca

SEQ ID NO: 606028 - DNA, 77 bp, Artificial Sequence
  ENSG00000175354_22 (sequence is synthesized)
gcgacagagcgagactccatctcaaaagaaacaaacaaaaaaaacagtttaaggccaaggcgggcggatcacgaggt

SEQ ID NO: 606029 - DNA, 65 bp, Artificial Sequence
  ENSG00000175354_23 (sequence is synthesized)
ggatcacgaggtcaagagatggagactgtcctggccaacatggtgaaatcccttcttccttggga

SEQ ID NO: 606030 - DNA, 120 bp, Artificial Sequence
  ENSG00000175354_24 (sequence is synthesized)
attggtatagatagatattttgaattgatttgcatagtctccttgaatgtgttaaattatgttgaaagtatgaaagcaggatgtaggtggtactacatattaaataagatttatataaca

SEQ ID NO: 606031 - DNA, 120 bp, Artificial Sequence
  ENSG00000175354_25 (sequence is synthesized)
ttgacagacacctaatattcatgacttgagaatattctgcagctataaattttgaaccattgatgtgcaaagcaagacctgaagcccactccggaaactaaagtgaggctcgctaaccct

SEQ ID NO: 606032 - DNA, 120 bp, Artificial Sequence
  ENSG00000175354_26 (sequence is synthesized)
ctagattgcctcacagttgtttgtttacaaagtaaactttacatccaggggatgaagagcacccaccagcagaagactttgcagaacctttaattggatgtgttaagtgtttttaatgag

SEQ ID NO: 606033 - DNA, 120 bp, Artificial Sequence
  ENSG00000175354_27 (sequence is synthesized)
tgtatgaaatgtagaaagatgtacaagaaataaattaggggagattactttgtattgtactgccattcctactgtatttttatactttttggcagcattaaatatttttgttaaatagtc

SEQ ID NO: 606034 - DNA, 120 bp, Artificial Sequence
  ENSG00000175354_28 (sequence is synthesized)
gaatctattagaattttctaaaatggagcccatttgtcttttcagtcttgcaagtaaagtctttaaaacaattaagcctcccaatgatttaaccgtattttcttacccccccaccctgaa

SEQ ID NO: 606035 - DNA, 120 bp, Artificial Sequence
  ENSG00000175354_29 (sequence is synthesized)
taatatttacaaagaaataataacgtgaatttttaaaaaccccgtccttcagttgttataaatgatagttcattcttggtaagtatatctgtaacaaaatactggggaaggacatgaggt

SEQ ID NO: 606036 - DNA, 120 bp, Artificial Sequence
  ENSG00000175354_30 (sequence is synthesized)
atggtgaacacttaaaattctgccagccagcttaaatacataatctaaatttaacccacgtaacacctcttctaggtaaacagcattctccctatattcagatgagaaaactgagtcaaa

SEQ ID NO: 606037 - DNA, 120 bp, Artificial Sequence
  ENSG00000175354_31 (sequence is synthesized)
gaataagtaacttgcccaagattgcacagctagtacatgacagaactgagattcactctgcagtctgtagacttccagtaactccaaacctcatactttttcttttatgttacacggact

SEQ ID NO: 606038 - DNA, 120 bp, Artificial Sequence
  ENSG00000175354_32 (sequence is synthesized)
ctgtttttaatggaatatttaaatgagatatttaagtgggaaagtaatagacaaccactcttacctgttaaaatccaaagtaattctctagtttttaaatggagcacatttaaaaaactt

SEQ ID NO: 606039 - DNA, 120 bp, Artificial Sequence
  ENSG00000175354_33 (sequence is synthesized)
tgtgcaccagtttgaactaccactgcaacagagaaatactagaacatcagagtattctctaaaccagatcattacttcattcactttgattgaattgagttgcttattttaaaaagactt

SEQ ID NO: 606040 - DNA, 120 bp, Artificial Sequence
  ENSG00000175354_34 (sequence is synthesized)
ctggatgcatggaaaacatatatattttgcagcactcagaatcaatacaaagtaccttcagccactttggttcacattctgaagattcatgtaataaacacccatagtagttgtgggctc

SEQ ID NO: 606041 - DNA, 120 bp, Artificial Sequence
  ENSG00000175354_35 (sequence is synthesized)
acattatctaatgagaatgttttcttgatgacttgacatttctccgtcactgttggataatcagagaaaaaaaggacgttcagaacaccaaggtgcttggtacaattatgccaagtgccc

SEQ ID NO: 606042 - DNA, 120 bp, Artificial Sequence
  ENSG00000175354_36 (sequence is synthesized)
tgtctttaaagggagtagcctaattctcagcatttgggagtttttgactaaatgtgtggatatgatttgtatttcctatttcttaatatatatgtgaagatacaatactgacaagtactt

SEQ ID NO: 606043 - DNA, 120 bp, Artificial Sequence
  ENSG00000175354_37 (sequence is synthesized)
aactcaactgcccttacaatagtcattccatccatctgttgcttatttgaattctcatttatttttactttatggcattaaaatacaataaatctgtcaattatgtattttatattagta

SEQ ID NO: 606044 - DNA, 120 bp, Artificial Sequence
  ENSG00000175354_38 (sequence is synthesized)
gtagcttaagattgggtcacttcatttcggtagatataattgttagtattatccttcaggacaaaaagcatctgctaacaacctgtggtttaaaaatataggccaactttatgttcaaac

SEQ ID NO: 606045 - DNA, 120 bp, Artificial Sequence
  ENSG00000175354_39 (sequence is synthesized)
attatgttgataatatttttagcagtattacacagtggaggtccaaattggattagacttttgcattgaattccaaagtattggtaagtctagcacatagtataaagtcttgctaaattc

SEQ ID NO: 606046 - DNA, 120 bp, Artificial Sequence
  ENSG00000175354_40 (sequence is synthesized)
ttgtgggtacattatttttaaaacctgtctgtctgtcggtatcacacagaggtcacttcttgagtaaaataagatgaccttaagaattcacataattcttgaagaagaatataagtcacg

SEQ ID NO: 606047 - DNA, 120 bp, Artificial Sequence
  ENSG00000175354_41 (sequence is synthesized)
atgcttccacatgaggccgcgtcacaccaccatcgtttggaaatccagcaccccagccgttttaccctaagataacagtgcagcacttagtgtggttgaatgtgtcatgtgggaatgatt

SEQ ID NO: 606048 - DNA, 120 bp, Artificial Sequence
  ENSG00000175354_42 (sequence is synthesized)
tttggtcaccttttcagttcattgttagtccttttatgtttgtgtgcatctatgttcgtctgtgtgtttggtaaatatgaattgaatagatgacttcttattttatgttttaggccaaga

SEQ ID NO: 606049 - DNA, 120 bp, Artificial Sequence
  ENSG00000175354_43 (sequence is synthesized)
gcgcggcccgggtctgggggtccttgggaaagccgtgggggcgctcgggcgcgcgcccccgggccgcagcttcgccgtagctcccacgccgctgtgcttggttcttgctcgcggacagct

SEQ ID NO: 606050 - DNA, 120 bp, Artificial Sequence
  ENSG00000175354_44 (sequence is synthesized)
ctttctctggccgggtgttttgtggccggtttacttcatagtacttctaggaattcttcctgtggtttgaggatggctcctgcctgttcccacccctcacccccggcagcaaaacctatg

SEQ ID NO: 606051 - DNA, 120 bp, Artificial Sequence
  ENSG00000175354_45 (sequence is synthesized)
aggagacaccagagctcagtctctctccctccctgcacaggtgcagagggaaggaactgggagcacacagcaagaaagtggctgttcacaagctaggacctgaccctgctggcaccttga

SEQ ID NO: 606052 - DNA, 120 bp, Artificial Sequence
  ENSG00000175354_46 (sequence is synthesized)
aaccagacttacaaggatgatgatcacagtcgtgttaaactgcaaaatgctgagaatgattatattaatgccagtttagttgacatagaagaggcacaaaggagttacatcttaacacag

SEQ ID NO: 606053 - DNA, 120 bp, Artificial Sequence
  ENSG00000175354_47 (sequence is synthesized)
aaaaaaaagaaagagaaagaggatattggaataaacgctaatatgcacctttgggagctgctttttgaaatattggttcttgaaattcgaaatgagtcccatgactatcctcatagagtg

SEQ ID NO: 606054 - DNA, 120 bp, Artificial Sequence
  ENSG00000175354_48 (sequence is synthesized)
ccaaatagcgtgtattaataatagctcagttccatttactgatttgtttttcctttgtttatgtcatatattatctttccaagagattgtgagtttatgctactgccaatttggtatgag

SEQ ID NO: 606055 - DNA, 120 bp, Artificial Sequence
  ENSG00000175354_49 (sequence is synthesized)
ggcctgtttttaaaagagctgcatgatattcacttggatgtaccacgatttattcaaccagtcttttctttgtcattagacatttagtttatttaaagcctttcaacattataagtaact

SEQ ID NO: 606056 - DNA, 120 bp, Artificial Sequence
  ENSG00000175354_50 (sequence is synthesized)
gtgaaagatatctttgtgctatgagttgcctacattttggatcattgccactaagaaagaaattaactagtgactcaattattccttgctttttttgagcaaaaatcatattaaaaataa

SEQ ID NO: 606057 - DNA, 120 bp, Artificial Sequence
  ENSG00000175354_51 (sequence is synthesized)
ttagatttaaaatttttggttaaattatactttaaagcaaagatccttgccatttagatctagtttggtattaaatgagaacggtggttctctactgtgttggtgggggatatgttcatg

SEQ ID NO: 606058 - DNA, 120 bp, Artificial Sequence
  ENSG00000175354_52 (sequence is synthesized)
taaacatcctgcaatacacaagacagtccccacttgcccccccccccccaaaaaaaattagctagcctaaaatgtcagtagtgctgaggctgagaaaccttggattaacaggtttcactg

SEQ ID NO: 606059 - DNA, 120 bp, Artificial Sequence
  ENSG00000175354_53 (sequence is synthesized)
ctgatgggaaacttttttttttttaacagggccttactctgttgcccaggctagagtgcagtagcaggatgctagctcactgcagtcttgaactcctgagttcaagcaatcctcctgtct

SEQ ID NO: 606060 - DNA, 120 bp, Artificial Sequence
  ENSG00000175354_54 (sequence is synthesized)
tcctgtctctgcctcccaagaagctggaactacacatgcacaccaccatccccagctaattaaaaaaattttttggcagagctggtgtcttactgtgttgcccaggctggtctcaaactc

SEQ ID NO: 606061 - DNA, 120 bp, Artificial Sequence
  ENSG00000175354_55 (sequence is synthesized)
aagtgatccttccagctgggcctcccaaagcaccaggattgcaggaatgtgcattttaccttgctgtcacaggatggctcctgcctgttcccacccctcacccccggcagcaaaacctat

SEQ ID NO: 606062 - DNA, 120 bp, Artificial Sequence
  ENSG00000175354_56 (sequence is synthesized)
agatcggtggttaggggtggaatggggaagagtgtgcctgccaaggggcacacagaacctttgtgctgatggaatagtattcaatgcagggaacagaccagttcatcatggaggcattcc

SEQ ID NO: 606063 - DNA, 120 bp, Artificial Sequence
  ENSG00000175354_57 (sequence is synthesized)
atcagagcgtctagttagagaagatatgtcatggactgcatcggcacagaagtggggtttatgtgagagaggagttggaagtcacacctgagtggagagcaacgtgaaaaggtgatgtca

SEQ ID NO: 606064 - DNA, 120 bp, Artificial Sequence
  ENSG00000175354_58 (sequence is synthesized)
gcaaaaaagactggtgaggaacaaccacagaagtggggaggaaagcagtggagggagttgagggtgagcagggccacctgacaggtaagggccagcctgagagggccatgacattgagca

SEQ ID NO: 606065 - DNA, 120 bp, Artificial Sequence
  ENSG00000175354_59 (sequence is synthesized)
agacagatacctggagttcaggagagaaggaaattcgaaatgagtcccatgactatcctcatagagtggccaagtttccagaaaacagaaatcgaaacagatacagagatgtaagcccat

SEQ ID NO: 606066 - DNA, 120 bp, Artificial Sequence
  ENSG00000175356_0 (sequence is synthesized)
cgcactccgccgcctctgcccgcaaccgctgagccatccatgggggtcgcgggccgcaaccgtcccggggcggcctgggcggtgctgctgctgctgctgctgctgccgccactgctgctg

SEQ ID NO: 606067 - DNA, 120 bp, Artificial Sequence
  ENSG00000175356_1 (sequence is synthesized)
tgctgctgctgctgctgccgccactgctgctgctggcgggggccgtcccgccgggtcggggccgtgccgcggggccgcaggaggatgtagatgagtgtgcccaagggctagatgactgcc

SEQ ID NO: 606068 - DNA, 120 bp, Artificial Sequence
  ENSG00000175356_2 (sequence is synthesized)
atgccgacgccctgtgtcagaacacacccacctcctacaagtgctcctgcaagcctggctaccaaggggaaggcaggcagtgtgaggacatcgatgaatgtggaaatgagctcaatggag

SEQ ID NO: 606069 - DNA, 120 bp, Artificial Sequence
  ENSG00000175356_3 (sequence is synthesized)
gctgtgtccatgactgtttgaatattccaggcaattatcgttgcacttgttttgatggcttcatgttggctcatgacggtcataattgtcttgatgtggacgagtgcctggagaacaatg

SEQ ID NO: 606070 - DNA, 120 bp, Artificial Sequence
  ENSG00000175356_4 (sequence is synthesized)
gcggctgccagcatacctgtgtcaacgtcatggggagctatgagtgctgctgcaaggaggggtttttcctgagtgacaatcagcacacctgcattcaccgctcggaagagggcctgagct

SEQ ID NO: 606071 - DNA, 120 bp, Artificial Sequence
  ENSG00000175356_5 (sequence is synthesized)
gcatgaataaggatcacggctgtagtcacatctgcaaggaggccccaaggggcagcgtcgcctgtgagtgcaggcctggttttgagctggccaagaaccagagagactgcatcttgacct

SEQ ID NO: 606072 - DNA, 120 bp, Artificial Sequence
  ENSG00000175356_6 (sequence is synthesized)
gtaaccatgggaacggtgggtgccagcactcctgtgacgatacagccgatggcccagagtgcagctgccatccacagtacaagatgcacacagatgggaggagctgccttgagcgagagg

SEQ ID NO: 606073 - DNA, 120 bp, Artificial Sequence
  ENSG00000175356_7 (sequence is synthesized)
acactgtcctggaggtgacagagagcaacaccacatcagtggtggatggggataaacgggtgaaacggcggctgctcatggaaacgtgtgctgtcaacaatggaggctgtgaccgcacct

SEQ ID NO: 606074 - DNA, 120 bp, Artificial Sequence
  ENSG00000175356_8 (sequence is synthesized)
gtaaggatacttcgacaggtgtccactgcagttgtcctgttggattcactctccagttggatgggaagacatgtaaagatattgatgagtgccagacccgcaatggaggttgtgatcatt

SEQ ID NO: 606075 - DNA, 120 bp, Artificial Sequence
  ENSG00000175356_9 (sequence is synthesized)
tctgcaaaaacatcgtgggcagttttgactgcggctgcaagaaaggatttaaattattaacagatgagaagtcttgccaagatgtggatgagtgctctttggataggacctgtgaccaca

SEQ ID NO: 606076 - DNA, 120 bp, Artificial Sequence
  ENSG00000175356_10 (sequence is synthesized)
gctgcatcaaccaccctggcacatttgcttgtgcttgcaaccgagggtacaccctgtatggcttcacccactgtggagacaccaatgagtgcagcatcaacaacggaggctgtcagcagg

SEQ ID NO: 606077 - DNA, 120 bp, Artificial Sequence
  ENSG00000175356_11 (sequence is synthesized)
tctgtgtgaacacagtgggcagctatgaatgccagtgccaccctgggtacaagctccactggaataaaaaagactgtgtggaagtgaaggggctcctgcccacaagtgtgtcaccccgtg

SEQ ID NO: 606078 - DNA, 120 bp, Artificial Sequence
  ENSG00000175356_12 (sequence is synthesized)
tgtccctgcactgcggtaagagtggtggaggagacgggtgcttcctcagatgtcactctggcattcacctctcttcaggactgcaaggggcctactctgtcacctgtggctcttcctctc

SEQ ID NO: 606079 - DNA, 120 bp, Artificial Sequence
  ENSG00000175356_13 (sequence is synthesized)
tgactctgcttttggggatgtcaccaccatcaggacaagtgtaacctttaagctaaatgaaggcaagtgtagtttgaaaaatgctgagctgtttcccgagggtctgcgaccagcactacc

SEQ ID NO: 606080 - DNA, 120 bp, Artificial Sequence
  ENSG00000175356_14 (sequence is synthesized)
agagaagcacagctcagtaaaagagagcttccgctacgtaaaccttacatgcagctctggcaagcaagtcccaggagcccctggccgaccaagcacccctaaggaaatgtttatcactgt

SEQ ID NO: 606081 - DNA, 120 bp, Artificial Sequence
  ENSG00000175356_15 (sequence is synthesized)
tgagtttgagcttgaaactaaccaaaaggaggtgacagcttcttgtgacctgagctgcatcgtaaagcgaaccgagaagcggctccgtaaagccatccgcacgctcagaaaggccgtcca

SEQ ID NO: 606082 - DNA, 120 bp, Artificial Sequence
  ENSG00000175356_16 (sequence is synthesized)
cagggagcagtttcacctccagctctcaggcatgaacctcgacgtggctaaaaagcctcccagaacatctgaacgccaggcagagtcctgtggagtgggccagggtcatgcagaaaacca

SEQ ID NO: 606083 - DNA, 120 bp, Artificial Sequence
  ENSG00000175356_17 (sequence is synthesized)
atgtggtctgtgtcaacctggtgaatattctgcagatggctttgcaccttgccagctctgtgccctgggcacgttccagcctgaagctggtcgaacttcctgcttcccctgtggaggagg

SEQ ID NO: 606084 - DNA, 120 bp, Artificial Sequence
  ENSG00000175356_18 (sequence is synthesized)
ccttgccaccaaacatcagggagctacttcctttcaggactgtgaaaccagagttcaatgttcacctggacatttctacaacaccaccactcaccgatgtattcgttgcccagtgggaac

SEQ ID NO: 606085 - DNA, 120 bp, Artificial Sequence
  ENSG00000175356_19 (sequence is synthesized)
ataccagcctgaatttggaaaaaataattgtgtttcttgcccaggaaatactacgactgactttgatggctccacaaacataacccagtgtaaaaacagaagatgtggaggggagctggg

SEQ ID NO: 606086 - DNA, 120 bp, Artificial Sequence
  ENSG00000175356_20 (sequence is synthesized)
agatttcactgggtacattgaatccccaaactacccaggcaattacccagccaacaccgagtgtacgtggaccatcaacccaccccccaagcgccgcatcctgatcgtggtccctgagat

SEQ ID NO: 606087 - DNA, 120 bp, Artificial Sequence
  ENSG00000175356_21 (sequence is synthesized)
cttcctgcccatagaggacgactgtggggactatctggtgatgcggaaaacctcttcatccaattctgtgacaacatatgaaacctgccagacctacgaacgccccatcgccttcacctc

SEQ ID NO: 606088 - DNA, 120 bp, Artificial Sequence
  ENSG00000175356_22 (sequence is synthesized)
caggtcaaagaagctgtggattcagttcaagtccaatgaagggaacagcgctagagggttccaggtcccatacgtgacatatgatgaggactaccaggaactcattgaagacatagttcg

SEQ ID NO: 606089 - DNA, 120 bp, Artificial Sequence
  ENSG00000175356_23 (sequence is synthesized)
agatggcaggctctatgcatctgagaaccatcaggaaatacttaaggataagaaacttatcaaggctctgtttgatgtcctggcccatccccagaactatttcaagtacacagcccagga

SEQ ID NO: 606090 - DNA, 120 bp, Artificial Sequence
  ENSG00000175356_24 (sequence is synthesized)
gtcccgagagatgtttccaagatcgttcatccgattgctacgttccaaagtgtccaggtttttgagaccttacaaatgactcagcccacgtgccactcaatacaaatgttctgctatagg

SEQ ID NO: 606091 - DNA, 120 bp, Artificial Sequence
  ENSG00000175356_25 (sequence is synthesized)
gttggtgggacagagctgtcttccttctgcatgtcagcacagtcgggtattgctgcctcccgtatcagtgactcattagagttcaatttttatagataatacagatattttggtaaattg

SEQ ID NO: 606092 - DNA, 120 bp, Artificial Sequence
  ENSG00000175356_26 (sequence is synthesized)
tttcccagcatcgtggatgtagactgagaatggctttgagtggcatcagcttctcactgctgtgggcggatgtcttggatagatcacgggctggctgagctggactttggtcagcctagg

SEQ ID NO: 606093 - DNA, 120 bp, Artificial Sequence
  ENSG00000175356_27 (sequence is synthesized)
tgagactcacctgtccttctggggtcttactcctcctcaaggagtctgtagtggaaaggaggccacagaataagctgcttattctgaaacttcagcttcctctagcccggccctctctaa

SEQ ID NO: 606094 - DNA, 120 bp, Artificial Sequence
  ENSG00000175356_28 (sequence is synthesized)
gggagccctctgcactcgtgtgcaggctctgaccaggcagaacaggcaagaggggagggaaggagacccctgcaggctccctccacccaccttgagacctgggaggactcagtttctcca

SEQ ID NO: 606095 - DNA, 120 bp, Artificial Sequence
  ENSG00000175356_29 (sequence is synthesized)
cagccttctccagcctgtgtgatacaagtttgatcccaggaacttgagttctaagcagtgctcgtgaaaaaaaaaagcagaaagaattagaaataaataaaaactaagcacttctggaga

SEQ ID NO: 606096 - DNA, 120 bp, Artificial Sequence
  ENSG00000175356_30 (sequence is synthesized)
tattatgatggagcacgagaacgctgcattttatgtccaaatggaaccttccaaaatgaggaaggacaaatgacttgtgaaccatgcccaagaccaggaaattctggggccctgaagacc

SEQ ID NO: 606097 - DNA, 120 bp, Artificial Sequence
  ENSG00000175356_31 (sequence is synthesized)
agcaaatgcactatgctgactctcgcaccttcagctgtgccctctgacactctgctggccattgcctgagggactggggagttcaggtgaaatgtaatttcctcagtggatgagaatcat

SEQ ID NO: 606098 - DNA, 120 bp, Artificial Sequence
  ENSG00000175356_32 (sequence is synthesized)
caattgtcatgaaaaggcgatttcaccaaccctgagtcggtattgccaagggttctactccccaagtgggcttcccatcacaagggatctgaggtccaggtgggtgtggtgaggcccagc

SEQ ID NO: 606099 - DNA, 120 bp, Artificial Sequence
  ENSG00000175356_33 (sequence is synthesized)
ctgtcatgtatgccttccttccccagtctcaaatgtgagagacggactctgctccgtggacatgagcagccccttgaagggtggtctcattctctaacagtaacagcactgccagaaaca

SEQ ID NO: 606100 - DNA, 120 bp, Artificial Sequence
  ENSG00000175356_34 (sequence is synthesized)
ccccctgaatgccacacgatcatctcactttgggtcaggccagcagggcctcacgatcatttcttgaacttgaattttcagtgttattgaatctttaaacatttaaatccccaagcaaaa

SEQ ID NO: 606101 - DNA, 120 bp, Artificial Sequence
  ENSG00000175356_35 (sequence is synthesized)
atctcattacagtgaataaaaaggaatccaatcaaacaagccaccacttccctaatggatggactacctacaactatagtgttttgttatttcaataacaattctatgcacagccaattc

SEQ ID NO: 606102 - DNA, 120 bp, Artificial Sequence
  ENSG00000175356_36 (sequence is synthesized)
tccataccaaagtactaaaaaaatgtttaacaagcatttttgaagaaaacaaagagaacttcattatggttaaacttgcttttcatctcagtgttgctttttttaacctgttaataacat

SEQ ID NO: 606103 - DNA, 120 bp, Artificial Sequence
  ENSG00000175356_37 (sequence is synthesized)
tgattcttaaaaagtcctaatcaaacttctttatttggatgggccctaaatattcattttcagatttctcttcaaaagtttgaacatcatcattaaaaaaaaaatagcattaaaacaagc

SEQ ID NO: 606104 - DNA, 120 bp, Artificial Sequence
  ENSG00000175356_38 (sequence is synthesized)
gctcagtgaagaactggatcaaggaggaggagtgaccagccaggtcaaaagctactgatgcatcaaggaggatgaagaccaagaactggccgttgggatttaacaacatgaaggtcattg

SEQ ID NO: 606105 - DNA, 120 bp, Artificial Sequence
  ENSG00000175356_39 (sequence is synthesized)
tctctctcctgcattgcaggggatgcctaggcagtgtgtaggcctaagcctgagaactacccaggccttcccatactttggaagcagttgacacttgacttcttggtttccatctttgca

SEQ ID NO: 606106 - DNA, 120 bp, Artificial Sequence
  ENSG00000175356_40 (sequence is synthesized)
ctgtgctgtgtagccctgtgtgtaaacagcaggcactcatgtgccattgactcagggtcagaagcaccacagcattgactgtgtgctctctgactgaggtgggaactgcggtcagcactg

SEQ ID NO: 606107 - DNA, 120 bp, Artificial Sequence
  ENSG00000175356_41 (sequence is synthesized)
ctgagagagacagagagcctcatctacccaaaagcaaccaactggcaacctctcctatctggaatcaggaagaaagcaaaaagacactgagacttcaaaataaatatggctgttctcaac

SEQ ID NO: 606108 - DNA, 120 bp, Artificial Sequence
  ENSG00000175356_42 (sequence is synthesized)
tgaagcgtcttgctgggccccagaggtagtgatcctgcaggtcagtcttcccctctgtgctcactggggcgttttggaccctcttccacaaggacccagagagccagtgaggatcatgca

SEQ ID NO: 606109 - DNA, 120 bp, Artificial Sequence
  ENSG00000175356_43 (sequence is synthesized)
gtgttggccccagacaaggcctcatactgagttgcaactgatggcttggagactgaccgagcctggccaggtggggacctgtcctcctatcctgattcatggtccagtgtccataaagga

SEQ ID NO: 606110 - DNA, 120 bp, Artificial Sequence
  ENSG00000175356_44 (sequence is synthesized)
agactgctgtcaacacagcttatgggcagtgtaatgaggggctctctgcagccagactgcctggatctctgtcccagttccacctcttactagttctatgatctcgggcacacattctga

SEQ ID NO: 606111 - DNA, 120 bp, Artificial Sequence
  ENSG00000175356_45 (sequence is synthesized)
atctttctgcacttgtcttctcatctgttaaaatggggctagtaacagttgctaccttataaggttataagggctaaaggagttcatagatgtgaaacacttagaataggccaggcacag

SEQ ID NO: 606112 - DNA, 120 bp, Artificial Sequence
  ENSG00000175356_46 (sequence is synthesized)
tggctcacacctgtaatcccaggctgagggaggaggctgaaccaggattttgtgaccaggctcggtgagaccctgtctctatacatttttttttttttaattagctgggcatgatggtgc

SEQ ID NO: 606113 - DNA, 90 bp, Artificial Sequence
  ENSG00000175356_47 (sequence is synthesized)
ttttttggttccggctactcgggaggctgagatgggtgaatcgcttaagcctgggaggtggaggatgcagtgagccgtgatcatgccact

SEQ ID NO: 606114 - DNA, 120 bp, Artificial Sequence
  ENSG00000175356_48 (sequence is synthesized)
aaacaaacaaacaaacaaacaaacaaagaatgatgatgacacatggagccactatataaacgtttgctcttcttattagtggttaaaatgtctgaagtcaagtataggtttaaatccttg

SEQ ID NO: 606115 - DNA, 120 bp, Artificial Sequence
  ENSG00000175356_49 (sequence is synthesized)
agtataggtttaaatccttgttttaccacatactggctatatgaccctgggcaagtatttaatctctctattaaaaaggtaacggttgcaccaactttctgtggttttcagaagattaaa

SEQ ID NO: 606116 - DNA, 120 bp, Artificial Sequence
  ENSG00000175356_50 (sequence is synthesized)
tgagacaaagtccataaattgcctagcatgctgcctgatcttaggcagcaaatggtggtgatgacaattagatgacagcaggtcagttctggaatgggaggccctcacccagctcctaca

SEQ ID NO: 606117 - DNA, 120 bp, Artificial Sequence
  ENSG00000175356_51 (sequence is synthesized)
ggtctttcaggtgtagcctcccctgggggtccacaattaccagctgaatctactctgtttccaggacctttgacttatgatggctcagctgggcctgaagagcttttgagcataacttat

SEQ ID NO: 606118 - DNA, 120 bp, Artificial Sequence
  ENSG00000175356_52 (sequence is synthesized)
tgtatggtttgagtgtttagaaagatgagcatctactctatgcctgatcagtgatgagtcttgaaccccacccttctccaacttcccttggcagcttcatccaattctgtgacaacatat

SEQ ID NO: 606119 - DNA, 120 bp, Artificial Sequence
  ENSG00000175356_53 (sequence is synthesized)
agatgctggcatctcctctctggattgtcattgcctgctttcgtgtcaggctcagcccttgcaccgtgagctcccagagggaaaagggggatctcttgcctgtctccatcccctgggcct

SEQ ID NO: 606120 - DNA, 120 bp, Artificial Sequence
  ENSG00000175356_54 (sequence is synthesized)
ggcaggtggtaaatgcttctgaagagatgaggagagggcccagagagctgcagcgcagcgtcctgcctgcagagggggtgagaggccacactgcagccgtctgcctggagcccacggaca

SEQ ID NO: 606121 - DNA, 120 bp, Artificial Sequence
  ENSG00000175356_55 (sequence is synthesized)
cttcggggcttcctttgcatggtatagttggtgaggctctggggaaacccacgagttcacagaagtcaataagggcttcagatgaattagcaatttgtgatcatattgggttaaattttc

SEQ ID NO: 606122 - DNA, 120 bp, Artificial Sequence
  ENSG00000175356_56 (sequence is synthesized)
tagatctcagattttgcttgaaatataagccaaagaaatgaaaaaaggtttggctcagaaaggataactttgatgaacaaagatctaatatccagccttcctgctgggtctagtttttgg

SEQ ID NO: 606123 - DNA, 120 bp, Artificial Sequence
  ENSG00000175356_57 (sequence is synthesized)
agaactggccttattgagaagagcagaatctaacattcctttttctttcccagcacacatttccagtattattttatagaattcttttggaaattaaaaataaaaaggatcaggattcat

SEQ ID NO: 606124 - DNA, 120 bp, Artificial Sequence
  ENSG00000175356_58 (sequence is synthesized)
gtattagggaggcttcttttcccaatctactctcaaatcacacagacaaataaacctaaagctcactctagtcacttttgactgcctattttagagaagcacagctcagtaaaagagagc

SEQ ID NO: 606125 - DNA, 120 bp, Artificial Sequence
  ENSG00000175356_59 (sequence is synthesized)
catacgtgacatatgatggtaagcacagcctgcagcacatggaaagagcgtctctgctttgaacagagccaacttcggagccagctggcaaactgctgacaagcacacatgctcagaaag

SEQ ID NO: 606126 - DNA, 120 bp, Artificial Sequence
  ENSG00000175356_60 (sequence is synthesized)
gcaggcaagatgaggggaaaagacattgctgactcacaagtgccaaattttaacaggcatttggggacactgacaataggaggaaaagatgttttataaaatatattaaaagtgagcata

SEQ ID NO: 606127 - DNA, 120 bp, Artificial Sequence
  ENSG00000175376_0 (sequence is synthesized)
agtacggttttcggagggatcagactcagactcacgtcgcactcctcgcagttggactggtgggaactgggaacactggagacctgatttctaactgacgctaccgtcgcggccgccggc

SEQ ID NO: 606128 - DNA, 120 bp, Artificial Sequence
  ENSG00000175376_1 (sequence is synthesized)
aagttcctttactgtgttttcttggttcagccttgaagtgagtcgtggacgatcctctctcagcgtccagcctagacggcggtgttgctccggcagcgttcctgggagccgagggccaga

SEQ ID NO: 606129 - DNA, 120 bp, Artificial Sequence
  ENSG00000175376_2 (sequence is synthesized)
gactaagttcctgggttctgagcctgccatccaaggaactcaggaggaggagttgacagtctcttcgttcctaaccagtgtgggacgacttcagcatgtctcaggccaccaagaggaagc

SEQ ID NO: 606130 - DNA, 120 bp, Artificial Sequence
  ENSG00000175376_3 (sequence is synthesized)
atgtggtgaaggaggtgctaggggagcacatagtgccctccgaccagcagcagattgtcagggtactcaggaccccagggaacaatctgcatgaggtggagacagcccaagggcagcgct

SEQ ID NO: 606131 - DNA, 120 bp, Artificial Sequence
  ENSG00000175376_4 (sequence is synthesized)
tcctggtgagcatgccctccaaataccgcaagaacatctggatcaagagaggggactttctcattgttgaccccattgaagagggagaaaaggtgaaggctgaaatctcgtttgtgctct

SEQ ID NO: 606132 - DNA, 120 bp, Artificial Sequence
  ENSG00000175376_5 (sequence is synthesized)
gcaaggaccacgtgcgctctctgcagaaggaggggttttggcctgaggccttctctgaagtggctgagaaacacaacaacaggaacagacaaactcaaccagaactcccagctgagccac

SEQ ID NO: 606133 - DNA, 120 bp, Artificial Sequence
  ENSG00000175376_6 (sequence is synthesized)
agttatcaggagaggagtccagctcagaagatgattctgacctgtttgttaacacaaaccgcagacagtatcatgagagtgaggaggagagtgaagaggaggaggcagcctgagactcca

SEQ ID NO: 606134 - DNA, 120 bp, Artificial Sequence
  ENSG00000175376_7 (sequence is synthesized)
ggacccaattctccacttgctcagggactggcccctggctcttctgggcttggacattcccagggtgctctgcacatcttcacccctgcatgaggacaaagcagggctcctctctgaact

SEQ ID NO: 606135 - DNA, 120 bp, Artificial Sequence
  ENSG00000175376_8 (sequence is synthesized)
gatcttttgattcagagaattaaacccctggtgggttggtgacttgttctggtgtctgagtggctctctcgggggagggagattgtgatgaagtgaaaaactgctccctatttattagag

SEQ ID NO: 606136 - DNA, 120 bp, Artificial Sequence
  ENSG00000175376_9 (sequence is synthesized)
accttgtgggtgggtgggctgaatggggaggaaatgggaaatggctggagtctttcccaggtggtttgttctttcttattgggcacttagaaagtgccaggccgtgctctgggccttctt

SEQ ID NO: 606137 - DNA, 120 bp, Artificial Sequence
  ENSG00000175376_10 (sequence is synthesized)
gcatgtgtttaacagctgggagcactcctgcttccttgcctgcttgcagttcataccaatttaagcattcaggatgacagccctaggacctaacacccacctgcctctaagagacgctca

SEQ ID NO: 606138 - DNA, 120 bp, Artificial Sequence
  ENSG00000175376_11 (sequence is synthesized)
ggagcccatggtgcctcgtgctgttctccccgcctttctagtcaccctgtgtacgggagtgctcacctccagctactgtgtccatccccacatacgacctcatctctcccactctgcacc

SEQ ID NO: 606139 - DNA, 120 bp, Artificial Sequence
  ENSG00000175376_12 (sequence is synthesized)
acttccagaaggtggctggcaaatctctctatccttaactttgttttgaatggtccatccatctcctgactttatttgaaacctgattattccctgaggacattgattgtcttataacct

SEQ ID NO: 606140 - DNA, 120 bp, Artificial Sequence
  ENSG00000175376_13 (sequence is synthesized)
tttaaatagaggctgcttttccaccctcacccttcattcttctaaccagccctgacattctcatgagtaaccttctgccttcacttccctcttgtgtagcatcaattccgtagtccaccc

SEQ ID NO: 606141 - DNA, 120 bp, Artificial Sequence
  ENSG00000175376_14 (sequence is synthesized)
tacacccctctgtctccctccattctgttccgctagtaaaaccctaaccctgggtaaacccaatcattcacctctgtgcccaaacccaagtcaccatcattaggtgagaaaacagccagc

SEQ ID NO: 606142 - DNA, 120 bp, Artificial Sequence
  ENSG00000175376_15 (sequence is synthesized)
ctggccaccagttgtaccttacgtttatcattacaaacctcagatggacactaagcactgcccagcagatctactctgggatgtctgtttcaaaacttctgtcttatctatcaattcccc

SEQ ID NO: 606143 - DNA, 120 bp, Artificial Sequence
  ENSG00000175376_16 (sequence is synthesized)
cttgtggtagttaccacaacacatgcctcattaagaaacagcaaccatcagagggaatgcctgcctccctgttaccagctctgcagatgtgcacatatcttcctgtcgtaagccaatggg

SEQ ID NO: 606144 - DNA, 82 bp, Artificial Sequence
  ENSG00000175376_17 (sequence is synthesized)
ctgcagatgtgcacatatcttcctgtcgtaagccaatgggacttaaaccttacctcttgtgttttggagtctccctgtgttg

SEQ ID NO: 606145 - DNA, 75 bp, Artificial Sequence
  ENSG00000175376_18 (sequence is synthesized)
tcctgacctcaagtggtccacccaccttggcctccttgctttcttaaagactttggtcgggtatttgtgttgttg

SEQ ID NO: 606146 - DNA, 120 bp, Artificial Sequence
  ENSG00000175376_19 (sequence is synthesized)
ttgctttcttaaagactttggtcgggtatttgtgttgttgagtattgtgtctgggtgtgggtatttgattctttttttgttttgtgtttttggctgtcctgtctattggatgtgatatgt

SEQ ID NO: 606147 - DNA, 120 bp, Artificial Sequence
  ENSG00000175376_20 (sequence is synthesized)
tatggatgtgatgtgttagtgtcgagcgtgctgtagaatctcccatttctgaaacaggcgtgaaaacctgtactgattcccacgtcctccagctaccacttcatttgtctgtttctcatt

SEQ ID NO: 606148 - DNA, 120 bp, Artificial Sequence
  ENSG00000175376_21 (sequence is synthesized)
ttctcatttactttctcttatagcgtggctttaaacatatatacatttgtatatatgtatatatgaatataatgtataaaatgtatgtagatgtatatacaaaaaataaacgagatgggt

SEQ ID NO: 606149 - DNA, 120 bp, Artificial Sequence
  ENSG00000175376_22 (sequence is synthesized)
gtacggttttcggagggatcagactcagactcacgtcgcactcctcgcagttggactggtgggaactgggaacactggagacctgatttctaactgacgctaccgtcgcggccgccgaac

SEQ ID NO: 606150 - DNA, 120 bp, Artificial Sequence
  ENSG00000175376_23 (sequence is synthesized)
tataaactagggaaaaggggaggttggagagaaactaagaaggccaacaggagaagtggtggcctcataccatactgtaacagtgctgagttagctgttatttttctgggacctagagaa

SEQ ID NO: 606151 - DNA, 120 bp, Artificial Sequence
  ENSG00000175376_24 (sequence is synthesized)
tttttctgggacctagagaagttgaatagttaggaaataaaccaaggtaggatttgaatccaggcagttagacttcagaacccatgttcttaaccaagacaccgtgtcacccctcagtaa

SEQ ID NO: 606152 - DNA, 120 bp, Artificial Sequence
  ENSG00000175376_25 (sequence is synthesized)
ttgagaggctgagatgggaggatcgcttgagaccagcctgggcagcataatgagaccttgtctctacaaaaagaaaaaaattagttgggcacgtgcctgtgatcccagctactcaggagg

SEQ ID NO: 606153 - DNA, 80 bp, Artificial Sequence
  ENSG00000175387_0 (sequence is synthesized)
gcgcgcgtcctcaccccctccttccccgcgggcggcggccaggctccctcccctccccttccctctcctcccctcccctc

SEQ ID NO: 606154 - DNA, 120 bp, Artificial Sequence
  ENSG00000175387_1 (sequence is synthesized)
ccgggcccgggcctgggggcggggcgggaagacggcggccgggagtgttttcagttccgcctccaatcgcccattcccctcttcccctcccagccccctccatcccatcggaagaggaag

SEQ ID NO: 606155 - DNA, 120 bp, Artificial Sequence
  ENSG00000175387_2 (sequence is synthesized)
gaacaaaaggtcccggaccccccggatctgacggggcgggacctggcgccaccttgcaggttcgatacaagaggctgttttcctagcgtggcttgctgcctttggtaagaacatgtcgtc

SEQ ID NO: 606156 - DNA, 120 bp, Artificial Sequence
  ENSG00000175387_3 (sequence is synthesized)
catcttgccattcacgccgccagttgtgaagagactgctgggatggaagaagtcagctggtgggtctggaggagcaggcggaggagagcagaatgggcaggaagaaaagtggtgtgagaa

SEQ ID NO: 606157 - DNA, 120 bp, Artificial Sequence
  ENSG00000175387_4 (sequence is synthesized)
agcagtgaaaagtctggtgaagaagctaaagaaaacaggacgattagatgagcttgagaaagccatcaccactcaaaactgtaatactaaatgtgttaccataccaagcacttgctctga

SEQ ID NO: 606158 - DNA, 120 bp, Artificial Sequence
  ENSG00000175387_5 (sequence is synthesized)
aatttggggactgagtacaccaaatacgatagatcagtgggatacaacaggcctttacagcttctctgaacaaaccaggtctcttgatggtcgtctccaggtatcccatcgaaaaggatt

SEQ ID NO: 606159 - DNA, 120 bp, Artificial Sequence
  ENSG00000175387_6 (sequence is synthesized)
gccacatgttatatattgccgattatggcgctggcctgatcttcacagtcatcatgaactcaaggcaattgaaaactgcgaatatgcttttaatcttaaaaaggatgaagtatgtgtaaa

SEQ ID NO: 606160 - DNA, 120 bp, Artificial Sequence
  ENSG00000175387_7 (sequence is synthesized)
cccttaccactatcagagagttgagacaccagttttgcctccagtattagtgccccgacacaccgagatcctaacagaacttccgcctctggatgactatactcactccattccagaaaa

SEQ ID NO: 606161 - DNA, 120 bp, Artificial Sequence
  ENSG00000175387_8 (sequence is synthesized)
cactaacttcccagcaggaattgagccacagagtaattatattccagaaacgccacctcctggatatatcagtgaagatggagaaacaagtgaccaacagttgaatcaaagtatggacac

SEQ ID NO: 606162 - DNA, 120 bp, Artificial Sequence
  ENSG00000175387_9 (sequence is synthesized)
aggctctccagcagaactatctcctactactctttcccctgttaatcatagcttggatttacagccagttacttactcagaacctgcattttggtgttcgatagcatattatgaattaaa

SEQ ID NO: 606163 - DNA, 120 bp, Artificial Sequence
  ENSG00000175387_10 (sequence is synthesized)
tcagagggttggagaaaccttccatgcatcacagccctcactcactgtagatggctttacagacccatcaaattcagagaggttctgcttaggtttactctccaatgttaaccgaaatgc

SEQ ID NO: 606164 - DNA, 120 bp, Artificial Sequence
  ENSG00000175387_11 (sequence is synthesized)
cacggtagaaatgacaagaaggcatataggaagaggagtgcgcttatactacataggtggggaagtttttgctgagtgcctaagtgatagtgcaatctttgtgcagagccccaattgtaa

SEQ ID NO: 606165 - DNA, 120 bp, Artificial Sequence
  ENSG00000175387_12 (sequence is synthesized)
tcagagatatggctggcaccctgcaacagtgtgtaaaattccaccaggctgtaatctgaagatcttcaacaaccaggaatttgctgctcttctggctcagtctgttaatcagggttttga

SEQ ID NO: 606166 - DNA, 120 bp, Artificial Sequence
  ENSG00000175387_13 (sequence is synthesized)
agccgtctatcagctaactagaatgtgcaccataagaatgagttttgtgaaagggtggggagcagaataccgaaggcagacggtaacaagtactccttgctggattgaacttcatctgaa

SEQ ID NO: 606167 - DNA, 120 bp, Artificial Sequence
  ENSG00000175387_14 (sequence is synthesized)
tggacctctacagtggttggacaaagtattaactcagatgggatccccttcagtgcgttgctcaagcatgtcataaagcttcaccaatcaagtcccatgaaaagacttaatgtaacaact

SEQ ID NO: 606168 - DNA, 120 bp, Artificial Sequence
  ENSG00000175387_15 (sequence is synthesized)
cttctgtcatagcattgtgtgtggtccctatggactgtttactatccaaaagttcaagagagaaaacagcacttgaggtctcatcaattaaagcaccttgtggaatctgtttcctatatt

SEQ ID NO: 606169 - DNA, 120 bp, Artificial Sequence
  ENSG00000175387_16 (sequence is synthesized)
tgaatattagatgggaaaattagtgtctagaaatactctcccattaaagaggaagagaagattttaaagacttaatgatgtcttattgggcataaaactgagtgtcccaaaggtttatta

SEQ ID NO: 606170 - DNA, 120 bp, Artificial Sequence
  ENSG00000175387_17 (sequence is synthesized)
ataacagtagtagttatgtgtacaggtaatgtatcatgatccagtatcacagtattgtgctgtttatatacatttttagtttgcatagatgaggtgtgtgtgtgcgctgcttcttgatct

SEQ ID NO: 606171 - DNA, 120 bp, Artificial Sequence
  ENSG00000175387_18 (sequence is synthesized)
aggcaaacctttataaagttgcagtacctaatctgttattcccacttctctgttatttttgtgtgtcttttttaatatataatatatatcaagattttcaaattatttagaagcagattt

SEQ ID NO: 606172 - DNA, 120 bp, Artificial Sequence
  ENSG00000175387_19 (sequence is synthesized)
tcctgtagaaaaactaatttttctgccttttaccaaaaataaactcttgggggaagaaaagtggattaacttttgaaatccttgaccttaatgtgttcagtggggcttaaacagtcattc

SEQ ID NO: 606173 - DNA, 120 bp, Artificial Sequence
  ENSG00000175387_20 (sequence is synthesized)
tttgtttttttttgtttttttttttaactgctaaatcttattataaggaaaccatactgaaaacctttccaagcctcttttttccattcccatttttgtcctcataatcaaaacagcata

SEQ ID NO: 606174 - DNA, 120 bp, Artificial Sequence
  ENSG00000175387_21 (sequence is synthesized)
caaaacagcataacatgacatcatcaccagtaatagttgcattgatactgctggcaccagttaattctgggatacagtaagaattcatatggagaaagtccctttgtcttatgcccaaat

SEQ ID NO: 606175 - DNA, 120 bp, Artificial Sequence
  ENSG00000175387_22 (sequence is synthesized)
ttcaacaggaataattggcttgtataatctagcagtctgttgatttatccttccacctcataaaaaatgcataggtggcagtataattattttcagggatatgctagaattacttccaca

SEQ ID NO: 606176 - DNA, 120 bp, Artificial Sequence
  ENSG00000175387_23 (sequence is synthesized)
tatttatccctttttaaaaaagctaatctataaataccgtttttccaaaggtattttacaatatttcaacagcagaccttctgctcttcgagtagtttgatttggtttagtaaccagatt

SEQ ID NO: 606177 - DNA, 120 bp, Artificial Sequence
  ENSG00000175387_24 (sequence is synthesized)
gcattatgaaatgggccttttgtaaatgtaattgtttctgcaaaatacctagaaaagtgatgctgaggtaggatcagcagatatgggccatctgtttttaaagtatgttgtattcagttt

SEQ ID NO: 606178 - DNA, 120 bp, Artificial Sequence
  ENSG00000175387_25 (sequence is synthesized)
ataaattgattgttattctacacataattatgaattcagaattttaaaaattgggggaaaagccatttatttagcaagttttttagcttataagttacctgcagtctgagctgttcttaa

SEQ ID NO: 606179 - DNA, 120 bp, Artificial Sequence
  ENSG00000175387_26 (sequence is synthesized)
ctgatcctggttttgtgattgacaatatttcatgctctgtagtgagaggagatttccgaaactctgttgctagttcattctgcagcaaataattattatgtctgatgttgactcattgca

SEQ ID NO: 606180 - DNA, 120 bp, Artificial Sequence
  ENSG00000175387_27 (sequence is synthesized)
gtttaaacatttcttcttgtttgcatcttagtagaaatggaaaataaccactcctggtcgtcttttcataaattttcatatttttgaagctgtctttggtacttgttctttgaaatcata

SEQ ID NO: 606181 - DNA, 120 bp, Artificial Sequence
  ENSG00000175387_28 (sequence is synthesized)
tccacctgtctctataggtatcattttcaatactttcaacatttggtggttttctattgggtactccccattttcctatatttgtgtgtatatgtatgtgttcatgtaaatttggtatag

SEQ ID NO: 606182 - DNA, 120 bp, Artificial Sequence
  ENSG00000175387_29 (sequence is synthesized)
taattttttattcattcaacaaatatttattgttcacctgtttgtaccaggaacttttcttagtctttgggtaaaggtgaacaagacaactacagttcctgcctttgctgagacagcagt

SEQ ID NO: 606183 - DNA, 120 bp, Artificial Sequence
  ENSG00000175387_30 (sequence is synthesized)
tacactaacccttaattatcttacttgtctatgaaggagataaacagggtactgtactggagaataacagatgggatgcttcaggtaggacatcaaggaaagcctctaaggaaaggatgc

SEQ ID NO: 606184 - DNA, 120 bp, Artificial Sequence
  ENSG00000175387_31 (sequence is synthesized)
atgagctaacacctgacattaaagaagcaagccaagtgaggagccaggggagataagcattcctggcaaagagaatagcatcaaatgcaaaaaggttcacactaaaggaaactcctgatt

SEQ ID NO: 606185 - DNA, 120 bp, Artificial Sequence
  ENSG00000175387_32 (sequence is synthesized)
aggtattaatgctttatacagaaacctctatacaaatccaaacttgaagatcagaatggttctacagttcataacattttgaaggtggccttattttgtgatagtctgcttcatgtgatt

SEQ ID NO: 606186 - DNA, 120 bp, Artificial Sequence
  ENSG00000175387_33 (sequence is synthesized)
ctcactaacatatctccttcctcaacctttgctgtaaaaatttcatttgcaccacatcagtactacttaatttaacaagcttttgttgtgtaagctctcactgttttagtgccctgctgc

SEQ ID NO: 606187 - DNA, 120 bp, Artificial Sequence
  ENSG00000175387_34 (sequence is synthesized)
ttgcttccagactttgtgctgtccagtaattatgtcttccactacccatcttgtgagcagagtaaatgtcctaggtaataccactatcaggcctgtaggagatactcagtggagcctctg

SEQ ID NO: 606188 - DNA, 120 bp, Artificial Sequence
  ENSG00000175387_35 (sequence is synthesized)
cccttctttttcttacttgagaacttgtaatggtgttagggaacagttgtaggggcagaaaacaactctgaaagtggtagaaggtcctgatcttggtggttactcttgcattactgtgtt

SEQ ID NO: 606189 - DNA, 120 bp, Artificial Sequence
  ENSG00000175387_36 (sequence is synthesized)
aggtcaagcagtgcctactatgctgtttcagtagtggagcgcatctctacagttctgatgcgatttttctgtacagtatgaaattgggactcaactctttgaaaacacctattgagcagt

SEQ ID NO: 606190 - DNA, 120 bp, Artificial Sequence
  ENSG00000175387_37 (sequence is synthesized)
tatacctgttgagcagtttacttcctggttgtaattacatttgtgtgaatgtgtttgatgctttttaacgagatgatgttttttgtattttatctactgtggcctgattttttttttgtt

SEQ ID NO: 606191 - DNA, 120 bp, Artificial Sequence
  ENSG00000175387_38 (sequence is synthesized)
ttctgcccctccccccatttataggtgtggttttcatttttctaagtgatagaatcccctctttgttgaatttttgtctttatttaaattagcaacattacttaggatttattcttcaca

SEQ ID NO: 606192 - DNA, 120 bp, Artificial Sequence
  ENSG00000175387_39 (sequence is synthesized)
atactgttaattttctaggaatgatgacctgagaaccgaatggccatgctttctatcacatttctaagatgagtaatattttttccagtaggttccacagagacaccttgggggctggct

SEQ ID NO: 606193 - DNA, 120 bp, Artificial Sequence
  ENSG00000175387_40 (sequence is synthesized)
taggggaggctgttggagttctcactgacttagtggcatatttattctgtactgaagaactgcatggggtttcttttggaaagagtttcattgctttaaaaagaagctcagaaagtcttt

SEQ ID NO: 606194 - DNA, 120 bp, Artificial Sequence
  ENSG00000175387_41 (sequence is synthesized)
ataaccactggtcaacgattagaaaaatataactggatttaggcctaccttctggaataccgctgattgtgctctttttatcctactttaaagaagctttcatgattagatttgagctat

SEQ ID NO: 606195 - DNA, 120 bp, Artificial Sequence
  ENSG00000175387_42 (sequence is synthesized)
atcagttataccgattataccttataatacacattcagttagtaaacatttattgatgcctgttgtttgcccagccactgtgatggatattgaataataaaaagatgactaggacggggc

SEQ ID NO: 606196 - DNA, 120 bp, Artificial Sequence
  ENSG00000175387_43 (sequence is synthesized)
cctgacccttgagctgtgcttggtcttgtagaggttgtgttttttttcctcaggacctgtcactttggcagaaggaaatctgcctaatttttcttgaaagctaaattttctttgtaagtt

SEQ ID NO: 606197 - DNA, 120 bp, Artificial Sequence
  ENSG00000175387_44 (sequence is synthesized)
tttacaaattgtttaatacctagttgtattttttaccttaagccacattgagttttgcttgatttgtctgtcttttaaacactgtcaaatgctttcccttttgttaaaattattttaatt

SEQ ID NO: 606198 - DNA, 120 bp, Artificial Sequence
  ENSG00000175387_45 (sequence is synthesized)
tcactttttttgtgcccttgtcaatttaagactaagactttgaaggtaaaacaaacaaacaaacatcagtcttagtctcttgctagttgaaatcaaataaaagaaaatatatacccagtt

SEQ ID NO: 606199 - DNA, 120 bp, Artificial Sequence
  ENSG00000175387_46 (sequence is synthesized)
ggtttctctacctcttaaaagcttcccatatatacctttaagatccttctcttttttctttaactactaaataggttcagcatttattcagtgttagataccctcttcgtctgagggtgg

SEQ ID NO: 606200 - DNA, 120 bp, Artificial Sequence
  ENSG00000175387_47 (sequence is synthesized)
cgtaggtttatgttgggatataaagtaacacaagacaatcttcactgtacataaaatatgtcttcatgtacagtctttactttaaaagctgaacattccaatttgcgccttccctcccaa

SEQ ID NO: 606201 - DNA, 120 bp, Artificial Sequence
  ENSG00000175387_48 (sequence is synthesized)
gcccctgcccaccaagtatctctttagatatctagtctgtggacatgaacaatgaatacttttttcttactctgatcgaaggcattgatacttagacatatcaaacatttcttcctttca

SEQ ID NO: 606202 - DNA, 120 bp, Artificial Sequence
  ENSG00000175387_49 (sequence is synthesized)
tatgctttactttgctaaatctattatattcattgcctgaattttattcttcctttctacctgacaacacacatccaggtggtacttgctggttatcctctttcttgttagccttgtttt

SEQ ID NO: 606203 - DNA, 120 bp, Artificial Sequence
  ENSG00000175387_50 (sequence is synthesized)
acaggcatgagccaccgcgcccagcctagccatatttttatctgcatatatcagaatgtttctctcctttgaacttattaacaaaaaaggaacatgcttttcatacctagagtcctaatt

SEQ ID NO: 606204 - DNA, 120 bp, Artificial Sequence
  ENSG00000175387_51 (sequence is synthesized)
aaaaggaacatgcttttcatacctagagtcctaatttcttcatcatgaaggttgctattcaaattgatcaatcattttaattttacaaatggctcaaaaattctgttcagtaaatgtctt

SEQ ID NO: 606205 - DNA, 120 bp, Artificial Sequence
  ENSG00000175387_52 (sequence is synthesized)
tgtgactggcaaatggcataaattatgtttaagattatgaacttttctgacagttgcagccaatgttttccctacgataccagatttccatcttggggcatattggattgttgtatttaa

SEQ ID NO: 606206 - DNA, 120 bp, Artificial Sequence
  ENSG00000175387_53 (sequence is synthesized)
gacagtcagaataatgatagtgtgtggtctccagaggtagtcagaatcctgctattgagttctttttatatcttccttttcaattttttattaccattttgtttgtttagactacacttt

SEQ ID NO: 606207 - DNA, 120 bp, Artificial Sequence
  ENSG00000175387_54 (sequence is synthesized)
gtagggattgaggggcaaattatctcttggagtggaattcctgtgttttgagccttacaaccaggaaatatgagctatactagatagcctcatgatagcatttacgataagaacttatct

SEQ ID NO: 606208 - DNA, 120 bp, Artificial Sequence
  ENSG00000175387_55 (sequence is synthesized)
cgtgtgttcatgtaattttttgagtaggaactgttttatcttgaatattgtagctaactatatatagcagaactgcctcagtctttttaagaaggaaataaataatatatgtgtatgaat

SEQ ID NO: 606209 - DNA, 120 bp, Artificial Sequence
  ENSG00000175387_56 (sequence is synthesized)
ttatatatacatatacactcatagacaaacttaacagttggggtcattctaacagttaaaacaattgttccattgtttaaatctcagatcctggtaaaatgttcttaatttgtctgtgta

SEQ ID NO: 606210 - DNA, 120 bp, Artificial Sequence
  ENSG00000175387_57 (sequence is synthesized)
cattttcctttcatggacagaccattggagtacattaattttcttaatctgccatttggcagttcatttaatataccattttttggcaacttggtaactaagaatcacagccaaaatttg

SEQ ID NO: 606211 - DNA, 120 bp, Artificial Sequence
  ENSG00000175387_58 (sequence is synthesized)
ttaacatcaaagaaagctctgccatataccccgttactaaattattatacatccagcagattctgggatgtactaacttagggttaactttgttgttgttgataatactagattgctccc

SEQ ID NO: 606212 - DNA, 120 bp, Artificial Sequence
  ENSG00000175387_59 (sequence is synthesized)
tctttaattcttcttctggtgcaaggttgctgcttaagttaccctgggaaatactactacaaggtcaaattttctagtatcttacagcctgattgaaggtgattcagatctttgctcaat

SEQ ID NO: 606213 - DNA, 120 bp, Artificial Sequence
  ENSG00000175387_60 (sequence is synthesized)
ataaatggattttccaagattctctgggccatccttgacccacaggtgatctcgctggagtatattaacttaacttcagtgccagttggtttggtgccatgagatccataatgaatccag

SEQ ID NO: 606214 - DNA, 120 bp, Artificial Sequence
  ENSG00000175387_61 (sequence is synthesized)
aacttcaccattgcttagatataagagtcccttggaagaataatgccactgatgatgggggtcagaaggtgtattaactcaacatagagggcttttagatttttcttcaaaaaaatttcg

SEQ ID NO: 606215 - DNA, 120 bp, Artificial Sequence
  ENSG00000175387_62 (sequence is synthesized)
agaaaagtattcttttaccctccaaacagttaacagctcttagtttctccaaatatgctctttgatttacttatttttaattaaagatggtaatttattgaacaatgaaatccgtaatat

SEQ ID NO: 606216 - DNA, 120 bp, Artificial Sequence
  ENSG00000175387_63 (sequence is synthesized)
attgatttaaggacaaaagtgaagttttagaattataaaagtacttaaatattatatattttccatttcataattgttttcctttctctgtggctttaaagtttttgactattttacaat

SEQ ID NO: 606217 - DNA, 120 bp, Artificial Sequence
  ENSG00000175387_64 (sequence is synthesized)
gttaatcactaggtaacttgccatatttctggttctatattaagttctatcctttataatgctgttattataaagctggtttttagcatttgtctgtagcaatagaaattttactaagtc

SEQ ID NO: 606218 - DNA, 120 bp, Artificial Sequence
  ENSG00000175387_65 (sequence is synthesized)
tctgttctcccagtaagttttttcttttctcagtaagtccctaagaaaacatttgtttgccactcttactattcccaatcttggattgttcgagctgaaaaaaaatttgatgagaaacag

SEQ ID NO: 606219 - DNA, 120 bp, Artificial Sequence
  ENSG00000175387_66 (sequence is synthesized)
gaggatccttttctggtgaatataggttcctgctttaagaatgtggaaatccattgctttatataactaatatacacacagattaattaaaattgtgagaaataattcacacatgacaag

SEQ ID NO: 606220 - DNA, 120 bp, Artificial Sequence
  ENSG00000175387_67 (sequence is synthesized)
taggtaacatgcatgagttttgaatttttttaaaaacccaactgtttgacaaaatatagaacccaaattggtactttcttagaccagtgtaacctcacacctcagttttgcttttccaac

SEQ ID NO: 606221 - DNA, 120 bp, Artificial Sequence
  ENSG00000175387_68 (sequence is synthesized)
cctgacttgaaaggcatatttgtatctttttattagtgatagtgaagctgtgacactaaccttttatacaaaagagtaaagaaagaaaaactacagcgattaagatgagaacagttctgc

SEQ ID NO: 606222 - DNA, 120 bp, Artificial Sequence
  ENSG00000175387_69 (sequence is synthesized)
agttgttgaactagatcacagcattgtaggcagaataaaaaatgttcatatctgagaatattcctttcgccatcttttcccaaggccagacctcctggtggagcacagttaaaagtaaca

SEQ ID NO: 606223 - DNA, 120 bp, Artificial Sequence
  ENSG00000175387_70 (sequence is synthesized)
ttctgggcctttgtaatcggagggctgtgtctccagctggcagcctttgttttaatatataatgcaggactgtggaaaacagttggcatagaatattttcacctaaaaaagaaagaaaag

SEQ ID NO: 606224 - DNA, 120 bp, Artificial Sequence
  ENSG00000175387_71 (sequence is synthesized)
acatacaaaactggattaattgcaaaaagagaatacagtaaaataccatataactggacaaagctagaagaacctttagaagatttgtctgaaaacagatttcaagagtgagcttttata

SEQ ID NO: 606225 - DNA, 120 bp, Artificial Sequence
  ENSG00000175387_72 (sequence is synthesized)
cactgctcactaatttgcttgattactaccaactcttcttaaagttaacacgtttaaggtatttctggacttcctagccttttagcaagcttagaggaactagccattagctagtgatgt

SEQ ID NO: 606226 - DNA, 120 bp, Artificial Sequence
  ENSG00000175387_73 (sequence is synthesized)
aaaaatattttggggactgatgcccttaaaggttatgcccttgaaagttcttaccttttctctagtgatattaaggaacgagtgggtagtgttctcagggtgaccagctgccctaaagtg

SEQ ID NO: 606227 - DNA, 120 bp, Artificial Sequence
  ENSG00000175387_74 (sequence is synthesized)
cctgggattgagggtttccctggatgcgggactttccctggatacaaaacttttagcagagttttgtatatatgtggatttttctgataagtagcacatcagaggccttaaccactgccc

SEQ ID NO: 606228 - DNA, 120 bp, Artificial Sequence
  ENSG00000175387_75 (sequence is synthesized)
aaaagcgattctccattgagagtacatatcttgaacttaagaaattcatttgctctgatttttaatcttgtaaagtttttgctaaactcaaaacaagtcccaggcacaccagaaggagct

SEQ ID NO: 606229 - DNA, 120 bp, Artificial Sequence
  ENSG00000175387_76 (sequence is synthesized)
gaccaccttaggtgttcttgtgatttatccttacttccctatgttgtcatagttgcttctaaactcagctgcactatggctgtcaacatttctgatacttattgggatatgtgccatcca

SEQ ID NO: 606230 - DNA, 120 bp, Artificial Sequence
  ENSG00000175387_77 (sequence is synthesized)
gtcatttagtactttgaatggaacatgagatttataacacaggtaatagctgaaggtaccagtatggtggtgagactcacacttagtgatccagctaaggtaactgatgttataatggaa

SEQ ID NO: 606231 - DNA, 120 bp, Artificial Sequence
  ENSG00000175387_78 (sequence is synthesized)
cagagaagaggccaactagatagctaagttcttctgaacctatgtgtatatgtaagtacaaatcatgcgtccttatggggttaaacttaatctgaaatttacatttttcatagtaaaagg

SEQ ID NO: 606232 - DNA, 120 bp, Artificial Sequence
  ENSG00000175387_79 (sequence is synthesized)
aaaccaattgttgcagatttcttttcttgtgaggaaatacatggcctttgatgctctggcgtctactgcatttcccagtctgttctgctcgagaagccagaatgtgttgttaacattttt

SEQ ID NO: 606233 - DNA, 120 bp, Artificial Sequence
  ENSG00000175387_80 (sequence is synthesized)
ccgtgaatgttgtgttaaaatgattaaatgcatcagccaatggcaagtgaaggaattgggtgtcctgatgcagactgagcagtttctctcaattgtagcctcatactcataaggtgctta

SEQ ID NO: 606234 - DNA, 120 bp, Artificial Sequence
  ENSG00000175387_81 (sequence is synthesized)
ccagctagaacattgagcacgtgaggtgagattttttttctctgatggcattaactttgtaatgcaatatgatggatgcagaccctgttcttgtttccctctggaagtccttagtggctg

SEQ ID NO: 606235 - DNA, 120 bp, Artificial Sequence
  ENSG00000175387_82 (sequence is synthesized)
catccttggtgcactgtgatggagatattaaatgtgttctttgtgagctttcgttctatgattgtcaaaagtacgatgtggttccttttttatttttattaaacaatgagctgaggcttt

SEQ ID NO: 606236 - DNA, 120 bp, Artificial Sequence
  ENSG00000175387_83 (sequence is synthesized)
attacagctggttttcaagttaaaattgttgaatactgatgtctttctcccacctacaccaaatattttagtctatttaaagtacaaaaaaagttctgcttaagaaaacattgcttacat

SEQ ID NO: 606237 - DNA, 120 bp, Artificial Sequence
  ENSG00000175387_84 (sequence is synthesized)
gtcctgtgatttctggtcaatttttatatatatttgtgtgcatcatctgtatgtgctttcactttttaccttgtttgctcttacctgtgttaacagccctgtcaccgttgaaaggtggac

SEQ ID NO: 606238 - DNA, 120 bp, Artificial Sequence
  ENSG00000175387_85 (sequence is synthesized)
agttttcctagcattaaaagaaagccatttgagttgtttaccatgttactatgggactaatttttaattgttttaatttttatttaaactgatctttttttatatgggattacattttgg

SEQ ID NO: 606239 - DNA, 120 bp, Artificial Sequence
  ENSG00000175387_86 (sequence is synthesized)
tgttcactccctaaattatatggaaaccaaaaaaagtgattgtatttcacatatggacatatgattttaagagtacatgtttttgtttttttaatttggtgttacataaaagattatcct

SEQ ID NO: 606240 - DNA, 120 bp, Artificial Sequence
  ENSG00000175387_87 (sequence is synthesized)
atccccccgggagataaatttatactacttaatataaccccacaacaggcgcacaccacacactgcacagtgctatttatacatttttatttatttcagagtttgcctatgctacattag

SEQ ID NO: 606241 - DNA, 120 bp, Artificial Sequence
  ENSG00000175387_88 (sequence is synthesized)
cgctctaatacataagatctatgctgtaaacaaaaacatcttcaaagttgaaatttgctgaaatatacttttaacaaaataacatttttaaggctccattgaaaaatactagataagata

SEQ ID NO: 606242 - DNA, 120 bp, Artificial Sequence
  ENSG00000175387_89 (sequence is synthesized)
taatctcatataatcagtatgaataattttaaaaatgagaaatatttaggtcagccacacttcctttgtgccttgcaagaattcagttctgtggatgaatcagtactggttagcagactg

SEQ ID NO: 606243 - DNA, 120 bp, Artificial Sequence
  ENSG00000175387_90 (sequence is synthesized)
ttttctgcaaaccattttaaacatgctttagtatgcaacaaaaagggacctcaaatgctaaaatacactattttacgtggcattgaatagccttgggactggtgtagttttatcaacact

SEQ ID NO: 606244 - DNA, 120 bp, Artificial Sequence
  ENSG00000175387_91 (sequence is synthesized)
tttttattaggaagaaacccaagaaaatttactgtaattgctaccacctgccactgtataaataatctaaaagggacttcccaacattgaacaacaacattgagggctgactcgagatcc

SEQ ID NO: 606245 - DNA, 120 bp, Artificial Sequence
  ENSG00000175387_92 (sequence is synthesized)
ttctacattgtcacctcagcctggctttgcctgtcactgcttagcttgaagtagtgacactgttctgtatcaggagatttttataatggccctagcatccataattccacatgttcatca

SEQ ID NO: 606246 - DNA, 120 bp, Artificial Sequence
  ENSG00000175387_93 (sequence is synthesized)
aatggctgaagagtatgagagaagtattaaggtctatgtttgggctgtctccccacttggcatattctgtttttccctcttcaaaatagattgaaagcctcttagtgcaggaagcaggca

SEQ ID NO: 606247 - DNA, 120 bp, Artificial Sequence
  ENSG00000175387_94 (sequence is synthesized)
tcagtatcaaactgatgtcatccaatgtaattattttaagctccaggtttgtctaagtttgggtgaagaatgttcaggaacatgtttgcaacatacagttatccagcttaccctttgaca

SEQ ID NO: 606248 - DNA, 120 bp, Artificial Sequence
  ENSG00000175387_95 (sequence is synthesized)
gattcacccttctcatcaaaatagtaagcccaacctaaaaattataagtttacaaataaaggaatagaaaaacccaaaaagctaatttacacataaaaattatcttttgctgcaataaat

SEQ ID NO: 606249 - DNA, 120 bp, Artificial Sequence
  ENSG00000175387_96 (sequence is synthesized)
aggtatggaaatatttgtagaattggtttaactgattttgtaaaacaaatgtcatgctattttgccatagtgagacatgcagtaattcttaaaatcacattaatagaaggcaagaacatt

SEQ ID NO: 606250 - DNA, 120 bp, Artificial Sequence
  ENSG00000175387_97 (sequence is synthesized)
gaatcagacttagcagataacagattcagtgataaatgaacaatagactaagcatacttaggaagctacatgagaacagaatgtattactgtgctcccgtccaaactgcatgactttatt

SEQ ID NO: 606251 - DNA, 120 bp, Artificial Sequence
  ENSG00000175387_98 (sequence is synthesized)
ggttatagaataaatggaatttgagatggggatttgccagtttttacagtctgtcttcaatagttttgttggctgcctctgcacctttctaaatgttatgtgaaaataaaattatttaag

SEQ ID NO: 606252 - DNA, 120 bp, Artificial Sequence
  ENSG00000175387_99 (sequence is synthesized)
ttctaaagtagtttaggaaagagatgtgatgacaggaaaaagaagttaacttctgaacagtttggtccaggaagaagatgggcagaatacagtaagcccagggttgaagaatacattcaa

SEQ ID NO: 606253 - DNA, 120 bp, Artificial Sequence
  ENSG00000175387_100 (sequence is synthesized)
tttggagagatggagaagacctttgaagaaggtcaaaatgagatcttggaacagaactctcacctgtgtgtctggatatacatgaaaactggacggtgttattgagctactgcttatatg

SEQ ID NO: 606254 - DNA, 120 bp, Artificial Sequence
  ENSG00000175387_101 (sequence is synthesized)
gtgagcagaaaattgataaccacaagcctggtaggttctgctatgaagcccacatataatcacaaggcctagatagcttggagttaaaagccaaggatagctgtatagtttgggttccat

SEQ ID NO: 606255 - DNA, 120 bp, Artificial Sequence
  ENSG00000175387_102 (sequence is synthesized)
agtttgcagtgagattgtgcttctgagcagtcatttgggggcagtggttctgagattacaagccataacccagccaagaacgggctacctgtggaatgaggatgaggaagttgctacata

SEQ ID NO: 606256 - DNA, 120 bp, Artificial Sequence
  ENSG00000175387_103 (sequence is synthesized)
taaaccctagtgtgtgtgtgtgtattaagtgaaacttagttaacttttttgctcacagccaaagatgattcatctagagaagccattggaattttagcagagttttgtatatatgtggat

SEQ ID NO: 606257 - DNA, 120 bp, Artificial Sequence
  ENSG00000175387_104 (sequence is synthesized)
ttttctaataagtagcaaatcagaggccttaaccactgcccaacagcgattctccattgagagtacgtatcttgaacttaagaaattcatttgctctgattttaaatcttgtaaagtttt

SEQ ID NO: 606258 - DNA, 120 bp, Artificial Sequence
  ENSG00000175387_105 (sequence is synthesized)
tcttcatgagaggtcttgcctctaaactatattgtggcagtatttgatcaaactacataagtaccatgtaaataagattttaatacaaatgatgactcacttctaaatggtttgccattt

SEQ ID NO: 606259 - DNA, 68 bp, Artificial Sequence
  ENSG00000175387_106 (sequence is synthesized)
taatacaaatgatgactcacttctaaatggtttgccatttagaaatgtgctgctgtgagaaaaacgaa

SEQ ID NO: 606260 - DNA, 82 bp, Artificial Sequence
  ENSG00000175387_107 (sequence is synthesized)
atgcctggctgaaaagtgaaaatttaagccagcttaccacctggaataaaaatgttttataggaatgtctaggttgctcttt

SEQ ID NO: 606261 - DNA, 120 bp, Artificial Sequence
  ENSG00000175387_108 (sequence is synthesized)
ggaataaaaatgttttataggaatgtctaggttgctcttttatattgaaaaaaaacttattagtgtctgttttacccaagaaccacaagctacttcatttcaacttttaaatcatgaata

SEQ ID NO: 606262 - DNA, 120 bp, Artificial Sequence
  ENSG00000175387_109 (sequence is synthesized)
ataacgtgttatcaccacatttaaaaatgtacatcgtcaatcacaaacacatattctaaggaattgaattttatagagataattgaatgctttcatctgtaaaagaattagtggcctgca

SEQ ID NO: 606263 - DNA, 120 bp, Artificial Sequence
  ENSG00000175387_110 (sequence is synthesized)
aaccactgtggattcttgctatgctttgaagttgtcagtgggggaatttgctgctgcaagttacttagacttgtaggcaaagggaaattcaaatttttaattctaaaatgaaaaccactg

SEQ ID NO: 606264 - DNA, 120 bp, Artificial Sequence
  ENSG00000175387_111 (sequence is synthesized)
acaaaattttatactctgaaagtttggttgttagcttagtcattattttcctgttctttatcatttcggaattcagatgcttaaatttaacatacaaattatttgttggtaaaacataaa

SEQ ID NO: 606265 - DNA, 120 bp, Artificial Sequence
  ENSG00000175387_112 (sequence is synthesized)
acataaaaagctacatttggtaaactaaattttaggattcaaagtctctaacaatttctatgtgacatgtcatacggtgcagtttttatttgccaaagtgtctacttcatactgcctatg

SEQ ID NO: 606266 - DNA, 120 bp, Artificial Sequence
  ENSG00000175387_113 (sequence is synthesized)
cactgcttcccgtttttaatctctctaccccaacccccctataattaaataaacccctagaaaactgccttcttttagaatacctaattgattactttaaatattttttcagaatcaaaa

SEQ ID NO: 606267 - DNA, 120 bp, Artificial Sequence
  ENSG00000175387_114 (sequence is synthesized)
ttacaaaagggagagatacctaagaatctggcttgtttatattctttaaaagatcgcatttgattgaaggtgggtgcatattttttatatccactctttccccatttgtatgtgaccatt

SEQ ID NO: 606268 - DNA, 120 bp, Artificial Sequence
  ENSG00000175387_115 (sequence is synthesized)
gtaaaagtggatgtgcttttttttttttgctgaggtctagagacaatgttttagagatacagaatgaaacatttatgggtaaaatacaatgggtaagacttgcttcaaaatagtatgtga

SEQ ID NO: 606269 - DNA, 120 bp, Artificial Sequence
  ENSG00000175387_116 (sequence is synthesized)
cagaggaagtagatggaggtatgaatgaataggacattgatggttgtttgttgggattgggtaagggagctttgttgtattctatttccttttagataagtttgaaattccttgtagtga

SEQ ID NO: 606270 - DNA, 120 bp, Artificial Sequence
  ENSG00000175387_117 (sequence is synthesized)
agaaattaaacgtctccatcaggtgcattgccacgtcttctctaggaagcctccttaacatcctctggtggctcctgaactttttctgttctcattcacagggaagctcatggggctgcc

SEQ ID NO: 606271 - DNA, 120 bp, Artificial Sequence
  ENSG00000175387_118 (sequence is synthesized)
tggagacttgaggttacatcttgcctagtattaccaaaattgtgatacttttctccaccccataatagcacagtctttggtctcaacttgaactaaagtctttttttttttttttttttt

SEQ ID NO: 606272 - DNA, 80 bp, Artificial Sequence
  ENSG00000175387_119 (sequence is synthesized)
cacctcccggacggggtggatgctggccgggggctgccccccacctcccgaacggggcagctggccgggcgggggttgcc

SEQ ID NO: 606273 - DNA, 89 bp, Artificial Sequence
  ENSG00000175387_120 (sequence is synthesized)
gggcggctggccgagcaggggctgctgggcggagacgctccttacttcccggacggggtggttgctgggcggaggggctcctcacttct

SEQ ID NO: 606274 - DNA, 77 bp, Artificial Sequence
  ENSG00000175387_121 (sequence is synthesized)
tgagtgagcgagactccatctgcaatcccagcacctcgggaggcccaggcgggcagatcatgcgcggtcaggagctg

SEQ ID NO: 606275 - DNA, 120 bp, Artificial Sequence
  ENSG00000175387_122 (sequence is synthesized)
gggagaccgtagaaagtgggagacggggggagacgggagagggagagggatgtgctttttttctaaccgttattgccaccaagtaataatgtcttaattcacaatttacatagtgattgg

SEQ ID NO: 606276 - DNA, 120 bp, Artificial Sequence
  ENSG00000175387_123 (sequence is synthesized)
ctggagagaggtattgagcataaatttttttttaagattcaactgggaaatggatgatttacatgattttagtctctttagttgtctgggtatttcttgactgggaatagcaatatctta

SEQ ID NO: 606277 - DNA, 120 bp, Artificial Sequence
  ENSG00000175387_124 (sequence is synthesized)
aaggccatttttaacaagaatgctaaggatggaacacttgaaggaagcagtcctgtacagtcaaatacttcagttaccttggataatagaatgaaaactcaattgcctactttgaacaaa

SEQ ID NO: 606278 - DNA, 120 bp, Artificial Sequence
  ENSG00000175387_125 (sequence is synthesized)
ttttttttttggattttaatggctggacagaataacattctgctaattttaatccttggtcatttccgatgtaatggaaaatgcagtttgactcagaatcggaggcctggggtttggacc

SEQ ID NO: 606279 - DNA, 120 bp, Artificial Sequence
  ENSG00000175387_126 (sequence is synthesized)
ctgattgtgccaatttatgtgactttagataaatcttttcatcagtctaccttaaagttcttcatttcctccagttccctaaaatgaggaagttagtttttagggtggttatgagaacta

SEQ ID NO: 606280 - DNA, 120 bp, Artificial Sequence
  ENSG00000175387_127 (sequence is synthesized)
aatgagagcacttgagagatcattcagcctgaagtgggtactcagtattagatggctaaatctgcacagtctagaataccaggcaaaggttactctgaaggtctttgctaataacaaatc

SEQ ID NO: 606281 - DNA, 120 bp, Artificial Sequence
  ENSG00000175387_128 (sequence is synthesized)
tttctctaagaaagtttgtaaatgtgatgttaaactcagaaatgtcacatagaacatattggagcaattattgccgcaaaagtaactcgtagcaaccacaaaaacccagtggtgtgcagc

SEQ ID NO: 606282 - DNA, 120 bp, Artificial Sequence
  ENSG00000175387_129 (sequence is synthesized)
aataaacagtttatgaattagataagtgatttcggctagatgtctctggagcagttgtagtctttcctcgttcatgagggagttggcctcacctggaaggacttggcatttttccacatg

SEQ ID NO: 606283 - DNA, 120 bp, Artificial Sequence
  ENSG00000175387_130 (sequence is synthesized)
cctcctatcctccattaaacaagcatgtttttgtggaggttgtagaaggcaacaacagccaagcccaatcccataactccctttcatgtctgcatgcttcatgctaactagcattcacca

SEQ ID NO: 606284 - DNA, 120 bp, Artificial Sequence
  ENSG00000175387_131 (sequence is synthesized)
gaaacaagccacatggctaaacccagtgtggaaaggcactacagagttattagaccaagggagagaacataggaggggtgaagaattggagccttaaatgcagtcaatctaccacaccct

SEQ ID NO: 606285 - DNA, 120 bp, Artificial Sequence
  ENSG00000175387_132 (sequence is synthesized)
agaatgctcaagctgggacttaatagagtggcctatttggtttgaaatgttttaacttacagagcattgagtagaagcctaatctaatatacataaggaagacaaaagcaaaggattgtg

SEQ ID NO: 606286 - DNA, 120 bp, Artificial Sequence
  ENSG00000175387_133 (sequence is synthesized)
ttttctatctaaaggttaatcattgtggttgctcctggccattatcacatgactggaagttaacactctccaaacgctgagcctatcctgtacagcactagaaagtagaaagaatcactc

SEQ ID NO: 606287 - DNA, 120 bp, Artificial Sequence
  ENSG00000175387_134 (sequence is synthesized)
aattcagggaaaccgttttctcttaatgtgaacatttacattaatgccatttccaaaacctttctgggacttcttaaatgcaaagatgctatctgctttacttcatgctgcctgttttta

SEQ ID NO: 606288 - DNA, 120 bp, Artificial Sequence
  ENSG00000175387_135 (sequence is synthesized)
ggagcttggagtgctttaggaagcttcccaatactggtttagcagtaatttggttgactgatcaaggcatgttttaactttgacactgaaattttaaaaagacaacagttatcttgcccg

SEQ ID NO: 606289 - DNA, 120 bp, Artificial Sequence
  ENSG00000175387_136 (sequence is synthesized)
gagagtcaagtttctgcttccaaggaggtcaggaattgttctctttggtgatgtggctgtgcttggtagcccttgaaagtggagtcgacagcagtcctcagcttttgtgtgcctgtctta

SEQ ID NO: 606290 - DNA, 120 bp, Artificial Sequence
  ENSG00000175387_137 (sequence is synthesized)
gtctgttttgtgttactataacaggatagctgaggcagggtcacttatgaaggatgctcacagttctacaggctgggaagttcaagggcatggccctggcttttggcaagggctttgctg

SEQ ID NO: 606291 - DNA, 120 bp, Artificial Sequence
  ENSG00000175387_138 (sequence is synthesized)
ctgcttcatagcttgatggagaaggtcagaggggaagcagacgtgcaaacaacccacttgttcacaacaaccaaacaagtctctttttaacaacccactcctggggactaatctagtctt

SEQ ID NO: 606292 - DNA, 120 bp, Artificial Sequence
  ENSG00000175387_139 (sequence is synthesized)
gagagagtgagaactcattgcaagagcagcaccaagccattcatgaagcatctgcctcagtgaaccaaacatctcccactaggccccagctctcaacaccaccacaatgaagataaaatc

SEQ ID NO: 606293 - DNA, 120 bp, Artificial Sequence
  ENSG00000175387_140 (sequence is synthesized)
tcatcatacatttgagggacagtttgggagacagaccatagcagtgctcagtatttctacccaaatgttcaggtaacttaatatatttttccttgaatatatgtttaaatgggcttccct

SEQ ID NO: 606294 - DNA, 120 bp, Artificial Sequence
  ENSG00000175387_141 (sequence is synthesized)
tccccacgctcatcttgaatggtcccacaacaacttttgattatcacgttcctgtaaatacacaaaaatattttgtggtcttttactggcagcccagtggatgggactttaaaaaatcac

SEQ ID NO: 606295 - DNA, 120 bp, Artificial Sequence
  ENSG00000175387_142 (sequence is synthesized)
ccagattccaacaaccagagaaaacgactggtgtatattttttccagtctttatttgtatgtctgtgtatattcaatggaaaatgtttgaagcttcactcacagcacattccattagaga

SEQ ID NO: 606296 - DNA, 120 bp, Artificial Sequence
  ENSG00000175387_143 (sequence is synthesized)
aagctactaaaatcataaggaaaatctaaaatgcagtaagccagtcagcaagccataatgggcatatgaaaacaaagttttttgccatgatttgtggaccacagaagatctgtgttatta

SEQ ID NO: 606297 - DNA, 120 bp, Artificial Sequence
  ENSG00000175387_144 (sequence is synthesized)
gtctatttaagtttggtgtttgaaattaaaaatgttcgacatactttttatgttttttttaaatatactgtctatatttaaaattgagtatactgtactttagtgtgtttggaagcagat

SEQ ID NO: 606298 - DNA, 120 bp, Artificial Sequence
  ENSG00000175387_145 (sequence is synthesized)
atccccaaataaaagtatacagtagaaccaaagaattttattgatcagctagaatttagttttcaggtgtaataactgtcaacctaaataacagaggctttctaaaagaaaatgatgttt

SEQ ID NO: 606299 - DNA, 120 bp, Artificial Sequence
  ENSG00000175387_146 (sequence is synthesized)
atttgggaatagggcattgtgaaggcaatatgcatgccatagtaaactgtgtgtattcaggaaggtaaaggaagacaggtttttaaaggacagataaagattatataattgtcttgaaat

SEQ ID NO: 606300 - DNA, 120 bp, Artificial Sequence
  ENSG00000175387_147 (sequence is synthesized)
aattattcttggctacaaggattaataacaaggatgctgccagttcgggtttggacaatcggcttctaggcagatgtcccaaaagtattttctgtgtaaggttgcgaatagtgtttgtgc

SEQ ID NO: 606301 - DNA, 120 bp, Artificial Sequence
  ENSG00000175387_148 (sequence is synthesized)
aagctggcgtggtttcttctgggtctttgaggtagtgcgtaaaatccctctcttcatggacttccctggctccatttgtcagggcttttggaaacatgactcttgattctgacagctttc

SEQ ID NO: 606302 - DNA, 120 bp, Artificial Sequence
  ENSG00000175387_149 (sequence is synthesized)
acctttccctctcttgatgaagatgtttttccgaaagtatctatgatgaatcatcttgtagttaggctttgattgtcccttggtgacagaatagacctttcccgggttattggtctggtc

SEQ ID NO: 606303 - DNA, 120 bp, Artificial Sequence
  ENSG00000175387_150 (sequence is synthesized)
ctgcatcctgcattggcaggagtgattggcaactaaaagtcagtgttaaaacccttttagccacctttgagggcagggaggctttaagggagtggcacttaggctaagtccacctggagt

SEQ ID NO: 606304 - DNA, 120 bp, Artificial Sequence
  ENSG00000175387_151 (sequence is synthesized)
ctattattaagtccaattttttttccttagtcctttgttgtcccctcaaagtgctgggctagcattattctgttaggaattgtacttctttctgcagaaaatttggcaaataacagatac

SEQ ID NO: 606305 - DNA, 120 bp, Artificial Sequence
  ENSG00000175387_152 (sequence is synthesized)
aaagtttaaaaaggaaatacacaaaattaatagtaatgtgacaatcccagtttgcataatggttttgagccctgaacctaggcttacaggcaaccaattgaataaatcaaattgtaatac

SEQ ID NO: 606306 - DNA, 120 bp, Artificial Sequence
  ENSG00000175387_153 (sequence is synthesized)
aattcttgctctgatgtcttaggaaaaatgtctacagcctgaaatcatcaactttttgtcctggtttgcagtttgaatgtctctagctatggcattggttggtatggtgaacttttgtgt

SEQ ID NO: 606307 - DNA, 120 bp, Artificial Sequence
  ENSG00000175387_154 (sequence is synthesized)
gacccatacatcagcatgagacttgctcctttaaaaattaatcacatcttagcttataggcctcagagcatgggagtagttttttttcttagagagtcatagccaaatattgaaggaaat

SEQ ID NO: 606308 - DNA, 120 bp, Artificial Sequence
  ENSG00000175387_155 (sequence is synthesized)
taggaggattcaggagcaaatccagtctgcaggtggataacaggagtttcaaaacggtacagagctgtgatctaataacaggtacatatagctttcttcagaaacttaaagttaccctga

SEQ ID NO: 606309 - DNA, 120 bp, Artificial Sequence
  ENSG00000175387_156 (sequence is synthesized)
tttttaccaaagatgttcagaataaaacagatttgtaaactttatcagattttgtctgcaagaatagtagtatggtcacagtaatctcagatttaaaaacctccttgaggctaagaagct

SEQ ID NO: 606310 - DNA, 120 bp, Artificial Sequence
  ENSG00000175387_157 (sequence is synthesized)
aagtcaaggtagactttagattttacctatagttttaaggttcctgggcctgccaggaaatgataatttttaattcagtgtaatgctgagaaccattgaagccaggcattctacacattc

SEQ ID NO: 606311 - DNA, 120 bp, Artificial Sequence
  ENSG00000175387_158 (sequence is synthesized)
tcaaatatgacattttaatcaaagccttggtaatacaaccagtgtttccaattgtatcctgttataacgagagccgatttttattgaacttaggcaaatcatattgccttaagagtactc

SEQ ID NO: 606312 - DNA, 72 bp, Artificial Sequence
  ENSG00000175387_159 (sequence is synthesized)
cccagctctttgggaggccaagacaggtggaatccccccggccaccgtctctactaaaaaatacaaaaatta

SEQ ID NO: 606313 - DNA, 86 bp, Artificial Sequence
  ENSG00000175387_160 (sequence is synthesized)
tgaatactcaaaatagtttccaaattggagggatcaagaagaaaggaaaagcaaatatttctacctttgttcacaaaagtattcca

SEQ ID NO: 606314 - DNA, 120 bp, Artificial Sequence
  ENSG00000175387_161 (sequence is synthesized)
aaaagcaaatatttctacctttgttcacaaaagtattccaaattgctgtaaactatagatagcatgagagaatttctttaaatatggaaaacaaaacatttaagtaaaaaaacaataatg

SEQ ID NO: 606315 - DNA, 120 bp, Artificial Sequence
  ENSG00000175387_162 (sequence is synthesized)
cttcaaataaaagtcacagacacatcttcagttacttagtctcatgtaactttttttgttgtggttgatcttaattagtagttacatggactcatcagtttcttgaagttctgaaaaaat

SEQ ID NO: 606316 - DNA, 120 bp, Artificial Sequence
  ENSG00000175387_163 (sequence is synthesized)
atttagtccattggtattaaagtgattagtaacctgtatttaaaagtgtgttagcatcttttccatgaatctgattgcaaatgcttttagagaaaaagcaataactgggaattacaaaaa

SEQ ID NO: 606317 - DNA, 120 bp, Artificial Sequence
  ENSG00000175387_164 (sequence is synthesized)
cttagaataaccatgattaaaaatctgatgagagtttaccataaccagaaatagacaaagagttttggttatttttgtggcaaacagcataatcagaattatgactgatgacatatttct

SEQ ID NO: 606318 - DNA, 120 bp, Artificial Sequence
  ENSG00000175387_165 (sequence is synthesized)
aacggcatcgtacaattttggaacactcatatcaataacatactcataaatgtaactgtgtctagtattacatcattagacaatgcttttcatacaatttaatacatcaaagaagcctaa

SEQ ID NO: 606319 - DNA, 120 bp, Artificial Sequence
  ENSG00000175387_166 (sequence is synthesized)
ttagctaacatctctaccagatggcatacacatgctctgaggctttccagaggcccaagtggaaaactcaaaggtaattttaagtcaaaaacacttaatttagaacttgagcctagagaa

SEQ ID NO: 606320 - DNA, 120 bp, Artificial Sequence
  ENSG00000175387_167 (sequence is synthesized)
gcctgtcaaagatgtcaaaagttcgaaacaggatcacaggtcactataaaatatttaacaagaatgataatcaaaagacttaagaagcaatgcagaaagttacatacatttaaaaaccat

SEQ ID NO: 606321 - DNA, 120 bp, Artificial Sequence
  ENSG00000175387_168 (sequence is synthesized)
cttttcaaagcttcatttttcccaagcaaaaaaaaaacttaaacacaagaatttatcttgatagaacataaaatttttcttaggccagttgccaaaatggtaaagaaaaatctcttgcag

SEQ ID NO: 606322 - DNA, 120 bp, Artificial Sequence
  ENSG00000175387_169 (sequence is synthesized)
tgtgactgcctttacttatgggaagcctatttggatatactgaaagttgaatctgatgaaaaggtacttgaatttaatcagacacaggaagagtatttccaaggttatgagtgtacgcct

SEQ ID NO: 606323 - DNA, 120 bp, Artificial Sequence
  ENSG00000175387_170 (sequence is synthesized)
tatagaggaatgtaaataagaaagctagtatgttgaacagaatacatggctcttggaaaaattacgagaaatttcctgcttgcgtggaacaattcaaacatgagaagagccaagaattca

SEQ ID NO: 606324 - DNA, 120 bp, Artificial Sequence
  ENSG00000175387_171 (sequence is synthesized)
gaatcaagttatactggaggaaaacattgcttttctaggccttctacagaacatttcagtatcaagttataacagcaagagttagaaccagaggaaaaaagttacaggagctaatgaaaa

SEQ ID NO: 606325 - DNA, 120 bp, Artificial Sequence
  ENSG00000175387_172 (sequence is synthesized)
agttaagagttatcacccctgccaaacaaaaagatgtaccttcttaaggggagaaagagctaaaggcaatgatgtgtgacctacaaataaggtgcagcaagatacagcaaaggttgaact

SEQ ID NO: 606326 - DNA, 120 bp, Artificial Sequence
  ENSG00000175387_173 (sequence is synthesized)
tgtgagatataaatcaggatcttcaagaagaaaactctacctcaagaaatgaaatgaccatcttaaatgaaaaaagacagcctttctaacctgaatctaggggaaattaaacggatctca

SEQ ID NO: 606327 - DNA, 120 bp, Artificial Sequence
  ENSG00000175387_174 (sequence is synthesized)
gaaggaaatatggcagaaatttaaactgtggtttagaagatggctgattttagaattaaaaattaaaacctctttcaattttattaagaccagatccttaaaaagaaccttgttctaaca

SEQ ID NO: 606328 - DNA, 120 bp, Artificial Sequence
  ENSG00000175387_175 (sequence is synthesized)
gtgtgtgtgtgtgtgtgtgtatagtgcatgtatagcatttacactatcgtgtatatacaaatatatagcatatgtatagaatatactgtattattgtacatatacatatgtacaagtata

SEQ ID NO: 606329 - DNA, 120 bp, Artificial Sequence
  ENSG00000175387_176 (sequence is synthesized)
atatactgtattattgtacatatacatatgtacaagtatatatgtaagctcaatgtcttatgatttcattctgacctattgccaacttcattacacacaactcctttcataaatgtatcc

SEQ ID NO: 606330 - DNA, 120 bp, Artificial Sequence
  ENSG00000175387_177 (sequence is synthesized)
ttcatgaacatttcatgatctgcacagaccttcagtgacatgcttaaactttctgctttgttttatacttccccttaaacaactggtcatcctgctttaggataaaaagttactatgcaa

SEQ ID NO: 606331 - DNA, 120 bp, Artificial Sequence
  ENSG00000175387_178 (sequence is synthesized)
gactcatacagaattattctgttaattttgtaaccttccttaccaaaggtacattctcacacccattaacttccttcatatttctctcctcctcctacttagtggttcctttctgtcttg

SEQ ID NO: 606332 - DNA, 120 bp, Artificial Sequence
  ENSG00000175387_179 (sequence is synthesized)
tttccatatttgaaacaacctctaataaactctgaatttaaacaacttttttcccaataaaaagcaatttttatgccttataacttttctcatcaaaacatctttttttgggtacacttt

SEQ ID NO: 606333 - DNA, 120 bp, Artificial Sequence
  ENSG00000175387_180 (sequence is synthesized)
gtatatggaattgtgtattttcaaattttaacttattaaccttaatttttagtgaaaacctaggaagcaaaattttgaagtgttatatcagcattttataaatgagaaccatattataat

SEQ ID NO: 606334 - DNA, 120 bp, Artificial Sequence
  ENSG00000175387_181 (sequence is synthesized)
ttttagaaacatgtttccttataactttgtatattaataggcccaaatatatttagtctttctataatttaggaagccaagaacaaactaatattttcagcagtttattgtttttttttg

SEQ ID NO: 606335 - DNA, 120 bp, Artificial Sequence
  ENSG00000175387_182 (sequence is synthesized)
gaaatgatccagacatttactgaagattaatttataagatttcaaattacatgaaaagttcattaacatcctatttttaaaaacattcttttggtttattttttagagacaatgtcttgc

SEQ ID NO: 606336 - DNA, 120 bp, Artificial Sequence
  ENSG00000175387_183 (sequence is synthesized)
tgtgttacccaggctggagttcagtggctgttcacaggcacaattgtagcacactgcagcctcaaactccaactcacacaatcctcctgcctccgtttcctgagtagctggaactataga

SEQ ID NO: 606337 - DNA, 120 bp, Artificial Sequence
  ENSG00000175387_184 (sequence is synthesized)
tcctgcctccgtttcctgagtagctggaactatagatgcatacctgcataccaccatgtctcacccttgcttatcccgtttataatccatccaattcttttttttttttttttttttgag

SEQ ID NO: 606338 - DNA, 120 bp, Artificial Sequence
  ENSG00000175387_185 (sequence is synthesized)
ttttaacaattattcctagattacttataaaaactgagatattagacatagctagtcatttcaagttattttcctgttaaccatttttattacctgtgagtatcatgtgttcaattaaga

SEQ ID NO: 606339 - DNA, 120 bp, Artificial Sequence
  ENSG00000175387_186 (sequence is synthesized)
accataaaaatgaaatatgtaggtattttgccagtaactcagaggacacagctgaagtcaataatacaaaattagttcaacttacagttatacaaagatcattctgtttttaagttgagt

SEQ ID NO: 606340 - DNA, 120 bp, Artificial Sequence
  ENSG00000175387_187 (sequence is synthesized)
ttatagttttatgaccttaaaaagtctaacagagacaaatataaaactgagtagtaaattcaggcaaaaattttaaagacacttatttttgatttaccaattattttaaaaccagcttat

SEQ ID NO: 606341 - DNA, 120 bp, Artificial Sequence
  ENSG00000175387_188 (sequence is synthesized)
cagatgtttaagttatattaactaaaaggcacttgtgttaattactatatattttgtattagcactcatttatttgatgaatagaattccttaagggatttgtggccaactgccagattt

SEQ ID NO: 606342 - DNA, 120 bp, Artificial Sequence
  ENSG00000175387_189 (sequence is synthesized)
taccacgtagacacaacatacaacatatatatacatatgtgtaaacacacctaaacatacacatacacaaacatagctttcattttagaattttagtcatacgatagtaatacaggcttg

SEQ ID NO: 606343 - DNA, 120 bp, Artificial Sequence
  ENSG00000175387_190 (sequence is synthesized)
ctggtttataaaagacagttattggattcaaattatatttctgagaaagtgggacctgctcagctgggtaaacatgcagaataggtaatcttatgaaagctgtgaaccaaaagttttggt

SEQ ID NO: 606344 - DNA, 120 bp, Artificial Sequence
  ENSG00000175387_191 (sequence is synthesized)
aaatagcagtttggatttttaaaaaacctcttaccccacctccccaaccccttttttcccttttttcagtttcaaatgagtttaatgttaatatttaaatgcttacatttttagctagga

SEQ ID NO: 606345 - DNA, 120 bp, Artificial Sequence
  ENSG00000175387_192 (sequence is synthesized)
ctggctgaattgtataagaaaaaacaatctccaggtggccttgaatttttagtaacaaatcttttgtttgccattctggtttttttgactagtcagtgcaggcagggaagcattttagca

SEQ ID NO: 606346 - DNA, 120 bp, Artificial Sequence
  ENSG00000175387_193 (sequence is synthesized)
gttgtggatgaggggtttttgttttgttcttttagcctttgcatagcaggcaagcaatttttatgctataccagagataccttatattattgccctgagctcaagattttgacctgtttg

SEQ ID NO: 606347 - DNA, 120 bp, Artificial Sequence
  ENSG00000175387_194 (sequence is synthesized)
agagcctaatttttatacgtatttatctagttcttttaggctattaatcctttaattaactgttccatcaccctaagcagttattaggcaaacctaaatttacattaaaagggatacttc

SEQ ID NO: 606348 - DNA, 120 bp, Artificial Sequence
  ENSG00000175387_195 (sequence is synthesized)
ttaattctaggtgttggttgccagggaactattataatttataaagccattaatttaaggccctttaagacctttttttttctttttgttcttggctggaatgccgtaaggagtgagttt

SEQ ID NO: 606349 - DNA, 120 bp, Artificial Sequence
  ENSG00000175387_196 (sequence is synthesized)
catctcaacactggcagaaacagcagatttaaagtaggcagaaaaaaaattagagagcttagaagactctacatatcaactctatagctgcagtctcttggtactaagaataaaaaagct

SEQ ID NO: 606350 - DNA, 120 bp, Artificial Sequence
  ENSG00000175387_197 (sequence is synthesized)
tggggagtttagacaaagcatagacaatctctatgatggtcattgatccaaaaacatgcatgaggaaaagccacatagctgacctgaagtcccagaaaagcaggcatgccttaatgtttg

SEQ ID NO: 606351 - DNA, 120 bp, Artificial Sequence
  ENSG00000175387_198 (sequence is synthesized)
agaatttccattttgtttcttctcaatctcttaagagcaaagaaaattctgtaaatcctgacagataagtcaggtgtttggaccagtgttttaactggtggcgattgccctagtggcttt

SEQ ID NO: 606352 - DNA, 120 bp, Artificial Sequence
  ENSG00000175387_199 (sequence is synthesized)
aaaagagccatcctgtgcccaaaatttagaatgtttatttttgctcttgggagatgttcagaaacaggggaaaagagccaaatcatttacagatgcatgtaaccatatcgaaacgaaacc

SEQ ID NO: 606353 - DNA, 120 bp, Artificial Sequence
  ENSG00000175387_200 (sequence is synthesized)
aaaatcagtgttcccaaaagtgttaacccagtcatgcagattaaaaaataatataaacacagaagaacccaaagtaaatttaccagaaaaggcatgcctcagaatccagagtactcagcc

SEQ ID NO: 606354 - DNA, 120 bp, Artificial Sequence
  ENSG00000175387_201 (sequence is synthesized)
ggccaaggcaggaggatcgcttgagcccatgagttcaagaccagcctcagcagtatagtgagacactgtctctaaaaaaaaattgtttttaaatccagagtactcaaaccagagggacac

SEQ ID NO: 606355 - DNA, 120 bp, Artificial Sequence
  ENSG00000175387_202 (sequence is synthesized)
aattgtttttaaatccagagtactcaaaccagagggacacttgtctttatatcaaaaaggacttgccaggaaagacaaaaagtcttttgtcatcccaggagggatgtaaagtcctttatt

SEQ ID NO: 606356 - DNA, 120 bp, Artificial Sequence
  ENSG00000175387_203 (sequence is synthesized)
aaagtggtcttagaaccaagacaaatccaaagtcaagtcaaaaagcctctgccaaaagtgggaggctctgcctgagaaaagactcactggggcagaacagacaagctatgtaagcggaga

SEQ ID NO: 606357 - DNA, 120 bp, Artificial Sequence
  ENSG00000175387_204 (sequence is synthesized)
gcccaaagggctcctgtgagtactgcatactgattctgagatcaccacttctctctgaaatgtgtcctacttcaggttctactgctgaacaccatttatgtcaacacagagagaggctct

SEQ ID NO: 606358 - DNA, 120 bp, Artificial Sequence
  ENSG00000175387_205 (sequence is synthesized)
acaccatttatgtcaacacagagagaggctctctaaaagaaaactctatttgggaatacagcattgctgtagaaatacgcatgtcatgggccgtgcgcggtggcttatgcctgtaatccc

SEQ ID NO: 606359 - DNA, 83 bp, Artificial Sequence
  ENSG00000175387_206 (sequence is synthesized)
tgtattggtgggtgcctatgatcccgctacttgggaggctgaggcagaagattggcttgaacctgagaagtggaggttgcagt

SEQ ID NO: 606360 - DNA, 89 bp, Artificial Sequence
  ENSG00000175387_207 (sequence is synthesized)
attggtgggtgcctatgatcccgctacttgggaggctgaggcagaagattggcttgaacctgagaagtggaggttgcagtgagcctaga

SEQ ID NO: 606361 - DNA, 120 bp, Artificial Sequence
  ENSG00000175387_208 (sequence is synthesized)
tcatggtaaactacgtgtgtattcagggaagtaaaggaagacaaagattttaaagaaaaatgagggttgtataattgttttgaaataattgtcgttggttacaaagatcaatagcaaggg

SEQ ID NO: 606362 - DNA, 120 bp, Artificial Sequence
  ENSG00000175387_209 (sequence is synthesized)
tggtgccactctgaagttggacaggcagtggctaggcaaaagtattttgtgggtaacctttgtgaaaggttgcagtttttgtaacacaagctgctttattttcccaaaagctttcacagt

SEQ ID NO: 606363 - DNA, 120 bp, Artificial Sequence
  ENSG00000175387_210 (sequence is synthesized)
acatagaaaatatattggacgtgtattaaatgtgccaaattagtcagcaatattacattaaaatatgtgttattacttgttaatgttcttaataagttgttcaggcagttataccagact

SEQ ID NO: 606364 - DNA, 120 bp, Artificial Sequence
  ENSG00000175387_211 (sequence is synthesized)
atcttttctcattttccaatttataagtgtattatccaaaaatgttagttttagggtgaccactgtatattttggtattttttaaagctacccaattgtgtataatttataaaaatcttt

SEQ ID NO: 606365 - DNA, 120 bp, Artificial Sequence
  ENSG00000175387_212 (sequence is synthesized)
ttttcataagacctaaaacttctgaacaatacataggtgcaaataaataaattcctttttatctcaaactcacttccactgccctccctgaagaaagccttttgttattgttgtcttgac

SEQ ID NO: 606366 - DNA, 120 bp, Artificial Sequence
  ENSG00000175387_213 (sequence is synthesized)
taaatgtggcatgggagctaacattttcaagggaagctgatcttatctccgggctctagaagccaagacatgaggtatgtgtttaccgtctcttaggtgactctccagaactttcattct

SEQ ID NO: 606367 - DNA, 120 bp, Artificial Sequence
  ENSG00000175387_214 (sequence is synthesized)
caacctcctccctcactgccagttcctcctcagcttcttagccaagtggtagaggaaaaatggtattttatgtcaggactaagccatgtgctctgagccctgggtaagtctgcaaggctt

SEQ ID NO: 606368 - DNA, 120 bp, Artificial Sequence
  ENSG00000175387_215 (sequence is synthesized)
ctctagaactcatacataggtcaattattcctcctctgaaaacttaaactctggcaccactagctttttcctacagcatacatgggctcagtaaatcctctgttaagacaacaggaaaat

SEQ ID NO: 606369 - DNA, 120 bp, Artificial Sequence
  ENSG00000175387_216 (sequence is synthesized)
taagacaatgtccttgcaagccccataactactttctatccctgctattcacagccaagtgtgtcgagaccagttcacacaaaccttgttgattttcggtttcaccccctccttactaaa

SEQ ID NO: 606370 - DNA, 120 bp, Artificial Sequence
  ENSG00000175387_217 (sequence is synthesized)
tcacccctccatttgctgcagttgcccttgcgtgctgtactcagacttggaggaagtgatgtcttattcaaggccagtttttgtactagtggttaaataaatggtttccaaattggagtc

SEQ ID NO: 606371 - DNA, 120 bp, Artificial Sequence
  ENSG00000175387_218 (sequence is synthesized)
agaaggagagcttctaaaatgtaggttccctggcctcaattgtgagattctgctttagcaggtctggaattggagcactgggatctgcattttcagaaaacccaaaatgattatcagcca

SEQ ID NO: 606372 - DNA, 120 bp, Artificial Sequence
  ENSG00000175387_219 (sequence is synthesized)
ggacttaaacctctgctttagaccacattccctgtgggctttcagattttctatcaatgttcttccctcttcccagctcccacacattaaaactcagatcatgcagaaaagaagttacag

SEQ ID NO: 606373 - DNA, 120 bp, Artificial Sequence
  ENSG00000175387_220 (sequence is synthesized)
ttccttcatttcacatcaatttctcatgcatcccatctggttttgggaaggtgtgggacgaggtggatggccttaaacttgccaatcaaagataacgttctctttcgattcaaatagcct

SEQ ID NO: 606374 - DNA, 120 bp, Artificial Sequence
  ENSG00000175387_221 (sequence is synthesized)
atctcaggcttaaaaccatctctttggataaatgctcagcttttcaaaggttcttcctagcttcttcctcatgatggcatctagtgggtgagaacagtcatctccaggtgacacaggaaa

SEQ ID NO: 606375 - DNA, 120 bp, Artificial Sequence
  ENSG00000175387_222 (sequence is synthesized)
gagtttctctaatgtatgtgctgaggtccttgacggtcctgctgctggtgctcatcctgccatctttgctggatgtcactgagtctactgggtaatgtaagtgggtccctggcttttgtt

SEQ ID NO: 606376 - DNA, 120 bp, Artificial Sequence
  ENSG00000175387_223 (sequence is synthesized)
cactgctgtcatgccctgctcctgaccacaactctgtcattgcctttggtctcaaggtctctaccttaatagcttccatgtcccaactatgggactgttaatctgctgggctttggagtg

SEQ ID NO: 606377 - DNA, 120 bp, Artificial Sequence
  ENSG00000175387_224 (sequence is synthesized)
ggtgggaagggatgatgttggaactttgggatgtactgaacatcttgctcaagctttgggaagccaacattttctcagactgactagacacctccttccaccaatgctgagctagtgctc

SEQ ID NO: 606378 - DNA, 120 bp, Artificial Sequence
  ENSG00000175387_225 (sequence is synthesized)
ctgtgccatactgggtaagcctctaagtcatgagtaggacttttttgagtggcttgcagtcttccccaggctatgccaggaaagtagttgactaaccctgctgctccaagactcgcatac

SEQ ID NO: 606379 - DNA, 120 bp, Artificial Sequence
  ENSG00000175387_226 (sequence is synthesized)
ccatcctgaagtttccgtttatttcccaacagggcaattgcaatctcaatcaatctctccctgccctgggagtcattccactcctgcctaatgaagagactcttctcacatcgtattctc

SEQ ID NO: 606380 - DNA, 120 bp, Artificial Sequence
  ENSG00000175387_227 (sequence is synthesized)
agtttctcttatccatggttaggagtaaaactcatgttcagttgtccaagctttgcttttagtatgtgaatggagctcttagcatgtagaactcccttctcattctcagtaaagtctgac

SEQ ID NO: 606381 - DNA, 120 bp, Artificial Sequence
  ENSG00000175387_228 (sequence is synthesized)
tttgaagactacttatcatcttcctagagatgccaaagaataatcaagataataaaggcaggctctgagattcacagctgagtagcaactgtgctgttactctagtacacaccctctcct

SEQ ID NO: 606382 - DNA, 120 bp, Artificial Sequence
  ENSG00000175387_229 (sequence is synthesized)
ttcctgtgactgtcaggcttcagggcttacctttattggaaagacagcaggggggcatatatgaagaaaatggaatctttaatattgtcaaagtcttgacccaatagagacattcttgcc

SEQ ID NO: 606383 - DNA, 120 bp, Artificial Sequence
  ENSG00000175387_230 (sequence is synthesized)
ccagactctcttgcttcagtgcctttgcctgttctggtcctaagtaccttgaatatccttctcttgatgccctgatataaaactctttattcctcaaagccaagttcaggttatcacctc

SEQ ID NO: 606384 - DNA, 120 bp, Artificial Sequence
  ENSG00000175387_231 (sequence is synthesized)
caccacagacttttctttccctccccaaacttcattgcctcttctcatcactccctttgtaatttgtttatactggtaagagagcattcatcataattaggcctatctatgcctaccttt

SEQ ID NO: 606385 - DNA, 120 bp, Artificial Sequence
  ENSG00000175387_232 (sequence is synthesized)
cttgttaaattatgagctttgttctgccttggatatctctctggcttggatatctctctggcctttgctctgcacttccaaatgtatccattattcaagacccaggtttccagcctgatc

SEQ ID NO: 606386 - DNA, 89 bp, Artificial Sequence
  ENSG00000175387_233 (sequence is synthesized)
aatgtatccattattcaagacccaggtttccagcctgatcaacatagcaagatcccatctctccaaaaaaaaaaaaaaaaaaaaattgt

SEQ ID NO: 606387 - DNA, 80 bp, Artificial Sequence
  ENSG00000175387_234 (sequence is synthesized)
tcatgagccatgtttgtgctactgcactctagcctggatgacaaagtgagatccttttctaaaaataaggacccagttta

SEQ ID NO: 606388 - DNA, 120 bp, Artificial Sequence
  ENSG00000175387_235 (sequence is synthesized)
acaaagtgagatccttttctaaaaataaggacccagtttattttatttagttatttagttatttttgagaccaagtttcatcactcaggctggagtgcaatggcacagtcttgactcact

SEQ ID NO: 606389 - DNA, 90 bp, Artificial Sequence
  ENSG00000175387_236 (sequence is synthesized)
tgatccacctgccttggttcaccctgcctggccagaacccagtttaaattccatcctctctgcagagtcttccttaaccacccctattga

SEQ ID NO: 606390 - DNA, 120 bp, Artificial Sequence
  ENSG00000175387_237 (sequence is synthesized)
ccatcctctctgcagagtcttccttaaccacccctattgaaagttacccctgcttcctacaagaagtggtacttggatgttcatgagatacctgtgcaaggctcctgtgggggtcctggg

SEQ ID NO: 606391 - DNA, 120 bp, Artificial Sequence
  ENSG00000175387_238 (sequence is synthesized)
gagacagtgacatggacactcatgaaaggaaccttggaatagcgagtgtgtgtgctataaaatgtgctttagatttgattaccaccacttaagttatgagctctgatatggtttgggtct

SEQ ID NO: 606392 - DNA, 120 bp, Artificial Sequence
  ENSG00000175387_239 (sequence is synthesized)
acccaaatctcatcttgaattgtaatccctacatgttgagggaaggaagtaattgtattatgggggtggttctcccatgctgttctcatgatagtgaattctcacaggatctgatggttt

SEQ ID NO: 606393 - DNA, 120 bp, Artificial Sequence
  ENSG00000175387_240 (sequence is synthesized)
tcccatgctgttctcatgatagtgaattctcacaggatctgatggttttataaatggtagtttttcctgtactttcacacactcacactctcttctgccaccttgtgaagaaggtgcctg

SEQ ID NO: 606394 - DNA, 120 bp, Artificial Sequence
  ENSG00000175387_241 (sequence is synthesized)
ccagctgtattagtctgatctcacgcggctaataaagagataccggagactgggtaatttataaaagaggtttaattgactcacagttttacatggctggggaggcctcacaattatggc

SEQ ID NO: 606395 - DNA, 84 bp, Artificial Sequence
  ENSG00000175387_242 (sequence is synthesized)
tcacagttttacatggctggggaggcctcacaattatggcagaaggtgaagggggagcaagacacatcttacatggcatcaggc

SEQ ID NO: 606396 - DNA, 120 bp, Artificial Sequence
  ENSG00000175387_243 (sequence is synthesized)
cactattacaagagcagcacgggaaagacccacccccatgattcagttacctctcactgggtccctcacataatatggggaattatgggagctccaattcaagatgagatttgggtgggg

SEQ ID NO: 606397 - DNA, 120 bp, Artificial Sequence
  ENSG00000175387_244 (sequence is synthesized)
gctaaaatcactttttcccaaacatttcctttttatatatgctacatctttgtgtctgcttcaacatttccagcagtgctttatatatggtaggcatgcaataaatgcttcttgatcgac

SEQ ID NO: 606398 - DNA, 120 bp, Artificial Sequence
  ENSG00000175387_245 (sequence is synthesized)
tgacaggtgctcagaagatctaggttggttgattctcttgtgatgccatcttttcctgagagctcattaatttttaagttgttttccttgaaatgcatggtatgtttcctccaccctgct

SEQ ID NO: 606399 - DNA, 120 bp, Artificial Sequence
  ENSG00000175387_246 (sequence is synthesized)
ctttgcctttcatagggttccattttgatcagctgctctcattgtctgttttgtgatcaaaggttctgatgaactttggaatatgtgtatgtttggagtgaggatggggtctggaggaga

SEQ ID NO: 606400 - DNA, 120 bp, Artificial Sequence
  ENSG00000175387_247 (sequence is synthesized)
tgcatggttgaggaccaattcacccaacccagcttacagaagtaaagcggccccttaggagcactgaagcattgctgtggatttcagaattaccttatttctttttcttttttttttttt

SEQ ID NO: 606401 - DNA, 120 bp, Artificial Sequence
  ENSG00000175387_248 (sequence is synthesized)
ggcgtgagccaccgtgcccagccagcttctttcaaatcagagtaggccttccagtgtggcaggccataagatctgaagttttcaccctgttcctggaagccaagtggacagcaactaatt

SEQ ID NO: 606402 - DNA, 120 bp, Artificial Sequence
  ENSG00000175387_249 (sequence is synthesized)
aagccaagtggacagcaactaatttttactttctttattgcacatttggggcttgggggatagagtcagatgtgtgtcagttgaaactgtagctactgcattccactccttgggggatcg

SEQ ID NO: 606403 - DNA, 120 bp, Artificial Sequence
  ENSG00000175387_250 (sequence is synthesized)
tagtgctcatgccaacagaaaacttcgaggctaataattactgtcttcagagtacaagacaggcacggaagttgttttggcataagaaaaccacgatttgcatcccacagtctaaggaag

SEQ ID NO: 606404 - DNA, 120 bp, Artificial Sequence
  ENSG00000175387_251 (sequence is synthesized)
acgatgctgaattcagaagatggtgcaaaagtgtgacagttcagctgtggcggctgttgctgatgcatgggactattttatttacatttcctttcttcttttttaacagagacaggatct

SEQ ID NO: 606405 - DNA, 80 bp, Artificial Sequence
  ENSG00000175387_252 (sequence is synthesized)
tttacatttcctttcttcttttttaacagagacaggatcttgctgtgttgcccagcctggtcttaacgtgttgggattac

SEQ ID NO: 606406 - DNA, 120 bp, Artificial Sequence
  ENSG00000175387_253 (sequence is synthesized)
agtcaaatgttagttggtcaatcagtctttttaagcaccaattttgtgcctagccttgtggaaactgtaggaaaaagatactttttatttgggaggaccttgatttgctgtcacaggtgc

SEQ ID NO: 606407 - DNA, 120 bp, Artificial Sequence
  ENSG00000175387_254 (sequence is synthesized)
cactaatgccaattataaggcagtgtggaatcaggtgattgaaagcccagtctgtagcataaactgctgcagggttccagtgggggcaattaaggtgggcagggagggtggatagcattt

SEQ ID NO: 606408 - DNA, 120 bp, Artificial Sequence
  ENSG00000175387_255 (sequence is synthesized)
gactttgacagcataacctgagcagaggcacagtggggatggtgagtgtgcagtgggaggagggagagaggtaagtggtagggaagaggtgggaagggggcaaggagaaggctcaggagg

SEQ ID NO: 606409 - DNA, 120 bp, Artificial Sequence
  ENSG00000175387_256 (sequence is synthesized)
tttggggacagggaaatgacttggttggcgacctcttactttcttctcgtgtgtgcaatttggaattcacttggttcttagtatttctgggtcagatgacttctttgcagtatgagaaac

SEQ ID NO: 606410 - DNA, 120 bp, Artificial Sequence
  ENSG00000175387_257 (sequence is synthesized)
catttcccaggctggctacctgggctgtggtatcttccagtgctcctctgtgattgtactcagatcagctcgtctaggcaggcaggatggcagaagccctctgacttcatgtctgaaaga

SEQ ID NO: 606411 - DNA, 120 bp, Artificial Sequence
  ENSG00000175387_258 (sequence is synthesized)
gtatgtgtttcaactctgtaattacagcatttaacagacgatatcagccctctttgggatggcttttggcaaatgggctagaagtctattgtgcatttaaatgatactgcatcttctctt

SEQ ID NO: 606412 - DNA, 120 bp, Artificial Sequence
  ENSG00000175387_259 (sequence is synthesized)
taaaaggtttctcagtgagtccaccccactctgtatccaagtatgtctcaggccatgaggcaaaaggaaatgagtagttctttttggttggagaattaaaaagaaatctccacccaagta

SEQ ID NO: 606413 - DNA, 120 bp, Artificial Sequence
  ENSG00000175387_260 (sequence is synthesized)
acaggtacatagtgggaaaaaataacatctgcctgaaagcttcatcttcaggcaaagagagggtcagggggcgggagcttagtaatggggaaacctcagaagatttaaagagaattacag

SEQ ID NO: 606414 - DNA, 120 bp, Artificial Sequence
  ENSG00000175387_261 (sequence is synthesized)
acagacaaggctgaacattggctgtcatccaacaaagctcttataagatgggaatcactgcccggttcttgagctccgacctggagggaagaggagtctggaagacttggcacaggcctg

SEQ ID NO: 606415 - DNA, 120 bp, Artificial Sequence
  ENSG00000175387_262 (sequence is synthesized)
agtgcttcattgtctttctggttccaagtcctcctcagctcactaggaaggaggtggggtgggggcaggtaggccactctgcataagtgcacacatctacactggctagtctacttcaca

SEQ ID NO: 606416 - DNA, 120 bp, Artificial Sequence
  ENSG00000175387_263 (sequence is synthesized)
attcccccacaggttatccttatctctacctggttccagttccagattggagggatatagaataccatccccacccctcaccttgcttgctctggcctggaaaactgtcattcctttacc

SEQ ID NO: 606417 - DNA, 120 bp, Artificial Sequence
  ENSG00000175387_264 (sequence is synthesized)
accagctggcatctgccatatgcttcaaggaactgaataaagaggaaggggaaagaagaaactagagaaactggaatgcttcctatctgacccccaagtacagggactgcctctttccgt

SEQ ID NO: 606418 - DNA, 120 bp, Artificial Sequence
  ENSG00000175387_265 (sequence is synthesized)
aacggcacagaacgtctccatccctttgacctccacctccccagagatgcccgaggaggacagccttgtttctgtgatctgttgttgagaactgctgctgagaattcttccttcagcacc

SEQ ID NO: 606419 - DNA, 120 bp, Artificial Sequence
  ENSG00000175387_266 (sequence is synthesized)
gccttaggcaccattggtttttcactaggtccgctgtagaaaacagccaggaattacttagttgactaccacctgaggtgctgtttggtgttggtaataaagaataaaggtggaaatgaa

SEQ ID NO: 606420 - DNA, 120 bp, Artificial Sequence
  ENSG00000175387_267 (sequence is synthesized)
gggccgtaggcaaagggaggtggggaggcggtggccggcgactccccgcgccccgctcgccccccggcccttcccgcggtgctcggcctcgttcctttcctcctccgctccctccgtctt

SEQ ID NO: 606421 - DNA, 120 bp, Artificial Sequence
  ENSG00000175387_268 (sequence is synthesized)
tccgtcttccatacccgccccgcgcggctttcggccggcgtgcctcgcgccctaacgggcggctggaggcgccaatcagcgggcggcagggtgccagccccggggctgcgccggcgaatc

SEQ ID NO: 606422 - DNA, 120 bp, Artificial Sequence
  ENSG00000175387_269 (sequence is synthesized)
aatcggcggggcccgcggcccagggtggcaggcgggtctacccgcgcggccgcggcggcggagaagcagctcgccagccagcagcccgccagccgccgggaggttcgatacaagaggctg

SEQ ID NO: 606423 - DNA, 120 bp, Artificial Sequence
  ENSG00000175387_270 (sequence is synthesized)
cccaataacaccagtgcagcctgtctagttgcaaatactaacagtagaatgtttcttgccttgtttggtagaccatccatttctttcccttacttgttttatgtatatcttaaaggttgc

SEQ ID NO: 606424 - DNA, 120 bp, Artificial Sequence
  ENSG00000175387_271 (sequence is synthesized)
ttttttggtttgttgatttgttttacaaatgcttattgagtgtttgctatgtagaaggcactgtttctagacatatgaggataacagtgattaacaaaacacaaaactcctgccttccta

SEQ ID NO: 606425 - DNA, 120 bp, Artificial Sequence
  ENSG00000175387_272 (sequence is synthesized)
gtgatatgatagaatgaagaattaaaaagctgctttgggtcggattgtgatgcttgcgtggagcttggagaagcagcagccaactgagggaagagtcttctaggcagagggaagagccag

SEQ ID NO: 606426 - DNA, 120 bp, Artificial Sequence
  ENSG00000175387_273 (sequence is synthesized)
agtgaagacactgagcacttgctctgaaatttggggactgagtacaccaaatacgatagatcagtgggatacaacaggcctttacagcttctctgaacaaaccaggtctcttgatggtcg

SEQ ID NO: 606427 - DNA, 120 bp, Artificial Sequence
  ENSG00000175387_274 (sequence is synthesized)
aggaagcctttgaagcacagctgaagaacagtaggtcttggagaaatttttgctgtagacctgctctatcttaacagtatgtttgaacatagattgctaaaaatctcggtctccacagag

SEQ ID NO: 606428 - DNA, 120 bp, Artificial Sequence
  ENSG00000175387_275 (sequence is synthesized)
gattggttccgggactctcctgcaagcaccagaatatgagaacgctgaagtcccttgtataaaatgatacctgaaaaaagcggcagtctgcaacccagaagagggccttacttggaacct

SEQ ID NO: 606429 - DNA, 120 bp, Artificial Sequence
  ENSG00000175387_276 (sequence is synthesized)
ctggagttcatttgtatctattttcaatgaggttatagagtcagctgatctttatgtaaaataaagttggaggcctccaaattcaaaactgttgcaaattactgagctgccattatggaa

SEQ ID NO: 606430 - DNA, 120 bp, Artificial Sequence
  ENSG00000175387_277 (sequence is synthesized)
gatattaaaacatgcacaggcgtgcattttaacgtaattcagagtgttaaatatcataaaaggggtgtatatgaagggttatgtcagtttatggaaggagagatgtttgcacacggtgct

SEQ ID NO: 606431 - DNA, 120 bp, Artificial Sequence
  ENSG00000175387_278 (sequence is synthesized)
caaggaaaacttgatggcacatgatctagttgtaaaaggtgcattggatttcaatagtcataaatggggtgggcagagttgggaagtgataatcttgacaatagcatagcaattcagttt

SEQ ID NO: 606432 - DNA, 120 bp, Artificial Sequence
  ENSG00000175387_279 (sequence is synthesized)
aggtaaagcctgggcgcccgcgggcctccagctagggaagtgtttgcgtgcgtccgcggccggggcgatgggccgtgtcacatggccgctgcgggtgggggctggggtgtggttcgatac

SEQ ID NO: 606433 - DNA, 120 bp, Artificial Sequence
  ENSG00000175390_0 (sequence is synthesized)
aaatcgcttctgggtgcagccacaggagtggggttgttggtccaggtggagccatggttgagggaaaaactaaaacatgacagagtttattcatcaatgggaacttttatatactgttag

SEQ ID NO: 606434 - DNA, 120 bp, Artificial Sequence
  ENSG00000175390_1 (sequence is synthesized)
ttagaaggcatgtaaattggaacagcctctttggaaaacaagtctgcattatcttcctcgagcttctgggctcaaacgatccttccgcctcggtctcccgaagtgctgagattacaggcg

SEQ ID NO: 606435 - DNA, 120 bp, Artificial Sequence
  ENSG00000175390_2 (sequence is synthesized)
ccaccgcgcctggccttaaaatcctttttaaaggcactttgacatccattatctcatttaagtctaaaacacgaatttcgacctccgcgctgctttctggttccacctggcggcagctgc

SEQ ID NO: 606436 - DNA, 120 bp, Artificial Sequence
  ENSG00000175390_3 (sequence is synthesized)
acaaagtgtttctcttcgaacgccgtcccaagttttacccggaactacttagcccagggtttcctgagtgctcctcgggccaaaagcagagcgcacaaattccagaagaaattaccaacg

SEQ ID NO: 606437 - DNA, 120 bp, Artificial Sequence
  ENSG00000175390_4 (sequence is synthesized)
gcgggactatttcagtgctccgagaagtatcaccagtaaccaatcagcaaaaagctctagctcacgtggtgtatattcagcctatcaagctcctgatattcatgaatgctgtcatttccg

SEQ ID NO: 606438 - DNA, 120 bp, Artificial Sequence
  ENSG00000175390_5 (sequence is synthesized)
cttccgcctccttctttctcgacaagatggccacaccggcggtaccagtaagtgctcctccggccacgccaaccccagtcccggcggcggccccagcctcagttccagcgccaacgccag

SEQ ID NO: 606439 - DNA, 120 bp, Artificial Sequence
  ENSG00000175390_6 (sequence is synthesized)
caccggctgcggctccggttcccgctgcggctccagcctcatcctcagaccctgcggcagcagcggctgcaactgcggctcctggccagaccccggcctcagcgcaagctccagcgcaga

SEQ ID NO: 606440 - DNA, 120 bp, Artificial Sequence
  ENSG00000175390_7 (sequence is synthesized)
ccccagcgcccgctctgcctggtcctgctcttccagggcccttccccggcggccgcgtggtcaggctgcacccagtcattttggcctccattgtggacagctacgagagacgcaacgagg

SEQ ID NO: 606441 - DNA, 120 bp, Artificial Sequence
  ENSG00000175390_8 (sequence is synthesized)
gtgctgcccgagttatcgggaccctgttgggaactgtcgacaaacactcagtggaggtcaccaattgcttttcagtgccgcacaatgagtcagaagatgaagtggctgttgacatggaat

SEQ ID NO: 606442 - DNA, 120 bp, Artificial Sequence
  ENSG00000175390_9 (sequence is synthesized)
ttgctaagaatatgtatgaactgcataaaaaagtttctccaaatgagctcatcctgggctggtacgctacgggccatgacatcacagagcactctgtgctgatccacgagtactacagcc

SEQ ID NO: 606443 - DNA, 120 bp, Artificial Sequence
  ENSG00000175390_10 (sequence is synthesized)
gagaggcccccaaccccatccacctcactgtggacacaagtctccagaacggccgcatgagcatcaaagcctacgtcagcactttaatgggagtccctgggaggaccatgggagtgatgt

SEQ ID NO: 606444 - DNA, 120 bp, Artificial Sequence
  ENSG00000175390_11 (sequence is synthesized)
tcacgcctctgacagtgaaatacgcgtactacgacactgaacgcatcggagttgacctgatcatgaagacctgctttagccccaacagagtgattggactctcaagtgacttgcagcaag

SEQ ID NO: 606445 - DNA, 120 bp, Artificial Sequence
  ENSG00000175390_12 (sequence is synthesized)
taggaggggcatcagctcgcatccaggatgccctgagtacagtgttgcaatatgcagaggatgtactgtctggaaaggtgtcagctgacaatactgtgggccgcttcctgatgagcctgg

SEQ ID NO: 606446 - DNA, 120 bp, Artificial Sequence
  ENSG00000175390_13 (sequence is synthesized)
ttaaccaagtaccgaaaatagttcccgatgactttgagaccatgctcaacagcaacatcaatgaccttttgatggtgacctacctggccaacctcacacagtcacagattgcactcaatg

SEQ ID NO: 606447 - DNA, 120 bp, Artificial Sequence
  ENSG00000175390_14 (sequence is synthesized)
aaaaacttgtaaacctgtgaatggaccccaagcagtacacttgctggtctaggtattaaccccaggactcagaagtgaaggagaaatgggttttttgtggtcttgagtcacactgagata

SEQ ID NO: 606448 - DNA, 120 bp, Artificial Sequence
  ENSG00000175390_15 (sequence is synthesized)
gtcagttgtgtgtgactctaataaacggagcctaccttttgtaaattaatttcatcttatgtgagtttattgccgggtggaagggaggaaaatgttttagatcacacagaaactaggaag

SEQ ID NO: 606449 - DNA, 120 bp, Artificial Sequence
  ENSG00000175390_16 (sequence is synthesized)
tgaatattgtaggtagagaagttggttatgtgtttggcatgttactgttttaccaaactgttcttttggttttcaatatggaaaggtgtccattggcaaaacaaccttttcttgaggatt

SEQ ID NO: 606450 - DNA, 120 bp, Artificial Sequence
  ENSG00000175390_17 (sequence is synthesized)
catgtgatttctacaggaaatgaaaataagaatccatggagaaaaaatagctaagaaaattggatgcttaatctgaactaaaagagtagagtgtgtagtcactatcttaaaatacattaa

SEQ ID NO: 606451 - DNA, 120 bp, Artificial Sequence
  ENSG00000175390_18 (sequence is synthesized)
tagtaagatggagctctttgccactttggttcggggaggcagaattaagatctgtgggttaaagattaaagaggtttccccaaaacttcagaaaattcttaggtgctatctgtaactcga

SEQ ID NO: 606452 - DNA, 120 bp, Artificial Sequence
  ENSG00000175390_19 (sequence is synthesized)
ggatagagccttgagttatactgaggtctgccagtggctcaatttaagcaaagactagatggcatttcccagaggccttgtaggctagagtacttgcctgtgtaacttcagacatccatt

SEQ ID NO: 606453 - DNA, 120 bp, Artificial Sequence
  ENSG00000175390_20 (sequence is synthesized)
tcctctggtatcctggagttccgcctcgccactgtgtgtcttagaaataagtcattattcaagaactcaggaaattatacgttggagtgaaaaggtgagtgaaggcaatggggaatcaaa

SEQ ID NO: 606454 - DNA, 120 bp, Artificial Sequence
  ENSG00000175390_21 (sequence is synthesized)
aaggcctggatcctagttctgaggtatgtgtagccttaggaaagataaattataagagtcataagatatggatcataaacatacatagtccattagggtattatgaggattccatgaatt

SEQ ID NO: 606455 - DNA, 120 bp, Artificial Sequence
  ENSG00000175390_22 (sequence is synthesized)
aataaatgtcaggttaatcaacacttgtggagaatatcacctggtatgtagtaagcacagataagtggtagatactatgatgcctaaaggtgaatagtttgaaagtaataagcaacatga

SEQ ID NO: 606456 - DNA, 120 bp, Artificial Sequence
  ENSG00000175390_23 (sequence is synthesized)
accccagcctggaactcagttctgagatatgtacctcaggaaatataagttatgggagtcataaagtgtggatagtaatgatagataatttcttacaggtagggaaatgtaaacagatct

SEQ ID NO: 606457 - DNA, 120 bp, Artificial Sequence
  ENSG00000175390_24 (sequence is synthesized)
tatcggcaaaatgataatgacaggccaaattgttaaaggtaggttaaaagtagacagcatggtgggaaggttaatcagagtcaaaatgtttcagtgttcttacatttttgggagtagcca

SEQ ID NO: 606458 - DNA, 120 bp, Artificial Sequence
  ENSG00000175390_25 (sequence is synthesized)
gttaatatcaacttagtctttttaagtatgcatgataaaattccgaggttaattgctagaagtatatataatctctcaatgaatagtgatgagagatggtgggataatagggaagaaaca

SEQ ID NO: 606459 - DNA, 120 bp, Artificial Sequence
  ENSG00000175390_26 (sequence is synthesized)
aaattttaaatttgagaaataagcatagaaaaggtggataaaacaaaagatggcaaaacaagtccaaatagatcagtaattacaataaatgtataagtattaaactagcccaaggaaaaa

SEQ ID NO: 606460 - DNA, 120 bp, Artificial Sequence
  ENSG00000175390_27 (sequence is synthesized)
ttgaatattaaaacaaaccccaatcatatgctgtttacaggagacacatctaaaacaaggacataaagttgtcctgcagctgtgagtaacaatataggtgaatgttaataataatgttga

SEQ ID NO: 606461 - DNA, 120 bp, Artificial Sequence
  ENSG00000175390_28 (sequence is synthesized)
atgaaaaaagctggtgtcagaagacatgtacattatgatactccagaagttcaaaaacaagtgaaacttgtttagacatgcggttggctgtctgtatatgtgggttccacatctatggac

SEQ ID NO: 606462 - DNA, 120 bp, Artificial Sequence
  ENSG00000175390_29 (sequence is synthesized)
tcaaccaactacaggttgaaaatattgagggggaaaattgtgtctggactaaacctgtacagacatttttccttgtcatttttccctaaacaatacaaagtattagatggtgtttatact

SEQ ID NO: 606463 - DNA, 120 bp, Artificial Sequence
  ENSG00000175390_30 (sequence is synthesized)
gtattcggtattataagtaatctagagatgacttaaaagtatatgagaaggtatgcacaggttatatccaaatacttcatattagggacttgagcatcagaggatttttatatccaagga

SEQ ID NO: 606464 - DNA, 120 bp, Artificial Sequence
  ENSG00000175390_31 (sequence is synthesized)
aagtcaccatgaacactgaattagagagtactgaaccattattcccaagggaaatacagggttgggttcctatgaacctctgggcacagtttcatcaacccatcagtacataaacttgtt

SEQ ID NO: 606465 - DNA, 120 bp, Artificial Sequence
  ENSG00000175390_32 (sequence is synthesized)
acatgtgtttctgtttgaagacaccttagtatatatggttgacccattaacactgaacttagcccacgacacttattcctgaatgaagcttacctcagtttctccaggcggcacatcaca

SEQ ID NO: 606466 - DNA, 120 bp, Artificial Sequence
  ENSG00000175390_33 (sequence is synthesized)
gtcttcttgcacttaggaacacttggcactgtgcgtgggggtcactttaagcagcaaaatccacaaaaatgcaaaagacatggcactaaatagactgaaaaggatacttgtttataagaa

SEQ ID NO: 606467 - DNA, 120 bp, Artificial Sequence
  ENSG00000175390_34 (sequence is synthesized)
ctgaaacaagaaggccttgttccacctcagctgggaacatggagagcaggcaattcaaattttttcacatgctgcatgtccgcaaatggctgcaaaagcccagcaagtactgatactgga

SEQ ID NO: 606468 - DNA, 120 bp, Artificial Sequence
  ENSG00000175390_35 (sequence is synthesized)
gttagaaataaattttagcaagaggtaaattcacacatacggagtctgcaaaaaatgagaattgactattatgtgtgtgtatattatatatatgataaaaaacaaaagaatgataaaaat

SEQ ID NO: 606469 - DNA, 120 bp, Artificial Sequence
  ENSG00000175390_36 (sequence is synthesized)
tcccaataatgtttactttggtggtgagaagaggatggcaagtaaaataagtctgtattgttatcagcaattatctagtttgaggttggacagtggtttcatcataggtattgattatat

SEQ ID NO: 606470 - DNA, 120 bp, Artificial Sequence
  ENSG00000175390_37 (sequence is synthesized)
tataaatagcccaacctgaactcatgaccatagtgtggtgttattacttagcgttattctagacttattagccattgtatttaaacaagaggaaatagagacattgaagataaagtggag

SEQ ID NO: 606471 - DNA, 72 bp, Artificial Sequence
  ENSG00000175390_38 (sequence is synthesized)
ctgtaatcccagcactttggcaggctgagatgggttaatcaagaccagaagttcacaaaaaatacaaaaatt

SEQ ID NO: 606472 - DNA, 120 bp, Artificial Sequence
  ENSG00000175390_39 (sequence is synthesized)
gcaccactgcaccccagcctgggtgacagcaagatcctttctcaagaaaaaaagtgaaaaggaggagggtttttaaaaaattagtactacccagttgatacggtggaagaaaacttgaaa

SEQ ID NO: 606473 - DNA, 120 bp, Artificial Sequence
  ENSG00000175390_40 (sequence is synthesized)
atgctaatgagaaacatgagatgtaatcacttgaaggcatatcatgttcttgaataagaagactcaacattattttaacaggtgttaattttccctgttaaactacatatttgtcataat

SEQ ID NO: 606474 - DNA, 120 bp, Artificial Sequence
  ENSG00000175390_41 (sequence is synthesized)
tacaataaaatacaaagagctattttggaactgggcaagctgtttctaaatgtatatggaaaaataaaaatgtctccaaaaaatccctgcagagggaaactagcccttccagatataaaa

SEQ ID NO: 606475 - DNA, 120 bp, Artificial Sequence
  ENSG00000175390_42 (sequence is synthesized)
tatattatagaactgtgtaattaaagcaatatggtactggtccataaaagaacataaaaccaaatagttcagtagactcaaaatgcaagcgttggtgagggtatggagaaaagggaaccc

SEQ ID NO: 606476 - DNA, 120 bp, Artificial Sequence
  ENSG00000175390_43 (sequence is synthesized)
ggagaaaagggaacccttttacacttggtgtgaatgtaaattagtacagacattgtggaaaacagtttgtagagcttcctcaataaaaacacatatgatccagcaatcccactactgggt

SEQ ID NO: 606477 - DNA, 120 bp, Artificial Sequence
  ENSG00000175390_44 (sequence is synthesized)
tgaaatcagtatgttgaagagatacttccacgttcactgaagcattgttcacaatcgccaagacatcaacctaagtgtccatcaacagaagatagatagggctgagcgcggtggcccacg

SEQ ID NO: 606478 - DNA, 78 bp, Artificial Sequence
  ENSG00000175390_45 (sequence is synthesized)
catttgaggtcagaagttctgatacaaaaattagccaggcatcttggagggcgcctgtaatcccacctactcgggctg

SEQ ID NO: 606479 - DNA, 120 bp, Artificial Sequence
  ENSG00000175390_46 (sequence is synthesized)
gcatcttggagggcgcctgtaatcccacctactcgggctgaagtgagaatggcttgaacccaggaagtggagatttcagtgagctgagattccgccactgcagtccagcctgagcgacaa

SEQ ID NO: 606480 - DNA, 120 bp, Artificial Sequence
  ENSG00000175390_47 (sequence is synthesized)
tgagacttcatctcaaaaaaaaaaaaggtacatctacacaatggaatattattaaccttaaaagaaggaaataactgatttacaacaacatggatggacctggaggacactatgctagtg

SEQ ID NO: 606481 - DNA, 120 bp, Artificial Sequence
  ENSG00000175390_48 (sequence is synthesized)
actatgctagtgaaataagccatgatctcacttggatatggaatcacaaaattgaactcacaagcagagtgtagaaaggtggtttcatggactggagggaggggataaatggggagatgt

SEQ ID NO: 606482 - DNA, 120 bp, Artificial Sequence
  ENSG00000175390_49 (sequence is synthesized)
tggtcaagggtacaaagtttcagttaaacaggagtagtacgttccggagacctgttgtgcagcagggtgactagttaatgtatacttgaaaattgctaggagtagatctcaccaggagaa

SEQ ID NO: 606483 - DNA, 120 bp, Artificial Sequence
  ENSG00000175390_50 (sequence is synthesized)
atgaatatgtgaggtgatggatgtaactagcttgattgtggtaatcaatttcgcaatgtgtacatatatcaaaacatcacattgtacaaaatacatacagtttttgtcaatttaaagata

SEQ ID NO: 606484 - DNA, 120 bp, Artificial Sequence
  ENSG00000175390_51 (sequence is synthesized)
tcagaattctagaatatgataaagttgtgttttcaagcaagtaaagatagattacttaagagcgaatgagtggtaatttggaaacaatgttggattcctacttcgttacctgcaccaaaa

SEQ ID NO: 606485 - DNA, 120 bp, Artificial Sequence
  ENSG00000175390_52 (sequence is synthesized)
taagttgctcatggaataaaaacttgtctgaaaaaaaaaccataaatatgagggaaaaaacacagcaatgtgtttttaatgatttatgagtgaggaagaactttctaagaactgagaatc

SEQ ID NO: 606486 - DNA, 120 bp, Artificial Sequence
  ENSG00000175390_53 (sequence is synthesized)
caggagttattttaaaagactgacaaatttagcaacatttttaaaatctgagtgtcaaattacacacatacacaaatagtcaatacaaatataaaactgggaaaatatttgcagttcata

SEQ ID NO: 606487 - DNA, 120 bp, Artificial Sequence
  ENSG00000175390_54 (sequence is synthesized)
tcaaaaaaagggctaatattcttgtcccagaattcctacagttttttaaggccagtaatttgatacattagtgtgtaaaggatatgaccagacagctcacacacagacacacaaatgtga

SEQ ID NO: 606488 - DNA, 120 bp, Artificial Sequence
  ENSG00000175390_55 (sequence is synthesized)
aaagatgcttgatctcactgataaagcataaattaaaacgatgtcatttttaaaaatcagattcgcaaattttaaaagttgctaacactggaatggccagagtaagaggaaacgtgacac

SEQ ID NO: 606489 - DNA, 120 bp, Artificial Sequence
  ENSG00000175390_56 (sequence is synthesized)
aggcacagattgctggtagacatataagttggtacagccctctctatgtaattttgtgtttgtcaaaattacaaatatgcatgcccttaacccaggaattccactcctcattatatatcc

SEQ ID NO: 606490 - DNA, 120 bp, Artificial Sequence
  ENSG00000175390_57 (sequence is synthesized)
tacaaataaactggtctcgttatgacacaatgtaatgaatacatagataagtactgaaatacttggttatcatagcgtaaagatggtaatcaacccaaatgactattaccagaatagaaa

SEQ ID NO: 606491 - DNA, 120 bp, Artificial Sequence
  ENSG00000175390_58 (sequence is synthesized)
ttaaacaaagtatgatatatccataaaacacaatactatgcagctgttaagcagaatgagacagtcctctatatatcaatatggataaagagtaagtgaaaaaagccaggagagaatgtt

SEQ ID NO: 606492 - DNA, 120 bp, Artificial Sequence
  ENSG00000175390_59 (sequence is synthesized)
gtctataatatgctgttgttgtgtacgggaaaataaataatataaatacctagaatatttgtgaaggtacagccaagaaactactatcactgattgtcttaaggtactagatggggcaca

SEQ ID NO: 606493 - DNA, 120 bp, Artificial Sequence
  ENSG00000175390_60 (sequence is synthesized)
ggacaggacgaaagatttacttcttattgtttcttctgtataacttttgaattttatgctgttaatgtaatttttcaaaaaaatatataaaaatataaaaacatgaaaaacatgaaacaa

SEQ ID NO: 606494 - DNA, 120 bp, Artificial Sequence
  ENSG00000175390_61 (sequence is synthesized)
aaactgttaaaggtgggaaatgatcagcaccagaggccacataccattcacatgagatcaaaaccggtgatgagcataccaggtaaaaggagttgagctctattaggaggaagaaaagct

SEQ ID NO: 606495 - DNA, 120 bp, Artificial Sequence
  ENSG00000175390_62 (sequence is synthesized)
gataagggcacagcaggaagtgtgactgagcagactgagtctaaggggagttgggaaacagagttagtaggacgttaagaccatctctttcctggtgggatgactgaattctctctctta

SEQ ID NO: 606496 - DNA, 120 bp, Artificial Sequence
  ENSG00000175390_63 (sequence is synthesized)
tgcctggtttcttcccccacctcagcacatacactcaaatgtgaaaagagttgggtgaggtgacctggagtaggatagagacagggcttcacctatagccccactgaagtccaggttggg

SEQ ID NO: 606497 - DNA, 120 bp, Artificial Sequence
  ENSG00000175390_64 (sequence is synthesized)
aggaaggaagaggtgtgttatgcgtggttggagacttccttccttctcccatgattccattgtctcatttactgctgatactactgtgacttactgtctaaattcgtgatggaaagaaac

SEQ ID NO: 606498 - DNA, 120 bp, Artificial Sequence
  ENSG00000175390_65 (sequence is synthesized)
ataaaaaagtttctccaaatgagctcatcctgggctggtaagttggggaggtgggggctggggttaatggaaggtctcttcgtgattgccggtgtcttttgctactggactggatcttat

SEQ ID NO: 606499 - DNA, 120 bp, Artificial Sequence
  ENSG00000175390_66 (sequence is synthesized)
ctggactggatcttatactcttccttttggaggcaagagtattgcaagtgtattactgactgtgagcagtggctcaatgcctgtaatcccagctgggaggctgaggcaggaggatcactt

SEQ ID NO: 606500 - DNA, 120 bp, Artificial Sequence
  ENSG00000175390_67 (sequence is synthesized)
gatcagcctgaacaaaatagtgagaccctgtctctacaaaaacattttttaaaaacttagccaggaatttgaagttgcagtgagctatgatcatgccttgccactgcattccagcctgag

SEQ ID NO: 606501 - DNA, 120 bp, Artificial Sequence
  ENSG00000175390_68 (sequence is synthesized)
tgacagagtgcgaccctgtctctaaaaaacaaaaggaaagtgtgttacctgtaggaactgtgaattcagtgggttttgctggtggttctgatcctgtggggccaggatatttcgaattac

SEQ ID NO: 606502 - DNA, 120 bp, Artificial Sequence
  ENSG00000175390_69 (sequence is synthesized)
cttgtaagtgacttggaatttttcatcagcactaagtcagcctttgattttatttgacatagttttcggtgtgtgtattgctcttggcagttggtgtcactaggtgtcctaccgtagaag

SEQ ID NO: 606503 - DNA, 120 bp, Artificial Sequence
  ENSG00000175390_70 (sequence is synthesized)
tgtccggtaccctgaagacacccatgccactgttgtgtttgatattgacgccacatatagacaggagtccaccactgtgttccatttcacaggtacgctacgggccatgacatcacagag

SEQ ID NO: 606504 - DNA, 120 bp, Artificial Sequence
  ENSG00000175390_71 (sequence is synthesized)
cagtgttgcaatatgcagaggatgtactggtgagaggggaaagaaaaaacaaagggggaggacatagttctctatcctgggatcactgaggcatgtgctgatgaaatggtagggctcagt

SEQ ID NO: 606505 - DNA, 120 bp, Artificial Sequence
  ENSG00000175390_72 (sequence is synthesized)
cagaccccctatattccatccatgggtttcagctaaggcacccctagtctataagtgtatcagtagagataagaaagccttctcaagcatttcctttctgtcttctacctttttgacttt

SEQ ID NO: 606506 - DNA, 120 bp, Artificial Sequence
  ENSG00000175390_73 (sequence is synthesized)
tattcagtctctcctagctgtcatttatccacagctgtcctcatacccagtgtctaccatagagctggccaaagccagcctttttgctccctttccacccaaccccccactcattgtgta

SEQ ID NO: 606507 - DNA, 120 bp, Artificial Sequence
  ENSG00000175395_0 (sequence is synthesized)
gtcttctttctggcattggcgtttttttggtcttacgccctagggtggggagaggactccggtgcctccgggtctgggctgggccgcaaagggcggggcctgggcccggcgcgggccggg

SEQ ID NO: 606508 - DNA, 120 bp, Artificial Sequence
  ENSG00000175395_1 (sequence is synthesized)
agcagaggccgagaccctgcaggtgattcctggggctgccagctaaggtcccttatgatttctgctctggctttgcagttttcagcctttcccaagagcagcagaaaatgaacaagttcc

SEQ ID NO: 606509 - DNA, 120 bp, Artificial Sequence
  ENSG00000175395_2 (sequence is synthesized)
agggacccgtgacattaaaggatgttattgtggaattcaccaaggaagaatggaagttactgacccctgctcagaggactctgtataaggatgtgatgctggaaaactatagtcaccttg

SEQ ID NO: 606510 - DNA, 120 bp, Artificial Sequence
  ENSG00000175395_3 (sequence is synthesized)
tctcagtgggttaccatgtgaataagccaaatgcagtcttcaagttgaagcaaggaaaagagccatggatattagaagtagaatttccacatcggggcttccctgaagacctatggagca

SEQ ID NO: 606511 - DNA, 120 bp, Artificial Sequence
  ENSG00000175395_4 (sequence is synthesized)
ttcatgatctagaagcaagataccaggaaagccaagctggaaattcaaggaatggagaactcacaaaacatcagaaaactcataccacagagaaagcctgtgaatgtaaggaatgtggga

SEQ ID NO: 606512 - DNA, 120 bp, Artificial Sequence
  ENSG00000175395_5 (sequence is synthesized)
agttcttctgccagaagtctgccctcatagtacatcagcatactcactcaaagggcaaatcctatgactgtgataaatgtgggaaatctttctctaaaaatgaagacctcataagacatc

SEQ ID NO: 606513 - DNA, 120 bp, Artificial Sequence
  ENSG00000175395_6 (sequence is synthesized)
agaaaattcacacgagagataaaacctatgagtgtaaagaatgtaagaaaatattttaccacctatcatctctcagtagacatctgagaacccatgcaggagagaaaccctatgaatgta

SEQ ID NO: 606514 - DNA, 120 bp, Artificial Sequence
  ENSG00000175395_7 (sequence is synthesized)
atcagtgtgaaaaatccttctaccagaaaccacatctcacagaacatcagaaaacacacacaggggagaaaccttttgaatgtactgaatgtgggaagttcttctatgtgaaggcatacc

SEQ ID NO: 606515 - DNA, 120 bp, Artificial Sequence
  ENSG00000175395_8 (sequence is synthesized)
tcatggtacatcagaaaacacacacaggggagaaaccctatgagtgtaaggagtgtgggaaagccttttcccagaagtcacacctcacagtacatcagagaatgcacacaggggagaaac

SEQ ID NO: 606516 - DNA, 120 bp, Artificial Sequence
  ENSG00000175395_9 (sequence is synthesized)
cctataaatgtaaggaatgtgggaaattcttctctaggaattcacacctcaaaactcatcagagaagtcacacaggagagaaaccctatgaatgtaaggaatgtaggaaatgcttctacc

SEQ ID NO: 606517 - DNA, 120 bp, Artificial Sequence
  ENSG00000175395_10 (sequence is synthesized)
agaagtcagccctcacagtacatcagcgaactcacacaggggagaaaccctttgaatgtaataaatgtgggaaaacattttactataaatcagacctcactaaacatcagagaaaacaca

SEQ ID NO: 606518 - DNA, 120 bp, Artificial Sequence
  ENSG00000175395_11 (sequence is synthesized)
caggggagaagccctatgaatgcacagaatgtggcaaatcttttgctgtgaattcagtcctcagattacatcaaaggactcacacaggagagaagccctatgcatgcaaggaatgtggga

SEQ ID NO: 606519 - DNA, 120 bp, Artificial Sequence
  ENSG00000175395_12 (sequence is synthesized)
agtccttttctcagaagtcacattttattatacatcagagaaaacacacaggggagaagccctatgagtgtcaggagtgtggggaaacctttatccagaagtcacaactcactgcacatc

SEQ ID NO: 606520 - DNA, 120 bp, Artificial Sequence
  ENSG00000175395_13 (sequence is synthesized)
agaagacacacacaaagaagaggaatgctgagaagtaagatgagttgggaaattctcttgactgaattaatccttcaaaacaatcagataattcacacaagaggtacaccttatgaatcg

SEQ ID NO: 606521 - DNA, 120 bp, Artificial Sequence
  ENSG00000175395_14 (sequence is synthesized)
catcaatagagggaaattttcagctacaatctttgctctctctgtgtatcagcaaatacatagagagattctgtacatttatttgggagaaaattttatcatattttaggcttttctaaa

SEQ ID NO: 606522 - DNA, 120 bp, Artificial Sequence
  ENSG00000175395_15 (sequence is synthesized)
tattagataatatagatggcagaagtcatgcaaattgtaaaacaggaaggaaacctttcagaagtcatacttttgttttgcaacatagaagtcacacaggagaaaaatcctgtaagtaaa

SEQ ID NO: 606523 - DNA, 120 bp, Artificial Sequence
  ENSG00000175395_16 (sequence is synthesized)
acgaatgtcaagacattttctgtcagggcagccagctgtagacatccaaaagctcacaaatgagaagctccttgagtatctagaaatctctttacacaattggagctcatgtactagaga

SEQ ID NO: 606524 - DNA, 120 bp, Artificial Sequence
  ENSG00000175395_17 (sequence is synthesized)
tcagatcactggtacttggatagatattttaaatatttggaaggtgttcaataaaaattcaaataatttgtactgagggaaacagttatactacaaatcatgttgcagatctgatgccga

SEQ ID NO: 606525 - DNA, 120 bp, Artificial Sequence
  ENSG00000175395_18 (sequence is synthesized)
gattgctctattttaaaaggaaacctgcaaatgtctacatatatgaagcttttaaaaagcacaagttatcaggcaacatcattaaacatacattaaatgtctgttagcatataggatttt

SEQ ID NO: 606526 - DNA, 120 bp, Artificial Sequence
  ENSG00000175395_19 (sequence is synthesized)
gtgcgtatgtgagtgtgctataacatgtaacttgcggatgttcagcgtgcatgtggaatccatccataatggtacatagcgaaataatataatcttagttcagtaactattatgtgtatg

SEQ ID NO: 606527 - DNA, 120 bp, Artificial Sequence
  ENSG00000175395_20 (sequence is synthesized)
aagatgttgcacattaagtctcagtagtgactctggttgttaatatttgtattgtaagtgtaatattccttttaaattataaggcatctttttatccttttttgtgtttgtaaatggata

SEQ ID NO: 606528 - DNA, 120 bp, Artificial Sequence
  ENSG00000175395_21 (sequence is synthesized)
tagacagtggtaataactaatccttcaaaaataagttaaaatgtttttgtaaaattttcaaatgtcagtcaagttttgcattagggacacatttatatatagcaaaagcctgagctgttt

SEQ ID NO: 606529 - DNA, 120 bp, Artificial Sequence
  ENSG00000175395_22 (sequence is synthesized)
ttaaacagctaaaaacagtagtatttattacaatctccacaatgaaaacaaatagtgcaatgtaagaaatattatgtatcttactgttgatgtgtgagcagggagcagagctatctgcat

SEQ ID NO: 606530 - DNA, 120 bp, Artificial Sequence
  ENSG00000175395_23 (sequence is synthesized)
ttgtatttagtgtgagagtcctaaatgttcttcaccaactttttcttcctcatagaagcaacatggcatagttaagggtgtggactctgggctcctgctgcctgggccccgattccagca

SEQ ID NO: 606531 - DNA, 120 bp, Artificial Sequence
  ENSG00000175395_24 (sequence is synthesized)
tggggcatgctacttaatatctctgtgcctcagttcccatcccataaaagagtagtgatagtgacaacatcttaggattgctttgaggtctaaatgagttaacattttcaaagcacttag

SEQ ID NO: 606532 - DNA, 120 bp, Artificial Sequence
  ENSG00000175395_25 (sequence is synthesized)
aatagtgtctgagacacaagagctatatgttagaggttatcatcattatttgtattttgtgaattacgctgcaaaaaaaaaaaaaatgttggctacccaacattcattccccaccttctt

SEQ ID NO: 606533 - DNA, 120 bp, Artificial Sequence
  ENSG00000175395_26 (sequence is synthesized)
gctgccagtgccttgatttggttgtttgttgtttgtttgttttcctacaagtgatttaggggcagatcctgactacactaagtcagggtttgacaaatgacagtccatcagacagatctg

SEQ ID NO: 606534 - DNA, 120 bp, Artificial Sequence
  ENSG00000175395_27 (sequence is synthesized)
gcccactacccatttttgtatcctgcaagctaagaatggttttatatttctaaatggttgaaagaatcaaagaatattgtgacacatgaaaattatatgatattcaaatttcagtgtcca

SEQ ID NO: 606535 - DNA, 120 bp, Artificial Sequence
  ENSG00000175395_28 (sequence is synthesized)
taaataaagttttgaaaacatgaatacaaacaaaaaacacctatttatgtttgacctgtggctgtctttgcactaccccagcagagttgagtagttgtagcagacaccacatgcccttga

SEQ ID NO: 606536 - DNA, 120 bp, Artificial Sequence
  ENSG00000175395_29 (sequence is synthesized)
gcctaagatctagcactttacaaagtaagtttttctgttacttagagctgaaaataaaagcaatgtagagttacgcttttataagtatttcatgtttcagaaatgatgcatacagcaatt

SEQ ID NO: 606537 - DNA, 120 bp, Artificial Sequence
  ENSG00000175395_30 (sequence is synthesized)
tgtaggtgggtggttttttgcagtatatttattttgtgcattatatttatatgttaagagcctgagcttagaagtatttttttcaaagaaatgtgttttttacttgctaaattgtcataa

SEQ ID NO: 606538 - DNA, 120 bp, Artificial Sequence
  ENSG00000175395_31 (sequence is synthesized)
catcaaaacaagaaatttcttgatggaatgtagcagtaaacatatgaaataaacattgtctaaattaagtcgaattgttcattgatactgccccacagtattcctttgttttctcccaaa

SEQ ID NO: 606539 - DNA, 120 bp, Artificial Sequence
  ENSG00000175395_32 (sequence is synthesized)
tcaatggccagttttccctgtatcattttataattttctttctatcccataagataccattggtaagtcatacttagctaacgtaacccaataacaaaaaacttacaatacccaattcca

SEQ ID NO: 606540 - DNA, 120 bp, Artificial Sequence
  ENSG00000175395_33 (sequence is synthesized)
tcagctacattactagtaatctataaaattattgcctgcacttcatgtaattgtcatatgctgctacaatctaaacctgccagcgtcttacttccccttcctaataaagactttcattga

SEQ ID NO: 606541 - DNA, 120 bp, Artificial Sequence
  ENSG00000175395_34 (sequence is synthesized)
aggaaagccaagctggaaattcaagtgcaggtcagagaatgctcacagtggagaaaccctatggatccagtaaatatgggaacatctctagaaatcggtcctcagaggaatggagaactc

SEQ ID NO: 606542 - DNA, 120 bp, Artificial Sequence
  ENSG00000175398_0 (sequence is synthesized)
cttggctgtgcctcagcttctggcctggagtgatggctggggaaaaccatactacactgcctgaattcctccttctgggattctctgacctcaaggccctgcagggccccctgttctggg

SEQ ID NO: 606543 - DNA, 120 bp, Artificial Sequence
  ENSG00000175398_1 (sequence is synthesized)
tggtgcttctggtctacctggtcaccttgctgggtaactccctgatcatcctcctcacacaggtcagccctgccctgcactcccccatgtacttcttcctgcgccaactctcagtggtgg

SEQ ID NO: 606544 - DNA, 120 bp, Artificial Sequence
  ENSG00000175398_2 (sequence is synthesized)
agctcttctacaccactgacatcgtgcccaggaccctggccaatctgggctccccgcatccccaggccatctctttccagggctgtgcagcccagatgtacgtcttcattgtcctgggca

SEQ ID NO: 606545 - DNA, 120 bp, Artificial Sequence
  ENSG00000175398_3 (sequence is synthesized)
tctcggagtgctgcctgctcacggccatggcctatgaccgatatgttgccatctgccagcccctacgctattccaccctcttgagcccacgggcctgcatggccatggtgggtacctcct

SEQ ID NO: 606546 - DNA, 120 bp, Artificial Sequence
  ENSG00000175398_4 (sequence is synthesized)
tccctcatcttctctctaccttttcgcagccacccgatcatcccgcactttctctgtgacatcctgccagtactgaggctggcaagtgctgggaagcacaggagcgagatctccgtgatg

SEQ ID NO: 606547 - DNA, 120 bp, Artificial Sequence
  ENSG00000175398_5 (sequence is synthesized)
acagccaccatagtcttcattatgatccccttctctctgattgtcacctcttacatccgcatcctgggtgccatcctagcaatggcctccacccagagccgccgcaaggtcttctccacc

SEQ ID NO: 606548 - DNA, 120 bp, Artificial Sequence
  ENSG00000175398_6 (sequence is synthesized)
tgctcctcccatctgctcgtggtctctctcttctttggaacagccagcatcacctacatccggccgcaggcaggctcctctgttaccacagaccgcgtcctcagtctcttctacacagtc

SEQ ID NO: 606549 - DNA, 120 bp, Artificial Sequence
  ENSG00000175398_7 (sequence is synthesized)
atcacacccatgctcaaccccatcatctacacccttcggaacaaggacgtgaggagggccctgcgacacttggtgaagaggcagcgcccctcaccctgaagggactcggatgtctgctca

SEQ ID NO: 606550 - DNA, 80 bp, Artificial Sequence
  ENSG00000175414_0 (sequence is synthesized)
agtcgcagcggggccatcttcggcgggcgagtgggctcggcctgtgcaacccgcacctgcgtccctcgcccggcccgatg

SEQ ID NO: 606551 - DNA, 120 bp, Artificial Sequence
  ENSG00000175414_1 (sequence is synthesized)
gcgccgcggcggtgctgggctcggtgctcttcatcctctggaagacctacttcggccgcggccgagagcggcgctgggaccggggagaggcctggtggggcgcggaggctgcccgcctcc

SEQ ID NO: 606552 - DNA, 120 bp, Artificial Sequence
  ENSG00000175414_2 (sequence is synthesized)
ccgagtgggacgagtgggaccccgaggacgaggaggacgaggagccggcgctggaggagctggaacagcgcgaggtgctggtgctggggctggatggcgcaggcaagagcacgttcctgc

SEQ ID NO: 606553 - DNA, 120 bp, Artificial Sequence
  ENSG00000175414_3 (sequence is synthesized)
gcgtgttgtcggggaagccaccgctggaaggccacatccccacctggggcttcaactccgtgcgtctgcccaccaaggactttgaggtggacctgctagaaattgggggcagccagaacc

SEQ ID NO: 606554 - DNA, 120 bp, Artificial Sequence
  ENSG00000175414_4 (sequence is synthesized)
tgcgcttctactggaaggagtttgtgagcgaggtggatgtgctggtgtttgtggtggactcggctgaccgactgcggctgccctgggcccgacaggagctgcacaagctgctggacaagg

SEQ ID NO: 606555 - DNA, 120 bp, Artificial Sequence
  ENSG00000175414_5 (sequence is synthesized)
accctgacctgcctgtcgtcgtggtggccaacaagcaggacctgagcgaggccatgagtatgggggagctgcagcgggagctgggtctacaggctatcgataaccagcgggaggttttcc

SEQ ID NO: 606556 - DNA, 120 bp, Artificial Sequence
  ENSG00000175414_6 (sequence is synthesized)
tcttggcagccagcattgcccctgcaggacccacctttgaagagcctggcaccgtgcacatctggaaactgctcttggagctcctctcctaggctggagctctcctgcttgccacctgcc

SEQ ID NO: 606557 - DNA, 120 bp, Artificial Sequence
  ENSG00000175414_7 (sequence is synthesized)
tgtcaagaccatagttgtactgctgctgcttcattgccagactgggcctggggcaagagccacatggcagcatttcccttttcccctcctttgcctttcaagagcagggcctgggcaagg

SEQ ID NO: 606558 - DNA, 120 bp, Artificial Sequence
  ENSG00000175414_8 (sequence is synthesized)
ccaagaaccatgcagaagccttcctggtgaggtggccgtgaagccgaagcagggaggtgggtgagacagagggtggggaggatagtgtctggctcattccaggctggaatgtggatccag

SEQ ID NO: 606559 - DNA, 120 bp, Artificial Sequence
  ENSG00000175414_9 (sequence is synthesized)
ctttcccttctcttacctgtacagtgagatgctcagtgggctcaatcctccactacaggtcccggtacctgaggaaccagtgtaggtgtcagaaatactcctagagcctcaaggtctccc

SEQ ID NO: 606560 - DNA, 120 bp, Artificial Sequence
  ENSG00000175414_10 (sequence is synthesized)
agtccagaaacagtctggtgacgtcatgcccttctcatgtgggcagcttctgagtggtgacacagcaagcctttgttcctgtcctgcattgtccagccccagctccacctaagtgacttg

SEQ ID NO: 606561 - DNA, 120 bp, Artificial Sequence
  ENSG00000175414_11 (sequence is synthesized)
tggccttgtgcaatctctgcctctctgaccccagggccattatttttaaagggaggtggtttcctaattcggagatgcctttcccagccatgggagtgtgaagtgctaggatgaacctgg

SEQ ID NO: 606562 - DNA, 120 bp, Artificial Sequence
  ENSG00000175414_12 (sequence is synthesized)
ccatcctagcaaggagctttctgaagacctccctgcctttccctgagcccaggcctggcctgccagcctctcttgactacagaataactgatattcacccaccaaacagaaaaagtgaag

SEQ ID NO: 606563 - DNA, 120 bp, Artificial Sequence
  ENSG00000175414_13 (sequence is synthesized)
gctgggtttttcccctctaatctggagacaagctgctgctctcgtactaactgtgccagtgcccatgtttacagaagtcaggggaaggaaggagcctgtgtccctgggacgacagtcaac

SEQ ID NO: 606564 - DNA, 120 bp, Artificial Sequence
  ENSG00000175414_14 (sequence is synthesized)
tggagctaggtgttgacctcagaactgcattttatttattaatttataagcagaacaggccagagttctaggctctgtttctaggtgctgttttcaaaaccccagatgacagtcatagaa

SEQ ID NO: 606565 - DNA, 120 bp, Artificial Sequence
  ENSG00000175414_15 (sequence is synthesized)
aatttggaacttaggaaaatagctggaatcatgaatgacaatgagataacatacagatgtcagtggagacaaagttgtgggttcctcctcccacctggctttgaggctgtcgtcgatatc

SEQ ID NO: 606566 - DNA, 120 bp, Artificial Sequence
  ENSG00000175414_16 (sequence is synthesized)
atagtactttacatggattcacatgaactgaaacgccaccacttggcccaggatgttgaaagggtgcaaattccttctgggtagataagaaatgactctgggagaggatttcccttatgt

SEQ ID NO: 606567 - DNA, 120 bp, Artificial Sequence
  ENSG00000175414_17 (sequence is synthesized)
gaatctaggtaaaaagatggaaaaaaattgtattatgtgatcctaaggacaggaatagcagaccagccaacgggatggccttgggtacatcactcagcctttctggacccaatttttccc

SEQ ID NO: 606568 - DNA, 120 bp, Artificial Sequence
  ENSG00000175414_18 (sequence is synthesized)
cagtgaaagccaagttggactgaatttctggagttctcatcagtgcacattccatagttctccagtgcttggcgatcagcccaattgaaggactggctctgtactgacacttattatcgg

SEQ ID NO: 606569 - DNA, 120 bp, Artificial Sequence
  ENSG00000175414_19 (sequence is synthesized)
tacaggcaaagaggagcctgttgtctgttagggaccactaaatcaacaaccacaaatggattttttttttaagaggagctgtgcacctcaatttgctgtctagttgagaatagagattgt

SEQ ID NO: 606570 - DNA, 120 bp, Artificial Sequence
  ENSG00000175414_20 (sequence is synthesized)
gtgccttcatttcatttgacatttacccagcatgcctcagttccacaccgtgaccagtgtaagaagaggaactatgataaaaacagttcaacaagccgcaaggagggtgggaaattctga

SEQ ID NO: 606571 - DNA, 120 bp, Artificial Sequence
  ENSG00000175414_21 (sequence is synthesized)
agtccagaagcgagtgtgatctttggaatagtggctgctgtgcccttgggcgccatttgaagaatcactgttcttgaaagtgctggttcactttctgcagtaagaagtgatttatgggct

SEQ ID NO: 606572 - DNA, 120 bp, Artificial Sequence
  ENSG00000175414_22 (sequence is synthesized)
tttatgtaaaattttaagaatgacttgggtttcagagtagcctttgaaactttgctggcagcttttcattttgtcattggaaggctaagagacttttctcctttgttctatgaactcctt

SEQ ID NO: 606573 - DNA, 120 bp, Artificial Sequence
  ENSG00000175414_23 (sequence is synthesized)
gttcttcagggcttgaaggcaaaaaaaccttagacaactttaacgaagtttaaaaagtatgttctgtttttgagcagaaaaaagattcgtgaactggttagtacttagcaccaaaagcag

SEQ ID NO: 606574 - DNA, 120 bp, Artificial Sequence
  ENSG00000175414_24 (sequence is synthesized)
ttcagaatgctcagccccacaatgtgtgtaggctacatttatagccagagaaacgaaaataacttaggttgcctgattggctgcagtctggcatttgccttacctgaacatgttttagca

SEQ ID NO: 606575 - DNA, 120 bp, Artificial Sequence
  ENSG00000175414_25 (sequence is synthesized)
gccttcagccgacgattgactgaaggtttggctgctgtgattggctaaaattcggctacttgttagaagaacatacttttaggttaggttacgagttgtttacacgttaagttacaattc

SEQ ID NO: 606576 - DNA, 120 bp, Artificial Sequence
  ENSG00000175414_26 (sequence is synthesized)
actgtgtacagaggcagctttaggccagacttaattcagcttcacagtgtccctcattttgctcagccccttaattttgagagattgaccaaaatcccacgcactgacactaccttctgt

SEQ ID NO: 606577 - DNA, 120 bp, Artificial Sequence
  ENSG00000175414_27 (sequence is synthesized)
cactatttgacctcattatggaactcacagtttacaatgttaaatcagttagcggattctgtatgtcttcatgtttctgttactctaaccgtaatgagaccatttgaggtacaaaggatg

SEQ ID NO: 606578 - DNA, 120 bp, Artificial Sequence
  ENSG00000175414_28 (sequence is synthesized)
actgcattggtgtacttaagactacaacacatcagtggggaccttaggatggctatcaggagtgtaataccaagaaactggaatgcatcccttaatatgagtctccacaaaccaaactga

SEQ ID NO: 606579 - DNA, 120 bp, Artificial Sequence
  ENSG00000175414_29 (sequence is synthesized)
ttggaatcaaacaactcaagttcagacgataaaaatagttcaacagcgtgcaagctctgctgctcatagcctgttcagggtataatggcaattaaggacatagttcactatgaagtacct

SEQ ID NO: 606580 - DNA, 120 bp, Artificial Sequence
  ENSG00000175414_30 (sequence is synthesized)
taattgtaaagtgtttgattttttagttagcttttggtaacacaagtcatggtgattgggatacccactaaaagaaacatgaagattagaaaaccttgaacagctaagcttgctgtctac

SEQ ID NO: 606581 - DNA, 120 bp, Artificial Sequence
  ENSG00000175414_31 (sequence is synthesized)
cattcaggatgcctgcaaaccaaccactagctgctcctgcaaacacattatgtgttccttttccctgagaaatatccttgatgtgtttggtggcagtatctacagaagcggcagccacca

SEQ ID NO: 606582 - DNA, 120 bp, Artificial Sequence
  ENSG00000175414_32 (sequence is synthesized)
ccgccttttgaagctctccatagtagtagaatcaggaaagataagcacagcgttcagttttgttcagcaccatacacaagctcctagctgggcaaaggaaatctaaagctgcatgaagtt

SEQ ID NO: 606583 - DNA, 86 bp, Artificial Sequence
  ENSG00000175414_33 (sequence is synthesized)
gtccacccgtccacccgtccacccatccacccacccacccatccatccacccacccacccacccatccacccatccatccatccat

SEQ ID NO: 606584 - DNA, 88 bp, Artificial Sequence
  ENSG00000175414_34 (sequence is synthesized)
ccatccatccattgtggcttctacctgtgcgaatctctgtgctacaaaattcttttcaatttagcattaactttaatttccatacagt

SEQ ID NO: 606585 - DNA, 120 bp, Artificial Sequence
  ENSG00000175414_35 (sequence is synthesized)
attcttttcaatttagcattaactttaatttccatacagttggcacctcactgccgccaaaagtgagtccgcaggaactccactggaatatttgctcaggggaaactaactaatcatctg

SEQ ID NO: 606586 - DNA, 120 bp, Artificial Sequence
  ENSG00000175414_36 (sequence is synthesized)
tttcaaggttggtattcattttagtctttgacctctgattatggggactttcagggaaagctgtttgcaaggtgagcatgaatcaggtgaaacagcaagatctgaagtcaggacagagta

SEQ ID NO: 606587 - DNA, 120 bp, Artificial Sequence
  ENSG00000175414_37 (sequence is synthesized)
agcaaattatccacagacctaatatgtaccctctgaagctggaaagtgggggccacctggtagcatttgagcaggggtcacttatgttcccccataagtctgcacagctcctaaacaagg

SEQ ID NO: 606588 - DNA, 120 bp, Artificial Sequence
  ENSG00000175414_38 (sequence is synthesized)
tccagtgggcaacttatttttatgtggtccctttatagcatgctgtaagggtgcataaccacagccagtgagaaggaaccctactggatttaacccagtgacattatataagcaatcgct

SEQ ID NO: 606589 - DNA, 120 bp, Artificial Sequence
  ENSG00000175414_39 (sequence is synthesized)
tggagccacataggtagttcccaggtcctgaatatgtggtgcctgaaagcataggtgtaggcagtgttccttgcataggcattacctggacaggtttttttccatattggcacttattaa

SEQ ID NO: 606590 - DNA, 120 bp, Artificial Sequence
  ENSG00000175414_40 (sequence is synthesized)
ggcacttattaattgaaaaggtcagggtaccacttccaatgagtgtagggaagcaagcagtagtggtgtttagaatatcaaggttagctgctggatgcggtggctcacgcctgtaatccc

SEQ ID NO: 606591 - DNA, 84 bp, Artificial Sequence
  ENSG00000175414_41 (sequence is synthesized)
aaaatacaaaaaatcagctgggtgtgacggcatgcgcctgtagtcccacctactagggaggctgaggcatgagaatcacttaaa

SEQ ID NO: 606592 - DNA, 120 bp, Artificial Sequence
  ENSG00000175414_42 (sequence is synthesized)
aaaaaaaaaaaaaaaaaggttagcattccactcttcctttggggtttcagggtgacttattgggaaaatggagagatactggcattaatggaatcgtttcctgatttgagcgttaagtca

SEQ ID NO: 606593 - DNA, 120 bp, Artificial Sequence
  ENSG00000175414_43 (sequence is synthesized)
tgctagagcattagcctttgctaaagccggccccagattatggtcccacggattttcccataaagaaagggaaaggatttgcggacagaaaataggaaagagagggagaaagataagatt

SEQ ID NO: 606594 - DNA, 120 bp, Artificial Sequence
  ENSG00000175414_44 (sequence is synthesized)
tttgcgattgcagtgaagtcttcatccacatctagggaaagctgttcatgtctaggacgtgatctgcttctggggaaaaacttccctggttagctttaccttaaagtctccaacaggtgt

SEQ ID NO: 606595 - DNA, 120 bp, Artificial Sequence
  ENSG00000175414_45 (sequence is synthesized)
gtagttccaggagtctggagaggtccttttgagttgtgagatgtggacccaaggttcgaagccctgaagttttaccacagtgtgggtaatagaagaacttggtattgtctctttctgtga

SEQ ID NO: 606596 - DNA, 120 bp, Artificial Sequence
  ENSG00000175414_46 (sequence is synthesized)
ggtttaagggcactttttctctgataccatctccagaagacctagtctcaggttacagattgtgaaggctttgatggtcctctgtgggtcacagaaagtttattttattttgtcaaaata

SEQ ID NO: 606597 - DNA, 120 bp, Artificial Sequence
  ENSG00000175414_47 (sequence is synthesized)
cagtgtgacataatgcattacagctttgtagtatttagtggcatcagcatttaggagagtaggaactacgtgaagttctgttaggagcacaggctttctagtaactatttcataggggtc

SEQ ID NO: 606598 - DNA, 120 bp, Artificial Sequence
  ENSG00000175414_48 (sequence is synthesized)
aatctgtgtctgtcgtaggaatggatctgatctgctgaccaaaggcaatggttggctttcttcttcagagatcagaaaaaaatgaaattcaaagccaatggtggtatctttggccaagat

SEQ ID NO: 606599 - DNA, 120 bp, Artificial Sequence
  ENSG00000175414_49 (sequence is synthesized)
aatccaatcgattcagttaattttgccaattttagttttaaaatatttgtccttttgacctttccagaagactgagggtgaaagggacaatggtagtaccactgtgtttctaacacttta

SEQ ID NO: 606600 - DNA, 120 bp, Artificial Sequence
  ENSG00000175414_50 (sequence is synthesized)
tttagctgcttcatagtttgtccaataaaatgagttcctctgtcactggagatttttccagagatgccccataaaggaaacacatgttcttataactccttagctactgccatagcatca

SEQ ID NO: 606601 - DNA, 120 bp, Artificial Sequence
  ENSG00000175414_51 (sequence is synthesized)
gctctcctacacaggaaagcttctatccaaccagaaaacatgccaactattacaagaacatactgatacttaattgagggtggcagttgaatgaagtccatctgtaagcgttcaaatggt

SEQ ID NO: 606602 - DNA, 120 bp, Artificial Sequence
  ENSG00000175414_52 (sequence is synthesized)
ccatcaggtgttggtggaaatacaccacttggagtttttattatcttccctggattatgggtttgacaaaccagatattggttataacccatttcagcattttacagtggtcacactatc

SEQ ID NO: 606603 - DNA, 120 bp, Artificial Sequence
  ENSG00000175414_53 (sequence is synthesized)
gcattttacagtggtcacactatcagtattttttataatctggatcatcttgctcatttgtgaggtgcagaggttgttttttgtttttttgttttgagacaggatctcactctgtcaccc

SEQ ID NO: 606604 - DNA, 86 bp, Artificial Sequence
  ENSG00000175414_54 (sequence is synthesized)
cagtgtgcgccaccatccccagctaattttttgtaatttttatagagagggttttatcctcttgcccaggctggtcttgaactcct

SEQ ID NO: 606605 - DNA, 120 bp, Artificial Sequence
  ENSG00000175414_55 (sequence is synthesized)
ctggtcttgaactcctgggctcaagctgtcagtccagctcagcttcccaaagtgctggggttatagggaagagccaccgtgcctggccaagtgcaaagcttttaacaatagaagtttcaa

SEQ ID NO: 606606 - DNA, 120 bp, Artificial Sequence
  ENSG00000175414_56 (sequence is synthesized)
agcttttaacaatagaagtttcaagggctcaggaaggaccagggggccatctaggctctccatgagttcacgcttaacattatgtttacgtctgtcagataacaattttggttttccaca

SEQ ID NO: 606607 - DNA, 120 bp, Artificial Sequence
  ENSG00000175414_57 (sequence is synthesized)
tcaggtgcattgcactgttagatgggtcatcataaaggtcatcaatctagtggcattcattcaatttgcacatcctaactgtttcagcactatctgatttagcatgaaaatctgccaggg

SEQ ID NO: 606608 - DNA, 120 bp, Artificial Sequence
  ENSG00000175414_58 (sequence is synthesized)
cagtcccttgatattcaggttcagctttccatgtatgggcttcaatcttataagaatttgttatttatttttcacctttactcaagatagcttggaacttataccaatttgtgatggcaa

SEQ ID NO: 606609 - DNA, 120 bp, Artificial Sequence
  ENSG00000175414_59 (sequence is synthesized)
caggatagtagcaagttcatccacttgagtctgtttttaataggggctccactagaagtgagaaaccctctttgtttccataacatgccaaaattgtggactgcaaaggcatgtatatat

SEQ ID NO: 606610 - DNA, 120 bp, Artificial Sequence
  ENSG00000175414_60 (sequence is synthesized)
acatagcatgtctgctatgtatatagcattttctgatttccctttagctatatgataagctcaagtgagagcaaaagttctgcagtttgagctgactgaaactgggaagagtccgctttt

SEQ ID NO: 606611 - DNA, 120 bp, Artificial Sequence
  ENSG00000175414_61 (sequence is synthesized)
ggaagagtccgctttttattaactcattttgggttttaatgacatattttgccaaagaataatttcaaatgggggccgggcgctgtggctcacgccgggcgtggtggcaggcacctgtag

SEQ ID NO: 606612 - DNA, 120 bp, Artificial Sequence
  ENSG00000175414_62 (sequence is synthesized)
aaatttcaaatgatgttggtctacttgctgaaaaatgctgggtttgactggaatttaatagactttccacagcacgtggaacttgcaaaaaaaaaagttcactccctaaaaccagatcag

SEQ ID NO: 606613 - DNA, 120 bp, Artificial Sequence
  ENSG00000175414_63 (sequence is synthesized)
atgaaccctttaccaatctgggggttgctgccactgcctttaaacaattgggatatgccttagctatggggtctaattgcaggccatgatatgtgatgggcctgtgctttcccaactatg

SEQ ID NO: 606614 - DNA, 87 bp, Artificial Sequence
  ENSG00000175414_64 (sequence is synthesized)
aggccatgatatgtgatgggcctgtgctttcccaactatgttcttttttatgtatgtatgtatgtatttaagctggagtgcagtggt

SEQ ID NO: 606615 - DNA, 120 bp, Artificial Sequence
  ENSG00000175414_65 (sequence is synthesized)
ccgcctcggcctcccaaagtgctgggtcaactatgttcttgagtaagaactcctgatgcctgattgttatgtttatgaacaaacaaggtgaagggttcagtataagttggaaatcctaga

SEQ ID NO: 606616 - DNA, 120 bp, Artificial Sequence
  ENSG00000175414_66 (sequence is synthesized)
tcagtataagttggaaatcctagagcaaccatatctgttactttccatcctggttatatttcttaattagactgcgaagttctgaatgaagtcctttttaaatagagcagttaatgccat

SEQ ID NO: 606617 - DNA, 120 bp, Artificial Sequence
  ENSG00000175414_67 (sequence is synthesized)
ttctgtctctgcaggtttcacaagtagtgtttctaaatgagctctataatctgaaaccggttcatctttcttttgcccacaagattatgtgattgaccaatcaattttttgtggaaaagc

SEQ ID NO: 606618 - DNA, 120 bp, Artificial Sequence
  ENSG00000175414_68 (sequence is synthesized)
cctagggattgaatttaaaagatcttcagcaattcttccagttcctttttgcctcctcttggggttttggagtggtctttagtatcctcaggctgttgccattctgctcctgctgtcaat

SEQ ID NO: 606619 - DNA, 120 bp, Artificial Sequence
  ENSG00000175414_69 (sequence is synthesized)
tttcaagcttcaccagtatcatgtgaataaattggtaaagattagagagtcctgaatcataagctcttatgaggattctcaattttccagtacgtttttgagtattttctcttggattag

SEQ ID NO: 606620 - DNA, 120 bp, Artificial Sequence
  ENSG00000175414_70 (sequence is synthesized)
ttaagtctttatgatggctctaagctcagctttagaccatggagtaaaagtggttacagcaggcaggctggttgactagagagtctcactttgtaaggcatttgtccaacttcccctttt

SEQ ID NO: 606621 - DNA, 120 bp, Artificial Sequence
  ENSG00000175414_71 (sequence is synthesized)
tcattagcctcaaggagaaaaggtaactgagcaaaagggttactgtactcaaagcatcgaggcaaagaagagacagagaaggagcaatccaggttcatgtgctgcatgagcctttcattt

SEQ ID NO: 606622 - DNA, 120 bp, Artificial Sequence
  ENSG00000175414_72 (sequence is synthesized)
gcgttttgtaaagaatcttttaggcaattttagatttgtataatcctttagatgcctctgcataccgatttaaaatgcatcccgttgtttttgtggcgttttcgatcctttcttttctaa

SEQ ID NO: 606623 - DNA, 120 bp, Artificial Sequence
  ENSG00000175414_73 (sequence is synthesized)
tgtgtcccataaataaacagttttatttaaagtttcctcatcgtggccattttaattctaagttgttcctagtaaggttaacctgtttttctaaaaacaagttctgggtccataattttg

SEQ ID NO: 606624 - DNA, 64 bp, Artificial Sequence
  ENSG00000175414_74 (sequence is synthesized)
ttctaaaaacaagttctgggtcccccaggctgtagcgcaatggcacgatctcagctcactgcaa

SEQ ID NO: 606625 - DNA, 87 bp, Artificial Sequence
  ENSG00000175414_75 (sequence is synthesized)
tcaagcaattctcctgcctcagcctctcagcctcccgagtagctgcgatcgatcacaggtgtgcaccaggggtttcgccacattggc

SEQ ID NO: 606626 - DNA, 61 bp, Artificial Sequence
  ENSG00000175414_76 (sequence is synthesized)
cggacttgttttgttttttgagatagagtgttgttttgtcgcccaggctggagtgcagtgg

SEQ ID NO: 606627 - DNA, 68 bp, Artificial Sequence
  ENSG00000175414_77 (sequence is synthesized)
atctcggcttactgcaacctctgcctccagggcacaagagattgcccaactaacttctgtattttttg

SEQ ID NO: 606628 - DNA, 120 bp, Artificial Sequence
  ENSG00000175414_78 (sequence is synthesized)
ataattcttacatataaaattagatggagtcccagactccttggattgaaacaaacccgttatcaaaaggataacctacccaatgcctctaactggatccatccagtttattatgggatg

SEQ ID NO: 606629 - DNA, 120 bp, Artificial Sequence
  ENSG00000175414_79 (sequence is synthesized)
cagtccaatccaggacccagtccagtaaaaattgctcagataaacttggagagctcaaaacacaaatttatggagctcagaatcctaggaagaactcactatgacctccagttgctgtga

SEQ ID NO: 606630 - DNA, 120 bp, Artificial Sequence
  ENSG00000175414_80 (sequence is synthesized)
ggggtcagtgggcacaatgggccctggcagataccttttttgcatggtcactcagtgctcctggaggttgctgaagttatactttggatcctacttctgacaccagtttgttaaaagaaa

SEQ ID NO: 606631 - DNA, 120 bp, Artificial Sequence
  ENSG00000175414_81 (sequence is synthesized)
aattttatagacaagttaactttaacagagcagaaaagggttcatgaaccaggtagtgctcaggaccaaaagcgatggttcagaatgtgtgcaggctatatttataagcaaagaaacgga

SEQ ID NO: 606632 - DNA, 120 bp, Artificial Sequence
  ENSG00000175414_82 (sequence is synthesized)
attggcatacagagatagcctgactggctgcagtctggcgtctgccttctttggacatgttttggcagccttcagcctatggttggctgagatctgactacttgttacaagagtagactc

SEQ ID NO: 606633 - DNA, 120 bp, Artificial Sequence
  ENSG00000175414_83 (sequence is synthesized)
ttacatcaggttgcagggtgtttacacattaagttaggttataattcactatgtacagaggcagctttaggccaaacttaacaaaggtcacctttggaaccagcactaattgttgagggg

SEQ ID NO: 606634 - DNA, 120 bp, Artificial Sequence
  ENSG00000175414_84 (sequence is synthesized)
gtccctggggtccctttttacctaatgaagatctgtctgagtctaatgaatatattgtacaatttttaaagtccccagttgtgggaggtgaacttgaagaataaagtttcattatgttta

SEQ ID NO: 606635 - DNA, 120 bp, Artificial Sequence
  ENSG00000175414_85 (sequence is synthesized)
aaaatgaaaacagcgacactgaacaatttcccgagggtgctgaggccccagcctcctgttcgtccttgatttctccttccttcccatcccccgtgcaagtcatcagcagggcctgtcatc

SEQ ID NO: 606636 - DNA, 120 bp, Artificial Sequence
  ENSG00000175414_86 (sequence is synthesized)
cctgacctgcctgtcgtcgtggtggccaacaagcaggttctgccgtaccgatttagcgtggtcccaggcatgtcggatgtgggagctaccggcaaagagagacatcgcggatccgtcatc

SEQ ID NO: 606637 - DNA, 120 bp, Artificial Sequence
  ENSG00000175414_87 (sequence is synthesized)
ggcccacggccacccggaaccccagccccctcaccattcgatccgcggcgctgccttccgtcgagcattccggttcagacgctttcggttgacactgtaaccaaacttctgcctccgggt

SEQ ID NO: 606638 - DNA, 120 bp, Artificial Sequence
  ENSG00000175414_88 (sequence is synthesized)
tttgcccttggccttgggcatcgcgctgaccaccgcaccagcagctcaaacacgctgcctctgtctctcagacctcgtgtaacaaactccttccggaaggcgtgcacaaggctttgcggg

SEQ ID NO: 606639 - DNA, 120 bp, Artificial Sequence
  ENSG00000175414_89 (sequence is synthesized)
gtccaggtgacatccactcagagatgcttgggcaggggcaaggagcgctgcctgggcccatggcctggagagggtggctgagatgctgcccccacctcttctacctatgccctgtcctga

SEQ ID NO: 606640 - DNA, 80 bp, Artificial Sequence
  ENSG00000175416_0 (sequence is synthesized)
ccgctcctcccgccgcggcgcccgcaccgcagtgacagccagccgggcccggtggcggagaggaagtgcggtccgcgcca

SEQ ID NO: 606641 - DNA, 120 bp, Artificial Sequence
  ENSG00000175416_1 (sequence is synthesized)
gacagcgtcgcggccgccggacgcagcgcggggcaggcgcgggcagagccgagcgcagcggaggctccggcggaggcgcggggaaaatggctgatgactttggcttcttctcgtcgtcgg

SEQ ID NO: 606642 - DNA, 120 bp, Artificial Sequence
  ENSG00000175416_2 (sequence is synthesized)
agagcggtgccccggaggcggcggaggaggacccggcggccgccttcctggcccagcaggagagcgagattgcaggcatagagaacgacgagggcttcggggcacctgccggcagccatg

SEQ ID NO: 606643 - DNA, 120 bp, Artificial Sequence
  ENSG00000175416_3 (sequence is synthesized)
cggcccccgcgcagccgggccccacgagtggggctggttctgaggacatggggaccacagtcaatggagatgtgtttcaggaggccaacggtcctgctgatggctacgcagccattgccc

SEQ ID NO: 606644 - DNA, 120 bp, Artificial Sequence
  ENSG00000175416_4 (sequence is synthesized)
aggctgacaggctgacccaggagcctgagagcatccgcaagtggcgagaggagcagaggaaacggctgcaagagctggatgctgcatctaaggtcacggaacaggaatggcgggagaagg

SEQ ID NO: 606645 - DNA, 120 bp, Artificial Sequence
  ENSG00000175416_5 (sequence is synthesized)
aggagtggaaccagcgccagagtgaacaagtagagaagaacaagatcaacaaccggatcgctgacaaagcattctaccagcagccagatgctgatatcatcggctacgtggcatccgagg

SEQ ID NO: 606646 - DNA, 120 bp, Artificial Sequence
  ENSG00000175416_6 (sequence is synthesized)
aggctttcgtgaaggaatccaaggaggagaccccaggcacagagtgggagaaggtggcccagctatgtgacttcaaccccaagagcagcaagcagtgcaaagatgtgtcccgcctgcgct

SEQ ID NO: 606647 - DNA, 120 bp, Artificial Sequence
  ENSG00000175416_7 (sequence is synthesized)
cggtgctcatgtccctgaagcagacgccactgtcccgctaggtgcctgctaggtgcatggccacagagcatgggctgggcctgggcacaggaggagcagctgctttggtcggggtggaga

SEQ ID NO: 606648 - DNA, 120 bp, Artificial Sequence
  ENSG00000175416_8 (sequence is synthesized)
ctcgcagcagctgctacccacagcctattccactcctccccatctccaggcgctgggaggggggccctcaccccatcacgcctcgctccctcctggccctctggtccagcccctcacgcc

SEQ ID NO: 606649 - DNA, 120 bp, Artificial Sequence
  ENSG00000175416_9 (sequence is synthesized)
tcctctcagtctactcaattgtgactgtccctcctgatgtattttttttcttggcttaaagggtgtgttgttgactctttttacacttatttattatcattctcacttctctggaagcca

SEQ ID NO: 606650 - DNA, 120 bp, Artificial Sequence
  ENSG00000175416_10 (sequence is synthesized)
aaggacgagcctgcccacaactattccagttccatttggcacagccaggggcagggacagaagggccctgcaggactccgcctccccacctctgcacagatcctctctcctttcccctaa

SEQ ID NO: 606651 - DNA, 120 bp, Artificial Sequence
  ENSG00000175416_11 (sequence is synthesized)
gctggtgtgggtccacagaggttctcatgggtgggcccagcagaggggcccctcaggagagggattctagggagctagactgagacaagcctggccctgactgtcgcctcctgccttctg

SEQ ID NO: 606652 - DNA, 120 bp, Artificial Sequence
  ENSG00000175416_12 (sequence is synthesized)
gtcctggccattcctgcccctttctctctccagagcttgggaggagtcagaacattgctctagccgctggtgatctctcctggttgccaaccctcctggccatgactgatctccccactg

SEQ ID NO: 606653 - DNA, 120 bp, Artificial Sequence
  ENSG00000175416_13 (sequence is synthesized)
tgctcaggtttgaaagccaagctgcccagggaagggacttctcaaaggtcgcgagtccagtgagtggcagaagggggatgtaaagcccagcccctctgatggagtgtccagcgctcgtcc

SEQ ID NO: 606654 - DNA, 120 bp, Artificial Sequence
  ENSG00000175416_14 (sequence is synthesized)
cgtgccctccacgcccctgtgtacccagctacttgtttattcatttggtttatacgtttggtcgttcattcatttggtcagtgcacattcttttatggccacacacctgctagggcagtg

SEQ ID NO: 606655 - DNA, 120 bp, Artificial Sequence
  ENSG00000175426_0 (sequence is synthesized)
actcagcctggagaccgaagcgcttcactgagcgctcgccgccgcccagcctctcctctcgcgcctcctagctcttcgcagagcaaccaggagccaggagtggtctagagcccgagggtg

SEQ ID NO: 606656 - DNA, 120 bp, Artificial Sequence
  ENSG00000175426_1 (sequence is synthesized)
ggaagggggagtctgtctggcttttctcctatcttgcttctttttcctcttcccttcccactcttgttcaagcgagtgtgtgagctatggagcgaagagcctggagtctgcagtgcactg

SEQ ID NO: 606657 - DNA, 120 bp, Artificial Sequence
  ENSG00000175426_2 (sequence is synthesized)
ctttcgtcctcttttgcgcttggtgtgcactgaacagtgcaaaagcgaaaaggcaatttgtcaatgaatgggcagcggagatccccgggggcccggaagcagcctcggccatcgccgagg

SEQ ID NO: 606658 - DNA, 120 bp, Artificial Sequence
  ENSG00000175426_3 (sequence is synthesized)
agctgggctatgaccttttgggtcagattggttcacttgaaaatcactacttattcaaacataaaaaccaccccagaaggtctcgaaggagtgcctttcatatcactaagagattatctg

SEQ ID NO: 606659 - DNA, 120 bp, Artificial Sequence
  ENSG00000175426_4 (sequence is synthesized)
atgatgatcgtgtgatatgggctgaacaacagtatgaaaaagaaagaagtaaacgttcagctctaagggactcagcactaaatctcttcaatgatcccatgtggaatcagcaatggtact

SEQ ID NO: 606660 - DNA, 120 bp, Artificial Sequence
  ENSG00000175426_5 (sequence is synthesized)
tgcaagataccaggatgacggcagccctgcccaagctggaccttcatgtgatacctgtttggcaaaaaggcattacgggcaaaggagttgttatcaccgtactggatgatggtttggagt

SEQ ID NO: 606661 - DNA, 120 bp, Artificial Sequence
  ENSG00000175426_6 (sequence is synthesized)
ggaatcacacggacatttatgccaactatgatccagaggctagctatgattttaatgataatgaccatgatccatttccccgatatgatcccacaaacgagaacaaacacgggaccagat

SEQ ID NO: 606662 - DNA, 120 bp, Artificial Sequence
  ENSG00000175426_7 (sequence is synthesized)
gtgcaggagaaattgccatgcaagcaaataatcacaaatgcggggttggagttgcatacaattccaaagttggaggcataagaatgctggatggcattgtgacggatgctattgaggcca

SEQ ID NO: 606663 - DNA, 120 bp, Artificial Sequence
  ENSG00000175426_8 (sequence is synthesized)
gttcaattggattcaatcctggacacgtggatatttacagtgcaagctggggccctaatgatgatgggaaaactgtggaggggcctggccggctagcccagaaggcttttgaatatggtg

SEQ ID NO: 606664 - DNA, 120 bp, Artificial Sequence
  ENSG00000175426_9 (sequence is synthesized)
tcaaacaggggagacaggggaaggggtccatcttcgtctgggcttcgggaaacggggggcgtcagggagataattgtgactgtgatggctacacagacagcatctacaccatctccatca

SEQ ID NO: 606665 - DNA, 120 bp, Artificial Sequence
  ENSG00000175426_10 (sequence is synthesized)
gcagtgcctcccagcaaggcctatccccctggtacgctgagaagtgctcctccacactggccacctcttacagcagcggagattacaccgaccagagaatcacgagcgctgacctgcaca

SEQ ID NO: 606666 - DNA, 120 bp, Artificial Sequence
  ENSG00000175426_11 (sequence is synthesized)
atgactgcacggagacgcacacaggcacctcggcctctgcacctctggctgctggcatcttcgctctggccctggaagcaaacccaaatctcacctggcgagatatgcagcacctggttg

SEQ ID NO: 606667 - DNA, 120 bp, Artificial Sequence
  ENSG00000175426_12 (sequence is synthesized)
tctggacctctgagtatgacccgctggccaataaccctggatggaaaaagaatggagcaggcttgatggtgaatagtcgatttggatttggcttgctaaatgccaaagctctggtggatt

SEQ ID NO: 606668 - DNA, 120 bp, Artificial Sequence
  ENSG00000175426_13 (sequence is synthesized)
tagctgaccccaggacctggaggagcgtgcctgagaagaaagagtgtgttgtaaaggacaatgactttgagcccagagccctgaaagctaatggagaagttatcattgaaattccaacaa

SEQ ID NO: 606669 - DNA, 120 bp, Artificial Sequence
  ENSG00000175426_14 (sequence is synthesized)
gagcttgtgaaggacaagaaaatgctatcaagtccctggagcatgtacaatttgaagcaacaattgaatattcccgaagaggagaccttcatgtcacacttacttctgctgctggaacta

SEQ ID NO: 606670 - DNA, 120 bp, Artificial Sequence
  ENSG00000175426_15 (sequence is synthesized)
gcactgtgctcttggctgaaagagaacgggatacatctcctaatggctttaagaattgggacttcatgtctgttcacacatggggagagaaccctataggtacttggactttgagaatta

SEQ ID NO: 606671 - DNA, 120 bp, Artificial Sequence
  ENSG00000175426_16 (sequence is synthesized)
cagacatgtctggaagaattcaaaatgaaggaagaattgtgaactggaagctgattttgcacgggacctcttctcagccagagcatatgaagcagcctcgtgtgtacacgtcctacaaca

SEQ ID NO: 606672 - DNA, 120 bp, Artificial Sequence
  ENSG00000175426_17 (sequence is synthesized)
ctgttcagaatgacagaagaggggtggagaagatggtggatccaggggaggagcagcccacacaagagaaccctaaggagaacaccctggtgtccaaaagccccagcagcagcagcgtag

SEQ ID NO: 606673 - DNA, 120 bp, Artificial Sequence
  ENSG00000175426_18 (sequence is synthesized)
ggggccggagggatgagttggaggagggagccccttcccaggccatgctgcgactcctgcaaagtgctttcagtaaaaactcaccgccaaagcaatcaccaaagaagtccccaagtgcaa

SEQ ID NO: 606674 - DNA, 120 bp, Artificial Sequence
  ENSG00000175426_19 (sequence is synthesized)
agctcaacatcccttatgaaaacttctacgaagccctggaaaagctgaacaaaccttcccagcttaaagactctgaagacagtctgtataatgactatgttgatgttttttataacacta

SEQ ID NO: 606675 - DNA, 120 bp, Artificial Sequence
  ENSG00000175426_20 (sequence is synthesized)
aaccttacaagcacagagacgaccggctgcttcaagctctggtggacattctgaatgaggaaaattaaaataagtgtgtggtcccaagttggaaatattcatgcttcttccttaccctgc

SEQ ID NO: 606676 - DNA, 120 bp, Artificial Sequence
  ENSG00000175426_21 (sequence is synthesized)
gtgaaggggatgagctcaagcaggaagttcaacttccagaattgatcataggtatttcaaaacacatctttcctgtctgcacaagtgaagtgttttgttctttctggagtcacagttgac

SEQ ID NO: 606677 - DNA, 120 bp, Artificial Sequence
  ENSG00000175426_22 (sequence is synthesized)
aaaaagctcttacactacattagaacactgcattagagcccatttcaattctcaaaagaaaaggcaaaacctgggatatcaattaatttgaaaacataatctgcaaagaatgagaaggag

SEQ ID NO: 606678 - DNA, 120 bp, Artificial Sequence
  ENSG00000175426_23 (sequence is synthesized)
tcagaaactgtttctgtagcttgttccctgtcttgtccatgtggttcttcaaattttgatgccaagaaagtatttggtaggcctaatgaaggagttcactgtaagactcattccctagat

SEQ ID NO: 606679 - DNA, 120 bp, Artificial Sequence
  ENSG00000175426_24 (sequence is synthesized)
ctttctattccaaagtgccactcattcctgtagtcaaaatctggtcatgttggtcaaaagctggattatttagatctagaaacagatcttgaaatctgaatgctctggtttgagcaattt

SEQ ID NO: 606680 - DNA, 120 bp, Artificial Sequence
  ENSG00000175426_25 (sequence is synthesized)
tcgaacattctttgcctggtgcactgtgtctgtggtgccagaggcgtccgtggatccagaggtggttatgactcgtgctgcatgcctggtctttcctctgtttctccttctgaaagtttt

SEQ ID NO: 606681 - DNA, 120 bp, Artificial Sequence
  ENSG00000175426_26 (sequence is synthesized)
ctatacctgtctcctttctcagccacaaaataaatgttgggagaaatgatatataccactttcccagaaaaaaaaaaacttacacttgggacttggcaaattcctagtcacaattttttt

SEQ ID NO: 606682 - DNA, 120 bp, Artificial Sequence
  ENSG00000175426_27 (sequence is synthesized)
cagcagtaacaggaaaccacttatcacatggagacctaatgtaataatagaaaaatactcataatagggagaaaccaagagaagttttgtttttgtttttttccaactgtgttcattaga

SEQ ID NO: 606683 - DNA, 120 bp, Artificial Sequence
  ENSG00000175426_28 (sequence is synthesized)
acagcgtgttctaagtatttgaaactgaatgtttattccttgatactaaaagttcttctccaatcctatcactgatagtgtccaaattctcaccaaattgctcctaagcttcaaatcaga

SEQ ID NO: 606684 - DNA, 120 bp, Artificial Sequence
  ENSG00000175426_29 (sequence is synthesized)
agcagaaactggcaggccatggaccttaattgtccctcaggtagattttgtttggtatgcagaatgtttttaaaatatgagtggttattgaaaatatgatgtttcacataaaacctcatt

SEQ ID NO: 606685 - DNA, 120 bp, Artificial Sequence
  ENSG00000175426_30 (sequence is synthesized)
ctcggacccatctttgctcatggcaacagttagctggagctgagtagcagctgcctgattagatgactctcagtccccatggcaccctgctccatgttacctagagcaggcacttgattc

SEQ ID NO: 606686 - DNA, 120 bp, Artificial Sequence
  ENSG00000175426_31 (sequence is synthesized)
cttgctgggcagtatccaataggcatttgattttgcccactcctacactaagcgaatgtgtacaaagtgtaaatgcattaggaaaaacaaactacccgcatcttctgttaggcaggatct

SEQ ID NO: 606687 - DNA, 120 bp, Artificial Sequence
  ENSG00000175426_32 (sequence is synthesized)
gtacaataataattatgagtttgcttatgtaatctcacctcacctggatgatcactaatactaattcatttattactaaccttctggcttccttctctcaatatgcttacaaagtctcca

SEQ ID NO: 606688 - DNA, 120 bp, Artificial Sequence
  ENSG00000175426_33 (sequence is synthesized)
gtcacctacaatgctggctttctcccactgagtttgctgtttgcaatttttccatgaagtttgaacttcataaggtaattcatggcattgaactggttcatgaaaagaacactagagtct

SEQ ID NO: 606689 - DNA, 120 bp, Artificial Sequence
  ENSG00000175426_34 (sequence is synthesized)
gtcatttgctttggcttgaagtatggttggtaacacaaattttcacctgctcttctaccatttgaatttgtgtagagggtgtttgcagagcaatgcccgtaatgcttagagaatgttctc

SEQ ID NO: 606690 - DNA, 120 bp, Artificial Sequence
  ENSG00000175426_35 (sequence is synthesized)
ctaaaagacttgcggaatcactctgtccttggaagtttcatatattgtttgatatgaagtgttagatagaatttccaatattggagcatatcaaaaagtattaaaactaaaaaggaccag

SEQ ID NO: 606691 - DNA, 120 bp, Artificial Sequence
  ENSG00000175426_36 (sequence is synthesized)
agaattcttagattggcccggaaaggccaataaagagttagaatgaaaactcattacttttccattcccaatctagtgctagatgtataaatctttcttttgattcttcctaacaaaata

SEQ ID NO: 606692 - DNA, 120 bp, Artificial Sequence
  ENSG00000175426_37 (sequence is synthesized)
ttttctgggttaaaaccccagccaactcattgggttgtagccaaaggttcactctcaagaagctttaatatttaaataaaatcatattgaatgtttccaacctggagtataatattcaga

SEQ ID NO: 606693 - DNA, 120 bp, Artificial Sequence
  ENSG00000175426_38 (sequence is synthesized)
tataaaacagttttgtcagtctttcttagtgcctgtgtggatttttgtgaaaatgtcaaagagaaaacttatatactatttcccttgaaattttaaactatattttctttacaggtattt

SEQ ID NO: 606694 - DNA, 120 bp, Artificial Sequence
  ENSG00000175426_39 (sequence is synthesized)
ataatataccaatgcttttatcaaacagaattttaaagagcataataaattatattaaagaaccaaaagttttcctgagaataagaaagtttcacccaataaaatatttttgaaaggcat

SEQ ID NO: 606695 - DNA, 120 bp, Artificial Sequence
  ENSG00000175426_40 (sequence is synthesized)
gttcctctgtcaatgaaaaaaagtacatgtatgtgttgtgatattaaaagtgacatttgtctaatagcctaatacaacatgtagctgagtttaacatgtgtggtcttggtattcttaagg

SEQ ID NO: 606696 - DNA, 120 bp, Artificial Sequence
  ENSG00000175426_41 (sequence is synthesized)
gaacttccacattatacatttgatgtattgaccagaatatgtaaaatatgcttataaatcagaaaaataaattgtttctcactaagtcaaaagaaaaaaagctcatgtttccaccacaaa

SEQ ID NO: 606697 - DNA, 120 bp, Artificial Sequence
  ENSG00000175426_42 (sequence is synthesized)
ttttatgggaaagtaatggcacagctccagctcagcaccaaagtgaagagctctactgaggcacaatggaaagtcgagcgagtgtgtgagctatggagcgaagagcctggagtctgcagt

SEQ ID NO: 606698 - DNA, 120 bp, Artificial Sequence
  ENSG00000175445_0 (sequence is synthesized)
gtcagactcgattccccctcttcctcctcctcaagggaaagctgcccacttctagctgccctgccatcccctttaaagggcgacttgctcagcgccaaaccgcggctccagccctctcca

SEQ ID NO: 606699 - DNA, 120 bp, Artificial Sequence
  ENSG00000175445_1 (sequence is synthesized)
gcctccggctcagccggctcatcagtcggtccgcgccttgcagctcctccagagggacgcgccccgagatggagagcaaagccctgctcgtgctgactctggccgtgtggctccagagtc

SEQ ID NO: 606700 - DNA, 120 bp, Artificial Sequence
  ENSG00000175445_2 (sequence is synthesized)
tgaccgcctcccgcggaggggtggccgccgccgaccaaagaagagattttatcgacatcgaaagtaaatttgccctaaggacccctgaagacacagctgaggacacttgccacctcattc

SEQ ID NO: 606701 - DNA, 120 bp, Artificial Sequence
  ENSG00000175445_3 (sequence is synthesized)
ccggagtagcagagtccgtggctacctgtcatttcaatcacagcagcaaaaccttcatggtgatccatggctggacggtaacaggaatgtatgagagttgggtgccaaaacttgtggccg

SEQ ID NO: 606702 - DNA, 120 bp, Artificial Sequence
  ENSG00000175445_4 (sequence is synthesized)
ccctgtacaagagagaaccagactccaatgtcattgtggtggactggctgtcacgggctcaggagcattacccagtgtccgcgggctacaccaaactggtgggacaggatgtggcccggt

SEQ ID NO: 606703 - DNA, 120 bp, Artificial Sequence
  ENSG00000175445_5 (sequence is synthesized)
ttatcaactggatggaggaggagtttaactaccctctggacaatgtccatctcttgggatacagccttggagcccatgctgctggcattgcaggaagtctgaccaataagaaagtcaaca

SEQ ID NO: 606704 - DNA, 120 bp, Artificial Sequence
  ENSG00000175445_6 (sequence is synthesized)
gaattactggcctcgatccagctggacctaactttgagtatgcagaagccccgagtcgtctttctcctgatgatgcagattttgtagacgtcttacacacattcaccagagggtcccctg

SEQ ID NO: 606705 - DNA, 120 bp, Artificial Sequence
  ENSG00000175445_7 (sequence is synthesized)
gtcgaagcattggaatccagaaaccagttgggcatgttgacatttacccgaatggaggtacttttcagccaggatgtaacattggagaagctatccgcgtgattgcagagagaggacttg

SEQ ID NO: 606706 - DNA, 120 bp, Artificial Sequence
  ENSG00000175445_8 (sequence is synthesized)
gagatgtggaccagctagtgaagtgctcccacgagcgctccattcatctcttcatcgactctctgttgaatgaagaaaatccaagtaaggcctacaggtgcagttccaaggaagcctttg

SEQ ID NO: 606707 - DNA, 120 bp, Artificial Sequence
  ENSG00000175445_9 (sequence is synthesized)
agaaagggctctgcttgagttgtagaaagaaccgctgcaacaatctgggctatgagatcaataaagtcagagccaaaagaagcagcaaaatgtacctgaagactcgttctcagatgccct

SEQ ID NO: 606708 - DNA, 120 bp, Artificial Sequence
  ENSG00000175445_10 (sequence is synthesized)
acaaagtcttccattaccaagtaaagattcatttttctgggactgagagtgaaacccataccaatcaggcctttgagatttctctgtatggcaccgtggccgagagtgagaacatcccat

SEQ ID NO: 606709 - DNA, 120 bp, Artificial Sequence
  ENSG00000175445_11 (sequence is synthesized)
tcactctgcctgaagtttccacaaataagacctactccttcctaatttacacagaggtagatattggagaactactcatgttgaagctcaaatggaagagtgattcatactttagctggt

SEQ ID NO: 606710 - DNA, 120 bp, Artificial Sequence
  ENSG00000175445_12 (sequence is synthesized)
cagactggtggagcagtcccggcttcgccattcagaagatcagagtaaaagcaggagagactcagaaaaaggtgatcttctgttctagggagaaagtgtctcatttgcagaaaggaaagg

SEQ ID NO: 606711 - DNA, 120 bp, Artificial Sequence
  ENSG00000175445_13 (sequence is synthesized)
cacctgcggtatttgtgaaatgccatgacaagtctctgaataagaagtcaggctgaaactgggcgaatctacagaacaaagaacggcatgtgaattctgtgaagaatgaagtggaggaag

SEQ ID NO: 606712 - DNA, 120 bp, Artificial Sequence
  ENSG00000175445_14 (sequence is synthesized)
tattttaggagacagtctcaagcactaaaaagtggctaattcaatttatggggtatagtggccaaatagcacatcctccaacgttaaaagacagtggatcatgaaaagtgctgttttgtc

SEQ ID NO: 606713 - DNA, 120 bp, Artificial Sequence
  ENSG00000175445_15 (sequence is synthesized)
ctttgagaaagaaataattgtttgagcgcagagtaaaataaggctccttcatgtggcgtattgggccatagcctataattggttagaacctcctattttaattggaattctggatctttc

SEQ ID NO: 606714 - DNA, 120 bp, Artificial Sequence
  ENSG00000175445_16 (sequence is synthesized)
ggactgaggccttctcaaactttactctaagtctccaagaatacagaaaatgcttttccgcggcacgaatcagactcatctacacagcagtatgaatgatgttttagaatgattccctct

SEQ ID NO: 606715 - DNA, 120 bp, Artificial Sequence
  ENSG00000175445_17 (sequence is synthesized)
tgctattggaatgtggtccagacgtcaaccaggaacatgtaacttggagagggacgaagaaagggtctgataaacacagaggttttaaacagtccctaccattggcctgcatcatgacaa

SEQ ID NO: 606716 - DNA, 120 bp, Artificial Sequence
  ENSG00000175445_18 (sequence is synthesized)
agttacaaattcaaggagatataaaatctagatcaattaattcttaataggctttatcgtttattgcttaatccctctctcccccttcttttttgtctcaagattatattataataatgt

SEQ ID NO: 606717 - DNA, 120 bp, Artificial Sequence
  ENSG00000175445_19 (sequence is synthesized)
tctctgggtaggtgttgaaaatgagcctgtaatcctcagctgacacataatttgaatggtgcagaaaaaaaaaaagaaaccgtaattttattattagattctccaaatgattttcatcaa

SEQ ID NO: 606718 - DNA, 120 bp, Artificial Sequence
  ENSG00000175445_20 (sequence is synthesized)
tttaaaatcattcaatatctgacagttactcttcagttttaggcttaccttggtcatgcttcagttgtacttccagtgcgtctcttttgttcctggctttgacatgaaaagataggtttg

SEQ ID NO: 606719 - DNA, 120 bp, Artificial Sequence
  ENSG00000175445_21 (sequence is synthesized)
agttcaaattttgcattgtgtgagcttctacagattttagacaaggaccgtttttactaagtaaaagggtggagaggttcctggggtggattcctaagcagtgcttgtaaaccatcgcgt

SEQ ID NO: 606720 - DNA, 120 bp, Artificial Sequence
  ENSG00000175445_22 (sequence is synthesized)
gcaatgagccagatggagtaccatgagggttgctatttgttgtttttaacaactaatcaagagtgagtgaacaactatttataaactagatctcctatttttcagaatgctcttctacgt

SEQ ID NO: 606721 - DNA, 120 bp, Artificial Sequence
  ENSG00000175445_23 (sequence is synthesized)
ataaatatgaaatgataaagatgtcaaatatctcagaggctatagctgggaacccgactgtgaaagtatgtgatatctgaacacatactagaaagctctgcatgtgtgttgtccttcagc

SEQ ID NO: 606722 - DNA, 120 bp, Artificial Sequence
  ENSG00000175445_24 (sequence is synthesized)
ataattcggaagggaaaacagtcgatcaagggatgtattggaacatgtcggagtagaaattgttcctgatgtgccagaacttcgaccctttctctgagagagatgatcgtgcctataaat

SEQ ID NO: 606723 - DNA, 120 bp, Artificial Sequence
  ENSG00000175445_25 (sequence is synthesized)
agtaggaccaatgttgtgattaacatcatcaggcttggaatgaattctctctaaaaataaaatgatgtatgatttgttgttggcatcccctttattaattcattaaatttctggatttgg

SEQ ID NO: 606724 - DNA, 120 bp, Artificial Sequence
  ENSG00000175445_26 (sequence is synthesized)
gttgtgacccagggtgcattaacttaaaagattcactaaagcagcacatagcactgggaactctggctccgaaaaactttgttatatatatcaaggatgttctggctttacattttattt

SEQ ID NO: 606725 - DNA, 120 bp, Artificial Sequence
  ENSG00000175445_27 (sequence is synthesized)
attagctgtaaatacatgtgtggatgtgtaaatggagcttgtacatattggaaaggtcattgtggctatctgcatttataaatgtgtggtgctaactgtatgtgtctttatcagtgatgg

SEQ ID NO: 606726 - DNA, 120 bp, Artificial Sequence
  ENSG00000175445_28 (sequence is synthesized)
tctcacagagccaactcactcttatgaaatgggctttaacaaaacaagaaagaaacgtacttaactgtgtgaagaaatggaatcagcttttaataaaattgacaacattttattaccaca

SEQ ID NO: 606727 - DNA, 120 bp, Artificial Sequence
  ENSG00000175445_29 (sequence is synthesized)
tggattggggtggtgaggtatcctgactggcctgcccaattgttggggacccagtgatgggtccgcaccccacatctcacgtggatctccttacacttgaataaagacagttctggctca

SEQ ID NO: 606728 - DNA, 120 bp, Artificial Sequence
  ENSG00000175445_30 (sequence is synthesized)
gatgtatctatgacaagtggtaggtgggtattttaagaaagcttgtgtcatcatcttcaggtaacaggaatgtatgagagttgggtgccaaaacttgtggccgccctgtacaagagagaa

SEQ ID NO: 606729 - DNA, 120 bp, Artificial Sequence
  ENSG00000175445_31 (sequence is synthesized)
aaagagcaaatttagattaaggaatgagaagtagtcctcgcagcctcatgaatctcctgaaatttcgaacggcaaaatctaaaatctacaagttattaccttcttacagtaaatagaaag

SEQ ID NO: 606730 - DNA, 120 bp, Artificial Sequence
  ENSG00000175449_0 (sequence is synthesized)
cgggaccagctgcttccggctgggctgcgggcgtggactcctcattccggctgtggccgcgccgctgcggggcctgaggccctcttgggttttggttcagcgttagttaacggttaaccc

SEQ ID NO: 606731 - DNA, 120 bp, Artificial Sequence
  ENSG00000175449_1 (sequence is synthesized)
gccaaggcgggcttccgcccaggcacaggagactcaccgagcttgttcaccttgaaacttgggccacacctgagacctgccacctaaggggggtacgcgggtcgtttttaacaagctttc

SEQ ID NO: 606732 - DNA, 120 bp, Artificial Sequence
  ENSG00000175449_2 (sequence is synthesized)
atggcatttgtgccatgaaagctctaaagtatagaagctgctccagggcttccgcagccccggccgtcctggagatactcgcctcctggagtctgtgtcgagaatttgcagcacctggac

SEQ ID NO: 606733 - DNA, 120 bp, Artificial Sequence
  ENSG00000175449_3 (sequence is synthesized)
agccacgtgcagtctcagaactgcaggcggtctttaccgaaatgttaaacacaacttgaagttaggcaggataactgccagagctggatggaccttagaggtgccagctaacgcgctgtg

SEQ ID NO: 606734 - DNA, 120 bp, Artificial Sequence
  ENSG00000175449_4 (sequence is synthesized)
agcgttttctgcggttaggcctgctctaaacatttgacatgtgttaaagcatttatgtgctttacccacacccctatgtggcgggcccttcttaaagtaaaagaaactgcagcacagcga

SEQ ID NO: 606735 - DNA, 120 bp, Artificial Sequence
  ENSG00000175449_5 (sequence is synthesized)
agttaagcaacttgccccaaatcacgcagaactgggatgcaaacccaggtctagctcactcgtgatcacaattcaacatcatacgatggtgctgatttccagagcagctctgtgacttta

SEQ ID NO: 606736 - DNA, 120 bp, Artificial Sequence
  ENSG00000175449_6 (sequence is synthesized)
tataaaattattgggcaagcgttcaattgtaaacattcgtgaacatagctgttgcacattagcgttcctttttttttttaattcaggaccatctttggtgacaaatataaatatcaatac

SEQ ID NO: 606737 - DNA, 120 bp, Artificial Sequence
  ENSG00000175449_7 (sequence is synthesized)
tatatatatcaccaatatacatatttgctttgctaaaaggtttctgtgtcttcaggatagtttacttgcaagcctcatgtttttataaaaacgtgggtgctacctgaataaaactaatgc

SEQ ID NO: 606738 - DNA, 120 bp, Artificial Sequence
  ENSG00000175449_8 (sequence is synthesized)
ctacccgttggcggttttgtgaagactaatgaactattatattcaaagggtccaagcagtaggcatttactaaaggacagctagttttatctgttattattctgccattcagagagatac

SEQ ID NO: 606739 - DNA, 120 bp, Artificial Sequence
  ENSG00000175449_9 (sequence is synthesized)
caaaactactctctaaggcatttctcttccctgcatgtaaaagcaagggtgtcatacttgagataagcattctgataatgtgtaggcaaagtttccacacttggtaaaagcatcttagtc

SEQ ID NO: 606740 - DNA, 120 bp, Artificial Sequence
  ENSG00000175449_10 (sequence is synthesized)
atggttcaagacgagtgacaagttaccacctatttgcaattcaaggagaatataagacagagaagaaagctgtgaatgaatttcatttgattagcaatagattggacactctactgatct

SEQ ID NO: 606741 - DNA, 120 bp, Artificial Sequence
  ENSG00000175449_11 (sequence is synthesized)
cacttcctctccaacatgaatcttgatggctctgcacaagatcctgaaaagagggaatattcttctgtgtgtgtgggcagagaagatgacattaaaaaatctgaaagaatgacagctgtt

SEQ ID NO: 606742 - DNA, 120 bp, Artificial Sequence
  ENSG00000175449_12 (sequence is synthesized)
gtccatgatagagaagtggtcattttctaccacaagggagaatatcatgctatggatattcgctgttaccactcaggaggacctttacatttgggagatatagaggattttgatggacga

SEQ ID NO: 606743 - DNA, 120 bp, Artificial Sequence
  ENSG00000175449_13 (sequence is synthesized)
ccgtgtatagtttgcccctggcataaatacaaaattactttggcaacaggagaaggtctgtaccagtctataaaccctaaagatccatcagcaaaacccaagtggtgctccaaaggaata

SEQ ID NO: 606744 - DNA, 120 bp, Artificial Sequence
  ENSG00000175449_14 (sequence is synthesized)
aagcaaaggattcacacagtgacagtagacaacggaaatatttatgtgactctttctaatgaaccttttaagtgtgactctgatttttatgccactggagacttcaaagtaattaagagt

SEQ ID NO: 606745 - DNA, 120 bp, Artificial Sequence
  ENSG00000175449_15 (sequence is synthesized)
tcttcctgataaaaaatatatagaaatgaaaaatgttgtgtatgcttgaaaacatttttagaataactctgcttcagttttaaaggtgatgaaatttttcaacataggcacaactgttta

SEQ ID NO: 606746 - DNA, 120 bp, Artificial Sequence
  ENSG00000175449_16 (sequence is synthesized)
aaattcacatacatttgagaggtttaagagcacacatacttagtatgatgtaaggattatcatcaggatcaatagaatacattttatcgaatcttctggattaattagaaacctgaaggt

SEQ ID NO: 606747 - DNA, 120 bp, Artificial Sequence
  ENSG00000175449_17 (sequence is synthesized)
aaacctgaaggttataggtttgggatgttctgtttaagaaggataaaaataaatttggagtaaacaaataataggtaaaaattaaggattagtaagaaaaaattttttaatttaaaaaat

SEQ ID NO: 606748 - DNA, 120 bp, Artificial Sequence
  ENSG00000175449_18 (sequence is synthesized)
ataggaaaaaatccctgtttgatgtagcagacttaattctggaaaagttttagtatatacaaagtaaacagactatataatgaacttccatcactcagctttaacagttatcagcattct

SEQ ID NO: 606749 - DNA, 120 bp, Artificial Sequence
  ENSG00000175449_19 (sequence is synthesized)
tccattcttgttttatttatacctctgtggatttgctacctctcctatttgattgttatttttacatttttaggaaagtttaaatacattgaaatgttcacctctgaactgtgcaacctt

SEQ ID NO: 606750 - DNA, 120 bp, Artificial Sequence
  ENSG00000175449_20 (sequence is synthesized)
cctaaataacagactttttatacttaaaaaatgcctccaaaaatgagataggtttacctgctgaacttgaaaataagaaacttaaccactgttaagtgatctgtgatcaaggcagatctt

SEQ ID NO: 606751 - DNA, 120 bp, Artificial Sequence
  ENSG00000175449_21 (sequence is synthesized)
gaagtaaggaagccagacacagctgctgcccagccatgagagatgtaaagtctcctattcagtgagccaatgttctttgaatgcctatatgaaattttcaaataaagatttttaaaaacg

SEQ ID NO: 606752 - DNA, 120 bp, Artificial Sequence
  ENSG00000175449_22 (sequence is synthesized)
tcatatcatgtactgtcttcatatacagaaatcttctcatcacattgactttgcttatacttacatgtgcaatgaaaggacatcaacatatcagtaagaatttagtaagctactatcagt

SEQ ID NO: 606753 - DNA, 120 bp, Artificial Sequence
  ENSG00000175449_23 (sequence is synthesized)
ggtttctgagcaaatatgtgatccactgtcccctccaaatatgccactcagtactttaaggagaggagtgtcaaaaataaaacagagaaaaataacttcagaaattcagaaccactaagg

SEQ ID NO: 606754 - DNA, 120 bp, Artificial Sequence
  ENSG00000175449_24 (sequence is synthesized)
actgcattaattaaacttactctgtaagtttactaatgatgaagatgatgatgatgctgagtattcaaggcacgcggtgagaacggaaaattcatgaaatatgagaagacttaaaccagt

SEQ ID NO: 606755 - DNA, 120 bp, Artificial Sequence
  ENSG00000175449_25 (sequence is synthesized)
tcaccgaagaaatgcctcaaggaagtcacctgcctcactggtattctcagccatataatagagagttttggtagagctatttaaggtgctccagctacaaatgcattttttcatcatttg

SEQ ID NO: 606756 - DNA, 120 bp, Artificial Sequence
  ENSG00000175449_26 (sequence is synthesized)
tcatccacaaaacagtgaccagacagaacacatccagaagatatttgaaagacaccttcagagccctctccccagaagtagagtggtgaaaaatgacagacggtgatggagtaagaaaat

SEQ ID NO: 606757 - DNA, 120 bp, Artificial Sequence
  ENSG00000175449_27 (sequence is synthesized)
ctcaccctgcagcacttacattatgaccttataatattttggtttgtgtttaattatcttcttatgccaataatcttatgcatcttatgttatttcagataataaacttagacaaaagaa

SEQ ID NO: 606758 - DNA, 120 bp, Artificial Sequence
  ENSG00000175449_28 (sequence is synthesized)
tctatgacctggaaactccccagtttttctctctagaaattctcgactttagtctcatatatctggttgttgacttgacatctctacttggatgtctctgagataccttaaactcaatat

SEQ ID NO: 606759 - DNA, 120 bp, Artificial Sequence
  ENSG00000175449_29 (sequence is synthesized)
aaaaataccattcatttcttggcctttctcctcacagtctttggcactacagttcacctagctgcacaaacctaaaacttgggagtcatctttatttatttttctgtagcatcttcattc

SEQ ID NO: 606760 - DNA, 120 bp, Artificial Sequence
  ENSG00000175449_30 (sequence is synthesized)
aagttcatcaacccaacttctctgtactataaaattaaaataatacctttttagtaacatggaggattaaaggagttaataaataaatgtagcctttgaatagtgcctggcacatagtta

SEQ ID NO: 606761 - DNA, 120 bp, Artificial Sequence
  ENSG00000175449_31 (sequence is synthesized)
acacaatataattgtagctactactgctactgttgttattactttttatcccctacagcatcaaccccctgcggcaagccaccacctttttcatggacccctagctttctgatttctggg

SEQ ID NO: 606762 - DNA, 120 bp, Artificial Sequence
  ENSG00000175449_32 (sequence is synthesized)
gaattgtcttagaccttcttccttatctacacttcctctccaatatggaattctcttccccaagctgttggcatgtctagttcatttgcattttgggcatttcagctcagctgtcatctc

SEQ ID NO: 606763 - DNA, 120 bp, Artificial Sequence
  ENSG00000175449_33 (sequence is synthesized)
gttcagttggttcaccctggttttatcatgtcagttatttatggtcagtaccattcagttgcaatgatggtcataccgtaccagttgtaatgtatttaaaataacaccccaagcacccac

SEQ ID NO: 606764 - DNA, 120 bp, Artificial Sequence
  ENSG00000175449_34 (sequence is synthesized)
catgcaaaaatcagcagcacatagtggtgatttttgcatggtcagtgctcatgcaaaaatcaccactatgtgggaccagaaatagctaaaatgagtagatgatgaattcagagtgagaag

SEQ ID NO: 606765 - DNA, 120 bp, Artificial Sequence
  ENSG00000175449_35 (sequence is synthesized)
aactgtcaagattggaacctagtctcaaagcacagtagtatttttaaaggaatagaattaagaatctaaatctaatacttaacattctaaggagccgacctggactctttctcttggtta

SEQ ID NO: 606766 - DNA, 120 bp, Artificial Sequence
  ENSG00000175449_36 (sequence is synthesized)
ttataaaaatagtaaatgagtaaggtccgtatagtaaagactctgcttacttacctttactacatattattacacttccttttctgttggagtttggatagcatgagtagcacttggtcc

SEQ ID NO: 606767 - DNA, 120 bp, Artificial Sequence
  ENSG00000175449_37 (sequence is synthesized)
tcatttctcagacaaccaacgaaccagacttgggctttttatagatactgtttgtggtagcagctacttactaagtacagaaaatgtactatctctcaggaaggtacatcccagtctatt

SEQ ID NO: 606768 - DNA, 120 bp, Artificial Sequence
  ENSG00000175449_38 (sequence is synthesized)
ctatcatgtgataatccttcaatgcccagtcaggtcttaacacatgtccagaatataaagtgtacagaagaaatcaaagtactttcttcaggcaaaaactagccctggtttgcaggaata

SEQ ID NO: 606769 - DNA, 120 bp, Artificial Sequence
  ENSG00000175449_39 (sequence is synthesized)
attacagaaatattttctcataggagccactggcaataatgagtagtgtgcacttgatttttcattctaaatttgtatctctaaatctagaaataaaaatcatatcatgtactgtcttca

SEQ ID NO: 606770 - DNA, 120 bp, Artificial Sequence
  ENSG00000175455_0 (sequence is synthesized)
gacaagccgggaagcttggaggggtctattgcgtacgcccaaggcgctgggcctggagcaggagaaagggagtggaggcgcgtcggagactatgaagcgcggcattcggcgggatccttt

SEQ ID NO: 606771 - DNA, 120 bp, Artificial Sequence
  ENSG00000175455_1 (sequence is synthesized)
ccggaagcggaagctcggcgggcgggccaagaaggtccgggagcccacggcggttaattctttttaccgtgaggcttcacttccctcggtctgggcttctctgaggcggcgagagatggt

SEQ ID NO: 606772 - DNA, 120 bp, Artificial Sequence
  ENSG00000175455_2 (sequence is synthesized)
caggtctggagctcgaccgggccaggtgttatcttcaggaaggcacactggacctgctaaattaacaaatggaaagaaagcgacctatttaagaaaaataccacgttttaatgcagattc

SEQ ID NO: 606773 - DNA, 120 bp, Artificial Sequence
  ENSG00000175455_3 (sequence is synthesized)
tggctattccatccattctgattcagaaagtcaggctgaaactgtacacgggcttgatggttgtgcttctttgctgagggacattttgagaaatgaagattcagcatcttcagataataa

SEQ ID NO: 606774 - DNA, 120 bp, Artificial Sequence
  ENSG00000175455_4 (sequence is synthesized)
gaaacagatacctaatgaagcttctgctagaagtgaaagagacacatcagacctagagcaaaactggtcattgcaagatcattatagaatgtattcacccataatataccaagccctctg

SEQ ID NO: 606775 - DNA, 120 bp, Artificial Sequence
  ENSG00000175455_5 (sequence is synthesized)
tgagcacgtgcagactcagatgtcactgatgaatgacttgacttcaaagaacatccctaatggaattcctgctgtaccatgccatgctccctctcattctgaatctcaggcaactcctca

SEQ ID NO: 606776 - DNA, 120 bp, Artificial Sequence
  ENSG00000175455_6 (sequence is synthesized)
ttctagttatggcttatgtacctccaccccagtctggtcacttcagcggccaccctgccctccaaaggttcattctgaagttcaaactgatggcaacagtcagtttgcatcacaaggtaa

SEQ ID NO: 606777 - DNA, 120 bp, Artificial Sequence
  ENSG00000175455_7 (sequence is synthesized)
aacagtttctgcaacctgtactgatgttctacggaattcatttaataccagtcctggagttccatgtagcctgcccaaaactgacatatcagctattccaacattgcagcaactgggcct

SEQ ID NO: 606778 - DNA, 120 bp, Artificial Sequence
  ENSG00000175455_8 (sequence is synthesized)
tgttaatggaattctgccacaacaaggaattcataaggaaacagacctactaaaatgtattcaaacatatttgtctctttttcgatctcatggaaaagaaacgcatctggacagtcagac

SEQ ID NO: 606779 - DNA, 120 bp, Artificial Sequence
  ENSG00000175455_9 (sequence is synthesized)
acaccgaagccctactcagtcacaaccagctttcttggccactaatgaagaaaaatgtgccagagagcaaattagagaggccacaagtgaaagaaaggatttaaacatacatgtgcgaga

SEQ ID NO: 606780 - DNA, 120 bp, Artificial Sequence
  ENSG00000175455_10 (sequence is synthesized)
tacaaaaacagtgaaggatgtacagaaggcaaaaaatgtgaacaagacagctgaaaaagttagaattataaaatatttgttgggagagctcaaggccctggtagcagaacaagaggattc

SEQ ID NO: 606781 - DNA, 120 bp, Artificial Sequence
  ENSG00000175455_11 (sequence is synthesized)
agaaattcagaggttgattacagaaatggaggcatgtatatctgtacttccaacagtaagtggaaacacagatattcaagttgagatagcactggccatgcaaccattaagaagtgagaa

SEQ ID NO: 606782 - DNA, 120 bp, Artificial Sequence
  ENSG00000175455_12 (sequence is synthesized)
tgctcagttacgaaggcagttgagaattttgaaccagcaactcagagaacaacagaaaactcaaaaaccatctggtgctgtggattgcaaccttgaattgttttctcttcagtcattgaa

SEQ ID NO: 606783 - DNA, 120 bp, Artificial Sequence
  ENSG00000175455_13 (sequence is synthesized)
tatgtcactgcaaaatcaattggaggagtcactaaagagccaggaattactgcagagtaaaaatgaagagctgttaaaagtgattgaaaatcagaaagatgaaaacaaaaaatttagtag

SEQ ID NO: 606784 - DNA, 120 bp, Artificial Sequence
  ENSG00000175455_14 (sequence is synthesized)
tatatttaaagacaaagatcaaactatacttgaaaataaacagcaatatgatattgagataacaagaataaaaattgaattggaggaagccctagtcaatgtgaaaagctcccagtttaa

SEQ ID NO: 606785 - DNA, 120 bp, Artificial Sequence
  ENSG00000175455_15 (sequence is synthesized)
gttagaaactgctgaaaaggaaaaccagatattggggataacattacgtcagcgtgatgctgaggtgactcgactaagagaattaaccagaactttacagactagcatggcaaagcttct

SEQ ID NO: 606786 - DNA, 120 bp, Artificial Sequence
  ENSG00000175455_16 (sequence is synthesized)
ctccgatcttagtgtggacagtgctcgctgcaagcctgggaataaccttaccaaatcactcttgaacattcatgataaacaacttcaacatgacccagctcctgctcacacttccataat

SEQ ID NO: 606787 - DNA, 120 bp, Artificial Sequence
  ENSG00000175455_17 (sequence is synthesized)
accatagagccagacaaaacctatgaaaatgttctgtcctccagaggccctcaaaatagtaacactaggggcatggaggaagcatctgcacctggaattatttctgccctttcaaaacag

SEQ ID NO: 606788 - DNA, 120 bp, Artificial Sequence
  ENSG00000175455_18 (sequence is synthesized)
gattctgatgaagggagtgaaactatggctttaatagaagatgagcataatttggataatacaatttacattccttttgctagaagcactcctgaaaagaaatcaccactttctaagaga

SEQ ID NO: 606789 - DNA, 120 bp, Artificial Sequence
  ENSG00000175455_19 (sequence is synthesized)
ctatcccctcagccacaaataagagcagctacaacacagctagtcagcaacagcggacttgctgtctctggaaaagaaaataaactgtgtacacctgtaatctgttcctcttcaacaaag

SEQ ID NO: 606790 - DNA, 120 bp, Artificial Sequence
  ENSG00000175455_20 (sequence is synthesized)
gaagcagaagatgcacctgaaaaactttccagagcatctgatatgaaggacacacagctcctcaagaaaataaaggaagcaattggtaagatccctgctgccaccaaggagccagaggaa

SEQ ID NO: 606791 - DNA, 120 bp, Artificial Sequence
  ENSG00000175455_21 (sequence is synthesized)
caaactgcatgtcatggcccatcaggttgtcttagcaacagccttcaagtgaaaggcaatactgtctgtgatggtagtgttttcacttctgacttgatgtctgactggagcatctcttcg

SEQ ID NO: 606792 - DNA, 120 bp, Artificial Sequence
  ENSG00000175455_22 (sequence is synthesized)
ttttcaacgttcacttctcgtgatgaacaagacttcagaaatggccttgcggcattagatgccaacatagctagactccagaagtctttaaggactggtcttctggagaaatgaattcag

SEQ ID NO: 606793 - DNA, 120 bp, Artificial Sequence
  ENSG00000175455_23 (sequence is synthesized)
aagaaaactcatcaggtgcttctttttaaaactagaacttggctatattgaatgtgtatttttctttagtgaaatgatgttttatgttattatgtgtgaagtaatatattgtacaagtaa

SEQ ID NO: 606794 - DNA, 120 bp, Artificial Sequence
  ENSG00000175455_24 (sequence is synthesized)
taaatgtattgttgagatatattgacactgaggagcttataaaaacaagtcatcttaagttcacaattgctacaagaagaaagttgtggataactaggaaattattgtaagtaatgtttt

SEQ ID NO: 606795 - DNA, 120 bp, Artificial Sequence
  ENSG00000175455_25 (sequence is synthesized)
atttcagtacttagcaattagagttcttttattaagatgtatctgctggattaagggtacaggttgaaatagttctgtggctgtcctaagaaataatgggaaaagaatctctggatgtaa

SEQ ID NO: 606796 - DNA, 120 bp, Artificial Sequence
  ENSG00000175455_26 (sequence is synthesized)
gtttttctgttgaaactagagggttttttttttctgtttacatatacttttttttaatagcaatgtgtttttattaaacatgctgtgtgccacaggccagtgttgttggtgaaatatata

SEQ ID NO: 606797 - DNA, 120 bp, Artificial Sequence
  ENSG00000175455_27 (sequence is synthesized)
aacatttatttaaagagaaaagttaccagtatctacacctcttaaaaaacattgattggtctaaaaaatatatagataacatcctaagttaacatatggcttcttaaaacttgggcactt

SEQ ID NO: 606798 - DNA, 120 bp, Artificial Sequence
  ENSG00000175455_28 (sequence is synthesized)
ttatttgtttttatcccaaattcatgttttaaggcctttaaagaatagtcagactgataaagaagtgctaacagataagctatagttggggaaatttgtgggttttttttaaataagaaa

SEQ ID NO: 606799 - DNA, 120 bp, Artificial Sequence
  ENSG00000175455_29 (sequence is synthesized)
tgtttatttttgtccttatatttaaacatgatggaatttgtaaatcttggcattgattgtaattctgcctttttggaagaattttttctcccagcatgttagctgagaatattctctatt

SEQ ID NO: 606800 - DNA, 120 bp, Artificial Sequence
  ENSG00000175455_30 (sequence is synthesized)
ttataaataatatgaagtaggttggtctctctgcttctctataccaggacttcttagctcagtatcatctcccttcatgtaagcagcacgttttaactcttaggaagctgaatgttgtgt

SEQ ID NO: 606801 - DNA, 120 bp, Artificial Sequence
  ENSG00000175455_31 (sequence is synthesized)
tatcactaatactttgtacaggtcacctgcctactctaattgtccttagtacttggacaggctttatcattaaagagtgttctcctaatcccagaacctcctcgtgttttttgttttttt

SEQ ID NO: 606802 - DNA, 120 bp, Artificial Sequence
  ENSG00000175455_32 (sequence is synthesized)
ggtggttttttttttttttttaggtgttagtgctacagcgtttgaaggagccagctgtagtctctttgatatgttcagattttccagatagagatttaagtctaaaaatttattaagtga

SEQ ID NO: 606803 - DNA, 120 bp, Artificial Sequence
  ENSG00000175455_33 (sequence is synthesized)
attctaaactatttcacacaagagtccattagcatctttaattttatttagtattcatgaattaatttattggcatcttatttggaggtaataggccacaactctttaacaaataagttc

SEQ ID NO: 606804 - DNA, 120 bp, Artificial Sequence
  ENSG00000175455_34 (sequence is synthesized)
atgctaagtgaaataagccagtcacaaaagaacaaatattgtattatttcagttatataaagtttctagactagtcaaattcatagaaactaggatgatagttgctagggtcagggagaa

SEQ ID NO: 606805 - DNA, 120 bp, Artificial Sequence
  ENSG00000175455_35 (sequence is synthesized)
ctagggtcagggagaagaggggatggaaaggtattgtttaatggatgcagagtttcagtttgagaagatgaataaaagaaaaaaatgacattaaattttgtcaagatagcatattgaaaa

SEQ ID NO: 606806 - DNA, 120 bp, Artificial Sequence
  ENSG00000175455_36 (sequence is synthesized)
tataatagaaaaatatttgtttatctgctataatatattatgtcataggtgttatcttcaggaaggcacactggacctgctaaattaacaaatggaaagaaagcgtaagtacttgaagac

SEQ ID NO: 606807 - DNA, 120 bp, Artificial Sequence
  ENSG00000175455_37 (sequence is synthesized)
gtttacaacttcagatttcaaggaatttttcaggtctttgggctggatgacatgtcgtctaccccagaaaattaggtaggcctctaccatcacaagctctgaggaacaatttttcatgtc

SEQ ID NO: 606808 - DNA, 120 bp, Artificial Sequence
  ENSG00000175455_38 (sequence is synthesized)
tacccatgttaatcattttagtatttaacagtctttctgatcttcagaatgtgtttataaattcatcttgtacatggttggacaagctttcttgtctttgctggaaagaaaatgactact

SEQ ID NO: 606809 - DNA, 120 bp, Artificial Sequence
  ENSG00000175455_39 (sequence is synthesized)
tactaatatattttgggaaaaatatttgtaagaatattaataagcttgttttccaggacctatttaagaaaaataccacgttttaatgcagattctggctattccatccattctgattca

SEQ ID NO: 606810 - DNA, 120 bp, Artificial Sequence
  ENSG00000175455_40 (sequence is synthesized)
gaaagtcaggtaagattgaatagatacaatacacactattttaattagttttcaaatagtagctaaaaagtaggaataaaatgcaaagtattaattgctctaaggaagtatgaagtctgt

SEQ ID NO: 606811 - DNA, 120 bp, Artificial Sequence
  ENSG00000175455_41 (sequence is synthesized)
tatgaagtctgttgctttaaaacatcttttctaccaataatagtttgtaaataaacaaattttaaaactacataatttatattttttcctacactaacagtcatatacaaatgtattcta

SEQ ID NO: 606812 - DNA, 120 bp, Artificial Sequence
  ENSG00000175455_42 (sequence is synthesized)
cattattttgatgtaacaaatttttgttttattaataggttcagaaacagcatatttagaaaacagatctaattctagacctttagaaagcaaaagatacggatcaaaaaagaaaagaca

SEQ ID NO: 606813 - DNA, 120 bp, Artificial Sequence
  ENSG00000175455_43 (sequence is synthesized)
tgaaaaacatactattcctttggtagtccagaaagaaacatgtaagccttttttctcttagttatttaaagataatccttaattgtgggtattttgatcaattatcaggattatacagtt

SEQ ID NO: 606814 - DNA, 120 bp, Artificial Sequence
  ENSG00000175455_44 (sequence is synthesized)
gattttcattttaataatcagtattagttaggtttatgtgtgcttatgcctttctgtattcagcttctaatcactgagtagtccactttgcttgctatcattttctcaagaagaaaaata

SEQ ID NO: 606815 - DNA, 120 bp, Artificial Sequence
  ENSG00000175455_45 (sequence is synthesized)
gaaaaagagactgtcagggttttgtaggagaaaaagttcaaactcagaatgacatttgggaggtatatagagtgatcttagtttcccctgccacttgttttcatagataatcataaattg

SEQ ID NO: 606816 - DNA, 120 bp, Artificial Sequence
  ENSG00000175455_46 (sequence is synthesized)
gttgtatttcaagtgtatacttctagtagttgctttaaaattattatatttatatatatatatatcctaagttggtcaagctgaacttgtcaagctacacagttaggatacatggtacat

SEQ ID NO: 606817 - DNA, 120 bp, Artificial Sequence
  ENSG00000175455_47 (sequence is synthesized)
aggaaggtaaaatcggatgaataaggaaaggctgctgctgattggtggtgagtatagccaagggtactttacaccctcacggctaacttttcctagtttagaacaagaaagttttgatta

SEQ ID NO: 606818 - DNA, 120 bp, Artificial Sequence
  ENSG00000175455_48 (sequence is synthesized)
tgttgtcccttggaggcctagaaaacaagatagcccaaaatgaagatgaaaaagtccacagtgggaattcagatggactagaattagactagccagttctatagttcaggtgggccagaa

SEQ ID NO: 606819 - DNA, 120 bp, Artificial Sequence
  ENSG00000175455_49 (sequence is synthesized)
atgtcagcactgtagtacgtgcttagattcagcttgggcaaggaatgaagtttagaaagtcatataaagcagtagccctataaagagatcaggatttaagcaaggaggctgagaaagtgt

SEQ ID NO: 606820 - DNA, 120 bp, Artificial Sequence
  ENSG00000175455_50 (sequence is synthesized)
cagtagagcattcatgggactagaggttgatgtttcagatagtcccaaggtagagaactaaggcaagggaaacctaactcatcttggaggccagtaatgatagctttatattatcttgac

SEQ ID NO: 606821 - DNA, 120 bp, Artificial Sequence
  ENSG00000175455_51 (sequence is synthesized)
ctgtgctattcaagatggtagccactggccacatgtggctattcagcacttgaaatgtgactagtacaaccaaggaattgaattttaatgttatttaatttaatttaatttaaaattaaa

SEQ ID NO: 606822 - DNA, 120 bp, Artificial Sequence
  ENSG00000175455_52 (sequence is synthesized)
ttagaaaactgataattgatccagttattataaaacttttaagtatgtttggaataacttgggcatgtgaacctaccttttcaagtgtaaattttattaaatctaaatatagaccaagta

SEQ ID NO: 606823 - DNA, 120 bp, Artificial Sequence
  ENSG00000175455_53 (sequence is synthesized)
tttctgatgagaatttagcatctagattgtgctttgtgtaaaatatatgctagatttagaagatttaatacaaaatttcagttatttatattatacactgaaatgttaatattttggata

SEQ ID NO: 606824 - DNA, 120 bp, Artificial Sequence
  ENSG00000175455_54 (sequence is synthesized)
tattgatttaaatattatgaaaagtaattttacctattttatatggttactggaaatttcaagttacatatatggtttgtattatatttctattggacagcattggtctaagctcaatac

SEQ ID NO: 606825 - DNA, 120 bp, Artificial Sequence
  ENSG00000175455_55 (sequence is synthesized)
actacagccagttttataagtaatgtttagttattttattgtgtaaataagattttattagaatgcagccaagctaatttattaatgtgtttttattagctgtttttgtgctgcagtgtc

SEQ ID NO: 606826 - DNA, 120 bp, Artificial Sequence
  ENSG00000175455_56 (sequence is synthesized)
agagttgagtagttttgacagagatcatctggcctgctaaacctaaaatatttatttgacctttgaagaaagagtgctaaaccctggccttaactctttaaagcagaggcctttttattg

SEQ ID NO: 606827 - DNA, 120 bp, Artificial Sequence
  ENSG00000175455_57 (sequence is synthesized)
gggcccaactgagaaagaaaggagcggtagcacctgttcctccagtctcctactttttgtctgtaggcaggttatttcttatccagggcacctttcctcaaggaactattatttgcaata

SEQ ID NO: 606828 - DNA, 120 bp, Artificial Sequence
  ENSG00000175455_58 (sequence is synthesized)
tatgtgactggcagtgggtgtcatggtatcaacttactggatcctgacttaactgcctctgtcggtcagagttccaacaagaaacagatggcaacactcaaattgaggtaattttaggag

SEQ ID NO: 606829 - DNA, 120 bp, Artificial Sequence
  ENSG00000175455_59 (sequence is synthesized)
ggtttatttacaaagggactcataaaggtatgaatagggtataggaaaaccacaggttttgcctactaggtcatgcgagcctagtgctagcagcagagcagcagagctgttatcatctct

SEQ ID NO: 606830 - DNA, 120 bp, Artificial Sequence
  ENSG00000175455_60 (sequence is synthesized)
aggccataagggattaggagagagagaggttactggatctagaaagagatactgtttatagaatacgctaccttgagaagagcagtgagcttcattgaaatgacgaaggcagcccaaggt

SEQ ID NO: 606831 - DNA, 120 bp, Artificial Sequence
  ENSG00000175455_61 (sequence is synthesized)
ggccttatagaaagggagcaggaataagtgtatatcctgacttcatgcttcttcctttccttgatatgccaagactcccattggattgaacccaactgaagccctactgatgtatatcag

SEQ ID NO: 606832 - DNA, 120 bp, Artificial Sequence
  ENSG00000175455_62 (sequence is synthesized)
gtctgggatttgactcttacaagctagtaagttagtcttactgtgtcatggatgctagcagaagacaagactgctgggtcagagacaaaggactttattactcacagcacaggaagcagt

SEQ ID NO: 606833 - DNA, 120 bp, Artificial Sequence
  ENSG00000175455_63 (sequence is synthesized)
atgtgcatcagcatattgtgttggttctcattcaccctagttcccattggggtgatatggtggacccatatggatgctgcacatgccttaggtttaggttgcagctgaggaacactgagc

SEQ ID NO: 606834 - DNA, 120 bp, Artificial Sequence
  ENSG00000175455_64 (sequence is synthesized)
ttggggaatccgtcactttggtagtaagcagtaatcaagcctgtgcttgtcccagagggaaacattacctcatccttcaaggttgctcactgcagacacaaccctgagaagcggcccagg

SEQ ID NO: 606835 - DNA, 120 bp, Artificial Sequence
  ENSG00000175455_65 (sequence is synthesized)
agaggtgggtttggattggcagatggaagattctggcattctgggtccatagcgttaaattcttatttggattacagccgaatcagcagttctggcctgtgatcagggtgcaatattctt

SEQ ID NO: 606836 - DNA, 120 bp, Artificial Sequence
  ENSG00000175455_66 (sequence is synthesized)
attgttctttctcccatattttcttaatcagaaggaaggacctacttccacaggacaatcttctttagggttgcaatattagaaattagtttctagttgtgtgtgtgtgtggttggcagc

SEQ ID NO: 606837 - DNA, 120 bp, Artificial Sequence
  ENSG00000175455_67 (sequence is synthesized)
tgttaaccaataatacaagattttgctttgttaccacaatgctcaaaaatacacaaaatccaagctcataacttgttctctttaccgtctccaagtgaagtaatcataaagaactttaag

SEQ ID NO: 606838 - DNA, 120 bp, Artificial Sequence
  ENSG00000175455_68 (sequence is synthesized)
cgatctattacagcatgttaactagtatccatgtattattttacttttaacacacattatcttgctattttgtgttaactgtcttctggggagtggcctccttatgtactttctatctgg

SEQ ID NO: 606839 - DNA, 120 bp, Artificial Sequence
  ENSG00000175455_69 (sequence is synthesized)
gacaaatactgcatgattttacttacataaagtacctaaatagttaaaactcatagaaacagaatgtgagcatggattgggcgtgaaccagagggatttttgttttttgggttttttttt

SEQ ID NO: 606840 - DNA, 120 bp, Artificial Sequence
  ENSG00000175455_70 (sequence is synthesized)
gtaaagaacagtattgggataattggcaacatgtgaataaggtctgaatattagattgtaattctgtatcaatgttaatttcctggttttgataattatactgtggttatgttagagaat

SEQ ID NO: 606841 - DNA, 120 bp, Artificial Sequence
  ENSG00000175455_71 (sequence is synthesized)
ggccttgtttttaggaaacatttaggagtaaaggagtattgtatctgcaaacttaactctaatggttcaggcaaaaagtactgctgtgtatatatattgagagagaatatggaaaatgtc

SEQ ID NO: 606842 - DNA, 120 bp, Artificial Sequence
  ENSG00000175455_72 (sequence is synthesized)
aaggttcacagaatctgagtgaagcatatatagggcatctttgtactattatttcatagtagaaactacaaaaaaaaattgaaaggaattgttccaatatgacagttactgtttcaaggt

SEQ ID NO: 606843 - DNA, 120 bp, Artificial Sequence
  ENSG00000175455_73 (sequence is synthesized)
gcttttatcatgggtagttttctttaccagattttctataatatagccttgtgtatattttttggagaaacaccatatgtaatcttacagttatgccagacatatacctcagacagtgta

SEQ ID NO: 606844 - DNA, 120 bp, Artificial Sequence
  ENSG00000175455_74 (sequence is synthesized)
ctttaattgtggtagttgtttttggactcgatccagggtatagtattatagtgtcatggcttggattttttattatgattccagccaagacatcgacataaatataccaaagggaaggac

SEQ ID NO: 606845 - DNA, 120 bp, Artificial Sequence
  ENSG00000175455_75 (sequence is synthesized)
cctgagagtgtgatgcagagaccagtggtgtgatgttatacaaggtcttatttcctacattgttggttctcactgctggcttcatgaccctccatcataatccaagttatctcaagacgt

SEQ ID NO: 606846 - DNA, 120 bp, Artificial Sequence
  ENSG00000175455_76 (sequence is synthesized)
ataactcttaccaacccagtttttaaaaaatgtattctcagtgacattcttagaaggatggagcacatattcaagcatataatagaatgccgtataactttagaaagtttggtagttaca

SEQ ID NO: 606847 - DNA, 120 bp, Artificial Sequence
  ENSG00000175455_77 (sequence is synthesized)
gctcaaagctatctggagatgaaattaaatatgtgaagagaaattataaataaaactgccaacagtgactacatctggagggtggaactagggggggaatcagggactttctcatgtcta

SEQ ID NO: 606848 - DNA, 120 bp, Artificial Sequence
  ENSG00000175455_78 (sequence is synthesized)
tttaaaattattttgaataaagattatatttatctgatataaaattattaagatataaaatagtataccatggaaagtgtcccttctcgctctgtcccccagatactctgtttccctccc

SEQ ID NO: 606849 - DNA, 120 bp, Artificial Sequence
  ENSG00000175455_79 (sequence is synthesized)
cagaggcaaccatgattaactgtttctggcataactcccaagatactggatgcatgtaaaagcaaatgcttattttttcctgtttttctacacaaaaggttgtccattattgtcactttt

SEQ ID NO: 606850 - DNA, 120 bp, Artificial Sequence
  ENSG00000175455_80 (sequence is synthesized)
aaaacaaaaaagtttaagaaaacaacagtggtatatgaatttaaaaagaaaaattaagacagtgagatgtagataaagagacagggtagagttctcacttcctggtctaatcaggcattc

SEQ ID NO: 606851 - DNA, 120 bp, Artificial Sequence
  ENSG00000175455_81 (sequence is synthesized)
taaagaatgtacataaaaggaaccagagttaagaactctgtcctatatcatgaattaacttgcatgtttcaaagaatttgggactatagaacatattttgggattaatatagtctgaact

SEQ ID NO: 606852 - DNA, 120 bp, Artificial Sequence
  ENSG00000175455_82 (sequence is synthesized)
tagtgtagtagttacttctggtttaaaatagtatctcaatttccttttcaccttaaatagacttaaggaacaaatatatgtgtagtttgcttgacgttttacataaaagaaatttaatat

SEQ ID NO: 606853 - DNA, 120 bp, Artificial Sequence
  ENSG00000175455_83 (sequence is synthesized)
atgaattaaattataattgtgtatttttaggatatatcacattaattaaaacagtgaataatgtggtacatacatataatggaatatatttgacctcaaaaaggaagaaaaattttgaca

SEQ ID NO: 606854 - DNA, 120 bp, Artificial Sequence
  ENSG00000175455_84 (sequence is synthesized)
ctaattactttcagaaagaatttgagatgattttctttagtaggggtgatagtggtaaagcccttctatgaagtatgtgatggattggactacttctgagagccctttcttctcttaaaa

SEQ ID NO: 606855 - DNA, 120 bp, Artificial Sequence
  ENSG00000175455_85 (sequence is synthesized)
aattatttgtggctccggaaatgttgataaagaattgagcttttgtaattactttgaggggataaatttaaaatattgtagaaacataagaaaataaaagatgctgtcacttcccaataa

SEQ ID NO: 606856 - DNA, 120 bp, Artificial Sequence
  ENSG00000175455_86 (sequence is synthesized)
ctaagagaattaaccagactttttaaaactgtggacttaaatgttctgcaaagtcttacacaaaagcccaatacagtacatgaactacggaaaagcagaactgctctgaacaaggaagag

SEQ ID NO: 606857 - DNA, 120 bp, Artificial Sequence
  ENSG00000175455_87 (sequence is synthesized)
ttgagaacatgaactgacaaggaacaaggtgaaggagtttgactggactttagggataatataactcccttaaaagaagtgttaaaatgaaggagagattttacaaatgcatcttcagat

SEQ ID NO: 606858 - DNA, 120 bp, Artificial Sequence
  ENSG00000175455_88 (sequence is synthesized)
tgaggtgactcgactaagagaattaaccaggtaaaattgacttcctttgaataactcatgccttttttatttttagatgtttttataaacttcaaaataatgttagacctgttttctccc

SEQ ID NO: 606859 - DNA, 120 bp, Artificial Sequence
  ENSG00000175455_89 (sequence is synthesized)
ccatatctttttctcttattttgccaatgtttttgctaatttctaatgatgttttcttctgttccaattaaattagtttaggaatttcaaacctggcgaaatgtttttttaaaaccatgt

SEQ ID NO: 606860 - DNA, 120 bp, Artificial Sequence
  ENSG00000175455_90 (sequence is synthesized)
gattctgggcagggggtcctgatgagaagctgaagacttgtatagcaacaccattgagccctctggttctgaagctagagagatctgactggaatcccagctctgccacatattagctga

SEQ ID NO: 606861 - DNA, 120 bp, Artificial Sequence
  ENSG00000175455_91 (sequence is synthesized)
ttccctcggtctgggcttctctgaggcggcgagagatggtcaggtctggagctcgaccgggccagactttttaaaactgtggacttaaatgttctgcaaagtcttacacaaaagcccaat

SEQ ID NO: 606862 - DNA, 120 bp, Artificial Sequence
  ENSG00000175455_92 (sequence is synthesized)
acggaaaagcagaactgctctgaacaaggaagaggtgggagatctgagtcctggccccagcacccacttcaacttcagtcacctccttggaatctggggttctgcagcttgaaataatca

SEQ ID NO: 606863 - DNA, 120 bp, Artificial Sequence
  ENSG00000175455_93 (sequence is synthesized)
tctggggttctgcagcttgaaataatcagtttggattttaaacttatttgtaacataataataatcctaggaactttaaaataatattttgtactaaattttagaattattataataagt

SEQ ID NO: 606864 - DNA, 120 bp, Artificial Sequence
  ENSG00000175455_94 (sequence is synthesized)
tggttggttttgttttgttttgtttttgaggacccaaagcatcagaattgtacaaactattctctttcctattgcattttcccttgagaacatgaactgacaaggaacaagcatcttcag

SEQ ID NO: 606865 - DNA, 120 bp, Artificial Sequence
  ENSG00000175463_0 (sequence is synthesized)
gagataccctgaaacctcccccctctgaccccgcagccaggccccaggctggccgggagtggcccctcacactggttctccccactttctctgcctgtggcatcgaaggccccgggcacc

SEQ ID NO: 606866 - DNA, 120 bp, Artificial Sequence
  ENSG00000175463_1 (sequence is synthesized)
atggcccaggccctgggggaggacctggtgcagcctcccgagctgcaggatgactccagctccttggggtccgactcagagctcagcgggcctggcccatatcgccaggccgaccgctat

SEQ ID NO: 606867 - DNA, 120 bp, Artificial Sequence
  ENSG00000175463_2 (sequence is synthesized)
ggattcattgggggcagctcagcagagccagggccgggccacccacctgcagacctcatccgccaacgggagatgaagtgggtggagatgacctcgcactgggagaaaaccatgtcccgg

SEQ ID NO: 606868 - DNA, 120 bp, Artificial Sequence
  ENSG00000175463_3 (sequence is synthesized)
cggtacaagaaggtaaagatgcagtgccggaaaggcatcccgtctgccctgcgcgcccgatgctggcccctgttgtgtggggcccatgtgtgccagaagaacagccctggcacctatcag

SEQ ID NO: 606869 - DNA, 120 bp, Artificial Sequence
  ENSG00000175463_4 (sequence is synthesized)
gagctggcagaggcccctggagacccacagtggatggagaccattggcagggacctgcaccgtcaattccctctgcacgagatgtttgtgtcgcctcagggccacgggcagcaggggctc

SEQ ID NO: 606870 - DNA, 120 bp, Artificial Sequence
  ENSG00000175463_5 (sequence is synthesized)
ctgcaggtgctcaaggcctacaccctgtatcgaccggagcagggctactgccaggcccaggggcccgtggctgctgtgctgctcatgcacctgcccccagaggaggccttctggtgcctg

SEQ ID NO: 606871 - DNA, 120 bp, Artificial Sequence
  ENSG00000175463_6 (sequence is synthesized)
gtgcagatctgtgaggtctacctccctgggtactacgggccccacatggaggctgtgcggctggacgccgaggtgttcatggccctgctgcggcggctgcttccgcacgtgcacaagcac

SEQ ID NO: 606872 - DNA, 120 bp, Artificial Sequence
  ENSG00000175463_7 (sequence is synthesized)
gggtgccagagtactgttccgtgtggggctgacactggtgcgcctggcgctgggcactgcagagcagcgaggggcctgccctggcctcctggagacactgggagcccttcgagccatccc

SEQ ID NO: 606873 - DNA, 120 bp, Artificial Sequence
  ENSG00000175463_8 (sequence is synthesized)
ccccgcgcagctgcaggaggaggccttcatgtcacaggtgcacagcgtggtgctgtcagagcgggacctgcagcgggagatcaaggcccagctggcccagctgcccgattccgcgccggg

SEQ ID NO: 606874 - DNA, 120 bp, Artificial Sequence
  ENSG00000175463_9 (sequence is synthesized)
acccccgccccggccacaggtccgcctcgccggggcccaagccatctttgaggcccagcagctggcaggagtgcgacgaggcgccaagcctgaggtgcctcggattgtggtgcagccccc

SEQ ID NO: 606875 - DNA, 120 bp, Artificial Sequence
  ENSG00000175463_10 (sequence is synthesized)
ggaggagcccagaccaccgcggcggaaaccccagacccgcggcaagactttccatgggctcctgactcgggcccggggcccccccatcgaggggccccccaggccccaacgaggctccac

SEQ ID NO: 606876 - DNA, 120 bp, Artificial Sequence
  ENSG00000175463_11 (sequence is synthesized)
ctccttcctggacacccgcttctgagaggaccatggacttagtgtcccccagtctcaattgcctgatggctgatgccggcccggcaaataggcaccgcactttactcttgggactcgggg

SEQ ID NO: 606877 - DNA, 120 bp, Artificial Sequence
  ENSG00000175463_12 (sequence is synthesized)
acttggcttccttcctggcaaggaccaggcagtggggaaggaggaggtcctccgtggtacatactgggtcaggcactagcatggaggagggtcacagagtggggcacgtgaggacccatg

SEQ ID NO: 606878 - DNA, 120 bp, Artificial Sequence
  ENSG00000175463_13 (sequence is synthesized)
gaaccgtcctggtgcccaggccctcacaagtaccaaagccagcaccaaaggagtcagggaaggggttggctgagtcaagggaccccagagggcaccaggaataaaatcttcttgaacaga

SEQ ID NO: 606879 - DNA, 120 bp, Artificial Sequence
  ENSG00000175463_14 (sequence is synthesized)
cccagccccacaagccccaggtgctccagcccactttccctagcccagctctacagtcttgcatctcaggggacccaggaaggcccagggaggctgaggcctgggcagaggcccccagag

SEQ ID NO: 606880 - DNA, 120 bp, Artificial Sequence
  ENSG00000175463_15 (sequence is synthesized)
ggtggagaagggggtgcctgcaggactggccccttatggggtcttccggcacaggcagcaggggctcctgcaggtgctcaaggcctacaccctgtatcgaccggagcagggctactgcca

SEQ ID NO: 606881 - DNA, 120 bp, Artificial Sequence
  ENSG00000175463_16 (sequence is synthesized)
ggcccaggggcccgtggctgctgtgctgctcatgcacctgcccccagaggtgagtgaccttgaccctgctctgggaaccctagtgacctaggcccagggaaccccatccccaggaactgt

SEQ ID NO: 606882 - DNA, 120 bp, Artificial Sequence
  ENSG00000175463_17 (sequence is synthesized)
ttggcaaaatgtacccaccctgtgtcccagcacctccggcctttgctccctgccacccaaagtgggcccctgcctgctgatgagctgtgcctggggcctgccagcaggagctatggaggc

SEQ ID NO: 606883 - DNA, 120 bp, Artificial Sequence
  ENSG00000175463_18 (sequence is synthesized)
ctaatgaccttgactccaggaacctgggacccttgaccccagccttgaccccagtcatctaggaatctggatgttatcaccttgaccccacgactcctgattctgaacttggggactgcg

SEQ ID NO: 606884 - DNA, 120 bp, Artificial Sequence
  ENSG00000175463_19 (sequence is synthesized)
accccaaccccaaagacccagaaacccaggacttgaactttgggacactcccaacccttggccagtgaaccccaaccctgtgaccttcaaatctaacaccatgagccctgtgatttccaa

SEQ ID NO: 606885 - DNA, 120 bp, Artificial Sequence
  ENSG00000175463_20 (sequence is synthesized)
caccctaaacccctcagcagaccctgtcttgggcagaggagggggcttttgggaagggcttccaggaactgcgcaggttaggagtggccctgagtgcaggcccctgtggtgcccaggccc

SEQ ID NO: 606886 - DNA, 120 bp, Artificial Sequence
  ENSG00000175463_21 (sequence is synthesized)
tccccttcactcctttcccctgtcctgccttctcctccacggtcccttccttggtgagcacttacaggcctgtgccctgccccttccccaggaggccttctggtgcctggtgcagatctg

SEQ ID NO: 606887 - DNA, 120 bp, Artificial Sequence
  ENSG00000175463_22 (sequence is synthesized)
tgaggtctacctccctgggtactacgggccccacatggtgagaggctgacatgggggctggaggaaggaggggcaggggcccggtgagtgggtgggggtctggggactgagggaggttga

SEQ ID NO: 606888 - DNA, 120 bp, Artificial Sequence
  ENSG00000175463_23 (sequence is synthesized)
ggtgagtggggcagccagtggctggggcaggagccttggggtgtgggtggggaggtagctcaccagctccagggttccctttttgagcctcaaatcacaggactgggtgtgccgaaggtg

SEQ ID NO: 606889 - DNA, 120 bp, Artificial Sequence
  ENSG00000175463_24 (sequence is synthesized)
atggcctggtgcctggcgctacatcacccatcacccatcacccaggcaccgcctggtgcagagctgggccagggaggcttccagaggaggcagatggggcaggagcagggtgatcacagc

SEQ ID NO: 606890 - DNA, 120 bp, Artificial Sequence
  ENSG00000175463_25 (sequence is synthesized)
acatggaggcctgagcttctcagggacagtaggaggcgttcctccccagagcccgcaggcacctgctgggtgctcactggctccagacgtggatctgcagctgggaatcaagtgatcgag

SEQ ID NO: 606891 - DNA, 120 bp, Artificial Sequence
  ENSG00000175463_26 (sequence is synthesized)
accttcaattctggcgggggtggggatgggtggcgacagtaaccaaattcacaagatatttatagattgtcagaagtgtcatgaagaaaataaaacaagggatgtgacagggagtgtcag

SEQ ID NO: 606892 - DNA, 120 bp, Artificial Sequence
  ENSG00000175463_27 (sequence is synthesized)
ctgctctgtgcaggaggaggactcacaggggtggctgtggaggcctggggccagagaggccactgtccccaggggccaggctacagtctacgaagcagggagggcttggagccatgaagc

SEQ ID NO: 606893 - DNA, 120 bp, Artificial Sequence
  ENSG00000175463_28 (sequence is synthesized)
cagagaggtggaggctgggggccaggccaagaacaggaggggagtcggagcagagccaagctggactccctgtgtctttgggactctgccttgatactgccatcggtaacccacctgcat

SEQ ID NO: 606894 - DNA, 120 bp, Artificial Sequence
  ENSG00000175463_29 (sequence is synthesized)
tctgttctatatgtgaggtctggaggttgcaccttaaaacgtggtagaaatcagtcagcatatgcatactgtgcatactgaatgcctgtcgtgtgctcagccggcttcctgccctccgca

SEQ ID NO: 606895 - DNA, 120 bp, Artificial Sequence
  ENSG00000175463_30 (sequence is synthesized)
cagcggaggaccactggctgacttagagttctggccacaggtgtccaagtcgctatccatgcggtcaccttccaaccagccttagacctcgagagcagggctgggcagagctgggcaggg

SEQ ID NO: 606896 - DNA, 120 bp, Artificial Sequence
  ENSG00000175463_31 (sequence is synthesized)
cctgacctgcccacctgggggcaaacactacacaggctccctttatcagaaggacgatagtatgaatagtgattgttcctaccatcatcactcaacctcgctggtcccctggtggctctt

SEQ ID NO: 606897 - DNA, 120 bp, Artificial Sequence
  ENSG00000175463_32 (sequence is synthesized)
ctcagatcagaggctgccaggaaggaattttgaggctccaggactagcccaaactcacactgtggggagtgtgcactgagtgctatgctcctggcttagggaagagcagttctgcctagg

SEQ ID NO: 606898 - DNA, 120 bp, Artificial Sequence
  ENSG00000175463_33 (sequence is synthesized)
atctttctagaatcagagggtcacagatccaagttggaaaggcccttaaagggctccacctgacctttcatcatggagatgagcaagctgaggcccagggagggcttggtgtgaaggcat

SEQ ID NO: 606899 - DNA, 120 bp, Artificial Sequence
  ENSG00000175463_34 (sequence is synthesized)
cagtagccctgggctcctggcaggaagctggtggcttggaggggactggagccttggggtgtggacagggagctagctcaccagctccagggttcccttttggagcctcgagtcatggga

SEQ ID NO: 606900 - DNA, 120 bp, Artificial Sequence
  ENSG00000175463_35 (sequence is synthesized)
ccaggtgtgctgaaggtgatggccctgtgcctggtggcacatcacctgtcacccggatgctgcctggggtaggagctgggtgatcatagcacatggaggcctgactggctcagggagggt

SEQ ID NO: 606901 - DNA, 120 bp, Artificial Sequence
  ENSG00000175463_36 (sequence is synthesized)
aggaggtgctcctccccggagcccacaggcacctgctgggtgcttgctggctccagatatggatggcatctgagcatcaagtgatcaagaccttcattttggcgggggtggggatgggag

SEQ ID NO: 606902 - DNA, 120 bp, Artificial Sequence
  ENSG00000175463_37 (sequence is synthesized)
gcgacagtaaccaaattcacaagatagtaactcttccccaaagcatctgtggctcttgaggctaacttggccagtacagcggcctgtgttacccgaaatgcaactccaccctctgtcatt

SEQ ID NO: 606903 - DNA, 120 bp, Artificial Sequence
  ENSG00000175463_38 (sequence is synthesized)
gttcctgaaccggggagggcagagctgcaggagagtgggaggcatatggctgagggcaggtttgggtgcagaactgtggaggggcagggccggcctcccagtgaataagcccccggcctg

SEQ ID NO: 606904 - DNA, 120 bp, Artificial Sequence
  ENSG00000175463_39 (sequence is synthesized)
gcattggcagctcctgggtcacaggtcaccccacagggctcccagagatccctagggccaggagctgggttcacctgggtagcctggagggtggcagtgtgggccttgggtaacagctgc

SEQ ID NO: 606905 - DNA, 120 bp, Artificial Sequence
  ENSG00000175467_0 (sequence is synthesized)
cgttgtctgggctcggcggcagccgggctcggagtggacgtgccactatggggtcgtccaagaagcatcgcggagagaaggaggcggccgggacgacggcggcggccggcaccgggggtg

SEQ ID NO: 606906 - DNA, 120 bp, Artificial Sequence
  ENSG00000175467_1 (sequence is synthesized)
ccaccgagcagccgccgcggcaccgggaacacaaaaaacacaagcaccggagtggcggcagtggcggtagcggtggcgaacgacggaagcggagccgggaacgtgggggcgagcgcggga

SEQ ID NO: 606907 - DNA, 120 bp, Artificial Sequence
  ENSG00000175467_2 (sequence is synthesized)
gcgggcggcgcggggccgaagctgaggcccggagcagcacgcacgggcgggagcgcagccaggcagagccctccgagcggcgcgtgaagcgggagaagcgcgatgacggctacgaggccg

SEQ ID NO: 606908 - DNA, 120 bp, Artificial Sequence
  ENSG00000175467_3 (sequence is synthesized)
ctgccagctccaaaactagctcaggcgatgcctcctcactcagcatcgaggagactaacaaactccgggcaaagttggggctgaaacccttggaggttaatgccatcaagaaggaggcgg

SEQ ID NO: 606909 - DNA, 120 bp, Artificial Sequence
  ENSG00000175467_4 (sequence is synthesized)
gcaccaaggaggagcccgtgacagctgatgtcatcaaccctatggccttgcgacagcgagaggagctgcgggagaagctggcggctgccaaggagaagcgcctgctgaaccaaaagctgg

SEQ ID NO: 606910 - DNA, 120 bp, Artificial Sequence
  ENSG00000175467_5 (sequence is synthesized)
ggaagataaagaccctaggagaggatgacccctggctggacgacactgcagcctggatcgagaggagccggcagctgcagaaggagaaggacctggcagagaagagggccaagttactgg

SEQ ID NO: 606911 - DNA, 120 bp, Artificial Sequence
  ENSG00000175467_6 (sequence is synthesized)
aggagatggaccaagagtttggtgtcagcactctggtggaggaggagttcgggcagaggcggcaggacctgtacagtgcccgggacctgcagggcctcaccgtggagcatgccattgatt

SEQ ID NO: 606912 - DNA, 120 bp, Artificial Sequence
  ENSG00000175467_7 (sequence is synthesized)
ccttccgagaaggggagacaatgattcttaccctcaaggacaaaggcgtgctgcaggaggaggaggacgtgctggtgaacgtgaacctggtggataaggagcgggcagagaaaaatgtgg

SEQ ID NO: 606913 - DNA, 120 bp, Artificial Sequence
  ENSG00000175467_8 (sequence is synthesized)
agctgcggaagaagaagcctgactacctgccctatgccgaggacgagagcgtggacgacctggcgcagcaaaaacctcgctctatcctgtccaagtatgacgaagagcttgaaggggagc

SEQ ID NO: 606914 - DNA, 120 bp, Artificial Sequence
  ENSG00000175467_9 (sequence is synthesized)
ggccacattccttccgcttggagcagggcggcacggctgatggcctgcgggagcgggagctggaggagatccgggccaagctgcggctgcaggctcagtccctgagcacagtggggcccc

SEQ ID NO: 606915 - DNA, 120 bp, Artificial Sequence
  ENSG00000175467_10 (sequence is synthesized)
ggctggcctccgaatacctcacgcctgaggagatggtgacctttaaaaagaccaagcggagggtgaagaaaatccgcaagaaggagaaggaggtagtagtgcgggcagatgacttgctgc

SEQ ID NO: 606916 - DNA, 120 bp, Artificial Sequence
  ENSG00000175467_11 (sequence is synthesized)
ctctcggggaccagactcaggatggggactttggttccagactgcggggacggggtcgccgccgagtgtccgaagtggaggaggagaaggagcctgtgcctcagcccctgccgtcggacg

SEQ ID NO: 606917 - DNA, 120 bp, Artificial Sequence
  ENSG00000175467_12 (sequence is synthesized)
acacccgagtggagaacatggacatcagtgatgaggaggaaggtggagctccaccgccggggtccccgcaggtgctggaggaggacgaggcggagctggagctgcagaagcagctggaga

SEQ ID NO: 606918 - DNA, 120 bp, Artificial Sequence
  ENSG00000175467_13 (sequence is synthesized)
agggacgccggctgcgacagttacagcagctacagcagctgcgagacagtggcgagaaggtggtggagattgtgaagaagctggagtctcgccagcggggctgggaggaggatgaggatc

SEQ ID NO: 606919 - DNA, 120 bp, Artificial Sequence
  ENSG00000175467_14 (sequence is synthesized)
ctggctggcaatcgcgaggagcaggaggagctcatggactttgaacgggatgaggagcgctcagccaacggtggctccgaatctgacggggaggagaacatcggctggagcacggtgaac

SEQ ID NO: 606920 - DNA, 120 bp, Artificial Sequence
  ENSG00000175467_15 (sequence is synthesized)
ctggacgaggagaagcagcagcaggatttctctgcttcctccaccaccatcctggacgaggaaccgatcgtgaatagggggctggcagctgccctgctcctgtgtcagaacaaagggctg

SEQ ID NO: 606921 - DNA, 120 bp, Artificial Sequence
  ENSG00000175467_16 (sequence is synthesized)
ctggagaccacagtgcagaaggtggcccgggtgaaggcccccaacaagtcgctgccctcagccgtgtactgcatcgaggataagatggccatcgatgacaagtacagccggagggaggaa

SEQ ID NO: 606922 - DNA, 120 bp, Artificial Sequence
  ENSG00000175467_17 (sequence is synthesized)
taccgaggcttcacacaggacttcaaggagaaggacggctacaaacccgacgttaagatcgaatacgtggatgagacgggccggaaactcacacccaaggaggctttccggcagctgtcg

SEQ ID NO: 606923 - DNA, 120 bp, Artificial Sequence
  ENSG00000175467_18 (sequence is synthesized)
caccgcttccatggcaagggctcaggcaagatgaagacagagcggcggatgaagaagctggacgaggaggcgctcctgaagaagatgagctccagcgacacgcccctgggcaccgtggcc

SEQ ID NO: 606924 - DNA, 120 bp, Artificial Sequence
  ENSG00000175467_19 (sequence is synthesized)
ctgctccaggagaagcagaaggctcagaagaccccctacatcgtgctcagcggcagcggcaagagcatgaacgcgaacaccatcaccaagtgacagcgccctcccgccccggccctgcct

SEQ ID NO: 606925 - DNA, 120 bp, Artificial Sequence
  ENSG00000175467_20 (sequence is synthesized)
caaccttcatattaaataaagctccctccttattttttcctccctggtcgtggtacagattccagggttggatctttggttgggtgtggcacagagtctggctcctgctaggtgagacct

SEQ ID NO: 606926 - DNA, 120 bp, Artificial Sequence
  ENSG00000175467_21 (sequence is synthesized)
ggccatcaaatgacacaaacaactaaacgatggaagagagagcgagcccgggtcctctaaggctccttccttctcccctggctgtcggtcacacctctgcagggccggctctctgataga

SEQ ID NO: 606927 - DNA, 120 bp, Artificial Sequence
  ENSG00000175467_22 (sequence is synthesized)
aagtggaaggcggttttagaaactcatcaccctgctctctcctggcctcgggggctgcacaggtcactgtcctgtaatgtctcccggtcagggcagcccaggactgcccagcctggtggg

SEQ ID NO: 606928 - DNA, 120 bp, Artificial Sequence
  ENSG00000175467_23 (sequence is synthesized)
ctggggattgggctttgggtagggcacaggtgccaccttctgtcctggctgtcctgtgccaccctggtctgtgtctagaggagtgaaactcccagggttgggctgggagtatttggtgca

SEQ ID NO: 606929 - DNA, 120 bp, Artificial Sequence
  ENSG00000175467_24 (sequence is synthesized)
cgcggtatggggagggctgagctcagtgcctcctgggagacttgtcccgtgtacagtgacccagaaagatgagattccttggcctgaactctgtgatagagtgtgactgagctgctgggg

SEQ ID NO: 606930 - DNA, 120 bp, Artificial Sequence
  ENSG00000175467_25 (sequence is synthesized)
gacatgtgagcctcaaatccatagaaagacaaacggccaccttgggtgcccaggatactggtgcctggccccacgtacacccacatacttctcagatggctcccacattttaagatttta

SEQ ID NO: 606931 - DNA, 120 bp, Artificial Sequence
  ENSG00000175467_26 (sequence is synthesized)
aaaatgaaaccaaaaaataaattgaagaaaactgtaaactttaaagaataatcagctgggcgcagtggctcatgcttgtaatcacagcactttaggaggctgaggcaggaggactgtttg

SEQ ID NO: 606932 - DNA, 88 bp, Artificial Sequence
  ENSG00000175467_27 (sequence is synthesized)
atcacagcactttaggaggctgaggcaggaggactgtttgagcccaggagtttgagaccaacctgagtaagggattagccaggcgtgg

SEQ ID NO: 606933 - DNA, 120 bp, Artificial Sequence
  ENSG00000175467_28 (sequence is synthesized)
tgggaggatcacttgaacctgggagacacaggctgcagtgggccctgattgagccaccacactgcagcctaggtgacagtcagaccctgtctcaaaaaaaataaaaaaaatttaaaataa

SEQ ID NO: 606934 - DNA, 120 bp, Artificial Sequence
  ENSG00000175467_29 (sequence is synthesized)
tggagaatgtcgggaatgggggctctgaggaggtggtggctcagtggcttttcaggagccagcctgggtcccaacctgtacctcttgccttgcagcaaaaacctcgctctatcctgtcca

SEQ ID NO: 606935 - DNA, 120 bp, Artificial Sequence
  ENSG00000175467_30 (sequence is synthesized)
ggcctggcattggggtcaatcaacacccgccctgttattatacaccttgtgggcacaggtggctccggccccacccagggccctgcatctcctctcatgccccgcgtccccaggctttcc

SEQ ID NO: 606936 - DNA, 120 bp, Artificial Sequence
  ENSG00000175467_31 (sequence is synthesized)
tctactttgtttttctaagagaggtggctctggggccagcacgggggaggctttctcacatgaaagtgtgctaatcagagttggaaagattgtttaaatcatcttagccaacagttgact

SEQ ID NO: 606937 - DNA, 120 bp, Artificial Sequence
  ENSG00000175467_32 (sequence is synthesized)
tatagaagagaaaactaaaacctaagagtaaagtggcattcactggttagacgcagaccaggctggtgcccatgtttcctgctttggaggccagggcccttcccagtgtcctaggctgcc

SEQ ID NO: 606938 - DNA, 120 bp, Artificial Sequence
  ENSG00000175467_33 (sequence is synthesized)
tggggcagactttgtgtttgggaccactcactcccaccctgtttctcctcttgtctgtctggaaatgcacatggcaccctgtgtctttaatagcccctaacacttgtatctcttgttgtc

SEQ ID NO: 606939 - DNA, 120 bp, Artificial Sequence
  ENSG00000175467_34 (sequence is synthesized)
tttgcaggcggaggcccggcctgccacagggaggccaagcccagggccatgcaatgccccgggccatgcaatgccccagggtcctggctccaccagcctctggctgggggcctggtgaat

SEQ ID NO: 606940 - DNA, 120 bp, Artificial Sequence
  ENSG00000175467_35 (sequence is synthesized)
gccacggatggggagggggccctcagggctgaggaaggctgtgcctcagtttgtctctagtgggcacagcagtctctttgcaagcctggcaggagggtcagacaggcactcgggacctct

SEQ ID NO: 606941 - DNA, 80 bp, Artificial Sequence
  ENSG00000175470_0 (sequence is synthesized)
tgagcgctcggctgcagcggcgcggaggccgtctccctggtctgccgcggtccccgcccgtcccgccgccggctgccatg

SEQ ID NO: 606942 - DNA, 120 bp, Artificial Sequence
  ENSG00000175470_1 (sequence is synthesized)
cccgtcccgccgccggctgccatggcaggagccggaggcggcggctgccccgcgggcggcaacgacttccagtggtgcttctcgcaggtcaagggggccatcgacgaggacgtggccgaa

SEQ ID NO: 606943 - DNA, 120 bp, Artificial Sequence
  ENSG00000175470_2 (sequence is synthesized)
gcggacatcatttccaccgttgagtttaattactctggagatcttcttgcaacaggagacaagggcggcagagttgttatttttcagcgtgaacaagagaataaaagccgccctcattct

SEQ ID NO: 606944 - DNA, 120 bp, Artificial Sequence
  ENSG00000175470_3 (sequence is synthesized)
aggggagaatataatgtttacagcacctttcaaagtcatgaaccggagtttgactatttgaaaagtctagaaattgaggaaaaaattaataaaattaggtggttaccacaacagaatgct

SEQ ID NO: 606945 - DNA, 120 bp, Artificial Sequence
  ENSG00000175470_4 (sequence is synthesized)
gctcattttctactgtctacaaatgataaaactataaaattatggaaaataagtgaacgggataaaagagcagaaggttataacctgaaagacgaagatggaagacttcgagacccattt

SEQ ID NO: 606946 - DNA, 120 bp, Artificial Sequence
  ENSG00000175470_5 (sequence is synthesized)
aggatcacggcgctacgggtcccaatattgaagcccatggatcttatggtagaagcgagtccacggcgaatttttgcaaatgctcacacatatcatataaattccatttcagtaaatagt

SEQ ID NO: 606947 - DNA, 120 bp, Artificial Sequence
  ENSG00000175470_6 (sequence is synthesized)
gatcatgaaacatatctttctgcagatgacctgagaattaatttatggcacttagaaatcacagatagaagctttaacatcgtggacatcaagcctgctaacatggaggagctgaccgaa

SEQ ID NO: 606948 - DNA, 120 bp, Artificial Sequence
  ENSG00000175470_7 (sequence is synthesized)
gtcatcactgcagccgagttccacccgcaccagtgcaacgtgttcgtctacagcagtagcaaagggaccatccgcctgtgtgacatgcgctcctcggccctgtgcgacagacactccaag

SEQ ID NO: 606949 - DNA, 120 bp, Artificial Sequence
  ENSG00000175470_8 (sequence is synthesized)
ttttttgaagagcctgaagatcccagcagtaggtccttcttctcagaaataatttcatccatatccgatgtaaaattcagtcatagtgggcggtacatgatgaccagagactacctgtcg

SEQ ID NO: 606950 - DNA, 120 bp, Artificial Sequence
  ENSG00000175470_9 (sequence is synthesized)
gtgaaggtgtgggacctcaacatggagagcaggccggtggagacccaccaggtccacgagtacctgcgcagcaagctctgctctctctatgagaacgactgcatctttgacaagtttgag

SEQ ID NO: 606951 - DNA, 120 bp, Artificial Sequence
  ENSG00000175470_10 (sequence is synthesized)
tgttgctggaacggttcggatagcgccatcatgaccgggtcctataacaacttcttcaggatgtttgatagagacacgcggagggatgtgaccctggaggcctcgagagagagcagcaaa

SEQ ID NO: 606952 - DNA, 120 bp, Artificial Sequence
  ENSG00000175470_11 (sequence is synthesized)
ccgcgcgccagcctcaaaccccggaaggtgtgtacggggggtaagcggaggaaagacgagatcagtgtggacagtctggacttcaacaagaagatcctgcacacagcctggcaccccgtg

SEQ ID NO: 606953 - DNA, 120 bp, Artificial Sequence
  ENSG00000175470_12 (sequence is synthesized)
gacaatgtcattgccgtggctgccaccaataacttgtacatattccaggacaaaatcaactagagacgcgaacgtgaggaccaagtcttgtcttgcatagttaagccggacatttttctg

SEQ ID NO: 606954 - DNA, 120 bp, Artificial Sequence
  ENSG00000175470_13 (sequence is synthesized)
tcagagaaaaggcatcattgtccgctccattaagaacagtgacgcacctgctacttcccttcacagacacaggagaaagccgcctccgctggaggcccggtgtggttccgcctcggcgag

SEQ ID NO: 606955 - DNA, 120 bp, Artificial Sequence
  ENSG00000175470_14 (sequence is synthesized)
gcgcgagacaggcgctgctgctcacgtggagacgctctcgaagcagagttgacggacactgctcccaaaaggtcattactcagaataaatgtatttatttcagtccgagccttcctttcc

SEQ ID NO: 606956 - DNA, 120 bp, Artificial Sequence
  ENSG00000175470_15 (sequence is synthesized)
aatttatagaccaaaaaattaacatccaagagaaaagttattgtcagataccgctctttctccaactttccctctttctctgccatcacacttgggccttcactgcagcgtggtgtggcc

SEQ ID NO: 606957 - DNA, 120 bp, Artificial Sequence
  ENSG00000175470_16 (sequence is synthesized)
accgtccgtgtcctctcggccttcctccgagtccaggtggactctgtggatgtgtggatgtggcccgagcaggctcaggcggccccactcacccacagcatccgccgccaccccttcggg

SEQ ID NO: 606958 - DNA, 120 bp, Artificial Sequence
  ENSG00000175470_17 (sequence is synthesized)
tgtgagcgctcaataaaaacaacacactataaagtgtttttaaatccaaacagaagtattgtctttttatttaattttattgcatagaatgaagttatgcagggttcttctttggaacta

SEQ ID NO: 606959 - DNA, 120 bp, Artificial Sequence
  ENSG00000175470_18 (sequence is synthesized)
actgtttgagaaatgtgtgtccttctttggcagcgtgggggtatgtgtgcagcatttctgtccccaagctgctgcccgctgtgtttctgtagaagtagcccatcagatacaccaggtaag

SEQ ID NO: 606960 - DNA, 120 bp, Artificial Sequence
  ENSG00000175470_19 (sequence is synthesized)
gtctgggaaaagccagaaccgaggccacctctgagaaagaaaattgcaaggaagaaccaaaattgctgccatccagtaagcctggtttaaagtagcttcaaattcactacagttgaagaa

SEQ ID NO: 606961 - DNA, 120 bp, Artificial Sequence
  ENSG00000175470_20 (sequence is synthesized)
atacgtgcttgctttctaaggcttttgaaaaagcactttggggaaagtatactttttaaacattgctaaaattacatgcatgctaaatttcatcctgcatttcaagccagcaaaattaag

SEQ ID NO: 606962 - DNA, 120 bp, Artificial Sequence
  ENSG00000175470_21 (sequence is synthesized)
caattttaattacacgatgccaccagtacgttggtttattttcaaagtaggatctttgataccagaaatcaagattttccaagacaaataatacagagctgtaccaatgctgagtgacca

SEQ ID NO: 606963 - DNA, 120 bp, Artificial Sequence
  ENSG00000175470_22 (sequence is synthesized)
gtgctgatcccccgtccgcctgtggagatgaaggtgtgtgttgattcctcctgctgctgtggagatggaggtgtgtgctgatcgcccgtcaccctgtctagatgaaggtatgtgctgatt

SEQ ID NO: 606964 - DNA, 120 bp, Artificial Sequence
  ENSG00000175470_23 (sequence is synthesized)
tatgtgctgattgcctgtgcccctgtggagaaggaggtgtgtgctgatcccctgtgccctgtggagatggaggtgtgtgctgctccctcgtgcccctgtggagatggaggtgtgtgctga

SEQ ID NO: 606965 - DNA, 89 bp, Artificial Sequence
  ENSG00000175470_24 (sequence is synthesized)
tggaggtgtgtgctgatcccccatcccatccccctgtctagatgaaggtgtgtgctgattcctcatgcccctgtctggatgaaggtgtg

SEQ ID NO: 606966 - DNA, 88 bp, Artificial Sequence
  ENSG00000175470_25 (sequence is synthesized)
gcgtgctgatcccccatctatccccctgtggagatgaagggatatgctgatcccctgtcccactgtggagatgaaggggtgtgctgat

SEQ ID NO: 606967 - DNA, 120 bp, Artificial Sequence
  ENSG00000175470_26 (sequence is synthesized)
gagatgaaggtgtgtgctgatcccccatctccctgtggagatgaaggggtgtgccaatcccccgcgcccctgtggagatggaggcgtgtgctgatccccatccccctgtggagatgaagg

SEQ ID NO: 606968 - DNA, 120 bp, Artificial Sequence
  ENSG00000175470_27 (sequence is synthesized)
aaggtgtgtgctgatcccccatccccatgtggagatgaaggggtgtgttgatcccctgtccccctgtggagatggtgtgtgctgatccccgtccccctgtggagatgaaggtgtgtgctg

SEQ ID NO: 606969 - DNA, 86 bp, Artificial Sequence
  ENSG00000175470_28 (sequence is synthesized)
tccctgtgaagatgaaggggtgtgctgatcccccgtgcccctgtggacatggaggcgtgtgctgatcccccgtccccctgtggaga

SEQ ID NO: 606970 - DNA, 75 bp, Artificial Sequence
  ENSG00000175470_29 (sequence is synthesized)
tgaaggtgtgtgctgatcccccatccccatgtggagatgaaggggtgtgtgtccccctgtggagatgaaggggtg

SEQ ID NO: 606971 - DNA, 120 bp, Artificial Sequence
  ENSG00000175470_30 (sequence is synthesized)
tggagatggaggtgtgtgctgatccctcgtgcccctgtggagatagaggtgtgtactgatcccctgttcccctatctagatgaaggtgtgtactgctgatcccccgtccccctgtggaga

SEQ ID NO: 606972 - DNA, 70 bp, Artificial Sequence
  ENSG00000175470_31 (sequence is synthesized)
cgtcttcctgtggagatgaaggtgtgtgctgattcctcatgcccctgtggagatggaggtgtgtgctgat

SEQ ID NO: 606973 - DNA, 89 bp, Artificial Sequence
  ENSG00000175470_32 (sequence is synthesized)
tgctgatcccccatccccctgtggagatgaaggggtatgctgatcccctgtccccctgtggggatgaaggtgtgtgctgatctcttgtc

SEQ ID NO: 606974 - DNA, 85 bp, Artificial Sequence
  ENSG00000175470_33 (sequence is synthesized)
tgtgtgtgctgcttcctcgtgcccctgtggagatggaggtgtgtgctggtcccccgtccccctgtggagatggaggtgtgtgctg

SEQ ID NO: 606975 - DNA, 86 bp, Artificial Sequence
  ENSG00000175470_34 (sequence is synthesized)
cccctgtggagatggaggtgtgtgctggtcccccgtcgtccccctgtggagatggaggcgtgtgctgatcccccatccccctgtgg

SEQ ID NO: 606976 - DNA, 64 bp, Artificial Sequence
  ENSG00000175470_35 (sequence is synthesized)
ccccctgtggagatacatcccactgtggagatgaaggcgtgtgctgatcccccatccccctgtg

SEQ ID NO: 606977 - DNA, 89 bp, Artificial Sequence
  ENSG00000175470_36 (sequence is synthesized)
cgtgtgctgatccgccatcccactgtggagatgaaggcgaaggcgtgtgctcatcccccatccccctgtggagatgaaggcgtgtgctg

SEQ ID NO: 606978 - DNA, 82 bp, Artificial Sequence
  ENSG00000175470_37 (sequence is synthesized)
cgtgtgctgatccgcatccccctgtggagatgaaggcgtgtgctcatcccccatccccctgtggagatgaaggcgtgtgctg

SEQ ID NO: 606979 - DNA, 120 bp, Artificial Sequence
  ENSG00000175470_38 (sequence is synthesized)
gagatgaaggtgtgtgttgatcccccatccccctgtggaggtgaaggtgtgtgctgattactaatccacatgggcaagaacaggatgtccgtcattaccctgaatcaatgctaacacagt

SEQ ID NO: 606980 - DNA, 120 bp, Artificial Sequence
  ENSG00000175470_39 (sequence is synthesized)
gccacttgagttcacattaagttagaaattgagaatctaaaggtacctttattttaactaaaaaataatttatatactgtatattgattgtgacacaatttacaaagtctgaggtgtgga

SEQ ID NO: 606981 - DNA, 120 bp, Artificial Sequence
  ENSG00000175470_40 (sequence is synthesized)
acagttatttaagcattagtcaaccctggtccttaagacagttctagtaaaatgggattgtatatatttgttcaactattttgaccaaaaagttcaataaattttaaatgtttaactgga

SEQ ID NO: 606982 - DNA, 120 bp, Artificial Sequence
  ENSG00000175470_41 (sequence is synthesized)
tgctccagaaaatacagcaaggctgcattcggcagacctgctccagatgcatacctagaagtggagtcgaagagtcggaaatcaagttcgttcttttttttttttttttccctgagtttc

SEQ ID NO: 606983 - DNA, 120 bp, Artificial Sequence
  ENSG00000175470_42 (sequence is synthesized)
atctgagatttttttgagccaggattttttagctttaaaaaatatgtatggtcatttgatattcaaatttatagtactgaaattttctctacactgtgctttgttcattaaaacagctct

SEQ ID NO: 606984 - DNA, 120 bp, Artificial Sequence
  ENSG00000175470_43 (sequence is synthesized)
tcgcaggtcaagggggccatcgacgaggacgtggccgaagggcgtggagaggagagctcggggctgctgccacagatcatgctgagccgccagcagctccacctgcccttggctttgctc

SEQ ID NO: 606985 - DNA, 120 bp, Artificial Sequence
  ENSG00000175470_44 (sequence is synthesized)
atccgtggaaatgacaacagcgtgaaaacggcagatgatgtacaaggattatgatgaaaatagtcttgacctcacggaccctctgagaggttcttgaccgttgcaccctcaagggcccac

SEQ ID NO: 606986 - DNA, 120 bp, Artificial Sequence
  ENSG00000175470_45 (sequence is synthesized)
agaccgcactttgagaactgctgcttgaatgcaagctattagcagtaggagtgtcaaggacagggcagacttcaggattaactgttccttctcatctttaccagattgtactggttttgt

SEQ ID NO: 606987 - DNA, 120 bp, Artificial Sequence
  ENSG00000175470_46 (sequence is synthesized)
ctcaaaatacaaaaatagagtgtttattatgtaaagaaaatcaaatgatagaacagctgagaacagctggatcaagagcacagagcggaagttcctcttcatcccactgctgtcctggag

SEQ ID NO: 606988 - DNA, 120 bp, Artificial Sequence
  ENSG00000175470_47 (sequence is synthesized)
tcttcctcaggacccactgctcctaactgtatctttgtagatcattttctatgtgtttatttatttatattttaaaacctagtttgtgtataagcaatcttttttaatccacaaatgtgg

SEQ ID NO: 606989 - DNA, 120 bp, Artificial Sequence
  ENSG00000175470_48 (sequence is synthesized)
aatcttattctagactttgaataagattttctgtattagtcagtattgttttttgctacttcttttcctttcctttccttttttggaaatagggtcttactcctctgtcacccaggctgg

SEQ ID NO: 606990 - DNA, 89 bp, Artificial Sequence
  ENSG00000175470_49 (sequence is synthesized)
caggctggagtgcagtggtgcgatcagagctcactgcagcctgatcaggctcaagcaatcctctccctgttgcactgccatgcccagct

SEQ ID NO: 606991 - DNA, 63 bp, Artificial Sequence
  ENSG00000175470_50 (sequence is synthesized)
atacaagcatgagccatggcatgtggccgccacttgccttttttcattaagagtctataattg

SEQ ID NO: 606992 - DNA, 120 bp, Artificial Sequence
  ENSG00000175470_51 (sequence is synthesized)
attacaggtgtgagtcaccgcacctggtcacgcctggcgtcttttaaagcatctcatttagagccacttgttcttcagacactccaaagacttagagagttcttcctgttccccaagtgc

SEQ ID NO: 606993 - DNA, 120 bp, Artificial Sequence
  ENSG00000175470_52 (sequence is synthesized)
caaagacttagagagttcttcctgttccccaagtgcctttgcacaactggggagccctcctttgctggggccgtccgagtgtggctgtgtcagaggctgctgctaataagtggaactcga

SEQ ID NO: 606994 - DNA, 120 bp, Artificial Sequence
  ENSG00000175471_0 (sequence is synthesized)
ggcgagccagagccgccggcggcgtcctcctccttccaggcccggctctggaagaacctgcagctgggggtgggcaggagcaagggcggcgggggcgggcgcgctgggggtccagagcgc

SEQ ID NO: 606995 - DNA, 120 bp, Artificial Sequence
  ENSG00000175471_1 (sequence is synthesized)
gcgctgggggtccagagcgccgcactgcggacaccccgtcgccctccccgccacccccggtgggcacagggaatgcaccggccagggggagtggtgcaggcagcaggtggagcggcttca

SEQ ID NO: 606996 - DNA, 120 bp, Artificial Sequence
  ENSG00000175471_2 (sequence is synthesized)
ttcaagaagcggaagcaagtgctggaccgagtcttctcctcctcgcagcccaacctgtgctgctcgtcgccggagcccctggagcccggcggcgccggcagagccgagcaggggtccacg

SEQ ID NO: 606997 - DNA, 120 bp, Artificial Sequence
  ENSG00000175471_3 (sequence is synthesized)
ctacgccgccggatccgcgagcatttgctccccgccgtaaaggggcccgcggcggcctcgggagcagcgggagggacgcctcctggcggacgctcccccgactcagctccttcctcttcc

SEQ ID NO: 606998 - DNA, 120 bp, Artificial Sequence
  ENSG00000175471_4 (sequence is synthesized)
tccgcctcatcctccctgtcctcctcgccccagcctcccccgaggggggaccgcgcccgagatgagggtgcacggcgtcagggccccggggcgcacttgtgccaccagaagagctcctct

SEQ ID NO: 606999 - DNA, 120 bp, Artificial Sequence
  ENSG00000175471_5 (sequence is synthesized)
ctgccgggcaccgcctgcctggagcagctgctggagccgccgcctcctcccgcagagccggcgcggagtcccgcggagtctcgggccccggagacgggcgaggagcacggcagcagccag

SEQ ID NO: 607000 - DNA, 120 bp, Artificial Sequence
  ENSG00000175471_6 (sequence is synthesized)
aaaataataaacactgctggaaccagtaatgcagaagtccccttggctgatcccggaatgtaccagctggacattacattaagaaggggtcaaagtttagctgctcgagatcgaggaggg

SEQ ID NO: 607001 - DNA, 120 bp, Artificial Sequence
  ENSG00000175471_7 (sequence is synthesized)
acgagtgatccatatgtgaagtttaaaatcggaggaaaagaagtttttagaagtaagataatacacaagaacctcaaccctgtgtgggaagaaaaagcttgtattctggttgatcatctt

SEQ ID NO: 607002 - DNA, 120 bp, Artificial Sequence
  ENSG00000175471_8 (sequence is synthesized)
agggagccattgtatataaaggtatttgactatgattttggactacaggatgactttatgggctcagcctttctggatctgacacaattggagttaaacaggcccacagatgtgaccctt

SEQ ID NO: 607003 - DNA, 120 bp, Artificial Sequence
  ENSG00000175471_9 (sequence is synthesized)
actctgaaagatcctcattatcctgaccatgatcttggaatcattttgctctcagtcatccttacccctaaagaaggagagtccagggatgtgacaatgctaatgaggaagagttggaaa

SEQ ID NO: 607004 - DNA, 120 bp, Artificial Sequence
  ENSG00000175471_10 (sequence is synthesized)
agatcaagtaaggaactttcagaaaatgaagtggttggatcttatttctctgtgaagtctctcttttggaggacgtgcggcaggccagctcttcctgtcctgggcttctgcagagcagag

SEQ ID NO: 607005 - DNA, 120 bp, Artificial Sequence
  ENSG00000175471_11 (sequence is synthesized)
cttcagaatccttattgcaaaaatgtacaatttcagacccaaagtttacgcctatcagacctacacagaaaatcgcatctttggagaggaatagtcagcatcaccttgattgaagggaga

SEQ ID NO: 607006 - DNA, 120 bp, Artificial Sequence
  ENSG00000175471_12 (sequence is synthesized)
gacctcaaggccatggattccaacgggttgagcgatccctacgtgaagttccggcttgggcatcagaagtacaagagcaagattatgccaaaaacgttgaatcctcagtggagggaacaa

SEQ ID NO: 607007 - DNA, 120 bp, Artificial Sequence
  ENSG00000175471_13 (sequence is synthesized)
tttgattttcacctttatgaagaaagaggaggagtcattgatatcactgcatgggacaaagatgctgggaaaagggatgatttcattggcaggtgccaggtcgacctgtcagccctcagt

SEQ ID NO: 607008 - DNA, 120 bp, Artificial Sequence
  ENSG00000175471_14 (sequence is synthesized)
agggaacagacgcacaagctggagttgcagctggaagagggtgagggacacctggtgctgctggtcactctgacagcatcagccacagtcagcatctctgacctgtctgtcaactccctg

SEQ ID NO: 607009 - DNA, 120 bp, Artificial Sequence
  ENSG00000175471_15 (sequence is synthesized)
gaggaccagaaggaacgagaggagatattaaagagatatagcccattgaggatatttcacaacctgaaagatgtgggatttctccaggtgaaagtcatcagagcggaagggttaatggct

SEQ ID NO: 607010 - DNA, 120 bp, Artificial Sequence
  ENSG00000175471_16 (sequence is synthesized)
gccgacgtcactggaaaaagtgacccattttgtgtggtagaactgaacaacgatagactgctaacacatactgtctacaaaaatctcaatcctgagtggaataaagtcttcacgttcaac

SEQ ID NO: 607011 - DNA, 120 bp, Artificial Sequence
  ENSG00000175471_17 (sequence is synthesized)
attaaagatatccattcagttcttgaagtgacagtttatgatgaagatcgggatcgaagtgctgactttctgggcaaagttgctataccattgctgtctattcaaaatggtgaacagaaa

SEQ ID NO: 607012 - DNA, 120 bp, Artificial Sequence
  ENSG00000175471_18 (sequence is synthesized)
gcctacgtcttgaaaaacaagcagctgacagggccaacaaagggggtcatctatcttgaaatagatgtgatttttaatgctgtgaaagccagcttacgaacattaatacccaaagaacag

SEQ ID NO: 607013 - DNA, 120 bp, Artificial Sequence
  ENSG00000175471_19 (sequence is synthesized)
aagtacattgaagaggaaaacagactctctaaacagctgctactaagaaactttatcagaatgaaacgttgtgtcatggtgctggtaaatgctgcatactacgttaatagttgctttgat

SEQ ID NO: 607014 - DNA, 120 bp, Artificial Sequence
  ENSG00000175471_20 (sequence is synthesized)
tgggattcacccccaaggagtctcgctgcttttgtgctctttctctttgttgtctggaactttgagctctacatgataccactggttttgttgttactattgacatggaactacttcttg

SEQ ID NO: 607015 - DNA, 120 bp, Artificial Sequence
  ENSG00000175471_21 (sequence is synthesized)
ataatatcagggaaagataacaggcaacgtgatacagtagtggaggacatgctagaggacgaggaagaagaagatgacaaagatgacaaggacagtgaaaaaaagggatttataaataaa

SEQ ID NO: 607016 - DNA, 120 bp, Artificial Sequence
  ENSG00000175471_22 (sequence is synthesized)
ggccattgtagccctctgtgtgttcacagccatcctgtactgcattccgctgagatacattgtccttgtctggggcatcaataaatttacaaaaaagcttcggagtccatatgcaattga

SEQ ID NO: 607017 - DNA, 120 bp, Artificial Sequence
  ENSG00000175471_23 (sequence is synthesized)
taacaatgaactacttgacttcctttccagagtcccttcagatgtacaagtggtgcaataccaagaactgaaaccagatccttctcatagcccatataaaagaaagaaaaacaatcttgg

SEQ ID NO: 607018 - DNA, 120 bp, Artificial Sequence
  ENSG00000175471_24 (sequence is synthesized)
ctagccagctcccagcactgaggagaccagcatctgtttgggaagataaaagaaaaagccctcagcctcagcagcatttcctttctttctgctttttatttattttgcctttttatcatg

SEQ ID NO: 607019 - DNA, 120 bp, Artificial Sequence
  ENSG00000175471_25 (sequence is synthesized)
atcgagagaatctgtaaatagtgtacaaaggcatatgtctttgaatatatacttctattgtacagactcaacttgataaaggttttgctactgctgtgtcaaaaccttgttagctgtgga

SEQ ID NO: 607020 - DNA, 120 bp, Artificial Sequence
  ENSG00000175471_26 (sequence is synthesized)
taataatataacacactgaaagaacaaatataagaatgataacactggaagatatattcttatctaattactagtggattaaatactcacctgtgctctgattaaatctacatcaattgt

SEQ ID NO: 607021 - DNA, 120 bp, Artificial Sequence
  ENSG00000175471_27 (sequence is synthesized)
aaatgtcgatttgattttaaagtttttttttaatgcgactattttttatctgaaaagtaatccattacacttttctatgttttatacatttcaaaagggagggaaattccaaagcctgaa

SEQ ID NO: 607022 - DNA, 120 bp, Artificial Sequence
  ENSG00000175471_28 (sequence is synthesized)
taatggaatggatacatttcaatttaacatatattctggctttagatcccgacattcactcctgtgcaaattacttaggtatgacttaggctaattttaagctaataagtgaaggtacat

SEQ ID NO: 607023 - DNA, 120 bp, Artificial Sequence
  ENSG00000175471_29 (sequence is synthesized)
tcactccctcaagagaatcaatactcagaaggttacaaagttttctttatagaatttcaatcaatcattccatctaaaaccttaaaatctctacaggactacataacataaatactgcca

SEQ ID NO: 607024 - DNA, 120 bp, Artificial Sequence
  ENSG00000175471_30 (sequence is synthesized)
gtttataaacgattgcctatctgaatttttatacctaccactactttaatttatacagttagttagcaaattagcaacccagtaagtacagttatcaaaaatactaggaaactatatcca

SEQ ID NO: 607025 - DNA, 120 bp, Artificial Sequence
  ENSG00000175471_31 (sequence is synthesized)
tatcgcttttggtgtcagattgtatctgtgcatctaaaaatattttaataaatactcaagtgctctcagagaaaaaaaaaacctgctttctcattagattactgaaatgctttaattcat

SEQ ID NO: 607026 - DNA, 120 bp, Artificial Sequence
  ENSG00000175471_32 (sequence is synthesized)
actatgattttgttattagtgtgaattttaatgtagagaattcagtgtgctaagtgatatgccagtgtttcactacattcatttattaaaaaaaatcattcttgattatgcatgaaaacc

SEQ ID NO: 607027 - DNA, 120 bp, Artificial Sequence
  ENSG00000175471_33 (sequence is synthesized)
tgttttgtaaaataaaataaactgcttgggggtggtggttgcctttatcaatgtttcactattatcatagaatctatacttaaaaattgcattcccaagactcttaaagtagtttttata

SEQ ID NO: 607028 - DNA, 120 bp, Artificial Sequence
  ENSG00000175471_34 (sequence is synthesized)
tctcactccctggtatactaagggagcataactctggagaaaaaataatttggttggttgagaatgtcttacttccctgacttggtaggggactacactcagttgaaattgcagcagaca

SEQ ID NO: 607029 - DNA, 120 bp, Artificial Sequence
  ENSG00000175471_35 (sequence is synthesized)
atgctttgcactactttattaataataaacttggatggggtaaaagtgggggttatactggaaaaactatagaaaagctaaaagaaatgtatatttcactctaaaggaagattctttaac

SEQ ID NO: 607030 - DNA, 120 bp, Artificial Sequence
  ENSG00000175471_36 (sequence is synthesized)
tttaaagtatttttattttagagataagttgttaaatactatttcttataatagaactattttgatctgtttatatactatgcttgaatgtcaattaaattccctttctacagaaaggct

SEQ ID NO: 607031 - DNA, 120 bp, Artificial Sequence
  ENSG00000175471_37 (sequence is synthesized)
aattaaattccctttctacagaaaggctttgacctcaacatgctttatttaatgtatcatgtttaaaatgacatgcttctgtctgcataccatcactgtttgttgctaaaaacataatgt

SEQ ID NO: 607032 - DNA, 120 bp, Artificial Sequence
  ENSG00000175471_38 (sequence is synthesized)
tccatgaacatgatgttactacagaaagtttattgatgagataactgtttgaaataactttcaattataccttatgtgagacttttatgttctgtgctgacaatgtgtactcaaatgtct

SEQ ID NO: 607033 - DNA, 120 bp, Artificial Sequence
  ENSG00000175471_39 (sequence is synthesized)
ataagcctgatattctacaacctcagatgtatctagtggatagtaaccattaacagatgactaatttgtttcactgtatcaaatttcagatgtttagttcaatggtaatgctgactacac

SEQ ID NO: 607034 - DNA, 120 bp, Artificial Sequence
  ENSG00000175471_40 (sequence is synthesized)
attcactgtattaaatacaaaagaaaataatctttcccacgtataatcagcactccttttttttttttttttggtggttcagagattgatgagggattgtgtgcatattcttaaaaacta

SEQ ID NO: 607035 - DNA, 120 bp, Artificial Sequence
  ENSG00000175471_41 (sequence is synthesized)
tatgtcacttggagaaaaacagatttggtttaaacaaataagacctttttcctgaaactctgactcttatatgaaaatacctctggaggggtgagcaaccaatgacattaacagaggaat

SEQ ID NO: 607036 - DNA, 120 bp, Artificial Sequence
  ENSG00000175471_42 (sequence is synthesized)
aagaactagcttgaggcacaaaagtgatattcagggaaatcttcattgcttttagaaactactacattcacaggctgaaaacagaatatgtatagttaaaattttaactatttatttctt

SEQ ID NO: 607037 - DNA, 120 bp, Artificial Sequence
  ENSG00000175471_43 (sequence is synthesized)
tccccttctcacatagctgcaattctgtcttgagagctgcctgacttgccttcattttgagatctgtgatgtaaatatttcttaagagactgaatgtcactcaaacatctacttggactg

SEQ ID NO: 607038 - DNA, 120 bp, Artificial Sequence
  ENSG00000175471_44 (sequence is synthesized)
attccaagtcgctgctgtgcagagcagcaagtgctccgtgcagggctgttgctatcacttggaggtgaacagcctcttttgccggtattcagtgaagaaagcaagtctaaatatgcagtt

SEQ ID NO: 607039 - DNA, 120 bp, Artificial Sequence
  ENSG00000175471_45 (sequence is synthesized)
tctatggccatgtctgaaatgggtgtgaaggagcttgctctccttggggattgtacatctttcatatcctgcttcctactaggtttgttagagaaaatacagttgtgctacatggccagg

SEQ ID NO: 607040 - DNA, 120 bp, Artificial Sequence
  ENSG00000175471_46 (sequence is synthesized)
gccttgtatgggactttcattaatgtctgagcacatggaacaaagagtgtctacgtccctttgtgttgtaagttaccagaaagttaggcagcctgcttcccatagacgtgttgttgtctc

SEQ ID NO: 607041 - DNA, 120 bp, Artificial Sequence
  ENSG00000175471_47 (sequence is synthesized)
cctaaagaaagcaattgtcattatcgttaagttttagaaaaaaaatctctctctctctgtctctctcagtattctttttgtagctctttcttataataaatatatggtggtactattaag

SEQ ID NO: 607042 - DNA, 120 bp, Artificial Sequence
  ENSG00000175471_48 (sequence is synthesized)
aagagacaggttggttaaaaatcacaacagtataaagatttaggtccacctgcaaaatgtatttttcttatctggcacactaggcttcatcatactataaacatgttagttgtgcagatt

SEQ ID NO: 607043 - DNA, 120 bp, Artificial Sequence
  ENSG00000175471_49 (sequence is synthesized)
cttcatatatcaaagtgtagctttgtctagatatccctctgatttattttcaccatttatatacaaacagaggcatttcaatccatatggtgcatttaggaaaatatgctttttttgctg

SEQ ID NO: 607044 - DNA, 120 bp, Artificial Sequence
  ENSG00000175471_50 (sequence is synthesized)
ttgtattttatcttgtggaatatatgtaaacatggtactatacatggctgcctgtttaagaggtcacctttagcattcgggaaaagggtccttggtacttgcaggttccttaggaacaaa

SEQ ID NO: 607045 - DNA, 120 bp, Artificial Sequence
  ENSG00000175471_51 (sequence is synthesized)
aggatccttttatgtgtactaaacaagaatgtttctataaagacctacatcaaaggtgatttttttcggtcctaatttttaatgcaactatgctgcatgccaacgattcttatgcacctg

SEQ ID NO: 607046 - DNA, 120 bp, Artificial Sequence
  ENSG00000175471_52 (sequence is synthesized)
ggctccatttaggagactgtcagttgcagcattcttctttttttctttctttcctgacaaaattcttggtttggaaaacaattttcagtctctaggatctactataacattaataatata

SEQ ID NO: 607047 - DNA, 120 bp, Artificial Sequence
  ENSG00000175471_53 (sequence is synthesized)
taaactagacggggtagaagaagaattctctacttacccctcacctgcttacacatacacctaagactgctaaaacaaatcaaatgcaaagaaccaaaatgagtcttagcttcggaaagc

SEQ ID NO: 607048 - DNA, 120 bp, Artificial Sequence
  ENSG00000175471_54 (sequence is synthesized)
atgtgcttacactgaaagcaaaattcttttcaaggcttttgaagaaatatgttggaataaagtgagttcaagtctgatgactccaagccctccgcttttaagatactttgtccctattct

SEQ ID NO: 607049 - DNA, 120 bp, Artificial Sequence
  ENSG00000175471_55 (sequence is synthesized)
ttttggcccaacttgccatatattgaggaagccctcttaccccttattatcactataattaccctttcagtctgggtgagaggtgggggaaatggtaattattttttcctttcctaattt

SEQ ID NO: 607050 - DNA, 120 bp, Artificial Sequence
  ENSG00000175471_56 (sequence is synthesized)
ctataattcaaagatattcaatttagacagcactttcattatataagggaagaataatttccactatgttcttgcttcctattgtatgttcatctttcatttcttcctgatagttaaaac

SEQ ID NO: 607051 - DNA, 120 bp, Artificial Sequence
  ENSG00000175471_57 (sequence is synthesized)
tacctagggtcagacctgccttggcttgtggagtcatctctgttgcaataggtggtggtgaatgccctgttctcccaggtttacagaaactggagcccagggcagacatctagctgtgta

SEQ ID NO: 607052 - DNA, 120 bp, Artificial Sequence
  ENSG00000175471_58 (sequence is synthesized)
acctgcagtgccctcactgactagctgtcttaaaagtaactttgcagaatgtgtttgggcctcttgtttcattaaacaaaataaaacaagaacagtattcctttagtggtaggtgattgc

SEQ ID NO: 607053 - DNA, 120 bp, Artificial Sequence
  ENSG00000175471_59 (sequence is synthesized)
tgaaatattagccagaaatttaagacataggtcttacatgaggagatggaccaaaatcaagattccagaagtttattctgcatgaactccctgaagaggagccaagatgctccagtgtat

SEQ ID NO: 607054 - DNA, 120 bp, Artificial Sequence
  ENSG00000175471_60 (sequence is synthesized)
ggctcagtttttaccagtttgttgatttcatgtaaaggtgtttatttatttatttatttttacaaagttgggggcaaatcttttcatttcaggtttgaaaaaaataaacatcatgtgtct

SEQ ID NO: 607055 - DNA, 120 bp, Artificial Sequence
  ENSG00000175471_61 (sequence is synthesized)
tctaaacatttagctggcattaacagcagcacacacccccacctccaaaaaggtgcatcttttggaaaaggggaaaccaaataagttagacatcttgccttaacaatcttaacccaaaaa

SEQ ID NO: 607056 - DNA, 120 bp, Artificial Sequence
  ENSG00000175471_62 (sequence is synthesized)
gtaggaaagcaagtttcatcataaatgaaacactaaagcaaggcttctaagtagactgtaacacagggggaaaaaaaaccaagatattgctaattaacccccagggcagctcctttattt

SEQ ID NO: 607057 - DNA, 120 bp, Artificial Sequence
  ENSG00000175471_63 (sequence is synthesized)
cccacatagaaagcctttcctgcttggaagaagctactaaggtacaagtaaaaaaagcagttgagctggaaaggaggaagaaatgaaggagaaaaagaggaagagggggaaaaaactggg

SEQ ID NO: 607058 - DNA, 120 bp, Artificial Sequence
  ENSG00000175471_64 (sequence is synthesized)
tgtattggttcattgagtcaaggcatacaagttagatcttcaaattactacaacacttttgtcagaaatgtgctttgtttaactccaactttgtttcaggcatcaataaatttacaaaaa

SEQ ID NO: 607059 - DNA, 120 bp, Artificial Sequence
  ENSG00000175471_65 (sequence is synthesized)
actctgaaagatcctcattatcctgaccatgatcttggaatcattttgctctcagtcatccttacccctaaagaaggagagtccagggatgtggaactttcagaaaatgaagtggttgga

SEQ ID NO: 607060 - DNA, 120 bp, Artificial Sequence
  ENSG00000175471_66 (sequence is synthesized)
ttcattaaattcagtaatcatagctgcatgtttctgtggctatagtaacagttatgttgatgtggccattttaaaactcctattttaagacttgactggacagatttgccgtgggcagga

SEQ ID NO: 607061 - DNA, 120 bp, Artificial Sequence
  ENSG00000175471_67 (sequence is synthesized)
acctgatggattgtacaaggtctgagtctaagaatacattttcccccctcagatttccggaacgcaagacatctcagccaatgtatcattttctctgtgacagttaaaaagtaaaatttt

SEQ ID NO: 607062 - DNA, 120 bp, Artificial Sequence
  ENSG00000175471_68 (sequence is synthesized)
acatattgcataattccaaaccccaataggacagccaagaaaagtcctccatgtgaaaaataataatagtaataatctcgaccattctcaatttgattttatctgtcctatagttaattt

SEQ ID NO: 607063 - DNA, 120 bp, Artificial Sequence
  ENSG00000175471_69 (sequence is synthesized)
ttttcaagatatgaaaatcattggtagtagaatgctaccaatgctacttggtaatgctttaacatgtgattcaactggaagtggatgtgacctatttaagagatgttttattatttctga

SEQ ID NO: 607064 - DNA, 120 bp, Artificial Sequence
  ENSG00000175471_70 (sequence is synthesized)
gatttctagcttttaaaagtcacaagtgagaattcgatagatccaaagagtcctttaatatgttcatcttgtggccttttactttgattatttaaaaacttctgatgagaccaactggca

SEQ ID NO: 607065 - DNA, 120 bp, Artificial Sequence
  ENSG00000175471_71 (sequence is synthesized)
gagctagaaaatccaaaagaatactttgctctgagctttagctgggattttcttctctcacattattttggctttttcaggatttcagtttgaagtttaagtagagtcattcttttgaaa

SEQ ID NO: 607066 - DNA, 120 bp, Artificial Sequence
  ENSG00000175471_72 (sequence is synthesized)
tcctttattttattttcatgtttgttcaaatatgagtaccttatgcttccttatagttgccagtttagcagaatacgactttattatgggggcttacaagaagagccttaattatagtaa

SEQ ID NO: 607067 - DNA, 120 bp, Artificial Sequence
  ENSG00000175471_73 (sequence is synthesized)
aagttatacctggaaggaataacttgctattcgcacaactgagtgtatgagatcctactccatccacagctgtgcacctgtgaccatgagattgttcgaatgtttgaaaggataaaatac

SEQ ID NO: 607068 - DNA, 120 bp, Artificial Sequence
  ENSG00000175471_74 (sequence is synthesized)
ttttgagatctgtgatgtaaatatttcttaagagactgaatgtcactcaaacatctacttggactgctaactattatagatattgtgaactactaaatatattcctttagtatcttttag

SEQ ID NO: 607069 - DNA, 120 bp, Artificial Sequence
  ENSG00000175471_75 (sequence is synthesized)
tgagtaaattcactgagtcattatttatattcataaactattactgacattcgttgtgataattcataagaaatgcgtatttgtgcttttaaatttttccccacttatcaaaaagaacat

SEQ ID NO: 607070 - DNA, 120 bp, Artificial Sequence
  ENSG00000175471_76 (sequence is synthesized)
aatagtacttctcattcattctggtactgttccagactcaaactgattgattgattgaatctcccaactcagattatcctagtgcatatagaatgttcaaaaactggaattcctacagaa

SEQ ID NO: 607071 - DNA, 120 bp, Artificial Sequence
  ENSG00000175471_77 (sequence is synthesized)
gtatgaccctgttatagacaacggtcaaaccaatgattgtatactaaaatcaaatctggagttgaagtacagtgagagccaaatttaattgatacatttctaaaattatcttttataaaa

SEQ ID NO: 607072 - DNA, 120 bp, Artificial Sequence
  ENSG00000175471_78 (sequence is synthesized)
tttttattctgcatttaaaagtgaagaaaaactcagaagtaaatgcttatctagggaccacaggagctttttttccactttgatctcatatctaaggtctcctatgctcaaagtagtcta

SEQ ID NO: 607073 - DNA, 120 bp, Artificial Sequence
  ENSG00000175471_79 (sequence is synthesized)
catttgtattaatgttattcaaaggcagtaatttcagcgaataaacttgttaaatgggcctaaatgtttataatgttgactaagcattaagaacaaacaaaaaggtataaggcagttata

SEQ ID NO: 607074 - DNA, 120 bp, Artificial Sequence
  ENSG00000175471_80 (sequence is synthesized)
cctttttgctccagaaatacaagtaaagacagctaccattatacttcttgaaaaacgtctcaggtattgctaaattaatacttgcttaaattcttgggctttaaatgaatagcgtgattt

SEQ ID NO: 607075 - DNA, 120 bp, Artificial Sequence
  ENSG00000175471_81 (sequence is synthesized)
cacactctagtgtgagtgagtgtacagatgatgtctattcgttggtttgattagggtatctagaatcagccttttctaattgctcagtaaagtatgaattaaaaccacatagaaaataat

SEQ ID NO: 607076 - DNA, 120 bp, Artificial Sequence
  ENSG00000175471_82 (sequence is synthesized)
gtggtaaattctttcttacaatagtgtcattcctttcaattataattctttttcctgggatgattggtgtaactcactgaaagaaaacaaaacatttttttttcttttttttttggtgaa

SEQ ID NO: 607077 - DNA, 120 bp, Artificial Sequence
  ENSG00000175471_83 (sequence is synthesized)
aatgttaccctctggtacctcagtttcttttatatagtggcaatttgaatagaggcagtcacataagatttacttcagctgaatggctaaaatttgagaaatactattgaaaaatctcat

SEQ ID NO: 607078 - DNA, 120 bp, Artificial Sequence
  ENSG00000175471_84 (sequence is synthesized)
taaaaaatagtatgcaaataaaaactatcaaatgtccaaagcaatcatacaatgtagaaactaagagcaccatgaaaggtttcctggaacttaatgattctatctgtgcttttcaaagga

SEQ ID NO: 607079 - DNA, 120 bp, Artificial Sequence
  ENSG00000175471_85 (sequence is synthesized)
agatcaagtaaggtaattcttagcttgtgatctttcagcttttcttgttgagcagaactatcatctgctttcccagatctctctcatctcttcaaagtatgctaccagatttcatactat

SEQ ID NO: 607080 - DNA, 120 bp, Artificial Sequence
  ENSG00000175471_86 (sequence is synthesized)
tcaattgttacttttccccataaatttaagccaaccatgtgatgttttttaaatagaaatcacaccgatcaatagcttcaaatcatcctttcactattctctggtcacttctcaacatca

SEQ ID NO: 607081 - DNA, 120 bp, Artificial Sequence
  ENSG00000175471_87 (sequence is synthesized)
ttctcagcatctggtctcaactatatatgcaacagggtctagaaaattgctctgagccaggaataaaatgatgaggctaggggagggacaactccagacagaagaaagattcgcacaatt

SEQ ID NO: 607082 - DNA, 120 bp, Artificial Sequence
  ENSG00000175471_88 (sequence is synthesized)
gaaaattgagtatgaggctttctaaactcagaaattcctgtatcattacatctttatagtatacaataagaacaatttttccccattgtctcttctcactttaagaaataaagtgagagg

SEQ ID NO: 607083 - DNA, 120 bp, Artificial Sequence
  ENSG00000175471_89 (sequence is synthesized)
agtttatggttcctgtaacttactaagccctggctcttcttcaacttgtaagatatgcaaaatataaactaagtgtttaatttgttcagtgatgctgccactgttggacacagatcgata

SEQ ID NO: 607084 - DNA, 120 bp, Artificial Sequence
  ENSG00000175471_90 (sequence is synthesized)
tcaagatgaaacaatttttatatgaatataccttgaaataaatcaaaacgattttacttgtaaaaatcttgtctgctcaaatttctacttagagtcagtattcctttttaataatgacta

SEQ ID NO: 607085 - DNA, 120 bp, Artificial Sequence
  ENSG00000175471_91 (sequence is synthesized)
atttttttagaccctggaacatgacagtctttttccttccattctgattgaatcatgcttttacctaagcttttctttaattttgtcatttttattactgtgaattaatatatatcaaaa

SEQ ID NO: 607086 - DNA, 120 bp, Artificial Sequence
  ENSG00000175471_92 (sequence is synthesized)
tgtttttatatttatggtaatgacttaatctgtttgaacaagtgtctcttactgtacattttctccctaattcctatggcattaatggcattaatgaccaaagaataatttggcttacaa

SEQ ID NO: 607087 - DNA, 120 bp, Artificial Sequence
  ENSG00000175471_93 (sequence is synthesized)
aaaagtcagggctcccattaaaaatcacctttattattttaataaaatgaaaaaggcttattaaggaaggttgctgaatatttctaacttaatgttcactgtgattttcactaatcaaaa

SEQ ID NO: 607088 - DNA, 120 bp, Artificial Sequence
  ENSG00000175471_94 (sequence is synthesized)
ttttcactaatcaaaataaagtttcaagatgttttgaagaaatatttgcactgttcatatttgtattactttttcctttacagttatactttacagttattgttatattaaaagtgtata

SEQ ID NO: 607089 - DNA, 120 bp, Artificial Sequence
  ENSG00000175482_0 (sequence is synthesized)
ctctctcggtttgtctgggtcatcttgtctgcccgccgctggcctggccccgtctgtctctctcagcagctgtctttctcgcgcccactggccggtctctcctcttccccgcagttgcct

SEQ ID NO: 607090 - DNA, 120 bp, Artificial Sequence
  ENSG00000175482_1 (sequence is synthesized)
ccttctctgcctgcctgggtggccgccatgggccggaagcggctcatcactgattcctacccggttgtgaagaggagggaggggcccgctgggcacagcaagggggagctggcacccgag

SEQ ID NO: 607091 - DNA, 120 bp, Artificial Sequence
  ENSG00000175482_2 (sequence is synthesized)
ctaggggaggagccccagccccgcgacgaggaggaagcggagctggagctgctgaggcagtttgacctggcctggcagtacgggccctgcaccgggatcacacggctgcagcgctggtgt

SEQ ID NO: 607092 - DNA, 120 bp, Artificial Sequence
  ENSG00000175482_3 (sequence is synthesized)
cgggccaagcagatgggcttggagcctcccccagaggtgtggcaggtgctgaagacccaccccggagacccccgcttccagtgcagtctctggcatctctatcccctatgaggcaccacg

SEQ ID NO: 607093 - DNA, 120 bp, Artificial Sequence
  ENSG00000175482_4 (sequence is synthesized)
taagacctcctgcccttagctctcttgctcaccacccaagaacctcaggacagaagcgagagcccattgctcctgctcagctcagcccggctgcggaggaacccttggcaggcagaacct

SEQ ID NO: 607094 - DNA, 120 bp, Artificial Sequence
  ENSG00000175482_5 (sequence is synthesized)
ggaggtgtcagaggctcaactcctccatctaaccagcaggctcccagagtccccggaagagcctgcgcagctgaagcagagtgcttctagatggagagtggtcactggggaaaaggacct

SEQ ID NO: 607095 - DNA, 120 bp, Artificial Sequence
  ENSG00000175482_6 (sequence is synthesized)
ggccatcaccttccaatacctgctgcctgtctccctgacccatgatctggcaagttaggcacagtcagacatggacagttgatccatgaggaaaagatgctctcccacctaaggccagga

SEQ ID NO: 607096 - DNA, 120 bp, Artificial Sequence
  ENSG00000175482_7 (sequence is synthesized)
ctggctgagctcccagggcaaggggttcactaatgcttatcaataaagaatattgagcctggaatcctgaccttcagtcctttactgtggccctgctttgactggcagtccctagcaagt

SEQ ID NO: 607097 - DNA, 120 bp, Artificial Sequence
  ENSG00000175482_8 (sequence is synthesized)
taggagatgagagaggcaccactacagctcttttccttcaagaaagtcctaggccgaagagggaggagacagtcatcttgagacggatcaagtcctcggaagagctgagcgacctctggt

SEQ ID NO: 607098 - DNA, 120 bp, Artificial Sequence
  ENSG00000175482_9 (sequence is synthesized)
gccccctggtggcccacagggaaactactcatgactcaccttctggagcagccagggaaaacctacctgactagccagccacctgccttgctaagcggtgcccacctcacaaacatgggt

SEQ ID NO: 607099 - DNA, 120 bp, Artificial Sequence
  ENSG00000175482_10 (sequence is synthesized)
gctttgccagagaaggacccctggggtccatagctcatgaagtccaaacatatctatacattcccagcaagcacctctggcttcccacatcgggggccaccttgatccaaagcagggctg

SEQ ID NO: 607100 - DNA, 120 bp, Artificial Sequence
  ENSG00000175482_11 (sequence is synthesized)
ccaccttgatccaaagcagggctggcgagggtctcaacttgcaggacctgctcagacatgaccatcatctgaggggctttggtaagaaactgatggctgggcgcggtggctcacacctgt

SEQ ID NO: 607101 - DNA, 120 bp, Artificial Sequence
  ENSG00000175482_12 (sequence is synthesized)
cctggatggccaaggtgaaagaggaggtgactagagaagaaggtgtggagggtggtaggagcaggacagaagatgcagtggtagaaaaacccagagaccccatcctttccactcaagctg

SEQ ID NO: 607102 - DNA, 120 bp, Artificial Sequence
  ENSG00000175482_13 (sequence is synthesized)
gtgcttttgggggtgggggaggcgtccctccctggaccccggcaaagcggtggtgaggaaggctgggaggtgaggggcaggagactgaagccaacctcgtactgaagagcagctgtcatt

SEQ ID NO: 607103 - DNA, 120 bp, Artificial Sequence
  ENSG00000175482_14 (sequence is synthesized)
cagtgcaggtcagagacaggccgggagggctttcaggggagccagggccttctccaggcactgtcaccctgctgtcctgacctgagggagaaatggatggagggttggaaggccttgctg

SEQ ID NO: 607104 - DNA, 120 bp, Artificial Sequence
  ENSG00000175482_15 (sequence is synthesized)
agggagaaatggatggagggttggaaggccttgctgaacaggcaagaagattctatgaggtgcctggctcaggaggacacgccactataataattctttttttttgagacagagtcttgc

SEQ ID NO: 607105 - DNA, 120 bp, Artificial Sequence
  ENSG00000175482_16 (sequence is synthesized)
gagaacccacccagccccacggaggcgcctctcccagccagtcacccacacgtctctgaagtcacccaagcgcttgcgtgactctgaccctcaggaactgtctccccccaacacacacat

SEQ ID NO: 607106 - DNA, 120 bp, Artificial Sequence
  ENSG00000175482_17 (sequence is synthesized)
caggcgtgagccaccacacccggccaataattcttacctctacaagctagtggggggcaaaggtacacccaggacccaaggaactatctatttagaactgaggggtttcccaaggactat

SEQ ID NO: 607107 - DNA, 120 bp, Artificial Sequence
  ENSG00000175482_18 (sequence is synthesized)
aggggtttcccaaggactatgggcatggccaagaataagctggtgaaatcagatccagggactcaacaactgattctctgtttctctctctctctctctggggtatccctccctcccacc

SEQ ID NO: 607108 - DNA, 120 bp, Artificial Sequence
  ENSG00000175482_19 (sequence is synthesized)
gaggcaggaggagtggacacggaggggcctagaggaggcccctagaggggcggaggggccgatggaaagggaaaggtggcctgtcctcccctcccgacaccaggtctagctgcggggtgg

SEQ ID NO: 607109 - DNA, 120 bp, Artificial Sequence
  ENSG00000175485_0 (sequence is synthesized)
gacccccaaaatctctccccttatcttccctgtcaggagtcatgcccccatgagccctcaagttgtgcccaccacagaatggcagaaactctacaactcaattccaccttcctacaccca

SEQ ID NO: 607110 - DNA, 120 bp, Artificial Sequence
  ENSG00000175485_1 (sequence is synthesized)
aacttcttcatactgactggctttccagggctaggaagtgcccagacttggctgacactggtctttgggcccatttatctgctggccctgctgggcaatggagcactgccggcagtggtg

SEQ ID NO: 607111 - DNA, 120 bp, Artificial Sequence
  ENSG00000175485_2 (sequence is synthesized)
tggatagactccacactgcaccagcccatgtttctactgttggccatcctggcagccacagacctgggcttagccacatctatagccccagggttgctggctgtgctgtggcttgggccc

SEQ ID NO: 607112 - DNA, 120 bp, Artificial Sequence
  ENSG00000175485_3 (sequence is synthesized)
cgatctgtgccatatgctgtgtgcctggtccagatgttctttgtacatgcactgactgccatggaatcaggtgtgcttttggccatggcctgtgatcgtgctgcggcaatagggcgtcca

SEQ ID NO: 607113 - DNA, 120 bp, Artificial Sequence
  ENSG00000175485_4 (sequence is synthesized)
tgggttatgcagccttggccctggcactgaaagctgtggctattgttgtacctttcccactgctggtggcaaagtttgagcacttccaagccaagaccataggccatacctattgtgcac

SEQ ID NO: 607114 - DNA, 120 bp, Artificial Sequence
  ENSG00000175485_5 (sequence is synthesized)
acatggcagtggtagaactggtggtgggtaacacacaggccaccaacttatatggtctggcactttcactggccatctcaggtatggatattctgggtatcactggctcctatggactca

SEQ ID NO: 607115 - DNA, 120 bp, Artificial Sequence
  ENSG00000175485_6 (sequence is synthesized)
ttgcccatgctgtgctgcagctacctacccgggaggcccatgccaaggcctttggtacatgtagttctcacatctgtgtcattctggccttctacatacctggtctcttctcctacctca

SEQ ID NO: 607116 - DNA, 120 bp, Artificial Sequence
  ENSG00000175485_7 (sequence is synthesized)
cacaccgctttggtcatcacactgtcccaaagcctgtgcacatccttctctccaacatctacttgctgctgccacctgccctcaaccccctcatctatggggcccgcaccaagcagatca

SEQ ID NO: 607117 - DNA, 120 bp, Artificial Sequence
  ENSG00000175485_8 (sequence is synthesized)
gagaccgactcctggaaaccttcacattcagaaaaagcccgttgtaatgtccagtggtaacaatggagcctaagagtggaggtgaggggacaatcggaggggagtctgggggtgtggatc

SEQ ID NO: 607118 - DNA, 120 bp, Artificial Sequence
  ENSG00000175489_0 (sequence is synthesized)
gagtcgctgggtgcagagccagaggaacgccagcgaccccagcagcgctgcggacggtgctggccgtggccgctgcggcccccgtgtccaggtgggccaggacgcagcctctgggcgccg

SEQ ID NO: 607119 - DNA, 120 bp, Artificial Sequence
  ENSG00000175489_1 (sequence is synthesized)
tcgcttttccagcatcgcagaggcaaaagcgtggcagtgggacccaaaaggtaggactgaggctctagaacttgcacctgtgcagggactgcaaaccagacctgggaggaccctttcagc

SEQ ID NO: 607120 - DNA, 120 bp, Artificial Sequence
  ENSG00000175489_2 (sequence is synthesized)
agcccccactccaccctatcccaggacttcccagcgacccgccgttctgggagataccgggagcgtgatcagggggcggggccgtttccaaggcaaccgcttatttgcatagggtcccgt

SEQ ID NO: 607121 - DNA, 120 bp, Artificial Sequence
  ENSG00000175489_3 (sequence is synthesized)
cctggccaacgagggcgccccaaatgttcaggacatagaagaaggggttaactggcccggatctcctcctcgccttccaagcccgctaagcactggggttatctacccattccccagaag

SEQ ID NO: 607122 - DNA, 120 bp, Artificial Sequence
  ENSG00000175489_4 (sequence is synthesized)
gggagactgaggcagcccaccagccaaaggaggcgaccagactggggctgcgttttaccatttcagaagcggcttgagctggtctgagctataataataaacactggcggtggaggcgag

SEQ ID NO: 607123 - DNA, 120 bp, Artificial Sequence
  ENSG00000175489_5 (sequence is synthesized)
ggcgaccacagggctgaggtcagggctaggattccggtgtctctacgtaggttgcttgaatggggggcaccctggcatggacgctgctgttgccgctgctgctgcgggagtcagacagcc

SEQ ID NO: 607124 - DNA, 120 bp, Artificial Sequence
  ENSG00000175489_6 (sequence is synthesized)
tagaaccgtcgtgcaccgtgtcctccgcggatgtggactggaacgcggagttcagtgccacgtgcctgaatttcagtggcctcagcctgagcctgcctcacaaccagtctctgcgggcca

SEQ ID NO: 607125 - DNA, 120 bp, Artificial Sequence
  ENSG00000175489_7 (sequence is synthesized)
gcaacgtgattctccttgacctgtctgggaacggcctgcgagagcttccagtgaccttctttgcccacctgcagaagcttgaggtcctgaacgtgctacgcaaccccttgtctcgtgtgg

SEQ ID NO: 607126 - DNA, 120 bp, Artificial Sequence
  ENSG00000175489_8 (sequence is synthesized)
atggggcgctggccgcccgctgtgaccttgacctgcaggccgactgcaactgtgccctggagtcctggcacgacatccgccgagacaactgctctggccagaagcctctgctctgctggg

SEQ ID NO: 607127 - DNA, 120 bp, Artificial Sequence
  ENSG00000175489_9 (sequence is synthesized)
acacaaccagctcccagcacaacctctctgccttcctggaggtcagctgcgcccctggcctggcctctgcaactatcggggcagtggtggtcagcgggtgcctgcttcttggacttgcca

SEQ ID NO: 607128 - DNA, 120 bp, Artificial Sequence
  ENSG00000175489_10 (sequence is synthesized)
tctggcgatgccgagtggccagaagccgggagctgaacaaaccctgggctgctcaggatgggcccaagcccggtttaggcttgcagccacggtacggcagccggagcgcccccaagcccc

SEQ ID NO: 607129 - DNA, 120 bp, Artificial Sequence
  ENSG00000175489_11 (sequence is synthesized)
aagtggccgtgccatcctgcccctccactcccgactatgagaacatgtttgtgggccagccagcagccgagcaccagtgggatgaacaaggggctcacccttcagaggacaatgactttt

SEQ ID NO: 607130 - DNA, 120 bp, Artificial Sequence
  ENSG00000175489_12 (sequence is synthesized)
acatcaactacaaggacatcgacctggcttcccagcctgtctactgtaacctgcagtcactgggccaggccccaatggatgaagaggagtacgtgatccccgggcactgagcctaagatg

SEQ ID NO: 607131 - DNA, 120 bp, Artificial Sequence
  ENSG00000175489_13 (sequence is synthesized)
tcctaacctccacccagaaccccttcagtccctgctgggtgactcagggcgtcctaacgcctccatggcctcagtttccccatctgaagaatgggtacaggaaaggattgtccttgaggc

SEQ ID NO: 607132 - DNA, 120 bp, Artificial Sequence
  ENSG00000175489_14 (sequence is synthesized)
cccaggaagctctgccgccccctccctgtccctcatgccgctcctcagctccctcagctcctagagggggaagaggagagacccccaacaaggggacaggacggtcactgtgccaatcct

SEQ ID NO: 607133 - DNA, 120 bp, Artificial Sequence
  ENSG00000175489_15 (sequence is synthesized)
gtcatcaccctcctgtggatgtacaggcagtgctcaataaatgcttcgaggctgatgaggctgctggctcagggtgcgtgggttcctcaaggtggggatttctgagttctaagaccaagt

SEQ ID NO: 607134 - DNA, 120 bp, Artificial Sequence
  ENSG00000175489_16 (sequence is synthesized)
gaccaagtctccatctgagactcccaaattgctccccacctcccatccctgtttttttttgttgttgttgtttgtttgtttgtttttgaaactgagtgtcactctgtcacccaggctgga

SEQ ID NO: 607135 - DNA, 120 bp, Artificial Sequence
  ENSG00000175489_17 (sequence is synthesized)
cattcctcccttctgcccctctcagggccccttcccaggtccctgatctccaggcttggcctccagagcagcccacaccaaccccaaaataaaaaaatgtatatattcctttagctctaa

SEQ ID NO: 607136 - DNA, 120 bp, Artificial Sequence
  ENSG00000175497_0 (sequence is synthesized)
aaatattttgcactggaaaaactataatctggagagacagaggagttgagagtgcccctttaaactgcaggactgcaattgatctctgtatgttttctggttttcgtccctttgaaaggg

SEQ ID NO: 607137 - DNA, 120 bp, Artificial Sequence
  ENSG00000175497_1 (sequence is synthesized)
gaatgagagccaggatcattggctgtactgtggagctgtcacatctccatactgaaaaggtacactgcaagtgaatttaaaccgtttttggctttctattgcatattgccaagagctttg

SEQ ID NO: 607138 - DNA, 120 bp, Artificial Sequence
  ENSG00000175497_2 (sequence is synthesized)
agactgatgaaccaagtaaatgctctatttagggctaagtgagatacagattcctccaatctgatagcgtttcagcctccggagtgaggaagcagcagaaacagaagcagcagaagcaac

SEQ ID NO: 607139 - DNA, 120 bp, Artificial Sequence
  ENSG00000175497_3 (sequence is synthesized)
agcagtagcagcggcagcagcaacagcagcagcccctactgaagtccaatagaggagacttgatctctagttcattctggaactccgcctgggattgtgcactgtccagggtcctgaaac

SEQ ID NO: 607140 - DNA, 80 bp, Artificial Sequence
  ENSG00000175497_4 (sequence is synthesized)
aactccgcctgggattgtgcactgtccagggtcctgaaacatgaaccaaactgccagcgtgtcccatcacatcaagtgtc

SEQ ID NO: 607141 - DNA, 120 bp, Artificial Sequence
  ENSG00000175497_5 (sequence is synthesized)
gtgattttagttgtatgctcactcatcactatgtcagtcatcctcttaaccccagatgaactcacaaattcgtcagaaaccagattgtctttggaagacctctttaggaaagactttgtg

SEQ ID NO: 607142 - DNA, 120 bp, Artificial Sequence
  ENSG00000175497_6 (sequence is synthesized)
cttcacgatccagaggctcggtggatcaatgatacagatgtggtgtataaaagcgagaatggacatgtcattaaactgaatatagaaacaaatgctaccacattattattggaaaacaca

SEQ ID NO: 607143 - DNA, 120 bp, Artificial Sequence
  ENSG00000175497_7 (sequence is synthesized)
acttttgtaaccttcaaagcatcaagacattcagtttcaccagatttaaaatatgtccttctggcatatgatgtcaaacagatttttcattattcgtatactgcttcatatgtgatttac

SEQ ID NO: 607144 - DNA, 120 bp, Artificial Sequence
  ENSG00000175497_8 (sequence is synthesized)
aacatacacactagggaagtttgggagttaaatcctccagaagtagaggactccgtcttgcagtacgcggcctggggtgtccaagggcagcagctgatttatatttttgaaaataatatc

SEQ ID NO: 607145 - DNA, 120 bp, Artificial Sequence
  ENSG00000175497_9 (sequence is synthesized)
tactatcaacctgatataaagagcagttcattgcgactgacatcttctggaaaagaagaaataatttttaatgggattgctgactggttatatgaagaggaactcctgcattctcacatc

SEQ ID NO: 607146 - DNA, 120 bp, Artificial Sequence
  ENSG00000175497_10 (sequence is synthesized)
gcccactggtggtcaccagatggagaaagacttgccttcctgatgataaatgactctttggtacccaccatggttatccctcggtttactggagcgttgtatcccaaaggaaagcagtat

SEQ ID NO: 607147 - DNA, 120 bp, Artificial Sequence
  ENSG00000175497_11 (sequence is synthesized)
ccgtatcctaaggcaggtcaagtgaacccaacaataaaattatatgttgtaaacctgtatggaccaactcacactttggagctcatgccacctgacagctttaaatcaagagaatactat

SEQ ID NO: 607148 - DNA, 120 bp, Artificial Sequence
  ENSG00000175497_12 (sequence is synthesized)
atcactatggttaaatgggtaagcaataccaagactgtggtaagatggttaaaccgagctcagaacatctccatcctcacagtctgtgagaccactacaggtgcttgtagtaaaaaatat

SEQ ID NO: 607149 - DNA, 120 bp, Artificial Sequence
  ENSG00000175497_13 (sequence is synthesized)
gagatgacatcagatacgtggctctctcagcagaatgaggagcccgtgttttctagagacggcagcaaattctttatgacagtgcctgttaagcaagggggacgtggagaatttcaccac

SEQ ID NO: 607150 - DNA, 120 bp, Artificial Sequence
  ENSG00000175497_14 (sequence is synthesized)
gtagctatgttcctcatccagagtaaaagtgagcaaattaccgtgcggcatctgacatcaggaaactgggaagtgataaagatcttggcatacgatgaaactactcaaaaaatttacttt

SEQ ID NO: 607151 - DNA, 120 bp, Artificial Sequence
  ENSG00000175497_15 (sequence is synthesized)
ctgagcactgaatcttctcccagaggaaggcagctgtacagtgcttctactgaaggattattgaatcgccaatgcatttcatgtaatttcatgaaagaacaatgtacatattttgatgcc

SEQ ID NO: 607152 - DNA, 120 bp, Artificial Sequence
  ENSG00000175497_16 (sequence is synthesized)
agttttagtcccatgaatcaacatttcttattattctgtgaaggtccaagggtcccagtggtcagcctacatagtacggacaacccagcaaaatattttatattggaaagcaattctatg

SEQ ID NO: 607153 - DNA, 120 bp, Artificial Sequence
  ENSG00000175497_17 (sequence is synthesized)
ctgaaggaagctatcctgaagaagaagataggaaagccagaaattaaaatccttcatattgacgactatgaacttcctttacagttgtcccttcccaaagattttatggaccgaaaccag

SEQ ID NO: 607154 - DNA, 120 bp, Artificial Sequence
  ENSG00000175497_18 (sequence is synthesized)
tatgctcttctgttaataatggatgaagaaccaggaggccagctggttacagataagttccatattgactgggattccgtactcattgacatggataatgtcattgtagcaagatttgat

SEQ ID NO: 607155 - DNA, 120 bp, Artificial Sequence
  ENSG00000175497_19 (sequence is synthesized)
ggcagaggaagtggattccagggtctgaaaattttgcaggagattcatcgaagattaggttcagtagaagtaaaggaccaaataacagctgtgaaatttttgctgaaactgccttacatt

SEQ ID NO: 607156 - DNA, 120 bp, Artificial Sequence
  ENSG00000175497_20 (sequence is synthesized)
gactccaaaagattaagcatttttggaaagggttatggtggctatattgcatcaatgatcttaaaatcagatgaaaagctttttaaatgtggatccgtggttgcacctatcacagacttg

SEQ ID NO: 607157 - DNA, 120 bp, Artificial Sequence
  ENSG00000175497_21 (sequence is synthesized)
aaattgtatgcctcagctttctctgaaagataccttgggatgccatctaaggaagaaagcacttaccaggcagccagtgtgctacataatgttcatggcttgaaagaagaaaatatatta

SEQ ID NO: 607158 - DNA, 120 bp, Artificial Sequence
  ENSG00000175497_22 (sequence is synthesized)
ataattcatggaactgctgacacaaaagttcatttccaacactcagcagaattaatcaagcacctaataaaagctggagtgaattatactatgcaggtctacccagatgaaggtcataac

SEQ ID NO: 607159 - DNA, 120 bp, Artificial Sequence
  ENSG00000175497_23 (sequence is synthesized)
gtatctgagaagagcaagtatcatctctacagcacaatcctcaaattcttcagtgattgtttgaaggaagaaatatctgtgctaccacaggaaccagaagaagatgaataatggactgta

SEQ ID NO: 607160 - DNA, 120 bp, Artificial Sequence
  ENSG00000175497_24 (sequence is synthesized)
tttatacagaactgaagggaatattgaggctcaatgaaacctgacaaagagactgtaatattgtagttgctccagaatgtcaagggcagcttacggagatgtcactggagcagcacgctc

SEQ ID NO: 607161 - DNA, 120 bp, Artificial Sequence
  ENSG00000175497_25 (sequence is synthesized)
agagacagtgaactagcatttgaatacacaagtccaagtctactgtgttgctaggggtgcagaacccgtttctttgtatgagagaggtcaaagggttggtttcctgggagaaattagttt

SEQ ID NO: 607162 - DNA, 120 bp, Artificial Sequence
  ENSG00000175497_26 (sequence is synthesized)
tccccctgtttgttctgtaactagttgctctcattttaatttcactggccaccatcatctttgcatataatgcacaatctatcatctgtcctacagtccctgatctttcatggctgagct

SEQ ID NO: 607163 - DNA, 120 bp, Artificial Sequence
  ENSG00000175497_27 (sequence is synthesized)
gcaatctaacactttactgtacctttataataagtgcaattctttcattgtctattattatgcttaagaaaatattcagttaataaaaaacagagtattttatgtaatttctgtttttaa

SEQ ID NO: 607164 - DNA, 120 bp, Artificial Sequence
  ENSG00000175497_28 (sequence is synthesized)
aaagacattattaaatgggtcaaaggacatatagaaatgtggatttcagcaccttccaaagttcagccagttatcagtagatacaatatctttaaatgaacacacgagtgtatgtctcac

SEQ ID NO: 607165 - DNA, 120 bp, Artificial Sequence
  ENSG00000175497_29 (sequence is synthesized)
aatatatatacacaagtgtgcatatacagttaatgaaactatctttaaatgttattcatgctataaagagtaaacgtttgatgaattagaagagatgctcttttccaagctataatggat

SEQ ID NO: 607166 - DNA, 120 bp, Artificial Sequence
  ENSG00000175497_30 (sequence is synthesized)
gctttgtttaatgagccaaatatgatgaaacattttttccaattcaaattctagctattgctttcctataaatgtttgggttgtgtttggtattgtttttagtggttaatagttttccag

SEQ ID NO: 607167 - DNA, 120 bp, Artificial Sequence
  ENSG00000175497_31 (sequence is synthesized)
ttgcatttaattttttgaatatgataccttgtcacatgtaaattagatacttaaatattaaattatagtttctgataaagaaattttgttaacaatgcaatgccactgagtgctattttg

SEQ ID NO: 607168 - DNA, 120 bp, Artificial Sequence
  ENSG00000175497_32 (sequence is synthesized)
ctcttttggtggagaaggcttttttcaaaactcttggtccttttacttctttctctcagtgcagaatcaattctcattttcatcgtaaaagcaaatagctggattatttcatttgccagt

SEQ ID NO: 607169 - DNA, 120 bp, Artificial Sequence
  ENSG00000175497_33 (sequence is synthesized)
ttctatttagtattccatgcctgcccaattcatctgttactgtttaatttcaattcttctggtgagaattagaaatgaaatattttttattcattggccaaaaagttcacagacagcagt

SEQ ID NO: 607170 - DNA, 120 bp, Artificial Sequence
  ENSG00000175497_34 (sequence is synthesized)
gtttgctatttactttgaattgaaggcacaaaatgcatcaattcctgtgctgtgttgacttgcagtagtaagtaactgagagcataaaataaacctgactgtatgaagtcaatttaagtg

SEQ ID NO: 607171 - DNA, 120 bp, Artificial Sequence
  ENSG00000175497_35 (sequence is synthesized)
atgagaacatttaactttggtgactaaagtcagaatatcttctcacttcacttaagggatcttccagaagatatctaaaagtctgtaataagcttagaagttcagataaatctaggcagg

SEQ ID NO: 607172 - DNA, 120 bp, Artificial Sequence
  ENSG00000175497_36 (sequence is synthesized)
atactgcatttttgtggttttaaaaaagtccttaggacagactgaattatcataacttatggcatcaggaggaaactttaaaatatcaaggaatcactcagtcaccctcctgttttgttg

SEQ ID NO: 607173 - DNA, 120 bp, Artificial Sequence
  ENSG00000175497_37 (sequence is synthesized)
aaggatcaaccccaaattctgggtatttgagtacatgtgaatcatggatttggtattcaactttttccctggatgctttggaatcgtgtcttccatgctccactgggttcaatttaaaat

SEQ ID NO: 607174 - DNA, 120 bp, Artificial Sequence
  ENSG00000175497_38 (sequence is synthesized)
aggagaggctttctcttctgaaagatccattttaggtctttttcaagaatagtgaacacattttttaacaaaataagttgtaattttaaaaggaaagttttgcctattttattaagatgg

SEQ ID NO: 607175 - DNA, 120 bp, Artificial Sequence
  ENSG00000175497_39 (sequence is synthesized)
aaatttctttttaggctaatttgaaatccaactgaagctttttaaccaatattttaaatttgaaccactagagttttttatgatgcaaatgattatgttgtctgaaaggtgtggttttat

SEQ ID NO: 607176 - DNA, 120 bp, Artificial Sequence
  ENSG00000175497_40 (sequence is synthesized)
tgagtatcatttaaaaagtatttgccttttactgtcatcatttctcttgttttattattattatcaatgtttatctatttttcaattaatttaatacagtttctaatgtgaaagacattt

SEQ ID NO: 607177 - DNA, 120 bp, Artificial Sequence
  ENSG00000175497_41 (sequence is synthesized)
tgaaagacatttttctggaacccgttttccccttaaacactaaagagacctcaagtgaaagcatattgcttagtaggaaggtagaaaatgttaatccctgcgattctttgagttttaatg

SEQ ID NO: 607178 - DNA, 120 bp, Artificial Sequence
  ENSG00000175497_42 (sequence is synthesized)
acagggtcattttcagtaaaggaaatgctcaccaacacatagtcaccaactattaaaggaatcatgtgattggattttcccctgtatacatgtacccttggtcataatcccactatttca

SEQ ID NO: 607179 - DNA, 120 bp, Artificial Sequence
  ENSG00000175497_43 (sequence is synthesized)
tacatatttatgcattgctagattttcctaggactccaatagcatgctttccaagtgttattattcccttaatgttaaagaaaaaaatcaatatattgaattctttaattaaataggtaa

SEQ ID NO: 607180 - DNA, 120 bp, Artificial Sequence
  ENSG00000175497_44 (sequence is synthesized)
gcagtattaaatcatccacagagataaacaatctcttgaaactcttttgaaagagaaaagtgtttgttcactttcattgccttcattaagatctccaaatactcagagactaagcaggct

SEQ ID NO: 607181 - DNA, 120 bp, Artificial Sequence
  ENSG00000175497_45 (sequence is synthesized)
attctcatctctttgagtttcctgacagaactaaaggaaggaatcactcttcaaaagatggatctcacttcactctgaaaatgtgcctttttttaattgggtgtttagcataaaaatcac

SEQ ID NO: 607182 - DNA, 120 bp, Artificial Sequence
  ENSG00000175497_46 (sequence is synthesized)
tattggggatcttacagatgtctgttgtagatctattacaatgaggtgacttagacattgggctttaccatattagagaattacttaagccattgtccttcaaatgttgggcttggagac

SEQ ID NO: 607183 - DNA, 120 bp, Artificial Sequence
  ENSG00000175497_47 (sequence is synthesized)
agaagtaccttggactgaattgctttcaagtctctagaatcactgacagcacatagcttctatgaggagttatatatgaaataccacttgtgtccctcctcaagttctctgaccaccttc

SEQ ID NO: 607184 - DNA, 120 bp, Artificial Sequence
  ENSG00000175497_48 (sequence is synthesized)
acatcctgcggccaccaacactgtatggatacaatctggcctctcagctctgctcactttcactttctgttctggggattctctgatactaattttggctacttggtagaaccaagagac

SEQ ID NO: 607185 - DNA, 120 bp, Artificial Sequence
  ENSG00000175497_49 (sequence is synthesized)
aaatcgcttacatgctgcaaaccgatgtgaaggtgttactaacccgctaaaacacaattaatgaaagactgtagcaggtaactgatctttccctcagatattctacatggtccatggaag

SEQ ID NO: 607186 - DNA, 120 bp, Artificial Sequence
  ENSG00000175497_50 (sequence is synthesized)
actctgtgggccgcagaagcccatagctgcatacccttctattttcctcttccccatttcactcttttaagctccctactcctattccctatgatcactttccaaaataaacggcaggtg

SEQ ID NO: 607187 - DNA, 120 bp, Artificial Sequence
  ENSG00000175497_51 (sequence is synthesized)
tgctagctgttgtcttagactctgctttctggaaactatttttcccctccacaagaaattatcactgtgaatattacaggaggagaaataaaataagaataaatcagtggtttattttca

SEQ ID NO: 607188 - DNA, 120 bp, Artificial Sequence
  ENSG00000175497_52 (sequence is synthesized)
aagaaggcacgaggcgtcgccgcagctcggtcaggggccggggccccgccgctcgccgctgcactaacttgccgcttggtctcgcctcgccgccgcggctcgctgcgctttgggtggcgg

SEQ ID NO: 607189 - DNA, 120 bp, Artificial Sequence
  ENSG00000175497_53 (sequence is synthesized)
ggggcggggagagcggggagtcagagggtctgcggtggccgagggagggaccctacgacggggagcccgcccggtgccgctcttcttcccctccccgcccctccgctccccccaccccgt

SEQ ID NO: 607190 - DNA, 120 bp, Artificial Sequence
  ENSG00000175497_54 (sequence is synthesized)
cccttccgccgattccgggagcgacgggcgcccgtgacctgcgaacgctgccaagtgacggtccccgagtctgaagcgcccgcgaggaagcgagcgccagcgcgggccgccggcgatgac

SEQ ID NO: 607191 - DNA, 120 bp, Artificial Sequence
  ENSG00000175497_55 (sequence is synthesized)
ggccgcgaagcaggagccgcagcccaccccgggggccagggcgagccaggcgcagccggcggaccaggaactgggaagtaacagccctccacagagaaactggaagggaattgctattgc

SEQ ID NO: 607192 - DNA, 120 bp, Artificial Sequence
  ENSG00000175497_56 (sequence is synthesized)
agttccaggctctcctgcttctccacggactctgcgggaagttagagcctctgcgtgcgctccggggcccggcgagaggatgcgcaaggtggagagccgcggggaagggggcagagagga

SEQ ID NO: 607193 - DNA, 120 bp, Artificial Sequence
  ENSG00000175497_57 (sequence is synthesized)
aatgcataattttactcagctataactcacctaagcaaaatctggcatgtctagtaactaccggaggacagtaatgactactttgcacaaaagatgtttgaagataatgtccaaacatct

SEQ ID NO: 607194 - DNA, 120 bp, Artificial Sequence
  ENSG00000175497_58 (sequence is synthesized)
tccatatctgcacagcaaataattgggacagtttgcccagtgcctgtgctgatccaagtccatctcttggcagaggagaatgtggcagagtttagcaaatccaacaaatgcgggcttgtg

SEQ ID NO: 607195 - DNA, 120 bp, Artificial Sequence
  ENSG00000175497_59 (sequence is synthesized)
aaagtttcaagataagccttaccatatacttgagtgtttcatgtgtgtacagattagagactttcctagtggctgtgcctagagcttcagatgtgtatattgggaaggcaactgctgaaa

SEQ ID NO: 607196 - DNA, 120 bp, Artificial Sequence
  ENSG00000175497_60 (sequence is synthesized)
atattgcattaaacacttgatgaaagaagacctagaaggctttaagaaagacagggtaatattttgctggtgtagagggcctgctcttcggagacaaatacttgcttttcattttgatca

SEQ ID NO: 607197 - DNA, 120 bp, Artificial Sequence
  ENSG00000175497_61 (sequence is synthesized)
gccgtctgcacttaaaagcctcctagccagggacatgttaattaaacagtctggggctcagtgctgccatccgtaaattggaggattagagaaataatatacacaagtacctggtacata

SEQ ID NO: 607198 - DNA, 120 bp, Artificial Sequence
  ENSG00000175497_62 (sequence is synthesized)
ccaaatatgatagaagatatcttcaacctttagctataagaagaatggaaaatgaaaaagagacaggtggagagagggagggagatgagagctgcgtggagctggtatgctggttaggag

SEQ ID NO: 607199 - DNA, 120 bp, Artificial Sequence
  ENSG00000175497_63 (sequence is synthesized)
gtaggaaataatgaggcctcgaccatctaagatacagaagtctccctgctgaatcgaaaggaagtgctacaatattctttcaaattcatcgcagttgagagaaaactggagcagagtgtg

SEQ ID NO: 607200 - DNA, 120 bp, Artificial Sequence
  ENSG00000175497_64 (sequence is synthesized)
atatcaagaaagggcttcaccaggatgatcaatgcaaatggatatggagctttcttggaatgaaacattatcccgtaacaccaggtatacatacatgaagagtggcttcaggactggatc

SEQ ID NO: 607201 - DNA, 120 bp, Artificial Sequence
  ENSG00000175497_65 (sequence is synthesized)
agagctggggcatgagtccaggcagttttgttccagagtccgtgctcttggtcaccttactttgatgcgtatcctccaccagcacactttgagaaacaccacagtaaggaatacgcacac

SEQ ID NO: 607202 - DNA, 120 bp, Artificial Sequence
  ENSG00000175497_66 (sequence is synthesized)
agatgtgacaactgcccctacaaagcaaatcattcctgtcaattatggatacctgtctcatttattgaaaacctacttcgtgccaaggactctggtagacagacaagttttttaaagcat

SEQ ID NO: 607203 - DNA, 120 bp, Artificial Sequence
  ENSG00000175497_67 (sequence is synthesized)
tacaaaataagtgtgaaaaacaaaatcctaaatgagtcttgattaacccaattgggtctctctgtggcctaatggtggaaccaaatgatgtagcagaaggaaagcaatgtttctgtgttt

SEQ ID NO: 607204 - DNA, 120 bp, Artificial Sequence
  ENSG00000175497_68 (sequence is synthesized)
ccaaatgctcaaactgcttctgagtacaccctgggctccatccagtgcagaacttaagaatttgctcctatgttttttactttttcttttaaaccagtatttatttggaaacaatttcaa

SEQ ID NO: 607205 - DNA, 120 bp, Artificial Sequence
  ENSG00000175497_69 (sequence is synthesized)
attgacagataatatttaaagaataagagtagtataaaagaccttcatatacatttcactcagaatcactgaccattaacattttacctcattaggtccaacagttgcaaattctctctc

SEQ ID NO: 607206 - DNA, 120 bp, Artificial Sequence
  ENSG00000175497_70 (sequence is synthesized)
tctcagtttctctctgtccacataacgtatacacattttttaaaaattaattttaatttttgttttaagcttcagtgtatgtatgtacaggaagtgcaggttcattacataggtaaatgt

SEQ ID NO: 607207 - DNA, 90 bp, Artificial Sequence
  ENSG00000175497_71 (sequence is synthesized)
ttcctaatgctctccctcccccactccaccccctggcaggccccagtgtgtgttgttccctccctgtgtccatgttttctcattgttcag

SEQ ID NO: 607208 - DNA, 120 bp, Artificial Sequence
  ENSG00000175497_72 (sequence is synthesized)
ttgttcagctcccacttataagtgagaccatgtggtgtttggttttctgtttctgccttagtttgctagctctacccatgcccctgcaaaggatatggtcttgttcctttttatggttgc

SEQ ID NO: 607209 - DNA, 120 bp, Artificial Sequence
  ENSG00000175497_73 (sequence is synthesized)
aaggatatggtcttgttcctttttatggttgcatagtattccacagtatgtacacaattttttaaccattagtgccattagcattttcttatgggggaagtattggtactttgtcccagc

SEQ ID NO: 607210 - DNA, 120 bp, Artificial Sequence
  ENSG00000175497_74 (sequence is synthesized)
gagtgacatgcaaggaactgacattgaagtaagattctgtgagggtgaggttgcatttgtagaaagtggttatagtccacttagcaatggtcatcacagaggtggctgagggaccagtag

SEQ ID NO: 607211 - DNA, 120 bp, Artificial Sequence
  ENSG00000175497_75 (sequence is synthesized)
cctcaaaaacaatcaagaattctgaaaactaactaagatgctggagaaattgggagaccatttgttgaagaaatacctactgaatcttggaactgggaagtaacagccctccacagagaa

SEQ ID NO: 607212 - DNA, 120 bp, Artificial Sequence
  ENSG00000175497_76 (sequence is synthesized)
gtacaaaggattctcaggtcaatagctagattttactaaactggccctgaaaattttataattttgattctcaatagcagttttctgtactctagtctgtgagttactggggaacatttg

SEQ ID NO: 607213 - DNA, 120 bp, Artificial Sequence
  ENSG00000175497_77 (sequence is synthesized)
aaggcaagaagaatagcagttaatacggcgtgccaccttctcaccatgcacactggattcgcaggaactgggaagtaacagccctccacagagaaactggaagggaattgctattgctct

SEQ ID NO: 607214 - DNA, 120 bp, Artificial Sequence
  ENSG00000175497_78 (sequence is synthesized)
tcaagaattaacagaaattttaatagccagcacagttctttcccattacttaacttgtgagtatgaaaggtaaaatttctaccagattttcagttgctcttgttttggtccaatatgttg

SEQ ID NO: 607215 - DNA, 120 bp, Artificial Sequence
  ENSG00000175497_79 (sequence is synthesized)
attgttggtgctagtaccttatcagttcattgggctcctttgaaatgctgaggatctgcttacacaggtcaactcctggcagaagcgggttggatacagatgtggtgtataaaagcgaga

SEQ ID NO: 607216 - DNA, 120 bp, Artificial Sequence
  ENSG00000175497_80 (sequence is synthesized)
attaaaaggatgaagatgactaagggaacaaaataacagcttagaataattctctcctttttagagtttttccctaactttgtcaaagtataattaaaaaataaaaatgtctatattttc

SEQ ID NO: 607217 - DNA, 120 bp, Artificial Sequence
  ENSG00000175505_0 (sequence is synthesized)
ctcccactccgccagcctccgggagaggagccgcacccggccggcccggccccagccccatggacctccgagcaggggactcgtgggggatgttagcgtgcctgtgcacggtgctctggc

SEQ ID NO: 607218 - DNA, 120 bp, Artificial Sequence
  ENSG00000175505_1 (sequence is synthesized)
acctccctgcagtgccagctctcaatcgcacaggggacccagggcctggcccctccatccagaaaacctatgacctcacccgctacctggagcaccaactccgcagcttggctgggacct

SEQ ID NO: 607219 - DNA, 120 bp, Artificial Sequence
  ENSG00000175505_2 (sequence is synthesized)
atctgaactacctgggcccccctttcaacgagccagacttcaaccctccccgcctgggggcagagactctgcccagggccactgttgacttggaggtgtggcgaagcctcaatgacaaac

SEQ ID NO: 607220 - DNA, 120 bp, Artificial Sequence
  ENSG00000175505_3 (sequence is synthesized)
tgcggctgacccagaactacgaggcctacagccaccttctgtgttacttgcgtggcctcaaccgtcaggctgccactgctgagctgcgccgcagcctggcccacttctgcaccagcctcc

SEQ ID NO: 607221 - DNA, 120 bp, Artificial Sequence
  ENSG00000175505_4 (sequence is synthesized)
agggcctgctgggcagcattgcgggcgtcatggcagctctgggctacccactgccccagccgctgcctgggactgaacccacttggactcctggccctgcccacagtgacttcctccaga

SEQ ID NO: 607222 - DNA, 120 bp, Artificial Sequence
  ENSG00000175505_5 (sequence is synthesized)
agatggacgacttctggctgctgaaggagctgcagacctggctgtggcgctcggccaaggacttcaaccggctcaagaagaagatgcagcctccagcagctgcagtcaccctgcacctgg

SEQ ID NO: 607223 - DNA, 120 bp, Artificial Sequence
  ENSG00000175505_6 (sequence is synthesized)
gggctcatggcttctgacttctgaccttctcctcttcgctcccccttcaaaccctgctcccactttgtgagagccagccctgtatgccaacacctgttgagccaggagacagaagctgtg

SEQ ID NO: 607224 - DNA, 120 bp, Artificial Sequence
  ENSG00000175505_7 (sequence is synthesized)
ctgggcgtgtgatgcgatcagccctgtctcctccccacctcccaaaggtctaccgagctggggaggaggtacagtaggccctgtcctgtcctgtttctacaggaagtcatgctcgaggga

SEQ ID NO: 607225 - DNA, 120 bp, Artificial Sequence
  ENSG00000175505_8 (sequence is synthesized)
gtgtgaagtggttcaggttggtgcagaggcgctcatggcctcctgcttcttgcctaccacttggccagtgcccacccagcccctcaggtggcacatctggagggcaggggttgaggggcc

SEQ ID NO: 607226 - DNA, 120 bp, Artificial Sequence
  ENSG00000175505_9 (sequence is synthesized)
accaccacacatgcctttctggggtgaagccctttggctgccccactctccttggatgggtgttgctcccttatccccaaatcactctatacatccaattcaggaaacaaacatggtggc

SEQ ID NO: 607227 - DNA, 120 bp, Artificial Sequence
  ENSG00000175505_10 (sequence is synthesized)
aattctacacaaaaagagatgagattaacagtgcagggttggggtctgcattggaggtgccctataaaccagaagagaaaatactgaaagcacaggggcagggacagaccagaccagacc

SEQ ID NO: 607228 - DNA, 120 bp, Artificial Sequence
  ENSG00000175505_11 (sequence is synthesized)
caggagtctccaaagcacagagtggcaaacaaaacccgagctgagcatcaggaccttgcctcgaattgtcttccagtattacggtgcctcttctctgccccctttcccagggtatctgtg

SEQ ID NO: 607229 - DNA, 120 bp, Artificial Sequence
  ENSG00000175505_12 (sequence is synthesized)
ggttgccaggctggggagggcaaccatagccacaccacaggatttcctgaaagtttacaatgcagtagcattttggggtgtagggtggcagctccccaaggccctgccccccagccccac

SEQ ID NO: 607230 - DNA, 120 bp, Artificial Sequence
  ENSG00000175505_13 (sequence is synthesized)
ccactcatgactctaagtgtgttgtattaatatttatttatttggagatgttatttattagatgatatttattgcagaatttctattcttgtattaacaaataaaatgcttgccccagaa

SEQ ID NO: 607231 - DNA, 120 bp, Artificial Sequence
  ENSG00000175505_14 (sequence is synthesized)
acttgctcccaggccagctcgctggcatttgggagaatgtgtcattgcatttactcaagggggaggaggagggaaggttagagatgaggaggcagaggtagggtgggagcagggacctcg

SEQ ID NO: 607232 - DNA, 120 bp, Artificial Sequence
  ENSG00000175513_0 (sequence is synthesized)
acacggggagcctgtggatgaggcagaggcaggacttgggcctgggtctctgcgctaaatgactcctgggcatcctgctgaactctctcccagaaggagattggcctcacataccccact

SEQ ID NO: 607233 - DNA, 120 bp, Artificial Sequence
  ENSG00000175513_1 (sequence is synthesized)
gaccccttcctagcatgctttttgccagacccattgagactggctgaggactggttgccatagagatggcctgttaggcagttctacggtgcggatgggggatggggcaggatggggcag

SEQ ID NO: 607234 - DNA, 120 bp, Artificial Sequence
  ENSG00000175513_2 (sequence is synthesized)
gacaccgatatgctaaatacctaccaacagttggttaggaccccgtcggtgcgaccagggcaggacgtgcggctccaggctccaggaaccagaacggggctgctcaagctgctgtcgacc

SEQ ID NO: 607235 - DNA, 120 bp, Artificial Sequence
  ENSG00000175513_3 (sequence is synthesized)
gtctctcaggacaagcagggctgcctggggagtggtgatggtgtgccaaatcaagacctgcagcagaggtctcagagctcaaggcagacagcaaagaaggaccgcaagcccaggggccag

SEQ ID NO: 607236 - DNA, 120 bp, Artificial Sequence
  ENSG00000175513_4 (sequence is synthesized)
agcaagaaaggacagggctctgaagagtctgaagatcacttcccgcttcttcctcggaaaccctccttccccttccagtgggcctgggagagcatcgccacagatgtccgggctgtgctt

SEQ ID NO: 607237 - DNA, 120 bp, Artificial Sequence
  ENSG00000175513_5 (sequence is synthesized)
cagccaagctccccaacccctggccaccaagccctgcccatgccctcctcgttctcccagcgtcagtccaggcgcaagtccacggccaacctcccagaggcccatggctgctgctggaag

SEQ ID NO: 607238 - DNA, 120 bp, Artificial Sequence
  ENSG00000175513_6 (sequence is synthesized)
acagaggcgcaaaacctgaaggcgagacagcagctgggagcctggggcggtgtctccatccctactggcaaaggggagctaggatcagagccccccagtggtctccagctgcctgggagg

SEQ ID NO: 607239 - DNA, 120 bp, Artificial Sequence
  ENSG00000175513_7 (sequence is synthesized)
aggccaggatcaggatcggcgtccgacaagcaggtccagctgcaaagcctgggtgctgaggaggccgagaggggtctgagttctggggtgctgccccagcgccccaggagggggtcgatc

SEQ ID NO: 607240 - DNA, 120 bp, Artificial Sequence
  ENSG00000175513_8 (sequence is synthesized)
ggaggagcaattttcagaggccacagaggaggctgaggagggagagcacaggactccctgcagaaggagggctggttgtcagagaaaggggcagatttctggagaggaagcctccgatga

SEQ ID NO: 607241 - DNA, 120 bp, Artificial Sequence
  ENSG00000175513_9 (sequence is synthesized)
gggagaagtgcagggccagagccaggggagcagccccagcttcaacaacctccgaaggcgacaatggaggaagacaagggccaaggagctgcaggggccatgggacctggagaagctgca

SEQ ID NO: 607242 - DNA, 120 bp, Artificial Sequence
  ENSG00000175513_10 (sequence is synthesized)
caggcagctacagagagacctggactgtggcccccaaaagctgccctggaagactttgagggctgccttccaggcctccaagcggaatggaaaggcctatgcctcgggatacgatgaaac

SEQ ID NO: 607243 - DNA, 120 bp, Artificial Sequence
  ENSG00000175513_11 (sequence is synthesized)
tttcgtgtctgccaacctccctaatcgcaccttccacaaacgacaggaagccaccaggagcctgctgcaggcctgggagcggcagcggcaggaggagcggcagcaggccgagctgcggcg

SEQ ID NO: 607244 - DNA, 120 bp, Artificial Sequence
  ENSG00000175513_12 (sequence is synthesized)
ggcccggacacagcatgtacagcggcaggtggcccactgcctggcagcctacgcacccagagggagccggggccctggggcggcccagcgcaagctggaggagctgaggcgccaggagcg

SEQ ID NO: 607245 - DNA, 120 bp, Artificial Sequence
  ENSG00000175513_13 (sequence is synthesized)
acagcgctttgctgagtaccaggcggagctgcaaggcatccagcacagggtgcaggcccggcccttcctgttccagcaggctatgcaggccaatgcccggctcaccgtcactcggcgctt

SEQ ID NO: 607246 - DNA, 120 bp, Artificial Sequence
  ENSG00000175513_14 (sequence is synthesized)
ctcccaggtgctgtcagcactggggctggatgaggagcagctgctgtctgaggcaggaaaggtggacagagagggcacccccaggaaacccaggagccacaggtcaatgggggtgagaat

SEQ ID NO: 607247 - DNA, 120 bp, Artificial Sequence
  ENSG00000175513_15 (sequence is synthesized)
ggagcactctcctcagaggcccccaaggacagaacccaccggcagccagcctgacaggcactacaaccccagcctggacccggagtgcagtccctgagataaaattaaaggctttatggc

SEQ ID NO: 607248 - DNA, 120 bp, Artificial Sequence
  ENSG00000175514_0 (sequence is synthesized)
cccaaatggacactaccatggaagctgacctgggtgccactggccacaggccccgcacagagcttgatgatgaggactcctacccccaaggtggctgggacacggtcttcctggtggccc

SEQ ID NO: 607249 - DNA, 120 bp, Artificial Sequence
  ENSG00000175514_1 (sequence is synthesized)
tgctgctccttgggctgccagccaatgggttgatggcgtggctggccggctcccaggcccggcatggagctggcacgcgtctggcgctgctcctgctcagcctggccctctctgacttct

SEQ ID NO: 607250 - DNA, 120 bp, Artificial Sequence
  ENSG00000175514_2 (sequence is synthesized)
tgttcctggcagcagcggccttccagatcctagagatccggcatgggggacactggccgctggggacagctgcctgccgcttctactacttcctatggggcgtgtcctactcctccggcc

SEQ ID NO: 607251 - DNA, 120 bp, Artificial Sequence
  ENSG00000175514_3 (sequence is synthesized)
tcttcctgctggccgccctcagcctcgaccgctgcctgctggcgctgtgcccacactggtaccctgggcaccgcccagtccgcctgcccctctgggtctgcgccggtgtctgggtgctgg

SEQ ID NO: 607252 - DNA, 120 bp, Artificial Sequence
  ENSG00000175514_4 (sequence is synthesized)
ccacactcttcagcgtgccctggctggtcttccccgaggctgccgtctggtggtacgacctggtcatctgcctggacttctgggacagcgaggagctgtcgctgaggatgctggaggtcc

SEQ ID NO: 607253 - DNA, 120 bp, Artificial Sequence
  ENSG00000175514_5 (sequence is synthesized)
cgcccgtgtggccaggaccattctgtcagcctatgtggtcctgaggctgccctaccagctggcccagctgctctacctggccttcctgtgggacgtctactctggctacctgctctggga

SEQ ID NO: 607254 - DNA, 120 bp, Artificial Sequence
  ENSG00000175514_6 (sequence is synthesized)
ggccctggtctactccgactacctgatcctactcaacagctgcctcagccccttcctctgcctcatggccagtgccgacctccggaccctgctgcgctccgtgctctcgtccttcgcggc

SEQ ID NO: 607255 - DNA, 120 bp, Artificial Sequence
  ENSG00000175514_7 (sequence is synthesized)
agctctctgcgaggagcggccgggcagcttcacgcccactgagccacagacccagctagattctgagggtccaactctgccagagccgatggcagaggcccagtcacagatggatcctgt

SEQ ID NO: 607256 - DNA, 120 bp, Artificial Sequence
  ENSG00000175514_8 (sequence is synthesized)
ggcccagcctcaggtgaaccccacactccagccacgatcggatcccacagctcagccacagctgaaccctacggcccagccacagtcggatcccacagcccagccacagctgaacctcat

SEQ ID NO: 607257 - DNA, 120 bp, Artificial Sequence
  ENSG00000175514_9 (sequence is synthesized)
ggcccagccacagtcagattctgtggcccagccacaggcagacactaacgtccagacccctgcacctgctgccagttctgtgcccagtccctgtgatgaagcttccccaaccccatcctc

SEQ ID NO: 607258 - DNA, 120 bp, Artificial Sequence
  ENSG00000175514_10 (sequence is synthesized)
gcatcctaccccaggggcccttgaggacccagccacacctcctgcctctgaaggagaaagccccagcagcaccccgccagaggcggccccgggcgcaggccccacgtgagggtccaggaa

SEQ ID NO: 607259 - DNA, 120 bp, Artificial Sequence
  ENSG00000175518_0 (sequence is synthesized)
gtccaccatgggtgaattatgaatcagtagctatgccaggcctcagctgggccacatctggagaactggggtgagggcacaacatcacaaaatatctggccccagtctggtcactcatcc

SEQ ID NO: 607260 - DNA, 120 bp, Artificial Sequence
  ENSG00000175518_1 (sequence is synthesized)
cttttagggcaacaaggaaactatcctgtggcctgagagcacaatacctgagacaaaggccagcagaaacatttgtctgccctcaccctttctgccccagcttccacctgctccccatct

SEQ ID NO: 607261 - DNA, 120 bp, Artificial Sequence
  ENSG00000175518_2 (sequence is synthesized)
gcccacccactaaagcccatgtggcatgccatctctcgaacatccaggatgtcccagagtggatgtccatcaggtctgctggcagacaaaaatatctcttcaagtgccactcgagtgata

SEQ ID NO: 607262 - DNA, 120 bp, Artificial Sequence
  ENSG00000175518_3 (sequence is synthesized)
gtgaagactgcaggcaaccagaaagactttatggtagctgatgacatctcggtaaggcagttcaaggagatgctattggctcacttccaatgccagatggaccaactagtgctggtcttc

SEQ ID NO: 607263 - DNA, 120 bp, Artificial Sequence
  ENSG00000175518_4 (sequence is synthesized)
atgggttgccttctcaaagaccatgacacactgagccagaggggcatcatggatggccacaccatctacttggtcatcaagtccaagcagggctccagatctctagcccattccttccgg

SEQ ID NO: 607264 - DNA, 120 bp, Artificial Sequence
  ENSG00000175518_5 (sequence is synthesized)
gacctgccaacgaatgatccctgccaccgggacagaaacaccaaaggaaacagcagcagagtgcaccaaccaactggtatgaatcaagctccagtggaactggcccactttgtggggtct

SEQ ID NO: 607265 - DNA, 120 bp, Artificial Sequence
  ENSG00000175518_6 (sequence is synthesized)
gatgcacccaaagtgcatacccaaaacttggaagtgagccacccagagtgcaaagcacagatgctggagaatcctagcatccagcggcttctgtccaacatggagttcatgtggcagttc

SEQ ID NO: 607266 - DNA, 120 bp, Artificial Sequence
  ENSG00000175518_7 (sequence is synthesized)
atttcagaacatctagacacgcaacaattgatgcagcagaacccagaagtttcccgccttcttcttgataattctgagatcctattgcagactctggagctggccaggaaccttgctatg

SEQ ID NO: 607267 - DNA, 120 bp, Artificial Sequence
  ENSG00000175518_8 (sequence is synthesized)
atccaagagataatgcagatccaacaaccttcacaaaaccttgagtatccactgaacccacagccatatctgggcttagagacaatgccaggtgggaataatgccctgggtcagaactat

SEQ ID NO: 607268 - DNA, 120 bp, Artificial Sequence
  ENSG00000175518_9 (sequence is synthesized)
agcatgcaagatccttttggaggaaaccctttcacagctctcctggcaggacaagtgctagaacaagtccagtcttcacccccacctccaccaccatcacaggaacaacaagaccagctc

SEQ ID NO: 607269 - DNA, 120 bp, Artificial Sequence
  ENSG00000175518_10 (sequence is synthesized)
acacagcatcctgcaacccgagtcatctataatagctctggtggtttctcttcaaacacctcagccaatgacacccttaacaaggtcaaccacacttccaaagccaacactgctatgatt

SEQ ID NO: 607270 - DNA, 120 bp, Artificial Sequence
  ENSG00000175518_11 (sequence is synthesized)
tccaccaagggccagagccatatctgtgccactcggcagccagcttggataccagccttacctagcatagagcttacccagcagcttcaagaagaatacaaggatgccactgtttctcta

SEQ ID NO: 607271 - DNA, 120 bp, Artificial Sequence
  ENSG00000175518_12 (sequence is synthesized)
agtagctccagacagacattaaagggtgatctccagctgtcagatgagcagagcagctcccagatcacaggaggcatgatgcagttgcttatgaacaacccctacctggcagctcagatt

SEQ ID NO: 607272 - DNA, 120 bp, Artificial Sequence
  ENSG00000175518_13 (sequence is synthesized)
atgttgttcacaagtatgccccagctgagtgaacagtggaggcagcagctgcccacattcctgcagcagacacagatttctgatctgcttagtgcttaggcaaccctaaagcattccaag

SEQ ID NO: 607273 - DNA, 120 bp, Artificial Sequence
  ENSG00000175518_14 (sequence is synthesized)
caatattgcagattgagcaggccctccagctgctggccacagaggctcctgttcttctgccttgggttgcaccctacctatggggcctgggttggcttcctgcccccagctgcagctatc

SEQ ID NO: 607274 - DNA, 120 bp, Artificial Sequence
  ENSG00000175518_15 (sequence is synthesized)
ctgacacagtgccctgttcctggaatgtttcagatacagctgagcccaagggacctgagtgctgccacaagcctggaacagtcctgcagaggctacaatccccggatggggacccttccc

SEQ ID NO: 607275 - DNA, 120 bp, Artificial Sequence
  ENSG00000175518_16 (sequence is synthesized)
accctctgcaagctcctgagatttgttttagcaaacagatggattctctccaggccatgggatttgggaaccaccatgccaatctacaggcactcattgctactgaaggggacaccaatg

SEQ ID NO: 607276 - DNA, 120 bp, Artificial Sequence
  ENSG00000175518_17 (sequence is synthesized)
ctgctatccgcaagctcaagagatcccagagattctaaccaccatgcctacttgtttgcttgctacctgcctgctgacccacctgaccatctcatttgccttttgcacctttcctgatgc

SEQ ID NO: 607277 - DNA, 120 bp, Artificial Sequence
  ENSG00000175518_18 (sequence is synthesized)
ttccagccaggagaagtcctggaataagagttatcaaccaatgtgtcttgtactgaataatagatcattggtcgtggctgaaacatctgtcaataaaatggctacactcacttgctgcga

SEQ ID NO: 607278 - DNA, 120 bp, Artificial Sequence
  ENSG00000175520_0 (sequence is synthesized)
agaaggcctcaggggtggctgtgtagcaagatgagggaggtttggagccctgcataaagagaaggacgggaccacagctgactgctgtgtccccacagatctgggcctcctgctgccacc

SEQ ID NO: 607279 - DNA, 120 bp, Artificial Sequence
  ENSG00000175520_1 (sequence is synthesized)
atggccaaaggtggagaagccctgccacagggcagcccagcaccagtccaggatccccacctcatcaaggtgacagtgaagacgcccaaagacaaggaggatttctcagttacagacaca

SEQ ID NO: 607280 - DNA, 120 bp, Artificial Sequence
  ENSG00000175520_2 (sequence is synthesized)
tgcactatccagcagctgaaggaagagatatctcagcgctttaaggcccaccccgatcagcttgttctaatctttgctggcaaaatcctcaaggatcctgactcactggcacagtgtgga

SEQ ID NO: 607281 - DNA, 120 bp, Artificial Sequence
  ENSG00000175520_3 (sequence is synthesized)
gtgcgagatggcctcactgtccacctggtcatcaagaggcagcaccgtgccatgggcaatgagtgcccagctgcctctgtccctacccagggcccaagtcctggatcactccctcagcca

SEQ ID NO: 607282 - DNA, 120 bp, Artificial Sequence
  ENSG00000175520_4 (sequence is synthesized)
agctccatttacccagcagatgggccccctgcctttagcttaggtctcctcacaggcctcagtaggctgggcttggcctatcgtggcttccctgaccagccaagctccctgatgcggcag

SEQ ID NO: 607283 - DNA, 120 bp, Artificial Sequence
  ENSG00000175520_5 (sequence is synthesized)
catgtgtctgtgcctgagtttgtgactcagctcattgatgaccccttcatcccgggtctgctgtccaacacaggcctagtacgccagctggttcttgacaacccccatatgcagcagctg

SEQ ID NO: 607284 - DNA, 120 bp, Artificial Sequence
  ENSG00000175520_6 (sequence is synthesized)
atccagcacaaccctgagattgggcatattcttaacaacccggaaattatgcggcagacactggagtttttacgtaaccctgccatgatgcaggagatgatacgtagccaggaccgggtg

SEQ ID NO: 607285 - DNA, 120 bp, Artificial Sequence
  ENSG00000175520_7 (sequence is synthesized)
ctcagtaacttggagagcattcctggtggctacaatgtgctttgcactatgtacacagatattatggacccaatgcttaacgcagtccaggagcagtttggcggcaatccctttgccact

SEQ ID NO: 607286 - DNA, 120 bp, Artificial Sequence
  ENSG00000175520_8 (sequence is synthesized)
gccactactgataatgccaccaccaccaccagccaaccttcaaggatggagaattgtgaccctctccccaacccctggacttccacacatggaggctcaggtagcaggcaaggaaggcag

SEQ ID NO: 607287 - DNA, 120 bp, Artificial Sequence
  ENSG00000175520_9 (sequence is synthesized)
cagtccctaggaacttatctacaggggactgcatctgccctcagccaaagccaggaaccaccaccatcagtaaacagagttcccccatcgtcaccctcatctcaggagcctgggtcaggc

SEQ ID NO: 607288 - DNA, 120 bp, Artificial Sequence
  ENSG00000175520_10 (sequence is synthesized)
cagcctctccccgaggagtcagtagcaatcaagggaaggtcctcctgcccagctttcctgagataccccacagagaacagtactggacaaggtggagaccaagatggtgcagggaaaagc

SEQ ID NO: 607289 - DNA, 120 bp, Artificial Sequence
  ENSG00000175520_11 (sequence is synthesized)
tctactggacatagcacaaacttgcctgatcttgtctcggggctgggagattctgccaacagggttccatttgctcccttatctttttcccccacggcagccattcctggaatccctgag

SEQ ID NO: 607290 - DNA, 120 bp, Artificial Sequence
  ENSG00000175520_12 (sequence is synthesized)
cctccctggctgccatccccggcttatccaagatctctgaggccagatggcatgaatccagctccacagttacaggatgagatacaaccacagctgccactgctgatgcaccttcaggca

SEQ ID NO: 607291 - DNA, 120 bp, Artificial Sequence
  ENSG00000175520_13 (sequence is synthesized)
gccatggcaaacccccgtgccctgcaagccctgcggcagattgagcagggtctacaggtcctagctactgaagcacctcgcctcctactctggttcatgccttgcctagcagggacgggt

SEQ ID NO: 607292 - DNA, 120 bp, Artificial Sequence
  ENSG00000175520_14 (sequence is synthesized)
agtgtggcaggaggtatagagtctagagaagatccccttatgtctgaggatcctctcccaaatccacctcctgaggtgttcccagcactggactctgcagagctgggcttcctttcccct

SEQ ID NO: 607293 - DNA, 120 bp, Artificial Sequence
  ENSG00000175520_15 (sequence is synthesized)
ccctttctccatatgctgcaagatttagttagtacaaatccccagcagctgcagcctgaggctcactttcaggtgcagctggagcaactgcggtccatgggctttctgaatcgtgaagcc

SEQ ID NO: 607294 - DNA, 120 bp, Artificial Sequence
  ENSG00000175520_16 (sequence is synthesized)
aatcttcaggccctcattgctacggggggcgacgtggatgctgctgtggagaagctgagacagtcgtaggagccttattcattcaaaccatacgttttcctctgtgcctttttcccatat

SEQ ID NO: 607295 - DNA, 120 bp, Artificial Sequence
  ENSG00000175520_17 (sequence is synthesized)
cctagttccctagctctcccatttttgaatacagctgcattataaaccaaatttactatgaagtcctttgctgtggaggcaatgttgttccagagtcaacgaggaagactaatggccaaa

SEQ ID NO: 607296 - DNA, 120 bp, Artificial Sequence
  ENSG00000175520_18 (sequence is synthesized)
acatagtggaggtgctgtgtgtgagtcaaccacttgtaccactataccactggggggccccagtctaagctctgcttatgcctatcttgagatgcaattacacccaatttccaatgtgaa

SEQ ID NO: 607297 - DNA, 120 bp, Artificial Sequence
  ENSG00000175520_19 (sequence is synthesized)
cagaaggcctcaggggtggctgtgtagcaagatgagggaggtttggagccctgcataaagagaaggacgggaccacagctgactggatgatcttggtctccaatccccatgcccctagct

SEQ ID NO: 607298 - DNA, 120 bp, Artificial Sequence
  ENSG00000175535_0 (sequence is synthesized)
gcgtgtggaacctgacggaactgccacgatgctgccactttggactctttcactgctgctgggagcagtagcaggaaaagaagtttgctacgaaagactcggctgcttcagtgatgactc

SEQ ID NO: 607299 - DNA, 120 bp, Artificial Sequence
  ENSG00000175535_1 (sequence is synthesized)
cccatggtcaggaattacggaaagacccctccatatattgccttggtctccaaaagatgtcaacacccgcttcctcctatatactaatgagaacccaaacaactttcaagaagttgccgc

SEQ ID NO: 607300 - DNA, 120 bp, Artificial Sequence
  ENSG00000175535_2 (sequence is synthesized)
agattcatcaagcatcagtggctccaatttcaaaacaaatagaaaaactcgctttattattcatggattcatagacaagggagaagaaaactggctggccaatgtgtgcaagaatctgtt

SEQ ID NO: 607301 - DNA, 120 bp, Artificial Sequence
  ENSG00000175535_3 (sequence is synthesized)
caaggtggaaagtgtgaactgtatctgtgtggactggaaaggtggctcccgaactggatacacacaagcctcgcagaacatcaggatcgtgggagcagaagtggcatattttgttgaatt

SEQ ID NO: 607302 - DNA, 120 bp, Artificial Sequence
  ENSG00000175535_4 (sequence is synthesized)
tcttcagtcggcgttcggttactcaccttccaatgtgcatgtcattggccacagcctgggtgcccacgctgctggggaggctggaaggagaaccaatgggaccattggacgcatcacagg

SEQ ID NO: 607303 - DNA, 120 bp, Artificial Sequence
  ENSG00000175535_5 (sequence is synthesized)
gttggacccagcagaaccttgctttcagggcacacctgaattagtccgattggaccccagcgatgccaaatttgtggatgtaattcacacggatggtgcccccatagtccccaatttggg

SEQ ID NO: 607304 - DNA, 120 bp, Artificial Sequence
  ENSG00000175535_6 (sequence is synthesized)
aatggaggagtggaaatgcctggatgtaaaaagaacattctctctcagattgtggacatagacggaatctgggaagggactcgagactttgcggcctgtaatcacttaagaagctacaaa

SEQ ID NO: 607305 - DNA, 120 bp, Artificial Sequence
  ENSG00000175535_7 (sequence is synthesized)
tattacactgatagcatcgtcaaccctgatggctttgctggattcccctgtgcctcttacaacgtcttcactgcaaacaagtgtttcccttgtccaagtggaggctgcccacagatgggt

SEQ ID NO: 607306 - DNA, 120 bp, Artificial Sequence
  ENSG00000175535_8 (sequence is synthesized)
cactatgctgatagatatcctgggaaaacaaatgatgtgggccagaaattttatctagacactggtgatgccagtaattttgcacgttggaggtataaggtatctgtcacactgtctgga

SEQ ID NO: 607307 - DNA, 120 bp, Artificial Sequence
  ENSG00000175535_9 (sequence is synthesized)
aaaaaggttacaggacacatactagtttctttgttcggaaataaaggaaactctaagcagtatgaaattttcaagggcactctcaaaccagatagtactcattccaatgaatttgactca

SEQ ID NO: 607308 - DNA, 120 bp, Artificial Sequence
  ENSG00000175535_10 (sequence is synthesized)
gatgtggatgttggggacttgcagatggttaaatttatttggtataacaatgtgatcaacccaactttacctagagtgggagcatccaagattatagtggagacaaatgttggaaaacag

SEQ ID NO: 607309 - DNA, 120 bp, Artificial Sequence
  ENSG00000175535_11 (sequence is synthesized)
ttcaacttctgtagtccagaaaccgtcagggaggaagttctgctcaccctcacaccgtgttaggagactactgttatttgaccaatgaattgacttctaataaaatctagtggtgatgca

SEQ ID NO: 607310 - DNA, 120 bp, Artificial Sequence
  ENSG00000175536_0 (sequence is synthesized)
gcggacgcaacggtgggcacgatgcggcaacccgccgttcggttggtgcgcctgggtcgggtgccgtacgccgagctactggggctgcaggaccgctggctgcggcggctgcaggccgag

SEQ ID NO: 607311 - DNA, 120 bp, Artificial Sequence
  ENSG00000175536_1 (sequence is synthesized)
ccaggcattgaggccccgtcggggactgaggcgggcgcgctcctgctctgcgagcccgcggggcccgtgtatacggccgggctgcgcggcggcctgacgcccgaggaaactgcgcggcta

SEQ ID NO: 607312 - DNA, 120 bp, Artificial Sequence
  ENSG00000175536_2 (sequence is synthesized)
cgggccttgggcgccgaggtgcgcgtcacaggccgcggtggcctggccaccttccacggcccgggccagctgctttgccacccggtactcgacctgcggcgtctcggcctgcgcttgcgc

SEQ ID NO: 607313 - DNA, 120 bp, Artificial Sequence
  ENSG00000175536_3 (sequence is synthesized)
atgcacgtagcgtcgctggaggcgtgcgccgtgcgcctgtgcgagctccagggcctgcaggacgcccgcgcgcggcccccgccctacactggcgtctggctagacgatcgcaagatctgc

SEQ ID NO: 607314 - DNA, 120 bp, Artificial Sequence
  ENSG00000175536_4 (sequence is synthesized)
gcgatcggagtccgctgtggaaggcacatcacatcccacggcctggctctcaactgctctaccgacctcacgtggtttgagcacatcgtgccctgtggactggttgggacaggcgtcact

SEQ ID NO: 607315 - DNA, 120 bp, Artificial Sequence
  ENSG00000175536_5 (sequence is synthesized)
tccttgagtaaggagctccagaggcacgtcaccgtggaagaagtaatgccacctttccttgtggcctttaaggagatctacaagtgcacactgatctcagaggacagccccaactgaaga

SEQ ID NO: 607316 - DNA, 120 bp, Artificial Sequence
  ENSG00000175536_6 (sequence is synthesized)
gtactcataacagccaggatgctcctgccttgggaagcatgaagtctgacttgagtcacctactgaaacccagattttagacctggcctgtcattcactgatcatgaaactaaggacata

SEQ ID NO: 607317 - DNA, 120 bp, Artificial Sequence
  ENSG00000175536_7 (sequence is synthesized)
ccatgagctctgagccactattttcatatgtatcctgttttatttatatcttccccacctacctcagagatactagatgtgacaatactgtgaaaagcaacacatgctatataaaacatt

SEQ ID NO: 607318 - DNA, 120 bp, Artificial Sequence
  ENSG00000175536_8 (sequence is synthesized)
agcactgctattgacagcagtgtctcagagaaattcagatgtcatagattgttatttctcgattgttgatgtcatagattgtcatttctcaattgttgcttcctcaatactgtgtctaac

SEQ ID NO: 607319 - DNA, 120 bp, Artificial Sequence
  ENSG00000175536_9 (sequence is synthesized)
tggcccaggtgaaggtgatgtgatgtagtgctttttcattctcaagagacctgggttctttctgcaataaagggaaaagggaagaaccttctaagaataaaatgggatcttaccttcctg

SEQ ID NO: 607320 - DNA, 120 bp, Artificial Sequence
  ENSG00000175536_10 (sequence is synthesized)
ggtttgattccccaagtttgataatttagcagtttttagttgggttaccctgagctaggccaaagactggaggaaggataagaataatttctcacactgtacaaatgccaaagatagaag

SEQ ID NO: 607321 - DNA, 120 bp, Artificial Sequence
  ENSG00000175536_11 (sequence is synthesized)
tgagtttttcttatatgagacctctaaatttgtaaggctgcgtattatctgttgctgtgtaacaaatcatcaaaacttagtgacttaacagtaaacattaattatctcgtttgtgggtca

SEQ ID NO: 607322 - DNA, 120 bp, Artificial Sequence
  ENSG00000175536_12 (sequence is synthesized)
ggaatttgggggaagcttagctgggtgtttctaggttagggtctcacacgaacttgcagttaagatgtcagctggaactgcacttattcaaaggcttggctgggctggaggatcagcgct

SEQ ID NO: 607323 - DNA, 120 bp, Artificial Sequence
  ENSG00000175536_13 (sequence is synthesized)
ccatatggtgcattcacttgcgtggttggttatggttgctgacaagaggcctcagttccttaccgtgtggacctccctatagggttgcttaattgttctcatgacagggcaactggcttc

SEQ ID NO: 607324 - DNA, 120 bp, Artificial Sequence
  ENSG00000175536_14 (sequence is synthesized)
ccctagagcaagtcatgccaaagagagacaagctggaagccacaatgttttttatgacccagcctcagaagtcacacaggcatttctgtagtcttctaacagatgagccctgttcagtgt

SEQ ID NO: 607325 - DNA, 120 bp, Artificial Sequence
  ENSG00000175536_15 (sequence is synthesized)
ggaagggactgcactagggcaacagaaggtgaggattattaggggccatcttgaagaatggccaccacagcctattaagagtggaaagagcctcgaatgagaagtcaggggaccctggtt

SEQ ID NO: 607326 - DNA, 120 bp, Artificial Sequence
  ENSG00000175536_16 (sequence is synthesized)
ccagttctggctctgtggaaaagtcatttactctctggtcttcagtttctccttaaaccagtgctgttcaatagaaatacaatgcaagccacattgtaatttgacattttctaggatcca

SEQ ID NO: 607327 - DNA, 120 bp, Artificial Sequence
  ENSG00000175536_17 (sequence is synthesized)
tattttattttatttttattttttttaagaaatgaggctttgctatgttgcccaagctggtctcagactcctgggctcaagggatccttctgcctcagcctcacaaagtgctggaattac

SEQ ID NO: 607328 - DNA, 77 bp, Artificial Sequence
  ENSG00000175536_18 (sequence is synthesized)
atgttgcccaagctggtctcagactcctgggctcaagggatccttctgcctcagcctcatgatgttaattttaatat

SEQ ID NO: 607329 - DNA, 120 bp, Artificial Sequence
  ENSG00000175536_19 (sequence is synthesized)
agggcctgcaggacgcccgcgcgcggcccccgccctacactggcgtctggctagacgatcgcaagatctgcgcgatcggtgagcgccgcggagcagggcggtacctgagagccgaggagt

SEQ ID NO: 607330 - DNA, 120 bp, Artificial Sequence
  ENSG00000175538_0 (sequence is synthesized)
gggcagggggaggggacgcccgggggagggaaaagggagccgagcgcgggtgggagcccagagccagagagcgcgctgggcggtgctgggcacccgcggagtggaacggggctggtggaa

SEQ ID NO: 607331 - DNA, 120 bp, Artificial Sequence
  ENSG00000175538_1 (sequence is synthesized)
gtggaacggggctggtggaatgcacagggtcgcagcgcttgggccaccctcggtcagagggcgccgtgtccagcgagcaaacgggcgccccggagccttgctgagaggcagctctgggct

SEQ ID NO: 607332 - DNA, 120 bp, Artificial Sequence
  ENSG00000175538_2 (sequence is synthesized)
ttcccagctccgaagtcaatactgagatcccagatgtgtccagagacatcctgaagaggctcgggggtggaggagccttagtgtgtccacaaagggactcctgaaactgactgagagcca

SEQ ID NO: 607333 - DNA, 120 bp, Artificial Sequence
  ENSG00000175538_3 (sequence is synthesized)
gtggatttgccagcagtctgagcttctaccgagtcttcccccacctcaatccctgttgctatggagactaccaatggaacggagacctggtatgagagcctgcatgccgtgctgaaggct

SEQ ID NO: 607334 - DNA, 120 bp, Artificial Sequence
  ENSG00000175538_4 (sequence is synthesized)
ctaaatgccactcttcacagcaatttgctctgccggccagggccagggctggggccagacaaccagactgaagagaggcgggccagcctacctggccgtgatgacaactcctacatgtac

SEQ ID NO: 607335 - DNA, 120 bp, Artificial Sequence
  ENSG00000175538_5 (sequence is synthesized)
attctctttgtcatgtttctatttgctgtaactgtgggcagcctcatcctgggatacacccgctcccgcaaagtggacaagcgtagtgacccctatcatgtgtatatcaagaaccgtgtg

SEQ ID NO: 607336 - DNA, 120 bp, Artificial Sequence
  ENSG00000175538_6 (sequence is synthesized)
tctatgatctaacacgagagggctgggacggtggaagaccaagacacctggggattgcgtctggggcctccagaactctgctgtggactgcatcaggtctcagtgtccctatctgtaaga

SEQ ID NO: 607337 - DNA, 120 bp, Artificial Sequence
  ENSG00000175538_7 (sequence is synthesized)
tcaacaagaaacacggttaagggaggtcgtcactggggtgggagaagaggggctggtagaccgaagccttgtgcataaggattttttcccaggaaaagatagactttataaacagtggga

SEQ ID NO: 607338 - DNA, 120 bp, Artificial Sequence
  ENSG00000175538_8 (sequence is synthesized)
gcccatgaacaaacatataaaagtagcaacagataatgaccaataactggttcagtggctggagtattaggggcctggggattggagaacggagaagaagttgtagcagagggaaatgag

SEQ ID NO: 607339 - DNA, 120 bp, Artificial Sequence
  ENSG00000175538_9 (sequence is synthesized)
acaggaagatgctctggggacacattttttatgtgttatcttcagccatgagaagcagtgatgactatcccatatcacagatatgatttaccaccaccaccctgcccccgctcccgtgaa

SEQ ID NO: 607340 - DNA, 120 bp, Artificial Sequence
  ENSG00000175538_10 (sequence is synthesized)
gaaagcagggcaagtgctgtgctgcccatttgggcctgcatagtgccatgattggaacccaggaactctggtctccttgcctagtgcttttcaaaactctgtgctacacaggagtggatc

SEQ ID NO: 607341 - DNA, 120 bp, Artificial Sequence
  ENSG00000175538_11 (sequence is synthesized)
caggcctgaaggtcatacaattctggggactctctttaagaaaaagaattctaaaatatcttacttttgcaaacattatgaaaatatactgccacattaatatgttgctagggcccctgc

SEQ ID NO: 607342 - DNA, 120 bp, Artificial Sequence
  ENSG00000175538_12 (sequence is synthesized)
taggaccttaagaaggagctcatgtgagtcaggaccctgaatgttaggcctcgttagctctatggttcatatgcttcttgaaccaagtcacagggcacttcccagccacattgccaggca

SEQ ID NO: 607343 - DNA, 81 bp, Artificial Sequence
  ENSG00000175538_13 (sequence is synthesized)
agccacattgccaggcaacaggactaaactacctccaaagcaagcagtcttttcagttttgactgagtgatgtgagaaatc

SEQ ID NO: 607344 - DNA, 120 bp, Artificial Sequence
  ENSG00000175538_14 (sequence is synthesized)
aggctggtctcgaactcctgtcctcaagttatctgcccattttggtctcccaaagtgctgggattacaagtgtaagccaccacgactatctgagagaagttttctgatgtcatgttgaat

SEQ ID NO: 607345 - DNA, 120 bp, Artificial Sequence
  ENSG00000175538_15 (sequence is synthesized)
cccaaagtgctgggattacaagtgtaagccaccacgactatctgagagaagttttctgatgtcatgttgaatctgcttctaaaagactgatactgccaaggtgggcggatcacctgaggt

SEQ ID NO: 607346 - DNA, 64 bp, Artificial Sequence
  ENSG00000175538_16 (sequence is synthesized)
aatacaaaaattagccagacctggtggcgggtgcccgtattcccagctacttgggaggctgagg

SEQ ID NO: 607347 - DNA, 84 bp, Artificial Sequence
  ENSG00000175538_17 (sequence is synthesized)
gcaaggctcttgatatcgcacctaaattattattatattaaaagaagcagagtatgagagacaggtacatggtccagtaggaag

SEQ ID NO: 607348 - DNA, 120 bp, Artificial Sequence
  ENSG00000175538_18 (sequence is synthesized)
aagcagagtatgagagacaggtacatggtccagtaggaagagaagcagccctgattctaccacttaaggtgatgtatgatcttaggctggacacttctctccctcatccgttttcctctt

SEQ ID NO: 607349 - DNA, 120 bp, Artificial Sequence
  ENSG00000175538_19 (sequence is synthesized)
caacataatgaaatagacttgaaagtctctaaggctctatcagttctgacattctaggcttcatatacattaagttgagccatatgtaatcactgtgtttgtaggttagaaacagctgag

SEQ ID NO: 607350 - DNA, 120 bp, Artificial Sequence
  ENSG00000175538_20 (sequence is synthesized)
tatcgtagtttcatatatggttccagctaatacatgcaatgtggctggtgaacacttctgaattcagaaactatcccagatctcagctagaaccatccactgttctgtttgtccagtttc

SEQ ID NO: 607351 - DNA, 120 bp, Artificial Sequence
  ENSG00000175538_21 (sequence is synthesized)
aacttaagggatctccatgcggtccctggaagtacccattgaaacatgcgtatttgtgtatagcagaactctgaaataatattctgacagcagttatctctgaggaattgggttataggt

SEQ ID NO: 607352 - DNA, 120 bp, Artificial Sequence
  ENSG00000175538_22 (sequence is synthesized)
gattttccctttccgcatgataaatttatgtaatatttgactgacttgaccgtaagtatgttacttgtataataaaaggaaaaaaggtacttctattttgaaaaaataaaaataaaagcc

SEQ ID NO: 607353 - DNA, 120 bp, Artificial Sequence
  ENSG00000175538_23 (sequence is synthesized)
tttgggttcttgaatggaggatcatggaacacatttgctgccatatgcagttatgttgatgctctgcaaacctgtgctgagccctgttgctcaagcccttcctcatctcttcttgaggga

SEQ ID NO: 607354 - DNA, 120 bp, Artificial Sequence
  ENSG00000175538_24 (sequence is synthesized)
gaaggtggagacttccttaaggagatgtgacatatgggaagacaacagattcagaaatttacgtggataggactttagacaccacccagcccaaacttccaaataaaatatggaacgcaa

SEQ ID NO: 607355 - DNA, 120 bp, Artificial Sequence
  ENSG00000175538_25 (sequence is synthesized)
tcacccagtgaagacactgtaagtctggaggtaggggacagcaatcagaggccctttggtcactgcacagttcctttaactgcaaccctaggctggcctgacccagctgctgcaggaagg

SEQ ID NO: 607356 - DNA, 120 bp, Artificial Sequence
  ENSG00000175538_26 (sequence is synthesized)
ggaggggccatgggagggggtcagagcccacagcaggactgttgcataatccttggggcctggccttgggcaatccaccctggttctgaagtttgtgctttgtgtctggttccttccttt

SEQ ID NO: 607357 - DNA, 120 bp, Artificial Sequence
  ENSG00000175544_0 (sequence is synthesized)
cataagcagctttatgggtcctgaaagccaagggtgcccaggggtgtggtgtctctgagccctgttatccctcccccatgaccacagagcaggcaagggggcagcagggcccaaatctgg

SEQ ID NO: 607358 - DNA, 120 bp, Artificial Sequence
  ENSG00000175544_1 (sequence is synthesized)
ccattggccgtcagaagccccctgcgggggttgtgactcccaagagtgatgcagaggagcccccgttgaccaggaagaggagcaagaaggagagggggctccgagggtctcgaaagcgca

SEQ ID NO: 607359 - DNA, 120 bp, Artificial Sequence
  ENSG00000175544_2 (sequence is synthesized)
ctggcagctctggggagcagacaggccccgaggccccggggagcagcaataaccctcccagcactggagaggggccggcgggcgcaccccctgcatcccctgggccggcctcttctcgcc

SEQ ID NO: 607360 - DNA, 120 bp, Artificial Sequence
  ENSG00000175544_3 (sequence is synthesized)
agtcccaccgacatcgtcctgactccctgcacgacgctgctcagaggacatacgggcccctgctcaatcgagtcttcgggaaggaccgcgaactgggccccgaggagctagacgagcttc

SEQ ID NO: 607361 - DNA, 120 bp, Artificial Sequence
  ENSG00000175544_4 (sequence is synthesized)
aggccgccttcgaggagtttgacactgaccgtgacggctacatcagccaccgggagctgggtgactgcatgcggaccctgggctacatgcccaccgagatggagctcctggaggtctcgc

SEQ ID NO: 607362 - DNA, 120 bp, Artificial Sequence
  ENSG00000175544_5 (sequence is synthesized)
agcacatcaagatgcgcatgggcggccgtgtggactttgaggagtttgtagaactgataggcccaaagctgagggaggagacggcgcacatgctgggggtgcgagagctgcgcatcgcct

SEQ ID NO: 607363 - DNA, 120 bp, Artificial Sequence
  ENSG00000175544_6 (sequence is synthesized)
tccgagagtttgacagggacagggatggacgaattacggtggcggagctgcgggaggcggtaccggctctgctcggggagccgctggcgggtcctgagctggacgagatgctccgagaag

SEQ ID NO: 607364 - DNA, 120 bp, Artificial Sequence
  ENSG00000175544_7 (sequence is synthesized)
tggacctcaatggggatggcaccgtagactttgacgagtttgtgatgatgctctcccgccactgaggctccaggagggaatatctgttgcccctgcggccccagacaccagccagaccca

SEQ ID NO: 607365 - DNA, 120 bp, Artificial Sequence
  ENSG00000175544_8 (sequence is synthesized)
ggctgcaggcctcccccaggagcctccaggatggagatggagacccagcagcccccagactacttctatccctgaaaacacctggcctcaatgttggcttgttatgttacctgcccaccc

SEQ ID NO: 607366 - DNA, 120 bp, Artificial Sequence
  ENSG00000175544_9 (sequence is synthesized)
tcatccttacctcctcctactcaagctgcctggagaagacctgctctcagctgcccaccgttcctcagtgtgagcaagatttgggtctctccagacctctgggaggtagggagttccctg

SEQ ID NO: 607367 - DNA, 120 bp, Artificial Sequence
  ENSG00000175544_10 (sequence is synthesized)
tgaatggagaggatggctggaccccttccactacttatgtttataattttttttttttttaatgaacttgagccgggtgcagtggctcacacctgtaagcccagctgtcagggggcagaa

SEQ ID NO: 607368 - DNA, 120 bp, Artificial Sequence
  ENSG00000175544_11 (sequence is synthesized)
ctgtcagggggcagaagcgggaggatagcttgagcccaggagtgcaagacctgcctgggcaatatactgagaccccattctccacaaaaaggaaaaataaaagacaaaaaaacaaacaaa

SEQ ID NO: 607369 - DNA, 120 bp, Artificial Sequence
  ENSG00000175544_12 (sequence is synthesized)
gtgtaaaaaaagtgagcttgaaagaaagaaagggatggctccatgtatcaaagacaaagaaatcaaagctggggttgtaagagggagctgacgctgtgggggtttcagatctggatggag

SEQ ID NO: 607370 - DNA, 120 bp, Artificial Sequence
  ENSG00000175544_13 (sequence is synthesized)
gcttggccgcctggactcctacaaccatgagtgacagaagaaccatatgagtctggggagcaagaaacaaaccccccggatatattccagggtctccaaaggctaagatattaatctgtc

SEQ ID NO: 607371 - DNA, 120 bp, Artificial Sequence
  ENSG00000175544_14 (sequence is synthesized)
tgcactgaccagtcatagaaagtggcaaggatacagatgttcagggcccagagtggaaacagctgccctaaagagcctggaactccagggcctgcccttcaagcaggcgtgtagtctctc

SEQ ID NO: 607372 - DNA, 120 bp, Artificial Sequence
  ENSG00000175544_15 (sequence is synthesized)
aagcaggcgtgtagtctctctccagggtgtgaaaaactggaaaaaaaccctgccgctcccaaaggggaacttgtgataaaaattacagattattgggctgggagtggtggctcacgcctg

SEQ ID NO: 607373 - DNA, 61 bp, Artificial Sequence
  ENSG00000175544_16 (sequence is synthesized)
aggtagcatgcacctgtaatctcagctactcggaggttgaggcaggagaatcgcttgagcc

SEQ ID NO: 607374 - DNA, 89 bp, Artificial Sequence
  ENSG00000175544_17 (sequence is synthesized)
cgggaggtggacccagcctgagcaacagatcgagactccgtctcaaaaacaaaacaaaaaaaccatactgattataaaagtaaagaaac

SEQ ID NO: 607375 - DNA, 120 bp, Artificial Sequence
  ENSG00000175544_18 (sequence is synthesized)
caaaacaaaaaaaccatactgattataaaagtaaagaaaccaccatgaaggagacgagacagagacaaaaacaagaggactggcatctcagtgtacataatacagccgcctaagagacca

SEQ ID NO: 607376 - DNA, 120 bp, Artificial Sequence
  ENSG00000175544_19 (sequence is synthesized)
caagatacatgcaaataaaagacggctaaaaggggaagagagatcaacatgcagtaacaggatagtatgaagagagaaccggaagatttaaaaagtaacccaacaggccaggcgcatggc

SEQ ID NO: 607377 - DNA, 120 bp, Artificial Sequence
  ENSG00000175544_20 (sequence is synthesized)
aggcagctgtccccagcggccagtgtcccccatgccggatctctaggatctggaaggccgctgctgccaggaacaagaagtcagagagggccaggctgagcaggagcagcgccagacgcg

SEQ ID NO: 607378 - DNA, 120 bp, Artificial Sequence
  ENSG00000175544_21 (sequence is synthesized)
tgccagctccatgccgggcctgggagccggccagccacgccatcaacccattggctggcagcccaaggagcagcagggccaccaggaagaccgtgtcccagccaccttggggtcccaccg

SEQ ID NO: 607379 - DNA, 120 bp, Artificial Sequence
  ENSG00000175544_22 (sequence is synthesized)
acatcgtcctgactccctgcacgacgctgctcagaggacatacgggcccctgctcaatcgagtcttcgggaaggccaacatgagcaggggatgaaggaggaaggatgacagagccgtggc

SEQ ID NO: 607380 - DNA, 120 bp, Artificial Sequence
  ENSG00000175544_23 (sequence is synthesized)
gtgaatcaatgatggtgtgaatgaccgagtatgggagagacggtgctgtgcatctccaggcaagtcaccatccctccctgcgccattgtcatcaccttttgagtaattatcctatgccaa

SEQ ID NO: 607381 - DNA, 86 bp, Artificial Sequence
  ENSG00000175544_24 (sequence is synthesized)
gacagggccttgctctattgcccaggatgagtgcagtggcacagtccctgcagcttccacctcctgggttccagcgaccctcccat

SEQ ID NO: 607382 - DNA, 81 bp, Artificial Sequence
  ENSG00000175544_25 (sequence is synthesized)
gccttgctctattgcccaggatgagtgcagtggcacagtccctgcagcttccacctcctgggttccagcgaccctcccaca

SEQ ID NO: 607383 - DNA, 120 bp, Artificial Sequence
  ENSG00000175544_26 (sequence is synthesized)
ttgcccaggctggtcttgaactcgtgagctcaagtgatcctcctaccttggcctcctgaaatgttgagattacaggcatgagacactgtccagacagacttaatcttctgccatgtagaa

SEQ ID NO: 607384 - DNA, 120 bp, Artificial Sequence
  ENSG00000175544_27 (sequence is synthesized)
atgtagaatcccaatgggtccggatagactaacccggaggctttcaaacattgttaaaggtatggaattttgtctgtaagtaaagtattctaaggccgggcacggtggctcacacctgta

SEQ ID NO: 607385 - DNA, 120 bp, Artificial Sequence
  ENSG00000175544_28 (sequence is synthesized)
atcatcaagctctgtgcggggcctgtggccagtggcacccaggtcagcttccatggtagtgtccatttggggtccccagagtcctgctggacacggagtgggtgcctggtgaatcaatga

SEQ ID NO: 607386 - DNA, 62 bp, Artificial Sequence
  ENSG00000175544_29 (sequence is synthesized)
ttacaggcgaggacaggaaggttcagagaatcagtgaaggtaggaagggagctaccgcactc

SEQ ID NO: 607387 - DNA, 120 bp, Artificial Sequence
  ENSG00000175548_0 (sequence is synthesized)
gtggccccgtctggctagtcctgtctagcgcgcccatttcgagcccaagtttccagctcgggtttccgggctcagaattttccaggagtgggttcttgggcagtggctgtgggagcagga

SEQ ID NO: 607388 - DNA, 120 bp, Artificial Sequence
  ENSG00000175548_1 (sequence is synthesized)
atggcgcagctagagggttactgtttctcggccgccttgagctgtacctttttagtgtcctgcctcctcttctccgccttcagccgggcgctgcgagagccctacatggacgagatcttc

SEQ ID NO: 607389 - DNA, 120 bp, Artificial Sequence
  ENSG00000175548_2 (sequence is synthesized)
cacctgcctcaggcgcagcgctactgtgagggccatttctccctttcccagtgggatcccatgattactacattacctggcttgtacctggtgtcagttggagtggtcaaacctgccatt

SEQ ID NO: 607390 - DNA, 120 bp, Artificial Sequence
  ENSG00000175548_3 (sequence is synthesized)
tggatctttgcatggtctgaacatgttgtctgctccattgggatgctcagatttgttaatcttctcttcagtgttggcaacttctatttactatatttgcttttccacaaggtacaaccc

SEQ ID NO: 607391 - DNA, 120 bp, Artificial Sequence
  ENSG00000175548_4 (sequence is synthesized)
agaaacaaggctgcctcaagtatccagagagtcttgtcaacattaacactagcagtatttccaacactttatttttttaacttcctttattatacagaagcaggatctatgttttttact

SEQ ID NO: 607392 - DNA, 120 bp, Artificial Sequence
  ENSG00000175548_5 (sequence is synthesized)
ctttttgcatatttgatgtgtctttatggaaatcataaaacttcagccttccttggattttgtggcttcatgtttcggcaaacaaatatcatctgggctgtcttctgtgcagggaatgtc

SEQ ID NO: 607393 - DNA, 120 bp, Artificial Sequence
  ENSG00000175548_6 (sequence is synthesized)
attgcacaaaagttaactgaggcttggaaaactgagctacaaaagaaggaagacagacttccacctattaaaggaccatttgcagaattcagaaaaattcttcagtttcttttggcttat

SEQ ID NO: 607394 - DNA, 120 bp, Artificial Sequence
  ENSG00000175548_7 (sequence is synthesized)
tccatgtcctttaaaaacttgagtatgcttttctgtttgacttggccctacatccttctgggatttctgttttgtgcttttgtagtagttaatggtggaattgttattggcgatcggagt

SEQ ID NO: 607395 - DNA, 120 bp, Artificial Sequence
  ENSG00000175548_8 (sequence is synthesized)
agtcatgaagcctgtcttcattttcctcaactattctactttttttcatttactctctttttttcttttcctcatctcctgtctcctagcaaaattaagacttttctttccttagtttgg

SEQ ID NO: 607396 - DNA, 120 bp, Artificial Sequence
  ENSG00000175548_9 (sequence is synthesized)
aaacatggaattctgtttttggtggttaccttagtctctgtgtttttagtttggaaattcacttatgctcataaatacttgctagcagacaatagacattatactttctatgtgtggaaa

SEQ ID NO: 607397 - DNA, 120 bp, Artificial Sequence
  ENSG00000175548_10 (sequence is synthesized)
agagtttttcaaagatatgcaattctgaaatatttgttagttccagcctatatatttgctggttggagtatagctgactcattgaaatcaaagccaattttttggaatttaatgtttttc

SEQ ID NO: 607398 - DNA, 120 bp, Artificial Sequence
  ENSG00000175548_11 (sequence is synthesized)
atatgcttgttcattgttatagttcctcagaaactgctggaatttcgttacttcattttaccttatgtcatttataggcttaacataactctgcctcccacatccagacttgtttgtgaa

SEQ ID NO: 607399 - DNA, 120 bp, Artificial Sequence
  ENSG00000175548_12 (sequence is synthesized)
ctgagttgctatgcaattgttaatttcataactttttacatctttctgaacaagacttttcagtggccaaatagtcaggacattcaaaggtttatgtggtaatatcagtgatattttgaa

SEQ ID NO: 607400 - DNA, 120 bp, Artificial Sequence
  ENSG00000175548_13 (sequence is synthesized)
ctgtaaaaatggacttaataattagaccatttctacaaagaacaactgaataggtggaaaacatggaatttcttttaggtgcagtggtggtcctcaaattacattagtttttttaatata

SEQ ID NO: 607401 - DNA, 120 bp, Artificial Sequence
  ENSG00000175548_14 (sequence is synthesized)
tattttaaacatatgtaagaaattaagtggcaaagaactgggaaagcttaagacctgcttcaaaagcctgaataatgggaaaataaaattgttttcagatatctcatatcgctctcgtaa

SEQ ID NO: 607402 - DNA, 120 bp, Artificial Sequence
  ENSG00000175548_15 (sequence is synthesized)
tgttggcccctcacaaagcttgggaatgttttgtatgtataagtttattaaaactgggtatgcttcatattactagaactaatttattctcttcagagagaactattaggttagtgcaaa

SEQ ID NO: 607403 - DNA, 120 bp, Artificial Sequence
  ENSG00000175548_16 (sequence is synthesized)
ttttgccattgaaagtaatggcaaaaccacaattacttttgtaccaacctaataacaatgtgttagcaaatatttacaaatggtcaggtgatattcttgactgaaaagttccttaacatt

SEQ ID NO: 607404 - DNA, 120 bp, Artificial Sequence
  ENSG00000175548_17 (sequence is synthesized)
ttccttaacatttcagtaaatataattttaattctaagtcaaaatagaaatgcatagatagtaaatgataaagtagagactcatatatgtctgtctaggcatcaaattgttggttattgt

SEQ ID NO: 607405 - DNA, 120 bp, Artificial Sequence
  ENSG00000175548_18 (sequence is synthesized)
ttacaatccagaaatgatgaagctctttcactaattcctaatatgaaatgtatgatggccaaagacaaattgtgttgattataatcctttaaaagggggatttcctttatgaaatacata

SEQ ID NO: 607406 - DNA, 120 bp, Artificial Sequence
  ENSG00000175548_19 (sequence is synthesized)
ttgtattagcttcccagggctgccataacaaatgaccacaaacttgggtgcttacaacaattttcctcacagtctggaggccagaagtctaaaatcaaagtgtcagcagagttggttcct

SEQ ID NO: 607407 - DNA, 120 bp, Artificial Sequence
  ENSG00000175548_20 (sequence is synthesized)
tctggaggctctaaggaagaatccattctatgtctgtttcctaatatcttgtggctgtctgcaattcttggagttctttggcttatgggcatatcttgtctaagtattgcagacagcaat

SEQ ID NO: 607408 - DNA, 120 bp, Artificial Sequence
  ENSG00000175548_21 (sequence is synthesized)
cttcactccagtctctgcctctgcgttcacacggcctttccctctgtcttttcattaccttttaaggacagtgtctttgaatgtagggcccaccctgatctagggtgattgtgtctggag

SEQ ID NO: 607409 - DNA, 120 bp, Artificial Sequence
  ENSG00000175548_22 (sequence is synthesized)
acccttaattatgtttacaaagacccatgttccaagtaagtttgtattcacatgttctgagtagacattgtctcttcatgggatacttttcagtccatgacagttactaaaggacatttt

SEQ ID NO: 607410 - DNA, 120 bp, Artificial Sequence
  ENSG00000175548_23 (sequence is synthesized)
aggataatcctcatatgattgttaggagactacctttaaaaattttttattatatatcaaattatagttgtatatacttatgaggtacgaagtggcattatgatttttgaatataatgtg

SEQ ID NO: 607411 - DNA, 120 bp, Artificial Sequence
  ENSG00000175548_24 (sequence is synthesized)
ggatgattaaataaagctaatctatccatcacctcaaatatttgacatattttgtgatgaaaacatttgaaatgtactctcaacagtattgaaatgtacatacagtgcttaattattagc

SEQ ID NO: 607412 - DNA, 120 bp, Artificial Sequence
  ENSG00000175548_25 (sequence is synthesized)
tgtattcaccatgttgtgtaatagatctaaaaaaagtcaaacatattccttctatctaattgaggctttgtatcttttgattgtcatctccctattcccacatccccggcctctagcaac

SEQ ID NO: 607413 - DNA, 120 bp, Artificial Sequence
  ENSG00000175548_26 (sequence is synthesized)
ttgtcatctccctattcccacatccccggcctctagcaaccatcattcttctctctacttctgtgagtttaattgttttagattacacaaataagtgagatcatgtggtatttgtctttc

SEQ ID NO: 607414 - DNA, 120 bp, Artificial Sequence
  ENSG00000175548_27 (sequence is synthesized)
tcatccatattgttgcaaatgacacaatttcttcctttttaaaggctgaatagtatttttttgtatatatatgccacattttctttatccattcatccatggatggacacttaggttgat

SEQ ID NO: 607415 - DNA, 120 bp, Artificial Sequence
  ENSG00000175548_28 (sequence is synthesized)
cgaatcacttggttattgtgacttgtctgcaatgaacatagagtgcagacttctctttgacatacggatttcaaatcttctggataaatagccagaagtgggattgttggatcaggagat

SEQ ID NO: 607416 - DNA, 120 bp, Artificial Sequence
  ENSG00000175548_29 (sequence is synthesized)
aatatcttagctgataccttttaaataactctcagtatctttactgagaggttaaaaaataagtgacttcttaggtaatataaagctaaaggtgactagtgtttgattccattatctatt

SEQ ID NO: 607417 - DNA, 120 bp, Artificial Sequence
  ENSG00000175548_30 (sequence is synthesized)
aaaaaaagtcagaattgaaagaaagttgagaaatcctttggtctgactttgtagattagggaacaactgctggggtaggattattttgtgttactttttgaattttgtgtttattatttt

SEQ ID NO: 607418 - DNA, 120 bp, Artificial Sequence
  ENSG00000175548_31 (sequence is synthesized)
gagtgtattttttgggttgtcattccattacaggaaagtattatttgggcatgttaactttgacatgtaaacttagaattgtgaatagaactcatcttttaacataattttatgtttcta

SEQ ID NO: 607419 - DNA, 120 bp, Artificial Sequence
  ENSG00000175548_32 (sequence is synthesized)
aactttaaaagtagctataagtgaacaaattactttcccctcaatgtcaaattttgcttctctgagttttaagtgatgagtctacatttacaaatataaaattgtgtgcaggtgaaaatt

SEQ ID NO: 607420 - DNA, 120 bp, Artificial Sequence
  ENSG00000175548_33 (sequence is synthesized)
acaagtataatttgagtaataaatgcaggccattttttggttgtactctagtactcagaaaatagatcggcattagttataacagtgattgtagaaaaacgtgttttacccagacttctt

SEQ ID NO: 607421 - DNA, 120 bp, Artificial Sequence
  ENSG00000175548_34 (sequence is synthesized)
aaaaattagatgagagaggacactcaaagaaattatacttttgtcattaatttactatagtggagaactaaatctgggaagtcaaaattgaaaaaagaatgtgtaatttagggaaagtaa

SEQ ID NO: 607422 - DNA, 120 bp, Artificial Sequence
  ENSG00000175548_35 (sequence is synthesized)
ctttttgtctgataatattaatgcaaggattttgtatttaggaatacttctgagaggagaagcttccactctgatctagtctggcaaaattgaggaaaatattctaccctgtaattaaag

SEQ ID NO: 607423 - DNA, 120 bp, Artificial Sequence
  ENSG00000175548_36 (sequence is synthesized)
aagactgctctttggagggatcactgttctatatctttttttgtttgtttttgtctttgaggagaagtctcgctcttgtcccccaggctggaatgcaatggcgcgatcttggctcactga

SEQ ID NO: 607424 - DNA, 120 bp, Artificial Sequence
  ENSG00000175548_37 (sequence is synthesized)
tgttgagtccctgctgtttaagagatgttttggtgaaaatctacattcagagagaaacaggttaatcttccacattttttataaaatacataaaatatagtacttggcattttaagaaaa

SEQ ID NO: 607425 - DNA, 120 bp, Artificial Sequence
  ENSG00000175548_38 (sequence is synthesized)
gaatgccatgtattaaaaggtgctattttcaactatttattattttaaaacaggaatgcttatcaatactttcgaatttaagataaatgtcttcgttaaattttctaggcagttcaaaga

SEQ ID NO: 607426 - DNA, 120 bp, Artificial Sequence
  ENSG00000175548_39 (sequence is synthesized)
ttcaagaaatgatactaaactcaaagtcattcacttgaaacaactgagaagaccattcttaggtgtttagatccttgcttttagaaacattcttagttatatttgtgttttcaaaagtta

SEQ ID NO: 607427 - DNA, 120 bp, Artificial Sequence
  ENSG00000175548_40 (sequence is synthesized)
ttgagtagatagatattttttcatgaatttttaaacattagacttagctgaattgattaaaattaggtgattatgaaaaaaatattgccctgctcgagggcatctggagccctacagtta

SEQ ID NO: 607428 - DNA, 120 bp, Artificial Sequence
  ENSG00000175548_41 (sequence is synthesized)
ccattactaaagtctgtgagtatgtctattttgaaaagtgtcataaaaatatctagtccataaatcattataggttcagtaatacatcattttgaactgattctatcttctgtgaaattc

SEQ ID NO: 607429 - DNA, 120 bp, Artificial Sequence
  ENSG00000175548_42 (sequence is synthesized)
tagagatatgttatctttaggtagcatgagtaagattcaggtatgctgtgaattttgttaacgtttatgttttccattaatggatagtcaggaatcttttgaactgcgtctatgtattta

SEQ ID NO: 607430 - DNA, 120 bp, Artificial Sequence
  ENSG00000175548_43 (sequence is synthesized)
aatgatttggaaagatagcatctctcagtttaaacttagcatctcattttggcaagataaattattttagctgtctggccttttctttgtcttcttagagttatttctgaaatgtgcata

SEQ ID NO: 607431 - DNA, 120 bp, Artificial Sequence
  ENSG00000175548_44 (sequence is synthesized)
gccagtcataaaataacttgtgtaaatagcctaatgtaatttatttctaataaatacgtagcttaatgaaatgtatttctagtttgaacttaattgccacttggcttgatattattttcc

SEQ ID NO: 607432 - DNA, 120 bp, Artificial Sequence
  ENSG00000175548_45 (sequence is synthesized)
ttagaattgttggaagagaggagagaggaagggatctaccatttttatttataccacctaaatagtggactgttattttggactcacttttaaataaaatatttattcacatgaagaaat

SEQ ID NO: 607433 - DNA, 120 bp, Artificial Sequence
  ENSG00000175548_46 (sequence is synthesized)
aaattttgtgtttattaggttagcaagcgtttattatctttgaagtaattggaatttcattaaaaagtgaagcaagtaagaattgtgatataaatttgaaaatttttaaatggaaattga

SEQ ID NO: 607434 - DNA, 120 bp, Artificial Sequence
  ENSG00000175548_47 (sequence is synthesized)
aatatgacttaggaactgtgggcttgtagaaaaaaacatttaacatgggagttaagatttttatatttggttgtggctctgggatcaataaggcaagtggtttagtctttagtcctcatt

SEQ ID NO: 607435 - DNA, 120 bp, Artificial Sequence
  ENSG00000175548_48 (sequence is synthesized)
tcaaatgagaatagtatttgtcctaactctagtcagtgtctgattggtatgtgtataaccttattttaaaaaggattcattcctgccatatactcataatatttataagtatgtcatatg

SEQ ID NO: 607436 - DNA, 120 bp, Artificial Sequence
  ENSG00000175548_49 (sequence is synthesized)
ataaatattgagtaaatatatactgaatgaagtttttagtatagagtgaagtgaatagaaaaaacatcctacataaccgtggctaattttaggaagtaaatcatgtttcataataagagt

SEQ ID NO: 607437 - DNA, 120 bp, Artificial Sequence
  ENSG00000175548_50 (sequence is synthesized)
catcctaaacatttttctgtgtaattttctgacccagtgttaacaatttttatttgccttagtgcaagcttgttcaacccacaggccacatgcagcccaggatggctttgaatgcggccc

SEQ ID NO: 607438 - DNA, 120 bp, Artificial Sequence
  ENSG00000175548_51 (sequence is synthesized)
ccaggatggctttgaatgcggccccaacacaaattttgtaagctttcttaaaacatgatgagatattttgtgattttattttattttattttatttattattttattttattttatttta

SEQ ID NO: 607439 - DNA, 89 bp, Artificial Sequence
  ENSG00000175548_52 (sequence is synthesized)
gacccctgctagcatttaatgcttatacatgtatttacttgtaaacatgttgtttctttgataggatatgatttcaacataattactgt

SEQ ID NO: 607440 - DNA, 120 bp, Artificial Sequence
  ENSG00000175548_53 (sequence is synthesized)
ttgtttctttgataggatatgatttcaacataattactgtttatttaaaataagaaaaacaaataactttcaaccattaaaaggttataacactttaaaggaaagtttcttattaaagaa

SEQ ID NO: 607441 - DNA, 120 bp, Artificial Sequence
  ENSG00000175548_54 (sequence is synthesized)
agaatttaaaggtaaaagacatttcaactaattacaaatactttgttttttttagttgggctacattttaccactctaggaatagctgttaattattttttatatagggcatttttatgt

SEQ ID NO: 607442 - DNA, 120 bp, Artificial Sequence
  ENSG00000175548_55 (sequence is synthesized)
atttaatgttgacaactgacgtttccaatatacaaaaacttgtgtaactgagaaaattataataaaaatagagattgaggacatatttttaacatatatccatgagtcaacactaatatt

SEQ ID NO: 607443 - DNA, 120 bp, Artificial Sequence
  ENSG00000175548_56 (sequence is synthesized)
gagatttgaaaaattatttctagggtaagaaattctgtcacaatataatatctctatattgtgcttttttaagagataaatttttgatgaatttaatgttaattaaattttatctcagcc

SEQ ID NO: 607444 - DNA, 120 bp, Artificial Sequence
  ENSG00000175548_57 (sequence is synthesized)
gagataaatttttgatgaatttaatgttaattaaattttatctcagcctatcaccatcagaccaaaagacaatacagtatttttctaacaaggaaaagaaaatacatatatatatattta

SEQ ID NO: 607445 - DNA, 120 bp, Artificial Sequence
  ENSG00000175548_58 (sequence is synthesized)
tatatgtaatgtatgtgtgtgtgtatacatataatttctccttttttttttttgtaagaattgagacagggtgtcactatgttgtgtgggctggtctcaaaacacctgcctcaagtgatc

SEQ ID NO: 607446 - DNA, 120 bp, Artificial Sequence
  ENSG00000175548_59 (sequence is synthesized)
caccttggcctcccaaagtgctaggatttacaatgagccactgtgccagcttccaacaagaaaaatattaaatgtattggtttttcacagtgaaacttaattcagtttagttgaaccata

SEQ ID NO: 607447 - DNA, 120 bp, Artificial Sequence
  ENSG00000175548_60 (sequence is synthesized)
catatatgtgtgtgtatggcatatataagatgaaaaaaggagaaaaagtaacaataataatgatggttgccatcattcattgaacacctataatgttttaggcattatactagctgattt

SEQ ID NO: 607448 - DNA, 120 bp, Artificial Sequence
  ENSG00000175548_61 (sequence is synthesized)
acaaatattgtctcatttgatgctacatttatatttctatgaggcagatgttgatttctctttgactgctgaagaaactgaaggtcggtcaggtcaggtgatttgcccaaagtccacact

SEQ ID NO: 607449 - DNA, 120 bp, Artificial Sequence
  ENSG00000175548_62 (sequence is synthesized)
gtcactaaatgaacatagattggtatgactcccaagcctgtgagtttttgaccgtcatattctgcctcactatgaaaagttttttttcaattttttttaaatcaaaagaagtagtatatg

SEQ ID NO: 607450 - DNA, 120 bp, Artificial Sequence
  ENSG00000175548_63 (sequence is synthesized)
gagagagaggtgaaaatccatgtttgctctctgcagtttccaaaccattcatgacgtgttatttttgtactggatatagtcattttttaaaatgctacaaactgttcaaaagagcatgaa

SEQ ID NO: 607451 - DNA, 120 bp, Artificial Sequence
  ENSG00000175548_64 (sequence is synthesized)
caacatgataactccttataattttgttgtaagataaatgactaaaattatgtgggatatttaatttggataagtggaaattctatcacttgataagctctcttgaagaataattatttg

SEQ ID NO: 607452 - DNA, 120 bp, Artificial Sequence
  ENSG00000175548_65 (sequence is synthesized)
aaagattggacttaattctgtattgcctgaagtgtaaatcagaggtcaacaattagattgcaaatcatgaaaagcataacttctaattgtttagtctttttagggaaacaagcccagaaa

SEQ ID NO: 607453 - DNA, 120 bp, Artificial Sequence
  ENSG00000175548_66 (sequence is synthesized)
aaaagtaagattctcattcattggagataagatttctatttatcaaagatactacacaagagttagatagcaagtagttcaaatgtcttttaaaggtatctgacatctttaaagctctgt

SEQ ID NO: 607454 - DNA, 120 bp, Artificial Sequence
  ENSG00000175548_67 (sequence is synthesized)
aatttttaaattctaaattttgttacagctaatttttaaaaattaattgctaagtcatggtcaagtatttctgatgacttacatgctgtctttggtatattttaagtttctaaaccaaaa

SEQ ID NO: 607455 - DNA, 120 bp, Artificial Sequence
  ENSG00000175548_68 (sequence is synthesized)
ctactatttgactctattacaccctgttttagaaaaacatttgagttatacaacttactaaaatgtattttagcggtgatgttttggagcactggtaatatagtgtttaacttattttct

SEQ ID NO: 607456 - DNA, 120 bp, Artificial Sequence
  ENSG00000175548_69 (sequence is synthesized)
attttttatccctctatattcgtgaaattacttctatttgaaaagttttccgccagtgataaaaaaaggctgagcactatctgtaaaaatttttaaggtgtccactaggtggagatattg

SEQ ID NO: 607457 - DNA, 120 bp, Artificial Sequence
  ENSG00000175548_70 (sequence is synthesized)
attgtgctacatttccaagtgttgtagttaaacttttattagtctgaattaaactcttttatagtgttttattgttttaaaccacaaagatttataatcatttatatctatttatctaat

SEQ ID NO: 607458 - DNA, 120 bp, Artificial Sequence
  ENSG00000175548_71 (sequence is synthesized)
ttcaaatgttttctgcgttgtatgaagctaagataaatgtaaaaaaaacaaacaaaaaaaacctcactttgtgttttgtaatcattagacgatttaacctaatatatcttcccatatgat

SEQ ID NO: 607459 - DNA, 120 bp, Artificial Sequence
  ENSG00000175548_72 (sequence is synthesized)
atgatctttgcatatggcatacttcattcatatgacatagttagaatcttttcccacaaacaatgagtgatgatatctcatttgaaaactcgtgtaacattgtatcagccactgttataa

SEQ ID NO: 607460 - DNA, 120 bp, Artificial Sequence
  ENSG00000175548_73 (sequence is synthesized)
agtgatttacccatgttagtctcataacaactctatgagatcagtaccgtacacatggggaaacttagtatagagaggtgaagtattttttccaagattacaaaataactgtctgagctg

SEQ ID NO: 607461 - DNA, 120 bp, Artificial Sequence
  ENSG00000175548_74 (sequence is synthesized)
ggattcgtaaccaggcagcctgactccaaaatcaatattcttaactctattgttatgatggagaaaggcatgaagtctaccttcaaattcatggcattttagaaggaaaaattgtcgcaa

SEQ ID NO: 607462 - DNA, 120 bp, Artificial Sequence
  ENSG00000175548_75 (sequence is synthesized)
gtaatgtgattatacttcctagttttataggtcagaaaaatgaggtccacactaattttgcctcttccacagggagatagattctcatctaccattgtgtcttttgtttctgtttttgtc

SEQ ID NO: 607463 - DNA, 120 bp, Artificial Sequence
  ENSG00000175548_76 (sequence is synthesized)
atgatacctcaaattgatatatgttgtaattatgaatttaaggaagtaaaaaaataactcagggctggagccttcagccatattaacatacattgacataaagacctttgttttaatatg

SEQ ID NO: 607464 - DNA, 120 bp, Artificial Sequence
  ENSG00000175548_77 (sequence is synthesized)
aatgattccagttaacaaatggagaaatagttgtttgaaaattaatatttagcttctcaaaagagactcctgtttggaagcaaattgttggtttaacaggacatactttagatatttgaa

SEQ ID NO: 607465 - DNA, 120 bp, Artificial Sequence
  ENSG00000175548_78 (sequence is synthesized)
aaattctctgtggaatcacaatctcttatttttaagaatgtaggaatatgtgttctatatgcttttaagttatgtattacatactattctctaaaatagaaatgtttatttggcttctaa

SEQ ID NO: 607466 - DNA, 120 bp, Artificial Sequence
  ENSG00000175548_79 (sequence is synthesized)
aagtcatttgtgagttgatgttatttaaaactgcttttcagtcaacttattctttataaaaaagtttgttcaaatagcatgtttttattttgtttctaaataaattcatgtttgataata

SEQ ID NO: 607467 - DNA, 120 bp, Artificial Sequence
  ENSG00000175548_80 (sequence is synthesized)
cttctcccatctttagacttaactcgtccctttccaccccaccccagcctcagaacatgaaagaaactgggtatagtcttttgttcctgtctctgagatctgtgaaatatttattaaatg

SEQ ID NO: 607468 - DNA, 120 bp, Artificial Sequence
  ENSG00000175548_81 (sequence is synthesized)
aatgaataaacagcagatctgatccccagggaggagtgatctgggagaatacttagtggggaactgagcgctcctcttggcagctgacaatatcgatcccactttgtttttccttgtctc

SEQ ID NO: 607469 - DNA, 120 bp, Artificial Sequence
  ENSG00000175548_82 (sequence is synthesized)
aggattaaaggcattcgggtgctccttggaaatatcagaaaacttccctttagctcacctgttaagcacctcactgtgcattttaggggtgggatagggtggactggagggatcttcggc

SEQ ID NO: 607470 - DNA, 120 bp, Artificial Sequence
  ENSG00000175548_83 (sequence is synthesized)
taccaaaaagtgacaatttataatcacaaattccttccctgggtatttttagtgaactatctgttgactggataaactggcaaccagtcaagtcacatcatttttgaatatatatttgac

SEQ ID NO: 607471 - DNA, 120 bp, Artificial Sequence
  ENSG00000175548_84 (sequence is synthesized)
tgtgcaagtatgtacatataaatatcaaaataaacatcccctgcttttctggtgacacaatatagggtactggctagaaatataaagtctgttttagagaaagatctgatcttaaatctt

SEQ ID NO: 607472 - DNA, 120 bp, Artificial Sequence
  ENSG00000175548_85 (sequence is synthesized)
ctcatctgcaaaatgacaataatctttactatagggcatattgtaatgttacaatacagagggtttggcacaatttctgtctcagtttatgtcagctgtcatcatggagcctgtggtcca

SEQ ID NO: 607473 - DNA, 120 bp, Artificial Sequence
  ENSG00000175548_86 (sequence is synthesized)
aatgttttcctaaacttagagtcccaaacaatgtttccatgcttttaaaaactggagcatttgcagtttatttatcaaaataaaggcttttaaagaacatttcttggaaaatagaaatag

SEQ ID NO: 607474 - DNA, 120 bp, Artificial Sequence
  ENSG00000175548_87 (sequence is synthesized)
attttaagttgttgtttattggttgctgctacctgaaccatcactaagctggtccgggggcaaaaaataagaaaaactaatcctgttctgccaaggacttacttaatcttgtcatagact

SEQ ID NO: 607475 - DNA, 120 bp, Artificial Sequence
  ENSG00000175548_88 (sequence is synthesized)
aacttctcaaaatttctgattgttgctggagatgagacttgggcttgacatatttgtgtctgtcttgttcgtattacctcttgcttttacttcattttctttcattttaaagtgggatcc

SEQ ID NO: 607476 - DNA, 120 bp, Artificial Sequence
  ENSG00000175550_0 (sequence is synthesized)
gggcggcgagcaggcccgggagccgggaggctgcgggcggcggcgctggacccgacgcggcgagagaggccccgagatgccgagcaagaagaagaagtacaacgcgcggttcccgccggc

SEQ ID NO: 607477 - DNA, 120 bp, Artificial Sequence
  ENSG00000175550_1 (sequence is synthesized)
gcggatcaagaagatcatgcagacggacgaagagattgggaaggtggcggcggcggtgcctgtcatcatctcccgggcgctcgagctcttcctagagtcgctgttgaagaaggcctgcca

SEQ ID NO: 607478 - DNA, 120 bp, Artificial Sequence
  ENSG00000175550_2 (sequence is synthesized)
ggtgacccagtcgcggaacgcgaagaccatgaccacatcccacctgaagcagtgcatcgagctggagcagcagtttgacttcttgaaggacctggtggcatctgttcccgacatgcaggg

SEQ ID NO: 607479 - DNA, 120 bp, Artificial Sequence
  ENSG00000175550_3 (sequence is synthesized)
ggacaagaagctgtccgggacagactcggagcaggaggatgaatctgaggacacagatactgatggggaagaggagacatcacaacccccaccccaggccagccacccctctgcccactt

SEQ ID NO: 607480 - DNA, 120 bp, Artificial Sequence
  ENSG00000175550_4 (sequence is synthesized)
tcagagccccccgacacccttcctgcccttcgcctctactctgcctttgcccccagcgcccccgggcccctcagcacctgatgaagaggacgaagaagattacgactcctagcgccttct

SEQ ID NO: 607481 - DNA, 120 bp, Artificial Sequence
  ENSG00000175550_5 (sequence is synthesized)
gccccccagaccatagccccttttagttggttttagttgctctggggggaggagagaaggtagagctgttcttaaatttattaaaaaaaaaaataaaagggaatctcagtgtctgttcca

SEQ ID NO: 607482 - DNA, 120 bp, Artificial Sequence
  ENSG00000175550_6 (sequence is synthesized)
tgggcggcagccgggacaccagcaaggccacagactggcagaggagaggctgggcttccaggcagagggagccacctgagtaaagcagggcaggcccgggagcggagatcggcccgggct

SEQ ID NO: 607483 - DNA, 120 bp, Artificial Sequence
  ENSG00000175550_7 (sequence is synthesized)
ccagcctgacatctggggccccttgctgccacccactgcgggtttgggtgtctgggcccctcttgagtgccagcccctcctcacctcttccaggaagcagtgcatcgagctggagcagca

SEQ ID NO: 607484 - DNA, 120 bp, Artificial Sequence
  ENSG00000175550_8 (sequence is synthesized)
ggtcttgttgattgtggcagatttgtggggtggaaggagaataactgaggagggcttgaaggcaggagactgttctcccgaaagatcctgctccaccctgccagggcccgtgggtggggc

SEQ ID NO: 607485 - DNA, 120 bp, Artificial Sequence
  ENSG00000175550_9 (sequence is synthesized)
cagactggggagggacgcgcaccggccaggaggcttcaagaggagggcactagggccctgcgagcggcgtcttaaccggcggcgctaggactccgcgggaaacggcgggggcggagcggg

SEQ ID NO: 607486 - DNA, 120 bp, Artificial Sequence
  ENSG00000175556_0 (sequence is synthesized)
attaggcggcgcggggcggccggcatggagctcccggaggcgcggcagggtcaggagctcggtggcatggcggcggtggctgccccgatttcctccagctgccactccttgcttcgtgtc

SEQ ID NO: 607487 - DNA, 120 bp, Artificial Sequence
  ENSG00000175556_1 (sequence is synthesized)
cccggtccctagacgcctcgtctcctcccgtgtccctcttcccatggagtcagtacggatcgaacagatgctgagcttgcccgctgaggtcagcagcgacaacttggagtcggcggagcg

SEQ ID NO: 607488 - DNA, 120 bp, Artificial Sequence
  ENSG00000175556_2 (sequence is synthesized)
aggggcatcagcggcccaagtagacatgggcccccacccaaaggtggctgcagagggccccgcacctctaccgacgcgggagccagagcaagagcagtctccggggacctcaacgccgga

SEQ ID NO: 607489 - DNA, 120 bp, Artificial Sequence
  ENSG00000175556_3 (sequence is synthesized)
gagcaaagtcctgctcacgcaggcagacgccttggcgtcccgggggcgaatccgtgaagccctcgaggtgtatagacagctctccgagcggcagcagctggtggctgagcagctggagca

SEQ ID NO: 607490 - DNA, 120 bp, Artificial Sequence
  ENSG00000175556_4 (sequence is synthesized)
gctggtgcgctgcctggcggagaaagtcccgcaaggcgaggcgctggcgccggcgcccccggacgagggtagcactgcaagcggcaccgtggcggcggaagagacgggggccgccgcggc

SEQ ID NO: 607491 - DNA, 120 bp, Artificial Sequence
  ENSG00000175556_5 (sequence is synthesized)
tgcggcggccaccgaggtgtgggacggctttaagtgccggaaatgtcatgggtttctatcagaccccgtgtccttgtcgtgtggccacaccttttgtaaactgtgcctggaacgtgggcg

SEQ ID NO: 607492 - DNA, 120 bp, Artificial Sequence
  ENSG00000175556_6 (sequence is synthesized)
gccgaccggcgctgtgcgctgtgcggggtcaagctctccgccttgatggtggccactgggcgggcgcgtggagcccggcgggctgggcagcagccgccgccgccgctgcgagtcaacgtg

SEQ ID NO: 607493 - DNA, 120 bp, Artificial Sequence
  ENSG00000175556_7 (sequence is synthesized)
cgtggtgctcagcggcctcctcggcaagttgtttccaggcccagcgcgagcgtcgcaactccggcacgagggcaaccgactgtaccgcgagcgccaggtggaggcggcactgctcaagta

SEQ ID NO: 607494 - DNA, 120 bp, Artificial Sequence
  ENSG00000175556_8 (sequence is synthesized)
caacgaggcagttaagttggctccaaatgaccacttgctttatagcaatcggtctcagatttatttcaccttggagtctcatgagaatgcactgcatgatgcagaaatagcatgtaagct

SEQ ID NO: 607495 - DNA, 120 bp, Artificial Sequence
  ENSG00000175556_9 (sequence is synthesized)
ccgcccgatgggttttaaggcacatttcagaaaagcccaagccttagccaccctaggcaaggtggaggaggcactaagggagtttctctactgtgtatcccttgatggaaagaacaagag

SEQ ID NO: 607496 - DNA, 120 bp, Artificial Sequence
  ENSG00000175556_10 (sequence is synthesized)
agcaagatgtgaagcccaaagagacaatctggagctcccacattgttctagtcaggaggaagcagcagccaggggagatggcagcagtctgatggacccagctaaagtgaagggggatgg

SEQ ID NO: 607497 - DNA, 120 bp, Artificial Sequence
  ENSG00000175556_11 (sequence is synthesized)
tcagcagcaccacatgaaagaccaggaagaagaggaggagaagtgggatgctacctctccaaaagctgcttccagcaagactggaaaatgccaggaaaagaaaaggaaacattgccagat

SEQ ID NO: 607498 - DNA, 120 bp, Artificial Sequence
  ENSG00000175556_12 (sequence is synthesized)
atctgaccttgaatgcgctctatgtatgagattattctatgagccagtcacaacaccttgcgggcatactttttgcttaaaatgcctagaaagatgcctagatcacaacgcaaagtgtcc

SEQ ID NO: 607499 - DNA, 120 bp, Artificial Sequence
  ENSG00000175556_13 (sequence is synthesized)
attgtgcaaagacggtctttcacagtgcttggcatcaagaaaatacagcaaaaatgtaataatggaggagctcatagctaaattccttccagaagaactgaaggaacgaaggaagcttta

SEQ ID NO: 607500 - DNA, 120 bp, Artificial Sequence
  ENSG00000175556_14 (sequence is synthesized)
tgaagaggaaatggaagaactttctaaccttaataagaatgtgcctattttcgtgtgtactatggcctatcccaccgttccttgtcccctgcacatctttgagccttgttaccgcctgat

SEQ ID NO: 607501 - DNA, 120 bp, Artificial Sequence
  ENSG00000175556_15 (sequence is synthesized)
gattcgtagatgcattgagacaggcacgagacagtttggcatgtgccttggagatcctgtcaaagggtttgcagaatatggctgcatcctagagatcagaaatgttcaattctttgctga

SEQ ID NO: 607502 - DNA, 120 bp, Artificial Sequence
  ENSG00000175556_16 (sequence is synthesized)
tggccgctcagtggttgacagcataggcaagaggcgcttcagggtgctccatcagagccagcgggatggctacaacacagccgacattgaatacattgaagaccaaaaggttcagggaga

SEQ ID NO: 607503 - DNA, 120 bp, Artificial Sequence
  ENSG00000175556_17 (sequence is synthesized)
ggattgtgctgagctcatgggattacataactgtgtctatcagcaagcatcattgtggtttcattcgctcaaattatccctaaagaatcggatactcaatcactttggtcccatgccgga

SEQ ID NO: 607504 - DNA, 120 bp, Artificial Sequence
  ENSG00000175556_18 (sequence is synthesized)
gaaagacgccgatcctcagatgaacccgaatggcccagcctggtgctggtggatgttagcagttcttcccttggaaagccgagctcagctccccttcctagcaatgaggtccttaaagga

SEQ ID NO: 607505 - DNA, 120 bp, Artificial Sequence
  ENSG00000175556_19 (sequence is synthesized)
cagactgaatggtattcgacgagtcctggccttcatatcccgaaaccaaaactagtgagtggattgccgaagaggagctcccaccttccccactgccgtcggggggagtcttcttgtaaa

SEQ ID NO: 607506 - DNA, 120 bp, Artificial Sequence
  ENSG00000175556_20 (sequence is synthesized)
tatatctaattgcaataatatcttaacagaagggggtgtcaaacagaggcatcagcctgctgttgatcacagagagaaattgagtagaaagaccaaaagaatgtgacctatttgaaactt

SEQ ID NO: 607507 - DNA, 120 bp, Artificial Sequence
  ENSG00000175556_21 (sequence is synthesized)
tctgtcttaagatgcttcttgacatgctgcataactacataaacagcagaggtgtttaagagcccagaaaaacataatttgattttaacattaaaatttccaaaagtttaaagtggtttt

SEQ ID NO: 607508 - DNA, 120 bp, Artificial Sequence
  ENSG00000175556_22 (sequence is synthesized)
gctttaatattctttctttcatagatcaatgactgtgtggttgaaatgtgaaaacaaagatactaataatgttgctgtataatttcactgacttgaggtctcattccaaatggttcaggt

SEQ ID NO: 607509 - DNA, 120 bp, Artificial Sequence
  ENSG00000175556_23 (sequence is synthesized)
tttatagagcattgtgtaaaataatgttcatacttctttctgttttaataatttattttttgcactactgtatccttttttctacatgtatgtttgtaactatttaagcgtacattgctg

SEQ ID NO: 607510 - DNA, 120 bp, Artificial Sequence
  ENSG00000175556_24 (sequence is synthesized)
aaaagtccattgctttatttattgatgtggtttaccatgtacctagggggaaataacaatactagaagtgtgcagtttttgcttttatcttttttttactacaatgacactagttcttag

SEQ ID NO: 607511 - DNA, 120 bp, Artificial Sequence
  ENSG00000175556_25 (sequence is synthesized)
gagacagtttggcatgtgccttggagatcctgtcaaagggcactgcctgttgtgtaattgaagctgtaacccagggacaggaaaataggcagaagtcccttgagccacagcatggggcta

SEQ ID NO: 607512 - DNA, 120 bp, Artificial Sequence
  ENSG00000175556_26 (sequence is synthesized)
cagaaatggctgggtgccagcccagggaaacagaactcatcaaggatctagtctctcgactccattctcaataaacaggtttgcagaatatggctgcatcctagagatcagaaatgttca

SEQ ID NO: 607513 - DNA, 120 bp, Artificial Sequence
  ENSG00000175556_27 (sequence is synthesized)
atcccacgagcatgtgcggggggagggggagcgcttgcgccccgctgccctgtgactcattgtcaccgcttcctatcacacgatcctcggctgaaatagatgcccccccttgcccgcccc

SEQ ID NO: 607514 - DNA, 120 bp, Artificial Sequence
  ENSG00000175556_28 (sequence is synthesized)
gccaacccgtagcctgtgccctcgcctccaacccctttaacctggccagcccggcgggaggccggcgcggcaactgcttggggatccctggggaccgtgggctggctacgaatgggtcac

SEQ ID NO: 607515 - DNA, 120 bp, Artificial Sequence
  ENSG00000175556_29 (sequence is synthesized)
gcctctgtcccgcttttcagtgccgcctgggagggttgggtgggctttgcagcttcaagggtaacgtgggcagtcccccatctccagctagactagggcacccgaatttccccagggagc

SEQ ID NO: 607516 - DNA, 120 bp, Artificial Sequence
  ENSG00000175556_30 (sequence is synthesized)
cgctctctgacccaccacgcctggacccaggaagtggctgctgagccgccagccggtgttgcccagctctggcagtttgccaggagctcggccgtggggcgcggtgtctggcgaagcatg

SEQ ID NO: 607517 - DNA, 120 bp, Artificial Sequence
  ENSG00000175556_31 (sequence is synthesized)
ccggggaggaggcagcagggctgggcaggcagggccctgggatccgagggtgtcctggacctgactctgtggagtggaggaggggtgtgggccggagtctccacgtgtttaatctccact

SEQ ID NO: 607518 - DNA, 120 bp, Artificial Sequence
  ENSG00000175556_32 (sequence is synthesized)
atgtgaagcccaaagacttctccttagtttcttttcaccatcagtcccgggggattctcaggaacattctcccgatatcctgaagctgttggcacctcaccctagattaaaggaaaacgt

SEQ ID NO: 607519 - DNA, 120 bp, Artificial Sequence
  ENSG00000175564_0 (sequence is synthesized)
agagacaacagtgaatgacaaggaggggccatccaatccctgctgccacctcctgggatggagccctagggagcccctgtgctgcccctgccgtggcaggactcacagccccaccgctgc

SEQ ID NO: 607520 - DNA, 120 bp, Artificial Sequence
  ENSG00000175564_1 (sequence is synthesized)
actgaagcccagggctgtggagcagcctctctccttggacctcctctcggccctaaagggactgggcagagccttccaggactatggttggactgaagccttcagacgtgcctcccacca

SEQ ID NO: 607521 - DNA, 120 bp, Artificial Sequence
  ENSG00000175564_2 (sequence is synthesized)
tggctgtgaagttcctgggggcaggcacagcagcctgttttgctgacctcgttacctttccactggacacagccaaggtccgcctgcagatccagggggagaaccaggcggtccagacgg

SEQ ID NO: 607522 - DNA, 120 bp, Artificial Sequence
  ENSG00000175564_3 (sequence is synthesized)
cccggctcgtgcagtaccgtggcgtgctgggcaccatcctgaccatggtgcggactgagggtccctgcagcccctacaatgggctggtggccggcctgcagcgccagatgagcttcgcct

SEQ ID NO: 607523 - DNA, 120 bp, Artificial Sequence
  ENSG00000175564_4 (sequence is synthesized)
ccatccgcatcggcctctatgactccgtcaagcaggtgtacacccccaaaggcgcggacaactccagcctcactacccggattttggccggctgcaccacaggagccatggcggtgacct

SEQ ID NO: 607524 - DNA, 120 bp, Artificial Sequence
  ENSG00000175564_5 (sequence is synthesized)
gtgcccagcccacagatgtggtgaaggtccgatttcaggccagcatacacctcgggccatccaggagcgacagaaaatacagcgggactatggacgcctacagaaccatcgccagggagg

SEQ ID NO: 607525 - DNA, 120 bp, Artificial Sequence
  ENSG00000175564_6 (sequence is synthesized)
aaggagtcaggggcctgtggaaaggaactttgcccaacatcatgaggaatgctatcgtcaactgtgctgaggtggtgacctacgacatcctcaaggagaagctgctggactaccacctgc

SEQ ID NO: 607526 - DNA, 120 bp, Artificial Sequence
  ENSG00000175564_7 (sequence is synthesized)
tcactgacaacttcccctgccactttgtctctgcctttggagccggcttctgtgccacagtggtggcctccccggtggacgtggtgaagacccggtatatgaactcacctccaggccagt

SEQ ID NO: 607527 - DNA, 120 bp, Artificial Sequence
  ENSG00000175564_8 (sequence is synthesized)
acttcagccccctcgactgtatgataaagatggtggcccaggagggccccacagccttctacaagggatttacaccctcctttttgcgtttgggatcctggaacgtggtgatgttcgtaa

SEQ ID NO: 607528 - DNA, 120 bp, Artificial Sequence
  ENSG00000175564_9 (sequence is synthesized)
gaaaacggtgcatccacgcacacatggacacagacccacacatgtttacagaactgttgtttacttgttgctgattcaagaaacagaagtagaagaggaggagggattctggtcttcact

SEQ ID NO: 607529 - DNA, 120 bp, Artificial Sequence
  ENSG00000175564_10 (sequence is synthesized)
gccatgcctcaagaacacctttgttttgcactgacaagatggaaaataaattatattaatttttgaaacccattaggcatgcctaatatttaggcaagagaaaataaaccaagatagatc

SEQ ID NO: 607530 - DNA, 120 bp, Artificial Sequence
  ENSG00000175564_11 (sequence is synthesized)
catttggacaaaatggaaggttggagacgtgtatccccgtgaaatctggttagataatgaatgataagcaggaaggatggcaagcacgggacaggaggggcccacaatggagtgggagat

SEQ ID NO: 607531 - DNA, 120 bp, Artificial Sequence
  ENSG00000175564_12 (sequence is synthesized)
cagccacggagcctggagggatgccacccagcaacacagagctggcgactgcagctgcaccatcacacatgcatcatcagcctatttgtaatatgtctgccacagagagtcctttgggat

SEQ ID NO: 607532 - DNA, 120 bp, Artificial Sequence
  ENSG00000175564_13 (sequence is synthesized)
tctaggaaacccaaggaacaagagaaaaaactagagcctgtgctaaagaagccctgctgggcccatgtgaggctggggctcgtaaatattccctgacgacactgaagaatcaagagggca

SEQ ID NO: 607533 - DNA, 120 bp, Artificial Sequence
  ENSG00000175564_14 (sequence is synthesized)
gcccccactttcctacaaaatggagggagccatcccttccctgtccacctcaccaggggtgctatgacatgcaagtgagaagctgggcatgaacgcactttataaaagcaaaagctctgt

SEQ ID NO: 607534 - DNA, 120 bp, Artificial Sequence
  ENSG00000175564_15 (sequence is synthesized)
gtaaatctaactacaaggacaatgccttgggagagattttgtcgggacagagaggagttgccagggaagaaggtttgaaagatacggttgtctagaggtgagaccaaaggatccagagac

SEQ ID NO: 607535 - DNA, 120 bp, Artificial Sequence
  ENSG00000175564_16 (sequence is synthesized)
ttggggaccagaggtgacagtggatgacgtgaagccacaggagccccacccccatgcagcctcttccccaccccccccaccacgtgctcaatcatgagtacctcaaaggattgttgggct

SEQ ID NO: 607536 - DNA, 120 bp, Artificial Sequence
  ENSG00000175564_17 (sequence is synthesized)
tgggggaaaagaggtggattcctgggcaagaacctaaagtagcaggactcggaattctcgggaaattattatgactcaataaaagaattcacaccttaggtgtgggagtaagaacagcca

SEQ ID NO: 607537 - DNA, 120 bp, Artificial Sequence
  ENSG00000175564_18 (sequence is synthesized)
cagcactccctcccagagaacaggggcttctttcttttcgaatgtggctaccgtgggtcaacctgggatgtagcggtgaagagtacagatgtaaatgccacaaagaagaagtttaaaaaa

SEQ ID NO: 607538 - DNA, 120 bp, Artificial Sequence
  ENSG00000175564_19 (sequence is synthesized)
ccatgcaagtaaaagaaaaaaagtgaaccatacctgatggggagggttagggaagcctgactgagaacaaacactccaggaataggtaaaagtactgcctgtctccagaggaagttagca

SEQ ID NO: 607539 - DNA, 120 bp, Artificial Sequence
  ENSG00000175564_20 (sequence is synthesized)
atcctgagacctcctggacctcctgccatggccattgagcaccacactgaccatggccagtgccttcctcactgtctccacacgctccacgttttcttgcacttactgctccctctgcgt

SEQ ID NO: 607540 - DNA, 120 bp, Artificial Sequence
  ENSG00000175564_21 (sequence is synthesized)
agagggagcaagaggagcaaaggcatggagggaagagggcctggcatcgtcagggaatgtgactagctgagtctggtgggagcaaacgggcccaggaggtggttagtggagggacaggct

SEQ ID NO: 607541 - DNA, 120 bp, Artificial Sequence
  ENSG00000175564_22 (sequence is synthesized)
gagagaggggcaggggccagctcgtgggcttctccctgagttggtgagccacagctgaggtggggacactgtgctatgccatcacagcacagccagcctctctggagaagagctaaatct

SEQ ID NO: 607542 - DNA, 120 bp, Artificial Sequence
  ENSG00000175564_23 (sequence is synthesized)
taactgagcccagaaacacccagcagcagggtggagttagaaccgcacctctgacacttactagccgcgggtctttggttgagctcttaacctccctgggcctcagtttgtgaaaaagag

SEQ ID NO: 607543 - DNA, 120 bp, Artificial Sequence
  ENSG00000175564_24 (sequence is synthesized)
cctggcagcaacatggctgccttatagaactgtgagaattcgctgcctaacacagtaacccgtctcaaaacatttacaccctcctttttgcgtttgggatcctggaacgtggtgatgttc

SEQ ID NO: 607544 - DNA, 120 bp, Artificial Sequence
  ENSG00000175564_25 (sequence is synthesized)
attcaagggataggaacgtgacctgtttttataggccaaattcatgcagcttaagtatggcaccacccaggcttctccctttctaaagcccctcctgggtaaggaagagttcctgggagc

SEQ ID NO: 607545 - DNA, 120 bp, Artificial Sequence
  ENSG00000175567_0 (sequence is synthesized)
actgcgaagcccagctgcgcgcgccttgggattgactgtccacgctcgcccggctcgtccgacgcgccctccgccagccgacagacacagccgcacgcactgccgtgttctccctgcggc

SEQ ID NO: 607546 - DNA, 120 bp, Artificial Sequence
  ENSG00000175567_1 (sequence is synthesized)
tcggacacatagtatgaccattaggtgtttcgtctcccacccattttctatggaaaaccaaggggatcgggccatgatagccactggcagctttgaagaacgggacacctttagagaagc

SEQ ID NO: 607547 - DNA, 120 bp, Artificial Sequence
  ENSG00000175567_2 (sequence is synthesized)
ttgatcttggaggcctcaccgtgagaccttacaaagccggctctgacctggacccctcatccctgcctgtcttgtggtattccggcagagttcctctatctcgtcttgttgctgattaaa

SEQ ID NO: 607548 - DNA, 120 bp, Artificial Sequence
  ENSG00000175567_3 (sequence is synthesized)
ggtgcccctgtctccagtttttctccatctcctgggacgtagcaggaaatcagcatcatggttgggttcaaggccacagatgtgccccctactgccactgtgaagtttcttggggctggc

SEQ ID NO: 607549 - DNA, 120 bp, Artificial Sequence
  ENSG00000175567_4 (sequence is synthesized)
acagctgcctgcatcgcagatctcatcacctttcctctggatactgctaaagtccggttacagatccaaggagaaagtcaggggccagtgcgcgctacagccagcgcccagtaccgcggt

SEQ ID NO: 607550 - DNA, 120 bp, Artificial Sequence
  ENSG00000175567_5 (sequence is synthesized)
gtgatgggcaccattctgaccatggtgcgtactgagggcccccgaagcctctacaatgggctggttgccggcctgcagcgccaaatgagctttgcctctgtccgcatcggcctgtatgat

SEQ ID NO: 607551 - DNA, 120 bp, Artificial Sequence
  ENSG00000175567_6 (sequence is synthesized)
taaaggtccgattccaagctcaggcccgggctggaggtggtcggagataccaaagcaccgtcaatgcctacaagaccattgcccgagaggaagggttccggggcctctggaaagggacct

SEQ ID NO: 607552 - DNA, 120 bp, Artificial Sequence
  ENSG00000175567_7 (sequence is synthesized)
ctcccaatgttgctcgtaatgccattgtcaactgtgctgagctggtgacctatgacctcatcaaggatgccctcctgaaagccaacctcatgacagatgacctcccttgccacttcactt

SEQ ID NO: 607553 - DNA, 120 bp, Artificial Sequence
  ENSG00000175567_8 (sequence is synthesized)
ctgcctttggggcaggcttctgcaccactgtcatcgcctcccctgtagacgtggtcaagacgagatacatgaactctgccctgggccagtacagtagcgctggccactgtgcccttacca

SEQ ID NO: 607554 - DNA, 120 bp, Artificial Sequence
  ENSG00000175567_9 (sequence is synthesized)
tgctccagaaggaggggccccgagccttctacaaagggttcatgccctcctttctccgcttgggttcctggaacgtggtgatgttcgtcacctatgagcagctgaaacgagccctcatgg

SEQ ID NO: 607555 - DNA, 120 bp, Artificial Sequence
  ENSG00000175567_10 (sequence is synthesized)
ctgcctgcacttcccgagaggctcccttctgagcctctcctgctgctgacctgatcacctctggctttgtctctagccgggccatgctttccttttcttccttctttctcttccctcctt

SEQ ID NO: 607556 - DNA, 120 bp, Artificial Sequence
  ENSG00000175567_11 (sequence is synthesized)
cccttctctccttccctctttccccacctcttccttccgctcctttacctaccaccttccctctttctacattctcatctactcattgtctcagtgctggtggagttgacatttgacagt

SEQ ID NO: 607557 - DNA, 120 bp, Artificial Sequence
  ENSG00000175567_12 (sequence is synthesized)
gtgggaggcctcgtaccagccaggatcccaagcgtcccgtcccttggaaagttcagccagaatcttcgtcctgcccccgacagcccagcctagcccacttgtcatccataaagcaagctc

SEQ ID NO: 607558 - DNA, 120 bp, Artificial Sequence
  ENSG00000175567_13 (sequence is synthesized)
gaagcaggaatgtgggcatcatcagtgaaatctctgcatacagcagacaaagggctggtccagtggctgtttatgaggcagcgctaggagagctctgatccagactctccctgcagtgaa

SEQ ID NO: 607559 - DNA, 120 bp, Artificial Sequence
  ENSG00000175567_14 (sequence is synthesized)
agggagggagcccttcatgaagtattgactgcttgagcaggaattgcttcaccagcacctaactgagtgcctctcgagctcacatcggttttccctcatgaggccacttggagtcttgct

SEQ ID NO: 607560 - DNA, 120 bp, Artificial Sequence
  ENSG00000175567_15 (sequence is synthesized)
gggcagcagctgggtcttattcttctctggccttcacaacatcctgcaacccagctcaaggtcaggaatgtgacagactcatgtcatcatatctctgatgcccagagaagggataccatt

SEQ ID NO: 607561 - DNA, 120 bp, Artificial Sequence
  ENSG00000175567_16 (sequence is synthesized)
aaatgagtgcaagcccgctggccactgaccccatggctcgcccacagatgccagcattgggagccgcctcctagcaggcagcaccacaggtgccctggctgtggctgtggcccagcccac

SEQ ID NO: 607562 - DNA, 120 bp, Artificial Sequence
  ENSG00000175567_17 (sequence is synthesized)
agccaacctcatgacaggcttctgcaccactgtcatcgcctcccctgtagacgtggtcaagacgagatacatgaactctgccctgggccagtacagtagcgctggccactgtgcccttac

SEQ ID NO: 607563 - DNA, 120 bp, Artificial Sequence
  ENSG00000175567_18 (sequence is synthesized)
aaaagaggaagtgcacttaagacacggccccgctggacgctgttagaaaccgtcctggctgggaaggcaagaggtgtgtgactggacaagacttgtttctggcggtcagtcttgccatcc

SEQ ID NO: 607564 - DNA, 120 bp, Artificial Sequence
  ENSG00000175567_19 (sequence is synthesized)
tcacagaggttggcggcccgagagagtgtgaggcagaggcggggagtggcaagggagtgaccatctcggggaacgaaggagtaaacgcggtgatgggacgcacggaaacgggagtggaga

SEQ ID NO: 607565 - DNA, 120 bp, Artificial Sequence
  ENSG00000175567_20 (sequence is synthesized)
aagtcatggagagaaccctaggcggggcggtccccgcggaaaggcggctgctccagggtctccgcacccaagtaggagctggcaggcccggccccgccccgcaggccccaccccgggccc

SEQ ID NO: 607566 - DNA, 120 bp, Artificial Sequence
  ENSG00000175567_21 (sequence is synthesized)
ggaggcctcaccgtgagaccttacaaagccgggtaagagtccagtccaaggaagaggtctcttgctgcctcctaaccctgtggtctaggggcaggagtcagcagggcattaacaaaaata

SEQ ID NO: 607567 - DNA, 120 bp, Artificial Sequence
  ENSG00000175567_22 (sequence is synthesized)
attaccatccccacccccgacagtgaagtggctctttccagttcacagagcactctcacacctccccgctctcattctggcccttcagctgactcggacaagccaaggatcttggtcccc

SEQ ID NO: 607568 - DNA, 120 bp, Artificial Sequence
  ENSG00000175567_23 (sequence is synthesized)
attttataaaggagaaaactgaggcccacgtgtaacagtgattggccccaagtcatcccgggagccagcagaagagctaggacaggaacctattgttctaacttcatattgatgctagct

SEQ ID NO: 607569 - DNA, 80 bp, Artificial Sequence
  ENSG00000175573_0 (sequence is synthesized)
aaagttgttgttgaggtggcgcggcgctaagatggcggcggcggcggcggcggccgtggcgggggtggggcgcggtggcg

SEQ ID NO: 607570 - DNA, 120 bp, Artificial Sequence
  ENSG00000175573_1 (sequence is synthesized)
ctgggccggcgtcgaacgcagcgaaggccggaggatggaaccaggtgaggagctggaagaggagggctctccaggtggccgtgaggatggcttcaccgccgagcacctggctgcagaggc

SEQ ID NO: 607571 - DNA, 120 bp, Artificial Sequence
  ENSG00000175573_2 (sequence is synthesized)
catggcagctgacatggacccctggctagtgtttgatgcccgcacaacgcctgccactgagctggatgcctggctggccaagtacccaccatcccaagttacccgctatggggaccccgg

SEQ ID NO: 607572 - DNA, 120 bp, Artificial Sequence
  ENSG00000175573_3 (sequence is synthesized)
ttcacccaactcagagcctgtgggctggattgcagtgtatgggcagggctacagccccaactccggggacgtgcagggcctgcaggcagcctgggaagctctgcagaccagtgggcggcc

SEQ ID NO: 607573 - DNA, 120 bp, Artificial Sequence
  ENSG00000175573_4 (sequence is synthesized)
catcacaccgggtaccctgcgccagctcgccatcacccaccacgtgctctcgggcaagtggcttatgcatctggcaccgggcttcaagctggaccacgcctgggctggcattgcccgggc

SEQ ID NO: 607574 - DNA, 120 bp, Artificial Sequence
  ENSG00000175573_5 (sequence is synthesized)
cgtggttgaaggccagcttcaggtggccaaggtgagcccacgtgccaaggagggtgggcgccaggtcatctgtgtttacacggacgacttcacggaccgcttgggtgtactggaggcgga

SEQ ID NO: 607575 - DNA, 120 bp, Artificial Sequence
  ENSG00000175573_6 (sequence is synthesized)
gtttccagcttgggggtagtgcccgtggctcccgagtgcttgaccgtgccaacaacgtggaactgacctaggggggccaaattggggagactgcccactcccccctccatgctggggttg

SEQ ID NO: 607576 - DNA, 120 bp, Artificial Sequence
  ENSG00000175573_7 (sequence is synthesized)
gatcctcctgtcttcctccttgtcctatgaaggccacaccccccagctctggggactcctaggtcacttgggaactacctgcatcttcagtccccttgaacttctgccctctgttcaggg

SEQ ID NO: 607577 - DNA, 120 bp, Artificial Sequence
  ENSG00000175573_8 (sequence is synthesized)
ctgacacaagccccacaggctggggggctccggttccctgagggatgagccttcagcctccctttgtaatgctgctcctctccactgcccagcaccatgagttgggtgcagacacctaga

SEQ ID NO: 607578 - DNA, 120 bp, Artificial Sequence
  ENSG00000175573_9 (sequence is synthesized)
aggagagacttcttggaacgctcatcccccgctatacctccccttcctcctgcatctccccttctttccttccccctcaggagagagaaaacttagtgcttccagcccttcttggagcct

SEQ ID NO: 607579 - DNA, 120 bp, Artificial Sequence
  ENSG00000175573_10 (sequence is synthesized)
tcatggtccaggggtaggggccccactggcctgagcatgccattttgaggggagggtagttgtgcctacttatcccctggcagaggggatgccaggaccatggacatgaggcttgcccat

SEQ ID NO: 607580 - DNA, 120 bp, Artificial Sequence
  ENSG00000175573_11 (sequence is synthesized)
ccctgccaacttacacagcctgtaccactgtccccccttccttggctactttgacatgtgcctgctcctggcatttcaataaaacccggcttgggtctgtgtcttgagtgttttttaaaa

SEQ ID NO: 607581 - DNA, 120 bp, Artificial Sequence
  ENSG00000175573_12 (sequence is synthesized)
caggaacagttgttatcccattgtaaagatgaggcaactgaggcgcatcgacagtaactcttactcaaggccacagtttaatccagtgcctggcatctgtagttattgtctcagaccctg

SEQ ID NO: 607582 - DNA, 120 bp, Artificial Sequence
  ENSG00000175575_0 (sequence is synthesized)
gactcacttccgggaaggggcggaagaggtgggctggtggaggcggggtcgagatggcggcgcctttgaggattcagagcgactgggcgcaagccctcaggaaggatgaaggggaggcct

SEQ ID NO: 607583 - DNA, 120 bp, Artificial Sequence
  ENSG00000175575_1 (sequence is synthesized)
ggctgagctgtcatcccccagggaaaccatctttgtatggcagcctgacttgtcaaggaattggcctagatggcatcccagaggttacagcttcagaaggatttactgtgaatgaaataa

SEQ ID NO: 607584 - DNA, 120 bp, Artificial Sequence
  ENSG00000175575_2 (sequence is synthesized)
acaagaaaagcattcatatttcatgtccaaaggaaaatgcatcttctaagtttttggcaccatatactactttttccagaattcatacaaagagtataacatgcctggacatttccagca

SEQ ID NO: 607585 - DNA, 120 bp, Artificial Sequence
  ENSG00000175575_3 (sequence is synthesized)
gaggaggtcttggtgtgtcttctagtactgacgggaccatgaaaatctggcaggcttccaatggagaactcaggagagtattggaaggacatgtgtttgatgtgaattgttgcaggtttt

SEQ ID NO: 607586 - DNA, 120 bp, Artificial Sequence
  ENSG00000175575_4 (sequence is synthesized)
tcccatcaggccttgtggtcctgagtgggggaatggatgcccagctgaagatatggtcagctgaagatgctagctgcgtggtgaccttcaaaggtcacaaaggaggtatcctggatacag

SEQ ID NO: 607587 - DNA, 120 bp, Artificial Sequence
  ENSG00000175575_5 (sequence is synthesized)
ccatcgttgatcgggggaggaatgtggtgtctgcttctcgagatgggacagcacgactttgggattgtgggcgctcagcctgcttgggagtccttgcagattgtggttcttctatcaatg

SEQ ID NO: 607588 - DNA, 120 bp, Artificial Sequence
  ENSG00000175575_6 (sequence is synthesized)
gagtggcggtgggtgctgctgacaactccataaaccttggctcccctgagcagatgcccagtgaacgggaggttggaacagaggccaaaatgctgctcttggcccgggaagataagaaac

SEQ ID NO: 607589 - DNA, 120 bp, Artificial Sequence
  ENSG00000175575_7 (sequence is synthesized)
ttcagtgcttgggactacagagcaggcagctggtgttcctctttattggctcagacgctttcaactgctgtacttttctctctggcttcttgctattggctgggactcaagatggaaaca

SEQ ID NO: 607590 - DNA, 120 bp, Artificial Sequence
  ENSG00000175575_8 (sequence is synthesized)
tttatcagctggatgtgaggagtccaagggctccggtacaagtcatccacagatcaggagcaccagttctatccctgctaagtgtcagagatggattcattgctagccaaggtgatggaa

SEQ ID NO: 607591 - DNA, 120 bp, Artificial Sequence
  ENSG00000175575_9 (sequence is synthesized)
gctgttttattgtccagcaagacttagactatgtcactgagctcactggggctgactgtgaccctgtgtacaaggtagccacatgggagaagcagatctacacatgctgtcgagacggtc

SEQ ID NO: 607592 - DNA, 120 bp, Artificial Sequence
  ENSG00000175575_10 (sequence is synthesized)
ttgtacgacgctaccagctttctgacctctgacttcttggaaagagcagtcccggttagtgaaaaggtttgaccctgatcaacaatgagcagaaacatcatcagtccttcccaaggacca

SEQ ID NO: 607593 - DNA, 120 bp, Artificial Sequence
  ENSG00000175575_11 (sequence is synthesized)
tggcgtttaatgtcttgggcaccccttggaaatcacagaaagtcagctgtactggccgtgtggaactctcatcccaagacctactttgaactgagtaagaaggtcattgtgcccactgca

SEQ ID NO: 607594 - DNA, 120 bp, Artificial Sequence
  ENSG00000175575_12 (sequence is synthesized)
tttgttccaacttctccttgtataaactcaccccagcaacacagggcaaggatatagatgcttttagtttgttcttaaaccagttttgttaaatgtttacaaggacctcagtactaaagc

SEQ ID NO: 607595 - DNA, 120 bp, Artificial Sequence
  ENSG00000175575_13 (sequence is synthesized)
ctgttctctggaggaaataaagaaaatatgtttggaggtgcctgaatatgaagaactttgttaaatactcttactccagcaaaaagttggtcaggacgatggaattccttcctcagcact

SEQ ID NO: 607596 - DNA, 120 bp, Artificial Sequence
  ENSG00000175575_14 (sequence is synthesized)
ccctgttgcctggccatagagaaggcctgcttggcagtagcaataaatgtcctgtaagctgccacctgggagagattcttatgcaggtggtaaccaactgtcccagtttgcttggaacta

SEQ ID NO: 607597 - DNA, 120 bp, Artificial Sequence
  ENSG00000175575_15 (sequence is synthesized)
aggggttttctgtgacttgaaactttcaatgccaaaactggggcagtctcaaaccaacatgattggtcagcctatatgtaggtgaggaaactgaatcataagcattgtaaaggcattggc

SEQ ID NO: 607598 - DNA, 120 bp, Artificial Sequence
  ENSG00000175575_16 (sequence is synthesized)
tgtcaaagtgtggttcttagaacagcagcatcagtatcacctgggaacttgacaggaaatagaaattgttaggcccaatcctagacctaaatcagaaattctacgggtgcagccagcagt

SEQ ID NO: 607599 - DNA, 120 bp, Artificial Sequence
  ENSG00000175575_17 (sequence is synthesized)
ctgtattttaacaagcattccaggtgattctgatgtatgctaaagcttgagagccactgatctagaggaagagatggtggagggcactttagtcacagctggaacccagggctcaaaatg

SEQ ID NO: 607600 - DNA, 120 bp, Artificial Sequence
  ENSG00000175575_18 (sequence is synthesized)
acaagatcggtctgtaggagatgaggccacagaggttggcagagcccaaatagtgaaggagcacgaatgttagctaaggagctcagactttacgtggttggcagtggggaaccactgaag

SEQ ID NO: 607601 - DNA, 120 bp, Artificial Sequence
  ENSG00000175575_19 (sequence is synthesized)
ggttttaagcaagagaatggcatggtcacctccttttttctctaaacataaaaatggaatcataatgtatgtattccatggcttattttcacttaatgtctctgagattttccatctcag

SEQ ID NO: 607602 - DNA, 120 bp, Artificial Sequence
  ENSG00000175575_20 (sequence is synthesized)
tattagagaaaagtttcttgaaagatgtaacacttgagctgggacatgcagattaagatttttatttatttaacggaggaaggtcatttctggctggggtaataatgttgttgacagagt

SEQ ID NO: 607603 - DNA, 72 bp, Artificial Sequence
  ENSG00000175575_21 (sequence is synthesized)
acaggtgtgagccaccgtacccggccggccaccagagtttttaaaggcgtattctcatgtaaattgttggca

SEQ ID NO: 607604 - DNA, 70 bp, Artificial Sequence
  ENSG00000175575_22 (sequence is synthesized)
ctgcctaaaccatgggtgcacaccaccacactcggctaattttttaaattttttgtagagacagagtctc

SEQ ID NO: 607605 - DNA, 79 bp, Artificial Sequence
  ENSG00000175575_23 (sequence is synthesized)
attcctcccaccttggcctctcatagtgctggcattacaggcatgagccacggcactcaaccaggaactttgtcttaac

SEQ ID NO: 607606 - DNA, 120 bp, Artificial Sequence
  ENSG00000175575_24 (sequence is synthesized)
ggcatgagccacggcactcaaccaggaactttgtcttaactttaaatcccatttttttctacaacaccctgttacttaaaccaaagtgtaaaaagaaaatactgcaattcatttaatatc

SEQ ID NO: 607607 - DNA, 120 bp, Artificial Sequence
  ENSG00000175575_25 (sequence is synthesized)
tactctgttctagatactatatttatatatctaattcttacaagactcaaaaagcgaatgttattatttgttttattccgataaggaaactgagactcaatacattaaataccagaggct

SEQ ID NO: 607608 - DNA, 120 bp, Artificial Sequence
  ENSG00000175575_26 (sequence is synthesized)
tcatttggaccttggacagcaccttctgctgcactgtgtaatcacaggcaggtagcaagagacttttgtgactagagcaatttcatttcaaggtgcagtttgtgacagggtcaggtagac

SEQ ID NO: 607609 - DNA, 120 bp, Artificial Sequence
  ENSG00000175575_27 (sequence is synthesized)
agaccagaatggacatattccagaacttagaaacattaaatcctaggagctccaggtggaacatctaagaagtcagattaagaaaacaggatgaggctgggcatggtggctcacgcctat

SEQ ID NO: 607610 - DNA, 72 bp, Artificial Sequence
  ENSG00000175575_28 (sequence is synthesized)
gggaggccgaggcgggcggatcacaacaaaaaatacaaaaaaatttagccaggcatggtggcaggcacctat

SEQ ID NO: 607611 - DNA, 83 bp, Artificial Sequence
  ENSG00000175575_29 (sequence is synthesized)
ggcaggagaatggtgtgaacctggcaggcagagcttgcagtaagctgagatcggtatctcaagaaaaaaaaaaagaaaaaaag

SEQ ID NO: 607612 - DNA, 90 bp, Artificial Sequence
  ENSG00000175575_30 (sequence is synthesized)
aaaaaaagaaaaaaagaaaacaggaagaaatgttgtcatttatttgtagaatctgaaacatttgaactcatagaagcagtgagtggaaga

SEQ ID NO: 607613 - DNA, 75 bp, Artificial Sequence
  ENSG00000175575_31 (sequence is synthesized)
ctttgggaggctggggtgggtggatcgctggagcccaggaattggagaccagcctgcacaacatgaggaaacgca

SEQ ID NO: 607614 - DNA, 63 bp, Artificial Sequence
  ENSG00000175575_32 (sequence is synthesized)
tgaacccaggaggtggagggctctcaaaaaagaaaaaaaaaatatgtatatatatatgtatat

SEQ ID NO: 607615 - DNA, 120 bp, Artificial Sequence
  ENSG00000175575_33 (sequence is synthesized)
atgtatatatatatgtatatatatatatttatatatgtagaagcagtgagtagaatggtggttacagagactcggggaggaggaatggggaaatgatggtcatagggtgcaaagtctcag

SEQ ID NO: 607616 - DNA, 120 bp, Artificial Sequence
  ENSG00000175575_34 (sequence is synthesized)
gaggaatatattgtgttttgagatctattgcatagcatggtagattgctaagagtaaatttcaaatgttctcaacccaaaaaatgttaagcatttgaggtgatggatatgttaactggct

SEQ ID NO: 607617 - DNA, 120 bp, Artificial Sequence
  ENSG00000175575_35 (sequence is synthesized)
tcatttaattattccatattgtatttataagtcacaataggactttgtggcccataattataaacaagtataaattgtccatttacaattaaaaatcaattaaaagaaaagaggataagg

SEQ ID NO: 607618 - DNA, 120 bp, Artificial Sequence
  ENSG00000175575_36 (sequence is synthesized)
aagaggtgggctggtggaggcggggtcgagatggcggcgcctttgaggattcagagcgactgggcgcaagccctcaggaaggatgaaggggaggcctggctgagctgtcatcccccagcc

SEQ ID NO: 607619 - DNA, 120 bp, Artificial Sequence
  ENSG00000175575_37 (sequence is synthesized)
agctgtcatcccccaggtaatacccatgaattatatatgctgtgactttaaaggagaaggattaatacccttaaaagaaagcttcctactttctcctggcccagcctccttacataatag

SEQ ID NO: 607620 - DNA, 120 bp, Artificial Sequence
  ENSG00000175575_38 (sequence is synthesized)
tctgcaaacatgcttgaccagtctgtactgtatggccaacaccccaactcctccattccaagggaaggccttcagattgattttccatttgaaagccacagacttattcatggagacatt

SEQ ID NO: 607621 - DNA, 120 bp, Artificial Sequence
  ENSG00000175575_39 (sequence is synthesized)
gttgatgcatcttaattagtcacttaccctgtgctattgtattctaagcacttctgcagcttcaactgggactttcttgatgataatttctagatctacagccccagccctgacttctcc

SEQ ID NO: 607622 - DNA, 120 bp, Artificial Sequence
  ENSG00000175575_40 (sequence is synthesized)
atgttcaagcagagattgatcagttgtttgctagatatttctgcttaaaggtctcactgtcaccttaagttactggacttactgaagtccaaaaccaagctaagtacatttgttgtcaag

SEQ ID NO: 607623 - DNA, 120 bp, Artificial Sequence
  ENSG00000175575_41 (sequence is synthesized)
tgagttctctttcctgatttttctcatttcttaagttaccatcatttttctaggcatcagagtgaaaaacctagttacttgaccctgccatatccaggaagctcccaagtcttatcaatt

SEQ ID NO: 607624 - DNA, 120 bp, Artificial Sequence
  ENSG00000175575_42 (sequence is synthesized)
tttcttttgaacaacagtcttatatcattcacaggattcttttcaaattgtaaccgaggtggtaccattctaaaacaaatcaaccttccttctaaattctgtaagaaagttttgttttgc

SEQ ID NO: 607625 - DNA, 120 bp, Artificial Sequence
  ENSG00000175575_43 (sequence is synthesized)
cttccttctaaattctgtaagaaagttttgttttgctgattatctttcatttcaaatgctgctgatatattgtatttctatgagaaataaagttttggccaggcacagtggctcacacct

SEQ ID NO: 607626 - DNA, 89 bp, Artificial Sequence
  ENSG00000175575_44 (sequence is synthesized)
gatctttatgatcgaaccattgcacttttgcctgggtgacagagtgagaccccatcattaaaaaaaaaaagactattgtttatatcagt

SEQ ID NO: 607627 - DNA, 120 bp, Artificial Sequence
  ENSG00000175575_45 (sequence is synthesized)
ccccatcattaaaaaaaaaaagactattgtttatatcagtggaataaaggatggactttatagtgctgtgacttgccaatcatcttaaaaataaggccagacgtgggggctcatacctgt

SEQ ID NO: 607628 - DNA, 120 bp, Artificial Sequence
  ENSG00000175575_46 (sequence is synthesized)
catccaccattctgggaggccaaggcggaggattgcttgagaccagcctgggagacatagggagacctcgtgtctacagcaaataaaactagctgggcatggtgttgggtgtctgtagtc

SEQ ID NO: 607629 - DNA, 120 bp, Artificial Sequence
  ENSG00000175575_47 (sequence is synthesized)
ccagctactcaagaggcagaggtgggaggattgctcaagcccagcaagtcaaggctgcagtgagctgtgattatgctactggacctcctaccctggacaagggtagccgtgatcatgctg

SEQ ID NO: 607630 - DNA, 120 bp, Artificial Sequence
  ENSG00000175575_48 (sequence is synthesized)
cgtggtctcctaccctggaccagaaagtgagaccctggctctaaaaaaagaaacacacacacaaatacacaaatatatatatatacacacacacatatacatatgtatacttaacataaa

SEQ ID NO: 607631 - DNA, 120 bp, Artificial Sequence
  ENSG00000175575_49 (sequence is synthesized)
aattcaaggaaaatactgtattttattttacctattttattgtgcttaattatgttcaaaaatcctattctaactgcttgagctaggattgtgccactgtacttcagcctgagagacaga

SEQ ID NO: 607632 - DNA, 89 bp, Artificial Sequence
  ENSG00000175575_50 (sequence is synthesized)
agctaggattgtgccactgtacttcagcctgagagacagagcaaaaccctgtctcagttaaaaaaaaaaaaaaaagccaggtgcggtgg

SEQ ID NO: 607633 - DNA, 85 bp, Artificial Sequence
  ENSG00000175575_51 (sequence is synthesized)
actcgggagcggcttgcagtgagaccagatagtgccaccgcattccagcttggatgactgagcaagactctgtctcgaaaaaaaa

SEQ ID NO: 607634 - DNA, 120 bp, Artificial Sequence
  ENSG00000175575_52 (sequence is synthesized)
gtgtgattttggacaaataacttagttctctgagtctcagtttcctcatcaataaagctgagatcctattctacctcctagaatggttaatggggaatgagactgcatgtggatgaatct

SEQ ID NO: 607635 - DNA, 120 bp, Artificial Sequence
  ENSG00000175575_53 (sequence is synthesized)
ataaaatactacagaagttagttttggttcttttaccataacaatcctgtgggattggcattttaaatttccattttgcagataagcaaaccaactcagagaggttaattaatctcaaat

SEQ ID NO: 607636 - DNA, 120 bp, Artificial Sequence
  ENSG00000175575_54 (sequence is synthesized)
aatcaaagacagactgtatgctggaattgaaacccagttctgttgattccaagtttagcactaccatgcaagcctacgtttttcccaggtgttttggcacagcctgggtgctgacttctt

SEQ ID NO: 607637 - DNA, 120 bp, Artificial Sequence
  ENSG00000175575_55 (sequence is synthesized)
catcccccagctgattgttaaaaagatcctggcatctcccttctctctcttacttcctctctcaccatgtgatctctgcatacactggctccccttctccttctgccatgagtggaagca

SEQ ID NO: 607638 - DNA, 120 bp, Artificial Sequence
  ENSG00000175575_56 (sequence is synthesized)
acttcacctgacttttaacacaggcacctgtttttctttcgtgggccaatttcatgggtatactatttatacagatgcctgaattgggtcttcaaagagaaaaataataaatttttctta

SEQ ID NO: 607639 - DNA, 120 bp, Artificial Sequence
  ENSG00000175575_57 (sequence is synthesized)
tcccctgagcagatgcccagtgttcctctttattggctcagacgctttcaactgctgtacttttctctctggcttcttgctattggctgggactcaagatggaaacatttatcagctgga

SEQ ID NO: 607640 - DNA, 120 bp, Artificial Sequence
  ENSG00000175575_58 (sequence is synthesized)
aggtgggctggtggaggcggggtcgagatggcggcgcctttgaggattcagagcgactgggcgcaagccctcaggtgaatccaggcccagaacagagtcagaggaggcgggtagtggatg

SEQ ID NO: 607641 - DNA, 120 bp, Artificial Sequence
  ENSG00000175575_59 (sequence is synthesized)
ttgctttgcgtcaaggagagccatgcctggtccaggatatcaataggggttacttcgtcaattgtcgagggatatggagggaacagggtccggaaaaagaagtatcaaacccgtatggtc

SEQ ID NO: 607642 - DNA, 120 bp, Artificial Sequence
  ENSG00000175575_60 (sequence is synthesized)
gtgggctggtggaggcggggtcgagatggcggcgcctttgaggattcagagcgactgggcgcaagccctcaggaaggatgaaggggaggcctggctgagctgtcatcccccagtggaagc

SEQ ID NO: 607643 - DNA, 120 bp, Artificial Sequence
  ENSG00000175581_0 (sequence is synthesized)
gtcaaggccgttccttcagtgttttcagacgccctgggaacgcggctgcagggtccggtcttcggtttgcacagctagaggccgcgcagcagcaaaggatgagcggaaccttggaaaagg

SEQ ID NO: 607644 - DNA, 120 bp, Artificial Sequence
  ENSG00000175581_1 (sequence is synthesized)
tgctgtgcctgaggaacaataccatttttaagcaagccttttctctcttaaggtttagaacttcaggagagaagcccatctattctgtaggtggaattctactaagtatcagtcggccct

SEQ ID NO: 607645 - DNA, 120 bp, Artificial Sequence
  ENSG00000175581_2 (sequence is synthesized)
acaagacaaagcccacccacggcattggaaagtacaagcacttaattaaagcagaagagcccaagaagaagaagggaaaagtggaagtgagagccattaatttggggacagattatgaat

SEQ ID NO: 607646 - DNA, 120 bp, Artificial Sequence
  ENSG00000175581_3 (sequence is synthesized)
atggggttttaaatattcatctgactgcatatgatatgaccctggcagagagttatgcccagtatgttcacaacctctgcaactctctctccattaaagtcgaggaaagttatgcaatgc

SEQ ID NO: 607647 - DNA, 120 bp, Artificial Sequence
  ENSG00000175581_4 (sequence is synthesized)
caaccaaaaccatagaagtgttgcagttgcaggaccaaggcagcaaaatgctcctggactcagtgcttaccacccatgagcgagtggttcagatcagcggtttgagtgctacgtttgcag

SEQ ID NO: 607648 - DNA, 120 bp, Artificial Sequence
  ENSG00000175581_5 (sequence is synthesized)
aaattttcttggaaataatccaaagcagtcttcctgaaggagtcagactgtcagtgaaggagcacactgaagaagacttcaagggacgattcaaagctcgaccagaactggaagaactgt

SEQ ID NO: 607649 - DNA, 120 bp, Artificial Sequence
  ENSG00000175581_6 (sequence is synthesized)
caaagagaagagcttactgggtagttagagttcatcaggagacccaacccttagatttcataagtacccattcccatagccagtaatgtcctcactcctctgtggcttggctgtacttgc

SEQ ID NO: 607650 - DNA, 120 bp, Artificial Sequence
  ENSG00000175581_7 (sequence is synthesized)
catttcttaccacttacctatgaggtaatgcttgttatcttccatctaataaaaatctgctgcagatgtgtatatgtatgtgtgtgtgagagagagaaattggcccatcctgtggagtat

SEQ ID NO: 607651 - DNA, 85 bp, Artificial Sequence
  ENSG00000175581_8 (sequence is synthesized)
tcaggactgctcgaggccaggagcttgagaccagcctggcaacattctgtctttaccaaaaacattcttttttttttttccgaaa

SEQ ID NO: 607652 - DNA, 75 bp, Artificial Sequence
  ENSG00000175581_9 (sequence is synthesized)
actgctcgaggccaggagcttgagaccagcctggcaacattctgtctttaccaaaaacattcttttttttttttc

SEQ ID NO: 607653 - DNA, 60 bp, Artificial Sequence
  ENSG00000175581_10 (sequence is synthesized)
gcgcacttcaaccccaagaagaagaagggaaaagtggaagtgagagccattaatttgggg

SEQ ID NO: 607654 - DNA, 120 bp, Artificial Sequence
  ENSG00000175581_11 (sequence is synthesized)
gtggttcaggtaggcactccaggagaataaaaaatgtatttgcttctcctggttcttttctctgtccactttttcactttctattatgctcttttcttttctttcttgaataatagtgtt

SEQ ID NO: 607655 - DNA, 120 bp, Artificial Sequence
  ENSG00000175581_12 (sequence is synthesized)
ctccaggttcagttcttgatgcctccatctctccttttataataccttccccctatgcagtctcattcattccttaggcctcagtgatcatcatttaatactgataacccccagatgtat

SEQ ID NO: 607656 - DNA, 120 bp, Artificial Sequence
  ENSG00000175581_13 (sequence is synthesized)
atatctccagtcctgatctgttggctgaggcttgaaacttgatacccagttgtctactggccttctcgacttggatgttccacaggagtcctccctgcactctgtctatgcaaaattagt

SEQ ID NO: 607657 - DNA, 120 bp, Artificial Sequence
  ENSG00000175581_14 (sequence is synthesized)
tgtagagggactgattttcctctttttctgtaatcctccccacctttgagcctaatgtgtcacccttctttgtcctctgatatccattcattcaccaaattctatagcttctacctccta

SEQ ID NO: 607658 - DNA, 74 bp, Artificial Sequence
  ENSG00000175581_15 (sequence is synthesized)
tctgtagagagagacggtcttgcttgtggcccaggcttgagtacagtggcatgatcatagctccctgcagcctc

SEQ ID NO: 607659 - DNA, 120 bp, Artificial Sequence
  ENSG00000175581_16 (sequence is synthesized)
cctgggaacgcggctgcagggtccggtcttcggtttgcacagctagaggccgcgcagcagcaaaggatgagcggaaccttggaaaaggctggtctggaactcctggaaaagagcccatgg

SEQ ID NO: 607660 - DNA, 120 bp, Artificial Sequence
  ENSG00000175581_17 (sequence is synthesized)
aaatctgtcattaaggccagcatctgacatgggtatataaggcctctcgacgtctgatgccactgttctcttcccgactccttagttgctttagtcagctaacctcgtcattatttgcca

SEQ ID NO: 607661 - DNA, 120 bp, Artificial Sequence
  ENSG00000175581_18 (sequence is synthesized)
agaatgctctgtttttttgttaaactaggcttttgagatacagtttacatgtagtaaaattaactctttttagttatataatgtactacaataaaaatatagactagttctattaacctg

SEQ ID NO: 607662 - DNA, 90 bp, Artificial Sequence
  ENSG00000175581_19 (sequence is synthesized)
gctaatttttatgttttttgcagagctgggattttgccatgttatccaggctggtcctgaactcctaggctcaagaggaattataggcgt

SEQ ID NO: 607663 - DNA, 120 bp, Artificial Sequence
  ENSG00000175581_20 (sequence is synthesized)
gagccactgtgcctagctgatactatttttgtacatgcttccagagatattttttaaatatgcaagcaaataagcatgtatgtaattacacacatgcacacacacacatatctattctct

SEQ ID NO: 607664 - DNA, 120 bp, Artificial Sequence
  ENSG00000175581_21 (sequence is synthesized)
tccagctcccccattttatatgtgtggcaacattttgaacacattattctacagtttgcttttatcatttgttttatcttaaagacctttccagtatctgtacataaagaagtggttatt

SEQ ID NO: 607665 - DNA, 83 bp, Artificial Sequence
  ENSG00000175581_22 (sequence is synthesized)
ttccagtatctgtacataaagaagtggttctgtcgctcaggttcgagtgcagtggcgggatctcagctcattgcaacctccgc

SEQ ID NO: 607666 - DNA, 120 bp, Artificial Sequence
  ENSG00000175581_23 (sequence is synthesized)
acagacgtgagccaccgcgcccggccccttatttctttttacagctgcataatttacttaataagtctccctccttttctgttttgaaacaggatctcactctgttgcccaagctagagt

SEQ ID NO: 607667 - DNA, 120 bp, Artificial Sequence
  ENSG00000175581_24 (sequence is synthesized)
acaggatctcactctgttgcccaagctagagtgcagttgcgtgaccacggctcactgcagcctcaacccctcagactcaagccatcatctcacctgagcctcctgagtagctgggattac

SEQ ID NO: 607668 - DNA, 120 bp, Artificial Sequence
  ENSG00000175581_25 (sequence is synthesized)
aggcacttgccacaatgcccagctaattaagaaaattttttttgtagagtcgggatctagctatgttgtcagggctgctcttgaaccctttggctcaagttatcctcctatcttggcctc

SEQ ID NO: 607669 - DNA, 120 bp, Artificial Sequence
  ENSG00000175581_26 (sequence is synthesized)
agttctgggattacaggtgtcagccactgtacccagctataagtccctctctttatgggcatttaggttagattattttcggttgaggtgctttcttctttctgaagtatgttgtgttaa

SEQ ID NO: 607670 - DNA, 120 bp, Artificial Sequence
  ENSG00000175582_0 (sequence is synthesized)
gcaggctcgcgcccgggctcgccccgcgccgctccagaggctcgcgcactcagcaggttgggctgcggcggcggcggcagctgtggaagctcaggcgctgcgcgtgagaggtcccagata

SEQ ID NO: 607671 - DNA, 120 bp, Artificial Sequence
  ENSG00000175582_1 (sequence is synthesized)
tgagaggtcccagatacgtctgcggttccggctccgccaccctcagcttctcttccccaggtctgggagccgagtgcggaaggagggaacggccctagctttgggaagccagaggacacc

SEQ ID NO: 607672 - DNA, 120 bp, Artificial Sequence
  ENSG00000175582_2 (sequence is synthesized)
cctggctcctgccgacaccgccctccttcccttcccagccgcgggcctcgctcggtgctaggctactctgccgggaggcggcggcggctgccagtctgtggagagtcctgctgccctcca

SEQ ID NO: 607673 - DNA, 120 bp, Artificial Sequence
  ENSG00000175582_3 (sequence is synthesized)
gccgggctcctccaccgggccttgcaggggccgagagagctcggtgcccgcccttccgctcgcctttttcgtcagctggctggagcagcatcggtccgggaggtctctaggctgaggcgg

SEQ ID NO: 607674 - DNA, 120 bp, Artificial Sequence
  ENSG00000175582_4 (sequence is synthesized)
cggccgctcctctagttccacaatgtccacgggcggagacttcgggaatccgctgaggaaattcaagctggtgttcctgggggagcaaagcgttggaaagacatctttgatcaccagatt

SEQ ID NO: 607675 - DNA, 120 bp, Artificial Sequence
  ENSG00000175582_5 (sequence is synthesized)
catgtatgacagttttgacaacacctatcaggcaacaattggcattgactttttatcaaaaactatgtacttggaggatcgaacaatcaggcttcagctgtgggatactgcgggtcagga

SEQ ID NO: 607676 - DNA, 120 bp, Artificial Sequence
  ENSG00000175582_6 (sequence is synthesized)
acgtttccgtagcctcattcccagttacatccgtgattctgctgcagctgtagtagtttacgatatcacaaatgttaactcattccagcaaactacaaagtggattgatgatgtcagaac

SEQ ID NO: 607677 - DNA, 120 bp, Artificial Sequence
  ENSG00000175582_7 (sequence is synthesized)
agaaagaggaagtgatgttatcatcatgctagtaggaaataaaacagatcttgctgacaagaggcaagtgtcaattgaggagggagagaggaaagccaaagagctgaatgttatgtttat

SEQ ID NO: 607678 - DNA, 120 bp, Artificial Sequence
  ENSG00000175582_8 (sequence is synthesized)
tgaaactagtgcaaaagctggatacaatgtaaagcagctctttcgacgtgtagcagcagctttgccgggaatggaaagcacacaggacagaagcagagaagatatgattgacataaaact

SEQ ID NO: 607679 - DNA, 120 bp, Artificial Sequence
  ENSG00000175582_9 (sequence is synthesized)
ggaaaagcctcaggagcaaccagtcagtgaaggaggctgttcctgctaatctcccatgtcatcttcaaccttcttcagaagctcactgctttggcccccttactctttcattgactgcag

SEQ ID NO: 607680 - DNA, 120 bp, Artificial Sequence
  ENSG00000175582_10 (sequence is synthesized)
tgtgaatattggcttgaaccttttcccttcagtaataacgtattgcaattcatcattgctgcctgtctcgtggagatgatctattagcttcacaagcacaacaaaagtcagtgtcttcat

SEQ ID NO: 607681 - DNA, 120 bp, Artificial Sequence
  ENSG00000175582_11 (sequence is synthesized)
tatattttacaaaaagccaaaatatttcagcatattccagtgataactttaaaaattagatacattttcttaacatttttttcttttttaatgttatgataatgtacttcaaaatgatgg

SEQ ID NO: 607682 - DNA, 120 bp, Artificial Sequence
  ENSG00000175582_12 (sequence is synthesized)
atggaaatctcaacagtatgagtatggcttggttaacgagcggtatgttcacagcctactttatctctccttgcttttctcacctctcacttacccccattccctattaccctattctta

SEQ ID NO: 607683 - DNA, 120 bp, Artificial Sequence
  ENSG00000175582_13 (sequence is synthesized)
cctagcctcccccgacttcctcaaaacaaacaagagatggcaaagcagcagttctaccaagcccattggaattatcctttaattttacagataccacttgctgtaggctacggaccaaga

SEQ ID NO: 607684 - DNA, 120 bp, Artificial Sequence
  ENSG00000175582_14 (sequence is synthesized)
aaattacggtcttctttgaggtcaaaattcagccatcatggtaggcagtgcttgaatgagaaaaggctcctggtgcatcttcaaaatgagtcctaaagaacatactgagtacttagaagt

SEQ ID NO: 607685 - DNA, 120 bp, Artificial Sequence
  ENSG00000175582_15 (sequence is synthesized)
agaagaacataagatgtatttctgactaaaacaaatggctctttcacatgtgctttattagactctgggagagaaaattaaccaagtgcttcagaacaggtttttagtatttaattcttc

SEQ ID NO: 607686 - DNA, 120 bp, Artificial Sequence
  ENSG00000175582_16 (sequence is synthesized)
acggtaagaaaatgaagttctaatgaactgtttctcccaaggttttaaaattgtcaagagttattctgtttgtttaaaaaataagaaacctctttaagcaatagattttgcttgggtttt

SEQ ID NO: 607687 - DNA, 120 bp, Artificial Sequence
  ENSG00000175582_17 (sequence is synthesized)
cttttttaaaaacataatactgtgcaggcaaggcactgtaaaagttttaattccttccagaagaaccagtggaagaatttaaatttggcgctacgatcaaaactactgaattagtagaaa

SEQ ID NO: 607688 - DNA, 120 bp, Artificial Sequence
  ENSG00000175582_18 (sequence is synthesized)
taatgatgtctaaagcttaccaacaaaagaaccctcagcagaataacaaaaactttgctcaggacatttgaggtcaaattgaagacggaaaccggaaaccgttttcttgtaagcccctag

SEQ ID NO: 607689 - DNA, 120 bp, Artificial Sequence
  ENSG00000175582_19 (sequence is synthesized)
aggcagatcaggtaaagcatacatagtagagggaaaggagagaatggaaataaaactcaatattatgcagatttatgccttattttttagcattttttaaggttgggtctttcaggctgg

SEQ ID NO: 607690 - DNA, 120 bp, Artificial Sequence
  ENSG00000175582_20 (sequence is synthesized)
ttttggtttgtattagatctgtatagtttaattaactggtgatttagttttatatttaagctacaattaatcttttttctttggtgatatttatttctttgccttttttttttttaacaa

SEQ ID NO: 607691 - DNA, 120 bp, Artificial Sequence
  ENSG00000175582_21 (sequence is synthesized)
ctttcaatcttcagatgtttcgttgaatctatttagagcttcaccatggcaatatgtatttcccttaaaacactgcaaacaaatatactaggagtgtgcccttttaatctttactagtta

SEQ ID NO: 607692 - DNA, 120 bp, Artificial Sequence
  ENSG00000175582_22 (sequence is synthesized)
ttgtgagattgctgtgtaagctaataaacacatttgtaaatacattgtttgcaggacgaaaacttctgagttacagctcaggaaaagcctgctgaatttatgttgtaagcattacttaac

SEQ ID NO: 607693 - DNA, 120 bp, Artificial Sequence
  ENSG00000175582_23 (sequence is synthesized)
acagtataaagatgaaaagacaacaaaaatatcttcatacttcctcatcccctcattggaacaaaaccttaaactgggagaaccttagtcccctctctttcctcttcctcctccacttcc

SEQ ID NO: 607694 - DNA, 120 bp, Artificial Sequence
  ENSG00000175582_24 (sequence is synthesized)
cacttattgtcaccttgtaatattcagagagcacttggattatggatctgaatagagaaatgcttacagataatcattagcccacataccagtaacttatacttaaagatgggatggagt

SEQ ID NO: 607695 - DNA, 120 bp, Artificial Sequence
  ENSG00000175582_25 (sequence is synthesized)
tgtaaagtgcttttataatacaatataattgttaaaggcaagggttgactctttgttttattttgacatggcatgtcctgaaataaatattgattcaatatggcagatgggtcatattct

SEQ ID NO: 607696 - DNA, 120 bp, Artificial Sequence
  ENSG00000175582_26 (sequence is synthesized)
ttatttggaagaagttgtgacttctgacatgggtgtgattgtcttcctacactgttgcatttgattctttttatgtatttttaagaaagtaaccagttatactgcttttaatattgattg

SEQ ID NO: 607697 - DNA, 120 bp, Artificial Sequence
  ENSG00000175582_27 (sequence is synthesized)
gtctttttatttggcttggagttcttcaaagcattgaagtgtgttcatagtccaggttttttttttaataaacacaattttgctgccaaaaatatataaataaaacacgaaagaaaacaa

SEQ ID NO: 607698 - DNA, 120 bp, Artificial Sequence
  ENSG00000175582_28 (sequence is synthesized)
catgtatgacagttttgacaacacctatcaggtattttgtttttgccaatttatttgttgtctattttttgttacaagtaatattcaagatatttttaaaaaattatttacttgcagttg

SEQ ID NO: 607699 - DNA, 120 bp, Artificial Sequence
  ENSG00000175582_29 (sequence is synthesized)
tggatgtaaaagtactttctataatctgtaaaatgctgtataaatacaatgtgtaaatgattttgtccagtcctaggataaacttttatcatttgatttcttttgtctcttccaaagtct

SEQ ID NO: 607700 - DNA, 120 bp, Artificial Sequence
  ENSG00000175582_30 (sequence is synthesized)
gttgaaatatatctccaatatcatctaggatggcattagaagtaatggtggatattctctatagattttgtccaagcctaggattctgtgacattttttatctacatttgaaattaagaa

SEQ ID NO: 607701 - DNA, 120 bp, Artificial Sequence
  ENSG00000175582_31 (sequence is synthesized)
gaaattagaaatcattaacagaaggatatttggcacattcacaaatatgtgaaaattaaataatacactcctaaataattaatgtcaaagatgaaatcacaagagaaattagaaaatgct

SEQ ID NO: 607702 - DNA, 120 bp, Artificial Sequence
  ENSG00000175582_32 (sequence is synthesized)
ttgagatcaataaaaaagaaaacacagcacaccaaaacttatggtatacaactaaagcagtgctatacaaaaaagaaaagagatactaaataaatagcctaacattctactttaagaaac

SEQ ID NO: 607703 - DNA, 120 bp, Artificial Sequence
  ENSG00000175582_33 (sequence is synthesized)
tggaagaaaactaaacccaaagcgacagaaggaagaagctattttaaaatttaggttttatcattattcctgtatggtgaggccaatagatcaggagatgattgccattgaaaagatagt

SEQ ID NO: 607704 - DNA, 120 bp, Artificial Sequence
  ENSG00000175582_34 (sequence is synthesized)
ttgttatactcacagatcccaagagaagagggcatgccatgccagagggggccacatggggaagcactgggtcagttaaaaggcaggtggctggggaaatgtggacaaaagccttgattg

SEQ ID NO: 607705 - DNA, 120 bp, Artificial Sequence
  ENSG00000175582_35 (sequence is synthesized)
tggttttcagggaagaggcacacaagacagggtaagcaggtttaggattagctagttcggataatttcaggggttctggggttgaggggctgttcctggttgtctagtacctggcccggg

SEQ ID NO: 607706 - DNA, 120 bp, Artificial Sequence
  ENSG00000175582_36 (sequence is synthesized)
tgattagggcagtgtagtattggccctcagtgtcatagaggaggtgctggggtattggctttggattggttggtttgcctatgaaaggagtactcaaaggtgagtttactatctctaatg

SEQ ID NO: 607707 - DNA, 120 bp, Artificial Sequence
  ENSG00000175582_37 (sequence is synthesized)
aaaaagctaatcctggcaggggcagtccctccagtgtcagcaaggaccctgatgtcaaaacatcaaaactatagaaagtaaaaagacatgcttaatacagaagttaataaaggttaaagc

SEQ ID NO: 607708 - DNA, 120 bp, Artificial Sequence
  ENSG00000175582_38 (sequence is synthesized)
agaaatatatgaaagagagagcagaaaaacaatggaggaaatcaatgaaaccaaaagcagttctttgaaaagataaaaaaattgactaactttagctagactgaccaagaaaaaaaagaa

SEQ ID NO: 607709 - DNA, 120 bp, Artificial Sequence
  ENSG00000175591_0 (sequence is synthesized)
gaacagcgcagggaggtgggtagccgggctcccaggcacgtgggtctctgcggctgcggcgggacccgggcactggcacccgggagcggcggcgacggcaccctgagaggagaagcgcag

SEQ ID NO: 607710 - DNA, 120 bp, Artificial Sequence
  ENSG00000175591_1 (sequence is synthesized)
cgcagtggcgagaggagccccttgtggcagcagcactacctgcccagaaaaatgctggaggctgggcgtggccccaggcctggggacctgtttttcctgtttcccgcagagttccctgca

SEQ ID NO: 607711 - DNA, 120 bp, Artificial Sequence
  ENSG00000175591_2 (sequence is synthesized)
gcccggtccaggtccaggcgtgtgcattcatgagtgaggaacccgtgcaggcgctgagcatcctgacctggagagcaggggctggtcaggttccagagcttggaggttccaggtccagat

SEQ ID NO: 607712 - DNA, 120 bp, Artificial Sequence
  ENSG00000175591_3 (sequence is synthesized)
ccaagtcagatggcaatgaaagccctggtcaggtggctgtgtcaggtcccctaggggcgctccggccacaaccctgatggccccacccctcccttccctgcagggcgatggcagcagacc

SEQ ID NO: 607713 - DNA, 120 bp, Artificial Sequence
  ENSG00000175591_4 (sequence is synthesized)
tgggcccctggaatgacaccatcaatggcacctgggatggggatgagctgggctacaggtgccgcttcaacgaggacttcaagtacgtgctgctgcctgtgtcctacggcgtggtgtgcg

SEQ ID NO: 607714 - DNA, 120 bp, Artificial Sequence
  ENSG00000175591_5 (sequence is synthesized)
tgcctgggctgtgtctgaacgccgtggcgctctacatcttcttgtgccgcctcaagacctggaatgcgtccaccacatatatgttccacctggctgtgtctgatgcactgtatgcggcct

SEQ ID NO: 607715 - DNA, 120 bp, Artificial Sequence
  ENSG00000175591_6 (sequence is synthesized)
ccctgccgctgctggtctattactacgcccgcggcgaccactggcccttcagcacggtgctctgcaagctggtgcgcttcctcttctacaccaacctttactgcagcatcctcttcctca

SEQ ID NO: 607716 - DNA, 120 bp, Artificial Sequence
  ENSG00000175591_7 (sequence is synthesized)
cctgcatcagcgtgcaccggtgtctgggcgtcttacgacctctgcgctccctgcgctggggccgggcccgctacgctcgccgggtggccggggccgtgtgggtgttggtgctggcctgcc

SEQ ID NO: 607717 - DNA, 120 bp, Artificial Sequence
  ENSG00000175591_8 (sequence is synthesized)
aggcccccgtgctctactttgtcaccaccagcgcgcgcgggggccgcgtaacctgccacgacacctcggcacccgagctcttcagccgcttcgtggcctacagctcagtcatgctgggcc

SEQ ID NO: 607718 - DNA, 120 bp, Artificial Sequence
  ENSG00000175591_9 (sequence is synthesized)
tgctcttcgcggtgccctttgccgtcatccttgtctgttacgtgctcatggctcggcgactgctaaagccagcctacgggacctcgggcggcctgcctagggccaagcgcaagtccgtgc

SEQ ID NO: 607719 - DNA, 120 bp, Artificial Sequence
  ENSG00000175591_10 (sequence is synthesized)
gcaccatcgccgtggtgctggctgtcttcgccctctgcttcctgccattccacgtcacccgcaccctctactactccttccgctcgctggacctcagctgccacaccctcaacgccatca

SEQ ID NO: 607720 - DNA, 120 bp, Artificial Sequence
  ENSG00000175591_11 (sequence is synthesized)
cggccgctggccagtgctaacagttgccttgaccccgtgctctacttcctggctgggcagaggctcgtacgctttgcccgagatgccaagccacccactggccccagccctgccaccccg

SEQ ID NO: 607721 - DNA, 120 bp, Artificial Sequence
  ENSG00000175591_12 (sequence is synthesized)
gctcgccgcaggctgggcctgcgcagatccgacagaactgacatgcagaggatagaagatgtgttgggcagcagtgaggactctaggcggacagagtccacgccggctggtagcgagaac

SEQ ID NO: 607722 - DNA, 120 bp, Artificial Sequence
  ENSG00000175591_13 (sequence is synthesized)
actaaggacattcggctgtaggagcagaacacttcagcctgtgcaggtttatattgggaagctgtagaggaccaggacttgtgcagacgccacagtctccccagatatggaccatcagtg

SEQ ID NO: 607723 - DNA, 120 bp, Artificial Sequence
  ENSG00000175591_14 (sequence is synthesized)
actcatgctggatgaccccatgctccgtcatttgacaggggctcaggatattcactctgtggtccagagtcaactgttcccataacccctagtcatcgtttgtgtgtataagttggggga

SEQ ID NO: 607724 - DNA, 120 bp, Artificial Sequence
  ENSG00000175591_15 (sequence is synthesized)
attaagtttcaagaaaggcaagagctcaaggtcaatgacacccctggcctgactcccatgcaagtagctggctgtactgccaaggtacctaggttggagtccagcctaatcaagtcaaat

SEQ ID NO: 607725 - DNA, 120 bp, Artificial Sequence
  ENSG00000175591_16 (sequence is synthesized)
ggagaaacaggcccagagaggaaggtggcttaccaagatcacataccagagtctggagctgagctacctggggtgggggccaagtcacaggttggccagaaaaccctggtaagtaatgag

SEQ ID NO: 607726 - DNA, 120 bp, Artificial Sequence
  ENSG00000175591_17 (sequence is synthesized)
ggctgagtttgcacagtggtctggaatggactgggtgccacggtggacttagctctgaggagtacccccagcccaagagatgaacatctggggactaatatcatagacccatctggaggc

SEQ ID NO: 607727 - DNA, 120 bp, Artificial Sequence
  ENSG00000175591_18 (sequence is synthesized)
tcccatgggctaggagccagtgtgaggctgtaacttatactaaaggttgtgttgcctgctgagctgtgccctattgtgtggtcgggggatgaggatatggcagggaagctttcaccagcc

SEQ ID NO: 607728 - DNA, 120 bp, Artificial Sequence
  ENSG00000175591_19 (sequence is synthesized)
acacaagggtcctttctccaatccgttcccttctgccacctgccttctcactagctgtctcaggagtagtctcatatcagggatcctctctccaggccccaggtcatcccccactgtaaa

SEQ ID NO: 607729 - DNA, 120 bp, Artificial Sequence
  ENSG00000175591_20 (sequence is synthesized)
gccagttggcttctgtgcctgactctgtgctgagcacagagaaaagtcaggtgcagtcccagtccttgagatttcccagtttaggtgatggccagtcatgtgctggtaaatgttaagcca

SEQ ID NO: 607730 - DNA, 120 bp, Artificial Sequence
  ENSG00000175591_21 (sequence is synthesized)
tttaactggagctccgatttaactgggaaccccttctttgtagaactgcccatttccatggtgcaaaaactcttatggccaaattcaaactataaacatgatgtcaacttccttgtaaaa

SEQ ID NO: 607731 - DNA, 120 bp, Artificial Sequence
  ENSG00000175591_22 (sequence is synthesized)
gcccggggaagcggcgggccagactggcgcaggtgcggactgggcgcggggcaggggagggcgctgtggagcggctgtcgccccggggcacagttgcgagccggcgtgtagcgcataact

SEQ ID NO: 607732 - DNA, 120 bp, Artificial Sequence
  ENSG00000175592_0 (sequence is synthesized)
gagtcagaacccagcagccgtgtaccccgcagagccgccagccccgggcatgttccgagacttcggggaacccggcccgagctccgggaacggcggcgggtacggcggccccgcgcagcc

SEQ ID NO: 607733 - DNA, 120 bp, Artificial Sequence
  ENSG00000175592_1 (sequence is synthesized)
cccggccgcagcgcaggcagcccagcagaagttccacctggtgccaagcatcaacaccatgagtggcagtcaggagctgcagtggatggtacagcctcatttcctggggcccagcagtta

SEQ ID NO: 607734 - DNA, 120 bp, Artificial Sequence
  ENSG00000175592_2 (sequence is synthesized)
ccccaggcctctgacctaccctcagtacagccccccacaaccccggccaggagtcatccgggccctggggccgcctccaggggtacgtcgaaggccttgtgaacagatcagcccggagga

SEQ ID NO: 607735 - DNA, 120 bp, Artificial Sequence
  ENSG00000175592_3 (sequence is synthesized)
agaggagcgccgccgagtaaggcgcgagcggaacaagctggctgcggccaagtgcaggaaccggaggaaggaactgaccgacttcctgcaggcggagactgacaaactggaagatgagaa

SEQ ID NO: 607736 - DNA, 120 bp, Artificial Sequence
  ENSG00000175592_4 (sequence is synthesized)
atctgggctgcagcgagagattgaggagctgcagaagcagaaggagcgcctagagctggtgctggaagcccaccgacccatctgcaaaatcccggaaggagccaaggagggggacacagg

SEQ ID NO: 607737 - DNA, 120 bp, Artificial Sequence
  ENSG00000175592_5 (sequence is synthesized)
cagtaccagtggcaccagcagcccaccagccccctgccgccctgtaccttgtatctccctttccccagggcctgtgcttgaacctgaggcactgcacacccccacactcatgaccacacc

SEQ ID NO: 607738 - DNA, 120 bp, Artificial Sequence
  ENSG00000175592_6 (sequence is synthesized)
ctccctaactcctttcacccccagcctggtcttcacctaccccagcactcctgagccttgtgcctcagctcatcgcaagagtagcagcagcagcggagacccatcctctgacccccttgg

SEQ ID NO: 607739 - DNA, 120 bp, Artificial Sequence
  ENSG00000175592_7 (sequence is synthesized)
tgaggcgcctgagccctactccctgcagatgccaccctagccaatgtctcctccccttcccccaccggtccagctggcctggacagtatcccacatccaactccagcaacttcttctcca

SEQ ID NO: 607740 - DNA, 120 bp, Artificial Sequence
  ENSG00000175592_8 (sequence is synthesized)
tccctctaatgagactgaccatattgtgcttcacagtagagccagcttggggccaccaaagctgcccactgtttctcttgagctggcctctctagcacaatttgcactaaatcagagaca

SEQ ID NO: 607741 - DNA, 120 bp, Artificial Sequence
  ENSG00000175592_9 (sequence is synthesized)
aaatatttcccatttgtgccagaggaatcctggcagcccagagactttgtagatccttagaggtcctctggagccctaaccccttccagatcactgccacactctccatcaccctcttcc

SEQ ID NO: 607742 - DNA, 120 bp, Artificial Sequence
  ENSG00000175592_10 (sequence is synthesized)
tgtgatccacccaaccctatctcctgacagaaggtgccactttacccacctagaacactaactcaccagccccactgccagcagcagcaggtgattggaccaggccattctgccgccccc

SEQ ID NO: 607743 - DNA, 120 bp, Artificial Sequence
  ENSG00000175592_11 (sequence is synthesized)
tcctgaaccgcacagctcaggaggcgcccttggcttctgtgatgagctgatctgcggatctcagctttgagaagccttcagctccagggaatccaagcctccacagcgagggcagctgct

SEQ ID NO: 607744 - DNA, 120 bp, Artificial Sequence
  ENSG00000175592_12 (sequence is synthesized)
atttattttcctaaagagagtatttttatacaaacctaccaaaatggaataaaaggcttgaagctgtggcctgagtgcctcactggacccagaggccaatgggagagtatttggagccct

SEQ ID NO: 607745 - DNA, 120 bp, Artificial Sequence
  ENSG00000175592_13 (sequence is synthesized)
aggtcccagccttagctctacagactcactgcatgaccttggacaaattctttgatatttttggactttgtcttatctgacaagtggggctacatccgctcggcctcatctccgggactg

SEQ ID NO: 607746 - DNA, 120 bp, Artificial Sequence
  ENSG00000175592_14 (sequence is synthesized)
aaaaggctgcagccggacttggggaggcgtcgccaagttcgggaccgacgggccaaggcggcgcgtctcgggggtggagcctggaggtgaccgcgccgctgcaacgcccccaccccccgc

SEQ ID NO: 607747 - DNA, 120 bp, Artificial Sequence
  ENSG00000175595_0 (sequence is synthesized)
agagcttccatggagtcagggcagccggctcgacggattgccatggcgccgctgctggagtacgagcgacagctggtgctggaactgctcgacactgacgggctagtagtgtgcgcccgc

SEQ ID NO: 607748 - DNA, 120 bp, Artificial Sequence
  ENSG00000175595_1 (sequence is synthesized)
gggctcggcgcggaccggctcctctaccactttctccagctgcactgccacccagcctgcctggtgctggtgctcaacacgcagccggccgaggaggagtattttatcaatcagctgaag

SEQ ID NO: 607749 - DNA, 120 bp, Artificial Sequence
  ENSG00000175595_2 (sequence is synthesized)
atagaaggagttgaacacctccctcgccgtgtaacaaatgaaatcacaagcaacagtcgctatgaagtttacacacaaggtggtgttatatttgcgacaagtaggatacttgtggttgac

SEQ ID NO: 607750 - DNA, 120 bp, Artificial Sequence
  ENSG00000175595_3 (sequence is synthesized)
ttcttgactgatagaataccttcagatttaattactggcatcttggtgtatagagcccacagaataatcgagtcttgtcaagaagcattcatcttgcgcctctttcgccagaaaaacaaa

SEQ ID NO: 607751 - DNA, 120 bp, Artificial Sequence
  ENSG00000175595_4 (sequence is synthesized)
cgtggttttattaaagctttcacagacaatgctgttgcctttgatactggtttttgtcatgtggaaagagtgatgagaaatctttttgtgaggaaactgtatctgtggccaaggttccat

SEQ ID NO: 607752 - DNA, 120 bp, Artificial Sequence
  ENSG00000175595_5 (sequence is synthesized)
gtagcagtaaactcatttttagaacagcacaaacctgaagttgtagaaatccatgtttctatgacacctaccatgcttgctatacagactgctatactggacattttaaatgcatgtcta

SEQ ID NO: 607753 - DNA, 120 bp, Artificial Sequence
  ENSG00000175595_6 (sequence is synthesized)
aaggaactaaaatgccataacccatcgcttgaagtggaagatttatctttagaaaatgctattggaaaaccttttgacaagacaatccgccattatctggatcctttgtggcaccagctt

SEQ ID NO: 607754 - DNA, 120 bp, Artificial Sequence
  ENSG00000175595_7 (sequence is synthesized)
ggagccaagactaaatccttagttcaggatttgaagatattacgaactttgctgcagtatctctctcagtatgattgtgtcacatttcttaatcttctggaatctctgagagcaacggaa

SEQ ID NO: 607755 - DNA, 120 bp, Artificial Sequence
  ENSG00000175595_8 (sequence is synthesized)
aaagcttttggtcagaattcaggttggctgtttcttgactccagcacctcgatgtttataaatgctcgagcaagggtttatcatcttccagatgccaaaatgagtaaaaaagaaaaaata

SEQ ID NO: 607756 - DNA, 120 bp, Artificial Sequence
  ENSG00000175595_9 (sequence is synthesized)
tctgaaaaaatggaaattaaagaaggggaagaaacaaaaaaggaactggtcctagaaagcaacccaaagtgggaggcactgactgaagtattaaaagaaattgaggcagaaaataaggag

SEQ ID NO: 607757 - DNA, 120 bp, Artificial Sequence
  ENSG00000175595_10 (sequence is synthesized)
agtgaagctcttggtggtccaggtcaagtactgatttgtgcaagtgatgaccgaacatgttcccagctgagagactatatcactcttggagcggaggccttcttattgaggctctacagg

SEQ ID NO: 607758 - DNA, 120 bp, Artificial Sequence
  ENSG00000175595_11 (sequence is synthesized)
aaaacctttgagaaggatagcaaagctgaagaagtctggatgaaatttaggaaggaagacagttcaaagagaattaggaaatctcacaaaagacctaaagacccccaaaacaaagaacgg

SEQ ID NO: 607759 - DNA, 120 bp, Artificial Sequence
  ENSG00000175595_12 (sequence is synthesized)
gcttctaccaaagaaagaaccctcaaaaagaaaaaacggaagttgaccttaactcaaatggtaggaaaacctgaagaactggaagaggaaggagatgtcgaggaaggatatcgtcgagaa

SEQ ID NO: 607760 - DNA, 120 bp, Artificial Sequence
  ENSG00000175595_13 (sequence is synthesized)
ataagcagtagcccagaaagctgcccggaagaaattaagcatgaagaatttgatgtaaatttgtcatcggatgctgctttcggaatcctgaaagaacccctcactatcatccatccgctt

SEQ ID NO: 607761 - DNA, 120 bp, Artificial Sequence
  ENSG00000175595_14 (sequence is synthesized)
ctgggttgcagcgacccctatgctctgacaagggtactacatgaagtggagccaagatacgtggttctttatgacgcagagctaacctttgttcggcagcttgaaatttacagggcgagt

SEQ ID NO: 607762 - DNA, 120 bp, Artificial Sequence
  ENSG00000175595_15 (sequence is synthesized)
aggcctgggaaacctctgagggtttactttcttatatacggaggttcaactgaggaacaacgctatctcactgctttgcggaaagaaaaggaagcttttgaaaaactcataagggaaaaa

SEQ ID NO: 607763 - DNA, 120 bp, Artificial Sequence
  ENSG00000175595_16 (sequence is synthesized)
gcaagcatggttgtccctgaagaaagagaaggcagagatgaaacaaacttagacctagtaagaggcacagcatctgcagatgtttccactgacactcggaaagccggtggccaggaacag

SEQ ID NO: 607764 - DNA, 120 bp, Artificial Sequence
  ENSG00000175595_17 (sequence is synthesized)
aatggtacacagcaaagcatagttgtggatatgcgtgaatttcgaagtgagcttccatctctgatccatcgtcggggcattgacattgaacccgtgactttagaggttggagattacatc

SEQ ID NO: 607765 - DNA, 120 bp, Artificial Sequence
  ENSG00000175595_18 (sequence is synthesized)
ctcactccagaaatgtgcgtggagcgcaagagtatcagtgatttaatcggctctttaaataacggccgcctctacagccagtgcatctccatgtcccgctactacaagcgtcccgtgctt

SEQ ID NO: 607766 - DNA, 120 bp, Artificial Sequence
  ENSG00000175595_19 (sequence is synthesized)
ctgattgagtttgaccctagcaagcctttctctctcacttcccgaggtgccttgtttcaggagatctccagcaatgacattagttccaaactcactcttcttacacttcacttccccaga

SEQ ID NO: 607767 - DNA, 120 bp, Artificial Sequence
  ENSG00000175595_20 (sequence is synthesized)
ctacggattctctggtgcccctctcctcatgcaacggcggagttgtttgaggagctgaaacaaagcaagccacagcctgatgcggcgacagcactggccattacagcagattctgaaacc

SEQ ID NO: 607768 - DNA, 120 bp, Artificial Sequence
  ENSG00000175595_21 (sequence is synthesized)
cttcccgagtcagagaagtataatcctggtccccaagacttcttgttaaaaatgccaggggtgaatgccaaaaactgccgctccttgatgcaccacgttaagaacatcgcagaattagca

SEQ ID NO: 607769 - DNA, 120 bp, Artificial Sequence
  ENSG00000175595_22 (sequence is synthesized)
gccctgtcacaagacgagctcacgagtattctggggaatgctgcaaatgccaaacagctttatgatttcattcacacctcttttgcagaagtcgtatcaaaaggaaaagggaaaaagtga

SEQ ID NO: 607770 - DNA, 120 bp, Artificial Sequence
  ENSG00000175595_23 (sequence is synthesized)
acagtgatggctgttttcttatcccatgcctgtacttttcagcggctccttgccagacatcataggtcattattaattattggtttgctatttcattcttttccaatgctcttaatgatt

SEQ ID NO: 607771 - DNA, 120 bp, Artificial Sequence
  ENSG00000175595_24 (sequence is synthesized)
gtacggtggaccagaagccaggattcctctctgaactctgcagttaggcatcacttgaacttgcctgtgcctgctctttttcctccctgcaccgtctatgccgggcttagcatgtttctt

SEQ ID NO: 607772 - DNA, 120 bp, Artificial Sequence
  ENSG00000175595_25 (sequence is synthesized)
tttaaatgaggtttgtcaggatcaggtaaagttcctacaagtgattacagaaggtagaaactttacctgatcctaacagatctcatttagaaaggaatatgctaagcctggcatggacgg

SEQ ID NO: 607773 - DNA, 120 bp, Artificial Sequence
  ENSG00000175595_26 (sequence is synthesized)
tgcagggagggaaaagagcaggcacaagaaagctaccatttttaacagtccttgttatctagtgcaacataaataacagtcttaattgcacttatacccatgtcctgtggctctccaaat

SEQ ID NO: 607774 - DNA, 120 bp, Artificial Sequence
  ENSG00000175595_27 (sequence is synthesized)
ctggtctttgctgttgtgtctgctggacgcttgaactgatgtttgtgtaggaaatcatgttctgaccctttgtctacaaaggagccttctggaacactgagaagaaacatctctttgcca

SEQ ID NO: 607775 - DNA, 120 bp, Artificial Sequence
  ENSG00000175595_28 (sequence is synthesized)
catacttctgcctgtctgctctaaggaaatttcatggagccttcctactactaattcaagacagtctcctcaaaaactggttgactagtcttctaatgaccctaacatatgtagcatata

SEQ ID NO: 607776 - DNA, 120 bp, Artificial Sequence
  ENSG00000175595_29 (sequence is synthesized)
ctataatttcattgttccaaattagtatttttaaagcaaaatgaattacctgtttgcaaaagttaatgatgaaggagctcttagaattctcaatttttgcacatattcagtctcctaata

SEQ ID NO: 607777 - DNA, 120 bp, Artificial Sequence
  ENSG00000175595_30 (sequence is synthesized)
tcagagatccctaagtccagctggctagttacagagttttttcagacttcctcgtttctcagctcttatatcctaagacaccagcatcatatcctctagaaatacaacctaattggcagt

SEQ ID NO: 607778 - DNA, 120 bp, Artificial Sequence
  ENSG00000175595_31 (sequence is synthesized)
gagccgagatcgcaccactgcacccctgcctgggcgacagagtgagactttgtctctattacaaaaagaaaagaaaagaaatacaacctaagctcacctgcctgtgattcctcatttctc

SEQ ID NO: 607779 - DNA, 120 bp, Artificial Sequence
  ENSG00000175595_32 (sequence is synthesized)
accatcctgtgccagggtggctacttctctctgtgaggactcaaatacaagccaatgagtggcccactaagcttttaagatttgattttcctgccttgagataaaaaggagtgtaggtaa

SEQ ID NO: 607780 - DNA, 120 bp, Artificial Sequence
  ENSG00000175595_33 (sequence is synthesized)
atgaaagatcaatgtatggaatatataaaaatacgaaagaaatatatacgtttaaaaatccataaagaaaaaaatctcattctaaacctgattaagttggctttttacgtaagtgtacaa

SEQ ID NO: 607781 - DNA, 120 bp, Artificial Sequence
  ENSG00000175595_34 (sequence is synthesized)
ataggatattcacagcatctttgtgcagtttttaaacttttatatttaaacattattaagttggcttttgttcacatgttgagtaatgggtagtaaattttctacctcaggagctgatat

SEQ ID NO: 607782 - DNA, 120 bp, Artificial Sequence
  ENSG00000175595_35 (sequence is synthesized)
agacatcagttctgctagccatatcacatattttaatgtttcatcaacatcagctgtttttttgtttgctacactatttgaactaatagacagtggatcatgtaacacaaaattgtcttc

SEQ ID NO: 607783 - DNA, 64 bp, Artificial Sequence
  ENSG00000175595_36 (sequence is synthesized)
aactaatagacagtggatcatgtaacacaaaattgtcttcaactttaacaaaattgtcattgtt

SEQ ID NO: 607784 - DNA, 120 bp, Artificial Sequence
  ENSG00000175595_37 (sequence is synthesized)
ccaccttggcctcccaaagtgctgagataacaggcgtgagccaccgcacccacccaacaaaattatttttaactgtcgtttctgaactgaacctctcacattggcatcttgatttattgg

SEQ ID NO: 607785 - DNA, 120 bp, Artificial Sequence
  ENSG00000175595_38 (sequence is synthesized)
ttggcatcttgatttattggtacttaacagtatatatggattttgaactctacacaagggtataaccagaatgaattgaggggtatcaagaaccagattggttacagtagaactctgtaa

SEQ ID NO: 607786 - DNA, 120 bp, Artificial Sequence
  ENSG00000175595_39 (sequence is synthesized)
gatgatgtggagagtaaggaaaaggagaagaaataaaaattagtttaagatggaataaagatttgggctgctaattttttcccaggattcaaaatatacccgctagaatggaaaacaaaa

SEQ ID NO: 607787 - DNA, 120 bp, Artificial Sequence
  ENSG00000175595_40 (sequence is synthesized)
tggaaaacaaaaatttgaatgattacaacattatcgttaacattcaattttgtatttattgttttattgaatatagttcagagtatattaaaatagacctaccacttcaaatgataatga

SEQ ID NO: 607788 - DNA, 120 bp, Artificial Sequence
  ENSG00000175595_41 (sequence is synthesized)
ctcttcaccctattctagcacttctgcttgcagtatgtggtttctatttttttcctcttgtataattccacttgcttttaattgttgtttcattatataaaaggaacatcttcccatagc

SEQ ID NO: 607789 - DNA, 120 bp, Artificial Sequence
  ENSG00000175595_42 (sequence is synthesized)
atattctatgaaaggggtttcattccaagttgagttttcaaaaaaaaggtcttcctaaagctaccattttcaaccgtccttgttatctagtacaacataaataacagtcttaaaaattgc

SEQ ID NO: 607790 - DNA, 120 bp, Artificial Sequence
  ENSG00000175595_43 (sequence is synthesized)
actaataccagtgcccccctggctctccaaatctgttctttgctcttgtatctgctggacgcttgaagacaggtgcactgtctcgtatgtatttgaattatgaacagtaatttctaatga

SEQ ID NO: 607791 - DNA, 120 bp, Artificial Sequence
  ENSG00000175595_44 (sequence is synthesized)
attctaaaatggtcattgtaagtgaaagcctctcgctaccacttcctcttccaactacataaatatatttcaatgtatttccagttttggaaagttttcaatacatacatcaagtgttta

SEQ ID NO: 607792 - DNA, 120 bp, Artificial Sequence
  ENSG00000175595_45 (sequence is synthesized)
cttagatttttataaaaattttttttacaatctaataatctttggtaaaggaactagagatgcatgcagttgcaaaattaatgtatttattttccagcataattttattaacttcacttt

SEQ ID NO: 607793 - DNA, 120 bp, Artificial Sequence
  ENSG00000175595_46 (sequence is synthesized)
ttttctctctagtaaatatccagtgtacttatgaactcatgtttggctcttttaaaaccttttctaaaagctagatcagcatttttctattttacaagttttttgtataaaaaggtgaac

SEQ ID NO: 607794 - DNA, 120 bp, Artificial Sequence
  ENSG00000175595_47 (sequence is synthesized)
atatgagatattgtgagaaatcattttaagtttcatttaaatcatggtgcctcttttgatactttcttaaaattgtgcaagaagaaatcatttttagtagtggtcataaatattatcctt

SEQ ID NO: 607795 - DNA, 120 bp, Artificial Sequence
  ENSG00000175595_48 (sequence is synthesized)
ttggcagtaagctattactaattcagcctgaagctcggtagacaatatgtctacatgtgtttgagtacatcctggatacagtttcccagctcatgagggactgaaaatagtcttattcat

SEQ ID NO: 607796 - DNA, 120 bp, Artificial Sequence
  ENSG00000175595_49 (sequence is synthesized)
caacccactaggatgtgaagggttaagtctagatttggtcgcattgaaaccccacaatatagaattaataaatggccttcagtaggaaaacctacactaaagcaaatccgaagaagtggg

SEQ ID NO: 607797 - DNA, 120 bp, Artificial Sequence
  ENSG00000175595_50 (sequence is synthesized)
gcagggggaaagaggcattactggtctttccttttgttttgcaagcataatttgattttcctttggctcagaaaactcatttggggaaattctcttttgtgttcagtttaacctagaaag

SEQ ID NO: 607798 - DNA, 120 bp, Artificial Sequence
  ENSG00000175595_51 (sequence is synthesized)
gtcctcttgaaaaaccaacattttaggaaagttcttttttcaggatggagtatattaaaattaagccaggctttgacgtgaattatcacttttctttattattttgttttctattttggt

SEQ ID NO: 607799 - DNA, 120 bp, Artificial Sequence
  ENSG00000175595_52 (sequence is synthesized)
ttatagctatttctggttcagttctgaacttcagcacttaatcatccttatcaaccaggcttttggtagcctaaaccgctatgctgttgtttttttaatttaaagatgtataagccaaaa

SEQ ID NO: 607800 - DNA, 120 bp, Artificial Sequence
  ENSG00000175595_53 (sequence is synthesized)
tttggatgggagtgagacataactgatttatatgaattttaacagagttgtatttgtgtgtgtttaataaaatatatatttattcagtactttcctcagtattttatgggcaaagtaaaa

SEQ ID NO: 607801 - DNA, 120 bp, Artificial Sequence
  ENSG00000175595_54 (sequence is synthesized)
ataacaatgcatagtgaaagggcatatattaccagcagtaataattcaaaatcctgaaaatgtttcattttttttgtttttgttatgcagaataaacaaggcagaaatgctctttgaacc

SEQ ID NO: 607802 - DNA, 120 bp, Artificial Sequence
  ENSG00000175595_55 (sequence is synthesized)
agtgggaggcggtgtggttggtaggaagacaggatgacagccagttacgtatgtaggtcatgtgaccatcagagactgttttaaattaaccataaattgatggcactttttcttttaact

SEQ ID NO: 607803 - DNA, 120 bp, Artificial Sequence
  ENSG00000175595_56 (sequence is synthesized)
ggaaattaaagaaggggaaggtatcttgtggggttaagtctttaaatgtgttttttatttcggtatttggtatggaaatttaaagtgcaatttaaagtcttctttggccatgtgaaaagt

SEQ ID NO: 607804 - DNA, 120 bp, Artificial Sequence
  ENSG00000175595_57 (sequence is synthesized)
ccttaagtagatctttttcaggaaagcagattccatctaacattataaagaaagcttaaataaatgggcatatgtactgatgctcgtgttatctgttgttttaaaagcctttggaagact

SEQ ID NO: 607805 - DNA, 120 bp, Artificial Sequence
  ENSG00000175595_58 (sequence is synthesized)
aaaaaaaaagagtagttatagtatttttaactttcttgattataccttgttttaggagtcaacaaactcttcatgtaaatggccagaaatacatagctgctgaaactctagaaaattgtt

SEQ ID NO: 607806 - DNA, 120 bp, Artificial Sequence
  ENSG00000175595_59 (sequence is synthesized)
agggtttactttcttatatacggaggttcaactgaggaacaacgctatctcactgctttgcggaaagaaaaggaagcttttgaaaaactcataagatctaccgtataagatatgagccac

SEQ ID NO: 607807 - DNA, 120 bp, Artificial Sequence
  ENSG00000175595_60 (sequence is synthesized)
tgtatgtttgttatatgtaacatgtaatgtatgttgaaagtatatatgtaaagtatatgtgtaatgtatgtcgaagtatacagcatggcaagtcttgcagtctattgcccagggcttcca

SEQ ID NO: 607808 - DNA, 120 bp, Artificial Sequence
  ENSG00000175595_61 (sequence is synthesized)
aataacagatgtcaaatattgatcaaaagtatgctacatgaggagctatatattgatttttttagaacttcaaagtaattattatttttgagtcagaatgaggttggggcatggtggcac

SEQ ID NO: 607809 - DNA, 120 bp, Artificial Sequence
  ENSG00000175595_62 (sequence is synthesized)
ccgaggcaggaggattgcttgagcccgggagttcaagaccatcctgggcaacaaagcaagactccatctctacaaaaaaaattttaaggctgggctcagtggctcacgtctgtaatccca

SEQ ID NO: 607810 - DNA, 89 bp, Artificial Sequence
  ENSG00000175595_63 (sequence is synthesized)
ttaaagtagcctggcgaggtgatgtgcacttatcgtctcagctacttgagaggctaaggtgagcccaggagttgaaggtgacaccaaga

SEQ ID NO: 607811 - DNA, 120 bp, Artificial Sequence
  ENSG00000175595_64 (sequence is synthesized)
gaggctaaggtgagcccaggagttgaaggtgacaccaagatatgatcacaccactatactccagcctgggtgacagagtacgactgtgtctcaaaactaataaataaagtcaggatggaa

SEQ ID NO: 607812 - DNA, 120 bp, Artificial Sequence
  ENSG00000175600_0 (sequence is synthesized)
gttcgccgcttgcaccgggaccgatgccatctgagacgcacgcgatgctggcgacgctggcgagggtggcagctctgcgcagaacctgcctcttctccggccggggcggcgggagggggc

SEQ ID NO: 607813 - DNA, 120 bp, Artificial Sequence
  ENSG00000175600_1 (sequence is synthesized)
tgtggactggccgcccgcagtcagatatgaacaatataaagccattggaaggggtaaaaattctggatctaacaagagtcctggcgggaccttttgctactatgaatttaggagatcttg

SEQ ID NO: 607814 - DNA, 120 bp, Artificial Sequence
  ENSG00000175600_2 (sequence is synthesized)
gagcagaagttataaaagtggagagaccaggagctggtgatgatacacgaacttgggggccaccttttgttgggacagaaagtacatattatctcagtgttaaccgaaataaaaaaagta

SEQ ID NO: 607815 - DNA, 120 bp, Artificial Sequence
  ENSG00000175600_3 (sequence is synthesized)
ttgctgttaatatcaaggatccaaaaggggtgaaaatcatcaaagagcttgcagctgtttgtgatgtgtttgtggaaaactatgtccctggcaaactgtctgcaatgggcctgggatatg

SEQ ID NO: 607816 - DNA, 120 bp, Artificial Sequence
  ENSG00000175600_4 (sequence is synthesized)
aagatatagacgagattgctcctcacatcatctattgttccatcacagggtatggtcagacaggtccaatttctcagcgagctggttatgatgctgttgcctcggctgtttctggtctga

SEQ ID NO: 607817 - DNA, 120 bp, Artificial Sequence
  ENSG00000175600_5 (sequence is synthesized)
tgcacatcacagggcctgagaatggagatccagttcgcccaggagtagctatgactgatcttgccactggcctgtatgcatatggagctattatggctggattgatacaaaaatacaaaa

SEQ ID NO: 607818 - DNA, 120 bp, Artificial Sequence
  ENSG00000175600_6 (sequence is synthesized)
actgtcatcccaggtggcgtgtttgtctcacatagctgcaaattatcttattggtcaaaaggaagcaaaacgttggggtacagctcatggcagtatcgttccttaccaggcttttaaaac

SEQ ID NO: 607819 - DNA, 120 bp, Artificial Sequence
  ENSG00000175600_7 (sequence is synthesized)
caaggatggctatattgtagttggagcaggaaataaccagcagtttgccaccgtctgcaagatcttggatttgcctgagttgattgataattccaagtataaaactaaccaccttcgggt

SEQ ID NO: 607820 - DNA, 120 bp, Artificial Sequence
  ENSG00000175600_8 (sequence is synthesized)
acacaatagaaaagagcttattaaaatattatctgaacggtttgaagaagaactgaccagcaagtggttatatctttttgaaggcagtggagtcccgtatggcccaatcaacaacatgaa

SEQ ID NO: 607821 - DNA, 120 bp, Artificial Sequence
  ENSG00000175600_9 (sequence is synthesized)
gaatgtatttgcagaacctcagaacgctgtctctggcttccaaagcctgctgcattccttggcccatggccccttccttcatcttcaaggatcagcaagggtattacacaatggcctcgt

SEQ ID NO: 607822 - DNA, 120 bp, Artificial Sequence
  ENSG00000175600_10 (sequence is synthesized)
tatggagatggagcatccaactgtggggaagatttccgtcccaggcccagctgtgagatacagtaagttcaagatgtcagaggccaggccgcccccgctgctcgggcagcacacaacgca

SEQ ID NO: 607823 - DNA, 120 bp, Artificial Sequence
  ENSG00000175600_11 (sequence is synthesized)
catcctgaaggaggtcctgagatacgatgacagggccatcggggagctgctcagcgctggagtggtggaccaacatgaaactcactgacaaaggaaaagggctcttcctcataacctcga

SEQ ID NO: 607824 - DNA, 120 bp, Artificial Sequence
  ENSG00000175600_12 (sequence is synthesized)
tccgaatacactggcaaaggcaacactttgcttggacccttctccccagttctgataccactaaaaagaagatttagagtaactccagatttcttacatggcatctccagaatggctctg

SEQ ID NO: 607825 - DNA, 120 bp, Artificial Sequence
  ENSG00000175600_13 (sequence is synthesized)
ctagtgccttttaaatgtatcccacgttttgttccctaccatcttttttttcagatgatgatttcattatggatttgtgggatttttaaaaataaagttttaatttttttcctggaaaaa

SEQ ID NO: 607826 - DNA, 120 bp, Artificial Sequence
  ENSG00000175600_14 (sequence is synthesized)
acgcgatgctggcgacgctggcgagggtggcagctctgcgcagaacctgcctcttctccggccggggcggcgggagggggctgtggactggccgcccgcagtcagcaaggcaatgtactt

SEQ ID NO: 607827 - DNA, 120 bp, Artificial Sequence
  ENSG00000175600_15 (sequence is synthesized)
tacttccctgaggaaacacagcctgtaagcggatgagttggaatcggatgcaagtttggaaggaagtatcctctccccaaatgtggggcagagagacgcttgggctgacctaattgttaa

SEQ ID NO: 607828 - DNA, 120 bp, Artificial Sequence
  ENSG00000175600_16 (sequence is synthesized)
agcctcagtcagtgttatgctgaatttgtcgcttacatgtctgcacattactttcaattgaaagtagaaaaatgaaatagagatctaataaacattaccacaatgttaagactgaaaaaa

SEQ ID NO: 607829 - DNA, 120 bp, Artificial Sequence
  ENSG00000175600_17 (sequence is synthesized)
ctctgatgagctgcagagtttcttggcgcttggtgcatggaaacggccacttctgttcagatgtgggaacgcaccactggcgcgtgtggcccactctccatgtgcgctgtgccagcacag

SEQ ID NO: 607830 - DNA, 120 bp, Artificial Sequence
  ENSG00000175600_18 (sequence is synthesized)
ctgctagttcaactggaaattgctttgggtgaagtacaaggcctggaacatggcgtaggaatggagactttgataaagtgaaaaggggtatgtctaacaacaacaacaaaagccaggatt

SEQ ID NO: 607831 - DNA, 120 bp, Artificial Sequence
  ENSG00000175600_19 (sequence is synthesized)
gggagactcagtaacggcagaaaaatttgagtgcctacttctcaagtagaccatttacagcatttcatttgtggtttgaacttggagacaacaaaaatttacttgatggtagaaactatt

SEQ ID NO: 607832 - DNA, 120 bp, Artificial Sequence
  ENSG00000175600_20 (sequence is synthesized)
tctagcctaacaatttcatcatagtctcatggattgaggtaacttgatttttcgattcaatcaaaacaacagatgatatttttttttcatggataaatgagagattgtctaccttttatc

SEQ ID NO: 607833 - DNA, 120 bp, Artificial Sequence
  ENSG00000175600_21 (sequence is synthesized)
agcacaagagcaggtgagggcagccaagagacttggcagtggatttcaggcctgagaaagctgcttaatttcaaggataacctgaaggactctgcccttgagactggcccctggcctcac

SEQ ID NO: 607834 - DNA, 120 bp, Artificial Sequence
  ENSG00000175602_0 (sequence is synthesized)
gagtggcgccgggcccgacgtggggctcctgggccgcggcggcgggcgggcgatgctccagaggcctgaccagccatggaggccgaggcaggcggcctggaggagctgacggacgaggag

SEQ ID NO: 607835 - DNA, 120 bp, Artificial Sequence
  ENSG00000175602_1 (sequence is synthesized)
gaggcaggcggcctggaggagctgacggacgaggagatggcggcgctaggcaaggaagagctagtgcggcgcctgcggcgggaggaggcggcgcgcctggcggcactggtgcagcgcggc

SEQ ID NO: 607836 - DNA, 120 bp, Artificial Sequence
  ENSG00000175602_2 (sequence is synthesized)
cgcctcatgcaggaggtgaatcggcagctgcagggccacctgggcgagatccgcgagctcaagcagctcaaccggcgtctgcaggcagagaaccgtgagctgcgcgacctctgctgcttc

SEQ ID NO: 607837 - DNA, 120 bp, Artificial Sequence
  ENSG00000175602_3 (sequence is synthesized)
ctggactcggagcgccagcgcgggcggcgcgccgcacgccagtggcagctcttcgggacccaagcatcccgggccgtgcgcgaggacctgggcggctgttggcagaagctggccgagctg

SEQ ID NO: 607838 - DNA, 120 bp, Artificial Sequence
  ENSG00000175602_4 (sequence is synthesized)
ggccgccaggaggagctgctgcgggagaacctagcgcttaaggagctctgcctggcgctgggcgaagaatggggcccccgcggcggccccagcggcgccgggggatcaggagccgggcca

SEQ ID NO: 607839 - DNA, 120 bp, Artificial Sequence
  ENSG00000175602_5 (sequence is synthesized)
gcacccgagcttgccttgcccccgtgcgggccccgcgacctaggcgatggaagctccagcactggcagcgtgggcagtccggatcagttgcccctggcctgttcccccgatgattgaagg

SEQ ID NO: 607840 - DNA, 120 bp, Artificial Sequence
  ENSG00000175602_6 (sequence is synthesized)
cactgcttcctccacgccgacgcccgcccggattgctccccgagccccgggaccgctgtggacctcgggacctggacgccgtcctggctgcgcaggaggggccgctggcatggactaaga

SEQ ID NO: 607841 - DNA, 120 bp, Artificial Sequence
  ENSG00000175602_7 (sequence is synthesized)
aatcctgacaccaagaagggcccctcgctcttgctggcagggcagcagggggactgaaggctggagcggagggacttgctgggggttggattgggggtaataaacccggacggaagcgga

SEQ ID NO: 607842 - DNA, 120 bp, Artificial Sequence
  ENSG00000175606_0 (sequence is synthesized)
acttgtgcggcagtcgggtgggaagccgtgtctcgcagtcgtggactcgtgcagctggggcgtccgcagccgctcgtcacccgcgtgatgctgtttctggcgttgggcagcccgtgggcg

SEQ ID NO: 607843 - DNA, 120 bp, Artificial Sequence
  ENSG00000175606_1 (sequence is synthesized)
gtcgaactgcctctctgcggaaggaggactgcattgtgtgcggccgccgcgctccgaggtccccgggcctctgtctcccgggcgtcctccagcagcgggccttcggggccggtagccggc

SEQ ID NO: 607844 - DNA, 120 bp, Artificial Sequence
  ENSG00000175606_2 (sequence is synthesized)
tggagtacggggccttcgggagccgcgcgccttctccggcgtccgggtcgagcgcagatccctgtttattgggaaggatatgttcgattcttaaatacgccatctgacaaatcagaagat

SEQ ID NO: 607845 - DNA, 120 bp, Artificial Sequence
  ENSG00000175606_3 (sequence is synthesized)
ggaaggctaatttatactggcaatatggcccgagcagtgtttggtgtgaaatgtttctcttattctacgagtctgattggccttacatttctgccatacatttttacacaaaataatgct

SEQ ID NO: 607846 - DNA, 120 bp, Artificial Sequence
  ENSG00000175606_4 (sequence is synthesized)
atttctgaaagtgtgcctctgcctattcaaatcatattctatggcatcatgggaagctttacggtgatcaccccagtgctgcttcactttattacaaaaggctatgtcattcgattgtac

SEQ ID NO: 607847 - DNA, 120 bp, Artificial Sequence
  ENSG00000175606_5 (sequence is synthesized)
catgaggccacaacagacacttataaagccattacctacaatgctatgcttgcagaaacgagtacagtgtttcaccagaatgatgtgaagattccagatgctaaacatgtatttaccaca

SEQ ID NO: 607848 - DNA, 120 bp, Artificial Sequence
  ENSG00000175606_6 (sequence is synthesized)
ttttatgctaaaacaaaatcactgttagttaatccagtgctctttccaaaccgtgaagactatatccatctaatgggttatgacaaagaagaatttattttgtatatggaagaaaccagt

SEQ ID NO: 607849 - DNA, 120 bp, Artificial Sequence
  ENSG00000175606_7 (sequence is synthesized)
gaagagaaacggcataaagatgacaaatgagcctatttgttagtgttcgtgctcaaatgtgatttacgttttaatgtataataataaaattgccttttgcattccgttagtgactgattg

SEQ ID NO: 607850 - DNA, 120 bp, Artificial Sequence
  ENSG00000175606_8 (sequence is synthesized)
agaaaggtatgtgaataaatatgttcatgctagtataagagttctgtgttactgtggttgactctaaactggggatctgatgtcagtagcaaatgggagagttgctttattctttgtgta

SEQ ID NO: 607851 - DNA, 120 bp, Artificial Sequence
  ENSG00000175606_9 (sequence is synthesized)
tggatttttctaagtgtataaatattttccgacattaaaagacattttctctttgaggaagacacagtcataggtggtgcggagctgtggtccacctgctcctgctcctgactcactgct

SEQ ID NO: 607852 - DNA, 120 bp, Artificial Sequence
  ENSG00000175606_10 (sequence is synthesized)
ctttgctgttgcctgaggaccaagtctgtcaggaagctggctaggaagccttgcagcagccatggcttttaaacataccagaaaaacacccgtggagtcagaggtggcaattcaccgaat

SEQ ID NO: 607853 - DNA, 120 bp, Artificial Sequence
  ENSG00000175606_11 (sequence is synthesized)
tcatatcactctaacgagttgcaacgtaaaatccctggataaggtgtgtgctgacttgatctgaggagcaaaggaaaagaatcagtgaaaggaccagtttgaatgcctaccaagactttg

SEQ ID NO: 607854 - DNA, 120 bp, Artificial Sequence
  ENSG00000175606_12 (sequence is synthesized)
agaatcactacaagaaaaacttacggtgaaggttctaaggcatgggatcgtttccagatgagaatccacaagcgactcattgacttgcgcagtcctcagatagttaagcagattacttcc

SEQ ID NO: 607855 - DNA, 120 bp, Artificial Sequence
  ENSG00000175606_13 (sequence is synthesized)
atcagtattgagccaggagttgagatggaagtcaccattgcaaatgcttaagtcaactgttttcataaattgattaccagttgttaaaaaattttcaaaaaaccgcaaaatttcaagaaa

SEQ ID NO: 607856 - DNA, 120 bp, Artificial Sequence
  ENSG00000175606_14 (sequence is synthesized)
ttcacaaattatgggagcagttttaagtcttctttggttcagaacacaggtttttgcctaacccctggcatgattgcccataagaacatacatgtacagttgaactggtggttagctata

SEQ ID NO: 607857 - DNA, 120 bp, Artificial Sequence
  ENSG00000175606_15 (sequence is synthesized)
cgggaaatggtaagtagtgttgtcttcagtatcttaatttgtttctgcaactgtgcactcctcccttggtggcaccctatgggtgtaggaaaaccactgttattaaacaggtgaaaaata

SEQ ID NO: 607858 - DNA, 120 bp, Artificial Sequence
  ENSG00000175606_16 (sequence is synthesized)
agagaggctctcgggagtccgagagagcactgcattctgggatttgtagtttctctggtggataccgtcggcgttgggaccgaggcagccctgcatcctgggacttgtagtttctcgcac

SEQ ID NO: 607859 - DNA, 120 bp, Artificial Sequence
  ENSG00000175606_17 (sequence is synthesized)
aaaaaaatatttaaccctggcttctgggcattgtcattctcgtacagccctctgcccctccacactgttataaagaagatccctgtttattgggaaggatatgttcgattcttaaatacg

SEQ ID NO: 607860 - DNA, 89 bp, Artificial Sequence
  ENSG00000175606_18 (sequence is synthesized)
ccatctgggattacaggtgtgaaatgtttctcttattctacgagtctgattggccttacatttctgccatacatttttacacaaaataa

SEQ ID NO: 607861 - DNA, 120 bp, Artificial Sequence
  ENSG00000175606_19 (sequence is synthesized)
cgcactgcgtgttaagattttggtggttacagagactgtccgtacctctcatttagggttacgcctggaggtgggagactgctgaggaaagattgaaacgtgggagggcggtttctttgc

SEQ ID NO: 607862 - DNA, 120 bp, Artificial Sequence
  ENSG00000175606_20 (sequence is synthesized)
taacgagatcgtactctttatgaagcagcatctgtccctggtgaaaagttgctgtgcgtgctgaagagccagcacagcaacgactagcgcaatcggctggcctcatttcctctcttcccg

SEQ ID NO: 607863 - DNA, 120 bp, Artificial Sequence
  ENSG00000175606_21 (sequence is synthesized)
gtagaattcaatgttaactgaaaactaaccacgtcccccactccacccgcgagggtcctgcctttgcctctgggttagctcagctgtcctggatccggagctcacgcacagaaaatccag

SEQ ID NO: 607864 - DNA, 120 bp, Artificial Sequence
  ENSG00000175606_22 (sequence is synthesized)
tcttttaattgtaaaaatatccttaccatatcttacttgttgttatggcatcccttaattacaagacgtaaggaaaattagattttcatttttttttcttgaggtgtgttgataagatgt

SEQ ID NO: 607865 - DNA, 120 bp, Artificial Sequence
  ENSG00000175619_0 (sequence is synthesized)
atggccagtacaagtaatgtgactgagttgattttcactggccttttccaggatccagctgtgcagagtgtatgctttgtggtgtttctccccgtgtaccttgccacggtggtgggcaat

SEQ ID NO: 607866 - DNA, 120 bp, Artificial Sequence
  ENSG00000175619_1 (sequence is synthesized)
ggcctcatcgttctgacggtcagtatcagcaagagtctggattctcccatgtacttcttccttagctgcctgtccttggtggagatcagttattcctccactatcgcccctaaattcatc

SEQ ID NO: 607867 - DNA, 120 bp, Artificial Sequence
  ENSG00000175619_2 (sequence is synthesized)
atagacttacttgccaagattaaaaccatctctctggaaggctgtctgactcagatattcttcttccacttctttggggttgctgagatccttttgattgtggtgatggcctatgattgc

SEQ ID NO: 607868 - DNA, 120 bp, Artificial Sequence
  ENSG00000175619_3 (sequence is synthesized)
ttttgtcactccataattcagattctcgttatcatccaattgcccttctgtggtcccaatgtgattgaccactatttctgtgacctccagcctttattcaagcttgcctgcactgacacc

SEQ ID NO: 607869 - DNA, 120 bp, Artificial Sequence
  ENSG00000175619_4 (sequence is synthesized)
ttcatggagggggttattgtgttggccaacagtggattattctctgtcttctccttcctcatcttggtgtcctcttatattgtcattctggtcaacttgaggaaccattctgcagagggg

SEQ ID NO: 607870 - DNA, 120 bp, Artificial Sequence
  ENSG00000175619_5 (sequence is synthesized)
aggcacaaagccctctccacctgtgcttctcacatcacagtggtcatcttgttttttggacctgctatcttcctctacatgcgaccttcttccactttcactgaagataaacttgtggct

SEQ ID NO: 607871 - DNA, 120 bp, Artificial Sequence
  ENSG00000175619_6 (sequence is synthesized)
gtattctacacggtcatcacccccatgctgaaccccatcatttacacactcaggaatgcagaggtgaaaatcgccataagaagattgtggagcaaaaaggagaatccagggagggagtga

SEQ ID NO: 607872 - DNA, 120 bp, Artificial Sequence
  ENSG00000175634_0 (sequence is synthesized)
agtcagtgcgcggccaggtacgggccgacgggcccgcggggccggcgccgccatggcggccgtgtttgatttggatttggagacggaggaaggcagcgagggcgagggcgagccagagct

SEQ ID NO: 607873 - DNA, 120 bp, Artificial Sequence
  ENSG00000175634_1 (sequence is synthesized)
cagccccgcggacgcatgtccccttgccgagttgagggcagctggcctagagcctgtgggacactatgaagaggtggagctgactgagaccagcgtgaacgttggcccagagcgcatcgg

SEQ ID NO: 607874 - DNA, 120 bp, Artificial Sequence
  ENSG00000175634_2 (sequence is synthesized)
gccccactgctttgagctgctgcgtgtgctgggcaaggggggctatggcaaggtgttccaggtgcgaaaggtgcaaggcaccaacttgggcaaaatatatgccatgaaagtcctaaggaa

SEQ ID NO: 607875 - DNA, 120 bp, Artificial Sequence
  ENSG00000175634_3 (sequence is synthesized)
ggccaaaattgtgcgcaatgccaaggacacagcacacacacgggctgagcggaacattctagagtcagtgaagcacccctttattgtggaactggcctatgccttccagactggtggcaa

SEQ ID NO: 607876 - DNA, 120 bp, Artificial Sequence
  ENSG00000175634_4 (sequence is synthesized)
actctacctcatccttgagtgcctcagtggtggcgagctcttcacgcatctggagcgagagggcatcttcctggaagatacggcctgcttctacctggctgagatcacgctggccctggg

SEQ ID NO: 607877 - DNA, 120 bp, Artificial Sequence
  ENSG00000175634_5 (sequence is synthesized)
ccatctccactcccagggcatcatctaccgggacctcaagcccgagaacatcatgctcagcagccagggccacatcaaactgaccgactttggactctgcaaggagtctatccatgaggg

SEQ ID NO: 607878 - DNA, 120 bp, Artificial Sequence
  ENSG00000175634_6 (sequence is synthesized)
cgccgtcactcacaccttctgcggcaccattgagtacatggcccctgagattctggtgcgcagtggccacaaccgggctgtggactggtggagcctgggggccctgatgtacgacatgct

SEQ ID NO: 607879 - DNA, 120 bp, Artificial Sequence
  ENSG00000175634_7 (sequence is synthesized)
tcatcaggggcaagctggcactgcccccctacctcaccccagatgcccgggaccttgtcaaaaagtttctgaaacggaatcccagccagcggattgggggtggcccaggggatgctgctg

SEQ ID NO: 607880 - DNA, 120 bp, Artificial Sequence
  ENSG00000175634_8 (sequence is synthesized)
atgtgcagagacatccctttttccggcacatgaattgggacgaccttctggcctggcgtgtggacccccctttcaggccctgtctgcagtcagaggaggacgtgagccagtttgataccc

SEQ ID NO: 607881 - DNA, 120 bp, Artificial Sequence
  ENSG00000175634_9 (sequence is synthesized)
gcttcacacggcagacgccggtggacagtcctgatgacacagccctcagcgagagtgccaaccaggccttcctgggcttcacatacgtggcgccgtctgtcctggacagcatcaaggagg

SEQ ID NO: 607882 - DNA, 120 bp, Artificial Sequence
  ENSG00000175634_10 (sequence is synthesized)
gcttctccttccagcccaagctgcgctcacccaggcgcctcaacagtagcccccgggcccccgtcagccccctcaagttctccccttttgaggggtttcggcccagccccagcctgccgg

SEQ ID NO: 607883 - DNA, 120 bp, Artificial Sequence
  ENSG00000175634_11 (sequence is synthesized)
agcccacggagctacctctacctccactcctgccaccgccgccgccctcgaccaccgcccctctccccatccgtcccccctcagggaccaagaagtccaagaggggccgtgggcgtccag

SEQ ID NO: 607884 - DNA, 120 bp, Artificial Sequence
  ENSG00000175634_12 (sequence is synthesized)
ggcgctaggaagccgggtgggggtgagggtagcccttgagccctgtccctgcggctgtgagagcagcaggaccctgggccagttccagagacctgggggtgtgtctgggggtggggtgtg

SEQ ID NO: 607885 - DNA, 120 bp, Artificial Sequence
  ENSG00000175634_13 (sequence is synthesized)
agtgcgtatgaaagtgtgtgtctgctggggcagctgtgcccctgaatcatgggcacggagggccgcccgccacgccccgcgctcaactgctcccgtggaagattaaagggctgaatcatg

SEQ ID NO: 607886 - DNA, 120 bp, Artificial Sequence
  ENSG00000175634_14 (sequence is synthesized)
atccttgagtgcctcagtgtagactgagcgtcctgagggcagtggctgggtctcttcatcctgtccccagcttcacccagcacagggccaggcaccgagtaggcgtcggtagatgtttgc

SEQ ID NO: 607887 - DNA, 120 bp, Artificial Sequence
  ENSG00000175634_15 (sequence is synthesized)
ccaggccttcctggtgagtgcgggggcctgaggcctgtgggaccagggcacggatcgtgactaaggatggcaggcactgagtgtcgcatggccctgcctccgccccccagggcttcacat

SEQ ID NO: 607888 - DNA, 120 bp, Artificial Sequence
  ENSG00000175634_16 (sequence is synthesized)
gtgtggctgggttagggacgctggcaggcaggatgccagctccagccttgggtgccttggccacgtctgtcggccagtgttggcttcggttgctgtgtctatcatggggacctcagttcc

SEQ ID NO: 607889 - DNA, 120 bp, Artificial Sequence
  ENSG00000175634_17 (sequence is synthesized)
tacaccccttgtggccaggctgcctggatgggagtttgtggagcccgcggcctgtgtgcctgggcaggtgggaaaggctgccttccctgactgagtgctgggagcctctggcagggccta

SEQ ID NO: 607890 - DNA, 120 bp, Artificial Sequence
  ENSG00000175634_18 (sequence is synthesized)
tgagtgccctgccctggcgcgactggatcctggagccgatcctgtcacccagccgaggccggagcggcggctccgcacgcccagagcgggctccgactctttgcagacccagatccttct

SEQ ID NO: 607891 - DNA, 120 bp, Artificial Sequence
  ENSG00000175634_19 (sequence is synthesized)
cagatcccggtctctattaagttctgatcccaccctcaccccgacctctcttccagaaccccagccttttctcccgattctccctttcctgccttcggtttcttcccaattcttacccat

SEQ ID NO: 607892 - DNA, 120 bp, Artificial Sequence
  ENSG00000175634_20 (sequence is synthesized)
cccctactagctgccatccctgacacccttctctcctgggccacgcagtccaacctgaacgggagcggggaggtatcctggcaccttccttggctcttacccctcggtttctcacaggac

SEQ ID NO: 607893 - DNA, 120 bp, Artificial Sequence
  ENSG00000175634_21 (sequence is synthesized)
gcatgtccccttgccgagttgagggcagctggcctagagtgagtgagggtcgtgttgggggaggggggaatggagtggggaaggggaactggggagcactggagccttgtcctcattaac

SEQ ID NO: 607894 - DNA, 120 bp, Artificial Sequence
  ENSG00000175634_22 (sequence is synthesized)
ctgccattcccaacatgctgtaccaggctttgggaagacagcagggaacacagtggaggaggatccctgactttggcgtttgctggtttattgtctgttgtgatgtgtattgtcttgcag

SEQ ID NO: 607895 - DNA, 120 bp, Artificial Sequence
  ENSG00000175634_23 (sequence is synthesized)
tgatgtgtattgtcttgcagtaattctcaatgggggcaattttgactcccagcagacatttgacaacagtgtctggacactattttattttatttttttttaagacggagtcttgctctg

SEQ ID NO: 607896 - DNA, 64 bp, Artificial Sequence
  ENSG00000175634_24 (sequence is synthesized)
cctctgtctcccaggttcaagcgattctcgtgccttagactccgtgtagaggtggggtttcgcc

SEQ ID NO: 607897 - DNA, 90 bp, Artificial Sequence
  ENSG00000175634_25 (sequence is synthesized)
cctaaacgtgctgggagctgggattacaggcatgagccaccgtccctagcttttttttttttttggatggagtcttgctttgttccccag

SEQ ID NO: 607898 - DNA, 120 bp, Artificial Sequence
  ENSG00000175634_26 (sequence is synthesized)
tgggattacaggcatgagccaccgtccctagcttttttttttttttggatggagtcttgctttgttccccagactggagtgcagtagtgcactctctgctcactgcaacctctgcctccc

SEQ ID NO: 607899 - DNA, 87 bp, Artificial Sequence
  ENSG00000175634_27 (sequence is synthesized)
gtaattctcttttgtgccaccacacctggctaatctttgtatttctatttgtttacctacttattttgagacggagtctcactctgt

SEQ ID NO: 607900 - DNA, 67 bp, Artificial Sequence
  ENSG00000175634_28 (sequence is synthesized)
agtgcagtggtgcgatctcggctcactggcaacctccacctcccaggaccaccactcctggctaatt

SEQ ID NO: 607901 - DNA, 74 bp, Artificial Sequence
  ENSG00000175634_29 (sequence is synthesized)
ggtcttgaactcctgacctcaggcaccaccgtgcctggcctagtttttgtactttttagtggaggcagggtttc

SEQ ID NO: 607902 - DNA, 62 bp, Artificial Sequence
  ENSG00000175634_30 (sequence is synthesized)
ccaaagtgctgggattacagccatgaaccaccgtgcctggcctagtttttgtactttttagt

SEQ ID NO: 607903 - DNA, 120 bp, Artificial Sequence
  ENSG00000175634_31 (sequence is synthesized)
ggtgtgatccactgcgcctggcatggacacatttttgattgtcaaggcaagaggggagtgttactggcacccggtgggtggagaccagggatgctgctgaacatcccacgatgcgcaggg

SEQ ID NO: 607904 - DNA, 120 bp, Artificial Sequence
  ENSG00000175634_32 (sequence is synthesized)
cagcctcccacaacaaagaatgacctggtcccaggtgtcagtagtgccgaggttgagaaaccctgtgttagaggataaacccatccctgaaaatgatggtggctgacagcagcagaatta

SEQ ID NO: 607905 - DNA, 120 bp, Artificial Sequence
  ENSG00000175634_33 (sequence is synthesized)
gcagcagaattatggagaaatacaatgcagtgacagaggatgcagcagttaacaaacagatggatggtctgaggagctctggttgcccccattttttttttttttttttttttgagatag

SEQ ID NO: 607906 - DNA, 120 bp, Artificial Sequence
  ENSG00000175634_34 (sequence is synthesized)
ggcagcgagccagcaaaggaagctctggggggaagctcttgagagatgagtctgtgggggttggctagggggcccccactctgtcctacccatccatccatccatccgtgcatccgtccc

SEQ ID NO: 607907 - DNA, 120 bp, Artificial Sequence
  ENSG00000175634_35 (sequence is synthesized)
atcattcattcattcagcaaacgtctgtccagcacctactgtgtccctcacgtgtgttgggggtggatgggcatggtgcgaatttggatagaagtccagaggatggttgagtctcttcct

SEQ ID NO: 607908 - DNA, 120 bp, Artificial Sequence
  ENSG00000175634_36 (sequence is synthesized)
actcccctccctgtcttgttcttctctcccgtgtgccctgcatcctgtcaggtccccagcccaactggttcattctctgtagtgtcctcctccatccgtccactctcaggggcctggtgg

SEQ ID NO: 607909 - DNA, 120 bp, Artificial Sequence
  ENSG00000175634_37 (sequence is synthesized)
ggtggccagagcacttttctaactgggctgaggcctcccgctcacctgctttctagtgtctcctctgccgactgctgaggtcatagagcctggggctgctcccagcccttctattcagag

SEQ ID NO: 607910 - DNA, 120 bp, Artificial Sequence
  ENSG00000175634_38 (sequence is synthesized)
tcctgcggctggctgcccacatcaagccttgcccctaggccggctgtcccctgcaggctgtgagcagtcttgacctgcctttccctcgtttgggccagatgaaccctgcgagcttctgcc

SEQ ID NO: 607911 - DNA, 120 bp, Artificial Sequence
  ENSG00000175634_39 (sequence is synthesized)
tccatgctctgcattcgctccgtccatctcagcatccccttaaagtcccagcaaaccgcgctttctctgttctgttctgttgggattcactctgtcttccctgtcttctctgcgagatct

SEQ ID NO: 607912 - DNA, 120 bp, Artificial Sequence
  ENSG00000175634_40 (sequence is synthesized)
gggaggacagcccgaaggggcacggcctgactgacagttccacctggaccccagggcccctgagattctggtgcgcagtggccacaaccgggctgtggactggtggagcctgggggccct

SEQ ID NO: 607913 - DNA, 120 bp, Artificial Sequence
  ENSG00000175634_41 (sequence is synthesized)
ggcgggaattatgagcccctctttccccaagaagaaataaagactcagaaagcacaaaggggcttggacccagcacgtggctgctgacgtgtttgtgtggcaggtggcgagctcttcacg

SEQ ID NO: 607914 - DNA, 120 bp, Artificial Sequence
  ENSG00000175634_42 (sequence is synthesized)
atcggcaagtccagcccccggggaggaggaggggcaggggcagaggtgggagtagcccccctcctggggcaagggcagggcctggtgggaggcccacaaggctcctctcaccttcctcct

SEQ ID NO: 607915 - DNA, 120 bp, Artificial Sequence
  ENSG00000175643_0 (sequence is synthesized)
gcggcgaggcggaatggcggcggctgcggactcgttctcaggcggccccgcgggggtgcggcttccgaggtcgccgccactcaaggtgctggcggagcagctgcggcgcgacgcggaggg

SEQ ID NO: 607916 - DNA, 120 bp, Artificial Sequence
  ENSG00000175643_1 (sequence is synthesized)
cggctgtcacgggcggcggcgggccgcgggccgctggacctggcggccgtgtggatgcagggcagggtagtgatggcggaccgcggcgaggctcggctgagggacccgagcggggacttc

SEQ ID NO: 607917 - DNA, 120 bp, Artificial Sequence
  ENSG00000175643_2 (sequence is synthesized)
cccgagcggggacttctcggtccgcggcctggagcgggtgccgcgcgggcggccctgtctagtcccaggaaagtatgtgatggtgatgggagtggttcaggcctgcagccctgagccctg

SEQ ID NO: 607918 - DNA, 120 bp, Artificial Sequence
  ENSG00000175643_3 (sequence is synthesized)
cctgcaggctgtgaagatgacagacctttctgataatcccatccatgaaagtatgtgggaactggaggtagaagatttacacaggaatattccttagagtatgttggaactgtcgttaaa

SEQ ID NO: 607919 - DNA, 120 bp, Artificial Sequence
  ENSG00000175643_4 (sequence is synthesized)
aacaaccaaaatcccgaaactatttagaagcttataatgatgtggatttcatggacacttttcaatgcgtatttttcaaatgcttctcagagagccttgctttggttgaccaaggagtcc

SEQ ID NO: 607920 - DNA, 120 bp, Artificial Sequence
  ENSG00000175643_5 (sequence is synthesized)
cttcctggtttgtgtgtgttaattctctctctctctctcagacacagaagtctcatgttgcattttccaaattttatgagtgatgatactttttccattactgctgcgtccctgttttac

SEQ ID NO: 607921 - DNA, 120 bp, Artificial Sequence
  ENSG00000175643_6 (sequence is synthesized)
aatgcaaaatttaagtacggtcgttgcccatggtgattaaagtgtggttatgggcaggaagacagactgtgtaaaaaaggaatgacatcctggctcctcatcttcttcatcagcaactac

SEQ ID NO: 607922 - DNA, 120 bp, Artificial Sequence
  ENSG00000175643_7 (sequence is synthesized)
cataaccagtttgcgagtcaaatggcatttcctaacggcaggcatggcggcccctgaaagacaacagctccctttctgcttcggacaccactcaaacatttagacgcagctctatccctt

SEQ ID NO: 607923 - DNA, 120 bp, Artificial Sequence
  ENSG00000175643_8 (sequence is synthesized)
ttcctagctagagaaggtgatgccttcttccattactcagagatgttgagacgttttcagaatttcttgttgaaatgaaaaacatcaagataaaggacgcctttcaggcattagctaaac

SEQ ID NO: 607924 - DNA, 120 bp, Artificial Sequence
  ENSG00000175643_9 (sequence is synthesized)
ttccacttcataactttcggcgagacatggtgagcctcctggtgtagagttcttttgtctttgtatggaatgactttttgctgtgatggttttgaatgttgggtttctgctgtctgctta

SEQ ID NO: 607925 - DNA, 120 bp, Artificial Sequence
  ENSG00000175643_10 (sequence is synthesized)
gtacccatgcctgaattttttgagattgtaaatatcaaaggagttagattgtgttctgacatggttgtagactttcacctggattattgatattctacctctaataaatttttaataggc

SEQ ID NO: 607926 - DNA, 120 bp, Artificial Sequence
  ENSG00000175643_11 (sequence is synthesized)
gagagtgcaggcgccgtggggcgtcagctggacaaaagccgacccgacttcatttgtctgcctcgaccccgaccccggctggtagacagcactcctgatgcacgggacgagggagcggca

SEQ ID NO: 607927 - DNA, 120 bp, Artificial Sequence
  ENSG00000175643_12 (sequence is synthesized)
cgagcaaaggccctgaaacaggagggagcgcgatatgttgtcattaccatggggattacacgaaacatcctgaagttagagcaatccattttaaactgatgttttgttgatggctgacgt

SEQ ID NO: 607928 - DNA, 120 bp, Artificial Sequence
  ENSG00000175643_13 (sequence is synthesized)
agcggactcaaaacaacgagcacttctgcttgatacacagattctccgaggttcctgtggagccacagcacctcctgtcttggcacttcatagttgtctcatcgagtccaaggctgcctc

SEQ ID NO: 607929 - DNA, 120 bp, Artificial Sequence
  ENSG00000175643_14 (sequence is synthesized)
ccaagggtctggctggtagaccatgaagttgattcctgccttaagcctggctctgcaagaagttgtcctatattctcaccagtcacatttttggtactagaacggtgctttttatagtgc

SEQ ID NO: 607930 - DNA, 120 bp, Artificial Sequence
  ENSG00000175643_15 (sequence is synthesized)
cgtaactggacgctgaaatcacagcctggccatttggatgttcaaccgatgctttatgctgctgagtccttggaactcactccccgtgccggaactcactggagctcaggtgtgtggcac

SEQ ID NO: 607931 - DNA, 120 bp, Artificial Sequence
  ENSG00000175643_16 (sequence is synthesized)
taccttgtttctctgcagctggtattgcaaacatttttcatgcatttatttcccattgtttacttttgagtttttgttttgtgagacagggtctcagtctgtcacgcaggcaggagtgtg

SEQ ID NO: 607932 - DNA, 89 bp, Artificial Sequence
  ENSG00000175643_17 (sequence is synthesized)
atctagtgtgagccaccacacctgccctacttttgagctttgagttctttatatattctagagatgagtctctagagatgagtcctcgg

SEQ ID NO: 607933 - DNA, 120 bp, Artificial Sequence
  ENSG00000175643_18 (sequence is synthesized)
tatatattctagagatgagtctctagagatgagtcctcggtctgatagatggtttgtaaacatttttcccaatctgtagcttatctttccatcttcttaatagagtctttcagacagcaa

SEQ ID NO: 607934 - DNA, 120 bp, Artificial Sequence
  ENSG00000175643_19 (sequence is synthesized)
aaataagatctctcttgcaaatactctgcctctgtagcaggaaagcagccatagactacgtaaatgaacgtcggtggatcccttgagtaagtgtcattcatggtaaagatatctctagac

SEQ ID NO: 607935 - DNA, 120 bp, Artificial Sequence
  ENSG00000175643_20 (sequence is synthesized)
agggagcgcggggtacctgagtgagattcatcgtagatgcctggatgaagagaggggccttgcgcttctatttgccttgttacatagtgtttcttggaaaggctgtccttccctactcca

SEQ ID NO: 607936 - DNA, 120 bp, Artificial Sequence
  ENSG00000175643_21 (sequence is synthesized)
agcccctcccctcactccccacccaggatctgggcactggaggcgccagacatcttatgccctgtccaaggctagcagggccatccatcagtgctggtgagctgagctcagctgacaagc

SEQ ID NO: 607937 - DNA, 120 bp, Artificial Sequence
  ENSG00000175643_22 (sequence is synthesized)
cagcctggcacggagcgctgcccctcctgctggtcccagatccgttctgtccggaggagaatttcttatccccaggagatgcctggcctcgttaggagcctcctcacccgcccgcccgca

SEQ ID NO: 607938 - DNA, 120 bp, Artificial Sequence
  ENSG00000175643_23 (sequence is synthesized)
ccaaccctctgactccctccacctcaccgcctgggaacaacaggaagagagcaggacagcagcagaaaggagtgctgcttatgtggctcttctcagaatcaggaggctcccaggccagga

SEQ ID NO: 607939 - DNA, 120 bp, Artificial Sequence
  ENSG00000175643_24 (sequence is synthesized)
atgtgaaaccattatgcagatgaagaagatgaagcccgagaggttatgaaacagacccaagtgggctcgctcttcagtctcggcataaggaatccggaacctgggcccgtgtccggaact

SEQ ID NO: 607940 - DNA, 120 bp, Artificial Sequence
  ENSG00000175643_25 (sequence is synthesized)
cggaagggtgcggcgaggcggaatggcggcggctgcggactcgttctcaggcggccccgcgggggtgcggcttccgaggtcgccgccactcaaggaaagtatgtgatggtgatgggagtg

SEQ ID NO: 607941 - DNA, 120 bp, Artificial Sequence
  ENSG00000175643_26 (sequence is synthesized)
aggcgccagacatcttatgccctgtccaaggctagcaggtccttgtccctgaagggccatggagctaagtgaccagcgtgcctctctgggtcccgtgtgtgtggtaggaatcttcacact

SEQ ID NO: 607942 - DNA, 120 bp, Artificial Sequence
  ENSG00000175643_27 (sequence is synthesized)
gccttgctgtgaccgtgggccatcgcatcacctccctgtgccttggtttcctggcctctaaagactgaccttaaggggttgtttgtaaggatgaaggcacaaatgcaagccaagtcctta

SEQ ID NO: 607943 - DNA, 120 bp, Artificial Sequence
  ENSG00000175643_28 (sequence is synthesized)
gaattctcagcacatagcaagtgctcaatgaaccgcctggctgctgttcgctggggacacagtcttttgctctctggatgtctgaccgtgccctgtccctgcctcacagggccatccatc

SEQ ID NO: 607944 - DNA, 120 bp, Artificial Sequence
  ENSG00000175643_29 (sequence is synthesized)
acagaccacgaatctgccgtgtttgtgcacctctgttttgcttcccagaaacgaaactttggcaactggagagggatggagtggggcgggtggggtacagcaagatcgggaaacagcacc

SEQ ID NO: 607945 - DNA, 120 bp, Artificial Sequence
  ENSG00000175646_0 (sequence is synthesized)
acagcccacagagttccacctgctcacaggttggctggctcagccaaggtggtgccctgctctgagcattcaggccaagcccatcctgcaccatggccaggtacagatgctgtcgcagcc

SEQ ID NO: 607946 - DNA, 120 bp, Artificial Sequence
  ENSG00000175646_1 (sequence is synthesized)
gcagacgaaggaggcggagctgccagacacggaggagagccatgaggtgctgccgccccaggtacagaccgcgatgtagaagacactaattgcacaaaatagcacatccaccaaactcct

SEQ ID NO: 607947 - DNA, 120 bp, Artificial Sequence
  ENSG00000175646_2 (sequence is synthesized)
gcctgagaatgttaccagacttcaagatcctcttgccacatcttgaaaatgccaccatccaataaaaatcaggagcctgctaaggaacaatgccgcctgtcaataaatgttgaaaagtca

SEQ ID NO: 607948 - DNA, 120 bp, Artificial Sequence
  ENSG00000175662_0 (sequence is synthesized)
agtcaggacgggagtccggcgggttacagcggaggcctaggtggcagacagggggcccgggccgctgcgtgttgtccacccaagatggagttcctcctggggaacccgttcagcacacca

SEQ ID NO: 607949 - DNA, 120 bp, Artificial Sequence
  ENSG00000175662_1 (sequence is synthesized)
gtggggcagtgcctcgaaaaggcaacagatggctccctgcaaagtgaggattggacgttgaatatggagatctgtgacatcatcaatgagacggaggaagggccaaaggatgccattcga

SEQ ID NO: 607950 - DNA, 120 bp, Artificial Sequence
  ENSG00000175662_2 (sequence is synthesized)
gccctgaagaagcggctcaacgggaaccggaactacagagaggtgatgctggcattaacagtgctggagacatgtgtgaagaactgtggccaccgcttccacatccttgtggccaaccga

SEQ ID NO: 607951 - DNA, 120 bp, Artificial Sequence
  ENSG00000175662_3 (sequence is synthesized)
gatttcatcgacagtgttctggtcaaaattatatctcccaagaacaaccctcccaccattgtacaggacaaagtgcttgctctgatccaggcatgggctgatgcctttcgaagcagtcct

SEQ ID NO: 607952 - DNA, 120 bp, Artificial Sequence
  ENSG00000175662_4 (sequence is synthesized)
gatctcaccggcgttgtgcacatatatgaggagctgaagaggaaaggggttgaatttcccatggcagacttggacgctctgtctcccatacacacaccacagcggagtgtccctgaagtg

SEQ ID NO: 607953 - DNA, 120 bp, Artificial Sequence
  ENSG00000175662_5 (sequence is synthesized)
gatccagctgcgaccatgcccaggtcccaatcacagcagaggacaagtgctggttcctattcctcgccgcctcctgctccctactccgcaccgcaggccccagctctgagtgtgactggc

SEQ ID NO: 607954 - DNA, 120 bp, Artificial Sequence
  ENSG00000175662_6 (sequence is synthesized)
cccatcacagccaattcagaacagattgccaggctgcggagtgaactggacgtcgttcgaggaaacacaaaagtcatgtctgagatgttaacagaaatggtccctggacaggaggattca

SEQ ID NO: 607955 - DNA, 120 bp, Artificial Sequence
  ENSG00000175662_7 (sequence is synthesized)
tctgatctggagttgctgcaggagctcaacaggacctgtcgggccatgcagcagcgcatcgtggagctcatctcccgcgtgtccaatgaggaggtcaccgaggagctgctgcatgtgaac

SEQ ID NO: 607956 - DNA, 120 bp, Artificial Sequence
  ENSG00000175662_8 (sequence is synthesized)
gatgacctcaacaacgtcttccttcgatacgagaggttcgaacgatacaggtctggccgatccgttcaaaatgccagtaatggagtactgaatgaagtaaccgaagacaacttaatagac

SEQ ID NO: 607957 - DNA, 120 bp, Artificial Sequence
  ENSG00000175662_9 (sequence is synthesized)
ctggggccagggtctccagccgtggtgagcccaatggtggggaacacagcgcccccatcttccctctcctcccagcttgcaggcttagacttggggacagagagcgtcagtggcaccctc

SEQ ID NO: 607958 - DNA, 120 bp, Artificial Sequence
  ENSG00000175662_10 (sequence is synthesized)
aatccccgtgacggctttgacatgtttgcccagacgagaggaaactccttggctgagcagcgcaagacggtaacctatgaggatcctcaggctgtcggaggacttgcttctgcactagac

SEQ ID NO: 607959 - DNA, 120 bp, Artificial Sequence
  ENSG00000175662_11 (sequence is synthesized)
aatcgaaaacagagttcagaagggatccccgttgcgcagccatctgtcatggacgacattgaggtgtggctcaggaccgacctgaagggtgatgatctggaggagggtgtcacaagtgaa

SEQ ID NO: 607960 - DNA, 120 bp, Artificial Sequence
  ENSG00000175662_12 (sequence is synthesized)
gagtttgataaattccttgaagaaagagccaaagctgctgaaatggttcccgacctcccctcgccccccatggaggctcctgccccagcctcaaacccttctggccggaagaagccagag

SEQ ID NO: 607961 - DNA, 120 bp, Artificial Sequence
  ENSG00000175662_13 (sequence is synthesized)
cggtcagaggatgccctcttcgccctgtgagcagctctgtggtttgcctccccagatggcgggtccccgctcgcaccccgtggacaccgggcactggccactcctacatccccagctcca

SEQ ID NO: 607962 - DNA, 120 bp, Artificial Sequence
  ENSG00000175662_14 (sequence is synthesized)
cacggcctgcacacctgtgtttccatggaaatgccaccgtgtctgctcccaggcctcccactagtcaggaccagcttcagccacttcttttctctgagtggtgggacaactgcagccaga

SEQ ID NO: 607963 - DNA, 120 bp, Artificial Sequence
  ENSG00000175662_15 (sequence is synthesized)
gactctctcccctcccaccatgggcccctctgcccatgtttcctcccaggaagagcgggcagagtggcccagccccaggcagtgcttcctgagcagaccacccggactgtctttcctcca

SEQ ID NO: 607964 - DNA, 120 bp, Artificial Sequence
  ENSG00000175662_16 (sequence is synthesized)
cccgcccatggagaaagagcacgcccggccccgccctgtgctcacctctgcctggctcagcgaccttctcaggcattctgccctcctgggcccctctctccctgaaggggctttgtggca

SEQ ID NO: 607965 - DNA, 120 bp, Artificial Sequence
  ENSG00000175662_17 (sequence is synthesized)
tctctggaagagcagggtgtgctgcactcatgggcctggtctcactccttggacttgtcaccttgtgacatttggcttatcagcatttgagaaggctctgctgggtctccatggtggggg

SEQ ID NO: 607966 - DNA, 120 bp, Artificial Sequence
  ENSG00000175662_18 (sequence is synthesized)
tctctcaccttcttgaccctctctccatcattcagctgccagcccaggcttcacacccaagctggctcagcagccgagcctggcaccgagggtccctgcaggctccctgggcagggagag

SEQ ID NO: 607967 - DNA, 120 bp, Artificial Sequence
  ENSG00000175662_19 (sequence is synthesized)
ggccaaggacaattgggagggcagcaggcagcccgcagatggtggccatgtggcacgctgctgagacgacactaccaataaaccaaactgccacgcacacactgcaggctcacacccgca

SEQ ID NO: 607968 - DNA, 120 bp, Artificial Sequence
  ENSG00000175662_20 (sequence is synthesized)
caatccagaccacgtctggcaggccccaaggcccaggcagctttttgagagcccctctcctgcctggcctggggacatgagccattcacaacagaggagagttggccacaaaaagagaga

SEQ ID NO: 607969 - DNA, 120 bp, Artificial Sequence
  ENSG00000175662_21 (sequence is synthesized)
ccacaatctaaatgtccagcaatagaagaatggcgagatacattatgaaacacacagaaaggaatgaggcagtctgtaccaagtgatggagaacggtgtctggaatattttgttgagaaa

SEQ ID NO: 607970 - DNA, 120 bp, Artificial Sequence
  ENSG00000175662_22 (sequence is synthesized)
aagcaatctggaaagaatcacattttaatattttttaatgatttgtacaagcatgtacttgtatacatacaacagtatgtctggacatttgtctgctgaaaaagtacttgtttcctctgc

SEQ ID NO: 607971 - DNA, 120 bp, Artificial Sequence
  ENSG00000175662_23 (sequence is synthesized)
ggaaggaggggcaggcagtgaagagggaacttctactttgaattcggcacatgtctggttttatgaacaagcatgtactccttttgtgacttttaagaatcagtacaaattttttcaaag

SEQ ID NO: 607972 - DNA, 120 bp, Artificial Sequence
  ENSG00000175662_24 (sequence is synthesized)
gacatgtttgcccagacgagaggaaactccttggctgagcagcgcaagacacaccaccctgcctggcccctcatccacaggagaagcttggaagcaggagggtgcagccatgcagggtga

SEQ ID NO: 607973 - DNA, 120 bp, Artificial Sequence
  ENSG00000175662_25 (sequence is synthesized)
acccattccttacagcgagattttcctgactaaaataagtggtcagagcagaggctcctctgatagcagctctggctaggatgagccatctggaattcagggagttgattccaaaagaga

SEQ ID NO: 607974 - DNA, 120 bp, Artificial Sequence
  ENSG00000175662_26 (sequence is synthesized)
gacccagcatcttggtgcactcagcaccctgagtcctgcttggggctcagtagggtaagcagaaacccaaggtcccatgtacccttcaccaccaaaggttgattgtaaaacagatatagc

SEQ ID NO: 607975 - DNA, 120 bp, Artificial Sequence
  ENSG00000175662_27 (sequence is synthesized)
taaaggagtcggagagtggaggaagacctcccataatcagtgacaggcccgggtcccagagaccaccttccctgtcaaatgccactgaggctgctgctaataaaataagaattaatgtta

SEQ ID NO: 607976 - DNA, 120 bp, Artificial Sequence
  ENSG00000175662_28 (sequence is synthesized)
gtcctagggtggccatgggcagacagaggtggctgggcgggcagtgcttggaccagtgccctaatttcattttctctgctcctcccacagaagggtgatgatctggaggagggtgtcaca

SEQ ID NO: 607977 - DNA, 120 bp, Artificial Sequence
  ENSG00000175662_29 (sequence is synthesized)
gaagttagaaggtgttttgcagccccgggctgagaggccccgcaatgtgagagtggacactcatagtcaaaaagttctccatttcaagaacgcgtacagccaccttccttaccgccggcc

SEQ ID NO: 607978 - DNA, 120 bp, Artificial Sequence
  ENSG00000175662_30 (sequence is synthesized)
ctgccgggagcctgcttcttatcatttgcacctcattgctttcctcacctgccatctcacacgtggctgccctgtgttgcccctgtgtgctgtgccaattgtgtttttttgctctgtgta

SEQ ID NO: 607979 - DNA, 120 bp, Artificial Sequence
  ENSG00000175662_31 (sequence is synthesized)
tcacacatctgcctcaagagccagcagcaaacagctttgtggcatccttggaggttcccagtgactgagaggcctgggcagcactaaggcccctgctctgctccctggcataggccttgg

SEQ ID NO: 607980 - DNA, 120 bp, Artificial Sequence
  ENSG00000175662_32 (sequence is synthesized)
cctccttgcacagactctcctgacagtctggcctcctcccacctcagaggtcctctggccaccaatttatactctctccccaagctgatcctgaaggcaggcagagcagctaggggctgg

SEQ ID NO: 607981 - DNA, 120 bp, Artificial Sequence
  ENSG00000175662_33 (sequence is synthesized)
taacatgtattcccatcccgtgtcctcactggtgtgtctcctggccatgggcaagggactcgggtcatcccaggccctggtccagccagacacctggccccacacctcccaccaggctgc

SEQ ID NO: 607982 - DNA, 120 bp, Artificial Sequence
  ENSG00000175662_34 (sequence is synthesized)
tcctgtcccctccagcatgcactgcctaggtcagcacaggttcctgatccatggtgtagttagcccttcccacctggcaggacggcccagaccaccagccaagcagggaaagggggctgg

SEQ ID NO: 607983 - DNA, 120 bp, Artificial Sequence
  ENSG00000175662_35 (sequence is synthesized)
gcttgacgggagaagagaccagcgacatggtcgttggggagcattcaggatggcgacttcagctgggggtcatgctgagcaccaacaggaactattccagtgaagagcaagtgctgcccg

SEQ ID NO: 607984 - DNA, 120 bp, Artificial Sequence
  ENSG00000175662_36 (sequence is synthesized)
acccaggaccctgtgccaggctagcagccctccagctccctccagagaggaaacctctgtctggctgagggtgggactagctgggatgtctcactccagttgctcaggttcacccaggaa

SEQ ID NO: 607985 - DNA, 120 bp, Artificial Sequence
  ENSG00000175662_37 (sequence is synthesized)
gctcctccgtggagtggccagcctgattctagccctgtcctctctggcagcacatgccacacctgcctgggccttctgctccctgatgcttgatgagcccctgcctcctcaatgtttctc

SEQ ID NO: 607986 - DNA, 120 bp, Artificial Sequence
  ENSG00000175662_38 (sequence is synthesized)
aaagacagacccccctgaggccagcttgaatgtgaagactgctgaagttagctggcttcacttgagctgcagaaaaggtggctgggatggcccaggtgcacccagaggccccagcccttt

SEQ ID NO: 607987 - DNA, 120 bp, Artificial Sequence
  ENSG00000175662_39 (sequence is synthesized)
ggctgcctttgggttgtgacttgggttgtctctgaggccctgccagagctgggcctgcgggtggtgggcggtccgacctcgggcagtcagtgctccgcagcctcagcactgcatcccaga

SEQ ID NO: 607988 - DNA, 120 bp, Artificial Sequence
  ENSG00000175662_40 (sequence is synthesized)
cccagtgtcctcagagggaagagccagcctccctgcctcatggaaccaggagtcccaaaaagtcaggagcctggaggctctgaaaggagcagggattccatagtgcgtgaagctgaaata

SEQ ID NO: 607989 - DNA, 120 bp, Artificial Sequence
  ENSG00000175662_41 (sequence is synthesized)
ggcgccctcctggggagcccccagcaaaactgtttttcatacccactcccagaactgccccgctccagctccagcgccagcgccagctggttgccaggcatcattggagaggcctggctg

SEQ ID NO: 607990 - DNA, 120 bp, Artificial Sequence
  ENSG00000175662_42 (sequence is synthesized)
ccccaggggcagcagggagtggtggacctgtatgggctggcaggaggccattggccatgctgacaagtgtcacctgccttcctagcctggagccacccctcaggtggcctgcttgcacct

SEQ ID NO: 607991 - DNA, 120 bp, Artificial Sequence
  ENSG00000175662_43 (sequence is synthesized)
cctatccggaggtagcctgccccacctgtaggcagagggggctcttgcttgaggcctgcacaggaagcaagtatagccccggtgccccagagtgggttccacttagccctggcgagatgg

SEQ ID NO: 607992 - DNA, 120 bp, Artificial Sequence
  ENSG00000175662_44 (sequence is synthesized)
cctgtcctgagatctctgctcccagaccccaccatctggggagcacagtccttaggctgcctggtccaggaagggggtgcggctctgtcaggaaacctggactctcaaggcccaccagcc

SEQ ID NO: 607993 - DNA, 120 bp, Artificial Sequence
  ENSG00000175662_45 (sequence is synthesized)
tctccgtgagtgttagaaatcacagatacagtatatacttaattacactaaattattgctgggattccttataagcactaattatacctgattataggttaaaatatttattttgtcaaa

SEQ ID NO: 607994 - DNA, 120 bp, Artificial Sequence
  ENSG00000175662_46 (sequence is synthesized)
atattttcttgggaatgtgtttaaccctttctgcgttcattgttgctgagatgtgaaaactaaccattccctcctgcctacctttttggccactgggcggcagagaatggcgctatgtgc

SEQ ID NO: 607995 - DNA, 120 bp, Artificial Sequence
  ENSG00000175662_47 (sequence is synthesized)
agttgggcccctggcaccatgggcctttggcctgcctgctgcagagtagccctgcctgggcagtctccaggcactgagcaggccatctgtggccaggctgagagaatgactggctcgctt

SEQ ID NO: 607996 - DNA, 120 bp, Artificial Sequence
  ENSG00000175662_48 (sequence is synthesized)
accagcgtgcatgggacaaggagctttggagcctcaaggggttgttgctggcctgggctagagggaaaggtgaccatccgtctgtcctcctgtctttctattagcgcctccatgtgagtg

SEQ ID NO: 607997 - DNA, 120 bp, Artificial Sequence
  ENSG00000175662_49 (sequence is synthesized)
atggtgccttggttcactagccttcccccaccaccccaccatgccacctggtggtcttggggcctgtgctgtcactccagcccctggggaggagaggacccagcccggagagttggggca

SEQ ID NO: 607998 - DNA, 120 bp, Artificial Sequence
  ENSG00000175662_50 (sequence is synthesized)
agggctccacatggcccaagggcaacagatgctcgcagggcagctgctgccgatgctcacgctcctgcccccctccttcccgctgccacaccccaccctgggcccccgcagacacgcatc

SEQ ID NO: 607999 - DNA, 120 bp, Artificial Sequence
  ENSG00000175662_51 (sequence is synthesized)
tctaactcagttgggcccagccttctggatggcttggggtaggccatgggcccacctggggccaggccagcccctggggcagctctggaagagcagtgtggaggagcacttgcttgcagc

SEQ ID NO: 608000 - DNA, 120 bp, Artificial Sequence
  ENSG00000175662_52 (sequence is synthesized)
ctggcttcagcctctggcactgctggagtggtccctgggagcttctgcactgtcggctttggggacgtctcacccacttgggttacagtaggccttccccacccagagagaagtgtttcc

SEQ ID NO: 608001 - DNA, 120 bp, Artificial Sequence
  ENSG00000175662_53 (sequence is synthesized)
accccagagacattgtctgtcagcccctgaagtgctcgcctcccccagtgcccgtcaccagcccttcctatctgtggggtccaagtcaggcttcccctgcggccaccagccatagggagc

SEQ ID NO: 608002 - DNA, 120 bp, Artificial Sequence
  ENSG00000175662_54 (sequence is synthesized)
agccatcagcccccgagtcagaactgcttctgtctgtccatacctccaggctctcccggagagggggacggatatttatttcctaaagtttgcacttaattgtgaggattctcaggattg

SEQ ID NO: 608003 - DNA, 120 bp, Artificial Sequence
  ENSG00000175662_55 (sequence is synthesized)
ttgggggctactgaaaagaggaatgtgttgaatgtcgcgtttgctgtccactcgtcctagaagtttagtgtttttgtcactgtcatgtgtttctgtgggcagagctggttctggagggtg

SEQ ID NO: 608004 - DNA, 120 bp, Artificial Sequence
  ENSG00000175662_56 (sequence is synthesized)
ggtcagtgcacccgaggctcagagcatccatccaccccactggccctccttccagataccctctctctaattgggttcttgcatgtaaaatactccacaataaataaataattgaacaaa

SEQ ID NO: 608005 - DNA, 120 bp, Artificial Sequence
  ENSG00000175662_57 (sequence is synthesized)
ctttttttttttttttcccttgaaaagattgttgccataacagagggatttctttcataaacaaaggaaagagagggagagggagagagattagagttggaaaatactcatcagagatgc

SEQ ID NO: 608006 - DNA, 120 bp, Artificial Sequence
  ENSG00000175662_58 (sequence is synthesized)
taatttgttcccggctgacaggaaaaatgcttcttgtcctcctgggaactgagcagcagaagcagcaggaagttgacgtgcagaattaggctctgccctttgtaagcctcaggctgctct

SEQ ID NO: 608007 - DNA, 120 bp, Artificial Sequence
  ENSG00000175662_59 (sequence is synthesized)
gcctttccccactgccccgccacccccagccccagggaggggtagcacttgggggcctctgggccccagagcttctgcacctgctcctttgatgatcctttgaatttgaaaaggattaaa

SEQ ID NO: 608008 - DNA, 120 bp, Artificial Sequence
  ENSG00000175662_60 (sequence is synthesized)
ttacagacccactgttgtgttggttttgagtctttcctgatgtctcaagccaagcactgctgtggcttgtctcttgcccactctgaccttcttgaagctgaggaccatatcagattcaat

SEQ ID NO: 608009 - DNA, 120 bp, Artificial Sequence
  ENSG00000175664_0 (sequence is synthesized)
ggctcccgcaagcgctgagatagctggagccagggccccgcggccgcctcctggggcagaatggaacagcctgggcccagggctccggatccctctctctgccaccacaacctccagcca

SEQ ID NO: 608010 - DNA, 120 bp, Artificial Sequence
  ENSG00000175664_1 (sequence is synthesized)
acagatgaccccaactgggattcctatgctaccactatgaggactgcattcacgcctaaaacaggagcagtgcctgccttaattcgccaaaacggtatcagaagattaggatatacatat

SEQ ID NO: 608011 - DNA, 120 bp, Artificial Sequence
  ENSG00000175664_2 (sequence is synthesized)
tcacttagtgatcctattctcaatcagacacaatatagtgatgagtacacttggaaatcacactctaaagaagatttgatcaaaactgagacttcaagaggaatcaagagccacaaatct

SEQ ID NO: 608012 - DNA, 120 bp, Artificial Sequence
  ENSG00000175664_3 (sequence is synthesized)
catctcaatgaagacattttcctgtggacactacctcactgtcaacaaacggggacactaaagaactgcctcccttggaaaatcccggcttcaatgaaagaagttaacaaggcactatca

SEQ ID NO: 608013 - DNA, 120 bp, Artificial Sequence
  ENSG00000175664_4 (sequence is synthesized)
aatcagtttatttcccttactaagagagactttgtggacagatcaaaagctcagaagattaagaaaagttctcacttgtctctggaatggaaaaagttacttccccaacctccagacact

SEQ ID NO: 608014 - DNA, 120 bp, Artificial Sequence
  ENSG00000175664_5 (sequence is synthesized)
gaattccgaaggaattaccaaattccagctaaaattcctgagcttcaagatttcagtttcaaatatggatgctactcaagcttgcctgttgcttctcagggtctagtgccttctgtgctg

SEQ ID NO: 608015 - DNA, 120 bp, Artificial Sequence
  ENSG00000175664_6 (sequence is synthesized)
aatgcttttaaactcatttacttcctctcaagtcaaagagtaccttcagagtctttcctacaaagatagacaaattattgatcgctttattcgtactcactgtgacactaacaaaaagaa

SEQ ID NO: 608016 - DNA, 120 bp, Artificial Sequence
  ENSG00000175664_7 (sequence is synthesized)
gaaatgaaaagggaaaatagtacaaatgaagaaaatctgaaaatcaatggaagcacgaggacattcctagtcattttctcaattatcaaggaaaaataagatgcaaatagcttcaagtat

SEQ ID NO: 608017 - DNA, 120 bp, Artificial Sequence
  ENSG00000175664_8 (sequence is synthesized)
gatgtgatagtcatgaatttgtgtcttttgctccgctttatttttaaacaataaaattaaggctacaaaattttccctgaacatagctttagctgtatccaatagtttttgatacaatgt

SEQ ID NO: 608018 - DNA, 120 bp, Artificial Sequence
  ENSG00000175664_9 (sequence is synthesized)
ttttttcttttcccttttggatacttaatttgtagtttcaattttgatttctcctgtgaactaggaattatgtggaagagatttcttaatgtcccattaatcagagacttaagaaatcat

SEQ ID NO: 608019 - DNA, 120 bp, Artificial Sequence
  ENSG00000175664_10 (sequence is synthesized)
tttattgccttatctcttctttgaatgaatgaaagtttaaaaatctgcttttgggaaatcaattgcagttttatttaatgccattaatcaagtatatgattaatttgtgtgttacgtgaa

SEQ ID NO: 608020 - DNA, 120 bp, Artificial Sequence
  ENSG00000175664_11 (sequence is synthesized)
tacgtgaatatgagaaaaaaattatagtttattgtattttttaatcccttatatctttaattgtatacttgaattgttcaattctgaaagaatattggaacctcccacaataaatatatt

SEQ ID NO: 608021 - DNA, 120 bp, Artificial Sequence
  ENSG00000175664_12 (sequence is synthesized)
ctcctggggcagaatggaacagcctgggcccagggctccggatccctctctctgccaccacaacctccagccaaggtttttaaacactcgaggaagtgcctggctaagaggggacaggaa

SEQ ID NO: 608022 - DNA, 120 bp, Artificial Sequence
  ENSG00000175664_13 (sequence is synthesized)
gattttccaaggaaaacagggccaaaggcaaagaagaaagagaagtcctggaagctctgaagagaacaggtcctgcctgagtcccgatccccatataggatcttggaaacagcaaggaaa

SEQ ID NO: 608023 - DNA, 120 bp, Artificial Sequence
  ENSG00000175664_14 (sequence is synthesized)
aagaagttaacaaggcactatcaaatcagtttatttcccttactaagagagactttgtggacagatcaaaagatagacaaattattgatcgctttattcgtactcactgtgacactaaca

SEQ ID NO: 608024 - DNA, 120 bp, Artificial Sequence
  ENSG00000175691_0 (sequence is synthesized)
aagccgagttcccctctgccttgcgcgcttccccgcctaccccgagcggctcaggtgtcctgtcgtgctcacctgcgccggtcgctggaccgcggggcgctaaccctggagagcccagga

SEQ ID NO: 608025 - DNA, 120 bp, Artificial Sequence
  ENSG00000175691_1 (sequence is synthesized)
gcgggcgggacatggactgcgtgatctttgaggaagtggctgtgaacttcaccccagaagagtgggcattgctggatcatgctcagaggagcctctacagagatgtgatgctggagacct

SEQ ID NO: 608026 - DNA, 120 bp, Artificial Sequence
  ENSG00000175691_2 (sequence is synthesized)
gcaggaaccttgcctccttggattgttacatttatgttagaaccagtggatcaagttctcagagggacgtttttgggaatggaatatccaatgatgaagagattgtaaagttcacaggaa

SEQ ID NO: 608027 - DNA, 120 bp, Artificial Sequence
  ENSG00000175691_3 (sequence is synthesized)
gtgattcctggtctatttttggagaaaattggagatttgataacactggagatcagcaccaaatcccacagaggcatctgagaagtcagctggggagactctgtgaaagtaatgaaggtc

SEQ ID NO: 608028 - DNA, 120 bp, Artificial Sequence
  ENSG00000175691_4 (sequence is synthesized)
atcaatgcggagagaccttgagccagactgcgaaccttcttgtgcacaagagttaccctaccgaagctaaaccctctgagtgcactaagtgtggcaaagccttcgagaatcggcagagat

SEQ ID NO: 608029 - DNA, 120 bp, Artificial Sequence
  ENSG00000175691_5 (sequence is synthesized)
ctcacactggacagagaccgtgtaaggaatgtgggcaagcctgcagctgcctctcctgccaaagccctcctatgaaaacgcagactgtagagaaaccctgtaattgccaggactcaagga

SEQ ID NO: 608030 - DNA, 120 bp, Artificial Sequence
  ENSG00000175691_6 (sequence is synthesized)
cagcatctgtgacatacgtgaaaagtctcagcagtaaaaagtcttatgaatgtcagaaatgtggaaaagctttcatttgtccctcatctttcaggggacatgtgaatagtcatcatgggc

SEQ ID NO: 608031 - DNA, 120 bp, Artificial Sequence
  ENSG00000175691_7 (sequence is synthesized)
agaaaacccatgcatgtaaagtatgtgggaagacctttatgtattactcctaccttacacggcacgtaagaactcacacaggagagaaaccctatgagtgtaaggagtgtgggaaagcct

SEQ ID NO: 608032 - DNA, 120 bp, Artificial Sequence
  ENSG00000175691_8 (sequence is synthesized)
cactggagagaaaccgtatgaatgtaagcattgtggaaaatcattcagctgttactcctcctttagagatcacgtgaggacgcacactggagagaaaccctgtcagtgtaaacattgcgg

SEQ ID NO: 608033 - DNA, 120 bp, Artificial Sequence
  ENSG00000175691_9 (sequence is synthesized)
cgcacactggagagaaaccctgtcagtgtaaacattgcggaaaagcgttcacttgttactcgtctcttcgagaacatgggagaacgcacagtggagagaaaccctatgaatgtaaggaat

SEQ ID NO: 608034 - DNA, 120 bp, Artificial Sequence
  ENSG00000175691_10 (sequence is synthesized)
gcggcaaagccttcaggtacccctcctctctgcgagcacacatgagaatgcacaccggagagaagccctatgtgtgcaagcagtgtgggaaggccttcggatgtcccacttactttagaa

SEQ ID NO: 608035 - DNA, 120 bp, Artificial Sequence
  ENSG00000175691_11 (sequence is synthesized)
gacatgtgaaaacacacagcggggtgaagccctatcaatgtaaagagtgtgggaaagcctacagtttttcctcctcccttcgaatccacgtgaggacgcatactggagagaagccctttg

SEQ ID NO: 608036 - DNA, 120 bp, Artificial Sequence
  ENSG00000175691_12 (sequence is synthesized)
agtgtaagcattgtgggaaagccttcagctgtcactcctcccttcgagagcatgtgcgaacccacagcggagagaaaccgtacgaatgtaatcaatgtgggaaagccttcagccacgctc

SEQ ID NO: 608037 - DNA, 120 bp, Artificial Sequence
  ENSG00000175691_13 (sequence is synthesized)
agtactttcaaaagcatgtgagatcacacagtggggtcaaaccctacgaatgtactgaatgtgggaaagcctacagttgttcctcgtcccttcgtgtgcacgtgagaacgcacactggag

SEQ ID NO: 608038 - DNA, 120 bp, Artificial Sequence
  ENSG00000175691_14 (sequence is synthesized)
agagaccgtatgaatgcaagcagtgtgggaaaaccttcaggtatctcgcatcgcttcaagcacatgtgagaacacatgctggagcgtgaatctacgaatacagtggacctgggagagtgt

SEQ ID NO: 608039 - DNA, 120 bp, Artificial Sequence
  ENSG00000175691_15 (sequence is synthesized)
tcaaccgtaaaaccttgttgtaaatgtgagaaacgttatttatgtagagcatgtaggaaaacctggtatagcacttattttgtacctaaaaattcagagtaggagagaaatctcttaatt

SEQ ID NO: 608040 - DNA, 120 bp, Artificial Sequence
  ENSG00000175691_16 (sequence is synthesized)
atgattaatatggtattgcctttacatgcctcagccttaatagtgattccttttgtattaatttctagtgtatgtttgtgatataaacatttaataaatatcctgttttgtacgctttca

SEQ ID NO: 608041 - DNA, 120 bp, Artificial Sequence
  ENSG00000175691_17 (sequence is synthesized)
gcgggcgggacatgagacgggatctcactatgcagcccaggctggtcgccaactcctggccctaagcaatcctcgcacctgagcctctcaaagtactgggattgcaggcatgagccacca

SEQ ID NO: 608042 - DNA, 120 bp, Artificial Sequence
  ENSG00000175691_18 (sequence is synthesized)
ttctttgtaagtctctggcagaggccgtcattgcgctttgctccctgttgggaaggtactcacggcattgagtgtactgcactttttcatactgttggtcacctctcacaaggacataag

SEQ ID NO: 608043 - DNA, 120 bp, Artificial Sequence
  ENSG00000175691_19 (sequence is synthesized)
ctctgtgtggctcagttccccaggctgtcagcctcacccctcttcctgcgcacatgggggaggcggtgcctttgctgaagtgggatgtgtggaatgttttaggactgcgtgatctttgag

SEQ ID NO: 608044 - DNA, 120 bp, Artificial Sequence
  ENSG00000175697_0 (sequence is synthesized)
ggagcctagcgaaataaccctttgcttctacctgaatgggttgttcactctggattctgagcctgcagccagctccaaaatggggcctctgaagaaaagatttgagttgctcttgtgtct

SEQ ID NO: 608045 - DNA, 120 bp, Artificial Sequence
  ENSG00000175697_1 (sequence is synthesized)
tagtcaaagatctacatccctaccagtgggtaaccaagactgtgaataagcacacaccaacaggggcatgtggtgacatggagcctgaaataaactgctctgaattgtgtgacagttttc

SEQ ID NO: 608046 - DNA, 120 bp, Artificial Sequence
  ENSG00000175697_2 (sequence is synthesized)
ctggccaggagctggatcggagaccccttcatgatctctgcaagacaacaattacatcttcccaccacagcagtaagaccatctcttcattatctcctgtcctcttgggtattgtttgga

SEQ ID NO: 608047 - DNA, 120 bp, Artificial Sequence
  ENSG00000175697_3 (sequence is synthesized)
cttttctcagctgtggacttctgctgatacttttctttcttgcctttacaattcactgcaggaagaacaggattgtgaagatgtccagtcccaatctgaacattgtgaccttactgggca

SEQ ID NO: 608048 - DNA, 120 bp, Artificial Sequence
  ENSG00000175697_4 (sequence is synthesized)
gttgtctcacttacagtagcgcttacctctttgggattcaggatgttttagtggggagctcaatggaaactctcattcagacaagactgtccatgctgtgcattgggacctcccttgtgt

SEQ ID NO: 608049 - DNA, 120 bp, Artificial Sequence
  ENSG00000175697_5 (sequence is synthesized)
ttggccccattctgggaaagagctggcgactctacaaggtgtttacccaaagggtcccggacaagagagtgattatcaaagacctgcagttgctggggttggtggcagccctgttgatgg

SEQ ID NO: 608050 - DNA, 120 bp, Artificial Sequence
  ENSG00000175697_6 (sequence is synthesized)
ctgatgtgatcctgctcatgacgtgggtgctgactgatcccatccagtgcctccagattctcagtgtcagtatgacggtgacagggaaagacgtgtcctgcacttcgaccagcacccact

SEQ ID NO: 608051 - DNA, 120 bp, Artificial Sequence
  ENSG00000175697_7 (sequence is synthesized)
tctgtgcttcccggtattccgatgtttggattgctctcatttggggatgcaagggtctgctcctgctgtatggtgcctacctggctggcctgactggccatgtcagctcccctcctgtga

SEQ ID NO: 608052 - DNA, 120 bp, Artificial Sequence
  ENSG00000175697_8 (sequence is synthesized)
atcagtccttaaccatcatggtgggggtcaacctccttgtactggctgctgggctgctttttgtagtcaccagatacttgcattcctggcccaacctggtctttggactcacatctggag

SEQ ID NO: 608053 - DNA, 120 bp, Artificial Sequence
  ENSG00000175697_9 (sequence is synthesized)
ggatctttgtttgtacaactacaatcaactgcttcatcttcattccccagctgaagcaatggaaggcatttgaagaggaaaaccaaacaatcagacgcatggccaaatatttcagcactc

SEQ ID NO: 608054 - DNA, 120 bp, Artificial Sequence
  ENSG00000175697_10 (sequence is synthesized)
ccaacaaaagcttccatacccagtatggtgaggaggagaactgccacccgaggggagagaaaagctccatggagaggctcctcacagaaaaaaatgctgtgattgaaagcctgcaggaac

SEQ ID NO: 608055 - DNA, 120 bp, Artificial Sequence
  ENSG00000175697_11 (sequence is synthesized)
aagtaaacaacgccaaagagaagattgtgaggctgatgtcagctgagtgcacctatgacctcccagagggggctgccccacctgcctcttccccgaacaaggacgtccaggcggtagcct

SEQ ID NO: 608056 - DNA, 120 bp, Artificial Sequence
  ENSG00000175697_12 (sequence is synthesized)
cggtccacaccctggcagctgctcaggggccttcgggtcacctctctgactttcagaatgatcctggcatggctgcccgggattcccagtgcacttcagggccctcctcatatgcacaaa

SEQ ID NO: 608057 - DNA, 120 bp, Artificial Sequence
  ENSG00000175697_13 (sequence is synthesized)
gccttgaggggcctgggaaggactccagcttctccccagggaaggaggagaagatatctgactcaaaagacttttctgatcatttagactcaggttgtagccagaagccatggactgagc

SEQ ID NO: 608058 - DNA, 120 bp, Artificial Sequence
  ENSG00000175697_14 (sequence is synthesized)
aaagcctgggtccagaaagaggagaccaagtccccatgaaccccagccagagtctcctaccagaaagaggcggctcagatccccagagacagaggcatctggagaactcagaggagcccc

SEQ ID NO: 608059 - DNA, 120 bp, Artificial Sequence
  ENSG00000175697_15 (sequence is synthesized)
cagagcggcggtcacgggttagttcagtaatcagggagaaacttcaggaggtcttacaagatctgggcctgggccctgaggcttccctctccaccgccccctcttgtcatcagcaaacct

SEQ ID NO: 608060 - DNA, 120 bp, Artificial Sequence
  ENSG00000175697_16 (sequence is synthesized)
ggaagaacagtgctgccttcagcccccaaaagatgcccctctccaaggagctcggctttagcccttacatggtgaggagaaggcgggcagctcagcgggcccgctcacactttcctggct

SEQ ID NO: 608061 - DNA, 120 bp, Artificial Sequence
  ENSG00000175697_17 (sequence is synthesized)
agagtacgaagaccttcttccaggaagccttcactaccttcagatcctcaagacagaccaggtaccctggagggcagcaaacaaagccagacagagcccgagggggctagagggagcaaa

SEQ ID NO: 608062 - DNA, 120 bp, Artificial Sequence
  ENSG00000175697_18 (sequence is synthesized)
gcagcctttcttcgccagccttctggttctggccgggccccaagtcctgctgccccatgcctctccaaagcctcacctgacttgcctgaacagtggcagctgtggcccccagtgccctca

SEQ ID NO: 608063 - DNA, 120 bp, Artificial Sequence
  ENSG00000175697_19 (sequence is synthesized)
ggctgtgcctccctgtcttctcaacacagctattttgatactgagtccagcagctcagatgagttcttctgccgctgccaccggccctactgtgaaatctgcttccagagctcttctgac

SEQ ID NO: 608064 - DNA, 120 bp, Artificial Sequence
  ENSG00000175697_20 (sequence is synthesized)
tctagtgacagtggcacatcagacactgaccctgagcctactggggggctggcttcctgggaaaagctgtgggcccgctccaagcctattgtgaacttcaaagatgacttgaaacccacg

SEQ ID NO: 608065 - DNA, 120 bp, Artificial Sequence
  ENSG00000175697_21 (sequence is synthesized)
ctggtgtgaaaagcaacagagctggtctagacacagaggtcagtccaagagaagctgtaccaaggcccacaggagaagagccaatttctggtctttggggaacagattagtgccctgcat

SEQ ID NO: 608066 - DNA, 120 bp, Artificial Sequence
  ENSG00000175697_22 (sequence is synthesized)
ttgaccagcccataccatgtttcagctaggctcactgtgttactttgagtacttcttgatctataaaaagagaggcattgcctgtcctgttactacctcgcagccttactataaaagact

SEQ ID NO: 608067 - DNA, 120 bp, Artificial Sequence
  ENSG00000175697_23 (sequence is synthesized)
ccagttgagtgactatgaaagacactgactccttggataaaaggtgctgaatgaacacataggattttctgtccaggtcagcctacattctgtaaaactcttaatatattcagatggatg

SEQ ID NO: 608068 - DNA, 120 bp, Artificial Sequence
  ENSG00000175697_24 (sequence is synthesized)
gctgaatggacagacagatggagagatgcatgggaaatttctgtagaacttgaggtgtggactgtgacccatcaaactggccttttggtggacagacctaccaggaagataagtctccta

SEQ ID NO: 608069 - DNA, 120 bp, Artificial Sequence
  ENSG00000175697_25 (sequence is synthesized)
catccttgggcctcccactcctggaaggcagtggttttatttctgctgaatgttgtgaacagcacctccctagattccagcttctggccagacccagctcagagccacccctacaccact

SEQ ID NO: 608070 - DNA, 120 bp, Artificial Sequence
  ENSG00000175697_26 (sequence is synthesized)
atttcttgatggtgtctttccaccattatggcactttaccctcctctctgagacagatctccatgcgcccgcaggcttcccagatctctcccctgggatcggatgtacctgaggtcctga

SEQ ID NO: 608071 - DNA, 120 bp, Artificial Sequence
  ENSG00000175697_27 (sequence is synthesized)
ctgtccccactgtccccttgtcctgtggctcatcctcgattcacccactgatgcagttttgtactgcggggaggcacacaccagcaatttctgttggggtatgggagaacctgttggtca

SEQ ID NO: 608072 - DNA, 120 bp, Artificial Sequence
  ENSG00000175697_28 (sequence is synthesized)
agagtgcttttggttccattggggttacatgactaccaacagacacataaacctggaagccaaatggagaaataaaaaggaagacacgagggacacgaaaacaggaaagaaaacaggatt

SEQ ID NO: 608073 - DNA, 120 bp, Artificial Sequence
  ENSG00000175697_29 (sequence is synthesized)
tgaatatttcacttgagtccagcatagtacttggcaatatcatatttttgtgattccttttgataaccctgtgaagtagacactttcatttttacagacaaggattatgaggcttagaga

SEQ ID NO: 608074 - DNA, 120 bp, Artificial Sequence
  ENSG00000175697_30 (sequence is synthesized)
aatgaggtagtttcccgcaacatcacactgctggacagagatgtacacacagctcctgggactcaagtaggtgggttttcccagggacacatggcttcatgtgttcttctgggaatggca

SEQ ID NO: 608075 - DNA, 120 bp, Artificial Sequence
  ENSG00000175697_31 (sequence is synthesized)
ggtgacgcttggcagacgagacaacaaagcaaggctcatgtaagaaagctgggatgtgctcccctatagtccagaataatagacctgggtcctcacctcaggaaacgggcctccacttcc

SEQ ID NO: 608076 - DNA, 120 bp, Artificial Sequence
  ENSG00000175697_32 (sequence is synthesized)
tcactgccaaaggccacactggcacctcccaagggagctggggagctggtgaaggatgagtgcgaggaactcagccaccaccagagccacagggagagcacacctgggtccactgtgctt

SEQ ID NO: 608077 - DNA, 120 bp, Artificial Sequence
  ENSG00000175697_33 (sequence is synthesized)
attgctgagctggctgtcatgtccaggctgtcccctgccccgagtcctgtgtatacatctgtgggtgtgcacatgtttgcatgaaggaattcaggccttattaaatattctcagaggggg

SEQ ID NO: 608078 - DNA, 120 bp, Artificial Sequence
  ENSG00000175697_34 (sequence is synthesized)
ggggaccgtgggcgtcctgcacatagcagcgggcttggcgcttctcggcggtccgacgctgatgaggaaccagagtgagggtactcgaacagtgactgccatctggtggttaaccagaat

SEQ ID NO: 608079 - DNA, 120 bp, Artificial Sequence
  ENSG00000175697_35 (sequence is synthesized)
catcaccttgtgtagcctgatggttactaagatgtccactcttgactcacatggcatgcactcgcagcaggggaccagttgaaggatgtctgactttggagggtcaccagttgaaggatg

SEQ ID NO: 608080 - DNA, 120 bp, Artificial Sequence
  ENSG00000175697_36 (sequence is synthesized)
ttttggcagcacaagccactatctggtctcccactacaggattaaaccacatgagacattccctctgaaatagtctacctgttgagaaggggaaagatctaggtcggtattgtgctaact

SEQ ID NO: 608081 - DNA, 120 bp, Artificial Sequence
  ENSG00000175697_37 (sequence is synthesized)
actgcaagggtatccaaagaagagaatgaagagtctctctctataatggaggtacaatccttctgagaagatgaggtatctgtatttaaaatgaagaccatgtagaggattccaaaacaa

SEQ ID NO: 608082 - DNA, 120 bp, Artificial Sequence
  ENSG00000175697_38 (sequence is synthesized)
cacaaaaacttgaggacagcacagcagaaccagtctgggtgagttagggtttctgcaaaagcagtgaagcactgctacctggctatttgctagataattctggctgactagaaagtcatc

SEQ ID NO: 608083 - DNA, 120 bp, Artificial Sequence
  ENSG00000175697_39 (sequence is synthesized)
agcttatcagggtaagtatggctcccaggattcgcaaaagaagcaaaatggtgacttttttctgaagggacttatagcaccttgccttggatgcaatttcatccttcctcagggcccatc

SEQ ID NO: 608084 - DNA, 120 bp, Artificial Sequence
  ENSG00000175697_40 (sequence is synthesized)
ccatctctcccacccccacactgtaccctcatcctaccacagccgtcccagggtgcctcatgagaagccctgctccagccctctccttagcccacagctgacttctagatggagcccaca

SEQ ID NO: 608085 - DNA, 120 bp, Artificial Sequence
  ENSG00000175697_41 (sequence is synthesized)
atcagaaattaacaacttcctcaaaccagccaaactcgtccagccccactccagccttaccctgtgtggtgaccaagcatgtcgtgctccattgcctgtggatttgacactcagatgaga

SEQ ID NO: 608086 - DNA, 120 bp, Artificial Sequence
  ENSG00000175697_42 (sequence is synthesized)
atctacttttaaacaggaatttcctaatttattctgtgcatgggtttgcagtttcttgtgctgtgtgtgtgctgtccaagtggtaccataataaaagagaaatgactcccgagaggagtc

SEQ ID NO: 608087 - DNA, 120 bp, Artificial Sequence
  ENSG00000175697_43 (sequence is synthesized)
ttttcagaaactgtaatctggggctggccaggaggggcccggagaaggctgacccacccaaagaaggggaaccagagaagccatcagagctgctgccgggctaccctgggtcccagtgta

SEQ ID NO: 608088 - DNA, 120 bp, Artificial Sequence
  ENSG00000175697_44 (sequence is synthesized)
ccttctaccaaagttccatttgaacagattcttctgtgttctccctaagaagcctcttatcccagaaacactccctcaatggacataggaaaccctggagaccctggactcttcctgccc

SEQ ID NO: 608089 - DNA, 120 bp, Artificial Sequence
  ENSG00000175697_45 (sequence is synthesized)
ctgggggtcctgtggctgggctccccctcctgcagctcccttcctcccagcatgccaccactagcagcccaccattcattcatgtggactctaaatctggcaatccttctagccttctca

SEQ ID NO: 608090 - DNA, 120 bp, Artificial Sequence
  ENSG00000175697_46 (sequence is synthesized)
ctctgtctgcttctagaaccttagtcccaccatccccgcccttctacatctccatccttctgtttagaattttttttcccactttgtgcccttgtgaattattcatccttcaaggctcag

SEQ ID NO: 608091 - DNA, 120 bp, Artificial Sequence
  ENSG00000175697_47 (sequence is synthesized)
gtggagcatacattctttcttcaacctttcccagccatccccaaagaaagctgattgattccctagttaaataaggaaggatgggctggaagcagtggctcacgtctgtaatcccagcac

SEQ ID NO: 608092 - DNA, 120 bp, Artificial Sequence
  ENSG00000175699_0 (sequence is synthesized)
agctaggccccttcctcctccagtgcctgtctacctatgtttgatgcttggggctagaaagactgaccttgtagcccctcaccttctctccccaatgcactgggctggttcagcagctga

SEQ ID NO: 608093 - DNA, 120 bp, Artificial Sequence
  ENSG00000175699_1 (sequence is synthesized)
ccaatgagggtcatgcttgcatactggccttgggtgagtggctcaggaacagtttgcaagaccgtgttgaagctacttgtaactagaccattttcccagcttgaccatgagcttcttcaa

SEQ ID NO: 608094 - DNA, 120 bp, Artificial Sequence
  ENSG00000175699_2 (sequence is synthesized)
ggcatctcttctcagtctccactgtagctctgtggggatgctaaccctggcttccaaggatctgaagaggaagctgcggctgtgactgtcccttttcggtctgtcttcatcctgcctgac

SEQ ID NO: 608095 - DNA, 120 bp, Artificial Sequence
  ENSG00000175699_3 (sequence is synthesized)
tcacgggtctcctgtcctcctgcatagcttgcggtggtgaggtgatggcagccatggacacaggccagagagctgacccaagcaatcctggtgacaaggaaggggaccttcaagggctgt

SEQ ID NO: 608096 - DNA, 120 bp, Artificial Sequence
  ENSG00000175699_4 (sequence is synthesized)
ggcaggaactctaccagctccaggctaagcagaagaagctcaagagagaagtcgagaagcacaagctttttgaagactatctgattaaggtccttgagaaaatccccgagggctgcacgg

SEQ ID NO: 608097 - DNA, 120 bp, Artificial Sequence
  ENSG00000175699_5 (sequence is synthesized)
gacacgcagaagcgcctcgaggccttctgccagatgatccaggctgtccaccggagcctggagtctctggaggaggaccacagggctctcatgttgagcctcaagatccggctgtgtcag

SEQ ID NO: 608098 - DNA, 120 bp, Artificial Sequence
  ENSG00000175699_6 (sequence is synthesized)
ctgcagaagaagtgctaccgcaagcaggagcagtggtggcagctgaagcacagcatcacttaccagaaggacattgactttgacacacacaccagcagcagctataatgatcagctgctc

SEQ ID NO: 608099 - DNA, 120 bp, Artificial Sequence
  ENSG00000175699_7 (sequence is synthesized)
ggctacatgcaaatgaccatcaccaacatggcccggcagtgctgcccctctgcccacggcgtgcccaagagcatggatctcttctccaagctcgatctgattaaggagttcatgttggac

SEQ ID NO: 608100 - DNA, 120 bp, Artificial Sequence
  ENSG00000175699_8 (sequence is synthesized)
aaaatggagactgtaagactgatcgcactgctcacggaacccaaagtgtgctggtcatgggacagcttcggggaccagtggctcagaagacaccccaaacccttcaggaaatgtccaagg

SEQ ID NO: 608101 - DNA, 120 bp, Artificial Sequence
  ENSG00000175699_9 (sequence is synthesized)
aggcgggtttccacccccaggaccccctttcccagcccccatgcttcagagtgctccggcctgtactgaccagcctgcgccttgcaggccccatggcatcacgacctctccttacctgcc

SEQ ID NO: 608102 - DNA, 120 bp, Artificial Sequence
  ENSG00000175699_10 (sequence is synthesized)
gggatcaaatgtctgccgtgccacacgtcccaggaaaggactgcagaggccttcagatgatctccacgctgcagtacccagaggtctggtttctgacccaggtgcctgtccaacccaagg

SEQ ID NO: 608103 - DNA, 120 bp, Artificial Sequence
  ENSG00000175699_11 (sequence is synthesized)
gctgccgtgcattgccttttgggaaagcctggcctggagagaatcaaagcaggtggatcctgcaatggacacatcataaggacagaagccagcattgtgatgtcacagcctggctgtggc

SEQ ID NO: 608104 - DNA, 120 bp, Artificial Sequence
  ENSG00000175699_12 (sequence is synthesized)
cacctgcctcggcctcccaaattgctaagattacagatgtgagccactgcatccggccgagaatccaacagttttactttgggtatgtgtatgtatttgtcctttaggagtcatatctaa

SEQ ID NO: 608105 - DNA, 120 bp, Artificial Sequence
  ENSG00000175699_13 (sequence is synthesized)
aaagccattacctaatccagggtcatgaagatttacacctgtttcttgtgagaagtttatagtttttgctctactgtttaggtctgtggttcattttcagttgattttttaatatagtgt

SEQ ID NO: 608106 - DNA, 120 bp, Artificial Sequence
  ENSG00000175699_14 (sequence is synthesized)
aaggtaggggtccaatttcattatttcgcatgaggatattcagttgtcctgataccatttgtttaaaaagttctatttttcccctttgagttttctcaggacccttgtcaaaaatcaatt

SEQ ID NO: 608107 - DNA, 120 bp, Artificial Sequence
  ENSG00000175699_15 (sequence is synthesized)
gaccgtaatatgaaaagtttatttctggattcttgattctattccattcatcgctacgcctgtttttatgccagtaccatactgtctttattactgtggctttgtaataaatattaaaat

SEQ ID NO: 608108 - DNA, 120 bp, Artificial Sequence
  ENSG00000175699_16 (sequence is synthesized)
actctaccagctccaggctaaataccttctttgctgcctgggagatgctgctatgggcgtttatttgatctgcttgtggctcagtttgctcagcagtgaaatgaaggtgcagagactcct

SEQ ID NO: 608109 - DNA, 120 bp, Artificial Sequence
  ENSG00000175699_17 (sequence is synthesized)
agcaacatctccttgagggcagtctcccgcctcgctcggtggtcttgatccagaatccctgtctcagtctctggctgaactttccaaggctgcacgggatgggaggagccggaggaggtg

SEQ ID NO: 608110 - DNA, 120 bp, Artificial Sequence
  ENSG00000175699_18 (sequence is synthesized)
agggagcagcggcgtaatgctggggggccctcggtggggctgtcgctcctgagccgccttccatatccccttcctctcccctctgctgcctgaggctcagctcgtgcctaacgttgttct

SEQ ID NO: 608111 - DNA, 120 bp, Artificial Sequence
  ENSG00000175699_19 (sequence is synthesized)
tgtgtcctggatgcagagggactggagctcggctcccagctcagccactgactagctgtgtgactagtttgtagcctctctgagcctcagtttctgcatctgtcaagtgggggcaacaca

SEQ ID NO: 608112 - DNA, 120 bp, Artificial Sequence
  ENSG00000175701_0 (sequence is synthesized)
gttaaaggtcaaaggtcacctccgcaaatggcaccaactgtgtagcctggcagtgggactttgtccagctttctgatcagtagaatagaaggatgccttcctccaagacctgtttggaga

SEQ ID NO: 608113 - DNA, 120 bp, Artificial Sequence
  ENSG00000175701_1 (sequence is synthesized)
attaaaccagctaatgtaggagccacggctgccgctggggagggcccagtaattattagttccctccccgtcctaggggaccccccaggagagcgtagtgtgggctcctagtggggcctc

SEQ ID NO: 608114 - DNA, 120 bp, Artificial Sequence
  ENSG00000175701_2 (sequence is synthesized)
tcgaggcaaatacctcccgagagggggcgcgcgccctcccctcttcccatggggcgcccccagttccagcctgacctggaactcagggttgccagagctgctgaattttcaagagaaagc

SEQ ID NO: 608115 - DNA, 120 bp, Artificial Sequence
  ENSG00000175701_3 (sequence is synthesized)
ggaaatctgagttttaatgagaccgctcctgattttttaaaacgttgatcatgaagttaaaacaataataatgggacagggtttcaccatgttaaccagtctggtcttgaattcctgacc

SEQ ID NO: 608116 - DNA, 120 bp, Artificial Sequence
  ENSG00000175701_4 (sequence is synthesized)
aaagtgctgggattacaggcatgagctgtcgcactcagccaacattcctgtttttgaaaatcctccaatccctgaagtctgtattacaagaccaattctgcattgctgagagagactgtg

SEQ ID NO: 608117 - DNA, 120 bp, Artificial Sequence
  ENSG00000175701_5 (sequence is synthesized)
caattctgcattgctgagagagactgtgctttacagagagtaagatccttgatactggctcagcatggaacatctggcacacagtatgcactgaggaaatacttgttggaataatcagtg

SEQ ID NO: 608118 - DNA, 120 bp, Artificial Sequence
  ENSG00000175701_6 (sequence is synthesized)
aatcatagatgaaaacttaaccttggaattaattatgagactgctcagaggaagagaatgggagacaaaggacctggtgattagacccccaagacactgggctgtctgcttgtgtctcgg

SEQ ID NO: 608119 - DNA, 120 bp, Artificial Sequence
  ENSG00000175701_7 (sequence is synthesized)
gtggaacaggcccagcgagagtctttagggccagaactcaagaatttattgagcccttgttctaggcacttgggattcaccagtatacaatggagacaaaaatccctgccctggagcagc

SEQ ID NO: 608120 - DNA, 120 bp, Artificial Sequence
  ENSG00000175701_8 (sequence is synthesized)
catggcaaacaggcagtaaacagcccattctggctgctgtattgagaagagaatgtggtggacagatatagaagcatggaaacctgatagggctattgcaatcactcagaaaagaggcga

SEQ ID NO: 608121 - DNA, 120 bp, Artificial Sequence
  ENSG00000175701_9 (sequence is synthesized)
tggcagcttggacctgttggaagcagtagagtgcttccagggaggagaaaggacctgaaggttaatttgatcaccaatggccaatgatgtaatcagttatgcctatgtaatgaagcttcc

SEQ ID NO: 608122 - DNA, 120 bp, Artificial Sequence
  ENSG00000175701_10 (sequence is synthesized)
gtaaaaaccaaaaggattgggtttgattgagcttctggatagctaaacatgtggaagttcctggaggatggtggtcctaaacagggttaccagaaaatttaaagttacgccagtcactcc

SEQ ID NO: 608123 - DNA, 120 bp, Artificial Sequence
  ENSG00000175701_11 (sequence is synthesized)
cattctattgctgagagaaaatacagagcggtgaagagcttacagtcgggtgagcaagatacgcccccaatgttagctaatgatgtaaggcatcaacaagaaatgtgggggttcaggaaa

SEQ ID NO: 608124 - DNA, 120 bp, Artificial Sequence
  ENSG00000175701_12 (sequence is synthesized)
gtggaaggtggggtcgtccaaagcctgggaaagtcttcagttgaaggcgagacagatgggactattagtgagtttcgagagatccaacgcctcgccgccttcgcttcatttttgtctcac

SEQ ID NO: 608125 - DNA, 120 bp, Artificial Sequence
  ENSG00000175701_13 (sequence is synthesized)
gccccacccttgaacgcgcggcgccttttgaccccgccgccgcgccgtagaccgcgctgcacgccggcggcagccatggcggatgtgtcagagaggacactgcagttgtccgtgctagta

SEQ ID NO: 608126 - DNA, 120 bp, Artificial Sequence
  ENSG00000175701_14 (sequence is synthesized)
gccttcgcttctggagtactcctgggctggcaggcgaaccgactgcggaggcgctacttggactggaggaaaaggaggctgcaggacaagctggcggcgacgcagaagaagctggacctg

SEQ ID NO: 608127 - DNA, 120 bp, Artificial Sequence
  ENSG00000175701_15 (sequence is synthesized)
gcctgagactctgcgccttccgccccattctgtccccctcatggccaccttgccatgtccgcgccggagccccggtccgccggcgcccagaaccaggcttgccacacagtccccgcctgc

SEQ ID NO: 608128 - DNA, 120 bp, Artificial Sequence
  ENSG00000175701_16 (sequence is synthesized)
catggccggctcttcctggagtgttgcttgttgaagatgcatatagactaccggaaagaaatgacttcttcttgcactttatgaatcaattttatttttaaaataaaaaaattaaacatc

SEQ ID NO: 608129 - DNA, 120 bp, Artificial Sequence
  ENSG00000175707_0 (sequence is synthesized)
aagtgtgtccctagcggcggcccgtgcagcgctcccgcgagacgctcacctgcgccccaggtgagcggcgagggggcgggggaggggctgagccggaggcggctcacctggcgggacagg

SEQ ID NO: 608130 - DNA, 120 bp, Artificial Sequence
  ENSG00000175707_1 (sequence is synthesized)
tgcctggctgctacaaaccatgcaatgagccatgccccgccctggacacccccgcccagcatctgggcctccacgcttgggaccgtgggagcggccaacagagctatgtctggagacata

SEQ ID NO: 608131 - DNA, 120 bp, Artificial Sequence
  ENSG00000175707_2 (sequence is synthesized)
tgataaaccacctcagcccccaccaagccgccgcacccgtagaccagaccccaaggaccctggccaccatgggccagagagcattaccttcatctctggctctgctgagccggcccttga

SEQ ID NO: 608132 - DNA, 120 bp, Artificial Sequence
  ENSG00000175707_3 (sequence is synthesized)
gtcccccacctgctgcctgctctggcgaccctgggtgtgggagtggtgccgggctgccttctgcttccgccgctgccgggattgcctccagcgctgtggagcctgtgtgcggggatgcag

SEQ ID NO: 608133 - DNA, 120 bp, Artificial Sequence
  ENSG00000175707_4 (sequence is synthesized)
cccctgcctgtctactgaggactccactgaggggactgctgaagccaactgggccaaggagcacaatggagtgccccccagccctgatcgtgcaccccccagccggcgggatggccagcg

SEQ ID NO: 608134 - DNA, 120 bp, Artificial Sequence
  ENSG00000175707_5 (sequence is synthesized)
gctcaagtcaaccatgggcagcagcttcagctaccccgatgttaagctcaaaggcatccctgtgtatccctacccgagggccacctccccagcccctgatgcggactcctgctgcaagga

SEQ ID NO: 608135 - DNA, 120 bp, Artificial Sequence
  ENSG00000175707_6 (sequence is synthesized)
gccactggccgatcccccacccatgcgacacagcctgcccagcacctttgccagtagtcctcgtggctccgaggagtactattctttccatgagtcggacctggacctgccggagatggg

SEQ ID NO: 608136 - DNA, 120 bp, Artificial Sequence
  ENSG00000175707_7 (sequence is synthesized)
gagctgttcagcgtacaccagatcgatgagctggccaagtgcacatcagacactgtgttcctggagaagaccagtaagatctcggaccttatcagcagcatcacgcaggactaccacctg

SEQ ID NO: 608137 - DNA, 120 bp, Artificial Sequence
  ENSG00000175707_8 (sequence is synthesized)
gatgagcaggatgctgagggccgcctggtacgcggcatcattcgcattagtacccgaaagagccgtgctcgcccacagacctcggagggtcgttcaactcgggctgctgccccaaccgct

SEQ ID NO: 608138 - DNA, 120 bp, Artificial Sequence
  ENSG00000175707_9 (sequence is synthesized)
gctgcccctgacagtggccatgagaccatggtgggctcaggtctcagccaggatgagctgacagtgcagatctcccaggagacgactgcagatgccatcgcccggaagctgaggccttat

SEQ ID NO: 608139 - DNA, 120 bp, Artificial Sequence
  ENSG00000175707_10 (sequence is synthesized)
ggagctccagggtacccagcaagccatgactcatccttccagggcaccgacacagactcgtcgggggcacccttgctccaggtgtactgctaacccctgccaggcccagctgccacaccc

SEQ ID NO: 608140 - DNA, 120 bp, Artificial Sequence
  ENSG00000175707_11 (sequence is synthesized)
tttctgggagaagcatggcctacagaatgaagagggggaccaggaacccctgtgggagaggcttagacctgaagcagtgcccactctggctcctcctgccttggctgactgggttcctgg

SEQ ID NO: 608141 - DNA, 120 bp, Artificial Sequence
  ENSG00000175707_12 (sequence is synthesized)
accatgtgcatttcactgggccatgggatctacatctccttgcatccccagctggtctgatccctgccagggccccttccttcctgctcatggtcttcaggtggcctgatcatggaaagt

SEQ ID NO: 608142 - DNA, 120 bp, Artificial Sequence
  ENSG00000175707_13 (sequence is synthesized)
aaggagttaggcattaccttctgggagtgaaccctgactccatccccctattgccaccctaaccaatcatgcaaacttctccctccctggggtaattcaacagttaaaagaagcttatct

SEQ ID NO: 608143 - DNA, 120 bp, Artificial Sequence
  ENSG00000175707_14 (sequence is synthesized)
taaatgtattgtattggggggtgggcagggcccactctatgttatgttaaggagttggttctggttcttggctgatgttctgtatcttaacatgaccacagtttgtaagtacaaaggtaa

SEQ ID NO: 608144 - DNA, 120 bp, Artificial Sequence
  ENSG00000175711_0 (sequence is synthesized)
gccgaagcggcgggatgagcggagccggcgtgggcggggcgtccgaggagagccaggccatgcaggcccacgtgtctattatcctcccagtccacaacgctgaaccgtggctggacgaat

SEQ ID NO: 608145 - DNA, 120 bp, Artificial Sequence
  ENSG00000175711_1 (sequence is synthesized)
gtttgaggtctgttttgcaacaggactttgaaggtaccatggagctgtctgttttcaatgatgccagtaaggacaagtctggggctatcattgaaaaatggagagtgaagctggaagatt

SEQ ID NO: 608146 - DNA, 120 bp, Artificial Sequence
  ENSG00000175711_2 (sequence is synthesized)
ctggtgtccacgtgatcattggggggcacgattctccctctcctagaggcgtcggatacgctaaaaatcaagcagttgcccagagctcagggtcttacctttgctttttggattcggatg

SEQ ID NO: 608147 - DNA, 120 bp, Artificial Sequence
  ENSG00000175711_3 (sequence is synthesized)
acgtcatgatgccccagcgggtgaggctgcaacacgaggctgccgttcagcacccgtcgagcatcattggttgcagagtgaggagagatccccctaactccaccgaacgatacacacgtt

SEQ ID NO: 608148 - DNA, 120 bp, Artificial Sequence
  ENSG00000175711_4 (sequence is synthesized)
ggatcaaccagctgacgccggagcagctcctaacccaggttttcacctcaaatggccccacggtgatcatgcccacctggttctgctcgcgagcgtggttctcccacgtgggccccttta

SEQ ID NO: 608149 - DNA, 120 bp, Artificial Sequence
  ENSG00000175711_5 (sequence is synthesized)
gcggcgtcatccgcgtggaccagagtctcctgctgtatcgccaccacccacaggcggccacgcactgcgtcctcgagacgaccatctggacccaccgcgtccgcttcctggaagagcagg

SEQ ID NO: 608150 - DNA, 120 bp, Artificial Sequence
  ENSG00000175711_6 (sequence is synthesized)
ccctgccccgctgggcggccttcaccatctggaacgctggcaagcaggggcgccggctgtaccgcagcttgactgccggcagccagcgcaaggtggtggcattctgtgacgtggacgaga

SEQ ID NO: 608151 - DNA, 120 bp, Artificial Sequence
  ENSG00000175711_7 (sequence is synthesized)
acaagatcaggaaaggcttctattgccacgaggactctcaggaaagacccaagccccgaatccccatcctgcacttccgagccgcccggccacccttcgtcatctgcgtgaagctggacc

SEQ ID NO: 608152 - DNA, 120 bp, Artificial Sequence
  ENSG00000175711_8 (sequence is synthesized)
tcacagggggcgcctttgaggacaacctgaggtcactgcacttgcaggagggccaggacttccttcacttcagctgacggacccatggcagctgctcccagtgcatcccaggccagcagg

SEQ ID NO: 608153 - DNA, 120 bp, Artificial Sequence
  ENSG00000175711_9 (sequence is synthesized)
agctttgtgagctgcaggcatggcgatggtgcgcctgttccacacccagcaggcgcaaccagagtctcgtgtgtgccgaccacaggagccaagccttttccactgtgtggactcatgtgg

SEQ ID NO: 608154 - DNA, 120 bp, Artificial Sequence
  ENSG00000175711_10 (sequence is synthesized)
ccaaggctaggcctggtcacccaggaccctcaccacgtgaccccagccaatcgggacagttcaaggaggaggagacccctattacacaggttggaataaaatatttaaatctcgtaaaaa

SEQ ID NO: 608155 - DNA, 120 bp, Artificial Sequence
  ENSG00000175711_11 (sequence is synthesized)
ggaggagacccctattacacaggaagcacatttgtgttcaagtgaaggcagaggcgtccaccccaagtcaccagagcgcaggtgcagagaggaaaagctgtcagctagtgccagcctcca

SEQ ID NO: 608156 - DNA, 120 bp, Artificial Sequence
  ENSG00000175711_12 (sequence is synthesized)
agggccagcgctacccttcaacagctggaggcaccactgtgcgaggctttccacaccggcctccctcaggaacaagacatcctcaccaggcaggggtgaggtatgggctccaggactggc

SEQ ID NO: 608157 - DNA, 120 bp, Artificial Sequence
  ENSG00000175711_13 (sequence is synthesized)
agtgctggcgagaggcagagaagctggatcctcatgcatcactgagggtgagagacggcgcaaccactctggagactgtttggaagttcctgtaaaaactaaacatgtaactgttctgtg

SEQ ID NO: 608158 - DNA, 120 bp, Artificial Sequence
  ENSG00000175711_14 (sequence is synthesized)
acccggcagttgctctcctgggcatttatcccagtggattgaagacgctgttcacagacaaacctgaacttgaatgttcgggatcgccagcacaggacctgactactgttacatgcagtg

SEQ ID NO: 608159 - DNA, 120 bp, Artificial Sequence
  ENSG00000175711_15 (sequence is synthesized)
actggaagcctgtcctgggagccgaggagcagtgcgaaagccgggcacagaaggccgcctcctgcacgttcccggatcatgctctggagagcacagccacggcgtcgggatagcacagcc

SEQ ID NO: 608160 - DNA, 120 bp, Artificial Sequence
  ENSG00000175711_16 (sequence is synthesized)
acggcgtcgggatagcacagcggctgccgttgaggggctgccagtggctgtaaggggcgcctcgggtgctcgtgccctgggacatctggatctggactccatcatgtccctctcctggtg

SEQ ID NO: 608161 - DNA, 120 bp, Artificial Sequence
  ENSG00000175711_17 (sequence is synthesized)
cggcgttgaccttgggtcctcgtgatgttaccaccagaggaagtggtgaagggcacagagggtctctctacagttgtttcttacagctgcaatgtgaattcacaattttctcaaagtaag

SEQ ID NO: 608162 - DNA, 120 bp, Artificial Sequence
  ENSG00000175711_18 (sequence is synthesized)
tttaattaaaaaacaacaacaacaacaaatgcaaacagaagcctcccccaagcacgtcattaactgcattggtagaaaagaatcactcactacgcgtaaacgctacacaagttggagaca

SEQ ID NO: 608163 - DNA, 120 bp, Artificial Sequence
  ENSG00000175711_19 (sequence is synthesized)
gatccaggggcctcagatgcctcggtgtgacttcatcgcttcagagttaggagactggctcactgataccactctttggaccacagttacattttcactattgtctccttgttggtcttg

SEQ ID NO: 608164 - DNA, 120 bp, Artificial Sequence
  ENSG00000175711_20 (sequence is synthesized)
ggtgagacggaatcagctgcgtccgctgggacttgtgacctggggcctgtgctgtgagaacgtctactcgggaggctctgctggccctgggccctcacttggggtgggtgctgtttccta

SEQ ID NO: 608165 - DNA, 120 bp, Artificial Sequence
  ENSG00000175711_21 (sequence is synthesized)
cagccaggggaccctcacccctctgggccctgtgtggggactgacacggttcctgcaggaaaccatttgtgccgtttcccacacacccggcagcctgagctatgtggctgacaggtgctc

SEQ ID NO: 608166 - DNA, 120 bp, Artificial Sequence
  ENSG00000175711_22 (sequence is synthesized)
atgactaacgtgtcctcggaagggcaccccatctggggagcgggaagggaggttcactgcactgctcttaacctgcattcacacgtttgaaatttttcctaataaaaatgtaaaaagcac

SEQ ID NO: 608167 - DNA, 120 bp, Artificial Sequence
  ENSG00000175711_23 (sequence is synthesized)
gtccctgttgagcctctagaccggtttctttgcaacaaaagccttttccaccggttcctggttggccggctgagcgcaggtgtagtgtgcatccggggcaggcacgcgtttctggggccc

SEQ ID NO: 608168 - DNA, 120 bp, Artificial Sequence
  ENSG00000175711_24 (sequence is synthesized)
ccaccacccacaggcggccacgcactgcgtcctcgaatccgggcagacagttccctccttagaactgtgaggacacagaggtctcggccacctgcctgccgcgtgccgcagcgttaagtt

SEQ ID NO: 608169 - DNA, 120 bp, Artificial Sequence
  ENSG00000175711_25 (sequence is synthesized)
cctggagcaagcgtgtccatcttatgtgtcctccacacctccaaatccccacgctggtgttgtggcactcattctagcctaatttcatccattattatttccctatctcaaggagataaa

SEQ ID NO: 608170 - DNA, 120 bp, Artificial Sequence
  ENSG00000175711_26 (sequence is synthesized)
aactgttaaaaggaccataaaaccaccatcccaccacagaattccaaatatcccatcgatgttcaaatcttcctaattgccttataaattgcttcatgttttaagtttgcttgctggaac

SEQ ID NO: 608171 - DNA, 120 bp, Artificial Sequence
  ENSG00000175711_27 (sequence is synthesized)
ccggcagcgtccgtgtgacctttacgacatgacctttctgtctccctgacgccgacgctcttttcttagttcagctgaagaatgggcttgtgtatcctgcactctgccgaccggttccct

SEQ ID NO: 608172 - DNA, 120 bp, Artificial Sequence
  ENSG00000175711_28 (sequence is synthesized)
gtggttttgcgtgttctgctccatccttttgagaggtggtcagaccgaggccgcatcaggctcccctgcaattccgtttggcgggagcagcttgcgggtctcagggcacctcggtggcac

SEQ ID NO: 608173 - DNA, 120 bp, Artificial Sequence
  ENSG00000175711_29 (sequence is synthesized)
tgttgttgtgccttcctccaccgttagctggaagagtaaagagaaacccaaggttcacgtttgtcactaaaacacccgctcttcgattatatggatgtttcatgcatttgtgatacagtt

SEQ ID NO: 608174 - DNA, 120 bp, Artificial Sequence
  ENSG00000175711_30 (sequence is synthesized)
acttactgatgtaccttttggccatttttaatcatctgctgtttaaaatgctgctgcagtatttgtatatatacataatttcgctcaagtggctctgtgtggaataaattctaaaaattt

SEQ ID NO: 608175 - DNA, 120 bp, Artificial Sequence
  ENSG00000175711_31 (sequence is synthesized)
ctgggtcaaagagcacacacattcaatcccagtctggctgttcaccacccgcagctgctgtgccaacccaacccaccagcgatggagcacctgcctcgtgcccttaaagggagggaaagc

SEQ ID NO: 608176 - DNA, 120 bp, Artificial Sequence
  ENSG00000175711_32 (sequence is synthesized)
atcttctcacatatttataaactgctttatttccccttcagtaaattattattttcattagcccatttttctattggtcagtatttttcataaggaaaactctccgacatgctgcaaatt

SEQ ID NO: 608177 - DNA, 120 bp, Artificial Sequence
  ENSG00000175711_33 (sequence is synthesized)
ttcctgccatttgatatttttgtatttttgccattgtgatataatcaaattaagtgactttcatttatggagtctgattcattctaagacaatcactcctggttgtgaaatttaaaaaac

SEQ ID NO: 608178 - DNA, 120 bp, Artificial Sequence
  ENSG00000175711_34 (sequence is synthesized)
aacattgtcccattttgcttctgggatttctagtttttaattacatctttgatacaactggaatttcttttgattacagatgccaatttttctatttggataattgtcccaacatcgttt

SEQ ID NO: 608179 - DNA, 120 bp, Artificial Sequence
  ENSG00000175711_35 (sequence is synthesized)
acatcactgcttttccaggaacgaaatgccgtctatgttggttgtgaacgtgcatttggcacctggcagggccaaccctcatggcgtgtgcgtgaacacatccctaaaccatagtctaat

SEQ ID NO: 608180 - DNA, 120 bp, Artificial Sequence
  ENSG00000175711_36 (sequence is synthesized)
ttatcctatttttgtagttcatgtgagcagaatccagtgtctgtgttctcgcatctggttttcactccacgtgtttggggtgtgtgcgtatcgctgtgcatggtgtggactttctccacg

SEQ ID NO: 608181 - DNA, 120 bp, Artificial Sequence
  ENSG00000175711_37 (sequence is synthesized)
tcccgtgtgcaaacgccaccccacccagaggccacgccaggacccaggcctgtgggcagtggttcccggtttgcccttgcaaggacgctgtgtcctcctgcgtgagcatccctgcctcgg

SEQ ID NO: 608182 - DNA, 120 bp, Artificial Sequence
  ENSG00000175711_38 (sequence is synthesized)
ccagagggcccagctgctcggctccctcacactgggctgggcacttggtcgccagccgtttggggagtgtgttctcatggtggtttcaggtgtgagtctgaccaacaaccccccgtgccc

SEQ ID NO: 608183 - DNA, 120 bp, Artificial Sequence
  ENSG00000175711_39 (sequence is synthesized)
gctggacactggagttccttcctctctggcggtgtttctcatcagggttccccaccggcctactgcacgctgcgtctctcctgacctgtaggagtcccctacacctctggctgctcgact

SEQ ID NO: 608184 - DNA, 120 bp, Artificial Sequence
  ENSG00000175711_40 (sequence is synthesized)
ttgttggtttaatgttttgcaaatgtcttcctccattttgtggtttgccttttcattctcctaatggaacatgttgctttacagaagcatctagttttaacagagtcttgtttaagacgg

SEQ ID NO: 608185 - DNA, 120 bp, Artificial Sequence
  ENSG00000175711_41 (sequence is synthesized)
tgtcaacacgcactgggctggcctggtccctgaactcaggtgtgtttcctttgcaaactctagagcagagagacaagggaggaaggacagatagcggcagagtgtgtggaaatgttttcc

SEQ ID NO: 608186 - DNA, 120 bp, Artificial Sequence
  ENSG00000175711_42 (sequence is synthesized)
aggaaggatggctttgagtgacagcatcatttgagtgacagcagtggtaggtggtgtaatggattctgatgtggtgggggtaaggggcgcagccaagctccgattcctcctgctgggccc

SEQ ID NO: 608187 - DNA, 120 bp, Artificial Sequence
  ENSG00000175711_43 (sequence is synthesized)
aaggaccaaggactgtgacaggaatgcatagtccctcctctgtcctgccagaggccagagacttgtgtccaccactctgccgggctgtcttcaggaacttgttcaggaggtgctggggtg

SEQ ID NO: 608188 - DNA, 120 bp, Artificial Sequence
  ENSG00000175711_44 (sequence is synthesized)
cagggcacgtctgaaaggcatttctggacacctgctgtggcctcatacaggagagtaggtgacctggccaaggccagcacacaggacaagattaagcatccagggacccggggtcacagc

SEQ ID NO: 608189 - DNA, 120 bp, Artificial Sequence
  ENSG00000175711_45 (sequence is synthesized)
cctcactccattgcaggggtggggatgacagaggccagaggagatcagacaggggcagctgttgatggttctgagatgcagtttctgtctgaggggcctcctcccactcctggcctgtgc

SEQ ID NO: 608190 - DNA, 120 bp, Artificial Sequence
  ENSG00000175711_46 (sequence is synthesized)
agaggggtgggtgtgtggagggaaggtgggtctgccctggtcaaacagcagaggcattgcctgttagtctcattccattccgagtgcccccagggagagtcagccaccttatgtagagag

SEQ ID NO: 608191 - DNA, 120 bp, Artificial Sequence
  ENSG00000175711_47 (sequence is synthesized)
gcaaggccagaaggcagggggggcctcccctctggtgaccaacagggcctgtggtacaagcagtgccggctgctgccctctctggcctttgtctccttccagcctctccgctattagcag

SEQ ID NO: 608192 - DNA, 120 bp, Artificial Sequence
  ENSG00000175711_48 (sequence is synthesized)
aggagcagaacacttgacaggtggacacaggccacccccaacccctggccctggaggaggctccacagtggcctcctagagccaggagaccggactgagctgaatctgctgctcctgaca

SEQ ID NO: 608193 - DNA, 120 bp, Artificial Sequence
  ENSG00000175711_49 (sequence is synthesized)
tgccaccctcctgtcccccgactcccgtcttcactggggaaccggccgcatggctgtccacgtgcacaggaagccacatggccttcccggaaccgccccgaggcctctgaactggggcct

SEQ ID NO: 608194 - DNA, 120 bp, Artificial Sequence
  ENSG00000175711_50 (sequence is synthesized)
taatccacccacctcggcctcccaaagtcctttcagtttttttttcactttcaaaaacatgtagaaggcagttcagggaaagctaagacgtaaagaatcttacaagcatgttaagagcct

SEQ ID NO: 608195 - DNA, 120 bp, Artificial Sequence
  ENSG00000175711_51 (sequence is synthesized)
tgttaagagcctggagaaaaggagtggacaccttttgtttgtcacggcatatgtgcgggtggtgaaggggaggtaaattagagccatggaaagggaactaagttttcacacttctgttaa

SEQ ID NO: 608196 - DNA, 120 bp, Artificial Sequence
  ENSG00000175711_52 (sequence is synthesized)
ccgtcgagcggacgctgctttcctgagctgaatggagcaggttcagacgggcggcctgcggacaggcagcggtttcctcacatccactttgcatgtgattcaagaaatcattggttgcag

SEQ ID NO: 608197 - DNA, 120 bp, Artificial Sequence
  ENSG00000175711_53 (sequence is synthesized)
gggtgaggctgcaacacgaggctgccgttcagcacccgtcgagcttgctggttcgtggttacgtgaattacattgtgtagtttgtcctgagagaatgaaataaacgctgagatacttgta

SEQ ID NO: 608198 - DNA, 120 bp, Artificial Sequence
  ENSG00000175718_0 (sequence is synthesized)
attcggcagggagacatgatggaagcggatcgcccagagaagcttttcattgggggcctcaacctcaaaaccgacgagaaagccctcaaagccgagtttggcaagtatggccacatcatc

SEQ ID NO: 608199 - DNA, 120 bp, Artificial Sequence
  ENSG00000175718_1 (sequence is synthesized)
aaggtgttcctgatgaaagaccgaaaaaccaacaagtcgaggggcttcgcgttcgtcaccttcgaaagccctgcagacgccaaggctgccgccagagatatgaacggcaagtacctggat

SEQ ID NO: 608200 - DNA, 120 bp, Artificial Sequence
  ENSG00000175718_2 (sequence is synthesized)
ggtaaggccatcatggtggcccagaccatcaaaccggcattcaagagcagccgatgggtcccgccaacccccggcagcggcagtcgctcaaggttctcacacagaacccgtgggggtggc

SEQ ID NO: 608201 - DNA, 120 bp, Artificial Sequence
  ENSG00000175718_3 (sequence is synthesized)
agcagcccacagcgacccccctctcagggcaggcctgatgacggccgcggctacgcggggtatttcgacctgtggccctacagggccccgatgcccaggaagcgcgggccgccaccgcgg

SEQ ID NO: 608202 - DNA, 120 bp, Artificial Sequence
  ENSG00000175718_4 (sequence is synthesized)
cactgggccagcccaccccacaagagggccacgccgtcgagcctggctcacagcgttggctgtggaatgcgcgggaaggcaccgactgtgtcggggcaagatggctactcaggcttgcag

SEQ ID NO: 608203 - DNA, 120 bp, Artificial Sequence
  ENSG00000175718_5 (sequence is synthesized)
ccacggcgctgggccggcccaccccacaagagggctgtgccccggtcaagcctggctcgcattggcggcagtggaatgcctgggaaggccccggccgtgtgggggcaagatggctactca

SEQ ID NO: 608204 - DNA, 120 bp, Artificial Sequence
  ENSG00000175718_6 (sequence is synthesized)
ggcccgcgggtccgggagccactgcccccgtgccgcgaccctggggattttgtccctgcgctcagagactacagccgccgctattatggccactccagtgtcccggactaccgtcccttg

SEQ ID NO: 608205 - DNA, 120 bp, Artificial Sequence
  ENSG00000175718_7 (sequence is synthesized)
agaggcgacggcaaccaaaatggctacaggggtcgcgaccatgagtacacagatcatcccagcaaaggctcctaccgagagcccctcaagagctacggaggcccatgcggcgctgcccct

SEQ ID NO: 608206 - DNA, 120 bp, Artificial Sequence
  ENSG00000175718_8 (sequence is synthesized)
gtgtgggggacaccgccatcttatggaggaggatgccgctacgaggagtaccagggcaactcgcccgatgcctgcagtgaaggccgctcgtccgaggccttgccagtcgtcttgccagac

SEQ ID NO: 608207 - DNA, 120 bp, Artificial Sequence
  ENSG00000175718_9 (sequence is synthesized)
gcctacagcagggaccactcgcccaaagcctatagtgggggccgcagcagttccagtaacggttacagccggagtgaccgctacggagaagaaggctgctacgaggagtacagaggccgc

SEQ ID NO: 608208 - DNA, 120 bp, Artificial Sequence
  ENSG00000175718_10 (sequence is synthesized)
tcgcccgacgcccacagcgggggccgcaacagttccagcaacagttacggccagagccaccactatggaggagaaggccgctatgaggagtaccgaggccgctcacacgaggcccgcagc

SEQ ID NO: 608209 - DNA, 120 bp, Artificial Sequence
  ENSG00000175718_11 (sequence is synthesized)
gggggccgctccactgatgcccacagcaggggccggtccgacgacgcctacagtgggggccatgacagttccagctggagcgactgctgcggaggaggaggccgttatgaggagtaccaa

SEQ ID NO: 608210 - DNA, 120 bp, Artificial Sequence
  ENSG00000175718_12 (sequence is synthesized)
ggccgctcgctggatgccaacagtggaggctgctcgcccgaggcctacagtgggggccacgacaattccagctggagcgaccgctacggagtaggaggccactatgaggagaaccgaggc

SEQ ID NO: 608211 - DNA, 120 bp, Artificial Sequence
  ENSG00000175718_13 (sequence is synthesized)
cactctctggatgccaacagcggaggccgttcacccgacacccacagtgggggccacagcagttccagcaacagttacggccagagccaccgctatggaggagaaggccgctatgagtac

SEQ ID NO: 608212 - DNA, 120 bp, Artificial Sequence
  ENSG00000175718_14 (sequence is synthesized)
accgctacggaggaggaggctgctacgaggagtaccgaggccgctccctcgatgccaacagtggaggccgctcgcccaatgcctacagcgggggccacgacagttccagctggagccacc

SEQ ID NO: 608213 - DNA, 120 bp, Artificial Sequence
  ENSG00000175718_15 (sequence is synthesized)
gctacggaggaggaggccgctacgaggagtaccgaggccgctcccttgatgccaacagtggaggccgctcgcctgatgcctacagtgggggccacgacagttctggccagagcaactgct

SEQ ID NO: 608214 - DNA, 120 bp, Artificial Sequence
  ENSG00000175718_16 (sequence is synthesized)
acggaggaggaggccgctacgaggagtaccgaggccgcttgctcgatgccaacagtggaggccgctcgcctgatgcctacagtgggggccacgacagttccagccagagcaaccgctatg

SEQ ID NO: 608215 - DNA, 120 bp, Artificial Sequence
  ENSG00000175718_17 (sequence is synthesized)
gaggaggcggccgctacgaggagtaccgaggccactcgcttgatgccaacagcggaggccgctcgcctgacacctacagccggggccacgacagttccagccagagcgaccactatggag

SEQ ID NO: 608216 - DNA, 120 bp, Artificial Sequence
  ENSG00000175718_18 (sequence is synthesized)
gaggaggtcgctcactcgatgccaacagcagtggccgcttgcctgacgcctacagtgggggccatgacagttccagccggagccaccgctacggaggaggaggccgctacgaggagtacc

SEQ ID NO: 608217 - DNA, 120 bp, Artificial Sequence
  ENSG00000175718_19 (sequence is synthesized)
gaggccgctcgctcgatgccaacagcggaggccgctcacccaatgcctacagcgggggccacaacagttccagccggaacgacccctgcagaggaggaggccgctacgaggagaaccgag

SEQ ID NO: 608218 - DNA, 120 bp, Artificial Sequence
  ENSG00000175718_20 (sequence is synthesized)
gtcactctctcgatgccaacagcggaggccactcacccaacgcctacagtgggggccgtgacagttccagcaacagttacgaccggagccaccgctatggaggaggaggccactacgaag

SEQ ID NO: 608219 - DNA, 120 bp, Artificial Sequence
  ENSG00000175718_21 (sequence is synthesized)
agtaccgaggccgctcgcacgacacccacagcaggggccgatcgcccgatgcccacagcggggaccactacaccgaagcctacagcaggggccgcgacagtttcagcaacagctatggcc

SEQ ID NO: 608220 - DNA, 120 bp, Artificial Sequence
  ENSG00000175718_22 (sequence is synthesized)
ggagtgaccattacggaagaggaggctgctacgaggaataccaaggccgctcgcccaatgcctacggcgggggccgcggcctcaacagttccaacaacagtcatggccggagccaccgct

SEQ ID NO: 608221 - DNA, 120 bp, Artificial Sequence
  ENSG00000175718_23 (sequence is synthesized)
acggaggaggaggccgctacgaggagtaccgaggcccctcgcctgacgcccacagtgggggccgcgacagttccatcaagagttacggcctgagcgaccgctacggaggaggaggccact

SEQ ID NO: 608222 - DNA, 120 bp, Artificial Sequence
  ENSG00000175718_24 (sequence is synthesized)
acgaggagtaccagggcagcttgcctgacgcctacagcggcgaccacgacagatccagcaacagttacggccggagcgaccgctactcgaggggtcgagaccgggtaggcagaccggatc

SEQ ID NO: 608223 - DNA, 120 bp, Artificial Sequence
  ENSG00000175718_25 (sequence is synthesized)
gtgggctccctctgcccatggaaacgggcagccctcccctgcatgattcttacagccggtcaggctgcagggtgcccaggggcggaggccgtcaaggaggccgcttcgagaggggggaag

SEQ ID NO: 608224 - DNA, 120 bp, Artificial Sequence
  ENSG00000175718_26 (sequence is synthesized)
gccggagcagatactaagcaggaacagacttgggcccaaaaattccttttcaaagaaacaaaaagaagaacctgttctatgttaactacccaaggactagtataagtaggagttgttttt

SEQ ID NO: 608225 - DNA, 120 bp, Artificial Sequence
  ENSG00000175718_27 (sequence is synthesized)
accttttaagaatttcctgttaagatctccatttttatgcttttgtgaggaaaaacttaaaattagtttgaaattgttaatgtttctttcaacaagttcttgttaaaagtataagatatg

SEQ ID NO: 608226 - DNA, 120 bp, Artificial Sequence
  ENSG00000175727_0 (sequence is synthesized)
ccggcgcccctctgcctcgcgcgcttgtcgcgttgccccgggctccgggggatgcccccggccgagcccttctcatggccgccgacgtcttcatgtgctccccgcgccggcctcgcagcc

SEQ ID NO: 608227 - DNA, 120 bp, Artificial Sequence
  ENSG00000175727_1 (sequence is synthesized)
atgtgctccccgcgccggcctcgcagccggggccgccaggtgctgctcaagccccaggtgtccgaggacgacgacgactcggacacggatgagccgtccccgccgcccgcctccggcgcg

SEQ ID NO: 608228 - DNA, 120 bp, Artificial Sequence
  ENSG00000175727_2 (sequence is synthesized)
cgggcccacgcgagcgccgcgccaccgccgcctcgggccgggccgggccgcgaggaacctccgcgccgccagcagatcatccacagcggccacttcatggtgtcgtcgccgcaccgagag

SEQ ID NO: 608229 - DNA, 120 bp, Artificial Sequence
  ENSG00000175727_3 (sequence is synthesized)
accgagagcacccgcccaagaagggctacgatttcgacacggtcaacaaacagacgtgccagacctacagcttcggcaagactagctcctgccacctgtccatcgacgcctcgctcacca

SEQ ID NO: 608230 - DNA, 120 bp, Artificial Sequence
  ENSG00000175727_4 (sequence is synthesized)
agctcttcgagtgcatgactttggcctacagtgggaagttggtgtctccaaagtggaagaatttcaagggcctgaagctacagtggagagacaagatccggctcaataatgccatctggc

SEQ ID NO: 608231 - DNA, 120 bp, Artificial Sequence
  ENSG00000175727_5 (sequence is synthesized)
gggcctggtacatgcagtatctggagaagcgcaagaatcctgtgtgccactttgtgacacccctggacggctctgtggacgtagacgagcaccgccggccggaggccatcaccacggaag

SEQ ID NO: 608232 - DNA, 120 bp, Artificial Sequence
  ENSG00000175727_6 (sequence is synthesized)
ggaagtactggaagagccgcatcgagattgtgatccgggagtatcacaagtggagaacctacttcaagaaaaggctacagcagcacaaggatgaggacctctccagcctggtccaggacg

SEQ ID NO: 608233 - DNA, 120 bp, Artificial Sequence
  ENSG00000175727_7 (sequence is synthesized)
atgacatgctgtattggcacaagcacggggatggatggaagacccccgtccccatggaggaggatcccctgctggacacagacatgctcatgtcggaattcagcgacaccctcttctcca

SEQ ID NO: 608234 - DNA, 120 bp, Artificial Sequence
  ENSG00000175727_8 (sequence is synthesized)
cactttcttcacaccagccggtggcctggcccaatccccgggaaatagcacatctgggaaatgcagacatgatccagccgggactgattcctttgcagcctaacctggacttcatggaca

SEQ ID NO: 608235 - DNA, 120 bp, Artificial Sequence
  ENSG00000175727_9 (sequence is synthesized)
cctttgagcctttccaggacctcttctcttctagccgctccatttttggctccatgctacctgcatctgcctcagcacctgtaccagatcccaacaacccacctgcacaggagagcatcc

SEQ ID NO: 608236 - DNA, 120 bp, Artificial Sequence
  ENSG00000175727_10 (sequence is synthesized)
tgccgaccacagccctccccactgtgagccttcctgacagcctcatcgcgccccctaccgccccatccctggctcacatggatgagcagggctgtgaacacacctcccggactgaggacc

SEQ ID NO: 608237 - DNA, 120 bp, Artificial Sequence
  ENSG00000175727_11 (sequence is synthesized)
cgtttatccagcccacggacttcggtccctcagagccgccactgagtgtcccgcagcccttcctccctgtcttcaccatgcccctgctgtctcccagccccgccccaccgcccatctccc

SEQ ID NO: 608238 - DNA, 120 bp, Artificial Sequence
  ENSG00000175727_12 (sequence is synthesized)
ccgtgttaccattagttcctcctcctgccactgccctgaaccccccggctccacccaccttccatcagccacagaagtttgctggagtcaacaaagcgccgtctgtcatcacccacacgg

SEQ ID NO: 608239 - DNA, 120 bp, Artificial Sequence
  ENSG00000175727_13 (sequence is synthesized)
cctctgccaccctcacccacgatgcccccgccaccacctttagccagagtcagggccttgtgatcaccacccatcaccctgccccgtcagcggccccttgtgggctggcactgtctcctg

SEQ ID NO: 608240 - DNA, 120 bp, Artificial Sequence
  ENSG00000175727_14 (sequence is synthesized)
tcacccggcctccccagccacggttaacttttgtgcaccccaaacctgtatccttgactgggggcaggcctaagcagccccacaaaatagtgcctgctcccaaaccagagcccgtgtcct

SEQ ID NO: 608241 - DNA, 120 bp, Artificial Sequence
  ENSG00000175727_15 (sequence is synthesized)
tggtgttgaagaatgcccgtatcgccccagctgccttttcaggccaaccacaagcggtgatcatgacgtcagggcctctgaagagagaagggatgttggcctccaccgtgtcccagtcca

SEQ ID NO: 608242 - DNA, 120 bp, Artificial Sequence
  ENSG00000175727_16 (sequence is synthesized)
acgtggtcattgcgcctgctgccatcgccagggctcctggggtcccggagttccacagcagcatcctggtgacagatctcggccatggcacgagcagcccgcctgcccccgtctcccggc

SEQ ID NO: 608243 - DNA, 120 bp, Artificial Sequence
  ENSG00000175727_17 (sequence is synthesized)
tcttcccaagcacagcgcaagaccccctggggaagggcgagcaggtcccgctgcatgggggcagcccccaggtcactgtcacagggcccagtcgggactgcccaaactcagggcaggcct

SEQ ID NO: 608244 - DNA, 120 bp, Artificial Sequence
  ENSG00000175727_18 (sequence is synthesized)
ctccgtgtgcatcggagcagagccccagtcctcaatctccccagaacaactgctcagggaaatccgaccccaaaaatgtggctgcactaaagaaccggcagatgaagcacatctcagctg

SEQ ID NO: 608245 - DNA, 120 bp, Artificial Sequence
  ENSG00000175727_19 (sequence is synthesized)
agcagaaaaggcgcttcaacatcaagatgtgcttcgacatgctcaacagcctcatctccaacaattccaagctgaccagtcacgccatcacactgcagaagactgtggagtacatcacca

SEQ ID NO: 608246 - DNA, 120 bp, Artificial Sequence
  ENSG00000175727_20 (sequence is synthesized)
agctgcagcaggagagaggccagatgcaggaggaggcccggcggctgcgggaggagatcgaggagctcaatgccaccatcatctcctgccagcagctgctccctgccacgggagtccccg

SEQ ID NO: 608247 - DNA, 120 bp, Artificial Sequence
  ENSG00000175727_21 (sequence is synthesized)
ttacccggcgccagtttgatcacatgaaagacatgtttgacgaatacgtgaaaacccggaccttgcagaattggaagttctggattttcagcatcatcatcaagccgctgtttgagtcgt

SEQ ID NO: 608248 - DNA, 120 bp, Artificial Sequence
  ENSG00000175727_22 (sequence is synthesized)
tcaagggcatggtgtccaccagcagcctggaggagctgcaccggacggcgctctcctggctggaccagcactgctccctgcccatcctcaggccgatggtattgagcacgctgcggcagc

SEQ ID NO: 608249 - DNA, 120 bp, Artificial Sequence
  ENSG00000175727_23 (sequence is synthesized)
tgagcacctccacctccatcctcacagacccggcacagctgccagagcaggcgtccaaggctgtcaccaggattggcaagagattgggagagtcctagctgcttagctggcatgtggccg

SEQ ID NO: 608250 - DNA, 120 bp, Artificial Sequence
  ENSG00000175727_24 (sequence is synthesized)
catgagatgccaggagacccttccctgcccatggagagtaggctgcgccccccagcccttcctgacgctcagcctcggggcctctctccaactctgccggcccaccgtggcatcgggagg

SEQ ID NO: 608251 - DNA, 120 bp, Artificial Sequence
  ENSG00000175727_25 (sequence is synthesized)
ccatgctcaggtctgaagcaggtttggggcctgctgacagcaatagcccgcctttgggaaccccttgctgtgaactctctcactcagtgacctcagtcaccaacctcctctgccctcggg

SEQ ID NO: 608252 - DNA, 120 bp, Artificial Sequence
  ENSG00000175727_26 (sequence is synthesized)
gcagcccacacaaaagggaagtgctggccgtgctggtcctgccctgctggtggcctgccgggcctggcgccggtgagcggaatcgatgggatgagggtgacagggcctgctcctgtcctg

SEQ ID NO: 608253 - DNA, 120 bp, Artificial Sequence
  ENSG00000175727_27 (sequence is synthesized)
aggcccagccttgtccctcctgccacgtcctgtccacatgcatgcctctgcctgatgccctgctccactctctggtctgcccgtggggcagttggaaggcgtctttctttctcccctcaa

SEQ ID NO: 608254 - DNA, 120 bp, Artificial Sequence
  ENSG00000175727_28 (sequence is synthesized)
ctctgacagcacccagcccttgtggatggacttgggcttctattcaggcttatgcatggcaggctgccagggggaagtgccttcttcagaggtcctccaggacacatgtgtgcagaaacg

SEQ ID NO: 608255 - DNA, 120 bp, Artificial Sequence
  ENSG00000175727_29 (sequence is synthesized)
gtggatgtggaacacacaggaccagaatggaagcgtgtgatgcacggtggctgctctggctgagaggccctgctgggcatgtttcatctgtccccttttagctccacctgacattgcagg

SEQ ID NO: 608256 - DNA, 120 bp, Artificial Sequence
  ENSG00000175727_30 (sequence is synthesized)
atccatggggactcagcccagggccttctcggatgtcacctcaccgctgtggcccttctgccgttcttctccacttggctccagctgcagctgttgacagatcaagcatgtcctgtggga

SEQ ID NO: 608257 - DNA, 120 bp, Artificial Sequence
  ENSG00000175727_31 (sequence is synthesized)
gcttagaaccctgaagttctagtgtctgaaagatcagactccacgtcctgctgtcagccttgtcatcttgtctgatgtctttcagctgggagccccaaaccaggacagttctcggaccaa

SEQ ID NO: 608258 - DNA, 120 bp, Artificial Sequence
  ENSG00000175727_32 (sequence is synthesized)
agatgcccccacactcaaaagtctgtcccgtcttgtgtttggagaaggaaacaatgttggcaggcagcactctgtggtggtcagccctcagagctgtttctaggcatctctcagatcaga

SEQ ID NO: 608259 - DNA, 120 bp, Artificial Sequence
  ENSG00000175727_33 (sequence is synthesized)
cagcaaagaatctacccagatctgggctgggtggaggtgtggctgggctgggggccattctgagcctgcagtgagagtttggcccagcctcagtccttgctcttctctggctacctctgc

SEQ ID NO: 608260 - DNA, 120 bp, Artificial Sequence
  ENSG00000175727_34 (sequence is synthesized)
gctttcaggcgacctctgccctccctgcctctcctcaccctccctctcttcctgcagggcctgggaagggctttgagggagcctgggagccatgtgaagaggggcacgcctgggctgtcc

SEQ ID NO: 608261 - DNA, 120 bp, Artificial Sequence
  ENSG00000175727_35 (sequence is synthesized)
cacagtttagatccagttggaggttctccctggctcctgcaggcctgcggggatctctccccacttcaggcctccggccagctgcctgccctcttgtctgtgcttcagccctgcacaaaa

SEQ ID NO: 608262 - DNA, 120 bp, Artificial Sequence
  ENSG00000175727_36 (sequence is synthesized)
gcagcttggtgacaccactcagccacccagagtacgtgtttacaggctttccagatcaccttcctgtggggtgaacgtaatgaggcggggctggtccttggaatttcccctggaaaatgg

SEQ ID NO: 608263 - DNA, 120 bp, Artificial Sequence
  ENSG00000175727_37 (sequence is synthesized)
taacagactccatccttgacccggggatgagcatgaaggcattgtcccaaaggcagaggccaccgtggtaggaattccaccaaggccagaagggaaaaaggaagaacccaccgtgtctgg

SEQ ID NO: 608264 - DNA, 120 bp, Artificial Sequence
  ENSG00000175727_38 (sequence is synthesized)
ctgtgcgggccctggggagggtcgtgagtgcagcccctctctacttctgtgcctttgtaaaacgtgtagataaccgcagtggttggctgagccaagaactctcctaaatcagtggctttc

SEQ ID NO: 608265 - DNA, 120 bp, Artificial Sequence
  ENSG00000175727_39 (sequence is synthesized)
tccccaccccttgctggggagtcatttttaaaaaaatctgtgggatataaaattggcctcctgctgcttcagcctacctctccctctgctgacttaatgtcgtgattctgtttcttcaga

SEQ ID NO: 608266 - DNA, 120 bp, Artificial Sequence
  ENSG00000175727_40 (sequence is synthesized)
tatttaaggctgttaggttgtgtgagccttgaagtgtgtgtgtgtgtcccagcgactgtccactgtccaggagatgcatgtctttgtattggagatatttctgtaactcattctcttggt

SEQ ID NO: 608267 - DNA, 120 bp, Artificial Sequence
  ENSG00000175727_41 (sequence is synthesized)
gctcacgattgccatggccatagggccacagtgccgtatctgctgcagacatgattgtttcttgttctagaggttttcttgttttcgaatcttgcctgatgaatccagccagaccaaggg

SEQ ID NO: 608268 - DNA, 120 bp, Artificial Sequence
  ENSG00000175727_42 (sequence is synthesized)
gcctagatttgacctctgtcctgggctcctgggccaggtgcaggaacatctgaggccactctgctggccacctccagtgggtgctgaccacaggatgggctttgtttacactcattttca

SEQ ID NO: 608269 - DNA, 120 bp, Artificial Sequence
  ENSG00000175727_43 (sequence is synthesized)
ccctgattcttgcccccactttcataaaagaaacttcaaaatgctgacgctttggagagtaagaaaatcaatcttggctgggcacggtggctcctgcctgtgatcctagcactttgggag

SEQ ID NO: 608270 - DNA, 90 bp, Artificial Sequence
  ENSG00000175727_44 (sequence is synthesized)
ggcacggtggctcctgcctgtgatcctagcactttgggaggctgaagctgaaaccctggcaacataacaagaccctgtctctacaaaaaa

SEQ ID NO: 608271 - DNA, 120 bp, Artificial Sequence
  ENSG00000175727_45 (sequence is synthesized)
tgtagcagtgagtgcctgtggtcccagctacttgggcctgaggctggaggattgcttgagcctagaagttgcagtgagctatgatcatgccacactgtactccagcctggatgacagagt

SEQ ID NO: 608272 - DNA, 61 bp, Artificial Sequence
  ENSG00000175727_46 (sequence is synthesized)
gtactccagcctggatgacagagtgaaaccctgcctctaaataaaagaaaatagaggcaga

SEQ ID NO: 608273 - DNA, 89 bp, Artificial Sequence
  ENSG00000175727_47 (sequence is synthesized)
tgacagagcaaaaccctatctccaaaaagaaaaaccagaaggcctgctggcgtataaatccctgggcgggtttctgataaattgccctg

SEQ ID NO: 608274 - DNA, 120 bp, Artificial Sequence
  ENSG00000175727_48 (sequence is synthesized)
gcgtataaatccctgggcgggtttctgataaattgccctgtgctgtcagcccctgcactgcactgctgccttccatggtgggtgggagaccccagagcggggcaggcgccactgagggct

SEQ ID NO: 608275 - DNA, 120 bp, Artificial Sequence
  ENSG00000175727_49 (sequence is synthesized)
tttcttggagtcggccagcaggccacgcagcatccggcaccctgggcgggctggctagctgccttcttaggacatctctactttgaaggattttaccgcaggaagcaatagcagcgctgg

SEQ ID NO: 608276 - DNA, 120 bp, Artificial Sequence
  ENSG00000175727_50 (sequence is synthesized)
ccattggtgctgatgacagcattgggtctggttgaggggaaggggctggaaagcagcagacccccccagtgctgcgcatggtcccggagctgtcagccaggggagtggggtcagccgtca

SEQ ID NO: 608277 - DNA, 120 bp, Artificial Sequence
  ENSG00000175727_51 (sequence is synthesized)
gccagccctcccatttcccgcccatgggccctgaccacactcccttttctagaagtcaatcctaaggtttctctgctctggctaagaggatgtaaatttggattcttagagggcatggca

SEQ ID NO: 608278 - DNA, 120 bp, Artificial Sequence
  ENSG00000175727_52 (sequence is synthesized)
cccccagtccctgcccagataaagtagcacagtggcaggcagcacctctgtctgttgctgacgttggggggcttacacacccacctcatctccgtgcacagccatgactggccctgccgg

SEQ ID NO: 608279 - DNA, 120 bp, Artificial Sequence
  ENSG00000175727_53 (sequence is synthesized)
cagctggggtgcaggtaagggtctctctcatagaggggagctgcagctgagaactggcgaggccccttcctccaaggccctagctggcccccgggtgaacctgaggtggcaggttcaggt

SEQ ID NO: 608280 - DNA, 120 bp, Artificial Sequence
  ENSG00000175727_54 (sequence is synthesized)
tttcaagatggtgaggtctcgctgtctgctggacagtacgttaggctctcagaactcatgggtgtggagctgggcctgtcccgggccagtggacccctgtgtgtgggggatttggggtgc

SEQ ID NO: 608281 - DNA, 120 bp, Artificial Sequence
  ENSG00000175727_55 (sequence is synthesized)
tgtgggcctggttatgcactggcagatggaccttgctttggtccagctcttttccttaccctggctctgacgtgggaaggcttggagggcccgtctcatcacccccgttcgccctcagct

SEQ ID NO: 608282 - DNA, 120 bp, Artificial Sequence
  ENSG00000175727_56 (sequence is synthesized)
gtccctttcccttgtcgcctggccgctgcctcgcccgcctgaggcctcctagcaggcagcctgggtgtgagttgagcctctctcttttccctctggtgggaaagtggcctttccctcaac

SEQ ID NO: 608283 - DNA, 120 bp, Artificial Sequence
  ENSG00000175727_57 (sequence is synthesized)
acctgctccccggccccagaggaacccacctgttttggagctcagcttggcccagcgtttccttggggaagggaaaggagggctggacagcactgatccgggcaggcagcgtgtgcagca

SEQ ID NO: 608284 - DNA, 120 bp, Artificial Sequence
  ENSG00000175727_58 (sequence is synthesized)
gtggccagccagagtgccaaagatgcacggggatgtggtgtgtggctccgggccctcgacatctctgctttgggggatttttaccttgtctgcacacttgtcaggggagaggggacagca

SEQ ID NO: 608285 - DNA, 120 bp, Artificial Sequence
  ENSG00000175727_59 (sequence is synthesized)
aggtgggaggttgaagagctttgaggctcagcagcatgtttgtggcattcggtggacaccatggccttgggcggctggacaggtttttgtgatgtgagggacacgcatggggcacatggt

SEQ ID NO: 608286 - DNA, 120 bp, Artificial Sequence
  ENSG00000175727_60 (sequence is synthesized)
aagcttggcaagggctccaggaacgctgacgaagggttttaggacccccacccccatgcctgtaccagggctggcctccagagcgggtgaggacagagcagctgtgggcttttcattctg

SEQ ID NO: 608287 - DNA, 120 bp, Artificial Sequence
  ENSG00000175727_61 (sequence is synthesized)
aggtcttggcccccctggccaccgcaagggactctttgcttgtcagggcttgcaaaaaccaaccttcgagaaagaaaagggaactcttcacgttgaatgttgactttgtgtgtatgcgtg

SEQ ID NO: 608288 - DNA, 120 bp, Artificial Sequence
  ENSG00000175727_62 (sequence is synthesized)
tgtgtgtgtgtgtgtgcacgcgcgcgtgtgcgtgttgacttcatggaattttgttttgtgaaattcccctccaatcgtgtcagaatttacctccatgccccagtcacactgttggttctg

SEQ ID NO: 608289 - DNA, 120 bp, Artificial Sequence
  ENSG00000175727_63 (sequence is synthesized)
cgctctgaacctgggtgtagctcatttgaaggactctcttctgcgtttcctaacagttatttggtggtctcaagagttgaggttgtggagggttgggagaaactgaagttctatacattt

SEQ ID NO: 608290 - DNA, 120 bp, Artificial Sequence
  ENSG00000175727_64 (sequence is synthesized)
ccatagagtttacatcctgcagttaaaaggcagggagggctcagcccgggccccacagctccaggccatcccctacgggctgcccacagtgcccccttttctctagccgaatctttttcg

SEQ ID NO: 608291 - DNA, 120 bp, Artificial Sequence
  ENSG00000175727_65 (sequence is synthesized)
aacagcccgggaaaggaaaacggattcacttgctgattttgttcacggcggaagcaccatgttccgttcctttttcaggttcagtttgttgtgtaaatggcggttttttctggtgtgagc

SEQ ID NO: 608292 - DNA, 120 bp, Artificial Sequence
  ENSG00000175727_66 (sequence is synthesized)
tttggtgatggtggcagggctcctttgaagagatggttccacctcgtggtctgaagaacaaaccagagaagagtctggtttggccagaggccccctccggtccacgtcaccctgagtaca

SEQ ID NO: 608293 - DNA, 120 bp, Artificial Sequence
  ENSG00000175727_67 (sequence is synthesized)
cccctctgattgctctgctgtcaagaagcacgtttccaccagctgtattcaacactacaatgcattttttaaactatatttgcatccaagacaataaagacaccttattttttttgaaaa

SEQ ID NO: 608294 - DNA, 120 bp, Artificial Sequence
  ENSG00000175727_68 (sequence is synthesized)
cactgtcacagggcccagtgagtgttcactcggcgggatggttggggcatcgcaagggaagtaactgggcctgccgtagaccatggggggtgcttgctgggtccccaggacggagcctgg

SEQ ID NO: 608295 - DNA, 120 bp, Artificial Sequence
  ENSG00000175727_69 (sequence is synthesized)
gcttaggacacacagtgaggtcttgtaggcctgctgataacacagtctgggaacacgctctgtgggtggcaggatgaaatgtggtggcactggcagggcaaaaagtagtgaacatgtggc

SEQ ID NO: 608296 - DNA, 120 bp, Artificial Sequence
  ENSG00000175727_70 (sequence is synthesized)
agtgtaggtgacccgtgtgctcggggagtccctgctgactgcccacgaaggcctggtactgagctgctgatctcacccagagaagggattgaggagccctgggcttcctgtctctgggag

SEQ ID NO: 608297 - DNA, 120 bp, Artificial Sequence
  ENSG00000175727_71 (sequence is synthesized)
catcagcctggggttgctgtggccacagaagccgtccagcctcatctgggcaccaacgtggccttccccagcaggtctcagcactacaggtctgtggcccatgtccactcttaggccatc

SEQ ID NO: 608298 - DNA, 120 bp, Artificial Sequence
  ENSG00000175727_72 (sequence is synthesized)
caggggcaagatagtcagagcaggactgattttgcccagggacatctgaggagccaacaggccagatcagggacaaatggtgtgcccgaggctgtgctgctggtagagggtgtgggcaga

SEQ ID NO: 608299 - DNA, 120 bp, Artificial Sequence
  ENSG00000175727_73 (sequence is synthesized)
agagggtgtgggcagatggggccccttccctcaaatgcctgccataccaggaagggaaatggaaatggcctcttttcttaaataaatgcatggtgtaggccaggcgcagtggctcatgcc

SEQ ID NO: 608300 - DNA, 120 bp, Artificial Sequence
  ENSG00000175727_74 (sequence is synthesized)
ggtgacagagcgagactcaatctcaaacaaacaaaggcatggtgtagctgctcctggaactctgagcaaacagttgtctccctcttccctcaggaagacgcgaatgagggagggtctctg

SEQ ID NO: 608301 - DNA, 120 bp, Artificial Sequence
  ENSG00000175727_75 (sequence is synthesized)
cctcttccctcaggaagacgcgaatgagggagggtctctgacttagtgggctcagccagcaggggccttttccaaggacaggctttggagagtaaggactcttcagtctggaaagataga

SEQ ID NO: 608302 - DNA, 120 bp, Artificial Sequence
  ENSG00000175727_76 (sequence is synthesized)
aacaagagagttgggagtcaggcccctcaaataatcgagggagaggttagggccaaccattgccttggtctccggagtctcagaacacagaacttagagcctgctgcacagcctcacggg

SEQ ID NO: 608303 - DNA, 120 bp, Artificial Sequence
  ENSG00000175727_77 (sequence is synthesized)
gagtttggggaaaataatccagcagagaggaaaggaagcggaggcatttgttacagtaaagcagaatgggccgagaaggccgagtccacctgggactgagcacggtcactcactcctcta

SEQ ID NO: 608304 - DNA, 120 bp, Artificial Sequence
  ENSG00000175727_78 (sequence is synthesized)
actttgggaggcagaggcaggtggatcgcttgagcccaggagattgagaccagcctagacaatatagtgagaccttggctctataaaaaatgttttttaattaaaaaatataataataat

SEQ ID NO: 608305 - DNA, 120 bp, Artificial Sequence
  ENSG00000175727_79 (sequence is synthesized)
ataataataaagagcccacctgcgaaatatctcgtaaagcgacaccagtgactggaacacgtcacacagggttgctccatcgtgttctgtgtggattaagggtgtttttgttgttgttat

SEQ ID NO: 608306 - DNA, 120 bp, Artificial Sequence
  ENSG00000175727_80 (sequence is synthesized)
taatttaagattttcagggagtgaataagaataatctaaggaagcatgtgtgtgcagttgaaagaaccaagtgcaatacgtggctagcagcgagcacctcataaccctgcagagacccca

SEQ ID NO: 608307 - DNA, 120 bp, Artificial Sequence
  ENSG00000175727_81 (sequence is synthesized)
aagatgtgcttcgacatgctcaacagcctcatctccaacaattccaagctggtgagttgccaagagcgtgggctgtggcagggcaggggagctggcaggacgtgctccctgcgtggtcat

SEQ ID NO: 608308 - DNA, 120 bp, Artificial Sequence
  ENSG00000175727_82 (sequence is synthesized)
tgctggtggcaggcctgctggctgtgggtgctgcctccagccacctgccccttctgcagaccagtcacgccatcacactgcagaagactgtggagtacatcaccaagctgcagcaggaga

SEQ ID NO: 608309 - DNA, 120 bp, Artificial Sequence
  ENSG00000175727_83 (sequence is synthesized)
tgcgcctgctgccatcgccaggcagtcaggggtgacctgtctcccatgtcactgcaggctcctggggtcccggagttccacagcagcatcctggtgacagatctcggccatggcacgagc

SEQ ID NO: 608310 - DNA, 120 bp, Artificial Sequence
  ENSG00000175727_84 (sequence is synthesized)
gtgcagaggcacgattccatccctcttttacagcatccttcagcacccatggggtgggagactcttggtccaggtgtgcttctgcctgagtgccaggtaacctatgtgcagctagctctg

SEQ ID NO: 608311 - DNA, 120 bp, Artificial Sequence
  ENSG00000175727_85 (sequence is synthesized)
ctccgactaattaacacagaattagctagacagagaagaaaaacatggattactaataaaaataacttctgtatatttctttcacgttttactaagcaatccaaaaagttgcttacaggt

SEQ ID NO: 608312 - DNA, 120 bp, Artificial Sequence
  ENSG00000175727_86 (sequence is synthesized)
gcttggggctacagagctgagtgaggtaccattctttgtccttacggagccctcatgcttatgcccatgaccagttagacactggtaacctggcaccatcttcaaacgggctccgggaag

SEQ ID NO: 608313 - DNA, 120 bp, Artificial Sequence
  ENSG00000175727_87 (sequence is synthesized)
aattgctactgcagagactgggatctgaaccattgattcctcgtagcttttcttatttaggaagaggtggcctgatgaccagttgacacgtgaaattgtcctcggggattcccgagcagc

SEQ ID NO: 608314 - DNA, 120 bp, Artificial Sequence
  ENSG00000175727_88 (sequence is synthesized)
tgcaatccaggctgcctctgctcagtaatagaagatggcagagactttggggagactctgctggactccagaaacaagatattcccaggctgctagccagctgtgtgagggccgttgcct

SEQ ID NO: 608315 - DNA, 120 bp, Artificial Sequence
  ENSG00000175727_89 (sequence is synthesized)
tatctgagctctgagttatttagtttttaatggaaacaagacccccgcagacacgcagggaaacacaaatccctatcagatcagcagccatggacgtggagacgtggcctttgtccctct

SEQ ID NO: 608316 - DNA, 120 bp, Artificial Sequence
  ENSG00000175727_90 (sequence is synthesized)
ttgtgatccgggagtatcacaagtggagaacctacttcaagaaaaggctacagcagcacaaggatgaggacctctccagcctggtccaggtgggtgagcctgggagctctgaggaccccc

SEQ ID NO: 608317 - DNA, 120 bp, Artificial Sequence
  ENSG00000175727_91 (sequence is synthesized)
gtccagctctctctcctgggtgggctggagggagccgctctccaaatgcctccaccctgctgcctcacttccactgagcacccctttgacgaatttccccaggtgacaggcgtgggaatt

SEQ ID NO: 608318 - DNA, 120 bp, Artificial Sequence
  ENSG00000175727_92 (sequence is synthesized)
cttcgtcccactgttactctttgatgcttcctcccctgtgttggtgttgtgttaggacgatgacatgctgtattggcacaagcacggggatggatggaagacccccgtccccatggagga

SEQ ID NO: 608319 - DNA, 120 bp, Artificial Sequence
  ENSG00000175727_93 (sequence is synthesized)
cggcctcccaaggtgctgggattacagatgtgagccattgcacccagcctctctatcttttttttaaagttagtcacaacctacagtgtgaaaacatggtcctggccatctctttcctgg

SEQ ID NO: 608320 - DNA, 120 bp, Artificial Sequence
  ENSG00000175727_94 (sequence is synthesized)
ctgggtctataacatgtctccttcaagaagtcacacaaatggttttaggtgccttggtggctttgtcttcctgtcccctggggttgagaacaagctgtctcactggcagagaggcagcct

SEQ ID NO: 608321 - DNA, 120 bp, Artificial Sequence
  ENSG00000175727_95 (sequence is synthesized)
ccatcccaaaggctttcaaacttgtgaccaccaccaccaccctggtgtgcacgtgcatgcgcacacacatacacttaaatgaaacaaaagtgtcatgaaataatacatggccatgatcta

SEQ ID NO: 608322 - DNA, 120 bp, Artificial Sequence
  ENSG00000175727_96 (sequence is synthesized)
cagatctggagaagcgcaagaatcctgtgtgccactttgtgacacccctggacggctctgtggacgtagacgagcaccgccggccggaggtacttggcagtgaccaagggtggctgagag

SEQ ID NO: 608323 - DNA, 120 bp, Artificial Sequence
  ENSG00000175727_97 (sequence is synthesized)
tggaaacataccagcacctcaccgggagtggctcaccgcgggctggtcctgtaggagaggctgccgagggtagtgcagcgcctgccctgcgccatccatgccctgggggccaggcctggg

SEQ ID NO: 608324 - DNA, 120 bp, Artificial Sequence
  ENSG00000175727_98 (sequence is synthesized)
agctggtggcctctggcaaccccaggctgcagagcctcccccttctcagagggactggcccagggactgagggggttaatatctttctgttaatttttaaagtgtgtgtctatgtgtgat

SEQ ID NO: 608325 - DNA, 120 bp, Artificial Sequence
  ENSG00000175727_99 (sequence is synthesized)
tatacatgcacaggaagtgtctagaggaatatatagaagtgtctttattaagagacttcaggaacctctggggagtaggattagggctgccagatgagggggagatgctttcttcactgc

SEQ ID NO: 608326 - DNA, 120 bp, Artificial Sequence
  ENSG00000175727_100 (sequence is synthesized)
atactcttctgtgtggctttaattttgtctaggcatgtctcactgttaacgataaagggggaatttagaaggtaagctaatgaaagacagttttgagacaggtataatctggtattagac

SEQ ID NO: 608327 - DNA, 120 bp, Artificial Sequence
  ENSG00000175727_101 (sequence is synthesized)
agtatcaagggatatcattttgttgggtatggcaatattgtaatcagttctttttaacagaaaagcatctttgctgtcgaggacacacacacagtgtttgtaggtgaggtgatttgggcc

SEQ ID NO: 608328 - DNA, 120 bp, Artificial Sequence
  ENSG00000175727_102 (sequence is synthesized)
ggctgtcatgcaaggcatccacactggcatcacgcgaaggttggatgagaggcccctggagggcacattccacctgaaacttcctggaattggctgttcatttttgccctttgaatgtgg

SEQ ID NO: 608329 - DNA, 120 bp, Artificial Sequence
  ENSG00000175727_103 (sequence is synthesized)
cagaggctgtggggaaggggcatttatgggggggcttgggaattgctgcagcgttcccctgcttcttcctctgtggagcattctgctctcaccctgtcctcctggacagagcctcaggac

SEQ ID NO: 608330 - DNA, 120 bp, Artificial Sequence
  ENSG00000175727_104 (sequence is synthesized)
cgtgcccccaaggcctttggctaccttaggtcttgaaatgacagcgcattgttagctagagggtctgctatagcatggaagaagtgggacgtactttctgagtgatgtggtagccactgt

SEQ ID NO: 608331 - DNA, 120 bp, Artificial Sequence
  ENSG00000175727_105 (sequence is synthesized)
ggggtttcccgctggattgcctaaggcctgattatagtgccggatactcagtacaccagttgagctttgctaatcaagcagagccccctcttcactctgctctctgtccctgtcctaggc

SEQ ID NO: 608332 - DNA, 120 bp, Artificial Sequence
  ENSG00000175727_106 (sequence is synthesized)
atccattctctgtgggcagatactttccagccccaggggaaaggagtacgccagtccaaccaccttcgggtctgcagtccccagcccctctccgtgcttgccttttctttaaccacacac

SEQ ID NO: 608333 - DNA, 120 bp, Artificial Sequence
  ENSG00000175745_0 (sequence is synthesized)
ggaaacattgctctgcgagtcctcccgtttaaacgcattcaatttttgggtctctctctctctctctctctctcttcttctcttctctctctctctctctctcctctctctctctcctct

SEQ ID NO: 608334 - DNA, 120 bp, Artificial Sequence
  ENSG00000175745_1 (sequence is synthesized)
ttctcccccctctctccctcctctcctctctctctcctctcttctctgaacctctcttctctttctcttttcttacatattctactagttgttttccccttcttcttctcctttctctcc

SEQ ID NO: 608335 - DNA, 120 bp, Artificial Sequence
  ENSG00000175745_2 (sequence is synthesized)
tttttctccctcctccttgtctcttttactccattcctgcagaagagagagggctaaacttaaagaaaaaaaaaaggaggaggaggaggaggaggcacccccttcgtattcttcttatcg

SEQ ID NO: 608336 - DNA, 120 bp, Artificial Sequence
  ENSG00000175745_3 (sequence is synthesized)
ttattttatacatatatgattttttttggagggagggtgttggttgccggctgaagagcacttatttaaaatactaaaaaaagaacatttttgggcgatctccagggtttttttaactag

SEQ ID NO: 608337 - DNA, 120 bp, Artificial Sequence
  ENSG00000175745_4 (sequence is synthesized)
ctctgtgtgttatagcagaagaagcagaagaaggagcaagaaagaggaaaagaagaggattatttattcgacctactttggatgtctctctcgcttttcctttttcctttttttggcaat

SEQ ID NO: 608338 - DNA, 120 bp, Artificial Sequence
  ENSG00000175745_5 (sequence is synthesized)
tattttcttctgatttttattttttctatttcgctgtgatttcgtcgccggcgtgaattatcccgtatttttctcccccttccgtcacctcccgaaagaagaaggcagcgagagcccggc

SEQ ID NO: 608339 - DNA, 120 bp, Artificial Sequence
  ENSG00000175745_6 (sequence is synthesized)
gccaccggcacaacaaaaagagcaaagtgtgtgatcttcctcgccggctgcctcccgctctccagcgctgccttcctgaatggctggctgcgtccggccctggacctggccccccgacac

SEQ ID NO: 608340 - DNA, 80 bp, Artificial Sequence
  ENSG00000175745_7 (sequence is synthesized)
acacccgcgcgccctgatcgccggcggcagcctcgcccagcgccctgctcggctcaccgcgctccccgcactcccgagcc

SEQ ID NO: 608341 - DNA, 80 bp, Artificial Sequence
  ENSG00000175745_8 (sequence is synthesized)
ccggcctccgctcgcgctccggctgcggccccgactcctgctcggactccggcccgggtcccggctcctccagcggcgct

SEQ ID NO: 608342 - DNA, 120 bp, Artificial Sequence
  ENSG00000175745_9 (sequence is synthesized)
cagctccagcggcgcctgcagccgcgacctcctcctcctccgccgccgccgccgcctccgccctcgccggcttcctctatgtcggctcagcccgcgcgctgcgcgtagcccgagcggccg

SEQ ID NO: 608343 - DNA, 120 bp, Artificial Sequence
  ENSG00000175745_10 (sequence is synthesized)
tgcgggcgaggcggagggcgagtgtgtgcgcgcgccgtggcccatgcccgccgcccccggcgctgcgccccgcgccgctcccggctgccgcctgtgccatttctgattttgcaacttggg

SEQ ID NO: 608344 - DNA, 120 bp, Artificial Sequence
  ENSG00000175745_11 (sequence is synthesized)
ccggctgccgcctgtgccatttctgattttgcaacttggggaagaagaaaaaagcgagagaagggagcttgctcgccggggggtggggaggggggaaggagagcgcggcccccccaggaa

SEQ ID NO: 608345 - DNA, 120 bp, Artificial Sequence
  ENSG00000175745_12 (sequence is synthesized)
cggagcgcggggggagcgggcgaggggagcaggggtgttggggggggagcctgagagcctgggggggctgcaaaaagagagaaagaaaacagcaggaaccacaacaaaacgccagcaggg

SEQ ID NO: 608346 - DNA, 120 bp, Artificial Sequence
  ENSG00000175745_13 (sequence is synthesized)
gaaaacagcaggaaccacaacaaaacgccagcagggcgggcgggcgcgcagcagcagcggggcggccgaggcagtagcggcggcagcggcggcggcggcggaggcagcggccggtgtccg

SEQ ID NO: 608347 - DNA, 120 bp, Artificial Sequence
  ENSG00000175745_14 (sequence is synthesized)
tccccctccccccttccccttccccttcccctcccagcgcgcccgcgcgccccgcggccctcggcgagcagctcggctccccccagcgctccccgggcccaaagatatggcaatggtagt

SEQ ID NO: 608348 - DNA, 120 bp, Artificial Sequence
  ENSG00000175745_15 (sequence is synthesized)
atatggcaatggtagttagcagctggcgagatccgcaggacgacgtggccgggggcaaccccggcggccccaaccccgcagcgcaggcggcccgcggcggcggcggcggcgccggcgagc

SEQ ID NO: 608349 - DNA, 120 bp, Artificial Sequence
  ENSG00000175745_16 (sequence is synthesized)
cccgggccagcccggagcgcccgccacccccggcacggcgggggacaagggccagggcccgcccggttcgggccagagccagcagcacatcgagtgcgtggtgtgcggggacaagtcgag

SEQ ID NO: 608350 - DNA, 120 bp, Artificial Sequence
  ENSG00000175745_17 (sequence is synthesized)
agcagcacatcgagtgcgtggtgtgcggggacaagtcgagcggcaagcactacggccaattcacctgcgagggctgcaaaagtttcttcaagaggagcgtccgcaggaacttaacttaca

SEQ ID NO: 608351 - DNA, 120 bp, Artificial Sequence
  ENSG00000175745_18 (sequence is synthesized)
catgccgtgccaacaggaactgtcccatcgaccagcaccaccgcaaccagtgccaatactgccgcctcaagaagtgcctcaaagtgggcatgaggcgggaagcggttcagcgaggaagaa

SEQ ID NO: 608352 - DNA, 120 bp, Artificial Sequence
  ENSG00000175745_19 (sequence is synthesized)
tgcctccaacccagcccaatccaggccagtacgcactcaccaacggggaccccctcaacggccactgctacctgtccggctacatctcgctgctgctgcgcgccgagccctaccccacgt

SEQ ID NO: 608353 - DNA, 120 bp, Artificial Sequence
  ENSG00000175745_20 (sequence is synthesized)
cgcgctacggcagccagtgcatgcagcccaacaacattatgggcatcgagaacatctgcgagctggccgcgcgcctgctcttcagcgccgtcgagtgggcccgcaacatccccttcttcc

SEQ ID NO: 608354 - DNA, 120 bp, Artificial Sequence
  ENSG00000175745_21 (sequence is synthesized)
cggatctgcagatcaccgaccaggtgtccctgctacgcctcacctggagcgagctgttcgtgctcaacgcggcccagtgctctatgccgctgcacgtggcgccgttgctggccgccgccg

SEQ ID NO: 608355 - DNA, 120 bp, Artificial Sequence
  ENSG00000175745_22 (sequence is synthesized)
gcctgcatgcctcgcccatgtctgccgaccgcgtcgtggccttcatggaccacatccgcatcttccaggagcaggtggagaagctcaaggcgctacacgtcgactcagccgagtacagct

SEQ ID NO: 608356 - DNA, 120 bp, Artificial Sequence
  ENSG00000175745_23 (sequence is synthesized)
gcctcaaagccatcgtgctgttcacgtcagacgcctgtggcctgtcggatgcggcccacatcgagagcctgcaggagaagtcgcagtgcgcactggaggagtacgtgaggagccagtacc

SEQ ID NO: 608357 - DNA, 120 bp, Artificial Sequence
  ENSG00000175745_24 (sequence is synthesized)
ccaaccagcccagccgttttggcaaactgctgctgcgactgccctcgctgcgcaccgtgtcctcctccgtcatcgagcagctcttcttcgtccgtttggtaggtaaaacccccatcgaaa

SEQ ID NO: 608358 - DNA, 120 bp, Artificial Sequence
  ENSG00000175745_25 (sequence is synthesized)
ctctcatccgcgatatgttactgtctgggagcagcttcaactggccttacatgtccatccagtgctcctagaccttgggcgcttcccacctgccccgtccccctagagactcagaggacc

SEQ ID NO: 608359 - DNA, 120 bp, Artificial Sequence
  ENSG00000175745_26 (sequence is synthesized)
cacctgggccaaggactccaaagccgcggggacaccgggaagtgcagcgggccaggcaggctgggtgggagggaggagggccgagacaggagcagcccacccagcagaaatacaatccga

SEQ ID NO: 608360 - DNA, 120 bp, Artificial Sequence
  ENSG00000175745_27 (sequence is synthesized)
gctacaaagcatgggaaaaagagactcttttaggatcagatctgtgagcacgttggcgaggaaaaacaaaacaaacaaaaaaaagaaccttgtgtctgtctggtgaaaaaaagaaaaaca

SEQ ID NO: 608361 - DNA, 120 bp, Artificial Sequence
  ENSG00000175745_28 (sequence is synthesized)
aattggaagagaggaccatgagaattttaataaaacagaaggaaactaatggaccttccaggatttattgtggacggatgtggatatattctgtacaggaacaacacatatggaagtgga

SEQ ID NO: 608362 - DNA, 120 bp, Artificial Sequence
  ENSG00000175745_29 (sequence is synthesized)
ctgaagcctatgtagaaacacacacacactgaacattgttattcattttgtaaaatactagtctttattttcattttttgtaaaatttaaacatcgtatgcgcataaagaaaaaggaaac

SEQ ID NO: 608363 - DNA, 120 bp, Artificial Sequence
  ENSG00000175745_30 (sequence is synthesized)
aagaattaggggaaaataacattttccaaataattataaaaaattgtcctgtgtctatgtatctatatctgttttgtatttttttctggttccaaaccagatttcctgtgattctatact

SEQ ID NO: 608364 - DNA, 120 bp, Artificial Sequence
  ENSG00000175745_31 (sequence is synthesized)
aataatttttgatataaccctttgcttcttataatgagtgcgatatatgttgtcgaggctgttcttcaagaattaaaattgaagtgaaaatttaaacaaaaataaaagaatttagcaaaa

SEQ ID NO: 608365 - DNA, 120 bp, Artificial Sequence
  ENSG00000175745_32 (sequence is synthesized)
aaaacgctgcttgcttgcaaatgaggaggccgctaggcatttgcctagaaccacaacctttctccggtttcgcctttttttaaccctgattttttttttccattctggagggcggttcag

SEQ ID NO: 608366 - DNA, 120 bp, Artificial Sequence
  ENSG00000175745_33 (sequence is synthesized)
ccaactggctggctggagtaattagacatctgagaggaacctagtctgtatctgaggtcaaaggggacttgcctcagaagttcttgaattatcactagttttatttgtatttttgctcga

SEQ ID NO: 608367 - DNA, 120 bp, Artificial Sequence
  ENSG00000175745_34 (sequence is synthesized)
attcagatggttaatgaatccagtgtttttgcagttgaaagctcgtgcattcactgggcaaaagctggctgcaggttgcagtggcaccgcgcaggacagacattaattatatttcctact

SEQ ID NO: 608368 - DNA, 120 bp, Artificial Sequence
  ENSG00000175756_0 (sequence is synthesized)
cgaggtcgggcttgggaagggtcagcgggaggcctgagggcgccgggcgctgcggcaggcgggcccggggtccagccgagaggctcccctgggacctgtggccgccgcccacagaccatg

SEQ ID NO: 608369 - DNA, 120 bp, Artificial Sequence
  ENSG00000175756_1 (sequence is synthesized)
ccacagaccatgctcctggggcgcctgacttcccagctgttgagggccgttccttgggcaggcggccgcccgccttggcccgtctctggagtgctgggcagccgggtctgcgggcccctt

SEQ ID NO: 608370 - DNA, 120 bp, Artificial Sequence
  ENSG00000175756_2 (sequence is synthesized)
tacagcacatcgccggccggcccaggtagggcggcctctctccctcgcaagggggcccagctggagctggaggagatgctggtccccaggaagatgtccgtcagccccctggagagctgg

SEQ ID NO: 608371 - DNA, 120 bp, Artificial Sequence
  ENSG00000175756_3 (sequence is synthesized)
ccgcccagccagataggggaaggggccgagcagggggatgaaggcgtcgcggatgcgcctcaaattcagtgcaaaaacgtgctgaagatccgccggcggaagatgaaccaccacaagtac

SEQ ID NO: 608372 - DNA, 120 bp, Artificial Sequence
  ENSG00000175756_4 (sequence is synthesized)
cggaagctggtgaagaagacgcggttcctgcggaggaaggtccaggagggacgcctgagacgcaagcagatcaagttcgagaaagacctgaggcgcatctggctgaaggcggggctaaag

SEQ ID NO: 608373 - DNA, 120 bp, Artificial Sequence
  ENSG00000175756_5 (sequence is synthesized)
gaagcccccgaaggctggcagacccccaagatctacctgcggggcaaatgagtctggcgccgcccttcccgcccgttgctgctgtgatccgtagtaataaattctcagaggactcagcct

SEQ ID NO: 608374 - DNA, 120 bp, Artificial Sequence
  ENSG00000175756_6 (sequence is synthesized)
ggaatccggcccctgggtggtccggaaacgattctggacctgcgggtatatccagggcccgcaccccctgggattgtgggaaatgtagttttttgcctccgtaagggaccaggcggagct

SEQ ID NO: 608375 - DNA, 120 bp, Artificial Sequence
  ENSG00000175756_7 (sequence is synthesized)
gaggaaccgcgcgaggactgggaccgtgattccactaaccggaaaccgtcgcctttcgggcccggcggggcctgagccaatgcagaatcgggggccgcgaggacgccagcgggcgctgtg

SEQ ID NO: 608376 - DNA, 120 bp, Artificial Sequence
  ENSG00000175756_8 (sequence is synthesized)
cgtaggaaccgccgggtggccgctgccgatcggggccgacttggggacggaccggaagtgcccgagggcggccgcagaacggtcaatttgagccgcgtcgagctcccctgggacctgtgg

SEQ ID NO: 608377 - DNA, 80 bp, Artificial Sequence
  ENSG00000175756_9 (sequence is synthesized)
cgaggtcgggcttgggaagggtcagcgggaggcctgagggcgccgggcgctgcggcaggcgggcccggggtccagccgag

SEQ ID NO: 608378 - DNA, 120 bp, Artificial Sequence
  ENSG00000175756_10 (sequence is synthesized)
acccggggagggggccggcctccccgttctgggacctttcggtgcgtccgagcgcgacaccgcccgcgtcgggggcttgggagcctcggggcgcgagctgtgttggaagcaaagtcctcc

SEQ ID NO: 608379 - DNA, 120 bp, Artificial Sequence
  ENSG00000175756_11 (sequence is synthesized)
ttgtgggttggggtggcggagggagaagggaagcgagggtcgcggcgggaccagacgccccagtcccggcccgcccgcgactactgaaggcgctgccgcctgacctgaacgggcacttgt

SEQ ID NO: 608380 - DNA, 120 bp, Artificial Sequence
  ENSG00000175756_12 (sequence is synthesized)
tttcccctctaagcttccgatgctcacagagggaacctcaggggttcaggccaggaatgaggtgcgggggatcctcgctgggacgaacctgctgctcctcaacccgacgggcctgtgtgg

SEQ ID NO: 608381 - DNA, 120 bp, Artificial Sequence
  ENSG00000175764_0 (sequence is synthesized)
cgagtgttggcggggactgagcctcctgcttgaggtagttgtttttactcccagtccccaggctcacgagccccacgcgcgctcaatctgccctcccgcttctcctcgccactccgagtt

SEQ ID NO: 608382 - DNA, 120 bp, Artificial Sequence
  ENSG00000175764_1 (sequence is synthesized)
ctgcgccctcgagatccagcgcatccgcggggtgggcgggtcctggcggctctttgccctcttccaacatggccgccgctgcctctgtgacaggcagggtcacgtgggcagcctcgccta

SEQ ID NO: 608383 - DNA, 120 bp, Artificial Sequence
  ENSG00000175764_2 (sequence is synthesized)
tgaggtcgctggggctcggccggcgattgtcccttcccggaccccgtctcgatgcggtgactgccgctgtcaacccgagcctgagcgatcatggcaacgggctcgggcggggaacgcgtg

SEQ ID NO: 608384 - DNA, 120 bp, Artificial Sequence
  ENSG00000175764_3 (sequence is synthesized)
ctgagcgatcatggcaacgggctcgggcggggaacgcgtggcagcggctgcagcggcggcagtttggtggcggactggggcggcggagcggcggcggcggcggcggtggcactggcactg

SEQ ID NO: 608385 - DNA, 120 bp, Artificial Sequence
  ENSG00000175764_4 (sequence is synthesized)
gcgagctggcggcccggtgggaggcggaggcggtggctgcggccaaagcggcggccaaagctgaggccgaggccacagcggagacggtggcggaacaggtccgcgtggacgcgggcgcgg

SEQ ID NO: 608386 - DNA, 120 bp, Artificial Sequence
  ENSG00000175764_5 (sequence is synthesized)
ccggggaaccggagtgcaaggcaggggaggagcagcccaaggtcctggccccggccccggcgcagcccagtgcggctgaggaggggaacacccaggtccttcagcggccgccgcccacgc

SEQ ID NO: 608387 - DNA, 120 bp, Artificial Sequence
  ENSG00000175764_6 (sequence is synthesized)
tgcccccgtccaagccgaagccggtgcagggcctctgcccgcacgggaagccccgggacaagggccgaagctgcaagcggagctcgggccacggttccggcgagaacggctcccagcggc

SEQ ID NO: 608388 - DNA, 120 bp, Artificial Sequence
  ENSG00000175764_7 (sequence is synthesized)
cggtcaccgtggacagctccaaggccaggacctccctggatgccctgaagatcagcatccgccagctcaagtggaaggagttcccatttggccggcgcttgccttgtgacatctactggc

SEQ ID NO: 608389 - DNA, 120 bp, Artificial Sequence
  ENSG00000175764_8 (sequence is synthesized)
atggagtttcatttcacgacaatgacatattctccggtcaagtgaacaagtttccaggcatgacggagatggtgcgtaaaattactctgagcagagcagtgagaaccatgcagaatctct

SEQ ID NO: 608390 - DNA, 120 bp, Artificial Sequence
  ENSG00000175764_9 (sequence is synthesized)
ttcctgaggagtacaacttctaccctcgctcatggattctgcctgacgagttccagctctttgttgctcaggttcaaatggtgaaagacgatgacccctcctggaagcccacttttatcg

SEQ ID NO: 608391 - DNA, 120 bp, Artificial Sequence
  ENSG00000175764_10 (sequence is synthesized)
tgaaacctgatggtggttgtcagggtgatggaatctacctcattaaagaccccagtgacatccgcctggcagggaccctccagagcaggccagcggtggtccaggagtacatctgcaaac

SEQ ID NO: 608392 - DNA, 120 bp, Artificial Sequence
  ENSG00000175764_11 (sequence is synthesized)
ctctccttatcgacaagctcaagtttgatattcgtctgtatgtcttactcaagtccttagaccccttagagatttatatagccaaagacggactctctaggttttgtaccgagccatatc

SEQ ID NO: 608393 - DNA, 120 bp, Artificial Sequence
  ENSG00000175764_12 (sequence is synthesized)
aggagcccacccccaaaaacctgcaccgcatctttatgcacttaaccaactattcactgaacatccacagcggcaacttcatccactcggacagtgctagcactggcagcaaaaggactt

SEQ ID NO: 608394 - DNA, 120 bp, Artificial Sequence
  ENSG00000175764_13 (sequence is synthesized)
cctttgtagactgtcttccaaaggcgttgacatcaagaaggtctggtctgacatcatctccgtggtgattaagacggtcatcgcgctgactccagagctcaaagtcttctaccagtcaga

SEQ ID NO: 608395 - DNA, 120 bp, Artificial Sequence
  ENSG00000175764_14 (sequence is synthesized)
catccccacggggaggccgggccccacgtgcttccagattttaggctttgacattcttctaatgaaaaatctgaagcctatactacttgaagtaaatgcaaatcccagtatgagaatcga

SEQ ID NO: 608396 - DNA, 120 bp, Artificial Sequence
  ENSG00000175764_15 (sequence is synthesized)
acatgagcacgaactttctccaggggtgtttgaaaatgtccccagcctcgttgatgaagaagtgaaagtggctgtgatcagagacactctgcgcctcatggacccacttaagaagaaaag

SEQ ID NO: 608397 - DNA, 120 bp, Artificial Sequence
  ENSG00000175764_16 (sequence is synthesized)
agagaatcagtctcagcagcttgaaaaaccattcgctggaaaggaagatgctttggacggcgagctgaccagtgctccagactgcaacgccaaccccgaagcccacctgccttccatttg

SEQ ID NO: 608398 - DNA, 120 bp, Artificial Sequence
  ENSG00000175764_17 (sequence is synthesized)
cctcaagcaggtgttccccaagtacgcaaaacagttcaactacctgcgcctggtggacaggatggcaaatttgtttatccggttcctgggcatcaaggggacaatgaagttggggccaac

SEQ ID NO: 608399 - DNA, 120 bp, Artificial Sequence
  ENSG00000175764_18 (sequence is synthesized)
aggctttcgtaccttcataaggagctgcaaactcagcagcagcagcctgtccatggctgccgtggacatcctctacattgacatcacacggaggtggaactccatgaccctggaccagcg

SEQ ID NO: 608400 - DNA, 120 bp, Artificial Sequence
  ENSG00000175764_19 (sequence is synthesized)
ggactcagggatgtgtctgcaggccttcgtagaagctttctttttcctggctcagaggaagttcaagatgctgccacttcatgagcaggtggcctcactgattgacctttgcgagtacca

SEQ ID NO: 608401 - DNA, 120 bp, Artificial Sequence
  ENSG00000175764_20 (sequence is synthesized)
cctgtccctgctggatgaaaaacgcctggtgtgtggccggggcgtcccgtcggggggccggcccccacaccgtggccctccccaggagccctccccctcggcccagccagcaggggacaa

SEQ ID NO: 608402 - DNA, 120 bp, Artificial Sequence
  ENSG00000175764_21 (sequence is synthesized)
ccccccaccccgcaccagctgtgccaataagctctcccatcccagacataccctgtcctgagggccactctgtcctcctggaaaacggaagacgagagcagctttcagggctggagcgcc

SEQ ID NO: 608403 - DNA, 120 bp, Artificial Sequence
  ENSG00000175764_22 (sequence is synthesized)
ccaggcattctgcctgcagaggaatggcaggcaggctgccgaggggcccagctgaggtccccacgaactgtctctgtgtgcggctgagctgtgcttcaccaggctggctggttctcacct

SEQ ID NO: 608404 - DNA, 120 bp, Artificial Sequence
  ENSG00000175764_23 (sequence is synthesized)
gccttcctcctcacacctcctggtgatacaccctgtttctgagtcatcagtcatcggacatatgacatctaaaacgtgacagatggcaccttctattctgggctcacaggaagcaccaac

SEQ ID NO: 608405 - DNA, 120 bp, Artificial Sequence
  ENSG00000175764_24 (sequence is synthesized)
tggggcaaatctgttgtatttggggcacaggacacaatcgatcccaaggcccggagctgtggagaggaagccgagtgttaggatctgctgccggggcctccacgcgcccaccgggaaaag

SEQ ID NO: 608406 - DNA, 120 bp, Artificial Sequence
  ENSG00000175764_25 (sequence is synthesized)
cctgagaacatcgtgtttatttcctgccgcccgttccgagagaaggaagtggaaatatcaagtaggcatctgcgaatctcccatcccagtcatgtgctacatgggtgtagtgaacagatt

SEQ ID NO: 608407 - DNA, 120 bp, Artificial Sequence
  ENSG00000175764_26 (sequence is synthesized)
aacctcatttagttcattagcttgcctgttgctgcaatatttggtttgttattaattaagaaaaaattaattaagaagtaactaagactcctggagcctcagagctggcaggagcctcag

SEQ ID NO: 608408 - DNA, 120 bp, Artificial Sequence
  ENSG00000175764_27 (sequence is synthesized)
ctcaagagggctctctggcttcgtgtaggatgagtgatcggggtgggatggccagaggaggggacagtgttggtggtgctgtgggcttgggtgttaaacctgggcccaacttccaagctt

SEQ ID NO: 608409 - DNA, 120 bp, Artificial Sequence
  ENSG00000175764_28 (sequence is synthesized)
tctgtttgctccctgtgtgatttggggcaagctacttcccctctgttacctgtaaaatgaaatgaagaatacctatcttaaaaggttcttgtaagaattaaatgagataacacatgtaaa

SEQ ID NO: 608410 - DNA, 120 bp, Artificial Sequence
  ENSG00000175766_0 (sequence is synthesized)
gtagtctgttgggagttgagggagggggacaacgcggcgtgtgaagagtggggaagaaatcacgcgactggatttggagttctgctgggctcgaatctcagctgtgctttttattaaccg

SEQ ID NO: 608411 - DNA, 120 bp, Artificial Sequence
  ENSG00000175766_1 (sequence is synthesized)
tgggaccttgagctactcggctctcctttctgaatgacagtttcctcctctgtaaaacaggaatggttaattcaacgaatgtttactgagcgcttagtccagtggtgcaggtttaaggct

SEQ ID NO: 608412 - DNA, 120 bp, Artificial Sequence
  ENSG00000175766_2 (sequence is synthesized)
ggaggcagcggaaaaggaaaacaaggttcctggtctcgggaagcttaccatgggggtgtctgtacgcgtgtgtgttcgtgcgctcagtggtggaagacaggacagaaaataaacggatca

SEQ ID NO: 608413 - DNA, 120 bp, Artificial Sequence
  ENSG00000175766_3 (sequence is synthesized)
acatccaaagcaacaaggtcattacagcttatggggaaactgactcgatgaagctcaggcctggccgcggtcagggtagaatcaggactagaacccaggctgtgtggctgcagccctgac

SEQ ID NO: 608414 - DNA, 120 bp, Artificial Sequence
  ENSG00000175766_4 (sequence is synthesized)
cctcaccatccaggtcaggcagagaacactcaggtcttggcccccatggtgtggggcttggtcacagctgcttccccagccccaggcctgcacgaagaaggcactcactaaatgcttgct

SEQ ID NO: 608415 - DNA, 120 bp, Artificial Sequence
  ENSG00000175766_5 (sequence is synthesized)
gttgaggtgagtgaagctgagggtggaatccgagagtgggaggaggaggagaaggaggaggaggcagcagagaggacgcccacaggagaaaagtctccaaactctcccaggactttgctg

SEQ ID NO: 608416 - DNA, 120 bp, Artificial Sequence
  ENSG00000175766_6 (sequence is synthesized)
tctctgagagggaaggcccggacggggggccccatggaagtcaagctggagctgcaccccttgcagaacaggtgggctctgtggttcttcaagaatgaccgcagccgggcctggcaggac

SEQ ID NO: 608417 - DNA, 120 bp, Artificial Sequence
  ENSG00000175766_7 (sequence is synthesized)
aacctgcacctggtcaccaaggtggacactgtggaggacttctgggcgctatacagtcacatccagctggccagcaagctctcctctggctgtgactacgccctcttcaaggatggcatc

SEQ ID NO: 608418 - DNA, 120 bp, Artificial Sequence
  ENSG00000175766_8 (sequence is synthesized)
agcagcgccacattgagctggaccggctgtggctggagacgctgctgtgtctgatcggggagagctttgaggaacacagcagagaggtatgtggggccgtcgtcaacatccgcaccaagg

SEQ ID NO: 608419 - DNA, 120 bp, Artificial Sequence
  ENSG00000175766_9 (sequence is synthesized)
gggacaagatcgctgtgtggacgagggaggcggaaaaccaggcgggcgtgctgcacgttgggcgtgtatacaaagagcgcctgggcctctccccaaagaccatcattgggtaccaggccc

SEQ ID NO: 608420 - DNA, 120 bp, Artificial Sequence
  ENSG00000175766_10 (sequence is synthesized)
atgcagacacagccaccaagagcaactccctagccaagaacaagtttgtggtgtgaggggggccttggcacccctcctatgtaatgggacagccgccactgagcctcattactttggggg

SEQ ID NO: 608421 - DNA, 120 bp, Artificial Sequence
  ENSG00000175766_11 (sequence is synthesized)
atggggcgggactggggatcagacagcctagttcttacctgtcctcaagtgaacaggaatgcaaacactctttaacatgagttggggcctgagccttaggggctagatgggggtagtggt

SEQ ID NO: 608422 - DNA, 120 bp, Artificial Sequence
  ENSG00000175766_12 (sequence is synthesized)
ggcagtctgaggacctagcttgtcctggggccacaggacagcagcagggtggaaaaaactcctgagggtggggtgagtcatggcggggaaggagggctctatggtaggcggagaaaccca

SEQ ID NO: 608423 - DNA, 120 bp, Artificial Sequence
  ENSG00000175766_13 (sequence is synthesized)
tagtccagcgtttactgtttccacccaggaaggaggtgaggtggcctgagagacagactcttccatgggtggtgggctcaagggcacagacattctggagggtgaacgccatcatttgta

SEQ ID NO: 608424 - DNA, 120 bp, Artificial Sequence
  ENSG00000175766_14 (sequence is synthesized)
cagagggatacgtgggttgctgaggactgagagagccttgcaaggccgctccccttctccccagctgtgaccagggctgtctgggccttgcctgcctcagggccagactgaagtggaggt

SEQ ID NO: 608425 - DNA, 120 bp, Artificial Sequence
  ENSG00000175766_15 (sequence is synthesized)
ggagggatgctgggctaggcctcaccaaggttctggtagaagtggtggaagtggataaacttgataataaaagcttaagcatctttctgttcctgttttaaataaatacttctgaacaaa

SEQ ID NO: 608426 - DNA, 120 bp, Artificial Sequence
  ENSG00000175766_16 (sequence is synthesized)
aaggctgtgggttgagcaaatactcagcctccagatggtcacgagccccccaagtgtgggggaggagcagggccttttatacgtctgggaccctaaaagtgcccaagatggggaaactga

SEQ ID NO: 608427 - DNA, 84 bp, Artificial Sequence
  ENSG00000175766_17 (sequence is synthesized)
aaggccttggggaccttgaggaagatggggaaactgactcgatgaagctcaggcctggccgcggtcagggtagaatcaggacta

SEQ ID NO: 608428 - DNA, 120 bp, Artificial Sequence
  ENSG00000175766_18 (sequence is synthesized)
ctgtggaggacttctgggcgtgagtgtctgtccccagtggggctagagttggggggctctgagctctgggctccctctctccgggttgagccagccctccctagggcctttcagcctttg

SEQ ID NO: 608429 - DNA, 120 bp, Artificial Sequence
  ENSG00000175766_19 (sequence is synthesized)
tgagggctggggctttgtgggttctgcccagggggtatagggcacaaccaccccccaccccaccaccttctttgggctcagggagagagcctggggagcaggagaagcaggaagctgacc

SEQ ID NO: 608430 - DNA, 120 bp, Artificial Sequence
  ENSG00000175766_20 (sequence is synthesized)
ttgactcggccactccagggctttgtgacctgggcaagttccttcccctctctgaacctgtctcagctgcaaagggaggactcggctgcctcagtgtccgggtgctcacgggagtggctc

SEQ ID NO: 608431 - DNA, 120 bp, Artificial Sequence
  ENSG00000175766_21 (sequence is synthesized)
tgaaaagggctacacaagccctagggagggtgagaaggcctcggctgtagctggaggggggagcaccagggggtctaaaaccctccccaggggttggctcagccttcactgggaaggctc

SEQ ID NO: 608432 - DNA, 120 bp, Artificial Sequence
  ENSG00000175766_22 (sequence is synthesized)
tgtggaaaaggtgggtcttgagagtttggataaacgggagtggaatcccaggtggcaggccagtgtaagcaaaggcttggaggccatggggtcggatgaggagttgggagggctgaaccc

SEQ ID NO: 608433 - DNA, 120 bp, Artificial Sequence
  ENSG00000175766_23 (sequence is synthesized)
cagcagcgccacattgagctggaccggctgtggctggagacggtgagttggaggaggagggtcctcaggggaagagacgggctgtgtgggtctcatggtggcagtggtctcaaggatggc

SEQ ID NO: 608434 - DNA, 120 bp, Artificial Sequence
  ENSG00000175766_24 (sequence is synthesized)
gagggaaggtgggtggagggggcttggcctgcatgggagacctctgaaagtctccatagcctccctcccttctgccttgcccacctgtatggaaggtctggcgttcagatttctaacttt

SEQ ID NO: 608435 - DNA, 120 bp, Artificial Sequence
  ENSG00000175766_25 (sequence is synthesized)
ctcttacggcagtgcagctctccttttgcattaagggggtcatattttgggtttccacatgggtaagacacaacaggtgtggctgtggccagaatgagggtaggagtctggtggcctaag

SEQ ID NO: 608436 - DNA, 120 bp, Artificial Sequence
  ENSG00000175766_26 (sequence is synthesized)
ttatctctaggaccctctgatgactacctgtgtctcttttcctctgtgtcccccgcacctgcaggcgtgtatacaaagagcgcctgggcctctccccaaagaccatcattgggtaccagg

SEQ ID NO: 608437 - DNA, 120 bp, Artificial Sequence
  ENSG00000175768_0 (sequence is synthesized)
gggcgcgaggcggccaccgtggagagcagagcgcggcggctggaagctgctaagtcagagccgcgatgttccggattgagggcctcgcgccgaagctggacccggaggagatgaaacgga

SEQ ID NO: 608438 - DNA, 120 bp, Artificial Sequence
  ENSG00000175768_1 (sequence is synthesized)
agatgcgcgaggatgtgatctcctccatacggaactttctcatctacgtggccctcctgcgagtcactccatttatcttaaagaaattggacagcatatgaagacaggacatcacatatg

SEQ ID NO: 608439 - DNA, 120 bp, Artificial Sequence
  ENSG00000175768_2 (sequence is synthesized)
taagaacaagtttggctctggtaactgaccttcaaagctaaaatataaaactatttgggaagtatgaaacgatgtctcgtgatctggtgtacccttatccctgtgacgtttggcctctga

SEQ ID NO: 608440 - DNA, 120 bp, Artificial Sequence
  ENSG00000175768_3 (sequence is synthesized)
caatactggtataattgtaaataatgtcaaactccgttttctagcaagtattaagggagctgtgtctgaaatggcactgtcttgtcagtcatttctgtttacctttttcttctgcccaga

SEQ ID NO: 608441 - DNA, 120 bp, Artificial Sequence
  ENSG00000175768_4 (sequence is synthesized)
gtgtatttgtgaagagtctcttatattatgttttgtggaaatcagcacacaaccacaatgacatttaagcacaggatcattattagtctatgtttttaataaacatatcaattaagaaaa

SEQ ID NO: 608442 - DNA, 120 bp, Artificial Sequence
  ENSG00000175768_5 (sequence is synthesized)
ctgagctgaacggtagcggggagcaaggagggtgcgcgttgaaggcgacgggcatatgcgcggtttgagctccatttatcttaaagaaattggacagcatatgaagacaggacatcacat

SEQ ID NO: 608443 - DNA, 120 bp, Artificial Sequence
  ENSG00000175768_6 (sequence is synthesized)
tgctcagagaacaaagactcttccaatctcccaagtgctgaatgaggccctgccaacgttctgggattcaaaggaatagggctgtggtgaggctcaggacagacaggtttatatcttaaa

SEQ ID NO: 608444 - DNA, 120 bp, Artificial Sequence
  ENSG00000175768_7 (sequence is synthesized)
acaaaaacctttaccgtcatttaatgggatttttgggagggagtggaggtaggtatacgtgcttcatctaccatcttaacctggaaagcatgtattttaattctgtggttttgtatttat

SEQ ID NO: 608445 - DNA, 120 bp, Artificial Sequence
  ENSG00000175768_8 (sequence is synthesized)
ttcttaaattaagaaggtgtagtgtatggcactgtggtcatatgaatactggctctaaagacaggcagacttgattttgaatgttggctccaatacttacgagatgggtgattttcagca

SEQ ID NO: 608446 - DNA, 120 bp, Artificial Sequence
  ENSG00000175768_9 (sequence is synthesized)
agtgagctccgaatctcattttctttaactataaaattaggataatagaaacatctctctacttcaaagtgtcgtaaggattaagtgaaaaaatgcaagtagagcagctggcacaattgc

SEQ ID NO: 608447 - DNA, 120 bp, Artificial Sequence
  ENSG00000175768_10 (sequence is synthesized)
ttgacatttggtaaatgttattaatggctagtctttggtataaggcatttagaagtgatttgtgctggcattcacagcatagacagatctcattcctatttccagatgctctgagatagc

SEQ ID NO: 608448 - DNA, 120 bp, Artificial Sequence
  ENSG00000175768_11 (sequence is synthesized)
atactcatcctctaattgtgtacaaacttcaaacttaccaaacacttaagttcattatctaaaaatagccttaaccaatcaataataatgccattttacaggtggagaggttgagactgc

SEQ ID NO: 608449 - DNA, 120 bp, Artificial Sequence
  ENSG00000175768_12 (sequence is synthesized)
aagtttcagtggccaatgagtagcagctggccaaggcctaggggactttttttttttttttcatttaaaaaaattatttctagtcagtctgtgcttatccaggggacttttaatgtttat

SEQ ID NO: 608450 - DNA, 120 bp, Artificial Sequence
  ENSG00000175768_13 (sequence is synthesized)
ttattccttgtaccccatccttacatgcttttcttggaggaaaatagtgtaattgttaccctggattctagtgtatgttcaggctggagtaagagaaaatgtgatggttcagtttttgtg

SEQ ID NO: 608451 - DNA, 120 bp, Artificial Sequence
  ENSG00000175768_14 (sequence is synthesized)
accagctttttaactttcaggccataaacgccacagaggggctcaatacttggaataagcagttctaaaatagtacattaagaaacagttggggagatatatacagtttgtttgtttgaa

SEQ ID NO: 608452 - DNA, 120 bp, Artificial Sequence
  ENSG00000175768_15 (sequence is synthesized)
agaaatggggatagtgaaaaatgtttattctccacaaacaggttaccagcttagtaggaatgctgctcctaagttaaggtagtgtacttcctgctgtcagtgcaacattaaaaaaaaaaa

SEQ ID NO: 608453 - DNA, 120 bp, Artificial Sequence
  ENSG00000175768_16 (sequence is synthesized)
ctgctttatcattgctctttatagttcttctgtggagtaagttagcattacagttaacatgttcagcagttcacaggctggaaaatttgggcctacatttggaatgaagaacaagtacag

SEQ ID NO: 608454 - DNA, 120 bp, Artificial Sequence
  ENSG00000175768_17 (sequence is synthesized)
gaatcaggacttcttgttctcttccccctctttgcttgagctaagcttgtctcttacaagatccaggcaccattctttttactctattttgcttttatagcttgatcatgtcataaattc

SEQ ID NO: 608455 - DNA, 120 bp, Artificial Sequence
  ENSG00000175768_18 (sequence is synthesized)
tgcatgtagctcagtcgtcaagccactaaagcaggggttggcaagctttctgttaggggcaaatggtaaatattttaggctttgtgggctcttacgatctctcagctgccaactgcagtt

SEQ ID NO: 608456 - DNA, 120 bp, Artificial Sequence
  ENSG00000175768_19 (sequence is synthesized)
ggtagtatgaaagcagccagggacaatatgcaaatgagtgggtgtggctgtgtcccaataaaactttatttacagaaaagatggctggccggatttgtcctacaggacaccttctaaagt

SEQ ID NO: 608457 - DNA, 120 bp, Artificial Sequence
  ENSG00000175768_20 (sequence is synthesized)
aaagagtaaaatttggctaagtgtgaaatggtcaccaaatcacttttattactttaaagatgttcattttatcatagatcaaagccctgagattacaaattcattcatcagcgttactga

SEQ ID NO: 608458 - DNA, 120 bp, Artificial Sequence
  ENSG00000175768_21 (sequence is synthesized)
gttcctgctatgtgccaggcactgtgctaggagttgaggatatggacgggcagggggactgcctttttgaggtctataatctgccataagatgccatgtgagtaaatatctcaaagacct

SEQ ID NO: 608459 - DNA, 120 bp, Artificial Sequence
  ENSG00000175768_22 (sequence is synthesized)
gaaaaccttgctggaggctcagagagaacttacctgaaaacatgacatttaaaggaacctgaagggataggtccaggttatctagggtgactaggtaaagggagggtcaggcaaagatca

SEQ ID NO: 608460 - DNA, 120 bp, Artificial Sequence
  ENSG00000175768_23 (sequence is synthesized)
tgttgatcaaggtggggagttcagaattgtccacttaaaacaatattggatgcaatatgggtactgtatttgaaggagaggtcagaggggtatatgagcagctcagcatttatttagata

SEQ ID NO: 608461 - DNA, 120 bp, Artificial Sequence
  ENSG00000175768_24 (sequence is synthesized)
cgtgtagtgaggaaagaaaggcatcaaagaagactccctgatttctggtttaagtgcagggttgacggtgccattcgctgaagtaaggaacaagtttcaaggggaaaataatgggttcga

SEQ ID NO: 608462 - DNA, 120 bp, Artificial Sequence
  ENSG00000175768_25 (sequence is synthesized)
ttttgagcctgggaggcagtagggaggactcccttaggaagagacacataaagtaaggtttgggtgaataggaattggccagatagagcggggcatctttgaaaaagtgttaaagcagat

SEQ ID NO: 608463 - DNA, 120 bp, Artificial Sequence
  ENSG00000175768_26 (sequence is synthesized)
gtatttgaggaagaaagaccagtgtgactgaagtgtgttgtgcacagaagagcaagaaagcctcagtccttccagaaactcctgttatttattgtgttttcatacttgagtcttaagaga

SEQ ID NO: 608464 - DNA, 120 bp, Artificial Sequence
  ENSG00000175768_27 (sequence is synthesized)
ttccattctgacatctgctggctattgtgtatactgcagttccaaattccactacacaagaacaacctttaataacgtattttttgaaatttgtcataataaatttgagataaaacacaa

SEQ ID NO: 608465 - DNA, 120 bp, Artificial Sequence
  ENSG00000175768_28 (sequence is synthesized)
gacgggcaccccttaactctaaggggtcatcggggccttcgaactgagctgaacggtagcggggagcaaggaggctccatttatcttaaagaaattggacagcatatgaagacaggacat

SEQ ID NO: 608466 - DNA, 120 bp, Artificial Sequence
  ENSG00000175779_0 (sequence is synthesized)
ctgttctgatatggagctacaaggggcccaagaggacctgggcatttccctctctagtccccggaggaaccatgaaaccaggccaggaagcaaggctaagggcaggagcagcatctgtct

SEQ ID NO: 608467 - DNA, 120 bp, Artificial Sequence
  ENSG00000175779_1 (sequence is synthesized)
ccaggcgtctgtttggatggctggaggaaagctgaggctcagagcaagtgaacatctaacccagggccaccaacaagagctcagggattggaatctgggagaagatgcttcccttctctt

SEQ ID NO: 608468 - DNA, 120 bp, Artificial Sequence
  ENSG00000175779_2 (sequence is synthesized)
ctccaagagtccttttggggctggcaagttgatacaagctccagctcatgtcttcagacaatgctgggtccaaggaaatgcatggatctcctgcattacaaagtttgactccaagagaag

SEQ ID NO: 608469 - DNA, 120 bp, Artificial Sequence
  ENSG00000175779_3 (sequence is synthesized)
cccagaagtggcttccagcccctcctacctaactgtgccccgccgttcaccacttcctgtcttcctgcgacccagtgacagatgtgtctgtgggggctgctacttgggaaagtccaccag

SEQ ID NO: 608470 - DNA, 120 bp, Artificial Sequence
  ENSG00000175779_4 (sequence is synthesized)
gaggagagcatgccaatctctcctctcagatcctctgggggttactttccccacccaaactaggccttgatgtcaaggcctagttacagggatgtcaaactaggaggttgatgtcggtgt

SEQ ID NO: 608471 - DNA, 120 bp, Artificial Sequence
  ENSG00000175779_5 (sequence is synthesized)
ggtgtgtaagatgttggggagaagctgcaggtgccttcttaccagctcttcctgaaaacttgtctctccctctccttgttagtctgttttataactcacactccagccggggggaagtaa

SEQ ID NO: 608472 - DNA, 120 bp, Artificial Sequence
  ENSG00000175779_6 (sequence is synthesized)
aggagcttatcccgttcacagatcctgtaacccatggtggttattacctcatagctggtgcagtgttctttgagcctagcagtttggtttagactcaagtgtctattctttgcagtcttt

SEQ ID NO: 608473 - DNA, 120 bp, Artificial Sequence
  ENSG00000175779_7 (sequence is synthesized)
ctggggttggtagcagagaaagagaagagaacaggtaattcgatcactcaggttattcgtgtgtaaaagttgaagccctaccacaaacgtatgagtggatgttatagtgtaataacctgg

SEQ ID NO: 608474 - DNA, 120 bp, Artificial Sequence
  ENSG00000175779_8 (sequence is synthesized)
ttgccaagacagcttcctcagggcttttgtttcctcaagcctacctgaaggctctcttctcagtcacgggggatggaattgtttcatccctggcttgctctgggcctcagtttccctatt

SEQ ID NO: 608475 - DNA, 120 bp, Artificial Sequence
  ENSG00000175779_9 (sequence is synthesized)
ccaggatagtttccctattccctattctgcatcataaaaaaaaaaatacactcctgatagaagtcggttgatgcttttggcctgcagcctccttaaggttaatagtccacataatttcct

SEQ ID NO: 608476 - DNA, 120 bp, Artificial Sequence
  ENSG00000175779_10 (sequence is synthesized)
caggggccctggctggcctgttgtgggtgtacccatgaagtatcttgatttgctatgataggagccaccttggcttcctgtggagataagccctgcccctcgttcccactttaagcttga

SEQ ID NO: 608477 - DNA, 120 bp, Artificial Sequence
  ENSG00000175779_11 (sequence is synthesized)
aaagtcccttatccaactttggaatgggaactagaaagactaagcagtgtctctcaggggttccttctggggtcactcagaagaggagaaccaagcagtcttggcggagagacacctgaa

SEQ ID NO: 608478 - DNA, 120 bp, Artificial Sequence
  ENSG00000175779_12 (sequence is synthesized)
gttggtcactcggcacattaccaggggctcagcaatgaccagcctgcaaccatcctgcctttccccaggggtctgggctccagccatggagggtggactggagactcctttgcctttcaa

SEQ ID NO: 608479 - DNA, 120 bp, Artificial Sequence
  ENSG00000175779_13 (sequence is synthesized)
cactgtctggcctgtctcgggtccggcacgtcttttctctactgattttgtggctgtggttaacttagctaacctttcagtgaaataatgtctagtggcattcctttacattttccatgt

SEQ ID NO: 608480 - DNA, 120 bp, Artificial Sequence
  ENSG00000175779_14 (sequence is synthesized)
gctgttttttccataactccattttcttcagggctgagtttgggtcttcatttttccacccacaggcctagttaagcttggtcttgtgctccaacttacctgccccagacttcttggatg

SEQ ID NO: 608481 - DNA, 120 bp, Artificial Sequence
  ENSG00000175779_15 (sequence is synthesized)
gacattgtcaatctggtcatattgagagtgaaactgccacctagtggtcactggaggtgtgcctgccttttcatgagctctcttgctgctggttaccggaaacatcagttgatggttttc

SEQ ID NO: 608482 - DNA, 120 bp, Artificial Sequence
  ENSG00000175779_16 (sequence is synthesized)
ttctaagctaactcagaagctgtgatgtgaatcagaccaaacaatttatctgcttcaaatccatattgtaaagaggtttaatataaagacatattttcaaatcaaaataaataatgaagc

SEQ ID NO: 608483 - DNA, 120 bp, Artificial Sequence
  ENSG00000175779_17 (sequence is synthesized)
ttttttagaagtgaaatcaggttacgaagagcactaaggcagctttgaaggggaagtcctgagagaacaggctgcagcttcggggtggagacaccagacctgaaatgaatgctagaggct

SEQ ID NO: 608484 - DNA, 120 bp, Artificial Sequence
  ENSG00000175779_18 (sequence is synthesized)
ggctgagttgcaacaaaagagcagggaatcttttaatagtgaatgtcaataggcagcaggccatctccatgccttctgccctctttgtctttacaaacaccataaggcgcatcctttgat

SEQ ID NO: 608485 - DNA, 120 bp, Artificial Sequence
  ENSG00000175779_19 (sequence is synthesized)
aaggtcatcaaaaacaaggcatgctgtgttttcttaaccttctccatggctgtcttggcctggccctctggactgctccaactttgctgttcattgtgatcattggatctatctgatttt

SEQ ID NO: 608486 - DNA, 120 bp, Artificial Sequence
  ENSG00000175779_20 (sequence is synthesized)
tgacagctacacatcatcatctgtcctctattccccctacccccactgggtagcagggtgattgtgatcatctctattgctatcagttagcttagttctgtgttctgtgatcaccttttc

SEQ ID NO: 608487 - DNA, 120 bp, Artificial Sequence
  ENSG00000175779_21 (sequence is synthesized)
agtgtgcgtcagggctcagcaccactgcctaaaagatatgctgacttctagctctgggcatgtgaagataaggcgttgtctgtctctctctgctggacgttctatctaagcagcgtggat

SEQ ID NO: 608488 - DNA, 120 bp, Artificial Sequence
  ENSG00000175779_22 (sequence is synthesized)
tctaagcagcgtggatgttgacaaggctcctggaaggacaagagaagataacatcactattgtaaaacctcagattggtgctcaagatagttttcagaccctgcacttgatggatcagct

SEQ ID NO: 608489 - DNA, 120 bp, Artificial Sequence
  ENSG00000175779_23 (sequence is synthesized)
acacactggctcacctggtcttgtggcccccacccaggaaatgactcagcacaagaggacagctttgactccctgtgatttcatctcagacccaaccagtcagctctccctactacttgg

SEQ ID NO: 608490 - DNA, 120 bp, Artificial Sequence
  ENSG00000175779_24 (sequence is synthesized)
ccccctacccaccaaattatccttaaaaaaccccagcctctaaattttgggggtgactgttttgagtaataataaaactctggtatcccattgagccagctctgcatgaattagttaact

SEQ ID NO: 608491 - DNA, 120 bp, Artificial Sequence
  ENSG00000175779_25 (sequence is synthesized)
gtttctctcttgcagttcctctgtcttgataaatcagcctgtctgggcagtgggcaaaatgaacccccaacaggaggatttcaaatgtaaagaagacacttgggctgagatatccggctg

SEQ ID NO: 608492 - DNA, 120 bp, Artificial Sequence
  ENSG00000175779_26 (sequence is synthesized)
atccgaactccaacatgaagcatcctttctgctttagattgacccccaaagagtgaaggactaggaagccaaaagtgtcacacggtcaaaaatgcttccatctactggtgaaactcagga

SEQ ID NO: 608493 - DNA, 120 bp, Artificial Sequence
  ENSG00000175779_27 (sequence is synthesized)
atacactaacatttccctgcctgaaatggttagttgaggacacaaagcaacccaaagcgagcggagcttggccatggagctcagaaattcaaaatagtcagttcttgctgatggtgaaga

SEQ ID NO: 608494 - DNA, 120 bp, Artificial Sequence
  ENSG00000175779_28 (sequence is synthesized)
gttgcgaagactttctgatgaagacatgctcaccaaccgagaaaagtccttcccagcaaaggtatgctgttcaatgtttaataaccagctcttcatggagacggggaagtcctgatctgc

SEQ ID NO: 608495 - DNA, 120 bp, Artificial Sequence
  ENSG00000175779_29 (sequence is synthesized)
agtaaacagacaaaccacagagtgggagaaaatattaacaaattatgaacctgacgaaggactaatatccagaatctaccagaaactcaaatcagcaagaaaaaaaaaacaaccccatca

SEQ ID NO: 608496 - DNA, 120 bp, Artificial Sequence
  ENSG00000175779_30 (sequence is synthesized)
caccttactcctgcaagaatggtcataatttaaaaattaaaaagtaatagatgttggcatggatgtgatgaaaagggaacacttttatgcgctggtgggaatgtaaactagtacagccat

SEQ ID NO: 608497 - DNA, 120 bp, Artificial Sequence
  ENSG00000175779_31 (sequence is synthesized)
taaaagtagaactaccattggatccagcaatcccactactgagtatctacctaagggaaagaagtcattatatgaaaaaaacacttgcacacgcatgtttatagcagcacatttcacaat

SEQ ID NO: 608498 - DNA, 120 bp, Artificial Sequence
  ENSG00000175779_32 (sequence is synthesized)
caatgagtggataaagaaaatgtggtatctatacaccattgaatactactcagcataaaagggaatgaaataatggcatctgcagcaatctagatggagttggagaccatttttctaagg

SEQ ID NO: 608499 - DNA, 120 bp, Artificial Sequence
  ENSG00000175779_33 (sequence is synthesized)
catctgcagcaatctagatggagttggagaccatttttctaaggaaagtaactcagggatggaaaaccaaatattttatgtttttacttgcaagtgggagctaagctatgaggatgcaaa

SEQ ID NO: 608500 - DNA, 120 bp, Artificial Sequence
  ENSG00000175779_34 (sequence is synthesized)
aatgatacaatggacttcgggtactcagggggaagggtgggagaggggtgaggaataaaagactacacattggttatagtgtatactgcttgggtgacaggtgcaccaacatctcagaaa

SEQ ID NO: 608501 - DNA, 120 bp, Artificial Sequence
  ENSG00000175779_35 (sequence is synthesized)
tcaccactaaagaacttatccatggaactaaaaaccacctgttccccaaaaactgttgaaataaaaataaactgtctagcattaatttttctgtgtaggaaaaaataaagtcttttaatg

SEQ ID NO: 608502 - DNA, 120 bp, Artificial Sequence
  ENSG00000175779_36 (sequence is synthesized)
gttgacaaggctcctggaaggacaagagaagatgttcattgagtcactgttaccaaatattggcccctggaaatctcatagtgtaattaaaaagatgaagaaggaaacagatactctgtg

SEQ ID NO: 608503 - DNA, 120 bp, Artificial Sequence
  ENSG00000175779_37 (sequence is synthesized)
agatactctgtggtgtcatggagaatttgttaaagacttttaattgagagatgcggtcttgctgtgttgtctgggctgttctggaacttctggcctcaagcaattctcctgcctcagcct

SEQ ID NO: 608504 - DNA, 120 bp, Artificial Sequence
  ENSG00000175779_38 (sequence is synthesized)
acctggcaagagcccagccaagatgaaccaacttgcctacacaaccacccccgcctcggcatgtgatgttcccctccctgtgtgcatgtgttctcactggagggaacatatattttttcg

SEQ ID NO: 608505 - DNA, 120 bp, Artificial Sequence
  ENSG00000175779_39 (sequence is synthesized)
agtcaccattcaataattcattacacggactatgaaaaatcaagtgaccatgtgatctgggctccccgtagcaaactggatgtcatctgacccactactcataaaggcactacttcttcc

SEQ ID NO: 608506 - DNA, 89 bp, Artificial Sequence
  ENSG00000175779_40 (sequence is synthesized)
cccgtgcagaactgtgagtcaattaaacccctttccttcataaattacacagtctcaggcagtactttatagcagcgtgagaatggatt

SEQ ID NO: 608507 - DNA, 120 bp, Artificial Sequence
  ENSG00000175779_41 (sequence is synthesized)
cagtctcaggcagtactttatagcagcgtgagaatggattaatacactatcccaggggtatctcagtgttgaacttcatgcagttagatcttgtatctccactgagctgcttgagggcct

SEQ ID NO: 608508 - DNA, 120 bp, Artificial Sequence
  ENSG00000175779_42 (sequence is synthesized)
gacctacatctctggcttctccagattagcctgctgaatgttgtaaagaattagaaacatggaaagcacttaaatacccttcacgttggtggcaaattggggtttaggttttaaaagtga

SEQ ID NO: 608509 - DNA, 120 bp, Artificial Sequence
  ENSG00000175779_43 (sequence is synthesized)
cgaatgctaccatgattcacagtaaaaataagacgatagaaggaagcaagctgcctgagctgtctctttcttatgggaaaaatgctccctgcactcttctgagtctctttaaaggaaaaa

SEQ ID NO: 608510 - DNA, 120 bp, Artificial Sequence
  ENSG00000175779_44 (sequence is synthesized)
cccattgttaatgcttcctgtatgcctgcagttggtgcacatcttgaccctctgcagccctgtttgatggatgcaatgtactgagcttggtgcatcatgccccagaactgggaaagggaa

SEQ ID NO: 608511 - DNA, 120 bp, Artificial Sequence
  ENSG00000175779_45 (sequence is synthesized)
atgagcagttggccacctcctgatgtctgtaggtgtctggaaatgcaggcatctagaactgctggcaggactctctgaaggcttgactgattcctacaagtaagcagctggagatgtaat

SEQ ID NO: 608512 - DNA, 120 bp, Artificial Sequence
  ENSG00000175779_46 (sequence is synthesized)
tattacattgtcattttattatttcattgtggtaagagcacttaacatgagatctagcctcttaacacatgatatgtcattgttgactataggtacaatgttgtgtagaagatccctaga

SEQ ID NO: 608513 - DNA, 120 bp, Artificial Sequence
  ENSG00000175779_47 (sequence is synthesized)
gcttattcatcttacttgactgaatctttacgccctttggttagtatctccccatttgttcctccttccagccctggaaaactaccattccactctttgattctatgaatttgactatct

SEQ ID NO: 608514 - DNA, 120 bp, Artificial Sequence
  ENSG00000175779_48 (sequence is synthesized)
ttgatacctcatagaagtagaataaagaagtatttgtttttctgcagctggcttgtttcacttagcataatgaccttggggttacatcgatgttgttatatatgttaggattttcttcct

SEQ ID NO: 608515 - DNA, 120 bp, Artificial Sequence
  ENSG00000175779_49 (sequence is synthesized)
ttttaaggctgaatagtgttccatcatatgtatataccacactttttatccacttatctgttgatagatatttaggttgttcttacaatacaatagtaagaaaaaaaacagctaataacc

SEQ ID NO: 608516 - DNA, 120 bp, Artificial Sequence
  ENSG00000175779_50 (sequence is synthesized)
caattaaaagtggtctaaagacttgaataggcatttctccaaataagacatacaaataatcaacaggtttatgaaaaaatgctcaatgtcactaatccttagagaaatgcaaataaaacc

SEQ ID NO: 608517 - DNA, 120 bp, Artificial Sequence
  ENSG00000175779_51 (sequence is synthesized)
acaataagatatcacctcccatctgttagaatggatattatgtattacacaaaaacaaaagataataagtgttggcaagtattggatatatagaaattgaaacttttgcacactgttggt

SEQ ID NO: 608518 - DNA, 120 bp, Artificial Sequence
  ENSG00000175779_52 (sequence is synthesized)
ggacatgcaaaaagacacagttgctatgtaaaaaaatatatagaagtttctaaaaaaaatttaaaaatagaattacatgatccagcaatcccatttctgggtatttatccaaaaaaaaaa

SEQ ID NO: 608519 - DNA, 120 bp, Artificial Sequence
  ENSG00000175779_53 (sequence is synthesized)
agataaggcgttgtctgtctctctctgctggacgttctatctaagcagcgtggatgttgacaaggctcctggaaggacaagagaagttcctctgtcttgataaatcagcctgtctgggca

SEQ ID NO: 608520 - DNA, 87 bp, Artificial Sequence
  ENSG00000175779_54 (sequence is synthesized)
atgtaaaggcactacttcttcctgctgccatgtgaagaaagacctgtttgcttcccctttcatcatgattgctggaccacctcccgg

SEQ ID NO: 608521 - DNA, 120 bp, Artificial Sequence
  ENSG00000175779_55 (sequence is synthesized)
acagcatgttttttagaagtgaaatcaggttacgaagagcactaaggcagctttgaaggggaagtcctgagagaacaggctgcagcttcggggtataacatcactattgtaaaacctcag

SEQ ID NO: 608522 - DNA, 120 bp, Artificial Sequence
  ENSG00000175779_56 (sequence is synthesized)
gggcatgtgaagataaggcgttgtctgtctctctctgctggacgttctatctaagcagcgtggatgttgacaaggctcctggaaggacaagagaaggcactacttcttcctgctgccatg

SEQ ID NO: 608523 - DNA, 120 bp, Artificial Sequence
  ENSG00000175779_57 (sequence is synthesized)
tgaagaaagacctgtttgcttcccctttcatcatgattaaacctctacatggatcccttgcatgggtgttgtacaatgggagctttcattcctgctttggcacctgcaaccctgggttaa

SEQ ID NO: 608524 - DNA, 120 bp, Artificial Sequence
  ENSG00000175779_58 (sequence is synthesized)
cagtaccatggagcggagaaagcgtttaccagagtgcggtgccgcgatcccaccccgtgcagcagttgagcagaggtcatctttaagtaaaagccatctgatattttactgcaagcatgt

SEQ ID NO: 608525 - DNA, 120 bp, Artificial Sequence
  ENSG00000175779_59 (sequence is synthesized)
ggcagtgaagacgacaatgactgctagtatggtttgtgccactgccttgatttccgctcaggcaccagcagtcttacccaccattgctttggtgcagttggtggagatatcaatggatca

SEQ ID NO: 608526 - DNA, 120 bp, Artificial Sequence
  ENSG00000175779_60 (sequence is synthesized)
aaagcgcaagtaatatgagaggccaggaatcaaccaaaagagcaagaaaagaagccactacagtaatgagcttcggctgcctgcacctcttccagccacaaaggaaaaaaaaatgagaaa

SEQ ID NO: 608527 - DNA, 120 bp, Artificial Sequence
  ENSG00000175779_61 (sequence is synthesized)
gctgcctctattctacttcttttcaaagctgcccaactgttaatattttagtaagtaagaagcagtgtctaaattctcattcaagttctcccatccattgagttaataatctaaattata

SEQ ID NO: 608528 - DNA, 120 bp, Artificial Sequence
  ENSG00000175779_62 (sequence is synthesized)
agaatatttatttttcacaggattaagtaaacttttacttaatgtaaaaacatggctcataaacatttgtattcttcccaaactaatccatatgccaacatgcttatctttcttccctgg

SEQ ID NO: 608529 - DNA, 120 bp, Artificial Sequence
  ENSG00000175779_63 (sequence is synthesized)
tttttccatgtggtagctcaaatatggttcttccacctcaatctcaagctctccagactgcagacatcttatctacacatcaaactagcatttattttaccaagggcattgcttcccctt

SEQ ID NO: 608530 - DNA, 120 bp, Artificial Sequence
  ENSG00000175779_64 (sequence is synthesized)
ttctatcccttatttcaacagacaggagaagaatatccagataaaggtctccaggcaaacacactagagaacctgtaaaagactctgaggatgtttgacgccttgagtctctacactgat

SEQ ID NO: 608531 - DNA, 120 bp, Artificial Sequence
  ENSG00000175779_65 (sequence is synthesized)
gccatcatcttacttcctaatctctgatcttttccaggactcggctccctatgcccagtaaatataaattttcagaactgtgatcacagccctggctaaatagtgcccctggtcaaacct

SEQ ID NO: 608532 - DNA, 120 bp, Artificial Sequence
  ENSG00000175779_66 (sequence is synthesized)
tcgtaggcaaaatgttttctccagctttctgctagttcttagaagccagtgtgaaggaaaagggatgtcatgaagcatcactctccaagctgatcatctattccattgccttgagaatta

SEQ ID NO: 608533 - DNA, 120 bp, Artificial Sequence
  ENSG00000175779_67 (sequence is synthesized)
tgtagaataaaatcactgtctccctaaatgataaaagtctaagactttgtcccaaagttgggtgttctctgaggaattgctggagacactattgccccctgtggctaggtaagctttcca

SEQ ID NO: 608534 - DNA, 120 bp, Artificial Sequence
  ENSG00000175779_68 (sequence is synthesized)
gacacaatccaagggaaggaaatgcctttggtgaaggaggagagactcctacgtggcatggggaccagcagctgagagtggttgtatgggtaattcacaccaaaagcactccaaatgcta

SEQ ID NO: 608535 - DNA, 120 bp, Artificial Sequence
  ENSG00000175779_69 (sequence is synthesized)
ctttcatctaaatggactataagggttgtcatcaggccagggagatgtagatatttcaaatctgaatttcacagtattagcattacatcaagccaaaaagattaagaaagtaaatgactg

SEQ ID NO: 608536 - DNA, 120 bp, Artificial Sequence
  ENSG00000175779_70 (sequence is synthesized)
taatttgtctaaagcagaatgtttgctaaaaccaggcaggtctctaaaaaaaaaaaaaaagagacagcagttgaaattattttgtaaatgttaattgtataatttacattaaactctttc

SEQ ID NO: 608537 - DNA, 120 bp, Artificial Sequence
  ENSG00000175782_0 (sequence is synthesized)
gtcctagctggcttacagggcggcggcggggtgtgtgtcctctgttaagagtgctactcgcccggggttgatctgtgcatgccactcctgggtcagacggtgaggtcggcgtctgcgagg

SEQ ID NO: 608538 - DNA, 120 bp, Artificial Sequence
  ENSG00000175782_1 (sequence is synthesized)
acgcggcggtggagtagaagggcagccggagacaggcccggcgccccttccgaggctagacggccccagcttcgcggggatcatggcattgctggtggaccgagtgcggggccactggcg

SEQ ID NO: 608539 - DNA, 120 bp, Artificial Sequence
  ENSG00000175782_2 (sequence is synthesized)
aatcgccgccgggctcctgttcaacctgctggtgtccatctgcattgtgttcctcaacaaatggatttatgtgtaccacggcttccccaacatgagcctgaccctggtgcacttcgtggt

SEQ ID NO: 608540 - DNA, 120 bp, Artificial Sequence
  ENSG00000175782_3 (sequence is synthesized)
cacctggctgggcttgtatatctgccagaagctggacatctttgcccccaaaagtctgccgccctccaggctcctcctcctggccctcagcttctgtggctttgtggtcttcactaacct

SEQ ID NO: 608541 - DNA, 120 bp, Artificial Sequence
  ENSG00000175782_4 (sequence is synthesized)
ttctctgcagaacaacaccataggcacctatcagctggccaaggccatgaccacgccggtgatcatagccatccagaccttctgctaccagaaaaccttctccaccagaatccagctcac

SEQ ID NO: 608542 - DNA, 120 bp, Artificial Sequence
  ENSG00000175782_5 (sequence is synthesized)
gctgattcctataactttaggtgtaatcctaaattcttattacgatgtgaagtttaatttccttggaatggtgtttgctgctcttggtgttttagttacatccctttatcaagtgtgggt

SEQ ID NO: 608543 - DNA, 120 bp, Artificial Sequence
  ENSG00000175782_6 (sequence is synthesized)
aggagccaaacagcatgaattacaagtgaactcaatgcagctgctgtactaccaggctccgatgtcatctgccatgttgctggttgctgtgcccttctttgagccagtgtttggagaagg

SEQ ID NO: 608544 - DNA, 120 bp, Artificial Sequence
  ENSG00000175782_7 (sequence is synthesized)
aggaatatttggtccctggtcagtttctgctttgcttatggtgctgctatctggagtaatagctttcatggtgaacttatcaatttattggatcattgggaacacttcacctgtcaccta

SEQ ID NO: 608545 - DNA, 120 bp, Artificial Sequence
  ENSG00000175782_8 (sequence is synthesized)
taacatgttcggacacttcaagttctgcattactttattcggaggatatgttttatttaaggatccactgtccattaatcaggcccttggcattttatgtacattatttggcattctcgc

SEQ ID NO: 608546 - DNA, 120 bp, Artificial Sequence
  ENSG00000175782_9 (sequence is synthesized)
ctatacccactttaagctcagtgaacaggaaggaagtaggagtaaactggcacaacgtccttaattgggtttttgtggagaaaagaatgttgtcccaagaagataaaaaatattgttaag

SEQ ID NO: 608547 - DNA, 78 bp, Artificial Sequence
  ENSG00000175782_10 (sequence is synthesized)
ttggtgacagactcaatgatggaatgatttgtcggaattaacacaaagcagattttattcatataatgactttttttt

SEQ ID NO: 608548 - DNA, 120 bp, Artificial Sequence
  ENSG00000175782_11 (sequence is synthesized)
taacacaaagcagattttattcatataatgacttttttttaagagtctcttttttaaaaaaacttaattctctaaaaccgaaatggttcatgcttctttttaaaaatgattgtataaaat

SEQ ID NO: 608549 - DNA, 71 bp, Artificial Sequence
  ENSG00000175782_12 (sequence is synthesized)
aaatggttcatgcttctttttaaaaatgattgtataaaatgtatggaatggttagccttgagaatcgcttg

SEQ ID NO: 608550 - DNA, 63 bp, Artificial Sequence
  ENSG00000175782_13 (sequence is synthesized)
tctctctctctctctcccatatatacacatatatacacacacacatacatatacatgtgtata

SEQ ID NO: 608551 - DNA, 120 bp, Artificial Sequence
  ENSG00000175782_14 (sequence is synthesized)
catatatacacacacacatacatatacatgtgtatatatataccatcccatatatatgtgggatatatatatatatatatatggatatggttatatatatgggatggtttggttggtccc

SEQ ID NO: 608552 - DNA, 120 bp, Artificial Sequence
  ENSG00000175782_15 (sequence is synthesized)
agcaaagtatatgaaaattaaagttctgtgataatgacaaaggaattgctgttactgtactgcaaatatgctgtgggttctcggtgttcaaactcttctaaggaaggacacacagtagct

SEQ ID NO: 608553 - DNA, 120 bp, Artificial Sequence
  ENSG00000175782_16 (sequence is synthesized)
ctctgcttgctgatagatggtttcccagtgtgagatttgttattttgatcagagtattcaaatcagaatttaaatctagtgtttctattttagtttagcttcctgatttatataaatgaa

SEQ ID NO: 608554 - DNA, 120 bp, Artificial Sequence
  ENSG00000175782_17 (sequence is synthesized)
tataaagtataataaagatgactgtaagacaaaatccaattctaaaagtatgatttttttctagtagaaaattgatgtaagaaatcatacattattcatacatttataggtcatctcttt

SEQ ID NO: 608555 - DNA, 120 bp, Artificial Sequence
  ENSG00000175782_18 (sequence is synthesized)
tcatacattattcatacatttataggtcatctctttgagttttcagtgaactatagaaactatatggagttaaaaaacaaaacggcagccaatctcagtggctcacacctgtaatcccag

SEQ ID NO: 608556 - DNA, 120 bp, Artificial Sequence
  ENSG00000175782_19 (sequence is synthesized)
gccctatgtttaaatggctcaaagaaaagactataaatggaattgaacatgtttgttagctgtttgagcattttatattggtaaattttttattttcttattttttgtcttacagtcgac

SEQ ID NO: 608557 - DNA, 70 bp, Artificial Sequence
  ENSG00000175782_20 (sequence is synthesized)
ctcagctacaggtgcacaccaacatacctggctgatttttatattttttgtagagacagagttttgccat

SEQ ID NO: 608558 - DNA, 86 bp, Artificial Sequence
  ENSG00000175782_21 (sequence is synthesized)
atttttatcaggctgatctcaaactcttgagctcaagccatctgtctgcctcagcctctcgaagtgctgggattacaggcctgagc

SEQ ID NO: 608559 - DNA, 120 bp, Artificial Sequence
  ENSG00000175782_22 (sequence is synthesized)
gagccaccacacctggccagtaatttcttaatcctacctccctgcttctattgcctagcccgtacatttgaggcttccatggagctttctgtggtactgaaacacttggagtgaactgca

SEQ ID NO: 608560 - DNA, 120 bp, Artificial Sequence
  ENSG00000175782_23 (sequence is synthesized)
aacttggagtgaactacatccaacctttctaaggtggctggggaaaattcttgtacagcaagttgggacaaaatagccatatagaaacagccatataagatcccaatatagaaaaattgg

SEQ ID NO: 608561 - DNA, 120 bp, Artificial Sequence
  ENSG00000175782_24 (sequence is synthesized)
gatattagaggaaatacatgatttccatttatggagtgctacatgtttgcaaaatgtatttctgcttttcatcttcttgacatctgaatattaaaagcagttgttgataatttcatataa

SEQ ID NO: 608562 - DNA, 120 bp, Artificial Sequence
  ENSG00000175782_25 (sequence is synthesized)
taaattgagacatatcattactcttgtaataattcattttctaaatgttatttatcaactttcatggagaaaacaactcttaggagaacaaagaccagcccgggcaacatggcaaaaccc

SEQ ID NO: 608563 - DNA, 120 bp, Artificial Sequence
  ENSG00000175782_26 (sequence is synthesized)
agaacaaagaccagcccgggcaacatggcaaaaccctgtctgcaaaaaatacaaaaattagccgggcctagtggcacgtgcctgtagctccatctactcaggaggctgaggtgggaggat

SEQ ID NO: 608564 - DNA, 120 bp, Artificial Sequence
  ENSG00000175782_27 (sequence is synthesized)
ccactgcacttcagcctgggcgacagactggactctgtctcgggaaaaaaaaaaaaaaaaaaagggaagagcgacaaaatataccttttgataagacagtaaattttatgttttgtgttt

SEQ ID NO: 608565 - DNA, 120 bp, Artificial Sequence
  ENSG00000175782_28 (sequence is synthesized)
ttgtgttttttaacacaataaaaatatatatacacacatataatatacctttggggtttttaggatttttttttcctggactctgaaatgagaagcctcgctgaaaatctgttttggaga

SEQ ID NO: 608566 - DNA, 120 bp, Artificial Sequence
  ENSG00000175782_29 (sequence is synthesized)
attccagtttgtcagtcagtctcttgtgtaattagtacgtgtggcttccttctttgttttaaatattctttggttcttctcattttacaaagatatatattttttgtgctaaggacagag

SEQ ID NO: 608567 - DNA, 120 bp, Artificial Sequence
  ENSG00000175782_30 (sequence is synthesized)
caattagtttttaccagataagcctcgggtattatgtttgtctaagaaacattctctgtgtatgtttaaattgtaattatttcccaaaagctgaggaaaatgtttcagcacagtgaggat

SEQ ID NO: 608568 - DNA, 120 bp, Artificial Sequence
  ENSG00000175782_31 (sequence is synthesized)
gaggaaaatgtttcagcacagtgaggatttgacgtctgcactgagaacagctgagtttatttgtgccatttagaaattcgtaactgtaggctgggcgcagtggcttacgcctataatccc

SEQ ID NO: 608569 - DNA, 90 bp, Artificial Sequence
  ENSG00000175782_32 (sequence is synthesized)
aggttgcagtgagccgagactgcgccattgcacaccagcctgggtgacgaaaaaaagaaatttttaaccgtaaatagaacttggggaggg

SEQ ID NO: 608570 - DNA, 120 bp, Artificial Sequence
  ENSG00000175782_33 (sequence is synthesized)
aagaaatttttaaccgtaaatagaacttggggagggtgttatataatatatgtgtcagtaggaaggcagtaagaagattggagtaagacaggatggggttacatgtatataaatgaataa

SEQ ID NO: 608571 - DNA, 120 bp, Artificial Sequence
  ENSG00000175782_34 (sequence is synthesized)
aataagtactgctaaaacttgagtctgataaacttttttgccccgaagataatcatcccactgaaaagaaaactctggggaaaatatgccagatactaggaccaagcacggagacaaacc

SEQ ID NO: 608572 - DNA, 120 bp, Artificial Sequence
  ENSG00000175782_35 (sequence is synthesized)
agatacagtgctttcaaagaaaacatgcttgctgtcctttgttaccagtgtaattgtaattattgtttattctgtgttaagtgactgaatttcaatttttaccttttaaaaataaagaga

SEQ ID NO: 608573 - DNA, 120 bp, Artificial Sequence
  ENSG00000175782_36 (sequence is synthesized)
acctctttttacttctgtattgcatatgagagctgatggaagaaggatggcatctgtgtaacatatgcatggtaacgctgacgtgttcagctgttcatatttggcctgtccaaataagca

SEQ ID NO: 608574 - DNA, 120 bp, Artificial Sequence
  ENSG00000175782_37 (sequence is synthesized)
gaaatgaatgaaacaaaattccatctccttttagaaataacataaaggagaaatctatctctgtgaaatgaagtaagcattcttctgtttcactttttaaaatacttttaaaatcttgct

SEQ ID NO: 608575 - DNA, 120 bp, Artificial Sequence
  ENSG00000175782_38 (sequence is synthesized)
ctgtttcactttttaaaatacttttaaaatcttgctgttttcaacctattaatgactttttgaaattgtatttcaaagcagaaacattaggttgggtatggtggctcacgcctgtaatcc

SEQ ID NO: 608576 - DNA, 120 bp, Artificial Sequence
  ENSG00000175782_39 (sequence is synthesized)
cagcaacattaatcaagcactctgtattcactccgtcagtaaatactgtcgggtgaatgactgcagaatggccaaaggtgagagtttgattaaaagaaaggagaccttggccgggcacgg

SEQ ID NO: 608577 - DNA, 120 bp, Artificial Sequence
  ENSG00000175782_40 (sequence is synthesized)
ggcaacaagagcaaaactgtctcaaataaataaataataaaagaaaggagaccggatttattagatgtggtccgttttgtctttctgttcccaaacttaaactggattatacctgctaat

SEQ ID NO: 608578 - DNA, 120 bp, Artificial Sequence
  ENSG00000175782_41 (sequence is synthesized)
ctgctaatatcaggaatataatgataattgcattcattcaacaaaaatttattgagcatatactgtgtgccaggtactgtcctaggcattatggatataaaacagtttttatgtagagac

SEQ ID NO: 608579 - DNA, 120 bp, Artificial Sequence
  ENSG00000175782_42 (sequence is synthesized)
agtcctatatttcctgtgatcttaaggaacatttgtctagtattagagataggactaattaaacaaaaacaagacaagaataattaaacagcaaactcaatgaatgctaaagggaacatc

SEQ ID NO: 608580 - DNA, 120 bp, Artificial Sequence
  ENSG00000175782_43 (sequence is synthesized)
gttctgtgagcacataacaaaagaatctggcccaggcttggcacttgtggagggagtccatgaggaaagtttgagctgcagtcatagatacatagaagttagctagctaggcagagggag

SEQ ID NO: 608581 - DNA, 120 bp, Artificial Sequence
  ENSG00000175782_44 (sequence is synthesized)
ggtattgcattctggaaagagggaatagcacatacaaatgcctagtggttggaggaattgtgatgcttttaaagaactgtaaaaaggatggagtctggagactaaatttgggagtgggga

SEQ ID NO: 608582 - DNA, 120 bp, Artificial Sequence
  ENSG00000175782_45 (sequence is synthesized)
gacatggtgtgtcctgcacctggaaatgtagatagacctcaggccatacaatacctggaggctatggtaagcatctttagtaagagcaagggggagtgttgtgagcactgtcacagtaaa

SEQ ID NO: 608583 - DNA, 120 bp, Artificial Sequence
  ENSG00000175782_46 (sequence is synthesized)
tttctttttttgaaattagtggaggagaaccagagagatgccaggagaccagttagttgggagatgactgtagttagagatggtggtagcttcaaaggtagtggaatgagataagtggaa

SEQ ID NO: 608584 - DNA, 120 bp, Artificial Sequence
  ENSG00000175782_47 (sequence is synthesized)
agataagtggaaataattgagtagctggagtcaactggactggagatggattggaaatggagggcatgagaaggggtgaagttaaggatcacacttcagctgggcacagtggctcatgcc

SEQ ID NO: 608585 - DNA, 80 bp, Artificial Sequence
  ENSG00000175782_48 (sequence is synthesized)
actcaggaggctgaggcgggaggatctcctgagcccaggagtttgaggcttcagtgcgccatccctgtctcaacaacaac

SEQ ID NO: 608586 - DNA, 120 bp, Artificial Sequence
  ENSG00000175782_49 (sequence is synthesized)
ctgtctcaacaacaacaaaaaatcacacatgtctgatttgcgcagcttgatagagaatggtgccattctctgaactaggaaacacaagaagaggactgaggagagggatgaggcagagga

SEQ ID NO: 608587 - DNA, 90 bp, Artificial Sequence
  ENSG00000175782_50 (sequence is synthesized)
aacacaagaagaggactgaggagagggatgaggcagaggaatattatgggccttcttgatactgagatatccaattaaagatgttggcca

SEQ ID NO: 608588 - DNA, 120 bp, Artificial Sequence
  ENSG00000175782_51 (sequence is synthesized)
tagtttatagaggcccagaactcaggaaaatgtttagttgaggtggagataaaacaggagtttctggggtatgcctgataaggaggaaaacagaccaagatgagcttgctgaagaagata

SEQ ID NO: 608589 - DNA, 120 bp, Artificial Sequence
  ENSG00000175782_52 (sequence is synthesized)
gcataaagcaagaacagactataactgaagttgaggaactctggtatacaatgatagaacataatgctgcaaaagaaacagagaaggaacaaagaggtgggaggaaaatgggccgggcac

SEQ ID NO: 608590 - DNA, 84 bp, Artificial Sequence
  ENSG00000175782_53 (sequence is synthesized)
gagaaggaacaaagaggtgggaggaaaatgggccgggcactgtggcttatgcctgtaatcccaacatttttgagaggccaagct

SEQ ID NO: 608591 - DNA, 120 bp, Artificial Sequence
  ENSG00000175782_54 (sequence is synthesized)
ataattaatagtttcgaaagaaagaaacctgccaagcaaaagtccggtctcagcccgggagctagtagcatgcagtggaacaggtctcacctggacggcagcactgggacttccagtcca

SEQ ID NO: 608592 - DNA, 120 bp, Artificial Sequence
  ENSG00000175782_55 (sequence is synthesized)
gactctgccattcactggtatagcctttggcaaagcctttgggcagcttgctcaaatcttacttctcagtttcttcacctataaaatgagggctttgatccaaataatttccaggggact

SEQ ID NO: 608593 - DNA, 120 bp, Artificial Sequence
  ENSG00000175782_56 (sequence is synthesized)
gtccagctccaaaatcccctgattctgctttttcagattaaaattataatttctcatttgcttataataaaagtagattgaataaattaatcagaagggtttggtttgtttgaccttttt

SEQ ID NO: 608594 - DNA, 120 bp, Artificial Sequence
  ENSG00000175782_57 (sequence is synthesized)
ttggtttgtttgaccttttttttaattttaatttttattttttattttttgagacagagtttcctctgtctcccaggcttggttgttgtggctcaatctcagttcactgcaacctccgcc

SEQ ID NO: 608595 - DNA, 84 bp, Artificial Sequence
  ENSG00000175782_58 (sequence is synthesized)
gacctttataagatcaatttttttgttcacaagcatttctttactcatagataccatttttataacttatatgagacgcattta

SEQ ID NO: 608596 - DNA, 120 bp, Artificial Sequence
  ENSG00000175782_59 (sequence is synthesized)
tcatagataccatttttataacttatatgagacgcatttaatgtaatcatattactttcttatattagaagataggatttcttctgatgtatcgaagttactttatacttcatatgaagt

SEQ ID NO: 608597 - DNA, 120 bp, Artificial Sequence
  ENSG00000175782_60 (sequence is synthesized)
gaaagcagcatatcactcaaactatagtaattcacatttttccatttaactaaaaatgtctcgtaactactatgccacaagaacaagcatggatacttatttaaccagccaagactatgc

SEQ ID NO: 608598 - DNA, 120 bp, Artificial Sequence
  ENSG00000175782_61 (sequence is synthesized)
atttctaaatatttatttttttcggttatccgtagacttttccttttgaaatccaacgatctgtatcaaccacgtcttcattttccttttcctgtttgtcttactctccccccaaaaaga

SEQ ID NO: 608599 - DNA, 120 bp, Artificial Sequence
  ENSG00000175782_62 (sequence is synthesized)
gtcagtttcctgttttctcaatttctcagtttaaaattagagccctatggcaggtgccatgtacagctgcaaaggtggcaagaagccctgagaaagctcaagaagcaggtcaagggggtg

SEQ ID NO: 608600 - DNA, 120 bp, Artificial Sequence
  ENSG00000175782_63 (sequence is synthesized)
ggtaaggaagatgggacgttcaagcagaaacaaaaagaggagctaaaagtgaaagccaccccgccaccagccctcaccagtcacaggtggaattaaagaaatctggcaaaaaataaattt

SEQ ID NO: 608601 - DNA, 120 bp, Artificial Sequence
  ENSG00000175782_64 (sequence is synthesized)
tgttatccgtgcttggggcggtgacccttgaccccattcctatttaaacatctggattctctgccataacatcttttgccacctatagctacaataaagtgtcgtcttggagtctgttgt

SEQ ID NO: 608602 - DNA, 120 bp, Artificial Sequence
  ENSG00000175782_65 (sequence is synthesized)
acatttaagaataaacttttgtaaggaagtaaaaaagagtctacagttcagtgcaggatagggatgggtgggccttaattcaggaggtgggaggctcaaaatcaattactctgttgagga

SEQ ID NO: 608603 - DNA, 120 bp, Artificial Sequence
  ENSG00000175782_66 (sequence is synthesized)
gttgaggagatggaatctcctggaatctcaaaaaggatttcctttaggaatcatcagactcatccgactcgtcaagtctttctctgcttggagttttgttttgtttttattttgttttgt

SEQ ID NO: 608604 - DNA, 80 bp, Artificial Sequence
  ENSG00000175782_67 (sequence is synthesized)
agacggggtcttgctatgtttgctctgcctcccgaagtgctaaaattacagctgtgaaacaccgcgcctggagtttaaaa

SEQ ID NO: 608605 - DNA, 120 bp, Artificial Sequence
  ENSG00000175782_68 (sequence is synthesized)
taaaattacagctgtgaaacaccgcgcctggagtttaaaagcaagattaacctttttggactggagttcttagagaattatggtgtgactcattgaccatatttgttaggatcagcattt

SEQ ID NO: 608606 - DNA, 120 bp, Artificial Sequence
  ENSG00000175782_69 (sequence is synthesized)
ttatatgatttaacacaaaatgttacagaaaaaagtgcaaaaatgttgtaaggcacagttggtttcctaagcaaatgcccattcctattctttgttcatctccactctagaggctagaaa

SEQ ID NO: 608607 - DNA, 120 bp, Artificial Sequence
  ENSG00000175782_70 (sequence is synthesized)
tactaaattctctttttacctcgttgccttgtagagggatgatcatatgacatttcaccaatggcacataattcaaagtctgctgaggatttctagggtatcctgattaaaagggacaga

SEQ ID NO: 608608 - DNA, 120 bp, Artificial Sequence
  ENSG00000175782_71 (sequence is synthesized)
tgtggctggtagtgtctattaccacctccttcctgccttaaatgtagctgcggatgtctagaattgtgctaatcagcttatgactataaaagagaggtgaagagagccagatctgaaagt

SEQ ID NO: 608609 - DNA, 85 bp, Artificial Sequence
  ENSG00000175782_72 (sequence is synthesized)
tgactataaaagagaggtgaagagagccagatctgaaagtggtgagccgaccaggcacagtgggaggaggatcatttgagcccag

SEQ ID NO: 608610 - DNA, 120 bp, Artificial Sequence
  ENSG00000175782_73 (sequence is synthesized)
gaccagcctgggcaacattgcaaaacctgttctctgtgaataacttaaaaattagtcaggtggccaggcgtagtggttcacacctgcaatctcagcactttggaaggctgaggtgggtgg

SEQ ID NO: 608611 - DNA, 73 bp, Artificial Sequence
  ENSG00000175782_74 (sequence is synthesized)
ggtatattggtgtgcacctgtggtctcagctactcaggaagctgaagcaggaggattgcctgatcctgggagg

SEQ ID NO: 608612 - DNA, 73 bp, Artificial Sequence
  ENSG00000175782_75 (sequence is synthesized)
gaatatgctgggcaacagagggagaccctgtctcaaaaacaaacaaaacaaacaaaaataagcaaaaaaaaaa

SEQ ID NO: 608613 - DNA, 89 bp, Artificial Sequence
  ENSG00000175782_76 (sequence is synthesized)
ccctgtctcaaaaacaaacgtgttgagcagctaaaacaatgccgttagatgccctatctcttaaaaaaaaaaaaaaaaagataaaataa

SEQ ID NO: 608614 - DNA, 120 bp, Artificial Sequence
  ENSG00000175782_77 (sequence is synthesized)
gctgaggtgggtggatcacttgagcccagtagtttgagaccagcctggccaacacgtcttcttgttctagatgaaaagtaaacccctatttggcttactcacttaaaaaaataataataa

SEQ ID NO: 608615 - DNA, 120 bp, Artificial Sequence
  ENSG00000175782_78 (sequence is synthesized)
ttctagatgaaaagtaaacccctatttggcttactcacttaaaaaaataataataattagagacagggtgttgctatgttgccctggctggtctcactcctgggttcaagtgatcctcct

SEQ ID NO: 608616 - DNA, 120 bp, Artificial Sequence
  ENSG00000175782_79 (sequence is synthesized)
gtgctgatattacaggcgtgagcaaccatgccagcctggcttagccacttttaattattactcgtagctgcaagaatgccaatgagcatttggggtaaaaaggggcaagaatggaggacc

SEQ ID NO: 608617 - DNA, 120 bp, Artificial Sequence
  ENSG00000175782_80 (sequence is synthesized)
tgctctgtctgtcggactttggaactcaggaagcaacaactaagcgtactcgttgtcttagtccattttgtgttgcatagaacagaatacctgaaactgggtcatttataaagaaaagga

SEQ ID NO: 608618 - DNA, 120 bp, Artificial Sequence
  ENSG00000175782_81 (sequence is synthesized)
atttatttcttacaatagtggagactgagaagtccaaggtacagggtccacatctggtgagagacttcttgttcctgggaactctctgcagagacccaaggtggcagagggcctcacgtg

SEQ ID NO: 608619 - DNA, 120 bp, Artificial Sequence
  ENSG00000175782_82 (sequence is synthesized)
gtgagggacttgagcatggtagctcaggtctctcttcctcttcttataaaggcaccagtctcactgggcagagccttcatgacccagtcaccttttaaaggcgccatctctcaatattgc

SEQ ID NO: 608620 - DNA, 120 bp, Artificial Sequence
  ENSG00000175782_83 (sequence is synthesized)
tctcaatattgccacattggggatgtttccagatgagttttggaggagacaaatattcaaactacagcactggttaaaaataaaaatagggcctggcgtggtggctcacgcctgtcatcc

SEQ ID NO: 608621 - DNA, 78 bp, Artificial Sequence
  ENSG00000175782_84 (sequence is synthesized)
gggtgacaagagcaaaactctgtctcacaaaaaaaaaaaaaaggccaggcatgatgactcacgcctgtaatcccagcg

SEQ ID NO: 608622 - DNA, 66 bp, Artificial Sequence
  ENSG00000175782_85 (sequence is synthesized)
ctcaggaggctgaggcaggaaactcacatgaaccctggagacgtaggttgcagtgagctgagatca

SEQ ID NO: 608623 - DNA, 120 bp, Artificial Sequence
  ENSG00000175782_86 (sequence is synthesized)
gaatgaaactgtgtctcaaaaagaaaaaaaaaaacaaaaactagtagctagccccacccccgccatttttccagactccagagagtggggtgtgtggaagacagggactggtctggtggc

SEQ ID NO: 608624 - DNA, 120 bp, Artificial Sequence
  ENSG00000175782_87 (sequence is synthesized)
atgtagattcataaatggcgtccaaacctggagctgttgctggcttggaatgaatgaaccagttccagccaggaacagactttcccaccaagtgggaggtggtctacctgcccttcacca

SEQ ID NO: 608625 - DNA, 120 bp, Artificial Sequence
  ENSG00000175782_88 (sequence is synthesized)
tcatctttgtgctctctgacactggtcatcctcagttacccaatatacccctcgccccagccccatccctagtcacccctcattcctagtagtacccccagttctgcttcaatttgattc

SEQ ID NO: 608626 - DNA, 120 bp, Artificial Sequence
  ENSG00000175782_89 (sequence is synthesized)
agcagatcaagaaagcactatcaccaatggtcgcaaggtcatgcttaagtcttggaactggccatcagtgtgaaagttcaacaggtattcagtaagcagatctaggaaaaactcactcta

SEQ ID NO: 608627 - DNA, 120 bp, Artificial Sequence
  ENSG00000175782_90 (sequence is synthesized)
ataacgttccaggaatttcctaagaccatagtgggagacagctgcatcagaggcctcccagtgccataggaccatggacattggtgagcaactgtgtgctgggaggaaatggctgcttat

SEQ ID NO: 608628 - DNA, 120 bp, Artificial Sequence
  ENSG00000175782_91 (sequence is synthesized)
tggcatggagttattgaatgcagaacttttcagccaagcacagtgctattcttctgaaatcataacatcatgaggacatccactgcttgtactcaaatagcattcctcacaggaatgtca

SEQ ID NO: 608629 - DNA, 120 bp, Artificial Sequence
  ENSG00000175782_92 (sequence is synthesized)
cacctgtgactctctcatacctccaaaatctcactgctgttctgaaacgcaagagattttgccaaggaaatgctgacattccttctgtccactcctctccccacactgcactgtgtggcc

SEQ ID NO: 608630 - DNA, 120 bp, Artificial Sequence
  ENSG00000175782_93 (sequence is synthesized)
ccagagaggaaagacaagggctgttaccatggagttcttgaatttcattatttatctcccaacacaactttggcctcaccctcttccccagcgtgaagacgcacaacccaagtgggacag

SEQ ID NO: 608631 - DNA, 120 bp, Artificial Sequence
  ENSG00000175782_94 (sequence is synthesized)
tctgaatttccccaccctcaggtgtcagagaatcagaggaagtcatgctgcttatctagaatctgctagaaatggagttcacccaaagaatgaccatcacagaatttatgaactactcct

SEQ ID NO: 608632 - DNA, 120 bp, Artificial Sequence
  ENSG00000175782_95 (sequence is synthesized)
ctactcctagatcatgcaattaataagtcctctagcccagtaccactcaaggtagggtctgggccccagtaccagtccataaacagtttgctgccggctgggtgtggtggctcatgccta

SEQ ID NO: 608633 - DNA, 63 bp, Artificial Sequence
  ENSG00000175782_96 (sequence is synthesized)
taaaaagtacaaaaattagccaggtatggtggtatgtgcctgtgatcccagctactcgggagg

SEQ ID NO: 608634 - DNA, 89 bp, Artificial Sequence
  ENSG00000175782_97 (sequence is synthesized)
caagcccagggaggtcgaggctgcaatgagccaccgtgatggtgaactgcactccagcttgagtgacagagtgagatcctgtctcaaaa

SEQ ID NO: 608635 - DNA, 120 bp, Artificial Sequence
  ENSG00000175782_98 (sequence is synthesized)
agatcctgtctcaaaaaaaagggcggggtgcggggattttgggtagtaatatcaatagcagacaaaatagaatttgaggcaaaaagtgttaataggatcaagatttttttttttaaagaa

SEQ ID NO: 608636 - DNA, 120 bp, Artificial Sequence
  ENSG00000175782_99 (sequence is synthesized)
caatccaccacaaacatagcaatcatgaacaacccagaaaacagcatgaaaattaaaaggaaaattgagattttaaatacttctaatagaggtgatagagcaggcagcagggaagttagt

SEQ ID NO: 608637 - DNA, 120 bp, Artificial Sequence
  ENSG00000175782_100 (sequence is synthesized)
aaccttgtctaataggttatctgtactcaacaagcctagaacacacactcctttcaagtacctgaggaatgtttataacagtaaagatgaacagagatcatattataaatagttggaaga

SEQ ID NO: 608638 - DNA, 90 bp, Artificial Sequence
  ENSG00000175782_101 (sequence is synthesized)
gtaaagatgaacagagatcatattataaatagttggaagatttattttttattttgttttttagaaacagggtcttgcctcagcactttg

SEQ ID NO: 608639 - DNA, 88 bp, Artificial Sequence
  ENSG00000175782_102 (sequence is synthesized)
ggcaggagaattgcttgaaccgggagggtagaggttgcagtgaaccatggtcgcaccacttcactccagcctggacaagaaaagaaac

SEQ ID NO: 608640 - DNA, 120 bp, Artificial Sequence
  ENSG00000175782_103 (sequence is synthesized)
gtctcaaaaacaaaaacaaaaacaaaaaactaggtctttctctgtggccgacgctggagtgcagtgcctttttgcaggcacaatcatagtgcactgcagccctgaactccttggctcaag

SEQ ID NO: 608641 - DNA, 90 bp, Artificial Sequence
  ENSG00000175782_104 (sequence is synthesized)
taggtatgccctaccatgtgtggctatatttggtaggttttaaatgaaaagatttttgttttctgtacatttatttaaatttaaaaagta

SEQ ID NO: 608642 - DNA, 120 bp, Artificial Sequence
  ENSG00000175782_105 (sequence is synthesized)
gatttttgttttctgtacatttatttaaatttaaaaagtatttaagccatctttaagaaacttaatgttgagaatgttctagaatagtgagtcattagatttcaaaatattggtattgaa

SEQ ID NO: 608643 - DNA, 120 bp, Artificial Sequence
  ENSG00000175782_106 (sequence is synthesized)
ccagatggtcttgtggcttcaaagaagtctctgaagtcactccaggtgatattaaaagtacagtgctaggactgtctgacccaaaatatgtggctggaaccagaaaggatataagcatgg

SEQ ID NO: 608644 - DNA, 120 bp, Artificial Sequence
  ENSG00000175782_107 (sequence is synthesized)
tttgagaaggaaaaaaagcttaacaagggggaattgaggaagccatttgcaaaacttcacaggaaagttaaatgaatgaatgaataaaatgtgattaataaatatgggggccaggtacag

SEQ ID NO: 608645 - DNA, 120 bp, Artificial Sequence
  ENSG00000175782_108 (sequence is synthesized)
tggcctgcatctgtaatcccagtgttttgggaggccaaggcaggaggtgcacttgaggccaggagttcaagacctgagcaacacagcaagacccccgtctctataaaaaattttataaaa

SEQ ID NO: 608646 - DNA, 120 bp, Artificial Sequence
  ENSG00000175782_109 (sequence is synthesized)
aaaattagccgggcatggtggtagacacctgtagtcccagctacttgggaagatgaggcagaggattgcctgagcccaggagtttgaggttatagtgagccatgactgtgccactgcact

SEQ ID NO: 608647 - DNA, 120 bp, Artificial Sequence
  ENSG00000175782_110 (sequence is synthesized)
cctgggcaacaaagtgagaccctgactctaaaagtaaaattaaattaaattaaaaataagtggataaatatgggttatgctgtgaagcatagagggagggatgaagagggacattttaag

SEQ ID NO: 608648 - DNA, 120 bp, Artificial Sequence
  ENSG00000175782_111 (sequence is synthesized)
ccacttctctggccccagtttctaacattatttctaaaatgcaggatatctggttatcccaaaccagttatatttttatttaaatttgctcaaaatttttatttttaaatcttaacaatt

SEQ ID NO: 608649 - DNA, 75 bp, Artificial Sequence
  ENSG00000175782_112 (sequence is synthesized)
gggcacaaacatggctcactgcagcctcgacctcccagcctcaagtgatactcccgcctcagcctcccaagtagc

SEQ ID NO: 608650 - DNA, 67 bp, Artificial Sequence
  ENSG00000175782_113 (sequence is synthesized)
tgtagagatggggtttcaccatgttgccctgtctagtcttgaaaccttgagctcaagctgcctggcc

SEQ ID NO: 608651 - DNA, 120 bp, Artificial Sequence
  ENSG00000175782_114 (sequence is synthesized)
ttataggcatgagccaccgcgcccagctagtcacgctttttagtcaagatttttaaaaatgtctgcatgcttttctgagagccttacctctcttgtgatttgaagcattttctccaccag

SEQ ID NO: 608652 - DNA, 120 bp, Artificial Sequence
  ENSG00000175782_115 (sequence is synthesized)
tccaccaggcctaaggctgaaggaatgtagtttgctgcccttcagtctatgacaaggaggtctgtttcctccaacgcctgccttttagacagagtgttgattcacagggaacagaggcag

SEQ ID NO: 608653 - DNA, 120 bp, Artificial Sequence
  ENSG00000175782_116 (sequence is synthesized)
acctggggctgacactgaatgaatgctactcacagcagtaaggggaaaagtgggaaagtcttgtttatgctgtggctgatgtggatgtctttggggaagaaaaattcaggatgagtttat

SEQ ID NO: 608654 - DNA, 120 bp, Artificial Sequence
  ENSG00000175782_117 (sequence is synthesized)
tgagagcattatttttgaaagtataagatttgtgattgtaatataaacttaaatcactttgggaatgaatttaaaaaatctatgtgacacaaattaatcatcattctcattgtaaatttg

SEQ ID NO: 608655 - DNA, 120 bp, Artificial Sequence
  ENSG00000175782_118 (sequence is synthesized)
gcaaagtatttgtaattaggaatatctgtcatactggcactgggcaaattattctgaatgttcccatgctgaagattctctcaaaaagggaaaaaacaagatcctttgtttgtataagta

SEQ ID NO: 608656 - DNA, 120 bp, Artificial Sequence
  ENSG00000175782_119 (sequence is synthesized)
caatcagtttgctgaataaaacctttatagctacaattataacaggattgtttctacattttagcttggagatcccatgactactctgttttgctaataataaaccaatacagtgctaca

SEQ ID NO: 608657 - DNA, 120 bp, Artificial Sequence
  ENSG00000175782_120 (sequence is synthesized)
agaaggaggaatatttggtccctggtcagtttctgctttgggaacagattgaccccaaacatctgacataacctacgtaagtgacagtgttggcttagaataaagaaacaaagactatca

SEQ ID NO: 608658 - DNA, 120 bp, Artificial Sequence
  ENSG00000175782_121 (sequence is synthesized)
tggcatttttttaataaagcaagtgttacagtgacctgttttggggactgccagagattaggtggcagttgccttctagatctagccacaggagaaaaaattaaagagccatatgactgt

SEQ ID NO: 608659 - DNA, 120 bp, Artificial Sequence
  ENSG00000175782_122 (sequence is synthesized)
aggcagatcctcatcagggaggaggcgcagtgtctttttaaccactttgaagaccaacagccaagacatcttgagctagttgtggtggacagagagttccaaacacctcagccaccagga

SEQ ID NO: 608660 - DNA, 120 bp, Artificial Sequence
  ENSG00000175782_123 (sequence is synthesized)
aaagggagtggccaggaagaggctgcaggctcaagggctgggattctcccacccacctaaggaacctactgagcatcgaaccactccaacttgccttgggaggaggacttgaatgctacc

SEQ ID NO: 608661 - DNA, 120 bp, Artificial Sequence
  ENSG00000175782_124 (sequence is synthesized)
gggcaacatagtgagaccccatctctacatccaaataaaataaaataaaataaaaaggtaaaaaaaaaagagagagagagagcacgataatttttgtaccaggaatgaaaagggagccca

SEQ ID NO: 608662 - DNA, 120 bp, Artificial Sequence
  ENSG00000175782_125 (sequence is synthesized)
agcacgataatttttgtaccaggaatgaaaagggagcccaaaaatctaagcagtgagcaggtgctgaaaccaacgtactcacagagcaagccaaacaggattagactttattactgggga

SEQ ID NO: 608663 - DNA, 120 bp, Artificial Sequence
  ENSG00000175782_126 (sequence is synthesized)
ctgggcttgaacctccgggctgcagcatcagaggctaacagaatggagagtaaaaaggtgggcaaaagacttggggctggaaagcagcagatgggagcagaattgacagaacagcacatg

SEQ ID NO: 608664 - DNA, 120 bp, Artificial Sequence
  ENSG00000175782_127 (sequence is synthesized)
gccaggatatccctccccgctaaaatactaggatactgacttagaaaagcagagggtcagggaaatctaaaaaaaaaagactgacatttctatttaagagacattgcctaaattgctgat

SEQ ID NO: 608665 - DNA, 120 bp, Artificial Sequence
  ENSG00000175782_128 (sequence is synthesized)
taaataaacagatccaaccagatctaaataatattggacatttaattagttttcctattacactgcaggtacagcctcaggaatacttataggcaaaattaaagtgctacttttctatct

SEQ ID NO: 608666 - DNA, 120 bp, Artificial Sequence
  ENSG00000175782_129 (sequence is synthesized)
gcctctctgagttggagtgagttaaatgtgtaacccccacattgtatataataatctcttacaatcttgttcatagtgccacctatggtcacgaccaattagagctggtaaggcagctgt

SEQ ID NO: 608667 - DNA, 120 bp, Artificial Sequence
  ENSG00000175782_130 (sequence is synthesized)
gggttgtctcataattatttactcagtacaaaataataccagccatgatcctcagtggtaagtagcagaaatcaactgtatttgtttgctaaggctgtgctaataaagtgctgtaaacca

SEQ ID NO: 608668 - DNA, 60 bp, Artificial Sequence
  ENSG00000175782_131 (sequence is synthesized)
cactcaagaaatgaagtcattggccgggtgccatggctcacgcctgtaattccaacactg

SEQ ID NO: 608669 - DNA, 120 bp, Artificial Sequence
  ENSG00000175785_0 (sequence is synthesized)
aaacagagctgccgcggggggaacgcggacctcttttccccgagcccagggtcggctggggccgccgccaggcaagttcgccccaggagcgggcgccgctggccgagatgctcctccggg

SEQ ID NO: 608670 - DNA, 120 bp, Artificial Sequence
  ENSG00000175785_1 (sequence is synthesized)
acttggtgctgcgccgtggctgctgctggtcctcgctgctgctgcactgcgcgctccacccgctctggggcttcgtgcaggtgacgcatggtgagccccagaagtcctgctccaaagtga

SEQ ID NO: 608671 - DNA, 120 bp, Artificial Sequence
  ENSG00000175785_2 (sequence is synthesized)
ctgacagctgccgacacgtctgccagtgccggccccctcccccgctgcccccgccgcccccacccccgccacctcccagactcctctccgccccagctcccaactctacctcttgcccca

SEQ ID NO: 608672 - DNA, 120 bp, Artificial Sequence
  ENSG00000175785_3 (sequence is synthesized)
ctgaggaaagctggtggtcggggctggtgatcatcattgccgtatgctgtgcctccctggtgtttctgactgtgcttgtcatcatttgctacaaagccataaaaaggaaaccactgagaa

SEQ ID NO: 608673 - DNA, 120 bp, Artificial Sequence
  ENSG00000175785_4 (sequence is synthesized)
aagacgaaaatggcaccagcgttgctgagtatcccatgagtgcttcgcagagcaacaaaggagtagacgtgaacaacgcagtggtgtgagtctgcaggccctggacccgctggccagagg

SEQ ID NO: 608674 - DNA, 120 bp, Artificial Sequence
  ENSG00000175785_5 (sequence is synthesized)
gacaccttggtggcactggtggacatgggaaagcaggtggacatgagctaaccctgagcttgtccaggacttcattgcctcacaggccctgagcctcccgaaggagaaaccattgtcttc

SEQ ID NO: 608675 - DNA, 120 bp, Artificial Sequence
  ENSG00000175785_6 (sequence is synthesized)
ccaggcttgcccctggtcagcctgcgggcccaggcagctcggacaccaggctgagcccggcgcagcacctgggcagtgtccccaccccaggccctccacatcctcctccctgtctggtgt

SEQ ID NO: 608676 - DNA, 120 bp, Artificial Sequence
  ENSG00000175785_7 (sequence is synthesized)
ctggtctgtcgactgcccccagctgctgtctaaagcatgcgcactggcgaagccagagggatctgtctttctactgtggcagggaggcttccccctttagccaaaagaaagatggtccgg

SEQ ID NO: 608677 - DNA, 120 bp, Artificial Sequence
  ENSG00000175785_8 (sequence is synthesized)
agcccactccctgccggaaaacctctcctcctcccaggaagcctgcctgctccactgttcacattctcaacagaagccatcggcacagccagcagacagacgtcccctttcaaaggtgct

SEQ ID NO: 608678 - DNA, 120 bp, Artificial Sequence
  ENSG00000175785_9 (sequence is synthesized)
tcccacacatctgttcatcgccccatctgcagttgttgtcaatcttcagggcctgccttctccctcctatccccactgacaccctacaccctaggctcctgactgcctgccatggagggc

SEQ ID NO: 608679 - DNA, 120 bp, Artificial Sequence
  ENSG00000175785_10 (sequence is synthesized)
tgtgagtccagcctgcagaatcccctcctgagcagacacaggagtgcgtttacactcgggggcagtgtctggccttccgggggcaaaacgactcactgaacccgcagcccagggccactg

SEQ ID NO: 608680 - DNA, 120 bp, Artificial Sequence
  ENSG00000175785_11 (sequence is synthesized)
ggcaagggcagaggccactgcacctgtcctcagactcatccccacacttgaccccataggaactgatgcatctgtgtgagccaggccctgccttagtcagcagaggccactacttgtgcc

SEQ ID NO: 608681 - DNA, 120 bp, Artificial Sequence
  ENSG00000175785_12 (sequence is synthesized)
aaatccactgtgggcctgctgtaccaggctgatgctggccaggcgctggatgtcccccacagtcccctgaggcctgactgttgtactcaggccctctcccagagtcctccatcatctccc

SEQ ID NO: 608682 - DNA, 120 bp, Artificial Sequence
  ENSG00000175785_13 (sequence is synthesized)
cattttaccctaccccgagccccagtcgccaagaaggaggtgttgttcttccagggtcttcctttcaatgtctgtttccacagtctcatgctatagaagcgctgagccctccagcgtggt

SEQ ID NO: 608683 - DNA, 120 bp, Artificial Sequence
  ENSG00000175785_14 (sequence is synthesized)
tggaggatcaagggatgaaatgggacaggaggagaggggtcctccaggctggtgacccctgccctgttggcctgtctcccaagtggcagccttccctgtgggccacatcaggaaacccac

SEQ ID NO: 608684 - DNA, 120 bp, Artificial Sequence
  ENSG00000175785_15 (sequence is synthesized)
cactgtcgagccctctaagacctggtttgcctcctaaacctccagtgtgctcctctgataggtgtttaagctacaggtgagactttgaagtccagagaagacagacacacctgaaaaccg

SEQ ID NO: 608685 - DNA, 120 bp, Artificial Sequence
  ENSG00000175785_16 (sequence is synthesized)
gtccccatttgggccgaaccttaaaaagcccattgtcccagagtcctagtgcccacggagctgtctgtgtgtcattgtcctgcccaggtcatcaggtgtgggctgaggacaggcccaggg

SEQ ID NO: 608686 - DNA, 120 bp, Artificial Sequence
  ENSG00000175785_17 (sequence is synthesized)
cataccctcccataaaggggttttcttctttcctcatttccttctatttgaggacttgtttggggtttagatttgaattttgcttcccctggacacctgggcatcagcatagtgccaccc

SEQ ID NO: 608687 - DNA, 120 bp, Artificial Sequence
  ENSG00000175785_18 (sequence is synthesized)
cctgctcctgacctggccagtacttcacagtgctcttgaggtgcggagccagctgacaaataggccagagggtgtgggccagcagcaggttaaagggggaaacccagcagaccccacccc

SEQ ID NO: 608688 - DNA, 120 bp, Artificial Sequence
  ENSG00000175785_19 (sequence is synthesized)
agggcactctcccctactgccttcagccttctggtgcctgttgaacccccaagctgtgccctaagcagacccctgggcaggaccctagccctaagcacacaccaccctgtgctgcaacca

SEQ ID NO: 608689 - DNA, 120 bp, Artificial Sequence
  ENSG00000175785_20 (sequence is synthesized)
tgagaaagtgcccatgccttgggctgtccagaagctcaggagtgatcagagggcaccttctctaagaggggaggttcctggctaagggaccatggagtggtgggcagcctgaaggggctg

SEQ ID NO: 608690 - DNA, 120 bp, Artificial Sequence
  ENSG00000175785_21 (sequence is synthesized)
ggcacagcccagctttgcgcacactcgcctggtcccatcattccctaccttggcttaaacctaggaggcctggattttgcagttagcctaatcttccagccccaggcgaggctccctggt

SEQ ID NO: 608691 - DNA, 120 bp, Artificial Sequence
  ENSG00000175785_22 (sequence is synthesized)
gaggaatcagctgagccatcaccacgttttggggcctgtatcctcttccctgagccgctgacgcatccagggctctagtctgcacataaattccctctcagctgggcttgtaaaatccct

SEQ ID NO: 608692 - DNA, 120 bp, Artificial Sequence
  ENSG00000175785_23 (sequence is synthesized)
tctcaccccagttagcaaaaatcaagggaagagcctagtttttttaaaagattcacttaatatccaccccccacctcaagcccaagaccgcccattcaaaaaacaagtatacggcacagc

SEQ ID NO: 608693 - DNA, 120 bp, Artificial Sequence
  ENSG00000175785_24 (sequence is synthesized)
aagggagacccactagattttgagcttacagagacataagggtacttaaaaccctgccggcctagtatttgagcttagaacttttatttaaaatgagccggcagtctctagacacacacc

SEQ ID NO: 608694 - DNA, 120 bp, Artificial Sequence
  ENSG00000175785_25 (sequence is synthesized)
gatcctcaggctagtccgagccctgaggtcaagaatgaaatgcacttcccttctcattttctcaaatagatcttttccagccgtctcacagttgaccccaactttggaactcagatcata

SEQ ID NO: 608695 - DNA, 120 bp, Artificial Sequence
  ENSG00000175785_26 (sequence is synthesized)
ggatctcccagaggtttcaggtgttcctaagaagcttctaaaggaagttttggaagaaagactaataggtgtaaacatataaacatatatattatatatagctatatatatttaaagaga

SEQ ID NO: 608696 - DNA, 120 bp, Artificial Sequence
  ENSG00000175785_27 (sequence is synthesized)
tctctacatatatatatatatataaatacaactactgtactctctgcatctgtacaaagtatgagttaaactgcccaggtagtgtgagatacgtaatgcatgaatgtgaatatcctgaaa

SEQ ID NO: 608697 - DNA, 120 bp, Artificial Sequence
  ENSG00000175785_28 (sequence is synthesized)
tctgccttcttagcaacgtgccgcgtgtactggagagaggacagttgctcctgggagttctctcaatgggcaaatgtacaagttgatgccgtcttatccaccaacaagccattaaggttg

SEQ ID NO: 608698 - DNA, 120 bp, Artificial Sequence
  ENSG00000175785_29 (sequence is synthesized)
gtttcctgctgagacttttgtaccggaagcgagaccggcagcactgggggtgtccatatgccacttatgaggaagaaagcaccatgacttttttattttcaataaaaatatagagatgtc

SEQ ID NO: 608699 - DNA, 120 bp, Artificial Sequence
  ENSG00000175787_0 (sequence is synthesized)
agtccggctcgcgtacttccgcgttccggcatcgtcgcctggtgcgtgatttgcctctgcaacttgactctcctctaggaagagtactccagagagcagggatatgtcaccaggactcct

SEQ ID NO: 608700 - DNA, 120 bp, Artificial Sequence
  ENSG00000175787_1 (sequence is synthesized)
gacaaccaggaaggaggcattgatggccttccgggatgtggctgtggccttcacccagaaggagtggaagctattgagttctgctcagaggaccctgtacagggaggtgatgctggagaa

SEQ ID NO: 608701 - DNA, 120 bp, Artificial Sequence
  ENSG00000175787_2 (sequence is synthesized)
ctacagccatctggtctccctgggaattgcattttccaaaccaaaactcatcgaacagctggagcaaggcgacgaaccttggagagaggagaacgaacatcttctggacctttgtccaga

SEQ ID NO: 608702 - DNA, 120 bp, Artificial Sequence
  ENSG00000175787_3 (sequence is synthesized)
gcctagaacagaattccagccaagttttccccacctggtggccttttctagctcgcagctcctcagacaatatgcgctaagtggccatcccacacagatcttcccaagctcatctgcagg

SEQ ID NO: 608703 - DNA, 120 bp, Artificial Sequence
  ENSG00000175787_4 (sequence is synthesized)
aggtgacttccaactagaagctccaagatgctctagtgaaaaaggagaaagtggagagacagaaggccccgacagctcattaagaaagaggccaagcagaatttctaggacattcttcag

SEQ ID NO: 608704 - DNA, 120 bp, Artificial Sequence
  ENSG00000175787_5 (sequence is synthesized)
cccacatcaaggtgacccagtagaatgggtagaagggaacagagaaggaggaacagaccttcgcctggcccaaaggatgagtcttggggggtcagacacaatgttgaagggagcagacac

SEQ ID NO: 608705 - DNA, 120 bp, Artificial Sequence
  ENSG00000175787_6 (sequence is synthesized)
ttcagaatctggagcagtcatacgtggaaactatagactgggacttagcaaaaagtcaagcctgttcagccaccagaagcatcatgtgtgccctgaatgcgggagaggcttttgccagag

SEQ ID NO: 608706 - DNA, 120 bp, Artificial Sequence
  ENSG00000175787_7 (sequence is synthesized)
atcagaccttatcaagcaccagaggacacacaccggggagaagccatacctgtgtcctgagtgtgggcgtcggtttagccagaaggcctccctctccatacaccagaggaagcactcggg

SEQ ID NO: 608707 - DNA, 120 bp, Artificial Sequence
  ENSG00000175787_8 (sequence is synthesized)
ggagaagccgtatgtgtgcagggaatgtgggcgacacttcaggtatacatcctctctcactaatcacaagaggattcactccggggagaggccctttgtatgtcaggagtgtgggcgagg

SEQ ID NO: 608708 - DNA, 120 bp, Artificial Sequence
  ENSG00000175787_9 (sequence is synthesized)
aaggcatcactcctccagcaccagagctcacacacaggggagaggcccttcctgtgccttgagtgtgggcgtagcttcaggcagcagtcactcctccttagtcaccaggtcacacactca

SEQ ID NO: 608709 - DNA, 120 bp, Artificial Sequence
  ENSG00000175787_10 (sequence is synthesized)
ggagagaagccttatgtctgtgctgagtgtgggcacagctttcgccaaaaggtcactctcatcaggcaccagaggacacacacaggggagaagccttacctgtgcccccagtgtgggcgg

SEQ ID NO: 608710 - DNA, 120 bp, Artificial Sequence
  ENSG00000175787_11 (sequence is synthesized)
ggttttagccagaaggtcaccctcattggacaccagaggacacacacaggggagaagccctacctgtgccctgattgtgggcgtggctttggtcagaaggtcaccctcatcagacaccag

SEQ ID NO: 608711 - DNA, 120 bp, Artificial Sequence
  ENSG00000175787_12 (sequence is synthesized)
aggacacacacaggggagaagccttatctgtgccccaagtgtgggcgtgcatttggctttaagtcgctcctcacccgacaccagaggacacactcagaggaggagctttacgtagacagg

SEQ ID NO: 608712 - DNA, 120 bp, Artificial Sequence
  ENSG00000175787_13 (sequence is synthesized)
gtgtgtggacaaggacttggccagaagtcacaccttatctctgaccaaaggacacactcaggagagaagccctgcatttgcgatgaatgtgggcgcggctttggctttaagtctgccctc

SEQ ID NO: 608713 - DNA, 120 bp, Artificial Sequence
  ENSG00000175787_14 (sequence is synthesized)
atccgacatcagcggacccattctggggagaagccgtatgtctgcagggagtgtgggcgtggctttagccagaagtctcacttgcatagacacaggaggaccaagtctggtcatcagctc

SEQ ID NO: 608714 - DNA, 120 bp, Artificial Sequence
  ENSG00000175787_15 (sequence is synthesized)
ctaccccaagaggtcttctgacctttcctttccccgtgagtgtgaagctggcagaaatcactagtaaatgcttcagtttcctgaaatggaatggaaaaaaaaaaatgttgctttctttca

SEQ ID NO: 608715 - DNA, 120 bp, Artificial Sequence
  ENSG00000175787_16 (sequence is synthesized)
tcgatcatgagatagttgatttttggtttactttctatattcacaatttgtcttggcttgctaggggttccataacaaagtaccccaggctgggtgattttgacaacggaaatatatttt

SEQ ID NO: 608716 - DNA, 120 bp, Artificial Sequence
  ENSG00000175787_17 (sequence is synthesized)
catatttatggaggctggaagtcccagatgaacgtattggtaggtttggctgctgcttaagcctctctgtttggcttgcggatggctgctttctggccacgtcctcacgtgggctttttt

SEQ ID NO: 608717 - DNA, 120 bp, Artificial Sequence
  ENSG00000175787_18 (sequence is synthesized)
ctgtgtgtatgctttcctggtgtggcttcctcctcttctagggacaccagtcattttggatagagccacagccacatggcctcgtttaaccttaataaccttcctaaaggccttatctct

SEQ ID NO: 608718 - DNA, 120 bp, Artificial Sequence
  ENSG00000175787_19 (sequence is synthesized)
agcaggtaaggaaggaggggctatctttgaggtgctaggaggaagttcttcttcaggcctcctaggccactggtaaaggctgcatggcactgcctgccttccacactgtgtgcctccccc

SEQ ID NO: 608719 - DNA, 120 bp, Artificial Sequence
  ENSG00000175787_20 (sequence is synthesized)
caggacagggcacccctggcattccatctccttcctccatcagggagcctcactcctcacttggcttcctttctcgagcacattcaggatttctccattcttgggctcatgtggttggca

SEQ ID NO: 608720 - DNA, 86 bp, Artificial Sequence
  ENSG00000175787_21 (sequence is synthesized)
cattcaggatttctccattcttgggctcatgtggttggcatgatcttcaaaacagtacctgtcctttgagactaagtccctgcccc

SEQ ID NO: 608721 - DNA, 74 bp, Artificial Sequence
  ENSG00000175787_22 (sequence is synthesized)
ttagtagagatggggtttcaccttattggtcaggctggtcttgaattcctgagctcaggcaatccatctgcctt

SEQ ID NO: 608722 - DNA, 120 bp, Artificial Sequence
  ENSG00000175787_23 (sequence is synthesized)
acctggtagcttttttgtgcatcatttctatcctgtaaattctcataactttgtttcttttatcatagattatttaagattacagcaaggtgtgaaaaactgtacaatgagtagggttgg

SEQ ID NO: 608723 - DNA, 120 bp, Artificial Sequence
  ENSG00000175787_24 (sequence is synthesized)
ggcagccctgtaccctaagagatagcatgttataaaaccaggtaatagccccatacttttcctgattgtgtcccgttcctccgcctctgttttctgagttagcattccatgactgtcttt

SEQ ID NO: 608724 - DNA, 120 bp, Artificial Sequence
  ENSG00000175787_25 (sequence is synthesized)
atccttttattccatctgatgggttcttcactcatatagggtgttgttttgcatgtctgtaaacttctctgcacataatgttattaagttgtttccaactttttggctatgaaataatct

SEQ ID NO: 608725 - DNA, 120 bp, Artificial Sequence
  ENSG00000175787_26 (sequence is synthesized)
ttgtttccaactttttggctatgaaataatcttgctctgtattcttgtatgcctccttgggaacatgtccaagagtttctcttaaaatatataccggccaggtgcagtggctcacacctg

SEQ ID NO: 608726 - DNA, 120 bp, Artificial Sequence
  ENSG00000175787_27 (sequence is synthesized)
acagcaggccgaacaaatgtttctcaggcaaggtttaataggcttgagctggagcaaaagcaagggagcggcgcccaagaaaggaagataaatgtgtaactctacttgcagcaatttata

SEQ ID NO: 608727 - DNA, 120 bp, Artificial Sequence
  ENSG00000175787_28 (sequence is synthesized)
gagctgaagctgcctgtgatgcttttttgaaccttttagtttggctgataggactagtttgtagtgtgggttttctgtgctgcaatagagcatgtaatgtgcccttgtgggttggaagat

SEQ ID NO: 608728 - DNA, 65 bp, Artificial Sequence
  ENSG00000175787_29 (sequence is synthesized)
gatctccatctcacaaagaaaaaaaaaaagatatatacttaggtgtgtagtagctggttcacagg

SEQ ID NO: 608729 - DNA, 120 bp, Artificial Sequence
  ENSG00000175787_30 (sequence is synthesized)
tgtgttctgaagtgggcatggcagcttatgctcccagcaggagtctatgagaattcttgttgtacatcctcaccaacatttgggattgtgagacctcatgttttatccatctattcagct

SEQ ID NO: 608730 - DNA, 120 bp, Artificial Sequence
  ENSG00000175787_31 (sequence is synthesized)
ggaagtgaaatctcagaggggtttttaagttgcttactagtgagcatgagcatcttttcatatgttgcttggcccttcctgtttccccatctgtgatttgaccattcaaggtgtttgcct

SEQ ID NO: 608731 - DNA, 120 bp, Artificial Sequence
  ENSG00000175787_32 (sequence is synthesized)
acttttcaatgggtctattctttttgttattgatttgtagaaatcccatataaattatggaaacatttaggtctttaactggaattaattttatatgaatgctgggagatagaaataaat

SEQ ID NO: 608732 - DNA, 120 bp, Artificial Sequence
  ENSG00000175787_33 (sequence is synthesized)
ttttgcctgctttatcttcttacttgtttattttcatggtttcctggcattttatttttgttttattttttgcttttaaatgtaactatatagctggtattacactatgtagcaactgag

SEQ ID NO: 608733 - DNA, 86 bp, Artificial Sequence
  ENSG00000175787_34 (sequence is synthesized)
tgtaactatatagctggtattacactatgtagcaactgagtgcttttgtctttttaaaagcatttcgttatataaaaatggctttg

SEQ ID NO: 608734 - DNA, 86 bp, Artificial Sequence
  ENSG00000175787_35 (sequence is synthesized)
ctctactaaaaatacacaaattagccgagcctggtggtgcatgcctgaaataccagctactcggatggctgaggagtatgaactga

SEQ ID NO: 608735 - DNA, 120 bp, Artificial Sequence
  ENSG00000175787_36 (sequence is synthesized)
agatacagcaattaaggtatattataagatatgttttttaaggtataataaactacacttatataggtgtgaaatttggttagttttggcatatgtatacatgcatgaaagcactgccac

SEQ ID NO: 608736 - DNA, 120 bp, Artificial Sequence
  ENSG00000175787_37 (sequence is synthesized)
agctaaagtaacaagcatgtctgtcatccttgaaaattttctttcgccttactgtaatcctacctcccactccttcctgtcctcccctgtacctgggcaaccactgatcagctttctata

SEQ ID NO: 608737 - DNA, 120 bp, Artificial Sequence
  ENSG00000175787_38 (sequence is synthesized)
attatagatttgtctgcattttctagaatttgtataactggattatacaggatacaactggattcttcactcagcataagtattttgaattttatctataatgtgtgtatcaatagttta

SEQ ID NO: 608738 - DNA, 120 bp, Artificial Sequence
  ENSG00000175787_39 (sequence is synthesized)
ttaatttttattgctgagtattcctttatatgtctaggtcacattttaatactgacctattaaaaggtatttgggttttcatttttgacaaatataaataaagctgttttaagcatgcaa

SEQ ID NO: 608739 - DNA, 120 bp, Artificial Sequence
  ENSG00000175787_40 (sequence is synthesized)
gtgggtattttaagctcttacatagcaagctgccatgcttctgactcagaaaaacagttttttcccctattcccccagagaatgcctggctttcacagtgcagttgtgtgtgtgtgtgtg

SEQ ID NO: 608740 - DNA, 120 bp, Artificial Sequence
  ENSG00000175792_0 (sequence is synthesized)
agtaacggccgcatggtaactcaggcgccgggcgcactgtcctagctgctggttttccacgctggttttagctcccggcgtctgcaaaatgaagattgaggaggtgaagagcactacgaa

SEQ ID NO: 608741 - DNA, 120 bp, Artificial Sequence
  ENSG00000175792_1 (sequence is synthesized)
gacgcagcgcatcgcctcccacagccacgtgaaagggctggggctggacgagagcggcttggccaagcaggcggcctcagggcttgtgggccaggagaacgcgcgagaggcatgtggcgt

SEQ ID NO: 608742 - DNA, 120 bp, Artificial Sequence
  ENSG00000175792_2 (sequence is synthesized)
catagtagaattaatcaaaagcaagaaaatggctggaagagctgtcttgttggcaggacctcctggaactggcaagacagctctggctctggctattgctcaggagctgggtagtaaggt

SEQ ID NO: 608743 - DNA, 120 bp, Artificial Sequence
  ENSG00000175792_3 (sequence is synthesized)
ccccttctgcccaatggtggggagtgaagtttactcaactgagatcaagaagacagaggtgctgatggagaacttccgcagggccattgggctgcgaataaaggagaccaaggaagttta

SEQ ID NO: 608744 - DNA, 120 bp, Artificial Sequence
  ENSG00000175792_4 (sequence is synthesized)
tgaaggtgaagtcacagagctaactccgtgtgagacagagaatcccatgggaggatatggcaaaaccattagccatgtgatcataggactcaaaacagccaaaggaaccaaacagttgaa

SEQ ID NO: 608745 - DNA, 120 bp, Artificial Sequence
  ENSG00000175792_5 (sequence is synthesized)
actggaccccagcatttttgaaagtttgcagaaagagcgagtagaagctggagatgtgatttacattgaagccaacagtggggccgtgaagaggcagggcaggtgtgatacctatgccac

SEQ ID NO: 608746 - DNA, 120 bp, Artificial Sequence
  ENSG00000175792_6 (sequence is synthesized)
agaattcgaccttgaagctgaagagtatgtccccttgccaaaaggggatgtgcacaaaaagaaagaaatcatccaagatgtgaccttgcatgacttggatgtggctaatgcgcggcccca

SEQ ID NO: 608747 - DNA, 120 bp, Artificial Sequence
  ENSG00000175792_7 (sequence is synthesized)
caagtacatcgaccagggcattgctgagctggtcccgggtgtgctgtttgttgatgaggtccacatgctggacattgagtgcttcacctacctgcaccgcgccctggagtcttctatcgc

SEQ ID NO: 608748 - DNA, 120 bp, Artificial Sequence
  ENSG00000175792_8 (sequence is synthesized)
tcccatcgtcatctttgcatccaaccgaggcaactgtgtcatcagaggcactgaggacatcacatcccctcacggcatccctcttgaccttctggaccgagtgatgataatccggaccat

SEQ ID NO: 608749 - DNA, 120 bp, Artificial Sequence
  ENSG00000175792_9 (sequence is synthesized)
gctgtatactccacaggaaatgaaacagatcattaaaatccgtgcccagacggaaggaatcaacatcagtgaggaggcactgaaccacctgggggagattggcaccaagaccacactgag

SEQ ID NO: 608750 - DNA, 120 bp, Artificial Sequence
  ENSG00000175792_10 (sequence is synthesized)
gtactcagtgcagctgctgaccccggccaacttgcttgctaaaatcaacgggaaggacagcattgagaaagagcatgtcgaagagatcagtgaacttttctatgatgccaagtcctccgc

SEQ ID NO: 608751 - DNA, 120 bp, Artificial Sequence
  ENSG00000175792_11 (sequence is synthesized)
caaaatcctggctgaccagcaggataagtacatgaagtgagatggctgaggttttcagcagtaagagactccccaggtgtgcctggcctgggtccagcctgtgggcgcttgcccctgggc

SEQ ID NO: 608752 - DNA, 120 bp, Artificial Sequence
  ENSG00000175792_12 (sequence is synthesized)
ttggggctgccgtccccactcaggcgtggtctgcagcgctgtcagttcagtgtggaaagcatttctttttaagttatcgtaactgttcctgtggttgctttgaaagaacccttccttacc

SEQ ID NO: 608753 - DNA, 120 bp, Artificial Sequence
  ENSG00000175792_13 (sequence is synthesized)
tggtgtgttttctataaatcttcataggttattttgattctctctctctctctctctaagttttttaaaaataaacttttcagaacagttttagatgtacagagtcattgtgaacataca

SEQ ID NO: 608754 - DNA, 120 bp, Artificial Sequence
  ENSG00000175792_14 (sequence is synthesized)
atagggagttcccatgtatcttgtacccagtttcccttcttgttaacgtgttacatcagatagcacatttgtcaccgtgaatgaccaatactgatgcattattctactgcgttcacattt

SEQ ID NO: 608755 - DNA, 120 bp, Artificial Sequence
  ENSG00000175792_15 (sequence is synthesized)
caggactgccactcagagctagttcacccttgctgccgccattcgaacccagagctcctggcccaaacagtctggaatgttctgtactgtgcttctaggacagtgacttgccaggccaac

SEQ ID NO: 608756 - DNA, 120 bp, Artificial Sequence
  ENSG00000175792_16 (sequence is synthesized)
tctgggctggggctgtcttggctctgtcaggagggcctctcctcaggctttctctcaggactcgtggctttgttcccgctggcccaggcgataacctcagcatttttactggagcctggg

SEQ ID NO: 608757 - DNA, 120 bp, Artificial Sequence
  ENSG00000175792_17 (sequence is synthesized)
gctaggtttttaaacaaactcaatgtaacttgtgtactctgcaatccaagccgacaccctcataaactatccctgcaggttattaaatgattaaagatctcatttatgaactgtccattt

SEQ ID NO: 608758 - DNA, 120 bp, Artificial Sequence
  ENSG00000175792_18 (sequence is synthesized)
tcgagcagcctgagacagacgctttcacgattgctctgacctgctgctctctctagtgagagagagagagcagagtgtccctgacattctggaagctgagccacagattcagtgcatctc

SEQ ID NO: 608759 - DNA, 120 bp, Artificial Sequence
  ENSG00000175792_19 (sequence is synthesized)
actgaaggcgaggcacttagcttaagctgtctcctatgaccaggctccaggattcaatatttacatctccctggagtttcagaaggtcatctggggacatttttcttggcaagacctggt

SEQ ID NO: 608760 - DNA, 120 bp, Artificial Sequence
  ENSG00000175792_20 (sequence is synthesized)
ggtttcctcagtcccagctgtgagtgagaagccgtttttaccttgaagctgtgttcaggggggagttctgttgtgagtccctcccagctccttttcttggttgtccttgtaccatccagt

SEQ ID NO: 608761 - DNA, 120 bp, Artificial Sequence
  ENSG00000175792_21 (sequence is synthesized)
aacttcagagggcccctttttgcccagctgcatttagctttggatttcagacagtgaagcccctcctgcataagctaagattgtttcagtggagctcacaccctggcagttcacccatga

SEQ ID NO: 608762 - DNA, 120 bp, Artificial Sequence
  ENSG00000175792_22 (sequence is synthesized)
gcccagcagatacgtttcatgtggcctatgcagtgtttgtgaaatgtttgaacaagttgctgacatctagacatcaggacatttctttctttctttctttttttgagatggagtttctct

SEQ ID NO: 608763 - DNA, 120 bp, Artificial Sequence
  ENSG00000175792_23 (sequence is synthesized)
tacaggcgtgagccattgtgtcctgccaaaatcaggacgtttcgtacaaggatctgagttctgagcctgtcttgagaaaagggaagactgcagacaacaccttgcagcagtggtggccgc

SEQ ID NO: 608764 - DNA, 120 bp, Artificial Sequence
  ENSG00000175792_24 (sequence is synthesized)
gggtggaggggctgcctccccagggtgtttgctggccaagcatttcaccctcacctggctcatcgcagccgctctgtcctgctggggctttccaaggcctttcccatctgtgggcagcca

SEQ ID NO: 608765 - DNA, 120 bp, Artificial Sequence
  ENSG00000175792_25 (sequence is synthesized)
atgtgctgtcccccaagcccaaccgcgatcatcagagactgggctccccctgcagctcctgcccgcagggtcccagcctggagagctgacaggcgaggcttgatgtggccacctcagtaa

SEQ ID NO: 608766 - DNA, 120 bp, Artificial Sequence
  ENSG00000175792_26 (sequence is synthesized)
acctctggctctcctccctcctggaaggctgaagctgggactcagtctttcccagctcctgtgcctctacactgggtgtgcttttatggctttaatttcaacaagggcttcttgatatct

SEQ ID NO: 608767 - DNA, 120 bp, Artificial Sequence
  ENSG00000175792_27 (sequence is synthesized)
tgtttacgaagctgccaaagtgaaaaattcctgtattatatgcggctcgaagtcctgcagttatctcagctccacaacacacaacatcattatcctggctgccccttatcactcagtgct

SEQ ID NO: 608768 - DNA, 120 bp, Artificial Sequence
  ENSG00000175792_28 (sequence is synthesized)
ggtacgcctgcaggatcctggtccaccgtgttacagcatccccgccgccagcctgcctcccctccaactctaccaagatcttcaaactgcaacaagcgtcagcctcttcttgatagatta

SEQ ID NO: 608769 - DNA, 120 bp, Artificial Sequence
  ENSG00000175792_29 (sequence is synthesized)
ttgcctgagtgcttgtaggcagtagtgcccatgctggagaggaaggttagagcccttgcaggagccccgggtaggttagaagaggccccagttctctgcctggggacaggggacgggagg

SEQ ID NO: 608770 - DNA, 120 bp, Artificial Sequence
  ENSG00000175792_30 (sequence is synthesized)
acatggaggcaagagtgagccacttgggaagctgcatacctccttgggcaccagccacacttgagtcagttgaatacagcacactggccgtgatgctattcatgcatactgcagggccgc

SEQ ID NO: 608771 - DNA, 120 bp, Artificial Sequence
  ENSG00000175792_31 (sequence is synthesized)
acatgcctcctggagggtgccgggccggcagtgctgggcaggcgttggctccctgcccaccaacccaggtctcagtttctcttatgctgcacagtgagaaatctgagcaacattgtcttt

SEQ ID NO: 608772 - DNA, 120 bp, Artificial Sequence
  ENSG00000175792_32 (sequence is synthesized)
aaagcactttagaaatggggcacttgaggtcagtcaccgttgatcatgttttttatcctttaaaagatcattaaaatccgtgcccagacggaaggaatcaacatcagtgaggaggcactg

SEQ ID NO: 608773 - DNA, 120 bp, Artificial Sequence
  ENSG00000175792_33 (sequence is synthesized)
aaccacctgggggagattggcaccaagaccacactgaggtgagctggtaccctgggcccgccggggcctccccagcacagccagggccctcgctggggtcattctggacaataaaggcag

SEQ ID NO: 608774 - DNA, 120 bp, Artificial Sequence
  ENSG00000175792_34 (sequence is synthesized)
gtcccttcctagggcatgggactctatccatccgctcttcctggcgcgatgggtgccagggcacttgagtttcaaatgcagaggatctatctgatggtttttaacaagctagagtaaggg

SEQ ID NO: 608775 - DNA, 120 bp, Artificial Sequence
  ENSG00000175792_35 (sequence is synthesized)
tgaagtccccatgtcctgcagcagatgctcccctctggtggagagtgctttgaccctgggccttcttgtggcagagaagatgcacagaactagagagcagggaccatgtggtagctcatt

SEQ ID NO: 608776 - DNA, 120 bp, Artificial Sequence
  ENSG00000175792_36 (sequence is synthesized)
agccagggccctggctcctgttctcccggtggtgttatgaggcctggtaaatctttaacttttttgatttatttaaccatcaagcaaataaaaaatgtctgggtggtggatatggagagc

SEQ ID NO: 608777 - DNA, 120 bp, Artificial Sequence
  ENSG00000175792_37 (sequence is synthesized)
cagggaggagcgcagacatagacagttctcctaattgttctccagcggctcaaacacaggaccggcagagcatgtcccttcacagtggcctgactcattgtaaaatcattgcttcacagt

SEQ ID NO: 608778 - DNA, 120 bp, Artificial Sequence
  ENSG00000175792_38 (sequence is synthesized)
cctcagcccttccctacatcccttgagtcagttcttgctcctgaggttgaaggcagaaatgcaagctgtgaggtttggatgaaggggtactttttaaaacggcagagtcttcatgccttt

SEQ ID NO: 608779 - DNA, 120 bp, Artificial Sequence
  ENSG00000175792_39 (sequence is synthesized)
ggatgggcatgtacttccagctggctatgttttcatttccctgccatgttaaatatccctatctgtcggacacctgtatacatataagtttgcagtccttttccagtagcagtgacatta

SEQ ID NO: 608780 - DNA, 120 bp, Artificial Sequence
  ENSG00000175792_40 (sequence is synthesized)
cttcctactggaggatttgtagactgtactaaagatttggggaatagcacttatgtcttcttggtggctcctggaccctctctgatgggataatgactgcagctctctgagaagtgacaa

SEQ ID NO: 608781 - DNA, 120 bp, Artificial Sequence
  ENSG00000175792_41 (sequence is synthesized)
ctttgtctccccttttctgtgttcgtagcagctggcacaagcccagcactgggctctgctcctggtgccagtgctgcctactgatgtggggggaaggtgctttcttcggtggccccagtt

SEQ ID NO: 608782 - DNA, 120 bp, Artificial Sequence
  ENSG00000175792_42 (sequence is synthesized)
cagaggcactgaggacatcacatcccctcacggcatccctcttgaccttctggaccgagtgatgataatccggaccatgctgtatactccacaggaaatgaaacaggtaccctctagggt

SEQ ID NO: 608783 - DNA, 120 bp, Artificial Sequence
  ENSG00000175792_43 (sequence is synthesized)
atcgtcatctttgcatccaaccgaggcaactgtgtcatcaggtcccatgactcaatgaacatgcttgtccagctcatctggaaacctgctgccttcaaataccatctcatcgtttcaaca

SEQ ID NO: 608784 - DNA, 120 bp, Artificial Sequence
  ENSG00000175792_44 (sequence is synthesized)
caatatgatgacagtgcaccccacagagtgggggactgcacacaaggcattctgaaacttaaatccagaccatggaaactccctggggttggatctggacacacctggaaatagatgacc

SEQ ID NO: 608785 - DNA, 120 bp, Artificial Sequence
  ENSG00000175792_45 (sequence is synthesized)
actgcaaagacaaagatggtggcgatgagattcatgaggttgggaagattctggcggtagaacgcctcccgaagggctcggaccttgtctgtgcgtgtggccagcagatggaaaagtgcg

SEQ ID NO: 608786 - DNA, 120 bp, Artificial Sequence
  ENSG00000175792_46 (sequence is synthesized)
atgatagcaccttcaaattccattcctgttggcagaggaggagacatatatgaaggaacgaacaggcaactcaatttgcttctagccttcttagcagacaaataaaaagaggaaaacaaa

SEQ ID NO: 608787 - DNA, 120 bp, Artificial Sequence
  ENSG00000175792_47 (sequence is synthesized)
gtcccggcaaaggctcgagcgaattcggacacggggcccggtcgctccgcccgcgtccctgagcccggctcccgccccggcccgcgctcaccgccgatgatggtccggatgagggaggcg

SEQ ID NO: 608788 - DNA, 120 bp, Artificial Sequence
  ENSG00000175792_48 (sequence is synthesized)
tgcccggggcagtcgaccagcgtgacctgaagcagtggctcgccgggctcgggctcggcctcgggcgctgcctggaactcgggcaaagacgaccgcaggcgcgcgggcagcggcaccgag

SEQ ID NO: 608789 - DNA, 120 bp, Artificial Sequence
  ENSG00000175792_49 (sequence is synthesized)
aagcacgagaagcccagatcgagcgtgatgccgcgctcgcggctctgcggctgcttgtcaaaggcggcggtggaggctgtggtgcttagcgcccgcgccagcgccgtcttgccgctgtcg

SEQ ID NO: 608790 - DNA, 120 bp, Artificial Sequence
  ENSG00000175792_50 (sequence is synthesized)
gtcgatgtggcccagcacgcccacgttcacgttcacccgccgccctgccatgccgccgccgccgcctcggacacccgcccggcccgcccctcacctccctcggtagtcgccgcggtccgg

SEQ ID NO: 608791 - DNA, 120 bp, Artificial Sequence
  ENSG00000175792_51 (sequence is synthesized)
ttaagttgcccccccgtaaccggcgcgctgtgcacacccgttccggcccggaagcttccgccctcctgaggctcacgggcacagccgagcgccgtgctccgagtgggtggtctaggaact

SEQ ID NO: 608792 - DNA, 120 bp, Artificial Sequence
  ENSG00000175792_52 (sequence is synthesized)
ggaggtcaccgtaggcagggtttctctctcacgtggctcctcctgcctgaagcctctaggagcccgagatggagggatccttctgagaagtgaagccatttggactttctgggcatgtgg

SEQ ID NO: 608793 - DNA, 87 bp, Artificial Sequence
  ENSG00000175792_53 (sequence is synthesized)
atcacatcccctcacggcatccctcttgaccttctggaccgagtgatgataatccggaccatgctgtatactccacaggaaatgaaa

SEQ ID NO: 608794 - DNA, 120 bp, Artificial Sequence
  ENSG00000175792_54 (sequence is synthesized)
agtagttgtactgaggactgtgcagactgaagagtgctgtggcagcatctaaggtcacctggactttgcccttccttacctaactgctccatctccaagggtacagctgtatctggcacc

SEQ ID NO: 608795 - DNA, 120 bp, Artificial Sequence
  ENSG00000175793_0 (sequence is synthesized)
acagagtccggcattggtcccaggcagcagttagcccgccgcccgcctgtgtgtccccagagccatggagagagccagtctgatccagaaggccaagctggcagagcaggccgaacgcta

SEQ ID NO: 608796 - DNA, 120 bp, Artificial Sequence
  ENSG00000175793_1 (sequence is synthesized)
tgaggacatggcagccttcatgaaaggcgccgtggagaagggcgaggagctctcctgcgaagagcgaaacctgctctcagtagcctataagaacgtggtgggcggccagagggctgcctg

SEQ ID NO: 608797 - DNA, 120 bp, Artificial Sequence
  ENSG00000175793_2 (sequence is synthesized)
gagggtgctgtccagtattgagcagaaaagcaacgaggagggctcggaggagaaggggcccgaggtgcgtgagtaccgggagaaggtggagactgagctccagggcgtgtgcgacaccgt

SEQ ID NO: 608798 - DNA, 120 bp, Artificial Sequence
  ENSG00000175793_3 (sequence is synthesized)
gctgggcctgctggacagccacctcatcaaggaggccggggacgccgagagccgggtcttctacctgaagatgaagggtgactactaccgctacctggccgaggtggccaccggtgacga

SEQ ID NO: 608799 - DNA, 120 bp, Artificial Sequence
  ENSG00000175793_4 (sequence is synthesized)
caagaagcgcatcattgactcagcccggtcagcctaccaggaggccatggacatcagcaagaaggagatgccgcccaccaaccccatccgcctgggcctggccctgaacttttccgtctt

SEQ ID NO: 608800 - DNA, 120 bp, Artificial Sequence
  ENSG00000175793_5 (sequence is synthesized)
cagcaccctcatcatgcagctgctgcgagacaacctgacactgtggacggccgacaacgccggggaagaggggggcgaggctccccaggagccccagagctgagtgttgcccgccaccgc

SEQ ID NO: 608801 - DNA, 120 bp, Artificial Sequence
  ENSG00000175793_6 (sequence is synthesized)
cccgccctgccccctccagtcccccaccctgccgagaggactagtatggggtgggaggccccacccttctcccctaggcgctgttcttgctccaaagggctccgtggagagggactggca

SEQ ID NO: 608802 - DNA, 120 bp, Artificial Sequence
  ENSG00000175793_7 (sequence is synthesized)
gagctgaggccacctggggctggggatcccactcttcttgcagctgttgagcgcacctaaccactggtcatgcccccacccctgctctccgcacccgcttcctcccgaccccaggaccag

SEQ ID NO: 608803 - DNA, 120 bp, Artificial Sequence
  ENSG00000175793_8 (sequence is synthesized)
gctacttctcccctcctcttgcctccctcctgcccctgctgcctctgatcgtaggaattgaggagtgtcccgccttgtggctgagaactggacagtggcaggggctggagatgggtgtgt

SEQ ID NO: 608804 - DNA, 82 bp, Artificial Sequence
  ENSG00000175793_9 (sequence is synthesized)
cagtgcaagaccgagattgagggaaagcatgtctgctgggtgtgaccatgtttcctctcaataaagttcccctgtgacactc

SEQ ID NO: 608805 - DNA, 80 bp, Artificial Sequence
  ENSG00000175806_0 (sequence is synthesized)
gtccagggaaggaacacgcccccggtgacagccggtacggccccgggtttgggcaacctcgattacgggcggcctccagc

SEQ ID NO: 608806 - DNA, 120 bp, Artificial Sequence
  ENSG00000175806_1 (sequence is synthesized)
cccccggttccggccgcggaccccactctctgccgttccggctgcggctccgctgccggtagcgccgtcccccgggaccacccttcggctggcgccctcccatgctctcggccacccgga

SEQ ID NO: 608807 - DNA, 120 bp, Artificial Sequence
  ENSG00000175806_2 (sequence is synthesized)
cggagggcttgccagctcctcctcctccacagcctctttcccgtcccgaggatgggcaactcggcctcgaacatcgtcagcccccaggaggccttgccgggccggaaggaacagacccct

SEQ ID NO: 608808 - DNA, 120 bp, Artificial Sequence
  ENSG00000175806_3 (sequence is synthesized)
gtagcggccaaacatcatgtcaatggcaacagaacagtcgaacctttcccagagggaacacagatggctgtatttggaatgggatgtttctggggagctgaaaggaaattctgggtcttg

SEQ ID NO: 608809 - DNA, 120 bp, Artificial Sequence
  ENSG00000175806_4 (sequence is synthesized)
aaaggagtgtattcaactcaagttggttttgcaggaggctatacttcaaatcctacttataaagaagtctgctcagaaaaaactggccatgcagaagtcgtccgagtggtgtaccagcca

SEQ ID NO: 608810 - DNA, 120 bp, Artificial Sequence
  ENSG00000175806_5 (sequence is synthesized)
gaacacatgagttttgaggaactgctcaaggtcttctgggagaatcacgacccgacccaaggtatgcgccaggggaacgaccatggcactcagtaccgctcggccatctacccgacctct

SEQ ID NO: 608811 - DNA, 120 bp, Artificial Sequence
  ENSG00000175806_6 (sequence is synthesized)
cccatcactaccgacatccgggagggacagactttctactatgcggaagactaccaccagcagtacctgagcaagaaccccaatggctactgcggccttgggggcaccggcgtgtcctgc

SEQ ID NO: 608812 - DNA, 120 bp, Artificial Sequence
  ENSG00000175806_7 (sequence is synthesized)
ccagtgggtattaaaaaataatttctccccacatggtgggcctttgaggttccagtaaaaatgctttcaacaaattgggcaatgcttgtgtgattcacaatcgtggcatttaaagtgcac

SEQ ID NO: 608813 - DNA, 120 bp, Artificial Sequence
  ENSG00000175806_8 (sequence is synthesized)
aaagtacaaaggaatttatacagattgggtttaccgaagtataatctataggaggcgcgatggcaagttgataaaatgtgacttatctcctaataagttatggtgggagtggagctgtgc

SEQ ID NO: 608814 - DNA, 120 bp, Artificial Sequence
  ENSG00000175806_9 (sequence is synthesized)
agtttcctgtgtcttctggggtctgagtgaagatagcagggatgctgtgttcacccttcttggtagaagctaaggtgtgagctgggaggttgctggacaggatgggggaccccagaagtc

SEQ ID NO: 608815 - DNA, 120 bp, Artificial Sequence
  ENSG00000175806_10 (sequence is synthesized)
ctttatctgtgctctctgcccgccagtgccttacaatttgcaaacgtgtatagcctcagtgactcattcgctgaaatccttcgctttaccaaatctagacatacataaggggctttctct

SEQ ID NO: 608816 - DNA, 120 bp, Artificial Sequence
  ENSG00000175806_11 (sequence is synthesized)
cccttttcagccctctctgtgcagagaaaagatgtgagtccgcttgatgaattctaatgctttgcttagagctatgagaaatgtttgttttaataaaaacctacagtccaataatgccaa

SEQ ID NO: 608817 - DNA, 120 bp, Artificial Sequence
  ENSG00000175806_12 (sequence is synthesized)
aaacttagaaggctttttaagtctcttgggctatttgaaagtgttggtacatacaatgacgtttagtcaccagtattaagggaaataaaagcctttttcaaaacgaagcttccatagtgt

SEQ ID NO: 608818 - DNA, 120 bp, Artificial Sequence
  ENSG00000175806_13 (sequence is synthesized)
ccatgcatttgggaaatactatatttgattttttgcatgtatgattataccatgagagacaggattaatatagaagatggcaaggcaaatttctaattagagggaatattaattttctac

SEQ ID NO: 608819 - DNA, 120 bp, Artificial Sequence
  ENSG00000175806_14 (sequence is synthesized)
ctgtctacgtcctgagatacccagcagaggacagggttccacttggaaaattcttttgaatctcacacaagacagtaataaacatagagggagaaataacaagacattttaccatgtctt

SEQ ID NO: 608820 - DNA, 120 bp, Artificial Sequence
  ENSG00000175806_15 (sequence is synthesized)
gtgtcatgtaggaaactttacatttcagaaaatatgaagacaaaaagatgaaggaaagggctttaaggatacaaaggaccttattatggaaggaaagcagtgttgtcaagagagctaaaa

SEQ ID NO: 608821 - DNA, 120 bp, Artificial Sequence
  ENSG00000175806_16 (sequence is synthesized)
agagtgagagagagaaagagggagagagagaggcagagggagagctgaggaaagaaaaaaaggcaagacttggcacagctcagtcaaatcagcttcttttgtctgctttctcggcttgag

SEQ ID NO: 608822 - DNA, 120 bp, Artificial Sequence
  ENSG00000175806_17 (sequence is synthesized)
aaaagaggcaggaaagacttaaggaggaggatggagtcttaaggagtgaaacttgaacttcacgctgggtttgctgaccttgaacatgctggattctgcttacagaatttgacagctgct

SEQ ID NO: 608823 - DNA, 120 bp, Artificial Sequence
  ENSG00000175806_18 (sequence is synthesized)
tcatatctttggttttacttttcctctttgttattctcttggcaattagaagaaccgaagaggccagagtcctccgaagacgcctgcttggaagttgagatgctgttgctgaaactgcta

SEQ ID NO: 608824 - DNA, 120 bp, Artificial Sequence
  ENSG00000175806_19 (sequence is synthesized)
aaaggaaactgacaaaagcttcttttctctctgtcttgagcttcactgcgtattcttaaccatgtggagctgggagctaacgcatcacagccaactgtatctggagtgcatttgctcata

SEQ ID NO: 608825 - DNA, 120 bp, Artificial Sequence
  ENSG00000175806_20 (sequence is synthesized)
tagcccttattttattttttagtcttatttttagtttcctttgaatataataataaaaaaaaaaaacccaatcattgaattcttagcttcagccaatatagtgtgaggttagacatattg

SEQ ID NO: 608826 - DNA, 120 bp, Artificial Sequence
  ENSG00000175806_21 (sequence is synthesized)
gctcctagcccctggcttaggccaccatgactagggccaggttctgattttagagggcagtctgctgcttttcaactggaattgtgttttatttgcacatctcttagaaatttctgtcag

SEQ ID NO: 608827 - DNA, 120 bp, Artificial Sequence
  ENSG00000175806_22 (sequence is synthesized)
ctcttagaaatttctgtcagcctctaggagtggagccattgtgtctaatacgtgtgctaaatgaggttttaagagtaggcctgggccagggccagtggctcatgcctgtaatcccagtac

SEQ ID NO: 608828 - DNA, 120 bp, Artificial Sequence
  ENSG00000175806_23 (sequence is synthesized)
aaaagctggtgcttccctgttcttcctcagccatgctggggctcactgcagcctcctctgctcaactcgcctgggtgcagccatcttcaagaaaacattattaaagcaatattattagta

SEQ ID NO: 608829 - DNA, 120 bp, Artificial Sequence
  ENSG00000175806_24 (sequence is synthesized)
tgaatgatagattattattttacattgtaggtacagccagtgtgatcagacaaagcaattcgagaactacaaaagaggaaaaaagatcagaagttcttaaatacataagggaatgcagca

SEQ ID NO: 608830 - DNA, 120 bp, Artificial Sequence
  ENSG00000175806_25 (sequence is synthesized)
aaatctgaggcccagacatttccttatcaacagaatactccggtggattttcaagcaggctgttcagcagaggtttcgagcaggagcccaggtgtgggaagagcggagtgtgggagtcct

SEQ ID NO: 608831 - DNA, 120 bp, Artificial Sequence
  ENSG00000175806_26 (sequence is synthesized)
cgtgtgaccctctgggggtggtgatggaactgactgtatggtctgcaaaacctaaaatatttactgtcaggtgcttatgtgtcctgtcctgagcccgtttcctctcttgtaaaatggggc

SEQ ID NO: 608832 - DNA, 90 bp, Artificial Sequence
  ENSG00000175806_27 (sequence is synthesized)
gtcctgtcctgagcccgtttcctctcttgtaaaatggggcaatgctgcttgatgaaaccagtcaagttgtggttggattcttatatgtaa

SEQ ID NO: 608833 - DNA, 120 bp, Artificial Sequence
  ENSG00000175809_0 (sequence is synthesized)
tttttgaggaagtagacaaacctaaatatgtgtctgaactccaaggaatatgaacaagatgcctgctggtgaacaagaatgtgaatataacaaagaagggaagtactactctaaaggagt

SEQ ID NO: 608834 - DNA, 120 bp, Artificial Sequence
  ENSG00000175809_1 (sequence is synthesized)
taaactggtgagaaaaaagaaaaaaattcctggttaccgttggggggacattaagataaacatcataggtgaaaaggatgatttaccaattcatttctgtgacaaatgtgatttgcctat

SEQ ID NO: 608835 - DNA, 120 bp, Artificial Sequence
  ENSG00000175809_2 (sequence is synthesized)
taaaatctatgggcgaataattccgtgcaagcatgctttttgctatcactgtgctaatttatatgacaaagtcggatataaagtatgtccgcgctgtcgttatcctgtgctgagaattga

SEQ ID NO: 608836 - DNA, 120 bp, Artificial Sequence
  ENSG00000175809_3 (sequence is synthesized)
ggcgcataaacgaggttctgtcttcatgtgtagtattgttcagcagtgcaagagaacatacttgtctcagaaaagcttacaggctcatatcaaacgccgccataagagagctcgaaaaca

SEQ ID NO: 608837 - DNA, 120 bp, Artificial Sequence
  ENSG00000175809_4 (sequence is synthesized)
agttaccagcgcttcgcttgaaaaagttcgtcctcatattgctccgccacaaactgaaatctctgacatccctaaaagactgcaagacagggaccatctaagctatattccaccagaaca

SEQ ID NO: 608838 - DNA, 120 bp, Artificial Sequence
  ENSG00000175809_5 (sequence is synthesized)
gcacaccatggtgtcactaccgtctgtgcaacatatgctacaagagcaacataatcagccacataaggatatccaggctcctcccccagaactatctctaagtctgccttttcccatcca

SEQ ID NO: 608839 - DNA, 120 bp, Artificial Sequence
  ENSG00000175809_6 (sequence is synthesized)
gctaagaagccaacacctcccgactattatcctgagtgtcaaagtcaaccagcggtatcgtcccctcatcatattatacctcagaaacagcattatgcgccacctccatctccatcatca

SEQ ID NO: 608840 - DNA, 120 bp, Artificial Sequence
  ENSG00000175809_7 (sequence is synthesized)
ccagtaaaccatcaaatgccatatcctcctcaggatgtagttactcctaactcggttcgtagccaagtgccagctctaaccacgacctacgatccatcatctggatatattattgtaaag

SEQ ID NO: 608841 - DNA, 120 bp, Artificial Sequence
  ENSG00000175809_8 (sequence is synthesized)
gtgccacctgatatgaattctcctccactacgtgctccccagtctcaaaatggtaatccatctgcaagtgaatttgcttctcaccattataaccttaacattttacctcagttcaccgaa

SEQ ID NO: 608842 - DNA, 120 bp, Artificial Sequence
  ENSG00000175809_9 (sequence is synthesized)
aatcaagaaaccttgagccctcagtttacacaaacagatgcaatggatcatagaaggtggcctgcatggaaacgactgtcaccttgtccaccaacgcggagtccacctccttcaacccta

SEQ ID NO: 608843 - DNA, 120 bp, Artificial Sequence
  ENSG00000175809_10 (sequence is synthesized)
catggtcgatcacatcattcacaccagagaagacatagacggtattaaggatgataacagtatttggaactgaagacctgatgggaaaaaaaccttcaagttctatactgtactgtggat

SEQ ID NO: 608844 - DNA, 120 bp, Artificial Sequence
  ENSG00000175809_11 (sequence is synthesized)
aagcggctcagttcagcagagctggagttgaacaactttgttcctctggtgtggtaaattgacctaaaggtgacctctgacgatttcctgaaataaatatgcaatgttacattttcaaaa

SEQ ID NO: 608845 - DNA, 120 bp, Artificial Sequence
  ENSG00000175820_0 (sequence is synthesized)
gcacttgataagataccagcagcactggccaaatgttgcacatggttatgagttgggcataccgaggttttatatttcagggcctctgaaatcaaggacttctgaatgagacaccagtct

SEQ ID NO: 608846 - DNA, 120 bp, Artificial Sequence
  ENSG00000175820_1 (sequence is synthesized)
ctttcacatatgacattaaaatgtcaaagcaatattattcctttaaaaaaggggtagggagtggactggaagataatacattcatgacattatgggactttctagagtcctggattattc

SEQ ID NO: 608847 - DNA, 120 bp, Artificial Sequence
  ENSG00000175820_2 (sequence is synthesized)
aaaatgattgggtggcaattttctttataattttactaggaattatttttgagataatactcatgaaagcttgtgcatccttttggaagaagcccacacttcctgaaaagggtagttcag

SEQ ID NO: 608848 - DNA, 120 bp, Artificial Sequence
  ENSG00000175820_3 (sequence is synthesized)
atgtccaggagacggaagacagttgccccaaaagcaggaaacttgctccagagaattggtcagttattaattcatcttcaggagaaagagttggcacctttttagaaaaaagaattactt

SEQ ID NO: 608849 - DNA, 120 bp, Artificial Sequence
  ENSG00000175820_4 (sequence is synthesized)
catcacttacatctgaagaaaaggaatgtaactttgaagatagaattttattctcacgtgaaatactatggtcaggtactagtgaaagtgaagatcaagtaagtccctctagtgaaagtc

SEQ ID NO: 608850 - DNA, 120 bp, Artificial Sequence
  ENSG00000175820_5 (sequence is synthesized)
atgtgccatcttcaaatggaatcagctcatctttgccattgttttattcagaagtagaggaaacgtgtctaagccatacagagcatccagacagagaatatgaaacaatacaattttcct

SEQ ID NO: 608851 - DNA, 120 bp, Artificial Sequence
  ENSG00000175820_6 (sequence is synthesized)
ccaagaaattattttcaatgatgaaaaccaacaaaaacaaaaattcaggattttcttctgatcttagcttttcagcatctagattcactgtagaaaatgaagatctagatgtggcacctt

SEQ ID NO: 608852 - DNA, 120 bp, Artificial Sequence
  ENSG00000175820_7 (sequence is synthesized)
gccctcttgcccacttatttctttctagagatcaagttagacttctggaagaaaatgtgaggaatcaaattccttcaaaacccaaaactaagttagggagcagaactacttatcaatgct

SEQ ID NO: 608853 - DNA, 120 bp, Artificial Sequence
  ENSG00000175820_8 (sequence is synthesized)
caagatctcaagagtccttgaatcagaatcaaccttctgttggaatggttatttctgtccaagcacaggattcttttccaggacaaaatgcttttcagaatcaaggtctttatgaagtcc

SEQ ID NO: 608854 - DNA, 120 bp, Artificial Sequence
  ENSG00000175820_9 (sequence is synthesized)
aatttactagtcaagcccaatatataaatcataaccaagaatcaattaagagccagcctgagagcaaagccagcaactttgcccagcctgaagatgtgatgaagaagccattttctagca

SEQ ID NO: 608855 - DNA, 120 bp, Artificial Sequence
  ENSG00000175820_10 (sequence is synthesized)
gcacacaagactccttccagtcccaagatctggataggaaccaacattttgttgaagttccatcaattgttgaggcaaaatattcagtaaagggcctggagtctgatgaacacttaggtg

SEQ ID NO: 608856 - DNA, 120 bp, Artificial Sequence
  ENSG00000175820_11 (sequence is synthesized)
aggaccaacattgtgtttggtttatagattcaaacaaggttaaatattcaattaaggggcaagacactatttttaagaatgctgaatttctcgttttaactctgaatccaaatttagtca

SEQ ID NO: 608857 - DNA, 120 bp, Artificial Sequence
  ENSG00000175820_12 (sequence is synthesized)
ctgaagatatgccacaactaaggagtgtaaaagcacaaggccagcaacaaattgtttcatcagaattgaaccaggattctgtatatagctcagtgcctcttttgtctaccattaaagggc

SEQ ID NO: 608858 - DNA, 120 bp, Artificial Sequence
  ENSG00000175820_13 (sequence is synthesized)
agaaaaatagaagaaaaacaccagacagtaaaagcaaactcagtcttaatgttccatctctaaaagccaaaaaaacaccaacttcacaagtatttcaaatcacagtatgtcacactttaa

SEQ ID NO: 608859 - DNA, 120 bp, Artificial Sequence
  ENSG00000175820_14 (sequence is synthesized)
aaaataggaatgagttaggatgcaagaataacactgagaagaaagaattacatgaaaggaaagatatatcagatatagctttgcatcttatttctgtttccaagcttattctgccttatg

SEQ ID NO: 608860 - DNA, 120 bp, Artificial Sequence
  ENSG00000175820_15 (sequence is synthesized)
ttaaaaattattccagaaaacaactagtgaaagtcatgccgggtttaataaaatgtggacattttctgcagaagcaaaataagtcaccagatacagagaaaatcaattatgcaggtcctc

SEQ ID NO: 608861 - DNA, 120 bp, Artificial Sequence
  ENSG00000175820_16 (sequence is synthesized)
ttgaggagacaggaatctcagatattactaaaaaggaaaaggagtatgacaaagaaaacaaaagactaaaaaacatttcaccaaaaatgttacctcagctagaacaatccttcatggtca

SEQ ID NO: 608862 - DNA, 120 bp, Artificial Sequence
  ENSG00000175820_17 (sequence is synthesized)
acactgttcaactaaaagcaccttgtttactagtagaaacaaatgggaagagtaaagaatctcttaaagactcaattacacaagcaaagggaattggtattacagaatttcatgttctaa

SEQ ID NO: 608863 - DNA, 120 bp, Artificial Sequence
  ENSG00000175820_18 (sequence is synthesized)
atagtaaaaaaccatttgatctccatattccaaagcacaagacatctttagaagaagctatatcaaaacctatgcagaaacttgtttcctctcctgaaatggaatcgaacaatagaatga

SEQ ID NO: 608864 - DNA, 120 bp, Artificial Sequence
  ENSG00000175820_19 (sequence is synthesized)
aaatacaggaggacctacaaagttcagaaaattcccatcttcaactttcaaatggagaggagttaccaaccagtacaccaaaaacgcaaaggtgctttccaagggaaaatacacagaaac

SEQ ID NO: 608865 - DNA, 120 bp, Artificial Sequence
  ENSG00000175820_20 (sequence is synthesized)
aaaaagattttttggaacttgttctggagttgtcaaatgtcggtttgctcatttccccaggaagcaaaatgcataaaagcagtgaagaattagaagccataaaaattcaagtgaatacag

SEQ ID NO: 608866 - DNA, 120 bp, Artificial Sequence
  ENSG00000175820_21 (sequence is synthesized)
aaagtgtaaatctgaaggaaagtaaaccattgatacttaatgttacagaagacagtgacctacgtgaaagtgaggaactggaatgcaacactggaagtaacataacaaatatgcatcaag

SEQ ID NO: 608867 - DNA, 120 bp, Artificial Sequence
  ENSG00000175820_22 (sequence is synthesized)
ataaagaaacgtctgatgcatttcacagtgccacttacactaccatttctcaactacctgatacagaaacacatagcatatcaaaagccaaggcagacacattaagaataataaggctca

SEQ ID NO: 608868 - DNA, 120 bp, Artificial Sequence
  ENSG00000175820_23 (sequence is synthesized)
gtcattcagcatcaaagcaagagaaattaccagatgagaaggaaacacagaacgcagaatacattgataagagctgtacatttaaaaagccacaacaatgtgatagaaaggaacaggaga

SEQ ID NO: 608869 - DNA, 120 bp, Artificial Sequence
  ENSG00000175820_24 (sequence is synthesized)
aagaggcaaattcagagctgacacaaggcttcaggttcagcatacatctaaagcaaaagcccaagtatgtcaaattccaaatggaacagatcagttcaggaagtagtaaagccccaaata

SEQ ID NO: 608870 - DNA, 120 bp, Artificial Sequence
  ENSG00000175820_25 (sequence is synthesized)
aagagcaagaagtccaaccacaaactctttctacacaaactattttggagaatagtccatgccccatgatggatccatttcaagttgagaaggtgaagcaaagcacagatagacctacag

SEQ ID NO: 608871 - DNA, 120 bp, Artificial Sequence
  ENSG00000175820_26 (sequence is synthesized)
acagagagagtgccggagatccaaagaatccacttacaatgccagagaacttgccagttggtgaacttttaattgaaacaacagagtatagtgtcccatttggtggaaacctccaaaaga

SEQ ID NO: 608872 - DNA, 120 bp, Artificial Sequence
  ENSG00000175820_27 (sequence is synthesized)
caacggatagtcatattgcagaagaaaaggaagatgtaaaaagatatttacctgcagttgccctggggtctttcaataaccacttgcttactttaccatattttaaaaggcaggaaatta

SEQ ID NO: 608873 - DNA, 120 bp, Artificial Sequence
  ENSG00000175820_28 (sequence is synthesized)
aaaaaaaattatcagaaacaaaaagtgtactcagtgtcaaatatgtaattatgaaagtaaagaagccagcaatctcactgatgccttatattaatatatgtggtacttcaaaccacagga

SEQ ID NO: 608874 - DNA, 120 bp, Artificial Sequence
  ENSG00000175820_29 (sequence is synthesized)
aaaaaatgggaggcaattttgaaattataattaaacagatactgcaagataaaattgcagcaggtatgcttctgaatgttatttaccctcccatgtctattttgcctaatactagaatgt

SEQ ID NO: 608875 - DNA, 120 bp, Artificial Sequence
  ENSG00000175820_30 (sequence is synthesized)
atagcagattaaatgcagagaatcacagtcatatcaagctagtccaagaggaatcccaaattgaaagggaagaaaagtatccatatttcattaatgagggaaatgaatcccaaaacacac

SEQ ID NO: 608876 - DNA, 120 bp, Artificial Sequence
  ENSG00000175820_31 (sequence is synthesized)
tagatgctaaattgcaagatgaagtaaaaggcgtcaaagaaactctaccaaaagcagtcctgcatgatagctgcaaccttggacttgatgcacatctagagaaggagattaaaacagaga

SEQ ID NO: 608877 - DNA, 120 bp, Artificial Sequence
  ENSG00000175820_32 (sequence is synthesized)
aagaaatgcatcaaccaatcccattcacagaaactattattgagtctgttgtttctcccataatggaactatctcatgctgagaatgtgaagagtactcaaaaaacacaaacagactgca

SEQ ID NO: 608878 - DNA, 120 bp, Artificial Sequence
  ENSG00000175820_33 (sequence is synthesized)
aatgcactgcagattcagagacgccttctccaatatcaggaaaatcactgattggagaccctttaaaccaaacaagagaaagttatattccaagtaatggaagtgatacaagagaaatgg

SEQ ID NO: 608879 - DNA, 120 bp, Artificial Sequence
  ENSG00000175820_34 (sequence is synthesized)
gttactgttttgcagaagaaaagacagaaataccaaaagatttaccagcaacttcgccagagactttcaattattgcactcctgttttatcttgttctaaagtgatgaaaaagagagtaa

SEQ ID NO: 608880 - DNA, 120 bp, Artificial Sequence
  ENSG00000175820_35 (sequence is synthesized)
catttgcactcacaacaagtacagcgaagcccaaatgtgtaaatacaaaggctgtgaagccatcaatctcagagacagtcagtgtcacaagccacagaaagaaatcagaattagacttta

SEQ ID NO: 608881 - DNA, 120 bp, Artificial Sequence
  ENSG00000175820_36 (sequence is synthesized)
agactaagtttaaaaagataaaccaaactaaaggattggtacctgaatgtctaaataccctttgctctccaatgcatagcagattgcagagagagttctgtctccctgcgtctcaattaa

SEQ ID NO: 608882 - DNA, 120 bp, Artificial Sequence
  ENSG00000175820_37 (sequence is synthesized)
agcaaggagaaacagcagataagacatacactgatgtctttgctaagaatagcatatcccatgacagagaggaaaaattgcaagatggaaaggaagaggaacataaagttttattagaag

SEQ ID NO: 608883 - DNA, 120 bp, Artificial Sequence
  ENSG00000175820_38 (sequence is synthesized)
cagcgccacagctgagccagcacctggggtctgaggcgggtcaaatgaaggaaatccatcttgaatcagacccagtgctgaactgtttaacactggagctacatattaatggacaacgtt

SEQ ID NO: 608884 - DNA, 120 bp, Artificial Sequence
  ENSG00000175820_39 (sequence is synthesized)
tgcagcaccaaacaggttttgaacaaactactttagagactagtctccaaatgggtcctttagaagctgaagaactacaaaaagccaacgaaacagaaaatgacataaaagtccttggag

SEQ ID NO: 608885 - DNA, 120 bp, Artificial Sequence
  ENSG00000175820_40 (sequence is synthesized)
gtcctaagattccacctcccaaagctttacaggctctggagaacagcgatggcttaatactcaatgcatatcagaaggataatgagcttgtcaaatcagatgaggaactgaaccaaccag

SEQ ID NO: 608886 - DNA, 120 bp, Artificial Sequence
  ENSG00000175820_41 (sequence is synthesized)
gaagtacaaatattcaggtacaaccacaaacacattttacacaaactattttgaagtctacttcatgccctacactggatcaatttccatttgaaaaggtagagagtcatgttaggtttt

SEQ ID NO: 608887 - DNA, 120 bp, Artificial Sequence
  ENSG00000175820_42 (sequence is synthesized)
cacctctaaagtctggggaagcaaaggttgatgaaatcatattttatgcaagagaaggtggtatctcatctgattctagccatcaaaaggaacaggctggtggtactgaaaagaaagaga

SEQ ID NO: 608888 - DNA, 120 bp, Artificial Sequence
  ENSG00000175820_43 (sequence is synthesized)
cagcgatttttggttcctgcatgcctgctttatctacacctaaaacgacgagaaacttaaaacaattttcagacatgaaaactttagtgaatcccaaatgtggaattataaaggcaaaga

SEQ ID NO: 608889 - DNA, 120 bp, Artificial Sequence
  ENSG00000175820_44 (sequence is synthesized)
agccatcaatttcatacatgctcaatatcagggctggtgctggtccgaaacgtagaaaagaactgagctgtaacttgacaaccaaaatgaaagaactgcatcaaggcaaaaagggggtag

SEQ ID NO: 608890 - DNA, 120 bp, Artificial Sequence
  ENSG00000175820_45 (sequence is synthesized)
atgaaacatatgctttcctgactatgacacctgacattaacaagtatagcaaggtagaaacagaaaaagacacgctaagagaaaaaagactcagttctactcaagtaaagcaagatacat

SEQ ID NO: 608891 - DNA, 120 bp, Artificial Sequence
  ENSG00000175820_46 (sequence is synthesized)
ctccacatgaagatagtattacttcacgtgacattaaagaaacccttcttcaagatgaagagcaagaagaaaggaaacaggaggcattgttaaaagtaattccacagcacctgcaacatt

SEQ ID NO: 608892 - DNA, 120 bp, Artificial Sequence
  ENSG00000175820_47 (sequence is synthesized)
tcatgttccgttcaggtcaggggaaggatcttgactttcacaaattagaaaaccaaggaagtaggaaaattctgtttgttaccaaacaagatgtcccacagcaacttcagcctgcagagc

SEQ ID NO: 608893 - DNA, 120 bp, Artificial Sequence
  ENSG00000175820_48 (sequence is synthesized)
caatacaaagagaggagacaaagaaatgcctccagacccaaaatggcacaatatgtacagtaaattcaaaacttcttcctctaaaatcagaggactcagtaaatggtgaagttttaactg

SEQ ID NO: 608894 - DNA, 120 bp, Artificial Sequence
  ENSG00000175820_49 (sequence is synthesized)
gtgcaataaaacgtggtgtaccaactgataggaaatgtatgggggaacagcacaattcaggtaaaggggaaaaggcagagtttaataaagatctacaagcaactgtcctggagttacaga

SEQ ID NO: 608895 - DNA, 120 bp, Artificial Sequence
  ENSG00000175820_50 (sequence is synthesized)
aatcaccacatggtggggaggcacagaaggccaatttgactgacatggaaagtggatctagtaatgcaatgaacatgaatgtacaacatgaaagggaagataaaaatattcaaaaaatgt

SEQ ID NO: 608896 - DNA, 120 bp, Artificial Sequence
  ENSG00000175820_51 (sequence is synthesized)
taacagaatcagttccatgctatagtcaacacctccgtttcagtacacatcaaatgaaagatcctgacccttgcaaatcaggatctgaaccgaagagtcccgaaggcagatcttggaatt

SEQ ID NO: 608897 - DNA, 120 bp, Artificial Sequence
  ENSG00000175820_52 (sequence is synthesized)
tgtctcacatagtgcaaaaaacaaagcaagaaacacactttagagaaactgttttagagcctatttctggatacatgatgaaacaaagtcctcatatgcaagaaggaataaaatgtatgg

SEQ ID NO: 608898 - DNA, 120 bp, Artificial Sequence
  ENSG00000175820_53 (sequence is synthesized)
aaggtctaaagacttcatttcccaaaacagggaaatcaaagattggttcaataccacgtgataccccttgggatgaaaatcctagaaggaaatgggatagttctatttctgagaaaactg

SEQ ID NO: 608899 - DNA, 120 bp, Artificial Sequence
  ENSG00000175820_54 (sequence is synthesized)
catggaatcaaaaaaacttacaaacagtcttaaaacctttagatttctccagcctcatgtcatctgaatatgaaagccggagctatacattagagtttataggcaagaaaagtatgagtc

SEQ ID NO: 608900 - DNA, 120 bp, Artificial Sequence
  ENSG00000175820_55 (sequence is synthesized)
ccaaatgtgtaactttgaaggcaaagcaactacgaattttgcagttgtttaatatcataagatattctacagaaaaccacagaaagaaaaagcaacaccgttttaagtacaagatgaaag

SEQ ID NO: 608901 - DNA, 120 bp, Artificial Sequence
  ENSG00000175820_56 (sequence is synthesized)
ggaagcaatggtacacaagtataggagaggcattactcagtgccactgaatatgctaagagtacaacatccaaatcaatgattgataaactcttatacaatacagcagcgaggtgcattc

SEQ ID NO: 608902 - DNA, 120 bp, Artificial Sequence
  ENSG00000175820_57 (sequence is synthesized)
tatctaacagaacacgccgacaaaatctggatggtcatattacagaggaaaaggaagaggtacaagaaaatgtagctgcaattttcttgggtcttttagatttcttcatgcctgttttat

SEQ ID NO: 608903 - DNA, 120 bp, Artificial Sequence
  ENSG00000175820_58 (sequence is synthesized)
ctgactctaaaaaccagaggaacacagcacagttatcagaaaaagaaattatattcaatgccaaatgtttaactatgaaggaaaagaagtcgtcaatttcacagatacataaaatcaata

SEQ ID NO: 608904 - DNA, 120 bp, Artificial Sequence
  ENSG00000175820_59 (sequence is synthesized)
gagagtctaccagaaaacataggaagaaatgtaaatcctatttaaaaactgtatccaacagaaagtgccaagaaaatcatggtcatattacagaggaagaggaagaagtacaagaaaact

SEQ ID NO: 608905 - DNA, 120 bp, Artificial Sequence
  ENSG00000175820_60 (sequence is synthesized)
cacctgcaactttcctgggtcctttagatttcttcatgcctgttttatctgactctaaaaaccagataaacacaatacagttatcagaaaggaaaattatattgaatcccaaatgtttaa

SEQ ID NO: 608906 - DNA, 120 bp, Artificial Sequence
  ENSG00000175820_61 (sequence is synthesized)
ctatgaaggaaaagaaaccaccaatttcacagatacataaaatcagtgggcagtttactacaaaacataggaagaaacttgaatccaatttaaaaaccaaactgaaagcaatgtggcaag

SEQ ID NO: 608907 - DNA, 120 bp, Artificial Sequence
  ENSG00000175820_62 (sequence is synthesized)
gtgaaaatgtggctgatacatttccaaatacaacttccttcactccagattcctctgacattaaaaggcaaagtggattccaaacagagatagacatgagaatatcagggttaagtcata

SEQ ID NO: 608908 - DNA, 120 bp, Artificial Sequence
  ENSG00000175820_63 (sequence is synthesized)
cacaaccaacacaaatagagtcactagctgaagggatagcaaggtattctgatcccattgacaagagaagaacttccaacttggtaaagggagcaaaactacatgatagagaaagtgggg

SEQ ID NO: 608909 - DNA, 120 bp, Artificial Sequence
  ENSG00000175820_64 (sequence is synthesized)
aagagaagcaagaacatcttacagaaatggatccattctatgcagaaaacttcatggcaaacacatatcttagaaaggatcgtcatcttggtaaatcagaggatgtgcttttgggagaaa

SEQ ID NO: 608910 - DNA, 120 bp, Artificial Sequence
  ENSG00000175820_65 (sequence is synthesized)
cttttttctcaaaaagtcagatttacaaagggaattcagaaaaaaatgtaaaaatagaaaaaaacaaaaatggaaaagaaagtctcaaagttgggctcgcaaggatggagaaatcagata

SEQ ID NO: 608911 - DNA, 120 bp, Artificial Sequence
  ENSG00000175820_66 (sequence is synthesized)
attgtgcagaactgagtgaggcaacagatgatgccatatcaaacaaatatgataaacagaacattggccattctgttttaaaagaaaatgctttctgtaatttggcagcaattgtcccag

SEQ ID NO: 608912 - DNA, 120 bp, Artificial Sequence
  ENSG00000175820_67 (sequence is synthesized)
attctgttggcaggcattcacctgcttcagaagaaatgaaaagacagaatggcagacttaaaatggctgacaggtcaagtccccaaggtagacctttgcaggcaaagcaatcagcagttt

SEQ ID NO: 608913 - DNA, 120 bp, Artificial Sequence
  ENSG00000175820_68 (sequence is synthesized)
cacaatcacctgatactgcaggttatgctgttgtaagcaataataaggagcagaaacagaactttaaagcccagaagacagaagcagaagttgatttaatagatcaagaagcaaagataa

SEQ ID NO: 608914 - DNA, 120 bp, Artificial Sequence
  ENSG00000175820_69 (sequence is synthesized)
atgttgcagaagagtttaatccagaatctgtttttttctctaagatacatccacttcaaattgaaaacaagaaagaatttaaaactgcagactggaaaacaagggcagatcccaagacat

SEQ ID NO: 608915 - DNA, 120 bp, Artificial Sequence
  ENSG00000175820_70 (sequence is synthesized)
ttgccctgccaaagaaacagcaagagctgtgtgtctcaggaactatctggagttatcctaatccctacacatctatttctcctaaaatcataagacataaagataaggcaaagacagcag

SEQ ID NO: 608916 - DNA, 120 bp, Artificial Sequence
  ENSG00000175820_71 (sequence is synthesized)
atgtggaaagtactatgcataccaaacagataaaattgaaggcaaaaagaataacagtttcccagctgcttgagtatggtactgcaagcaataaaaaagaactgagaggtaacatccagc

SEQ ID NO: 608917 - DNA, 120 bp, Artificial Sequence
  ENSG00000175820_72 (sequence is synthesized)
agcagaagtcattccagctgagtaaaaatgcagtacatcgagttctaaaggctgtttatgactctggatactgtgtgtctagcattaaaaagcttacagaagtaaaaatggagaaagaca

SEQ ID NO: 608918 - DNA, 120 bp, Artificial Sequence
  ENSG00000175820_73 (sequence is synthesized)
agccaaaagacaggacatgcattcttccacagccaaagctggagaaaccactaaaagaaatgcaaaggtcattgtcaggttgtactgatatgtccagcattcttagaaaacaggaacaag

SEQ ID NO: 608919 - DNA, 120 bp, Artificial Sequence
  ENSG00000175820_74 (sequence is synthesized)
atattagagaaaaggaacaaaaacaccaaagcatttcagaagacatatcccaatactatattggaccgttaaggattagttcacaacaaatcaattacagtagtttcgatgccccacgaa

SEQ ID NO: 608920 - DNA, 120 bp, Artificial Sequence
  ENSG00000175820_75 (sequence is synthesized)
ttagaacagatgaagaacttgaattcctcattgcacaaagagcaaaggaaaaagatgtgggcattgccaaacattcagtttcaattccgtgggagagagaaggatcgaagagactagata

SEQ ID NO: 608921 - DNA, 120 bp, Artificial Sequence
  ENSG00000175820_76 (sequence is synthesized)
ttccactaaactcaaaaggacagaatatattttttacagagttggatacttctcaacagaagacttgccaggagcaagaattgctgaaacaagaagatatttctatgacaaacctggggt

SEQ ID NO: 608922 - DNA, 120 bp, Artificial Sequence
  ENSG00000175820_77 (sequence is synthesized)
ctatggcctgccccattatggaacctcttcatttggaaaacacaggaaaggtaactgaggaagaagatgtgtacattaacagaaaaattagttcacatgtattgggaaaagaaggattaa

SEQ ID NO: 608923 - DNA, 120 bp, Artificial Sequence
  ENSG00000175820_78 (sequence is synthesized)
aggaaactgatatatttgtaggttctaaaggacagaaatttctttgtacaaattcagaggtacagcacaaagtgcctgcagagcagaaagaacaggtgaatccagatcatgttcccgaaa

SEQ ID NO: 608924 - DNA, 120 bp, Artificial Sequence
  ENSG00000175820_79 (sequence is synthesized)
gtattctggattctgaatctttcctcagtaaggaccctcttcacttaaaacaggcagtgaatacagcaagaaaagaaaatgttaccatctctgaaagtttcaatgaaaatctttggggaa

SEQ ID NO: 608925 - DNA, 120 bp, Artificial Sequence
  ENSG00000175820_80 (sequence is synthesized)
aagagcaatcaaagttggatattacattaaaatcaaatagacagaaaatggacttttcaaaaaaattgaggatgaagcatctaagtaattattatcagaataaagagaatattctggaat

SEQ ID NO: 608926 - DNA, 120 bp, Artificial Sequence
  ENSG00000175820_81 (sequence is synthesized)
ctgttctcccttgcatattgcatcaactttatattgaaaatcccaagaaagaaggctcagcagaagaaatcatgagttcaaaagttctaagcccaatggtagagaaagcatcacatgaag

SEQ ID NO: 608927 - DNA, 120 bp, Artificial Sequence
  ENSG00000175820_82 (sequence is synthesized)
taggtattccggtggatcaacctccatgttcagaaggaatacatttgaatattaaaggaagaaaagaacatccacaagaaagtacacacgaggcttttccagcatctgtttctcactctt

SEQ ID NO: 608928 - DNA, 120 bp, Artificial Sequence
  ENSG00000175820_83 (sequence is synthesized)
taatggacgtacttcagattaagtcaccaaaggtaaagaaagcattaaaggcaatcaatagtttagggtacctcacttcaaatacaaaaggaattggcttgctttttccaagacaggcag

SEQ ID NO: 608929 - DNA, 120 bp, Artificial Sequence
  ENSG00000175820_84 (sequence is synthesized)
aaaaggaagaaaaatatacatacaaggctcttccaaagcctgcatctcactccaaaacagatctatttcagttcaatgcatctatgcaacaagagaaattagatgctatggatattccac

SEQ ID NO: 608930 - DNA, 120 bp, Artificial Sequence
  ENSG00000175820_85 (sequence is synthesized)
attatgactatttaacttcacagacaagagaagcagtgaaacaaatggatgtcatagttggatatactcaaaacagtaaaaaaagacaagacttactcaaaacaggccaaaaatggcagt

SEQ ID NO: 608931 - DNA, 120 bp, Artificial Sequence
  ENSG00000175820_86 (sequence is synthesized)
acctaccaatttcctatgagaacttttgggagcatatatcttgccctcaaaagtatccctgtctcctgcaacatttaatgcctcaggaaaaggaagcattatcagaaggaggtaatttat

SEQ ID NO: 608932 - DNA, 120 bp, Artificial Sequence
  ENSG00000175820_87 (sequence is synthesized)
caagccggacaccaggactagacttgttttctgcagatcagctaagcactataactaagaatagactagaatggattgtgcccttgatttctccaaggcagatgaaaaaacaagattcaa

SEQ ID NO: 608933 - DNA, 120 bp, Artificial Sequence
  ENSG00000175820_88 (sequence is synthesized)
tgctgcctttaggatcataccataaaactataaaatatgcaagtctcttatttccaaaaggaatgaaatcatcagatggggtacaggtctttgatttaatatcaaataatagctcaccca

SEQ ID NO: 608934 - DNA, 120 bp, Artificial Sequence
  ENSG00000175820_89 (sequence is synthesized)
caagaaagtaaaggacagaaggatagcgtagaacaagttattaggaaaggcgtgatatgccacaaaaggagaacttcgaaatggaagaaatcagtattttcacatatactcaataccagt

SEQ ID NO: 608935 - DNA, 120 bp, Artificial Sequence
  ENSG00000175820_90 (sequence is synthesized)
gactgtggtgcctcaagtaacagactagaaatgcagtggaacatgacagacaaaatggtcaatgtgaaacatagaatgagtgaaatagatttggttgcagcaaaaatatgtgagtctatt

SEQ ID NO: 608936 - DNA, 120 bp, Artificial Sequence
  ENSG00000175820_91 (sequence is synthesized)
ctttctttacctcacttcaaattgaataaagaaacaattgatggggtgatctcaagtaatgttaaaagtacaaaacaacacatatcacagggaaagaatgatagagtaaaagcaatggat

SEQ ID NO: 608937 - DNA, 120 bp, Artificial Sequence
  ENSG00000175820_92 (sequence is synthesized)
atgaaaagaataaaaagccctaacatcattttgaagccaaggaagtcatcactgtcacatatactcagtataaaggaatttcctttgctgttagacattataaaacaagagggcaagatg

SEQ ID NO: 608938 - DNA, 120 bp, Artificial Sequence
  ENSG00000175820_93 (sequence is synthesized)
caagaaggtaaaggtaaatcaagtatgaaactgacaaacttgtgtacttctttaccatctctatcacatagtaattcaaattcaagaacaaaagcaggtaaagataagtcaggaactcta

SEQ ID NO: 608939 - DNA, 120 bp, Artificial Sequence
  ENSG00000175820_94 (sequence is synthesized)
aagggctgccttccaccactaaagctccaggcatcatcaaatgccagaagagtatcatctgcagagtcaattaatagagacagtttaagtaatgtaatagaatcaaagtgttttccacag

SEQ ID NO: 608940 - DNA, 120 bp, Artificial Sequence
  ENSG00000175820_95 (sequence is synthesized)
aaaaagaaggaagatagagaaaatatagtagatgtgaaagatgtaatgggcctcaaatgtatcactttgaaaggaaagaaatcactttttagacatttactgcatggaaaagaaccacaa

SEQ ID NO: 608941 - DNA, 120 bp, Artificial Sequence
  ENSG00000175820_96 (sequence is synthesized)
cggagcaataaaaaactagagaaaatgacgcaggaagatgaaagtaatctaaatgtagttcagaataaactctgtgcttctattctttctccacctcacttggaatggaatcctagaata

SEQ ID NO: 608942 - DNA, 120 bp, Artificial Sequence
  ENSG00000175820_97 (sequence is synthesized)
aaagaggtatacatgagaggaataacaagattctgtctttcatcatcaacacagcaggaattatcagatacaatggaaaaatgtgagcagccaattgatgatagtttaagcagtattgaa

SEQ ID NO: 608943 - DNA, 120 bp, Artificial Sequence
  ENSG00000175820_98 (sequence is synthesized)
aaagcaaaacatatgccgcagaaagacaaagacagagtggaaaaggctttggaaaaaatcatgcattccaaaagaatagctttggaggtgaagcagccttcaatattccaagaattagag

SEQ ID NO: 608944 - DNA, 120 bp, Artificial Sequence
  ENSG00000175820_99 (sequence is synthesized)
ttgaacatcaaagaaaaaggaggaaagattcaggaagataaagaagttgagatttggagcaaaccttttgcttccatctcttttctaccttactctaaagtgggcacaatagaaggagag

SEQ ID NO: 608945 - DNA, 120 bp, Artificial Sequence
  ENSG00000175820_100 (sequence is synthesized)
gaagccatgagaataaaaatgagatcctctttttcacaaccaaatctccaagagtcatcagatacagagaaaacagcatatgaaaagtgtatttctgataatatctcaaacagtgtaaaa

SEQ ID NO: 608946 - DNA, 120 bp, Artificial Sequence
  ENSG00000175820_101 (sequence is synthesized)
aaggccctagaatctatattgcaaaaagaacagaggcaaaaaatggaaaaaattagggctttgaagaaaatgaaatcatcaatttcacagggaattcagttggacattaaagagcaagag

SEQ ID NO: 608947 - DNA, 120 bp, Artificial Sequence
  ENSG00000175820_102 (sequence is synthesized)
aaaaggatagaacatattaaaggtgaaccaagtgtgcttctgacaaatgcctgcgcttccattccttctccttctcatttacaactggatacaaggagagaaaaagcagagtatgtcact

SEQ ID NO: 608948 - DNA, 120 bp, Artificial Sequence
  ENSG00000175820_103 (sequence is synthesized)
gaaataacaagatactatcttccagaactatcacaccaaaaatcatcagaggcaggggaaaaagcagatggagtggccagtaagggtgatatcacaatcaaagtacaaaaagcaaaagat

SEQ ID NO: 608949 - DNA, 120 bp, Artificial Sequence
  ENSG00000175820_104 (sequence is synthesized)
tacatgcaacagaaagaagacgatgaagtaaaaatatcagctaagaaagacataatgcatccagaagacaaaggtctgaaagcaaagaaggcactttcacaggacctaccattgaatact

SEQ ID NO: 608950 - DNA, 120 bp, Artificial Sequence
  ENSG00000175820_105 (sequence is synthesized)
aaagagccagggaaaatggatcaagaagctcaggagcaagggaaagaggacagagaaggtgaggagcaagggaaagaggacagaagaggtgcaggacaagaaaaggttgatagagaagac

SEQ ID NO: 608951 - DNA, 120 bp, Artificial Sequence
  ENSG00000175820_106 (sequence is synthesized)
aaagagcaagggaaaatggatcacgaagttgaagagcaacagaaagcagatggagtaggcatagagcaagggaaaatggatggagacaagaatgaacaggaaagagttctgttcctatat

SEQ ID NO: 608952 - DNA, 120 bp, Artificial Sequence
  ENSG00000175820_107 (sequence is synthesized)
ttgccttccaattcttctctaacccattatatattggacacaagaatagaaggagaggaagaccaacaaggaataatcagacctggtattttacaaccaaggcaccagaaatcatcagag

SEQ ID NO: 608953 - DNA, 120 bp, Artificial Sequence
  ENSG00000175820_108 (sequence is synthesized)
acagggaaaaaagcaaatggggtgcccagtgagggtgatagcgcaagtgaagtacaaaaagcaaaagattacatgcaacagaaagaagaggatgaagtaaaaatatcagctgagaaagac

SEQ ID NO: 608954 - DNA, 120 bp, Artificial Sequence
  ENSG00000175820_109 (sequence is synthesized)
ttaatgcatccagaagacaaagatctgaaaggaaagaaggcactttcacagaacctaccactgaatcctaaagagccagggaaaagggatggagaaggccaggagcaagggaaagaggac

SEQ ID NO: 608955 - DNA, 120 bp, Artificial Sequence
  ENSG00000175820_110 (sequence is synthesized)
ggagaaggtgaggagcaagggaacagggatggagaaactgaagagcaacagcaagcagatggagtaggcacagagcaagagaaaagggatggacacaagagtaaacaggaaacagttctc

SEQ ID NO: 608956 - DNA, 120 bp, Artificial Sequence
  ENSG00000175820_111 (sequence is synthesized)
ttcctacatttgccttctgagtcttctctaacttgttatgaattgaacacaagaaaagaaggagaggaagacttacaaggaataataaaatctgctactttgcaactaaggcagcagaaa

SEQ ID NO: 608957 - DNA, 120 bp, Artificial Sequence
  ENSG00000175820_112 (sequence is synthesized)
tcatttgatgcagggaaaatagcacatacaaagtcttttggggtggatagctcaaatgatgtaaaaacagtacaagaatacaagccacagaaagaagtagatagaggaaaaacagtaagt

SEQ ID NO: 608958 - DNA, 120 bp, Artificial Sequence
  ENSG00000175820_113 (sequence is synthesized)
gtggattatataatgcaacctgaaggcacaatttttgaggcagagcaattatcacttccacatacactcaatatccctggcagcagtggctcaaaaactagagaagtactaacaaacata

SEQ ID NO: 608959 - DNA, 120 bp, Artificial Sequence
  ENSG00000175820_114 (sequence is synthesized)
aaagaaaaattgagacatgtacaggaaagaaaaagtgaactggatgtgtttctgacaataccttctctatctcactgtaaattagacaaacgaacagcaggcaaaaaagaggaacaagga

SEQ ID NO: 608960 - DNA, 120 bp, Artificial Sequence
  ENSG00000175820_115 (sequence is synthesized)
gtaacaagatcttttcttccaccctcatggcacatggaatcatcagatacagggaaattaaaatatacattgtcatatttgaatgatatcacaggtgattcaaacagaacaaaatacatg

SEQ ID NO: 608961 - DNA, 120 bp, Artificial Sequence
  ENSG00000175820_116 (sequence is synthesized)
gcccagatccaaaaggataaagcaaatatttcagagaaaagtgtaatgcatcccgagtacatagctgtaaaggcagagaaatcacccctttcccatatactaaaaacaaaggaactgcag

SEQ ID NO: 608962 - DNA, 120 bp, Artificial Sequence
  ENSG00000175820_117 (sequence is synthesized)
gtgaacatcagtcaacaaggggaaaaggcacaagaaggtgaggtggaaatagttgtacttctgagcaaaacttgtccttttgtcacttcttcagctttccttgagttagactcaataaaa

SEQ ID NO: 608963 - DNA, 120 bp, Artificial Sequence
  ENSG00000175820_118 (sequence is synthesized)
gaagaggaaggtgaaccacgaataacaagaagctttatgccacatcttgagatccaggaatcattgccttcaaggcaaacagcacctacaaagccaacagagagccttgtaaagaaagag

SEQ ID NO: 608964 - DNA, 120 bp, Artificial Sequence
  ENSG00000175820_119 (sequence is synthesized)
aaacaactccttccacagaaagaagacagagtacaaacagtatccatgcatggcctgatgcaccccaatggtgccgttttcaaggcaaagacatcagcacctccacaagtgttcagcatc

SEQ ID NO: 608965 - DNA, 120 bp, Artificial Sequence
  ENSG00000175820_120 (sequence is synthesized)
actgagcacagtcctctgagtaagagaaaggagccacagtggggcatgaaagagagagcaggacagaagcaggacaggacaggacgtcctcatgtgattctgacaaaaactcatccattc

SEQ ID NO: 608966 - DNA, 120 bp, Artificial Sequence
  ENSG00000175820_121 (sequence is synthesized)
atgccttctctctctcaccatagattctctccttcacaaccaaagcttcctatatcatcaggtgcaggaaaaagcagacttgcaaattcaaatgaaggtattagctcacataaagtaata

SEQ ID NO: 608967 - DNA, 120 bp, Artificial Sequence
  ENSG00000175820_122 (sequence is synthesized)
ctaaaagcaaaccaacaaatgccatataaagaggcaaaggacagagtaaaaatagaaggcagggaaggtagaatactccccaaaaggatacatttgagggcagaggcactcccacttgca

SEQ ID NO: 608968 - DNA, 120 bp, Artificial Sequence
  ENSG00000175820_123 (sequence is synthesized)
cttctatgcaatggaaagaactactctttgcacattgaagagcaaggggaaggagtacaggaaagcaaaaaggaacctggagtggttccgaggaaatctgcttcattccctcctcctcca

SEQ ID NO: 608969 - DNA, 120 bp, Artificial Sequence
  ENSG00000175820_124 (sequence is synthesized)
ttttacctgaattgtgacactagaaggaatgaaaaggaaggcacattaggaaaaacacaattcagttttccaccactaaagattcaggattcatcagattcaggcaaaaaagcatatact

SEQ ID NO: 608970 - DNA, 120 bp, Artificial Sequence
  ENSG00000175820_125 (sequence is synthesized)
gagtcactgcatggttacacattaagcaactcaaaaggaccagtgcaacccacagcacagggagaagagaaaggtggactcagaatagatatggaagacaaaatgctccccaaatgtaca

SEQ ID NO: 608971 - DNA, 120 bp, Artificial Sequence
  ENSG00000175820_126 (sequence is synthesized)
gacctgaaagcaaagcaattactactctcagatatactcaataccaaaaaattgcagtggaaaagtaaagaacaaaagagaaagattcaggaagataaaaataaacaagttaaaggactg

SEQ ID NO: 608972 - DNA, 120 bp, Artificial Sequence
  ENSG00000175820_127 (sequence is synthesized)
ccaagcattaatacttctttacttactccaccatatcttaagtttgatacaacagaaggacaggagaacgtgataagaattgcaaaagtgtctctcccacagtcacggtccaaggaatca

SEQ ID NO: 608973 - DNA, 120 bp, Artificial Sequence
  ENSG00000175820_128 (sequence is synthesized)
tcagatgcagggagaatagcatgtccagaagcaacccatggagaactttcaagtgatgtaaagcaattaaaagcacacctgctacagaaagaagagaaggatagagaaaaagttgcggat

SEQ ID NO: 608974 - DNA, 120 bp, Artificial Sequence
  ENSG00000175820_129 (sequence is synthesized)
atgaccagtgtactggatcccaacaaaatgtatttgaaggcaaagaaatcgcctgtcttacatacgcacagtttcagtgatcttcagtggaaaactagagagcaagaggaggaaaaggtc

SEQ ID NO: 608975 - DNA, 120 bp, Artificial Sequence
  ENSG00000175820_130 (sequence is synthesized)
cagaaagttaaaagtgggccaggtgtcatgttgtctaagagtccttctagatcctccccacttcaccttaatgtgaatacagggtttcaggaggaaagcataccaatattaacaagaccc

SEQ ID NO: 608976 - DNA, 120 bp, Artificial Sequence
  ENSG00000175820_131 (sequence is synthesized)
tcttttcccctagtaaaactccaggtatcaccagatactgagggaggcacatgtataaggccaattgctggtgatattttaatctatctacaaaaaggaaaacatgtgtcacagaacaag

SEQ ID NO: 608977 - DNA, 120 bp, Artificial Sequence
  ENSG00000175820_132 (sequence is synthesized)
gaagaggatgacgtgcaaatagtaagcatcttaatattccccaaacatcaggaagagaaggtgcaggaatgtgaaggtgaaccaggtgtggttctgaccaaatctacttcattgccatct

SEQ ID NO: 608978 - DNA, 120 bp, Artificial Sequence
  ENSG00000175820_133 (sequence is synthesized)
ctatctcaactagaattggataaagaaacacatttaggtaatgaaatgctaagacttaaaagacctattttgcggagaatatcacacataggggagactgtacatagagagtccgtcgtt

SEQ ID NO: 608979 - DNA, 120 bp, Artificial Sequence
  ENSG00000175820_134 (sequence is synthesized)
ggtgatatcccaaaagatgttaaaaatgaaaagcaacatatccctcaaaaagaagagaggaaccaaaaaaaaataatcgatatgagaggcacagatataactttgaagtcaaagaagtca

SEQ ID NO: 608980 - DNA, 120 bp, Artificial Sequence
  ENSG00000175820_135 (sequence is synthesized)
cctcgttcctgtatgctccacagaacagaactgcatgtgaacattggagggcaaggacgaaaggaacatgaaggtcaagataaaccaccaggtatgattcaaagaaaaatgtgcatactc

SEQ ID NO: 608981 - DNA, 120 bp, Artificial Sequence
  ENSG00000175820_136 (sequence is synthesized)
ttttccaaacctttgccatctaaccttaaactggagagagctacgcatgcagatgaagaaaggcttggaggtaagacatcctttgtacttccactaatgccatcagcattaccagataca

SEQ ID NO: 608982 - DNA, 120 bp, Artificial Sequence
  ENSG00000175820_137 (sequence is synthesized)
gagaaaacagcagatgcagaggcaaggagtggtgatgtaagaaaaggaaaaccacataggtcacagaaagaaaacaggcatgaagtgaaaacgatagatatgaggttcaggatacactgc

SEQ ID NO: 608983 - DNA, 120 bp, Artificial Sequence
  ENSG00000175820_138 (sequence is synthesized)
caagaggcaaggatttcaccaatgtcacatatccttaatgcaaaggaattagtgttgaatattaacaaactggagaaaaaagtacacaaagataaagatgaagcatgtgtggttctgtca

SEQ ID NO: 608984 - DNA, 120 bp, Artificial Sequence
  ENSG00000175820_139 (sequence is synthesized)
aggacttttctttctataccgtcagcacctcctctttatctggattcagggaacaaaacagacaaagacactccaggaattacaggatcatcttgtccacagcgaactctccatgtaccc

SEQ ID NO: 608985 - DNA, 120 bp, Artificial Sequence
  ENSG00000175820_140 (sequence is synthesized)
tcaaatacccagaaaataacaaatagagactcagttgaaggcgttgataaaaacgttgttaagcaagcagaacagtatgtgccccgcccagaggcagagcaacagttgacctcaaacttc

SEQ ID NO: 608986 - DNA, 120 bp, Artificial Sequence
  ENSG00000175820_141 (sequence is synthesized)
atgatcagcgtccagcaaaggaaccaaccttcacgagtcaggtcagaagaagatttgaatcagttagttttaaactcacgggatgaggacatttatttcacagggtttggtaccataaga

SEQ ID NO: 608987 - DNA, 120 bp, Artificial Sequence
  ENSG00000175820_142 (sequence is synthesized)
agtgggaaaaggccggaatggctctttacagggaaaaaggctcagcctgtaaaatacaaaacagaaactttaactgcgtttctttcctatcccacaatggatgcaactaaaatgggaggt

SEQ ID NO: 608988 - DNA, 120 bp, Artificial Sequence
  ENSG00000175820_143 (sequence is synthesized)
ctggaagaagacactgaaataatggataacttaaaccataaaatcagtcctaaggcttcagtttcactgataaggaaaatatctaaggaactgtatgtcacacttggcacccctgcaaat

SEQ ID NO: 608989 - DNA, 120 bp, Artificial Sequence
  ENSG00000175820_144 (sequence is synthesized)
tcaaaaggattttctgtttcagagagatacgctcaccagcaagaaacttcatcgaaagtatctccagaacttgcaggttcatgtaaatttgataagccaaaggaagatggacaaagtaat

SEQ ID NO: 608990 - DNA, 120 bp, Artificial Sequence
  ENSG00000175820_145 (sequence is synthesized)
gatagaatcagcaaaatgttttctcccaaagtgttagcaccacagacaaagggatcactcaaaaaaataagtatcgtcaccaactggaatgccccccaaaatatagaagaacaagatatt

SEQ ID NO: 608991 - DNA, 120 bp, Artificial Sequence
  ENSG00000175820_146 (sequence is synthesized)
gtcatgaaaaagcaagtgatccgacggtgtgaacatgggcacaagaccaggacgaacactatcctttctaagtttccccttcaaagtggaaagcagaagacaccatcggaaacagatgtg

SEQ ID NO: 608992 - DNA, 120 bp, Artificial Sequence
  ENSG00000175820_147 (sequence is synthesized)
gacaagaaaacaacagcgcacctcagcctacagatgctaccaggaatacacatggatatgacagagattgaccctgcaaaagggggaaggaagcaggcattgctcatttcagaacaagag

SEQ ID NO: 608993 - DNA, 120 bp, Artificial Sequence
  ENSG00000175820_148 (sequence is synthesized)
gaaggtgttctggaatttcttccgaagtccctattccctccctggacttttcaatttcaatcaggggatctggaggaaaaacatcaaacagacgcaaacaccaatataaatctagagcag

SEQ ID NO: 608994 - DNA, 120 bp, Artificial Sequence
  ENSG00000175820_149 (sequence is synthesized)
aaaaaattagaaatggacaatgatagtactgtgaatcagaaagaagggaaattaaaaataggcacaaacagagctttacatctgcaagaagagaaaacagagatgcacaaggccaggact

SEQ ID NO: 608995 - DNA, 120 bp, Artificial Sequence
  ENSG00000175820_150 (sequence is synthesized)
gccaatctggagaaggagagaggaagaatggacacaagcagtagtgcacacccgcatcttctatctctaaaggcagaggaatctcaaatgaagactcaagtcatcactcatagggagaac

SEQ ID NO: 608996 - DNA, 120 bp, Artificial Sequence
  ENSG00000175820_151 (sequence is synthesized)
agccgcctaatcatgcaaaagcagaaaaaagaactagaagcatctaatgcaaaacaaagcattcaactacaaaaattatttcaaagaaatgttctggattcattttattcatatgttcct

SEQ ID NO: 608997 - DNA, 120 bp, Artificial Sequence
  ENSG00000175820_152 (sequence is synthesized)
ctttctcccaaacgtaaagatcagaaaggcagattaacaataagagatctgaaaagagaattgagcaccaaatatttaactatgaaaatccagaatcacccaattccacagatgcttaat

SEQ ID NO: 608998 - DNA, 120 bp, Artificial Sequence
  ENSG00000175820_153 (sequence is synthesized)
atcacggggcgtggtacaccaagcaatagaaagaaattagagtatgatgttaagttaaagaacatagcttcgtggagtaaagatgtctcaggaatatttatcagaagtctttctatttcc

SEQ ID NO: 608999 - DNA, 120 bp, Artificial Sequence
  ENSG00000175820_154 (sequence is synthesized)
atcatgcgttcacctcacactgaccctaagacaaacctagaaagagaaaagagaatctgtcttcctaaattccaggaaaaatcaccaaacactagtgaaatgtctaagagagacacttta

SEQ ID NO: 609000 - DNA, 120 bp, Artificial Sequence
  ENSG00000175820_155 (sequence is synthesized)
acaattgtaaaaggggaacagaattttacaaacacagttccacaagatccccagccctttgcagtggacaaacaacaaatgcagaaacttcctaatgtcaaatcagaagcaaacctcaga

SEQ ID NO: 609001 - DNA, 120 bp, Artificial Sequence
  ENSG00000175820_156 (sequence is synthesized)
agtgaaatgaataaaaaatacttaaaggcacaaacaaaagaacggattgttccagagcatgatgtctcaaggatcattaaaaaaccagacttacgtatcatcgagcaggaagaaaagatt

SEQ ID NO: 609002 - DNA, 120 bp, Artificial Sequence
  ENSG00000175820_157 (sequence is synthesized)
ctaaaacgcattctgacacccacagagtgtccatctatgcttgaagatccaaagttacccaagcaaagggatcagagtgaaccagtatgggacatgaccacacaaaaggttcagcagcaa

SEQ ID NO: 609003 - DNA, 120 bp, Artificial Sequence
  ENSG00000175820_158 (sequence is synthesized)
aaagctttcccaggaactgtgcccataccgcctcaagttaaaagtagcgaagtcaaaatagttgcagacagtacaaatgcagaacatttacttcccatttgtgaagcaaccaaagctatc

SEQ ID NO: 609004 - DNA, 120 bp, Artificial Sequence
  ENSG00000175820_159 (sequence is synthesized)
tctgagtcccaggttaaaaatatgatccaagacaaagtttcttctgataaactagataacatacaagcctataagcctgacgacttgaagtcaccaccttttccagagggtccagataca

SEQ ID NO: 609005 - DNA, 120 bp, Artificial Sequence
  ENSG00000175820_160 (sequence is synthesized)
atatcaacagcaatatatcccaaaacgcagcacaaatcccttttagaacagtttactcccaaagaaaaaaataagcttactagtcatttagagtcaaaagcacttgaaatacaactgaat

SEQ ID NO: 609006 - DNA, 120 bp, Artificial Sequence
  ENSG00000175820_161 (sequence is synthesized)
ctgataccagagatggcaaggaaatctttacaaatgttcaacttttatccaaaagggactatttcaaaagataacagttggaggttctattctagacataaaacaatgaactttatgtct

SEQ ID NO: 609007 - DNA, 120 bp, Artificial Sequence
  ENSG00000175820_162 (sequence is synthesized)
ctagaagggactgataccatagaacctaactcaaaacataaacaccaaaaggattcacctcttgccagcaatatgaagacactgattgttgatgtttcaagtgacagtgaggagacaatc

SEQ ID NO: 609008 - DNA, 120 bp, Artificial Sequence
  ENSG00000175820_163 (sequence is synthesized)
acaaagctacagagtattaataagctagaaaatggaacatctgcagtgacttctgctagtgagatgctattgcctcataccctccaaaaccactcagtaaaagaaaaaggcaaactcctc

SEQ ID NO: 609009 - DNA, 120 bp, Artificial Sequence
  ENSG00000175820_164 (sequence is synthesized)
atgcacttttctgtgaaaacattggagatacaaatgaaagcctttcccagaattgtaagagaatcttatgcaatgaccagtgctcatgagagaaagaaacccttatctaactgtattcat

SEQ ID NO: 609010 - DNA, 120 bp, Artificial Sequence
  ENSG00000175820_165 (sequence is synthesized)
cctggtttcacaggaccaaaacgacaaaacagaattttgttactttctgaggagaaatctctccatcaaatagatcttgatttacaatacaaataccttcgttttctcctggggcttcct

SEQ ID NO: 609011 - DNA, 120 bp, Artificial Sequence
  ENSG00000175820_166 (sequence is synthesized)
gttggaagtacgttccctaagccaaatgtacttcccaaacatagtaagttaaacacaattgcagtgtgtaaaaacgtaaatgctggtggacaaagtggtagtctttccattgatacagaa

SEQ ID NO: 609012 - DNA, 120 bp, Artificial Sequence
  ENSG00000175820_167 (sequence is synthesized)
ctgttagaacaacatatttctttcaaaaagcaaagtccccatgaaaactcatcactcatcagaaaattcccacagccaacccttgtgtgtgcttctgaccgtgatctgcacagcccgagg

SEQ ID NO: 609013 - DNA, 120 bp, Artificial Sequence
  ENSG00000175820_168 (sequence is synthesized)
aagaaagatactcaagttctttcagagtcagaattccatgtgactccagaaaaaaacaaacaatatcatgtatggtttcaagaaagaaatacatgtgaatctgttgatttaaggacccag

SEQ ID NO: 609014 - DNA, 120 bp, Artificial Sequence
  ENSG00000175820_169 (sequence is synthesized)
agaaatgctactggttcagctgtttcatgtgaaactcagatttctgaagattttgttgatattcagacagatattgagagtccagctgacttggacgagtgttcatgtcttgaagtaagt

SEQ ID NO: 609015 - DNA, 120 bp, Artificial Sequence
  ENSG00000175820_170 (sequence is synthesized)
gagagtgaggaatgtgtgtttctggaagccaactcttatttaagtcaggaatcagaaaacattctatttgaattacagacaggcattcctttggaaaatgtctacaaaatcacgactgat

SEQ ID NO: 609016 - DNA, 120 bp, Artificial Sequence
  ENSG00000175820_171 (sequence is synthesized)
ttgaaatcattttacagtgaagattcaggttcccattgtactagagagtgcagaaaggaaaccttaattattacaccaccttcctgtaagtcccacaaaagcaggaaatatagatcatct

SEQ ID NO: 609017 - DNA, 120 bp, Artificial Sequence
  ENSG00000175820_172 (sequence is synthesized)
tccaaaatgaaatctcctgactggttgtgtcatagttcatcaaatactgcggaaattcagtctaggtcatctagtgtatcattcagtgaagagaagatttcatggactaccaagagcaga

SEQ ID NO: 609018 - DNA, 120 bp, Artificial Sequence
  ENSG00000175820_173 (sequence is synthesized)
acaagttactcttcagctcccttaactgaatcaaatattaaatcacatcttgcaaaaaaccaaggcaagtctcacaggcacccagaaagccaagaaagaaagaaggccagatctgattta

SEQ ID NO: 609019 - DNA, 120 bp, Artificial Sequence
  ENSG00000175820_174 (sequence is synthesized)
tttaggaagaacagcagtcattgggaccacgattacagttgtacacacagcaaagggaaacgtgacagaaagaagagagtgtatgattatgagtcagaaagattggattgtttccaaagc

SEQ ID NO: 609020 - DNA, 120 bp, Artificial Sequence
  ENSG00000175820_175 (sequence is synthesized)
aaacataaatcagcatcaaaacctcatcatgacgatatcaacttctattctgaaagaaaacaaaaccggccctttttttttgcctgtgtaccggcagactcactggaggttatacccaaa

SEQ ID NO: 609021 - DNA, 120 bp, Artificial Sequence
  ENSG00000175820_176 (sequence is synthesized)
accattcgctggactattccccctgaaaccttaaggaaaagaaacttcagaattcccctagtggcaaagatttcaagttcttggaatatatggagttcctccaaaaagttgttggggtcg

SEQ ID NO: 609022 - DNA, 120 bp, Artificial Sequence
  ENSG00000175820_177 (sequence is synthesized)
ctctcggggtcccttactaccgtttttcatagctgacattaccatagctaaactcctctgaagtggacagctggtcgctattgtgatattctgtgaaaaatacaatcatataacatccaa

SEQ ID NO: 609023 - DNA, 120 bp, Artificial Sequence
  ENSG00000175826_0 (sequence is synthesized)
aaatggcgcctgtcagagtgggaaacccagctgcagaggctgcagccccggtccccagcggctaaaggacccccgagctcggggagggggaggccgctccggcccagcgctctgcgccct

SEQ ID NO: 609024 - DNA, 120 bp, Artificial Sequence
  ENSG00000175826_1 (sequence is synthesized)
ccggctccccctccccctccttccctgctccttcgctctgcaggtctcggaggaccccatcctagccctacctgtctcggcccgcaacctccccgaagccgtcggtgccactcccagccc

SEQ ID NO: 609025 - DNA, 120 bp, Artificial Sequence
  ENSG00000175826_2 (sequence is synthesized)
atgtgggcccccgcgggctgcccacgcctgtcccccagctccccgttccgctgggctttaccctcgccaggggtggctttctgagccgcccgctccgtgcccctctctgcagcctctcct

SEQ ID NO: 609026 - DNA, 80 bp, Artificial Sequence
  ENSG00000175826_3 (sequence is synthesized)
ggggggctggcggagctgggccgcgggggccccggggccggcggtgccggggtcatcgggatgatgcggacgcagtgtct

SEQ ID NO: 609027 - DNA, 120 bp, Artificial Sequence
  ENSG00000175826_4 (sequence is synthesized)
cagtgtctgctggggctgcgcacgttcgtggccttcgccgccaagctctggagcttcttcatttaccttctgcggaggcagatccgcacggtaattcagtaccaaactgttcgatatgat

SEQ ID NO: 609028 - DNA, 120 bp, Artificial Sequence
  ENSG00000175826_5 (sequence is synthesized)
atcctccccttatctcctgtgtcccggaatcggctagcccaggtgaagaggaagatcctggtgctggatctggatgagacacttattcactcccaccatgatggggtcctgaggcccaca

SEQ ID NO: 609029 - DNA, 120 bp, Artificial Sequence
  ENSG00000175826_6 (sequence is synthesized)
tgagccagtggtacgagctggtggtgtttacagcaagcatggagatctatggctctgctgtggcagataaactggacaatagcagaagcattcttaagaggagatattacagacagcact

SEQ ID NO: 609030 - DNA, 120 bp, Artificial Sequence
  ENSG00000175826_7 (sequence is synthesized)
gcactttggagttgggcagctacatcaaggacctctctgtggtccacagtgacctctccagcattgtgatcctggataactccccaggggcttacaggagccatccagacaatgccatcc

SEQ ID NO: 609031 - DNA, 120 bp, Artificial Sequence
  ENSG00000175826_8 (sequence is synthesized)
ccatcaaatcctggttcagtgaccccagcgacacagcccttctcaacctgctcccaatgctggatgccctcaggttcaccgctgatgttcgttccgtgctgagccgaaaccttcaccaac

SEQ ID NO: 609032 - DNA, 120 bp, Artificial Sequence
  ENSG00000175826_9 (sequence is synthesized)
atcggctctggtgacagctgctccccctccacctgagttggggtgggggggaaagggagggcgagcccttgggatgccgtctgatgccctgtccaatgtgaggactgcctgggcagggtc

SEQ ID NO: 609033 - DNA, 120 bp, Artificial Sequence
  ENSG00000175826_10 (sequence is synthesized)
tgcccctcccacccctctctgccctgggagccctacactccacttggagtctggatggacacatgggccaggggctctgaagcagcctcactcttaacttcgtgttcacactccatggaa

SEQ ID NO: 609034 - DNA, 120 bp, Artificial Sequence
  ENSG00000175826_11 (sequence is synthesized)
accccagactgggacacaggcggaagcctaggagagccgaatcagtgtttgtgaagaggcaggactggccagagtgacagacatacggtgatccaggaggctcaaagagaagccaagtca

SEQ ID NO: 609035 - DNA, 120 bp, Artificial Sequence
  ENSG00000175826_12 (sequence is synthesized)
cgccatagaccgcgcaggaggaacttagtcccggtgaagcgaatacacgtcaccaccggaagtagtgtcaaaggggaagaggagggggaaagacaggaagagggagtcctttggacggtc

SEQ ID NO: 609036 - DNA, 120 bp, Artificial Sequence
  ENSG00000175826_13 (sequence is synthesized)
tttgggccactggattttccctaaatttgtcccccctttactctccctctatttttctctccttagactccctcagacctgtaaccagctttgtgtcttttttccttttctctcttttaa

SEQ ID NO: 609037 - DNA, 120 bp, Artificial Sequence
  ENSG00000175826_14 (sequence is synthesized)
agccccctagcgcgcctgcgcagcgggccactctctgctttccccccctccccttcccttttcccttcctcccttttccctagccccctcccccactgccccctcccccaattatccttc

SEQ ID NO: 609038 - DNA, 120 bp, Artificial Sequence
  ENSG00000175826_15 (sequence is synthesized)
gactagaagcatcaataggtatgagatctggtgattaaaacttagtttcggagcataaaccaggaaagttttacttaggttgttgacttccggtagtgggaggcatatatttttaacaat

SEQ ID NO: 609039 - DNA, 120 bp, Artificial Sequence
  ENSG00000175826_16 (sequence is synthesized)
tagaggggaggctgtgtaatggtaggggagtggctttcagtacttggggttcatttgttgtgctgatgtaattcttttccgctggcatctttctcttttgttcttgcatttctgaatcat

SEQ ID NO: 609040 - DNA, 120 bp, Artificial Sequence
  ENSG00000175826_17 (sequence is synthesized)
aagagtgtaggatgcctaacactgagtttggaggtttgggctgggggttcagaatttcgtgtcctcagagacatttgatgttgatggaaggcctgaaggactatgccattgcctttctga

SEQ ID NO: 609041 - DNA, 120 bp, Artificial Sequence
  ENSG00000175832_0 (sequence is synthesized)
gctcacaactgtctgctgcgcccgaaaaacaagtcggtgcgctggggacccggggccggggccgccttactccggcctagccccgcggccctcggtgcgggctccagggcatgctcggga

SEQ ID NO: 609042 - DNA, 120 bp, Artificial Sequence
  ENSG00000175832_1 (sequence is synthesized)
ccccccgcggctccagcccagacgccccggcctcaggtctcggcccccgcttggggccccggccgtgcggccggagggagcggccggatggagcggaggatgaaagccggatacttggac

SEQ ID NO: 609043 - DNA, 120 bp, Artificial Sequence
  ENSG00000175832_2 (sequence is synthesized)
cagcaagtgccctacaccttcagcagcaaatcgcccggaaatgggagcttgcgcgaagcgctgatcggcccgctggggaagctcatggacccgggctccctgccgcccctcgactctgaa

SEQ ID NO: 609044 - DNA, 120 bp, Artificial Sequence
  ENSG00000175832_3 (sequence is synthesized)
gatctcttccaggatctaagtcacttccaggagacgtggctcgctgaagctcaggtaccagacagtgatgagcagtttgttcctgatttccattcagaaaacctagctttccacagcccc

SEQ ID NO: 609045 - DNA, 120 bp, Artificial Sequence
  ENSG00000175832_4 (sequence is synthesized)
accaccaggatcaagaaggagccccagagtccccgcacagacccggccctgtcctgcagcaggaagccgccactcccctaccaccatggcgagcagtgcctttactccagtgcctatgac

SEQ ID NO: 609046 - DNA, 120 bp, Artificial Sequence
  ENSG00000175832_5 (sequence is synthesized)
ccccccagacaaatcgccatcaagtcccctgcccctggtgcccttggacagtcgcccctacagccctttccccgggcagagcaacggaatttcctgagatcctctggcacctcccagccc

SEQ ID NO: 609047 - DNA, 120 bp, Artificial Sequence
  ENSG00000175832_6 (sequence is synthesized)
caccctggccatgggtacctcggggaacatagctccgtcttccagcagcccctggacatttgccactccttcacatctcagggagggggccgggaacccctcccagccccctaccaacac

SEQ ID NO: 609048 - DNA, 120 bp, Artificial Sequence
  ENSG00000175832_7 (sequence is synthesized)
cagctgtcggagccctgcccaccctatccccagcagagctttaagcaagaataccatgatcccctgtatgaacaggcgggccagccagccgtggaccagggtggggtcaatgggcacagg

SEQ ID NO: 609049 - DNA, 120 bp, Artificial Sequence
  ENSG00000175832_8 (sequence is synthesized)
tacccaggggcgggggtggtgatcaaacaggaacagacggacttcgcctacgactcagatgtcaccgggtgcgcatcaatgtacctccacacagagggcttctctgggccctctccaggt

SEQ ID NO: 609050 - DNA, 120 bp, Artificial Sequence
  ENSG00000175832_9 (sequence is synthesized)
tctgcgttgtccctgagaaatttgaaggagacatcaagcaggaaggggtcggtgcatttcgagaggggccgccctaccagcgccggggtgccctgcagctgtggcaatttctggtggcct

SEQ ID NO: 609051 - DNA, 120 bp, Artificial Sequence
  ENSG00000175832_10 (sequence is synthesized)
tgctggatgacccaacaaatgcccatttcattgcctggacgggccggggaatggagttcaagctcattgagcctgaggaggtcgccaggctctggggcatccagaagaaccggccagcca

SEQ ID NO: 609052 - DNA, 120 bp, Artificial Sequence
  ENSG00000175832_11 (sequence is synthesized)
tgaattacgacaagctgagccgctcgctccgatactattatgagaaaggcatcatgcagaaggtggctggtgagcgttacgtgtacaagtttgtgtgtgagcccgaggccctcttctctt

SEQ ID NO: 609053 - DNA, 120 bp, Artificial Sequence
  ENSG00000175832_12 (sequence is synthesized)
tggccttcccggacaatcagcgtccagctctcaaggctgagtttgaccggcctgtcagtgaggaggacacagtccctttgtcccacttggatgagagccccgcctacctcccagagctgg

SEQ ID NO: 609054 - DNA, 120 bp, Artificial Sequence
  ENSG00000175832_13 (sequence is synthesized)
ctggccccgcccagccatttggccccaagggtggctactcttactagcccccagcggctgttccccctgccgcaggtgggtgctgccctgtgtacatataaatgaatctggtgttgggga

SEQ ID NO: 609055 - DNA, 120 bp, Artificial Sequence
  ENSG00000175832_14 (sequence is synthesized)
aaccttcatctgaaacccacagatgtctctggggcagatccccactgtcctaccagttgccctagcccagactctgagctgctcaccggagtcattgggaaggaaaagtggagaaatggc

SEQ ID NO: 609056 - DNA, 120 bp, Artificial Sequence
  ENSG00000175832_15 (sequence is synthesized)
aagtctagagtctcagaaactcccctgggggtttcacctgggccctggaggaattcagctcagcttcttcctaggtccaagccccccacaccttttccccaaccacagagaacaagagtt

SEQ ID NO: 609057 - DNA, 120 bp, Artificial Sequence
  ENSG00000175832_16 (sequence is synthesized)
tgttctgttctgggggacagagaaggcgcttcccaacttcatactggcaggagggtgaggaggttcactgagctccccagatctcccactgcggggagacagaagcctggactctgcccc

SEQ ID NO: 609058 - DNA, 120 bp, Artificial Sequence
  ENSG00000175832_17 (sequence is synthesized)
acgctgtggccctggagggtcccggtttgtcagttcttggtgctctgtgttcccagaggcaggcggaggttgaagaaaggaacctgggatgaggggtgctgggtataagcagagagggat

SEQ ID NO: 609059 - DNA, 120 bp, Artificial Sequence
  ENSG00000175832_18 (sequence is synthesized)
gggttcctgctccaagggaccctttgcctttcttctgccctttcctaggcccaggcctgggtttgtacttccacctccaccacatctgccagaccttaataaaggcccccacttctccca

SEQ ID NO: 609060 - DNA, 120 bp, Artificial Sequence
  ENSG00000175832_19 (sequence is synthesized)
cgccggcctccacgcccgccccgccccgcacccagcccctactctcaccacagcccccctccccgcagtcccagcggagtcctgggctgccccgcccctgagtcacccgaggaccccaac

SEQ ID NO: 609061 - DNA, 64 bp, Artificial Sequence
  ENSG00000175832_20 (sequence is synthesized)
tatgtaaccgagcccgggtaaagcagggctgcagaaagcagaaacggcgagcccggctcctggg

SEQ ID NO: 609062 - DNA, 120 bp, Artificial Sequence
  ENSG00000175832_21 (sequence is synthesized)
tcagaaaaccgtgagtagaggtccctggggagagggtatagggagtggaggatggcaggaagtgagtcataggatagagaatcacaagagagcagcttgttctctcctaaaacacagtgg

SEQ ID NO: 609063 - DNA, 120 bp, Artificial Sequence
  ENSG00000175832_22 (sequence is synthesized)
aaggaagcagtgaggggaacagacgagctccacacacaaagggacgggaggagagggatagacacaaagcctgctagaggtgatcagggaaggcttcacagaggaggcagtatcagtccc

SEQ ID NO: 609064 - DNA, 120 bp, Artificial Sequence
  ENSG00000175832_23 (sequence is synthesized)
agcaactgtagcccagttgctccccgtcacccaaagacagccacacctgatcccctggctcaggcagctggaaagaggagctgagaaaaaggagagtcatgctctcagcaaacatcaagt

SEQ ID NO: 609065 - DNA, 120 bp, Artificial Sequence
  ENSG00000175832_24 (sequence is synthesized)
cttgcccagcccccgctgctgccttccatggcctcagccgcagccctcaagttgaggaggggttccagcatcacactccctctgggtgaactttccctgggattttgtggttggcaggca

SEQ ID NO: 609066 - DNA, 120 bp, Artificial Sequence
  ENSG00000175832_25 (sequence is synthesized)
acctgggcaaagaacagtcaccaggaagcaggctggaaggaagaaattcttgaatgtggataggacttcctcctcccctgccctcgagctccaccccaagccacttctcacatcacccct

SEQ ID NO: 609067 - DNA, 120 bp, Artificial Sequence
  ENSG00000175854_0 (sequence is synthesized)
cagcgcgacgtccaagtcgccgctccgcgatgggggaggggaccgcagggccaggacccaggtccttggagacccgagaccaaagaaccccgggaggtccggtttggggcggcaggagga

SEQ ID NO: 609068 - DNA, 120 bp, Artificial Sequence
  ENSG00000175854_1 (sequence is synthesized)
cattcagaaactgaaggagaagagggacatgctggacaaggagatctcccagttcgtatctgaaggctacagtgtggatgaactggaggaccacattacccagcttcacgagtacaatga

SEQ ID NO: 609069 - DNA, 120 bp, Artificial Sequence
  ENSG00000175854_2 (sequence is synthesized)
catcaaggatgtggggcagatgctgatgggcaaactagctgtgatccgaggtgtcaccaccaaagagttgtatccagagtttgggctggacatgaatgactgagcaggctcatcgcccct

SEQ ID NO: 609070 - DNA, 120 bp, Artificial Sequence
  ENSG00000175854_3 (sequence is synthesized)
tccttgggtgcgcgcgcagctttctgtgcgccagttcacactccgggtcagagttcctggcccggtgcacctgagaggtcgctctccgactcccgcgctggaccctcttgcgccattgaa

SEQ ID NO: 609071 - DNA, 120 bp, Artificial Sequence
  ENSG00000175854_4 (sequence is synthesized)
ccccctgatccgggggcctcggaccccagggctcaggaggactgaaccaagacttacccgaagttgccgcggggccttccgatcccctaggccattgcccaagtctggccaggctgatgg

SEQ ID NO: 609072 - DNA, 120 bp, Artificial Sequence
  ENSG00000175854_5 (sequence is synthesized)
ggacagaagggtgtggacatgataaacactgagagcccaaccagcacacctacagagtttccagcgagacaatgccagaagcacttttctagagagcccaagcccaatcaggaggaggct

SEQ ID NO: 609073 - DNA, 120 bp, Artificial Sequence
  ENSG00000175854_6 (sequence is synthesized)
agagaagaggcgggcagggaggaaggggcgttcccagctccaaggttcctgaaatgtcgcagtgatacttgtgtaggggtacatgtactttatttgtcaataaacgtatctgtacactga

SEQ ID NO: 609074 - DNA, 120 bp, Artificial Sequence
  ENSG00000175854_7 (sequence is synthesized)
ggtccttggagacccgagaccaaagaaccccgggaggtccggtttggggcggcaggaggactgaaccaagacttacccgaagttgccgcggggccttccgatcccctttccttccagcaa

SEQ ID NO: 609075 - DNA, 120 bp, Artificial Sequence
  ENSG00000175854_8 (sequence is synthesized)
accccagggctcaggagatggatccagtccctggcgctcctacttcccaactgctcctcctcccgcatccccacagtaccccgtcctcacagcgggctgtgggtccaatcagactttccc

SEQ ID NO: 609076 - DNA, 120 bp, Artificial Sequence
  ENSG00000175854_9 (sequence is synthesized)
gccacaagcaggcatcatagggtgtcgtctcgcctaggggtgttgggttttgctcctgggcctcccagcttgccaaccgtcacaccctcagcagttggcctgctcctaggctgccccagc

SEQ ID NO: 609077 - DNA, 120 bp, Artificial Sequence
  ENSG00000175854_10 (sequence is synthesized)
ccctctcctgaccagcctctggtctccctggccacctaggtttgttcctcaagtacagaacctgctttggagccgcagccaggtttgagcggggcttgcccatctgccagactgagaact

SEQ ID NO: 609078 - DNA, 120 bp, Artificial Sequence
  ENSG00000175854_11 (sequence is synthesized)
cagggtctccccagtcttctgggacctactcagagtgatcaagataccgtccatgcctcaagtggctagcttgctaaagaggctgcaagtgcaagggtgaccctttgtgtcttaaggaag

SEQ ID NO: 609079 - DNA, 120 bp, Artificial Sequence
  ENSG00000175854_12 (sequence is synthesized)
tattttgtttcctccctgaacaaaatcttgctatctagagggctttagccgaggcaccaacacctgtatgtcatgctggctaggacagcctaccttggaggtgaggaaatgtgcaggcgg

SEQ ID NO: 609080 - DNA, 120 bp, Artificial Sequence
  ENSG00000175854_13 (sequence is synthesized)
gcccaggaggccacgcactgtgtaatccttcaaggacagggagctctcctgtcacctggggacagtaacagggccagtctcacagtactgctgcctggattcagcaggacatggtacctg

SEQ ID NO: 609081 - DNA, 120 bp, Artificial Sequence
  ENSG00000175854_14 (sequence is synthesized)
agcactggcagcctccaaagcccctgcacagcacacgatcatcaaaaaaatgcttgcttatggcttgggtgttcccccacggaatcctctaagcttcagaatcctgctggtgacccccag

SEQ ID NO: 609082 - DNA, 120 bp, Artificial Sequence
  ENSG00000175854_15 (sequence is synthesized)
gaaaggaccaagggagaagcaggctgtccccagaccctcgtaccttggtaagatgagcattgtacatatcggtgaggagcctgcatccatgtcccacgccgagcactgaaaagcagccag

SEQ ID NO: 609083 - DNA, 120 bp, Artificial Sequence
  ENSG00000175854_16 (sequence is synthesized)
cgtcatctcacacctgggacccccttcccattcccctaagtatccccacccctacccccaccatcagaatactcccttttctgatgctgccaaaggcaacaagaaggcaaaaagatcttc

SEQ ID NO: 609084 - DNA, 120 bp, Artificial Sequence
  ENSG00000175854_17 (sequence is synthesized)
tacagggggcaggtgcacccctctgggtatatatcacatgcagattgctgggccttacccatatgcactgaatctgactcatggttggagggggcctaggatccctgccaagctctccac

SEQ ID NO: 609085 - DNA, 120 bp, Artificial Sequence
  ENSG00000175854_18 (sequence is synthesized)
aggattctgacacctgagaggaagagatccctggcctagtcacacaaacctgcactcaaatcagggacagctctgagtataatctttagcctctttgagcgtcaagttccccatcagtaa

SEQ ID NO: 609086 - DNA, 62 bp, Artificial Sequence
  ENSG00000175854_19 (sequence is synthesized)
aatctttagcctctttgagcgtcaagttccccatcagtaaaatgggggtaaaaatactgtct

SEQ ID NO: 609087 - DNA, 120 bp, Artificial Sequence
  ENSG00000175857_0 (sequence is synthesized)
ttaacagaaaaggaagtggaatggaataaaatcccccaatacagtacaattatacattaatggctgtaatgtgaagagcatcacacacgaagagagccatcttccagaaataagtttata

SEQ ID NO: 609088 - DNA, 120 bp, Artificial Sequence
  ENSG00000175857_1 (sequence is synthesized)
cactctctcctctaattgcatcaggactttaccagataatgttcttccagatctgaaaaggaaaatgcctaaaagagcttccaaactcatttttgaataatactaggctacaaagaatta

SEQ ID NO: 609089 - DNA, 120 bp, Artificial Sequence
  ENSG00000175857_2 (sequence is synthesized)
cactgtgaattcattaagggtaacaccaaatcactaaacagcactgtttgtacagaaatgtcgaaaagctgtggaaataatttagcggccatttctgtaggaatttcgcttcttttactc

SEQ ID NO: 609090 - DNA, 120 bp, Artificial Sequence
  ENSG00000175857_3 (sequence is synthesized)
ttagtggtttgtggaattgggtgtgtttggcactggaaacaccgtgttgccacacgatttaccttaccgaggtttttacaaaggagaagcagcaggagaaaagtctgtactaaaacattc

SEQ ID NO: 609091 - DNA, 120 bp, Artificial Sequence
  ENSG00000175857_4 (sequence is synthesized)
ttgggcccccgcatcattggcttaaggcatgaaatctcagttgaaacccaagaccacaaatctgctgtcaggggaaataacacacacgacaactatgaaaatgtggaagcaggtcctccc

SEQ ID NO: 609092 - DNA, 120 bp, Artificial Sequence
  ENSG00000175857_5 (sequence is synthesized)
aaagctaaaggaaaaaccgataaggaactatatgaaaacacagggcagtctaatttcgaggagcatatctatggaaatgagacatcttctgactattataacttccagaagcctcgtcct

SEQ ID NO: 609093 - DNA, 120 bp, Artificial Sequence
  ENSG00000175857_6 (sequence is synthesized)
tctgaagttcctcaagatgaagatatatacattcttccagattcatattagcttttcaaaatattgacttttgttattggatgataaatattcactgtaatttttcaacagcaaagacaa

SEQ ID NO: 609094 - DNA, 120 bp, Artificial Sequence
  ENSG00000175857_7 (sequence is synthesized)
taaagaaaatgtggtacacatacaccatagaatattatgcagccgtaaaaaaagaacaaaactaacatgggaacagaaaatcaaataccacatattctcacttaaaagtgggagctaaat

SEQ ID NO: 609095 - DNA, 120 bp, Artificial Sequence
  ENSG00000175857_8 (sequence is synthesized)
ggcctacttgagggaggacagtggaaggagggagaggttcagggaaaaaaaaaatatcaggtactatgcttagtacacacatgatgaaataatctgtacaccaaacccccaagtcacaag

SEQ ID NO: 609096 - DNA, 120 bp, Artificial Sequence
  ENSG00000175857_9 (sequence is synthesized)
tgttcctacataacaaacctgaacatgtacccctgaacataaaattataattaaaatattaaaaataattcactgtgatttttattgtactgatgccattcttaatcaagttctgataag

SEQ ID NO: 609097 - DNA, 120 bp, Artificial Sequence
  ENSG00000175857_10 (sequence is synthesized)
tggatggtctctgcctatctccacctttctgaatcctatgtgtatcgctgtggattaattctagatatcttctccaccctccttgcaccagactaaatctgtattatgtgatattgattc

SEQ ID NO: 609098 - DNA, 120 bp, Artificial Sequence
  ENSG00000175857_11 (sequence is synthesized)
ttccttctaaatattacccgttatctctttcctttatttctaccattatctttatctggctcagaattattgtcataggctcctaactgttcctcctgcttctagtttctacccactcaa

SEQ ID NO: 609099 - DNA, 120 bp, Artificial Sequence
  ENSG00000175857_12 (sequence is synthesized)
tcaattaccgatggtgttgccagatttatcttcagaaaatattcctaacagccacattatttctttcacttaaaatgttttaatgccccctctttgcaaaagacataatacccataattt

SEQ ID NO: 609100 - DNA, 120 bp, Artificial Sequence
  ENSG00000175857_13 (sequence is synthesized)
gaactccaaaatttatggttttccacaattggttccaattcacttttccagtgacttctcttactatctctcatttctttgccttcagcagaatcatcttaaaacctgccaaacttatcc

SEQ ID NO: 609101 - DNA, 120 bp, Artificial Sequence
  ENSG00000175857_14 (sequence is synthesized)
ttccttcacagctttgcttttctgcctcttctctcaagcctgcttcagatcataagttcttccacacatctcctgaatcactccaaacccgcatttacctttttattttctgatataagc

SEQ ID NO: 609102 - DNA, 120 bp, Artificial Sequence
  ENSG00000175857_15 (sequence is synthesized)
tttgatgcctcttcaattcttaggacatttaaacatatgaatgttgccacagcattttattacctagcttcatatgaaaatgtcttaaattcccacctaaatgaaaagaaactgcccaaa

SEQ ID NO: 609103 - DNA, 120 bp, Artificial Sequence
  ENSG00000175857_16 (sequence is synthesized)
tgcctagaacatcacataaggcactaaatgcctcatgttttactgacgggaattgaattgtacattttgctgagtagttttgagaaaaaaatctaataaattcatctgttattcatccat

SEQ ID NO: 609104 - DNA, 120 bp, Artificial Sequence
  ENSG00000175857_17 (sequence is synthesized)
aaggaagtaacccaccaaagtgaaaaagaggaacaagttctaacccaatgcaggtttaaaacataaccaaaagaacaaaagagagagcttgacacaccaatcttgaggtgttgtgccatt

SEQ ID NO: 609105 - DNA, 120 bp, Artificial Sequence
  ENSG00000175857_18 (sequence is synthesized)
tgttgtgtcttctatctacttgctattgtgctgtgcacctgagggacatgggttggtggaggggttacaaaattaaaaagagagacatggatcctgaacacatacagtctagtaggaaag

SEQ ID NO: 609106 - DNA, 120 bp, Artificial Sequence
  ENSG00000175857_19 (sequence is synthesized)
aaaacatagtaaacaaatgaatacgatgctgctcatgaagctatgatagctcatctctaaatccactcttttatttgctcctctgaattgcttgacctgggcctctgcaaacatttcttt

SEQ ID NO: 609107 - DNA, 120 bp, Artificial Sequence
  ENSG00000175857_20 (sequence is synthesized)
tgccaggtggatccattctattctctaccaatagggggcactaaggaagaccgaaaggcagtaggaggcaacagggaattgctcctgcctattctttctgttgcccccgcaggaatttat

SEQ ID NO: 609108 - DNA, 120 bp, Artificial Sequence
  ENSG00000175857_21 (sequence is synthesized)
tgccatgtggtttactccagcatcactggttgtttgcagctttctagtttcttccatcattcccaggaccagcttctctgcaacctgtcagaagcaccagcaccagccaggtggcaccct

SEQ ID NO: 609109 - DNA, 120 bp, Artificial Sequence
  ENSG00000175857_22 (sequence is synthesized)
cccttagactctgacagccagactctccttcaacctcctgaagtggtgcaggagacaagtggtaccctcagagttctgcgtcccagcctggcagggctcctcctctgaggtctggtaact

SEQ ID NO: 609110 - DNA, 120 bp, Artificial Sequence
  ENSG00000175857_23 (sequence is synthesized)
ctcagccaagattgttacagttactatctctgtggtacctgtgtccccttttttgtttttccatcctgccaatgcctgtttagccaattatctatattaaattctctctgttaaaacaaa

SEQ ID NO: 609111 - DNA, 120 bp, Artificial Sequence
  ENSG00000175857_24 (sequence is synthesized)
aatgcaggtttaaaacataaccaaaagaacaaaagagagagcttgacacaccaatcttgaggttatcacgctataatagagaatggactcattaatatgggattacagaggaaggaatgg

SEQ ID NO: 609112 - DNA, 120 bp, Artificial Sequence
  ENSG00000175857_25 (sequence is synthesized)
ttaagaaaaagacatggcctctgactgctccaaaaaaggataagcagggcttcacagaagaggtgacaggtttctggatggcagatcattcaaccttctttttcttgagttttctactct

SEQ ID NO: 609113 - DNA, 120 bp, Artificial Sequence
  ENSG00000175857_26 (sequence is synthesized)
aaaacataaccaaaagaacaaaagagagagcttgacacaccaatcttgaggtgttgtgccattctctgggaacatacagatgaaatgacctgaaccctgcccaccatttaaccaagtaag

SEQ ID NO: 609114 - DNA, 120 bp, Artificial Sequence
  ENSG00000175866_0 (sequence is synthesized)
aaggtggccgccgccggacgccgggctctgtggttcgggtccgctttcgtctccgtcctgctgccgttaccgccgctgctgccgccgcttgcgtcccccgctccggtctgtggtgcagcc

SEQ ID NO: 609115 - DNA, 120 bp, Artificial Sequence
  ENSG00000175866_1 (sequence is synthesized)
gggacccaggaccatgtctctgtctcgctcagaggagatgcaccggctcacggaaaatgtctataagaccatcatggagcagttcaaccctagcctccggaacttcatcgccatggggaa

SEQ ID NO: 609116 - DNA, 120 bp, Artificial Sequence
  ENSG00000175866_2 (sequence is synthesized)
gaattacgagaaggcactggcaggtgtgacgtatgcagccaaaggctactttgacgccctggtgaagatgggggagctggccagcgagagccagggctccaaagaactcggagacgttct

SEQ ID NO: 609117 - DNA, 120 bp, Artificial Sequence
  ENSG00000175866_3 (sequence is synthesized)
cttccagatggctgaagtccacaggcagatccagaatcagctggaagaaatgctgaagtcttttcacaacgagctgcttacgcagctggagcagaaggtggagctggactccaggtatct

SEQ ID NO: 609118 - DNA, 120 bp, Artificial Sequence
  ENSG00000175866_4 (sequence is synthesized)
gagtgctgcgctgaagaaataccagactgagcaaaggagcaaaggcgacgccctggacaagtgtcaggctgagctgaagaagcttcggaagaagagccagggcagcaagaatcctcagaa

SEQ ID NO: 609119 - DNA, 120 bp, Artificial Sequence
  ENSG00000175866_5 (sequence is synthesized)
gtactcggacaaggagctgcagtacatcgacgccatcagcaacaagcagggcgagctggagaattacgtgtccgacggctacaagaccgcactgacagaggagcgcaggcgcttctgctt

SEQ ID NO: 609120 - DNA, 120 bp, Artificial Sequence
  ENSG00000175866_6 (sequence is synthesized)
cctggtggagaagcagtgcgccgtggccaagaactccgcggcctaccactccaagggcaaggagctgctggcgcagaagctgccgctgtggcaacaggcctgtgccgaccccagcaagat

SEQ ID NO: 609121 - DNA, 120 bp, Artificial Sequence
  ENSG00000175866_7 (sequence is synthesized)
cccggagcgcgcggtgcagctcatgcagcaggtggccagcaacggcgccaccctccccagcgccctgtcggcctccaagtccaacctggtcatttccgaccccattccgggggccaagcc

SEQ ID NO: 609122 - DNA, 120 bp, Artificial Sequence
  ENSG00000175866_8 (sequence is synthesized)
ctggcaccgttcgtggggcggatgtctgcccaggagagcacacccatcatgaacggcgtcacaggcccggatggcgaggactacagcccgtgggctgaccgcaaggctgcccagcccaaa

SEQ ID NO: 609123 - DNA, 120 bp, Artificial Sequence
  ENSG00000175866_9 (sequence is synthesized)
tccctgtctcctccgcagtctcagagcaagctcagcgactcctactccaacacactccccgtgcgcaagagcgtgaccccaaaaaacagctatgccaccaccgagaacaagactctgcct

SEQ ID NO: 609124 - DNA, 120 bp, Artificial Sequence
  ENSG00000175866_10 (sequence is synthesized)
cgctcgagctccatggcagccggcctggagcgcaatggccgtatgcgggtgaaggccatcttctcccacgctgctggggacaacagcaccctcctgagcttcaaggagggtgacctcatt

SEQ ID NO: 609125 - DNA, 120 bp, Artificial Sequence
  ENSG00000175866_11 (sequence is synthesized)
accctgctggtgcctgaggcccgcgatggctggcactacggagagagtgagaagaccaagatgcggggctggtttcccttctcctacacccgggtcttggacagcgatggcagtgacagg

SEQ ID NO: 609126 - DNA, 120 bp, Artificial Sequence
  ENSG00000175866_12 (sequence is synthesized)
ctgcacatgagcctgcagcaagggaagagcagcagcacgggcaacctcctggacaaggacgacctggccatcccaccccccgattacggcgccgcctcccgggccttccccgcccagacg

SEQ ID NO: 609127 - DNA, 120 bp, Artificial Sequence
  ENSG00000175866_13 (sequence is synthesized)
gccagcggcttcaagcagaggccctacagtgtggccgtgcccgccttctcccagggcctggatgactatggagcgcggtccatgagcagtggcagcggcacgctggtgtccacagtgtga

SEQ ID NO: 609128 - DNA, 120 bp, Artificial Sequence
  ENSG00000175866_14 (sequence is synthesized)
ggacgctgaccccgggcagccgctgctctgaagagcttccgcgccttccccctggtctcgtccgttttcctcctcagctctcgctggtttgttcttgggttgtttttcttttccacctgc

SEQ ID NO: 609129 - DNA, 120 bp, Artificial Sequence
  ENSG00000175866_15 (sequence is synthesized)
cccatgccttttggttggtgaccccagactctgtgatcccccagggtccatggtgctgctccatccgccccccctcccctgtgtttacgcgccccatcctgtgtgtcccagccttttgag

SEQ ID NO: 609130 - DNA, 120 bp, Artificial Sequence
  ENSG00000175866_16 (sequence is synthesized)
ctatggagcgcggtccatgagcaggaatccctttgcccacgtccagctgaagccgacagtgaccaacgacaggtctgcccccctcctcagctgatggccacatctgcagtgctgcccatc

SEQ ID NO: 609131 - DNA, 120 bp, Artificial Sequence
  ENSG00000175866_17 (sequence is synthesized)
tggtggcttcccccgcccttcccatgtagcctgttctgtcatcatctgtgcgttcctgtgtagagaacatccaggccccggctgcctggtcttgccccacttgagtctggcctggactgg

SEQ ID NO: 609132 - DNA, 120 bp, Artificial Sequence
  ENSG00000175866_18 (sequence is synthesized)
atcccagctgttctaggcagggccgggcagagtggggcgcaggcccctgaagggcgagacccagtggctgggctgcccagggctgaggggccgcctcttgagggtacacgcctctggtca

SEQ ID NO: 609133 - DNA, 120 bp, Artificial Sequence
  ENSG00000175866_19 (sequence is synthesized)
catggccatggagccttgggtacccctgagttaagggaggacatttggccagctggtggctgggaggggagcctggctgccctgctgcttctcctgcctaataaacaggcttctcctgca

SEQ ID NO: 609134 - DNA, 120 bp, Artificial Sequence
  ENSG00000175866_20 (sequence is synthesized)
gatgcaccggctcacggaaaatgtctataagagggtggaagagaagtaccagcggaacctttttcctattttttctccttctgcgctgaaaccagaaagcaggaactttcgtggtgagag

SEQ ID NO: 609135 - DNA, 120 bp, Artificial Sequence
  ENSG00000175866_21 (sequence is synthesized)
gcatcttcttaagagccgattctgaactgaccactccttgacgggcaatcccggtggacggggggtctgagtcctgctgtggagggtctgcctgaggccggtaggggctcagcccaagta

SEQ ID NO: 609136 - DNA, 120 bp, Artificial Sequence
  ENSG00000175866_22 (sequence is synthesized)
atgtttcactggctgcagtggcagccatgacacgctgggctccagggagagtcctgatcgcagccccagccagaccccactcctggggttcacaaggttgcaaggcacacttcccctggc

SEQ ID NO: 609137 - DNA, 120 bp, Artificial Sequence
  ENSG00000175866_23 (sequence is synthesized)
ctctccgactgtaggcagaggcagaccccacacaaccagagcacgttgctggcggctggtttgcagcatcctgtctaaagccaggggtctgaccctggtgtcagttcaggcccatgggcc

SEQ ID NO: 609138 - DNA, 120 bp, Artificial Sequence
  ENSG00000175866_24 (sequence is synthesized)
ctgcgacctctcagcctgtgtcgcagtgatccccagcatgggacagcagaggaaggaggggatggccgtttgtttcccttgtggctgtttggaggcgagattgtccgacgttccagactc

SEQ ID NO: 609139 - DNA, 120 bp, Artificial Sequence
  ENSG00000175866_25 (sequence is synthesized)
ctgttcagcactcgctcctggctccagagggtgcacacgggcatgcggggccacagctcatcagtcagggggagggggcccctcctgcacagccgggacacccggtgtctcgtgcccatc

SEQ ID NO: 609140 - DNA, 120 bp, Artificial Sequence
  ENSG00000175866_26 (sequence is synthesized)
cgctctagccctgccctgcctcctgttccgggtccatgtgttggagctgacggctgatgtgttttctctccatgtccagctgaagtcttttcacaacgagctgcttacgcagctggagca

SEQ ID NO: 609141 - DNA, 120 bp, Artificial Sequence
  ENSG00000175866_27 (sequence is synthesized)
gagatgctgggaggcccctcaggcggcggcaataccaagtaatgcctttagcctcctttgatcagctgtgacgggcgtcctggtctgagactgtgaagcaattggaaatagttctcccac

SEQ ID NO: 609142 - DNA, 120 bp, Artificial Sequence
  ENSG00000175866_28 (sequence is synthesized)
acctggggccacctcttttcctttagggcccagcctggcccttcacccctgtcagagccggggatgtcccttagggcgtcctgctttctccgagtgacacgggaacccccctgggccctg

SEQ ID NO: 609143 - DNA, 120 bp, Artificial Sequence
  ENSG00000175866_29 (sequence is synthesized)
cccctctttcatcgcatctggccggccccatccatccctgtcaggcaaggttggggagggtagctgaggctggcatccatggctggggctgcagcctcctctgccccaatctgtgctccg

SEQ ID NO: 609144 - DNA, 120 bp, Artificial Sequence
  ENSG00000175866_30 (sequence is synthesized)
ccccagcggcaggggtctccccccagtggcaggggtctgccccatggcaggggtctttccccacggcaggggtctccccccaatggcaggggtctccccccaatggctcgggtctccccc

SEQ ID NO: 609145 - DNA, 120 bp, Artificial Sequence
  ENSG00000175866_31 (sequence is synthesized)
acatggctgttgtcttcccccatggctggggtctttcaccacagagtctagtgaccaccttgctccatcgcctccctgtgccactcagattgccgcagggtgtggcatcccacacgtgta

SEQ ID NO: 609146 - DNA, 120 bp, Artificial Sequence
  ENSG00000175866_32 (sequence is synthesized)
cacactcagcacgtccagccgaagccctgtggtgggcatcagtttcccacagttcgcaggtgcagagcagggcttggccatcctgagaccgcaggctttctgtggctttcagctcttcca

SEQ ID NO: 609147 - DNA, 120 bp, Artificial Sequence
  ENSG00000175866_33 (sequence is synthesized)
catgccagacgggctctccagtttggagttctagaagtcacctatggagtcagatgggccacacctcctcagtttactgaatgctgttgcagagaggctgggccagggtgccaccctcgc

SEQ ID NO: 609148 - DNA, 120 bp, Artificial Sequence
  ENSG00000175866_34 (sequence is synthesized)
tggacctgggggctgcattcccagggctgtgtttgtgcgggtgtgtctcttggcaagatgggaaaaggccctgacatttgtgccttcctaagcttggccttgcagccatcactctgagga

SEQ ID NO: 609149 - DNA, 120 bp, Artificial Sequence
  ENSG00000175866_35 (sequence is synthesized)
gggggccgagggcagggggtctcccaggaggctgctccatctttcttccagtggccactccaatcttggtgccatccgtggcttagcgtgacactggggctgcgaggcaggagcaactgc

SEQ ID NO: 609150 - DNA, 120 bp, Artificial Sequence
  ENSG00000175866_36 (sequence is synthesized)
tctgcccgggctctggggccttgcagttgggtctggtggggccggcagctcccaccaggttgaggacagcccgggccaccttgcccttgaggctgagcacacagtgggagcgggctgcgg

SEQ ID NO: 609151 - DNA, 120 bp, Artificial Sequence
  ENSG00000175866_37 (sequence is synthesized)
tctttgtctccctggagcactgtctctgttgctccagagacagccgcgcagccatgctggggagctagagggacttgtgcatggatggtggtcggtgggggatggggagcctctgggctg

SEQ ID NO: 609152 - DNA, 120 bp, Artificial Sequence
  ENSG00000175866_38 (sequence is synthesized)
gtggccgtgcccgccttctcccaggtcagtgggcggggccggggctgggaggggcccgcaggtggaacagtgggctcagcctgcagtcccccgttggagcctccgctgaggggcggggcg

SEQ ID NO: 609153 - DNA, 120 bp, Artificial Sequence
  ENSG00000175866_39 (sequence is synthesized)
cctgggggtctgggtctttggacagccctggggtgaaggctgcatgatttgggaatgtgtacacacccctgcttcggcctcaggctgcccgcctcgccgcagcaggctccctgtgtcggc

SEQ ID NO: 609154 - DNA, 120 bp, Artificial Sequence
  ENSG00000175866_40 (sequence is synthesized)
atgctggggctggggtcagcctgtccctcatggtgccctcagccagccacgggcaactcactgctctgtccaagggggcagcgtctgggctgggaagtggctggcctagaggtgggcctg

SEQ ID NO: 609155 - DNA, 120 bp, Artificial Sequence
  ENSG00000175866_41 (sequence is synthesized)
gacgccgccgccttttgggagagccaggggggcaggatctcttccgtgagaaccacggggctccctcagtcacatccatgagatgggagtgcttgctgctcagccctggcatgtggctgg

SEQ ID NO: 609156 - DNA, 120 bp, Artificial Sequence
  ENSG00000175866_42 (sequence is synthesized)
accccttccagtcagtgtgaccctggatttgggccatctggtgccgggaggccagaggtggaggatcagggcctgggtcctaggccctggtgtgggttctcggaaacccgggatcatggc

SEQ ID NO: 609157 - DNA, 120 bp, Artificial Sequence
  ENSG00000175866_43 (sequence is synthesized)
tggagagttggagacccctgtctgtctggggctcctcagccagaggtccagtttgtgggatattggctgggctagcagctttgttcccggggccggtctccagggctgggcctcaggcag

SEQ ID NO: 609158 - DNA, 120 bp, Artificial Sequence
  ENSG00000175866_44 (sequence is synthesized)
tgagtagagagaagaagagaacccacctttttccgagataacaggtagcctgggtgactactcagctattgacccacaagtgaggagtccctagattgacagcctgagctgaggccgcag

SEQ ID NO: 609159 - DNA, 120 bp, Artificial Sequence
  ENSG00000175866_45 (sequence is synthesized)
gaggcaacctggagaggtttgggctctgggccgtgggtgttccacaggtcagcctctggggtgggctcagtgctgggagagccaaggaggggtctgcatctgccctaggccgcgggccag

SEQ ID NO: 609160 - DNA, 120 bp, Artificial Sequence
  ENSG00000175866_46 (sequence is synthesized)
gccatgctggcagatgaagggcacagccagccccagcgccacacctgggcgctcctcccaggcagtgtcaccctcccaggggccgggatggtacatgtgacaagtttccaggaaactgca

SEQ ID NO: 609161 - DNA, 120 bp, Artificial Sequence
  ENSG00000175866_47 (sequence is synthesized)
gctggggtctgggtctggtcctgggtcctacaagcaggcggaggagtcccaggggcccgcccaggcatgggtgaggtgctgcaggtgccctgcgggggcctcggctccctgggggcagga

SEQ ID NO: 609162 - DNA, 120 bp, Artificial Sequence
  ENSG00000175866_48 (sequence is synthesized)
ggaggggtctcaggcggccagtcttgcatctgtttgggagtgtgcaacaagcacacaaattgaggtggccgctggctggaggaggtatcccctttaatttgggcagtcattactttacca

SEQ ID NO: 609163 - DNA, 120 bp, Artificial Sequence
  ENSG00000175866_49 (sequence is synthesized)
ctgggaccagggctccaggcaggtctctgagtgctgcagccaggagatggggagccttccaaaggaacacggtttgaaccttgtccaggcaggatcaccatttgtgggtgtgtacaggca

SEQ ID NO: 609164 - DNA, 120 bp, Artificial Sequence
  ENSG00000175866_50 (sequence is synthesized)
gcgggtgggggtgaccacaggccccgtcacccggcctgacatgtttctgcctctgcccccagggcctggatgactatggagcgcggtccatgagcaggtaaggggactttcagacctgtc

SEQ ID NO: 609165 - DNA, 120 bp, Artificial Sequence
  ENSG00000175866_51 (sequence is synthesized)
caggacctgctgggccgtgcggggcaccctcggcctcaccctgcagtgtctgtggcactcactgcttttctaaggctcgccgtgagccaggtctaaagtttgaagaaaaagaaaaatctt

SEQ ID NO: 609166 - DNA, 120 bp, Artificial Sequence
  ENSG00000175866_52 (sequence is synthesized)
agtgctcagagggtctgtggtcatggtgagaagaaccccgcagctcctggaagggcgagaggacccggagaggcttcctctgccagactcagctgtgctttgaggaggggaagtgaccca

SEQ ID NO: 609167 - DNA, 120 bp, Artificial Sequence
  ENSG00000175866_53 (sequence is synthesized)
aggccagcccagccgtggtcctgggaggcagcatcgcccggttagggcttcctgcgtgtcaccgggggccttgctctggtttctggctgaacttgttgggcactgggcgatcctagtggg

SEQ ID NO: 609168 - DNA, 120 bp, Artificial Sequence
  ENSG00000175866_54 (sequence is synthesized)
cacaggcagatccagaatcagctggaagaaatggtgagtccacccccagcgtggccctgcgaggaggggcaggtgcgacgggagagctggcgccacaccttggccgtgtgtccacttggg

SEQ ID NO: 609169 - DNA, 120 bp, Artificial Sequence
  ENSG00000175866_55 (sequence is synthesized)
aacagtcccagttgtccagccacactcggaggcagggagggaccctggctcagcacacaagccacactcgaaggaggacgtcggagaaaagggcacaggccagaccgcggccgcatgttt

SEQ ID NO: 609170 - DNA, 120 bp, Artificial Sequence
  ENSG00000175866_56 (sequence is synthesized)
aggacagccctgaggggctgtggcatgcttctgtcccatgtggtgctgatggggggtgggtctcgggctctgctgatgagtatcagggctgggtcctggaacccaggctggctgcactct

SEQ ID NO: 609171 - DNA, 120 bp, Artificial Sequence
  ENSG00000175866_57 (sequence is synthesized)
gggggcgcttctggggacggctagccagccccctgggctgatggtgtggtcgcacctgctggccttggcggtcatgtctcaaatgggatcacagctccgagggagctttggcagaggaag

SEQ ID NO: 609172 - DNA, 120 bp, Artificial Sequence
  ENSG00000175866_58 (sequence is synthesized)
tttggttgggtgttgagtttgtttcctgttcttcctcttcagccccggggacgttgctcatttctggtcaccttctcctccagctgtccttgctgccccaggatgggaggatggaaggag

SEQ ID NO: 609173 - DNA, 120 bp, Artificial Sequence
  ENSG00000175866_59 (sequence is synthesized)
agttgtattctgcctgctgcaccatgcaaatgcgctccttcagcccgcagacactcctctgcggccgggtttcttcttaccccctttgcacagaccatcatggagcagttcaaccctagc

SEQ ID NO: 609174 - DNA, 120 bp, Artificial Sequence
  ENSG00000175866_60 (sequence is synthesized)
cggtctagcctggggcagacaggagatggcagatggacacctgggaggggctcactgagctccgcctctccatcaacggaggccccgtctaggttgtggaggatgcttgagagagccctg

SEQ ID NO: 609175 - DNA, 120 bp, Artificial Sequence
  ENSG00000175866_61 (sequence is synthesized)
atgttctgacctcccaaaaggtcaagggtgctggcagccggtgagacgccgcagtttgctctgctccccggggctgtgcttgccaggagacatttcggctataagcaggcgagaatacct

SEQ ID NO: 609176 - DNA, 120 bp, Artificial Sequence
  ENSG00000175866_62 (sequence is synthesized)
gtcttgcacattgcagactgacgatggcttcctttttccagagccactcgtctgtgggacacttggtgacctcatctacggtagagtcttccgtagccctcacgtggctctccgaggtgt

SEQ ID NO: 609177 - DNA, 120 bp, Artificial Sequence
  ENSG00000175866_63 (sequence is synthesized)
gcccaaatccctgtctcctccgcagtctcagagcaagctcagcgactcctactccaacacactccccgtgcgcaagagcgtgaccccaaaaaacagctatgccaccacagccgagaacaa

SEQ ID NO: 609178 - DNA, 120 bp, Artificial Sequence
  ENSG00000175866_64 (sequence is synthesized)
gtgcccccgctccctgcttaactgcagggaagccaagcaggtctgcccacaccctgcagaccaagccagaagatttccagtgtggggtcgcctggtggagctggatcggccccaaaggag

SEQ ID NO: 609179 - DNA, 120 bp, Artificial Sequence
  ENSG00000175866_65 (sequence is synthesized)
aggacgggactaggccaggggcagatgagaaggataagtgagagtctgtggaaacagccatacgggggagctgggggtccctcgggtgcccgctgctgtttgcagcctcccactcaggca

SEQ ID NO: 609180 - DNA, 120 bp, Artificial Sequence
  ENSG00000175866_66 (sequence is synthesized)
tggtgcacagttgcagggacgcaactcaggccgttctctagggtgccctgccctctccagccacctcttcccgtgtccccagcctttgttttgatcctgtttttcactccagtacatcga

SEQ ID NO: 609181 - DNA, 120 bp, Artificial Sequence
  ENSG00000175866_67 (sequence is synthesized)
caagggcggaccgggccctgtgtagagacccttccgcgccggcgttcccgctccgctaaagatttcaaatccaggggattccatgctcaatggatgaatgtagacacaaaacagcaacac

SEQ ID NO: 609182 - DNA, 120 bp, Artificial Sequence
  ENSG00000175866_68 (sequence is synthesized)
ttgtatgaagatgtaaagtgctgaacatatttttttcctgtttcctttccttttttttaaaaaatctgaattgtgccctgtactgcagttacttgtttgaataaaagttttatttattgc

SEQ ID NO: 609183 - DNA, 120 bp, Artificial Sequence
  ENSG00000175866_69 (sequence is synthesized)
tgatctgtccgcccaagggccagaaggccgggagcacggggatgggagcgcccgcaccctggctggaagatgaacttcccgtaagcacgtaattccctgcaggtccggcagctacacctg

SEQ ID NO: 609184 - DNA, 120 bp, Artificial Sequence
  ENSG00000175866_70 (sequence is synthesized)
gagtgtggggcctggtccctccccatgcccctcggtggggctctcctgggcccctcactcccactggcaatgtcacaagggcctccccaggcccctcctgcctcgggcaggccccagccc

SEQ ID NO: 609185 - DNA, 120 bp, Artificial Sequence
  ENSG00000175866_71 (sequence is synthesized)
tcctccttacccaacctcccatccagaaccttgctgccagggcctcccagctcgctcctgcggccaaaggccagctgtcaggtgctatgcggggtcaccagcagagtgcccgctggcagg

SEQ ID NO: 609186 - DNA, 120 bp, Artificial Sequence
  ENSG00000175866_72 (sequence is synthesized)
tgggggcttccccgcttccggggtctgccccaggactcctgggtggacctcccccccccacctccgctgactcctgcaggcactggggagctctgctggaattgggggttttaaaacttc

SEQ ID NO: 609187 - DNA, 120 bp, Artificial Sequence
  ENSG00000175866_73 (sequence is synthesized)
attagcagatttgtgctcttccatactgtttgtttgtttgttaggtgaaatacagtgtggtgagctgcactggtgacaacagcccttacctggctggggaggtgtctccagcagagctca

SEQ ID NO: 609188 - DNA, 120 bp, Artificial Sequence
  ENSG00000175866_74 (sequence is synthesized)
ctcccgcctacagccactcacaccccggggacaggaagctgtagagttggcgggccaggagggcagttgagagctggccagcggagggtgcagggaagcccagctgtgctcaactctcct

SEQ ID NO: 609189 - DNA, 120 bp, Artificial Sequence
  ENSG00000175866_75 (sequence is synthesized)
gcctccgccttccaccctgggcccagggacagacagacattgccctcagaagggcagggaggaggctgtcctggagaggcctgtaggtccattcttcacccgtccctaccaggccaactc

SEQ ID NO: 609190 - DNA, 120 bp, Artificial Sequence
  ENSG00000175866_76 (sequence is synthesized)
ggcctgcaggaagggagacctgcagggcgctacccctgcgcccccacacacagtagggccagaacaccatcccctccaccggggtgtgccgaggacagtggggaggagaggagaggggca

SEQ ID NO: 609191 - DNA, 120 bp, Artificial Sequence
  ENSG00000175866_77 (sequence is synthesized)
gcttcctcctggccccaggaagggctggcatcgggttcctggcacagcccctcctgtccaggactttatcatcggcagacctcagaagacaacacacaaaggtttcttttgtcttagctt

SEQ ID NO: 609192 - DNA, 120 bp, Artificial Sequence
  ENSG00000175866_78 (sequence is synthesized)
catttctcttaaaaaacaaggaacaagaaaacattgcaccagcgttctaagcctcaaacaaaacacaaaacaaatccccctgcgaagcaacaataaactttacatctctttggcaacaat

SEQ ID NO: 609193 - DNA, 120 bp, Artificial Sequence
  ENSG00000175868_0 (sequence is synthesized)
gcccacagcaggtgtggtgttcatcccgggtcgaccggccgctcgcgctgccctgaaactctagtcgccagagaggcggcatgggtttccggaagttctcccccttcctggctctcagta

SEQ ID NO: 609194 - DNA, 120 bp, Artificial Sequence
  ENSG00000175868_1 (sequence is synthesized)
tcttggtcctgtaccaggcgggcagcctccaggcggcgccattcaggtctgccctggagagcagcccagacccggccacactcagtaaagaggacgcgcgcctcctgctggctgcactgg

SEQ ID NO: 609195 - DNA, 120 bp, Artificial Sequence
  ENSG00000175868_2 (sequence is synthesized)
tgcaggactatgtgcagatgaaggccagtgagctgaagcaggagcaggagacacagggctccagctccgctgcccagaagagagcctgcaacactgccacctgtgtgactcatcggctgg

SEQ ID NO: 609196 - DNA, 120 bp, Artificial Sequence
  ENSG00000175868_3 (sequence is synthesized)
caggcttgctgagcagatcagggggcatggtgaagagcaacttcgtgcccaccaatgtgggttccaaagcctttggcaggcgccgcagggaccttcaagcctgagcagatgaatgactcc

SEQ ID NO: 609197 - DNA, 120 bp, Artificial Sequence
  ENSG00000175868_4 (sequence is synthesized)
tacacatgtttgcatcctaagatactgaaaaaagggcacctttgtcacttgaaaggaatgaaactgaatgcaaaataagctaattccatatttgctgtgcatcatttttatatttaattc

SEQ ID NO: 609198 - DNA, 120 bp, Artificial Sequence
  ENSG00000175868_5 (sequence is synthesized)
tatgtccagtaaaagtgatggcatctctcattgacttatctggtagcaaactggttctttcggagccatcctgttgatcatgcagctccaccaaaccttagggggacgtgaaatcactgc

SEQ ID NO: 609199 - DNA, 120 bp, Artificial Sequence
  ENSG00000175868_6 (sequence is synthesized)
ctgttgtggtctccgaggacacatggtaatggtgatgctgtgccttgttatctaagaacatgattgtataatttgtttaagaaaatgtcaatattgtgccatttgtgaacttcatcaaga

SEQ ID NO: 609200 - DNA, 120 bp, Artificial Sequence
  ENSG00000175868_7 (sequence is synthesized)
ttaaaagcatattttgggtacatttgtttcaaaaccttggtgatgcattacaacttgttttcttatgtaataataatgatgatgatgatgataataataaatatttttgagtgcttacta

SEQ ID NO: 609201 - DNA, 120 bp, Artificial Sequence
  ENSG00000175868_8 (sequence is synthesized)
aaggaggcacaagccaaggaagtctgtgtctaccagaagccagaatcacagaacagtctctggaagaagagcagccctgctgacacctagagtttggacttccagcttccagaactgtga

SEQ ID NO: 609202 - DNA, 120 bp, Artificial Sequence
  ENSG00000175868_9 (sequence is synthesized)
gagaataatttctgttgttttaagccacaaagtttgtggtaatttgttatgacagccctaggaaactaatacaatacattttcatttattttgggtaaatgccttggagtgggattgctg

SEQ ID NO: 609203 - DNA, 120 bp, Artificial Sequence
  ENSG00000175868_10 (sequence is synthesized)
ggttatttggaaagtgtgtatttaactctgtaagaaactgccaaactattttctgaagtgactgtaccacttcgccttcttgccagccacatatgagagctctagtatttccacaaatag

SEQ ID NO: 609204 - DNA, 120 bp, Artificial Sequence
  ENSG00000175868_11 (sequence is synthesized)
ttgagcatctattttaccatatgtttatcacctttattgaagggtctgtttaaatcttctgctaaatttttgttggcttgcttgctttattagtgttgagtttttagagctctttatatg

SEQ ID NO: 609205 - DNA, 120 bp, Artificial Sequence
  ENSG00000175868_12 (sequence is synthesized)
ttgtggatgcaagattgttttcagatatatagtttggaaacttccttcccctgaatctgcggattgctttttcattttcttagcagtgtctctcacagagaaaaagttgtaatttgaata

SEQ ID NO: 609206 - DNA, 120 bp, Artificial Sequence
  ENSG00000175868_13 (sequence is synthesized)
agatccaattcatctttttttttcttttatgtattgtgcttttagttcatgtctaagaactctttgcctaactaaggtcccaaggtcacaataaccttattctatactttcttgtaaaag

SEQ ID NO: 609207 - DNA, 120 bp, Artificial Sequence
  ENSG00000175868_14 (sequence is synthesized)
ttttatagttttatattttatatgtagattagtgatctattttgagttaatttttgtataaggtgagaggtgtaggttgaaattcatacctgtgaatatagatacccaattgtttcagtg

SEQ ID NO: 609208 - DNA, 120 bp, Artificial Sequence
  ENSG00000175868_15 (sequence is synthesized)
ccatttgttaaaaagactgttatttcaccatttaattgcccctgcacctttgtcaaaaagcaactgatcatatttgtgtgggtatatttctgggttctcaattctgtctcattgattgat

SEQ ID NO: 609209 - DNA, 120 bp, Artificial Sequence
  ENSG00000175868_16 (sequence is synthesized)
ttgaccattcttttgccaatgtcatactgccttgattagtgtagtgttaaagtgaatctcaaaaccaggtaatgtgggtctaccaacattgttcattcttgttcaaaaagattttagcta

SEQ ID NO: 609210 - DNA, 120 bp, Artificial Sequence
  ENSG00000175868_17 (sequence is synthesized)
catctaaaatattttctacatcttttatacattttagaatcagtgtgttactatctacaaaatttctgatgagatttttaatgggattgtgttaaatcagtgggttaattttgggagaat

SEQ ID NO: 609211 - DNA, 120 bp, Artificial Sequence
  ENSG00000175868_18 (sequence is synthesized)
tagcatattaataatattaagtcgttcaattcatgaacacaatacatgttttcacttatttaggttttctctgtttttttttttttaacagtgttctcagttttcaacagaaatattcta

SEQ ID NO: 609212 - DNA, 120 bp, Artificial Sequence
  ENSG00000175868_19 (sequence is synthesized)
tctacacatatcttgttagatttttaactattttattttttggtgctaatgtaaatggtacttaaacatttttgtttttaattgttcattgctagtagatagaaatacaatatttaaaat

SEQ ID NO: 609213 - DNA, 120 bp, Artificial Sequence
  ENSG00000175868_20 (sequence is synthesized)
gtcggccgcgaaggcgtggcggcccgcggaccggcggaccccgggtcataccagctgtccgggtgcacaggcccaggggccccacgaccgcgggtgtcgggaccgtgggctccactgagg

SEQ ID NO: 609214 - DNA, 120 bp, Artificial Sequence
  ENSG00000175868_21 (sequence is synthesized)
agcccaccgaatccttcggcctggccaggcggggggtcttcttcccagtccgcggaagccaggtccgggagacggcggggctcactgtgccttcggacctacactctgctcgggggccgg

SEQ ID NO: 609215 - DNA, 120 bp, Artificial Sequence
  ENSG00000175868_22 (sequence is synthesized)
atttctgcaaagcgtccacttggaaagaagtttcacttgcagggaaggcgggtgtacgcaatgatggtccgtgtgtccgggatgtgaatgccaaccaagactgcgtccgttggtggagtg

SEQ ID NO: 609216 - DNA, 120 bp, Artificial Sequence
  ENSG00000175868_23 (sequence is synthesized)
tgcgcgggtcctccgtgagggtgcttctggcagtcacagttcacgagttagcgagaagatggctgggaggcggcgagcccccgctcccggggcgcgcatttcgaactccataggtctccc

SEQ ID NO: 609217 - DNA, 120 bp, Artificial Sequence
  ENSG00000175868_24 (sequence is synthesized)
gtggagagcagcccagacccggccacactcagtgaggaggaagtgcgcctcctgctggctgcactggtgcaggactatgtgcagatgaaggccagtgagctggagcaggagcaggagaca

SEQ ID NO: 609218 - DNA, 120 bp, Artificial Sequence
  ENSG00000175868_25 (sequence is synthesized)
gagctccagatttaatttatgtccttttcttctatcttctttggatggaggctgagtttcagttcttgccggagagtttccagatttctcctcctgatggcctgttctgtggattttgga

SEQ ID NO: 609219 - DNA, 120 bp, Artificial Sequence
  ENSG00000175868_26 (sequence is synthesized)
tttgccaaggcagccctcacaatccgagtcctggggctgtctaaggaactatggtgagatagagtgttatgggttgaattttgtccccctcaaaaaggtaccattgtcttctaaaagaac

SEQ ID NO: 609220 - DNA, 120 bp, Artificial Sequence
  ENSG00000175868_27 (sequence is synthesized)
aactgaggagttcaacatgaaggaggaaggatatgtcattctttgcagtgacacaatcagaaaaggtactgctcccccacctaaatatgagggataagtgattttcagaagagacaggag

SEQ ID NO: 609221 - DNA, 120 bp, Artificial Sequence
  ENSG00000175868_28 (sequence is synthesized)
aagaagggacaaatgtcctggtccttgtctccttgtcaacaaaagatgtactggtaccctttgaaaggggacagagaggatgccagctgaactgggagcactaagttctctgctttgtga

SEQ ID NO: 609222 - DNA, 120 bp, Artificial Sequence
  ENSG00000175868_29 (sequence is synthesized)
atacagcccaacccatagttctgatggagcctgaaaatcagccctgaaaagttctcctcagaggatgcctctgaagtgagaggcatgaaaaaagaggctaaccttcagagaggcggcatg

SEQ ID NO: 609223 - DNA, 120 bp, Artificial Sequence
  ENSG00000175874_0 (sequence is synthesized)
gtgctgcctgcaagatgtccgtgcgccgcggccggcggccggcgcggccggggacccgcctctcctggctgctgtgctgcagcgccctgctgtccccggccgcgggctacgtgatcgtga

SEQ ID NO: 609224 - DNA, 120 bp, Artificial Sequence
  ENSG00000175874_1 (sequence is synthesized)
gctgtccccggccgcgggctacgtgatcgtgagctccgtgtcttgggccgtcaccaacgaggtggacgaggagctggacagcgcctccactgaggaggctatgcccgcgctgctagagga

SEQ ID NO: 609225 - DNA, 120 bp, Artificial Sequence
  ENSG00000175874_2 (sequence is synthesized)
ggcagcatctggcagcaaagcttccccgcctctgcccacaaggaggacgcgcacctgcggccccgggcgggcgccgcccgggccaggccgccccccgcgccacccgggatgttctcctac

SEQ ID NO: 609226 - DNA, 120 bp, Artificial Sequence
  ENSG00000175874_3 (sequence is synthesized)
atgttctcctaccggcgcgagggcggccagacggccagtgcgcccccgggccctagactgcgcgccgccaccgcccgctccctggcccatgccagcgtctggggctgcctggccaccgtg

SEQ ID NO: 609227 - DNA, 120 bp, Artificial Sequence
  ENSG00000175874_4 (sequence is synthesized)
caagaagatccaaggactgccatttgggaactgcctgcccgtcagtgatggccccttcaacaatagcactgggattcctttcttctacatgacagccaaggaccccgtggtggctgatct

SEQ ID NO: 609228 - DNA, 120 bp, Artificial Sequence
  ENSG00000175874_5 (sequence is synthesized)
gatgaagaaccccatggcctcgctgatgctgccagaatcagaaggggagttctgcagaaaaaacatcgttgatccggaagatccccgatgtgtccagttaacgctcactggccagatgat

SEQ ID NO: 609229 - DNA, 120 bp, Artificial Sequence
  ENSG00000175874_6 (sequence is synthesized)
cgcagtgtctccagaagaagtagaatttgccaagcaagccatgttttcaaggcacccagggatgaggaagtggcctcgtcaatatgaatggttctttatgaagatgaggatagaacatat

SEQ ID NO: 609230 - DNA, 120 bp, Artificial Sequence
  ENSG00000175874_7 (sequence is synthesized)
ctggcttcagaaatggtatggaggcgcatccagtatttcaagggaggaatatttcaaagcagttcccagaaaggcctgatggagtgagaagaaagtccttggtgtttgcacttaaatgaa

SEQ ID NO: 609231 - DNA, 120 bp, Artificial Sequence
  ENSG00000175874_8 (sequence is synthesized)
aaccttttcagtgatgcagccagacagctattgaccactgtctctttgttgaagggttcatagcagccctgccatccctgcagcagaatgagagagggtgaacagggaactctatgctag

SEQ ID NO: 609232 - DNA, 120 bp, Artificial Sequence
  ENSG00000175874_9 (sequence is synthesized)
atttgagattaaagtggtcatttgcagatctccaactcacacagatacttcacgtagatagtctttattccattgtattcaatccagactcatcgattcagaaatcatataatagctggt

SEQ ID NO: 609233 - DNA, 120 bp, Artificial Sequence
  ENSG00000175874_10 (sequence is synthesized)
ggtcaaaatgacatgttgagatcattgttgtttcattgtttaaggaaaaaaaaaaatgcctgtacctacaatgtgattgctttgtattgtgagagtatctttgttgcttgctctgccaaa

SEQ ID NO: 609234 - DNA, 120 bp, Artificial Sequence
  ENSG00000175874_11 (sequence is synthesized)
tgcagtcttggttctaagttcactgtgaccacgaagcagctgactgtgcatcacgcagtcacaatattgtttttagggtgagggtggaggactgtgtgtccgtggattactcctcctgct

SEQ ID NO: 609235 - DNA, 120 bp, Artificial Sequence
  ENSG00000175874_12 (sequence is synthesized)
ggtggattgcagatgcattattaggtcatactggctagaatgcagcttttctcccaccataacatgaaaacagtgtaagaacatagggtgctttgtgcatagcccttctctatgtaagca

SEQ ID NO: 609236 - DNA, 120 bp, Artificial Sequence
  ENSG00000175874_13 (sequence is synthesized)
gccatggcagtcattaaagagaaaggagtagctttgacattaagctccccagatccctgctgctcatacttctggcaagggttcccctctctcatgcatgaacaggggcatccaaaataa

SEQ ID NO: 609237 - DNA, 120 bp, Artificial Sequence
  ENSG00000175874_14 (sequence is synthesized)
gaagctctccattctgtggtggggaaagcggagaggggagtgggtgaagctgggaaagtaaaggcagcacgttacagaaggaagaaaggaagccagtaactgagggcccactgcctgccc

SEQ ID NO: 609238 - DNA, 120 bp, Artificial Sequence
  ENSG00000175874_15 (sequence is synthesized)
ggccctgggccaggccctcaacagaagccatctcatttaagccctgcaaccaatgagatgcacgtcatcattggctcttacagacaagaaaactagactcagaggggctgagtccacatc

SEQ ID NO: 609239 - DNA, 120 bp, Artificial Sequence
  ENSG00000175874_16 (sequence is synthesized)
ccagacagctcactgcagacacaggtggagtggttcctacaagacatccagttttaacaacaaaagagttattgaaatgcatgggtagaaattgaaccaggaaaatcagtaaagtgattg

SEQ ID NO: 609240 - DNA, 120 bp, Artificial Sequence
  ENSG00000175874_17 (sequence is synthesized)
taaaaaagaaggactagcttgcctggagatgatgtttcttgcttttggaaaaaaaaaaaaagtctctgaaatttgattcttactacagatttaaaactttctacatattatatgtaggag

SEQ ID NO: 609241 - DNA, 120 bp, Artificial Sequence
  ENSG00000175874_18 (sequence is synthesized)
ctcctagtgtttttgagaaattagactgtacctgtgtacacttctaaggtctacatggacctatgtatatatatctaagacctctgatcattaaaacctataaagggttgagctgtccca

SEQ ID NO: 609242 - DNA, 120 bp, Artificial Sequence
  ENSG00000175874_19 (sequence is synthesized)
agttttctgtctttctgtaatggctacaaactttctttggtaggttagggaggttgtataacataaaaaacacatcactatatgtaggaaatatacatttttcaagtaaataagagtgtt

SEQ ID NO: 609243 - DNA, 120 bp, Artificial Sequence
  ENSG00000175874_20 (sequence is synthesized)
attaatgattatgaacttttgcttaacaaaataacatacgacgagagcttgagttgtcaaaatatattttaattatctattgctaaaaacatagtaagatgcagagaattctttatttgt

SEQ ID NO: 609244 - DNA, 120 bp, Artificial Sequence
  ENSG00000175874_21 (sequence is synthesized)
cataagccagtcctcaaaagagttcctaacagtagtgatttctaatatataagaataaggtacttctgagggaattttatattttcagagtttaaaattattgctactcccaatttagaa

SEQ ID NO: 609245 - DNA, 120 bp, Artificial Sequence
  ENSG00000175874_22 (sequence is synthesized)
aaatggggagaaagctggaagaacaaatgacatgctcaaatgtattgcataagtcaacctcacaccttaatactgggagcttctctgcctcctgatcctgtcttgcagataaggtcccct

SEQ ID NO: 609246 - DNA, 120 bp, Artificial Sequence
  ENSG00000175874_23 (sequence is synthesized)
ggctaggtttgcgtttatagtcaggttccatttagctcattaaaggtcactgctgcttcaaaggactttgcccagtggatgccattcataaccactgatgaatgttatcagctatttatc

SEQ ID NO: 609247 - DNA, 120 bp, Artificial Sequence
  ENSG00000175874_24 (sequence is synthesized)
caaattacaggaaatgaaacctgaaaaggttgggtaagaatagtgttgaaaattcacagttttaagtttgatggtctccattcaggcaagtgtgtttcagcaaatctctagaaatttaca

SEQ ID NO: 609248 - DNA, 120 bp, Artificial Sequence
  ENSG00000175874_25 (sequence is synthesized)
ttgattaaaatgttagaggctgttctggaagttctagacatggcaataaggcaagaaaaagagattaaatgcatacagatcgaaagaaaaaaaaagtacccctatttagagatgagagga

SEQ ID NO: 609249 - DNA, 120 bp, Artificial Sequence
  ENSG00000175874_26 (sequence is synthesized)
aactagtatgtgagtgcaacaaggtctcaggacacaagatcagcatacaaaagtcaattgcatttctctatgctaacgatgaacatgtggggaaaaaaactaaaaacacaataccatttg

SEQ ID NO: 609250 - DNA, 120 bp, Artificial Sequence
  ENSG00000175874_27 (sequence is synthesized)
caatcactccaaagtgaaatacttccgtataaacaaaacttacccaggacctatgtagtgaaaatttttaaatgctaagaaaagaaattaatgacctaaacaaagaaagagagataccat

SEQ ID NO: 609251 - DNA, 120 bp, Artificial Sequence
  ENSG00000175874_28 (sequence is synthesized)
gttcttggattggaagatacaaacagtaaagatatcagttctccccatctccatctctaggtttaatgcaattcctatcaaaatctcaacaaggattttgtagacctatacaagcttatt

SEQ ID NO: 609252 - DNA, 120 bp, Artificial Sequence
  ENSG00000175874_29 (sequence is synthesized)
ttaaaagttacatggaaaggcacaggcattgaaatagctaaaacagtcttgtaaaagcagaataaggtaggagaaatcattctatttaatatagagttatgatgtagctacagtattcaa

SEQ ID NO: 609253 - DNA, 120 bp, Artificial Sequence
  ENSG00000175874_30 (sequence is synthesized)
gaagtgtggtatttggtggaggcatagaaacacattgatggaacagaatagggaatctagaaataggcccacacaaatatgctcaactgattttcttttacaaaagtacaaaactaattc

SEQ ID NO: 609254 - DNA, 120 bp, Artificial Sequence
  ENSG00000175874_31 (sequence is synthesized)
aacagaggatagccttttcaataagtgtggagtaagtggacatccataggaaaataaaatgaaccttggactaaacttcataccttatgcaaaaattaactcagatcatatctgtaaaaa

SEQ ID NO: 609255 - DNA, 120 bp, Artificial Sequence
  ENSG00000175874_32 (sequence is synthesized)
taaaatgtaaaactataaaactataggatatagaaaatcttttggaactagggctaagcaaagggttgttagacttgataccaaaagcacaattcataaaagaaaatttgataaattaaa

SEQ ID NO: 609256 - DNA, 120 bp, Artificial Sequence
  ENSG00000175874_33 (sequence is synthesized)
cttcatcagaatttaaaacatttgttctgcaaaagaccatgttaaaaggccgagaagacaggccacatactgggagaaaatatttccaaaccacatatccaacaaaagattagtatctag

SEQ ID NO: 609257 - DNA, 120 bp, Artificial Sequence
  ENSG00000175874_34 (sequence is synthesized)
aatatataaagaactgtcaaaactcaacagctaaaaaattctaattagaaaatggagcacatgaacagacatttcactgcagaggatataaaaatggcaaataagcgcatgaaaagacat

SEQ ID NO: 609258 - DNA, 120 bp, Artificial Sequence
  ENSG00000175874_35 (sequence is synthesized)
gaaaagacagtcaacagcactagtcactaggggaactgcaaactaatactacaatgagatatcactacatagctaccaaaattgctaaaataaaaaataatgataacaccaaacgctgac

SEQ ID NO: 609259 - DNA, 120 bp, Artificial Sequence
  ENSG00000175874_36 (sequence is synthesized)
aaggatgcagataaaccgggtcagtcatacactagtggtgggaatagaaaatggaacagccactccgcaaaaccatttgccagtttctcataaaactaaacatacaactgccatactgac

SEQ ID NO: 609260 - DNA, 120 bp, Artificial Sequence
  ENSG00000175874_37 (sequence is synthesized)
cctcaattgctcctgggcatttatacaagagaaatgaaaagaggttcacacaaaaacttgtgcatgaatgttcatatcagttttatccataatgttcaaaaacttggagaaatcagatgg

SEQ ID NO: 609261 - DNA, 120 bp, Artificial Sequence
  ENSG00000175874_38 (sequence is synthesized)
cctttaacgggtggctggtgaaacagtggatggtgcctctatgcccggaatactactcagcgataaaaaagaactaattactgacatgggcaaccactgggatgaattccagagaattgt

SEQ ID NO: 609262 - DNA, 120 bp, Artificial Sequence
  ENSG00000175874_39 (sequence is synthesized)
gctgagtgagcaaagccaatcataaaagtttgcacactgtatgattccatttacataacattttgaaatgcaaaattataggaatggagaatagattaggggttgccagggaggagtggg

SEQ ID NO: 609263 - DNA, 120 bp, Artificial Sequence
  ENSG00000175874_40 (sequence is synthesized)
gagaacaagagagttgggcataactataaaaggatagcacaagagatccttgtggtgatggacatattcagtatcttgaccaaatcaatgtgaaaatcctggttgggatattgtactgta

SEQ ID NO: 609264 - DNA, 120 bp, Artificial Sequence
  ENSG00000175874_41 (sequence is synthesized)
gtttagcaagatgtgccattggggaaaactgggtaaaaagaacacaggatctctgtattatttcttacaactgcatgtgaatctacagttatctacaactatctcagaatctacaattat

SEQ ID NO: 609265 - DNA, 120 bp, Artificial Sequence
  ENSG00000175874_42 (sequence is synthesized)
ctctgagtaaaaagcttaacataaacaagatttagggcttagcttaataaagcatttatactctctctcttattagtccctaataaaatgaggaactgagctataagccaaaacctagta

SEQ ID NO: 609266 - DNA, 120 bp, Artificial Sequence
  ENSG00000175874_43 (sequence is synthesized)
caaagagacagcatttcatttgttaaccgttaatatatccatttgcagaagaggtgtaaaattctttaaaattttcctaaatatgttcaatttaatgttaaatacaaattaacaagaatt

SEQ ID NO: 609267 - DNA, 120 bp, Artificial Sequence
  ENSG00000175874_44 (sequence is synthesized)
caacaaatctgctgtatagattttaagtgggtcacttaggaggagaggacatcttcgaatttctgatataaacacgttgagtaagctataggtgtatataagtatccaagtgtgtatata

SEQ ID NO: 609268 - DNA, 120 bp, Artificial Sequence
  ENSG00000175874_45 (sequence is synthesized)
atgattctccactgattttatagagaagaactatatttccagtaatcttcccctaaatattgtgggaaataattctgttttagtgaataagctaattaaagtctatccagaccaccatgt

SEQ ID NO: 609269 - DNA, 120 bp, Artificial Sequence
  ENSG00000175874_46 (sequence is synthesized)
ttttatttacagtgactatatatatccatgattttgacatagagtataattctgatgttacttatttcaatatgccttgtatatattagctgtttataagagagtcgctttttggttgaa

SEQ ID NO: 609270 - DNA, 83 bp, Artificial Sequence
  ENSG00000175874_47 (sequence is synthesized)
atatattagctgtttataagagagtcgctttttggttgaaaagtatttctaggctgagcaaggtagctcatgcctgtaatcca

SEQ ID NO: 609271 - DNA, 120 bp, Artificial Sequence
  ENSG00000175874_48 (sequence is synthesized)
tcatctctacaaaaaatatttattaaaaaaaaaaaaaaaaaagcccagcatggtggtgcacacctgtagttctagctactcaagaggctgaggtgggaggattgctttgaggccaggagt

SEQ ID NO: 609272 - DNA, 120 bp, Artificial Sequence
  ENSG00000175874_49 (sequence is synthesized)
ttgacctcctgagctgtgatcatgccaccacacttgagtgatagagtgagactttgtctcttaaaaaaaaaaaaaggtatttctacaatttttccaaaaagtctgtatttatttaaataa

SEQ ID NO: 609273 - DNA, 120 bp, Artificial Sequence
  ENSG00000175874_50 (sequence is synthesized)
ttgaactatcaaatactgttctgaaaataaaacctctctaggataatttattgatgcttatttgattgctataacagaaagtcaattattgtacaatttgaattgtaatgatgtgattat

SEQ ID NO: 609274 - DNA, 120 bp, Artificial Sequence
  ENSG00000175874_51 (sequence is synthesized)
ttgtgccatgtaatgcatgtaaaatgtaaaatctgttttcaaaactagatctatttaaccaaagactatttcattcctgatatgatttgtgtgcttgattaaatgaatttatgatattga

SEQ ID NO: 609275 - DNA, 120 bp, Artificial Sequence
  ENSG00000175874_52 (sequence is synthesized)
cactttttcaaaagctctctgaaagaaaacacttctaaagacatttaagcactaacagaacattgatgcaggcccctttatctgaattcaaaatgcaaagcctgaactcgcatcctcccc

SEQ ID NO: 609276 - DNA, 120 bp, Artificial Sequence
  ENSG00000175874_53 (sequence is synthesized)
gaagaaccccatggcctcgctgatgctgccagaatcagaaggggagttctgcagttcttacagaggctaatcaaagcaactatacaatgcaagatgcatcctggataagccattgtttcc

SEQ ID NO: 609277 - DNA, 120 bp, Artificial Sequence
  ENSG00000175874_54 (sequence is synthesized)
aagccaggaaaagaaacatttcctttctcatggaatattctccctgttcttggtcagtcaagcttactgttactagaagtacatttccaggatacctttcttttcttttcttactctttt

SEQ ID NO: 609278 - DNA, 77 bp, Artificial Sequence
  ENSG00000175874_55 (sequence is synthesized)
cttttcttactctttttttttttttttcgagatagagtttcgctcttgtttgtgaacctctgcctcccaggttcaag

SEQ ID NO: 609279 - DNA, 120 bp, Artificial Sequence
  ENSG00000175874_56 (sequence is synthesized)
tgatccacctgcctcggccttccaatccaggatacctttctaagcttcccaggctttcctcattcaggtatcctgaaagcagtcgtgctggagcatgtggctcccagaacccagagcaca

SEQ ID NO: 609280 - DNA, 120 bp, Artificial Sequence
  ENSG00000175877_0 (sequence is synthesized)
gcttctcccagctggagtaggtgggggaggccagacatggaggcccttcctccagtcagatccagccttttggggatcctgttgcaggttacgaggctctcagtgctgttggttcagaac

SEQ ID NO: 609281 - DNA, 120 bp, Artificial Sequence
  ENSG00000175877_1 (sequence is synthesized)
cgagatcacctctataatttcctgctcctcaagatcaacctcttcaaccactgggtgtcagggctggcccaggaggcccgggggtcctgtaactggcaggcccacctacccctgggagct

SEQ ID NO: 609282 - DNA, 120 bp, Artificial Sequence
  ENSG00000175877_2 (sequence is synthesized)
gcagcctgccccctgggccaggctctctgggctgggctggctctgatacaggtccccgtatggctggtgctacagggacccaggctgatgtgggctggcatgtggggcagcaccaagggc

SEQ ID NO: 609283 - DNA, 120 bp, Artificial Sequence
  ENSG00000175877_3 (sequence is synthesized)
cttgctcagtgcctgggagcagctgggcctgtctgtggccatctggacagatctgtttttgtcatgtctgcacggcctgatgttggtggccttgctcttggtggtagtgacctggagggt

SEQ ID NO: 609284 - DNA, 120 bp, Artificial Sequence
  ENSG00000175877_4 (sequence is synthesized)
gtgtcagaagtcccactgcttccgactgggcaggcagctcagtaaggccttgcaagtgaactgcgtggtaaggaagctcctggtacagctgagacgtctgtattggtgggtggagactat

SEQ ID NO: 609285 - DNA, 120 bp, Artificial Sequence
  ENSG00000175877_5 (sequence is synthesized)
gactgccctcacctcctggcacctggcctatctcatcacctggaccacctgcctggcctcccacctgctgcaggctgcctttgagcacacgacccagctggccgaggcccaggaggttga

SEQ ID NO: 609286 - DNA, 120 bp, Artificial Sequence
  ENSG00000175877_6 (sequence is synthesized)
accccaggaggtctcagggtcttccttgctgccctcactgtctgcgtcctcggactcagagtctggaacagttttgccagagcaagaaactcccagagaataaatgtatccccatctgcc

SEQ ID NO: 609287 - DNA, 120 bp, Artificial Sequence
  ENSG00000175877_7 (sequence is synthesized)
ggagtaggtgggggaggccagacatggaggcccttcctccagtcagatccagccttttggggatcctgttgcaggttacgaggctctcagtgctgagacagggtctcgctctgtcgccca

SEQ ID NO: 609288 - DNA, 120 bp, Artificial Sequence
  ENSG00000175879_0 (sequence is synthesized)
ctccgcggggctcctcgtccccgtcacgctgactttccgtgcagtgctgtggtgcgaaaatgcctcgccggtgcgcaccgggtcggcagcctcggcggcgggggcgagattggcgggagg

SEQ ID NO: 609289 - DNA, 120 bp, Artificial Sequence
  ENSG00000175879_1 (sequence is synthesized)
ggggcgcggggggggcgcggtaagaggtggcggcgggcagagggtgttttttttcttttccctccagagccggggtttgtaaaccgaggccagagtgtccccgtgggccgagcgcacttt

SEQ ID NO: 609290 - DNA, 120 bp, Artificial Sequence
  ENSG00000175879_2 (sequence is synthesized)
tttcttgtccgggtgcgctcagtcactggtgcctgagaggaaacagtggaggcagcggggcaggtcgcctggggcgtcggcgattatattgcggccgagccggggcgcgccgggaaaggc

SEQ ID NO: 609291 - DNA, 120 bp, Artificial Sequence
  ENSG00000175879_3 (sequence is synthesized)
ctgggcgaggccccgcgacccgcgagggaggcggcgcgaagccgaggcggcgggcgcaagagccgggcatgagcgcccagtagctgagcgcccgcggctgcctggcctcagaagcgacgc

SEQ ID NO: 609292 - DNA, 120 bp, Artificial Sequence
  ENSG00000175879_4 (sequence is synthesized)
caagagccgggcatgagcgcccagtagctgagcgcccgcggctgcctggcctcagaagcgacgcgcgagcgcgggcgggcggcagcagcgacgtagcccggcggtcccggcggcgagagc

SEQ ID NO: 609293 - DNA, 120 bp, Artificial Sequence
  ENSG00000175879_5 (sequence is synthesized)
ggctcgctctctggctgcttagcgccgcccgcccgcccggggccgccgccgctgacgccccaatgagttcgtacttcgtgaacccgctgtactccaagtacaaggcggcggctgcggcgg

SEQ ID NO: 609294 - DNA, 120 bp, Artificial Sequence
  ENSG00000175879_6 (sequence is synthesized)
cggcggcggcgggcgaggccatcaatcccacttactacgactgtcacttcgcgcccgaggtcggcggccgtcacgccgccgccgcagcagccctgcagctctatggcaacagcgccgccg

SEQ ID NO: 609295 - DNA, 120 bp, Artificial Sequence
  ENSG00000175879_7 (sequence is synthesized)
cagcagccctgcagctctatggcaacagcgccgccggcttcccgcacgcgcccccgcaggcgcacgcgcacccgcacccgtccccgccgccctccgggactgggtgcggcggtagggaag

SEQ ID NO: 609296 - DNA, 120 bp, Artificial Sequence
  ENSG00000175879_8 (sequence is synthesized)
gcccggccgctgcctaccaggccgccccccctcctcctccgcatcctccgcctccgccgccacctcccccctgcggcgggattgcctgtcacggggagcccgcgaagttttacggatacg

SEQ ID NO: 609297 - DNA, 120 bp, Artificial Sequence
  ENSG00000175879_9 (sequence is synthesized)
ataacttacagagacagccgatttttacgacccagcaagaggccgagctggtacaatatcctgactgtaaatcgtccagtggtaatattggcgaggacccagaccacttaaatcagagct

SEQ ID NO: 609298 - DNA, 120 bp, Artificial Sequence
  ENSG00000175879_10 (sequence is synthesized)
gaaaaggaatttctttttaacccctatctgaccaggaaaagaagaatcgaggtttcccacgccctagccctcaccgagagacaggtaaaaatctggttccagaacaggagaatgaaatgg

SEQ ID NO: 609299 - DNA, 120 bp, Artificial Sequence
  ENSG00000175879_11 (sequence is synthesized)
aaaaaggaaaacaacaaggacaaatttcccgtttcccggcaggaggtgaaggacggggaaacgaaaaaggaagcccaagagctggaggaagacagagccgaaggcctgacaaattaactt

SEQ ID NO: 609300 - DNA, 120 bp, Artificial Sequence
  ENSG00000175879_12 (sequence is synthesized)
ctacctttaaaatttaccacagactattaaaactaataatcaccatatgctgtggacaccacctattttctttgttggaaaggaccttacctgtgtttcaagctaccttcatgtcactgc

SEQ ID NO: 609301 - DNA, 120 bp, Artificial Sequence
  ENSG00000175879_13 (sequence is synthesized)
tcttgaggttttctgtgctttgagagggatttgggtgtttaaaaaagtttctagtatcacatagaagctgtccttgagctgtcctatggaagggtaatttgatactgaccttgtagctat

SEQ ID NO: 609302 - DNA, 120 bp, Artificial Sequence
  ENSG00000175879_14 (sequence is synthesized)
atttttataatggtttttaatgtctgagctagtgatttgcctcaacaacgtaaacttcctaatgattagcacttaataattgcatataaaatgctttattaattaaacaagtgcacttga

SEQ ID NO: 609303 - DNA, 120 bp, Artificial Sequence
  ENSG00000175879_15 (sequence is synthesized)
aagtgcacttgaacattttaatatttgtggtgagtaaattaaaaggagtttattaattaaaaaaaattatgtctgcagaatactttatattatttgattacaatgtattatttatggatt

SEQ ID NO: 609304 - DNA, 120 bp, Artificial Sequence
  ENSG00000175879_16 (sequence is synthesized)
ctttataatgaatagttcgggtgcgttttgtttactcctaaaaggtttctttgcgtattttctaaatgtaatatctcggggaaaatattagaaaagcacgtattagctgaagaatgtaac

SEQ ID NO: 609305 - DNA, 120 bp, Artificial Sequence
  ENSG00000175879_17 (sequence is synthesized)
ttgtagtccagctctgcagcttccttaaacttaagaaaaagattgggccagtgacaagaatttaaagacaatgtccaagttgacaattatttttctatagtccatacaaattaaataatc

SEQ ID NO: 609306 - DNA, 120 bp, Artificial Sequence
  ENSG00000175879_18 (sequence is synthesized)
tggcaactctggcaaatcgccttgtaaaatgcgtctcattttttaacttgctttcgttttgaaccgcccttgtaatcgcctgaaatcgctagttctttatgcggtggctgccgctgtgtt

SEQ ID NO: 609307 - DNA, 120 bp, Artificial Sequence
  ENSG00000175879_19 (sequence is synthesized)
ccgttattttcagtaggtgtcatatttatttgtattgcctttgttctgttcgccgctggttttaaaccagcttgctgtgtgcatctcagacgtcggttggtacgtcctccgctgttcttc

SEQ ID NO: 609308 - DNA, 120 bp, Artificial Sequence
  ENSG00000175879_20 (sequence is synthesized)
aggaaagcgatagcctcacctatttgaaacaagccctgagaggaaacgcagaaaaacctgagtgtaaacaactccggaatgtcgctagctccttagtaaataaatgaatctctttctgga

SEQ ID NO: 609309 - DNA, 120 bp, Artificial Sequence
  ENSG00000175893_0 (sequence is synthesized)
tcgcggctcccgggagctaagcgagacggcgacggcggcagtcgtccctccccacgcgggcgcgcgggcatgcggacacccactcggccggtccaggccctcaggctcccggaagcggaa

SEQ ID NO: 609310 - DNA, 120 bp, Artificial Sequence
  ENSG00000175893_1 (sequence is synthesized)
ggaaggggagagcggcccggcctgggcggcggcgccggaggaggcggaggtggcgcggcaggaggaggggaaagagctgctggcggtcgggagagcggcggcagcgagaggcgagccagc

SEQ ID NO: 609311 - DNA, 120 bp, Artificial Sequence
  ENSG00000175893_2 (sequence is synthesized)
acgaatgaagaactttttcacttactgcaggattttcagcttcagcaagcaggttctcatggagaactgttattgaagagagatccatttggtgggatataattaaaaaaaatgaatcaa

SEQ ID NO: 609312 - DNA, 120 bp, Artificial Sequence
  ENSG00000175893_3 (sequence is synthesized)
aagaaaatctctaaatgcagattccagaaaaattacagcacatctcagtgaatttgcaagtggatcatccttccttgtgggttagcaggcagttataagattgcaaaatgggtctccgga

SEQ ID NO: 609313 - DNA, 120 bp, Artificial Sequence
  ENSG00000175893_4 (sequence is synthesized)
ttcactttgttgttgacccacatggttggtgctgcatgggtttgattgtctttgtttggttatacaatattgttttaattcccaaaattgtcctctttcctcactatgaagaaggacata

SEQ ID NO: 609314 - DNA, 120 bp, Artificial Sequence
  ENSG00000175893_5 (sequence is synthesized)
ttccaggcatattaataataatattctatggcatttccatattctgtctggttgccttagtgagggcctccataactgatccaggaagactccctgagaaccccaagatcccacatggag

SEQ ID NO: 609315 - DNA, 120 bp, Artificial Sequence
  ENSG00000175893_6 (sequence is synthesized)
aaagggagttctgggaattatgtaacaagtgtaatttgatgagaccaaagcgttcccatcactgtagccgctgcggccactgtgtgaggagaatggatcatcactgtccatggattaaca

SEQ ID NO: 609316 - DNA, 120 bp, Artificial Sequence
  ENSG00000175893_7 (sequence is synthesized)
attgtgttggtgaagataatcattggctctttctgcagttgtgtttctacactgaacttcttacttgctacgcactgatgttttctttctgccactattactattttcttccactaaaaa

SEQ ID NO: 609317 - DNA, 120 bp, Artificial Sequence
  ENSG00000175893_8 (sequence is synthesized)
agcgtaatttggacctctttgtttttagacatgaattggccataatgagactagcagcctttatgggcattactatgttagttggaataactggactcttttacactcaactaattggca

SEQ ID NO: 609318 - DNA, 120 bp, Artificial Sequence
  ENSG00000175893_9 (sequence is synthesized)
tcatcacagatacaacatctattgaaaagatgtcaaactgttgtgaagatatatcgaggccccgaaagccatggcagcagaccttctcagaagtttttggcactcgttggaagatcctgt

SEQ ID NO: 609319 - DNA, 120 bp, Artificial Sequence
  ENSG00000175893_10 (sequence is synthesized)
ggttcattcctttcaggcagaggcaaccactgcgagttccctaccactttgccaatcatgtctaaacagatggatggtgggcacagatgggtcctccatgctggcaatgcgttacaggtt

SEQ ID NO: 609320 - DNA, 120 bp, Artificial Sequence
  ENSG00000175893_11 (sequence is synthesized)
ttatgataatagaactatgacagtcttcaagtcaattaaaatccacccaccagtcttaggcatcataatgtgccccaggctttattttaatagtgatcttgatcctgttgtgggactaat

SEQ ID NO: 609321 - DNA, 120 bp, Artificial Sequence
  ENSG00000175893_12 (sequence is synthesized)
acaagatctatatttaagttttaaagcatgtttactttcaaattagctttccacagggatttcttgaaatgcttttgttattaaactcaaaaggcagtgattaggatgaaataattgtac

SEQ ID NO: 609322 - DNA, 120 bp, Artificial Sequence
  ENSG00000175893_13 (sequence is synthesized)
tttattttagtactgacagtgttacagattctaatttatggtaaatttcagatgtttatttaaaattttcacttttaaacagtaaccaaatctaaatttaattattcaggttttacaaaa

SEQ ID NO: 609323 - DNA, 120 bp, Artificial Sequence
  ENSG00000175893_14 (sequence is synthesized)
aaaagttgatacaccttcttatagtataggtaaattttctttttcaaatccaatttaaaataacctttccttttaaatgtgctgcaacgtttttaaaaatgcagcagcataggagtgaac

SEQ ID NO: 609324 - DNA, 120 bp, Artificial Sequence
  ENSG00000175893_15 (sequence is synthesized)
aacagcaacacaaaacgggcattggtttcttaggagtggcttgcttacgttttcttcttttttcttcaccaaaaccaacatgaaagtaccactgaagtaaaacaccaactacctacctta

SEQ ID NO: 609325 - DNA, 120 bp, Artificial Sequence
  ENSG00000175893_16 (sequence is synthesized)
ctataaaggaaatgttaaaatttttttcacaataattttttcaattttcactattactgttgtaattattgattgtgattaaaatatttgctcccaggagaactcctgaccagtgggcat

SEQ ID NO: 609326 - DNA, 120 bp, Artificial Sequence
  ENSG00000175893_17 (sequence is synthesized)
gtattcctattttatcctaagattttaatgagcaaaaaggggagagaatttgcaataacttcacaattaccttttctagtgcagttatattagaatgcatatgtttttaaaatgctagta

SEQ ID NO: 609327 - DNA, 120 bp, Artificial Sequence
  ENSG00000175893_18 (sequence is synthesized)
agtataactagatagtatataatgtacagtataaagaggaatattgtgcttttgaaaagagtatactttttacttttatttatgtactagtagatgtaaaatttcacattgaaggtttat

SEQ ID NO: 609328 - DNA, 120 bp, Artificial Sequence
  ENSG00000175893_19 (sequence is synthesized)
attggccaactcatatagaaattttatttataggaagctactactaaaaaaagtcactaactttgtgtacctataatccctaaattaaaattaaattttaattggctggctgtaatttgc

SEQ ID NO: 609329 - DNA, 120 bp, Artificial Sequence
  ENSG00000175893_20 (sequence is synthesized)
attgagagaccttttactagtagctagtgttaggaagtgaacctaaaataagaaaatataatgatctgtgtttatcattagccttgtacaaatgtaaattactaatagtgatgttctttt

SEQ ID NO: 609330 - DNA, 120 bp, Artificial Sequence
  ENSG00000175893_21 (sequence is synthesized)
gcaaggcatagaacatttgtatgaaaagacatttagtatgctttgaaaaaaactcagcttttagtttttttccattagaatactgcaaaacccatatatctttttaaaaaatttatgtac

SEQ ID NO: 609331 - DNA, 120 bp, Artificial Sequence
  ENSG00000175893_22 (sequence is synthesized)
tcacagtctttcccttgaagagaagattgaaaaagtctactgttcataaaccatgctaacattttccttttagctagttttgaaagtaaggaacaatacctgggaaataattaaacagaa

SEQ ID NO: 609332 - DNA, 120 bp, Artificial Sequence
  ENSG00000175893_23 (sequence is synthesized)
ggttaccattgtcagccagttggctatactgtggttagttctttcagaaattgtaaatatcttgtagcatattctgaaataatagagtaagttcttctcagagatgttaatatcatgttt

SEQ ID NO: 609333 - DNA, 120 bp, Artificial Sequence
  ENSG00000175893_24 (sequence is synthesized)
ttcatgttctaattagaatactttattacttacaaactcagaaatacgaacagaaatacagcagacgaacatatttattggtactgaaaagagacgtagtaaattaaatagaagaaatat

SEQ ID NO: 609334 - DNA, 120 bp, Artificial Sequence
  ENSG00000175893_25 (sequence is synthesized)
atttataaagcttagtgaaacacaaaattagaatgttcatgtcaggcacaagggtttggattttgtgcaagctaatttggccacatttggcctggtgacagaactgttcataaggaagta

SEQ ID NO: 609335 - DNA, 120 bp, Artificial Sequence
  ENSG00000175893_26 (sequence is synthesized)
atatatagataaggtaggtagatatcagttgaatgccttatattgtatacattcctttcaaataaagaccttgagaaaacagcagagccaagtgaagatcacctaaagaactttgtggct

SEQ ID NO: 609336 - DNA, 120 bp, Artificial Sequence
  ENSG00000175893_27 (sequence is synthesized)
aatttatacttcatgtagtagcagtgggtactgggcagggtctctttcccactctgatgatttgtgctcttatttttcctagatttacctcatctagggcatattcttttccctcttcct

SEQ ID NO: 609337 - DNA, 120 bp, Artificial Sequence
  ENSG00000175893_28 (sequence is synthesized)
ctttacctttcctggtcctgatccctctgtactcagttcccctaaattattggactacaaactaatatactagaaaagcatacacttattttatttgaatgcagaaatgctatctatcag

SEQ ID NO: 609338 - DNA, 120 bp, Artificial Sequence
  ENSG00000175893_29 (sequence is synthesized)
tatatatacataagaatgtatattacagtatatctatatatacttaacactgtaactttcagtattccccagttagcgtacctaactctcctgtgggttttgttaattcttattagacta

SEQ ID NO: 609339 - DNA, 120 bp, Artificial Sequence
  ENSG00000175893_30 (sequence is synthesized)
ctagagaaaaaccaactggcagtttgctaagcatatctactggtgttgtttctgcgccctcttttggctaattgatgtaattatactggctctaaagatttactgccccataagtaaata

SEQ ID NO: 609340 - DNA, 120 bp, Artificial Sequence
  ENSG00000175893_31 (sequence is synthesized)
gtatagccacattctgaacatatcaaaagtacaaacttaggaggagtgtatgtacaaaaatgtaaaattttatgaaaatgaacatgtttttatgatgttatttctagttcataagaatgt

SEQ ID NO: 609341 - DNA, 120 bp, Artificial Sequence
  ENSG00000175893_32 (sequence is synthesized)
gatgactgctttgcttcatttatgtacgttcccattatattcttgctgtcaatcaatcacaaatttatatcagattaggataaactaagccattttatgtattttattttaaaccttatt

SEQ ID NO: 609342 - DNA, 120 bp, Artificial Sequence
  ENSG00000175893_33 (sequence is synthesized)
ttggcagagtaattccttagaattggaaaagctgttactttgaaattaccaatttattacaaaacatagaaatgtattgtagctacaaagacaaccaagcattttctgtgttttaatgaa

SEQ ID NO: 609343 - DNA, 120 bp, Artificial Sequence
  ENSG00000175893_34 (sequence is synthesized)
tatctaaaaaactacatttagtttattttactcagttttgaaatgatttttttactggctctattgccttaaaataactaagagattaatgattctttgtataattttccttttctttgt

SEQ ID NO: 609344 - DNA, 120 bp, Artificial Sequence
  ENSG00000175893_35 (sequence is synthesized)
tcttttttttacatttcgcagagttatatctatagttttagtaacaatttcttatgtattctggataactgaaaacaactaaaggtgttgggcattagaaaataattgtgagcagtaaga

SEQ ID NO: 609345 - DNA, 120 bp, Artificial Sequence
  ENSG00000175893_36 (sequence is synthesized)
ttactgatgtaatatgtatgttggactgaagtatttctttataaacattctatttgattttaagcaaaatgtatgttaaagcatgtttttacatcagtaaagtcatttgtcgaccttctg

SEQ ID NO: 609346 - DNA, 120 bp, Artificial Sequence
  ENSG00000175893_37 (sequence is synthesized)
gaaatgaaaggtttttacctagatactgtaagttacacctccttaacaatcatatttgtcattgttgttttctgcaaacaaaaatgtttatgggcttcatgtaggcttaagattgtaggc

SEQ ID NO: 609347 - DNA, 120 bp, Artificial Sequence
  ENSG00000175893_38 (sequence is synthesized)
tcagttacagagcagttggtactttgtaacccagacttacagtttaaaaatatcaagttagctgatgtttcattataataaaaatactattttgcttaagagttgtattacaaatatttg

SEQ ID NO: 609348 - DNA, 120 bp, Artificial Sequence
  ENSG00000175893_39 (sequence is synthesized)
tgcttaacattagaaatagctgttttaaattgtagttaacatattaactttttcagaaaaaaagcatggtttatttttaataatgaaatagagaacataatacgtaatgttcagtataac

SEQ ID NO: 609349 - DNA, 120 bp, Artificial Sequence
  ENSG00000175893_40 (sequence is synthesized)
agctgagttaaaacatctgccaggattaacatcagtgcgtttttgccaatgcatagaggcatttttctctaagtatgatggctaatgataactattctttgttacacattcaagtcactc

SEQ ID NO: 609350 - DNA, 120 bp, Artificial Sequence
  ENSG00000175893_41 (sequence is synthesized)
ccatacaagtaactagtgggtgatatgtttcactccaaagggtgtattaattctgaatgctaatcatgaagacttaagttaggacaacacttcaaaccaggaagtgtgaactgatttaga

SEQ ID NO: 609351 - DNA, 120 bp, Artificial Sequence
  ENSG00000175893_42 (sequence is synthesized)
ttatagctacacaattttctgtgtgttagatcatggggtagtttgagtgttttcacatgtattgctataaaatcacaatgtaccaagctctggtttaatatgccattaatactaattaat

SEQ ID NO: 609352 - DNA, 120 bp, Artificial Sequence
  ENSG00000175893_43 (sequence is synthesized)
agagctgctagtctctctctggacttttctctagtctctgcttctcttgcgcttcctgtatcaatagattacttagctcaagtttaccaagtttaataacctatagttactttattgaat

SEQ ID NO: 609353 - DNA, 120 bp, Artificial Sequence
  ENSG00000175893_44 (sequence is synthesized)
aagtttctgacatgacctctaatatacatagatatatctagaatttatttgataaaattcacacatacaaacattgagtagtttgctaatagatacaaatattagattttcacacaactc

SEQ ID NO: 609354 - DNA, 120 bp, Artificial Sequence
  ENSG00000175893_45 (sequence is synthesized)
tactactgctttaaaaatataagtattggtaagtgtagcaaataagccatgtacatttaatgtgttctacttgctagtattaactgtatgattaatgaatgtgttatttaatgcccaagt

SEQ ID NO: 609355 - DNA, 120 bp, Artificial Sequence
  ENSG00000175893_46 (sequence is synthesized)
ttgttaacttttattctagaaatcatcctctgaatttattataaatcacagatttcattgtgctctatatttagtcattctcagttgaattctagaatattccacagtacagtataagaa

SEQ ID NO: 609356 - DNA, 120 bp, Artificial Sequence
  ENSG00000175893_47 (sequence is synthesized)
agtattagaaccaacttgcttgaactattttgaaccagtgttgtaattctatatgttaatcagtatttagcatttctgctccttttgagatgatgatggtttaacttcaggaaagtgact

SEQ ID NO: 609357 - DNA, 120 bp, Artificial Sequence
  ENSG00000175893_48 (sequence is synthesized)
tttctgacttcttttattatcattgtgcaatttttagcaacaaaactcactatatctttgtcagttcttcagatgttacaatactgcctgctaatttgaaacagaaataacaatggtatt

SEQ ID NO: 609358 - DNA, 120 bp, Artificial Sequence
  ENSG00000175893_49 (sequence is synthesized)
ttaaaaagtcattgatattactgatactttccattatcattatattttttactattattatgttctttttgccttgtccaccctagagaataggtacaaatgagtagtgagtatccacaa

SEQ ID NO: 609359 - DNA, 120 bp, Artificial Sequence
  ENSG00000175893_50 (sequence is synthesized)
acttactaagatggagagaaggctagatggtgcatgaataatcagcatctcagcaacagagttgactggagccagtttctgacatcagagaatctctttgctgtaatcattttagcctta

SEQ ID NO: 609360 - DNA, 120 bp, Artificial Sequence
  ENSG00000175893_51 (sequence is synthesized)
tctcttatttataccatttttatgggaagagttgttagtgcatataagcatttagtttgaattatttaacttaaagaatttatattgcggtttctcttcagttggtcagatgccttttat

SEQ ID NO: 609361 - DNA, 120 bp, Artificial Sequence
  ENSG00000175893_52 (sequence is synthesized)
aaatattttagttttaaatataattgtgtagagtatgatcatgtgaagtgttaaaaataatgtggaaaactcagctatttaatgcagaggagaaatgaataggttgaccaaagtttgaaa

SEQ ID NO: 609362 - DNA, 120 bp, Artificial Sequence
  ENSG00000175893_53 (sequence is synthesized)
aaactggcaccttttctggaaatctcttattgcaaagaaaagatactgagtgtatagaaaattttgtcaccagaggaaaaataaacaatatataagggtggctttcactttaacatttgg

SEQ ID NO: 609363 - DNA, 120 bp, Artificial Sequence
  ENSG00000175893_54 (sequence is synthesized)
gatattttggagttcttgatacctcgaaggtctccatttctattggtattttgaatatctgtaacatgtaatgtcgttcttataacagttcaacactgatttttttggtatcgatagctt

SEQ ID NO: 609364 - DNA, 120 bp, Artificial Sequence
  ENSG00000175893_55 (sequence is synthesized)
tatatataaacaaagatgcggacaaaatagcttaacagaagttgtgggcttttttgtggctttgcctgcctgtttgaccaaatacagggtttaattgtttgcaggctgttaactaaaggg

SEQ ID NO: 609365 - DNA, 120 bp, Artificial Sequence
  ENSG00000175893_56 (sequence is synthesized)
aaagcttacctgcgtattgcaagctatatattcttgccagtatacattggatgatattttaacctactggtgcctgaagttcgtgttttataacctcaacaactataaaacatcctggtg

SEQ ID NO: 609366 - DNA, 120 bp, Artificial Sequence
  ENSG00000175893_57 (sequence is synthesized)
ctattcactttagcattgagtgacatttttaattcctgtaccaaagagttaattttctttttggttgactgagttttcttctcacatcgttgtgtatttataaagtagaatttaatgtta

SEQ ID NO: 609367 - DNA, 120 bp, Artificial Sequence
  ENSG00000175893_58 (sequence is synthesized)
ctaagaacagtttgattaacagatcttattttttgcatgctgctctggcaatttaatggattttaaatgtttctcatttggatttttttttaggtaggcatgtatggattttaattttgt

SEQ ID NO: 609368 - DNA, 120 bp, Artificial Sequence
  ENSG00000175893_59 (sequence is synthesized)
attttaatatagcttggctactttaaaaggtagtttgataggctgaaattacaaaagataattgaagcacttttcacaagttgttttatttctgcaacaatgaataaaaaggtaagaact

SEQ ID NO: 609369 - DNA, 120 bp, Artificial Sequence
  ENSG00000175893_60 (sequence is synthesized)
ctaatttatataaatgaactatatagcttattgggcactttagtgaatactgaaacaaaatactaagatgaagagttaaggttcgttctcattacaaatcgagttcagcgtgtgtgtgtg

SEQ ID NO: 609370 - DNA, 120 bp, Artificial Sequence
  ENSG00000175893_61 (sequence is synthesized)
tgtgtgtgtgtgtgtgtgtaatctttagtggctttaaagaataatattgccatttgtctactttgcaaataaagataacagaacacctttaaaatatatgtatgtgtacatatgtgtgtg

SEQ ID NO: 609371 - DNA, 120 bp, Artificial Sequence
  ENSG00000175893_62 (sequence is synthesized)
tgtgtgtgtagatatatagagagagagatacggagagacagacagacagagagagagacagagagagagatgctttcccaagaggaaatgcatatgtaccttgatttaagcaaaactgat

SEQ ID NO: 609372 - DNA, 120 bp, Artificial Sequence
  ENSG00000175893_63 (sequence is synthesized)
aacagaaaattgaacttaatgaaagaaaaaagtctggatatggttactcactttacatagagtaagatttttaaaactaattttgcttagtagttaattttacaaaaatgaagagaaaca

SEQ ID NO: 609373 - DNA, 120 bp, Artificial Sequence
  ENSG00000175893_64 (sequence is synthesized)
ccctttaagtgtactcgtaatttaaaacacctttgaaatgtaattgtccaaatgtaatgctgctatgtatattatttgggttccagatttttccctttaaaattctcaaaacactcagtg

SEQ ID NO: 609374 - DNA, 120 bp, Artificial Sequence
  ENSG00000175893_65 (sequence is synthesized)
tccttacaactgcagctaaaatggttaatcattctggcaagaaggtgacagtgtgtatattggaaaggcagacattcacatttgaaaatattttgcattattgttagctaaaatcaacct

SEQ ID NO: 609375 - DNA, 120 bp, Artificial Sequence
  ENSG00000175893_66 (sequence is synthesized)
ctccttgaatgtagatacaatatatggttttgcagtcaattctgaatggaaaaaaagaatcaagtctgaaatttatgtgaaatgtggcttcagatcatttgaacgatatgtagaaatcta

SEQ ID NO: 609376 - DNA, 120 bp, Artificial Sequence
  ENSG00000175893_67 (sequence is synthesized)
gatgaacatatcattagaggtgaaagcaaaatttgaaagcctaatgagatgaagcaacattatctctctctaatctgccaacaatattccctagattgtgttgccactgtattgattctg

SEQ ID NO: 609377 - DNA, 120 bp, Artificial Sequence
  ENSG00000175893_68 (sequence is synthesized)
agtaatttggcttgtttatgcgtgatttaaatgcatgtggctgaatgcagtaatttttcaagttattgagtagtagagaattcaccactattcactgtctcccagagatgaacatataaa

SEQ ID NO: 609378 - DNA, 120 bp, Artificial Sequence
  ENSG00000175893_69 (sequence is synthesized)
agaaaaaaaattctacttcatatatgtaagaataaagcaactaaatgatacaaaagtaaaaacttccaccagaatcagagatattccgacaagtgaattgtgagtctaacacgggaggac

SEQ ID NO: 609379 - DNA, 120 bp, Artificial Sequence
  ENSG00000175893_70 (sequence is synthesized)
aaagctaggctcttgcaaggacagagcacacgtggatcatgctgtatgagctcactttgtgtccctggaattagtgtttttttgtgtgtgatctaactggcaagtttaatgaatagccaa

SEQ ID NO: 609380 - DNA, 120 bp, Artificial Sequence
  ENSG00000175893_71 (sequence is synthesized)
aatctatgttattcttgaggctcctaaaattatgtgtgaaccccaagttctgtctagtattatatccctaaaatgcttttaatagtggtatgttacaagtggcataagaagatcctgttt

SEQ ID NO: 609381 - DNA, 120 bp, Artificial Sequence
  ENSG00000175893_72 (sequence is synthesized)
ttaaatttgtcaggcattttattattcagtacataatatgtatagatctgagtgctgttttccttgcattgtctattatttttaccttgtctttcccctaagagaatttgaagaaaatct

SEQ ID NO: 609382 - DNA, 120 bp, Artificial Sequence
  ENSG00000175893_73 (sequence is synthesized)
tcaccaatatttctagtgttgatggtaattaggaaaatagtagttgagagatgtaagaatagtttgagaagagtgagtaaaatgggtgaaatgacaagtgggaaccatgtagctgagatg

SEQ ID NO: 609383 - DNA, 120 bp, Artificial Sequence
  ENSG00000175893_74 (sequence is synthesized)
tatttgtttagatgaaaagtctacactggttcttaatgtgaaaatcaaaccatgtatctaccttaagaacaatgttgttgtttttaatttattgtagcgatttagtttttttcacgtaat

SEQ ID NO: 609384 - DNA, 120 bp, Artificial Sequence
  ENSG00000175893_75 (sequence is synthesized)
gcgatttagtttttttcacgtaatatttctattttctttgcagattgtttttaatttaaattgtggaatttttacttctcaaaatgtattaagtactgtattttttgaaatcttattttt

SEQ ID NO: 609385 - DNA, 82 bp, Artificial Sequence
  ENSG00000175893_76 (sequence is synthesized)
gagagcggcggcagcgagaggcgagccagcggcgacgaatgaagaactttttcacttactgcaggattttcagcttcagcaa

SEQ ID NO: 609386 - DNA, 60 bp, Artificial Sequence
  ENSG00000175893_77 (sequence is synthesized)
gcatctggtcctggacttttttttggttctcatggagaactgttattgaagagagatcca

SEQ ID NO: 609387 - DNA, 120 bp, Artificial Sequence
  ENSG00000175893_78 (sequence is synthesized)
gaatttgcaagtgtttctcttcagccataagccacgcctggtagatattaattgagtggagagatcttgcacctcttccagttatgcatttgtggtttgtcgtctgatttggagcacttg

SEQ ID NO: 609388 - DNA, 120 bp, Artificial Sequence
  ENSG00000175894_0 (sequence is synthesized)
agccacttccctgcaggctgagcggagccctggatggagcttggcacccaagcccctcatgtctgccctgctgagtctgtgttttgtgctgcccctggcggcccccggccacggcacgca

SEQ ID NO: 609389 - DNA, 120 bp, Artificial Sequence
  ENSG00000175894_1 (sequence is synthesized)
gggttgggagccctgcacagacctgcgccccctggacatcctggcggaagtggtcccttctgatggcgccacaagcgggatcaggatagttcaggttcacggtgcacggggactccagct

SEQ ID NO: 609390 - DNA, 120 bp, Artificial Sequence
  ENSG00000175894_2 (sequence is synthesized)
ctcagtagccgccccccgcaccatgagcttcccagcatccaggattttctcccagtgtgacctcttccctgaagaattttccatcgtcgtaactttgagagttcccaatcttccacccaa

SEQ ID NO: 609391 - DNA, 120 bp, Artificial Sequence
  ENSG00000175894_3 (sequence is synthesized)
gaggaacgagtacctgctgacggtggtggcagaggagagcgacctgctgctgctcggcctgcggttgtcacctgcccagctgcacttcctgttccttcgcgaggacacggccggcgcctg

SEQ ID NO: 609392 - DNA, 120 bp, Artificial Sequence
  ENSG00000175894_4 (sequence is synthesized)
gcagacccgagtgtccttccgcagcccggccctggtggatggccgctggcacacactggtcctggctgtgtccgcaggcgtcttctccctcaccacggactgcggcctcccggtggacat

SEQ ID NO: 609393 - DNA, 120 bp, Artificial Sequence
  ENSG00000175894_5 (sequence is synthesized)
aatggccgatgtgcccttcccagccaccctgtcagtgaaaggagctcgattcttcgtcggcagccggaggagagccaaaggcctgttcatgggactggtgaggcaactggtcctgctgcc

SEQ ID NO: 609394 - DNA, 120 bp, Artificial Sequence
  ENSG00000175894_6 (sequence is synthesized)
gggctcagacgccaccccaaggctgtgtcccagcaggaacgccccgctggcggtgctgtccatcccacgggtcctgcaggctctcacggggaagccagaagataacgaggtgctaaaata

SEQ ID NO: 609395 - DNA, 120 bp, Artificial Sequence
  ENSG00000175894_7 (sequence is synthesized)
tccctatgaaaccaacattcgagtgacgctgggaccccagccaccgtgtaccgaggtggaagacgcccagttctggtttgatgccagccggaagggcctgtatctgtgtgttggcaacga

SEQ ID NO: 609396 - DNA, 120 bp, Artificial Sequence
  ENSG00000175894_8 (sequence is synthesized)
gtgggtctccgtgttagcagccaaagaaagactggactacgtggaggagcatcagaacttgtccaccaactcagagaccctgggcattgaggtgttccgcatccctcaggtggggctctt

SEQ ID NO: 609397 - DNA, 120 bp, Artificial Sequence
  ENSG00000175894_9 (sequence is synthesized)
tgtggccacagccaatcgcaaagccacatccgccgtctacaagtggaccgaagagaagttcgtctcatatcagaacatccccacgcaccaagcacaggcctggaggcatttcaccatcgg

SEQ ID NO: 609398 - DNA, 120 bp, Artificial Sequence
  ENSG00000175894_10 (sequence is synthesized)
gaaaaagatcttcctggcagtggctaattttgaaccagatgagaagggtcaggagttctctgtcatttacaaatggagccacagaaagctgaagtttaccccatatcagagcattgccac

SEQ ID NO: 609399 - DNA, 120 bp, Artificial Sequence
  ENSG00000175894_11 (sequence is synthesized)
acacagcgcccgagactgggaggccttcgaggtggatggggagcacttcctggcggtggccaaccaccgggaaggcgacaaccacaacatcgacagtgtcatctacaagtggaacccggc

SEQ ID NO: 609400 - DNA, 120 bp, Artificial Sequence
  ENSG00000175894_12 (sequence is synthesized)
aacccggctcttcgaggccaaccagaccatcgccacctccggcgcctacgactgggagttcttcagtgtggggccctactcgttcctggtggtggccaacaccttcaacggcacctccac

SEQ ID NO: 609401 - DNA, 120 bp, Artificial Sequence
  ENSG00000175894_13 (sequence is synthesized)
caaggtgcactcgcacctctacatccgactcctgggctccttccagctcttccagtccttcccgacgttcggtgctgcagactgggaggtcttccagatcggggagaggatcttcctcgc

SEQ ID NO: 609402 - DNA, 120 bp, Artificial Sequence
  ENSG00000175894_14 (sequence is synthesized)
tgtggcaaacagtcacagctacgatgtggagatgcaagtccagaatgattcctatgtcatcaactccgtcatctacgagctgaacgtgaccgcgcaggcctttgtcaagttccaggacat

SEQ ID NO: 609403 - DNA, 120 bp, Artificial Sequence
  ENSG00000175894_15 (sequence is synthesized)
tctcacctgcagtgctctggactgggagtttttctcggtgggagaagattatttcctggtggtggccaactccttcgatgggcgtaccttctcggtgaacagtattatttacaggtggca

SEQ ID NO: 609404 - DNA, 120 bp, Artificial Sequence
  ENSG00000175894_16 (sequence is synthesized)
tccagggtcctgcggctgaggacacgctgaggccgcggctgcccggcagcaactggggtggccaggtggggcgggaccccagcacctcccccaactgaccctggacgtccaggtgggccc

SEQ ID NO: 609405 - DNA, 120 bp, Artificial Sequence
  ENSG00000175894_17 (sequence is synthesized)
agcctagggcatcccgggcctgggcatcaggcagggtgcaggtggggccatctgcggccctggttcgggcagggacatccatccacctctgagtccttctgagccacagccccagtgacg

SEQ ID NO: 609406 - DNA, 120 bp, Artificial Sequence
  ENSG00000175894_18 (sequence is synthesized)
gtctggtcttgcaggcagaggcccagagcccctgccagtgctcgcccatctgagtgtcaagcggggatttcgctgtcaaggaaccgtttctatacatttttacctcaaacaacaggacct

SEQ ID NO: 609407 - DNA, 120 bp, Artificial Sequence
  ENSG00000175894_19 (sequence is synthesized)
cggttcatgtccctgcggctggcctctcgccagccactcctgcagtgtgcgtccggccgcctgagcaggtgtggtgccgtcccgccattgccgccacctatttattgtgttttatctgaa

SEQ ID NO: 609408 - DNA, 120 bp, Artificial Sequence
  ENSG00000175894_20 (sequence is synthesized)
cggaagtgtatttatactgctctttacaaaagcaccggtgctcctctctaggcagcgggtgggcacagcccctcaccacggacacggacagaggaccacctccccatacagagagaggct

SEQ ID NO: 609409 - DNA, 120 bp, Artificial Sequence
  ENSG00000175894_21 (sequence is synthesized)
tccctcccagcctcagtttacccgtaaatgcactagcgcgaggtcagaaatcacaagcctgggcatggcctgggtcgcaccccctccccacggccccacccacagggacctcaacttctg

SEQ ID NO: 609410 - DNA, 120 bp, Artificial Sequence
  ENSG00000175894_22 (sequence is synthesized)
ggcccgggattttttccctattcagcagcattttaatcacatgtcctccagctgactgggactcaggctgcgtgcctccgtctgcctgtgtgctggctgtcctagctccctggtaacagc

SEQ ID NO: 609411 - DNA, 120 bp, Artificial Sequence
  ENSG00000175894_23 (sequence is synthesized)
atcctctgctggctctcctgtggtcatcttgtctctgcagctgggagagctgcttgtctgtccgtcacaggcagtgaggatgagagggggtgatgggcgcaaggccccaggggtcctccc

SEQ ID NO: 609412 - DNA, 120 bp, Artificial Sequence
  ENSG00000175894_24 (sequence is synthesized)
tcttaacccatgtaggtgccagagaaaccacccccactccatgagaagaggctcagacagcaggctccggggccacgcagcccagaccacacctgccacggtcttccaggaacggtgctc

SEQ ID NO: 609413 - DNA, 120 bp, Artificial Sequence
  ENSG00000175894_25 (sequence is synthesized)
ctgcttctgcaacacaaatcggaacaggagcgatcctcagagagtttacaatgtgctttttccgccaatcagaactgtggacaaaacttcctatttcctacaccgcagctgtctgttcac

SEQ ID NO: 609414 - DNA, 120 bp, Artificial Sequence
  ENSG00000175894_26 (sequence is synthesized)
cttcagctcagagagcactcctgacctttcgtaatgaaatggaagcctccccttgtctggcaaataataaactcagtgtctacttttgccggctttgggaccttcgtgtttttccggggc

SEQ ID NO: 609415 - DNA, 120 bp, Artificial Sequence
  ENSG00000175894_27 (sequence is synthesized)
tcaggtctcactccagccatcgctgtggccagtggagagccactcccctctgggggcagtcgccgagagcctccttcccctccgtccagccagcaaggctttcccaagcgtcctgggcag

SEQ ID NO: 609416 - DNA, 120 bp, Artificial Sequence
  ENSG00000175894_28 (sequence is synthesized)
gagggttgggccctgctttccaccaagtcactcagaaggtcccaatcacacatgattggcctcattgggtcagcacctgtgaaaggaagattaaaaactcgacaccccaattcactcaac

SEQ ID NO: 609417 - DNA, 120 bp, Artificial Sequence
  ENSG00000175894_29 (sequence is synthesized)
caagaagaaaaaagctgaaagctgagtcctgcaggaagctgcctttccctttgccctaagcagacagctgcagatgagagggtcagcatctccactagtggctgctctgtgtgcccctta

SEQ ID NO: 609418 - DNA, 120 bp, Artificial Sequence
  ENSG00000175894_30 (sequence is synthesized)
tctcatggaaagtgccaatttactgagcacgagataaacaggtaactgactgttcccacctgctccttttctcctgcagcatggagcaatcagtcatgtgaccacaccctcctccctctg

SEQ ID NO: 609419 - DNA, 120 bp, Artificial Sequence
  ENSG00000175894_31 (sequence is synthesized)
ccccctccagccggcttttccccttgactgaagccttcaacatcatcttgggagagaggcacagacctgtctcctgggtgcatccttagccttggcaaaataaacttctccattgatcga

SEQ ID NO: 609420 - DNA, 120 bp, Artificial Sequence
  ENSG00000175894_32 (sequence is synthesized)
agccctggatggagcttggcacccaagcccctcatgtctgccctgctgagtctgtgttttgtgctgcccctggcggcccccggccacggcacgcagggttgggagccctgcacagcatgc

SEQ ID NO: 609421 - DNA, 120 bp, Artificial Sequence
  ENSG00000175894_33 (sequence is synthesized)
gaggccccagagggacaggtgcgaggtgcaggcttcgagtgcccgctgcctgccagtgccagctgccaccagacatgattacttccttcccccgatgttgcatcctccccgacaacaaac

SEQ ID NO: 609422 - DNA, 120 bp, Artificial Sequence
  ENSG00000175894_34 (sequence is synthesized)
accaggacacggagactggcctgttgagacagatgtgagatccagggaacatggagggtgggtctgtatgtacgagaaagtgatggttccagaccgacacgctccgtggagccacaggag

SEQ ID NO: 609423 - DNA, 120 bp, Artificial Sequence
  ENSG00000175894_35 (sequence is synthesized)
gttgcgtgggcaccacattttggacagtgggcactgagaatccacaaccatcctgaccagtgtggggcgtcctctggggtggaattccggtctgtgaataaacctgcaatcgaatccgta

SEQ ID NO: 609424 - DNA, 120 bp, Artificial Sequence
  ENSG00000175895_0 (sequence is synthesized)
aggcagccgttgtcgggttcgactggaggggcgggggagtcacctgcgagcggctgcgctggcggccagcccgcccaccgcgtctggatcgcgccggctgcgcggggctgcggacagcac

SEQ ID NO: 609425 - DNA, 120 bp, Artificial Sequence
  ENSG00000175895_1 (sequence is synthesized)
tgcggacagcacacaccctggaaggccccggcggggaacgggcagagtccgcgccctgcgtccgcgaccaggaggatcggaccttcgccttcgctgtcgccgccgccgccgcccgcggcc

SEQ ID NO: 609426 - DNA, 120 bp, Artificial Sequence
  ENSG00000175895_2 (sequence is synthesized)
gtcggggctattagtgaaagatggtggatcgcttggcaaacagtgaagcaaatactagacgtataagtatagtggaaaactgttttggagcagctggtcaacctttaactatacctggac

SEQ ID NO: 609427 - DNA, 120 bp, Artificial Sequence
  ENSG00000175895_3 (sequence is synthesized)
gagttcttattggagaaggagtattgactaagttgtgcaggaaaaagcccaaagcaaggcagtttttcttgtttaatgatattcttgtatatggcaatattgtcatccagaagaaaaaat

SEQ ID NO: 609428 - DNA, 120 bp, Artificial Sequence
  ENSG00000175895_4 (sequence is synthesized)
ataacaaacaacatattattcccctggaaaatgtcactattgattccatcaaagatgagggagacttaaggaatggatggctaatcaagacaccaactaaatcttttgcagtttatgctg

SEQ ID NO: 609429 - DNA, 120 bp, Artificial Sequence
  ENSG00000175895_5 (sequence is synthesized)
ccactgctacggagaaatcagaatggatgaatcatataaataaatgtgttactgatttactctccaaaagtgggaagacacccagtaatgaacatgctgctgtctgggttcctgactctg

SEQ ID NO: 609430 - DNA, 120 bp, Artificial Sequence
  ENSG00000175895_6 (sequence is synthesized)
aggcaactgtatgtatgcgttgtcagaaagcaaaattcacacctgttaatcgtcgccaccattgccgcaaatgtggttttgttgtctgtgggccctgctctgaaaagagatttcttcttc

SEQ ID NO: 609431 - DNA, 120 bp, Artificial Sequence
  ENSG00000175895_7 (sequence is synthesized)
ccagccagtcctctaagcctgtgcggatttgtgacttctgctatgacctgctttctgctggggacatggccacatgccagcctgctagatcagactcttacagccagtcattgaagtctc

SEQ ID NO: 609432 - DNA, 120 bp, Artificial Sequence
  ENSG00000175895_8 (sequence is synthesized)
ctttaaatgatatgtctgatgatgatgacgatgatgatagcagtgactaaggacacatttgggagtatttaatcaggtgtggctatctgagaaatcaactttgggggaaatgtaagattc

SEQ ID NO: 609433 - DNA, 120 bp, Artificial Sequence
  ENSG00000175895_9 (sequence is synthesized)
tgagctctctctctgttttgttctagccatgaatttgcctgagaaacttgtaacctatgtgcctcaatatattccatagaaagtaggtccccctgccttctcccactcctcacactcttc

SEQ ID NO: 609434 - DNA, 120 bp, Artificial Sequence
  ENSG00000175895_10 (sequence is synthesized)
tacagggataggcttttgcaaatatatcagataaattttttgtttcttgtttatttttaggttattttcttggaaggttgggaaaagatgtttgttttaacaggtcatgtactacgttgt

SEQ ID NO: 609435 - DNA, 120 bp, Artificial Sequence
  ENSG00000175895_11 (sequence is synthesized)
tgttttcatttctgttataagtaaaactaaaagcacagaatggtgggaaaggggctataatgtggttcattaataatgttagcagcttttttctaaccatcctgtctaatggttaagaca

SEQ ID NO: 609436 - DNA, 120 bp, Artificial Sequence
  ENSG00000175895_12 (sequence is synthesized)
ttggaaatactttggctttttcatatacctagtggtgccttatcataatagcactgttacatgaaataagcccctaccttcttactttctggtttgttgaaaaaatacactggtgctctt

SEQ ID NO: 609437 - DNA, 120 bp, Artificial Sequence
  ENSG00000175895_13 (sequence is synthesized)
tgaagtgataaaatgagtgtttatgaatgggtgtaattaggaaatacttctcatctgacagctacaaataactaagtttggaggtattttcactctatatgaataaatatttttccataa

SEQ ID NO: 609438 - DNA, 120 bp, Artificial Sequence
  ENSG00000175895_14 (sequence is synthesized)
tttttgttttatataggtcccaaattataattgtcaaatatatattttaaattaataaaagttgtcattcttaggaatttggtttgaaatttatcagttatacagaattgtcatactgca

SEQ ID NO: 609439 - DNA, 120 bp, Artificial Sequence
  ENSG00000175895_15 (sequence is synthesized)
gaattgtcatactgcattagcttctacctttagtaagacatattttttaggtataaattcttatgctttaacattatttctggattgaaaatcttataaaacccttgaaaataaacagtc

SEQ ID NO: 609440 - DNA, 120 bp, Artificial Sequence
  ENSG00000175895_16 (sequence is synthesized)
tcttttttacaaagcctgtgttagagcacagatttacctaggcttgaagatttggaagaaataatatgtaagaatggcctcaaggcagaccactttaagtttggctagacttcatatcgt

SEQ ID NO: 609441 - DNA, 120 bp, Artificial Sequence
  ENSG00000175895_17 (sequence is synthesized)
ggaagtattgtctatttcagtgtgaaactatcttgaatttgcaaatatagtgttatattttataaagttttgtaaaatcccaaacaatatttctatttttgtaaaacaattgtatgtata

SEQ ID NO: 609442 - DNA, 120 bp, Artificial Sequence
  ENSG00000175895_18 (sequence is synthesized)
atctgtatttgaaatcattttgcaatctatggaaatagagtagcaattgctatttctaaattgtgaactttaagtcaatctagatttattttgagaagtaattgttcactctttactttt

SEQ ID NO: 609443 - DNA, 120 bp, Artificial Sequence
  ENSG00000175895_19 (sequence is synthesized)
gaggcagccattaggttgaaagtatatatttatcatataaaacttgatgcgttttgcactactctttccatttatatgctgcaaacaactacagtctttgaaatatggaaaatcagcagt

SEQ ID NO: 609444 - DNA, 120 bp, Artificial Sequence
  ENSG00000175895_20 (sequence is synthesized)
ctaaagtttgttttaaattctaaatttaaaaaatcttcaaatctgaatataccgcaaatgtcatgagaagtttgattcagtaacttgtgatggaggattctttggtatcttactgtttgg

SEQ ID NO: 609445 - DNA, 120 bp, Artificial Sequence
  ENSG00000175895_21 (sequence is synthesized)
ttaaggcactaattttacttacctattagattttgaaagtatctgagatatacaaatctccctgtaggaaatgtgaaagaaaagcacaacaaaactagggttttttgttcatttgcttgc

SEQ ID NO: 609446 - DNA, 120 bp, Artificial Sequence
  ENSG00000175895_22 (sequence is synthesized)
ttttatgattttttttggtttgttttaatatcaggtggatttttgtttctaagcaatatatacataaaatcaaccaacatatctgaaaaggatcatgaaacctgagaaatgctaatggag

SEQ ID NO: 609447 - DNA, 120 bp, Artificial Sequence
  ENSG00000175895_23 (sequence is synthesized)
atttgctggtacataggaatctagcaaattcaggaaccaaggggaaatgttgtgagataacatttacattgtcaacctttattgactttgtttttacaataaaaaatattttacaactta

SEQ ID NO: 609448 - DNA, 120 bp, Artificial Sequence
  ENSG00000175895_24 (sequence is synthesized)
ggaggggagacgcgaaactttccgggcgcttcctcccgcggtcccggagccgtcgcagcgccgggaggtgtcgtcgtcgcgggcggtggcggccgacgccatgttggggtctgtgagaaa

SEQ ID NO: 609449 - DNA, 80 bp, Artificial Sequence
  ENSG00000175895_25 (sequence is synthesized)
atgttggggtctgtgagaaacggggcgctcccggccgctcccctcgcgccggggccggcccgcgggccagttgccgccgc

SEQ ID NO: 609450 - DNA, 120 bp, Artificial Sequence
  ENSG00000175899_0 (sequence is synthesized)
gaaaagcttattagctgctgtacggtaaaagtgagctcttacgggaatgggaatgtagttttagccctccagggattctatttagcccgccaggaattaaccttgactataaataggcca

SEQ ID NO: 609451 - DNA, 120 bp, Artificial Sequence
  ENSG00000175899_1 (sequence is synthesized)
tcaatgacctttccagagaatgttcagagacctcaactttgtttagagatcttgtgtgggtggaacttcctgtttgcacacagagcagcataaagcccagttgctttgggaagtgtttgg

SEQ ID NO: 609452 - DNA, 120 bp, Artificial Sequence
  ENSG00000175899_2 (sequence is synthesized)
gaccagatggattgtagggagtagggtacaatacagtctgttctcctccagctccttctttctgcaacatggggaagaacaaactccttcatccaagtctggttcttctcctcttggtcc

SEQ ID NO: 609453 - DNA, 120 bp, Artificial Sequence
  ENSG00000175899_3 (sequence is synthesized)
tcctgcccacagacgcctcagtctctggaaaaccgcagtatatggttctggtcccctccctgctccacactgagaccactgagaagggctgtgtccttctgagctacctgaatgagacag

SEQ ID NO: 609454 - DNA, 120 bp, Artificial Sequence
  ENSG00000175899_4 (sequence is synthesized)
tgactgtaagtgcttccttggagtctgtcaggggaaacaggagcctcttcactgacctggaggcggagaatgacgtactccactgtgtcgccttcgctgtcccaaagtcttcatccaatg

SEQ ID NO: 609455 - DNA, 120 bp, Artificial Sequence
  ENSG00000175899_5 (sequence is synthesized)
aggaggtaatgttcctcactgtccaagtgaaaggaccaacccaagaatttaagaagcggaccacagtgatggttaagaacgaggacagtctggtctttgtccagacagacaaatcaatct

SEQ ID NO: 609456 - DNA, 120 bp, Artificial Sequence
  ENSG00000175899_6 (sequence is synthesized)
acaaaccagggcagacagtgaaatttcgtgttgtctccatggatgaaaactttcaccccctgaatgagttgattccactagtatacattcaggatcccaaaggaaatcgcatcgcacaat

SEQ ID NO: 609457 - DNA, 120 bp, Artificial Sequence
  ENSG00000175899_7 (sequence is synthesized)
ggcagagtttccagttagagggtggcctcaagcaattttcttttcccctctcatcagagcccttccagggctcctacaaggtggtggtacagaagaaatcaggtggaaggacagagcacc

SEQ ID NO: 609458 - DNA, 120 bp, Artificial Sequence
  ENSG00000175899_8 (sequence is synthesized)
ctttcaccgtggaggaatttgttcttcccaagtttgaagtacaagtaacagtgccaaagataatcaccatcttggaagaagagatgaatgtatcagtgtgtggcctatacacatatggga

SEQ ID NO: 609459 - DNA, 120 bp, Artificial Sequence
  ENSG00000175899_9 (sequence is synthesized)
agcctgtccctggacatgtgactgtgagcatttgcagaaagtatagtgacgcttccgactgccacggtgaagattcacaggctttctgtgagaaattcagtggacagctaaacagccatg

SEQ ID NO: 609460 - DNA, 120 bp, Artificial Sequence
  ENSG00000175899_10 (sequence is synthesized)
gctgcttctatcagcaagtaaaaaccaaggtcttccagctgaagaggaaggagtatgaaatgaaacttcacactgaggcccagatccaagaagaaggaacagtggtggaattgactggaa

SEQ ID NO: 609461 - DNA, 120 bp, Artificial Sequence
  ENSG00000175899_11 (sequence is synthesized)
ggcagtccagtgaaatcacaagaaccataaccaaactctcatttgtgaaagtggactcacactttcgacagggaattcccttctttgggcaggtgcgcctagtagatgggaaaggcgtcc

SEQ ID NO: 609462 - DNA, 120 bp, Artificial Sequence
  ENSG00000175899_12 (sequence is synthesized)
ctataccaaataaagtcatattcatcagaggaaatgaagcaaactattactccaatgctaccacggatgagcatggccttgtacagttctctatcaacaccaccaatgttatgggtacct

SEQ ID NO: 609463 - DNA, 120 bp, Artificial Sequence
  ENSG00000175899_13 (sequence is synthesized)
ctcttactgttagggtcaattacaaggatcgtagtccctgttacggctaccagtgggtgtcagaagaacacgaagaggcacatcacactgcttatcttgtgttctccccaagcaagagct

SEQ ID NO: 609464 - DNA, 120 bp, Artificial Sequence
  ENSG00000175899_14 (sequence is synthesized)
ttgtccaccttgagcccatgtctcatgaactaccctgtggccatactcagacagtccaggcacattatattctgaatggaggcaccctgctggggctgaagaagctctccttctattatc

SEQ ID NO: 609465 - DNA, 120 bp, Artificial Sequence
  ENSG00000175899_15 (sequence is synthesized)
tgataatggcaaagggaggcattgtccgaactgggactcatggactgcttgtgaagcaggaagacatgaagggccatttttccatctcaatccctgtgaagtcagacattgctcctgtcg

SEQ ID NO: 609466 - DNA, 120 bp, Artificial Sequence
  ENSG00000175899_16 (sequence is synthesized)
ctcggttgctcatctatgctgttttacctaccggggacgtgattggggattctgcaaaatatgatgttgaaaattgtctggccaacaaggtggatttgagcttcagcccatcacaaagtc

SEQ ID NO: 609467 - DNA, 120 bp, Artificial Sequence
  ENSG00000175899_17 (sequence is synthesized)
tcccagcctcacacgcccacctgcgagtcacagcggctcctcagtccgtctgcgccctccgtgctgtggaccaaagcgtgctgctcatgaagcctgatgctgagctctcggcgtcctcgg

SEQ ID NO: 609468 - DNA, 120 bp, Artificial Sequence
  ENSG00000175899_18 (sequence is synthesized)
tttacaacctgctaccagaaaaggacctcactggcttccctgggcctttgaatgaccaggacaatgaagactgcatcaatcgtcataatgtctatattaatggaatcacatatactccag

SEQ ID NO: 609469 - DNA, 120 bp, Artificial Sequence
  ENSG00000175899_19 (sequence is synthesized)
tatcaagtacaaatgaaaaggatatgtacagcttcctagaggacatgggcttaaaggcattcaccaactcaaagattcgtaaacccaaaatgtgtccacagcttcaacagtatgaaatgc

SEQ ID NO: 609470 - DNA, 120 bp, Artificial Sequence
  ENSG00000175899_20 (sequence is synthesized)
atgggaagaggccatgcacgcctggtgcatgttgaagagcctcacacggagaccgtacgaaagtacttccctgagacatggatctgggatttggtggtggtaaactcagcaggtgtggct

SEQ ID NO: 609471 - DNA, 120 bp, Artificial Sequence
  ENSG00000175899_21 (sequence is synthesized)
gaggtaggagtaacagtccctgacaccatcaccgagtggaaggcaggggccttctgcctgtctgaagatgctggacttggtatctcttccactgcctctctccgagccttccagcccttc

SEQ ID NO: 609472 - DNA, 120 bp, Artificial Sequence
  ENSG00000175899_22 (sequence is synthesized)
tttgtggagctcacaatgccttactctgtgattcgtggagaggccttcacactcaaggccacggtcctaaactaccttcccaaatgcatccgggtcagtgtgcagctggaagcctctccc

SEQ ID NO: 609473 - DNA, 120 bp, Artificial Sequence
  ENSG00000175899_23 (sequence is synthesized)
gccttcctagctgtcccagtggagaaggaacaagcgcctcactgcatctgtgcaaacgggcggcaaactgtgtcctgggcagtaaccccaaagtcattaggaaatgtgaatttcactgtg

SEQ ID NO: 609474 - DNA, 120 bp, Artificial Sequence
  ENSG00000175899_24 (sequence is synthesized)
agcgcagaggcactagagtctcaagagctgtgtgggactgaggtgccttcagttcctgaacacggaaggaaagacacagtcatcaagcctctgttggttgaacctgaaggactagagaag

SEQ ID NO: 609475 - DNA, 120 bp, Artificial Sequence
  ENSG00000175899_25 (sequence is synthesized)
gaaacaacattcaactccctactttgtccatcaggtggtgaggtttctgaagaattatccctgaaactgccaccaaatgtggtagaagaatctgcccgagcttctgtctcagttttggga

SEQ ID NO: 609476 - DNA, 120 bp, Artificial Sequence
  ENSG00000175899_26 (sequence is synthesized)
gacatattaggctctgccatgcaaaacacacaaaatcttctccagatgccctatggctgtggagagcagaatatggtcctctttgctcctaacatctatgtactggattatctaaatgaa

SEQ ID NO: 609477 - DNA, 120 bp, Artificial Sequence
  ENSG00000175899_27 (sequence is synthesized)
acacagcagcttactccagagatcaagtccaaggccattggctatctcaacactggttaccagagacagttgaactacaaacactatgatggctcctacagcacctttggggagcgatat

SEQ ID NO: 609478 - DNA, 120 bp, Artificial Sequence
  ENSG00000175899_28 (sequence is synthesized)
ggcaggaaccagggcaacacctggctcacagcctttgttctgaagacttttgcccaagctcgagcctacatcttcatcgatgaagcacacattacccaagccctcatatggctctcccag

SEQ ID NO: 609479 - DNA, 120 bp, Artificial Sequence
  ENSG00000175899_29 (sequence is synthesized)
aggcagaaggacaatggctgtttcaggagctctgggtcactgctcaacaatgccataaagggaggagtagaagatgaagtgaccctctccgcctatatcaccatcgcccttctggagatt

SEQ ID NO: 609480 - DNA, 120 bp, Artificial Sequence
  ENSG00000175899_30 (sequence is synthesized)
cctctcacagtcactcaccctgttgtccgcaatgccctgttttgcctggagtcagcctggaagacagcacaagaaggggaccatggcagccatgtatataccaaagcactgctggcctat

SEQ ID NO: 609481 - DNA, 120 bp, Artificial Sequence
  ENSG00000175899_31 (sequence is synthesized)
gcttttgccctggcaggtaaccaggacaagaggaaggaagtactcaagtcacttaatgaggaagctgtgaagaaagacaactctgtccattgggagcgccctcagaaacccaaggcacca

SEQ ID NO: 609482 - DNA, 120 bp, Artificial Sequence
  ENSG00000175899_32 (sequence is synthesized)
gtggggcatttttacgaaccccaggctccctctgctgaggtggagatgacatcctatgtgctcctcgcttatctcacggcccagccagccccaacctcggaggacctgacctctgcaacc

SEQ ID NO: 609483 - DNA, 120 bp, Artificial Sequence
  ENSG00000175899_33 (sequence is synthesized)
aacatcgtgaagtggatcacgaagcagcagaatgcccagggcggtttctcctccacccaggacacagtggtggctctccatgctctgtccaaatatggagcagccacatttaccaggact

SEQ ID NO: 609484 - DNA, 120 bp, Artificial Sequence
  ENSG00000175899_34 (sequence is synthesized)
gggaaggctgcacaggtgactatccagtcttcagggacattttccagcaaattccaagtggacaacaacaaccgcctgttactgcagcaggtctcattgccagagctgcctggggaatac

SEQ ID NO: 609485 - DNA, 120 bp, Artificial Sequence
  ENSG00000175899_35 (sequence is synthesized)
agcatgaaagtgacaggagaaggatgtgtctacctccagacatccttgaaatacaatattctcccagaaaaggaagagttcccctttgctttaggagtgcagactctgcctcaaacttgt

SEQ ID NO: 609486 - DNA, 120 bp, Artificial Sequence
  ENSG00000175899_36 (sequence is synthesized)
gatgaacccaaagcccacaccagcttccaaatctccctaagtgtcagttacacagggagccgctctgcctccaacatggcgatcgttgatgtgaagatggtctctggcttcattcccctg

SEQ ID NO: 609487 - DNA, 120 bp, Artificial Sequence
  ENSG00000175899_37 (sequence is synthesized)
aagccaacagtgaaaatgcttgaaagatctaaccatgtgagccggacagaagtcagcagcaaccatgtcttgatttaccttgataaggtgtcaaatcagacactgagcttgttcttcacg

SEQ ID NO: 609488 - DNA, 120 bp, Artificial Sequence
  ENSG00000175899_38 (sequence is synthesized)
gttctgcaagatgtcccagtaagagatctgaaaccagccatagtgaaagtctatgattactacgagacggatgagtttgcaattgctgagtacaatgctccttgcagcaaagatcttgga

SEQ ID NO: 609489 - DNA, 120 bp, Artificial Sequence
  ENSG00000175899_39 (sequence is synthesized)
aatgcttgaagaccacaaggctgaaaagtgctttgctggagtcctgttctcagagctccacagaagacacgtgtttttgtatctttaaagacttgatgaataaacactttttctggtcaa

SEQ ID NO: 609490 - DNA, 120 bp, Artificial Sequence
  ENSG00000175899_40 (sequence is synthesized)
ctaggaattaattgctttgagctctcttgtgggctttcattggtaaggaattatatatatatatatatataactactcacttctgcagttaaaaaaataaacaaaatacaatatattgaa

SEQ ID NO: 609491 - DNA, 120 bp, Artificial Sequence
  ENSG00000175899_41 (sequence is synthesized)
gtgtgctgtaggataataaagcttttcccccaaaaaacaggtgaatacttaaactaattcaaagagagaagaaagcttcctgaaaggtcatttaattgacttttgctttccaggtgtcaa

SEQ ID NO: 609492 - DNA, 120 bp, Artificial Sequence
  ENSG00000175899_42 (sequence is synthesized)
cacactgcacattattatagaaaaacacatttattggagagggccgctgactctgtcaaacctcagagagtccataggattgcttatgggtaatgatttggaatagatttggtttcccac

SEQ ID NO: 609493 - DNA, 120 bp, Artificial Sequence
  ENSG00000175899_43 (sequence is synthesized)
tgtactgattaggtttccttgggcactatgctacccagaactaagggaaagaatactctctgctcatggagacccaaatctgtcttaattttttttctttccaatgtcacagatcttgga

SEQ ID NO: 609494 - DNA, 120 bp, Artificial Sequence
  ENSG00000175899_44 (sequence is synthesized)
ataaattactgaaaagatcattgaagaagaaattctgaaaatcacaggaaaccagtagcccatttttaagatatttatatattactgttgtattaaaggcggacaacttttcaggaggag

SEQ ID NO: 609495 - DNA, 120 bp, Artificial Sequence
  ENSG00000175899_45 (sequence is synthesized)
atacaagagatgtgagaagcaccataaaaggcgttgtgaggagttgtgggggagtgagggagagaagaggttgaaaagcttattagctgctgtacggtaaaactccttctttctgcaaca

SEQ ID NO: 609496 - DNA, 120 bp, Artificial Sequence
  ENSG00000175899_46 (sequence is synthesized)
cccacaaccaaacatggaacaatgccctggagtataaaaatctatagagtgccaaataaaggaacaatttgaaatactggtgttgatattgaaaaagcaagggactctaatgtcagaaga

SEQ ID NO: 609497 - DNA, 120 bp, Artificial Sequence
  ENSG00000175899_47 (sequence is synthesized)
gaaatccttttgcagatgaggtggtgatgaattctttgtttcaacacaactgaaggaggaactgaaggaaataccagctgatgagtgatgagaagggattcttgataatagagtactagg

SEQ ID NO: 609498 - DNA, 120 bp, Artificial Sequence
  ENSG00000175899_48 (sequence is synthesized)
gaacagagctatgtattggcattgacagaggtatatgcgttatgttagttatttaagaaataatctggagaatttatcatcccctctgagagatttctgcacaatttaattaaggaccct

SEQ ID NO: 609499 - DNA, 120 bp, Artificial Sequence
  ENSG00000175899_49 (sequence is synthesized)
ctcagagctccacagaagacacgtgtttttgtatctttaaagacttgatgaataaacactttttctggtcaatgtctttccctgtttcctgttcattcaataaatatcattgtacatttc

SEQ ID NO: 609500 - DNA, 120 bp, Artificial Sequence
  ENSG00000175906_0 (sequence is synthesized)
agaggcagcggttggaggcgcggtgggtgtctgcgggggtctcgcggggcggctgcggtgtttcaccgggaaaggctcgaggagagcgcggctcacgagagataacccagctgtgctccc

SEQ ID NO: 609501 - DNA, 120 bp, Artificial Sequence
  ENSG00000175906_1 (sequence is synthesized)
tggaaccttcaatttcaaggcctccctgcctctactaggcgccttagctcactatggggaaccacttgactgagatggcgcccactgcctcctccttcttgccccacttccaagccctgc

SEQ ID NO: 609502 - DNA, 120 bp, Artificial Sequence
  ENSG00000175906_2 (sequence is synthesized)
atgtcgtggtcattgggctggactctgctggaaagacctccctcctttaccgcctcaagttcaaggagtttgtccagagtgtccccaccaaaggcttcaacaccgagaagatccgggtgc

SEQ ID NO: 609503 - DNA, 120 bp, Artificial Sequence
  ENSG00000175906_3 (sequence is synthesized)
ccctcgggggatcgcgtggcatcaccttccaagtgtgggacgtcggggggcaggagaagctgcgaccactgtggcgctcttatacccgccggacagacggtctagtgtttgtggtggacg

SEQ ID NO: 609504 - DNA, 120 bp, Artificial Sequence
  ENSG00000175906_4 (sequence is synthesized)
ctgcggaggctgagcggctggaggaagccaaggtggagttgcaccgaatcagccgggcctcggacaaccagggcgtgccagtgctggtgctggccaacaagcaggaccagcccggggcac

SEQ ID NO: 609505 - DNA, 120 bp, Artificial Sequence
  ENSG00000175906_5 (sequence is synthesized)
tgagcgctgctgaggtggagaagaggctggcagtccgagagctagcagccgccactctcactcatgtgcaaggctgcagcgctgtggacggtctgggcctgcagcagggccttgagcgcc

SEQ ID NO: 609506 - DNA, 120 bp, Artificial Sequence
  ENSG00000175906_6 (sequence is synthesized)
agaggaagaaggcagctcggggtggcaagaagagacggtgacccaagccccccctccctttcctcccacctagtaggggtctgcacacttggacagcagggtgggaccagcctgtgacct

SEQ ID NO: 609507 - DNA, 120 bp, Artificial Sequence
  ENSG00000175906_7 (sequence is synthesized)
ctcagtcagactggggtgcaggacctgtccacctcaatgaaggagagaggagcatggggtgtcccgttttggtgccacactggggtggggatgggagatgggatgtctttgcatatctct

SEQ ID NO: 609508 - DNA, 120 bp, Artificial Sequence
  ENSG00000175906_8 (sequence is synthesized)
ctcatcctctctggagaagtgggcgctgcaggactgtggagacgtaaatgtaaactgtgactctacctcgaccctgtttcttatttttcttctctggctaaaaatttttaattggatgtg

SEQ ID NO: 609509 - DNA, 120 bp, Artificial Sequence
  ENSG00000175906_9 (sequence is synthesized)
tttgggggcggggggatggaagtgacttggagaatgtgtttgggatgaaataactatctccccttcctctgtcccccaactggggagtctccccaggctgcttttctaggaataccagtc

SEQ ID NO: 609510 - DNA, 120 bp, Artificial Sequence
  ENSG00000175906_10 (sequence is synthesized)
acatagtttttatttttgtgtctgtgaaagtgccaagaacccctccccacatttgtagatccatgaccctttttataagctgtgtgtgtcctctgtattattgttattaactatttttta

SEQ ID NO: 609511 - DNA, 120 bp, Artificial Sequence
  ENSG00000175906_11 (sequence is synthesized)
gcatttgcctgtaagttattaaagactgataactgtagctcttaccttggtctggggcattttcctctccttatcttgccccagagacaattcaagatttctatatggggttgtggcgca

SEQ ID NO: 609512 - DNA, 120 bp, Artificial Sequence
  ENSG00000175906_12 (sequence is synthesized)
gggggagggagatttatcttgaagctgaatttgcaaagcaagcacttataaaaattagattgtgtgttacgggatggcttgtgaaaattataggggggagtggaaaacccctcaagctat

SEQ ID NO: 609513 - DNA, 120 bp, Artificial Sequence
  ENSG00000175920_0 (sequence is synthesized)
gagctattttgaaagtgaccctgggctggggcgccggggcgagcgcggcggcgcggaaccatgacagaagatgaccgaggcggcgctggtggagggccaggtcaagctgcgggacggcaa

SEQ ID NO: 609514 - DNA, 120 bp, Artificial Sequence
  ENSG00000175920_1 (sequence is synthesized)
gaagtggaagagtaggtggctggtgctgcggaagccgtcgcccgtggcagactgcctgctgatgctggtctacaaggacaagtcggagcgtatcaagggcctgcgggagcgcagcagcct

SEQ ID NO: 609515 - DNA, 120 bp, Artificial Sequence
  ENSG00000175920_2 (sequence is synthesized)
gacgctagaggacatctgcgggctggagcccggcctgccctacgagggcctggtccacacgctggccattgtctgcctgtcccaggccatcatgctgggctttgacagccacgaggccat

SEQ ID NO: 609516 - DNA, 120 bp, Artificial Sequence
  ENSG00000175920_3 (sequence is synthesized)
gtgtgcgtgggatgcccggatccgctatgcgctcggcgaggtgcataggttccatgtgacagtggctccaggcaccaagttggagagcggcccggctaccctgcacctctgcaatgatgt

SEQ ID NO: 609517 - DNA, 120 bp, Artificial Sequence
  ENSG00000175920_4 (sequence is synthesized)
cctcgtcttggccagggacatccccccggctgtcacggggcagtggaagctgtctgacctccggcgctacggggccgtgccaagcggattcatctttgaaggcgggaccaggtgtgggta

SEQ ID NO: 609518 - DNA, 120 bp, Artificial Sequence
  ENSG00000175920_5 (sequence is synthesized)
ctgggctggcgtcttcttcctgtcctcggccgagggggagcagatcagcttcctgttcgactgcatcgtccgaggcatctcccccaccaagggcccctttgggctgcggccggttctacc

SEQ ID NO: 609519 - DNA, 120 bp, Artificial Sequence
  ENSG00000175920_6 (sequence is synthesized)
agacccaagtcccccgggaccctcgactgtggaggagcgtgtggcccaggaagccctggaaaccctacagctggagaagcggctgagcctcctctcacatgcgggcaggccgggcagtgg

SEQ ID NO: 609520 - DNA, 120 bp, Artificial Sequence
  ENSG00000175920_7 (sequence is synthesized)
aggggatgaccgcagcctgtccagctcatcctcagaggccagtcacttggacgtcagcgccagcagccggctcaccgcatggccagagcaatcctcgtcgtcagccagcacgtcacagga

SEQ ID NO: 609521 - DNA, 120 bp, Artificial Sequence
  ENSG00000175920_8 (sequence is synthesized)
ggggcctagaccagcagctgcccaggccgccggggaagccatggtgggtgcctcaaggccaccccccaagccgctgcgtccgcggcagctgcaggaggttggccgccagagctcctcgga

SEQ ID NO: 609522 - DNA, 120 bp, Artificial Sequence
  ENSG00000175920_9 (sequence is synthesized)
cagcggcatcgccactggcagccactcctcttactccagcagcctctcgtcctacgcgggcagcagcctggacgtgtggcgggccacagatgaactgggctcactgctcagcctgccagc

SEQ ID NO: 609523 - DNA, 120 bp, Artificial Sequence
  ENSG00000175920_10 (sequence is synthesized)
gtcgagtaccaggtgcccacctccctgcgggcccactatgacacaccacgcagcctttgcctggctcctagagaccacagccccccctcacagggcagccccggcaacagtgcggccagg

SEQ ID NO: 609524 - DNA, 120 bp, Artificial Sequence
  ENSG00000175920_11 (sequence is synthesized)
gactcaggcggccagacgtccgccgggtgtccctctggctggctgggcacgagacggcggggcctggtgatggaggccccccagggcagcgaggccacactgcctggccctgcccctggc

SEQ ID NO: 609525 - DNA, 120 bp, Artificial Sequence
  ENSG00000175920_12 (sequence is synthesized)
gagccctgggaagcaggcggcccccacgcggggccacccccggctttcttttcggcatgtccagtctgtggaggactcaaggtaaacccccctccttgagagccgcagatcccgccccgc

SEQ ID NO: 609526 - DNA, 120 bp, Artificial Sequence
  ENSG00000175920_13 (sequence is synthesized)
ggctgcaaaggggctgaatttgcccccagatggcagaggaagtggcgccagcctccttgcagactggtgctctgtgttctgtgggagggaccgggggtctcccggagaggggagctggag

SEQ ID NO: 609527 - DNA, 120 bp, Artificial Sequence
  ENSG00000175920_14 (sequence is synthesized)
ggcgcgccctgtggctgccaccggaggaaggggctgacttggggaggtgagttctggaaggcaggggctctgggtccggcaggtcggggtcaccagagccccaatgctcagctgcttcac

SEQ ID NO: 609528 - DNA, 120 bp, Artificial Sequence
  ENSG00000175920_15 (sequence is synthesized)
tccgtgtcccccacccctgaggatcaggtgagtgctgcacctctgttggctcgtgccttgcactggggtgccaagggctggaggccctgccgctggccttgtcctccttgggcctcacgc

SEQ ID NO: 609529 - DNA, 120 bp, Artificial Sequence
  ENSG00000175920_16 (sequence is synthesized)
ccccttcgggggtggccggttctccccatcacctctctggggcagtcacaccacctgttaagcatcaagctaccacagaggctccggccacctgggctccaccagcccagcccccctggg

SEQ ID NO: 609530 - DNA, 120 bp, Artificial Sequence
  ENSG00000175920_17 (sequence is synthesized)
ctccgtgtgcgctgggcctcatccccatctatgggaggaaactgaagctcaggaggctgtgtggcttgcggggtctctgggttctgggccccactgttccccagtgaagcccttgtggga

SEQ ID NO: 609531 - DNA, 120 bp, Artificial Sequence
  ENSG00000175920_18 (sequence is synthesized)
aggttccgggagcaggtggtgtcctcagagcagcctcgcctgctgaccccactgggagaggcgccgtgcctcgggcccctggtgggagctctgctggctcctgtctgaacctcctcgcag

SEQ ID NO: 609532 - DNA, 120 bp, Artificial Sequence
  ENSG00000175920_19 (sequence is synthesized)
ggccaaaggctggcttggcctgtgtttcccctggcccaggcctcagcccctgcgtcggaggtggggctgtgttgggcccattgtcccccgccctgggtggcttcctcttgcacagcctgg

SEQ ID NO: 609533 - DNA, 120 bp, Artificial Sequence
  ENSG00000175920_20 (sequence is synthesized)
agcctgccctgaccacagcccagcagctccctgtgaacacctctttgtcccttcactgtcagctgtttctaaacccagacactgtttgtaatagactggaaataaaatgttctttcctta

SEQ ID NO: 609534 - DNA, 120 bp, Artificial Sequence
  ENSG00000175920_21 (sequence is synthesized)
ccaggacctgcgacagcacattcaggatccccaggacccgtggctgtggacagcccaggaccagagaggccgcgcggcgagtcgcccacttacgtgaacatccccgtcagcccatcctcc

SEQ ID NO: 609535 - DNA, 120 bp, Artificial Sequence
  ENSG00000175920_22 (sequence is synthesized)
agaaagcagctgcactacatgggcctggagctccaggaggccagcgagggtgtccgaggggctggcgcctccctctacgcccagatcgacatcatggccaccgagacggcgcacagagtg

SEQ ID NO: 609536 - DNA, 120 bp, Artificial Sequence
  ENSG00000175920_23 (sequence is synthesized)
ggggtgcggcacgcacgggcccgggaggagcagctgtcggagctggagcagaggaaggcagccccgcagtgaggtcacagcgccaggagctgaccgcaaacccggtgcgctgtgcggccc

SEQ ID NO: 609537 - DNA, 120 bp, Artificial Sequence
  ENSG00000175920_24 (sequence is synthesized)
cgtggcccccggcaggccagccccttctgttgggcgtggtctggtccccagggagctcccagtcgcaggagcaggcatggccggtctccgggccatggtgcaaacaggaagttttcaggg

SEQ ID NO: 609538 - DNA, 120 bp, Artificial Sequence
  ENSG00000175920_25 (sequence is synthesized)
cccacggccaggcctcctgcctcacaggtgtccggggctgacccttcggcctgaaagagttgctctggaccccaggctgactgaggccctgcttccaggcatcaggcagctctggtagct

SEQ ID NO: 609539 - DNA, 120 bp, Artificial Sequence
  ENSG00000175920_26 (sequence is synthesized)
gctgtggcatctcaggcagaggctgctgcccaggagtttgggagcatggtttgtggtgcctgggatgcaaaccgccctctcaccctgggggtgactgcatggatgacagccgtgtcctgg

SEQ ID NO: 609540 - DNA, 120 bp, Artificial Sequence
  ENSG00000175920_27 (sequence is synthesized)
caaaatgctcatcccttcacctgggtgttgtggccctgcagagccaggacccagtgcccgctcccactgtcggcaccatgcccgctcctgagactggcggctcagacactcccggaatcc

SEQ ID NO: 609541 - DNA, 120 bp, Artificial Sequence
  ENSG00000175920_28 (sequence is synthesized)
cctccccgcctcccggctgtcctgcctgggccaccgccaccctgcacctggggacggagcctggactctcccagccacctgaccgctccacttcttgggacctattacagccagtcatgt

SEQ ID NO: 609542 - DNA, 120 bp, Artificial Sequence
  ENSG00000175920_29 (sequence is synthesized)
gtcggctctgggcacccggattcacggggccaggcggggtgtcggctctgggcatctgacttcgtggggccaggcagggtgtcattgtcggctcttggtggagtttgctgcggtttcctg

SEQ ID NO: 609543 - DNA, 120 bp, Artificial Sequence
  ENSG00000175920_30 (sequence is synthesized)
attttgaaagtgaccctgggctggggcgccggggcgagcgcggcggcgcggaaccatgacagaagatgaccgaggcggcgctggtggagggccaggtcaagctgcgggacggcaagaaga

SEQ ID NO: 609544 - DNA, 120 bp, Artificial Sequence
  ENSG00000175920_31 (sequence is synthesized)
attcacgcggccgccagggcttcattcacccctggccgggagggcagcgcccccgtgactcgcagctggggcttctccacgggtggcggctgcatcgctctgccagtgacgctgggctgg

SEQ ID NO: 609545 - DNA, 120 bp, Artificial Sequence
  ENSG00000175920_32 (sequence is synthesized)
tccctgggggccctcctgctgctgtgggggtgcaggggtggatgctggccccaggatgctgcacacggcctcagggcagcacccacacactggcagctccagcttcccctgaaagatgac

SEQ ID NO: 609546 - DNA, 80 bp, Artificial Sequence
  ENSG00000175928_0 (sequence is synthesized)
gagcacaaagcggggcgcaccgcgggcgccggcaacgagccggtgaacgaggcgaggcccgtgcgcccgcggctgcaagc

SEQ ID NO: 609547 - DNA, 120 bp, Artificial Sequence
  ENSG00000175928_1 (sequence is synthesized)
gcggcggcatccctaggcgcctggggcgccttcctccggacctggccgctcgctgccccgccctctgcaccccacttctccgaccctccttcccagtcctgcctccccctgccctggcct

SEQ ID NO: 609548 - DNA, 120 bp, Artificial Sequence
  ENSG00000175928_2 (sequence is synthesized)
ctgagagccgactgagcccagccccgtgcagcagcggttgcctgtgtcgccgcctagtctccggtcttggtgctctcccgggggtgccccaaggagccagtgcgcgctgcgggctgggaa

SEQ ID NO: 609549 - DNA, 120 bp, Artificial Sequence
  ENSG00000175928_3 (sequence is synthesized)
ggaggcgccgctcagctagtcctcctcctcctcctcgtctttctcctcctcctgctgctgctgccgccgccgccgccgtgggtgccgggtccgcgcgcaccccaacacccccaccagctg

SEQ ID NO: 609550 - DNA, 120 bp, Artificial Sequence
  ENSG00000175928_4 (sequence is synthesized)
ggcctcggggcacatctccagacttcaatttggctgaaataattcatgccacggacctgtgcacatgcctggaattgagagacacagttaaaagactccaagttgctttctgccttttga

SEQ ID NO: 609551 - DNA, 120 bp, Artificial Sequence
  ENSG00000175928_5 (sequence is synthesized)
aaactcctgaaaaccatccctttggactctggaattctacacagctcaaccaagactttgcttgaatgtttacattttctgctcgctgtcctacatatcacaatatagtgttcacgtttt

SEQ ID NO: 609552 - DNA, 120 bp, Artificial Sequence
  ENSG00000175928_6 (sequence is synthesized)
gttaaaactttggggtgtcaggagttgagcttgctcagcaagccagcatggctaggatgagctttgttatagcagcttgccaattggtgctgggcctactaatgacttcattaaccgagt

SEQ ID NO: 609553 - DNA, 120 bp, Artificial Sequence
  ENSG00000175928_7 (sequence is synthesized)
cttccatacagaatagtgagtgtccacaactttgcgtatgtgaaattcgtccctggtttaccccacagtcaacttacagagaagccaccactgttgattgcaatgacctccgcttaacaa

SEQ ID NO: 609554 - DNA, 120 bp, Artificial Sequence
  ENSG00000175928_8 (sequence is synthesized)
ggattcccagtaacctctctagtgacacacaagtgcttctcttacagagcaataacatcgcaaagactgtggatgagctgcagcagcttttcaacttgactgaactagatttctcccaaa

SEQ ID NO: 609555 - DNA, 120 bp, Artificial Sequence
  ENSG00000175928_9 (sequence is synthesized)
acaactttactaacattaaggaggtcgggctggcaaacctaacccagctcacaacgctgcatttggaggaaaatcagattaccgagatgactgattactgtctacaagacctcagcaacc

SEQ ID NO: 609556 - DNA, 120 bp, Artificial Sequence
  ENSG00000175928_10 (sequence is synthesized)
ttcaagaactctacatcaaccacaaccaaattagcactatttctgctcatgcttttgcaggcttaaaaaatctattaaggctccacctgaactccaacaaattgaaagttattgatagtc

SEQ ID NO: 609557 - DNA, 120 bp, Artificial Sequence
  ENSG00000175928_11 (sequence is synthesized)
gctggtttgattctacacccaacctggaaattctcatgatcggagaaaaccctgtgattggaattctggatatgaacttcaaacccctcgcaaatttgagaagcttagttttggcaggaa

SEQ ID NO: 609558 - DNA, 120 bp, Artificial Sequence
  ENSG00000175928_12 (sequence is synthesized)
tgtatctcactgatattcctggaaatgctttggtgggtctggatagccttgagagcctgtctttttatgataacaaactggttaaagtccctcaacttgccctgcaaaaagttccaaatt

SEQ ID NO: 609559 - DNA, 120 bp, Artificial Sequence
  ENSG00000175928_13 (sequence is synthesized)
tgaaattcttagacctcaacaaaaaccccattcacaaaatccaagaaggggacttcaaaaatatgcttcggttaaaagaactgggaatcaacaatatgggcgagctcgtttctgtcgacc

SEQ ID NO: 609560 - DNA, 120 bp, Artificial Sequence
  ENSG00000175928_14 (sequence is synthesized)
gctatgccctggataacttgcctgaactcacaaagctggaagccaccaataaccctaaactctcttacatccaccgcttggctttccgaagtgtccctgctctggaaagcttgatgctga

SEQ ID NO: 609561 - DNA, 120 bp, Artificial Sequence
  ENSG00000175928_15 (sequence is synthesized)
acaacaatgccttgaatgccatttaccaaaagacagtcgaatccctccccaatctgcgtgagatcagtatccatagcaatcccctcaggtgtgactgtgtgatccactggattaactcca

SEQ ID NO: 609562 - DNA, 120 bp, Artificial Sequence
  ENSG00000175928_16 (sequence is synthesized)
acaaaaccaacatccgcttcatggagcccctgtccatgttctgtgccatgccgcccgaatataaagggcaccaggtgaaggaagttttaatccaggattcgagtgaacagtgcctcccaa

SEQ ID NO: 609563 - DNA, 120 bp, Artificial Sequence
  ENSG00000175928_17 (sequence is synthesized)
tgatatctcacgacagcttcccaaatcgtttaaacgtggatatcggcacgacggttttcctagactgtcgagccatggctgagccagaacctgaaatttactgggtcactcccattggaa

SEQ ID NO: 609564 - DNA, 120 bp, Artificial Sequence
  ENSG00000175928_18 (sequence is synthesized)
ataagataactgtggaaaccctttcagataaatacaagctaagtagcgaaggtaccttggaaatatctaacatacaaattgaagactcaggaagatacacatgtgttgcccagaatgtcc

SEQ ID NO: 609565 - DNA, 120 bp, Artificial Sequence
  ENSG00000175928_19 (sequence is synthesized)
aaggggcagacactcgggtggcaacaattaaggttaatgggacccttctggatggtacccaggtgctaaaaatatacgtcaagcagacagaatcccattccatcttagtgtcctggaaag

SEQ ID NO: 609566 - DNA, 120 bp, Artificial Sequence
  ENSG00000175928_20 (sequence is synthesized)
ttaattccaatgtcatgacgtcaaacttaaaatggtcgtctgccaccatgaagattgataaccctcacataacatatactgccagggtcccagtcgatgtccatgaatacaacctaacgc

SEQ ID NO: 609567 - DNA, 120 bp, Artificial Sequence
  ENSG00000175928_21 (sequence is synthesized)
atctgcagccttccacagattatgaagtgtgtctcacagtgtccaatattcatcagcagactcaaaagtcatgcgtaaatgtcacaaccaaaaatgccgccttcgcagtggacatctctg

SEQ ID NO: 609568 - DNA, 120 bp, Artificial Sequence
  ENSG00000175928_22 (sequence is synthesized)
atcaagaaaccagtacagcccttgctgcagtaatggggtctatgtttgccgtcattagccttgcgtccattgctgtgtactttgccaaaagatttaagagaaaaaactaccaccactcat

SEQ ID NO: 609569 - DNA, 120 bp, Artificial Sequence
  ENSG00000175928_23 (sequence is synthesized)
taaaaaagtatatgcaaaaaacctcttcaatcccactaaatgagctgtacccaccactcattaacctctgggaaggtgacagcgagaaagacaaagatggttctgcagacaccaagccaa

SEQ ID NO: 609570 - DNA, 120 bp, Artificial Sequence
  ENSG00000175928_24 (sequence is synthesized)
gtttttgctttattctgcaaaagtgaacaagttgaagacttttgtatttttgactttgctagtttgtggcagagtggagaggacgggtggatatttcaaatttttttagtatagcgtatc

SEQ ID NO: 609571 - DNA, 120 bp, Artificial Sequence
  ENSG00000175928_25 (sequence is synthesized)
gcaagggtttgacacggctgccagcgactctaggcttccagtctgtgtttggtttttattcttatcattattatgattgttattatattattattttattttagttgttgtgctaaactc

SEQ ID NO: 609572 - DNA, 120 bp, Artificial Sequence
  ENSG00000175928_26 (sequence is synthesized)
aataatgctgttctaactacagtgctcaataaaatgattaatgacaggatggggttcccctgtgcttttaccagtagcatgaccccttctgaagccatccgtagaaagtactttgtcctc

SEQ ID NO: 609573 - DNA, 120 bp, Artificial Sequence
  ENSG00000175928_27 (sequence is synthesized)
caaaaagctaacatacggttttgaagcagcattgaaacttttgtagcaatctggtctatagacttttaactcaagaagctaaggctagacttgttaccttcgttgaatgatgttagttga

SEQ ID NO: 609574 - DNA, 120 bp, Artificial Sequence
  ENSG00000175928_28 (sequence is synthesized)
aaggctagacttgttaccttcgttgaatgatgttagttgactgtactgtaatgttgtatcaactgaattgaatgtttgcctttaaacaatgaattttctttttctttccttttttttttt

SEQ ID NO: 609575 - DNA, 120 bp, Artificial Sequence
  ENSG00000175928_29 (sequence is synthesized)
gcaatagaaatatgtatatcagattttttaatgtaacaaactacatgttaattgttatcttattctttttatctttagtagacacttttaaaagaaaagacaagtttgttgtgtttaact

SEQ ID NO: 609576 - DNA, 120 bp, Artificial Sequence
  ENSG00000175928_30 (sequence is synthesized)
caccaacacgtggtgtataatgaagacagaactataataaattagttttgttctgattttttagaacacttgcaataatgtatcatttatagttcttgctagttgcagtggtaatatttt

SEQ ID NO: 609577 - DNA, 120 bp, Artificial Sequence
  ENSG00000175928_31 (sequence is synthesized)
tcacatccataaaaacaactaccaaaataaatcagctgtagcatgttgctttttaaagctaggccctaaaaggttttaattctttttctaagggaagaaatgtctattttaattaagata

SEQ ID NO: 609578 - DNA, 120 bp, Artificial Sequence
  ENSG00000175928_32 (sequence is synthesized)
ttttaatgaacaggatttctgtattttaaatagtactgactagcacctaatgggcagtgggagggtggttcatatgaagaaaaaaaggtgtattgttgtatcccatgcataaataaaggt

SEQ ID NO: 609579 - DNA, 120 bp, Artificial Sequence
  ENSG00000175928_33 (sequence is synthesized)
aaatatatatatacaccaatatattcatatatactcacacacatcccaacctgtcacacacaatgcgtgtgtatatatatatgaatatattggatatgtcatttctgtaagagttttgtt

SEQ ID NO: 609580 - DNA, 120 bp, Artificial Sequence
  ENSG00000175928_34 (sequence is synthesized)
aaaacctgattttcttttgtagtatccacattcttcatcaaagtacaaaaacgtctgtggagtgtcacaaactgtatgacatgttatttctttttaacagttgtctatatgcttagaccc

SEQ ID NO: 609581 - DNA, 120 bp, Artificial Sequence
  ENSG00000175928_35 (sequence is synthesized)
gtgttagtctctatatctgtgtggcaatatctgctgagacaagtaaatgattaatagaaaacaaaacaacttccgtacagttcaaacttttcatccaaatatatatagacagttttggag

SEQ ID NO: 609582 - DNA, 120 bp, Artificial Sequence
  ENSG00000175928_36 (sequence is synthesized)
aattgtttcaagattatagaggaaacatgtaacatttagagcagatggaactaggtttaggtagaaggccagttccacaaagggcagagggagggatgggatttaataggtaaagaagaa

SEQ ID NO: 609583 - DNA, 120 bp, Artificial Sequence
  ENSG00000175928_37 (sequence is synthesized)
cccatttgaaaataaaggttgtttcaaaaggcagctgccgccaggcacacagcattccatcagacaggtgccagacaagcaaaagcaaggaagttggcagaaagaaagtccaggtgatgt

SEQ ID NO: 609584 - DNA, 120 bp, Artificial Sequence
  ENSG00000175928_38 (sequence is synthesized)
aggttgaggtatttctttctttggcagtatcttgcttttgtgaatcactttattaaaaaaaatcactttcttcccattcttaaggggttttggcaaacagaatttcagatcttgaaacaa

SEQ ID NO: 609585 - DNA, 120 bp, Artificial Sequence
  ENSG00000175928_39 (sequence is synthesized)
atgagctgcaacagaaaaataagtacctgagctcgaggtatcccttcccaaagccttcacttattggtgagaaaaacctgggcccagggagggcttgcagcttacccagttcggactcct

SEQ ID NO: 609586 - DNA, 120 bp, Artificial Sequence
  ENSG00000175928_40 (sequence is synthesized)
gccagttcagcgctctgcactccattgattgttctaggcccggcagcctgttaggttcctgtgcagggcccctcttttgcagttctgaataacctctagtgcccctgcttcaaaaatgca

SEQ ID NO: 609587 - DNA, 120 bp, Artificial Sequence
  ENSG00000175928_41 (sequence is synthesized)
gtacatcctcaagttcccatttactcaggatacattttagcacagggcagatcagacggtgtctctactgttagtattgcaaagtatgtatgggaaacacagagaattggagctgcgttg

SEQ ID NO: 609588 - DNA, 120 bp, Artificial Sequence
  ENSG00000175928_42 (sequence is synthesized)
aatgcaaacttgaggtgtttcccttgaggaattcttgtcttcaaacgtctgcagagtaatggaccatgttacaactttcctgttcatctgtgaaccatgaaaatggatggcactgatgca

SEQ ID NO: 609589 - DNA, 120 bp, Artificial Sequence
  ENSG00000175928_43 (sequence is synthesized)
ttagaccctcagcagcctgcaattgcaaatctgcgaggtttcattcggcccataaagcaaacatttgaacttacacagaatgagcacttaaatacgggtgcaataaatgaagggaaaaac

SEQ ID NO: 609590 - DNA, 120 bp, Artificial Sequence
  ENSG00000175928_44 (sequence is synthesized)
ctcagccgtttctccattctgaagatatagcaagcaccgggaaatctaagatttttcatcaacaatatcttctgccagcccagtttggggggaaaaaccccttttacatttttcttcagt

SEQ ID NO: 609591 - DNA, 120 bp, Artificial Sequence
  ENSG00000175928_45 (sequence is synthesized)
aaagtactggaacttacttttccctgtctgtgctaatgagctgattttcagctgatagaaaacaaaatgatagagtacttttttccttggccaagtattttctcatttgtatttaatttc

SEQ ID NO: 609592 - DNA, 120 bp, Artificial Sequence
  ENSG00000175928_46 (sequence is synthesized)
ataaattagacagccagtgaaattagacctcaaactaggtcctgatggataatgaatgttatgtcacctttaacagtgaagtggttattataggtcactttctaatttcatattttccct

SEQ ID NO: 609593 - DNA, 120 bp, Artificial Sequence
  ENSG00000175928_47 (sequence is synthesized)
tttgctttctgctgccttcagggtatatagtgtatctctaacctgatttttcaaggttatttttggagcagtttcttaaaacaggcattccctaacttgctcatttaattaatgaaaaat

SEQ ID NO: 609594 - DNA, 120 bp, Artificial Sequence
  ENSG00000175928_48 (sequence is synthesized)
tgaactgatgccatggatataaaaacaaatgtaatgtttgattgtcagtgtttctgatttggcaaaaaggaatcatctctatttttttgcaaacaatatcaaagtgcatattttctctca

SEQ ID NO: 609595 - DNA, 120 bp, Artificial Sequence
  ENSG00000175928_49 (sequence is synthesized)
cttcggcccggatgccggatccaggagaaggggacctcgcttgccgtgtccaccgccgcggccccagcgccaagaacagagcctggccgtgagtgaacgactggccggggtacaaatggt

SEQ ID NO: 609596 - DNA, 120 bp, Artificial Sequence
  ENSG00000175928_50 (sequence is synthesized)
tctgaagcacttgaagctcacaggcaaaggctaagagtctaaatcccatcccgccctctaggcaaatgtcgggagttattaacaattttatcagttgattggttggttagcaagctatta

SEQ ID NO: 609597 - DNA, 120 bp, Artificial Sequence
  ENSG00000175928_51 (sequence is synthesized)
gaagcgaggaaagtttgccggcgagtgtcctttgtgctgcgtggagaggggtgtgggcggccgccgactcggcgcttccccgccgcccgcccagggagtccctgcctggcaagctggggc

SEQ ID NO: 609598 - DNA, 80 bp, Artificial Sequence
  ENSG00000175931_0 (sequence is synthesized)
gcagagcagttatggcggatcccgcagcccccacgcccgcagctcccgctccagcccaggccccggctccagccccggag

SEQ ID NO: 609599 - DNA, 120 bp, Artificial Sequence
  ENSG00000175931_1 (sequence is synthesized)
cgcccgcctcggactcggcctccgggccgtcctcggactccggcccagaagccggctcgcagcgcctgctgttttctcacgacctggtgtcgggccgttaccgtggctccgtgcacttcg

SEQ ID NO: 609600 - DNA, 120 bp, Artificial Sequence
  ENSG00000175931_2 (sequence is synthesized)
gcacttcgggctggtgcgcctcatccacggcgaggactcggactcggagggcgaggaggagggccgcgggagctcggggtgctccgaggccgggggcgcgggccacgaggagggccgggc

SEQ ID NO: 609601 - DNA, 120 bp, Artificial Sequence
  ENSG00000175931_3 (sequence is synthesized)
tgcgccgcggctacgtgcgcgtccagtggtacccggagggcgtcaagcagcatgtgaaggagaccaagctgaaactagaggaccgttctgtggtgccccgagatgtggtccggcacatgc

SEQ ID NO: 609602 - DNA, 120 bp, Artificial Sequence
  ENSG00000175931_4 (sequence is synthesized)
gatccaccgacagtcagtgtggcacggtgatcgacgtcaacatcgactgtgccgtcaagctcatcggcaccaactgcatcatctatcccgtcaacagcaaggacctgcagcacatctggc

SEQ ID NO: 609603 - DNA, 120 bp, Artificial Sequence
  ENSG00000175931_5 (sequence is synthesized)
ccttcatgtatggggactacattgcctatgactgctggctggggaaggtctacgacttgaagaaccagatcatcctgaagctatccaacggcgccaggtgctccatgaacacggaagatg

SEQ ID NO: 609604 - DNA, 120 bp, Artificial Sequence
  ENSG00000175931_6 (sequence is synthesized)
gcgccaagctctacgacgtctgcccgcacgtcagcgactcgggtctcttcttcgatgattcctatggcttctacccaggccaggtgctcattggccctgccaagatcttctccagcgtcc

SEQ ID NO: 609605 - DNA, 120 bp, Artificial Sequence
  ENSG00000175931_7 (sequence is synthesized)
agtggctgtcaggtgtcaagcccgtgctcagcaccaagagcaagttccgagtggtggtggaagaggtgcaggttgtagagttgaaagttacatggattaccaagagtttctgtccagggg

SEQ ID NO: 609606 - DNA, 120 bp, Artificial Sequence
  ENSG00000175931_8 (sequence is synthesized)
gcacggacagcgtcagccccccaccctctgtcatcacccaggaaaacctaggcagggtgaagcgtctcggatgctttgaccatgctcagcggcagcttggggagcgctgtctgtatgtct

SEQ ID NO: 609607 - DNA, 120 bp, Artificial Sequence
  ENSG00000175931_9 (sequence is synthesized)
tcccagccaaggtagagccagccaagattgcctgggaatgtccagaaaaaaactgcgcccagggggagggctctatggccaagaaggtgaagcgcctgttgaagaagcaggttgtgcgga

SEQ ID NO: 609608 - DNA, 120 bp, Artificial Sequence
  ENSG00000175931_10 (sequence is synthesized)
tcatgtcatgctccccagacacccagtgttcccgggaccattccatggaagacccagacaagaagggggaatccaaaaccaagagcgaagcggagtctgccagccctgaggagacgcccg

SEQ ID NO: 609609 - DNA, 120 bp, Artificial Sequence
  ENSG00000175931_11 (sequence is synthesized)
atggctctgccagtccagtggagatgcaggacgagggtgcagaggagccccacgaggcaggagagcagctgcccccattcctgctaaaagaaggcagagatgacaggctgcactcggcag

SEQ ID NO: 609610 - DNA, 120 bp, Artificial Sequence
  ENSG00000175931_12 (sequence is synthesized)
agcaggacgcagatgatgaggctgctgatgacacggacgacaccagttcggtgacctcctctgccagctccaccacttcctcccagagcggcagcggcacgagtcgcaaaaagagcatcc

SEQ ID NO: 609611 - DNA, 120 bp, Artificial Sequence
  ENSG00000175931_13 (sequence is synthesized)
ccttgtccatcaagaacttaaagcgcaaacacaagaggaagaagaataaaatcactcgagacttcaagccaggggacagggtggcagtggaggtggtgaccacgatgacctcagccgacg

SEQ ID NO: 609612 - DNA, 120 bp, Artificial Sequence
  ENSG00000175931_14 (sequence is synthesized)
tgatgtggcaggatggctccgtggaatgcaacatccgctccaacgacctcttccctgtgcaccacctggacaacaacgagttctgccctggagacttcgtggtagataagcgagtccaga

SEQ ID NO: 609613 - DNA, 120 bp, Artificial Sequence
  ENSG00000175931_15 (sequence is synthesized)
gctgtccagaccctgctgtctacggtgtggtacagtctggggaccacatcggccgtacctgcatggtgaagtggttcaagctgaggccgagtggggacgacgtggagctgattggagaag

SEQ ID NO: 609614 - DNA, 120 bp, Artificial Sequence
  ENSG00000175931_16 (sequence is synthesized)
aggaagatgtgagtgtttacgacattgctgaccaccctgactttaggttccgtacaactgacatcgtcatccgcatcggcaatactgaggatggggctcctcacaaggaggatgagccat

SEQ ID NO: 609615 - DNA, 120 bp, Artificial Sequence
  ENSG00000175931_17 (sequence is synthesized)
cggtgggccaggtggcccgtgtggacgtcagcagcaaggtggaggtggtgtgggctgacaactcaaagaccatcatcctgccccagcacttgtacaacatagagtctgagattgaggagt

SEQ ID NO: 609616 - DNA, 120 bp, Artificial Sequence
  ENSG00000175931_18 (sequence is synthesized)
cagactacgattcggtagaaggcagcaccagcggggcatcctcggatgaatgggaagatgatagtgacagctgggagacggacaatgggctggtggaggacgagcaccccaagatagagg

SEQ ID NO: 609617 - DNA, 120 bp, Artificial Sequence
  ENSG00000175931_19 (sequence is synthesized)
agccccccatcccacccctggagcagccggtggcccctgaggacaagggagtggtgatcagtgaagaggcagccacagctgccgtccagggggctgtggccatggctgcccccatggccg

SEQ ID NO: 609618 - DNA, 120 bp, Artificial Sequence
  ENSG00000175931_20 (sequence is synthesized)
ggctgatggagaaggctggcaaggacgggccacccaagagcttccgggagttgaaagaggccatcaagatcctggagagcctcaagaacatgactgtggagcagctgctgacgggctcgc

SEQ ID NO: 609619 - DNA, 120 bp, Artificial Sequence
  ENSG00000175931_21 (sequence is synthesized)
ccacctctccgactgtggagcctgagaagccaactcgggagaagaagtttctggatgacatcaagaagctacaggaaaacctcaagaagaccctggacaatgtggccattgtagaggagg

SEQ ID NO: 609620 - DNA, 120 bp, Artificial Sequence
  ENSG00000175931_22 (sequence is synthesized)
gtgccagcagtgtggcggcaagcctggcgtcaccttcaccagcgccaagggcgaggtcttctccgtactggagtttgcaccctcaaatcattcttttaagaaaattgagttccagcctcc

SEQ ID NO: 609621 - DNA, 120 bp, Artificial Sequence
  ENSG00000175931_23 (sequence is synthesized)
agaagccaagaagttcttcagcacagtgcggaaggagatggcgctgctggctacctcactgcctgagggcatcatggtcaagacttttgaagatagaatggacctcttctcagctctcat

SEQ ID NO: 609622 - DNA, 120 bp, Artificial Sequence
  ENSG00000175931_24 (sequence is synthesized)
caagggccccactcgaaccccctacgaggatggcctctacttgtttgacatccagctccccaacatctacccagccgtgcccccccacttctgctacctctcccaatgcagtggccgcct

SEQ ID NO: 609623 - DNA, 120 bp, Artificial Sequence
  ENSG00000175931_25 (sequence is synthesized)
gaaccccaacctgtatgacaatgggaaggtgtgtgtcagcctcctgggcacctggattggaaaggggacagagaggtggacaagcaagtccagccttctccaggtgctcatctccatcca

SEQ ID NO: 609624 - DNA, 120 bp, Artificial Sequence
  ENSG00000175931_26 (sequence is synthesized)
aggtctgatcctggtaaatgaaccatactacaacgaagccggcttcgacagtgaccgaggcctgcaggaaggctatgaaaacagtcgctgttacaatgagatggcgctgatccgcgtggt

SEQ ID NO: 609625 - DNA, 120 bp, Artificial Sequence
  ENSG00000175931_27 (sequence is synthesized)
gcagtccatgacccagctggtgcggcggccccccgaggtctttgagcaggagatcaggcaacactttagcactggtggctggcggctggtgaaccgtatcgagtcctggctggaaaccca

SEQ ID NO: 609626 - DNA, 120 bp, Artificial Sequence
  ENSG00000175931_28 (sequence is synthesized)
tgccctgctggagaaggcccaggcactgcccaacggggtgcccaaggccagcagctcgccagagcccccagctgtagccgagctgtcagactccggccaacaagaacctgaggatggagg

SEQ ID NO: 609627 - DNA, 120 bp, Artificial Sequence
  ENSG00000175931_29 (sequence is synthesized)
gccagccccaggagaggcctcccagggctcagactcagagggcggtgcccagggcctggcctcagctagcagggaccacacagaccagacttcggagaccgcaccagacgcatcggtgcc

SEQ ID NO: 609628 - DNA, 120 bp, Artificial Sequence
  ENSG00000175931_30 (sequence is synthesized)
acccagtgtgaaaccaaagaagcggagaaagagctaccggagcttcttacctgagaagagtggctaccctgacatcggcttccccctcttcccactttccaagggtttcatcaagagcat

SEQ ID NO: 609629 - DNA, 120 bp, Artificial Sequence
  ENSG00000175931_31 (sequence is synthesized)
ccggggtgtcctgacgcagttccgggctgccctgctagaggcaggcatgccggagtgcacagaggacaagtagctgccaggcacagaggaaagagcatcaccgtgggagaggccagccgc

SEQ ID NO: 609630 - DNA, 120 bp, Artificial Sequence
  ENSG00000175931_32 (sequence is synthesized)
cgcctgctcactcccccccggaatcacccctcttcccatgcccctctgtccccactgcaaacccactgccctcttctccccaaggtgagtttgatgctgaagtgcaagaagtgtgttgag

SEQ ID NO: 609631 - DNA, 120 bp, Artificial Sequence
  ENSG00000175931_33 (sequence is synthesized)
atgctgccgtttctattttgaagcgagctttcaacaggcgggtcccctgtggcaaagaaaatcggaaccctgttgccgattttccatttgtcaccccagcagaatgtccggcacttgctc

SEQ ID NO: 609632 - DNA, 120 bp, Artificial Sequence
  ENSG00000175931_34 (sequence is synthesized)
ccttgctgccccttctcaggtcagaggcgggtgttccagggcctgccgcggggctctctgggccggttccctgcagacccgcaggagagcacatgtgccttgcatgaagtgtgggttgcg

SEQ ID NO: 609633 - DNA, 120 bp, Artificial Sequence
  ENSG00000175931_35 (sequence is synthesized)
ccaacaattcccctggtccctttcaacctgtttagttcaactcaagcctccctgtgtcccagaccctcctgctgccaccaccacccaggtcctccctagtcctccagcgtcaacactatc

SEQ ID NO: 609634 - DNA, 120 bp, Artificial Sequence
  ENSG00000175931_36 (sequence is synthesized)
ccttgggagttgtagctgctgtcactgactcccggctatacatggcctgtcgaccacgttatagccctcaggcctgttgaacttgctctctaagagaggttgggaccaggctaggttccg

SEQ ID NO: 609635 - DNA, 120 bp, Artificial Sequence
  ENSG00000175931_37 (sequence is synthesized)
ggtgacgcccaggagaggtggtggccttcacacatgcacatggagttgaggaccagggagctgcagggaaagcaacagctataggtgccttgctcttctgtcggaggctgctgggggcaa

SEQ ID NO: 609636 - DNA, 120 bp, Artificial Sequence
  ENSG00000175931_38 (sequence is synthesized)
gagcagctgcacaaggccagggcaagtgctagggcccctcccccatcacatggtcacactgggacaggcgtgcagctcactgaactccaagcgagccagccctctcttggactagaaggc

SEQ ID NO: 609637 - DNA, 120 bp, Artificial Sequence
  ENSG00000175931_39 (sequence is synthesized)
ctactgtcagcccttcgcttacaaactgcaggctcaatccgaaggggacggccggcgggggctctcctagtgcccagagacaggcccagaggtttacaagttttctaagcttttgataat

SEQ ID NO: 609638 - DNA, 120 bp, Artificial Sequence
  ENSG00000175931_40 (sequence is synthesized)
gtgaagctccaggccgagaggatgctgttgagcacattgcagctatgtaatttttggtgtatgtatgtaatatttaaggttggaaaaaaaactcaaaagcaaagatattaactcttatta

SEQ ID NO: 609639 - DNA, 120 bp, Artificial Sequence
  ENSG00000175931_41 (sequence is synthesized)
gaaaaaaagacaaaaaaaaagccaaagcatgatgcgtcttgtcagccttaagtgggctccacacctgtgctgtgctgtgaccgcccagccagcagagctgcgggaggatggagccggacc

SEQ ID NO: 609640 - DNA, 120 bp, Artificial Sequence
  ENSG00000175931_42 (sequence is synthesized)
acacaccgtggcatttggaaccgagtcggtatcttgtttgagaaacacccggagtgactggtggggctgtgcttcccagtgcattgtacatgtggagatgtgaatgcctactgcttacga

SEQ ID NO: 609641 - DNA, 75 bp, Artificial Sequence
  ENSG00000175931_43 (sequence is synthesized)
gcattgtacatgtggagatgtgaatgcctactgcttacgatatctgtataaagtgctgtgtgattaaaccattag

SEQ ID NO: 609642 - DNA, 120 bp, Artificial Sequence
  ENSG00000175931_44 (sequence is synthesized)
acctggacccagctaaacagagcggtttcctagaaaaggggcgggtgcgcgccagagggtctaaaagtttgggtataggcagaaagtattagaacttttttttttttttttttttttgag

SEQ ID NO: 609643 - DNA, 120 bp, Artificial Sequence
  ENSG00000175931_45 (sequence is synthesized)
ctgtttgtgtcaccagatctgggtgcagggtggttagtcccctcgccagaccccagctactgccccagggcaaaccatttccctgtgtggtcacagtgctgaggccagcagcggcgagtg

SEQ ID NO: 609644 - DNA, 120 bp, Artificial Sequence
  ENSG00000175931_46 (sequence is synthesized)
ggaagtctgtgggtgtgctcacctgtccagccaggttggcagatggagctccagggcctctccatgagggactgactattctcttcccccctctagcaaatcattcttttaagaaaattg

SEQ ID NO: 609645 - DNA, 120 bp, Artificial Sequence
  ENSG00000175931_47 (sequence is synthesized)
ggcttggcatgggcaggtgcagatgtgctgtgtgggcacccagtgcccaagaggccaccaaccttgggtccccaaacctccggggctgactggcacctgcgaggacactcacccacccac

SEQ ID NO: 609646 - DNA, 120 bp, Artificial Sequence
  ENSG00000175931_48 (sequence is synthesized)
cttttacaggggcggtcacaggctcagtcaggtgagggctgactcagccgtgtgtccaggccagatggttctttctttcctccctcctttaaaaaattactttctcggccgggcgcagtg

SEQ ID NO: 609647 - DNA, 120 bp, Artificial Sequence
  ENSG00000175938_0 (sequence is synthesized)
agttcctgttttggcctccgctgtcccgctccggctcctggggctccccgcagacgctgcttttcttgctccactgggggtgcctcttcctgggcgcccgccgcctgcatcctgctcgtc

SEQ ID NO: 609648 - DNA, 80 bp, Artificial Sequence
  ENSG00000175938_1 (sequence is synthesized)
ctgtctgggaatggggccgcccccgggcttgggccggcccggctggggcccccgaggcgcttccgccccgtagtgaccgc

SEQ ID NO: 609649 - DNA, 120 bp, Artificial Sequence
  ENSG00000175938_2 (sequence is synthesized)
gacgcgggcgagcaggccccgctgaaccctgagggcgagagccctgcaggctcggccacgtaccgggagttcgtgcaccgcggctacctggacctcatgggggccagtcagcactcgctg

SEQ ID NO: 609650 - DNA, 120 bp, Artificial Sequence
  ENSG00000175938_3 (sequence is synthesized)
cgggcgctcagctggcgccgcctctacctcagccgggccaagctcaaagcttccagccgcacgtctgccttgctctcgggcttcgccatggtggccatggtggaggtgcagctggagagt

SEQ ID NO: 609651 - DNA, 120 bp, Artificial Sequence
  ENSG00000175938_4 (sequence is synthesized)
gaccacgagtacccaccaggcctgctggtggccttcagtgcctgcaccaccgtgctggtggctgtgcacctctttgcactcatggtctccacgtgtctgctgccccacattgaagctgtg

SEQ ID NO: 609652 - DNA, 120 bp, Artificial Sequence
  ENSG00000175938_5 (sequence is synthesized)
agcaacatccacaacctcaactctgtccaccagtcgccacaccagagactgcaccgctacgtggagctggcctggggcttctccactgccctgggcacctttctcttccttgctgaagtt

SEQ ID NO: 609653 - DNA, 120 bp, Artificial Sequence
  ENSG00000175938_6 (sequence is synthesized)
gtcctggttggttgggtcaagtttgtgcccattggggctcccttggacacaccgacccccatggtgcccacatcccgggtgcccgggactctggcaccagtggctacctcccttagtcca

SEQ ID NO: 609654 - DNA, 120 bp, Artificial Sequence
  ENSG00000175938_7 (sequence is synthesized)
gcttccaatctcccacggtcctctgcgtctgcagcaccgtcccaagctgagccagcctgcccaccccggcaagcctgtggtggtggtggggcccatgggccaggctggcaagcagccatg

SEQ ID NO: 609655 - DNA, 120 bp, Artificial Sequence
  ENSG00000175938_8 (sequence is synthesized)
gcctccacagccatcatggtacccgtggggctcgtgtttgtggcctttgccctgcatttctaccgctccttggtggcacacaagacagaccgctacaagcaggaactagaggaactgaat

SEQ ID NO: 609656 - DNA, 120 bp, Artificial Sequence
  ENSG00000175938_9 (sequence is synthesized)
accgctcactgcaagcactgcctccctccggggtctgtaagaggccgcaggggcctacagacctcatccccccatcccctggctggagccacttccagtggccactctcaggcagagttc

SEQ ID NO: 609657 - DNA, 120 bp, Artificial Sequence
  ENSG00000175938_10 (sequence is synthesized)
agattcctgcccgcagggtcctctgggctgggccttggggcagctcccacattcccagggattttccccatcagtctgtcccttgggttttgcaagctactctgcacctgggctggcctc

SEQ ID NO: 609658 - DNA, 120 bp, Artificial Sequence
  ENSG00000175938_11 (sequence is synthesized)
agttgaaggatcatgcagtagatagaggggaggcagggagagcttgtgggaccttcagtgctgactttagccaccatttccattcctatacaggatgtgaaggtcagaaggcagccaatt

SEQ ID NO: 609659 - DNA, 120 bp, Artificial Sequence
  ENSG00000175938_12 (sequence is synthesized)
gttggtttaatttttttttttttttgagacagtctgtttcccaggctggagtgtagtgatacagtcacagctcactgtagcctcgaccttccaggctcaaaagatgctcccaccacagcc

SEQ ID NO: 609660 - DNA, 120 bp, Artificial Sequence
  ENSG00000175938_13 (sequence is synthesized)
cccaccacagcctcccaggtagtgagtagctggtactacaggtgtgtgctgccacacccgactaatttttttgtagagacggggtttcgctgttcccaggctggtctcaaactcctgggc

SEQ ID NO: 609661 - DNA, 120 bp, Artificial Sequence
  ENSG00000175938_14 (sequence is synthesized)
cctcggcctcccaaagtgctgggattcctttctttatttctgtagaatctattttatggttggcattttgggggaagatttcgatgggttccacattcttgctttagttgttgtagaggg

SEQ ID NO: 609662 - DNA, 120 bp, Artificial Sequence
  ENSG00000175938_15 (sequence is synthesized)
agggatttgggtgtttctacccaaggcattggtctagcttttcctacaatgaacctatctttggaggttcaagctccccaccttcccccactgtggtgacctgtggccacttgcagaagg

SEQ ID NO: 609663 - DNA, 120 bp, Artificial Sequence
  ENSG00000175938_16 (sequence is synthesized)
gatggtgcctgacccactgccctagccccacgctatgcaccaaacttgttctccccgtcctggtccagggctggggtctttagagactgacagcctctgccccaggcctgagtccttagc

SEQ ID NO: 609664 - DNA, 120 bp, Artificial Sequence
  ENSG00000175938_17 (sequence is synthesized)
aagggttgggtaaggaggttttaagggagaaggtccagtccttagcccttgaaatacaaagctcttctgacactgaatttggatgcaccttgttttatataataaatcgtgtttcacaga

SEQ ID NO: 609665 - DNA, 120 bp, Artificial Sequence
  ENSG00000175938_18 (sequence is synthesized)
aggctgaagatcttgcccaaaaccacacagctagtccatgaaactgaacttggactatctacccctcacacgggaatctctctttgatttgagaaaaggaaccagtgcctttcaactgga

SEQ ID NO: 609666 - DNA, 120 bp, Artificial Sequence
  ENSG00000175938_19 (sequence is synthesized)
acagaaaggaatctgatctcaacacctatgcctccacgtaaattatttttttcagccttatttccctcaaaattgtagagtcctaatcttcttctatcttgtggtgtgagaccttggata

SEQ ID NO: 609667 - DNA, 120 bp, Artificial Sequence
  ENSG00000175938_20 (sequence is synthesized)
agtggggtgaacaaatcgctggtggggttgactgcaacagtgaggcagagtggtccagatggagcctgtacctggcagaagtggttcctaagtcccagtgccagcttcaaaggcaggtgg

SEQ ID NO: 609668 - DNA, 120 bp, Artificial Sequence
  ENSG00000175946_0 (sequence is synthesized)
ggggcttccttccctctttgtaggatggacgaggagtcactagatgggctgctcttcaaagaccacgacttctcttctgacttgttgaggcagctcaacagcttaaggcaaagcaggatc

SEQ ID NO: 609669 - DNA, 120 bp, Artificial Sequence
  ENSG00000175946_1 (sequence is synthesized)
ctgactgatgtgagcatctgtgccggtgcccgggagatcccctgccaccgcaacgtgctggcctccagcagcccctacttcagggctatgttctgcagcagcttccgggagaagagtgaa

SEQ ID NO: 609670 - DNA, 120 bp, Artificial Sequence
  ENSG00000175946_2 (sequence is synthesized)
gccaaagtgcagctgaaaggcattgaccccccaaccctggaccagatcgtctcctacgtgtatacgggggaggcacatattgccactgacaatgtcctccccgtgatggaggccgcctcc

SEQ ID NO: 609671 - DNA, 120 bp, Artificial Sequence
  ENSG00000175946_3 (sequence is synthesized)
atgctacagttccccaagctgtttgaggcctgctcctcgtacttgcagagccagttggcccccagcaactgcctgggtatgatcagactctcagaaatcttaagctgcgagaccctcaag

SEQ ID NO: 609672 - DNA, 120 bp, Artificial Sequence
  ENSG00000175946_4 (sequence is synthesized)
aagaaagccagggaggtggcactgacgtccttcccagaggtggccgcatcggccgacctgaaggagctctgtgccttggagttgagggactatctcggagatgatgggctctgtggggag

SEQ ID NO: 609673 - DNA, 120 bp, Artificial Sequence
  ENSG00000175946_5 (sequence is synthesized)
gaggaaaaggtgtttgaggccctcatggtttggatcaagcatgacctccaggcccggaagcgatacatgcaggaactgttcaagcaggtcaggctgcagtacatccacccagccttcttt

SEQ ID NO: 609674 - DNA, 120 bp, Artificial Sequence
  ENSG00000175946_6 (sequence is synthesized)
caccacttcatcgccaacgatgccctcctgcagtcctcgcctgcatgccagatcatcttggagaccgccaagagacagatgttctctttgtgtggcaccaccgtcccagactgcaaactc

SEQ ID NO: 609675 - DNA, 120 bp, Artificial Sequence
  ENSG00000175946_7 (sequence is synthesized)
ctgttgcatgtccctccaagaaactcttaccaagatttcctcatcctcttgggcggaaggaaggacagccagcagaccaccagggacgtcctactgtacagcaaacagaccggccaatgg

SEQ ID NO: 609676 - DNA, 120 bp, Artificial Sequence
  ENSG00000175946_8 (sequence is synthesized)
catctatgtgctggggggcatggctgtcagctcagggaggagtctggtcagtcacaatgtctacatcttctccctgaaactcaatcagtggaggctgggggagcccatgctggtggcccg

SEQ ID NO: 609677 - DNA, 120 bp, Artificial Sequence
  ENSG00000175946_9 (sequence is synthesized)
ctactcccacagaagcactgcccataagaacttcatcttctccatcggggggattggagaagggcaggagctcatgggctccatggaaaggtatgacagcatctgcaatgtctgggagag

SEQ ID NO: 609678 - DNA, 120 bp, Artificial Sequence
  ENSG00000175946_10 (sequence is synthesized)
tatggccagcatgcccgtgggggtgctccaccccgcagtcgctgtgaaagaccaaagactctatctctttggaggagaggacatcatgcagaaccctgtgcgccttatccaggtttatca

SEQ ID NO: 609679 - DNA, 120 bp, Artificial Sequence
  ENSG00000175946_11 (sequence is synthesized)
catttccagaaactcgtggttcaaaatggagacaagaatgatcaagaacgtgtgtgcccctgcagtggtgcttggggagcggattgtcattgtgggaggttacacaaggaggattcttgc

SEQ ID NO: 609680 - DNA, 120 bp, Artificial Sequence
  ENSG00000175946_12 (sequence is synthesized)
ttatgaccctcaatccaacaaatttgtcaaatgtgcggacatgaaagaccggaggatgcaccatggggccacagtgatgggaaacaaactctacgtgacgggcgggcggcggctgaccac

SEQ ID NO: 609681 - DNA, 120 bp, Artificial Sequence
  ENSG00000175946_13 (sequence is synthesized)
ggactgcaacattgaggactccgcctccttcgattgctacgaccccgagacggacacctggacatcccagggacagctgccgcacaagctctttgaccatgcctgcctcactctccagtg

SEQ ID NO: 609682 - DNA, 120 bp, Artificial Sequence
  ENSG00000175946_14 (sequence is synthesized)
cataccccgcacgtctggcctcccatgaggtcgacaagaaaccttctgccctagtcaaaatgccttctgtcgccagggacacaaacccagctccaaagggcttaacccttaaaggctgca

SEQ ID NO: 609683 - DNA, 120 bp, Artificial Sequence
  ENSG00000175946_15 (sequence is synthesized)
gggagagctcacaagactgaggtaccagagtcgggaggcctggaactaggcattgcattgccagaactctctctctccttctctgcctctctccttatctctctcccccacctccatctg

SEQ ID NO: 609684 - DNA, 120 bp, Artificial Sequence
  ENSG00000175970_0 (sequence is synthesized)
atcttggcggcggagcgatgagcgggtctaacccgaaggctgcggccgcggcgtcggcggctgggcccggggggctggtggctggcaaggaggagaagaagaaggcgggcggcggcgtcc

SEQ ID NO: 609685 - DNA, 120 bp, Artificial Sequence
  ENSG00000175970_1 (sequence is synthesized)
tgaaccgcctgaaggcgcggcggcaggcgccccaccacgcggccgacgacggcgtcggggcagcggtcacggagcaggagctgctggcgctggacaccatccggcccgagcacgtcctgc

SEQ ID NO: 609686 - DNA, 120 bp, Artificial Sequence
  ENSG00000175970_2 (sequence is synthesized)
gcctcagccgggtcaccgagaattatttatgtaaacccgaagacaacatctacagtattgatttcacccgcttcaaaattcgagatttggagacagggacagtactttttgagattgcca

SEQ ID NO: 609687 - DNA, 120 bp, Artificial Sequence
  ENSG00000175970_3 (sequence is synthesized)
aaccttgcgtttcagaccaggaggaggatgaggaggagggaggtggagacgtggacatcagcgcaggacgttttgtccgctatcagttcacaccggcatttctccgcctccggacagtcg

SEQ ID NO: 609688 - DNA, 120 bp, Artificial Sequence
  ENSG00000175970_4 (sequence is synthesized)
gggctacggtggagttcacagtgggagacaaacctgtttcaaacttccggatgatcgaacggcactatttccgggaacacttgctgaaaaactttgactttgattttggcttctgcatcc

SEQ ID NO: 609689 - DNA, 120 bp, Artificial Sequence
  ENSG00000175970_5 (sequence is synthesized)
ccagcagtaggaacacttgtgaacatatctatgagtttccccagctttcggaggatgtcattcgtctaatgattgaaaatccttacgagacccgctctgacagcttctactttgttgaca

SEQ ID NO: 609690 - DNA, 120 bp, Artificial Sequence
  ENSG00000175970_6 (sequence is synthesized)
acaagctgataatgcacaacaaggctgattatgcctataatggaggccagtaagtgctgcaagagtagataggggaggtgctttgccgcggccacaagatcctggcacacggagatgatc

SEQ ID NO: 609691 - DNA, 120 bp, Artificial Sequence
  ENSG00000175970_7 (sequence is synthesized)
gaagctgcagtttgtcaacacacatctggaacctggccccaggaagccaaggctggggtggcagtttcctgcgcgccaaaggagctgccaaacagtgctgtgttttcttccccagtattt

SEQ ID NO: 609692 - DNA, 120 bp, Artificial Sequence
  ENSG00000175970_8 (sequence is synthesized)
tttcttccctttttttcctgccccgtaggttgcagaggtactatagtaaagtaaaaggttaggataagggtcctggaatccagataaaaaagtttattttccgtagttctggctgcctgt

SEQ ID NO: 609693 - DNA, 120 bp, Artificial Sequence
  ENSG00000175970_9 (sequence is synthesized)
tggttgtcttgacgaccaggcatagctgtgcctggtgagaaggctctggccaggcccaccagcaggtcagcagctcttaaggttcctgggtgctgtgggaagctgaaaggtaggcctctt

SEQ ID NO: 609694 - DNA, 120 bp, Artificial Sequence
  ENSG00000175970_10 (sequence is synthesized)
ccaggtagctcctcctctcacctccggcattgccatcagcgcagtctgccctcggtctgtgtgaagtcttaaaccaactggaagacacttgaaagggtggggagggagggaggtgccaag

SEQ ID NO: 609695 - DNA, 120 bp, Artificial Sequence
  ENSG00000175970_11 (sequence is synthesized)
agtggaggcaccaaggaatgggtgatgctgccaagctgaagggtctgctttgtggagaggctgctgctctgtctgacttccagggtctcagccagccctcctgggaatagaccaagtttt

SEQ ID NO: 609696 - DNA, 120 bp, Artificial Sequence
  ENSG00000175970_12 (sequence is synthesized)
cagcctggcagtgccttctgttcccattttggaggacagacaagcttgctccacatctcctggctcctcccttctgagtctcatgaaatagaatgagtcagctctgctcatggaacagta

SEQ ID NO: 609697 - DNA, 120 bp, Artificial Sequence
  ENSG00000175970_13 (sequence is synthesized)
gtatctcttgaggccagagcaggtcttgtattttgtttttttatttccagacttctttcggggaggttttataaaatgacagtggtgttcccagcatatgtgatatgtggttagacttct

SEQ ID NO: 609698 - DNA, 120 bp, Artificial Sequence
  ENSG00000175970_14 (sequence is synthesized)
gatagtatcagcttccaggggctaatctggcttatgttgggaggatatgcttacgaatcagcagcagctttctaaaggagagatttgacttttctctgcactgcacagcctggaggattg

SEQ ID NO: 609699 - DNA, 120 bp, Artificial Sequence
  ENSG00000175970_15 (sequence is synthesized)
gcttttgatggggatttgcctccgaagctctttgtacatttcttgtttaggagggttttcctatctacctttctactgaagtagtttctggaactttcctggtggatcagagttacgtaa

SEQ ID NO: 609700 - DNA, 120 bp, Artificial Sequence
  ENSG00000175970_16 (sequence is synthesized)
tgcagtctgagccttcagactgctagttagaattgttttaggtgttcagaaagggcaaaataggctgatgtggcctgtcagagtgatgtgttctcaaaaaagttcacttgcacatctgtg

SEQ ID NO: 609701 - DNA, 120 bp, Artificial Sequence
  ENSG00000175970_17 (sequence is synthesized)
ggctgcttttgtcctcagacccttagtggacagactccacaaaccctctgatgagacgattgatgtggccagggtccagttagcatcagtagaaggatgtcactaggaaaggcccaggta

SEQ ID NO: 609702 - DNA, 120 bp, Artificial Sequence
  ENSG00000175970_18 (sequence is synthesized)
ggagaaaggccgtatgggggccagggatggaagagacagtgtgtggccacagaaattcctgtccatccaccaccagtgctgctccctgtgtgggctttagggcgagtggccccgaacctt

SEQ ID NO: 609703 - DNA, 120 bp, Artificial Sequence
  ENSG00000175970_19 (sequence is synthesized)
ggcccagtgctttgtcccaggccagagtcttggcaatgccacatgctggcagctttctcactgagaaggtcctagcttacccctgtgtgctggccttggattcagccccgagagagggga

SEQ ID NO: 609704 - DNA, 120 bp, Artificial Sequence
  ENSG00000175970_20 (sequence is synthesized)
gagaccattcctcctgtggagtgggttccttatcaccagaccggccactctcagaactggcgtccactgtaaatccaggtgccttacgtgtggctctgtcccttatgctgcaggggaaag

SEQ ID NO: 609705 - DNA, 120 bp, Artificial Sequence
  ENSG00000175970_21 (sequence is synthesized)
ctgcattgccattgttcccacctcctcactggcagaaagatgccagggctgttagcactgtctcctcaccttctgtttctcattgtggctcctcaaatgggatttgcatgttcctgtcaa

SEQ ID NO: 609706 - DNA, 120 bp, Artificial Sequence
  ENSG00000175970_22 (sequence is synthesized)
gcgtaacaacaatcccttctctctttgacagaggcccaggtgggacagtttctactatttgatatttgagtattatctgggatgtggttctggagctgcccagagctgtgcttagtagag

SEQ ID NO: 609707 - DNA, 120 bp, Artificial Sequence
  ENSG00000175970_23 (sequence is synthesized)
tgtgtcttggaaacatgcccctgggcacactgtatctgctacattagtgggctatctcttatctgcagtgttcgcttttgctagaaagaggatgtggaggaaggaggaggtgggcaatct

SEQ ID NO: 609708 - DNA, 120 bp, Artificial Sequence
  ENSG00000175970_24 (sequence is synthesized)
ggcttgagttgtgctgtatcctcttccttgttagcttgccttagtctcactggagaccatttgcggatagtgcttggtccatgcccagcaggacagggctttgctgcttctgaaagtctg

SEQ ID NO: 609709 - DNA, 120 bp, Artificial Sequence
  ENSG00000175970_25 (sequence is synthesized)
gtgttctgtatctggggctgtgggttcctgtgtctagctgctcaggaaatcttgagaagcattccactctggggtgtaaaccagtatgagtttgaaattcaagcgtttgtacctgagttg

SEQ ID NO: 609710 - DNA, 120 bp, Artificial Sequence
  ENSG00000175970_26 (sequence is synthesized)
gggagagaattgcaaggcatactttctctgaaagtaacagaaccattcaggctgccatgttattaaggaatctgaactgttgatagcagttaccttgtgggtgatacaatgggaggcggc

SEQ ID NO: 609711 - DNA, 120 bp, Artificial Sequence
  ENSG00000175970_27 (sequence is synthesized)
aaaaaaactacctgcataggagaccctgccctttgtcaagagctgggagcacatttcatcagagtagcaggcccacctggtgccagagggcctgcccctcctgcttctgttcctttgcct

SEQ ID NO: 609712 - DNA, 120 bp, Artificial Sequence
  ENSG00000175970_28 (sequence is synthesized)
tgcagtctcctggagagagcctctcttttcctgtacagcctttgggccaaaatgcccttctagcttctccaaagaagatccgagtttatttcattctatgttttaagaggtaaaaggaca

SEQ ID NO: 609713 - DNA, 120 bp, Artificial Sequence
  ENSG00000175970_29 (sequence is synthesized)
taacaagtgaaagaagttttgggctaaagtaggctatgtctccttatgtattactcaatactgttttgcagagaaaacatttttcaagcatgtgcttcctgaagacacctcagtctttgg

SEQ ID NO: 609714 - DNA, 120 bp, Artificial Sequence
  ENSG00000175970_30 (sequence is synthesized)
gccatttgatttccaatacatagggtggaagaatgtgattttggggctgaccataaactggaaatttgtgaaatggcagtgattgggcaatcttcagtttattttttcagttgaagtgga

SEQ ID NO: 609715 - DNA, 120 bp, Artificial Sequence
  ENSG00000175970_31 (sequence is synthesized)
actcatttctggaatggatttaataggctgtgtctaatgtacaaactgggtgagtcctgccttagtgtgtcctgccccaccggtacgcttccaggatactcttttcccctctgtaaagtc

SEQ ID NO: 609716 - DNA, 120 bp, Artificial Sequence
  ENSG00000175970_32 (sequence is synthesized)
actttcttctgatggccagtgtcactatgatgtcagtgaggtctggggatgaggacagtgtgtcctgaaattcacaggactgactcctcaccccagtgcacgaggattcctgtggcatca

SEQ ID NO: 609717 - DNA, 120 bp, Artificial Sequence
  ENSG00000175970_33 (sequence is synthesized)
ggtgctgctgtacctggtgtaggagcctaatcattgaaccattgtgttactcacattccatgtcacagaacatatcagcctcaagaaggatttggtggaggtggatttaccactggtttt

SEQ ID NO: 609718 - DNA, 120 bp, Artificial Sequence
  ENSG00000175970_34 (sequence is synthesized)
acaaaggaccgtgtaaagtcattgaagttgtgaaagtctattttttttcctgtaaatctattttttacagaatataagaaacatcaatgacctgatctgtccttcctcctccttcccgct

SEQ ID NO: 609719 - DNA, 120 bp, Artificial Sequence
  ENSG00000175970_35 (sequence is synthesized)
tcccccaaaatcacattccagtttttattgtctttgtgtccaaagtaaactaggtgacttatttgtataaaatgttattttgccacatgagacagtaataaaagaaagattttcacagta

SEQ ID NO: 609720 - DNA, 120 bp, Artificial Sequence
  ENSG00000175970_36 (sequence is synthesized)
actcctggcgtgcagtctcctaaccctgtggcagcagcaacattccctggatggatcgaaggctgccatggtgtctgctgagctgctatagcaggcagcccagggctgttcagattattt

SEQ ID NO: 609721 - DNA, 120 bp, Artificial Sequence
  ENSG00000175970_37 (sequence is synthesized)
agcacgtcctgcgcctcagccgggtcaccgagagtgagtgccgcgcgggccgcgccctcccctcgcgccgtgccccggctcccggagccttcagcggacccggccacttgaccagcgcgg

SEQ ID NO: 609722 - DNA, 120 bp, Artificial Sequence
  ENSG00000175970_38 (sequence is synthesized)
cccgccacgctcacgtagctctggtggggaaggactctcctgggctggaccgcattcctgtgagtccggccacgctaggatgcccttcggccggtcggctccccagctctgccggacctg

SEQ ID NO: 609723 - DNA, 120 bp, Artificial Sequence
  ENSG00000175970_39 (sequence is synthesized)
tttgggtagagggccccgttcagctgaactggatcctcctgagccggccgggggccgaggtcccctaataaatgggcccctgggccctcagcctggaacccccggccatcagtgaagttc

SEQ ID NO: 609724 - DNA, 120 bp, Artificial Sequence
  ENSG00000175970_40 (sequence is synthesized)
ccgctcagccaggctcccccagccctctggcaggccagaagccttacctgcttcctccgccctggccccatggcagccctcccccattgcagcctgcccggcctccctccctctttgggt

SEQ ID NO: 609725 - DNA, 120 bp, Artificial Sequence
  ENSG00000175970_41 (sequence is synthesized)
cgggagcgttgccccttagtgtgcagatgggttcttcctcaaaacacatagccgtggcatttcctgctcatttaaaactgtgccacattaaaacaaaaataaagtttcagtttgtgtaca

SEQ ID NO: 609726 - DNA, 120 bp, Artificial Sequence
  ENSG00000175984_0 (sequence is synthesized)
ggggctagggggtggggctgcagccgggacggggccttcggcagggcctgcgggggcgggacggagcggacccgagtgatacccgggagactagcttggccacaggagacaacgttgagg

SEQ ID NO: 609727 - DNA, 120 bp, Artificial Sequence
  ENSG00000175984_1 (sequence is synthesized)
tacagacaggattattcaagatcaggttgtagccattttcaacaaggatcactgatcaaaattttctttttacaaagagatttacaagttaaacatgaagggaaaatactggaatcattt

SEQ ID NO: 609728 - DNA, 120 bp, Artificial Sequence
  ENSG00000175984_2 (sequence is synthesized)
ggattctgacaggataaagaatacaatatttcacatttacttgtaatggaacctttgtaagattcatcacttgtcattcacccagttgggaacatggatgttggtttttctcgtactact

SEQ ID NO: 609729 - DNA, 120 bp, Artificial Sequence
  ENSG00000175984_3 (sequence is synthesized)
gttcagacactgtcaagaagccactgcaaaaacatcaaacaaaaaatttctcaatgggaaggaagggctaatggtatatctaatccagaaaagtggtgtccaaaggactttggagtgaga

SEQ ID NO: 609730 - DNA, 120 bp, Artificial Sequence
  ENSG00000175984_4 (sequence is synthesized)
tataactgtcaccaagagatccgtcttaagaaaaatcctatagctgagagaaagagcaaaaacttggatgtaaccagccgtgaaaatgtgggtctagatataaatgaaaataccaaaagc

SEQ ID NO: 609731 - DNA, 120 bp, Artificial Sequence
  ENSG00000175984_5 (sequence is synthesized)
catgatcaaagtgagaatgaaaataagaaacatgaatatgacgatacacacttctttaaaaatgaatcagaatccaactgggtatgttctcgggtcaaagaaattgaaagctgtaaagaa

SEQ ID NO: 609732 - DNA, 120 bp, Artificial Sequence
  ENSG00000175984_6 (sequence is synthesized)
gatgtcttagatccagagacttcattacctccaggaaacttctatacctcacaaatactgtggaagaaaatagaagcacttcccccagataaactcttaaatttggctttagaacattgt

SEQ ID NO: 609733 - DNA, 120 bp, Artificial Sequence
  ENSG00000175984_7 (sequence is synthesized)
gactcttcagaaaaagaactgaacttcagagttctggatagttcatacggaataaccaagagcttagaaaatatttactctgaacctgaggggcaagaatgtggaccttccataaatcct

SEQ ID NO: 609734 - DNA, 120 bp, Artificial Sequence
  ENSG00000175984_8 (sequence is synthesized)
ttgccaaaacctcgtaggacattcagatatttatccgaatctggtgttacgccgtataaagaaagaaactgtgacaaaaaatactgtgaaaataactcttgtgcacaatcttctttggcc

SEQ ID NO: 609735 - DNA, 120 bp, Artificial Sequence
  ENSG00000175984_9 (sequence is synthesized)
tcttctcaggaacctgaaccaaagaaatatggtggaaaaatcagaggaagatctaaaaggaaatcctttgaatttgaggatattcagcactttcgaaatcggaactcacagacgattcgt

SEQ ID NO: 609736 - DNA, 120 bp, Artificial Sequence
  ENSG00000175984_10 (sequence is synthesized)
gaagaacttggaagaaattctgggtcagcactttattacacacagtctgaggacaatatctatgaagatatcatatatcccaccaaagaaaatccatatgaagatattccagtgcagcct

SEQ ID NO: 609737 - DNA, 120 bp, Artificial Sequence
  ENSG00000175984_11 (sequence is synthesized)
ttacctatgtggagatccccttcagcatggaagctaccacccgctaaaagtgcttttaaagcacccaagcttgtattgaaaatagatgacatatttgaatctaaaagagggaagaagaag

SEQ ID NO: 609738 - DNA, 120 bp, Artificial Sequence
  ENSG00000175984_12 (sequence is synthesized)
gtaaagttacattcttacactggaaaggaattacctccgacaaaaggtgaaaccagtgggaacgaaagtgatgccgagtatctgccaaagaatcgccataaacgcttagcacaactgcaa

SEQ ID NO: 609739 - DNA, 120 bp, Artificial Sequence
  ENSG00000175984_13 (sequence is synthesized)
ccgtcttccaagaggaatcctcactaccagaccttggagcgggatcttattgaattacaggagcagcagctgtttgaactttttgtggtggtgtctctacagaagaaaccatcaggaata

SEQ ID NO: 609740 - DNA, 120 bp, Artificial Sequence
  ENSG00000175984_14 (sequence is synthesized)
agctatattccccaggtcatacaacaattccctggcaaggatgatcatggctataagcagtccaaagacatggaagagagacttaaagttattccaaaattttgttttcctgattcaaag

SEQ ID NO: 609741 - DNA, 120 bp, Artificial Sequence
  ENSG00000175984_15 (sequence is synthesized)
gactggatgccaacctcagaactcaagagtgaaacattctcctttgtcttgactggtgaagatggaagccggtggtttggttactgtaagaagctcttgccagtaggcaaaggaaagcga

SEQ ID NO: 609742 - DNA, 120 bp, Artificial Sequence
  ENSG00000175984_16 (sequence is synthesized)
ctccctgaggtatactgcatggttagtcgcctaggctgcttcaatcttttttcaaagattctggatgaagtagagaagagaagagaaatgtctccagcccttgtttacccattcatgcga

SEQ ID NO: 609743 - DNA, 120 bp, Artificial Sequence
  ENSG00000175984_17 (sequence is synthesized)
agtgtcatggaagctcctttcccagctcctggacgcaccatcacagttaagagttacctccctggggctggagatgagtccattgaactctgccgaccactagattcccgattggaacat

SEQ ID NO: 609744 - DNA, 120 bp, Artificial Sequence
  ENSG00000175984_18 (sequence is synthesized)
gttgattttaaatgtctctttaagtgcctgagtgtgtgtcatctcatccgggtctgtgcctctctccttttggagcgtagggtaatctttgttgccaacagcctaagcaccctgtcaaaa

SEQ ID NO: 609745 - DNA, 120 bp, Artificial Sequence
  ENSG00000175984_19 (sequence is synthesized)
tgtggccatgctgtggtagctacactgtatccgttcacctggcagcatacctatatcccagtcctgccagcatctatgattgacatcgtgtgctcacctacaccattccttattggaatc

SEQ ID NO: 609746 - DNA, 120 bp, Artificial Sequence
  ENSG00000175984_20 (sequence is synthesized)
ctgtcttgctccttaccacagctccaggacctacccattgaagaggtgctgatagttgatctctgtgcagacaagttcttacaggaggtatctgatgaggatgaaattctaccaccaaaa

SEQ ID NO: 609747 - DNA, 120 bp, Artificial Sequence
  ENSG00000175984_21 (sequence is synthesized)
cttcaagctgccctgatgcagattttggaagaacgaaatgaaatcttgactcaggagcagaatttttcacaagatgtgacactcaactctctggtgtccgaagcatttgtcaggtttttt

SEQ ID NO: 609748 - DNA, 120 bp, Artificial Sequence
  ENSG00000175984_22 (sequence is synthesized)
gtggagttggtaggacattattctttgaacatgactgtcactgagcgtggggagcgtgttttccaaagggaaccattccgtaagtcccacacctcccgaagtgtacgccacttcctggat

SEQ ID NO: 609749 - DNA, 120 bp, Artificial Sequence
  ENSG00000175984_23 (sequence is synthesized)
gagttaaaggtttgtttgagatccgggccatccagtatttggaaacaattcctgagtcggagcccagtgggatgaatagaattttgcggagtcttggaagcaaaatgaaatttctgcaaa

SEQ ID NO: 609750 - DNA, 120 bp, Artificial Sequence
  ENSG00000175984_24 (sequence is synthesized)
agaaatgaaatctctgattgtctccatcctgaatatacaacagaaagtgccaaagaaaatatttttctaagggtcaggatcccatgaagtattctacaaaattcttgaaattttaaaagg

SEQ ID NO: 609751 - DNA, 120 bp, Artificial Sequence
  ENSG00000175984_25 (sequence is synthesized)
ttaaagagcgagtcaggctgttagaggaggattctcctgttgctgctgtagtaatcactggagaattgttgggaatggtctggcaccatgccatctttactctgtctccatttttttttt

SEQ ID NO: 609752 - DNA, 120 bp, Artificial Sequence
  ENSG00000175984_26 (sequence is synthesized)
atagcagccttttctatgtgattcttgggctcattctctgttttgtgctttgtctgtgaaagtagttgtgtttcacaaggaaaagccttgttgttgttacatttaaaaaatagctcaaag

SEQ ID NO: 609753 - DNA, 120 bp, Artificial Sequence
  ENSG00000175984_27 (sequence is synthesized)
atgagaataatgagagaaatgctgagtttaaggtagtagagagacatgatggaaatggagaacactagccttatacacataattctcatcactgaactatcatggcccctttaaacccat

SEQ ID NO: 609754 - DNA, 120 bp, Artificial Sequence
  ENSG00000175984_28 (sequence is synthesized)
gggctgtttgacctgggctaaggaatagactcatcacatatctccattgttttgccttatattatatctaggggaatctcacttaggaggaagccctacttgtaatattataaggtactg

SEQ ID NO: 609755 - DNA, 120 bp, Artificial Sequence
  ENSG00000175984_29 (sequence is synthesized)
ttattaagtaccttataaaattagacatcttgcaactcctcctccaaattatgtggcatttgagtagtttgcttgtgcctcacatgtcaacattaaactttgtggaggctggatgcagtg

SEQ ID NO: 609756 - DNA, 120 bp, Artificial Sequence
  ENSG00000175984_30 (sequence is synthesized)
tgtcaacattaaactttgtggaggctggatgcagtggctcacacctgtaatctccaccactttgggaggctaaggcaggagtttgagggtgggagtttgagactagcctgggcaacatag

SEQ ID NO: 609757 - DNA, 120 bp, Artificial Sequence
  ENSG00000175984_31 (sequence is synthesized)
gtaaataaatttaaactttgtgaaattatagctaatatgaaaatgtcctttcaagggcatgggagccacctttattttttagtgtccaccatgtgccatgcactgtggtatatgtatgca

SEQ ID NO: 609758 - DNA, 120 bp, Artificial Sequence
  ENSG00000175984_32 (sequence is synthesized)
tatcatctcaaccaatccttaaatcaaccttatgagatagatatttgcatctccattttactaataaactgaggctgggtgctatggctcacgtctgtaatcccagcactatgggagtcc

SEQ ID NO: 609759 - DNA, 120 bp, Artificial Sequence
  ENSG00000175984_33 (sequence is synthesized)
aggaaaagaaaaaagaaaaaaacaaattcaaagaagttaaatacgttgcccaaagttgtacaacacagaactgaagccaagacttttatggacacagaaaaagttggttagtcctacaga

SEQ ID NO: 609760 - DNA, 120 bp, Artificial Sequence
  ENSG00000175984_34 (sequence is synthesized)
tagtcctacagatggaaatttcatctcagtaggattatatagctatttcttttattaataaaaattttctattaagtgtaccagagccacttttcagctctgaggataaggaactttata

SEQ ID NO: 609761 - DNA, 120 bp, Artificial Sequence
  ENSG00000175984_35 (sequence is synthesized)
ggtgcctagatgagactctttttattcccctagaaatgttgaaatttttgctctaattaaattagactcaaaatatgaacattccttgaacatataccacttagtcatccagacctttaa

SEQ ID NO: 609762 - DNA, 120 bp, Artificial Sequence
  ENSG00000175984_36 (sequence is synthesized)
tataccacttagtcatccagacctttaatatctaaagtagtagtagtagtgattggaaagagaaagttttcagtgatggtgcagtgttttttttgtgtgtgtatgtgtgtgtgtgtgtgt

SEQ ID NO: 609763 - DNA, 81 bp, Artificial Sequence
  ENSG00000175984_37 (sequence is synthesized)
aactcatgggcaaattcaagttcagatggtgcacttttcattgattaatgttatagcaaatgtcagtttgttttcttcagt

SEQ ID NO: 609764 - DNA, 120 bp, Artificial Sequence
  ENSG00000175984_38 (sequence is synthesized)
tgattaatgttatagcaaatgtcagtttgttttcttcagtttctgctgatggttttaactggcacagaaagtatttattcaaccttacaaaactgtgtaagttgtattgtgatacagttt

SEQ ID NO: 609765 - DNA, 120 bp, Artificial Sequence
  ENSG00000175984_39 (sequence is synthesized)
attgacttgtacagtattgtcattacaacccattcaggtatgcatgaatctgaagcagaacaccatttaagactggtgctgtataatataattcctacagatgtgggtccagggaataga

SEQ ID NO: 609766 - DNA, 120 bp, Artificial Sequence
  ENSG00000175984_40 (sequence is synthesized)
actgagcctgtcttttttttaatgttaagcaggttacccccagtggggcttctactagacatctctccatttggtctcttcttacactccaacccagcaggaacagttaataattggatg

SEQ ID NO: 609767 - DNA, 120 bp, Artificial Sequence
  ENSG00000175984_41 (sequence is synthesized)
tttataaaatgggggtaaaagggtttactgtgatggatcctggctatccctctaggaggagacctttgcttcagcaatggtgtcttcatcctcgcagcctgaagctgcttcatttcctta

SEQ ID NO: 609768 - DNA, 120 bp, Artificial Sequence
  ENSG00000175984_42 (sequence is synthesized)
ggtctgttgtgttttctgtaaagtgttaggaattctggatatttttgtaaaagaatcaagatttgtataaaatgttgtttacagatcttttaatgaataaatacataaaccccccacaga

SEQ ID NO: 609769 - DNA, 120 bp, Artificial Sequence
  ENSG00000175984_43 (sequence is synthesized)
ggagcggacccgagtgatacccgggagactagcttggccacaggagacaacgttgaggtacagacaggtggcagagaaacaaacatcggtattgcttaaaccacttgctatttccagttc

SEQ ID NO: 609770 - DNA, 120 bp, Artificial Sequence
  ENSG00000175984_44 (sequence is synthesized)
cggctgtatgtaccaaaacttaatcttatatagtaccccaaagaggtgctatgaaaattaattgtgatagtgtgattgaagtgattggcacatagtatttaacaaaatatttaatgaagt

SEQ ID NO: 609771 - DNA, 120 bp, Artificial Sequence
  ENSG00000175984_45 (sequence is synthesized)
gtaatcactgttcttgctgttttaattctcacaatactctgtatgaagtgggtgttcaataagtatttgatgaatctttaaaaatttgctaggtctaccataaccaaataccgcagattg

SEQ ID NO: 609772 - DNA, 120 bp, Artificial Sequence
  ENSG00000175984_46 (sequence is synthesized)
ttttaaagcacccaagctccctccaaaacctcagttccttcaccggaagactatggaagtaaagaactcacaggcttatttgcggtcaaagcttacaaaagatacaactttgccggtcac

SEQ ID NO: 609773 - DNA, 120 bp, Artificial Sequence
  ENSG00000175984_47 (sequence is synthesized)
caaaagaggtaaaaccacccttcaactccaggtgggtcgacacataagcctctaatttaattacattttaaaagcatttattaagcactgattatttctttttttttttttttttgagat

SEQ ID NO: 609774 - DNA, 120 bp, Artificial Sequence
  ENSG00000175984_48 (sequence is synthesized)
ctcatgcctgtaattccagcactttgcgaggtcaagtaaggaggtttgcttgaggccaggagtttgagaccagcgtgggcaacatagtgagaccccatccctacacaaaattttaaaatt

SEQ ID NO: 609775 - DNA, 83 bp, Artificial Sequence
  ENSG00000175984_49 (sequence is synthesized)
ttagctaggcatgctggcacattcctgtagttctagctacgcaggaggctgagaggcccgagggggatcgctggagcccggga

SEQ ID NO: 609776 - DNA, 120 bp, Artificial Sequence
  ENSG00000175984_50 (sequence is synthesized)
ggaggctgagaggcccgagggggatcgctggagcccgggagtttgaggcctcagtaagatgatcttgccacagatgacagagtgagattcttgtctctaaaaaaataaataaataaaaat

SEQ ID NO: 609777 - DNA, 120 bp, Artificial Sequence
  ENSG00000175984_51 (sequence is synthesized)
ccaggctttatcttgttgagtagttgtgaagagtaaaccttcacatgaagcatagggccgtctccgtggggccgatgcgacggcaggcgaaggcgatggagctctggctcgagggcttgg

SEQ ID NO: 609778 - DNA, 120 bp, Artificial Sequence
  ENSG00000175985_0 (sequence is synthesized)
ggagttcccgcccggccctctgcaatccggagcccaagccgccggctacgcgccctgcgcccccttggtgccgcgtccagtgcccagcgcgctttgatgctgcagctccgggccgggccg

SEQ ID NO: 609779 - DNA, 120 bp, Artificial Sequence
  ENSG00000175985_1 (sequence is synthesized)
ctctgcttctctgctcgctgggacgctctccgacggctccgccctcgcctctcgccccgagtccctgctgaccccggggaggtggggtccgggccgggcacagccccgctgaggcaggat

SEQ ID NO: 609780 - DNA, 120 bp, Artificial Sequence
  ENSG00000175985_2 (sequence is synthesized)
gttcacgtccaagtccaactcggtgtcgccctcgccgtccctggagcaggctgactcggacgccctggatatcagcaccaaagtgcagctctacggcgtgctgtggaagaggcctttcgg

SEQ ID NO: 609781 - DNA, 120 bp, Artificial Sequence
  ENSG00000175985_3 (sequence is synthesized)
caggccgtcggccaagtggtcccggcggtttttcatcatcaaagagagctttctgctttactactctgagagcgaaaaaaagagctttgaaaccaataaatacttcaatatacatcctaa

SEQ ID NO: 609782 - DNA, 120 bp, Artificial Sequence
  ENSG00000175985_4 (sequence is synthesized)
gggcgtcatccctctggggggctgcctggtggagcccaaggaagagcctagcatgccctatgccatgaagatctcccaccaggacttccatgggaacatcttgcttgctgctgagtcgga

SEQ ID NO: 609783 - DNA, 120 bp, Artificial Sequence
  ENSG00000175985_5 (sequence is synthesized)
gtttgagcagacccagtggctggagatgctgcaggagtctgggaaggtgacctggaagaatgcccagctgggagaagccatgatcaaaagcctggaggcccaggggctgcagttggctaa

SEQ ID NO: 609784 - DNA, 120 bp, Artificial Sequence
  ENSG00000175985_6 (sequence is synthesized)
ggaaaagcaggagtatttagacaaactgatggaagagaccgaagaactctgccttcagagggagcagagagaggagcttgagcgccttaaccaggtgctggaggccgagaagcagcagtt

SEQ ID NO: 609785 - DNA, 120 bp, Artificial Sequence
  ENSG00000175985_7 (sequence is synthesized)
cgaggaggtggtgcaggagctgagaatggagcaggagcagatcaagagggagctggaactgactgcaagatgccttaagggtgtagaacaagagaaaaaggaactgaggcacctcacgga

SEQ ID NO: 609786 - DNA, 120 bp, Artificial Sequence
  ENSG00000175985_8 (sequence is synthesized)
gtccttgcagcagacactggaggaactctccatagagaagaagaaaaccctggaaatgctggaggagaacgagaaccacctgcagacactggccaatcagagtgagcagccccctcccag

SEQ ID NO: 609787 - DNA, 120 bp, Artificial Sequence
  ENSG00000175985_9 (sequence is synthesized)
tgggggcctccatagcaacctccggcagatcgaggagaagatgcagcagctcttagaggagaagctcctggcagagaagcggatgaaggagaacgaggagcgctcacgggccctggagga

SEQ ID NO: 609788 - DNA, 120 bp, Artificial Sequence
  ENSG00000175985_10 (sequence is synthesized)
ggagcgtgagttctactccagccagtcccaggcactgcagaactcgctgcaggagctgacggcagagaagcagcaggctgagcgggagctcaaggctgaggtgaaggtccgcatggacct

SEQ ID NO: 609789 - DNA, 120 bp, Artificial Sequence
  ENSG00000175985_11 (sequence is synthesized)
ggagaggcgtctccgggaggcagaaggggccttgcgaagcctggaacaggggctgaattccaaggtgcggaataaggagaaggaggagaggatgcgggctgatgtgagccatctgaaaag

SEQ ID NO: 609790 - DNA, 120 bp, Artificial Sequence
  ENSG00000175985_12 (sequence is synthesized)
gttctttgaggagtgcatccggaatgccgagctggaggccaagatgcctgtgatcatgaagaactccgtgtacatccataaggcagccactcgccgcatcaagagctgccgcttccaccg

SEQ ID NO: 609791 - DNA, 120 bp, Artificial Sequence
  ENSG00000175985_13 (sequence is synthesized)
acgccggtccagcacctcctggaatgacatgaagccgtcccagtccttcatgacctcccagctggatgccaacaacatggaggagctaaaggaggtggccaagcggctcagcagggacca

SEQ ID NO: 609792 - DNA, 120 bp, Artificial Sequence
  ENSG00000175985_14 (sequence is synthesized)
gcgcttccgggaatccatctaccacatcatggccacccagcctggagccccctcggcactctcccggggtggaaagtgatgggcgctcctcccctgcttcccaagtctcccctggatggg

SEQ ID NO: 609793 - DNA, 120 bp, Artificial Sequence
  ENSG00000175985_15 (sequence is synthesized)
cgggggaggggaaggggtggcagagggaggcctcactctaccagctcctggcctctctggtctggagcctatgtctcctctgggccggagctccacttgggggccagccttgccctcaaa

SEQ ID NO: 609794 - DNA, 120 bp, Artificial Sequence
  ENSG00000175985_16 (sequence is synthesized)
ggacatggacgctgccttcctcatcctcaccccacaccccacctttgggtccacaccagggccatgcaggcctgagctgggtgctggttgtcatggtgaggtgaggacaggacctggttg

SEQ ID NO: 609795 - DNA, 120 bp, Artificial Sequence
  ENSG00000175985_17 (sequence is synthesized)
tatgtggagatttgtgtcggttagggagtggggtggggaggtgctgtctaccactgtgccatcaggcagggtctgccccactgaggaagatggcagccctccctggtgcccactggacct

SEQ ID NO: 609796 - DNA, 120 bp, Artificial Sequence
  ENSG00000175985_18 (sequence is synthesized)
ctctgggactctgctgccctgcccgtggtcctcatgtagaaaggccttgcctccctaccttgacattcccttttccccagggtttcctaaccctccctttgcttctgacactcagcaaaa

SEQ ID NO: 609797 - DNA, 120 bp, Artificial Sequence
  ENSG00000175985_19 (sequence is synthesized)
tgtccctcagctgagacccctcatttacaccacatcatgctgtgcaggaggaaaggggcctaggacagcagcttctgggctcctgacataccacacacccgccacagtgccgcttttcct

SEQ ID NO: 609798 - DNA, 120 bp, Artificial Sequence
  ENSG00000175985_20 (sequence is synthesized)
gatggcaccagtccctcctgcctgtgtacctagggccctggctgggagctggggccagcagtgatgctgggggctcccccagaggacacgtaacaagctcaggagtgggctgggcacagt

SEQ ID NO: 609799 - DNA, 68 bp, Artificial Sequence
  ENSG00000175985_21 (sequence is synthesized)
aaccctgtctctacaaaaaataaaaaaaataaaataaaatgaggggattgattgagcctgggaggttg

SEQ ID NO: 609800 - DNA, 120 bp, Artificial Sequence
  ENSG00000175985_22 (sequence is synthesized)
tgcactccagccagggtaacagagcaagaccctgtctcaaacaaacacaaggaaaacaagctcaggagtgaaggaaagtcactctggttcctgcattatgtacttctggttgcgcaggga

SEQ ID NO: 609801 - DNA, 120 bp, Artificial Sequence
  ENSG00000175985_23 (sequence is synthesized)
ggcagtgttcctgctggtcgagagatcacagatatctccttcccagctgcccctgcttcagtcaccttgctgcctcctctccctgcagagatttcagcctgtgaagcaatgtgaccatga

SEQ ID NO: 609802 - DNA, 120 bp, Artificial Sequence
  ENSG00000175985_24 (sequence is synthesized)
actctggcagctggggaccctgggcctgtgatgaggccagtagtcattggttggctcagtgtcattgggagtgaagctgaaacgccaatctgcagcttctgtggaagaccaccaccctcc

SEQ ID NO: 609803 - DNA, 120 bp, Artificial Sequence
  ENSG00000175985_25 (sequence is synthesized)
agggggctgaagggtgtgtctgtctctcactcatggacagacagactgcccagaccctctccctgcaggcccaccctccaaagctacctgaggctattggcctccagaaaaggggtccac

SEQ ID NO: 609804 - DNA, 120 bp, Artificial Sequence
  ENSG00000175985_26 (sequence is synthesized)
ctgggatcagggtgctcttggacactgttgacattaaaggtgctcattctttgctgcttggaaaaccaagaagttctgagagataaacagatggcttcggggcaagtcccagcaaaaagt

SEQ ID NO: 609805 - DNA, 120 bp, Artificial Sequence
  ENSG00000175985_27 (sequence is synthesized)
gcaagaacctgggagcccacaacctattctgtgggaagaggagcattgttgcctctaagaacacatgcacatctgctgctaggctggccgagcccaggccgggctgccctgctctttgct

SEQ ID NO: 609806 - DNA, 120 bp, Artificial Sequence
  ENSG00000175985_28 (sequence is synthesized)
cagtgcttcctgccaaaactaatctcagtggttcctttcagtgatgggtggactttggtggcttcatacagtctctgcagaatctagctggggagagggctgagtcagtttggaataaat

SEQ ID NO: 609807 - DNA, 120 bp, Artificial Sequence
  ENSG00000175985_29 (sequence is synthesized)
gcatttgacagggctgagcctaaatgtaaaactttaaacgtgtataacatgcataaacctggaacttgtttctctaacacgtatgaaggatgaactttgaattgaaggggaatatttata

SEQ ID NO: 609808 - DNA, 120 bp, Artificial Sequence
  ENSG00000175985_30 (sequence is synthesized)
aaaccaagattactgtttccttttttttaaaagaattaatcatggcttgcttttagagagatctttcataattttcagatgcatttgtttttcttgggcgagctattaaccagacaggaa

SEQ ID NO: 609809 - DNA, 120 bp, Artificial Sequence
  ENSG00000175985_31 (sequence is synthesized)
acctgagactgggtaatttataaggaacagaaatgtactggctcacagatatggtggctaagacgtccaatatcaaggtgctggcatctggcaaggaccttcttgttgcatcatcccatg

SEQ ID NO: 609810 - DNA, 120 bp, Artificial Sequence
  ENSG00000175985_32 (sequence is synthesized)
ctggcatctggcaaggaccttcttgttgcatcatcccatggttgacaggcaaagagagggtgagagagcaagaggggccaaacttattcttttataacaaacccaccccctcgataatga

SEQ ID NO: 609811 - DNA, 120 bp, Artificial Sequence
  ENSG00000175985_33 (sequence is synthesized)
tataacaaacccaccccctcgataatgacattaatcctttcataagggagagtcttcatggccaaatcacctcttaaatgttccacctcttgcggatcacctgaggtcaggagtttgaga

SEQ ID NO: 609812 - DNA, 120 bp, Artificial Sequence
  ENSG00000175985_34 (sequence is synthesized)
gtgaaactctgtctcagaaaaaaaaaaaaggtcccacctcttaatattgttacaatggcaatcaaatttctttttttaatcctgcaaactactgggatagtaattaaatttcagtgtgag

SEQ ID NO: 609813 - DNA, 120 bp, Artificial Sequence
  ENSG00000175985_35 (sequence is synthesized)
caaactactgggatagtaattaaatttcagtgtgagtttgggagggaacaaacattcaaactgtagcagtgcttttccatgcacatttaccaatcgatacttcctcctattctcaccctg

SEQ ID NO: 609814 - DNA, 120 bp, Artificial Sequence
  ENSG00000175985_36 (sequence is synthesized)
tattttccatgcctcaggcaagtctgaattatcttcagccaactgaacaatccataagtgtttattcgttaaaagctcactatgtacctagcactgtaaatagaaaaatagcaacatctc

SEQ ID NO: 609815 - DNA, 120 bp, Artificial Sequence
  ENSG00000175985_37 (sequence is synthesized)
tatatcaaaatacgtaggagtggaaattacttagtggagatatgttgatgtaatttttttaatttttaaaaacaaaactcttattccttggccaattaaatgcatttcctgcagtatcta

SEQ ID NO: 609816 - DNA, 120 bp, Artificial Sequence
  ENSG00000175985_38 (sequence is synthesized)
cgctcttgctctggcctagcagagagtctggagagcaaatcctcttggggcaaaagaccccctgcccctgtcctgggctggaccctcactctcctgtgccccagaccctgccccaaccct

SEQ ID NO: 609817 - DNA, 120 bp, Artificial Sequence
  ENSG00000175985_39 (sequence is synthesized)
tcctcttctctctgaacatcagttctggcctctgtcccatggccccagggtctagcttccatcctggggcacttggcaggaactggctttgtccaggggcccccagaacccctgagtgac

SEQ ID NO: 609818 - DNA, 120 bp, Artificial Sequence
  ENSG00000175985_40 (sequence is synthesized)
cccagttgggtggggtgggggctgcctgttctggttcttcctcagggcgtcatccctctggggggctgcctggtggagcccaaggaagagcctagcatgccctatgccatgaagatctcc

SEQ ID NO: 609819 - DNA, 120 bp, Artificial Sequence
  ENSG00000175985_41 (sequence is synthesized)
caccaggacttccatgtgagtaaagctcttccctcagcctgggctccgcaggagcagaccagcctctcaggcctcttcaggacacacatcccatgtcctggcctgggagaggggcatcag

SEQ ID NO: 609820 - DNA, 120 bp, Artificial Sequence
  ENSG00000175985_42 (sequence is synthesized)
cacccagggatgtggggtgggtgacagggcagagctgggcctccatcaccctcagcgtggctgcctctcaggcatgcgcatggctcctcttcctggcaggggaacatcttgcttgctgct

SEQ ID NO: 609821 - DNA, 120 bp, Artificial Sequence
  ENSG00000175985_43 (sequence is synthesized)
gagtcggagtttgagcagacccagtggctggagatgctgcaggagtctgggaaggtgtaagtgctcacagccaggagggcagcctgcagatccaggatggggtgggcggggctgcccctg

SEQ ID NO: 609822 - DNA, 120 bp, Artificial Sequence
  ENSG00000175985_44 (sequence is synthesized)
aactccctgcctctctgctgggatcctggtgggcacagggccagggctgtgggagatggctagggtaggggagagcagacaggccaggttttagagcatctgtgaggggtcccctgagtg

SEQ ID NO: 609823 - DNA, 120 bp, Artificial Sequence
  ENSG00000175985_45 (sequence is synthesized)
agcttgaaaagtgtctaggtcacaggtggcaggtgtgggtaccatttgtctccaactcttgggagttgtatttgatgcctcctgacacccatctcacctccccaggcccataattaattc

SEQ ID NO: 609824 - DNA, 120 bp, Artificial Sequence
  ENSG00000175985_46 (sequence is synthesized)
tagcaaggactagagctagtgctttgtaaattagggtcaagatcacagaaatctcctgccaacccagtccatttttatgtaaaccactgtcctgacacctgcctagtcaggctaggtcat

SEQ ID NO: 609825 - DNA, 120 bp, Artificial Sequence
  ENSG00000175985_47 (sequence is synthesized)
gcttttagttccaaaaacaccgaccgtgtgctctgtggcaggccttgcactgggtagcggacattcagtaatgtaaaaaagccacccaggaagcaatctcctccctgctctaaaagtgct

SEQ ID NO: 609826 - DNA, 120 bp, Artificial Sequence
  ENSG00000175985_48 (sequence is synthesized)
gttggcccagcccccagtggcccactttgcagcctgggccagcctccagctactgtaactgatccgtgctggtgacatgcccagagccatgggtgccagagtgaatgcaagttgagattc

SEQ ID NO: 609827 - DNA, 120 bp, Artificial Sequence
  ENSG00000175985_49 (sequence is synthesized)
ctctttcccctctacccttctgttttaatgattttctgtttcttcctcttctctcctctgtcccatctgccctccctccccaggacctggaagaatgcccagctgggagaagccatgatc

SEQ ID NO: 609828 - DNA, 120 bp, Artificial Sequence
  ENSG00000175985_50 (sequence is synthesized)
aaaagcctggaggcccaggggctgcagttggctaaggaaaagcaggagtatttaggttggctggaggggtggttccctaatggtagcagcacttggggaccaggggctatagccaggggc

SEQ ID NO: 609829 - DNA, 120 bp, Artificial Sequence
  ENSG00000175985_51 (sequence is synthesized)
ttggtaaaggatgcagcagggatgagggtctctcaggtggggctatgagggaacagagaccagtttggcacctggagggcttcctggtacactacgcatccttttggccaacatgactga

SEQ ID NO: 609830 - DNA, 120 bp, Artificial Sequence
  ENSG00000175985_52 (sequence is synthesized)
aggcaggagcgtctgatggttaagagcctgggctctggatccagcttcatcatttgtcacccatctcagctgtgtatatctttaggcagctcagcctctctaagcctcaatttcctcatc

SEQ ID NO: 609831 - DNA, 120 bp, Artificial Sequence
  ENSG00000175985_53 (sequence is synthesized)
cttaaaatcgagttaaaaatagtctctagcttttagaggattgggttaaatgagacaatgtctgtaagtgcttgagccagacatgcagtaagggctccataagtggagttgatgttgtta

SEQ ID NO: 609832 - DNA, 120 bp, Artificial Sequence
  ENSG00000175985_54 (sequence is synthesized)
tcctatcctgggtccccagggtctggcttgtccccagtacccttgccccaggccattttaaaccttgccacagcattccagaccttgtgcccctgacaggttggtaaacatgcactgttt

SEQ ID NO: 609833 - DNA, 120 bp, Artificial Sequence
  ENSG00000175985_55 (sequence is synthesized)
gggagagaagatgagactgagggtttgccttcagcctgggaccctctcccctctgcctgcttagacacttggggccccagcacttgctcccctatgcctgcttcagaacttcctaggttc

SEQ ID NO: 609834 - DNA, 120 bp, Artificial Sequence
  ENSG00000175985_56 (sequence is synthesized)
tgccctccttactagccagacattagtgcaggtggaaggtgggtgtgggactagcccaggtgcagcaggcctgggggatgcagagactgctttgaacttccaaggatgaggcccctcata

SEQ ID NO: 609835 - DNA, 120 bp, Artificial Sequence
  ENSG00000175985_57 (sequence is synthesized)
accctaggaaaagaaaaagcaggatgatgatgggggaaggagggtggcagcttccatcaccaggagctggcccaccctctggctggcagggctgcaggccccttccttgggagatgctgg

SEQ ID NO: 609836 - DNA, 120 bp, Artificial Sequence
  ENSG00000175985_58 (sequence is synthesized)
gggtgacagcgaccacctcaggcaccagctccctcaggacctcagagcactttcctgattgtgtgtgcatgtgtgtgtgtgtgcttgttttggcagacaaactgatggaagagaccgaag

SEQ ID NO: 609837 - DNA, 120 bp, Artificial Sequence
  ENSG00000175985_59 (sequence is synthesized)
aactctgccttcagagggagcagagagaggtaggtgcacaccaaggggctctcagcagccgtggtgtaatggctcacgtttctagcactagggaatgatgcaggggagctgggtgcacag

SEQ ID NO: 609838 - DNA, 120 bp, Artificial Sequence
  ENSG00000175985_60 (sequence is synthesized)
aggacttgctagaagatcagatggggcagggcggggaggccaaatgggatcacagtgcttgcttgggacttgctgtaacttgttggtaagaagtgtctttctccttaccaacccctggga

SEQ ID NO: 609839 - DNA, 120 bp, Artificial Sequence
  ENSG00000175985_61 (sequence is synthesized)
gtaaagtgaaaagggtgggtgatgaccttctagagaaagagccatccaaagtgtcatcagctgcatcagttggtaatgagctgcttgtcaatgatgttcacgggagctataatgccctct

SEQ ID NO: 609840 - DNA, 120 bp, Artificial Sequence
  ENSG00000175985_62 (sequence is synthesized)
gttatccatagagggctatctggcacctgagggtgattgggcttgatgatctcagaagttccttcattctctgaatgtcaaaagtccacagcaggctaagcactggcttgaggcagactg

SEQ ID NO: 609841 - DNA, 120 bp, Artificial Sequence
  ENSG00000175985_63 (sequence is synthesized)
cactggcttgaggcagactggagggtaaaggagactcttgccttgtgtgaaggaggggagccaccgaagccctcttcttcatttagaatctcagtgcaggctgggcgcagtggctcacgc

SEQ ID NO: 609842 - DNA, 120 bp, Artificial Sequence
  ENSG00000176009_0 (sequence is synthesized)
ctatctgaccacattgttaaacttggttatgtttgcaggttaaagaggaaatgatggacaacagaggcaactctagtctacctgacaaacttcctatcttccctgattctgcccgcttgc

SEQ ID NO: 609843 - DNA, 120 bp, Artificial Sequence
  ENSG00000176009_1 (sequence is synthesized)
cactgaccaggtccttctatctggagcccatggtcactttccacgtgcacccagaggccccggtgtcatccccttactctgaggagctgccacggctgccttttcccagcgactctctta

SEQ ID NO: 609844 - DNA, 120 bp, Artificial Sequence
  ENSG00000176009_2 (sequence is synthesized)
ctttcccgatgccttatccaaattacagagggtgcgagtactcctacgggccagccttcacccggaaaaggaatgagcgggaaaggcagcgggtgaaatgtgtcaatgaaggctacgccc

SEQ ID NO: 609845 - DNA, 120 bp, Artificial Sequence
  ENSG00000176009_3 (sequence is synthesized)
agctccgccatcatctgccagaggagtatttggagaagcgactcagcaaagtggaaaccctcagagctgcgatcaagtacattaactacctgcagtctcttctgtaccctgataaagctg

SEQ ID NO: 609846 - DNA, 120 bp, Artificial Sequence
  ENSG00000176009_4 (sequence is synthesized)
agaccaagaataaccctggaaaagtttcctccatgatagcaaccaccagccaccatgctgaccctatgttcagaattgtttgagttgctgtttccaaatagaaatgaataatatcacaaa

SEQ ID NO: 609847 - DNA, 120 bp, Artificial Sequence
  ENSG00000176014_0 (sequence is synthesized)
agttgccgctgtcgtccgcagagccagttcctagcgcagagccgcgcccgccatgagggagatcgtgcacatccaggcgggccagtgcgggaaccagatcggcaccaagttttgggaagt

SEQ ID NO: 609848 - DNA, 120 bp, Artificial Sequence
  ENSG00000176014_1 (sequence is synthesized)
gatcagcgatgagcacggcatcgacccggccggaggctacgtgggagactcggcgctgcagctggagagaatcaacgtctactacaatgagtcatcgtctcagaaatatgtgcccagggc

SEQ ID NO: 609849 - DNA, 120 bp, Artificial Sequence
  ENSG00000176014_2 (sequence is synthesized)
cgccctggtggacttagagccaggcaccatggacagcgtgcggtctgggccttttgggcagcttttccggcctgacaacttcatctttggccagacgggtgcagggaacaactgggcgaa

SEQ ID NO: 609850 - DNA, 120 bp, Artificial Sequence
  ENSG00000176014_3 (sequence is synthesized)
agggcactacacggagggcgcggagctggtggacgcagtgctggacgtggtgcggaaggagtgcgagcactgcgactgcctgcagggcttccagctcacgcactcgctgggcggcggcac

SEQ ID NO: 609851 - DNA, 120 bp, Artificial Sequence
  ENSG00000176014_4 (sequence is synthesized)
gggctcaggcatgggcacgctgctcatcagcaagatccgtgaggagttcccggaccgcatcatgaacaccttcagcgtcatgccctcgcccaaggtgtcggacacggtggtggagcccta

SEQ ID NO: 609852 - DNA, 120 bp, Artificial Sequence
  ENSG00000176014_5 (sequence is synthesized)
caatgccacactgtcggtgcaccagctggtggagaatacagacgagacctactgcatcgacaacgaggcgctctatgacatctgcttccgcactctgaagctgacaacgcccacctacgg

SEQ ID NO: 609853 - DNA, 120 bp, Artificial Sequence
  ENSG00000176014_6 (sequence is synthesized)
ggacctcaaccacctggtgtccgccaccatgagtggggtcaccacctcgctgcgcttcccgggccagctcaatgctgacctgcgcaagctggcggtgaacatggtgcccttcccgcgcct

SEQ ID NO: 609854 - DNA, 120 bp, Artificial Sequence
  ENSG00000176014_7 (sequence is synthesized)
acccagcagatgttcgacgccaggaacatgatggccgcctgcgatccgcgccatggccgctacctgaccgtggccaccgtgttccgcgggcccatgtccatgaaggaggtggacgagcag

SEQ ID NO: 609855 - DNA, 120 bp, Artificial Sequence
  ENSG00000176014_8 (sequence is synthesized)
atgctggccatccagagtaagaacagcagctacttcgtggagtggattcccaacaacgtgaaggtggccgtgtgcgacatcccgccccgcggcctgaagatggcctccaccttcatcggc

SEQ ID NO: 609856 - DNA, 120 bp, Artificial Sequence
  ENSG00000176014_9 (sequence is synthesized)
aacagcacggccatccaggagctgttcaagcgcatctccgagcagttctcagccatgttccggcgcaaggccttcctgcactggttcacgggtgagggcatggatgaaatggagttcacc

SEQ ID NO: 609857 - DNA, 120 bp, Artificial Sequence
  ENSG00000176014_10 (sequence is synthesized)
gaggcggagagcaacatgaacgacctggtatccgagtaccagcagtaccaggatgccaccgccaatgacggggaggaagcttttgaggatgaggaagaggagatcgatggatagtcggaa

SEQ ID NO: 609858 - DNA, 120 bp, Artificial Sequence
  ENSG00000176014_11 (sequence is synthesized)
tagagccgccccaactcagatcctacaacacgcaagttccttcttgaaccctggtgcctcctaccctatggccctgaatggtgcactggtttaattgtgttggtgtcggcccctcacaaa

SEQ ID NO: 609859 - DNA, 120 bp, Artificial Sequence
  ENSG00000176014_12 (sequence is synthesized)
tgcagccaagtcatgtaattagtcatctggaacaaagactaaaaacagcagagaattgcgggttctacccagtcagaagatcacaccatggagactttctactagaggacttgaaagaga

SEQ ID NO: 609860 - DNA, 120 bp, Artificial Sequence
  ENSG00000176014_13 (sequence is synthesized)
actgaggggccacaaaataaacttcaccttccattaagtgttcaagcatgtctgcaaattaggagggagttagaaacagtctttttcatcctttgtgatgaagcctgaaattgtgccgtg

SEQ ID NO: 609861 - DNA, 120 bp, Artificial Sequence
  ENSG00000176014_14 (sequence is synthesized)
ttgccttatatgaatatgcagtatgggactttgaaataatgattcataataaaatactaaacgtgtgtcttcatctctctagccatgtgcataaatgacgtaagttactttgtatggtta

SEQ ID NO: 609862 - DNA, 120 bp, Artificial Sequence
  ENSG00000176014_15 (sequence is synthesized)
agaaacaggaatgaagagtgggcgacaaagagaaagcatcccttcccacacgccaagagtccagtgcaacgatccctgccacacggtcagccgaccccacttggtgccacagggtccagc

SEQ ID NO: 609863 - DNA, 120 bp, Artificial Sequence
  ENSG00000176014_16 (sequence is synthesized)
gacagtgtgcatttccctcaaggcctccggaaagtcacctgccacccactgtgacctctgaggctgaaaggactaaggactcctttccccatcatttcagctgggccagtggctggctaa

SEQ ID NO: 609864 - DNA, 120 bp, Artificial Sequence
  ENSG00000176014_17 (sequence is synthesized)
aatcagcgcagcattcccattcttctgaaagccacagctgaaataatgcaccagctgaaaccacagtggacagactgagatggcctccctctgggcctctagttggcaactttctcaccc

SEQ ID NO: 609865 - DNA, 120 bp, Artificial Sequence
  ENSG00000176014_18 (sequence is synthesized)
gggggctcctctttctccttttcccgctccttgttccagtccttaaggccttctggaagtgaggtgtcctcatccaagctgccagtgccttccacaaattcttcataggtagatttttcc

SEQ ID NO: 609866 - DNA, 120 bp, Artificial Sequence
  ENSG00000176014_19 (sequence is synthesized)
gcaaatggtctggggcccaaaagttcaaccatatcattcttatctaatacttctttttctaacaacagaagagcaacctgaaatatgaacaattttcattaaatacagttactcagcaaa

SEQ ID NO: 609867 - DNA, 120 bp, Artificial Sequence
  ENSG00000176014_20 (sequence is synthesized)
atctttgtcacattcctaagagccacaggagccgggacagtgtcaacttctgctcaccacattgcaacccccgcttgaagacagagcagacaacgaaacatcagaacgaacggacccatg

SEQ ID NO: 609868 - DNA, 120 bp, Artificial Sequence
  ENSG00000176014_21 (sequence is synthesized)
ctgctcagctgcaccgttggtgggtgcctgtttccccggcccctccctttggctaacagcacatcatggaatcacttcacaccctccttgtcggtgaccaagcatggtgatggcgcagcc

SEQ ID NO: 609869 - DNA, 120 bp, Artificial Sequence
  ENSG00000176014_22 (sequence is synthesized)
actttagctaaacccggttccaaaggggtgggagtcgtcggagaggaatggcctctgtatctccggagacggaaacaccaggacgaagaggccctaagaacagccagttcctagcgcaga

SEQ ID NO: 609870 - DNA, 120 bp, Artificial Sequence
  ENSG00000176014_23 (sequence is synthesized)
ccctggtggacttagagccaggcaccatggacagcgtgcggtctgggccttttgggcagcttttccggcctgacaacttcatctttggagtgtagcttgcttcttgagtgactgcagcga

SEQ ID NO: 609871 - DNA, 120 bp, Artificial Sequence
  ENSG00000176014_24 (sequence is synthesized)
agtcttcttctcctcaggctgcagaacctgcgttttcttctctaagcctaacaaaataacaacaaaaaaacccaagccattgttacagtgacactgacattaaaagacagttatacagtg

SEQ ID NO: 609872 - DNA, 120 bp, Artificial Sequence
  ENSG00000176014_25 (sequence is synthesized)
catacaatggagccagctgtatacactgtttagtaccctagtgttcctccctggctccccagcaacgtattttgaagatctttccatttcacaagtatggctgcctcattcctgttgatg

SEQ ID NO: 609873 - DNA, 120 bp, Artificial Sequence
  ENSG00000176014_26 (sequence is synthesized)
gctgatagtatcctctgcagagataccgccgtggatttaaccagtcttcagttgatagaattacctctttaacatggaacaaccaggtcaaaatgtatatacatctttaaaattgaccag

SEQ ID NO: 609874 - DNA, 120 bp, Artificial Sequence
  ENSG00000176014_27 (sequence is synthesized)
ttttgaagatctttccatttcacaagtatggctgcctcattcctgttgatggctgatagtatcctctgcagagataccgccgtggatttaaccagtcttcagttgataggccagacgggt

SEQ ID NO: 609875 - DNA, 120 bp, Artificial Sequence
  ENSG00000176014_28 (sequence is synthesized)
agttgccgctgtcgtccgcagagccagttcctagcgcagagccgcgcccgccatgagggagatcgtgcacatccaggcgggccagtgcgggaaccagatcggcaccaaggtgggcctggc

SEQ ID NO: 609876 - DNA, 80 bp, Artificial Sequence
  ENSG00000176014_29 (sequence is synthesized)
ggcaccaaggtgggcctggcgcggtgcagggcctctccgcgggtcggctgctggcgggccccgggtctcccggcgcgacc

SEQ ID NO: 609877 - DNA, 120 bp, Artificial Sequence
  ENSG00000176014_30 (sequence is synthesized)
gagggccgcagggagggagcgcccggggcgtggccggccggggaccttctactcttcgctccccacccccatcccaactgggagcggctgccggcggctcaggcgcgcctggaattcggc

SEQ ID NO: 609878 - DNA, 120 bp, Artificial Sequence
  ENSG00000176018_0 (sequence is synthesized)
ggagacgttggcggcagaggcggaggcggacggggtcagcccaaagcagaggctcggccatgaacttacccgggacagcggcggcggcggaccttttggccatcttctcgcagagtgctc

SEQ ID NO: 609879 - DNA, 120 bp, Artificial Sequence
  ENSG00000176018_1 (sequence is synthesized)
cctgctaacggggacagattttaacattatggcagggaggcatcagaatcgtagttttcctcttccaggagttcagtcaagtggtcaagtacatgcatttggaaattgttcagacagtga

SEQ ID NO: 609880 - DNA, 120 bp, Artificial Sequence
  ENSG00000176018_2 (sequence is synthesized)
tattttggaggaggatgctgaagtgtatgaacttcgatccagaggaaaagagaaagtccgaagaagtacatcaagagatagacttgacgacattatagtattaacaaaagatatacaaga

SEQ ID NO: 609881 - DNA, 120 bp, Artificial Sequence
  ENSG00000176018_3 (sequence is synthesized)
aggagatacattaaatgcaatagcccttcagtactgttgtacggtagcagatatcaagagagttaacaatctcatcagtgatcaagacttttttgcccttaggtctatcaaaattccagt

SEQ ID NO: 609882 - DNA, 120 bp, Artificial Sequence
  ENSG00000176018_4 (sequence is synthesized)
aaaaaagttcagttccttgaccgaaacactttgtcctccaaaaggaagacagacttcacgtcattcatctgttcaatactcttccgaacaacaggaaattttgccagctaatgattctct

SEQ ID NO: 609883 - DNA, 120 bp, Artificial Sequence
  ENSG00000176018_5 (sequence is synthesized)
tgcttacagtgactcagctggtagctttttaaaagaagtagaccgagacatagaacaaatagtaaagtgtacagacaataagagagagaacctcaatgaggtagtatcggccttaacagc

SEQ ID NO: 609884 - DNA, 120 bp, Artificial Sequence
  ENSG00000176018_6 (sequence is synthesized)
acaacaaatgcgttttgaacctgataacaaaaacactcaacgtaaagacccctattatggagcagactggggaatagggtggtggacagctgtagtgataatgttgatagtaggtataat

SEQ ID NO: 609885 - DNA, 120 bp, Artificial Sequence
  ENSG00000176018_7 (sequence is synthesized)
aacaccagtgttttatttgttgtattatgaaattttagctaaggtggatgttagtcatcattcaacagtggactcttcacatttacattcaaaaatcacacccccatcacagcagagaga

SEQ ID NO: 609886 - DNA, 120 bp, Artificial Sequence
  ENSG00000176018_8 (sequence is synthesized)
aatggaaaatggaattgtgccaactaaaggaatacatttcagccaacaagatgatcataaactgtatagtcaagattctcagtcacctgctgctcaacaggaaacatagcaattagctca

SEQ ID NO: 609887 - DNA, 120 bp, Artificial Sequence
  ENSG00000176018_9 (sequence is synthesized)
taatcaaatgttagtggtcacatgtgcatctggaatgtggtgaatcagttatatccaataatagcttcaaaggcagaatttagagagattgaggatgcttttgtttttaacaaaagggtt

SEQ ID NO: 609888 - DNA, 120 bp, Artificial Sequence
  ENSG00000176018_10 (sequence is synthesized)
tcacactttgaaaattttttgagcaactagttgttgatgttgagagcagttgatccataaatctggtgtgtgaatgtttcaagcagaaattaatttaaatgtgtgtttaggaagtactta

SEQ ID NO: 609889 - DNA, 120 bp, Artificial Sequence
  ENSG00000176018_11 (sequence is synthesized)
acttggaagatgtatcatttttcttaaaatgcatgtttaaattttatttttttaagtaatttttaaaaagtttattaatgttaaatttatgatgcagaatgatagcatcagatgtctgca

SEQ ID NO: 609890 - DNA, 120 bp, Artificial Sequence
  ENSG00000176018_12 (sequence is synthesized)
gctgaaaaaaatttactactatgaacccccaaaatattcagttgcaagaaaatttgattctaaaattattcatggtaggatacgtaacacaccccttcaaaacttttaaaaaatacattt

SEQ ID NO: 609891 - DNA, 120 bp, Artificial Sequence
  ENSG00000176018_13 (sequence is synthesized)
agcacatgtgctatgaaagcatacgtacaaagagaaaggggaaagtgatttataattcctacaacagaggccaagaaatagattaaaatattttcaagaccccaaaataatgtattatgg

SEQ ID NO: 609892 - DNA, 120 bp, Artificial Sequence
  ENSG00000176018_14 (sequence is synthesized)
ttgggaagtcagtagaacactggaataggtgaagacctgacagtaatttttgtcttaagaatgctttctttaggacagaccctttaacctcacctctgtgcatctgtttttaaaatgatt

SEQ ID NO: 609893 - DNA, 120 bp, Artificial Sequence
  ENSG00000176018_15 (sequence is synthesized)
atatttgcctctgatatttgaaagcacttttgtagttttgatgatgaaaaatatattaaacgtgcatattaccattatttaggaaataattccttatatactgtgataaatcattgctgt

SEQ ID NO: 609894 - DNA, 120 bp, Artificial Sequence
  ENSG00000176018_16 (sequence is synthesized)
tacatacagtaacatgccttaattacatttaatgccttactgctttatgtaagtaaatccaagtttcagaattaaaaataagcattatttcatatggtccaatcagattcgttacatagg

SEQ ID NO: 609895 - DNA, 120 bp, Artificial Sequence
  ENSG00000176018_17 (sequence is synthesized)
aggtctgttgaagaaaatggttcattaagcaaaaaagagtagaggtattttatattagcagtaacagacaaattatttagtaatcccttaacctctgtttttcaaagagaaaatatccaa

SEQ ID NO: 609896 - DNA, 120 bp, Artificial Sequence
  ENSG00000176018_18 (sequence is synthesized)
tttagacttttttcctgatctctatatatagcatcaaattgggaaacaaaggccaaaggtgtatagattgcttgaaagggggtggtagtgcctctttttaagatctgttgagtcggctac

SEQ ID NO: 609897 - DNA, 120 bp, Artificial Sequence
  ENSG00000176018_19 (sequence is synthesized)
agtctggctaagtaagaagcatttgcatactgattccatcatttaatctttaaaagtatgtgttttaaaaatgtaaccagaatgattcttcaatagaaatgagatttggtggagtctgga

SEQ ID NO: 609898 - DNA, 120 bp, Artificial Sequence
  ENSG00000176018_20 (sequence is synthesized)
ttgcctgttttgtatataatatatacttaagatatataataccacctcattttctgggcattatttcctaattgttgatgtttcaggcttttgataagtcattttatatatttcaaattt

SEQ ID NO: 609899 - DNA, 120 bp, Artificial Sequence
  ENSG00000176018_21 (sequence is synthesized)
aactcagaataagtaaatatttatggcaaatgcagttttatgtactttcaggagaagaccatcaggaaaagacaggacaaagaagtcaaacattaaagcccttgcaaatattagaggacc

SEQ ID NO: 609900 - DNA, 120 bp, Artificial Sequence
  ENSG00000176018_22 (sequence is synthesized)
ttagacaattaccaaaaagtgtttaatagggaagttgcaaatgattctcttagtaaattaaacatttaaaaagtagttttaatgtgccttgggcatcttgaaaagaagagtgtgatataa

SEQ ID NO: 609901 - DNA, 120 bp, Artificial Sequence
  ENSG00000176018_23 (sequence is synthesized)
tttatgcttagtgttaactggtcattttacattgtatttattaagtctgctgaaaaatgaggttttaaggaagaaaatgcagattattttagggtaaacaggccaggtgtcctttgaaga

SEQ ID NO: 609902 - DNA, 120 bp, Artificial Sequence
  ENSG00000176018_24 (sequence is synthesized)
actttgtttacatcaaattgatgaaattacagtcagtgattccttactttttttgctagttgtactttgaaattgttatgggttcgatttccaaaatatgtaacttattttttaaaggaa

SEQ ID NO: 609903 - DNA, 120 bp, Artificial Sequence
  ENSG00000176018_25 (sequence is synthesized)
taaggtgtgctgtgtatttgttgattaaaaatcatttgtcttgcagagtatccttttttgaaggaaatatacatccttataacacatcaggtagttttcttttttctgtatttaaattat

SEQ ID NO: 609904 - DNA, 120 bp, Artificial Sequence
  ENSG00000176018_26 (sequence is synthesized)
ggaataattttagtttctaaaaagtactaatgtaagttaagtttatatcaaatgcaaattaccttgtataactaacaagcacagttattgtttaacattatggattttaattgtgttgac

SEQ ID NO: 609905 - DNA, 120 bp, Artificial Sequence
  ENSG00000176018_27 (sequence is synthesized)
acccttctttgaatttgttgctttacatgtgtgtctgtgtgtgtgtctgcatgtgtgcacgcatgtacttgtatgcaatgtaaaagtaacagcagaatcattgcatttggtttacttaaa

SEQ ID NO: 609906 - DNA, 120 bp, Artificial Sequence
  ENSG00000176018_28 (sequence is synthesized)
attttggagttagcaagtaaacaaaaagctgatagttttatgaagtctcggttaaaataaaatttctttgctatctcactcctaggaagttatggagttcatattttcaaaagatatgtt

SEQ ID NO: 609907 - DNA, 120 bp, Artificial Sequence
  ENSG00000176018_29 (sequence is synthesized)
aaaaatggttacacactctgctggccacattaaaaattagaagactcatgttaaattatctcctccaaaggactttttatttacagcttttcttttcctggactctacctgcttggttca

SEQ ID NO: 609908 - DNA, 120 bp, Artificial Sequence
  ENSG00000176018_30 (sequence is synthesized)
gtgtcctgaagagttatttaaatgaaccactacttagtaattagttcttttttaaagtatctacttctaaaattacctagttgaaaatatgaaggatatgcttagttttagaaatatcat

SEQ ID NO: 609909 - DNA, 120 bp, Artificial Sequence
  ENSG00000176018_31 (sequence is synthesized)
gaagcaaggatctagtcagtgttacagggtaaaggtggagttttttaaagtctgtatttaaatggtgcactgatggattcatttttaatttgcattacaaaaatgttgctcaggtaatca

SEQ ID NO: 609910 - DNA, 120 bp, Artificial Sequence
  ENSG00000176018_32 (sequence is synthesized)
gtattttcttccacgtatgtgcatattgcactgttagatcatagaaatatctgaatgctttaatttttatgtatgcaaaatctataaatcttttgtataatgtattttatacaaatgtaa

SEQ ID NO: 609911 - DNA, 120 bp, Artificial Sequence
  ENSG00000176018_33 (sequence is synthesized)
ctgtagaacattgttagcatgtgtatctgtaaaaccagtttttaaaattttttgccccttatttttcatattttgaaagatctccaacatgtaataaagtttctcttattcaatctaaaa

SEQ ID NO: 609912 - DNA, 120 bp, Artificial Sequence
  ENSG00000176018_34 (sequence is synthesized)
aggcggacggggtcagcccaaagcagaggctcggccatgaacttacccgggacagcggcggcggcggaccttttggccatcttctcgcagagtgctccctgctaacggggacaggctgat

SEQ ID NO: 609913 - DNA, 120 bp, Artificial Sequence
  ENSG00000176018_35 (sequence is synthesized)
atcaagttgaccaaaccagaaatctaagcttcatactagacccactttatctctctgacatgaatcaggtagcagatatcaagagagttaacaatctcatcagtgatcaagacttttttg

SEQ ID NO: 609914 - DNA, 120 bp, Artificial Sequence
  ENSG00000176020_0 (sequence is synthesized)
gagagggctagcgaagccgaagggagcgcggctaagagtgccgcaccgcctcacaacctgggaaccggagagtaggggccgtcggctggcaagaacccgccgtgcctcctcggcaagggc

SEQ ID NO: 609915 - DNA, 120 bp, Artificial Sequence
  ENSG00000176020_1 (sequence is synthesized)
catccggtgccacccatgtcgcactagagcagaagagggtgagtcctggaactgcaacctgcacagagctgctctgtactgtccctggtggtcgccgccatgacctggttggtgctgctg

SEQ ID NO: 609916 - DNA, 120 bp, Artificial Sequence
  ENSG00000176020_2 (sequence is synthesized)
gggacactgctctgcatgctgcgcgttgggttaggcaccccggactccgagggtttcccgccccgtgcgctccacaactgcccctacaaatgtatctgcgctgccgacctgctaagctgc

SEQ ID NO: 609917 - DNA, 120 bp, Artificial Sequence
  ENSG00000176020_3 (sequence is synthesized)
actggcctagggctgcaggacgtgccagccgagttacctgccgctactgcggacctcgacctgagccacaacgcgctccagcgcctgcgccccggctggttggcgcccctcttccagctg

SEQ ID NO: 609918 - DNA, 120 bp, Artificial Sequence
  ENSG00000176020_4 (sequence is synthesized)
cgcgccctgcacctagaccacaacgaactagatgcgctgggtcgcggcgtcttcgtcaacgccagcggcctgaggctgctcgatctatcatctaacacgttgcgggcgcttggccgccac

SEQ ID NO: 609919 - DNA, 120 bp, Artificial Sequence
  ENSG00000176020_5 (sequence is synthesized)
gacctcgacgggctgggggcgctggagaagctgcttctgttcaataaccgcttggtgcacttggacgagcatgccttccacggcctgcgcgcgctcagccatctctacctgggctgcaac

SEQ ID NO: 609920 - DNA, 120 bp, Artificial Sequence
  ENSG00000176020_6 (sequence is synthesized)
gaactcgcctcgttctccttcgaccacctgcacggtctgagcgccacccacctgcttactctggacctctcctccaaccggctgggacacatctccgtacctgagctggccgcgctgccg

SEQ ID NO: 609921 - DNA, 120 bp, Artificial Sequence
  ENSG00000176020_7 (sequence is synthesized)
gccttcctcaagaacggcctctacttgcacaacaaccctttgccttgcgactgccgcctctaccacctgctacagcgctggcaccagcggggcctgagcgccgtgcgcgactttgcgcgc

SEQ ID NO: 609922 - DNA, 120 bp, Artificial Sequence
  ENSG00000176020_8 (sequence is synthesized)
gagtacgtatgcttggccttcaaggtacccgcgtcccgcgtgcgcttcttccagcacagccgcgtctttgagaactgctcgtcggccccagctcttggcctagagcggccggaagagcac

SEQ ID NO: 609923 - DNA, 120 bp, Artificial Sequence
  ENSG00000176020_9 (sequence is synthesized)
ctgtacgcgctggtgggtcggtccctgaggctttactgcaacaccagcgtcccggccatgcgcattgcctgggtttcgccgcagcaggagcttctcagggcgccaggatcccgcgatggc

SEQ ID NO: 609924 - DNA, 120 bp, Artificial Sequence
  ENSG00000176020_10 (sequence is synthesized)
agcatcgcggtgctggccgacggcagcttggccataggcaacgtacaggagcagcatgcgggactcttcgtgtgcctggccactgggccccgcctgcaccacaaccagacgcacgagtac

SEQ ID NO: 609925 - DNA, 120 bp, Artificial Sequence
  ENSG00000176020_11 (sequence is synthesized)
ctctacctgttcgccccaccctgccgctgctgccgccgtgcctgccgctgccgccgctggccccaaacacccagcccgctccaagagctgagcgcacagtcctcagtactcagcaccaca

SEQ ID NO: 609926 - DNA, 120 bp, Artificial Sequence
  ENSG00000176020_12 (sequence is synthesized)
ccgccagacgcacccagccgcaaggccagcgtccacaagcacgtagtctttctggagccaggccggaggggcctcaatggccgcgtgcagctggcagtagctgaggaattcgatctctac

SEQ ID NO: 609927 - DNA, 120 bp, Artificial Sequence
  ENSG00000176020_13 (sequence is synthesized)
aaccctggaggcctgcagctgaaggctggctctgagtccgccagctccataggctccgagggtcccatgacaacctagactgcccagggctcccccacccaggcccccaccctcttgctg

SEQ ID NO: 609928 - DNA, 120 bp, Artificial Sequence
  ENSG00000176020_14 (sequence is synthesized)
ctcgccctgctccctgcttcggtccagagaactggcagatactggtgggaagcactgtgcctggccccccagcttcctgtatgggcctcgaaacacaatgggccttctcgctcactggta

SEQ ID NO: 609929 - DNA, 120 bp, Artificial Sequence
  ENSG00000176020_15 (sequence is synthesized)
gagacaggggttgtggtccccaacctgccttctgctctgcccctgcacaggacccaaaggccccaggccctgcaaggtgtgctagttcctgctttcccgcggacttcctagtgcccaaat

SEQ ID NO: 609930 - DNA, 120 bp, Artificial Sequence
  ENSG00000176020_16 (sequence is synthesized)
gccctgtgaggctgagagacccaggcccctgtggctttcaacacagcacagctgtggaagtggctgtgttcttctacagcctgtggaagaacccctgtagcagagcctcccgtccaccct

SEQ ID NO: 609931 - DNA, 120 bp, Artificial Sequence
  ENSG00000176020_17 (sequence is synthesized)
caggggctgagacagctctcgaggagtggtgctcaagagctgacgcagggccacctccccttcccaagggggtgggagggagtgggcccacagggaaaagaaggcggctctgaaggaaga

SEQ ID NO: 609932 - DNA, 120 bp, Artificial Sequence
  ENSG00000176020_18 (sequence is synthesized)
tctcgcccacaccccaggacagaaagaggaaacaagcccgccctctggtgaaatgggactccctccatccaccaacacccaacctcctgaaagcttcacaacttcacgcagagtccggtg

SEQ ID NO: 609933 - DNA, 120 bp, Artificial Sequence
  ENSG00000176020_19 (sequence is synthesized)
ggcaggcaccaggcaggaaaggctcctcaagaggttcctggtggtctggcctaagccccagccagaggccctgctctctctggcctggggcatccacccgttgttctgaaggcagagccc

SEQ ID NO: 609934 - DNA, 120 bp, Artificial Sequence
  ENSG00000176020_20 (sequence is synthesized)
attctgtgggctcacaagacacagtgaaggggatcatggcctgcacccctgcttttcagcagtaaaaagcccgaaaagcctggcgagcatggccgagctgggagggccgagccggaactc

SEQ ID NO: 609935 - DNA, 120 bp, Artificial Sequence
  ENSG00000176020_21 (sequence is synthesized)
cacgtccctcgagagcaggagcctcttaagggctggcactggtctcagcctaatggctgaggcggtaccctggcttcatatgcatctcactgctcccactgcaggggggcagggaagggg

SEQ ID NO: 609936 - DNA, 120 bp, Artificial Sequence
  ENSG00000176020_22 (sequence is synthesized)
ggtctgggagcccttcatgtgtgggggccgagctgggggcccccatggccatcctggacctcgctgctccagagtttaataaaggtagcacatgcttattgctagagcctttgcagacaa

SEQ ID NO: 609937 - DNA, 80 bp, Artificial Sequence
  ENSG00000176022_0 (sequence is synthesized)
cggcgctaggcctgggcacgctggcgctgtgcggggcggcgctgctctacctggcgcgctgcgcggccgagcccggggac

SEQ ID NO: 609938 - DNA, 80 bp, Artificial Sequence
  ENSG00000176022_1 (sequence is synthesized)
cgctgtgcggggcggcgctgctctacctggcgcgctgcgcggccgagcccggggaccccagggcgatgtcgggccgcagc

SEQ ID NO: 609939 - DNA, 80 bp, Artificial Sequence
  ENSG00000176022_2 (sequence is synthesized)
gcgccgccgagcgccgcagcgtgatccgcagcacgtggcttgcgcggcgcggggccccgggcgacgtgtgggcgcgcttt

SEQ ID NO: 609940 - DNA, 120 bp, Artificial Sequence
  ENSG00000176022_3 (sequence is synthesized)
cgcgccctggagcgggagcaggcgcggcacggggacctgctgctgctgcccgcgctgcgcgacgcctacgaaaacctcacggccaaggtgctggccatgctggcctggctggacgagcac

SEQ ID NO: 609941 - DNA, 120 bp, Artificial Sequence
  ENSG00000176022_4 (sequence is synthesized)
gtggccttcgagttcgtgctcaaggcggacgacgactccttcgcgcggctggacgcgctgctggccgagctgcgcgcccgcgagcccgcgcgccgccgccgcctctactggggcttcttc

SEQ ID NO: 609942 - DNA, 120 bp, Artificial Sequence
  ENSG00000176022_5 (sequence is synthesized)
tcgggccgcggccgcgtcaagccgggggggcgctggcgcgaggccgcctggcaactctgcgactactacctgccctacgcgctgggcggcggctacgtgctctcggccgacctggtgcac

SEQ ID NO: 609943 - DNA, 120 bp, Artificial Sequence
  ENSG00000176022_6 (sequence is synthesized)
tacctgcgcctcagccgcgactacctgcgcgcctggcacagcgaggacgtgtctctgggcgcctggctggcgccggtggacgtccagcgggagcacgacccgcgcttcgacaccgaatac

SEQ ID NO: 609944 - DNA, 120 bp, Artificial Sequence
  ENSG00000176022_7 (sequence is synthesized)
cggtcccgcggctgcagcaaccagtacctggtgacgcacaagcagagcctggaggacatgctggagaagcacgcgacgctggcgcgcgagggccgcctgtgcaagcgcgaggtgcagctg

SEQ ID NO: 609945 - DNA, 120 bp, Artificial Sequence
  ENSG00000176022_8 (sequence is synthesized)
cgcctgtcctacgtgtacgactggtccgcgccgccctcgcagtgctgccagagaagggagggcatcccctgagccgccgcggcccggccctccgggacacctgcttcacccggcggcgcc

SEQ ID NO: 609946 - DNA, 120 bp, Artificial Sequence
  ENSG00000176022_9 (sequence is synthesized)
ttggggcaggtgccgagcgggcgcactacgcccgggccccaaggcccccgtcccgcagccacgcttgtggtcgctgcgtcccggtctgcgtttgggagacccctgggggttgccggggca

SEQ ID NO: 609947 - DNA, 120 bp, Artificial Sequence
  ENSG00000176022_10 (sequence is synthesized)
gcgcgccgtgtccaggtggaggtgcccgttcctggacctcagcgagcctgagccgggcccggccgcacgctgacccccgtgctgtccccgaccggctcacggggctgggctccgatcttc

SEQ ID NO: 609948 - DNA, 120 bp, Artificial Sequence
  ENSG00000176022_11 (sequence is synthesized)
aacgtggtttcacatcaatccgctttcatgggattttggtctctgtccagtgacttcgtggtaaatgtaactcagtgtttgcttgcgacttatttataaatattgtaagtttgtgtcgat

SEQ ID NO: 609949 - DNA, 120 bp, Artificial Sequence
  ENSG00000176022_12 (sequence is synthesized)
gagtgtaagttggcagtgcgcacgtctcggtttttttacatgatttaaggaaagacttttatgtcagaacttggtgcctgtaccgtcaaccccgctgctgcccgtgtttaaacgcaggag

SEQ ID NO: 609950 - DNA, 120 bp, Artificial Sequence
  ENSG00000176022_13 (sequence is synthesized)
aactttaaaactggccatctatcttttcagtgtacaagtcactgaacccattgtttctttctgaagagactttcctttcaaggcttcccatgggtccgcgccacacagggccggtgctgc

SEQ ID NO: 609951 - DNA, 120 bp, Artificial Sequence
  ENSG00000176022_14 (sequence is synthesized)
tttatttcagactctgccccaggttccaggaatccgaaccccggagtgctgacgcggttccccaacttccgccttaagaaaacaggaccagccggcaccaggcccgtctctcacgtactt

SEQ ID NO: 609952 - DNA, 120 bp, Artificial Sequence
  ENSG00000176022_15 (sequence is synthesized)
taacacatccttgaaagcccctcgtttaatgagaaaagcgaacactgcggtccttgccaaagtaaaatgaagctgccccaggacaaggggttaccatgagctccctggagtccgacgcgg

SEQ ID NO: 609953 - DNA, 120 bp, Artificial Sequence
  ENSG00000176022_16 (sequence is synthesized)
gttttctctctgggggacctgggtggtccccgctgtggtctttgttgtcccactttgggaccgggtccagtctggggtctagtctcgagcatcagggtcaggctcggggcagggctgggt

SEQ ID NO: 609954 - DNA, 120 bp, Artificial Sequence
  ENSG00000176022_17 (sequence is synthesized)
taggctccgggtcagtcttgccatgggtttgggagcaggtttgggttacttgcgtttgaaggcagcagtggtctcaggaggaagaaacgggggcgggagagagtggtgatctgtggtcag

SEQ ID NO: 609955 - DNA, 120 bp, Artificial Sequence
  ENSG00000176022_18 (sequence is synthesized)
tgggtcagtgacctgcacggtgattctcccacctccaaaaggtaggggtgggactggaggcgtccctaggtcaggccgttgagttcgagctccgatgggccaccttgaatccaggactga

SEQ ID NO: 609956 - DNA, 120 bp, Artificial Sequence
  ENSG00000176022_19 (sequence is synthesized)
ccgcccgtgtgtgcacagtttgttcttggacgaggactcgtgaggatcgagggctggggaccccggtgtgagcaggatggggccctgccctcccgtgggagttgtggactcgagcccagg

SEQ ID NO: 609957 - DNA, 120 bp, Artificial Sequence
  ENSG00000176022_20 (sequence is synthesized)
ggctgcccgtcacagcggtgtcccaggtccctgccatccgattttacctgggatgtcttctctggagtttggaattgcttgaggaaccctgcgtgtgcttggagaggccagagggcttgc

SEQ ID NO: 609958 - DNA, 120 bp, Artificial Sequence
  ENSG00000176022_21 (sequence is synthesized)
tgagaaccccatggacagtggagagcgggattcgaaccaagggctggactcccacacctctggcctgcgtcgcccagttctttgtggctctgaagaattggccgctgtggaaaagagcaa

SEQ ID NO: 609959 - DNA, 120 bp, Artificial Sequence
  ENSG00000176022_22 (sequence is synthesized)
atgtccgagacccccaacaggaagagtctaaaaatccagtttgcaaccacttctgacctacaaaaaaatggaaatttagtgtttttcagcctaagacattaaatttcatatcagaacaaa

SEQ ID NO: 609960 - DNA, 77 bp, Artificial Sequence
  ENSG00000176024_0 (sequence is synthesized)
gcccagaagtggaataattcaggaaagtgcaggttctgggaagtctcggtgggttccccgcaaaatcagagatggca

SEQ ID NO: 609961 - DNA, 120 bp, Artificial Sequence
  ENSG00000176024_1 (sequence is synthesized)
tgctgggattccaggtgtgagccacttcacccagccacatttatccatcttgtaaaatattgctttgttttttggtgcatttcaaacccacaggtcctgacttcaggagcaagacacttc

SEQ ID NO: 609962 - DNA, 120 bp, Artificial Sequence
  ENSG00000176024_2 (sequence is synthesized)
ggtcctgacttcaggagcaagacacttcaagtgaggtgaggaggaggttccaggacctggataccatcctttgcagggatgtaattcaccagagaccaagatttctagccagaaattgag

SEQ ID NO: 609963 - DNA, 120 bp, Artificial Sequence
  ENSG00000176024_3 (sequence is synthesized)
ggcagctcaaggagagactacagacacagcatcctacttactggctatttcccagtaacaaaagaaaatgatcaagtcccaggaatcactgaccctggaggatgtggctgtggagttcac

SEQ ID NO: 609964 - DNA, 120 bp, Artificial Sequence
  ENSG00000176024_4 (sequence is synthesized)
ttgggaggagtggcagctcctcggccctgctcagaaggacctgtaccgagacgtgatgttggagaactatagcaacctcgtgtcagtggggtatcaagccagcaaaccagatgcactctt

SEQ ID NO: 609965 - DNA, 120 bp, Artificial Sequence
  ENSG00000176024_5 (sequence is synthesized)
caagttggaacaaggagagccatggacagtagaaaatgaaatccacagccaaatctgtccagaaatcaagaaagttgacaatcatctacagatgcactcacaaaagcaaagatgtctgaa

SEQ ID NO: 609966 - DNA, 120 bp, Artificial Sequence
  ENSG00000176024_6 (sequence is synthesized)
gagagtggaacaatgccataaacataatgcatttggaaacatcattcatcagaggaaaagtgattttcctttaaggcaaaatcatgatacatttgacttacatgggaaaatactgaaatc

SEQ ID NO: 609967 - DNA, 120 bp, Artificial Sequence
  ENSG00000176024_7 (sequence is synthesized)
aaatttaagtttagtcaaccagaacaaaaggtatgaaatcaagaattctgtgggggttaatggagatgggaaatccttccttcatgccaagcatgaacaatttcataatgaaatgaactt

SEQ ID NO: 609968 - DNA, 120 bp, Artificial Sequence
  ENSG00000176024_8 (sequence is synthesized)
ccccgaaggtggaaattctgtgaatacaaattcacaattcattaagcatcagcgaactcaaaacatagataaaccccatgtatgcactgagtgtgggaaggctttcctcaagaagtctcg

SEQ ID NO: 609969 - DNA, 120 bp, Artificial Sequence
  ENSG00000176024_9 (sequence is synthesized)
cctcatctatcatcagagagttcacactggggagaaacctcatggatgcagtatatgtgggaaagccttctccagaaagtccgggctcactgaacaccagagaaaccacacaggagagaa

SEQ ID NO: 609970 - DNA, 120 bp, Artificial Sequence
  ENSG00000176024_10 (sequence is synthesized)
accctatgaatgcactgaatgtgacaaagcattccgctggaaatcacagctcaatgcacaccagaaaattcatacaggagagaagtcatatatatgcagtgattgtggaaaaggcttcat

SEQ ID NO: 609971 - DNA, 120 bp, Artificial Sequence
  ENSG00000176024_11 (sequence is synthesized)
caagaagtctcggctcattaatcatcagagagttcatacaggagagaaaccacatggatgcagcctgtgtgggaaggccttctccaaaaggtccaggctcactgaacaccagagaactca

SEQ ID NO: 609972 - DNA, 120 bp, Artificial Sequence
  ENSG00000176024_12 (sequence is synthesized)
tacaggagagaaaccctatgaatgcactgaatgtgacaaagcattccgctggaaatcacagctcaatgcacatcagaaagctcacacaggagagaagtcatatatatgccgtgattgtgg

SEQ ID NO: 609973 - DNA, 120 bp, Artificial Sequence
  ENSG00000176024_13 (sequence is synthesized)
tcatactggagaaaaaccctatatatgcaatgaatgtggaaaaggcttcatccaaaagggcaacctccttattcatcgacgtactcacactggagagaaaccctatgtatgcaatgaatg

SEQ ID NO: 609974 - DNA, 120 bp, Artificial Sequence
  ENSG00000176024_14 (sequence is synthesized)
tgggaaaggcttcagccagaagacatgtttaatatcccatcagagatttcacacaggaaagacaccctttgtatgtactgagtgtggaaaatcctgctcacacaagtcaggtctcattaa

SEQ ID NO: 609975 - DNA, 120 bp, Artificial Sequence
  ENSG00000176024_15 (sequence is synthesized)
ccaccagagaattcacacaggagagaaaccctatacatgcagtgactgtgggaaagctttcagagataaatcatgtctcaacagacatcggagaactcatacaggggagagaccgtatgg

SEQ ID NO: 609976 - DNA, 120 bp, Artificial Sequence
  ENSG00000176024_16 (sequence is synthesized)
atgctctgattgtgggaaagctttctcccacttgtcatgccttgtttatcataagggaatgctgcatgcaagagagaaatgtgtaggttcagtcaaattggaaaatccttgctcagagag

SEQ ID NO: 609977 - DNA, 120 bp, Artificial Sequence
  ENSG00000176024_17 (sequence is synthesized)
tcatagcttatcacatacacgtgatctcatacaggataaagactctgttaacatggtgactctgcagatgccttctgtggcagctcagacctcattaactaacagtgcgttccaagcaga

SEQ ID NO: 609978 - DNA, 120 bp, Artificial Sequence
  ENSG00000176024_18 (sequence is synthesized)
gagcaaagtagccattgtgagccagcctgttgccagaagttcagtctcagcagatagtagaatttgcacagaataaaaaccatatgaatgcagtgaatgtggtagtgctttcagtgatca

SEQ ID NO: 609979 - DNA, 120 bp, Artificial Sequence
  ENSG00000176024_19 (sequence is synthesized)
attacatcatatgtcacaaaaaacacagaggaacaaactgatatattcaaggtggaaagcccttgaataaaaccttatggctaataagcatatactcagagaaaaatagtatgaagtgga

SEQ ID NO: 609980 - DNA, 120 bp, Artificial Sequence
  ENSG00000176024_20 (sequence is synthesized)
gactgggaaattcttttatgggaagatagatcttctcatcagtgaccatagatcacatcttcagtgagcttatagttggtagaaatataatgatcatggaaaagtccttgttcagaaaca

SEQ ID NO: 609981 - DNA, 120 bp, Artificial Sequence
  ENSG00000176024_21 (sequence is synthesized)
gtacgccagtaggtatcagggggtttacacaggagagaaacttttggaagacctttgaaggctatgaatgtggcagggttgctagtggtacattctgccttatcctcagagggaatcata

SEQ ID NO: 609982 - DNA, 120 bp, Artificial Sequence
  ENSG00000176024_22 (sequence is synthesized)
tagaaataaaactatgaaaatgtaactagaacatcttcatcaaaatatgaaagaacacacgaagcaaataagccctgtgaaaaggagtattttagagatttcgatcagaaatctaacatc

SEQ ID NO: 609983 - DNA, 120 bp, Artificial Sequence
  ENSG00000176024_23 (sequence is synthesized)
attatatggcagataatatacaggatgtgtattttaggacaatataccttgaatcactagttgatatgtcaatgactaattaaaaggggttgtcagtgttacacatcattggttaaattt

SEQ ID NO: 609984 - DNA, 120 bp, Artificial Sequence
  ENSG00000176024_24 (sequence is synthesized)
atagcacaatgtacctcttcccccttttttgataagagtcttctattcccaaccaagatcattatatgattagctcttgtgtttctttgattccaaatttcttcacttgttatttcagac

SEQ ID NO: 609985 - DNA, 120 bp, Artificial Sequence
  ENSG00000176024_25 (sequence is synthesized)
tactgaagctcttcaaaaggaaaaatgtatttaatttaataatgtaacacaacaagtttggatgtgtttaactttataaataatcaccccagaggaatgaagttcaaaacttgtgaataa

SEQ ID NO: 609986 - DNA, 120 bp, Artificial Sequence
  ENSG00000176024_26 (sequence is synthesized)
agatcgctcccgtatttggcctcaagacaattctcggctagactagccttgcccattcttttctgcatccgttgaaggagattcagaacatccacaaatttggtccactctgtgaccgct

SEQ ID NO: 609987 - DNA, 120 bp, Artificial Sequence
  ENSG00000176024_27 (sequence is synthesized)
atgacttttctccccagcccgctaaggtgcacgtagccataccatgtttgtcttggctaagctcgaccctctgaaaataaatgaaacttgggcgcaggatttaggtgccaaaatatggag

SEQ ID NO: 609988 - DNA, 120 bp, Artificial Sequence
  ENSG00000176024_28 (sequence is synthesized)
ttcttcaccgtcccgcgctatccctgaatacttgggcagaaaaggtccactttaccttccgtacgtgcaggattcaaagatggctgcctccagtatccgtgacgagaggacgcgaactta

SEQ ID NO: 609989 - DNA, 120 bp, Artificial Sequence
  ENSG00000176024_29 (sequence is synthesized)
tcctaaagtgctgggattccagcccacaggtcctgacttcaggagcaagacacttcaagtgaggtgaggaggaggttccaggacctggataccatcctttgcagggatgtaattcaccag

SEQ ID NO: 609990 - DNA, 78 bp, Artificial Sequence
  ENSG00000176024_30 (sequence is synthesized)
ttcaagttggaacaaggagagccatggacagtagaaaatgaaatccacagccaaatctgtccagagtctctctctgtc

SEQ ID NO: 609991 - DNA, 120 bp, Artificial Sequence
  ENSG00000176024_31 (sequence is synthesized)
ctcggccgccgtaggccggcttggaggctgggggagggcccagaagtggaataattcaggaaagtgcaggttctgggaagtctcggtgggttccccgcaaaatcaggcttgagtgcagtg

SEQ ID NO: 609992 - DNA, 120 bp, Artificial Sequence
  ENSG00000176024_32 (sequence is synthesized)
gcgcaatcgtggctcactgcagcctccatctcccggggctcaggtgattttcccacctcagctttcccgagtagctgggactacagagatggcatctcactatgttgcccaggctgatct

SEQ ID NO: 609993 - DNA, 120 bp, Artificial Sequence
  ENSG00000176029_0 (sequence is synthesized)
agaaggagcctgaggctgaggtggaggctgggagtttggggctgtgggtggatcctctgaaggccatggaatcctccacggggcccaggatgcctttgctcaaatactgcagcgtggcca

SEQ ID NO: 609994 - DNA, 120 bp, Artificial Sequence
  ENSG00000176029_1 (sequence is synthesized)
caagcctgaaggcccctggctgggacggtgctgctccaccttgggacctctccttcacctacccctttgccctccaagcaccctggctcaccgggcacaagccccttgcaaggcatgcct

SEQ ID NO: 609995 - DNA, 120 bp, Artificial Sequence
  ENSG00000176029_2 (sequence is synthesized)
cttcttgcccatgtctccacgttgccgacccagcatggcaggggcctggctggctgggaagagctggagatgctgccaacacatgggtcctagcaagaagggaagcagatggtttttact

SEQ ID NO: 609996 - DNA, 120 bp, Artificial Sequence
  ENSG00000176029_3 (sequence is synthesized)
accgggcccaaataaaggccactcccgagctggagagacagggggtcctgcttgtggaattcgaggctcctcttgtcgcaggcccaaagctgccagcccagcagcagagagtggtcttag

SEQ ID NO: 609997 - DNA, 120 bp, Artificial Sequence
  ENSG00000176029_4 (sequence is synthesized)
aagaggatgtcattcctctctcaccatctgtaggatactcactgagaccaggggataaggtgctggcactctgggagccaggccaacagcagtatggccctggcactgttcttttgggct

SEQ ID NO: 609998 - DNA, 120 bp, Artificial Sequence
  ENSG00000176029_5 (sequence is synthesized)
tggagatgagagatccccagagagcatcaaaggaaaaagaaatcactgttcatttctggaatggcaaagctgctaaagtgcccctaggtggggtccagtcggtgtccctgaccatctgga

SEQ ID NO: 609999 - DNA, 120 bp, Artificial Sequence
  ENSG00000176029_6 (sequence is synthesized)
agaaggctgtggagaggctgcacaagtctttcaccagggagcaccccaggccccttcactgggccccttgctgctctctgctagggccaatcactgggcgcatcactaatgagcttcctc

SEQ ID NO: 610000 - DNA, 120 bp, Artificial Sequence
  ENSG00000176029_7 (sequence is synthesized)
gcctctgtggctgcccgccatgtggcacgacttggtggcctctaaccaggacctcagaagtcatggccagagaacttccagagttggagcccacagcacagcttttgcccctggaaggtc

SEQ ID NO: 610001 - DNA, 120 bp, Artificial Sequence
  ENSG00000176029_8 (sequence is synthesized)
ctaaagaggagaaagtagcaatgcacgctcccctggctgtttcttcctcctcatcctcctcctgtgaacaagacggtgtggagaatgatctggagatgggccctccccagagactgatgg

SEQ ID NO: 610002 - DNA, 120 bp, Artificial Sequence
  ENSG00000176029_9 (sequence is synthesized)
tgaacagtgcagtcaacacagatcccatctttcttgagatgcctctgagacagagtggcctctgccagcctgagtggaggtattggaagagaaacgggcctgagccatgccttgggaagc

SEQ ID NO: 610003 - DNA, 120 bp, Artificial Sequence
  ENSG00000176029_10 (sequence is synthesized)
caggaacaagatattccaacatctgcaaagaagaaaaggatcacaaacagcagagagcacaaactgcagtagtggggactaccaaggagctggtctcgaaagcaacccacatgaagccac

SEQ ID NO: 610004 - DNA, 120 bp, Artificial Sequence
  ENSG00000176029_11 (sequence is synthesized)
cgcggaccccgccaggggaagctgaacacagaaagcggagtcagagccttgcaatatgtcagtggaacaagaattcccgttagactaagagccctgaggatctaggtaaagaataaacat

SEQ ID NO: 610005 - DNA, 120 bp, Artificial Sequence
  ENSG00000176029_12 (sequence is synthesized)
ggtaaatattcgaggagagttatacagagtggctgacaaggccttcttcaacggaaggaggcagaggacaggccacaggtaacagtcaaataaccaccagtatctccaccccacgaagac

SEQ ID NO: 610006 - DNA, 120 bp, Artificial Sequence
  ENSG00000176029_13 (sequence is synthesized)
ctccctgcagataagcagcaggaaggcacctgttgtgagggctataggaatgtgggatcctgccctggggctccctgccagggccctggtgaaactgctttaagatgcctcttccgtgga

SEQ ID NO: 610007 - DNA, 120 bp, Artificial Sequence
  ENSG00000176029_14 (sequence is synthesized)
agagggggtcagcctgctttgggcaaatgtgtccacagccactctgccaccttcccataaagcctagttgtacatgagtgacattttgtttcacctcttaataaaaatgaattctcttca

SEQ ID NO: 610008 - DNA, 120 bp, Artificial Sequence
  ENSG00000176029_15 (sequence is synthesized)
cgaggcaagtccctgaccccagtatctccctggcgtgctcctctgggtggccttgtcatacctgacatgccttagctgtgtacatctagcaggctggtttcttgcataagcacagctctc

SEQ ID NO: 610009 - DNA, 120 bp, Artificial Sequence
  ENSG00000176029_16 (sequence is synthesized)
ccatggccatgttgtagaagtgaacatgtaataccattgagtgtattagtttgctagggctccctaacaaagtgcaacaaacggagtggcttaaaccacagaaatgtgtcatctcccatt

SEQ ID NO: 610010 - DNA, 120 bp, Artificial Sequence
  ENSG00000176029_17 (sequence is synthesized)
tctggaggctggaagtccaggggttggcaaggttggttccttctgagagctatgaagaagaatcattcccatgccctgcttctggcttctcatggcttgctggcaggctttggtgttcct

SEQ ID NO: 610011 - DNA, 120 bp, Artificial Sequence
  ENSG00000176029_18 (sequence is synthesized)
cagcttatagaggcatcgccttgatctctgcctttacctttatggggctttctccctgagtgtgtgtctgcccacatttccccctttataaggacatcaatcacactggattagggacct

SEQ ID NO: 610012 - DNA, 120 bp, Artificial Sequence
  ENSG00000176029_19 (sequence is synthesized)
agctctgtggccacaatcgctccttgcctacatgagcctcataggtgaacaaccatcctgttggtcttggacacatccctggttggtcttggacacaggagcgacgcttcttgggggtgc

SEQ ID NO: 610013 - DNA, 120 bp, Artificial Sequence
  ENSG00000176029_20 (sequence is synthesized)
tggaaggaggagattgcattgagaaaaggtccagggaggacccagctggagagacagggggtcctgcttgtggaattcgaggctcctcttgtcgcaggcccaaagctgccagcccagcag

SEQ ID NO: 610014 - DNA, 120 bp, Artificial Sequence
  ENSG00000176040_0 (sequence is synthesized)
tcatctggctgctcatctgtatcctttataataaagaaggaatagtaaaacagaaagcaaagatgctttttactttgctgggatgtttcgcatcaccaacattgagtttcttcccgaata

SEQ ID NO: 610015 - DNA, 120 bp, Artificial Sequence
  ENSG00000176040_1 (sequence is synthesized)
ccgacaaaaggagtccagggaatttctttcagtgtcacggactgtgcagcaagtgataaacctggtttatacaacatctgccttctccaaattttatgagcagtctgttgttgcagatgt

SEQ ID NO: 610016 - DNA, 120 bp, Artificial Sequence
  ENSG00000176040_2 (sequence is synthesized)
cagcaacaacaaaggcggcctccttgtccacttttggattgtttttgtcatgccacgtgccaaaggccacatcttctgtgaagactgtgttgccgccatcttgaaggactccatccagac

SEQ ID NO: 610017 - DNA, 120 bp, Artificial Sequence
  ENSG00000176040_3 (sequence is synthesized)
aagcatcataaaccggacctctgtggggagcttgcagggactggctgtggacatggactctgtggtactaaatgacaaaggctgctctcagtacttctatgcagagcatctgtctctcca

SEQ ID NO: 610018 - DNA, 120 bp, Artificial Sequence
  ENSG00000176040_4 (sequence is synthesized)
ctacccgctggagatttctgcagcctcagggaggctgatgtgtcacttcaagctggtggccatagtgggctacctgattcgtctctcaatcaagtccatccaaatcgaagccgacaactg

SEQ ID NO: 610019 - DNA, 120 bp, Artificial Sequence
  ENSG00000176040_5 (sequence is synthesized)
tgtcactgactccctgaccatttacgactcccttttgcccatccggagcagcatcttgtacagaatttgtgaacccacaagaacattaatgtcatttgtttctacaaataatctcatgtt

SEQ ID NO: 610020 - DNA, 120 bp, Artificial Sequence
  ENSG00000176040_6 (sequence is synthesized)
ggtgacatttaagtctcctcatatacggaggctctcaggaatccgggcatattttgaggtcattccagaacaaaagtgtgaaaacacagtgttggtcaaagacatcactggctttgaagg

SEQ ID NO: 610021 - DNA, 120 bp, Artificial Sequence
  ENSG00000176040_7 (sequence is synthesized)
gaaaatttcaagcccatattacccgagctactatcctccaaaatgcaagtgtacctggaaatttcagacttctctatcaactcttggcatagcactgaaattctataactattcaataac

SEQ ID NO: 610022 - DNA, 120 bp, Artificial Sequence
  ENSG00000176040_8 (sequence is synthesized)
caagaagagtatgaaaggctgtgagcatggatggtgggaaattaatgagcacatgtactgtggctcctacatggatcatcagacaatttttcgagtgcccagccctctggttcacattca

SEQ ID NO: 610023 - DNA, 120 bp, Artificial Sequence
  ENSG00000176040_9 (sequence is synthesized)
ttggcagaatatggcagttacaacatcagtcaaccctgccctgttggatcttttagatgctcctccggtttatgtgtccctcaggcccagcgttgtgatggagtaaatgactgctttgat

SEQ ID NO: 610024 - DNA, 120 bp, Artificial Sequence
  ENSG00000176040_10 (sequence is synthesized)
gaaagtgatgaactgttttgcgtgagccctcaacctgcctgcaataccagctccttcaggcagcatggccctctcatctgtgatggcttcagggactgtgagaatggccgggatgagcaa

SEQ ID NO: 610025 - DNA, 120 bp, Artificial Sequence
  ENSG00000176040_11 (sequence is synthesized)
aactgcactcaaagtattccatgcaacaacagaacttttaagtgtggcaatgatatttgctttaggaaacaaaatgcaaaatgtgatgggacagtggattgtccagatggaagtgatgaa

SEQ ID NO: 610026 - DNA, 120 bp, Artificial Sequence
  ENSG00000176040_12 (sequence is synthesized)
gaaggctgcacctgcagcaggagttcctccgcccttcaccgcatcatcggaggcacagacaccctggaggggggttggccgtggcaggtcagcctccactttgttggatctgcctactgt

SEQ ID NO: 610027 - DNA, 120 bp, Artificial Sequence
  ENSG00000176040_13 (sequence is synthesized)
ggtgcctcagtcatctccagggagtggcttctttctgcagcccactgttttcatggaaacaggctgtcagatcccacaccatggactgcacacctcgggatgtatgttcaggggaatgcc

SEQ ID NO: 610028 - DNA, 120 bp, Artificial Sequence
  ENSG00000176040_14 (sequence is synthesized)
aagtttgtctccccggtgagaagaattgtggtccacgagtactataacagtcagacttttgattatgatattgctttgctacagctcagtattgcctggcctgagaccctgaaacagctc

SEQ ID NO: 610029 - DNA, 120 bp, Artificial Sequence
  ENSG00000176040_15 (sequence is synthesized)
attcagccaatatgcattcctcccactggtcagagagttcgcagtggggagaagtgctgggtaactggctgggggcgaagacacgaagcagataataaaggctccctcgttctgcagcaa

SEQ ID NO: 610030 - DNA, 120 bp, Artificial Sequence
  ENSG00000176040_16 (sequence is synthesized)
gcggaggtagagctcattgatcaaacgctctgtgtttccacctacgggatcatcacttctcggatgctctgtgcaggcataatgtcaggcaagagagatgcctgcaaaggagattcgggt

SEQ ID NO: 610031 - DNA, 120 bp, Artificial Sequence
  ENSG00000176040_17 (sequence is synthesized)
ggacctttatcttgtcgaagaaaaagtgatggaaaatggattttgactggcattgttagctggggacatggaagtggacgaccaaactttcctggtgtttacacaagggtgtcaaacttt

SEQ ID NO: 610032 - DNA, 120 bp, Artificial Sequence
  ENSG00000176040_18 (sequence is synthesized)
gttccctggattcataaatatgtcccttctcttttgtaattgtaccagttgtatttttactgtgatttatgttaaaaatagatactttaaaatgatgcagtaattggctgggtgcgctgg

SEQ ID NO: 610033 - DNA, 120 bp, Artificial Sequence
  ENSG00000176040_19 (sequence is synthesized)
ataatggacaaagaaaacagcgatgtttcagccgcacctgctgacctgaaaatatccaatatctcagtccaagtggtcagtgcccaaaagaagctgccagtgagacgaccaccgttgcca

SEQ ID NO: 610034 - DNA, 120 bp, Artificial Sequence
  ENSG00000176040_20 (sequence is synthesized)
gggagacgactaccattgccaggaagacgaccaccacaaagacccattggcaaagccaaacccaagaagcaatccaagaaaaaagttcccttttggaatgtacaaaataaaatcattctc

SEQ ID NO: 610035 - DNA, 120 bp, Artificial Sequence
  ENSG00000176040_21 (sequence is synthesized)
atgaggaaaggtggtgagagagagggcacatcaaagacaatagtgctcagagcagcttttacttattgaatgcctgctatatactggataaacctggtttatacaacatctgccttctcc

SEQ ID NO: 610036 - DNA, 120 bp, Artificial Sequence
  ENSG00000176040_22 (sequence is synthesized)
cagggactggctgtggacatggactctgtggtactaaatgaagtcctggggctgactctcattgtctggattgactgacatgcctattcttgaaatgacttctttgactctgattggcca

SEQ ID NO: 610037 - DNA, 120 bp, Artificial Sequence
  ENSG00000176046_0 (sequence is synthesized)
ccagctgggtgagcctgggagggaggaggtgagttgggctggactcagggaccgactcttcccgtctcatgactgtgtttactgggctggattttgggaaggggccagattgcatcagac

SEQ ID NO: 610038 - DNA, 120 bp, Artificial Sequence
  ENSG00000176046_1 (sequence is synthesized)
agggcctgatgggctggagccagactgtggtctgaggaggagacacagccttataagctgagggagtggagaggcccggggccaggaaagcagagacagacaaagcgttaggagaagaag

SEQ ID NO: 610039 - DNA, 120 bp, Artificial Sequence
  ENSG00000176046_2 (sequence is synthesized)
agaggcagggaagacaagccaggcacgatggccaccttcccaccagcaaccagcgccccccagcagcccccaggcccggaggacgaggactccagcctggatgaatctgacctctatagc

SEQ ID NO: 610040 - DNA, 120 bp, Artificial Sequence
  ENSG00000176046_3 (sequence is synthesized)
ctggcccattcctacctcggaggtggaggccggaaaggtcgcaccaagagagaagctgctgccaacaccaaccgccccagccctggcgggcacgagaggaaactggtgaccaagctgcag

SEQ ID NO: 610041 - DNA, 120 bp, Artificial Sequence
  ENSG00000176046_4 (sequence is synthesized)
aattcagagaggaagaagcgaggggcacggcgctgagacagagctggagatgaggccagaccatggacactacacccagcaatagagacgggactgcggaggaaggaggacccaggacag

SEQ ID NO: 610042 - DNA, 120 bp, Artificial Sequence
  ENSG00000176046_5 (sequence is synthesized)
gatccaggccggcttgccacaccccccacccctaggacttattcccgctgactgagtctctgaggggctaccaggaaagcgcctccaaccctagcaaaagtgcaagatggggagtgagag

SEQ ID NO: 610043 - DNA, 120 bp, Artificial Sequence
  ENSG00000176046_6 (sequence is synthesized)
gctgggaatggaggggcagagccaggaagatcccccagaaaagaaagctacagaagaaactggggctcctccagggtggcagcaacaataaatagacacgcacggcagccacagcttggg

SEQ ID NO: 610044 - DNA, 120 bp, Artificial Sequence
  ENSG00000176046_7 (sequence is synthesized)
tgtgtgttcatccttgttctttgtgtgtttttgttcgggcatgtgtgtgcttgcctgtgcctgcacattcatgagcctgagagagcatctttgatgtgtatttgtgtttggtgtatgtat

SEQ ID NO: 610045 - DNA, 120 bp, Artificial Sequence
  ENSG00000176046_8 (sequence is synthesized)
ctggggcagggagtgttcctgctcttgcagggtctacgctgtgaatgcagcttttggtttgtttgcttttgcttgcatatattttagtgcatacatttctgtgggctcctacgtagtgga

SEQ ID NO: 610046 - DNA, 120 bp, Artificial Sequence
  ENSG00000176046_9 (sequence is synthesized)
aaggaatttcttctgcttttttgcgatactgcccatgaaacacggccctccccagcacctgtttttgttgattgtgtcctgttcatagacgggaacgctacttatgagtgccatctaaaa

SEQ ID NO: 610047 - DNA, 76 bp, Artificial Sequence
  ENSG00000176046_10 (sequence is synthesized)
gttcatagacgggaacgctacttatgagtgccatctaaaagtcagagaaaactgagatttaaaatattaaaagcca

SEQ ID NO: 610048 - DNA, 60 bp, Artificial Sequence
  ENSG00000176046_11 (sequence is synthesized)
ctaaagtctgggagcagtggctcatgcctgtaatcacagcagtttaggaggccgaagtgg

SEQ ID NO: 610049 - DNA, 85 bp, Artificial Sequence
  ENSG00000176046_12 (sequence is synthesized)
aacaaacaaacaaacaaaaactaaagtctgggagcagtggctcatgcctgtaatcacagcagtttaggaggccgaagtgggaggc

SEQ ID NO: 610050 - DNA, 60 bp, Artificial Sequence
  ENSG00000176046_13 (sequence is synthesized)
gctgggattacaggtgagcaccaccacgcctggctaatttttgtttttttgtttttttga

SEQ ID NO: 610051 - DNA, 72 bp, Artificial Sequence
  ENSG00000176046_14 (sequence is synthesized)
ctcaaatgatctgcccacctcagccttccagcctttgggaggccaaggaccaaggccctgtctctacaaaaa

SEQ ID NO: 610052 - DNA, 120 bp, Artificial Sequence
  ENSG00000176046_15 (sequence is synthesized)
ggcaacataccaaggccctgtctctacaaaaatttaaaaattagcaaagcatggtggctcatgcctgtagtcctagttgctcagaggctgaagttggaggatcccttgaacccagttgga

SEQ ID NO: 610053 - DNA, 120 bp, Artificial Sequence
  ENSG00000176046_16 (sequence is synthesized)
ggctacagtaagccatgatggtgccactgcactgcagcctgagcaatagagtgaaaccatgtattgaaaaagaaagaaagaaagaaagagaaaaagaaggaaggaaggaaaagaaaggaa

SEQ ID NO: 610054 - DNA, 87 bp, Artificial Sequence
  ENSG00000176046_17 (sequence is synthesized)
aaagaaagagaaaaagaaggaaggaaggaaaagaaaggaaggaagaaagaaaagaaagagagaaaggagagaaaaagaagaaagaga

SEQ ID NO: 610055 - DNA, 120 bp, Artificial Sequence
  ENSG00000176046_18 (sequence is synthesized)
aactccatctcaaaaaaagaaaaagagagagaaagaaagagagaaggagggaaagaaagaggaaggaaaggagggagggaaggagggaaggaggaaaggagggaaggaaatattaaggga

SEQ ID NO: 610056 - DNA, 120 bp, Artificial Sequence
  ENSG00000176046_19 (sequence is synthesized)
tttgccctagctcactcagggctcatattcagggatcttattgtcttcagatatgaggtgggtccccaggccaagggggctgtgggacagggttctgggaagtgagatgggggagggaga

SEQ ID NO: 610057 - DNA, 120 bp, Artificial Sequence
  ENSG00000176046_20 (sequence is synthesized)
ttcttattcagtgctatgtctcaggaccagagttgaagaaaaatatggggcaaacaggaagtgtggttggagctgagattatttgttgattgagatacaggtttgggttgctattatgaa

SEQ ID NO: 610058 - DNA, 120 bp, Artificial Sequence
  ENSG00000176046_21 (sequence is synthesized)
gaatcaaaacaggatacaaagttactcctctcttacttagccccaagtcctcctgggttcaaatggcagctccattgtgttgaggattccagctatttttactcactgttctgccacacc

SEQ ID NO: 610059 - DNA, 120 bp, Artificial Sequence
  ENSG00000176046_22 (sequence is synthesized)
caaaacatggcttccactttgaggcccaaaatagctactccaatacctgccatcacgtttgcatctcagcctgtggaaagagtgtggaagagacagaggaggccacacctcttcaatttt

SEQ ID NO: 610060 - DNA, 120 bp, Artificial Sequence
  ENSG00000176046_23 (sequence is synthesized)
agggcataatctaaaagtagaacacatcacatctgctccgaatgtggctacatggccacacccaactacgagagaggttgggaaatgtagcattgagctgcttagccacgtggtagccaa

SEQ ID NO: 610061 - DNA, 120 bp, Artificial Sequence
  ENSG00000176046_24 (sequence is synthesized)
aacttgggcaacagcagggttttatgatgaaagggaaccagagagagtgaatacacgaagaagctagcaagaaacattgcccacatgcagactcaacagatgtcgggggagaaaactctg

SEQ ID NO: 610062 - DNA, 120 bp, Artificial Sequence
  ENSG00000176046_25 (sequence is synthesized)
agattgggccccgggcagagcctgtttccttttcccctgtccctttcacataagccccacactgcagaacttggagtcagtggttcatggggacccaaggacatccacagaagaccgaag

SEQ ID NO: 610063 - DNA, 120 bp, Artificial Sequence
  ENSG00000176046_26 (sequence is synthesized)
tacctgatagagcaggaacagatgcacgtcagactacgaccagcttgaacccttggggacctgtatccatccccttcccttgagtccagcctaatcacagccacagaatgaatccatgac

SEQ ID NO: 610064 - DNA, 120 bp, Artificial Sequence
  ENSG00000176046_27 (sequence is synthesized)
ccggaaggacatttaaggacctctggcccaactctccccacgcaacagtgggattgcctctgcttgtttgaataccactatggagggggaacttgctacatttaaaggttgctgaatttt

SEQ ID NO: 610065 - DNA, 65 bp, Artificial Sequence
  ENSG00000176046_28 (sequence is synthesized)
tggagggggaacttgctacatttaaaggttgctgaatttttttgttttgttttgccactgcaacc

SEQ ID NO: 610066 - DNA, 120 bp, Artificial Sequence
  ENSG00000176046_29 (sequence is synthesized)
gtgttgggattacaggcttgagccacaccacccggcaaaggttgcctaattctatctcagggcaagtctgttcatgtgggctgaaatctgtctctcatacctgcccttaaataagcttct

SEQ ID NO: 610067 - DNA, 120 bp, Artificial Sequence
  ENSG00000176046_30 (sequence is synthesized)
ctgcccttaaataagcttctgtttttctggtcctttctgtctgagatgactttaattcctcccccgaccccatctcatgaggctcagcttagatgtttccttctcttcctccctgatggc

SEQ ID NO: 610068 - DNA, 88 bp, Artificial Sequence
  ENSG00000176046_31 (sequence is synthesized)
ggcccaggagttctaggccagcctagcaacacagcaagaccctctctctacaaaaaattaaaaattagccaggtgtggtggcttgtgc

SEQ ID NO: 610069 - DNA, 89 bp, Artificial Sequence
  ENSG00000176046_32 (sequence is synthesized)
ttagccaggtgtggtggcttgtgcctgtgggcccacctactcaggaggctgaggtgagaggatctcttgagtctcactccagcctgggc

SEQ ID NO: 610070 - DNA, 120 bp, Artificial Sequence
  ENSG00000176046_33 (sequence is synthesized)
gcctgggcgtcagagtgagacctgtctcaaaaaaacaaaaaccaaagttttccttaacttgcaatcctccacccatctcctgacctccaccccaggccgaccctcctctgggatcacacg

SEQ ID NO: 610071 - DNA, 120 bp, Artificial Sequence
  ENSG00000176046_34 (sequence is synthesized)
gaagcctgggcccagaatcttacagtctaccttggaaatccttcagattttgcctccaactcctctttccatacaagttacatattaactcaatcaatgcttattggatgccttctgagt

SEQ ID NO: 610072 - DNA, 120 bp, Artificial Sequence
  ENSG00000176046_35 (sequence is synthesized)
taccaggatgctgctggaggcctgtgctgctgagagggacaaatagaatcctgatatgactggaaccaggaatagggccaccatcagctctagaacccagggagcaaatggcaggagcaa

SEQ ID NO: 610073 - DNA, 120 bp, Artificial Sequence
  ENSG00000176046_36 (sequence is synthesized)
caccaggcagtcggccctcagcccagcacagacctggtgtgttggcttcagaaaatcctggaaacatctctgctgtgtttggagctcctattctgtgagaagtgttttataggctttgct

SEQ ID NO: 610074 - DNA, 120 bp, Artificial Sequence
  ENSG00000176046_37 (sequence is synthesized)
ccatttaatccttacgataacccaataggacatactattaatgatcccctttttttcagaccggaaaactgaggttcggagacattaagtaatttgcctaaagtcacacagccacatcct

SEQ ID NO: 610075 - DNA, 120 bp, Artificial Sequence
  ENSG00000176046_38 (sequence is synthesized)
gtaggacttggaattatgaactcaggtctatctgaattttaaagcctggatttttccccctttgctacatgcctgggaagaaccatgtattgacaatgaagaatcctaaactctcgttaa

SEQ ID NO: 610076 - DNA, 120 bp, Artificial Sequence
  ENSG00000176049_0 (sequence is synthesized)
gaggaggagccagaggaggtgtctgctgcaagttcctggctgcttccgagctcaccccatcctccgagagggaggaggcccaactggtgatgctgctgctgctgctgctgccgccgccgc

SEQ ID NO: 610077 - DNA, 120 bp, Artificial Sequence
  ENSG00000176049_1 (sequence is synthesized)
cgcctctattgctgatactctagtggggctggaagggtggttcctattcgcaccatcgccaaccagagacagagggaaaaaaaaaaccggcagccactgctgatgttgggttcggaggct

SEQ ID NO: 610078 - DNA, 120 bp, Artificial Sequence
  ENSG00000176049_2 (sequence is synthesized)
gcatccgactcggtcacaaggaaaatggattcagtttgcatctctccctcctttaaacagcttctccgggtctcagcatgggcttccagggcagcgattgaggagaccttaccaaggagc

SEQ ID NO: 610079 - DNA, 120 bp, Artificial Sequence
  ENSG00000176049_3 (sequence is synthesized)
accacacagtagatgctgagacatcgtactccaggataagaaacagtaacatggcagcacctgcttgaaagaaattaaaaaccaacagactccatttagaaaggaacaatgtccaagaaa

SEQ ID NO: 610080 - DNA, 120 bp, Artificial Sequence
  ENSG00000176049_4 (sequence is synthesized)
gggcgaaataagggcgagaagcccgaggcactcattgttgcccttcaagctgccaatgaagacctcaggaccaagctcacagacattcagatagagctgcatcaagagaagtccaaggta

SEQ ID NO: 610081 - DNA, 120 bp, Artificial Sequence
  ENSG00000176049_5 (sequence is synthesized)
tcaaagcttgaaagagagaagactcaagaagcgaagaggattcgtgagctggagcagcgcaagcacacggtgctggtgacagaactcaaagccaagctccatgaggagaagatgaaggag

SEQ ID NO: 610082 - DNA, 120 bp, Artificial Sequence
  ENSG00000176049_6 (sequence is synthesized)
ctgcaggctgtgagggagaaccttatcaagcagcacgagcaggaaatgtcaaggacggtgaaggtacgtgatggagagatccagaggctcaagtctgctctctgtgctctccgcgacggc

SEQ ID NO: 610083 - DNA, 120 bp, Artificial Sequence
  ENSG00000176049_7 (sequence is synthesized)
agcagtgacaaagtaaggacagcgctcaccattgaggcccgggaggaggcccggaaactgtttgacacagagcgccttaagctcttacaggaaattgcggacctgaaaacggccaagaag

SEQ ID NO: 610084 - DNA, 120 bp, Artificial Sequence
  ENSG00000176049_8 (sequence is synthesized)
caggtggacgaggctctgagcaatatgatccaagcagataaaatcaaggctggggaccttcggagtgagcatcagtcccaccaagaagccatctcgaagatcaagtgggagtcggagcgg

SEQ ID NO: 610085 - DNA, 120 bp, Artificial Sequence
  ENSG00000176049_9 (sequence is synthesized)
gatattcggaggctgatggatgaaatcaaagccaaggacaggatcatcttttccctggaaaaggaactggagacccagacaggctatgtacagaaactccaacttcagaaggaggctttg

SEQ ID NO: 610086 - DNA, 120 bp, Artificial Sequence
  ENSG00000176049_10 (sequence is synthesized)
gacgaacaactctttctggtcaaggaggctgagtgcaacatgagcagcccaaaacgagaaattccaggaagggcaggtgatggttccgaacactgcagcagtcctgatttgcgaagaaat

SEQ ID NO: 610087 - DNA, 120 bp, Artificial Sequence
  ENSG00000176049_11 (sequence is synthesized)
caaaagagaatagctgaattgaatgccactataagaaaattagaagacaggaataccttgcttggagatgaacgaaatgaactgttaaaacgtgtgcgggaaaccgaaaagcaatgtaaa

SEQ ID NO: 610088 - DNA, 120 bp, Artificial Sequence
  ENSG00000176049_12 (sequence is synthesized)
cctctcctggaaaggaacaagtgcctcgccaagagaaacgatgaactgatggtgtccttgcagcgcatggaagaaaaactaaaagccgttaccaaggaaaattcagaaatgagagaaaaa

SEQ ID NO: 610089 - DNA, 120 bp, Artificial Sequence
  ENSG00000176049_13 (sequence is synthesized)
ataacatcccatccacccctgaagaaattaaaatctctgaatgacctcgaccaagctaatgaagaacaagaaacagagtttctaaaacttcaggtcattgagcaacagaacattattgat

SEQ ID NO: 610090 - DNA, 120 bp, Artificial Sequence
  ENSG00000176049_14 (sequence is synthesized)
gagctcacaagggaccgagaaaagctcatccgtagaagaaagcatagaagaagttccaagccaattaagaggcctgttttggacccgtttattggctatgatgaggactctatggattca

SEQ ID NO: 610091 - DNA, 120 bp, Artificial Sequence
  ENSG00000176049_15 (sequence is synthesized)
gagacatcatccatggcctcatttagaacagacagaacaccagctactcctgatgatgacttggatgaaagtttagcagctgaagaatctgaactaagatttcgacaattaacaaaagaa

SEQ ID NO: 610092 - DNA, 120 bp, Artificial Sequence
  ENSG00000176049_16 (sequence is synthesized)
tatcaggccctccaaagagcatatgccctcctacaggagcagacgggaggcatcatcgacgctgaacgagaagccaaggctcaagaacagctccaagcagaggtgctaaggtataaagcc

SEQ ID NO: 610093 - DNA, 120 bp, Artificial Sequence
  ENSG00000176049_17 (sequence is synthesized)
aaaattgaagacctggaagcgactctggctcagaaagggcaggattcacactgggtagaagataaacaacttttcattaagagaaaccaggagcttttagaaaagatagaaaaacaggag

SEQ ID NO: 610094 - DNA, 120 bp, Artificial Sequence
  ENSG00000176049_18 (sequence is synthesized)
gcagaaaatcaccggttacaacaagaactacaggacgccagagaccagaatgagctgctggagtttcgaaacctagagctagaagagagagagagacgatcccctccatttaatctccaa

SEQ ID NO: 610095 - DNA, 120 bp, Artificial Sequence
  ENSG00000176049_19 (sequence is synthesized)
attcacccattctcagatggtgtgagtgctctacagatctactgtatgaaagaaggtgttaaggatgtgaacatccctgatctcataaagcagcttgatatcttgggtgataatgggaat

SEQ ID NO: 610096 - DNA, 120 bp, Artificial Sequence
  ENSG00000176049_20 (sequence is synthesized)
ttaagaaatgaagaacaagtggccataattcaggccagcactgtgctgtccctggcagagaagtggatccagcagattgaaggagctgaggctgccctacaccagaaaatgatggaattg

SEQ ID NO: 610097 - DNA, 120 bp, Artificial Sequence
  ENSG00000176049_21 (sequence is synthesized)
gaaagtgacatggaacagttctgcaaaataaaaggctatctggaggaagaactagactacagaaaacaagctcttgaccaagcatatatgagaatccaggaactagaagctactttgtac

SEQ ID NO: 610098 - DNA, 120 bp, Artificial Sequence
  ENSG00000176049_22 (sequence is synthesized)
aatgctctacagcaagaaactgttatcaagtttggtgaattattaagtgaaaaacagcaagaggagctgaggacggcagtagaaaagttacggcggcaaatgctgaggaagagcagagag

SEQ ID NO: 610099 - DNA, 120 bp, Artificial Sequence
  ENSG00000176049_23 (sequence is synthesized)
tatgactgtcagattcttcaggagagaatggagctcttacagcaagcccatcagagaattcgtgacttagaagataaaacagacatccagaaaagacaaataaaagacttagaagaaaag

SEQ ID NO: 610100 - DNA, 120 bp, Artificial Sequence
  ENSG00000176049_24 (sequence is synthesized)
agtaaccgaaaacatggataagatcccaggaagacaagtgcttctaaaccttcaaagatggcaaaattgtttacaccagtgagagggagatcaaaagctaagaactaccctgtagccagg

SEQ ID NO: 610101 - DNA, 120 bp, Artificial Sequence
  ENSG00000176049_25 (sequence is synthesized)
ctacaactgtgtattttaaagccattattcaaggtttcttacttgacagttcctacacaaccctgttgaaaatctacaatatatgctgcatttaatgaaacatgtatatgtcaaatcaga

SEQ ID NO: 610102 - DNA, 120 bp, Artificial Sequence
  ENSG00000176049_26 (sequence is synthesized)
agagaagaactataaacatatattgtgtaaagaaaaagttcagcaatggaactagtttctgcagatcaagcaaagatgtgtcttgggcatggaaccaaagttacaatgaaatattcaacc

SEQ ID NO: 610103 - DNA, 120 bp, Artificial Sequence
  ENSG00000176049_27 (sequence is synthesized)
cctgctgtgcaggggggtcattttaatgtaacaccacaccccatggaaacactagtcctgataataaacatcattttaaaagatcaaaacaaacaaacaaaaaaaacaagggtgggtggg

SEQ ID NO: 610104 - DNA, 120 bp, Artificial Sequence
  ENSG00000176049_28 (sequence is synthesized)
gagtgaagcacgaggaatacctatgaagagctatttacaataaaatgtttcatttgaaaagtctggtttcttactacagggatttgcttttctgtctttatgattgttttaaactcagga

SEQ ID NO: 610105 - DNA, 120 bp, Artificial Sequence
  ENSG00000176049_29 (sequence is synthesized)
acagagacatccgcatcgtaaatgggaagaaaaacactctctgttttgtttttctgcaaaaggtggagcttgtggaattcattccacagacgacagatgagaagtggatcacagtgacca

SEQ ID NO: 610106 - DNA, 120 bp, Artificial Sequence
  ENSG00000176049_30 (sequence is synthesized)
caacaaaactggtaacgaagtcaaaggacccgagcgaatgtgacatgtgaaataaaagcagattcgatgcttccttgtcctactctcacatctgcattcctctatcaacaatggactgat

SEQ ID NO: 610107 - DNA, 120 bp, Artificial Sequence
  ENSG00000176049_31 (sequence is synthesized)
ctcattcatattgaaaactaagaagatgatactgtaaatcacatgctccctgacttagttctgtttagaacgccaacatctatagggaacatgggccagagagcatctctgaatctttca

SEQ ID NO: 610108 - DNA, 120 bp, Artificial Sequence
  ENSG00000176049_32 (sequence is synthesized)
tttccaaaatactgtttttcaaatggctgcttaaaattgcctgcaaatgaatatgctatatgatttgggcaaaaacacagcagaatcaatgagtaaatttctaccaagagtcgggtttgc

SEQ ID NO: 610109 - DNA, 120 bp, Artificial Sequence
  ENSG00000176049_33 (sequence is synthesized)
cacagagatgtgaatattaaactaaactattattttttaaagaatcctcacatgcctagagcattctgacctcttcttgtttagagtgataacattttttcccagacagatgacagcaac

SEQ ID NO: 610110 - DNA, 120 bp, Artificial Sequence
  ENSG00000176049_34 (sequence is synthesized)
aagatagctctacttttttatatggaaataacattatgttactgacaaggtcattttctaccagagacaattagaggactggtacttttcctaagttgtgtattactgagtcttggagtc

SEQ ID NO: 610111 - DNA, 120 bp, Artificial Sequence
  ENSG00000176049_35 (sequence is synthesized)
atctctgagagcaaatgtatgttcctgaaaagctaattttacacctcatttactgtagataacagaacaacctcaatttttcaaatttttgaagttttatttatggggctagaattccca

SEQ ID NO: 610112 - DNA, 120 bp, Artificial Sequence
  ENSG00000176049_36 (sequence is synthesized)
tgcatagagaatatgtgtagggagccagaaactctttctatgaaatgctatacaaatctttccatatgtgggttcactatcatccttcagttttagcactggcatttgcaaagccagaac

SEQ ID NO: 610113 - DNA, 120 bp, Artificial Sequence
  ENSG00000176049_37 (sequence is synthesized)
aataactgaagaatgtacaataaaaactagaatgctggggtcccactttttgttcttacatttactgctgacccaggtatctttggcccagtcacttaacctctctgtgcctcagtttcc

SEQ ID NO: 610114 - DNA, 120 bp, Artificial Sequence
  ENSG00000176049_38 (sequence is synthesized)
tcatctgcaaaatggggttaaaatgctttttcataaagttttatttgcaattttagaacaagaggtgcttaaagtagcacaatgtgctttgtaattattacaagtgctgtattatttgac

SEQ ID NO: 610115 - DNA, 120 bp, Artificial Sequence
  ENSG00000176049_39 (sequence is synthesized)
tttcttgtgttgttgacaaaaagattccctcatgtaataaaatagtgcttcagtttggttaaatttaagcactatagcactgaagcttgcttatcaagctacttgggacattattagcaa

SEQ ID NO: 610116 - DNA, 120 bp, Artificial Sequence
  ENSG00000176049_40 (sequence is synthesized)
taaaaattgagagattcaaaaccaggatctttaataatctataggaaatagatcatctcatgctattgaacaagatagaagagtgtgtcatttctatgataagcatctcccagctctctt

SEQ ID NO: 610117 - DNA, 120 bp, Artificial Sequence
  ENSG00000176049_41 (sequence is synthesized)
gattgcatatgcatgccatcatacagaaccccacttttaccacaggagagccagtcattaaacaaaggcttggagcaaactgacagtatcacataattagcttgattatcttttattctg

SEQ ID NO: 610118 - DNA, 120 bp, Artificial Sequence
  ENSG00000176049_42 (sequence is synthesized)
agtatcacataattagcttgattatcttttattctggaggaaagccaggtggtatgccctactgggaagatacaaaacagactatcctgctgtattcttttttttttttttttttgagat

SEQ ID NO: 610119 - DNA, 120 bp, Artificial Sequence
  ENSG00000176049_43 (sequence is synthesized)
ctcctgctggattctttattcaactaggtaggttccagattaaatatgagccatatgctcattaggcaagaaatgtgaaagagggtgcctctacagtgttggtgacccaacactagccaa

SEQ ID NO: 610120 - DNA, 120 bp, Artificial Sequence
  ENSG00000176049_44 (sequence is synthesized)
cttgagtcagaaaatatggaagaggataaattactctcacatatctaagacttttccatttttcttcactttctgttgcagggcccatatgagtaaatctatattccgtctgctccaaca

SEQ ID NO: 610121 - DNA, 120 bp, Artificial Sequence
  ENSG00000176049_45 (sequence is synthesized)
cacaccttccttctcttaattttgctttcccacccaccaagaaatttgtaagtcaaaatttatttccatgagtaactatttctaaatgattgaaaatttttgaaaaagtggtatggttta

SEQ ID NO: 610122 - DNA, 120 bp, Artificial Sequence
  ENSG00000176049_46 (sequence is synthesized)
tatacctaatctgcttatctgctataagtcatatgagaacaacagctaggatgattgtccaagcagctttagatgtgtttagggccaggcaaaaggtttgcttgttttttctttttgctt

SEQ ID NO: 610123 - DNA, 120 bp, Artificial Sequence
  ENSG00000176049_47 (sequence is synthesized)
aagatctgggagattagcaaatttctcaagactatagactgaactgtaatttttaccaactcttgctcatgagcctcaaaatgaatatatccttgaataaagtataaatatttcaataga

SEQ ID NO: 610124 - DNA, 120 bp, Artificial Sequence
  ENSG00000176049_48 (sequence is synthesized)
tctattatccattttcacaattataaaagcatcagcaaaattgtggatatgtgttccagtcactcatggatccatggaaatggaccgtgtttaaatgaatgcttcccttggatgggatgt

SEQ ID NO: 610125 - DNA, 120 bp, Artificial Sequence
  ENSG00000176049_49 (sequence is synthesized)
tcagcaatagcaaaaaaaaaaaaaaaaaagttatcaataactgagatttcctgtggccccacttctgcatctgtactaccgagatgcatttggctactgagtttgtagcagtcagaacag

SEQ ID NO: 610126 - DNA, 120 bp, Artificial Sequence
  ENSG00000176049_50 (sequence is synthesized)
cattcttccgggttcattaacttaatttttctcaataaaatattcataccctggaaaataaacataactgactactaaagataatttgagataaataaaagacccaatttaaatagttat

SEQ ID NO: 610127 - DNA, 120 bp, Artificial Sequence
  ENSG00000176049_51 (sequence is synthesized)
tcaggatagaaaaatttcatgaaagaggggaaaaacatagagagactatctttgactatcatacttaaaaagcatctattactaaattgaatgtcaaacttttctttaatgccaccctac

SEQ ID NO: 610128 - DNA, 120 bp, Artificial Sequence
  ENSG00000176049_52 (sequence is synthesized)
ttttaggaaatagaatttgctgaaaaaaattacaacccttctgacttatgctatataaattaaattattaccaacagttaggttttaggggtggaagaatagatcttgatttaatttttt

SEQ ID NO: 610129 - DNA, 120 bp, Artificial Sequence
  ENSG00000176049_53 (sequence is synthesized)
tttttttttttggcccacaaataactgctcatacaggttgtatgtgtcttcccaagtccataaggtagagctgatatagaaggcctgggttatcacttaggtagagagcaaatgtgttct

SEQ ID NO: 610130 - DNA, 120 bp, Artificial Sequence
  ENSG00000176049_54 (sequence is synthesized)
ccactagtaataggagaaataaagtttgccaaataaattttgctgcagtattttgtttcaactttgctttcaattttaaataaatctctggcaaacttgttcctttttgcccattgactg

SEQ ID NO: 610131 - DNA, 120 bp, Artificial Sequence
  ENSG00000176049_55 (sequence is synthesized)
tcaaattttcctgtaaacccattgtgtaattcttatgtttgctttaacataattcacaagttcattgtttcaaaatgaagcacgtctttttaacctgcctaggtttttgtagaaactgta

SEQ ID NO: 610132 - DNA, 120 bp, Artificial Sequence
  ENSG00000176049_56 (sequence is synthesized)
aaaagaatattcattggttttgtgttgatgtttaaataattggatcatctgtgttatattacatcaagatagatggacagcatagaaattttatttttaaaatatttaattgcattattt

SEQ ID NO: 610133 - DNA, 120 bp, Artificial Sequence
  ENSG00000176049_57 (sequence is synthesized)
acacacacacacacacacacacagagcaatagaaatttgctctgtaatttgggagttgcattgcttgttgccttttgtgaaattttcataacagtgttttggtaattaatgacagctttt

SEQ ID NO: 610134 - DNA, 120 bp, Artificial Sequence
  ENSG00000176049_58 (sequence is synthesized)
aattttcataacagtgttttggtaattaatgacagcttttggcagtttaattctatcattttactaatttagatttatctattacattgaaaaaattcaatataacttttgaatgataaa

SEQ ID NO: 610135 - DNA, 120 bp, Artificial Sequence
  ENSG00000176049_59 (sequence is synthesized)
cattcaaagcaaatcttagatgactgtttatgtcatgagtttatgcttccaatatggacccaagcccctctttaagcagacttctaggtcttaagtgaggaaagatgtcattgtgttcta

SEQ ID NO: 610136 - DNA, 120 bp, Artificial Sequence
  ENSG00000176049_60 (sequence is synthesized)
ctgccttgtcatttctatataatgtagtatcttgagatctaatttcaggcatattggcaagaagatacagacataatggaaagttggagctaatccctgtaaggcctcttcaagtgccaa

SEQ ID NO: 610137 - DNA, 120 bp, Artificial Sequence
  ENSG00000176049_61 (sequence is synthesized)
attctattattccatttcagaatggggcagggcagattcacaatcctttgctgtcattagtttggcggtttagttcttcctaaataaatctcttgctgggagtccaagtccaatgcttaa

SEQ ID NO: 610138 - DNA, 120 bp, Artificial Sequence
  ENSG00000176049_62 (sequence is synthesized)
tcaaaattcctaaagatagctactcagaaggctaaggtggcaggatagcttgggcccaggagtttcataacggcctgggcaacatggtgagacctcatctcaaaaaaaaaaaaaaaaaag

SEQ ID NO: 610139 - DNA, 120 bp, Artificial Sequence
  ENSG00000176049_63 (sequence is synthesized)
aaagaaagaaaagagggagagaggaaaaaaactactaaagatatacttataggggcaatgtagcaaaaataggattataatttcctatattcaaattaatgtggcagagatacacgtggt

SEQ ID NO: 610140 - DNA, 120 bp, Artificial Sequence
  ENSG00000176049_64 (sequence is synthesized)
tgatttggtgagggttcctgtttttgtttttttctgcattacggtctttgtacccatgcttatattttcatccttgttatatgcaaagttctgtagggtgagaatggtaaagttaaacaa

SEQ ID NO: 610141 - DNA, 120 bp, Artificial Sequence
  ENSG00000176049_65 (sequence is synthesized)
ctttgagcccaattttgcccacaatcaagatcccacgaacttactaaagagtggatgatgcaattttccaactaaaacagatccccagcatctgttagtaacaacacttctatttgactg

SEQ ID NO: 610142 - DNA, 120 bp, Artificial Sequence
  ENSG00000176049_66 (sequence is synthesized)
acatctcacagactgtgcctataccagccattaaccatagcaacttcccacaatgaggcagatcaaaatccaaacatttttataaatatgtgatgtaaatatatgcacagatatattctg

SEQ ID NO: 610143 - DNA, 120 bp, Artificial Sequence
  ENSG00000176049_67 (sequence is synthesized)
tacatagtatgatggtgtgagcgcttactaaacgtgtacttctgttctaggatgcaggacttcaagaaaggttttttctgcgctgctgctgcttctgctgggaactcatgtttttgtcga

SEQ ID NO: 610144 - DNA, 120 bp, Artificial Sequence
  ENSG00000176049_68 (sequence is synthesized)
gcatttagtgtttgaactcttcccatccttgactacctcttctctcccttaccccaccttctgttcactactattatttccaattgttgactgaggcagagaccactcggtttttcaatt

SEQ ID NO: 610145 - DNA, 120 bp, Artificial Sequence
  ENSG00000176049_69 (sequence is synthesized)
atccaggcccataaaccagcaaataggttttttttatttgtttggttggttggttgatgtttcttttttttgaaagagcaacagaaagttcagcacaatctacagtattaaaattagcca

SEQ ID NO: 610146 - DNA, 120 bp, Artificial Sequence
  ENSG00000176049_70 (sequence is synthesized)
aaagtcccatatctttattagctaaaaattccatctcaacagggttcatgcatgttttagccttcaagatccaatactttggggactcaagtatagagctaatgtgtttgaatacataat

SEQ ID NO: 610147 - DNA, 120 bp, Artificial Sequence
  ENSG00000176049_71 (sequence is synthesized)
tccccaggtgtttactgtgttaatgtagccaagggtccaatttcacagagctttcattcaatcaactgcctcaattggggttctttctttccatctcattagcatgactccatatatcac

SEQ ID NO: 610148 - DNA, 120 bp, Artificial Sequence
  ENSG00000176049_72 (sequence is synthesized)
ttcagtgcttgtttattaatgaaagaaaaataaaaattgactgagtttcaccagaatgatcctctgaagtacaccgaatatgtacatgtactgtatgtattaccgtagagattggaatca

SEQ ID NO: 610149 - DNA, 120 bp, Artificial Sequence
  ENSG00000176049_73 (sequence is synthesized)
atcaacttactgtatgtaaagttttatgaatggttattttataatttatgtatttaatataggaatcgatgaactctggtgttttagtttatataaaaataaaacaagctgcatttttta

SEQ ID NO: 610150 - DNA, 120 bp, Artificial Sequence
  ENSG00000176055_0 (sequence is synthesized)
gtacaacccgcgaggccccacactttctgcgccagctgggagtgcgcgccctgcagagccagtgggtgggcggttctagctcttcccaccctcactgcgggcctctgctgtcacacgccc

SEQ ID NO: 610151 - DNA, 120 bp, Artificial Sequence
  ENSG00000176055_1 (sequence is synthesized)
ggggtggcgaaacggtcgccacctgagtctccattctgctgcagtggcccctgcgttaaagctctctcgtggtgcggctgccgaggctgcggtagctcctgcgcccccgtgctggtggcg

SEQ ID NO: 610152 - DNA, 120 bp, Artificial Sequence
  ENSG00000176055_2 (sequence is synthesized)
cagcctctgcttgctgccgacctggcggaagggtgcgggagcgcacgctacgggcagcgtcggtctgcgtccttcctcctcctattccgacccccgcatcccacgcccccgcctcgctct

SEQ ID NO: 610153 - DNA, 120 bp, Artificial Sequence
  ENSG00000176055_3 (sequence is synthesized)
acgcctcctccctggctgcaggcagaccgcttcacacagccgcagtgccctgtgtgtggacagcctgtgggagactcgcacgcccacactcaccccgcctggctgcacccctgcccagca

SEQ ID NO: 610154 - DNA, 120 bp, Artificial Sequence
  ENSG00000176055_4 (sequence is synthesized)
tgtcggcgctcgagtggtacgcccacaagtctctaggcgatggtatcttctggattcaagaacgtttctacgagtcgggcaaccgtgccaacatctggctggtgcgcggctccgagcagg

SEQ ID NO: 610155 - DNA, 120 bp, Artificial Sequence
  ENSG00000176055_5 (sequence is synthesized)
acgtggtgatcgatacaggcctggggctgcgcagcctcccggagtacctgtactcctccggcctcttgcaggaccgagaggccaaagaggacgcggcgcgccggccactgcttgccgtgg

SEQ ID NO: 610156 - DNA, 120 bp, Artificial Sequence
  ENSG00000176055_6 (sequence is synthesized)
ccacccacgtgcacttcgaccactccggcggcctctaccagttcgaccgcgtggcagtgcaccacgccgaggccgaggcgctggctcgcggggacaactttgagaccgtgacctggcttt

SEQ ID NO: 610157 - DNA, 120 bp, Artificial Sequence
  ENSG00000176055_7 (sequence is synthesized)
ccgatagcgaggtggtgcggacgcccagccccggctggagggccagacagttccgggtacaggcggtgcagcccaccctcatcctgcaggatggggatgtgatcaaccttggtgacagac

SEQ ID NO: 610158 - DNA, 120 bp, Artificial Sequence
  ENSG00000176055_8 (sequence is synthesized)
agctcactgttatgcacatgccaggtcactccaggggcagtatttgcttacatgacaaagaccgaaagattctcttcagtggagacgtcgtgtatgatggatcactgattgactggctcc

SEQ ID NO: 610159 - DNA, 120 bp, Artificial Sequence
  ENSG00000176055_9 (sequence is synthesized)
catacagcaggataagtgactatgttggaacttgtgaacgtctaatagaattagtggacagaggtctggtagagaaggtgcttcctgggcacttcaatacctttggtgctgaaaggcttt

SEQ ID NO: 610160 - DNA, 120 bp, Artificial Sequence
  ENSG00000176055_10 (sequence is synthesized)
ttcgattggcttctaactatatttcaaaagctgggatatgtcacaaagtttctacttttgccatgcgatctcttgcaagtttagctctacgtgtaacaaattctaggacctcgccctagt

SEQ ID NO: 610161 - DNA, 120 bp, Artificial Sequence
  ENSG00000176055_11 (sequence is synthesized)
gccctagtatctatactgataatatattttgattaattatatacattaattcattctgtgctatttaactgattaatagtgagcatttcatgaagtgcttttataccactattatatatc

SEQ ID NO: 610162 - DNA, 120 bp, Artificial Sequence
  ENSG00000176055_12 (sequence is synthesized)
attgagaatgaataagccaaaaagaaaattgttagtttaaattgttttctttcttccaagaaagaagccacttaaataagcttatactttgccaaagctgtcatcttgtaatatatgctc

SEQ ID NO: 610163 - DNA, 120 bp, Artificial Sequence
  ENSG00000176055_13 (sequence is synthesized)
tagaaatgacataaaggtttatggggaagcaaagagagattttgtggcaagagaactgcccttgcctctgtttttcttgttttattcccttgatgacctagggaaaaaaaggcatgtaga

SEQ ID NO: 610164 - DNA, 120 bp, Artificial Sequence
  ENSG00000176055_14 (sequence is synthesized)
gtattatgtttatactttaaacttgatatttttagtgtattatttaaagataaaggttcttgggtttaaaatacattagaacttaatgcagacatataaagtaacattgagaatgacaac

SEQ ID NO: 610165 - DNA, 120 bp, Artificial Sequence
  ENSG00000176055_15 (sequence is synthesized)
taaaacattccattgttatggtcctgaattttttatgcttcatttcatgtatttattctttgtataattatagcatacatgttatgtaatataacttatgaaaagtacagtgaattttgc

SEQ ID NO: 610166 - DNA, 120 bp, Artificial Sequence
  ENSG00000176055_16 (sequence is synthesized)
tttattgcaaagctttaaatataaatttcagagtgcttcagtaaaaagctactatatattgttgtttgttattgtgtaggtaatattttcaattatgaaagtgaaatgcaaatgtctgtt

SEQ ID NO: 610167 - DNA, 120 bp, Artificial Sequence
  ENSG00000176055_17 (sequence is synthesized)
tttattattatatcctattttaatattaacagctattatgaacaaaatttttcctgttaaatagcgacttcagtattgtgttatgttttacagcgttaaaacaactatgaagatctgcag

SEQ ID NO: 610168 - DNA, 120 bp, Artificial Sequence
  ENSG00000176055_18 (sequence is synthesized)
ctattcttttacttaacatgcatatgtactacagagggatttttaaattaattgcaaaatgtgcattagctattgacttagagtgaattgccttttgtatcctgattcacaacacctatt

SEQ ID NO: 610169 - DNA, 120 bp, Artificial Sequence
  ENSG00000176055_19 (sequence is synthesized)
cctgttcagtattctttgtcttgaatagagaagtctatgttcgtaaagtcatataaaaggttataccactatttagtaaaaagttttagtttggtgctgttaataataatttgctaaaag

SEQ ID NO: 610170 - DNA, 120 bp, Artificial Sequence
  ENSG00000176055_20 (sequence is synthesized)
gccttttagaatatttcataaagggttttaaacagttttttcccactgcctttttattattgacatatctaaaaccaaactgaaatcgctttggaaatcagattttttaatgttaggaag

SEQ ID NO: 610171 - DNA, 120 bp, Artificial Sequence
  ENSG00000176055_21 (sequence is synthesized)
atccagcaattttggtttctgaaaaattacaaaacttttctaccctacagatgcccaggttctttagttttttattcattcaactcacacacacataaacatatacatacacaaacacaa

SEQ ID NO: 610172 - DNA, 120 bp, Artificial Sequence
  ENSG00000176055_22 (sequence is synthesized)
tcccacatgcaaacacacacagccacatatatacatgtgtagcacagcgctaaacactgtggaggctaaaaaaagtcaaagacaacattataactaaaagtcgaaagcacacaaaatata

SEQ ID NO: 610173 - DNA, 120 bp, Artificial Sequence
  ENSG00000176055_23 (sequence is synthesized)
aataatagtgtatgcaagttaatgtacattatacatgcgtgtaagggacataaatggaggggtgtgaactttggttaggcaaagtttactggaggaggggtttttgagtcaaatttggaa

SEQ ID NO: 610174 - DNA, 120 bp, Artificial Sequence
  ENSG00000176055_24 (sequence is synthesized)
ggatgaacttgttagatagtcagagttggaaacaaaacaatccaagaatagggatataagcattgctagtctagaatagtctattccttgtgaaaatataaatttaattttcaggaatcc

SEQ ID NO: 610175 - DNA, 120 bp, Artificial Sequence
  ENSG00000176055_25 (sequence is synthesized)
agtatattccaaacatcacatatttagcatgagaaaaattgatttgtgattgtgtatatgagtcattgttaatgggagacaagctgaactgccacatgccaccaaatgaacctttacttc

SEQ ID NO: 610176 - DNA, 120 bp, Artificial Sequence
  ENSG00000176055_26 (sequence is synthesized)
aatcaaaaaggagggtatgattggttcaattatattaacagaatatcatgggcatttctctatgatggtcattcaaggtagtaggtctctttcaactgagtgcaacattgagaataatga

SEQ ID NO: 610177 - DNA, 120 bp, Artificial Sequence
  ENSG00000176055_27 (sequence is synthesized)
tttggttcagggcaactacaaataatcacttactaagccttaaataaagccattatttttatatcaatagcacaaaggaaaaccaaaagtccttaaccactgaccatttttatcatattt

SEQ ID NO: 610178 - DNA, 120 bp, Artificial Sequence
  ENSG00000176055_28 (sequence is synthesized)
taggcctttttttaaaaaatcagggtatagtaggcactaagttttattaggaaatatttaaacctgctgaaggatttatttataaaaagtgcaatttttcaaaacacattattatttttt

SEQ ID NO: 610179 - DNA, 120 bp, Artificial Sequence
  ENSG00000176055_29 (sequence is synthesized)
aatttcccaattttttcagtttttcaaattgtaccacaacatagaactgtgatattttgctattacttcaatgtgaataaataaggtaaagtatatcatttattgagtgcccatgctgta

SEQ ID NO: 610180 - DNA, 120 bp, Artificial Sequence
  ENSG00000176055_30 (sequence is synthesized)
catttaaaatatgcattatttaatttaatcttactcccagcaccaaaaggtaattgaccagcctcaacacaattttggacaaagctagtaactgaacacaggtctgtctgccccacactt

SEQ ID NO: 610181 - DNA, 120 bp, Artificial Sequence
  ENSG00000176055_31 (sequence is synthesized)
ctctttctcttgtaactgcacaatagcagaaaattggcaagatgtatttttactttccaagatgccgtgtgtgccaagaataaatgaaatgatgttaaagcataataataacatatcttt

SEQ ID NO: 610182 - DNA, 120 bp, Artificial Sequence
  ENSG00000176055_32 (sequence is synthesized)
aaaaagcttttcaaaatatattttcaccctgacagtgacccttgtaacttaaatgatttttggaaatattagtatgtaagtataattcaaagttgtcaaaatgtaagacatttagaagta

SEQ ID NO: 610183 - DNA, 120 bp, Artificial Sequence
  ENSG00000176055_33 (sequence is synthesized)
atttttattatttatattgttaatacttaatcactggaaattcattttccttactcgatgttttctttcaactgagaagcctaaaacaaacaaaaaccttgtgtgttatcctgatatagt

SEQ ID NO: 610184 - DNA, 120 bp, Artificial Sequence
  ENSG00000176055_34 (sequence is synthesized)
tgactaaatgtatttgttcttatatggatagtaatatgaatgtgacatgcaccaattgtcctattataattttcagataagtgtaactaagcacttgtgtaataaatattagtcatttta

SEQ ID NO: 610185 - DNA, 120 bp, Artificial Sequence
  ENSG00000176055_35 (sequence is synthesized)
gagtgccgcatgttgcagacttgcgtggccataaaggggattattttggcacctcgcagagccacttctgtttcacccttccctgagtaaaaacccacttgaccagagtcaaggccatca

SEQ ID NO: 610186 - DNA, 120 bp, Artificial Sequence
  ENSG00000176055_36 (sequence is synthesized)
cagccttccctgccagagaccagctctggcatcgtgtagagattctgagtactcctttgaaagccggcaccaccccctccctagccactttcctgcatcggctgtagcagtaacactaca

SEQ ID NO: 610187 - DNA, 120 bp, Artificial Sequence
  ENSG00000176055_37 (sequence is synthesized)
aagacttgtgactgactagggatttctcattctttccctaagcacctgcccgacatttccaggagctttcgtagtgagcagacttttaaggaatgacccctcacggagagtgcatgtcat

SEQ ID NO: 610188 - DNA, 120 bp, Artificial Sequence
  ENSG00000176055_38 (sequence is synthesized)
aattgcagacttcatcagcttggtccccaccgggtatgggcagttcccacctgtagccttagagagtcatcagaccagtgattccaatccgctaatgcgattggaaacctttcagatagg

SEQ ID NO: 610189 - DNA, 120 bp, Artificial Sequence
  ENSG00000176055_39 (sequence is synthesized)
tttctgttcttgatgttgcctcacgattgcaaaagcttaatagtaatcataaacgtagaatatgtctgagtcttactttatgacagatatttggtccggttgaaagcaaagcctgagaaa

SEQ ID NO: 610190 - DNA, 120 bp, Artificial Sequence
  ENSG00000176055_40 (sequence is synthesized)
gatcaataaggaagtaattttcggtagaggtaaattatgtggactaatgcataggtagccatggtcctctttggctctgtgaaagacaagtatggaattcagagagaaattcatggaatg

SEQ ID NO: 610191 - DNA, 120 bp, Artificial Sequence
  ENSG00000176055_41 (sequence is synthesized)
aaaataaatagggcctcagcccattctccctacgtagggacttaaataattgagctaattcgccacatcagcaatatttggtatattagttttctattttctttttaaaatacttttgat

SEQ ID NO: 610192 - DNA, 120 bp, Artificial Sequence
  ENSG00000176055_42 (sequence is synthesized)
ttcattttatcttcacaacacatttaaagtgaggccactgaccccccagttaaatggcttgcctgagccagatcatgataaaagctaggatatgaatctaggcacaatagatcaaggcat

SEQ ID NO: 610193 - DNA, 120 bp, Artificial Sequence
  ENSG00000176055_43 (sequence is synthesized)
gcagaacatacataaatcctgcctcataaatatatgatgattttgagtagaatgtgaaaggccccttctttcctttagcgtgagatcattttaattaccaatgtggtatattaaaacgtg

SEQ ID NO: 610194 - DNA, 120 bp, Artificial Sequence
  ENSG00000176055_44 (sequence is synthesized)
cctctatatggtagaaaaattcagttgctgcagtataatgaagctcactttatgaccaaacaatatggcaaataatgaaatattttacaaaaatcagtttatctcacagatgacatcttc

SEQ ID NO: 610195 - DNA, 120 bp, Artificial Sequence
  ENSG00000176055_45 (sequence is synthesized)
atttgagatattttaaaaattgcaatattgtactgcttatcggtgctaaaaaaaaaattgcaagattctgtacctcacacccaccgaacaagtcttcattaaagttttaaatctaaattt

SEQ ID NO: 610196 - DNA, 120 bp, Artificial Sequence
  ENSG00000176058_0 (sequence is synthesized)
agtccagccgtccgctgccgcgttcgcagcatggccgccctggggcggccgggctcggggccgcgcgctgcggtgcccgcttggaagcgtgagatcctggagcggaagcgggccaagcta

SEQ ID NO: 610197 - DNA, 80 bp, Artificial Sequence
  ENSG00000176058_1 (sequence is synthesized)
ccgagcagcgggtgctggccgagagcctgggcccgctgcgcgagaacccgttcatgctgctggaggccgagcggcggcgc

SEQ ID NO: 610198 - DNA, 80 bp, Artificial Sequence
  ENSG00000176058_2 (sequence is synthesized)
gccgcgtgcctggcgtgcgcgccctccgcgccgacagcgtcctcatcatcgagacggtgcccggcttcccgcccgcgccg

SEQ ID NO: 610199 - DNA, 80 bp, Artificial Sequence
  ENSG00000176058_3 (sequence is synthesized)
gtgctggtgtacggggcgccgcccggccgcgtcagccgcctactggagaggttcgacccgcccgccgcgccgcgccgccg

SEQ ID NO: 610200 - DNA, 120 bp, Artificial Sequence
  ENSG00000176058_4 (sequence is synthesized)
gcccggcgcagcgacttcctccagaagaccggcagcaactccttcaccgtccacccccggggtctgcaccgcggcgcgggcgcccgcctgctctccaacgggcactcggcccctgagccc

SEQ ID NO: 610201 - DNA, 120 bp, Artificial Sequence
  ENSG00000176058_5 (sequence is synthesized)
cgggccggccctgccaaccgcctcgcgggctccccgcctgggtcgggacagtggaagccaaaggtggagtcgggggatccctccctccacccgccccccagccccgggaccccgagtgcc

SEQ ID NO: 610202 - DNA, 120 bp, Artificial Sequence
  ENSG00000176058_6 (sequence is synthesized)
actccagcctcaccccctgccagtgccactcctagccagcgccagtgcgtctccgcagccaccagcaccaacgactccttcgagatacggccggcccccaagccagttatggagaccatc

SEQ ID NO: 610203 - DNA, 120 bp, Artificial Sequence
  ENSG00000176058_7 (sequence is synthesized)
cccttgggggacctccaggcccgggcgctggccagcctccgcgcaaactctcgaaattctttcatggtcatccccaagagcaaggcctccggggctcctcctcctgaggggaggcagtcc

SEQ ID NO: 610204 - DNA, 120 bp, Artificial Sequence
  ENSG00000176058_8 (sequence is synthesized)
gtggagctgccaaagggagacctgggcccggcctccccgagccaggagctcggatcccagccggtgcctggaggggatggtgcgcctgccctcgggaagagccccctggaggtcgaggca

SEQ ID NO: 610205 - DNA, 120 bp, Artificial Sequence
  ENSG00000176058_9 (sequence is synthesized)
cagtgggcagtcgaggagggggcctgtcccaggacagccaccgccctcgctgaccgggctattaggtggcagaggccgtcctcaccgccccccttcctgccggctgcttcggaagaagct

SEQ ID NO: 610206 - DNA, 120 bp, Artificial Sequence
  ENSG00000176058_10 (sequence is synthesized)
gggttcctggcttggccaagaatagccgggaatatgtgaggccggggctgcctgtcaccttcatcgatgaggtagactcggaggaggccccccaagcagccaaactaccctacctcccgc

SEQ ID NO: 610207 - DNA, 120 bp, Artificial Sequence
  ENSG00000176058_11 (sequence is synthesized)
accctgccaggcctctgcaccctgccaggcccgggtgcgtggcagagcttcagccccggggcagcaacaccttcacagtggtgcccaagaggaagccagggactctgcaggaccagcact

SEQ ID NO: 610208 - DNA, 120 bp, Artificial Sequence
  ENSG00000176058_12 (sequence is synthesized)
tcagtcaggccaacagggagcctcggccacgggaggccgaggaggaggaggctagttgcctcctggggcccacgttgaagaagcgctaccccaccgtgcatgagatcgaggtgattggcg

SEQ ID NO: 610209 - DNA, 120 bp, Artificial Sequence
  ENSG00000176058_13 (sequence is synthesized)
gctacctggccctgcagaagtcctgcctcaccaaggctggctcctcaagaaagaagatgaagatctccttcaacgacaaaagcctgcagaccacatttgagtacccttccgagagctccc

SEQ ID NO: 610210 - DNA, 120 bp, Artificial Sequence
  ENSG00000176058_14 (sequence is synthesized)
gaggaggaggaggaggaggaggaagaggaagaggaggaagagggatccggctcagaggagaagccctttgcactcttcctgccccgggccacgtttgtgagcagcgtgagacccgagagc

SEQ ID NO: 610211 - DNA, 120 bp, Artificial Sequence
  ENSG00000176058_15 (sequence is synthesized)
ccacgtttgtgagcagcgtgagacccgagagctctcggctgccagagggtagctcaggcctgtccagctacaccccgaagcactctgtggccttcagcaagtggcaggagcaggcgctgg

SEQ ID NO: 610212 - DNA, 120 bp, Artificial Sequence
  ENSG00000176058_16 (sequence is synthesized)
agcaggccccgagggaggcagagcccccgcccgtggaggccatgctcacacccgccagtcagaatgacctctcggacttccgcagcgagccagccctgtatttctgagcccagcactgcc

SEQ ID NO: 610213 - DNA, 120 bp, Artificial Sequence
  ENSG00000176058_17 (sequence is synthesized)
aggaccaaggctgagcccagctgtgggagtcccggaagctgggcagtagccagggactactgcacccgcttctgccttgtttggcctcactgtatcccacccacccctcctggccctgga

SEQ ID NO: 610214 - DNA, 120 bp, Artificial Sequence
  ENSG00000176058_18 (sequence is synthesized)
agcagctagggtgcctcctgccatcggggccaggtctgggtctcactccccggccctgatttgggagggtccaagggggaagtggggtggggaactgcctgtgggtgagtgccaggggcc

SEQ ID NO: 610215 - DNA, 120 bp, Artificial Sequence
  ENSG00000176058_19 (sequence is synthesized)
tgctgggtggtggccatctgcgacccggcagggggctgtgcagattctgcacctggccattccctgtcctgtctcctcagcctgcctcacagtggccatggggtgtcggggtgaagggct

SEQ ID NO: 610216 - DNA, 120 bp, Artificial Sequence
  ENSG00000176058_20 (sequence is synthesized)
gtcccagctacttgtcctctgcaggaccctaagcccctgcccgcagcccacatgccctctgtgatgagtggcgtctttcctgcctctgatgatggactcaataaacagcactggacaagg

SEQ ID NO: 610217 - DNA, 120 bp, Artificial Sequence
  ENSG00000176058_21 (sequence is synthesized)
gcccatctttgttggcctacgaactttggtttgatgccagtcaggtgccacatgagaacctttgctgagatgcaaataaaatgaagatctccttcaacgacaaaagcctgcagaccacat

SEQ ID NO: 610218 - DNA, 120 bp, Artificial Sequence
  ENSG00000176058_22 (sequence is synthesized)
ggagggagaggcggggctgggctcagctcacacctccatctgggcaggttggggctggctgcttggccctttgtcccaggtggaggccaggccctttggtaaccaaagctaggtgtgcac

SEQ ID NO: 610219 - DNA, 120 bp, Artificial Sequence
  ENSG00000176058_23 (sequence is synthesized)
aggcagggtgggtggagcgagaacagaagggtcctgagaagccgggaggctctgctgggaggctgggctgagctgggacccacctgcctgctctgttggctgtgccaggcaaagtccctg

SEQ ID NO: 610220 - DNA, 120 bp, Artificial Sequence
  ENSG00000176058_24 (sequence is synthesized)
ataggctgcggccaggtgcgtgcggtcccagaccctggccacaccctctgcccatcctgcgtctcggggtcttcaggctgcccaccgtatgagtcacggggtgtcctgtccccacagtgg

SEQ ID NO: 610221 - DNA, 120 bp, Artificial Sequence
  ENSG00000176058_25 (sequence is synthesized)
gaggggagggctgtgcgagtcagcaggcaccagcccagctgaggagacctggggaggcaggacgtgaccagagccccgggccccagctgagggcagacaggggctgcctgtccacccccc

SEQ ID NO: 610222 - DNA, 120 bp, Artificial Sequence
  ENSG00000176058_26 (sequence is synthesized)
gccccgcaccgcctggccaggctgtaccaggctcagggcccatgtgcacccagcccccgcggcccccctgctgggaccggtcatgtgcacgagtgagggcactaatcccgcggccctggc

SEQ ID NO: 610223 - DNA, 120 bp, Artificial Sequence
  ENSG00000176058_27 (sequence is synthesized)
agccagcccttctgtgttctcagccgtgggggctgggcctggagggcttcggggtcatctgggttagctccacatatccagggcgactggaaaccccatttgctgctggacttcggggct

SEQ ID NO: 610224 - DNA, 120 bp, Artificial Sequence
  ENSG00000176058_28 (sequence is synthesized)
gtgggagagctctagccaccagccctgtcctgccttgagcacctccacctggggtatctgtcccaaagcatgagtctgggagggccgggtgaccccctccccaagtgggctggcagtggg

SEQ ID NO: 610225 - DNA, 120 bp, Artificial Sequence
  ENSG00000176058_29 (sequence is synthesized)
tgggtgcctgtgaggtctgtcccagcctctccctgcctggcctcctgtgggatgagcgttggagggccaggtgggcctagccacaggcagggcagttaagggacaggagcgggtgctttc

SEQ ID NO: 610226 - DNA, 120 bp, Artificial Sequence
  ENSG00000176058_30 (sequence is synthesized)
ctccttgttttgtctggcccaggtggcctccccctcccccgctcatccatgcagacggctggggtgccggggcctggggtaggggtgcaagcaggcagctgagttgcccagcagggctct

SEQ ID NO: 610227 - DNA, 120 bp, Artificial Sequence
  ENSG00000176058_31 (sequence is synthesized)
gtgtgagctgtgctgagaggggaagctgggggtttgggcacaaagcgtggccccccagctgtgggaggcgggggtattcgtggtgagaagggacctgagggtacacctggctgtgtgggc

SEQ ID NO: 610228 - DNA, 120 bp, Artificial Sequence
  ENSG00000176058_32 (sequence is synthesized)
cgtgtggccgctgtgggagagagcatgatggcaagagtgtgtgcccttggccctgtcctggcagccctgtgtggcctcctcggctgcctcctgagaggccgtctcgtcctgtgcctggct

SEQ ID NO: 610229 - DNA, 120 bp, Artificial Sequence
  ENSG00000176058_33 (sequence is synthesized)
gcggtggttctctgcctggggcccggctcctgcctccgggtccttctaggggaggaggaggaacttgagctgctggtgtcctgtgcccaggaagagtttaatatttcgagctccctcagg

SEQ ID NO: 610230 - DNA, 120 bp, Artificial Sequence
  ENSG00000176058_34 (sequence is synthesized)
gctgcttccatctgctgcaagcgggggccgctcatattcattagggaccactggggccgggctgagtgcagctgagcagtgggagctcggctgttgtggggagcttagccccatgcaagc

SEQ ID NO: 610231 - DNA, 120 bp, Artificial Sequence
  ENSG00000176058_35 (sequence is synthesized)
ttgctcagatgtgaaatcttgcagcctacgaagtggggatggaggacgagggccagaggggcagcagggtgaggaaggggtcactgctggggttgctggcacccaggctcagtggaggca

SEQ ID NO: 610232 - DNA, 120 bp, Artificial Sequence
  ENSG00000176058_36 (sequence is synthesized)
gccccctactctgcacagccgcaggccaactctcaactatgttaggtgggtgatggtgcctgaggctactgcctggccttgacggctcacagaggcccctgttcacagtggggggtccat

SEQ ID NO: 610233 - DNA, 120 bp, Artificial Sequence
  ENSG00000176058_37 (sequence is synthesized)
gctctgctggattgtccaggcatccagtaagccaggacatgaacttggctttagagagaggccccagacaccagcaggagctgcctggagcctagagtgcaaggcccctgaggggacagc

SEQ ID NO: 610234 - DNA, 120 bp, Artificial Sequence
  ENSG00000176058_38 (sequence is synthesized)
ctcttttccaccctgttcctgctctagagctgcttggtgggaggggatgtgtccaccccagtttccccccagctggcactctgcccagacagcagagcaggaggggcctgagatggtagc

SEQ ID NO: 610235 - DNA, 120 bp, Artificial Sequence
  ENSG00000176058_39 (sequence is synthesized)
tccaggagctggtctagaggcttctggggacccagaggctttgggctcctggtcctggtcagcgtttggtccctggctggaatggggaggggaggttgacccccagggtggagggatgga

SEQ ID NO: 610236 - DNA, 120 bp, Artificial Sequence
  ENSG00000176058_40 (sequence is synthesized)
cgcctgcagggtccagctggagagctctgtgccccctcctggagcccccggaacggttgatggtgtgtctggcgccccacttgggtcagcctcatcctgagggctgaacctgagcccctg

SEQ ID NO: 610237 - DNA, 120 bp, Artificial Sequence
  ENSG00000176076_0 (sequence is synthesized)
agccactgcgcgctcgccggagagctgggtgctaccgctgtttccgctgctgagccctgcccgccggccggcccgctcgctagctcgcttcccctcgcccagggggaaaggtcagcagcg

SEQ ID NO: 610238 - DNA, 120 bp, Artificial Sequence
  ENSG00000176076_1 (sequence is synthesized)
tcctggagccgccgtgtcactccccgaaagccatgaactgcagcgagagccagcggctgcgaacccttctgagccgcctgttgctcgagctgcaccaccggggtaatgccagcggcttgg

SEQ ID NO: 610239 - DNA, 120 bp, Artificial Sequence
  ENSG00000176076_2 (sequence is synthesized)
gcgctggccctcgtcccagcatgggcatgggggtcgtgcctgaccctttcgtgggccgcgaggtgaccagcgccaagggcgacgacgcctatctctacatcctgctcatcatgatcttct

SEQ ID NO: 610240 - DNA, 120 bp, Artificial Sequence
  ENSG00000176076_3 (sequence is synthesized)
acgcctgcttggccggaggcctcatcctggcctacacccgctcccgtaagctcgtcgaggccaaggacgagccgtcccaggcttgcgccgagcacgaatgggccccgggaggcgccctga

SEQ ID NO: 610241 - DNA, 120 bp, Artificial Sequence
  ENSG00000176076_4 (sequence is synthesized)
ccgccgacgccgaggctgccgcgggctcccaggccgagggccgccgccagcttgcctccgaggggctgcctgccctcgcccagggcgctgagcgggtctaaaaccacagccccagattgc

SEQ ID NO: 610242 - DNA, 120 bp, Artificial Sequence
  ENSG00000176076_5 (sequence is synthesized)
tggttcgcgccctcctcatctcgctcatccctgggcgcgcctcccaccttccacccccaactcccttccagggttcgcctcatctgaggcccagataatggtgagaggccaggagacctt

SEQ ID NO: 610243 - DNA, 120 bp, Artificial Sequence
  ENSG00000176076_6 (sequence is synthesized)
tacccattcgggccagtttctccctcttcacccctgcgcctccacccctaccccgcacatccaactgcactaaactgcctctgctctcttgtcttcagacagccctgacagcacgctcca

SEQ ID NO: 610244 - DNA, 120 bp, Artificial Sequence
  ENSG00000176076_7 (sequence is synthesized)
gccctctgggaactgaatccaacacgtccaacacttggcactgaactgaagcaatgcattctatcagaactctgggccgtctaactggcagctgctccaggggctgccagggactgctca

SEQ ID NO: 610245 - DNA, 120 bp, Artificial Sequence
  ENSG00000176076_8 (sequence is synthesized)
ctctgcagagccaacgggcttgccaggccgactgcagcagctccagcttccagttgccttagggacagagacaaaggaaatgaagagacctcagacatcttttccctccctctctctttc

SEQ ID NO: 610246 - DNA, 120 bp, Artificial Sequence
  ENSG00000176076_9 (sequence is synthesized)
agcagggagctagcaggacactaggaccagtctgtgggatagaatgaacttaatgggggacggaagggggaggagtgctcaacggggagggaaatgatctatgactccaaccgtatgatt

SEQ ID NO: 610247 - DNA, 120 bp, Artificial Sequence
  ENSG00000176076_10 (sequence is synthesized)
ttcttgcctccccagttttcatcccagtggtaacgcctgatttttggtagctatgccatcttctgctgaggattaccattactgggtgtatcaccccagtacttccaaatgcctctcctc

SEQ ID NO: 610248 - DNA, 120 bp, Artificial Sequence
  ENSG00000176076_11 (sequence is synthesized)
tattgattcagttgttattgcagtgtctgcttcatccgtggaacttgaggctcagatgccccctgctctgtaaccctggggaatgtcagaggcaggtaataaaggttgtttaaacaataa

SEQ ID NO: 610249 - DNA, 120 bp, Artificial Sequence
  ENSG00000176083_0 (sequence is synthesized)
aggaacctgagcagatgccttgacccagaccagagacccaagccaaggaaagcccatgatcaccagacaggtaatggggatatgaaggaagaatcagctgcacaattaggttgttgtcat

SEQ ID NO: 610250 - DNA, 120 bp, Artificial Sequence
  ENSG00000176083_1 (sequence is synthesized)
aggcccatggccctgggaggtacagggggctccctgtcccccagcctggacttccagctcttccgaggtgaccaggtcttctcagcctgcagaccacttccagacatggtggatgctcat

SEQ ID NO: 610251 - DNA, 120 bp, Artificial Sequence
  ENSG00000176083_2 (sequence is synthesized)
ggcccatcctgtgccagctggctgtgtcccttgcccctggcaccgggcaggtctgcactgctggcctgcctacaggacctggacctgaacctgtgcaccccacagccggcacccctgggc

SEQ ID NO: 610252 - DNA, 120 bp, Artificial Sequence
  ENSG00000176083_3 (sequence is synthesized)
acagacctgcagggcctccaagaggacgccttgagcatgaagcacgagccaccagggctgcaggccagctccaccgatgacaagaaattcacagtcaagtacccacagaacaaggacaag

SEQ ID NO: 610253 - DNA, 120 bp, Artificial Sequence
  ENSG00000176083_4 (sequence is synthesized)
ctgggaaaacagccagaaagagctggcgagggggccccctgcccagccttctcctctcataacagctcttccccaccaccgctgcagaacagaaagagccccagccccttggctttctgc

SEQ ID NO: 610254 - DNA, 120 bp, Artificial Sequence
  ENSG00000176083_5 (sequence is synthesized)
ccctgtccccctgtcaactccatctccaaggagctcccatttctcctccacgccttctaccctggatacccacttctcctgcctccaccccacctgttcacctatggggccctaccttct

SEQ ID NO: 610255 - DNA, 120 bp, Artificial Sequence
  ENSG00000176083_6 (sequence is synthesized)
catggctatgcctagcctgctgatgatggtcaatgagctggggcaccccagcgctcggtgggagaccctgcttccctacccaggggccttccaagcctctggccaagctctgccttccca

SEQ ID NO: 610256 - DNA, 120 bp, Artificial Sequence
  ENSG00000176083_7 (sequence is synthesized)
ggcccgaaatccaggtgctggagctgccccaaccgactccccaggcctggagcgtggtggcatggcatctccagcaaagcgggtcccattgagttcccagacaggcaccgcagccttgcc

SEQ ID NO: 610257 - DNA, 120 bp, Artificial Sequence
  ENSG00000176083_8 (sequence is synthesized)
ttacccgctgaaaaagaagaatggcaaaatcctgtacgagtgcaacatatgtggcaagagctttgggcagctctccaatctcaaggtccacctgcgtgtgcacagtggagagcgtccatt

SEQ ID NO: 610258 - DNA, 120 bp, Artificial Sequence
  ENSG00000176083_9 (sequence is synthesized)
ccagtgtgccttgtgccagaagagcttcactcaacttgcccacctgcagaagcaccacctggtgcacactggggagcggccccacaagtgctcggtgtgccacaagcgcttcagcagctc

SEQ ID NO: 610259 - DNA, 120 bp, Artificial Sequence
  ENSG00000176083_10 (sequence is synthesized)
cagtaacctcaagacccacctgcgcctgcactccggggcccggcccttccagtgcagtgtctgccggagtcgcttcacccagcacatccacctgaagctgcaccatcggctgcatgcccc

SEQ ID NO: 610260 - DNA, 120 bp, Artificial Sequence
  ENSG00000176083_11 (sequence is synthesized)
acagccctgtggcctggtgcacacccagctgcccctggcctctctggcctgccttgcccaatggcaccagggggcactagatcttatggcggtggcatctgagaaacacatgggctatga

SEQ ID NO: 610261 - DNA, 120 bp, Artificial Sequence
  ENSG00000176083_12 (sequence is synthesized)
catagatgaggtcaaagtgtcctcgacatcccaggggaaagcaagagcagtgagcctgagcagtgccgggactcccctggtgatggggcaggaccagaacaattaaaaatgtttcttctg

SEQ ID NO: 610262 - DNA, 120 bp, Artificial Sequence
  ENSG00000176083_13 (sequence is synthesized)
ctcctggggcatttcctagccaagccagggagctttcaggattggagacctggaaatctccaaggccatttccttttttatttttttctaacagagaggttgtgcaaagtgttctgagag

SEQ ID NO: 610263 - DNA, 120 bp, Artificial Sequence
  ENSG00000176083_14 (sequence is synthesized)
aggttgtgcaaagtgttctgagagctgggagcagagtgtgatgccaggagggagcacagctggcagatggaagccaaagcctggagtgtagcagagccatctcagctcactgcaacctcc

SEQ ID NO: 610264 - DNA, 120 bp, Artificial Sequence
  ENSG00000176083_15 (sequence is synthesized)
ggggcctcagccacaggcagctgtggcctggctgcccacctccttccttcccagccaggagcactgctgcagcaccgagtggagagccccacagccagcagcccttcgggggtccatggt

SEQ ID NO: 610265 - DNA, 120 bp, Artificial Sequence
  ENSG00000176083_16 (sequence is synthesized)
ctcagccacaggcagctgtggcctggctgcccacctccttccttcccagccaggagcactgctgcagcaccgagtggagagccccacagccagcagcccttcgggggtccatgcaggtaa

SEQ ID NO: 610266 - DNA, 120 bp, Artificial Sequence
  ENSG00000176083_17 (sequence is synthesized)
acccaagccaaggaaagcccatgatcaccagagtaggttgggaagtgcggatagaggggaagtagtttttatttttttctaacagagaagttgtgcaaggtgttctgagagttgggagca

SEQ ID NO: 610267 - DNA, 120 bp, Artificial Sequence
  ENSG00000176087_0 (sequence is synthesized)
aagttcggcggggaagatggcggatgacaaggattctctgcctaagcttaaggacctggcatttctcaagaaccagctggaaagcctgcagcggcgtgtagaagacgaagtcaacagtgg

SEQ ID NO: 610268 - DNA, 120 bp, Artificial Sequence
  ENSG00000176087_1 (sequence is synthesized)
agtgggccaggatggctcgctgttgtcctccccgttcctcaagggattcctggctggctatgtggtggccaaactgagggcatcagcagtattgggctttgctgtgggcacctgcactgg

SEQ ID NO: 610269 - DNA, 120 bp, Artificial Sequence
  ENSG00000176087_2 (sequence is synthesized)
catctatgcggctcaggcatatgctgtgcccaacgtggagaagacattaagggactatttgcagttgctacgcaaggggcccgactagctctaggtgccatggaagaggcaggatgagca

SEQ ID NO: 610270 - DNA, 120 bp, Artificial Sequence
  ENSG00000176087_3 (sequence is synthesized)
gctcagccttcaggtggagacactttatctggattccccagctgtcatccatttgctatctccaactttcctgccaccttcatccttgcctcccttcctgcagattgtggacagtagttc

SEQ ID NO: 610271 - DNA, 120 bp, Artificial Sequence
  ENSG00000176087_4 (sequence is synthesized)
ctcagcctgcaccctggattccttcttccccttcctagctccatgggactcgccccaagactgtggcttcaaggaccaccagccccttactcttcaagccctgactgtggagttggtaga

SEQ ID NO: 610272 - DNA, 120 bp, Artificial Sequence
  ENSG00000176087_5 (sequence is synthesized)
tgcctctgatcctcagtattctctctggcaatgttccacggcttctccttcctgggagctggctccataacttgattttccccaaacgtgttgcaatccctgctgccccttagccaccca

SEQ ID NO: 610273 - DNA, 120 bp, Artificial Sequence
  ENSG00000176087_6 (sequence is synthesized)
gggtcttgtgtgggtatgagtgtagaggatgggggtatgccaggcctgggccgtcccaggcaggcccgctggaccctgatgctactcctatccactgccatgtacggtgcccatgcccca

SEQ ID NO: 610274 - DNA, 120 bp, Artificial Sequence
  ENSG00000176087_7 (sequence is synthesized)
ttgctggcactgtgccatgtggacggccgagtgcccttccggccctcctcagccgtgctgctgactgagctgaccaagctactgttatgcgccttctcccttctggtaggctggcaagca

SEQ ID NO: 610275 - DNA, 120 bp, Artificial Sequence
  ENSG00000176087_8 (sequence is synthesized)
tggccccaggggcccccaccctggcgccaggctgctcccttcgcactatcagccctgctctatggcgctaacaacaacctggtgatctatcttcagcgttacatggaccccagcacctac

SEQ ID NO: 610276 - DNA, 120 bp, Artificial Sequence
  ENSG00000176087_9 (sequence is synthesized)
caggtgctgagtaatctcaagattggaagcacagctgtgctctactgcctctgcctccggcaccgcctctctgtgcgtcaggggttagcgctgctgctgctgatggctgcgggagcctgc

SEQ ID NO: 610277 - DNA, 120 bp, Artificial Sequence
  ENSG00000176087_10 (sequence is synthesized)
tatgcagcagggggccttcaagttcccgggaacacccttcccagtccccctccagcagctgctgccagccccatgcccctgcatatcactccgctaggcctgctgctcctcattctgtac

SEQ ID NO: 610278 - DNA, 120 bp, Artificial Sequence
  ENSG00000176087_11 (sequence is synthesized)
gtacacagagctgctcatgaagcgacagcggctgcccctggcacttcagaacctcttcctctacacttttggtgtgcttctgaatctaggtctgcatgctggcggcggctctggcccagg

SEQ ID NO: 610279 - DNA, 120 bp, Artificial Sequence
  ENSG00000176087_12 (sequence is synthesized)
cctcctggaaggtttctcaggatgggcagcactcgtggtgctgagccaggcactaaatggactgctcatgtctgctgtcatgaagcatggcagcagcatcacacgcctctttgtggtgtc

SEQ ID NO: 610280 - DNA, 120 bp, Artificial Sequence
  ENSG00000176087_13 (sequence is synthesized)
ctgctcgctggtggtcaacgccgtgctctcagcagtcctgctacggctgcagctcacagccgccttcttcctggccacattgctcattggcctggccatgcgcctgtactatggcagccg

SEQ ID NO: 610281 - DNA, 120 bp, Artificial Sequence
  ENSG00000176087_14 (sequence is synthesized)
ctagtccctgacaacttccaccctgattccggaccctgtagattgggcgccaccaccagatccccctcccaggccttcctccctctcccatcagcagccctgtaacaagtgccttgtgag

SEQ ID NO: 610282 - DNA, 120 bp, Artificial Sequence
  ENSG00000176087_15 (sequence is synthesized)
aaaagctggagaagtgagggcagccaggttattctctggaggttggtggatgaaggggtacccctaggagatgtgaagtgtgggtttggttaaggaaatgcttaccatcccccaccccca

SEQ ID NO: 610283 - DNA, 120 bp, Artificial Sequence
  ENSG00000176087_16 (sequence is synthesized)
accaagttcttccagactaaagaattaaggtaacatcaatacctaggcctgagaaataaccccatccttgttgggcagctccctgctttgtcctgcatgaacagagttgatgaaagtggg

SEQ ID NO: 610284 - DNA, 120 bp, Artificial Sequence
  ENSG00000176087_17 (sequence is synthesized)
gtgtgggcaacaagtggctttccttgcctactttagtcacccagcagagccactggagctggctagtccagcccagccatggtgcatgactcttccataagggatcctcacccttccact

SEQ ID NO: 610285 - DNA, 120 bp, Artificial Sequence
  ENSG00000176087_18 (sequence is synthesized)
ttcatgcaagaaggcccagttgccacagattatacaaccattacccaaaccactctgacagtctcctccagttccagcaatgcctagagacatgctccctgccctctccacagtgctgct

SEQ ID NO: 610286 - DNA, 120 bp, Artificial Sequence
  ENSG00000176087_19 (sequence is synthesized)
ccccacacctagcctttgttctggaaaccccagagagggctgggcttgactcatctcagggaatgtagcccctgggccctggcttaagccgacactcctgacctctctgttcaccctgag

SEQ ID NO: 610287 - DNA, 120 bp, Artificial Sequence
  ENSG00000176087_20 (sequence is synthesized)
ggctgtcttgaagcccgctacccactctgaggctcctaggaggtaccatgcttcccactctggggcctgcccctgcctagcagtctcccagctcccaacagcctggggaagctctgcaca

SEQ ID NO: 610288 - DNA, 120 bp, Artificial Sequence
  ENSG00000176087_21 (sequence is synthesized)
gagtgacctgagaccaggtacaggaaacctgtagctcaatcagtgtctctttaactgcataagcaataagatcttaataaagtcttctaggctgtagggtggttcctacaaccacagcca

SEQ ID NO: 610289 - DNA, 120 bp, Artificial Sequence
  ENSG00000176087_22 (sequence is synthesized)
cgtggtcttcactctccttgacctttttagttccggggagaagcgactctggagcggctcaggagtgaggatgtcccttgtttcttctgcggctcctgtcaactgcctcaacagtgtgga

SEQ ID NO: 610290 - DNA, 120 bp, Artificial Sequence
  ENSG00000176087_23 (sequence is synthesized)
gtggtgtggggagagcattcggcgaggcgggaggagccgtggatcccccagatgtcccctcctgggaaccatcacgaacccgttactagcacagactcaaaaacattcacccttaaacac

SEQ ID NO: 610291 - DNA, 120 bp, Artificial Sequence
  ENSG00000176087_24 (sequence is synthesized)
tcctcactttaccccattccctagctcccgaaattttcttcccagtgacacgatgtttccaatcacacggacactcacaccaccctcattcaaacactcctttgcatacattctgaattt

SEQ ID NO: 610292 - DNA, 120 bp, Artificial Sequence
  ENSG00000176087_25 (sequence is synthesized)
catacttatatgcgatcaaaatcactcagtccatttacttacacacttgccgacagtcttttttgtcattctcagtcacatccagtcactcacattcagtttgggatgtccttgggaaga

SEQ ID NO: 610293 - DNA, 120 bp, Artificial Sequence
  ENSG00000176087_26 (sequence is synthesized)
aagaggtaaagcccatccaggaaccaagacaataaaattgtccaggaaactgcctcggtccattactcaccattggtctagaagctcagcattacccacacatttactaaatgtcaggca

SEQ ID NO: 610294 - DNA, 120 bp, Artificial Sequence
  ENSG00000176087_27 (sequence is synthesized)
ctagaacatagtagccaagacagactggtcacgactttcaaggagctcataatggagtcagtagtggtttcctgatggacctaattaaaggtccctagctgtccctcctgcctttcctac

SEQ ID NO: 610295 - DNA, 120 bp, Artificial Sequence
  ENSG00000176087_28 (sequence is synthesized)
atactgcttgctatataaaattcttgtcaaggttgatgtaagttactggttcagatcccatctgtcagtcccttcctggccctcatttgaattctgtgcttttcaatgcttgtctttctt

SEQ ID NO: 610296 - DNA, 120 bp, Artificial Sequence
  ENSG00000176087_29 (sequence is synthesized)
tgccactgccatctcaggaagcttttataggaaaaggtctttctggctcaccccatcccctcccaattcccagcttctgatggaattgagcaaggggtggggcttagtcagactgctgga

SEQ ID NO: 610297 - DNA, 120 bp, Artificial Sequence
  ENSG00000176092_0 (sequence is synthesized)
gacggccggagccccgggtctttcactcgccatggccgagcggtgcggaggcccgggggcctgcctggcccaccttttggctgggttaggggtccggagggagcacagagggaaagagat

SEQ ID NO: 610298 - DNA, 120 bp, Artificial Sequence
  ENSG00000176092_1 (sequence is synthesized)
ctcggaggccacatcccgggagaggcctctggatggccggagctgctctgacctagcccagggtaccacctgcaatgtcagcctcaaggcccaaggccagagctgctcagaatgggacat

SEQ ID NO: 610299 - DNA, 120 bp, Artificial Sequence
  ENSG00000176092_2 (sequence is synthesized)
ccatgtaggggaccatgatgatttctggatttggaagcaacaaggaatctcggggggtcctgctcagtccctggggcgcctacagaggccagcggtgggcagcgccttcgacctggccag

SEQ ID NO: 610300 - DNA, 120 bp, Artificial Sequence
  ENSG00000176092_3 (sequence is synthesized)
ccatgcctccctggggcctgagagcctggccctggaagtggcctcaggagagtctgctcgtaccaggctcccccaatacccagggcctgctcctggacatggggagcagggatcctcagg

SEQ ID NO: 610301 - DNA, 120 bp, Artificial Sequence
  ENSG00000176092_4 (sequence is synthesized)
ctgcacctgtcagcagtctccacccacagcttcagaggtccctctgaggcctgagccacccagcaacctggaagacgcacccctgctgctccaccctgcatccttccccagggcagaggg

SEQ ID NO: 610302 - DNA, 120 bp, Artificial Sequence
  ENSG00000176092_5 (sequence is synthesized)
gacaaagggcaagcccgccaccccagggactgccttgccagagcctgcccagaccctacacacgcgtccctcttccaggaggacccgctactacatcactgtcaccctgctggggcacag

SEQ ID NO: 610303 - DNA, 120 bp, Artificial Sequence
  ENSG00000176092_6 (sequence is synthesized)
gcaagcaccaggggaggagggtgaagaaccggcccaaccagctccacacctctgcggccctgaggaatctgagggctggtgggagcctccccaggggccacgccccatcacagggtgccg

SEQ ID NO: 610304 - DNA, 120 bp, Artificial Sequence
  ENSG00000176092_7 (sequence is synthesized)
gacggccccgcctcaggaaccccagctgagagcccaatcgcatcaggggagcacggcccagcagcaggagctccaggctggctggacacctgggtccccacgcagactggagctggacca

SEQ ID NO: 610305 - DNA, 120 bp, Artificial Sequence
  ENSG00000176092_8 (sequence is synthesized)
cagtgggacaaggacacctccagacaggttgccagggccccacatggaggaggcaggtgggcccatggcccgggccaaggcccgagtggtaagtgccacattgacatggcggcagcggcc

SEQ ID NO: 610306 - DNA, 120 bp, Artificial Sequence
  ENSG00000176092_9 (sequence is synthesized)
ccccacccaggaagagatcaaacatggttttcacaaggtgtccctggtgtcaggggcccagatggaagccccgcagaaggagatgtttgagttcagccgtcgagaggaagtggaagtcaa

SEQ ID NO: 610307 - DNA, 120 bp, Artificial Sequence
  ENSG00000176092_10 (sequence is synthesized)
tggctttgcaacacaggaagaagagactgtgaattgccagggccctcgggatacagctggctccaagaacttccagagccatggacccatcttttccaagaagtacataccacctcccaa

SEQ ID NO: 610308 - DNA, 120 bp, Artificial Sequence
  ENSG00000176092_11 (sequence is synthesized)
ggagaaaaggcctgaggggaggctgaaggaggctgtggaccagagtgatggcagccgccaagctcccaggactgagcccccatgtgtgggagctatggccaggactgagcttttggttcc

SEQ ID NO: 610309 - DNA, 120 bp, Artificial Sequence
  ENSG00000176092_12 (sequence is synthesized)
cctgcctgggccccgagagccaagtccccacccaggtgtaggtctcaccagtggtagctcccggagcctcgaggaataccgagtgacacgcactgtgcggaccaccacagtggtgggagg

SEQ ID NO: 610310 - DNA, 120 bp, Artificial Sequence
  ENSG00000176092_13 (sequence is synthesized)
tcatgtggaccggcggatgagcagctctgtgactgtgaggccagtgtcctcaggcgaggccctgccacggggccgtcaggtctcccgcatggtgccgccagtggtggtgggctccccacc

SEQ ID NO: 610311 - DNA, 120 bp, Artificial Sequence
  ENSG00000176092_14 (sequence is synthesized)
aggctcgcccagccgcagccaggccgtgaaagtgctaagtaacctcgtgcctgctgggcacagcccccctgccagtcacctgcccaggcccacggctggcgggccaaggagcacaggtct

SEQ ID NO: 610312 - DNA, 120 bp, Artificial Sequence
  ENSG00000176092_15 (sequence is synthesized)
gggcagcacagtgggggcagccttgaggcagctgcctgagaccgggacagcagagcttaaagacagctctgccctggcctctacaggcatcccagccagtgctcacctgcctaagaatca

SEQ ID NO: 610313 - DNA, 120 bp, Artificial Sequence
  ENSG00000176092_16 (sequence is synthesized)
ggatgcccctgcagcctgtccggacagagaccagggcagagccccggatgccagggcctgtgagctctggcaggtgctgggagcccccagttccactgagctccctctccagacttctca

SEQ ID NO: 610314 - DNA, 120 bp, Artificial Sequence
  ENSG00000176092_17 (sequence is synthesized)
gggtcaagcatcagtcccctcctctcccagactcgagacccatgtcccctctcctggcctaactcaccctgcaaagcagcctgtggtgcccactcaccccggggcccggctcactcccct

SEQ ID NO: 610315 - DNA, 120 bp, Artificial Sequence
  ENSG00000176092_18 (sequence is synthesized)
tgttctgccccctaaaaaaaaggacgggcccgtggacccccctgctgccaccgtcctgcccatggtgaggagcgagcatgtgacagtccctggacaacctcctgctccatccactacaag

SEQ ID NO: 610316 - DNA, 120 bp, Artificial Sequence
  ENSG00000176092_19 (sequence is synthesized)
aaggaaggatgtccccagcccaggaggtctttctgctccatcgtccccaaggaataagtttgttcagaactctgaaaatgtccctgtcctcccctttacccagagggaggtcgtgaaggg

SEQ ID NO: 610317 - DNA, 120 bp, Artificial Sequence
  ENSG00000176092_20 (sequence is synthesized)
ccccggtgctcctgctgcctcatctcccacccggaaggaggtggtgcaggggtccagtgcttctgctgcctcgtcccccacctggaaagaggtcgtgaagggccctggtgctcctgctgc

SEQ ID NO: 610318 - DNA, 120 bp, Artificial Sequence
  ENSG00000176092_21 (sequence is synthesized)
ctcatctcccacccagaaggaggtggtgcaggggtccagtgctcctgctgccttgttccccacctggaaagaggtcgtgaagggccccggtgctcctgatgcctcatttcccacctggaa

SEQ ID NO: 610319 - DNA, 120 bp, Artificial Sequence
  ENSG00000176092_22 (sequence is synthesized)
agaggttgtgaagggccctggtgctcctgctgcctcatcccccacccagaaggaggtggtgcaggggtctggtgctcctgctgccttgtccaccaccccaaaagaggttgtgaagggccc

SEQ ID NO: 610320 - DNA, 120 bp, Artificial Sequence
  ENSG00000176092_23 (sequence is synthesized)
tggtgctcctgctgcctcatcgcccacccagaaagaggttgtgaagggcccctgtgctcctgctgcctcatctcccacccagaaggaggtggtgcaggggtctggtgctcctgctgcctt

SEQ ID NO: 610321 - DNA, 120 bp, Artificial Sequence
  ENSG00000176092_24 (sequence is synthesized)
gtcccccaagtcaactgaggttgtccagggcccaaaaggcagcagtagcatccaaaaagaggctgtccagggtattgcaggcagccttgccccgcccctcaccaaggaagagactgttca

SEQ ID NO: 610322 - DNA, 120 bp, Artificial Sequence
  ENSG00000176092_25 (sequence is synthesized)
aggcccaattgctcctgccacctcactccccaaacaggataagggggtccaggactctgaagggagccccatctcatctctcacccagaaagaggttgtgcaggaccctgatgctctccc

SEQ ID NO: 610323 - DNA, 120 bp, Artificial Sequence
  ENSG00000176092_26 (sequence is synthesized)
gacagggtgtcccccagcccaggaggcacccctgccccagtgccaacaggagcagaggccagcacggagtcccagcttgtctctgatcccaccgagggcaagacgtgcacagagacatca

SEQ ID NO: 610324 - DNA, 120 bp, Artificial Sequence
  ENSG00000176092_27 (sequence is synthesized)
agggaggaggatgaggtggccctggccgctgacctggagatattcctggatacgctgcggagcatggagccccctgagatcctccgcactcaccggctgccacgagcccctcgctcctcc

SEQ ID NO: 610325 - DNA, 120 bp, Artificial Sequence
  ENSG00000176092_28 (sequence is synthesized)
tacctgtccatgtacgccacgctgcctgccattgaggaggaccagctggggccatgggtgctgggccccggaccccaggaggtgccttcactggaagagaaagaggaggaggaggaggag

SEQ ID NO: 610326 - DNA, 120 bp, Artificial Sequence
  ENSG00000176092_29 (sequence is synthesized)
gaaccagagaacccctatctgagtgacgatgagaagctccagcgcaggcaggagaaagctgggcccagcccctccagggacctccaccctgccagacccacccaggtctcctgctctcct

SEQ ID NO: 610327 - DNA, 120 bp, Artificial Sequence
  ENSG00000176092_30 (sequence is synthesized)
ctggagatgatgaagaagcatgtagcaggaaccaagggcccccactcagagctgggattggaactgcagggaggcagcaggcccacttcccgtcttggaggcagccttctgttcggcagt

SEQ ID NO: 610328 - DNA, 120 bp, Artificial Sequence
  ENSG00000176092_31 (sequence is synthesized)
ctggtgcctaccgccaaggaggcctccaccccggaaccgctgggcacaaaactatctgctctgctgccccatggggcaccggggctcaggaaggtgccaggacagttgcccctgctttgc

SEQ ID NO: 610329 - DNA, 120 bp, Artificial Sequence
  ENSG00000176092_32 (sequence is synthesized)
agtgaaagatcatccccaacggagaagcttgcctgttccctgcccctggaggggtggagcccagccttaaagacccagggcaagctgaacaccaggcctggaaaggtgatcttcttctca

SEQ ID NO: 610330 - DNA, 120 bp, Artificial Sequence
  ENSG00000176092_33 (sequence is synthesized)
gagtctggctgccaaggcagtggcagggaggtctggggagacatcgttgatgcctcaggctgggcccccgtagcctccataagggtagttcgaggctgctgggtgctgtacgaagagcca

SEQ ID NO: 610331 - DNA, 120 bp, Artificial Sequence
  ENSG00000176092_34 (sequence is synthesized)
gagttccggggtcagaagctggtcctgcctgaaggagacatggaactcagaaccccagggacaaagtggagtccccaaggcatcggctccctaaggagggttgtctgggactacagcacc

SEQ ID NO: 610332 - DNA, 120 bp, Artificial Sequence
  ENSG00000176092_35 (sequence is synthesized)
ccggaaatcagcctcttctctgaggagggcctcaagggggagcaagtgaagctaacagaggccttgaagaattcccagggtctggagaagcccctgcaggtggcatctgccaccgtctct

SEQ ID NO: 610333 - DNA, 120 bp, Artificial Sequence
  ENSG00000176092_36 (sequence is synthesized)
gcaggactgtggctactgtaccccaaaccattattcgaagacactccctacatcctggaacctggagagtaccccacctcagaggcctggggcacatcggaccccagcgtgggctccctg

SEQ ID NO: 610334 - DNA, 120 bp, Artificial Sequence
  ENSG00000176092_37 (sequence is synthesized)
aagcccatgagattgggctgcccaagtgtggagaagccaggggagcccagggctgtggtgtatgaggccccaggctttcagggccgcagctgggaagtgagccgagacatctacaacctt

SEQ ID NO: 610335 - DNA, 120 bp, Artificial Sequence
  ENSG00000176092_38 (sequence is synthesized)
cagcagccagaggacagccagagcccccacctggcctctgtggggtccctgagagttctcggaggctgctgggtgggctacgagaaggagggcttccggggccaccagtatctgctggag

SEQ ID NO: 610336 - DNA, 120 bp, Artificial Sequence
  ENSG00000176092_39 (sequence is synthesized)
gagggggaatacccagactggtcacactggggaggctatgacgagttgctgacctccctccgggtcatccggacggacttcggggacccggccgtcgtgctatttgaggccatggacttc

SEQ ID NO: 610337 - DNA, 120 bp, Artificial Sequence
  ENSG00000176092_40 (sequence is synthesized)
gaggggcacggcgtggaggtgagcaaggcattgccggatgtggagctggtgcaacacggccccagcacacaggccatccacgtgctcagcggcgtgtgggtggcctaccaggaggtgggc

SEQ ID NO: 610338 - DNA, 120 bp, Artificial Sequence
  ENSG00000176092_41 (sequence is synthesized)
ttctccggggaacagtacgtgctggagaagggcgtgtatcgtaactgcgaggactggggcgctggcaacagcaccctcgcctcgctgcagccggtcctacaggtcggggagcacgatctg

SEQ ID NO: 610339 - DNA, 120 bp, Artificial Sequence
  ENSG00000176092_42 (sequence is synthesized)
cacttcgtctcaaagattcagcttttctcccgccccgactttctgggcgaccacttctctttcgaagatgaccaggccgctctgcccgcctccttccgacctcagtcctgccgggtccac

SEQ ID NO: 610340 - DNA, 120 bp, Artificial Sequence
  ENSG00000176092_43 (sequence is synthesized)
ggcggcagctggatcctgtttgatgagacgaacttcgagggtgaccagcacattctctctgagggcgagttccccactctcacggccatgggctgcctcgcctccacagtcctgggctct

SEQ ID NO: 610341 - DNA, 120 bp, Artificial Sequence
  ENSG00000176092_44 (sequence is synthesized)
ctccagaaggtatccctgcacttttcagagccttccattttcctgtatggactcgagtgcttcgaggggaaggagatcgagctcagcagggaggtgcggagcctgcaagccgagggcttc

SEQ ID NO: 610342 - DNA, 120 bp, Artificial Sequence
  ENSG00000176092_45 (sequence is synthesized)
aacaaccatgtgctgtctgtgcggatcaaggggggcatttgggtgctatgtgaacacagtgacttccggggccgccagtggctggtgggaagctgcgagatcaccaactggctgacctac

SEQ ID NO: 610343 - DNA, 120 bp, Artificial Sequence
  ENSG00000176092_46 (sequence is synthesized)
agcggcacccagagggtgggctccctctaccccatcaagcagcgccgggtttatttccgcctctggaatgcagcactggggggattcctggcagtgccggaccatgtggaggacatgaaa

SEQ ID NO: 610344 - DNA, 120 bp, Artificial Sequence
  ENSG00000176092_47 (sequence is synthesized)
gcaggccgtgtggtggtcgccgacccccaagctggaggtagctgcatctggtactacgaggatgggctgctgaagaaccagatggcccccaccatgagcctacaggtgattggaccccct

SEQ ID NO: 610345 - DNA, 120 bp, Artificial Sequence
  ENSG00000176092_48 (sequence is synthesized)
agcccaggctccaaggtggtgctgtgggccgagagccgcctgccgcgccagacgtggagcatcagtgaatcgggccacatctgcagccagatgttcgaaggccagatcctggacgtgaag

SEQ ID NO: 610346 - DNA, 120 bp, Artificial Sequence
  ENSG00000176092_49 (sequence is synthesized)
ggaggccggggctacgaccgggaccacgtggtgctatgggagccggatgaggacagggcatcccagatctggactatccacgtgctttgaaacttttcccctcaccctccagccctggag

SEQ ID NO: 610347 - DNA, 120 bp, Artificial Sequence
  ENSG00000176092_50 (sequence is synthesized)
gcttttgctgggatgaatgtttttatagggtttttgttgtaacataagctattttctaatatgctgccaggtacccttgtctctgtgcaccttgatatttcggggtggggtggggatttg

SEQ ID NO: 610348 - DNA, 120 bp, Artificial Sequence
  ENSG00000176092_51 (sequence is synthesized)
ttcacttgccttcttccctgacgctcaggctggcttcttccctccaggccccagctttcgggttcagatgttaggcctccttctgccatcagagggcgccctgggaccagactaactggg

SEQ ID NO: 610349 - DNA, 120 bp, Artificial Sequence
  ENSG00000176092_52 (sequence is synthesized)
aaaggcaattggcccatccctctgcctctggccacagccagacctcccccagtacagtttgtggagggaagaatttgtaccccctctccgtgttctccctgacttcggggacccggccgt

SEQ ID NO: 610350 - DNA, 120 bp, Artificial Sequence
  ENSG00000176092_53 (sequence is synthesized)
aagataatgtaggtaaaacattattagaacagtgcttgagtgagtcagctctcaacaaacgttagctgtgattattgttattactattattacttttgctaccatctaagagctccagct

SEQ ID NO: 610351 - DNA, 120 bp, Artificial Sequence
  ENSG00000176092_54 (sequence is synthesized)
tgctgaggggaggcatgggtgcggtggctgctggtggggatgagtcatggcaagacagagatcctgggggtctctggcctctttcccctccccacttttcccccactcccctccaagcca

SEQ ID NO: 610352 - DNA, 80 bp, Artificial Sequence
  ENSG00000176092_55 (sequence is synthesized)
gcggggcctccccggtggcgggacctggagttcgggtgcgccccgcccccacgcagaggtagcgggctggaggacctgcc

SEQ ID NO: 610353 - DNA, 120 bp, Artificial Sequence
  ENSG00000176095_0 (sequence is synthesized)
agccgccatcttgttgttgatccgtacccagtgggcagcgccgggagctggaccaagcggccggtgagaggccgctgtagcggtgctcagccacctgtgctgcctgccagggggcgggcc

SEQ ID NO: 610354 - DNA, 120 bp, Artificial Sequence
  ENSG00000176095_1 (sequence is synthesized)
gaaacctggaggcccggggggcccagctcccgtagggagccgtgggcgctcggtgcccgggccgggcaggacagaataataagctgaatagaatctgaccattggctttcacctggccag

SEQ ID NO: 610355 - DNA, 120 bp, Artificial Sequence
  ENSG00000176095_2 (sequence is synthesized)
gaccttctatgtagctctccttttgtggcccatgtgctgcatcctctgccctcagtgtgcaactggcccccaacgcaatgtgtgtttgtcaaaccatggaagtggggcagtatggcaaga

SEQ ID NO: 610356 - DNA, 120 bp, Artificial Sequence
  ENSG00000176095_3 (sequence is synthesized)
atgcaagtcgggctggagaccggggagtcctcctggagcccttcatccaccaagtaggcggacacagcagcatgatgcgttacgacgatcacactgtgtgcaagcccctcatctcccggg

SEQ ID NO: 610357 - DNA, 120 bp, Artificial Sequence
  ENSG00000176095_4 (sequence is synthesized)
aacagcgcttttacgagtccctccctcccgaaatgaaggagttcacccctgaatacaaaggcgtggtatctgtctgttttgagggggacagtgatggttacatcaacttagtggcctatc

SEQ ID NO: 610358 - DNA, 120 bp, Artificial Sequence
  ENSG00000176095_5 (sequence is synthesized)
cttatgtggaaagtgagactgtggaacaggatgacacaacagaacgggagcaacctcggcgcaaacactcccgccggagcctgcaccggtcaggcagtggcagtgaccacaaggaggaga

SEQ ID NO: 610359 - DNA, 120 bp, Artificial Sequence
  ENSG00000176095_6 (sequence is synthesized)
aagccagcctgtcccttgagacctctgagagctcacaggaggcaaagagtccgaaggtggagctgcacagccactcagaggtccctttccagatgctagatggcaacagtggcttgagtt

SEQ ID NO: 610360 - DNA, 120 bp, Artificial Sequence
  ENSG00000176095_7 (sequence is synthesized)
ctgagaagatcagccacaacccctggagcctgcgttgtcacaagcagcagctgagccgcatgcgctccgagtccaaggaccgaaagctctacaagttcctcctgcttgagaacgtggtgc

SEQ ID NO: 610361 - DNA, 120 bp, Artificial Sequence
  ENSG00000176095_8 (sequence is synthesized)
accacttcaagtacccctgcgtgttggacctgaagatgggcacgcggcagcatggcgatgacgcgtcagctgagaaggcagcccggcagatgcggaaatgcgagcagagcacatcagcca

SEQ ID NO: 610362 - DNA, 120 bp, Artificial Sequence
  ENSG00000176095_9 (sequence is synthesized)
cgctgggcgtcagggtctgcggcatgcaggtgtaccagctggacacagggcattacctctgcaggaacaagtactatggccgtgggctctccattgaaggcttccgcaatgccctctatc

SEQ ID NO: 610363 - DNA, 120 bp, Artificial Sequence
  ENSG00000176095_10 (sequence is synthesized)
aatatctgcacaatggcctggacctgcgacgtgacctgtttgagcctatcctgagcaaactgcggggcctgaaagctgtgctggagcggcaggcctcttaccgcttctactccagttccc

SEQ ID NO: 610364 - DNA, 120 bp, Artificial Sequence
  ENSG00000176095_11 (sequence is synthesized)
tgcttgtcatctatgatggcaaggagtgccgggctgagtcctgcctggaccgccggtctgagatgcgtctcaagcacctggacatggtgctccctgaggtggcgtcatcctgtggcccca

SEQ ID NO: 610365 - DNA, 120 bp, Artificial Sequence
  ENSG00000176095_12 (sequence is synthesized)
gcaccagccccagcaacaccagccccgaggcgggtccctcctctcagcccaaggtggatgtccgcatgattgactttgcacacagcacattcaagggcttccgggatgaccccaccgtgc

SEQ ID NO: 610366 - DNA, 120 bp, Artificial Sequence
  ENSG00000176095_13 (sequence is synthesized)
atgatgggccagacagaggctacgtgtttggcctggagaacctcatcagcatcatggaacagatgcgggacgagaaccagtaggccctgttctgggcccccagaaccccttcctctccac

SEQ ID NO: 610367 - DNA, 120 bp, Artificial Sequence
  ENSG00000176095_14 (sequence is synthesized)
tgcaggcagggaccattgttctgaacttgccgtgaggacacacagacttgcttttaaagggttatatttctctttggtgtaaactaaaagaaatgtttttagctgtagcctggaatccat

SEQ ID NO: 610368 - DNA, 120 bp, Artificial Sequence
  ENSG00000176095_15 (sequence is synthesized)
atatataaagtgaaggagggcagaccacacgccctctcagccaggctcctcagctttgtggctctgactggtgtgtccaggctgccttaggaaggaagaggtgcccctggtgggcttggc

SEQ ID NO: 610369 - DNA, 120 bp, Artificial Sequence
  ENSG00000176095_16 (sequence is synthesized)
agcagggacagggtgcccttggacattggtttctcttgtctagatctttgagatctgtggctgcagggccctgctgattgtaaggtaaagccctgggctggtgcagggcccctccacgcc

SEQ ID NO: 610370 - DNA, 120 bp, Artificial Sequence
  ENSG00000176095_17 (sequence is synthesized)
cactcttcccttgttccccagaagtagagggctctgggtgcccatttcttgggggctttccagtcttatgctgtgggtgtcagctagctctttaataggtgccctcagggcaccacaggg

SEQ ID NO: 610371 - DNA, 120 bp, Artificial Sequence
  ENSG00000176095_18 (sequence is synthesized)
tctgaccttagcatggggctagattaatgaagctgggctgaggccaacttatggcagagggcggcgcctgggttccccaggcacctgttggcacgtgacaggttggcacctgtcctattc

SEQ ID NO: 610372 - DNA, 120 bp, Artificial Sequence
  ENSG00000176095_19 (sequence is synthesized)
ctgaaacagcctctctcaccaagttcccttgcctaagaaggccactccctcccaccccactgaagtgggggatagtcggtgtcctagcaggcctcagggcctctggtggctctggcccag

SEQ ID NO: 610373 - DNA, 120 bp, Artificial Sequence
  ENSG00000176095_20 (sequence is synthesized)
acagtatttgcagttcttgtgctatgggtgggagtcttcttcctcaagtttcggcagctgtgctgctgctggatgggctgctcctcccagggctcaagggctgtggtccgctcagggtct

SEQ ID NO: 610374 - DNA, 120 bp, Artificial Sequence
  ENSG00000176095_21 (sequence is synthesized)
catttccccaggccaagttcaaggcagcagccctttgtgaggcgctcttggccctgggcctggagggagaactttaagcttttttgctcacagggacgtggtatgggccctgggtgcagg

SEQ ID NO: 610375 - DNA, 120 bp, Artificial Sequence
  ENSG00000176095_22 (sequence is synthesized)
tgcccacattctgctaatgagagctttgtctgatcagtcctgggtccatcagtttgtccatgtgtccggctgccagcccgtcccttgggatccttcccctggggtgtagccttgttcatt

SEQ ID NO: 610376 - DNA, 120 bp, Artificial Sequence
  ENSG00000176095_23 (sequence is synthesized)
agtatatactcattccttcatgctttcctcagcagaacacttccacttctgaggtgagcttttgccccatgcccttcctccacaggtgttgcctttttataaagacctgatagcagaata

SEQ ID NO: 610377 - DNA, 120 bp, Artificial Sequence
  ENSG00000176095_24 (sequence is synthesized)
aattggtgtttccctgttgacccagcaccatttctgtgggcctagaatatggccctcaacccttagagtggggcagtgagggcttgaggagtgacccttcctttctcatggttttagtca

SEQ ID NO: 610378 - DNA, 120 bp, Artificial Sequence
  ENSG00000176095_25 (sequence is synthesized)
ttttggctgccagcccttaatggcacagatctgctgcttctaacagatggccaggaggtgacaccgatttcagccattgccaaggttagcaccctctcctttgagcctagggccacactg

SEQ ID NO: 610379 - DNA, 120 bp, Artificial Sequence
  ENSG00000176095_26 (sequence is synthesized)
ttcattgtcactttaggcaagtgcctgtttggctttaaaggtaagcctgccagctgtgagaagccttggtaactgatggactcatttcctggtccttaaagatgcagcctcttaagggct

SEQ ID NO: 610380 - DNA, 120 bp, Artificial Sequence
  ENSG00000176095_27 (sequence is synthesized)
ccttgatggatgccatctctcctagcccccagccctggtgccactggtgggcaggttcccattctttggggctgggagggacagcttgcctgtttctggtcacaaattacagtcttctct

SEQ ID NO: 610381 - DNA, 120 bp, Artificial Sequence
  ENSG00000176095_28 (sequence is synthesized)
cctgtaccattctgtggcttcagccatgggggcagtagcccttcattagtgtagatagtcattccctggtagggtggagggtaagacatagggtctggaactgtttgggaccttttgggg

SEQ ID NO: 610382 - DNA, 120 bp, Artificial Sequence
  ENSG00000176095_29 (sequence is synthesized)
atgtcctgtgcctcccagattcctcgattctgggaggagaggctgccgcattctgctgctcctcacagcgagcaaagctgcacccacttacattcagtattttcctggcactacaaagag

SEQ ID NO: 610383 - DNA, 120 bp, Artificial Sequence
  ENSG00000176095_30 (sequence is synthesized)
tgggaaggcctgggatttgctgctgctcccttagagcagggcccctcttttcagcactttggacacctggagacccagccctgttatttaatggtagtgggcaagtgtgtgtgcatactg

SEQ ID NO: 610384 - DNA, 120 bp, Artificial Sequence
  ENSG00000176095_31 (sequence is synthesized)
tctgccactgctttctccctgccccatgccagagagccctgtccctgccaggcccagccttcttagccccaacttgggaacaaagtgcaacatgggatcatgggttggggtgctcaggtg

SEQ ID NO: 610385 - DNA, 120 bp, Artificial Sequence
  ENSG00000176095_32 (sequence is synthesized)
agccctctctatagtgcttccctgggccaagctgacaccagcccctgagggtggggtgggacgggtggtgcttaaaagaggaaggggaccagtgtagcaacttgccagggaccccacccc

SEQ ID NO: 610386 - DNA, 120 bp, Artificial Sequence
  ENSG00000176095_33 (sequence is synthesized)
tccctctctgggcctgtgcagtgagcatggggattcccatcaaggggcctggcacctgtgctagttacgtagccgctgctcacgcgctcactcctgaccacatgcacgttccctagatgc

SEQ ID NO: 610387 - DNA, 120 bp, Artificial Sequence
  ENSG00000176095_34 (sequence is synthesized)
agactgctttgaactttaaagctgtacaatttggttatgtttgtgctgacttaaaatatattttaatgaggaaaaaataatggagaaccctgggaaggacctggttcttttgcttctcgg

SEQ ID NO: 610388 - DNA, 120 bp, Artificial Sequence
  ENSG00000176095_35 (sequence is synthesized)
ggaactgtaagccctcgcgttctgggaatcgctctctgctgctctttcctggaagctaagcctgtctccaccgcccgaggcctgcgccggtggctcccgccgcagttgcgtttgctttgg

SEQ ID NO: 610389 - DNA, 120 bp, Artificial Sequence
  ENSG00000176095_36 (sequence is synthesized)
accttgcgtgcgggggagggggtgctcggtccgagcccgctcctttctgtacacctagcgctgcccgccccgcttgtgtctgaggtcgtgtatgtcaaaaataaagccgctagaaacgga

SEQ ID NO: 610390 - DNA, 120 bp, Artificial Sequence
  ENSG00000176095_37 (sequence is synthesized)
agatgctggcaccgaagccggggggacagccggtgtggaggacggagagcgccagtgcctgagggttggccggctagtagcgggaaaccagcttctctgaccgaagctctggactccgct

SEQ ID NO: 610391 - DNA, 120 bp, Artificial Sequence
  ENSG00000176095_38 (sequence is synthesized)
gatccggagcgctaaagtgtgtccggtgccaccctgatgctctcctgggagttatgttgctcctggctgagaaatagacttacctctttcttagatagcgttcctgcgagtgattttcag

SEQ ID NO: 610392 - DNA, 120 bp, Artificial Sequence
  ENSG00000176095_39 (sequence is synthesized)
gacgctggatgctaagactagacgaagcaagccaaagcccccgcgagccaggcaggccggtgtcacggccctatgattatggcaagggggaccctctgcctggctgctgcttcctgagac

SEQ ID NO: 610393 - DNA, 120 bp, Artificial Sequence
  ENSG00000176095_40 (sequence is synthesized)
ccgttcggaacctcacgtgtacctcgaagctcaccgttttcctcgcaaagaacctggttaaatgtccataatggctgagttttattttggaacataatttctttggttcttcaccaccac

SEQ ID NO: 610394 - DNA, 120 bp, Artificial Sequence
  ENSG00000176095_41 (sequence is synthesized)
agccgccatcttgttgttgatccgtacccagtgggcagcgccgggagctggaccaagcggccggcgtggtatctgtctgttttgagggggacagtgatggttacatcaacttagtggcct

SEQ ID NO: 610395 - DNA, 120 bp, Artificial Sequence
  ENSG00000176095_42 (sequence is synthesized)
ttgagacaagtacatactgcattaggtaaaagcccccttttatagaaaaactgggttgtgctttcctggctggggctgatggtgagtgtggttgtcattctccttgaccgtggcccagag

SEQ ID NO: 610396 - DNA, 120 bp, Artificial Sequence
  ENSG00000176101_0 (sequence is synthesized)
agcgctgcttccgcggcggttggggtggtggggccccgggcggcgttgaccatgacccagcagggcgcggcgctgcagaactacaacaacgagctggtcaagtgcatagaggagctgtgc

SEQ ID NO: 610397 - DNA, 120 bp, Artificial Sequence
  ENSG00000176101_1 (sequence is synthesized)
cagaagcgggaggagctgtgccggcagatccaggaggaggaggacgagaagcagcggctgcagaatgaggtgaggcagctgacagagaagctggcccgcgtcaacgagaacctggcacgc

SEQ ID NO: 610398 - DNA, 120 bp, Artificial Sequence
  ENSG00000176101_2 (sequence is synthesized)
aagattgcctctcgcaacgagttcgaccggaccatcgcggagacggaggccgcctacctcaagatcctggagagctcccagactttgctcagcgttctcaagagggaagctgggaacctg

SEQ ID NO: 610399 - DNA, 120 bp, Artificial Sequence
  ENSG00000176101_3 (sequence is synthesized)
gaaaagtagcggcggcagggacagctgaccagaccacgggcagggcctgcctccgtgtgcccctcagctcagccccagcaagtgtgtgctcagagcatctttgttcttcacggcagcagc

SEQ ID NO: 610400 - DNA, 120 bp, Artificial Sequence
  ENSG00000176101_4 (sequence is synthesized)
taccttccctcactgtctcaggtgccgagaggggcaggtgccagcctccactggcatcagtgacaagcccagggcacagcccacccgggggtcctcgcttcatgctcacacaggctatgg

SEQ ID NO: 610401 - DNA, 120 bp, Artificial Sequence
  ENSG00000176101_5 (sequence is synthesized)
ggatggtgggctccaggtcagctctgcaaggggcttgtctctgtggcacccacactcctgccctgccagggaggctctggttgtctgagcaccatgggggccccctcaccttgtccctcc

SEQ ID NO: 610402 - DNA, 120 bp, Artificial Sequence
  ENSG00000176101_6 (sequence is synthesized)
tcagccagcagaggcccagggcaagggacaggaggacaggggttctccttcaccacagaacccaaacctcaggtctcacccctgtggcctgtgattatgaataaagattatctttgtaaa

SEQ ID NO: 610403 - DNA, 120 bp, Artificial Sequence
  ENSG00000176101_7 (sequence is synthesized)
gtgcgcaggcgcggacagcgctgcttccgcggcggttggggtggtggggccccgggcggcgttgaccatgacccagcagggcgcggcgctgcagaactacaacaacgagctggtcaagtg

SEQ ID NO: 610404 - DNA, 120 bp, Artificial Sequence
  ENSG00000176101_8 (sequence is synthesized)
aacaacgagctggtcaagtgtgagcggcgcagccgggacggggaggtcgggagggccgcagggccgggttcccggctcgcagcggggtgcccctggacccgcctcgctgcgggcatcgcg

SEQ ID NO: 610405 - DNA, 120 bp, Artificial Sequence
  ENSG00000176101_9 (sequence is synthesized)
cagagccctccgtgccggaggccgggtgtccgtggcccgagccctcgctggctcgcaggccccgcgccgggcgctcgggggtggtgcctgactctggcttcctcgggtggaaggaggccc

SEQ ID NO: 610406 - DNA, 120 bp, Artificial Sequence
  ENSG00000176101_10 (sequence is synthesized)
cgcgctcctgccctgggcccacagcgccgcccctcccggcccccaggcatagaggagctgtgccagaagcgggaggagctgtgccggcagatccaggaggaggaggacgagaagcagcgg

SEQ ID NO: 610407 - DNA, 120 bp, Artificial Sequence
  ENSG00000176102_0 (sequence is synthesized)
aattcatatttgagtgggcggtggcgattggtgttggcggtctggctcagctgggcagggggtaactttactgatttgggggtggtttttagtttaatttttcttttctagcttcccatc

SEQ ID NO: 610408 - DNA, 120 bp, Artificial Sequence
  ENSG00000176102_1 (sequence is synthesized)
gacggtcagtgcgcacgttgtaatcagctgaggccatgtcaggagacggagccacggagcaggcagctgagtatgtcccagagaaggtgaagaaagcggaaaagaaattagaagagaatc

SEQ ID NO: 610409 - DNA, 120 bp, Artificial Sequence
  ENSG00000176102_2 (sequence is synthesized)
catatgaccttgatgcttggagcattctcattcgagaggcacagaatcaacctatagacaaagcacggaagacttatgaacgccttgttgcccagttccccagttctggcagattctgga

SEQ ID NO: 610410 - DNA, 120 bp, Artificial Sequence
  ENSG00000176102_3 (sequence is synthesized)
aactgtacattgaagcagagattaaagctaaaaattatgacaaggttgaaaagctatttcagagatgccttatgaaggttttgcacattgatttatggaagtgttatctttcatatgtcc

SEQ ID NO: 610411 - DNA, 120 bp, Artificial Sequence
  ENSG00000176102_4 (sequence is synthesized)
gagaaaccaagggtaaactaccaagttacaaagaaaaaatggctcaagcatatgactttgcactggataaaattggaatggaaattatgtcctatcagatttgggtggattacatcaatt

SEQ ID NO: 610412 - DNA, 120 bp, Artificial Sequence
  ENSG00000176102_5 (sequence is synthesized)
tcctaaaaggcgtggaagctgtaggatcttatgcagaaaatcaaagaataacagctgtccgaagagtttatcaacgaggttgtgttaatccgatgatcaacattgaacagctctggagag

SEQ ID NO: 610413 - DNA, 120 bp, Artificial Sequence
  ENSG00000176102_6 (sequence is synthesized)
actataacaagtatgaagagggtatcaatattcatttagctaaaaaaatgattgaagatcggagtagagattatatgaatgctagacgtgtagcaaaggaatatgagacagtaatgaaag

SEQ ID NO: 610414 - DNA, 120 bp, Artificial Sequence
  ENSG00000176102_7 (sequence is synthesized)
gcttggaccgtaatgctccctcggtgcctcctcagaatactcctcaagaagctcaacaagtagatatgtggaagaaatatatacagtgggaaaagagcaaccctcttcgtacagaggatc

SEQ ID NO: 610415 - DNA, 120 bp, Artificial Sequence
  ENSG00000176102_8 (sequence is synthesized)
agacccttataacaaaaagagttatgtttgcttatgaacagtgcctgcttgtgctgggccatcaccctgatatttggtatgaagctgcccagtatcttgagcagtcaagtaaactgctcg

SEQ ID NO: 610416 - DNA, 120 bp, Artificial Sequence
  ENSG00000176102_9 (sequence is synthesized)
cagaaaagggagatatgaataatgccaaattatttagtgatgaagctgctaatatatatgaaagagccataagcactttattgaagaagaatatgcttctttattttgcatatgcagatt

SEQ ID NO: 610417 - DNA, 120 bp, Artificial Sequence
  ENSG00000176102_10 (sequence is synthesized)
atgaagagagtcgcatgaagtatgaaaaggttcacagtatatataacagacttctggcaattgaggatattgaccctaccttggtatatatccaatatatgaaatttgcacggagagcag

SEQ ID NO: 610418 - DNA, 120 bp, Artificial Sequence
  ENSG00000176102_11 (sequence is synthesized)
aacccgccaccatgtctatgttactgcagcactcatggaatattactgtagtaaggacaaatctgttgcctttaagatttttgagctggggctaaaaaaatatggagacattccagagta

SEQ ID NO: 610419 - DNA, 120 bp, Artificial Sequence
  ENSG00000176102_12 (sequence is synthesized)
tgtcctggcctatattgactatctttctcacctcaatgaggacaataatacccgagttttgtttgaacgagttttaacatctggaagccttcctcctgagaagtctggagaaatctgggc

SEQ ID NO: 610420 - DNA, 120 bp, Artificial Sequence
  ENSG00000176102_13 (sequence is synthesized)
ccgatttctagcatttgaaagtaatattggtgatctagctagtatactcaaagtggagaaaagacggtttacagcattcaaagaagagtatgaagggaaagaaacggctttactagtaga

SEQ ID NO: 610421 - DNA, 120 bp, Artificial Sequence
  ENSG00000176102_14 (sequence is synthesized)
tagatacaagttcatggatttatatccttgctctgcaagtgaattaaaagcacttggttataaggatgtctcccgtgctaagctagcagctataattccggacccagttgtagctccttc

SEQ ID NO: 610422 - DNA, 120 bp, Artificial Sequence
  ENSG00000176102_15 (sequence is synthesized)
tatagtgcctgttctgaaagatgaagtggatagaaaaccagaataccctaaaccagacactcagcagatgattccatttcagccacgacatttagcacctccaggtttacaccctgtacc

SEQ ID NO: 610423 - DNA, 120 bp, Artificial Sequence
  ENSG00000176102_16 (sequence is synthesized)
tggtggagtgttcccagtccctcctgcagctgttgttttaatgaaacttctccctcctcctatctgtttccagggtccttttgtacaagtggatgaactgatggaaattttccgaagatg

SEQ ID NO: 610424 - DNA, 120 bp, Artificial Sequence
  ENSG00000176102_17 (sequence is synthesized)
caagataccaaatactgttgaggaagctgtgaggatcattactggtggggccccagagctagctgtagaaggcaacggccccgtggaaagtaatgcagtactcaccaaggccgtcaaaag

SEQ ID NO: 610425 - DNA, 120 bp, Artificial Sequence
  ENSG00000176102_18 (sequence is synthesized)
gcccaacgaggattcagatgaagatgaagaaaagggagccgttgtcccccctgttcatgacatttacagagcacggcagcagaagcggattcggtagggttttaaacgcctctgcagaaa

SEQ ID NO: 610426 - DNA, 120 bp, Artificial Sequence
  ENSG00000176102_19 (sequence is synthesized)
actcctgtccaggattccttttgcctcaagtggtatgtttaaaagagacaacgctttgttacaaggttcttggaaacaaagttgtattgtcattggtgcctctatcacatggttcttgag

SEQ ID NO: 610427 - DNA, 120 bp, Artificial Sequence
  ENSG00000176102_20 (sequence is synthesized)
aaaaaacaaaccaacctgtgtgaattttagaatacggaacagacctatgctctaagcaaaattaggttttcaaaaatgtgagaacagtacaaagtggcagaaccacattttgttccctct

SEQ ID NO: 610428 - DNA, 120 bp, Artificial Sequence
  ENSG00000176102_21 (sequence is synthesized)
tcaagggtgtcttgtatgtgccgcttgaagatttgtgagtttttcaacagttttattttaaaaactggatggcttatgattgtaaagcattttatcacattttctgaaaacaattgttct

SEQ ID NO: 610429 - DNA, 120 bp, Artificial Sequence
  ENSG00000176102_22 (sequence is synthesized)
tggtttgcttatgtagagtcctgccttattgtttgtttttatttatggcagaatgtatgaaatccgttttgtagtttcaaattttaaaagtcctttaaaaaataaaaggattcagaaaca

SEQ ID NO: 610430 - DNA, 120 bp, Artificial Sequence
  ENSG00000176102_23 (sequence is synthesized)
ctttgaatacaacttcttgagaaactcagctgcttttctaagactcaggaaagcataatgtggttccctcatccaccatttcctttggttttggctatcgtgtatgaagagaatttttga

SEQ ID NO: 610431 - DNA, 120 bp, Artificial Sequence
  ENSG00000176102_24 (sequence is synthesized)
aaatgtgtcttacctttattttgtaaaataggtataaaggagtaattaaaatgaatttttgaaatttgggtcttttacaagctgatgattgttgcattttggagttgcaacaacattaaa

SEQ ID NO: 610432 - DNA, 120 bp, Artificial Sequence
  ENSG00000176102_25 (sequence is synthesized)
acagtttcaatggtattggagtgctttagccttttatttacttgtcatgtgtcaatttattgcctcctgtgtcatttatttagaactcatttttctttttattcctacttacaaactaat

SEQ ID NO: 610433 - DNA, 120 bp, Artificial Sequence
  ENSG00000176102_26 (sequence is synthesized)
atgaatgggagtatatgaaaatacagaaatgttaacttagtttttcatagagtattttgagtgtctggtgaaatgaaacattttaagagaagaattacttcacattttaattttgtgaaa

SEQ ID NO: 610434 - DNA, 120 bp, Artificial Sequence
  ENSG00000176102_27 (sequence is synthesized)
atgcatggtttatcaatgtaagcacttcaataatttaacgatttttctgtaagatagtttatattatgcaagaataagctaatgtgattcaaacctatttaatcctatttaatcataatt

SEQ ID NO: 610435 - DNA, 120 bp, Artificial Sequence
  ENSG00000176102_28 (sequence is synthesized)
ttacccaatgatactttgatatttttttcttgctttttatatcttgaaatttgaacccaggcatgtatattttaaagagtaaggaccccattcatgattatggttaggaggaaaatgtta

SEQ ID NO: 610436 - DNA, 120 bp, Artificial Sequence
  ENSG00000176102_29 (sequence is synthesized)
ccgaggtagtgggcggccaagagtctgtgaagccagttattcatgcatcaagatttcaaacggtccaaatggaactctggcaatgtaagaactcaggaggggaaaaatatcttgcaagaa

SEQ ID NO: 610437 - DNA, 120 bp, Artificial Sequence
  ENSG00000176102_30 (sequence is synthesized)
tctactcttacaaaagaagagtttttgagatttaggaagaatgactgcaggaagtggtgatcagcgctgtgcagttggggttaagctcctctccttcagccttggagcggcaggaaaagg

SEQ ID NO: 610438 - DNA, 120 bp, Artificial Sequence
  ENSG00000176105_0 (sequence is synthesized)
gtcgttgctgccgccgggcgccccgggacgaggaggtggaggagggagagggcccgcgggcctcgcctccgccctccgccacctcgagctgcggtagcagcgactcatgagagcgcggcc

SEQ ID NO: 610439 - DNA, 120 bp, Artificial Sequence
  ENSG00000176105_1 (sequence is synthesized)
ggaggacagatttgataatgggctgcattaaaagtaaagaaaacaaaagtccagccattaaatacagacctgaaaatactccagagcctgtcagtacaagtgtgagccattatggagcag

SEQ ID NO: 610440 - DNA, 120 bp, Artificial Sequence
  ENSG00000176105_2 (sequence is synthesized)
aacccactacagtgtcaccatgtccgtcatcttcagcaaagggaacagcagttaatttcagcagtctttccatgacaccatttggaggatcctcaggggtaacgccttttggaggtgcat

SEQ ID NO: 610441 - DNA, 120 bp, Artificial Sequence
  ENSG00000176105_3 (sequence is synthesized)
cttcctcattttcagtggtgccaagttcatatcctgctggtttaacaggtggtgttactatatttgtggccttatatgattatgaagctagaactacagaagacctttcatttaagaagg

SEQ ID NO: 610442 - DNA, 120 bp, Artificial Sequence
  ENSG00000176105_4 (sequence is synthesized)
gtgaaagatttcaaataattaacaatacggaaggagattggtgggaagcaagatcaatcgctacaggaaagaatggttatatcccgagcaattatgtagcgcctgcagattccattcagg

SEQ ID NO: 610443 - DNA, 120 bp, Artificial Sequence
  ENSG00000176105_5 (sequence is synthesized)
cagaagaatggtattttggcaaaatggggagaaaagatgctgaaagattacttttgaatcctggaaatcaacgaggtattttcttagtaagagagagtgaaacaactaaaggtgcttatt

SEQ ID NO: 610444 - DNA, 120 bp, Artificial Sequence
  ENSG00000176105_6 (sequence is synthesized)
ccctttctattcgtgattgggatgagataaggggtgacaatgtgaaacactacaaaattaggaaacttgacaatggtggatactatatcacaaccagagcacaatttgatactctgcaga

SEQ ID NO: 610445 - DNA, 120 bp, Artificial Sequence
  ENSG00000176105_7 (sequence is synthesized)
aattggtgaaacactacacagaacatgctgatggtttatgccacaagttgacaactgtgtgtccaactgtgaaacctcagactcaaggtctagcaaaagatgcttgggaaatccctcgag

SEQ ID NO: 610446 - DNA, 120 bp, Artificial Sequence
  ENSG00000176105_8 (sequence is synthesized)
aatctttgcgactagaggttaaactaggacaaggatgtttcggcgaagtgtggatgggaacatggaatggaaccacgaaagtagcaatcaaaacactaaaaccaggtacaatgatgccag

SEQ ID NO: 610447 - DNA, 120 bp, Artificial Sequence
  ENSG00000176105_9 (sequence is synthesized)
aagctttccttcaagaagctcagataatgaaaaaattaagacatgataaacttgttccactatatgctgttgtttctgaagaaccaatttacattgtcactgaatttatgtcaaaaggaa

SEQ ID NO: 610448 - DNA, 120 bp, Artificial Sequence
  ENSG00000176105_10 (sequence is synthesized)
gcttattagatttccttaaggaaggagatggaaagtatttgaagcttccacagctggttgatatggctgctcagattgctgatggtatggcatatattgaaagaatgaactatattcacc

SEQ ID NO: 610449 - DNA, 120 bp, Artificial Sequence
  ENSG00000176105_11 (sequence is synthesized)
gagatcttcgggctgctaatattcttgtaggagaaaatcttgtgtgcaaaatagcagactttggtttagcaaggttaattgaagacaatgaatacacagcaagacaaggtgcaaaatttc

SEQ ID NO: 610450 - DNA, 120 bp, Artificial Sequence
  ENSG00000176105_12 (sequence is synthesized)
caatcaaatggacagctcctgaagctgcactgtatggtcggtttacaataaagtctgatgtctggtcatttggaattctgcaaacagaactagtaacaaagggccgagtgccatatccag

SEQ ID NO: 610451 - DNA, 120 bp, Artificial Sequence
  ENSG00000176105_13 (sequence is synthesized)
gtatggtgaaccgtgaagtattagaacaagtggagcgaggatacaggatgccgtgccctcagggctgtccagaatccctccatgaattgatgaatctgtgttggaagaaggaccctgatg

SEQ ID NO: 610452 - DNA, 120 bp, Artificial Sequence
  ENSG00000176105_14 (sequence is synthesized)
aaagaccaacatttgaatatattcagtccttcttggaagactacttcactgctacagagccacagtaccagccaggagaaaatttataattcaagtagcctattttatatgcacaaatct

SEQ ID NO: 610453 - DNA, 120 bp, Artificial Sequence
  ENSG00000176105_15 (sequence is synthesized)
gccaaaatataaagaacttgtgtagattttctacaggaatcaaaagaagaaaatcttctttactctgcatgtttttaatggtaaactggaatcccagatatggttgcacaaaaccacttt

SEQ ID NO: 610454 - DNA, 120 bp, Artificial Sequence
  ENSG00000176105_16 (sequence is synthesized)
tttttccccaagtattaaactctaatgtaccaatgatgaatttatcagcgtatttcagggtccaaacaaaatagagctaagatactgatgacagtgtgggtgacagcatggtaatgaagg

SEQ ID NO: 610455 - DNA, 120 bp, Artificial Sequence
  ENSG00000176105_17 (sequence is synthesized)
acagtgaggctcctgcttatttataaatcatttcctttctttttttccccaaagtcagaattgctcaaagaaaattatttattgttacagataaaacttgagagataaaaagctatacca

SEQ ID NO: 610456 - DNA, 120 bp, Artificial Sequence
  ENSG00000176105_18 (sequence is synthesized)
taataaaatctaaaattaaggaatatcatgggaccaaataattccattccagttttttaaagtttcttgcatttattattctcaaaagttttttctaagttaaacagtcagtatgcaatc

SEQ ID NO: 610457 - DNA, 120 bp, Artificial Sequence
  ENSG00000176105_19 (sequence is synthesized)
aaggaatataaacaggatctcaaacttgattaaatgttagaccacagaagtggaatttgaaagtataatgcagtacattaatattcatgttcatggaactgaaagaataagaactttttc

SEQ ID NO: 610458 - DNA, 120 bp, Artificial Sequence
  ENSG00000176105_20 (sequence is synthesized)
acttcagtccttttctgaagagtttgacttagaataatgaaggtaactagaaagtgagttaatcttgtatgaggttgcattgattttttaaggcaatatataattgaaactactgtccaa

SEQ ID NO: 610459 - DNA, 120 bp, Artificial Sequence
  ENSG00000176105_21 (sequence is synthesized)
tcaaaggggaaatgttttgatctttagatagcatgcaaagtaagacccagcattttaaaagccctttttaaaaactagacttcgtactgtgagtattgcttatatgtccttatggggatg

SEQ ID NO: 610460 - DNA, 120 bp, Artificial Sequence
  ENSG00000176105_22 (sequence is synthesized)
ggtgccacaaatagaaaatatgaccagatcagggacttgaatgcacttttgctcatggtgaatatagatgaacagagaggaaaatgtatttaaaagaaatacgagaaaagaaagtgaaag

SEQ ID NO: 610461 - DNA, 120 bp, Artificial Sequence
  ENSG00000176105_23 (sequence is synthesized)
ttttacaagttagagggatggaaggtaatgtttaatgttgatgtcatggagtgacagaatggctttgctggcactcagagctcctcacttagctatattctgagactttgaagagttata

SEQ ID NO: 610462 - DNA, 120 bp, Artificial Sequence
  ENSG00000176105_24 (sequence is synthesized)
aagtataactataaaactaatttttcttacacactaaatgggtatttgttcaaaataatgaagttatggcttcacattcattgcagtgggatatggtttttatgtaaaacatttttagaa

SEQ ID NO: 610463 - DNA, 84 bp, Artificial Sequence
  ENSG00000176105_25 (sequence is synthesized)
ttgcagtgggatatggtttttatgtaaaacatttttagaactccagttttcaaatcatgtttgaatctacattcactttttttt

SEQ ID NO: 610464 - DNA, 120 bp, Artificial Sequence
  ENSG00000176105_26 (sequence is synthesized)
taatggtggtcattttttcccttttagaatacattaaatggttgatttggggaggaaaacttattctgaatattaacggtggtgaaaaggggacagtttttaccctaaagtgcaaaagtg

SEQ ID NO: 610465 - DNA, 120 bp, Artificial Sequence
  ENSG00000176105_27 (sequence is synthesized)
aaacatacaaaataagactaatttttaagagtaactcagtaatttcaaaatacagatttgaatagcagcattagtggtttgagtgtctagcaaaggaaaaattgatgaataaaatgaagg

SEQ ID NO: 610466 - DNA, 120 bp, Artificial Sequence
  ENSG00000176105_28 (sequence is synthesized)
tctggtgtatatgttttaaaatactctcatatagtcacactttaaattaagccttatattaggcccctctattttcaggatataattcttaactatcattatttacctgattttaatcat

SEQ ID NO: 610467 - DNA, 120 bp, Artificial Sequence
  ENSG00000176105_29 (sequence is synthesized)
cagattcgaaattctgtgccatggcatatatgttcaaattcaaaccatttttaaaatgtgaagatggacttcatgcaagttggcagtggttctggtactaaaaattgtggttgttttttc

SEQ ID NO: 610468 - DNA, 120 bp, Artificial Sequence
  ENSG00000176105_30 (sequence is synthesized)
tgtttacgtaacctgcttagtattgacactctctaccaagagggtcttcctaagaagagtgctgtcattatttcctcttatcaacaacttgtgacatgagattttttaagggctttatgt

SEQ ID NO: 610469 - DNA, 120 bp, Artificial Sequence
  ENSG00000176105_31 (sequence is synthesized)
gaactatgatattgtaatttttctaagcatattcaaaagggtgacaaaattacgtttatgtactaaatctaatcaggaaagtaaggcaggaaaagttgatggtattcattaggttttaac

SEQ ID NO: 610470 - DNA, 120 bp, Artificial Sequence
  ENSG00000176105_32 (sequence is synthesized)
tgaatggagcagttccttatataataacaattgtatagtagggataaaacactaacttaatgtgtattcattttaaattgttctgtatttttaaattgccaagaaaaacaactttgtaaa

SEQ ID NO: 610471 - DNA, 120 bp, Artificial Sequence
  ENSG00000176105_33 (sequence is synthesized)
tttggagatattttccaacagcttttcgtcttcagtgtcttaatgtggaagttaacccttaccaaaaaaggaagttggcaaaaacagccttctagcacacttttttaaatgaataatggt

SEQ ID NO: 610472 - DNA, 120 bp, Artificial Sequence
  ENSG00000176105_34 (sequence is synthesized)
agcctaaacttaatatttttataaagtattgtaatattgttttgtggataattgaaataaaaagttctcattgaatgcacctattaatcgttttagttgctattcatattctcattcgtt

SEQ ID NO: 610473 - DNA, 120 bp, Artificial Sequence
  ENSG00000176105_35 (sequence is synthesized)
ttttaaaaactgatatattctgaatttattcttccattgagaaaaaaatgttcagttacttgtaactactgagcagaatttaatcaatcctttattaaattcagaacattattgaactca

SEQ ID NO: 610474 - DNA, 120 bp, Artificial Sequence
  ENSG00000176105_36 (sequence is synthesized)
ggtcgggagaagtgacacggaccggtcgcctatcctgaccacagcaaagcggcccggagcccgcggaggggacctgacgggggcgtaggcgccggaaggctgggggccccggagccgggc

SEQ ID NO: 610475 - DNA, 120 bp, Artificial Sequence
  ENSG00000176108_0 (sequence is synthesized)
aggacccgagctacggtggccgcggggcggcggtggcgattggacttggtgggtcccgggccaggggcgggcgccgccatgggtaacctgttcggccgcaagaagcagagccgcgtcacg

SEQ ID NO: 610476 - DNA, 120 bp, Artificial Sequence
  ENSG00000176108_1 (sequence is synthesized)
gagcaggacaaggccatcctgcaactgaagcagcagcgggacaagctgaggcagtaccagaagaggatcgcccagcagctggagcgcgagcgcgccctggcccggcagctgctgcgggac

SEQ ID NO: 610477 - DNA, 120 bp, Artificial Sequence
  ENSG00000176108_2 (sequence is synthesized)
ggcaggaaggaacgggccaagctgctgctcaagaagaagcgataccaggagcagctcctggacaggacggagaaccagatcagcagcctggaggccatggttcagagtattgagttcacc

SEQ ID NO: 610478 - DNA, 120 bp, Artificial Sequence
  ENSG00000176108_3 (sequence is synthesized)
cagatcgaaatgaaagtgatggaggggctgcagtttggaaatgagtgtctgaacaagatgcaccaggtgatgtccattgaagaggtggagaggatcctggacgagacgcaggaggccgtg

SEQ ID NO: 610479 - DNA, 120 bp, Artificial Sequence
  ENSG00000176108_4 (sequence is synthesized)
gagtaccagcggcaaatagacgagctcctggcaggaagcttcactcaggaggatgaagacgccatcctggaggagctgagcgcaatcactcaggaacaaatagagctgccagaggttccc

SEQ ID NO: 610480 - DNA, 120 bp, Artificial Sequence
  ENSG00000176108_5 (sequence is synthesized)
tccgagccccttcctgagaagatcccagaaaacgtccctgtcaaggccaggcccaggcaggcggagctggtggcagcttcgtaacgtggcctcgtcttgtgggactcacggggatgcccc

SEQ ID NO: 610481 - DNA, 120 bp, Artificial Sequence
  ENSG00000176108_6 (sequence is synthesized)
attgcaggaggactccagagcgtctcctggagaccttgagcctgaacgcactcaggcgccactggcctgctctcagtccggattaactctcgaccgagcccagcttctgccggttgtggg

SEQ ID NO: 610482 - DNA, 120 bp, Artificial Sequence
  ENSG00000176108_7 (sequence is synthesized)
ctcccccggtggccgaggcccaggcccaacgcctctggtgctgttcccctgcagtcccagccccgcgtggctcgcgctcgtctgtgaggaagacacctccagaccttggggtccccgcgc

SEQ ID NO: 610483 - DNA, 120 bp, Artificial Sequence
  ENSG00000176108_8 (sequence is synthesized)
ttcctcttgctcctcgctgctcccattagctggtgcaggcttccgttaaggggtccctcccttggcctggcttcccggcgcacctcagcttccctgctggtggggggatccccaggagac

SEQ ID NO: 610484 - DNA, 120 bp, Artificial Sequence
  ENSG00000176108_9 (sequence is synthesized)
cagcatgtgctgaacctctctgtgcctctgcctccgcaccctagacacccacctccagtttgaaggtggcgggccaggggctttcttgctgaattgacgactccgagagccctgactccc

SEQ ID NO: 610485 - DNA, 120 bp, Artificial Sequence
  ENSG00000176108_10 (sequence is synthesized)
gccttgccactcacggctctgtccactagggctcagccctgctgagaaaggacctccgatgcttgggagacgctgctccggcaggtgcagccccggaagtttgtccatgggggtccccgc

SEQ ID NO: 610486 - DNA, 120 bp, Artificial Sequence
  ENSG00000176108_11 (sequence is synthesized)
ggctggggctcatggaactgcgagacccgggaccctcctgccctgcgggtccccgagccaccagcagccaggactggaggctgtggggcatggcgtgacttctcgtgcacagggctggtt

SEQ ID NO: 610487 - DNA, 120 bp, Artificial Sequence
  ENSG00000176108_12 (sequence is synthesized)
tggttatgagacgatctcgctgggaccgcccctgcccgtggaaagccacaaggacaaagggagcggccacctcgacccccagacaggccggcccgtattaaagttggccctgcacgccca

SEQ ID NO: 610488 - DNA, 120 bp, Artificial Sequence
  ENSG00000176108_13 (sequence is synthesized)
caggatgggcctcagttacggaactgcacagaaacacggaaagctaaaactcccatagaaaccttgtccttttggcaagagaaattgtgaacaggggccactgaggtccagaaagcgtgt

SEQ ID NO: 610489 - DNA, 120 bp, Artificial Sequence
  ENSG00000176108_14 (sequence is synthesized)
gtttgattcttttgaatggttggaattcgcaggagaaaagtggattctagaagggaacaagacagaatgctcccaggccttcctgggccgtgggcaagccctgctgcctggctgtttggc

SEQ ID NO: 610490 - DNA, 120 bp, Artificial Sequence
  ENSG00000176108_15 (sequence is synthesized)
ttgggggcgtgcgtgcctggccttggggttgggcttgggtttcccaggggttcggtaactgggcaacctcataagagagccataccccattcaaagagacacattcagaaatcagaactg

SEQ ID NO: 610491 - DNA, 120 bp, Artificial Sequence
  ENSG00000176125_0 (sequence is synthesized)
attgtgggagctcctcggtcggtgccggtcggtggctgcctattgcggcctgcggtgatcaacgaggcccggggagcgcgtccccagtctgcgcgccggtcctgcggcagctggcccaag

SEQ ID NO: 610492 - DNA, 120 bp, Artificial Sequence
  ENSG00000176125_1 (sequence is synthesized)
acccggagccgaaaggaagtgttggagcctgaggtcgctccgcgccgctaggaggacgctgtgcctggcctgggacctccgctcccgcccaccgccctggagccgctgagggacgtccac

SEQ ID NO: 610493 - DNA, 120 bp, Artificial Sequence
  ENSG00000176125_2 (sequence is synthesized)
gtgggcctgtccccgccgagccgcggccctgtccgcctggcgctgctctcgggccactacctctactaccactacggctgcgacggcctggacgaccgcggctggggctgcggctaccgc

SEQ ID NO: 610494 - DNA, 120 bp, Artificial Sequence
  ENSG00000176125_3 (sequence is synthesized)
actctgcagacgctgtgctcgtggccagagggccagcccgcgggcgtacctggactggccgccgtacaggcggccctggaggacatgggcgacaagccccccggcttccggggctcccgg

SEQ ID NO: 610495 - DNA, 120 bp, Artificial Sequence
  ENSG00000176125_4 (sequence is synthesized)
cgctcacttcggagggccccagggacgcctctgccacgtaccccggggagtggggctgcacggggagctggagaggctttactcgcacttcgcagggggtgggggcccagtcatggttgg

SEQ ID NO: 610496 - DNA, 120 bp, Artificial Sequence
  ENSG00000176125_5 (sequence is synthesized)
gggggacgcagatgccaggtccaaggccttgctgggagtctgcgtagggtcaggcacggaagcctatgtcctggtattggaccctcactactggggcactccaaaaagccccagtgaact

SEQ ID NO: 610497 - DNA, 120 bp, Artificial Sequence
  ENSG00000176125_6 (sequence is synthesized)
acaggctgctgggtgggtgggctggcaagaggtgagtgcagcctttgaccccaactccttctacaacctgtgcttgaccagccttagctcccaacagcagcagcgcaccttggactgagg

SEQ ID NO: 610498 - DNA, 120 bp, Artificial Sequence
  ENSG00000176125_7 (sequence is synthesized)
acgaagttacagaactgagattctcgggtcccagacacgcacctatgtacctcccactggtgtccctgcaaagcctggcgcttttgacatcaataataaaagtggcagggctgagcaaca

SEQ ID NO: 610499 - DNA, 120 bp, Artificial Sequence
  ENSG00000176136_0 (sequence is synthesized)
ctgtctcttaaaaaaaaaaaaaaaaaaggactgagtgagccgagcccagtcctctgatgcactgtgtcattcatcccctttcttaggctgtgttggttctaggctagctgctgtctttct

SEQ ID NO: 610500 - DNA, 120 bp, Artificial Sequence
  ENSG00000176136_1 (sequence is synthesized)
tgctgtctttctttggtaggctgctaacctctttggattgtgaatttaaaacatgttttacagtaaatttgctgccaagacaagaggtgtatttctccagcaatgaattcctcatttcac

SEQ ID NO: 610501 - DNA, 120 bp, Artificial Sequence
  ENSG00000176136_2 (sequence is synthesized)
ctgcatttcttggatctcaacctgaatgccacagagggcaacctttcaggacccaatgtcaaaaacaagtcttcaccatgtgaagacatgggcattgctgtggaggtgtttctcactctg

SEQ ID NO: 610502 - DNA, 120 bp, Artificial Sequence
  ENSG00000176136_3 (sequence is synthesized)
ggtgtcatcagcctcttggagaacatcttggtcataggggccatagtgaagaacaaaaacctgcactcccccatgtacttcttcgtgtgcagcctggcagtggcggacatgctggtgagc

SEQ ID NO: 610503 - DNA, 120 bp, Artificial Sequence
  ENSG00000176136_4 (sequence is synthesized)
atgtccagtgcctgggagaccatcaccatctacctactcaacaacaagcacctagtgatagcagacgcctttgtgcgccacattgacaatgtgtttgactccatgatctgcatttccgtg

SEQ ID NO: 610504 - DNA, 120 bp, Artificial Sequence
  ENSG00000176136_5 (sequence is synthesized)
ctgggctttctgcacgggctgcggcattgtcttcatcctgtactcagaatccacctacgtcatcctgtgcctcatctccatgttcttcgctatgctgttcctcctggtgtctctgtacat

SEQ ID NO: 610505 - DNA, 120 bp, Artificial Sequence
  ENSG00000176136_6 (sequence is synthesized)
acacatgttcctcctggcgcggactcacgtcaagcggatcgcggctctgcccggggccagctctgcgcggcagaggaccagcatgcagggcgcggtcaccgtcaccatgctgctgggcgt

SEQ ID NO: 610506 - DNA, 120 bp, Artificial Sequence
  ENSG00000176136_7 (sequence is synthesized)
gtttaccgtgtgctgggccccgttcttccttcatctcactttaatgctttcttgccctcagaacctctactgctctcgcttcatgtctcacttcaatatgtacctcatactcatcatgtg

SEQ ID NO: 610507 - DNA, 120 bp, Artificial Sequence
  ENSG00000176136_8 (sequence is synthesized)
taattccgtgatggaccctctcatatatgccttccgcagccaagagatgcggaagacctttaaggagattatttgctgccgtggtttcaggatcgcctgcagctttcccagaagggatta

SEQ ID NO: 610508 - DNA, 120 bp, Artificial Sequence
  ENSG00000176136_9 (sequence is synthesized)
agcacaaagtgctcctctctgtggctctgttctcctttgtttgctcacctatgacaaagcgacagccaaggggtaggcgggagtgctagcatcccatttttctctttaccagctcagaca

SEQ ID NO: 610509 - DNA, 120 bp, Artificial Sequence
  ENSG00000176136_10 (sequence is synthesized)
gcctagctgggggagaggcccgtccggggctggctctgagcgccgcacggccgtcggatcccggggacgccgggggcccgggctgagcgccgcggcccgcgaggaggagcaccgtaaatt

SEQ ID NO: 610510 - DNA, 120 bp, Artificial Sequence
  ENSG00000176136_11 (sequence is synthesized)
cttttgtgtcctatggtttctactgctcccacccatttctgggggccccatccaccctccacctagcaggcatgtgctcggggaatgcacagcaccctcagtgcaagccagacatgatga

SEQ ID NO: 610511 - DNA, 120 bp, Artificial Sequence
  ENSG00000176136_12 (sequence is synthesized)
aacacgtattgtgacgcgaagaaaaccgtgatatcgacgccaggtgggattgcttcttctccccagaagcaggtccacactctgctggctgcactctgagctatgcatgcttttcaggga

SEQ ID NO: 610512 - DNA, 120 bp, Artificial Sequence
  ENSG00000176136_13 (sequence is synthesized)
agaaaagagtggccagattctttccatcagaagcaatctgttcatttgttctgaaatgtcttctttgctccccttgcctgaacttttgattcatggcttttgttcataattgtctgaata

SEQ ID NO: 610513 - DNA, 120 bp, Artificial Sequence
  ENSG00000176142_0 (sequence is synthesized)
cagctccgcggtaatggaggctagggatgggtgctgaagtatcaggctctggctctagctttagctctggcactggaactgcgtcggagtctgggtctgagtctggcagcccgaagcctg

SEQ ID NO: 610514 - DNA, 120 bp, Artificial Sequence
  ENSG00000176142_1 (sequence is synthesized)
gacaccttttcttgattctctaggcgggggctgcctgcgtccaagcagctggtttgcagcgttccaacgctgggagggagttcccttacctggggtccagtctgtaaagttgtcgccgct

SEQ ID NO: 610515 - DNA, 120 bp, Artificial Sequence
  ENSG00000176142_2 (sequence is synthesized)
ttctagggaccccgccccaccggctgggactcttccatgcagttgaaactggttgacaaccattaacctgggttgcaactacaggtggcactggaagcagactggttcctggacatgccc

SEQ ID NO: 610516 - DNA, 120 bp, Artificial Sequence
  ENSG00000176142_3 (sequence is synthesized)
ggtggaaggaggggccctagtcggcaacagctaagccgttcagctttaccttctttgcagactttggttggtggaggctgtggcaatggaacaggcttgagaaacaggaatggtagtgct

SEQ ID NO: 610517 - DNA, 120 bp, Artificial Sequence
  ENSG00000176142_4 (sequence is synthesized)
attggccttccagtcccacctatcacagccttaatcaccccaggtcctgttcgtcattgccaaattcctgacttgcctgtggatgggagcctactctttgaattcctttttttcatctac

SEQ ID NO: 610518 - DNA, 120 bp, Artificial Sequence
  ENSG00000176142_5 (sequence is synthesized)
ctgttggttgctcttttcattcagtacatcaacatttataaaacagtgtggtggtatccttacaatcatcctgcttcttgtacatcactgaattttcatctcattgattatcatctggca

SEQ ID NO: 610519 - DNA, 120 bp, Artificial Sequence
  ENSG00000176142_6 (sequence is synthesized)
gcattcatcacagtgatgcttgcgaggaggcttgtatgggctctcatctcagaggctactaaggcaggtgcagcatcaatgattcactacatggttctgatatcagctcgcttggtacta

SEQ ID NO: 610520 - DNA, 120 bp, Artificial Sequence
  ENSG00000176142_7 (sequence is synthesized)
ctcactttgtgtggatgggtactttgttggaccctcgtcaatctctttcgaagccattcagtcctcaatctccttttccttggctacccgtttggtgtttatgttcctctttgctgtttt

SEQ ID NO: 610521 - DNA, 120 bp, Artificial Sequence
  ENSG00000176142_8 (sequence is synthesized)
catcaagatagtagagcacatcttcttctcacagactacaactatgtggttcagcacgaggcagtagaggaaagtgcctcgactgtgggaggcttggccaaatccaaagactttctctcc

SEQ ID NO: 610522 - DNA, 120 bp, Artificial Sequence
  ENSG00000176142_9 (sequence is synthesized)
ttgttgctggagtcgctaaaagaacagtttaataatgccacacccatccccacccacagttgtcccctatctccagacctcattcgcaatgaagtagaatgtctgaaagcagatttcaac

SEQ ID NO: 610523 - DNA, 120 bp, Artificial Sequence
  ENSG00000176142_10 (sequence is synthesized)
cacagaatcaaggaggttctcttcaactccctcttcagtgcctactatgttgcatttctccccctgtgttttgtgaagagtacccagtactatgacatgcgctggtcatgtgagcacctc

SEQ ID NO: 610524 - DNA, 120 bp, Artificial Sequence
  ENSG00000176142_11 (sequence is synthesized)
attatggtgtggatcaatgcttttgtcatgctcaccacgcaactgttgccatccaaatactgtgatttgctacataaatcagctgctcacctgggcaagtggcagaagttggaacatggg

SEQ ID NO: 610525 - DNA, 120 bp, Artificial Sequence
  ENSG00000176142_12 (sequence is synthesized)
tcctacagcaatgctccacagcacatttggtcagaaaatacaatatggcctcaaggggtgctggtgcggcacagcagatgtttatatagagccatggggccttacaacgtggcagtgcct

SEQ ID NO: 610526 - DNA, 120 bp, Artificial Sequence
  ENSG00000176142_13 (sequence is synthesized)
tcagatgtatctcatgcccgcttttatttcttatttcatcgaccattaaggctgttaaatctgctcatccttattgagggcagtgtcgtcttctatcagctctattccttgctgcggtcg

SEQ ID NO: 610527 - DNA, 120 bp, Artificial Sequence
  ENSG00000176142_14 (sequence is synthesized)
gagaagtggaaccacacactttccatggctctcatcctcttctgcaactactatgttttatttaaacttctccgggacagaatagtattaggcagggcatactcctacccactcaacagt

SEQ ID NO: 610528 - DNA, 120 bp, Artificial Sequence
  ENSG00000176142_15 (sequence is synthesized)
tatgaactcaaggcaaactaagctgcctctcaacaatgagggagaactcagataaaaatattttcatacgttctatttttttcttgtgatttttataaatatttaagatattttatattt

SEQ ID NO: 610529 - DNA, 120 bp, Artificial Sequence
  ENSG00000176142_16 (sequence is synthesized)
tgtatactattatgttttgaaagtcgggaagagtaagggatattaaatgtatccgtaaacaaggtgatgtgatctttcatgtgttagtatattcgaataatatacatatgagaggtatgc

SEQ ID NO: 610530 - DNA, 120 bp, Artificial Sequence
  ENSG00000176142_17 (sequence is synthesized)
ctgtccagtaaagagattgatttgtttgtatggctctggaataactcattcgtttatgaacacatctcatgtattacttgacacagtacctttggtatgtctgcttttctttcaatcctc

SEQ ID NO: 610531 - DNA, 120 bp, Artificial Sequence
  ENSG00000176142_18 (sequence is synthesized)
attatctttagccctcagctggccagtacttattgctaaagaaagggagatcaatggagttgcctaccagcacccattctcttttagttcagctggctaatagtattggaatacattggg

SEQ ID NO: 610532 - DNA, 120 bp, Artificial Sequence
  ENSG00000176142_19 (sequence is synthesized)
aaaagagtgggttaaagtcctaggtggggttctctttgttgcctaccaggagaaagcagtaggcttcctttctaagatacggactcagctggtctattttaccctgtgacatttaaatat

SEQ ID NO: 610533 - DNA, 120 bp, Artificial Sequence
  ENSG00000176142_20 (sequence is synthesized)
gtgtttccacttctgcttccaaagattttcctcttagttgtttgaaataatactttgccagacaggaagtctttagactgcccacattcatgaagaagatgatgtgtggctggatcagta

SEQ ID NO: 610534 - DNA, 120 bp, Artificial Sequence
  ENSG00000176142_21 (sequence is synthesized)
ggagaagctgagtgcaaatgccatgtgggctagagtatgggaaggttgaaaattccaagtaactgggagagtgggcaagtcctcagctgaacaatcttggatgtagtctagcagcaaccc

SEQ ID NO: 610535 - DNA, 120 bp, Artificial Sequence
  ENSG00000176142_22 (sequence is synthesized)
acctacaatggcgttatgtttggagttatgaggggaagtgaaagataagaattacctacagctttgtactcagataatttatatccaaaatttgtgttttaaatttcatactccagaact

SEQ ID NO: 610536 - DNA, 120 bp, Artificial Sequence
  ENSG00000176142_23 (sequence is synthesized)
ttcatgtttatgagtattagccttttaagttatgggaggtgatatacttagtccattgatgttgtcacttgtcatctaaacttatgagaccttgtcttagagaatctaaaatatattgtc

SEQ ID NO: 610537 - DNA, 120 bp, Artificial Sequence
  ENSG00000176142_24 (sequence is synthesized)
atatgttttctgtgctgagtttggtttgttacactgtgaagcttttggtgaaacaaaataagacttatgaagtaaaaagaccaatcatgtcgttgacaagctggctctgaaaataattct

SEQ ID NO: 610538 - DNA, 120 bp, Artificial Sequence
  ENSG00000176142_25 (sequence is synthesized)
tgcagaagagttcctgaaaggcttcaccaaggggaagtattgtgaggagtgtttgtaaaaccaaggtacccaatatcagttttatgtttaaatcaataattgtttctttaaatattttga

SEQ ID NO: 610539 - DNA, 120 bp, Artificial Sequence
  ENSG00000176142_26 (sequence is synthesized)
tgtgtatactttttttttaagttaacattatttggcattcagtctgagtctgttcaaccattcaacaaatatatattaaccagtaggcactatattaggccctggggatatagcagtgaa

SEQ ID NO: 610540 - DNA, 120 bp, Artificial Sequence
  ENSG00000176142_27 (sequence is synthesized)
tgagaaatgcaaaggtcctacttgcacagagcttacaatatgcgtgggggtgggggagttaggtggtgcagaaaatacagcaaataaatttatgtgtaatataacattccctggtagtag

SEQ ID NO: 610541 - DNA, 120 bp, Artificial Sequence
  ENSG00000176142_28 (sequence is synthesized)
tgataagtgtagcaaagggaaatcaggacaaggaaatagtggtaagaatagcactgctagaaggcatctttgaggagatgatttttaagcaaagaaaaagcaagactgaatcatataaat

SEQ ID NO: 610542 - DNA, 120 bp, Artificial Sequence
  ENSG00000176142_29 (sequence is synthesized)
agctttggggagaattccatgttacagtagcagaaagggcagtgccctgaggtggggacaagttggtatattggaagaatagcaagaaaatatattaggttagttgctttttaaagtagt

SEQ ID NO: 610543 - DNA, 120 bp, Artificial Sequence
  ENSG00000176142_30 (sequence is synthesized)
tcagcctaaatatagtggttcttgaggtaggggtgggaagggtagggaatctgccatctttctattctttctgtaggatcttgaaaatatgcttctcttggcagcaacattttcatgaga

SEQ ID NO: 610544 - DNA, 120 bp, Artificial Sequence
  ENSG00000176142_31 (sequence is synthesized)
ttactcagcagttgagagcaaaatgggtggcatgggcacagagatatctcatcaaaattgccccaacttggctccagcttgggaaagtaacccagaaaaccctgattagagataacagac

SEQ ID NO: 610545 - DNA, 120 bp, Artificial Sequence
  ENSG00000176142_32 (sequence is synthesized)
cagtcttatgaactaatatgatgccccttctggcttgatctgtcttggtcctatcctaagggaatagcacagaaccagatgctggcttggctaaataagtaagtggatataagaaataaa

SEQ ID NO: 610546 - DNA, 120 bp, Artificial Sequence
  ENSG00000176142_33 (sequence is synthesized)
taaaaattaattttggctaatggaattgcaaagttcctcctaccctcacctccagatatggcagcatacggggcataagaccgtttagttcaacgtgttctacacattccagctgttttt

SEQ ID NO: 610547 - DNA, 120 bp, Artificial Sequence
  ENSG00000176142_34 (sequence is synthesized)
tgtttgtttgttttgttgttttgtttttgtaggggccacgttcatggaagagagaaaaattactagttacccggatatcctattatagttcatgtaacagaagggacactatatttgctc

SEQ ID NO: 610548 - DNA, 120 bp, Artificial Sequence
  ENSG00000176142_35 (sequence is synthesized)
actgatagtagaaaaatgtgtaatcattaaagaatgaccttttttgtaattctttgttggcaagttaaaattgtttgtggaaagcatggtatagcaaaagttcagttgggtgaactggga

SEQ ID NO: 610549 - DNA, 120 bp, Artificial Sequence
  ENSG00000176142_36 (sequence is synthesized)
tactggaaaaggaaagaagatacttgactagtctgggtggtctaaggtgggtaaataaaggagtagaggagggtagttcacaggaatgagcatgacagaagttttcctcaatatcctgtt

SEQ ID NO: 610550 - DNA, 120 bp, Artificial Sequence
  ENSG00000176142_37 (sequence is synthesized)
tactctgattccatgtttatattcctaatcctcctttccttcctgtccctatcagtcaccaccactgccacctgttgtgccgtttctctctcttttttttaattaatttttttatttcta

SEQ ID NO: 610551 - DNA, 120 bp, Artificial Sequence
  ENSG00000176142_38 (sequence is synthesized)
ttaagctagccaggcatctcatttctatgtactgggcaattatatgccaaacactgctgggtgccggagatagtgatgttcgagttcattaactaatagaagacagacaagtaaaccagt

SEQ ID NO: 610552 - DNA, 120 bp, Artificial Sequence
  ENSG00000176142_39 (sequence is synthesized)
tgtcacactagggtgttcattaacagaaatatgtatgagatacgtaatagatatcagatctattaacaatcttgagtgtgaagcccaataaagtgctcttttcataagtacttcaaataa

SEQ ID NO: 610553 - DNA, 120 bp, Artificial Sequence
  ENSG00000176142_40 (sequence is synthesized)
gtggggaggataaacgaatggaccagttgcctatcctccctccctggcacccctgggaaaataggtctgcagccagaaaactgaaggtcagagaggagttgaaactggttgacaaccatt

SEQ ID NO: 610554 - DNA, 120 bp, Artificial Sequence
  ENSG00000176142_41 (sequence is synthesized)
cttgcgaggaggcttgtatgggctctcatctcagaggtctgtgtgtgtaagctctgattttcaggaaccctatttctggaagcagagtaactggaaatactaagtcaagatctgaaaacc

SEQ ID NO: 610555 - DNA, 120 bp, Artificial Sequence
  ENSG00000176142_42 (sequence is synthesized)
tcttggctttgaacatttaatttttagtttttgtcttacatggatgcttgtcatcatgctaaactgaatacaagggacattaactcatttccaccaccaccccagctccttaaatgcgtt

SEQ ID NO: 610556 - DNA, 120 bp, Artificial Sequence
  ENSG00000176142_43 (sequence is synthesized)
tcctacagcaatgctccacagcacatattagcacaggccttcaagcccaggaactgaaagagattgggccaggctgaaaagaaacccgactgtgggcaaaggacagatttcaataaaaat

SEQ ID NO: 610557 - DNA, 120 bp, Artificial Sequence
  ENSG00000176142_44 (sequence is synthesized)
taccatgttattagtaaatctttagaaattatttcggtcacgtaaacgatacttttaagagtgaaaaatgaaattcttcaaatataaatgaagcatttagaaaactgggaaatccatgag

SEQ ID NO: 610558 - DNA, 120 bp, Artificial Sequence
  ENSG00000176142_45 (sequence is synthesized)
catggtgaacatataatttgttttctaaactggagtacagttgggacaacaggcataaaccaggactgtcctgggaaacctggaatgtagggtgtgttgccagtggagaatattttaatt

SEQ ID NO: 610559 - DNA, 120 bp, Artificial Sequence
  ENSG00000176142_46 (sequence is synthesized)
gtctctcttcaccaagtaaaggcccctcttgctatctatatttgggtaaacggtagttaattttagatgaatgcactggttcgaaaaccagtcttacccttggttggtcatattactttg

SEQ ID NO: 610560 - DNA, 120 bp, Artificial Sequence
  ENSG00000176148_0 (sequence is synthesized)
agtctcctccttcctgatgctgagaagcggccgctctgaccgctgcccacccgagtcgggctgggaggaccgcccgccgcgtggcgagggatgcggcctcggaggggcagaggctgaacc

SEQ ID NO: 610561 - DNA, 120 bp, Artificial Sequence
  ENSG00000176148_1 (sequence is synthesized)
gcccctgcctgccgcgcatccctccggcttccgccgcggcgccagcccgcgcctgattcgcggcgggagcggcaggagggagaacgccgactccgtggcaggaaagtgaataaacttaat

SEQ ID NO: 610562 - DNA, 120 bp, Artificial Sequence
  ENSG00000176148_2 (sequence is synthesized)
tgagaatgtctgaaaaccttgacaagtccaatgtaaatgaagcaggaaaatcaaaatccaatgattctgaggaaggcctcgaagatgctgtggaaggtgctgatgaagccttacaaaaag

SEQ ID NO: 610563 - DNA, 120 bp, Artificial Sequence
  ENSG00000176148_3 (sequence is synthesized)
caataaagtcagactcctccagcccccaaagagtgcagagacctcactctagtcctcctcgctttgtgacagtagaagaacttctagagacagcgagaggtgtcaccaacatggctctag

SEQ ID NO: 610564 - DNA, 120 bp, Artificial Sequence
  ENSG00000176148_4 (sequence is synthesized)
cccatgaaattgtagtaaatggagactttcagattaaaccagttgaattaccagaaaacagcttgaagaagagagtaaaggagattgtacataaagcgttttgggattgcttgagtgtgc

SEQ ID NO: 610565 - DNA, 120 bp, Artificial Sequence
  ENSG00000176148_5 (sequence is synthesized)
agctaagtgaagatcccccagcatatgaccatgctatcaaacttgtaggagaaatcaaagagactctcttatctttcttgctgcctggtcatactagactgagaaaccagataacagaag

SEQ ID NO: 610566 - DNA, 120 bp, Artificial Sequence
  ENSG00000176148_6 (sequence is synthesized)
tcttggatctggatctgataaagcaggaagcagagaatggggcgctagacatttccaagctggcagaattcattattggcatgatggggacactgtgtgcacctgctcgagatgaggaag

SEQ ID NO: 610567 - DNA, 120 bp, Artificial Sequence
  ENSG00000176148_7 (sequence is synthesized)
ttaagaaactaaaggacattaaggaaatagtgccccttttcagagaaattttttctgtgttggacctaatgaaagtggacatggccaactttgctatcagtagcatcaggcctcatctca

SEQ ID NO: 610568 - DNA, 120 bp, Artificial Sequence
  ENSG00000176148_8 (sequence is synthesized)
tgcagcagtcagttgaatacgaaaggaagaagtttcaagagattttggagaggcaaccaaattccctggactttgtcacccagtggctggaagaagcctcagaggaccttatgactcaga

SEQ ID NO: 610569 - DNA, 120 bp, Artificial Sequence
  ENSG00000176148_9 (sequence is synthesized)
agtataaacacgccctgccagtggggggaatggctgctggctctggggacatgcccaggctgagccctgttgctgtccagaattacgcttacctgaagcttctgaagtgggaccacctcc

SEQ ID NO: 610570 - DNA, 120 bp, Artificial Sequence
  ENSG00000176148_10 (sequence is synthesized)
agaggccgttccccgaaacagttttaatggaccagtctcgcttccacgagctccagttgcagctggaacaactgaccatcctgggggctgtgttgctggtcaccttcagcatggcagcgc

SEQ ID NO: 610571 - DNA, 120 bp, Artificial Sequence
  ENSG00000176148_11 (sequence is synthesized)
ccagccaggccgactttgctgagaaactcaagatgattgtgaagattttgctaacagatatgcacctgccctccttccatctgaaggacgtcctcactaccatcggggagaaggtgtgcc

SEQ ID NO: 610572 - DNA, 120 bp, Artificial Sequence
  ENSG00000176148_12 (sequence is synthesized)
tggaggtgagcagctgcctctccctgtgtgggtcctctcccttcaccacggacaaggagaccgtgctcaagggccagatccaggccgtggccagtcccgatgaccccattcgcaggatca

SEQ ID NO: 610573 - DNA, 120 bp, Artificial Sequence
  ENSG00000176148_13 (sequence is synthesized)
tggaatctcgaatcctgaccttcttagaaacctaccttgcctcgggtcatcagaagccattgcccacagtccctgggggactcagtccagttcagagagagctggaggaagttgctatta

SEQ ID NO: 610574 - DNA, 120 bp, Artificial Sequence
  ENSG00000176148_14 (sequence is synthesized)
aatttgctcgcctggtcaactataacaagatggtcttctgtccctactacgatgcaatcctgagtaagatcctcgtccgatcctaacgtgtatgcaccctacagcagcagtattactcac

SEQ ID NO: 610575 - DNA, 120 bp, Artificial Sequence
  ENSG00000176148_15 (sequence is synthesized)
tagccacagaatacctgttctgtactctaatgttgcattggaaaatggctatatagtacatgtctatttaacagcaccgattccaaagggaagaatattgtgtatcactgttgaaaagac

SEQ ID NO: 610576 - DNA, 120 bp, Artificial Sequence
  ENSG00000176148_16 (sequence is synthesized)
ttgttgagaaatccactgaattctattttgagagattgtatttatgagtgcaagtttacaaatcaaagaagcattttgttctcgagttttacaggtaacactcagctgttgtctccactc

SEQ ID NO: 610577 - DNA, 120 bp, Artificial Sequence
  ENSG00000176148_17 (sequence is synthesized)
ctcccccatcatgtccttccaaggaggctgggacctctctcttctgcaatctgggtagttctttcagatgcctcatgctgagctgacggccatccaagcgcaaaagagaccaagccatgg

SEQ ID NO: 610578 - DNA, 120 bp, Artificial Sequence
  ENSG00000176148_18 (sequence is synthesized)
cctcacctcctgccctccctcagacagccttgtccctcacccctcccttctggtatttttgttagaagggctatataacgtcttattgccattttctccccctatttattgcttcctccc

SEQ ID NO: 610579 - DNA, 120 bp, Artificial Sequence
  ENSG00000176148_19 (sequence is synthesized)
tgcctggcctagccagggctcccaagcccttttttctagaggagagttatttgtctctctctctttttttttttactttcttttttgtatttaaacattcttttaaccttcccccaaaga

SEQ ID NO: 610580 - DNA, 120 bp, Artificial Sequence
  ENSG00000176148_20 (sequence is synthesized)
tacagttattggactttaaaaagcttgttcttttatacaaaattactcctgcatctggttgagagcagttatgacttatgagatctagtgaaaggaaagtctttgactttcaagccttga

SEQ ID NO: 610581 - DNA, 120 bp, Artificial Sequence
  ENSG00000176148_21 (sequence is synthesized)
aagtcaaggaggaaatgtattgaaaaatagtttactgtaatgtgaacgaagagaaatgtctggaattcttactgaaaaattgaccctgagacaatacacagatgtgatgattgaattaaa

SEQ ID NO: 610582 - DNA, 120 bp, Artificial Sequence
  ENSG00000176148_22 (sequence is synthesized)
ggcctgaacagctgtttacaacggaatccggacgccgggcgcgagtggagctcagtgccagaggaggggattcccggcgccgggggacagagccccttttttcttttgccgaaagaccct

SEQ ID NO: 610583 - DNA, 120 bp, Artificial Sequence
  ENSG00000176148_23 (sequence is synthesized)
atgttttccacctctccctgaggaaacacggcgccgcccagctgcgagtcaccgcttactgaaccccttcggcaagcaggggaaagaccctcccgcctttccgtacgaagacatggcgct

SEQ ID NO: 610584 - DNA, 120 bp, Artificial Sequence
  ENSG00000176148_24 (sequence is synthesized)
tttatgaggcctccttgtgcatgtggccgtgagctaggttctaataatataacattgccaatgtagcatttaggaataatagcagttcctcagctggcagcctagctacttgtggatttt

SEQ ID NO: 610585 - DNA, 120 bp, Artificial Sequence
  ENSG00000176148_25 (sequence is synthesized)
cctcttgtgtccagcctaggcccgcgtgcagcgccgacggatgaccgtcttcttggcaagtgcgaggatcctcctcccctcggctctctttttagacacagtgggggttgaatggatgcg

SEQ ID NO: 610586 - DNA, 120 bp, Artificial Sequence
  ENSG00000176148_26 (sequence is synthesized)
gatctctccagagctgttcaatgttgatcatcggattaacacaacctcgttgataaactcttcggacagctgttattctttgattttctgcataagatcctacagcttccctgagattgg

SEQ ID NO: 610587 - DNA, 120 bp, Artificial Sequence
  ENSG00000176148_27 (sequence is synthesized)
ataagaaatgccatcaattatattataaccaaatctcattcaacccagcaatctcactactggatatctacccaaagaacaactctatggaaaatagtatggagatttctcaaagaacta

SEQ ID NO: 610588 - DNA, 120 bp, Artificial Sequence
  ENSG00000176148_28 (sequence is synthesized)
aaaattatattttagctaaatcaactgtagatgtaaaaaaaaactatacaaatacttacacgccttttaggaaattgatgtaatccacccaaatctaagaaataaaatgaaatgttaata

SEQ ID NO: 610589 - DNA, 120 bp, Artificial Sequence
  ENSG00000176148_29 (sequence is synthesized)
ggagctggggcggaggctggcggggcccgtccgggaggcgcgcggtccaagtcgcaggcatctcttcgcctcttcccgtcggatcccatcccgggatgtcgggggcaggcgaggaagagg

SEQ ID NO: 610590 - DNA, 120 bp, Artificial Sequence
  ENSG00000176148_30 (sequence is synthesized)
ctgagaaaaagatggatatcttttggcaatttctttgggtccagcaatactgatatgagtccttggaattgtaggactgattatcccatgagtctgcacattagatttccaaagaaccat

SEQ ID NO: 610591 - DNA, 120 bp, Artificial Sequence
  ENSG00000176148_31 (sequence is synthesized)
gtgatagaggcaccaatgacaatacaactttgtttccaagaaccttgtaacaaagcgttgtctcttttaaacataccacttgaggcaaaaggaatcctggacaggagttttctgcagagg

SEQ ID NO: 610592 - DNA, 120 bp, Artificial Sequence
  ENSG00000176148_32 (sequence is synthesized)
cgtttaaaaccctaccgaatccgcttctgctgccgtgctctgtaaatgtcatgaacaggggggacaacggctcccttttcttcatcttcatctgaatcctcgttgggccttttgacggcc

SEQ ID NO: 610593 - DNA, 120 bp, Artificial Sequence
  ENSG00000176148_33 (sequence is synthesized)
aggtaggtagctgtgttttacagaggaggacactgaagttacacagctagtaaagagccagaattggggcccaggtatgtctgaaaccaacgcccagcctcccagatacagtgacatcac

SEQ ID NO: 610594 - DNA, 120 bp, Artificial Sequence
  ENSG00000176148_34 (sequence is synthesized)
agagatgacgtagggattcatctctatcaacagatacttgtgggtgtctatttgggggatatacagatggagcataagtggggaatatgactggtcctggctcttaagaagttcgaaatc

SEQ ID NO: 610595 - DNA, 120 bp, Artificial Sequence
  ENSG00000176148_35 (sequence is synthesized)
taggtggggaattttaaaataaaaactagcacttttaccatctggccccaacgcatctttccatcatctctagccacttccttttctcattttcttgtgccttggcttctgccctctgag

SEQ ID NO: 610596 - DNA, 120 bp, Artificial Sequence
  ENSG00000176148_36 (sequence is synthesized)
tgaaatgccctccttttcacctcctctccccctcctctccccctccagacatgttttaactaggtgaaatcctactccttttaaagatcagttcaaatgtcatcttttctgggaaggttt

SEQ ID NO: 610597 - DNA, 120 bp, Artificial Sequence
  ENSG00000176148_37 (sequence is synthesized)
tctcaatctcctcccaggcagagttagtttcttcctctgctatattccctgggcaatttcataatgccacttaagtttcattatggctccttgtaagcctgtctgcctccccctctagac

SEQ ID NO: 610598 - DNA, 120 bp, Artificial Sequence
  ENSG00000176148_38 (sequence is synthesized)
tatgtatttgcatctttctatttaaataagcacgctttgaattgaatttaaggcagtgacaaatgccaaatgtcaactagccagccctgcaggagttgagaaaggtgcaatcactggtga

SEQ ID NO: 610599 - DNA, 120 bp, Artificial Sequence
  ENSG00000176148_39 (sequence is synthesized)
ggtccgggaagtgtcctgggaagagacaggacttgaactcaatcttaaggatggggttagtttactaagctgagcattagagacctagaaatcctccctttcctcctcactgcacagaat

SEQ ID NO: 610600 - DNA, 73 bp, Artificial Sequence
  ENSG00000176148_40 (sequence is synthesized)
ctcgctctgttggccaggctgatctcgaactcctcacctcaggtgaactgcctgcctcggcctccaaaagtgc

SEQ ID NO: 610601 - DNA, 120 bp, Artificial Sequence
  ENSG00000176153_0 (sequence is synthesized)
gctcactctgcgcttcaccatggctttcattgccaagtccttctatgacctcagtgccatcagcctggatggggagaaggtagatttcaatacgttccggggcagggccgtgctgattga

SEQ ID NO: 610602 - DNA, 120 bp, Artificial Sequence
  ENSG00000176153_1 (sequence is synthesized)
gaatgtggcttcgctctgaggcacaaccacccgggacttcacccagctcaacgagctgcaatgccgctttcccaggcgcctggtggtccttggcttcccttgcaaccaatttggacatca

SEQ ID NO: 610603 - DNA, 120 bp, Artificial Sequence
  ENSG00000176153_2 (sequence is synthesized)
ggagaactgtcagaatgaggagatcctgaacagtctcaagtatgtccgtcctgggggtggataccagcccaccttcacccttgtccaaaaatgtgaggtgaatgggcagaacgagcatcc

SEQ ID NO: 610604 - DNA, 120 bp, Artificial Sequence
  ENSG00000176153_3 (sequence is synthesized)
tggagccctgtgcgccgctcagatgtggcctggaactttgagaagttcctcatagggccggagggagagcccttccgacgctacagccgcaccttcccaaccatcaacattgagcctgac

SEQ ID NO: 610605 - DNA, 120 bp, Artificial Sequence
  ENSG00000176153_4 (sequence is synthesized)
atcaagcgcctccttaaagttgccatatagatgtgaactgctcaacacacagatctcctactccatccagtcctgaggagccttaggatgcagcatgccttcaggagacactgctggacc

SEQ ID NO: 610606 - DNA, 120 bp, Artificial Sequence
  ENSG00000176153_5 (sequence is synthesized)
tcagcattcccttgatatcagtccccttcactgcagagccttgcctttcccctctgcctgtttccttttcctctcccaaccctctggttggtgattcaacttgggctccaagacttgggt

SEQ ID NO: 610607 - DNA, 120 bp, Artificial Sequence
  ENSG00000176153_6 (sequence is synthesized)
aagctctgggccttcacagaatgatggcaccttcctaaaccctcatgggtggtgtctgagaggcgtgaagggcctggagccactctgctagaagagaccaataaagggcaggtgtggaaa

SEQ ID NO: 610608 - DNA, 120 bp, Artificial Sequence
  ENSG00000176153_7 (sequence is synthesized)
cttgttcaaacagcacttacaggtggggacctgtttttgctaagtcatcctggggatgctcaaagctccattgttagatcctttctgtcctccttcctggctcctccttcctccccaccc

SEQ ID NO: 610609 - DNA, 120 bp, Artificial Sequence
  ENSG00000176153_8 (sequence is synthesized)
tgcaaccaatttggacatcagaactgctcagggtagactggagacaaaagcaacagctcagaagtgctaaatcttgaagagcagccaaagcatgggcaacaaagtgagaccccatctcta

SEQ ID NO: 610610 - DNA, 120 bp, Artificial Sequence
  ENSG00000176155_0 (sequence is synthesized)
cctggccagcgctgctggcgggcgttagggtatttctggaaaactcaaactgtttttcctctactctgataccacaagaatcatcagcacagaggaagacttctgtgatcaaatgtggtg

SEQ ID NO: 610611 - DNA, 120 bp, Artificial Sequence
  ENSG00000176155_1 (sequence is synthesized)
ggagagggaggttttcaccagcacatgagcagtcagttctgccgcagactcggcgggtgtccttcggttcagttccaacaccgcctgcctggagagaggtcagaccacagggtgagggct

SEQ ID NO: 610612 - DNA, 120 bp, Artificial Sequence
  ENSG00000176155_2 (sequence is synthesized)
cagtccccaagacataaacacccaagacataaacacccaacaggtccaccccgcctgctgcccaggcagagccgattcaccaagacgggaattaggatagagaaagacggccaccatgct

SEQ ID NO: 610613 - DNA, 120 bp, Artificial Sequence
  ENSG00000176155_3 (sequence is synthesized)
gccactgggctcagagcccgccctgaatgagctgctgcttcgcaaggaggaggagtggagggcgctgcaggcacaccgcacccagctgcaggaggcggctctgcaggacacacggagcca

SEQ ID NO: 610614 - DNA, 120 bp, Artificial Sequence
  ENSG00000176155_4 (sequence is synthesized)
gctggaggaggcgcaggggaaactgcggtgcctgcaggaggactttgtctacaaccttcaggtgctggaggagcgggacctcgagctggagcgctatgacgccgccttcgcccaggccag

SEQ ID NO: 610615 - DNA, 120 bp, Artificial Sequence
  ENSG00000176155_5 (sequence is synthesized)
ggagtgggaagaggccaggcgggcagaggtgagcgagctcaagatagaggcagctaagctgaggcaggcgctagccagagaggccaggaaggtggaggagctgcagcagcagcagcagct

SEQ ID NO: 610616 - DNA, 120 bp, Artificial Sequence
  ENSG00000176155_6 (sequence is synthesized)
ggcattccaggagcatcgcctggagctggagcgcgtccacagtgacaagaatggtgagattgaccaccaccgggaacagtatgaaaatctaaaatggacactggagagaaaacttgagga

SEQ ID NO: 610617 - DNA, 120 bp, Artificial Sequence
  ENSG00000176155_7 (sequence is synthesized)
gctcgacggtgagcttgctctgcagagacaggaactgctgctggagtttgaatcgaaaatgcggaagagggagcacgaattccgtctgcaggctgacaacatgagcaacacagccttgtc

SEQ ID NO: 610618 - DNA, 120 bp, Artificial Sequence
  ENSG00000176155_8 (sequence is synthesized)
ccgggagcttaaggttaaactactgcacaaagagctggaggctctgaaggaagccggggcaaaggctgcagagagtctgcagagggcagaggccaccaacgccgagctggagaggaagct

SEQ ID NO: 610619 - DNA, 120 bp, Artificial Sequence
  ENSG00000176155_9 (sequence is synthesized)
ccagagccgagccggggagctccaggacctggaggccatgagccgcgcccgggtaaaggatttagaggataaacttcactctgtgcagctaaccaggaagaaggaagaggaaacatttaa

SEQ ID NO: 610620 - DNA, 120 bp, Artificial Sequence
  ENSG00000176155_10 (sequence is synthesized)
gaggaagcatgaggagctcgaccgtctggccagggagaaggatgcagtgctggtggcggtgaagggagcccacgtggagcagctgcaggagctgcagaccagggttctggagctgcaggc

SEQ ID NO: 610621 - DNA, 120 bp, Artificial Sequence
  ENSG00000176155_11 (sequence is synthesized)
ccactgcgagaccctcgaggcgcagctccgcagggcagagtggagacaggctgacaccgccaaggagaaggacgctgccattgaccaacttcgtgaagatgcatcaactgtaaaatctgc

SEQ ID NO: 610622 - DNA, 120 bp, Artificial Sequence
  ENSG00000176155_12 (sequence is synthesized)
gctcaactatctaaggagatggtctccagagaccttcagattcagacgctgcaggaagaagaggtgaagctcaaggcacaggtggcccgatcccagcaggacattgaaaggtacaagcaa

SEQ ID NO: 610623 - DNA, 120 bp, Artificial Sequence
  ENSG00000176155_13 (sequence is synthesized)
cagctgtccctggcagtggaaagggagcggagcctggagcgtgatcaggtgcagctgggcctggactggcagcgccgctgtgatgacattgaaagggaccagatccaaaagtcagaggcc

SEQ ID NO: 610624 - DNA, 120 bp, Artificial Sequence
  ENSG00000176155_14 (sequence is synthesized)
ctgattcagggtctgagcatggcaaaaagtcaggttgctgccaagctgcaggagacagagcaggcgctacaggagcaggaggtggtgctgaaggccgtgaccctggaacgagaccaggcc

SEQ ID NO: 610625 - DNA, 120 bp, Artificial Sequence
  ENSG00000176155_15 (sequence is synthesized)
gtgcaggccctgaggatgcatgggctccccagaccaggggcacagatgcttctcaggcagcatgaagaagaaataagtaaagactttccatccagtgagatccagcggctccgagagcag

SEQ ID NO: 610626 - DNA, 120 bp, Artificial Sequence
  ENSG00000176155_16 (sequence is synthesized)
aacacgagcttgcgaaacgcgattgcccagatgaggaaagaaatggaggctctaagccatcagattcctcctcccatccagacagcggcagagagcacagatgcaaaccagcctgaccca

SEQ ID NO: 610627 - DNA, 120 bp, Artificial Sequence
  ENSG00000176155_17 (sequence is synthesized)
gaggctgggggagatgccgccactcctgattatgttctggcccttgaagcagaaatacgaactctaaagcataagtttaaaactctggaaaagcatctagaagatgtgttggatccttta

SEQ ID NO: 610628 - DNA, 120 bp, Artificial Sequence
  ENSG00000176155_18 (sequence is synthesized)
aagatgtcctcacctcatgctgagtctcagcccagcgtccgcacctcgacagagacgactggagggtctgcccaagctggtcaagccggagggtctgtccaagctggtcaagcaggagga

SEQ ID NO: 610629 - DNA, 120 bp, Artificial Sequence
  ENSG00000176155_19 (sequence is synthesized)
tctgtccaagctggcccagtatcctctggactggcactcaggaagctcggggacagagtgcagctcctaaacctgctggtgacacgactcagacagaaggtgctgcgggaacccctggag

SEQ ID NO: 610630 - DNA, 120 bp, Artificial Sequence
  ENSG00000176155_20 (sequence is synthesized)
ccggccgctctccagcgtgagcttccccgtgaggtggaccaggtacacctggaggttttggagctgcggaagcaggtggctgagctggggaagcatctcaggatagcccagcacggggga

SEQ ID NO: 610631 - DNA, 120 bp, Artificial Sequence
  ENSG00000176155_21 (sequence is synthesized)
gcggagccttcaggcaggaagcagcccccagcctcggacgccgtggcccttgggagagaggtgggtgcccgctagctcctcctgccacccgccgaggttcctgccacagaaaccgtcctt

SEQ ID NO: 610632 - DNA, 120 bp, Artificial Sequence
  ENSG00000176155_22 (sequence is synthesized)
gcctgtgctctgccagcgttgctgtctgtatgccctgggagctcaggtgggacgagggctgcagtgaaggccgtgcctggaagtgggccctgctccaccccctctccccattcctccgcc

SEQ ID NO: 610633 - DNA, 120 bp, Artificial Sequence
  ENSG00000176155_23 (sequence is synthesized)
ttcttcctccacacgcctcctcttctcctggtccttcaccttgatgccccgttggtggggggcgggacgggcccatcccagtcctcccttcagctaacagcatcttgtgttggaaacgca

SEQ ID NO: 610634 - DNA, 120 bp, Artificial Sequence
  ENSG00000176155_24 (sequence is synthesized)
ggacgccaagagtgccgaggatgaggctccttccagacacttgggaaagcaccagccccgctcagcacaggtgggcagcagacttgacgccctgcaaggcccgaagacacaacacagcat

SEQ ID NO: 610635 - DNA, 120 bp, Artificial Sequence
  ENSG00000176155_25 (sequence is synthesized)
ccacacggtgacctgtaaatcacctcggcagaaagaagacaggtccccaaagccaccccaggctccccagcaccctgaggagcatggtcgccaatcccacagctcctcctcctttgccag

SEQ ID NO: 610636 - DNA, 120 bp, Artificial Sequence
  ENSG00000176155_26 (sequence is synthesized)
tggcaccctccaggacatgtggaggttgctagacctgggatccagcccttctggtgtcacctcccagggtgactcaactccagagctcccagctcctccagcagccgacaggaggcccgt

SEQ ID NO: 610637 - DNA, 120 bp, Artificial Sequence
  ENSG00000176155_27 (sequence is synthesized)
caagatgcaggcaggcattgccaccccagggatgaagacagcagcccaggcaaaggccaagaccacaggagcctcccggtctcatcctgcaaaagctaaaggctgccagaggccccccaa

SEQ ID NO: 610638 - DNA, 120 bp, Artificial Sequence
  ENSG00000176155_28 (sequence is synthesized)
gatccgtaactacaacattatggactgacttcctccccccaccccgccccactaaggggtgctcggggcctccgcatggtgcctgtgctttcacctacgtgttgtgggggggtgtgggca

SEQ ID NO: 610639 - DNA, 120 bp, Artificial Sequence
  ENSG00000176155_29 (sequence is synthesized)
cagcgtgcagggtggaggcagggagctgcagggcaggctcccaaatgctgctgaggcgaccctgctgactgaaggcctccctgagcacagggcccattaaaaccaggttcctccctgggg

SEQ ID NO: 610640 - DNA, 120 bp, Artificial Sequence
  ENSG00000176155_30 (sequence is synthesized)
cccaaggagtggaggagggccaagccacgctggcgggagctgtcctcctgggtcctgggcactgctagaggccacagccttctctctgctctccctgggccgccttcctgggtcctgggc

SEQ ID NO: 610641 - DNA, 120 bp, Artificial Sequence
  ENSG00000176155_31 (sequence is synthesized)
actgctggaggccacagccttctctctgctctccctggggagctgctgtgctggttgggtgtcctcagattctccttgtgttcacttgaaagacacaaaggcatagatgaccagaaggca

SEQ ID NO: 610642 - DNA, 120 bp, Artificial Sequence
  ENSG00000176155_32 (sequence is synthesized)
gggatggcggggaggaggcggagggctgtgagggcctgggagatctgggggccaccctggcctgggagatctgtgggcctttattctatttgtggaagagaaggaacccactgaagcact

SEQ ID NO: 610643 - DNA, 120 bp, Artificial Sequence
  ENSG00000176155_33 (sequence is synthesized)
gggagcagcgactctttttgtctttcttttggaaggatgtcacccagtgacagccagcagtgcccaccctggaagagcaggtgaagaggctccttgggtgggcacccctggcgtcctccc

SEQ ID NO: 610644 - DNA, 120 bp, Artificial Sequence
  ENSG00000176155_34 (sequence is synthesized)
atgagggcagcctcacaggggtgtctgcctgtgagttttgttacagggcctcaccaagagagggcctatggaggccgaggaccagggggagcttttcctgcacctccggtcagtggcacg

SEQ ID NO: 610645 - DNA, 120 bp, Artificial Sequence
  ENSG00000176155_35 (sequence is synthesized)
tgccccccagaccttatctatgcaccgactccagagaaagctgaaggaggcagccagaaaaatcatcagcctccgcctggagaaagagcagctcatcgagatggggaacaggctccgtgc

SEQ ID NO: 610646 - DNA, 120 bp, Artificial Sequence
  ENSG00000176155_36 (sequence is synthesized)
agagctgggccgacccgaaaggtggctgttgcaccacgccctccctcctgcccctgaggcccggaagccaggcgaggagcccaggaggcctttggatcgcagcccacctttgggacaggt

SEQ ID NO: 610647 - DNA, 88 bp, Artificial Sequence
  ENSG00000176155_37 (sequence is synthesized)
cctgcctgtgggccccacgcccagcctggcgtggagtggagcccttcacccaaacatgaaccaggaggcgagcttggtaaggagcacg

SEQ ID NO: 610648 - DNA, 120 bp, Artificial Sequence
  ENSG00000176155_38 (sequence is synthesized)
cccaaacatgaaccaggaggcgagcttggtaaggagcacgtgggctccaggaatgcgagggggaatgaatggaggcagctcctcagtgtgcaaaaacatgcagcgcgggcctcactggtc

SEQ ID NO: 610649 - DNA, 120 bp, Artificial Sequence
  ENSG00000176155_39 (sequence is synthesized)
tgctcctgtcgttctagtcccattgctgctctcaggacaagctgtgactgagagagcaggtcacgctggtgacattttatgaggctggatgcacagccccacagcaccttgtcactgaag

SEQ ID NO: 610650 - DNA, 120 bp, Artificial Sequence
  ENSG00000176155_40 (sequence is synthesized)
ctacaggaatccaagaaccagtgctctggccaagaagggagcactggggtgccctgaatggcacggacaaccccagccccccgccttcactgattatcatgacctgtggcttctgaaagg

SEQ ID NO: 610651 - DNA, 120 bp, Artificial Sequence
  ENSG00000176155_41 (sequence is synthesized)
acagggcagtcttggaactttctgagaaacagatggtcaagtagatgtctgttagctcttttcttgaaattgtagtgacgaaaccatgactgccacttaggaaagtaacttgtgttgaaa

SEQ ID NO: 610652 - DNA, 120 bp, Artificial Sequence
  ENSG00000176155_42 (sequence is synthesized)
taacttttagaacaaagtaaatacattaagaaataaccaaatcggcttactttctgataatatttattctatgcccacacaacggctggcactcacttctgcttctggccaggccgtagt

SEQ ID NO: 610653 - DNA, 120 bp, Artificial Sequence
  ENSG00000176155_43 (sequence is synthesized)
tacaaggaccagactttaatgttcctccatgaacaactagaaaactggacaaagtatatgaaacaactgtttgcagacattggacaactggtcaaacaagaccgagatccccaacaagac

SEQ ID NO: 610654 - DNA, 120 bp, Artificial Sequence
  ENSG00000176155_44 (sequence is synthesized)
cgagaccctggacgagtccgagatcccggacaagaccgccacccttgttggaagggagacaggcaaggtgaaccctggggccctggccttctgcctgaaggccgtttctgggctgccggc

SEQ ID NO: 610655 - DNA, 120 bp, Artificial Sequence
  ENSG00000176155_45 (sequence is synthesized)
acagggagggaagcagggcctgagcaaagctgagcacccttacggagctgagactgcactagggtctggggacacagaaggagccggcatttcagggcagaatcccgcaaggaggaaact

SEQ ID NO: 610656 - DNA, 120 bp, Artificial Sequence
  ENSG00000176155_46 (sequence is synthesized)
gcagaaaagagctccagaaatctgcacagggttctcttgagtctgtactgaggaccagcctgtacatgtatagaagaaaactccacaaagccaggcaaagaggagaaaggagcatgtaag

SEQ ID NO: 610657 - DNA, 120 bp, Artificial Sequence
  ENSG00000176155_47 (sequence is synthesized)
gtgaacaacttccagacctcgcacacggtcatgacatactgaagctccagccagggggatgggtccccagtgatcactgtggacattcagtggagactcaggaggagccacaccgtggga

SEQ ID NO: 610658 - DNA, 120 bp, Artificial Sequence
  ENSG00000176155_48 (sequence is synthesized)
ccgtgggaacagggctgatgctgtctgcagtgaaggctcgtctagaacctgcctgagaaactgcagctacagaaatccaaggcctggcatggcggctcacgcctgtaatcccagaacttt

SEQ ID NO: 610659 - DNA, 120 bp, Artificial Sequence
  ENSG00000176155_49 (sequence is synthesized)
tgtccggccctccccaagttctcgatgtaatggaagttactttggttttgaaaaggaacatgctgttctttctgagtgtttgcattcaacacaagaggaatccagaagtgatgcacagag

SEQ ID NO: 610660 - DNA, 120 bp, Artificial Sequence
  ENSG00000176155_50 (sequence is synthesized)
ccgctcgtggccgtggtgtcctctgtccctgcagtgagggctcagcagccgtgcccattgatctacacctgagactgtgcatcaggggagactgtccaggaggccccaggcagagtcaca

SEQ ID NO: 610661 - DNA, 120 bp, Artificial Sequence
  ENSG00000176155_51 (sequence is synthesized)
tcaccatcctgatgctgggagtggggctggccctcataattaggtggctcatggtccagggataaagctgcttcccagagcaccagaggccgttgacttcgtgaagatgcatcaactgta

SEQ ID NO: 610662 - DNA, 120 bp, Artificial Sequence
  ENSG00000176155_52 (sequence is synthesized)
gtttgctttaatgcagggccttgacggcctgctgagggggcgtctgcgtgcacagccatgcctgccccatgcctagcgttgggccctccctgcgtggggaggggcccacatggccctcac

SEQ ID NO: 610663 - DNA, 120 bp, Artificial Sequence
  ENSG00000176155_53 (sequence is synthesized)
tgctgcgttcagagccacacagctgctccaggccatggcactcctatcctggttttggtcaggcccttggccccgagggagtgacccccaactccatggctgggtttgagccacagctct

SEQ ID NO: 610664 - DNA, 120 bp, Artificial Sequence
  ENSG00000176155_54 (sequence is synthesized)
gagctgtggagacgaccccaggtcctgattctgcagcttggcagagccgaccagcagggcccccttcttcctacctaaggccagagggaaaggctgtgaaggacaggctgcccggcctcc

SEQ ID NO: 610665 - DNA, 120 bp, Artificial Sequence
  ENSG00000176155_55 (sequence is synthesized)
ctgacttcgtaccctagactgttggtaactgggataactgtagtgacctatgacctgtggtaacctatagttaccaatagtgacctatgaatccacagaaggttttggggacagtagatg

SEQ ID NO: 610666 - DNA, 120 bp, Artificial Sequence
  ENSG00000176155_56 (sequence is synthesized)
atgtctggaaagcacaaagtggaagacagcgtggatccccagggcaccgtgcttggggagcagatccccagggactcaggctggaatagagtggactgaggaagatgcggccgtggctgt

SEQ ID NO: 610667 - DNA, 120 bp, Artificial Sequence
  ENSG00000176155_57 (sequence is synthesized)
ctcaggctccaggacagtgaggagcaggccagagctgccttggcatgggatgggcaagaccataaggatgcctcaggggtacaacagggcaggtatgggaaggccgagggagcctgaggc

SEQ ID NO: 610668 - DNA, 120 bp, Artificial Sequence
  ENSG00000176155_58 (sequence is synthesized)
cctagcaggtgctcagccagtgcgcacaggaagggctgagctggtcggtaagatattgagctgcacctgcccctgtacctgttggtaaggaggtcttgtcctcaggggtctccagcaccc

SEQ ID NO: 610669 - DNA, 120 bp, Artificial Sequence
  ENSG00000176155_59 (sequence is synthesized)
tagccctcctgggctcccagtccagccactccagggtggctcctgcccggtgggggctgtggcccttgggccagctggcagcacagccaggggtaagcatgtctgtacccccacacatct

SEQ ID NO: 610670 - DNA, 120 bp, Artificial Sequence
  ENSG00000176155_60 (sequence is synthesized)
cccacccacctgagcgccatgtgttcccggacacgggcgggcgcctccttgggcagcaaggggccccaggagctctcactgttggcccttgcgtagttcactgtcttcccacttgtttag

SEQ ID NO: 610671 - DNA, 62 bp, Artificial Sequence
  ENSG00000176155_61 (sequence is synthesized)
agacagagtctcacactgtcgcccaatctggagtgcactggcgcccctgagtagctgggatt

SEQ ID NO: 610672 - DNA, 120 bp, Artificial Sequence
  ENSG00000176155_62 (sequence is synthesized)
tggccaggctggtctcaaactcctggtttcaagtgatctgcctgcctcagtcccccaaagtggtgggattacaggtgggattataggcacagtggcccactgtgcctggcccaaataagc

SEQ ID NO: 610673 - DNA, 120 bp, Artificial Sequence
  ENSG00000176155_63 (sequence is synthesized)
tgtgcctggcccaaataagcagaattttaaattgagagatgaagccacctgcagcccaatcccagttattggagctaaggcacaggcggggcatacactccaggctctgtgtctacatgc

SEQ ID NO: 610674 - DNA, 120 bp, Artificial Sequence
  ENSG00000176155_64 (sequence is synthesized)
atggaggcgacagtcgggctccaggctcctcctgggtctgagcatcctgtggccgggctctccacccaggcgaggcccacctgggctctgtcctctgccaagcagcatggctgagctcct

SEQ ID NO: 610675 - DNA, 120 bp, Artificial Sequence
  ENSG00000176155_65 (sequence is synthesized)
ggagacgagggcgggcccaggtccttgctgcttgctgctgggaaaggagcccagacggagaaggggccatgttggggctggaccctcaggtagaggatcaatgtgtccgttatgttgggt

SEQ ID NO: 610676 - DNA, 120 bp, Artificial Sequence
  ENSG00000176155_66 (sequence is synthesized)
atagagagaagtgggtagagctgcatgtgcatctgatcccagctctgtcctgagagggcccacagcccggactcagccacagcagatgccagttccacagttccaggcgctagttccatg

SEQ ID NO: 610677 - DNA, 120 bp, Artificial Sequence
  ENSG00000176155_67 (sequence is synthesized)
gttcctgccctgctcacaggagcccgggctctagcatggaggcaggttcggaaggcacaggaagcagctgaaaggggtccccaaggaccagaactaggccaataggcagtgacgttgaag

SEQ ID NO: 610678 - DNA, 120 bp, Artificial Sequence
  ENSG00000176155_68 (sequence is synthesized)
accacaatccactgactcaaccaggaaatcatgggtccaggctgatagcaatggacagatcggtcaggggaacggggcactcttccacgcgagagtgccagccaaggaacgcgacaggaa

SEQ ID NO: 610679 - DNA, 120 bp, Artificial Sequence
  ENSG00000176155_69 (sequence is synthesized)
cggcgcgccgggcgaccacggatgggtgctgaaccagagggattcccatcagacggatgcgaagcagcatctccccacacgtgacttcttatttccaagggaaatgctggctttccagtg

SEQ ID NO: 610680 - DNA, 120 bp, Artificial Sequence
  ENSG00000176155_70 (sequence is synthesized)
gagcagcctgtttgaccccagctgacccgagtgatcagagctcccatcgccagtgctgggatgcgcccgtgtcacgcgcctctgggcgggtcgcactgagacggcacagactcgcgctcg

SEQ ID NO: 610681 - DNA, 120 bp, Artificial Sequence
  ENSG00000176155_71 (sequence is synthesized)
gggtccctgccaaaaatgcagaacctgagcttatgcatgaggagacctcaggcaagcccaaacagagggacatctgcagatgagcgggtctagatgcttggcgagtgcccaaacatggaa

SEQ ID NO: 610682 - DNA, 120 bp, Artificial Sequence
  ENSG00000176155_72 (sequence is synthesized)
gctggggagccactccagttaggagacctgggagaccccatgtagaaatgccaggtgggaccctggaccctgcacaggagagacagcgtcagggcatcatctgtagaaacgccacgtggg

SEQ ID NO: 610683 - DNA, 120 bp, Artificial Sequence
  ENSG00000176155_73 (sequence is synthesized)
accctgggctctgtacaggagagacgggcatcaagtcatcatccgtagaaacgccacgtgggaccctggaccctgcacaggagagacggcgtcagggcatcatccgtagaaacaccacgt

SEQ ID NO: 610684 - DNA, 120 bp, Artificial Sequence
  ENSG00000176155_74 (sequence is synthesized)
gggaccctggaccctgcacaggagagacggtgtcagggcatcatctgtagaaacaccatgtgggaccatggaccctgcacaggagagacagtgtagaaatgccacgtgggaccctggacc

SEQ ID NO: 610685 - DNA, 120 bp, Artificial Sequence
  ENSG00000176155_75 (sequence is synthesized)
ctgcacaggagagatggcgtcagggcgttatctggacggttggtgacatttgcacacgggccacggaccaggtcacgtattgtgtacacccacccaagtactgaggtgtgacgcggcact

SEQ ID NO: 610686 - DNA, 120 bp, Artificial Sequence
  ENSG00000176155_76 (sequence is synthesized)
gcgtctccagcctacctcctgtagtgcaggaagccagtgcagggtgggtgaggaagtgcacaggggtccagggactgtcccacagcactcctgacgaaagctggtccccttccacggccc

SEQ ID NO: 610687 - DNA, 120 bp, Artificial Sequence
  ENSG00000176155_77 (sequence is synthesized)
tagccaaggagccaggtctgcaaagctgggaccaggtgtgtgcggaggcacgtgttcccacttctcccatggcagagggagagcctgtggacaacagtggggcactctgctcccaggcag

SEQ ID NO: 610688 - DNA, 120 bp, Artificial Sequence
  ENSG00000176155_78 (sequence is synthesized)
gtcccactgggctgagccgcacagcctggctttgggcttccctgactgcaccacccacatcagctgcctctagcccttaaaatacaaaacttcccccagtcactggccgccagggctgag

SEQ ID NO: 610689 - DNA, 120 bp, Artificial Sequence
  ENSG00000176155_79 (sequence is synthesized)
ttgggggatgtgttacatccctgggtccactggggggcagtgttggccatggtgttggtgctggctctgccgagaggcgttggagtggctgtgtggggcggtgagcgccggcccagcctg

SEQ ID NO: 610690 - DNA, 120 bp, Artificial Sequence
  ENSG00000176155_80 (sequence is synthesized)
atggaacccactgtaccaggcccaggcctcagcctctgagaaggacttccctgtgtcactcactcatacatgtcctcaggacgtgaagacatttcagcagaccaaagtttccttcgaatt

SEQ ID NO: 610691 - DNA, 120 bp, Artificial Sequence
  ENSG00000176155_81 (sequence is synthesized)
ttcttcgaatcgtccagatacttggagacatctcctcctcacctgtggggtgctggggcagtcctaggcgtgggggcagatgggtggacagctgctgctgccctgctgggggtgggcagc

SEQ ID NO: 610692 - DNA, 120 bp, Artificial Sequence
  ENSG00000176155_82 (sequence is synthesized)
ccttggagcacacagtggtgaagacattcctgaatatgtctcaggctgtagaaatcttattttgtggaaagattttagagaatcatcaaaataaacttttaccaaataacattttaccag

SEQ ID NO: 610693 - DNA, 120 bp, Artificial Sequence
  ENSG00000176155_83 (sequence is synthesized)
ccgcccatcctcacagtgtgccgagcgccaggtccagaagcacgcacctacctgggggcctcttcctcctttctggcgggggtccgctttggcccctgatgctaacctcgccccgtgtgc

SEQ ID NO: 610694 - DNA, 120 bp, Artificial Sequence
  ENSG00000176155_84 (sequence is synthesized)
gggagacaggagacatcaatcaacatatgtaagatgaacagtggttccatctgcagaggcgggacaactccaagtggggaggaggcttccgggtcatagatgcttctcaggcagcatgaa

SEQ ID NO: 610695 - DNA, 120 bp, Artificial Sequence
  ENSG00000176155_85 (sequence is synthesized)
agatgggctctggtcgggagccggcccaggaggaaggccatgcgtctctgggtctcttctcgcccaagtgaggcctgtgtgcccgccttccgtgatgcagcctccgagctcccagctcct

SEQ ID NO: 610696 - DNA, 120 bp, Artificial Sequence
  ENSG00000176155_86 (sequence is synthesized)
ttgaattttcatttttcttctccctcccaatcctgataaaacagcagtatgtacccctaatgcctcagtgtcttctaattatcacctcattttgaactcatttttatcattcaaaggtta

SEQ ID NO: 610697 - DNA, 120 bp, Artificial Sequence
  ENSG00000176155_87 (sequence is synthesized)
tctgggggattctaccttttctgctcattccaggctggtctttgctttcatctcacttgctccttccataaatatttgtttcttttcagggtaaaggatttagaggataaacttcactct

SEQ ID NO: 610698 - DNA, 120 bp, Artificial Sequence
  ENSG00000176155_88 (sequence is synthesized)
ccggggcctcagggcgttctcctgcgtttactcttctgaaaggcaggagaagggtggggtgtggagatacccagaggctgtccagctctcaggccactgcctggccctggctctcaccgt

SEQ ID NO: 610699 - DNA, 120 bp, Artificial Sequence
  ENSG00000176155_89 (sequence is synthesized)
ctcagcctcctagtggcctcctcggcacccaccagcctgcagccacctgtgcttggggttcttggcacctccccttcctgtgggctgagctcagatgggctctggtcgggagccggccca

SEQ ID NO: 610700 - DNA, 120 bp, Artificial Sequence
  ENSG00000176155_90 (sequence is synthesized)
aagtgaggcctgtgtgcccgccttccgtgatgcagcctccgccctaggaagccacgtaggtgtgcccaggggcacccagagagcccggagcagcctggagaatgagccaccagaggccaa

SEQ ID NO: 610701 - DNA, 120 bp, Artificial Sequence
  ENSG00000176155_91 (sequence is synthesized)
cttggtcaagagctgagctgaggctcaggtgcaggagaagaaactcacagggtggccagaaagctggggaccagctccgtcctctttgtgctcagagttctcatgcccccaggctgagac

SEQ ID NO: 610702 - DNA, 120 bp, Artificial Sequence
  ENSG00000176155_92 (sequence is synthesized)
gctgagacgggagtgagggccgcaccttccctgcaataggacaggctatgtcctccctgagattccaccagcttcaaacctccaagccgggcttggtggcccacacctgtaatcccagca

SEQ ID NO: 610703 - DNA, 120 bp, Artificial Sequence
  ENSG00000176155_93 (sequence is synthesized)
aggcaaaggccaagaccacaggagcctcccgggcaggctcccaaatgctgctgaggcgaccctgctgactgaaggcctccctgagcacagggcccattaaaaccaggttcctccctgggg

SEQ ID NO: 610704 - DNA, 120 bp, Artificial Sequence
  ENSG00000176155_94 (sequence is synthesized)
ctcaaatcagtctccccaagcattcggggatcagagtttttaaggataacttagtgtgtagggggccagtgagttggagatgaaagcgtagggagtcgaaggtgtccttttgcgccgagt

SEQ ID NO: 610705 - DNA, 120 bp, Artificial Sequence
  ENSG00000176155_95 (sequence is synthesized)
ccacagacacacccggcctgccccgccccacgctgcccctgccctggagaaagcgaggctccttcctttcctggagacgccggccacagttcttcagtgaaacgcttcactctctggtca

SEQ ID NO: 610706 - DNA, 120 bp, Artificial Sequence
  ENSG00000176155_96 (sequence is synthesized)
tagagagctcccagctcctccagcagccgacaggaggcccgtcaagatgcaggcaggcattgccaccccagggatgaagacagcagcccaggcaaaggccaagaccacaggagcctcccg

SEQ ID NO: 610707 - DNA, 120 bp, Artificial Sequence
  ENSG00000176160_0 (sequence is synthesized)
gtgcgccaacggtccctggtacgcggcggatgggcgccggcaggagcgggcagggcgaggcgaaggccggggagggatcgagaacggtgtgggagagctaggctcggggggcgaggcccc

SEQ ID NO: 610708 - DNA, 120 bp, Artificial Sequence
  ENSG00000176160_1 (sequence is synthesized)
ggcccggcggggcgatggaggcgctgctctccacccccatcaaccccaacaacttccccgccaagctgtggcgcctggtgaacagcccgcgctaccgctccatccgctgggacggccgcg

SEQ ID NO: 610709 - DNA, 120 bp, Artificial Sequence
  ENSG00000176160_2 (sequence is synthesized)
gcgaggggctgcttatcgatcagccgctcttcgaggccgagctgctcagcccgcccgggccggggggcggtggcgggactgcgggggccggggccgagcccgagctcttcaaaaccacca

SEQ ID NO: 610710 - DNA, 120 bp, Artificial Sequence
  ENSG00000176160_3 (sequence is synthesized)
gcttcaccagcttcatccgccagctcaacctctacggcttccgcaaggtggtgctgggcgggccggggggcggcaaaccggcaggcaatgggccgctccatcacttccacaacccgcact

SEQ ID NO: 610711 - DNA, 120 bp, Artificial Sequence
  ENSG00000176160_4 (sequence is synthesized)
tccgccgcgaccagccacagctgctcgtgcacctcaagcgcctcaccagcgccaacaaggccaagctggcggccggcctggaggtgccctgccgcccgcccaaccgcttccagcggctgc

SEQ ID NO: 610712 - DNA, 120 bp, Artificial Sequence
  ENSG00000176160_5 (sequence is synthesized)
tcatcacctcggcctccgccgccaccgcgccactgcagcaccagcagccgccgccgcccgcggggccccggcccgagccgcacggaccagtggctgtaggacaatttcaccggtcatttc

SEQ ID NO: 610713 - DNA, 120 bp, Artificial Sequence
  ENSG00000176160_6 (sequence is synthesized)
gtcgagatagtttgtctccttactcctgtgtatcaactccatcccacgaccacagtacttaccctctgaaaggtttagatcggaccccagttcctcatagaatatggcagaactcccttg

SEQ ID NO: 610714 - DNA, 120 bp, Artificial Sequence
  ENSG00000176160_7 (sequence is synthesized)
gaatgcatcctggacaagtggagacatctcccacattttcagataaaggggttccgtttcctgtactccagaggtttccaactgaggttacctatacactgcagcccagcaccacatctg

SEQ ID NO: 610715 - DNA, 120 bp, Artificial Sequence
  ENSG00000176160_8 (sequence is synthesized)
tacatgttcaacaaggtcctcaaacaatggtcagctcctcccaaaaatacagtaactacacaccctcagcacagtactcgcaagcctactatccaacagctgtgctacagtgctgttctc

SEQ ID NO: 610716 - DNA, 120 bp, Artificial Sequence
  ENSG00000176160_9 (sequence is synthesized)
ctacccacatggatgctctaagtagttgtgtcactcccactgcctcttcctatgcacactgcaactacttccagaatccttcaatgcagtcctcctatccagttgaatttttgccttcca

SEQ ID NO: 610717 - DNA, 120 bp, Artificial Sequence
  ENSG00000176160_10 (sequence is synthesized)
attggccctgcagtactactgatgaaaatacaaagacagaagtaaacctagaggctgtctttcagatagttgatgagttgcattcctcccctaaattggagatggtaaaggtggagcctg

SEQ ID NO: 610718 - DNA, 120 bp, Artificial Sequence
  ENSG00000176160_11 (sequence is synthesized)
ttgagaatcagtgcccaacatctccgtcttacagaggccaacacattttagctaattctaacaacagcaatccatgttctgcaagtcaggctagccagctggagccacttactcctgtag

SEQ ID NO: 610719 - DNA, 120 bp, Artificial Sequence
  ENSG00000176160_12 (sequence is synthesized)
gctcagatattatgtcttttgtggttggaacagaacaagcagttgcctgctctctaccacagtcacctgagtacatctataccatccacacagctcagcctgttgaaaatagcacaatac

SEQ ID NO: 610720 - DNA, 120 bp, Artificial Sequence
  ENSG00000176160_13 (sequence is synthesized)
aggaatctgcagccatccagcaagctcatgtcaaactgaaggagcacctaaatcataatccatctccatcttcagtagtatttgtgcaggaagggccaccattcagcacacaccaggtgg

SEQ ID NO: 610721 - DNA, 120 bp, Artificial Sequence
  ENSG00000176160_14 (sequence is synthesized)
atgccaacataaaatgccagaccagttcacgtgagaatatcttgccgtcagaacagatgggattcctcatttcagaaatggggcctgctagcaagcctagtgaagacacaggtttagcca

SEQ ID NO: 610722 - DNA, 120 bp, Artificial Sequence
  ENSG00000176160_15 (sequence is synthesized)
ctccagccagatacagagagcacagaagcaactcacaacaaggaaagtcccctgatcttcatctgctggtggacgtggcctgcaagcaggagcgctttccaaaggaggaagaattaaaag

SEQ ID NO: 610723 - DNA, 120 bp, Artificial Sequence
  ENSG00000176160_16 (sequence is synthesized)
agtgaggaatggatgacaaatgtgacattgtgcactagctgtagctggaggcagactagccttgcacatgacaaactgttgggattttttcagttctgttaaggaaaaaaaagtattttt

SEQ ID NO: 610724 - DNA, 120 bp, Artificial Sequence
  ENSG00000176160_17 (sequence is synthesized)
gaatttgtatgtactacagtggttcagttcagattatctgccttgacaaactactgaacatctagcagccacgttttttggctgcccagatcccttttaaatgaaaagttctgaccttct

SEQ ID NO: 610725 - DNA, 120 bp, Artificial Sequence
  ENSG00000176160_18 (sequence is synthesized)
gttatagtcaaggagcatctaaaaactgctccatctatggtactaagaataatctgtgtgtgtgctgatttgttgtcttgccactcaaactgtagtcagcacaactttagtggggaattc

SEQ ID NO: 610726 - DNA, 120 bp, Artificial Sequence
  ENSG00000176160_19 (sequence is synthesized)
agtctctctgattcaagtcacagtgtgatccttttagaggagattgtgtgagaaacaaaggcatgtgaggtcaccagcatcacaggtctaaatgcatcaggaattccagggaagaaactc

SEQ ID NO: 610727 - DNA, 120 bp, Artificial Sequence
  ENSG00000176160_20 (sequence is synthesized)
tggagaagagctaattttctaagtgattaaccaggaaattctcttacttcctaacccagcattctgttttaagagcaaggcatccggacttggaccatctatcacacttaacagcccctg

SEQ ID NO: 610728 - DNA, 120 bp, Artificial Sequence
  ENSG00000176160_21 (sequence is synthesized)
cacttaacagcccctgattcttttatattaatggaagcattcttctattttcatatctttctttaattttaatgatacattatcataaatggtaaaaagattttattaatatatcactta

SEQ ID NO: 610729 - DNA, 120 bp, Artificial Sequence
  ENSG00000176160_22 (sequence is synthesized)
taaagaaagtatttaacttgtttaatataattgtatttataaatgctgatagatttaaaggttttaaagttttatatttttattattgcaggatagaaggataaaggatgcatgtgtagt

SEQ ID NO: 610730 - DNA, 120 bp, Artificial Sequence
  ENSG00000176160_23 (sequence is synthesized)
aaaggaaaatgtacaatgtgtgaacaaaaacattaagagatttaatatactattttcttattttagatttttacattcaataagtataaattctcatctatataaggtattgtgtgcaaa

SEQ ID NO: 610731 - DNA, 120 bp, Artificial Sequence
  ENSG00000176160_24 (sequence is synthesized)
tgtgcaaatttgggaaaaaactgattagcagccatttagtagaagctatgcctctgatttttaaagaatggtttcaatctggtttaagcttctgagagaattttggataatgggatagat

SEQ ID NO: 610732 - DNA, 120 bp, Artificial Sequence
  ENSG00000176160_25 (sequence is synthesized)
ggtaacatttttttcttatccctgttacaggattctagatttgtgcagtaggattgtgggactgtgttttaggagagaaggatgtcttggatgtccagtttctgtggttaatcccttact

SEQ ID NO: 610733 - DNA, 120 bp, Artificial Sequence
  ENSG00000176160_26 (sequence is synthesized)
tgcttatccagtgacagcaagaaactttctgatttaaagtctttcaattgaccaaaactttcttattggattctgtttcagttctcctattaagcactgcagaaacgaaaggaaagccta

SEQ ID NO: 610734 - DNA, 120 bp, Artificial Sequence
  ENSG00000176160_27 (sequence is synthesized)
ggaatatgaaactaattaaaaaggcacttggtgatatgacatagtactatgctagccgttgtggatgtaacagttcatttcttatactgcattgtgccttcccaatgatgtcaaacccta

SEQ ID NO: 610735 - DNA, 120 bp, Artificial Sequence
  ENSG00000176160_28 (sequence is synthesized)
gaaatattacagagatctacttttctggaaaagggtgagctctgtattgatctgcagtgactctgtttagatattaaagtaggttctgaaaagcgacctgtgtggtccctctgattagac

SEQ ID NO: 610736 - DNA, 120 bp, Artificial Sequence
  ENSG00000176160_29 (sequence is synthesized)
tagttaatgtctatgtgatgggcatttatttatctttattagcaaggtttaaaagagcaaattatcaagacacctatatcttttggccagactatataatattttgtcagagtatgtgaa

SEQ ID NO: 610737 - DNA, 120 bp, Artificial Sequence
  ENSG00000176160_30 (sequence is synthesized)
gaggagacccaatttccaaatgaaggaactttgctttttctctgtcatgttgaagagctaatatactgtgtagattttcccctaaatatggctttcttagctttatagatgttgagataa

SEQ ID NO: 610738 - DNA, 120 bp, Artificial Sequence
  ENSG00000176160_31 (sequence is synthesized)
tatcttttgaggaacacatgtcaagcaggaaccttggcatagatttggtttcagttgttttaaggcttaattaatgaaatgccttaatcagctttccaaacatttttatatatgaataca

SEQ ID NO: 610739 - DNA, 120 bp, Artificial Sequence
  ENSG00000176160_32 (sequence is synthesized)
gcagaccaaggagctggatctcctgctatccttacacgccttgtatctatcaactaaagctgtcattaatgacttgggcaaaatggcaagaggtataataaagtcttcctgtgaattagc

SEQ ID NO: 610740 - DNA, 120 bp, Artificial Sequence
  ENSG00000176160_33 (sequence is synthesized)
cagtagggtctgacacaactagtcaactaacaaggttcctgactagtacctcagtatttcagcaccttaagcactgataaatttcaatcagtcaacaataaagtgagtgttccaactaga

SEQ ID NO: 610741 - DNA, 120 bp, Artificial Sequence
  ENSG00000176165_0 (sequence is synthesized)
aattgtggctatagccgcctcgatcgctgtctccccagcctcgccgcggccgctccgggacgcgcccgcccgccgcccggctctccccccctttgggctgctgctgctgctgctgtgact

SEQ ID NO: 610742 - DNA, 87 bp, Artificial Sequence
  ENSG00000176165_1 (sequence is synthesized)
ggaggaagcccaagaagtacagttgggagcgagggagcttcacccccggggcggtggttgtttcttttttctttctttcttttttct

SEQ ID NO: 610743 - DNA, 120 bp, Artificial Sequence
  ENSG00000176165_2 (sequence is synthesized)
ttcttttcctttttttttttttttctaattcctgaggggtggttgctgcttttgctacatgacttgccagcgcccgagcctgcggtccaactgcgctgctgccggagcgctcagtgccgc

SEQ ID NO: 610744 - DNA, 120 bp, Artificial Sequence
  ENSG00000176165_3 (sequence is synthesized)
ccccgcgccccgttcggcacccaccggtcgccgccgcccgccgcgccgctgtcccgctcccgcgccgccgccgccgtttccccccgacgactgggtgatgctggacatgggagataggaa

SEQ ID NO: 610745 - DNA, 120 bp, Artificial Sequence
  ENSG00000176165_4 (sequence is synthesized)
cgacgactgggtgatgctggacatgggagataggaaagaggtgaaaatgatccccaagtcctcgttcagcatcaacagcctggtgcccgaggcggtccagaacgacaaccaccacgcgag

SEQ ID NO: 610746 - DNA, 80 bp, Artificial Sequence
  ENSG00000176165_5 (sequence is synthesized)
ccaccaccaccaccaccatcaccaccacccgccgccgcccgccccgcaaccgccgccgccgccgcagcagcagcagccgc

SEQ ID NO: 610747 - DNA, 80 bp, Artificial Sequence
  ENSG00000176165_6 (sequence is synthesized)
cggccgccgacgacgacaagggcccccagcagctgctgctcccgccgccgccaccgccaccaccggccgccgccctggac

SEQ ID NO: 610748 - DNA, 80 bp, Artificial Sequence
  ENSG00000176165_7 (sequence is synthesized)
gcggcgggccgggggagctggcgcccgtcgggccggacgagaaggagaagggcgccggcgccgggggggaggagaagaag

SEQ ID NO: 610749 - DNA, 120 bp, Artificial Sequence
  ENSG00000176165_8 (sequence is synthesized)
gaagggggcgggcgagggcggcaaggacggggaggggggcaaggagggcgagaagaagaacggcaagtacgagaagccgccgttcagctacaacgcgctcatcatgatggccatccggca

SEQ ID NO: 610750 - DNA, 120 bp, Artificial Sequence
  ENSG00000176165_9 (sequence is synthesized)
gagccccgagaagcggctcacgctcaacggcatctacgagttcatcatgaagaacttcccttactaccgcgagaacaagcagggctggcagaactccatccgccacaatctgtccctcaa

SEQ ID NO: 610751 - DNA, 120 bp, Artificial Sequence
  ENSG00000176165_10 (sequence is synthesized)
caagtgcttcgtgaaggtgccgcgccactacgacgacccgggcaagggcaactactggatgctggacccgtcgagcgacgacgtgttcatcggcggcaccacgggcaagctgcggcgccg

SEQ ID NO: 610752 - DNA, 120 bp, Artificial Sequence
  ENSG00000176165_11 (sequence is synthesized)
ctccaccacctcgcgggccaagctggccttcaagcgcggtgcgcgcctcacctccaccggcctcaccttcatggaccgcgccggctccctctactggcccatgtcgcccttcctgtccct

SEQ ID NO: 610753 - DNA, 120 bp, Artificial Sequence
  ENSG00000176165_12 (sequence is synthesized)
gcaccacccccgcgccagcagcactttgagttacaacggcaccacgtcggcctaccccagccaccccatgccctacagctccgtgttgactcagaactcgctgggcaacaaccactcctt

SEQ ID NO: 610754 - DNA, 120 bp, Artificial Sequence
  ENSG00000176165_13 (sequence is synthesized)
ctccaccgccaacggcctgagcgtggaccggctggtcaacggggagatcccgtacgccacgcaccacctcacggccgccgcgctagccgcctcggtgccctgcggcctgtcggtgccctg

SEQ ID NO: 610755 - DNA, 120 bp, Artificial Sequence
  ENSG00000176165_14 (sequence is synthesized)
actccctcaacccctgctccgtcaacctgctcgcgggccagaccagttactttttcccccacgtcccgcacccgtcaatgacttcgcagagcagcacgtccatgagcgccagggccgcgt

SEQ ID NO: 610756 - DNA, 120 bp, Artificial Sequence
  ENSG00000176165_15 (sequence is synthesized)
cctcctccacgtcgccgcaggccccctcgaccctgccctgtgagtctttaagaccctctttgccaagttttacgacgggactgtctgggggactgtctgattatttcacacatcaaaatc

SEQ ID NO: 610757 - DNA, 120 bp, Artificial Sequence
  ENSG00000176165_16 (sequence is synthesized)
aggggtcttcttccaaccctttaatacattaacatccctgggaccagactgtaagtgaacgttttacacacatttgcattgtaaatgataattaaaaaaataagtccaggtattttttat

SEQ ID NO: 610758 - DNA, 120 bp, Artificial Sequence
  ENSG00000176165_17 (sequence is synthesized)
taagcccccccctcccatttctgtacgtttgttcagtctctagggttgtttattattctaacaaggtgtggagtgtcagcgaggtgcaatgtggggagaatacattgtagaatataaggt

SEQ ID NO: 610759 - DNA, 120 bp, Artificial Sequence
  ENSG00000176165_18 (sequence is synthesized)
ttggaagtcaaattatagtagaatgtgtatctaaatagtgactgctttgccatttcattcaaacctgacaagtctatctctaagagccgccagatttccatgtgtgcagtattataagtt

SEQ ID NO: 610760 - DNA, 120 bp, Artificial Sequence
  ENSG00000176165_19 (sequence is synthesized)
atcatggaactatatggtggacgcagaccttgagaacaacctaaattatggggagaattttaaaatgttaaactgtaatttgtatttaaaaagcattcgtagtaaaggtgcccaagaaat

SEQ ID NO: 610761 - DNA, 120 bp, Artificial Sequence
  ENSG00000176165_20 (sequence is synthesized)
tattttggccatttattgttttgtccttttctttaaagaactgtttttttttcttttgtttacttttagaccaaagattgggttctagaaaatgcacttggtatactaagtattaaaaca

SEQ ID NO: 610762 - DNA, 120 bp, Artificial Sequence
  ENSG00000176165_21 (sequence is synthesized)
aacaaaaaggaaagttgtttcagttggcaacactgcccattcaattgaatcagaaggggacaaaattaacgattgccttcagtttgtgttgtgtatattttgatgtatgtggtcactaac

SEQ ID NO: 610763 - DNA, 120 bp, Artificial Sequence
  ENSG00000176165_22 (sequence is synthesized)
aggtcacttttattttttctaaatgtagtgaaatgttaatacctattgtacttataggtaaaccttgcaaatatgtaacctgtgttgcgcaaatgccgcataaatttgagtgattgttaa

SEQ ID NO: 610764 - DNA, 120 bp, Artificial Sequence
  ENSG00000176165_23 (sequence is synthesized)
tgttgtcttaaaatttcttgattgtgatactgtggtcatatgcccgtgtttgtcacttacaaaaatgtttactatgaacacacagaaataaaaaataggctaaattcatatatatcttga

SEQ ID NO: 610765 - DNA, 120 bp, Artificial Sequence
  ENSG00000176165_24 (sequence is synthesized)
tacttttgtctcttttattaagtagagctaattttttaaagaccaatcaacttatagggaattcaaaggctttttcagccaaactaaaatttaaactgctcctttaatttgaactgactc

SEQ ID NO: 610766 - DNA, 120 bp, Artificial Sequence
  ENSG00000176165_25 (sequence is synthesized)
taaaaatgaaaatagtatttttccctttgtgaacaaattttacaaggagcagcctatttaataaacactagctttaaacaaagtataggcttttcagctgatacctgtaagtttctgtgg

SEQ ID NO: 610767 - DNA, 120 bp, Artificial Sequence
  ENSG00000176165_26 (sequence is synthesized)
atatacagcaaaaagagatataatttaattttctgtgcatagctctttaccctgtgtttatttccaaatccattaatagaatgccatttatatattttgtttcaggtatattgttaatag

SEQ ID NO: 610768 - DNA, 120 bp, Artificial Sequence
  ENSG00000176165_27 (sequence is synthesized)
agcttggcaaattataaataaatatatgtatatggttagatagaagtgactataatgcacacatatgtaatatatatagacacacagagcccttcagttcaggtacaatttgcgctatga

SEQ ID NO: 610769 - DNA, 120 bp, Artificial Sequence
  ENSG00000176165_28 (sequence is synthesized)
atgctgcaaacatttttgtttaaatatttgtatttatactttctaagtcagcatttatttttgtggctgtttacccacaatgaaagagttctaataaagatgtgctgaagttgcaatata

SEQ ID NO: 610770 - DNA, 120 bp, Artificial Sequence
  ENSG00000176165_29 (sequence is synthesized)
atcgctcgcagctacccgcttccaattcggattagaagctgaggctggagcggcgaggagaaaacgacatcgagtcaccccgcgcgtgagcgacgctctggagcaggagagaaggaaaag

SEQ ID NO: 610771 - DNA, 120 bp, Artificial Sequence
  ENSG00000176165_30 (sequence is synthesized)
aaacgtaccgggccgtccacctcagagggagccctgtgtgccattataagtggtgggtgatcgctcgcagctacccgcttccaattcggattagaagctgaggctggagcggcgaggaga

SEQ ID NO: 610772 - DNA, 120 bp, Artificial Sequence
  ENSG00000176165_31 (sequence is synthesized)
acataggtaaagatacatacatacagtggaaggacatttgagggtgatcgctcgcagctacccgcttccaattcggattagaagctgaggctggagcggcgaggagaaaacgacatcgag

SEQ ID NO: 610773 - DNA, 120 bp, Artificial Sequence
  ENSG00000176165_32 (sequence is synthesized)
atttatgcttctccacctccctcttctctggggctacatcctccgtaaaatgtgggtgatcgctcgcagctacccgcttccaattcggattagaagctgaggctggagcggcgaggagaa

SEQ ID NO: 610774 - DNA, 120 bp, Artificial Sequence
  ENSG00000176170_0 (sequence is synthesized)
gaaaagtttgaggccggagggagcgaggccggggagtccgctccagcggggcgctccagtccctcagacgtgggctgagcttgggacgagctgcgttccgccccaggccactgtagggaa

SEQ ID NO: 610775 - DNA, 120 bp, Artificial Sequence
  ENSG00000176170_1 (sequence is synthesized)
cggcggtggcgcctccccagcaaaccggaccgactgggtagggccgcccaccctgccttcgcgccgctcgtggctcctgtgcggcccgccctcgcggggccccgggaactgggccacttg

SEQ ID NO: 610776 - DNA, 120 bp, Artificial Sequence
  ENSG00000176170_2 (sequence is synthesized)
tcgcttgggcgagagcaggcggcagctggtggcccggttcgggcttggctttggcgcgacccgggagcggctcccacgagcgccgcgcgcgtcgcaacggagcggggccctgagaagcgc

SEQ ID NO: 610777 - DNA, 120 bp, Artificial Sequence
  ENSG00000176170_3 (sequence is synthesized)
gcgccgcggctcccaccgctctggagctccgggcaggggacacggcaacctggatggctggggcagggatcctctcccagaacttcgtgcccagcaatgtccgctcaagttctgggattt

SEQ ID NO: 610778 - DNA, 120 bp, Artificial Sequence
  ENSG00000176170_4 (sequence is synthesized)
ttacgcagctggactcccctccccctggcagccccgaggggtccagccgccgcagggaatgacgccggtgctcctgcagccacggctccgggcggggaaggcgagccccacagccggccc

SEQ ID NO: 610779 - DNA, 120 bp, Artificial Sequence
  ENSG00000176170_5 (sequence is synthesized)
tgcgacgcccgcctgggcagcaccgataaggagctgaaggcaggagccgccgccacgggcagcgcccccacagcgccagggaccccctggcagcgggagccgcgggtcgaggttatggat

SEQ ID NO: 610780 - DNA, 120 bp, Artificial Sequence
  ENSG00000176170_6 (sequence is synthesized)
ccagcgggcggcccccggggcgtgctcccgcggccctgccgcgtgctggtgctgctgaacccgcgcggcggcaagggcaaggccttgcagctcttccggagtcacgtgcagccccttttg

SEQ ID NO: 610781 - DNA, 120 bp, Artificial Sequence
  ENSG00000176170_7 (sequence is synthesized)
gctgaggctgaaatctccttcacgctgatgctcactgagcggcggaaccacgcgcgggagctggtgcggtcggaggagctgggccgctgggacgctctggtggtcatgtctggagacggg

SEQ ID NO: 610782 - DNA, 120 bp, Artificial Sequence
  ENSG00000176170_8 (sequence is synthesized)
gctggcagcttccttgaaccattatgctggctatgagcaggtcaccaatgaagacctcctgaccaactgcacgctattgctgtgccgccggctgctgtcacccatgaacctgctgtctct

SEQ ID NO: 610783 - DNA, 120 bp, Artificial Sequence
  ENSG00000176170_9 (sequence is synthesized)
gcacacggcttcggggctgcgcctcttctctgtgctcagcctggcctggggcttcattgctgatgtggacctagagagtgagaagtatcggcgtctgggggagatgcgcttcactctggg

SEQ ID NO: 610784 - DNA, 120 bp, Artificial Sequence
  ENSG00000176170_10 (sequence is synthesized)
caccttcctgcgtctggcagccctgcgcacctaccgcggccgactggcctacctccctgtaggaagagtgggttccaagacacctgcctcccccgttgtggtccagcagggcccggtaga

SEQ ID NO: 610785 - DNA, 120 bp, Artificial Sequence
  ENSG00000176170_11 (sequence is synthesized)
tgcacaccttgtgccactggaggagccagtgccctctcactggacagtggtgcccgacgaggactttgtgctagtcctggcactgctgcactcgcacctgggcagtgagatgtttgctgc

SEQ ID NO: 610786 - DNA, 120 bp, Artificial Sequence
  ENSG00000176170_12 (sequence is synthesized)
acccatgggccgctgtgcagctggcgtcatgcatctgttctacgtgcgggcgggagtgtctcgtgccatgctgctgcgcctcttcctggccatggagaagggcaggcatatggagtatga

SEQ ID NO: 610787 - DNA, 120 bp, Artificial Sequence
  ENSG00000176170_13 (sequence is synthesized)
atgcccctacttggtatatgtgcccgtggtcgccttccgcttggagcccaaggatgggaaaggtgtgtttgcagtggatggggaattgatggttagcgaggccgtgcagggccaggtgca

SEQ ID NO: 610788 - DNA, 120 bp, Artificial Sequence
  ENSG00000176170_14 (sequence is synthesized)
cccaaactacttctggatggtcagcggttgcgtggagcccccgcccagctggaagccccagcagatgccaccgccagaagagcccttatgacccctgggccgcgctgtgccttagtgtct

SEQ ID NO: 610789 - DNA, 120 bp, Artificial Sequence
  ENSG00000176170_15 (sequence is synthesized)
acttgcaggacccttcctccttccctagggctgcagggcctgtccacagctcctgtgggggtggaggagactcctctggagaagggtgagaaggtggaggctatgctttggggggacagg

SEQ ID NO: 610790 - DNA, 120 bp, Artificial Sequence
  ENSG00000176170_16 (sequence is synthesized)
ccagaatgaagtcctgggtcaggagcccagctggctgggcccagctgcctatgtaaggccttctagtttgttctgagacccccaccccacgaaccaaatccaaataaagtgacattccca

SEQ ID NO: 610791 - DNA, 120 bp, Artificial Sequence
  ENSG00000176170_17 (sequence is synthesized)
agtcacacggcgggggcgccctcggaggcaccggacctcagctctctggacttcccgggaacctggctccccgcgcgtggtcccgggatttagtcgggcgctccccacctctggcagctg

SEQ ID NO: 610792 - DNA, 120 bp, Artificial Sequence
  ENSG00000176170_18 (sequence is synthesized)
aatgcagctctgccttcctgctccctgtgcagaggtgccggctcctgcttcctggttcccagctttccttttgggaactgcctgaggtggtttgacacacagctgttgggcttctcttcc

SEQ ID NO: 610793 - DNA, 120 bp, Artificial Sequence
  ENSG00000176170_19 (sequence is synthesized)
cttgaggtctctgaaccagggcacccatgcagggagagggccctctgaaggtgaaggcagagacggggacgacgcagcagcaagacacggatgaccaaaggctgtcggcaaaccaccagg

SEQ ID NO: 610794 - DNA, 120 bp, Artificial Sequence
  ENSG00000176170_20 (sequence is synthesized)
acacaggcctgggacagagtcacagcctcagaaggaaccaaccctgccaacaccgtgatcgtagacttcccaacctccaaaactgtgagacagtcaatttctgttgtctacgccaccagg

SEQ ID NO: 610795 - DNA, 120 bp, Artificial Sequence
  ENSG00000176170_21 (sequence is synthesized)
acactaatacaaatgcctatagatgctgggcaggcagctgagacaaatggagtgggtagggctgcagctcgccaccttgagagggctctgaagagaatcaccctgaattgcagccacagt

SEQ ID NO: 610796 - DNA, 89 bp, Artificial Sequence
  ENSG00000176170_22 (sequence is synthesized)
gagggctctgaagagaatcaccctgaattgcagccacagtcagcagcctggagatggagttgacgatctcagctcaccacaacctctgc

SEQ ID NO: 610797 - DNA, 120 bp, Artificial Sequence
  ENSG00000176170_23 (sequence is synthesized)
tacaggagtgagccactgcgcccggcctgctgcttcctcctcctcagggagacgccacagctctgcggcaagcaatccaccaggcaccagatccccagatacctgcccttcagggagaaa

SEQ ID NO: 610798 - DNA, 120 bp, Artificial Sequence
  ENSG00000176170_24 (sequence is synthesized)
ttcagggagaaatagcctgggatacagagaggcccagaggggagctctggctggacttggcttctcagcgtggggtctgggttcacaggtccagccgccgcagggaatgacgccggtgct

SEQ ID NO: 610799 - DNA, 120 bp, Artificial Sequence
  ENSG00000176170_25 (sequence is synthesized)
accgcactgcgcggctaggcctggggcttggcgcggtgcgtcccaggctgaggccacgtgtgcttcaacaggtggtgaacgggctcatggagcggcctgactgggagaccgccatccaga

SEQ ID NO: 610800 - DNA, 120 bp, Artificial Sequence
  ENSG00000176170_26 (sequence is synthesized)
agcccctgtgtagcctcccagcaggctctggcaacgcgctggcagcttccttgaaccattatgctgggtgagagcccagggccagagtaggcctgtttcccgtcagtgctcctctaccgc

SEQ ID NO: 610801 - DNA, 120 bp, Artificial Sequence
  ENSG00000176170_27 (sequence is synthesized)
acagccgccgctcgcgtccccgcagcgcatgaccgcggcactgcggctgcagggctctctcccccgcccgcgccggattcctggagcaagggggtggggggctcggaggtgcaggaccca

SEQ ID NO: 610802 - DNA, 120 bp, Artificial Sequence
  ENSG00000176170_28 (sequence is synthesized)
tcattccgacacgcgccgcgacgccaggagtcggggatgacgcccctgctccctcccctcgttcctgtttctcggagtttttcgacccctgagcgcgtcgctgagtcaccttcccggaac

SEQ ID NO: 610803 - DNA, 120 bp, Artificial Sequence
  ENSG00000176170_29 (sequence is synthesized)
gaacgcgctcgggacgctctggacccagcggggactgcccgggggccgcgcaaggcgaaggcgcacccgccgatacgcgcgcggagctgcggccccagggaccccgcgtcccagccagtg

SEQ ID NO: 610804 - DNA, 120 bp, Artificial Sequence
  ENSG00000176170_30 (sequence is synthesized)
ccgacccgcccggggactctcgggtcccgcccgtctgaccccccaagtgttgggaaacggggccgagctgcctgggtcctccggaagagaagacaccgcggaggcgtgccggagttcagg

SEQ ID NO: 610805 - DNA, 120 bp, Artificial Sequence
  ENSG00000176170_31 (sequence is synthesized)
gggctgtggacgatcgggagaaacattatccctcacgaggccagaagccggccgaatctgagccaaggaagggggtggcaggggcgccgcgtccccaccccaggtctcccagcaaaggcc

SEQ ID NO: 610806 - DNA, 120 bp, Artificial Sequence
  ENSG00000176170_32 (sequence is synthesized)
gctcctctggccagggtcaattaccggggtgtttcgggcaccaagttcccacactagtgccccattgttacccgtggccccctagtggtcggttgcggacgtggcctctttggttttgtt

SEQ ID NO: 610807 - DNA, 120 bp, Artificial Sequence
  ENSG00000176171_0 (sequence is synthesized)
gccccgccctgccctgtgagttcctccggccgggctgcggggctccgctcagtccgggagcgcagctgggccgcggcgctccgacctccgctttcccaccgcccgcagctgaagcacatc

SEQ ID NO: 610808 - DNA, 120 bp, Artificial Sequence
  ENSG00000176171_1 (sequence is synthesized)
ccgacctccgctttcccaccgcccgcagctgaagcacatcccgcagcccggcgcggactccgatcgccgcagttgccctctggcgccatgtcgcagaacggagcgcccgggatgcaggag

SEQ ID NO: 610809 - DNA, 120 bp, Artificial Sequence
  ENSG00000176171_2 (sequence is synthesized)
gagagcctgcagggctcctgggtagaactgcacttcagcaataatgggaacgggggcagcgttccagcctcggtttctatttataatggagacatggaaaaaatactgctggacgcacag

SEQ ID NO: 610810 - DNA, 120 bp, Artificial Sequence
  ENSG00000176171_3 (sequence is synthesized)
catgagtctggacggagtagctccaagagctctcactgtgacagcccacctcgctcgcagacaccacaagataccaacagagcttctgaaacagatacccatagcattggagagaaaaac

SEQ ID NO: 610811 - DNA, 120 bp, Artificial Sequence
  ENSG00000176171_4 (sequence is synthesized)
agctcacagtctgaggaagatgatattgaaagaaggaaagaagttgaaagcatcttgaagaaaaactcagattggatatgggattggtcaagtcggccggaaaatattccccccaaggag

SEQ ID NO: 610812 - DNA, 120 bp, Artificial Sequence
  ENSG00000176171_5 (sequence is synthesized)
ttcctctttaaacacccgaagcgcacggccaccctcagcatgaggaacacgagcgtcatgaagaaagggggcatattctctgcagaatttctgaaagttttccttccatctctgctgctc

SEQ ID NO: 610813 - DNA, 120 bp, Artificial Sequence
  ENSG00000176171_6 (sequence is synthesized)
tctcatttgctggccatcggattggggatctatattggaaggcgtctgacaacctccaccagcaccttttgatgaagaactggagtctgacttggttcgttagtggattacttctgagct

SEQ ID NO: 610814 - DNA, 120 bp, Artificial Sequence
  ENSG00000176171_7 (sequence is synthesized)
tgcaacatagctcactgaagagctgttagatcctggggtggccacgtcacttgtgtttatttgttctgtaaatgctgcgttcctaatttagtaaaataaaagaatagacactaaaatcat

SEQ ID NO: 610815 - DNA, 120 bp, Artificial Sequence
  ENSG00000176171_8 (sequence is synthesized)
gttgatctataattacacctatgggatcaataagcatgtcagactgattaatgtctactgtgaaaatttggtagtaaattttcatttgatattagatataaatatctgaatataaataat

SEQ ID NO: 610816 - DNA, 120 bp, Artificial Sequence
  ENSG00000176171_9 (sequence is synthesized)
tttaatatactagtcatgatgtgtgttgtattttaaaaattatctgcaaccttaattcagctgaagtactttatatttcaaaagaatgaataacattgataataaaatcgctactttaag

SEQ ID NO: 610817 - DNA, 120 bp, Artificial Sequence
  ENSG00000176171_10 (sequence is synthesized)
gggtttgtccaaaataaatattgtggccttatatatcacactattgtagaaagtattatttaatttaaatggatgcaggttgtctactaaagaaagattatatataactatgctaattgt

SEQ ID NO: 610818 - DNA, 120 bp, Artificial Sequence
  ENSG00000176171_11 (sequence is synthesized)
attaggtgatcaccctggatgatcagttttctgctgaaggcacctactcagtatcttttcctctttatcactctgcattggtgaatttaatcctctcctttgtgttcaacttttgtgtgc

SEQ ID NO: 610819 - DNA, 120 bp, Artificial Sequence
  ENSG00000176171_12 (sequence is synthesized)
ttttaaaatcagctttattctaagcaaatctgtgtctactttaaaaaactggaaatggaaaaaaaaataaatctttgccaaatccttcagattactgtatttacatatggtttaaaatca

SEQ ID NO: 610820 - DNA, 120 bp, Artificial Sequence
  ENSG00000176171_13 (sequence is synthesized)
gacgtcatgatagcttcttaatgaaaccaggactggtccctattttgacattatctttcctacagcaaactttttagaaaggctgcctgccgccttgatgtttcacctttccacgcttaa

SEQ ID NO: 610821 - DNA, 120 bp, Artificial Sequence
  ENSG00000176171_14 (sequence is synthesized)
ttcgggtgttaaatctaacgttttcatttgtaaaaatctttgttgatgctaccttggaagcagtcatctctcagtcttacatttggagaatgtggatggcatgacatcagaattccttta

SEQ ID NO: 610822 - DNA, 120 bp, Artificial Sequence
  ENSG00000176171_15 (sequence is synthesized)
tataatttaacttcagaatagtctgagatcatcgaagcacgatggtcaagggaattccgtttttgttttagagcaaatatgtttgctgtttgtctttcatcacaaacatcagtggagttt

SEQ ID NO: 610823 - DNA, 120 bp, Artificial Sequence
  ENSG00000176171_16 (sequence is synthesized)
cagcaccttacagagctcagtgaaccccctggtcaccatcaaagttagcacacaacaaagccaaccacgtgtccccctcacagatgacaatggctgaactctgagtgaaaccacctgtat

SEQ ID NO: 610824 - DNA, 89 bp, Artificial Sequence
  ENSG00000176171_17 (sequence is synthesized)
gggaggttgaggtgggtggatcacctgaagtcagaagattgataaaaatgcaaaaattagctgggcgcagtggcacgtgcctgtaatcc

SEQ ID NO: 610825 - DNA, 64 bp, Artificial Sequence
  ENSG00000176171_18 (sequence is synthesized)
tggccaacatgatgaaaccccgtctctaataaaaatgcaaaaattagctgggcgggaacccaga

SEQ ID NO: 610826 - DNA, 82 bp, Artificial Sequence
  ENSG00000176171_19 (sequence is synthesized)
cctgggagggccagttggaggtactaagctctgggactgggccagtgtgatggctccacacctgtaatctcaacactttggg

SEQ ID NO: 610827 - DNA, 120 bp, Artificial Sequence
  ENSG00000176171_20 (sequence is synthesized)
actttgggaggctgaggtaggaggatcacaagtccagaagttcgagaccagcctgggggagcatagcaagaccctgtctctacacaaaatacaaaaattagcctcgtgtggtggcacaca

SEQ ID NO: 610828 - DNA, 84 bp, Artificial Sequence
  ENSG00000176171_21 (sequence is synthesized)
ggatagtgcacacggcctgagcaagagcaagaccctgtttcagaaaaaacaactctgggactggagtgctttagacagatggga

SEQ ID NO: 610829 - DNA, 120 bp, Artificial Sequence
  ENSG00000176171_22 (sequence is synthesized)
aaaaacaactctgggactggagtgctttagacagatgggagaccaagaatcaagttttctggaggtgtttttcgttagattgtaacattagacattttattaaaaatgaaacaagtttga

SEQ ID NO: 610830 - DNA, 120 bp, Artificial Sequence
  ENSG00000176171_23 (sequence is synthesized)
cgatgtcttcagtgggtgacagtcacagctggaagtgcccgtgtcacctctaggacagtgggctgctgttcgcctcgggccgcgttctggactggctcctgctgcagtccgtccttatat

SEQ ID NO: 610831 - DNA, 120 bp, Artificial Sequence
  ENSG00000176171_24 (sequence is synthesized)
aggagcctcgccctctttggggatgcagtgacctgggacttagtctgtggggagccatgttcaagtcatcagtaggcagcggaacagccacaaaccccactctgagaaacgcactcacgc

SEQ ID NO: 610832 - DNA, 120 bp, Artificial Sequence
  ENSG00000176171_25 (sequence is synthesized)
gcctcagcggggctgtggtcgcaggaggagcggtccctggttagcagtacttctgagtgactccaaggtagagtggccgacagtggtcaaaggtcgcgtgcccttgagagctgtgcaaca

SEQ ID NO: 610833 - DNA, 120 bp, Artificial Sequence
  ENSG00000176171_26 (sequence is synthesized)
tttattcgtaacctgtttcctgaagtccagatcatcagttacagcttggtgcattttcacaaacacccacgtagtcactgttcaggtccagaaaccaccagcctgcagcccccaaaggcc

SEQ ID NO: 610834 - DNA, 120 bp, Artificial Sequence
  ENSG00000176171_27 (sequence is synthesized)
ccagcacaggcgccctgtggtgctgctgtctggcctgacgagtctgcctgttgctcactgaatataaacggagtcaaagcagggcttcttaggtctgacctctttgtcctgtgtgtaggt

SEQ ID NO: 610835 - DNA, 120 bp, Artificial Sequence
  ENSG00000176171_28 (sequence is synthesized)
gaaagcagtctcatttctgtgtagtactgtggcgggaatgcacccagctctgctgtaggtggagggtctcagttacctgctgtacttcctccagacaggactgttgttctagtaactctc

SEQ ID NO: 610836 - DNA, 120 bp, Artificial Sequence
  ENSG00000176171_29 (sequence is synthesized)
ctgttgttctagtaactctcagcaatgaaggaaccaatgcagtctccgactttactggcttgagtttcgctcttgttgcccaggctgagtgcaggggcgtgatctcggctcactgcagcc

SEQ ID NO: 610837 - DNA, 70 bp, Artificial Sequence
  ENSG00000176171_30 (sequence is synthesized)
cttcgccacgttgcccaggctgatctcgaactcaagggatggctcacctcggcctccaaagtgctgggat

SEQ ID NO: 610838 - DNA, 90 bp, Artificial Sequence
  ENSG00000176171_31 (sequence is synthesized)
cctggctgcttatactcactcaccctgcagaaaacacagagaccaggcaggcgccgctgtgggttctgaagagcgttcgccgcagcggtg

SEQ ID NO: 610839 - DNA, 120 bp, Artificial Sequence
  ENSG00000176171_32 (sequence is synthesized)
acggctcctcctcgggctggtcccagcctctcagcggggaggagggctctagtcctggcgtgcagacagtgttctgtggctgccgtgtgttggacagactggaaagaccggaatgccact

SEQ ID NO: 610840 - DNA, 120 bp, Artificial Sequence
  ENSG00000176171_33 (sequence is synthesized)
gggggcaggtgggttaggtaggttggccagagggctcacatctggggttgaaggaaacgggataaaagccactgagtttcctgggccgggacctgagcgctgcccgtgtctccacctcgc

SEQ ID NO: 610841 - DNA, 120 bp, Artificial Sequence
  ENSG00000176171_34 (sequence is synthesized)
cctcccgtgtgcgtggctttctcctagctcttgggcacattctcacgtcccccccataacccgtcaccttcatttctgctggtgcttttgggagtcagacctacagactgcatcagcatc

SEQ ID NO: 610842 - DNA, 120 bp, Artificial Sequence
  ENSG00000176171_35 (sequence is synthesized)
accaggcagtttgctttctggagccttttccagaactgtcaagcagactctgggggcaaggcctcgggatcctcattttaaatacaaggtttaagcccttcgtttcaggatggatttctg

SEQ ID NO: 610843 - DNA, 120 bp, Artificial Sequence
  ENSG00000176171_36 (sequence is synthesized)
cagccactacttcccagctactgtccttcgtcctgcccgggttttcagagcctgatgctgccactggcgacccacaccccctcagctgcttttcagaaccacacgataaaatctgccccg

SEQ ID NO: 610844 - DNA, 120 bp, Artificial Sequence
  ENSG00000176171_37 (sequence is synthesized)
aaagctgctgcagcactgtctgcgctcacagtgcccaccacaccaccgcccacaggccaggccagccaggcttccgattctgccctttcctggagacccatcctcctccctccgggagtg

SEQ ID NO: 610845 - DNA, 120 bp, Artificial Sequence
  ENSG00000176171_38 (sequence is synthesized)
atgcccgctggtcagctggagcgagcctctctattgccgaaaagccttttctgacactcctgcatctttagtttgggacatctctcccactaccaaacttaaaccacatgagggcagggg

SEQ ID NO: 610846 - DNA, 120 bp, Artificial Sequence
  ENSG00000176171_39 (sequence is synthesized)
cttcatttttaagcagttggctttggtgaggctggtggtgatgaactagcaacaccatcttgccctggtaggtgacttcccccagcactgagttggaacaaagcagaagctttctgtgtg

SEQ ID NO: 610847 - DNA, 120 bp, Artificial Sequence
  ENSG00000176171_40 (sequence is synthesized)
gaaacagcattcggtttggtgatccttctatgtaagaatacgatctgatgttttctaagttaattaatacaaaatacatattgataaaacactagataaaagatcacagatagattcatt

SEQ ID NO: 610848 - DNA, 120 bp, Artificial Sequence
  ENSG00000176171_41 (sequence is synthesized)
acaaaatttttataatgggtataaaatcaccagtccccttgcataagctctaaccacagtgagctaccctgtttcagctgtaacacagtctcctgtgaatcacaagatacattaactact

SEQ ID NO: 610849 - DNA, 120 bp, Artificial Sequence
  ENSG00000176177_0 (sequence is synthesized)
ggagtaggtggaatatcctggggagaggaagtttggtcgttgggcagcggccgactttcctctcaggaaattgatactttatcaacatagagattaattatttgtatttgggagcagcag

SEQ ID NO: 610850 - DNA, 120 bp, Artificial Sequence
  ENSG00000176177_1 (sequence is synthesized)
aactggggaccaattacctgtcaagagttttataaacccgtgacataaactgttattccattgctttcatcctccatctcaccttggaacttgtattacttatggcgttcaggagacaag

SEQ ID NO: 610851 - DNA, 120 bp, Artificial Sequence
  ENSG00000176177_2 (sequence is synthesized)
tgaaaaactttgtgaaaaattactcagatgctgaaataaaagtcagggaagcaacttctaacgacccttggggtccctctagttctctgatgttagatatcagtgacttgactttcaaca

SEQ ID NO: 610852 - DNA, 120 bp, Artificial Sequence
  ENSG00000176177_3 (sequence is synthesized)
caatttctctctcagagattatgaatatgctgtggcacagactcaatgaccatgggaagaactggcgccacgtgtataaatcccttaccctaatggattatctcatcaagaatggatcaa

SEQ ID NO: 610853 - DNA, 120 bp, Artificial Sequence
  ENSG00000176177_4 (sequence is synthesized)
agaaagttattcagcattgcagagaggggttctgtaaccttcaaacactaaaagattttcagcacatagatgaagctggaaaagaccaaggttattatatccgggaaaaatctaagcaag

SEQ ID NO: 610854 - DNA, 120 bp, Artificial Sequence
  ENSG00000176177_5 (sequence is synthesized)
tcatcacattgctgatggatgaaccattgctgtgtaaagagagggaagtggcatgtcggactagacagcgtacctcccactctatattgttttctaaaagacaacttggttcaagtaact

SEQ ID NO: 610855 - DNA, 120 bp, Artificial Sequence
  ENSG00000176177_6 (sequence is synthesized)
cactgacagcgtgcacttctgcccccacaccggatatttctgcttcagagaagaagtataagcttcctaagtttggaaggttacataataaaagaaatgtgtgcaaggcaggattgaaac

SEQ ID NO: 610856 - DNA, 120 bp, Artificial Sequence
  ENSG00000176177_7 (sequence is synthesized)
aagagcattgccaagatgttcatttgcctacagaaactatgttgtcccaggaaacacttccactcaagattcatggttggaaatcaacagaggacctgatgacatttttggatgatgatc

SEQ ID NO: 610857 - DNA, 120 bp, Artificial Sequence
  ENSG00000176177_8 (sequence is synthesized)
cagagctgcctttactagcaacacctccttccattgtctctccaatcacttgcttgtcagaagcagaagaagtttgtaatctttcgggtgcagatgctgtgcctactctctcagaaaata

SEQ ID NO: 610858 - DNA, 120 bp, Artificial Sequence
  ENSG00000176177_9 (sequence is synthesized)
gtccttctgggcagagagatgtgagtttggacaagagatcagatggtatctttacaaatactgtcacagaaaacctcttggaaacacctttagaaaagcaatcagctgcagaaggtctta

SEQ ID NO: 610859 - DNA, 120 bp, Artificial Sequence
  ENSG00000176177_10 (sequence is synthesized)
aaacattgacaattttaccagcatgttggtcaagtaaagaggagtttatcagccccgacttaagggtatcaaagtcagattctactttccataaccaggcctctgtagaaacactctgtc

SEQ ID NO: 610860 - DNA, 120 bp, Artificial Sequence
  ENSG00000176177_11 (sequence is synthesized)
tgtaatcaacaaggcctaccagaaaccagcacaatccagcattcagatggatgataaaatcctcaagacaaccacacgggtttcaactgcttctgagggagcatcttccttttctccttt

SEQ ID NO: 610861 - DNA, 120 bp, Artificial Sequence
  ENSG00000176177_12 (sequence is synthesized)
atccatgtcatctcctgatttagcctctccagagaagtcagctcatctcttatcaccaattctggccggaccttccttctggactctgtcccatcaacagttgtcttctacctcctttaa

SEQ ID NO: 610862 - DNA, 120 bp, Artificial Sequence
  ENSG00000176177_13 (sequence is synthesized)
agatgaagataagacagccaagctgcatcactcctttgcttctaggggcccagtgtcttctgatgtagaggaaaatgatagcctcaatctactgggaattcttccaaataactctgattc

SEQ ID NO: 610863 - DNA, 120 bp, Artificial Sequence
  ENSG00000176177_14 (sequence is synthesized)
tgctaaaaagaatataagtcacatttctagtagtcactggggggagttttccacccaaaatgtagaccagttcatccctctgtcctgttctggttttcagtcaaccaaagacttccccca

SEQ ID NO: 610864 - DNA, 120 bp, Artificial Sequence
  ENSG00000176177_15 (sequence is synthesized)
ggaacctgaagcaaagaattccattagtgttcttttaagggaggtaaaacgtgcgatcgctagattacatgaagatctgagcacagtgatccaagaacttaatgtcatcaataacatctt

SEQ ID NO: 610865 - DNA, 120 bp, Artificial Sequence
  ENSG00000176177_16 (sequence is synthesized)
gatgagcatgagtctgaatagttcacaaataagccagtcttcccaggtcccccagtcttctgaggggagctcagatcagatctaatcatcacaatatctatttttgatagaactcgtgtg

SEQ ID NO: 610866 - DNA, 120 bp, Artificial Sequence
  ENSG00000176177_17 (sequence is synthesized)
gttccacttccccaagacttacgttagcattgtataaattcatattattatggcaaaaaaggggatggtttaatttttccttgtcaggtttattagcaagtatctttcaaactaatactt

SEQ ID NO: 610867 - DNA, 120 bp, Artificial Sequence
  ENSG00000176177_18 (sequence is synthesized)
tcatttgggtggtttattttttaaaagggaaagatgtcacctttgataatttcagatttagatattagttcatttgaaacagaagagaatttcattctttcatgctctgtacctcaaatg

SEQ ID NO: 610868 - DNA, 120 bp, Artificial Sequence
  ENSG00000176177_19 (sequence is synthesized)
ggttaagcattagtgaaaattgtggtaagacctcaaactgcaaatgactattcaagagcttttggataaggaggcaggaagaagctctttatctttcaactgtatggagcttgttaacaa

SEQ ID NO: 610869 - DNA, 120 bp, Artificial Sequence
  ENSG00000176177_20 (sequence is synthesized)
gcctctgaggtgacctaggaggattgagtttgggggtatacatttcacacattcttttgcaagttttaggttctgcaaccaagggccagaaatcttttctttcttccagatgctagtgtt

SEQ ID NO: 610870 - DNA, 120 bp, Artificial Sequence
  ENSG00000176177_21 (sequence is synthesized)
aggagttaaatggaaacaagaaggacatggggcaaatgtttttactgtcaatgtatattgcaaggtgaattcaaatgcatccttttattctacttcagaaaataaatttgatatttttca

SEQ ID NO: 610871 - DNA, 120 bp, Artificial Sequence
  ENSG00000176177_22 (sequence is synthesized)
tcaggtatctgcaaccatcttgcttgacgccctgacaggaactgcaccaggccagaaagtgaggaagcggaagtggggaccggcctgggcccttgagcctggctggagtaggtggaatat

SEQ ID NO: 610872 - DNA, 120 bp, Artificial Sequence
  ENSG00000176177_23 (sequence is synthesized)
tagggtaattgctggtctgattctctgtgtggccgaacgcccagcacctggctcatctggtacacagtcgtcatctgaagtgggggttgtatgaatgaagacgaggatgccgaggaaagg

SEQ ID NO: 610873 - DNA, 120 bp, Artificial Sequence
  ENSG00000176177_24 (sequence is synthesized)
ccctgcccacagaaagttgattcttgctcagcctccacccgccattttcaaaattctttccaaagcatctcgtttcttcctcccccacggccctgtctggcgattattctttgtgttgcg

SEQ ID NO: 610874 - DNA, 80 bp, Artificial Sequence
  ENSG00000176182_0 (sequence is synthesized)
gcagaagcccgagccctgacccaccggcggctgcggcggagccgcgccggcgccccccatgcgccagacggcaggacggc

SEQ ID NO: 610875 - DNA, 120 bp, Artificial Sequence
  ENSG00000176182_1 (sequence is synthesized)
gcggaggaaaccacccggttgcgcaagccgcgcttctcattcgaagagaaccagatcctgatccgcgaggtgcgcgcccactacccgcagctctacggcgcgcagagccgtcgggtgagc

SEQ ID NO: 610876 - DNA, 120 bp, Artificial Sequence
  ENSG00000176182_2 (sequence is synthesized)
gtggcagagcggcggcgcgtgtgggacggcatcgccgccaagatcaacggtatcaccagctggaagcgcacgggccaggaggtgcagaagcgctggaacgacttcaagcgccgcaccaag

SEQ ID NO: 610877 - DNA, 120 bp, Artificial Sequence
  ENSG00000176182_3 (sequence is synthesized)
gagaagctcgctcgcgtgccgcactccacgcagggcgccgggcccgccgcggaggacgctttctccgcggaagaggagaccatttttgccatcctggggccaggtgtggcggcgccgggg

SEQ ID NO: 610878 - DNA, 120 bp, Artificial Sequence
  ENSG00000176182_4 (sequence is synthesized)
gcaggtgctggggcggaggagccccctgcggccccctcttcacagccgccgcccccaagcgcctgccctcagcgctacgtgttgtcggaagaccgccgggaggaccgacgtgcagataca

SEQ ID NO: 610879 - DNA, 120 bp, Artificial Sequence
  ENSG00000176182_5 (sequence is synthesized)
tcagcccacagcaaggcgggctccagcagcccggagccatgggcccggccctcctgcactccccaggaagggggctgcccacggcccaaggagcgtgagtcaccacccccttcggccctg

SEQ ID NO: 610880 - DNA, 120 bp, Artificial Sequence
  ENSG00000176182_6 (sequence is synthesized)
cagccggtccagctgcctcgcctggccttgtctccaccacccccagcccctccactgccacccccaccgccactggcccaagtggcaccctcaccccctagccccccaccccctcctcgg

SEQ ID NO: 610881 - DNA, 120 bp, Artificial Sequence
  ENSG00000176182_7 (sequence is synthesized)
cgacagggactggccaaactgagcgaggccctcagcgctctgctgccccttctgccaggaaccccagttgactccctgcctccacctctgcccccacccccacccccaccgccacctccc

SEQ ID NO: 610882 - DNA, 120 bp, Artificial Sequence
  ENSG00000176182_8 (sequence is synthesized)
aggcctgtcctgcccccaccggcccccaaggtggagatcaccccagagcccgtgtccgtggtggctgctgtggtggacggggcagtggtggcagccaggggagtgatcattgccccaagg

SEQ ID NO: 610883 - DNA, 120 bp, Artificial Sequence
  ENSG00000176182_9 (sequence is synthesized)
agcgaggagggggcaccccggccccccccagccccgctccctccgcacgactcccccccacacaagcggagaaaaggtttccctacacggaaaaggcgcggccgatggaaatctccgtga

SEQ ID NO: 610884 - DNA, 120 bp, Artificial Sequence
  ENSG00000176182_10 (sequence is synthesized)
aatctactatctatgatcctgcctgcaacccctctccccagcttggcgcagtcgaggggggcgatgctctctgcccatcccagctgcaccctagctccctgctccagggatgtgagcacc

SEQ ID NO: 610885 - DNA, 120 bp, Artificial Sequence
  ENSG00000176182_11 (sequence is synthesized)
cactccctgtgctagttagtgcctgattctctggggggggcctcagtaatgggcccccccaacccctttctctggtacagtgctgtctgcctggctgcctcccttaaccctgacttctaa

SEQ ID NO: 610886 - DNA, 120 bp, Artificial Sequence
  ENSG00000176182_12 (sequence is synthesized)
gccatcaatttcatgttatttattattgccctatgtggggtggggagggaacctctcgggtctgcacatctccccttccctaacagttcctgttcttgacttgaagagaattgacccgtg

SEQ ID NO: 610887 - DNA, 120 bp, Artificial Sequence
  ENSG00000176182_13 (sequence is synthesized)
ggggactccccacctccccaacccagactttggagcgggtgggagttgtaagacaaatcaaaatacggatgacaaagaggatatagccgtgtataccccagggagaggaggcgccgagtt

SEQ ID NO: 610888 - DNA, 120 bp, Artificial Sequence
  ENSG00000176182_14 (sequence is synthesized)
ctgatgggagaggtacaggttgggttctctgcctaccattgctgtctctgacttccagagctcaaccccctcctttctcccagtggtgacaagatatcaataaacttatttttaatacaa

SEQ ID NO: 610889 - DNA, 120 bp, Artificial Sequence
  ENSG00000176194_0 (sequence is synthesized)
aggcccgctaggggatccgcgccatggaggccgcccgggactatgcaggagccctcatcaggcccctgacatttatgggatcacagactaagcgagtcctgttcaccccgctcatgcatc

SEQ ID NO: 610890 - DNA, 120 bp, Artificial Sequence
  ENSG00000176194_1 (sequence is synthesized)
cagctcgccctttccgggtctccaaccatgacaggagcagccggcgtggggtgatggcaagcagcctgcaggagctcatcagcaagactctggatgccctcgtcatcgctaccggactgg

SEQ ID NO: 610891 - DNA, 120 bp, Artificial Sequence
  ENSG00000176194_2 (sequence is synthesized)
tcactctggtgctggaggaagatggcaccgtggtggacacagaagagttctttcagaccttgggagacaacacgcatttcatgatcttggaaaaaggacagaagtggatgccgggcagcc

SEQ ID NO: 610892 - DNA, 120 bp, Artificial Sequence
  ENSG00000176194_3 (sequence is synthesized)
agcacgtccccacttgctcgccgccgaagaggtcgggaatagcgagagtcaccttcgacttgtacaggctgaaccccaaggacttcatcggctgccttaacgtgaaggccaccatgtatg

SEQ ID NO: 610893 - DNA, 120 bp, Artificial Sequence
  ENSG00000176194_4 (sequence is synthesized)
tgctgaggagtctgctgcggttcctgtcctactccgcccaggtgacgggacagtttctcatctatctgggcacatacatgctccgggtgctggatgacaaggaagagcggccatccctcc

SEQ ID NO: 610894 - DNA, 120 bp, Artificial Sequence
  ENSG00000176194_5 (sequence is synthesized)
ggtcacaagccaagggcaggttcacgtgtggatagggatgcaggctgtcgccggctcttgagccaaacactgtgtttcgtttggctcaatgacgaatgttgaagatgcttttatgttctg

SEQ ID NO: 610895 - DNA, 120 bp, Artificial Sequence
  ENSG00000176194_6 (sequence is synthesized)
agccacatgcacttggaggccgctggtcacgctgctcaggagtggtgcccagaaaaggaaagggcttggtggtacatgaagtgggggcagtgggcagggtgccctgggggggaggcatag

SEQ ID NO: 610896 - DNA, 120 bp, Artificial Sequence
  ENSG00000176194_7 (sequence is synthesized)
agggccctgggggtcatgggaagcgagcacgcagcaggcgtgcccaggagcgtgtgcatgtgtcagagccatttggtccatcatctcctgcaataaacccatcgcaagaatgaccttcaa

SEQ ID NO: 610897 - DNA, 120 bp, Artificial Sequence
  ENSG00000176194_8 (sequence is synthesized)
ctggcgagtggctgcatgcatctctggccgctgctgcagtcgcgggcgcagaagagggtccggtcccaggaaccccgagcaaagcttccgcgatgcgaggggaccgggcttctgggggtc

SEQ ID NO: 610898 - DNA, 120 bp, Artificial Sequence
  ENSG00000176194_9 (sequence is synthesized)
ctggaaatcacaacgggagctgggcgcgggaggggcccaggcttggcccctcctggaagcgcgggctctggtctccgaggggaggccccaaccgtccggcggagccctccaggcccctga

SEQ ID NO: 610899 - DNA, 120 bp, Artificial Sequence
  ENSG00000176194_10 (sequence is synthesized)
aggcccgctaggggatccgcgccatggaggccgcccgggactatgcaggagccctcatcaggcgagtgccccgcgtccccctgattgccgtgcgcttccaatcgccttgcgttcggtggc

SEQ ID NO: 610900 - DNA, 120 bp, Artificial Sequence
  ENSG00000176194_11 (sequence is synthesized)
ctcatattcccctgtgcgcctctagtaccgtaccccgctcccttcagccccctgctccccgcattctcttgcgctccgcgaccccgcgcacacacccatccgccccactggtgcccaagc

SEQ ID NO: 610901 - DNA, 120 bp, Artificial Sequence
  ENSG00000176194_12 (sequence is synthesized)
cgtccagccgcgcccgcgggcagagcccaatcccgtcccgcgcctcctcaccctcttgcagctgggcacaggtaccaggtgtggctcttgcgaggtgcgcgggcgtctgcaaaccaggtg

SEQ ID NO: 610902 - DNA, 120 bp, Artificial Sequence
  ENSG00000176194_13 (sequence is synthesized)
ctgcaggagctcatcagcaagggaggatgcagggatggagccgactttggaagtctgggtttggttgtaaaggccaggatctagaacagtgtcctagaccaccaaataaggaagaatccc

SEQ ID NO: 610903 - DNA, 120 bp, Artificial Sequence
  ENSG00000176194_14 (sequence is synthesized)
agagaagcataactcagactcaggcacccatggaaacaagaaacaagcatccaacatgcagtctctgaagcaagagagacactcagctacgcacacgaggctgtggctcttacagcagca

SEQ ID NO: 610904 - DNA, 120 bp, Artificial Sequence
  ENSG00000176198_0 (sequence is synthesized)
tgagatacgtagcaagcaattggattacactccaagagacttggattacactcatgtctttcttctttgtagacttaagacccatgaacaggtcagcaacacacatcgtgacagagttta

SEQ ID NO: 610905 - DNA, 120 bp, Artificial Sequence
  ENSG00000176198_1 (sequence is synthesized)
ttctcctgggattccctggttgctggaagattcagattttcctcttctcattgtttttggtgatttatgtcttgaccttgctgggaaatggagccatcatctatgcagtgagatgcaacc

SEQ ID NO: 610906 - DNA, 120 bp, Artificial Sequence
  ENSG00000176198_2 (sequence is synthesized)
cactactacacacccccatgtactttctgctgggaaattttgccttccttgagatctggtatgtgtcctccactattcctaacatgctagtcaacattctctccaagaccaaggccatct

SEQ ID NO: 610907 - DNA, 120 bp, Artificial Sequence
  ENSG00000176198_3 (sequence is synthesized)
cattttctgggtgcttcctccagttctatttcttcttttcactgggaacaactgaatgtctctttctggcagtaatggcttatgatcgatacctggccatctgccacccactgcagtacc

SEQ ID NO: 610908 - DNA, 120 bp, Artificial Sequence
  ENSG00000176198_4 (sequence is synthesized)
gccatcatgactgtaaggttctgtggtaagctggtgtctttctgttggcttattggattccttggatacccaattcccattttctacatctcccaactccccttctgtggtcctaatatc

SEQ ID NO: 610909 - DNA, 120 bp, Artificial Sequence
  ENSG00000176198_5 (sequence is synthesized)
attgatcacttcctgtgtgacatggacccattgatggctctatcctgtgccccagctcccataactgaatgtattttctatactcagagctcccttgtcctctttttcactagtatgtac

SEQ ID NO: 610910 - DNA, 120 bp, Artificial Sequence
  ENSG00000176198_6 (sequence is synthesized)
attcttcgatcctatatcctgttactaacagctgtttttcaggtcccttctgcagctggtcggagaaaagccttctctacctgtggttctcatttggttgtggtatctcttttctatggg

SEQ ID NO: 610911 - DNA, 120 bp, Artificial Sequence
  ENSG00000176198_7 (sequence is synthesized)
acagtcatggtaatgtatgtaagtcctacatatgggatcccaactttattgcagaagatcctcacactggtatattcagtaacgactcctctttttaatcctctgatctatactcttcgt

SEQ ID NO: 610912 - DNA, 120 bp, Artificial Sequence
  ENSG00000176198_8 (sequence is synthesized)
aataaggacatgaaactcgctctgagaaatgtcctgtttggaatgagaattcgtcaaaattcgtgagccaaagatgtgccatacttacaagttctaacgaagaacaaggtcgagatgttg

SEQ ID NO: 610913 - DNA, 120 bp, Artificial Sequence
  ENSG00000176198_9 (sequence is synthesized)
tatattttacctggaagtgtgcccagcttaaatatgtttccagcactgactctttaaaccttaattaactggtcttcaacatccacttaaaagttttcaaagcctgtctttattagaatg

SEQ ID NO: 610914 - DNA, 120 bp, Artificial Sequence
  ENSG00000176198_10 (sequence is synthesized)
ataaaatggaatttctacatgagatgccctcctgctgacatgccccatggttcatcattgtatatcttcttcctcattgcaacaagacaataaacccaactttgttcaactacaggtatg

SEQ ID NO: 610915 - DNA, 120 bp, Artificial Sequence
  ENSG00000176198_11 (sequence is synthesized)
ctcctaggagtctttgtctgatgggaatcaatagtggcacaatacccagcaaacggtaaggcctcagacatgttttttaaatatctctatctcaattttttttacttacaacaataatat

SEQ ID NO: 610916 - DNA, 120 bp, Artificial Sequence
  ENSG00000176198_12 (sequence is synthesized)
gtgattgttgtaataaattcaagcaattcagaagaatgtccatcttcactcccatattcaccaattttcctatctgctcctcagagtcaatacatctaaatccctctgtctggcactcga

SEQ ID NO: 610917 - DNA, 120 bp, Artificial Sequence
  ENSG00000176200_0 (sequence is synthesized)
atggagttgggaaatgtcaccagagtaaaagaatttatatttctgggacttactcaatcccaagaccagagtttggtcttgtttctttttttatgtcttgtgtacatgacgactctgctg

SEQ ID NO: 610918 - DNA, 120 bp, Artificial Sequence
  ENSG00000176200_1 (sequence is synthesized)
ggaaacctcctcatcatggtcaccgtgacctgtgagtctcgccttcacacccccatgtacttcctgctccgcaatctagccatccttgacatctgcttctcctccacaactgctcctaaa

SEQ ID NO: 610919 - DNA, 120 bp, Artificial Sequence
  ENSG00000176200_2 (sequence is synthesized)
gtcttgctggaccttctgtcaaagaaaaagaccatatcctatacaagctgcatgacacagatatttctcttccacctccttggtggggcagacattttttctctctctgtgatggcgttt

SEQ ID NO: 610920 - DNA, 120 bp, Artificial Sequence
  ENSG00000176200_3 (sequence is synthesized)
tttgtccactccatcgtgcagatctccctgttgctgcctctccctttctgtggacccaatgttcttgacactttctactgcgatgtcccccaggtcctcaaactcacttgcactgacact

SEQ ID NO: 610921 - DNA, 120 bp, Artificial Sequence
  ENSG00000176200_4 (sequence is synthesized)
tttgctcttgagttcttgatgatttccaacaatggcctggtcactaccctgtggtttatcttcctgcttgtgtcctacacagtcatcctaatgacgctgaggtctcaggcaggagggggc

SEQ ID NO: 610922 - DNA, 120 bp, Artificial Sequence
  ENSG00000176200_5 (sequence is synthesized)
aggaggaaagccatctccacttgcacctcccacatcactgtggtgaccctgcattttgtgccctgcatctatgtctatgcccggcccttcactgccctccccacagaaaaggccatctct

SEQ ID NO: 610923 - DNA, 120 bp, Artificial Sequence
  ENSG00000176200_6 (sequence is synthesized)
gtcaccttcactgtcatctcccctctgctgaaccctttgatctacactctgaggaaccaggaaatgaagtcagccatgagaagactgaagagaagactcgtgccttctgaaagggaatag

SEQ ID NO: 610924 - DNA, 120 bp, Artificial Sequence
  ENSG00000176204_0 (sequence is synthesized)
acaaactcaagcattagcaccaacaagctctgagcatcatcagtctctggaaagccttctgaattagacaagggctgcctcccagcacagctacaaaacactttaaacctgaccagctaa

SEQ ID NO: 610925 - DNA, 120 bp, Artificial Sequence
  ENSG00000176204_1 (sequence is synthesized)
atggataaacctagcctgcatagcttttaaactggggtctcatacagcacaggaggcctacttgcttcaagaactgaaaatccagaggatgaattgctttatctgggaatggcaaaagcc

SEQ ID NO: 610926 - DNA, 120 bp, Artificial Sequence
  ENSG00000176204_2 (sequence is synthesized)
agcacaataaggaatgccaggtggtggtggtttccgcacaagagaccaaataagaagaaagctgagagaggggggaaacgtttttggatgacaaaggatgggtttccatttaattacgca

SEQ ID NO: 610927 - DNA, 120 bp, Artificial Sequence
  ENSG00000176204_3 (sequence is synthesized)
gctgaaaggcatgagtgtggtgctggtgctacttcctacactgctgcttgttatgctcacgggtgctcagagagcttgcccaaagaactgcagatgtgatggcaaaattgtgtactgtga

SEQ ID NO: 610928 - DNA, 120 bp, Artificial Sequence
  ENSG00000176204_4 (sequence is synthesized)
gtctcatgctttcgcagatatccctgagaacatttctggagggtcacaaggcttatcattaaggttcaacagcattcagaagctcaaatccaatcagtttgccggccttaaccagcttat

SEQ ID NO: 610929 - DNA, 120 bp, Artificial Sequence
  ENSG00000176204_5 (sequence is synthesized)
atggctttatcttgaccataattacattagctcagtggatgaagatgcatttcaagggatccgtagactgaaagaattaattctaagctccaacaaaattacttatctgcacaataaaac

SEQ ID NO: 610930 - DNA, 120 bp, Artificial Sequence
  ENSG00000176204_6 (sequence is synthesized)
atttcacccagttcccaatctccgcaatctggacctctcctacaataagcttcagacattgcaatctgaacaatttaaaggccttcggaaactcatcattttgcacttgagatctaactc

SEQ ID NO: 610931 - DNA, 120 bp, Artificial Sequence
  ENSG00000176204_7 (sequence is synthesized)
actaaagactgtgcccataagagtttttcaagactgtcggaatcttgattttttggatttgggttacaatcgtcttcgaagcttgtcccgaaatgcatttgctggcctcttgaagttaaa

SEQ ID NO: 610932 - DNA, 120 bp, Artificial Sequence
  ENSG00000176204_8 (sequence is synthesized)
ggagctccacctggagcacaaccagttttccaagatcaactttgctcattttccacgtctcttcaacctccgctcaatttacttacaatggaacaggattcgctccattagccaaggttt

SEQ ID NO: 610933 - DNA, 120 bp, Artificial Sequence
  ENSG00000176204_9 (sequence is synthesized)
caatttacaaaaattgaatttggattccaacaagctcaccaatatctcacaggaaactgtcaatgcgtggatatcattaatatccatcacattgtctggaaatatgtgggaatgcagtcg

SEQ ID NO: 610934 - DNA, 120 bp, Artificial Sequence
  ENSG00000176204_10 (sequence is synthesized)
gagcatttgtcctttattttattggcttaagaatttcaaaggaaataaggaaagcaccatgatatgtgcgggacctaagcacatccagggtgaaaaggttagtgatgcagtggaaacata

SEQ ID NO: 610935 - DNA, 120 bp, Artificial Sequence
  ENSG00000176204_11 (sequence is synthesized)
taatatctgttctgaagtccaggtggtcaacacagaaagatcacacctggtgccccaaactccccagaaacctctgattatccctagacctaccatcttcaaacctgacgtcacccaatc

SEQ ID NO: 610936 - DNA, 120 bp, Artificial Sequence
  ENSG00000176204_12 (sequence is synthesized)
cacctttgaaacaccaagcccttccccagggtttcagattcctggcgcagagcaagagtatgagcatgtttcatttcacaaaattattgccgggagtgtggctctctttctctcagtggc

SEQ ID NO: 610937 - DNA, 120 bp, Artificial Sequence
  ENSG00000176204_13 (sequence is synthesized)
catgatcctcttggtgatctatgtgtcttggaaacgctacccagccagcatgaaacaactccagcaacactctcttatgaagaggcggcggaaaaaggccagagagtctgaaagacaaat

SEQ ID NO: 610938 - DNA, 120 bp, Artificial Sequence
  ENSG00000176204_14 (sequence is synthesized)
gaattcccctttacaggagtattatgtggactacaagcctacaaactctgagaccatggatatatcggttaatggatctgggccctgcacatataccatctctggctccagggaatgtga

SEQ ID NO: 610939 - DNA, 120 bp, Artificial Sequence
  ENSG00000176204_15 (sequence is synthesized)
gatgccacaccacatgaagcccttgccatattacagctatgaccagcctgtgatcgggtactgccaggcccaccagccactccatgtcaccaagggctatgagacagtgtctccagagca

SEQ ID NO: 610940 - DNA, 120 bp, Artificial Sequence
  ENSG00000176204_16 (sequence is synthesized)
ggacgaaagccccggcctggagctgggccgagaccacagcttcatcgccaccatcgccaggtcggcagcaccggccatctacctagagagaattgcaaactaacgctgaagccaactcct

SEQ ID NO: 610941 - DNA, 120 bp, Artificial Sequence
  ENSG00000176204_17 (sequence is synthesized)
cactggggagctccatgggggggagggagggccttcatcttaaaggagaatgggtgtccacaatcgcgcaatcgagcaagctcatcgttcctgttaaaacatttatggcatagagaaaag

SEQ ID NO: 610942 - DNA, 120 bp, Artificial Sequence
  ENSG00000176204_18 (sequence is synthesized)
aatagtaagagtgtcaagttcttataaaaatagatttcaccctagctacatataggtttgtttgtatatttgatttttctacactgcatggttcctgggctggagaaccacaggggagca

SEQ ID NO: 610943 - DNA, 120 bp, Artificial Sequence
  ENSG00000176204_19 (sequence is synthesized)
aataaacaggggtgggtgggaagctagggaaacaaccgttttcctctttaggtgtgtgtaattctcacagattttatttaaattgctttcatttattttttctttaaaaatgctgtttgt

SEQ ID NO: 610944 - DNA, 120 bp, Artificial Sequence
  ENSG00000176204_20 (sequence is synthesized)
tcttgttttgtttgttttaatttttttctttcctggtcaagtttctaatacaaaacatgagcattaaagcttatgttgtaccaaaagaaaatgtgctttaccacggaccacggagaaagt

SEQ ID NO: 610945 - DNA, 120 bp, Artificial Sequence
  ENSG00000176204_21 (sequence is synthesized)
tgaccacaaagtttgacaaaactactggaaaacccaataagtctgggtgaatgacccttcatgacaaatgccatatatggtacatgatagaaggaattttgttttgtcccattggcagcc

SEQ ID NO: 610946 - DNA, 120 bp, Artificial Sequence
  ENSG00000176204_22 (sequence is synthesized)
ctcactgtgtaggatgcctgagagagccatgaagatctccgaatgagaagaccagcagaatcattctcatgtggactaaggctataagagagatatgaccatgggctcaatgaatgaaac

SEQ ID NO: 610947 - DNA, 120 bp, Artificial Sequence
  ENSG00000176204_23 (sequence is synthesized)
tgccaagctgacaaatttctaaacacaagataatgtgtaacattgctttttaaattaattatcaattagcttttgtgtagtttttatcaataaaagaaaaaatattgaaaaataaatata

SEQ ID NO: 610948 - DNA, 120 bp, Artificial Sequence
  ENSG00000176204_24 (sequence is synthesized)
cactagaaagattaatgacccttttgcttttgggttttgctcagtgtgaaaggttacttaattaaattacaaccaccaggaaattgactgctttttttttttttttaaatggttgaaact

SEQ ID NO: 610949 - DNA, 120 bp, Artificial Sequence
  ENSG00000176204_25 (sequence is synthesized)
tgaaggaagttcattcaaggataagttggaataaagcactatgttaaaacatctgctttttaacaatttgtatacaggggttggacttaaaaacacacatacaaacaaaactcttttcat

SEQ ID NO: 610950 - DNA, 120 bp, Artificial Sequence
  ENSG00000176204_26 (sequence is synthesized)
tctgaaatttctgtctggttcttggtgtttgactgttgtaatggagtaaagaagagggccagcttaatttaaaaataaagtgagtttaccaaaattccagaaggtaatgaagatttaaac

SEQ ID NO: 610951 - DNA, 120 bp, Artificial Sequence
  ENSG00000176204_27 (sequence is synthesized)
caaagagcaattttcccaagggttgattttgttgtaaatttttagttttaatgaaagcatgcaacagggatctcacacccatgttacttgccatttagttattataccagcatagagaat

SEQ ID NO: 610952 - DNA, 120 bp, Artificial Sequence
  ENSG00000176204_28 (sequence is synthesized)
gtcagaggcctactgtgtaattgtatcaggctcctaaggcttctttctttttttttttttgtttccttctttcctactttctttcactccttcctttccttcctttctcttccttctttt

SEQ ID NO: 610953 - DNA, 120 bp, Artificial Sequence
  ENSG00000176204_29 (sequence is synthesized)
tttgtttgtttgtttgttttttaattactgggatatagatccgatttcaaaggtttttatgcactggctatttgtgtttaatcagaatgaaacttcaattccatgctttggctttgtccc

SEQ ID NO: 610954 - DNA, 85 bp, Artificial Sequence
  ENSG00000176204_30 (sequence is synthesized)
gtgggcgtaggaccctccgagccaggtgagggatataatctcgtggtgccgttttttaagcccgtcgaaaatatgctgtctgtca

SEQ ID NO: 610955 - DNA, 79 bp, Artificial Sequence
  ENSG00000176204_31 (sequence is synthesized)
agagctgtagaccggagcttttcctatttggccatcttgcgacaaagtgatcccaggtttccatttaattacgcagctg

SEQ ID NO: 610956 - DNA, 120 bp, Artificial Sequence
  ENSG00000176204_32 (sequence is synthesized)
cgacaaagtgatcccaggtttccatttaattacgcagctgaaaggcatgagtgtggtgctggtgctacttcctacactgctgcttgttatgctcacgggtgctcagagagcttgcccaaa

SEQ ID NO: 610957 - DNA, 120 bp, Artificial Sequence
  ENSG00000176204_33 (sequence is synthesized)
aaaatcaggtcacaattttgtggatgatttagcaataataaaatggcagtcataacagggactgtttgtcagtattgctgtcatccccaaaagaaatgatatgtattcttgttaaactta

SEQ ID NO: 610958 - DNA, 120 bp, Artificial Sequence
  ENSG00000176204_34 (sequence is synthesized)
ttaaaaaataagtgatacaaatatttataaataaaaggagagaggtttgagttctgggtatcctccctttctgtaacagcctcaaataaaggtgtaccttccatgttatattatttttgt

SEQ ID NO: 610959 - DNA, 120 bp, Artificial Sequence
  ENSG00000176204_35 (sequence is synthesized)
ttttataagaataaatttggacccggtttctgattatttaatttaaaagatcacttacaggatcatgttagtgagcagacaaatagtcacaaatttcaaacttgtcaataagtaatgctg

SEQ ID NO: 610960 - DNA, 120 bp, Artificial Sequence
  ENSG00000176204_36 (sequence is synthesized)
gatgtaaattgttcttttcttggtaatgttgatcattatgtgcaaagactgactactaaggccttgttgctggaagaaactagtgaagagaggttaaattctggcaatataatgttttag

SEQ ID NO: 610961 - DNA, 120 bp, Artificial Sequence
  ENSG00000176204_37 (sequence is synthesized)
tatctgattttagatgatcactctttcaaaagacagttttaatgagtaattaaagatgttgccctttctaatgctagttaacagttggaaaatataattgctctttgatagcatatactc

SEQ ID NO: 610962 - DNA, 120 bp, Artificial Sequence
  ENSG00000176204_38 (sequence is synthesized)
caatttttccatagtcctaactacaaatgctaatgaaaatgttttcagacaaagcactgaatttgaaataatctctaactcagtacaatttggactattgaactgttcttcaaagaattc

SEQ ID NO: 610963 - DNA, 120 bp, Artificial Sequence
  ENSG00000176204_39 (sequence is synthesized)
attttcttcttttttgtgtatcattgaaaataagagaagtaatcccagataataaattcctaaaaggaaactgtataagcaattgcccttaaaaattaaaaagaataaaagattttctat

SEQ ID NO: 610964 - DNA, 62 bp, Artificial Sequence
  ENSG00000176204_40 (sequence is synthesized)
cccggctgctttgtttacctaagcaagcccgggcaatggtgggcgcccatcccccagcctcg

SEQ ID NO: 610965 - DNA, 120 bp, Artificial Sequence
  ENSG00000176208_0 (sequence is synthesized)
gcgcgcaggacggcgcgaaaacccaattgacaagaattccctccgaagctctgtggtccgatctgcggtccgcttgctttccctgcccggtcccgagcgctcagcctgaagcgccgcttt

SEQ ID NO: 610966 - DNA, 120 bp, Artificial Sequence
  ENSG00000176208_1 (sequence is synthesized)
cgagggcaccctgcatacactggccgcgcctcagggatctcattgcccgcgctttctcattgcctctttccgtgttcgattcggctgatctgggcccagcctccgctcccgctctctgtc

SEQ ID NO: 610967 - DNA, 120 bp, Artificial Sequence
  ENSG00000176208_2 (sequence is synthesized)
ggtgggcgcgggggaatccgaaacggctcagcagaatcccagcagcttgctgctactggagcgggccgcctccatggcctccaggcaggccgggctggaccgcgtgaggtcctaggagac

SEQ ID NO: 610968 - DNA, 120 bp, Artificial Sequence
  ENSG00000176208_3 (sequence is synthesized)
gggattccgggaagcggggagtatggtgggggtcctggccatggcggctgcagctgctccgcctcccgtgaaggactgcgagattgagccatgcaaaaagcgaaagaaagatgatgacac

SEQ ID NO: 610969 - DNA, 120 bp, Artificial Sequence
  ENSG00000176208_4 (sequence is synthesized)
atctacctgcaaaacaattacaaaatatttatcaccactagggaagactagagacagggtttttgctccaccaaaacctagtaatattctggattattttagaaagacttcacccacaaa

SEQ ID NO: 610970 - DNA, 120 bp, Artificial Sequence
  ENSG00000176208_5 (sequence is synthesized)
tgagaagacacaattagggaaagagtgcaagataaagtcacctgaatcagtacctgttgacagcaacaaagactgtacgacacctttggaaatgttctcaaatgtagagtttaagaagaa

SEQ ID NO: 610971 - DNA, 120 bp, Artificial Sequence
  ENSG00000176208_6 (sequence is synthesized)
aagaaagagggttaatttatctcatcaactaaataatattaaaactgaaaatgaagctccaattgaaattagtagcgacgatagcaaagaagactatagtttaaataatgattttgtgga

SEQ ID NO: 610972 - DNA, 120 bp, Artificial Sequence
  ENSG00000176208_7 (sequence is synthesized)
aagtagtacttctgttttacgttacaagaaacaagtagaggtacttgcagaaaacattcaagatacaaaaagtcaaccaaatactatgacctccctgcaaaattctaaaaaagtaaatcc

SEQ ID NO: 610973 - DNA, 120 bp, Artificial Sequence
  ENSG00000176208_8 (sequence is synthesized)
taaacaagggaccacaaaaaatgacttcaaaaagttgagaaaaaggaaatgcagagatgtagtagatctatctgaaagcttacccttggcagaggaactaaatttgcttaaaaaagatgg

SEQ ID NO: 610974 - DNA, 120 bp, Artificial Sequence
  ENSG00000176208_9 (sequence is synthesized)
taaagatactaaacagatggagaatactacaagccatgcaaactctagagataacgtaactgaagcagcccagttaaatgatagtataataactgtctcatatgaggaatttttaaaaag

SEQ ID NO: 610975 - DNA, 120 bp, Artificial Sequence
  ENSG00000176208_10 (sequence is synthesized)
tcacaaggaaaataaagtggaagagataccagactctacaatgtcaatttgtgttccttctgaaactgtcgacgaaatagtcaaaagtggttatataagtgaatcagaaaactccgaaat

SEQ ID NO: 610976 - DNA, 120 bp, Artificial Sequence
  ENSG00000176208_11 (sequence is synthesized)
ttcccagcaggtacgctttaagacagttactgttcttgcacaggttcaccctattccgcccaaaaagacagggaaaataccccgaattttcttgaaacaaaagcaatttgaaatggaaaa

SEQ ID NO: 610977 - DNA, 120 bp, Artificial Sequence
  ENSG00000176208_12 (sequence is synthesized)
tagtttatctgatcctgagaatgaacagacagttcagaaaagaaaatctaatgttgttatacaggaggaagaattagaattggctgttttggaagctggaagttctgaagctgtgaaacc

SEQ ID NO: 610978 - DNA, 120 bp, Artificial Sequence
  ENSG00000176208_13 (sequence is synthesized)
aaaatgcactctagaagaaagacagcaatttatgaaagcatttaggcagccagcatcagatgcacttaaaaatggagttaaaaagtcttctgataagcagaaagaccttaatgaaaaatg

SEQ ID NO: 610979 - DNA, 120 bp, Artificial Sequence
  ENSG00000176208_14 (sequence is synthesized)
tctatatgaagtaggaagagatgataattctaaaaaaatcatggaaaattctggtatccaaatggtttcaaaaaatggcaatttacagttacacactgataaaggaagttttctgaagga

SEQ ID NO: 610980 - DNA, 120 bp, Artificial Sequence
  ENSG00000176208_15 (sequence is synthesized)
gaaaaataaaaagctaaagaagaagaataagaaaacattagatactggggctattccaggcaaaaacagagagggaaacactcaaaagaaagaaacaacctttttcttaaaagagaaaca

SEQ ID NO: 610981 - DNA, 120 bp, Artificial Sequence
  ENSG00000176208_16 (sequence is synthesized)
atatcaaaatagaatgagtttaagacaaaggaaaacagagtttttcaaaagcagcactttatttaacaatgaaagtcttgtttatgaagatatagcaaatgatgaccttctaaaggtttc

SEQ ID NO: 610982 - DNA, 120 bp, Artificial Sequence
  ENSG00000176208_17 (sequence is synthesized)
ctctctgtgtaacaataataaattgtcaagaaaaaccagcataccagttaaagatattaagcttacacagtctaaagctgaatctgaagccagcttgctaaatgtttccacgcccaagtc

SEQ ID NO: 610983 - DNA, 120 bp, Artificial Sequence
  ENSG00000176208_18 (sequence is synthesized)
aactagaagatctggaagaattagcagcacacctactacagaaaccattagaggtattgattctgacgatgtacaagataatagtcaactaaaggcttccactcaaaaagcagccaactt

SEQ ID NO: 610984 - DNA, 120 bp, Artificial Sequence
  ENSG00000176208_19 (sequence is synthesized)
atcggaaaagcacagcttatatacagcagaattaataacagtaccctttgattcagagagccctattagaatgaaattcaccagaattagtactcccaaaaaatctaagaaaaaatctaa

SEQ ID NO: 610985 - DNA, 120 bp, Artificial Sequence
  ENSG00000176208_20 (sequence is synthesized)
caaaagatctgagaaatctgaagcaactgatggaggttttacttctcagattagaaaggcaagcaatacttcaaaaaacatatcaaaagcaaaacaattgattgaaaaagcaaaagcttt

SEQ ID NO: 610986 - DNA, 120 bp, Artificial Sequence
  ENSG00000176208_21 (sequence is synthesized)
acacatcagtaggtcaaaggtgactgaagaaatagcgatacccttaaggcgctcctctagacatcagacacttcctgaaaggaagaaattgtcagaaacagaagattctgttataataat

SEQ ID NO: 610987 - DNA, 120 bp, Artificial Sequence
  ENSG00000176208_22 (sequence is synthesized)
agattcaagtcctactgctttaaagcatccagagaaaaatcagaagaaacttcagtgtttgaatgatgtgctaggaaaaaaacttaacacatccactaaaaatgtacctggaaaaatgaa

SEQ ID NO: 610988 - DNA, 120 bp, Artificial Sequence
  ENSG00000176208_23 (sequence is synthesized)
agtcgctcctttatttcttgtcagaaaagcacaaaaagcagctgatcctgtccctagttttgatgaaagcagtcaagatacatctgaaaaatctcaggattgtgatgttcaatgtaaagc

SEQ ID NO: 610989 - DNA, 120 bp, Artificial Sequence
  ENSG00000176208_24 (sequence is synthesized)
aaagcgtgacttcctaatgagtggtttgccagatttgttgaaacggcaaattgcaaagaaagctgctgcgctggatgtgtacaatgcagtgagtaccagtttccagagagtcgtacatgt

SEQ ID NO: 610990 - DNA, 120 bp, Artificial Sequence
  ENSG00000176208_25 (sequence is synthesized)
gcaacaaaaggatgatgggtgttgtttgtggcatttgaaaccaccctcttgtcctctcttaactaaatttaaagaactgaacactaaagtaatagatctctcaaaatgtggtattgctct

SEQ ID NO: 610991 - DNA, 120 bp, Artificial Sequence
  ENSG00000176208_26 (sequence is synthesized)
tggtgaattttcaacattgaattcaaagttgaaaagcggtaactctgctgctgtgttcatgaggacaaggaaggaatttactgaagaagtaagaaatcttttgcttgaggaaattaggtg

SEQ ID NO: 610992 - DNA, 120 bp, Artificial Sequence
  ENSG00000176208_27 (sequence is synthesized)
gtcaaatcctgaattttcattgaaaaaatattttcccttactcctaaaaaaacaaattgagcaccaagtactttcttccgagtgtcatagtaaacaagaactggaggctgatgtcagcca

SEQ ID NO: 610993 - DNA, 120 bp, Artificial Sequence
  ENSG00000176208_28 (sequence is synthesized)
aaattctaagtcaaaaagaaagaaaccaaatgagtattcaaaaaatctggagaagaccaataggaagtcagaagaacttagcaaaagaaacaactcttctgggataaagctagattcttc

SEQ ID NO: 610994 - DNA, 120 bp, Artificial Sequence
  ENSG00000176208_29 (sequence is synthesized)
caaagattctggaactgaagacatgctttggacagaaaagtatcaacctcagactgccagtgaacttataggaaatgagttagctataaaaaagttacatagttggttgaaagactggaa

SEQ ID NO: 610995 - DNA, 120 bp, Artificial Sequence
  ENSG00000176208_30 (sequence is synthesized)
aagaagagctgaattggaagaaaggcagaatctgaagggaaaaagagatgagaaacatgaagatttctcgggtggcatagactttaaaggcagttcagatgatgaagaagagagtcgtct

SEQ ID NO: 610996 - DNA, 120 bp, Artificial Sequence
  ENSG00000176208_31 (sequence is synthesized)
ttgcaatactgtccttataacagggccaacaggagtgggaaaaactgctgcagtgtatgcttgtgcccaggagcttggatttaagatatttgaagtgaatgcctcttcccagcgcagtgg

SEQ ID NO: 610997 - DNA, 120 bp, Artificial Sequence
  ENSG00000176208_32 (sequence is synthesized)
tagacaaattctatctcagttgaaggaagctactcagtcccatcaagtagacaaacaaggtgtaaactcacaaaaaccctgtttttttaatagctactacataggcaagtcaccaaaaaa

SEQ ID NO: 610998 - DNA, 120 bp, Artificial Sequence
  ENSG00000176208_33 (sequence is synthesized)
aataagctcccctaagaaagttgttacatcaccaagaaaagttcctccaccatcaccaaaaagtagtggaccaaagcgagcacttcctcccaaaaccttggcaaattattttaaagtatc

SEQ ID NO: 610999 - DNA, 120 bp, Artificial Sequence
  ENSG00000176208_34 (sequence is synthesized)
tcccaaacctaaaaataatgaagaaataggaatgcttctggaaaataataaaggaataaaaaattcttttgaacagaaacaaattactcagactaaatctacaaatgcaactaattcaaa

SEQ ID NO: 611000 - DNA, 120 bp, Artificial Sequence
  ENSG00000176208_35 (sequence is synthesized)
tgtcaaagacgttggagctgaagaacccagcagaaaaaatgcaacatctcttattctttttgaggaggttgatgtaatttttgatgaagatgctgggtttttgaatgcaatcaaaacatt

SEQ ID NO: 611001 - DNA, 120 bp, Artificial Sequence
  ENSG00000176208_36 (sequence is synthesized)
catggcaacaactaaacgacctgtaatccttactacaagtgacccaacatttagtttaatgtttgatggctgctttgaagaaatcaagttcagtactccttccctgctaaatgttgccag

SEQ ID NO: 611002 - DNA, 120 bp, Artificial Sequence
  ENSG00000176208_37 (sequence is synthesized)
ctacctacaaatgatttgcttaactgagaattttagaactgatgtaaaagactttgtaaccttgttaactgcaaatacttgtgatatcagaaaaagtatcctttacttacaattctggat

SEQ ID NO: 611003 - DNA, 120 bp, Artificial Sequence
  ENSG00000176208_38 (sequence is synthesized)
tagaagtggaggtggagttttagaagaacgaccattaaccctttatcgtggaaatagcagaaatgtacaactagtttgctctgaacatggccttgataacaaaatttaccctaaaaatac

SEQ ID NO: 611004 - DNA, 120 bp, Artificial Sequence
  ENSG00000176208_39 (sequence is synthesized)
taaaaagaaacgtgtagaccttccaaaatgtgacagtggctgtgctgagaccttgtttggccttaagaacattttttccccatctgaagacttattttcatttttaaagcacaaaatcac

SEQ ID NO: 611005 - DNA, 120 bp, Artificial Sequence
  ENSG00000176208_40 (sequence is synthesized)
aatgaaggaagaatggcataaattcatccagcttcttacagaattccaaatgcggaatgtagattttttatatagtaatcttgagtttattctaccattaccagttgataccattccaga

SEQ ID NO: 611006 - DNA, 120 bp, Artificial Sequence
  ENSG00000176208_41 (sequence is synthesized)
aactaaaaacttttgtggcccatcagtaactgtggatgccagtgcagcaacaaaaagtatgaattgtcttgctaggaaacactctgaaagagaacagccattgaaaaagtcccagaaaaa

SEQ ID NO: 611007 - DNA, 120 bp, Artificial Sequence
  ENSG00000176208_42 (sequence is synthesized)
gaaacaaaagaaaacattggtaatattagatgatagtgatctatttgacactgacttggactttcctgatcaatctattagcctgtcctctgtatcatcttcctcaaatgcagaagaaag

SEQ ID NO: 611008 - DNA, 120 bp, Artificial Sequence
  ENSG00000176208_43 (sequence is synthesized)
caaaaccggagacgaagaaagcaaagccagagacaaaggaaacaatccagagacaaagaaatctattccttgtcctcctaaaacaactgcaggaaaaaaatgttctgcccttgtttctca

SEQ ID NO: 611009 - DNA, 120 bp, Artificial Sequence
  ENSG00000176208_44 (sequence is synthesized)
ttgtttaaattctctctctgagttcatggataacatgtccttcttagatgcacttttaactgatgtaagggaacaaaacaaatacggtagaaatgactttagttggacaaatggaaaggt

SEQ ID NO: 611010 - DNA, 120 bp, Artificial Sequence
  ENSG00000176208_45 (sequence is synthesized)
tacaagtggactttgtgatgagtttagtcttgagagtaatgatggatggacttctcaaagctctggagaattaaaggcagctgcagaagctctcagctttactaaatgttcttctgctat

SEQ ID NO: 611011 - DNA, 120 bp, Artificial Sequence
  ENSG00000176208_46 (sequence is synthesized)
ttcaaaagcattggaaaccttgaattcttgcaagaaattaggaagagatccaaccaacgatcttactttttatgtttcacaaaagcgcaataatgtatactttagtcagtcagcagctaa

SEQ ID NO: 611012 - DNA, 120 bp, Artificial Sequence
  ENSG00000176208_47 (sequence is synthesized)
tttagacaatgcttggaagaggatatcagtcattaaaagtgtattttcgagtcgatctcttctctatgtgggtaatagacaagctagtataattgaatacctgccaacccttcgaaacat

SEQ ID NO: 611013 - DNA, 120 bp, Artificial Sequence
  ENSG00000176208_48 (sequence is synthesized)
ctgtaagactgagaagctaaaagaacaaggaaaaagtaaaagaagattcctgcactattttgaaggaattcatcttgacattccaaaagagactgtgaatactttggcagctgacttccc

SEQ ID NO: 611014 - DNA, 120 bp, Artificial Sequence
  ENSG00000176208_49 (sequence is synthesized)
ttaatgttccatactaacaatgctttgtatagattatcatgtggtccttaagatacatttttatattatgtggatcttcatggaaaagtatatttctcgatgtacattttaaacaaacaa

SEQ ID NO: 611015 - DNA, 120 bp, Artificial Sequence
  ENSG00000176208_50 (sequence is synthesized)
tttattggcgggtaaatatttaaaatatttgagttacaaattttatatatgattgtaattttttttctgaattttttgtattatctgatttagctttgttggagtattttttgtatgtga

SEQ ID NO: 611016 - DNA, 120 bp, Artificial Sequence
  ENSG00000176208_51 (sequence is synthesized)
ttttgtatgtgagtgaactgtttctggaaggtagagttcattaagatgaactccctatttcaagtgtttatattatatattagcttaatattcagatacattatcttggctgctaacatt

SEQ ID NO: 611017 - DNA, 120 bp, Artificial Sequence
  ENSG00000176208_52 (sequence is synthesized)
agtgtcactaaagttggtatacaatctcccactgctaaatttgactggctttacaaaaacaaaaacattatctggtgaattatatttttaacctaaaagttaaggatcctcatattgtac

SEQ ID NO: 611018 - DNA, 70 bp, Artificial Sequence
  ENSG00000176208_53 (sequence is synthesized)
agctgggattacaggcataccatgttggttaggctggtctcttaactcctgacctcaagtgatccatctg

SEQ ID NO: 611019 - DNA, 120 bp, Artificial Sequence
  ENSG00000176208_54 (sequence is synthesized)
tgctgggatcacaggcgtgagccacctcacctggcctatattgtacagttttgaacagtatagatgcatacctgtttacaaatgtgtatgaagatagatatttttacctcttatttgttc

SEQ ID NO: 611020 - DNA, 120 bp, Artificial Sequence
  ENSG00000176208_55 (sequence is synthesized)
tgtttacaaatgtgtatgaagatagatatttttacctcttatttgttcaatttactttttcttgtattaattagtatattgatctaattaaaggttaaagctaaaggctttatgaaatgt

SEQ ID NO: 611021 - DNA, 120 bp, Artificial Sequence
  ENSG00000176208_56 (sequence is synthesized)
tattttttatcttctacacgtacacgtttcctgcccacccctgccagattattttaaaacaaatctgaagaccatcatatcatttcacccataccttcttcaatatttatctctatctga

SEQ ID NO: 611022 - DNA, 120 bp, Artificial Sequence
  ENSG00000176209_0 (sequence is synthesized)
gtaaccgtttcccgcgcgcccggccccgactccggggtaaagagccccggagcggagcagcgctggccgcgtgccgcctccggagccggcagcccccatggctgggggttatggagtgat

SEQ ID NO: 611023 - DNA, 120 bp, Artificial Sequence
  ENSG00000176209_1 (sequence is synthesized)
gggtgacgatggttctattgattatactgttcacgaagcctggaatgaagccaccaatgtttacttgatagttatccttgttagcttcggtctcttcatgtatgccaaaaggaacaaaag

SEQ ID NO: 611024 - DNA, 120 bp, Artificial Sequence
  ENSG00000176209_2 (sequence is synthesized)
gagaattatgaggatattcagtgtgccacctacagaggaaactttgtcagagcccaacttttatgacacgataagcaagattcgtttaagacaacaactggaaatgtattccatttcaag

SEQ ID NO: 611025 - DNA, 120 bp, Artificial Sequence
  ENSG00000176209_3 (sequence is synthesized)
agagcaacagaagtaattgtttcaagctcctgattctttctactaaatcatgaacagctttaaaaacatttctgtctgcataaaattattttacttgtaacttttccccaattgttctgt

SEQ ID NO: 611026 - DNA, 120 bp, Artificial Sequence
  ENSG00000176209_4 (sequence is synthesized)
gcattgttttgcctttttaaattacatctccaagtggctcaaaaggccttgacacagggaacctgcacatatccaggatatgtgtaaccagcgatggtgacttgaccttgccaagacctg

SEQ ID NO: 611027 - DNA, 120 bp, Artificial Sequence
  ENSG00000176209_5 (sequence is synthesized)
tgattccttcaggatacaatcagtgagaaataaaaacacatcttgggaagtgggaatcctggagtttatgccatttgcaatattaaaaaataaaaatgcaagttattatttcaataataa

SEQ ID NO: 611028 - DNA, 120 bp, Artificial Sequence
  ENSG00000176209_6 (sequence is synthesized)
ccgcccgcctgccctcggtcccgtgcggtccccgaaactccgagcacccgcccggtcccggcgcggagcccctcggcgtcgcgtggagctgcgagtcgcccgcttccggaagcgcacacg

SEQ ID NO: 611029 - DNA, 120 bp, Artificial Sequence
  ENSG00000176209_7 (sequence is synthesized)
cgcttccggaagcgcacacgggccagttgcggcggcccatctgccggggcggcgggggctcggcgggagggttgaggctgaatcacgcgcagcctgcgggcggcggaaacgtccctagag

SEQ ID NO: 611030 - DNA, 120 bp, Artificial Sequence
  ENSG00000176209_8 (sequence is synthesized)
gctcggtaaccgtttcccgcgcgcccggccccgactccggggtaaagagccccggagcggagcagcgctggccgcgtgccgcctccggagccggcagcgtgagtggccccgcgtccccgc

SEQ ID NO: 611031 - DNA, 120 bp, Artificial Sequence
  ENSG00000176209_9 (sequence is synthesized)
gctccacttgactttcttccggaaggagcaggtctcgcaggatcggggccaagactggaagagttcaggtttgggagtcgtgtgtataacagccccgcgcctccacgcccaggcctgtgt

SEQ ID NO: 611032 - DNA, 120 bp, Artificial Sequence
  ENSG00000176209_10 (sequence is synthesized)
ggctttggacaagttatataaccaccgccgccaccccagtttcttctcctgtaaaatggagctttagtgccgcccagcagggttgttgggataattcagtgactctgtggactgcccagc

SEQ ID NO: 611033 - DNA, 120 bp, Artificial Sequence
  ENSG00000176209_11 (sequence is synthesized)
gtggcacaatctctgctcactgcaacttccacctcccgggtttaaacgattctcctgccacagcctcctgaatattctgttaacagctctttaattaatgatctttgcttcttcagaact

SEQ ID NO: 611034 - DNA, 120 bp, Artificial Sequence
  ENSG00000176209_12 (sequence is synthesized)
aattaatgatctttgcttcttcagaacttgtatggtagaccgtcttttctacagcatgatgcatactcctgtgctaattttagaagctttctgtaactagatttttcctcattatgctcc

SEQ ID NO: 611035 - DNA, 120 bp, Artificial Sequence
  ENSG00000176209_13 (sequence is synthesized)
caggagcgagtttgtttttatccccgtttcatttctaccaggtagctctactttaggccatactggggacctgctgttgaataaatggatgcctgtgtattggtgttggcaactctgcgg

SEQ ID NO: 611036 - DNA, 120 bp, Artificial Sequence
  ENSG00000176209_14 (sequence is synthesized)
tagtagtgctaccactggcgaggcagtattactgccactggtgaatgttgctgtctggttactgctgcatttttggcatgctaagctttcctaaagagcctcatatcttttcccatgctg

SEQ ID NO: 611037 - DNA, 120 bp, Artificial Sequence
  ENSG00000176209_15 (sequence is synthesized)
tactgtacaatgaaatgtttttacctaatttttcatgtttatttaaataaaagctgactgggtaatagtggggaagtttaattgtccacataagtcaaaagaatccgtttttgaactaga

SEQ ID NO: 611038 - DNA, 61 bp, Artificial Sequence
  ENSG00000176209_16 (sequence is synthesized)
gagtttgagaccagcctggccaacgtggttaaacccaatctctacgaagaatacaaaaatt

SEQ ID NO: 611039 - DNA, 77 bp, Artificial Sequence
  ENSG00000176209_17 (sequence is synthesized)
aggcgacagagcaagacttcgtctcagaaaaaaaaaaaaaagttaataatggcttcaagtatttcattttcccctta

SEQ ID NO: 611040 - DNA, 120 bp, Artificial Sequence
  ENSG00000176209_18 (sequence is synthesized)
aaaagttaataatggcttcaagtatttcattttccccttattgtgaaataaactatatacattttaaatggaaattaaggtttagaccaaataaaatcattcagggaaattgcatttact

SEQ ID NO: 611041 - DNA, 120 bp, Artificial Sequence
  ENSG00000176209_19 (sequence is synthesized)
tttaaaaatgtgttgttcaaaaatgtatatatagtacaaagtgaattgaccaaacagaataattcttaactcacaaaggagtttgagcgcacttcctacatgttgaatttaaatctgact

SEQ ID NO: 611042 - DNA, 120 bp, Artificial Sequence
  ENSG00000176209_20 (sequence is synthesized)
aaaggattgtaaacagttgtaattatgggttgtagtaacagagcaacaaggggacaatcttctaaacttgcctttgcctaggagagctactgtatatttccacaagtgaatttaatcagc

SEQ ID NO: 611043 - DNA, 120 bp, Artificial Sequence
  ENSG00000176209_21 (sequence is synthesized)
agtaggagtggtttactcgtcactgacatgtggcacaatctggacaaattacacaaactggctatctcagatgtgtaaaattaatgtacataaataaacgtaagtcacacaatgaatttc

SEQ ID NO: 611044 - DNA, 120 bp, Artificial Sequence
  ENSG00000176209_22 (sequence is synthesized)
ctttgtgtccactagatagagatggtcctaactacaaactagtagattatttgatgagcatcaagccctggcaagtgacaggagatgaattcctctccgttttttccttaaagcaaactg

SEQ ID NO: 611045 - DNA, 120 bp, Artificial Sequence
  ENSG00000176209_23 (sequence is synthesized)
atgggaattgcacacaccccactggcaggaacaacagcaagccggctttgaagtctcttccctgcttcaacagctgaattggggagagcgcaagccctgcagccacacttcaaagcggcg

SEQ ID NO: 611046 - DNA, 120 bp, Artificial Sequence
  ENSG00000176209_24 (sequence is synthesized)
ctgactggctgtcctgcttctacccaacatccacctgagactcaacagaactgttttctttggaagaaaaatggaactactaataagctagtaattaacccttgtattctttttctggtt

SEQ ID NO: 611047 - DNA, 120 bp, Artificial Sequence
  ENSG00000176209_25 (sequence is synthesized)
tcatcttcctgttttaatgtgtaagatattcagcagtaagcactggtcagcctgccctggtgcacagcttgagtgtgttaaataactggctgtttagctgatgccagccagctgcgtgaa

SEQ ID NO: 611048 - DNA, 120 bp, Artificial Sequence
  ENSG00000176209_26 (sequence is synthesized)
ggggagaaggccgcctccaaggacacagatgtttgctgttgacctcacgctgtgtctggttgagttattcatgattcatcagaaaatgacatgcaaggtttatggtaaaactgctgtaca

SEQ ID NO: 611049 - DNA, 120 bp, Artificial Sequence
  ENSG00000176209_27 (sequence is synthesized)
atcagaagtattttaagtatgcattagaagtaagataaaatagtaataaaaatagtttcagatgttaagatgatacaagaataaatttaacctagaaaataaagggagaaggaataaaag

SEQ ID NO: 611050 - DNA, 120 bp, Artificial Sequence
  ENSG00000176209_28 (sequence is synthesized)
ttgtgttaaatggatgtgttcagctacttttctcacagcctcatactttttagtgaaagaaagaatactttgagccaaggaagcagctctcaaagacaaaatagaaagtaaaatggtctt

SEQ ID NO: 611051 - DNA, 120 bp, Artificial Sequence
  ENSG00000176219_0 (sequence is synthesized)
atgttctttattattcattctttggttacttctgtttttctaacagctttgggaccccagaacagaacaatgcattttgtgactgagtttgtcctcctgggtttccatggtcaaagggag

SEQ ID NO: 611052 - DNA, 120 bp, Artificial Sequence
  ENSG00000176219_1 (sequence is synthesized)
atgcagagctgcttcttctcattcatcctggttctctatctcctgacactgctagggaatggagctattgtctgtgcagtgaaattggacaggcggctccacacacccatgtacatcctt

SEQ ID NO: 611053 - DNA, 120 bp, Artificial Sequence
  ENSG00000176219_2 (sequence is synthesized)
ctgggaaactttgcctttctagagatctggtacatttcctccactgtcccaaacatgctagtcaatatcctctctgagattaaaaccatctccttctctggttgcttcctgcaattctat

SEQ ID NO: 611054 - DNA, 120 bp, Artificial Sequence
  ENSG00000176219_3 (sequence is synthesized)
ttctttttttcactgggtacaacagagtgtttctttttatcagttatggcttatgatcggtacctggccatctgtcgtccattacactacccctccatcatgactgggaagttctgtata

SEQ ID NO: 611055 - DNA, 120 bp, Artificial Sequence
  ENSG00000176219_4 (sequence is synthesized)
ctctgctatccagtccctattgttcttatctcccaacttcccttctgtgggcccaacatcattgaccacttggtgtgtgacccaggcccattgtttgcactggcctgcatctctgctcct

SEQ ID NO: 611056 - DNA, 120 bp, Artificial Sequence
  ENSG00000176219_5 (sequence is synthesized)
tccactgagcttatctgttacaccttcaactcgatgattatctttgggcccttcctctccatcttgggatcttacactctggtcatcagagctgtgctttgtattccctctggtgctggt

SEQ ID NO: 611057 - DNA, 120 bp, Artificial Sequence
  ENSG00000176219_6 (sequence is synthesized)
cgaactaaagctttctccacatgtgggtcccacctaatggtggtgtctctattctatggaacccttatggtgatgtatgtgagcccaacatcagggaacccagcaggaatgcagaagatc

SEQ ID NO: 611058 - DNA, 120 bp, Artificial Sequence
  ENSG00000176219_7 (sequence is synthesized)
atcactctggtatacacagcaatgactccattcttaaatccccttatctatagtcttcgaaacaaagacatgaaagatgctctaaagagagtcctggggttaacagttagccaaaactga

SEQ ID NO: 611059 - DNA, 120 bp, Artificial Sequence
  ENSG00000176222_0 (sequence is synthesized)
atggcccgggtgccattgacattcagcgatgttgccatagacttctctcaggaggagtgggaatatttaaactcggatcagagggatttgtacagagatgtgatgttggagaattatact

SEQ ID NO: 611060 - DNA, 120 bp, Artificial Sequence
  ENSG00000176222_1 (sequence is synthesized)
aacttggtctcattggactttaatttcacaactgaaagcaacaagttatcttcagaaaaaagaaattatgaagtaaatgcgtaccatcaggagacatggaaaagaaataaaaccttcaac

SEQ ID NO: 611061 - DNA, 120 bp, Artificial Sequence
  ENSG00000176222_2 (sequence is synthesized)
cttatgaggtttattttcagaactgacccacagtacacaattgaatttgggagacaacagagacctaaagtgggatgttttagtcaaatgatattcaaaaaacataaatcccttcctcta

SEQ ID NO: 611062 - DNA, 120 bp, Artificial Sequence
  ENSG00000176222_3 (sequence is synthesized)
cataagagaaataacacaagagagaaatcatatgagtgtaaggaatataagaagggctttagaaaatatttgcaccttactgaacatctgagagaccatactggtgtgataccctatgaa

SEQ ID NO: 611063 - DNA, 120 bp, Artificial Sequence
  ENSG00000176222_4 (sequence is synthesized)
tgtaatgaatgtggaaaagcatttgtagttttccagcattttattagacatcgaaaaatccacactgatttgaaaccctatgaatgcaatggatgtgagaaggcctttaggttttattca

SEQ ID NO: 611064 - DNA, 120 bp, Artificial Sequence
  ENSG00000176222_5 (sequence is synthesized)
cagcttattcagcatcagataattcatactggtatgaaaccctatgaatgtaagcaatgcgggaaggcttttagacgtcattctcaccttacagaacatcagaaaattcatgttggcttg

SEQ ID NO: 611065 - DNA, 120 bp, Artificial Sequence
  ENSG00000176222_6 (sequence is synthesized)
aaaccctttgaatgtaaggaatgtggggaaacgtttagattatatcgacatatgtgtctgcatcagaaaattcatcatggtgtgaaaccctacaaatgtaaagaatgtggaaaggctttt

SEQ ID NO: 611066 - DNA, 120 bp, Artificial Sequence
  ENSG00000176222_7 (sequence is synthesized)
aaccatataaatgtgaacaatgtgaaaaggcctttgttcgcagctatctacttgttgaacatcaaagaagtcatactggtgagaaacctcatgaatgcatggaatgtggaaaggcttttg

SEQ ID NO: 611067 - DNA, 120 bp, Artificial Sequence
  ENSG00000176222_8 (sequence is synthesized)
gtaagggctcaagccttcttaaacataagagaattcatagtagtgagaaactctatgattgtaaggattgtggaaaggccttttgtagaggctctcaacttacacagcatcagagaattc

SEQ ID NO: 611068 - DNA, 120 bp, Artificial Sequence
  ENSG00000176222_9 (sequence is synthesized)
atactggtgagaagccacatgaatgtaaagaatgtgggaagacttttaagcttcattcatatcttattcaacatcagataattcatactgatttgaagccatatgaatgtaagcaatgtg

SEQ ID NO: 611069 - DNA, 120 bp, Artificial Sequence
  ENSG00000176222_10 (sequence is synthesized)
ggaaagccttcagtcgtgttggagaccttaagacacatcaatcaattcatgctggggagaaaccctatgaatgtaaggaatgtggaaaaacctttagacttaattctcaactaatttatc

SEQ ID NO: 611070 - DNA, 120 bp, Artificial Sequence
  ENSG00000176222_11 (sequence is synthesized)
atcagacaattcatactggtttgaaaccctatgtatgtaaagaatgtaagaaggcctttcgttctatctcaggtctttctcaacataagagaattcatactggtgaaaaaccctatgaat

SEQ ID NO: 611071 - DNA, 120 bp, Artificial Sequence
  ENSG00000176222_12 (sequence is synthesized)
gtaaagaatgtgataaggcctttaatcgcagtgatcgacttactcaacatgagacaattcatactggtgtgaaaccacagaaatgcaaagaatgtggtaaggcctttagtcattgctatc

SEQ ID NO: 611072 - DNA, 120 bp, Artificial Sequence
  ENSG00000176222_13 (sequence is synthesized)
aacttagtcaacatcaaagatttcaccatggtgagagactcttaatgtaatgagagggaaagcctttagccatggcacatttttactgttgtcactattatgatgctatagtgaagatta

SEQ ID NO: 611073 - DNA, 120 bp, Artificial Sequence
  ENSG00000176222_14 (sequence is synthesized)
aactagttaatatagaatataaatacttggaaaggcatctggcacatcgtatttgcttactaaatacattatttttatgataattgttagaattactaaaaataaatcttatagaaggaa

SEQ ID NO: 611074 - DNA, 120 bp, Artificial Sequence
  ENSG00000176222_15 (sequence is synthesized)
gattcatggaggcgtgaaggatcccagcaagaaaacacagacttgatcttgagacgagatttttgaaattggttgcggcctcaaggcaggctctgagaagactcgataaagagttctcag

SEQ ID NO: 611075 - DNA, 120 bp, Artificial Sequence
  ENSG00000176222_16 (sequence is synthesized)
gaataggcatccctcctggatatttcccccttggaagcgccgaggagccagctctatgtttgtaaccatagcatttctaaagctccagccccaggaacctgctgtgaattagagacagat

SEQ ID NO: 611076 - DNA, 120 bp, Artificial Sequence
  ENSG00000176222_17 (sequence is synthesized)
cttgtattgggaaggtcaacactgttccagtttctctcctactcccatctggttgtgctcggtgaagtaggtgagcagtgctacccttctgttaaaaaaaaaaaaaaaaaaaagatcctg

SEQ ID NO: 611077 - DNA, 120 bp, Artificial Sequence
  ENSG00000176222_18 (sequence is synthesized)
aaagaggaaagaatttttgctacacatctgaaagctaaagtccaggtgatgccttgattacctagctttggcttctctgaactctgcttctctgatagaggaaacctgaagagaactagc

SEQ ID NO: 611078 - DNA, 90 bp, Artificial Sequence
  ENSG00000176222_19 (sequence is synthesized)
actctgcttctctgatagaggaaacctgaagagaactagcatttctgaaaccatggcccgggtgatccgcctgcctcaccctccggcacc

SEQ ID NO: 611079 - DNA, 120 bp, Artificial Sequence
  ENSG00000176225_0 (sequence is synthesized)
ctccggcggctgcagattgacgggacgagatggtcctggcagggctcatcaggaaactcggtcatcagctggccgagatcagggagcgcgctctcaagagtattctctgcaagattgagc

SEQ ID NO: 611080 - DNA, 120 bp, Artificial Sequence
  ENSG00000176225_1 (sequence is synthesized)
acaacttaatctgctacgctgatctcattcaggagaggcaactttttcttcatttgctggaatggttcaatttcccgtccgttccgatgaaggaagaggttctgaacctgttaagcagat

SEQ ID NO: 611081 - DNA, 120 bp, Artificial Sequence
  ENSG00000176225_2 (sequence is synthesized)
tggttaagtatcccccagcagtccaacatttggttgacgttggtgcagtagagttcttatctaagcttcggtctaatgtggagccaaatctgcaggctgaaattgatggcattctggatg

SEQ ID NO: 611082 - DNA, 120 bp, Artificial Sequence
  ENSG00000176225_3 (sequence is synthesized)
gactttttcttcttccttcggaagttcctgcactatcttctgcctcataccaaaccaatcaaactgaattgtcaaaaaaccctgaaatcttaacaggatattttccccaagacaaaagta

SEQ ID NO: 611083 - DNA, 120 bp, Artificial Sequence
  ENSG00000176225_4 (sequence is synthesized)
atttccagcagatggaagtgccgccacgaccagtggtaaatcagactgtgaagtgcttgaagttttctacatttccttggctacccctgaccaccacagacagacatgtcctctcctcta

SEQ ID NO: 611084 - DNA, 120 bp, Artificial Sequence
  ENSG00000176225_5 (sequence is synthesized)
atgaaagctctttaagaagtagtaaccacactttaatctggaacacctgtgaactattgaaggatgttatcatgcaagattttcctgctgagattttccttcaaaggccaaaaattgttc

SEQ ID NO: 611085 - DNA, 120 bp, Artificial Sequence
  ENSG00000176225_6 (sequence is synthesized)
agagccttttatctctgttgaaactggcctttggagatggaaagcatcgcctggcattacagtcggtgtcctgcctgcagcagctgtgcatgtatttaagaaacagacttaactttcacc

SEQ ID NO: 611086 - DNA, 120 bp, Artificial Sequence
  ENSG00000176225_7 (sequence is synthesized)
gagatccaggttttttctccaataaacacgacacagtttcccaaaattcttctttgtcttattgtcatgaagcaagaggtactcatcattcccagaatccttccccaggaagcagcagcc

SEQ ID NO: 611087 - DNA, 120 bp, Artificial Sequence
  ENSG00000176225_8 (sequence is synthesized)
ctcggccttctgtggttgggcgcacaggccagcgacccagaggagatggccaggactgggatgcagcgtcctctagtggaagtagtagtcatgctcatgtaaactccaggatatccgttc

SEQ ID NO: 611088 - DNA, 120 bp, Artificial Sequence
  ENSG00000176225_9 (sequence is synthesized)
attcacctttggatatgggacacatagatctgccagagctggaaactgaagacacattggaactacaattccagcagctcagtcttccccagttttgtgtctccattctggaatcagctg

SEQ ID NO: 611089 - DNA, 120 bp, Artificial Sequence
  ENSG00000176225_10 (sequence is synthesized)
ttcctctcttaagaacaggtagcagacaagtgataataagagttctggaattgcttacagaggatatgacacttattggtgaagcaatttcaacagatatctgggatgacagcagccttt

SEQ ID NO: 611090 - DNA, 120 bp, Artificial Sequence
  ENSG00000176225_11 (sequence is synthesized)
ttggtatagatatgaaggagaaactactcctggtgttgggagcccttggagaaaccatgtgctaccataaaagtagtatcagtttggagcagccagaggtgatgcttgtgcaccacagaa

SEQ ID NO: 611091 - DNA, 120 bp, Artificial Sequence
  ENSG00000176225_12 (sequence is synthesized)
tggcctttatcagcatttccctgtttgcagttcgactgctacaaacgcttctccctgttgaaaaggcaagcgagtttttatcagagcctatgtcaacagcattatttctcctttctttgg

SEQ ID NO: 611092 - DNA, 120 bp, Artificial Sequence
  ENSG00000176225_13 (sequence is synthesized)
acatgcctatttctttggaatatccaaatattcatgaagctgttgtggcctatttggaacagctgaattctgaaaactacagtatttataaacgaactgcagaggccgtttattcaattg

SEQ ID NO: 611093 - DNA, 120 bp, Artificial Sequence
  ENSG00000176225_14 (sequence is synthesized)
aatgcacctgtaacttcctgtctgatattgggaaagagggagagaagaatctcttagaattagtggagctggcagaccaagccttgcgtagcttttcctatcatcagcatttcccgctaa

SEQ ID NO: 611094 - DNA, 120 bp, Artificial Sequence
  ENSG00000176225_15 (sequence is synthesized)
taaaggaaatcatcagcatttgttcaaagatctggaaatctgctcaggccagtccattactacaaggagaaagtcagaaggtgcttctccatatgttgtctcacccattgccacgagtga

SEQ ID NO: 611095 - DNA, 120 bp, Artificial Sequence
  ENSG00000176225_16 (sequence is synthesized)
aagctgaaacttaccactgctgtctggaaatcacgaaggaatgtttaggtgtccataatgtcactaaacccgtgtcttcactttgcaatggaattcattttctacttcatccaaaagttc

SEQ ID NO: 611096 - DNA, 120 bp, Artificial Sequence
  ENSG00000176225_17 (sequence is synthesized)
tgtatgaaatctctgtatttggcattcaagagcccgaaagtgaggtgaacactgctgccaaggccattctgttatacctgcttcagggacgattgatgatgacagcattgacctggaaca

SEQ ID NO: 611097 - DNA, 120 bp, Artificial Sequence
  ENSG00000176225_18 (sequence is synthesized)
agtttattgaatctctctgtcctgtcatcccaatactacagggctatgccgacacagaagatcctctgggtaactgcattctccttctaagcaaagcaagttctgacacagaagagatgc

SEQ ID NO: 611098 - DNA, 120 bp, Artificial Sequence
  ENSG00000176225_19 (sequence is synthesized)
ttccgtgtactacccgattaaagtccatgctgcgacttttgctagtgaaaaagccatcggtccgttcgctagcattaaagcttttagcattccatcttaccagtgaagaaggggctgata

SEQ ID NO: 611099 - DNA, 120 bp, Artificial Sequence
  ENSG00000176225_20 (sequence is synthesized)
caaagcgtcctctaatagacgccagagttctctccagagttactgatttattcattgggaagaaacctattgaactcagactggatgacagaagagagctggttattaagttggagactg

SEQ ID NO: 611100 - DNA, 120 bp, Artificial Sequence
  ENSG00000176225_21 (sequence is synthesized)
ttgaaaaggtatatgaaatcttcacctcagatgatgttgatctcgttttgagaaagtcagctgctgaacagttagctgtgattatgcaagatattaaaatgcatgctgtggtgaaaaagt

SEQ ID NO: 611101 - DNA, 120 bp, Artificial Sequence
  ENSG00000176225_22 (sequence is synthesized)
tatgcttaattgacaaaataattgagtatttaaatgaatgtgtgagtcaagatggcaaggttgtagaatgtttggtacaaccatgcctcacactcttgaggaaggttttatgtggtgatc

SEQ ID NO: 611102 - DNA, 120 bp, Artificial Sequence
  ENSG00000176225_23 (sequence is synthesized)
cagtcatgcgtgtttcgctctcgcaacagtcttctcttttgaccgtgttattcagagtttccttaatatttcatgaagattgtagtgtcgtgactgaagttggagcactattttgtcttc

SEQ ID NO: 611103 - DNA, 120 bp, Artificial Sequence
  ENSG00000176225_24 (sequence is synthesized)
tattatttgatgaagtatcgagaatggatatgtggtctgttaatccttccaataaaccttctttgccatcggtcttcagtttgcctgtttccgtttttagaaggtaccatctacctgttc

SEQ ID NO: 611104 - DNA, 120 bp, Artificial Sequence
  ENSG00000176225_25 (sequence is synthesized)
atgtaattggacaccatgctgtgagtccttactccatagttttgcccttatctgctgattgtttggccttgaagccggtgtcagatatgctgagaatagcttggaacctgtcatggtatc

SEQ ID NO: 611105 - DNA, 120 bp, Artificial Sequence
  ENSG00000176225_26 (sequence is synthesized)
atgggagtgataatctgttgaagcaaatgaactctgaaactaaaacgcaagaaattttagatgcattgaagttatctacagaggacatcctcactctgaagataacacacatggctagtg

SEQ ID NO: 611106 - DNA, 120 bp, Artificial Sequence
  ENSG00000176225_27 (sequence is synthesized)
ggctgcaggactgcctccattccattgttcaggctgcaacccacagggaagttagggctgctgtcaccaggatgagtttttatcttctgaatgacagattgtctttaaagggttgccctg

SEQ ID NO: 611107 - DNA, 120 bp, Artificial Sequence
  ENSG00000176225_28 (sequence is synthesized)
gtccatgtggggttaccttgaagtccttggcttggcacaccgcactaaacaggtttttacaggtgcttcctgcttgcactgaagatgagaaactgctaatagatatcatacattttttaa

SEQ ID NO: 611108 - DNA, 120 bp, Artificial Sequence
  ENSG00000176225_29 (sequence is synthesized)
ataaattaataaaggaacaaagaaaaaattcttcactagaacttctaaactggattctcgaattacttcttagacatagtgcaaacccactgttagacctcttggttctgacagagtcac

SEQ ID NO: 611109 - DNA, 120 bp, Artificial Sequence
  ENSG00000176225_30 (sequence is synthesized)
aggcacgagaagaaacagatgatatccggactgctgtcaggcaacaacttcagaaagaactgattgctctttttgataccttgctgctcaatttcatggaagttactgacaggaaatgct

SEQ ID NO: 611110 - DNA, 120 bp, Artificial Sequence
  ENSG00000176225_31 (sequence is synthesized)
cggaacttctttacgtttttcaaacgcagctggctctgaaactgctccagtgtctgaaagtgacggatgcgcctcatttctatggcctgccgtcccttgagcggaccttacgagggatgg

SEQ ID NO: 611111 - DNA, 120 bp, Artificial Sequence
  ENSG00000176225_32 (sequence is synthesized)
cacactctcctctcacaaagcctctagatatctgtgtgaagtacttgtcaggtctccttgaggtcattacttctttttatgtggagcgtggaggaaatgctatgtccttcatgggaaaag

SEQ ID NO: 611112 - DNA, 120 bp, Artificial Sequence
  ENSG00000176225_33 (sequence is synthesized)
gtgttacaaagagcacaattctttgcttgcttcacttatcccatgagatgatggcccaggctgggagcttggagtggatgtcactttggttcttgcctttgggtagtcatagtgaagaac

SEQ ID NO: 611113 - DNA, 120 bp, Artificial Sequence
  ENSG00000176225_34 (sequence is synthesized)
atattcctactcaacaaggattggcttggttgattccattatgggttgatcgggacccagaggtgagattcacttcactgggattaggatcagcactgaccacccttgaaacgggctgtg

SEQ ID NO: 611114 - DNA, 120 bp, Artificial Sequence
  ENSG00000176225_35 (sequence is synthesized)
tggccttagcaaacagttgtcagaacatttccggtgggctctggggaactgtggtgaacattcttctggaccagtcagaatgtagtatggtgcgccgggaggcggcatttattcttcaga

SEQ ID NO: 611115 - DNA, 120 bp, Artificial Sequence
  ENSG00000176225_36 (sequence is synthesized)
atctccttgtaattccaatgcctacagaaattataaaggattatacttggcagggtccctgtgttcatgatgaggactctggcctatcgctcattggaaaacctgcccttcaggctcttt

SEQ ID NO: 611116 - DNA, 120 bp, Artificial Sequence
  ENSG00000176225_37 (sequence is synthesized)
tatatcactgccatttttatgaacatttgaatcagatggtaaagcattgttacctaggacggtgtatgtttgatttgaatttttctgcttttgatagaaattcagaaagcaatgatttaa

SEQ ID NO: 611117 - DNA, 120 bp, Artificial Sequence
  ENSG00000176225_38 (sequence is synthesized)
atggtttagatgactcattcaagttttggagggctccatctaggacaagtcaggatcgagatccaagttctctctccacctcagaaacaacggtggcaccttcattggggagtactgaat

SEQ ID NO: 611118 - DNA, 120 bp, Artificial Sequence
  ENSG00000176225_39 (sequence is synthesized)
ttcagccacttgtgcagtcaacaacacttctacctgaagcctcccatgaccagtttgtggctcaaggtcaccaggaaagtacatcaccacggccacctcatgattcatctctttctgctc

SEQ ID NO: 611119 - DNA, 120 bp, Artificial Sequence
  ENSG00000176225_40 (sequence is synthesized)
ccctgcccaaactgtgtgtttttgttactccatctcttctttcagcaatgtgcagcctcttggacaacctcttgacgattgctcccagagacactgcaaaggcttttcgacaagctcatc

SEQ ID NO: 611120 - DNA, 120 bp, Artificial Sequence
  ENSG00000176225_41 (sequence is synthesized)
tcatagaacttctctgtagcattgcagatgctaccctcatacagacatgtgtccaggaactcagagccctgctgccttcatcacctccagctgaacacactcaggctcaggtttcctttc

SEQ ID NO: 611121 - DNA, 120 bp, Artificial Sequence
  ENSG00000176225_42 (sequence is synthesized)
tcctggaatacctatcctctttgtccaggcttctgcagtcatgtttattggtggagcctgaccttgtgattcaggatgagcttgtgaaacctcttatcaccaatatcattggaattctca

SEQ ID NO: 611122 - DNA, 120 bp, Artificial Sequence
  ENSG00000176225_43 (sequence is synthesized)
ccatatgtaccaaagatgtattagataaagagttaatatcagctttttatcacacatggacacatttatttaatcttctggccatgctcctgaggaaagctggtgccatcacactcccgt

SEQ ID NO: 611123 - DNA, 120 bp, Artificial Sequence
  ENSG00000176225_44 (sequence is synthesized)
ttgttaccgtggccctggccaagcactggacagcggcgattgatatgttctgcacatgtgcaggcttgtctgccacgtgtcctgccctgtatactgccagcttgcaattcctttctgttc

SEQ ID NO: 611124 - DNA, 120 bp, Artificial Sequence
  ENSG00000176225_45 (sequence is synthesized)
tcttgaccgaagaagcaaaagggcatctccaggctaagagcaaaacacatttatgctgtagtccaacagtggcttcacttcttgatgactctcaggaaaatcagaaatctctagaacaac

SEQ ID NO: 611125 - DNA, 120 bp, Artificial Sequence
  ENSG00000176225_46 (sequence is synthesized)
ttagtgatgtaatccttcagtgctatgaagggaaatcctccaaagatatcctgaaaagagtagctgcaaatgcattgatgtcactgctggctgtcagtagaagagcacagaaacatgctt

SEQ ID NO: 611126 - DNA, 120 bp, Artificial Sequence
  ENSG00000176225_47 (sequence is synthesized)
tgaaagccaatcttatagacaattgcatggagcagatgaaacacataaatgcacaactgaacctagattctctgaggcctgggaaagcagcattgaaaaaaaaggaggatggtgttatta

SEQ ID NO: 611127 - DNA, 120 bp, Artificial Sequence
  ENSG00000176225_48 (sequence is synthesized)
aagagttaagcattgccatgcagctcctaagaaactgtctttatcaaaatgaggaatgtaaagaagcagctcttgaagctcaccttgtccctgtcttgcactctctctggccttggattt

SEQ ID NO: 611128 - DNA, 120 bp, Artificial Sequence
  ENSG00000176225_49 (sequence is synthesized)
tgatggatgattcattgatgcaaatttctctgcagctcctttgtgtctatactgcaaattttccaaatggttgcagttctctttgttggtcaagttgtggacaacaccctgttcaagcta

SEQ ID NO: 611129 - DNA, 120 bp, Artificial Sequence
  ENSG00000176225_50 (sequence is synthesized)
cacatagaggagccgtgagcaactctctgatgctgtgtatcctaaagttggcttcccagatgccactggagaacaccacggttcagcagatggtttttatgcttctttcaaacctggcct

SEQ ID NO: 611130 - DNA, 120 bp, Artificial Sequence
  ENSG00000176225_51 (sequence is synthesized)
tgtcgcatgactgtaaaggagtaattcagaagagtaacttcttacagaacttcctctctctagcattgccaaaaggaggaaataaacatctaagtaatctgactattctttggttgaagt

SEQ ID NO: 611131 - DNA, 120 bp, Artificial Sequence
  ENSG00000176225_52 (sequence is synthesized)
tactcctgaatatatcatctggagaagatgggcaacaaatgattctgaggcttgatggctgtctagacttactaacagagatgagcaaatacaagcacaagagcagccctttattgcctc

SEQ ID NO: 611132 - DNA, 120 bp, Artificial Sequence
  ENSG00000176225_53 (sequence is synthesized)
ttcttatctttcataatgtttgcttcagtcctgcaaataaacccaagatcctggctaatgaaaaagtcattactgtgcttgctgcctgtctggaaagtgagaatcaaaatgctcagagga

SEQ ID NO: 611133 - DNA, 120 bp, Artificial Sequence
  ENSG00000176225_54 (sequence is synthesized)
ttggagcagctgccctttgggctctgatttacaattatcagaaggcaaaaacagctttgaaaagcccatcagtaaaaagaagagtggatgaagcatactccttagcaaagaaaactttcc

SEQ ID NO: 611134 - DNA, 120 bp, Artificial Sequence
  ENSG00000176225_55 (sequence is synthesized)
caaactcagaagcaaaccctctaaatgcctattatttgaaatgtcttgaaaacctcgtgcagctccttaattcttcctgagtgccatgggatgctacaccttgaagctgacagtcatcaa

SEQ ID NO: 611135 - DNA, 120 bp, Artificial Sequence
  ENSG00000176225_56 (sequence is synthesized)
caggggagctaaagttgaagccagctgtgtgtagcagctgttacctgaagacgtgctacctctctacaaagtgttgatccccttctttcccatgagagagagaactggtgatactccaac

SEQ ID NO: 611136 - DNA, 120 bp, Artificial Sequence
  ENSG00000176225_57 (sequence is synthesized)
accgtccagttgtggcagctctccagaagtaatagcagctgacaactttctgtgccttttcctttctgttgaaaaggcatagaaagttctgggaacataaacatttttacccttttctat

SEQ ID NO: 611137 - DNA, 120 bp, Artificial Sequence
  ENSG00000176225_58 (sequence is synthesized)
ctatgccatttattttgtaaaaatcctatttaacagttatttaataaaacaatatttttagaaactaaaaattgactaataattgctgcttacagacttttatcagtctcatgaatatta

SEQ ID NO: 611138 - DNA, 120 bp, Artificial Sequence
  ENSG00000176225_59 (sequence is synthesized)
taggagttgaaataagacactgtgtcctggttgtttctctctttttttaaattttaactgatgtaaaatttggctctgtcagtgcaaatccttattttcaaaactttctgttatccagag

SEQ ID NO: 611139 - DNA, 120 bp, Artificial Sequence
  ENSG00000176225_60 (sequence is synthesized)
catccacactggaaaagggctatgtagaagtaagtgtgcattatttgtaaagggctgtgtggaagtaaatgtacatgatttgtaagtagctttcttaggcaagttttagtgatgttatct

SEQ ID NO: 611140 - DNA, 120 bp, Artificial Sequence
  ENSG00000176225_61 (sequence is synthesized)
tcttcctagatgactcttaaatcattacatgtataatcttcaccgttgtcttctgcaaggctgtgtaataaagaagaaagaaatagagttggggctgtataagcctgggttcaaatttag

SEQ ID NO: 611141 - DNA, 120 bp, Artificial Sequence
  ENSG00000176225_62 (sequence is synthesized)
ctcagcccaaaacatcatgaagaatagagtaagactgaaaaatgcagaagatggccgggcttggtggctcatgcttatactttcagctctttgggagaccgaggtaggtggatcacttga

SEQ ID NO: 611142 - DNA, 88 bp, Artificial Sequence
  ENSG00000176225_63 (sequence is synthesized)
ttcctggtcttgagcgtctataatctcagctactccagtggctgaggcacgagaatctcttcaacctgggaggcagggaggttgcagt

SEQ ID NO: 611143 - DNA, 78 bp, Artificial Sequence
  ENSG00000176225_64 (sequence is synthesized)
cttgagcgtctataatctcagctactccagtggctgaggcacgagaatctcttcaacctgggaggcagtgggtgacaa

SEQ ID NO: 611144 - DNA, 120 bp, Artificial Sequence
  ENSG00000176225_65 (sequence is synthesized)
aggggtagtttagatagaaatggagagaggggaatgtgtccccagaaggagaaaggaggaaattgatgacagttctcctgttcagcagttttacaaggacccattttaataagtgctatg

SEQ ID NO: 611145 - DNA, 120 bp, Artificial Sequence
  ENSG00000176225_66 (sequence is synthesized)
aggaaaactaatcctaaaatttccataagataggtgatagaagtatatacgaaacttactttcagtggaaagtaattcctagtatttatttacattttagtttcagataattttgatgaa

SEQ ID NO: 611146 - DNA, 120 bp, Artificial Sequence
  ENSG00000176225_67 (sequence is synthesized)
aacgcataaaatttagagtaagataatattatggtctgtttgatctcacctgataattggtgaaaatgaaaagctgtgtttttcctcctggcccaggttgtagaatgtttggtacaacca

SEQ ID NO: 611147 - DNA, 120 bp, Artificial Sequence
  ENSG00000176225_68 (sequence is synthesized)
ccatgaccagtttgtggctcaagggaatcgacactttggaacaaatatccaattttagagcttggacgaggaaagaacaagatgaacctggaacatcttgctgtgccagaaagtcaccag

SEQ ID NO: 611148 - DNA, 120 bp, Artificial Sequence
  ENSG00000176225_69 (sequence is synthesized)
gctgccataacaaaataccacagactgggtggcttagacaacagacacttcttttctcatagaagttttggaagctgaaagtccaagatcagagtgccggcatagtcaagttctggtgag

SEQ ID NO: 611149 - DNA, 120 bp, Artificial Sequence
  ENSG00000176225_70 (sequence is synthesized)
tgtcttgctaggttggggaagttctcttgcatttaatatcctgaagagtattttccaacttggttccatttttccccatcactctcaggtacaccagtcaaacataggttgcttcttttc

SEQ ID NO: 611150 - DNA, 120 bp, Artificial Sequence
  ENSG00000176225_71 (sequence is synthesized)
gtacaccagtcaaacataggttgcttcttttcacacagtcccatatttcttggatgctttgttcattccttttcttttttttttttctctaatcttgtcttcacgctttatttcgttaag

SEQ ID NO: 611151 - DNA, 84 bp, Artificial Sequence
  ENSG00000176225_72 (sequence is synthesized)
ttttttctctaatcttgtcttcacgctttatttcgttaagttgatcttcaatctctgacatcctttcttctgcttgatcgattt

SEQ ID NO: 611152 - DNA, 80 bp, Artificial Sequence
  ENSG00000176225_73 (sequence is synthesized)
ccaagagaagagttattctggttttgggaattttcatcctttttgcactgggttttcctcattttcgtggatttatctac

SEQ ID NO: 611153 - DNA, 120 bp, Artificial Sequence
  ENSG00000176225_74 (sequence is synthesized)
tcctttttgcactgggttttcctcattttcgtggatttatctacctttggtttttgatgttggtgaccattggatggggtttttgtgtggatgtccttttggttgatgttgatgctattc

SEQ ID NO: 611154 - DNA, 88 bp, Artificial Sequence
  ENSG00000176225_75 (sequence is synthesized)
attcctttctgtttgttagttttcttcctaacgggcctctctgctgcaggtctttgggagttggctggaggtccactcctgcacagaa

SEQ ID NO: 611155 - DNA, 120 bp, Artificial Sequence
  ENSG00000176225_76 (sequence is synthesized)
tcctctggaagcttcatcccagagggcaccccccagatgccagctagagctctcctgtatgatgtgtctgtcaacacctgttgggaggtgtctcccagtcaggaggcacgagcgtcaggg

SEQ ID NO: 611156 - DNA, 85 bp, Artificial Sequence
  ENSG00000176225_77 (sequence is synthesized)
ggcacgagcagcagagctcgagcactgtgctgggaggtccactgctctcttcagagacagcaggcaggaacatttaagtctgctg

SEQ ID NO: 611157 - DNA, 120 bp, Artificial Sequence
  ENSG00000176225_78 (sequence is synthesized)
gctgagctgtggtgggctctgcccagtttgaacttcccagtgccttcgtttgcactgtgaagggaaacaggctacttaagcctcattaatggtggacacccctctccccaccaagctcga

SEQ ID NO: 611158 - DNA, 120 bp, Artificial Sequence
  ENSG00000176225_79 (sequence is synthesized)
tacttaagcctcattaatggtggacacccctctccccaccaagctcgagcatcccaggtcgacttcagactgctgtgcaggcagtgagaattttaagccagtggatcttagtttgctggg

SEQ ID NO: 611159 - DNA, 120 bp, Artificial Sequence
  ENSG00000176225_80 (sequence is synthesized)
gggatctgttgagctaggccacttggcaccctggcttcagccccctttccaggggactgaacaactctgtctcactggcattccaggcactactgagatgagctgggtacctcagttgga

SEQ ID NO: 611160 - DNA, 120 bp, Artificial Sequence
  ENSG00000176225_81 (sequence is synthesized)
acccgccttctgcattgatctcactggaagctgcagaccggagcttcctattgagccatcttgccagccaccctagtcatttttaaaaaacatcaagcagtgtgatatttgatgatcgtt

SEQ ID NO: 611161 - DNA, 120 bp, Artificial Sequence
  ENSG00000176225_82 (sequence is synthesized)
ttgatgatcgtttttgtatagtagctcatgctactgatgtgtttgtatgatagtctttataatttatcatgaaagcagatctgtttttctgcctgccagaatgttagctgtaattgagta

SEQ ID NO: 611162 - DNA, 120 bp, Artificial Sequence
  ENSG00000176225_83 (sequence is synthesized)
gtctttgacccttctatgcctgacatgaaaacaatgttttgaggttgtcctcccatataccacatggcataaaagattggttttgccatagtctagtgataccaactttatgtatgcatt

SEQ ID NO: 611163 - DNA, 120 bp, Artificial Sequence
  ENSG00000176225_84 (sequence is synthesized)
ctaatgggaaaagaggggggtgtctgactagtccaagataagaatacaatgcagtgtctgggactgaacttttaaaaaatatatgttcatttttagaaaaagtcattactgtgcttgctg

SEQ ID NO: 611164 - DNA, 120 bp, Artificial Sequence
  ENSG00000176225_85 (sequence is synthesized)
acaaggtataacccaggtataaactcttaggatacatccaaaggtgtcaagagttacagcaaaagaaaaaagacaaaatcaaagatccatgttccctttgctgattcatacaattagtaa

SEQ ID NO: 611165 - DNA, 120 bp, Artificial Sequence
  ENSG00000176225_86 (sequence is synthesized)
accatcagttgaaatctttttatttaatcatttcaacagaatgtctcagtttagaagagaatctctgaactgactttttcctcttaatttaaattgatttactttattattgcaatttta

SEQ ID NO: 611166 - DNA, 120 bp, Artificial Sequence
  ENSG00000176225_87 (sequence is synthesized)
gtatagattgtttcttctaaaagacgtatcaagggaaaacacatcttaaagtaaaactgagtaacaaaagttttatccaattgtacaattcccctttatctagctcagttcttgtacgac

SEQ ID NO: 611167 - DNA, 120 bp, Artificial Sequence
  ENSG00000176225_88 (sequence is synthesized)
tgcagcccaaagcctgctctgagaaaagggcaggcaacgtggagatttgtgttctactctttctctggcctttggacttccactttattgcagacatgttgttcccaagagaaataccca

SEQ ID NO: 611168 - DNA, 120 bp, Artificial Sequence
  ENSG00000176225_89 (sequence is synthesized)
taagtatctagtgattaagtagtagccaagtgacagtgttaggatagacagccatcctagaatggtgttctctcagctgactgtctctgccggggctagttttctccctgctggccagag

SEQ ID NO: 611169 - DNA, 120 bp, Artificial Sequence
  ENSG00000176225_90 (sequence is synthesized)
tcacgtacacaaggacaagagggtgttgttttctttctcacctgggtatccccagagcttagcacaggatttggcactttgtagtcactctgtaaatatttgttgaccaactgctaatat

SEQ ID NO: 611170 - DNA, 120 bp, Artificial Sequence
  ENSG00000176225_91 (sequence is synthesized)
ttggtatatgtgatcagaaatctgaggtttgagggagtatgaaaaactgaaaccaaggatgactagtttaaaatagcaaattgagattaggggagaaggagtaaaagagaagggaagaaa

SEQ ID NO: 611171 - DNA, 120 bp, Artificial Sequence
  ENSG00000176225_92 (sequence is synthesized)
gaaaatgggaatagagaaagaatcaagttagataagaggatatgggcaagacttcagaatgtgcaaggggattggctcaataggatgtattatgctaagatggaactctctagttatatt

SEQ ID NO: 611172 - DNA, 120 bp, Artificial Sequence
  ENSG00000176225_93 (sequence is synthesized)
attatatttcataatattctgtttaatactgtagttagcaatgggcagaattagtgttttgctatcatgatccataacacatggcaagaaacctaattaatggattgttctaggcaaaaa

SEQ ID NO: 611173 - DNA, 85 bp, Artificial Sequence
  ENSG00000176225_94 (sequence is synthesized)
aaacattaacacaggtataggccttgtgttaaaccctggcttcatactttttttgaccatgatccacggtaaggacagataaata

SEQ ID NO: 611174 - DNA, 120 bp, Artificial Sequence
  ENSG00000176225_95 (sequence is synthesized)
actttttttgaccatgatccacggtaaggacagataaatattacatcgcaactcagtgctcagtacttgaacatatgctctgtttatgtatatatatgtgtgtgtatgtgtcccccaaaa

SEQ ID NO: 611175 - DNA, 120 bp, Artificial Sequence
  ENSG00000176225_96 (sequence is synthesized)
tatggctgaataatattcctttgcatgtatatcccacattttattcatctatgcatttgtcgatggacatgtgggttgtacccacatttggcggttgtgaataatgcttcagtgaacatt

SEQ ID NO: 611176 - DNA, 120 bp, Artificial Sequence
  ENSG00000176225_97 (sequence is synthesized)
ggcatgcaagtatctgtgcagtgcctggtttcaattcttttgggtaatacccagtgaataatagtgaaattgctgcgtcatatggaaattctatctttagctttttgaagaatcaccaaa

SEQ ID NO: 611177 - DNA, 120 bp, Artificial Sequence
  ENSG00000176225_98 (sequence is synthesized)
ctattttccacagcagctgtaccatttacatttctatcagcaatatataaagcttccagtttttccacatcatcactgacttgttcatttttttcttttttaaaaataatcgtagtcatc

SEQ ID NO: 611178 - DNA, 86 bp, Artificial Sequence
  ENSG00000176225_99 (sequence is synthesized)
ctagtagatgtgaagagacctaataattaatgaccaatgaatctctaataactttttatgtgcttattgtttgttcatgtatcttc

SEQ ID NO: 611179 - DNA, 120 bp, Artificial Sequence
  ENSG00000176225_100 (sequence is synthesized)
gttgagtttttttgtccaatctgacattatttacagttttaatggaatattttaatgcattttacatttactataattactaatatttttggatacagattattagcttgctattttcta

SEQ ID NO: 611180 - DNA, 120 bp, Artificial Sequence
  ENSG00000176225_101 (sequence is synthesized)
tttgtccaatgtggtttttttctttctttttcctctctggcttttcttgattaatttttaaaattagtccatgttttccagctgttaacttgtagttacatatacattaagtattttatt

SEQ ID NO: 611181 - DNA, 90 bp, Artificial Sequence
  ENSG00000176225_102 (sequence is synthesized)
gctgttaacttgtagttacatatacattaagtattttatttatttatttatttgtagcgattgggatcttgcttttcaagcaattctccc

SEQ ID NO: 611182 - DNA, 120 bp, Artificial Sequence
  ENSG00000176225_103 (sequence is synthesized)
gagtcactgtgcccagctaagtattcttctatatacattatttctatatattttatacagatgattattcttttataatatagagattataatttacttccttgactgtgaactagtatt

SEQ ID NO: 611183 - DNA, 120 bp, Artificial Sequence
  ENSG00000176225_104 (sequence is synthesized)
ccacatcccagacaatgcaaggaccttagaacacattaattccatttatttgctcttcttttttttttcttttattgtcaggtatttaaattctatacatattttaaattctataagatg

SEQ ID NO: 611184 - DNA, 120 bp, Artificial Sequence
  ENSG00000176225_105 (sequence is synthesized)
ttattataattattttatgcagtaaatagtcatttagatttgtataccgtggtcgtttctgttactttttattgcttttttggtttttctgcctccatctgagaatttgtttttttaaga

SEQ ID NO: 611185 - DNA, 120 bp, Artificial Sequence
  ENSG00000176225_106 (sequence is synthesized)
aagagttttttattatttaatgtagtgcacttatattagcaatgatttctgtcaggttttttttttttttaatctaaaaattctttctgttttaaaaaatgttatcactaggtatagaat

SEQ ID NO: 611186 - DNA, 120 bp, Artificial Sequence
  ENSG00000176225_107 (sequence is synthesized)
ggttggcagttggagtccatttttttgtaggaacattggctgtcagttttattgttgcttctttgaaggaactgtgttccccattctcttaggagttccttcagctatatcccacagcac

SEQ ID NO: 611187 - DNA, 120 bp, Artificial Sequence
  ENSG00000176225_108 (sequence is synthesized)
tttgcttgcttgcttatttatttgggggagtttattttatttttatgggtatataatagtacatatttatggagtacatgtgatattttgatataagcatacaatgtataatgatcaaat

SEQ ID NO: 611188 - DNA, 120 bp, Artificial Sequence
  ENSG00000176225_109 (sequence is synthesized)
cagagtaattaggatgtccattacctctaacatttattgattctctgtgttaggaacatttcagatctgctcttctagttattttgaaatatacaacaaattactgttaactatttttac

SEQ ID NO: 611189 - DNA, 120 bp, Artificial Sequence
  ENSG00000176225_110 (sequence is synthesized)
cctattgtgctactgaacactagatcttattccttctatctaaatttttatgtacccattagccatcccttcttaattccccccttccccaccatcctttacagcctgtggtaatcatca

SEQ ID NO: 611190 - DNA, 120 bp, Artificial Sequence
  ENSG00000176225_111 (sequence is synthesized)
ttctactctttatctccatgagatcatttttttttttttttagctcccacatataaaggagaacatgtgatgtttgtttttctgtgcctggattatttcagttaacgtaatgacttccag

SEQ ID NO: 611191 - DNA, 120 bp, Artificial Sequence
  ENSG00000176225_112 (sequence is synthesized)
ttccatccatgttgtttcaagtgacaggatttcattcttttttacatctgaatgatactccattgtgtatttataccacattttaaaaaatccattcatctattgatggacacttaggta

SEQ ID NO: 611192 - DNA, 120 bp, Artificial Sequence
  ENSG00000176225_113 (sequence is synthesized)
tattgatggacacttaggtagattccatatcttggttattgtgaatagtgctacaataaacatgggagtgcatatatctctttgacataccaatttcctttcttttggatatatacccag

SEQ ID NO: 611193 - DNA, 120 bp, Artificial Sequence
  ENSG00000176225_114 (sequence is synthesized)
atgtaggttctgtttttagttttttgaggaactccatactgtttccaataatgactctactaatttacattcccactaacagtgtgtgagcattctccttcctccacatctttgccagca

SEQ ID NO: 611194 - DNA, 89 bp, Artificial Sequence
  ENSG00000176225_115 (sequence is synthesized)
agtgtgtgagcattctccttcctccacatctttgccagcatctgttatttttttttgtcttgttgataaaagcctttttaactggggtg

SEQ ID NO: 611195 - DNA, 120 bp, Artificial Sequence
  ENSG00000176225_116 (sequence is synthesized)
gttggtcatttgtatgtcttttaagaagtttctattcagatcttttgcccagcttttaattggattattattattattattttgctgttaagttgtttgagttccttatatattttgatg

SEQ ID NO: 611196 - DNA, 120 bp, Artificial Sequence
  ENSG00000176225_117 (sequence is synthesized)
gttaatctcttgccagttgaatagtttgcaagtgttttctctcattccataggtggtctcttcactttgttgactgtttcctttgctatgcagaagctttttagcttgatatgatcccat

SEQ ID NO: 611197 - DNA, 120 bp, Artificial Sequence
  ENSG00000176225_118 (sequence is synthesized)
ttacttatttttgctttgcttgcctgtgtttttgaggtcttacttaataaatctttgcccaggctaatgtcctgaagcatttctctaatgttttcttctagtagtttcatagttgcaggt

SEQ ID NO: 611198 - DNA, 120 bp, Artificial Sequence
  ENSG00000176225_119 (sequence is synthesized)
cttacattaagtctttaattcattttgatttgattttcatatgtggcgagagatagagatctagtttcatttttctgcatatggatatccagttttctgagtaccattcattgaagagac

SEQ ID NO: 611199 - DNA, 120 bp, Artificial Sequence
  ENSG00000176225_120 (sequence is synthesized)
tgttctttccccaaattatgttctcggtgcttttgttgaaaattgaccaaatgtgtgtatttatttgtgcattctttattctgttttattggtctgtgtgtctgtttttatgctagtatc

SEQ ID NO: 611200 - DNA, 120 bp, Artificial Sequence
  ENSG00000176225_121 (sequence is synthesized)
atgctgttttggttactatagctttgtagcataattcagagttaggcagtgtgatacctccctctttgttctttttgctcgggattgttttggctatttaggaccatgttttgttccata

SEQ ID NO: 611201 - DNA, 120 bp, Artificial Sequence
  ENSG00000176225_122 (sequence is synthesized)
tacattttaggagttttaaaatttctttttgttccttttaggatgcaaatttacatgcatgttagattatttcaccatgttaaaggaaaaacttgagacaaaatacacatgcatgtgtct

SEQ ID NO: 611202 - DNA, 120 bp, Artificial Sequence
  ENSG00000176225_123 (sequence is synthesized)
atttcttggttcttgttgaatttattgatgatgaaaccatgttctcaagtgaaaacaataagctggaattcagtcatttagtgacctctatgatcataggcaattcatttatcagcttta

SEQ ID NO: 611203 - DNA, 120 bp, Artificial Sequence
  ENSG00000176225_124 (sequence is synthesized)
agcctcatttttgatcatttgtaaaataggtatcatagtgccataccatgtaactgtgaatgaatgatacaaaataagcagtgtttggcataaagtaaatatcagtgttttagctgaaca

SEQ ID NO: 611204 - DNA, 120 bp, Artificial Sequence
  ENSG00000176225_125 (sequence is synthesized)
ccttttatgtttggttcactgtattcatggtccctgacttcaaggagcattagttatctccacaacaactctaatatagcatagaatgtggtaagtcctcaagaaaggatttaagtgttc

SEQ ID NO: 611205 - DNA, 120 bp, Artificial Sequence
  ENSG00000176225_126 (sequence is synthesized)
tggggagtttagaggagatgaaaagaataattgaaatactgtataaattatgataattgtttaaaatagggactaagagaaacctttgcattattgtgggttgggaggcattgaactagc

SEQ ID NO: 611206 - DNA, 120 bp, Artificial Sequence
  ENSG00000176225_127 (sequence is synthesized)
ttcatttccagttctaccacccagagagatgtattttcttcccgtcttctttctctgtatagcctttgtttgttttatgtaattatgttcatatcttgtgtacatttttgtatttccttc

SEQ ID NO: 611207 - DNA, 120 bp, Artificial Sequence
  ENSG00000176225_128 (sequence is synthesized)
tttcactaaatattctgcaagcatttttctatgttataaattcttcatggaaattatttttgacatcttattaatactttataagttatgcccatcagtacagttttatagtttctttct

SEQ ID NO: 611208 - DNA, 120 bp, Artificial Sequence
  ENSG00000176225_129 (sequence is synthesized)
ctgttaacgtctcaaacttttttggaactttcacttctaggcaatgtacagtttttttatccttcttgtgaatgagactttttcccactatattttctaattcattttgctcatgtatca

SEQ ID NO: 611209 - DNA, 120 bp, Artificial Sequence
  ENSG00000176225_130 (sequence is synthesized)
aaaagttatttattttagtatgttacttatttgtcacaatattttcctgaaacctttttattccttttgtttgtaggttcttgtagatttgctaagtataagatctgagcacataaaaat

SEQ ID NO: 611210 - DNA, 120 bp, Artificial Sequence
  ENSG00000176225_131 (sequence is synthesized)
cttctcttttgaccgtgttattcagagagacttaggccactgctttttgatattttgcaagagtcatgtagaatcatctgaatgtgctgaagagtcacgtacaagcatctgaatgtgctt

SEQ ID NO: 611211 - DNA, 120 bp, Artificial Sequence
  ENSG00000176225_132 (sequence is synthesized)
catcttgtctattatcaggcatataggagataagtgagatttatgttcaaaatatgttattataatgtagtcattttattttagcatcttttcctcctgttggcttctgcttgccaagtg

SEQ ID NO: 611212 - DNA, 120 bp, Artificial Sequence
  ENSG00000176225_133 (sequence is synthesized)
agtaagatgcagtttatttaagtagcagccctaaaaccaggtaaagctctaaacagattcagtgtgtttaggctcataacattttgagtggactataacgtttttataagattgtataga

SEQ ID NO: 611213 - DNA, 120 bp, Artificial Sequence
  ENSG00000176225_134 (sequence is synthesized)
ctgatcatctgaaagagcagcagttacggatttttagttttctttaatcctgttaataattgtcttcttattaacctcattcacttgaatttagttcctggtttaccttttcatttataa

SEQ ID NO: 611214 - DNA, 120 bp, Artificial Sequence
  ENSG00000176225_135 (sequence is synthesized)
ttttcatttaaattattcaagcatggaacttattatgaacacctactggattcaaaagcacatttcaaggcaatataatctatacccttttcagtatttcagtttttctatttcattgct

SEQ ID NO: 611215 - DNA, 120 bp, Artificial Sequence
  ENSG00000176225_136 (sequence is synthesized)
gtttgtggaaattactttcaatgagtttgagaatgaatatagtatcctccattaatggatttagtttcaggaaaaattttacttacttacttatttatttattgagaaagaatttcactc

SEQ ID NO: 611216 - DNA, 120 bp, Artificial Sequence
  ENSG00000176225_137 (sequence is synthesized)
tccttttcctctactgtttcttctccctgaactcctcagaagatactttgttatcaccacataaatagaaagttcggtctttctaaggaaatggaaagatcaatcttaccaaggaaagat

SEQ ID NO: 611217 - DNA, 120 bp, Artificial Sequence
  ENSG00000176225_138 (sequence is synthesized)
gttttcagtggcacgttggagccagcctcctactgactcatgagtgtcatcttaaatttgcaggaattttataaaaattccagttgatgttacattgttattttgaaatcagccacagtg

SEQ ID NO: 611218 - DNA, 120 bp, Artificial Sequence
  ENSG00000176225_139 (sequence is synthesized)
ttgtttatttaccagcacatggctggatattttcttcatgtatatgttcatgtatgtcatatatgtatatatatttgaatatattttcttcatatatgtattcatatacatgcatcactt

SEQ ID NO: 611219 - DNA, 120 bp, Artificial Sequence
  ENSG00000176225_140 (sequence is synthesized)
ccaaaatgagacattctcttgaactggatatatgtgattagcatccataagaatgagagattctgcatatgtgagagcagagcgggggcagtgctttccaccacttccttatagagcatg

SEQ ID NO: 611220 - DNA, 120 bp, Artificial Sequence
  ENSG00000176225_141 (sequence is synthesized)
ttggtgggaagctaagtgggagcacccagaaggaatagtaacttcttacagaacttcctctctctagcattgccaaaaggaggaaataaacatctaagtaatctgactattctttggttg

SEQ ID NO: 611221 - DNA, 120 bp, Artificial Sequence
  ENSG00000176225_142 (sequence is synthesized)
agacaagttatctcccatttctaaaattctgttcctttacacaggcctttatttagatgttttctttagcaactattaaaaaccctagtatgtttattttattctttttttaaaaataaa

SEQ ID NO: 611222 - DNA, 120 bp, Artificial Sequence
  ENSG00000176225_143 (sequence is synthesized)
cctggtgtcttaaagtgctttagtgagataattaggccctcagtgaggacagtatatctattaggttgactgtagacaccaacattagcctccattgctaatttgcagttcacaggttaa

SEQ ID NO: 611223 - DNA, 120 bp, Artificial Sequence
  ENSG00000176225_144 (sequence is synthesized)
tggcctagtcattttgttagacagatatgctttgccacttagtgtcttcaaaaactaaacagggaaactgagaagacattgtgataggctgttatttttgaaggttgcagttctctttgt

SEQ ID NO: 611224 - DNA, 120 bp, Artificial Sequence
  ENSG00000176225_145 (sequence is synthesized)
atgatacccagcaaagccagttctcagcatctcatcagtgttaaaatgatctcgatgttaaaggaatagtaattccttagaaattcaacaagtggcagtgataccctaactaagcttatt

SEQ ID NO: 611225 - DNA, 120 bp, Artificial Sequence
  ENSG00000176225_146 (sequence is synthesized)
attttctttcttaatgtgattacgttattattggacacttagggtgtgtgtaaacttagaaacagtgaaagtgaaactgactgtatatctttgttattattttttagtttaattgctttt

SEQ ID NO: 611226 - DNA, 120 bp, Artificial Sequence
  ENSG00000176225_147 (sequence is synthesized)
atatgtgtctgatttttaaagggtatatgtacagctgcattaggatacttaactgttatattcaagattaaacttcaaaaatgtcatgcctacaatcaaaatgaataatccttggatttt

SEQ ID NO: 611227 - DNA, 120 bp, Artificial Sequence
  ENSG00000176225_148 (sequence is synthesized)
tatacatttgtttttggtatccatccagactattcacacacattgtttatttatctttaaagttttaattaataacttaaactgagagttttgtaacttttattactttgtacctttttc

SEQ ID NO: 611228 - DNA, 120 bp, Artificial Sequence
  ENSG00000176225_149 (sequence is synthesized)
ttatgtggatttttagaaaagactgtgtattggttaatttattttgaggacatcagcaaatttctatttagaacttagtgtctttattgcttttggaaagaataaattctgtgatgtgat

SEQ ID NO: 611229 - DNA, 120 bp, Artificial Sequence
  ENSG00000176225_150 (sequence is synthesized)
tatgctgagaatagcttggaacctgtcatggtatcatgggagtgataatctgttgaagcaaatgaactctgaaactaaaacgcaagaatatgaatcactaggaaaagggtcctggattag

SEQ ID NO: 611230 - DNA, 120 bp, Artificial Sequence
  ENSG00000176225_151 (sequence is synthesized)
caagagcccgaaagtgaggtgtgtcaggtgacctagcgggacatctcatttgactggtttatcgggtctgtgttgttgagcaggtgaacactgctgccaaggccattctgttatacctgc

SEQ ID NO: 611231 - DNA, 120 bp, Artificial Sequence
  ENSG00000176230_0 (sequence is synthesized)
atggctctttatttttcactcatactccatggtatgagtgatcttttctttctctctacaggtcatccaagagcgagctgtaggatggaggccatgaaactattaaatcaatctcaagtg

SEQ ID NO: 611232 - DNA, 120 bp, Artificial Sequence
  ENSG00000176230_1 (sequence is synthesized)
tcagaattcattttgctgggactgaccagctcccaggatgtagagtttcttctctttgccctcttctcggttatctatgtggtcacagttttgggtaaccttcttattatagtcacagtg

SEQ ID NO: 611233 - DNA, 120 bp, Artificial Sequence
  ENSG00000176230_2 (sequence is synthesized)
tttaacacccctaacctgaatactcccatgtattttctccttggtaatctctcttttgtagatatgacccttgcttcttttgccacccctaaggtgattctgaacttgttaaaaaagcag

SEQ ID NO: 611234 - DNA, 120 bp, Artificial Sequence
  ENSG00000176230_3 (sequence is synthesized)
aaggtaatttcttttgctgggtgcttcactcagatatttctccttcacttactgggtggggttgaaatggtactgttggtctccatggcttttgacagatatgtggccatttgtaagccc

SEQ ID NO: 611235 - DNA, 120 bp, Artificial Sequence
  ENSG00000176230_4 (sequence is synthesized)
cttcactcagggtttcagataccatttgctgtgaacttgcccttttgtggtcccaatgtggtagacagcattttttgtgacctccctttggttactaagcttgcctgtatagacatatat

SEQ ID NO: 611236 - DNA, 120 bp, Artificial Sequence
  ENSG00000176230_5 (sequence is synthesized)
tttgtacaggtagtcattgttgccaacagtggcataatctccctgagctgtttcattattttgcttatctcctacagtctgatcctcataaccattaagaaccactctcctactgggcaa

SEQ ID NO: 611237 - DNA, 120 bp, Artificial Sequence
  ENSG00000176230_6 (sequence is synthesized)
tctaaagcccgttccactttgactgctcacatcacagtggtgattctcttctttggcccatgcatctttatctacatttggcccttcggcaaccactctgtagataagttccttgctgtg

SEQ ID NO: 611238 - DNA, 120 bp, Artificial Sequence
  ENSG00000176230_7 (sequence is synthesized)
ttttataccatcatcactcctatcttgaatccaattatctatactctgagaaacaaagaaatgaagatatccatgaaaaaactctggagagcttttgtgaattctagagaagatacttag

SEQ ID NO: 611239 - DNA, 120 bp, Artificial Sequence
  ENSG00000176230_8 (sequence is synthesized)
cctaattctaagagagacggtattaggaactcccctgattggagtctagatactttagtgacttgtttcttctatggaactataagttgagaaggtgcatgcccttctcgatattgtccc

SEQ ID NO: 611240 - DNA, 63 bp, Artificial Sequence
  ENSG00000176230_9 (sequence is synthesized)
gttcttttctattttccctaagtgttgactggtctgagaaataaagggaaagaggttccgtga

SEQ ID NO: 611241 - DNA, 83 bp, Artificial Sequence
  ENSG00000176230_10 (sequence is synthesized)
tccaggggagacatcacatgtcagcgggttccgtgatgccccccaagctgaggcagtgtacgaatagggtgtgggtcacagag

SEQ ID NO: 611242 - DNA, 120 bp, Artificial Sequence
  ENSG00000176230_11 (sequence is synthesized)
ggcaataaaatatcacaaggcaaatggggacagagcaagatcacaggaccagggtgaaattaacattgctaatgaagttttatgccccactgggcactcattgccattgataacatctta

SEQ ID NO: 611243 - DNA, 87 bp, Artificial Sequence
  ENSG00000176230_12 (sequence is synthesized)
accctaataggcctggggacactacaggagactggggcttatttcatcccttatctacagccgtgtaagacagacattgccagagcg

SEQ ID NO: 611244 - DNA, 120 bp, Artificial Sequence
  ENSG00000176230_13 (sequence is synthesized)
tcatcccttatctacagccgtgtaagacagacattgccagagcggccattttagagacctccccctaggaatgcattctccttctcagggttattccttgctgagaaaaagaattcagcg

SEQ ID NO: 611245 - DNA, 120 bp, Artificial Sequence
  ENSG00000176230_14 (sequence is synthesized)
attcagcgatatttctcctattcacttttgtaagaagagaaatatgactctgttccacccagctcccaggcagtcagacctaatggttatctctcttgttccctgaacatcgctgttatc

SEQ ID NO: 611246 - DNA, 78 bp, Artificial Sequence
  ENSG00000176230_15 (sequence is synthesized)
atttcatattgtttaaacacacatgctttatgaacaatttgtgccattaacaagaagatgatgggattaagagattaa

SEQ ID NO: 611247 - DNA, 80 bp, Artificial Sequence
  ENSG00000176230_16 (sequence is synthesized)
tttcacaatttatgttcagagattgtagtaaagacaggcatgagaaattatacaaatattaatttggggaactaataaat

SEQ ID NO: 611248 - DNA, 120 bp, Artificial Sequence
  ENSG00000176230_17 (sequence is synthesized)
gaactaataaatgtccatgaaatcttcaaaatttatgttcttctgtcacggcttcagcaggtccctctgttcggggtccctgacttcccgcaacagagccaaggcaggttgccttggctg

SEQ ID NO: 611249 - DNA, 61 bp, Artificial Sequence
  ENSG00000176230_18 (sequence is synthesized)
gcaggtccctctgttcggggtccctgacttcccgcaacagagccaaggcaggttgccttgg

SEQ ID NO: 611250 - DNA, 120 bp, Artificial Sequence
  ENSG00000176230_19 (sequence is synthesized)
tgccctccagcctgggtgacagagtgagagtccatcttaaaataataataataatagtagcagagaaacaataattttttatatttttaaaggtttctcttaagtatagagttattagct

SEQ ID NO: 611251 - DNA, 120 bp, Artificial Sequence
  ENSG00000176230_20 (sequence is synthesized)
acactgagatgaaggcaagtaaaatgcagtaagattacagtagtcagtcaagattatttttaatgcagcaccaaaaataataaattattgatttttaaaatgttgactgagttataaaag

SEQ ID NO: 611252 - DNA, 120 bp, Artificial Sequence
  ENSG00000176230_21 (sequence is synthesized)
gtgtcagagactcacttgtccttcagaggagcttgatagatatgtactttgtttagttgttacaatggcttttgatgtaaatgaaataaagtgaatcctcaaaatgtctgtcacattttt

SEQ ID NO: 611253 - DNA, 120 bp, Artificial Sequence
  ENSG00000176230_22 (sequence is synthesized)
actgtataattgagttaaatgatttggcactcactgtgagatcatgtttggttctctgtcttctttacaatattaatgtctaagtcagcactcatatgcagtgtctcctaagaaaccagt

SEQ ID NO: 611254 - DNA, 120 bp, Artificial Sequence
  ENSG00000176230_23 (sequence is synthesized)
aattcagactttccatatctacctacactcatttttcttgtagcttccaaaataagaattcatgaagatacctttatggttgttaatattataaaatctcactttcacctccttgtcccc

SEQ ID NO: 611255 - DNA, 120 bp, Artificial Sequence
  ENSG00000176230_24 (sequence is synthesized)
atgtatttcaattcaaaaaaactgtgtgtctgactccaaaaagaaaattatacattctaggtaaatgaactctagtcctagaaccaagatggttttcttgtgtgactgtgtgctgagcac

SEQ ID NO: 611256 - DNA, 120 bp, Artificial Sequence
  ENSG00000176230_25 (sequence is synthesized)
cggctcagccaccatagagaattagtttctacctcaaactcagagccactgcaactctgcacttacccatacttccgtcacaaggtccccagctatttcaaaagcacctgcaccttgcat

SEQ ID NO: 611257 - DNA, 120 bp, Artificial Sequence
  ENSG00000176230_26 (sequence is synthesized)
accattatagtttgggcagtggaattcctgggcccagatactgctgccattactatcccaaaccacagatctatagtacctccattcatacctgcgcttatggctccagatccatggctt

SEQ ID NO: 611258 - DNA, 120 bp, Artificial Sequence
  ENSG00000176230_27 (sequence is synthesized)
cccctagggtacccctcgtcagacatttatgccaaaaccaccacaagcagtttctcaagctggacccagtgccaagagggattcctccagccacaacatccccagtgggagaaaaagaga

SEQ ID NO: 611259 - DNA, 120 bp, Artificial Sequence
  ENSG00000176230_28 (sequence is synthesized)
tagaaaggactttagcagccctagccaccaaagaccacaacaatttttgtcaccacttcaaacatctacatcattggctgctgaagttccctacaatcttcatcaatgccaacctcagct

SEQ ID NO: 611260 - DNA, 120 bp, Artificial Sequence
  ENSG00000176230_29 (sequence is synthesized)
ggaggagctacacaaacacgacactgctgcaccttcacaatagtcagagcagttgtgttttactcaaccaatcccctcacacctccatacaggggaagttctttctgtactgaaaccagc

SEQ ID NO: 611261 - DNA, 120 bp, Artificial Sequence
  ENSG00000176230_30 (sequence is synthesized)
ctgtgaagtctggaagagatgactgctccaacaaatgcacagaaatctgcttaagacaacaagaaacaccaaaaaccaaaagggagtatcaccatgaaaggaacacaataattttccagt

SEQ ID NO: 611262 - DNA, 120 bp, Artificial Sequence
  ENSG00000176230_31 (sequence is synthesized)
atctgtctccaaagaaacagagacctatgaactcccagacaaagacttcacaataattgtcttaaggaagtgcagtaaagtccaagaacatacagggaaataattcaacaaaatcaagca

SEQ ID NO: 611263 - DNA, 120 bp, Artificial Sequence
  ENSG00000176230_32 (sequence is synthesized)
aacaacaaacaaaaaaatggggaaatttgatgaagagattgaaatagtttttaaaattccagaaatttgtttaaaaataaataacataaaaatatgtaaattgtgacagtaaaaacataa

SEQ ID NO: 611264 - DNA, 120 bp, Artificial Sequence
  ENSG00000176230_33 (sequence is synthesized)
aatgtgtgggggaggtagaataaaagtgtagactttttaaatgcaatcaaagttaggtatttattcacttaaaatagtctatgataaccataagatgtgttatgtaagccttatggtaac

SEQ ID NO: 611265 - DNA, 120 bp, Artificial Sequence
  ENSG00000176230_34 (sequence is synthesized)
tacaaatgaaaaacctatagagcatttacaaaaacaaaaaaaataaaaaatcaaagcatatgctggagaaaataaactatgaataaatgaagacgaaagagaaagatgaagcaaaagaaa

SEQ ID NO: 611266 - DNA, 120 bp, Artificial Sequence
  ENSG00000176230_35 (sequence is synthesized)
aggaagggaacaaagagtgtaaaaaataaccagaaaacaattaataaaatggaggtactaagcacagtcagttttctggcatatccataggttttacattcacagactcaatcaaccaca

SEQ ID NO: 611267 - DNA, 120 bp, Artificial Sequence
  ENSG00000176230_36 (sequence is synthesized)
cacagactcaatcaaccacagatcaaaactatcaaaaataaataaataaataacagcacaacaataaaaataatacaaaattttaaaacaagtataacaactatttacattttatttgat

SEQ ID NO: 611268 - DNA, 120 bp, Artificial Sequence
  ENSG00000176230_37 (sequence is synthesized)
ggtataaatcatacaacagaatgcatgtaagttttatgcaaatactgtgacattttgtataagggacttaagcatctatagattttgataatcacagggaggtcttggagtctgttgcct

SEQ ID NO: 611269 - DNA, 120 bp, Artificial Sequence
  ENSG00000176230_38 (sequence is synthesized)
aaagtcactgagggatgactctacttacctaccaacaattatctggaatgtgaatgaattaaattatctgaacaaaagacacagagtggctaaatgaataaaaagataaaacccaactac

SEQ ID NO: 611270 - DNA, 120 bp, Artificial Sequence
  ENSG00000176230_39 (sequence is synthesized)
ctctgaacccatggccctgacttcttctgaactgcagccacatccagtttcttcctgcagtggaaagagcaatccaagatccactttctcttcatggtaaatcggcttggagaacaaatg

SEQ ID NO: 611271 - DNA, 120 bp, Artificial Sequence
  ENSG00000176230_40 (sequence is synthesized)
aaataaatggagtcctggagggctggataggtcaaagtcaggaaaagaagtttggaacttgtcatttattcagaggagtaaggaaaacagtgggaggtcatccaagagcgagctgtagga

SEQ ID NO: 611272 - DNA, 120 bp, Artificial Sequence
  ENSG00000176231_0 (sequence is synthesized)
atgcctagtcagaactatagcatcatatctgaatttaacctctttggcttctcagccttcccccagcacctcctgcccatcttgttcctgctgtacctcctgatgttcctgttcacattg

SEQ ID NO: 611273 - DNA, 120 bp, Artificial Sequence
  ENSG00000176231_1 (sequence is synthesized)
ctgggcaaccttctcatcatggccacaatctggattgaacacagactccacacacccatgtacctcttcttgtgcaccctctccgtctctgagattctgttcactgttgccatcacccct

SEQ ID NO: 611274 - DNA, 120 bp, Artificial Sequence
  ENSG00000176231_2 (sequence is synthesized)
cgcatgctggctgatctgctttccacccatcattccatcacctttgtggcttgtgccaaccagatgttcttctccttcatgtttggcttcactcactccttccttctcctggtcatgggc

SEQ ID NO: 611275 - DNA, 120 bp, Artificial Sequence
  ENSG00000176231_3 (sequence is synthesized)
atgatggtgacaacgatagttttccacctcactttctgtgggtctaatgtgatccaccattttttctgtcatgtgctttccctcttgaagttggcctgtgaaaacaagacatcatctgtc

SEQ ID NO: 611276 - DNA, 120 bp, Artificial Sequence
  ENSG00000176231_4 (sequence is synthesized)
atcatgggtgtgatgctggtgtgtgtcacagccctgataggctgtttattcctcatcatcctctcctatgtcttcattgtggctgccatcttgaggattccctctgccgaaggccggcac

SEQ ID NO: 611277 - DNA, 120 bp, Artificial Sequence
  ENSG00000176231_5 (sequence is synthesized)
aagacattttctacgtgtgtatcccacctcactgtggtggtcacgcactatagttttgcctcctttatctacctcaagcccaagggcctccattctatgtacagtgacgccttgatggcc

SEQ ID NO: 611278 - DNA, 120 bp, Artificial Sequence
  ENSG00000176231_6 (sequence is synthesized)
accacctatactgtcttcacccccttccttagcccaatcattttcagcctaaggaacaaggagctgaagaatgccataaataaaaacttttacagaaaattctgtcctccaagttcctga

SEQ ID NO: 611279 - DNA, 90 bp, Artificial Sequence
  ENSG00000176231_7 (sequence is synthesized)
aggattacagatgatcacgtctcttcgcttccagtcctcagataccttagatactttgtttctttttcttgccttgtaacatcactcacg

SEQ ID NO: 611280 - DNA, 120 bp, Artificial Sequence
  ENSG00000176231_8 (sequence is synthesized)
atactttgtttctttttcttgccttgtaacatcactcacgactttcagctccatgttaaagaacagcagagttaccttcccccagcacctcctgcccatcttgttcctgctgtacctcct

SEQ ID NO: 611281 - DNA, 120 bp, Artificial Sequence
  ENSG00000176231_9 (sequence is synthesized)
gtgtatctccatagggctgttgtaagtgttcaggtatgtgaaaatatgtgtttgatacatactagctattgttttcccttccctttttgcttaagctcaagtgatcataatcttttcttt

SEQ ID NO: 611282 - DNA, 120 bp, Artificial Sequence
  ENSG00000176231_10 (sequence is synthesized)
atgagccattatgatgacctttatcccattatctgtgcctagaaatgtgttttctgtccacggacaggtggggatcatcacgtggatgtgtctgggcacttatgaacacagttcttcttg

SEQ ID NO: 611283 - DNA, 120 bp, Artificial Sequence
  ENSG00000176231_11 (sequence is synthesized)
aatggacaggcaaaaaagattttattttcccctagtgtaagaaaaagcaagaataacatgatagtcataaatgccacccagcactgagctttttctatgtattggcactgtgtccagtgt

SEQ ID NO: 611284 - DNA, 120 bp, Artificial Sequence
  ENSG00000176239_0 (sequence is synthesized)
atggggctcaataagtctgcttccaccttccagcttactggcttcccaggcatggagaaggcacatcactggatattcatcccattattggcagcctacatctccatacttcttggcaat

SEQ ID NO: 611285 - DNA, 120 bp, Artificial Sequence
  ENSG00000176239_1 (sequence is synthesized)
ggcactcttctctttctcatcaggaatgatcataacctccatgagcccatgtactatttcttagctatgttggcagctacagacctcggagtgacattgaccacaatgcccacagtgcta

SEQ ID NO: 611286 - DNA, 120 bp, Artificial Sequence
  ENSG00000176239_2 (sequence is synthesized)
ggtgttctgtggttagatcacagggagattggccatggagcctgcttctctcaggcctattttatccatactctttctgtcatggagtcaggtgtcttgcttgccatggcttatgactgt

SEQ ID NO: 611287 - DNA, 120 bp, Artificial Sequence
  ENSG00000176239_3 (sequence is synthesized)
attatgccaatagttgttcgcctacactggtttccctactgtcgatcccatgtactctcccatgctttctgtctacaccaagatgtcatcaagctagcctgtgctgacatcaccttcaac

SEQ ID NO: 611288 - DNA, 120 bp, Artificial Sequence
  ENSG00000176239_4 (sequence is synthesized)
cgtctctatccagttgtagttttatttgcaatggtcttgttggactttctcatcatctttttctcctacattttgattctcaagactgtcatgggcattggttctggaggagaaagggcc

SEQ ID NO: 611289 - DNA, 120 bp, Artificial Sequence
  ENSG00000176239_5 (sequence is synthesized)
aaggccctcaacacatgtgtctctcatatctgctgcatcctggtcttctatgtcactgtagtttgtctgacatttattcataggtttggaaagcatgttcctcatgtcgttcacatcaca

SEQ ID NO: 611290 - DNA, 120 bp, Artificial Sequence
  ENSG00000176239_6 (sequence is synthesized)
atgagctacatccacttccttttcccaccttttatgaacccatttatctatagcattaaaactaagcagattcagagtggcatacttcgtttattctctctgcctcactctagagcatga

SEQ ID NO: 611291 - DNA, 120 bp, Artificial Sequence
  ENSG00000176244_0 (sequence is synthesized)
agagcaccggacgacaacagcagcagcaacaacgcggcagccgccaccatggccctgcaggctgattttgacagggctgcagaagatgtgaggaagctgaaagcaagaccagatgatgga

SEQ ID NO: 611292 - DNA, 120 bp, Artificial Sequence
  ENSG00000176244_1 (sequence is synthesized)
gaactgaaagaactctatgggctttacaaacaagcaatagttggagacattaatattgcgtgtccaggaatgctagatttaaaaggcaaagccaaatgggaagcatggaacctcaaaaaa

SEQ ID NO: 611293 - DNA, 120 bp, Artificial Sequence
  ENSG00000176244_2 (sequence is synthesized)
gggttgtcgacggaagatgcgacgagtgcctatatttctaaagcaaaggagctgatagaaaaatacggaatttagaatacagcatatgaggaatttttccttttgaagacttccaaatgc

SEQ ID NO: 611294 - DNA, 120 bp, Artificial Sequence
  ENSG00000176244_3 (sequence is synthesized)
tatcatgacctaacatttagagggagaggcatactgttaacttgatgtatcatgtatatttttgctattagcatgagctgtagtacttagaagtatactgaaactacatagttaactcaa

SEQ ID NO: 611295 - DNA, 76 bp, Artificial Sequence
  ENSG00000176244_4 (sequence is synthesized)
tagtacttagaagtatactgaaactacatagttaactcaattgtacttgcttaaaccaggtgtctttaaaagttct

SEQ ID NO: 611296 - DNA, 85 bp, Artificial Sequence
  ENSG00000176244_5 (sequence is synthesized)
aagggaacatcacacactggggcctgtcggggactagggggttaggggagggataacattaggagacatacctgatgtaggtgac

SEQ ID NO: 611297 - DNA, 120 bp, Artificial Sequence
  ENSG00000176244_6 (sequence is synthesized)
tatgtatcccagaacttaaagtataaaaaaaaaaattcttttagaaaagtattttttatttttatagagttagggagtacagttgcagtttttgtttgtttgtttgttttttcttgagga

SEQ ID NO: 611298 - DNA, 84 bp, Artificial Sequence
  ENSG00000176244_7 (sequence is synthesized)
tttatagagttagggagtacagttgcagtttttgtttgtttgtttgttttttcttgcgtgtgatctcggttcactgcaacctcc

SEQ ID NO: 611299 - DNA, 120 bp, Artificial Sequence
  ENSG00000176244_8 (sequence is synthesized)
caccttggcgctggggttgcaggtgtgagccaccacacctggtcacaggtgcagttttgttacatggatatattgtgtagtggggaaatctgggcttttagtgtaaccatcaccaaaata

SEQ ID NO: 611300 - DNA, 120 bp, Artificial Sequence
  ENSG00000176244_9 (sequence is synthesized)
ctgtacattgtacccaaaaggtaattgctcatccctcaccccctcccacctttccaagcctccagtgtctattattccacactccatgaccctgtatacaccctgtttaactcccactta

SEQ ID NO: 611301 - DNA, 120 bp, Artificial Sequence
  ENSG00000176244_10 (sequence is synthesized)
taagtgaaaacatgtggtatttttttttgtttctgagggttctttaaaaatctttattttcttatttttttctgagttgtttcacttaagataatagcctccagttccacccacgttgct

SEQ ID NO: 611302 - DNA, 120 bp, Artificial Sequence
  ENSG00000176244_11 (sequence is synthesized)
gcaaaagccgtaatttcattctctttatatggctgagtaatatcccctggtatacatatacaacgttttctttatcccatcatctgctgatggatacttaggttgattccatatctttgc

SEQ ID NO: 611303 - DNA, 120 bp, Artificial Sequence
  ENSG00000176244_12 (sequence is synthesized)
tgtgctgcaatagatatacaagtgcaggtatcttttggatagaatgatttattttcctttaagaagatacccagtagtgggattgctgggtagaatggtagttctatttttagttccatg

SEQ ID NO: 611304 - DNA, 120 bp, Artificial Sequence
  ENSG00000176244_13 (sequence is synthesized)
agaggttgtactaatttacattcccaccaatagtgtataagcattcccttttctccacatctgttgttttttgactttttagaaagtctagccctggtaatatgtgtacagatttgaaca

SEQ ID NO: 611305 - DNA, 120 bp, Artificial Sequence
  ENSG00000176244_14 (sequence is synthesized)
gtaatatgtgtacagatttgaacagctgtttgttcttttggctcatctgttctgttacaataagttaatgttactggtgaaataaaaacaggttattaagaatcaatggcaaggctgagc

SEQ ID NO: 611306 - DNA, 90 bp, Artificial Sequence
  ENSG00000176244_15 (sequence is synthesized)
aataaaaacaggttattaagaatcaatggcaaggctgagcgtggtggctcacgcctctaatcttactgaggtcagaagttcgagaccagc

SEQ ID NO: 611307 - DNA, 120 bp, Artificial Sequence
  ENSG00000176244_16 (sequence is synthesized)
cgtctcaaaaaaaaaaaaaaaaattacaagtctgtccatagcagtttaaagaaatttaaaaagcccccataggaatatctatttttctttaaatttttacatttaagacatttaagacaa

SEQ ID NO: 611308 - DNA, 120 bp, Artificial Sequence
  ENSG00000176244_17 (sequence is synthesized)
atttttacatttaagacatttaagacaaaaaggcaaactaaaatgtatctagtgataaactgtaccactactgtaccccatatgttcagttctatctgagtaaaaatagagtctggaata

SEQ ID NO: 611309 - DNA, 120 bp, Artificial Sequence
  ENSG00000176244_18 (sequence is synthesized)
taatattggccccctactcagtctttctggatggtacacaggctctttgaaagaagacagtctcatgttaacaattcaaaaaattgtttgagatcccttaagataaatatcccccaaaac

SEQ ID NO: 611310 - DNA, 120 bp, Artificial Sequence
  ENSG00000176244_19 (sequence is synthesized)
agtgtacctctattccctgcataaaaatttagatttggaatggtatgaccagaggaatagatccacttcatgttactacaacaacaaaactatctaggtctgctagatgaatttccaggg

SEQ ID NO: 611311 - DNA, 120 bp, Artificial Sequence
  ENSG00000176244_20 (sequence is synthesized)
actatctaggtctgctagatgaatttccagggaattatgctgagcagaaaaagccagtccccaaatgtgacatgtataattccatttatataacattctttttcttttcttttttttttt

SEQ ID NO: 611312 - DNA, 76 bp, Artificial Sequence
  ENSG00000176244_21 (sequence is synthesized)
ttttttttttttttttttgttgagacaggctgtcactctgttacccaggctggagcgcagtggcacctcccatctc

SEQ ID NO: 611313 - DNA, 86 bp, Artificial Sequence
  ENSG00000176244_22 (sequence is synthesized)
ctgaggtgatctacccaccttggccccccaaagtgctgagactataggcatgagccaccgcgtccagccaggattcttgaaaggga

SEQ ID NO: 611314 - DNA, 120 bp, Artificial Sequence
  ENSG00000176244_23 (sequence is synthesized)
ggcatgagccaccgcgtccagccaggattcttgaaagggaacatttatagacgcaaaggatggaatagtggttgccagggaggagggaggtgggtgtggctttaaaagggcagcaggagg

SEQ ID NO: 611315 - DNA, 120 bp, Artificial Sequence
  ENSG00000176244_24 (sequence is synthesized)
gatgatcctgcagtgatggaatgttctgtcttgattgtagcaacaccaatatgctgattgtgatattatactatagttttgcataacagttaccattaaaggaaattgggtaaaaggcta

SEQ ID NO: 611316 - DNA, 120 bp, Artificial Sequence
  ENSG00000176244_25 (sequence is synthesized)
aggcaaggcaggagcgccggggagcacggagcgggcctcctcctctccgtctccgagagggagtcgagatcccccgctcccgccccttcgctcgttgggacctccaggacctctcttagt

SEQ ID NO: 611317 - DNA, 120 bp, Artificial Sequence
  ENSG00000176246_0 (sequence is synthesized)
atggatcttaaaaatggatctctagtgaccgagtttattttactaggattttttggacgatgggaacttcaaattttcttctttgtgacattttccctgatctacggtgctactgtgatg

SEQ ID NO: 611318 - DNA, 120 bp, Artificial Sequence
  ENSG00000176246_1 (sequence is synthesized)
ggaaacattctcattatggtcacagtgacatgtaggtcaacccttcattctcccttgtactttctccttggaaatctctcttttttggacatgtgtctctccactgccacaacacccaag

SEQ ID NO: 611319 - DNA, 120 bp, Artificial Sequence
  ENSG00000176246_2 (sequence is synthesized)
atgatcatagatttgctcactgaccacaagaccatctctgtgtggggctgcgtgacccagatgttcttcatgcacttctttgggggtgctgagatgactcttctgataatcatggccttt

SEQ ID NO: 611320 - DNA, 120 bp, Artificial Sequence
  ENSG00000176246_3 (sequence is synthesized)
ttacactccataagccagatagttttaacaatgaacttgcctttctgtggccacaatgtcataaacaacatattttgtgatcttccccttgtgatcaagcttgcttgcattgaaacatac

SEQ ID NO: 611321 - DNA, 120 bp, Artificial Sequence
  ENSG00000176246_4 (sequence is synthesized)
accctggaattatttgtcattgctgacagcgggctgctctctttcacctgtttcatcctcttgcttgtttcttacattgtcatcctggtcagtgtaccaaaaaaatcatcacatgggctc

SEQ ID NO: 611322 - DNA, 120 bp, Artificial Sequence
  ENSG00000176246_5 (sequence is synthesized)
tccaaggcgctgtccacattgtctgcccacatcattgtggtcactctgttctttggaccttgtatttttatctatgtttggccattcagtagtttggcaagcaataaaactcttgccgta

SEQ ID NO: 611323 - DNA, 120 bp, Artificial Sequence
  ENSG00000176246_6 (sequence is synthesized)
ttttatacagttatcacacccttactgaatccgagtatttataccctgagaaataagaaaatgcaagaggccataagaaaattacggttccaatatgttagttctgcacagaatttctag

SEQ ID NO: 611324 - DNA, 120 bp, Artificial Sequence
  ENSG00000176248_0 (sequence is synthesized)
gagcgaatctcggagtcggtgggtgcagatggcggcggcagttgtggtggcggagggggacagcgactcccggcccggacaggagttgttagtggcctggaacaccgtgagcaccggcct

SEQ ID NO: 611325 - DNA, 120 bp, Artificial Sequence
  ENSG00000176248_1 (sequence is synthesized)
ggtgccgccggctgcgctggggctggtgtcttcccggaccagcggtgcagtcccgccaaaggaagaggagctccgggcggcggtggaggttctgaggggccacgggctacactcggtcct

SEQ ID NO: 611326 - DNA, 120 bp, Artificial Sequence
  ENSG00000176248_2 (sequence is synthesized)
ggaggagtggttcgtggaggtgctgcagaacgatctgcaggccaacatctcccctgagttctggaatgccatctcccaatgcgagaactctgcggatgagccccagtgccttttgctact

SEQ ID NO: 611327 - DNA, 120 bp, Artificial Sequence
  ENSG00000176248_3 (sequence is synthesized)
ccttgacgcttttggcctgctggagagccgcctggatccctacctgcgtagcctagagctgctggagaaatggactcgcctgggcttgctgatgggcactggtgctcaggggctgcgaga

SEQ ID NO: 611328 - DNA, 120 bp, Artificial Sequence
  ENSG00000176248_4 (sequence is synthesized)
agaagtccacactatgttgcgcggagtcttgttctttagcacccccagaaccttccaagagatgatccagcgtctgtatgggtgcttcttgagagtctatatgcagagtaagaggaaggg

SEQ ID NO: 611329 - DNA, 120 bp, Artificial Sequence
  ENSG00000176248_5 (sequence is synthesized)
ggaagggggcacagacccggaactggaaggggagctggacagccggtatgcccgtcgccggtactaccggctcctgcagagcccgctgtgtgcagggtgcagcagtgacaagcaacagtg

SEQ ID NO: 611330 - DNA, 120 bp, Artificial Sequence
  ENSG00000176248_6 (sequence is synthesized)
ctggtgtcgccaggctctggagcagttccatcagctcagccaggtcttacacaggctcagtctgctggagcgggtcagtgccgaggctgtgaccaccaccctgcaccaggtgacccggga

SEQ ID NO: 611331 - DNA, 120 bp, Artificial Sequence
  ENSG00000176248_7 (sequence is synthesized)
gaggatggaggaccgttgccggggcgagtacgagcgctccttcctgcgtgagttccacaagtggatcgagcgggtggtcggctggctcggcaaggtgttcctgcaggacggccccgccag

SEQ ID NO: 611332 - DNA, 120 bp, Artificial Sequence
  ENSG00000176248_8 (sequence is synthesized)
gcccgcatctcccgaggccggcaacaccctgcgccgctggcgctgccacgtgcaaaggttcttctaccgcatctacgccagcctgcgcatcgaggagctcttcagcatcgtccgagactt

SEQ ID NO: 611333 - DNA, 120 bp, Artificial Sequence
  ENSG00000176248_9 (sequence is synthesized)
cccagactcccggccagccatcgaggacctcaagtactgcctggagaggacggaccagaggcagcagctgctcgtgtccctcaaggctgccctggagactcggctcctgcatccaggcgt

SEQ ID NO: 611334 - DNA, 120 bp, Artificial Sequence
  ENSG00000176248_10 (sequence is synthesized)
caacacgtgtgacatcatcaccctctatatctctgccatcaaggcgctgcgcgtgctggacccttccatggtcatcctggaggtggcctgtgagcctatccgccgctacctgaggacgcg

SEQ ID NO: 611335 - DNA, 120 bp, Artificial Sequence
  ENSG00000176248_11 (sequence is synthesized)
gcagattgtggctgggctgacgggggactcggacgggacaggggacctggctgttgagctgtccaagaccgacccggcgagcctggagacaggccaggacagtgaggatgactcaggcga

SEQ ID NO: 611336 - DNA, 120 bp, Artificial Sequence
  ENSG00000176248_12 (sequence is synthesized)
gccagaggactgggtcccggaccctgtggatgccgatccagggaagtcgagctccaagcggcgttcatcggacatcatcagcctgctggtcagcatctacggcagcaaggacctcttcat

SEQ ID NO: 611337 - DNA, 120 bp, Artificial Sequence
  ENSG00000176248_13 (sequence is synthesized)
caatgagtaccgctcgctgctggccgaccgcctgctgcaccagttcagcttcagccccgagcgggagatccgcaacgtggagctgctgaagctgcgctttggcgaggccccaatgcactt

SEQ ID NO: 611338 - DNA, 120 bp, Artificial Sequence
  ENSG00000176248_14 (sequence is synthesized)
ctgtgaagtcatgctgaaggacatggcggactcccgccgcatcaatgccaacatccgggaggaggatgagaagcggccagcagaggagcagccaccgttcggggtctacgctgtcatcct

SEQ ID NO: 611339 - DNA, 120 bp, Artificial Sequence
  ENSG00000176248_15 (sequence is synthesized)
gtccagtgagttctggccgcccttcaaggacgagaagctggaggtccccgaggatatcagggcagccctggaggcttactgcaagaagtatgagcagctcaaggccatgcggaccctcag

SEQ ID NO: 611340 - DNA, 120 bp, Artificial Sequence
  ENSG00000176248_16 (sequence is synthesized)
ttggaagcacaccctgggcctggtgaccatggacgtggagctggccgaccgcacgctgtctgtggcggtcaccccagtacaggcggtgatcttgctgtattttcaggaccaagccagctg

SEQ ID NO: 611341 - DNA, 120 bp, Artificial Sequence
  ENSG00000176248_17 (sequence is synthesized)
gaccctggaggaactgagcaaggcggtgaagatgcccgtggcgctgctgcggcggcggatgtccgtgtggctgcagcagggtgtgctgcgtgaggagccccccggcaccttctctgtcat

SEQ ID NO: 611342 - DNA, 120 bp, Artificial Sequence
  ENSG00000176248_18 (sequence is synthesized)
tgaggaggagcggcctcaggaccgggacaacatggtgctcattgacagtgacgacgagagcgactccggcatggcctcccaggccgaccagaaggaggaggagctgctgctcttctggac

SEQ ID NO: 611343 - DNA, 120 bp, Artificial Sequence
  ENSG00000176248_19 (sequence is synthesized)
gtacatccaggccatgctgaccaacctggagagcctctcactggatcgtatctacaacatgctccgcatgtttgtggtgactgggcctgcactggccgagattgacctgcaggagctgca

SEQ ID NO: 611344 - DNA, 120 bp, Artificial Sequence
  ENSG00000176248_20 (sequence is synthesized)
gggctacctgcagaagaaggtgcgggaccagcagctcgtctactcggccggcgtctaccgcctgcccaagaactgcagctgacacatcgcccgcccgcccgcccgcccgccaggcgctgc

SEQ ID NO: 611345 - DNA, 120 bp, Artificial Sequence
  ENSG00000176248_21 (sequence is synthesized)
cctgcaggtgctctcgtcctcccgtgccagcccccgcccgcccgtgtcccagaatgcactgctgaggagcatgcccacccccacccccgcagtgtgcagattaaagcaagtcagatcatc

SEQ ID NO: 611346 - DNA, 120 bp, Artificial Sequence
  ENSG00000176248_22 (sequence is synthesized)
catgtccagggagcctggggcctagtctgccagccctggacttgtaggtctaaggaagaaatgggttgagaagcaattggtgaggtccttaggggatctgaggtgcccgtcagcttgctt

SEQ ID NO: 611347 - DNA, 120 bp, Artificial Sequence
  ENSG00000176248_23 (sequence is synthesized)
gtttcttctttggagggagtcaggactgaccggtaggtctgaggtgatgagacttagttctctcagaacagacctccctgcagggcgggacctgtgaacaggtagaggtggggatggggg

SEQ ID NO: 611348 - DNA, 120 bp, Artificial Sequence
  ENSG00000176248_24 (sequence is synthesized)
acagctgaggattgtggggaggtgtgtgctgggtgtgtgtgtgtgtgtgtgctgcatgcactctacaggcagggcagtcctggcatggggctgttctgggctagaggggccggtgtgtgc

SEQ ID NO: 611349 - DNA, 120 bp, Artificial Sequence
  ENSG00000176248_25 (sequence is synthesized)
gagggtgtggtttggggcagctgcgccagcaggcggcacccttccctttcccacgggcaaggcagggtggcccgggagccccccgacctctcggctgacgggaggcaggggaggtgcagc

SEQ ID NO: 611350 - DNA, 120 bp, Artificial Sequence
  ENSG00000176248_26 (sequence is synthesized)
ctgtccctgtctgctgctgagatggttagttggatacacaggtcacacctcatgtctagcaaaccctggtccagccacacccttggccacgtctcagagctgcctggatagagtattttt

SEQ ID NO: 611351 - DNA, 120 bp, Artificial Sequence
  ENSG00000176248_27 (sequence is synthesized)
cagatccccaagggctggtgcctttttgcttaatggtccctgcctcactgattgtttccctcttgcattctgctataagtagcaaggagaagccaggtggcaccttccacactgcttgga

SEQ ID NO: 611352 - DNA, 120 bp, Artificial Sequence
  ENSG00000176248_28 (sequence is synthesized)
aatctcagcttgatgtccaggctcatcagctgcaggtcccacttcgcacccaacagcagagcagcagccagccaagctctctgctgcctcctccggttcccagtagcacggtcatttcca

SEQ ID NO: 611353 - DNA, 120 bp, Artificial Sequence
  ENSG00000176248_29 (sequence is synthesized)
tctgagacctcactggaagcacctgttgggtcggcattgctgccgacatccagtctgtgatgctgtgtgcattctccaagacggcggcagctctcctcttccagccatttccaggcttgt

SEQ ID NO: 611354 - DNA, 120 bp, Artificial Sequence
  ENSG00000176248_30 (sequence is synthesized)
cttcatgcctttctaccagcagtcgtgcaggcctcaccagttcttccagcctctccccatcacccacttccaaagctgctgccacagttcttggtgttaggttttggcagcacccctcct

SEQ ID NO: 611355 - DNA, 120 bp, Artificial Sequence
  ENSG00000176248_31 (sequence is synthesized)
ggcccttcctggtaccaaaatctgttcgtttactgtggctgctgtaacaaagtgtcacaaactgggtggcttaaaaaacagaaatagattgtcttagttttggaggctggaagtccaaga

SEQ ID NO: 611356 - DNA, 120 bp, Artificial Sequence
  ENSG00000176248_32 (sequence is synthesized)
tgaaagtactggcagccccgttccctctgaaccctcttagagacctccgttgccccccagcttctggtgtttgccacagcccttggtgtttcttggcttgtggccgcgttgctccaggtg

SEQ ID NO: 611357 - DNA, 120 bp, Artificial Sequence
  ENSG00000176248_33 (sequence is synthesized)
gtctctgtcttcgtgtggccccctccccgcctgcctgtgtcttcctatctttccttttcttagaaggaccccagtcagttgggttaggatgcacctcagttacatctgcatcaaccctgt

SEQ ID NO: 611358 - DNA, 120 bp, Artificial Sequence
  ENSG00000176248_34 (sequence is synthesized)
cttttcgggacacaccttatgatgctggccccattgcccttccatggtggctgagcaggtggggaccccacccagtcctgtgctctcgctgctcacctgcctgccagggtggggtggggc

SEQ ID NO: 611359 - DNA, 120 bp, Artificial Sequence
  ENSG00000176248_35 (sequence is synthesized)
aggtggctctgggagcccctttctcactggtaccaggtggcagagcccacgggcctgagcgccctgcagccgagctgcccgtgctgaccctggccctccttaggccatgcggaccctcag

SEQ ID NO: 611360 - DNA, 120 bp, Artificial Sequence
  ENSG00000176248_36 (sequence is synthesized)
ctggagcagttccatcagctcagccaggtcttgtgagtagtctgtcccgatggccatgcccttgctccttctggttccccgctgctcccctgggtccagctggcctcagcagaaagctgg

SEQ ID NO: 611361 - DNA, 120 bp, Artificial Sequence
  ENSG00000176248_37 (sequence is synthesized)
tgagccgtcctgataaccaggaacatgacagagagagagtcccagggattcctgtgcagcgtgtcctggacacaggtgtctctcttctgtcactcaccttcagtcccacagattcatgcc

SEQ ID NO: 611362 - DNA, 120 bp, Artificial Sequence
  ENSG00000176248_38 (sequence is synthesized)
ttgaccctggtaaggccctatgtggcttgtgtctgcagcagcaaatttcttagcaactccaaacttcctggactctgcagaattccactgtgccttttgtcgatcctggggaggaatgat

SEQ ID NO: 611363 - DNA, 120 bp, Artificial Sequence
  ENSG00000176248_39 (sequence is synthesized)
tctcaccctcgtcgacattccttgccctgtaattgtgaacagaagcttgctgctgcttctctccaggaagatcaggtcactgtgagggcaagcagtctcttgttagtttggagaggagag

SEQ ID NO: 611364 - DNA, 120 bp, Artificial Sequence
  ENSG00000176248_40 (sequence is synthesized)
gggtttgttgtgagagacaggtcctgttgtagttctctagcaattgtcatacccttggccatttgtggtggttttgtcacattgaacgggggtgtagccatgcagctacttgagaggtct

SEQ ID NO: 611365 - DNA, 120 bp, Artificial Sequence
  ENSG00000176248_41 (sequence is synthesized)
taggtggactaaaggtggactaaaggagtgctccttttgctggcaggggtcagggagaccgtgaagggcttctgttgggctcatccctgcaaaagttacacggcaacttttctcatcctc

SEQ ID NO: 611366 - DNA, 120 bp, Artificial Sequence
  ENSG00000176248_42 (sequence is synthesized)
ctcttgagtccttttgtcactgtagaccagagactgcactgaaaggcacaaacagtggcatctgtacctctgcggccagggtagcagtgcagttggttgtcgtttcagagttgatcctag

SEQ ID NO: 611367 - DNA, 120 bp, Artificial Sequence
  ENSG00000176253_0 (sequence is synthesized)
atggaaagagcaaaccattcagtggtatcggaatttattttgttgggactttccaaatctcaaaatcttcagattttattcttcttgggattctctgtggtcttcgtggggattgtgtta

SEQ ID NO: 611368 - DNA, 120 bp, Artificial Sequence
  ENSG00000176253_1 (sequence is synthesized)
ggaaacctgctcatcttggtgactgtgacctttgattcgctccttcacacaccaatgtattttctgcttagcaacctctcctgcattgatatgatcctggcttcttttgctacccctaag

SEQ ID NO: 611369 - DNA, 120 bp, Artificial Sequence
  ENSG00000176253_2 (sequence is synthesized)
atgattgtagatttcctccgagaacgtaagaccatctcatggtggggatgttattcccagatgttctttatgcacctcctgggtgggagtgagatgatgttgcttgtagccatggcaata

SEQ ID NO: 611370 - DNA, 120 bp, Artificial Sequence
  ENSG00000176253_3 (sequence is synthesized)
ttatcctcctatgcagttggatttgtgcactcatctagtcaaatggctttcatgttgactttgcccttctgtggtcccaatgttatagacagctttttctgtgaccttccccttgtgatt

SEQ ID NO: 611371 - DNA, 120 bp, Artificial Sequence
  ENSG00000176253_4 (sequence is synthesized)
aaacttgcctgcaaggacacctacatcctacagctcctggtcattgctgacagtgggctcctgtcactggtctgcttcctcctcttgcttgtctcctatggagtcataatattctcagtt

SEQ ID NO: 611372 - DNA, 120 bp, Artificial Sequence
  ENSG00000176253_5 (sequence is synthesized)
aggtaccgtgctgctagtcgatcctctaaggctttctccactctctcagctcacatcacagttgtgactctgttctttgctccgtgtgtctttatctacgtctggcccttcagcagatac

SEQ ID NO: 611373 - DNA, 120 bp, Artificial Sequence
  ENSG00000176253_6 (sequence is synthesized)
tcggtagataaaattctttctgtgttttacacaattttcacacctctcttaaatcctattatttatacattaagaaatcaagaggtaaaagcagccattaaaaaaagactctgcatataa

SEQ ID NO: 611374 - DNA, 120 bp, Artificial Sequence
  ENSG00000176253_7 (sequence is synthesized)
gtaaattgcagataactgatggggatacaggaaaaggagataaaaggccattcctgggattcacgtacgacgccatcacgaaagtttttttcccctgtcttgtaagtaataacagcacaa

SEQ ID NO: 611375 - DNA, 120 bp, Artificial Sequence
  ENSG00000176253_8 (sequence is synthesized)
aaagatgactacaaatactttatttactgaaggtgttttgtaagacctagattaatttaaaactattagcaacggaggcaatttttttaaaagctgaaccaatagaaccagtttgtaata

SEQ ID NO: 611376 - DNA, 120 bp, Artificial Sequence
  ENSG00000176253_9 (sequence is synthesized)
agcatgagccgatgacaaattttgtcataaatttagattatactgaaagaactgtatttcttttaccaacataaatgttacatcaagctaagtcattttgaaacctatgacaaccataca

SEQ ID NO: 611377 - DNA, 120 bp, Artificial Sequence
  ENSG00000176253_10 (sequence is synthesized)
caggccaaccagctaaccactacatagcaataaccagaaacttatattctgaattctactgactatttgggatacttctctgggccattagtaaaatcactgactgacaaaattccacaa

SEQ ID NO: 611378 - DNA, 120 bp, Artificial Sequence
  ENSG00000176253_11 (sequence is synthesized)
aagtaagggtccttgtaagttcaagtgccttgactgagtaccaaatgtggacatcaacatgaacatttctttccaatatgcatcatttccctaccccttattctcacttattttgatcat

SEQ ID NO: 611379 - DNA, 120 bp, Artificial Sequence
  ENSG00000176253_12 (sequence is synthesized)
acttttgaagagacactctcttgtttgtttgaacatttaagaaactcgtttttaatgtatcaggttcgtgcaaaagtcattgcggtttttgccattaaagtaaatgacaaaattaaagta

SEQ ID NO: 611380 - DNA, 120 bp, Artificial Sequence
  ENSG00000176253_13 (sequence is synthesized)
atggcaaaaaccactataacttgtgtaccagctaacagttcaagttccatatgaggaaatagtagatgtaattgttaaaaagcaaacacctttttgtgatcttttatggtcaaacacata

SEQ ID NO: 611381 - DNA, 120 bp, Artificial Sequence
  ENSG00000176253_14 (sequence is synthesized)
atatctacagtttggcttgtatacatttaaatcccacctttatcagtttctctggtgcaaatttgaagaaaataaataagttccctgtgatttagttttttcgtctatacaaccttgttt

SEQ ID NO: 611382 - DNA, 120 bp, Artificial Sequence
  ENSG00000176253_15 (sequence is synthesized)
atatgcatctttcattattattttagcatgctcttaaacctcagaaaacacattattattgttaggttttttgttgttgttattggtaatctatgtttagagaaagcacacagatgacat

SEQ ID NO: 611383 - DNA, 120 bp, Artificial Sequence
  ENSG00000176253_16 (sequence is synthesized)
ctcatcacggttatttatccaagtgccttacaggctagaaaactgcatgttctgggtaatccctgattagtgtgtattaaattatactaagttgttttccataaacacagtgtgttcacc

SEQ ID NO: 611384 - DNA, 120 bp, Artificial Sequence
  ENSG00000176253_17 (sequence is synthesized)
attcttcacatattttgtgagcctacagaatgccagaagatatagccaggccttcaaggaacttacagcctatggatagatcgagcaaactaaattggcagttgttccatggcacgaaca

SEQ ID NO: 611385 - DNA, 120 bp, Artificial Sequence
  ENSG00000176253_18 (sequence is synthesized)
gcactgttacatgatggacagggtgctttgagagtgcaggaatggcatctcaatcagggcagggcaggaaggtttccacttatagttagcatcagctagatggaaaagaaagacattcca

SEQ ID NO: 611386 - DNA, 120 bp, Artificial Sequence
  ENSG00000176253_19 (sequence is synthesized)
cgagaaagaaatagtatgttgagaatgcatagaagcatgacacagtggagaacctatacataatttcattgagctgggtcatgggctatgatgttgagagatgagatagagaggtaggtc

SEQ ID NO: 611387 - DNA, 120 bp, Artificial Sequence
  ENSG00000176253_20 (sequence is synthesized)
aaatgtagtctgatcatataatagaaaatataggacactctttggaattcaaaactgtgtcatgctgaaatttaaaagagagacaggaaggaaaaaaagtaagcatagaccattcctgtc

SEQ ID NO: 611388 - DNA, 120 bp, Artificial Sequence
  ENSG00000176253_21 (sequence is synthesized)
ccaacttgtacattgtactgcttctattccaagtttatctcccccttcttagctctgttcatatttctctttgcaatctaggcaactaggcctgtaactgacttgaaggctaaagcaaat

SEQ ID NO: 611389 - DNA, 120 bp, Artificial Sequence
  ENSG00000176253_22 (sequence is synthesized)
ttaaggcaactgggtatgggagaagatgtctactgtctttcaacttcagcataaatccaaaaagaactttatgccttttattggatatattatacctagtatccagaaaagccattccag

SEQ ID NO: 611390 - DNA, 120 bp, Artificial Sequence
  ENSG00000176253_23 (sequence is synthesized)
actgagcaaccaattttatggagaaaacattttgtgtacaagttgaattattgtgaccaaggatcccagcctcaaaatgcattttcaaactttttttttctttctttctgaatctcagaa

SEQ ID NO: 611391 - DNA, 120 bp, Artificial Sequence
  ENSG00000176253_24 (sequence is synthesized)
tgtagccttgtgttgtaagactttgtctccctttcccaccaggtacattcatacacagtgtttcttatctaattaaggacttgcttagaaatcctaggggccgattttgaaacaaacaag

SEQ ID NO: 611392 - DNA, 120 bp, Artificial Sequence
  ENSG00000176253_25 (sequence is synthesized)
gcagggaaacctggctgcagaatcctcccttgagaggggaattacttacagttaacccaccactaccaggccaaagtcaggaaaaggcaaatcaggcctcaggacagaccatcactcaag

SEQ ID NO: 611393 - DNA, 120 bp, Artificial Sequence
  ENSG00000176253_26 (sequence is synthesized)
ataaccttcagaacaaaacacgcagacctgcacgttcctgcactattcccacatatttcccatatcttttccgtcttaaactcctttacttagcccccaaacggggaatggtctgttaaa

SEQ ID NO: 611394 - DNA, 120 bp, Artificial Sequence
  ENSG00000176253_27 (sequence is synthesized)
ggcatgagcctggccatcccccacctgcttgcatttgaataaaattgctttccttttaccacaccttgctgcacttgttttcagcctctgagcggggaggtgggcatgggtgggtgtgtt

SEQ ID NO: 611395 - DNA, 120 bp, Artificial Sequence
  ENSG00000176253_28 (sequence is synthesized)
gggggctcggggtggggggaggcgggggagacttcagctggttatattttaagctggttatattatatctaactagaaatagctcttttctgaacacatactatgaaaatacccataggt

SEQ ID NO: 611396 - DNA, 120 bp, Artificial Sequence
  ENSG00000176253_29 (sequence is synthesized)
ttaatataatctagagttttgtttttaaaaggctattattgattggttgatgtgactgacaatttgttgagcaaattgtcacgaatttgtgatataaattatttgtaagttatttatgta

SEQ ID NO: 611397 - DNA, 120 bp, Artificial Sequence
  ENSG00000176253_30 (sequence is synthesized)
tttcttatgtcaagaaaaaagctaccaactactattatgtatttcttatgccagagaaagctactaactactcaatatttttcccaaataatttagctaattttcaaaacagtattattt

SEQ ID NO: 611398 - DNA, 120 bp, Artificial Sequence
  ENSG00000176253_31 (sequence is synthesized)
gaaaaataatctaccctgtccccttgttatgtgaaatttgtgaactgtctttattagaaggagttattttttccctctcccaacatgctagctactatcaagcatataatacagaaaccc

SEQ ID NO: 611399 - DNA, 120 bp, Artificial Sequence
  ENSG00000176253_32 (sequence is synthesized)
tcaccctgacagccagtagaggcaccgccctccttctgcctgccattcacttgctctccttctaagcacgtgatgtgatttatagatgactgaaatttggaaacgagactgagcatgagg

SEQ ID NO: 611400 - DNA, 120 bp, Artificial Sequence
  ENSG00000176253_33 (sequence is synthesized)
ttctcggcgttttacagtattgctgtttcagaggagccgaggcacacagttctaaaccccagttaaggggtagcacctgttttccatgggcaaatttgttaacacctcaaactgtcttcc

SEQ ID NO: 611401 - DNA, 90 bp, Artificial Sequence
  ENSG00000176253_34 (sequence is synthesized)
tttccatgggcaaatttgttaacacctcaaactgtcttcctgtcagggtcctctgctcttggaggaatgtgtaatttaatcactctgttg

SEQ ID NO: 611402 - DNA, 64 bp, Artificial Sequence
  ENSG00000176253_35 (sequence is synthesized)
tccacgaatgtgcactttagaattatccttgtctctgcccagctaaatgtttgttctgcaaact

SEQ ID NO: 611403 - DNA, 120 bp, Artificial Sequence
  ENSG00000176253_36 (sequence is synthesized)
atccttgtctctgcccagctaaatgtttgttctgcaaactctctatttaaggggatcccagggttaaaattaagggaaagtagtaggaagactcttggggttttaagtccagtgcaactt

SEQ ID NO: 611404 - DNA, 120 bp, Artificial Sequence
  ENSG00000176253_37 (sequence is synthesized)
taccagtaataatactgatatttgtctcttcctattcacaattctacctatgaatttgttcaggactcacaagggagaagggaagattgacacttcagagaaccctacaatcaattcata

SEQ ID NO: 611405 - DNA, 120 bp, Artificial Sequence
  ENSG00000176253_38 (sequence is synthesized)
gtacaaatattaagctttttgtttcatttttcaagtacagtttacatatagaaaaaatgactctttagtgtatggttttgtgagcttttatagcaatttattttttattattttaatttt

SEQ ID NO: 611406 - DNA, 120 bp, Artificial Sequence
  ENSG00000176253_39 (sequence is synthesized)
ttaaaatttatttttaattattatgaatatataatagttgcacatatttatgaggtactggagatgttttgatgcaagcaaagaatgtataatgaacaattcagggtaattggctggatt

SEQ ID NO: 611407 - DNA, 120 bp, Artificial Sequence
  ENSG00000176253_40 (sequence is synthesized)
gttgacaaatgcccatagttatataattatcaaatctcagagatagaacagtttcatcaacccaaaaatgctcctgtcccccacagtagtcacctcctccttcccatttcctgtccttga

SEQ ID NO: 611408 - DNA, 120 bp, Artificial Sequence
  ENSG00000176253_41 (sequence is synthesized)
cagtagccatctgactgtgctcttagagtttgctttttcaagattgtcatataggtagaatcatacagcaaatagcctgttgagggtggcttttttcacttggcgcaatgtcttctgaga

SEQ ID NO: 611409 - DNA, 120 bp, Artificial Sequence
  ENSG00000176253_42 (sequence is synthesized)
ttagttcagtagcaagctgatttaattaatgtaaatctatattacattttattattttattttatttgtttttttgagatggagtcttgccctgtcacccaggctgtagtgcagtggctc

SEQ ID NO: 611410 - DNA, 120 bp, Artificial Sequence
  ENSG00000176253_43 (sequence is synthesized)
ctcctgacctcaagtggtccacccacctcaggctcccaaaatgctgggattacaggcactgtgagccactgtgcctggcctatattacattttaatatctacccatataagtactcccgt

SEQ ID NO: 611411 - DNA, 120 bp, Artificial Sequence
  ENSG00000176253_44 (sequence is synthesized)
tatattacattttaatatctacccatataagtactcccgttactattcttcctcaaactatcttcgtttgtgtcattcgattcttcatttacgttaactagtgtgattttaccaaataat

SEQ ID NO: 611412 - DNA, 120 bp, Artificial Sequence
  ENSG00000176253_45 (sequence is synthesized)
atgaacactatatctttataactgcattaaccaaaacattgtttcagggataaatatatattggtattgaccacatttgactttcctatcctagaacgtggtttaatttttaacttattt

SEQ ID NO: 611413 - DNA, 120 bp, Artificial Sequence
  ENSG00000176253_46 (sequence is synthesized)
gtaaattgcagataactgatggggatacaggaaaaggagataaaaggccattcctgggattcacgtacgacgccatcacgaaagtttttttcccctgtcttaaacttatattctgaattc

SEQ ID NO: 611414 - DNA, 120 bp, Artificial Sequence
  ENSG00000176256_0 (sequence is synthesized)
aagtggtgtctgccagatttccccgctgtaaagttactatttgtccctttccatgttctattcattagtagtgggtggctaagtccagcccacactggagagggggagtgccatctgttt

SEQ ID NO: 611415 - DNA, 120 bp, Artificial Sequence
  ENSG00000176256_1 (sequence is synthesized)
ttattcctatcatttcaatttgtttaatcctcatggctttattatcacctcactactttttagagatatggttgtaatgagctagacttgcccaaagttactcagctagtaaatggcaaa

SEQ ID NO: 611416 - DNA, 120 bp, Artificial Sequence
  ENSG00000176256_2 (sequence is synthesized)
gctagaatttgaacttatatgtgtctggcttaaaaggccatgttctttccacttcatgttactgccaccaagtaaagaggatctcacagtctccgaggcggaagctccctctcagcttgt

SEQ ID NO: 611417 - DNA, 120 bp, Artificial Sequence
  ENSG00000176256_3 (sequence is synthesized)
ctggacagtgtttttcaaatccattcttggagtgtgacccatcagtgggtcatgagaagatgaacactgaagtcttggaaccctgggaatgaacctggaaaaattcaaaatatggtctag

SEQ ID NO: 611418 - DNA, 120 bp, Artificial Sequence
  ENSG00000176256_4 (sequence is synthesized)
tcttaggcaagtttccttgtccggctcagctgctgagaccacatatctggaccctcagtgccctggcaacagctctgtgcaggcaggatgaagcacaggcttaggtcaagcaatcagccg

SEQ ID NO: 611419 - DNA, 120 bp, Artificial Sequence
  ENSG00000176256_5 (sequence is synthesized)
tcaaaatccacactctcacctgtgagtggctgttcaaccttgaacatgttactttttatgttaatgaaactcagttttctagtcctataaatttggggctatcatcaaccattaagtgat

SEQ ID NO: 611420 - DNA, 120 bp, Artificial Sequence
  ENSG00000176256_6 (sequence is synthesized)
attaaacccagtgccacacaggcaagtacctagcagtgtccaaaggcccccagaatgacactttttcatcttttctcttccctccaattgaaagactagtggaatatctgcaattacttt

SEQ ID NO: 611421 - DNA, 120 bp, Artificial Sequence
  ENSG00000176256_7 (sequence is synthesized)
gaccaaaagccagaagccggccagtttgagtgtagctgttacagctttgtgttctaaacctaagaaatggggacccctcacatgagagtggggaggcttctggatgtgctacaaattcca

SEQ ID NO: 611422 - DNA, 120 bp, Artificial Sequence
  ENSG00000176256_8 (sequence is synthesized)
tttcattttcatgaactccagtgttaattaataaaatctcaaggttctcccccctctttcgcctcacatttcttcagagaaatgaagagttccaactcatagcccaagtgctcaggtttt

SEQ ID NO: 611423 - DNA, 120 bp, Artificial Sequence
  ENSG00000176256_9 (sequence is synthesized)
gttactactaaaccctttgtatggcatgagctgccactgttcaaggcaaacagaaacacttcacattttatcatgacagccctggatctatccacctccccatgttcattatgctcagcc

SEQ ID NO: 611424 - DNA, 120 bp, Artificial Sequence
  ENSG00000176256_10 (sequence is synthesized)
tgtctttggaagggatgatgaggcatcctgaaaatcgtatagtgaggaaggcagaccccatggcctgtcactacagcctagggattttaagcccctaaagtgcagcaaaacccactgcct

SEQ ID NO: 611425 - DNA, 120 bp, Artificial Sequence
  ENSG00000176256_11 (sequence is synthesized)
ccaggaagccaaggagaattatttctgggggacatagctgcctcatagcctactatgaatgaaccatcatctttcatgagaggcaaacattgaccctcaagtaaccaaccaatacgagca

SEQ ID NO: 611426 - DNA, 120 bp, Artificial Sequence
  ENSG00000176256_12 (sequence is synthesized)
cctgtacacaaatgcccacaggtgttggctgggattggctggcttgtggatgatgtcacagtttccctcctctgactcaacaatgccatcagcactgaaaaggctgagccctgactacag

SEQ ID NO: 611427 - DNA, 120 bp, Artificial Sequence
  ENSG00000176256_13 (sequence is synthesized)
ctcttgcagacagaaaaattcgctgcaagtacagcactttctagattgctcctggagtgtgggaacaacagtctctcctgtccacgttactgaatccagaaaaaaggtgaacttacgaac

SEQ ID NO: 611428 - DNA, 120 bp, Artificial Sequence
  ENSG00000176256_14 (sequence is synthesized)
atgggaaaagaaatccagctaaagcctaaggcaaatgtctcttcttacgttcactttttgctgaattacagaaacaaattcaaggagcagcagccaaatacctatgttggctttaaagag

SEQ ID NO: 611429 - DNA, 120 bp, Artificial Sequence
  ENSG00000176256_15 (sequence is synthesized)
ttctctagaaagtgttcggaaaaatggagatccatctcaaagcatgaaaaggccaaatatgaagccctggccaaactcgacaaagcccgataccaggaagaaatgatgaattatgttggc

SEQ ID NO: 611430 - DNA, 120 bp, Artificial Sequence
  ENSG00000176256_16 (sequence is synthesized)
aagaggaagaaacggagaaagcgggatccccaggaacccagacggcctccatcatccttcctactcttctgccaagaccactatgctcagctgaagagggagaacccgaactggtcggtg

SEQ ID NO: 611431 - DNA, 120 bp, Artificial Sequence
  ENSG00000176256_17 (sequence is synthesized)
gtgcaggtggccaaggccacagggaagatgtggtcaacagcgacagacctggagaagcacccttatgagcaaagagtggctctcctgagagctaagtacttcgaggaacttgaactctac

SEQ ID NO: 611432 - DNA, 120 bp, Artificial Sequence
  ENSG00000176256_18 (sequence is synthesized)
cgtaaacaatgtaatgccaggaagaagtaccgaatgtcagctagaaaccggtgcagagggaaaagagtcaggcagagctgatggatccagtttgaaaaaacaaaatgccattcaaccgta

SEQ ID NO: 611433 - DNA, 120 bp, Artificial Sequence
  ENSG00000176256_19 (sequence is synthesized)
cttggagtgtgacccatcagtgggtcatgagactgcaatcaagatgtttgaaaatactgaactcacatctgtagacgaggagttggcagatttacgacccccagcttgcagcctattttt

SEQ ID NO: 611434 - DNA, 120 bp, Artificial Sequence
  ENSG00000176256_20 (sequence is synthesized)
taaaaataaggttttattggaacatagccacactcattggtttagaaaggagctgtgtcccattcatctaggcagccctgctcatgtccaaaaaatgtaagatgaacactgaagtcttgg

SEQ ID NO: 611435 - DNA, 120 bp, Artificial Sequence
  ENSG00000176256_21 (sequence is synthesized)
gcagacagaaaaattcgctgcaagtacagcactttctagattgctcctggagtgtgggaacaacagtctctcctgtccacgttactgaatccagaaaaaagaaacaaattcaaggagcag

SEQ ID NO: 611436 - DNA, 120 bp, Artificial Sequence
  ENSG00000176261_0 (sequence is synthesized)
ccgggccgaagtccggtggatgaagggcggaagtagagtgtctaatcctgcagtcatggcgcaggaagaggaagatgttagagattacaatttgactgaagaacagaaggcgatcaaggc

SEQ ID NO: 611437 - DNA, 120 bp, Artificial Sequence
  ENSG00000176261_1 (sequence is synthesized)
caagtatccgccagtcaataggaagtacgagtatttggatcatacagcagatgtccagttacacgcatggggagatactctggaggaagcatttgagcaatgtgcaatggccatgtttgg

SEQ ID NO: 611438 - DNA, 120 bp, Artificial Sequence
  ENSG00000176261_2 (sequence is synthesized)
ttacatgacagatactgggacagtggagcccctccaaacagtagaagtagaaacccaaggagatgacttacagtctcttctgtttcactttttggatgaatggctttataagttcagtgc

SEQ ID NO: 611439 - DNA, 120 bp, Artificial Sequence
  ENSG00000176261_3 (sequence is synthesized)
tgatgaattcttcataccccgggaagtgaaagtacttagcattgatcaaagaaatttcaaattacgatcaattgggtggggagaagaattttcattgtccaagcaccctcagggaacaga

SEQ ID NO: 611440 - DNA, 120 bp, Artificial Sequence
  ENSG00000176261_4 (sequence is synthesized)
agtcaaagcaataacatattcagcaatgcaggtctataatgaagagaacccggaagtttttgtgatcattgacatttaagacaccaaaaaataaaagactcctacgaagaactgtttttg

SEQ ID NO: 611441 - DNA, 120 bp, Artificial Sequence
  ENSG00000176261_5 (sequence is synthesized)
ttttcctcttccttttgagaagacactatgaattaaattctacagcttttttttgatatatggaaatttgtagaacagaaatattttagttaaagtgtgactttcagaaagggaaaatca

SEQ ID NO: 611442 - DNA, 120 bp, Artificial Sequence
  ENSG00000176261_6 (sequence is synthesized)
aaagaattcttcaaccccccaagggacagttatggtcctttgattctctgctgtggcagtaggtgtgcctcatgcccttccagtgcaatgcaagccctccagcctcaccccagagaggat

SEQ ID NO: 611443 - DNA, 120 bp, Artificial Sequence
  ENSG00000176261_7 (sequence is synthesized)
cactgatgtcagcagcagcctgaggctgaatccaggttgaaagaagaataacttgaaaaaatatatttccacacacagaattttgtttttcttccaagttggttaagacatatattttgt

SEQ ID NO: 611444 - DNA, 120 bp, Artificial Sequence
  ENSG00000176261_8 (sequence is synthesized)
atccgcccaccttggcctcccaaggtactgcgattacaggcatgagctaccatgcccggccacaagacatagattttctatatgcacatcaagggaggtgctggtttaggttgctatagg

SEQ ID NO: 611445 - DNA, 120 bp, Artificial Sequence
  ENSG00000176261_9 (sequence is synthesized)
acagagctatcctgtattccagttggtttttgtagagaaacaattagacttctctagatagagccctgatttttctctcacgctttcagttttttaaaagcactaatgatatttcctgtt

SEQ ID NO: 611446 - DNA, 120 bp, Artificial Sequence
  ENSG00000176261_10 (sequence is synthesized)
ttctcataagaaaaagtcaatactatgccttacaaagagacctttccttctaatatagaattttatttgaaagtgagtacatgtttataactagagaataaaaggagaatttttgaaaaa

SEQ ID NO: 611447 - DNA, 120 bp, Artificial Sequence
  ENSG00000176261_11 (sequence is synthesized)
gttgctatgttgtcgaggctagtcttgaactcctagcttccggcaatcctcctgcctcaattttgcaaagtgctgggattacaggtggggagaagaattttcattgtccaagcaccctca

SEQ ID NO: 611448 - DNA, 120 bp, Artificial Sequence
  ENSG00000176261_12 (sequence is synthesized)
gaatttggatcatacagcagatgtccatggattgtattacacagagcatgaatatacttctttaggttacacgcatggggagatactctggaggaagcatttgagcaatgtgcaatggcc

SEQ ID NO: 611449 - DNA, 120 bp, Artificial Sequence
  ENSG00000176261_13 (sequence is synthesized)
cgaccctttcagagtactgagatgaaaaatctagaatgccttcgggtctagttatcaattttgggggtgaagcgggggaaagaacctcgccagtcagacccagacgggtttcattcaagg

SEQ ID NO: 611450 - DNA, 120 bp, Artificial Sequence
  ENSG00000176261_14 (sequence is synthesized)
tgcccttcaacgtttttccttagtctttggaaagaactagtaatgaaggaatcgcagaagatggggttttggctttttaaatatgcgatccaagcggcagggtagggactaaagtaggtc

SEQ ID NO: 611451 - DNA, 120 bp, Artificial Sequence
  ENSG00000176261_15 (sequence is synthesized)
gccatctggaatccttatctccatctgatggggacataagatgttgttcagcttccaagtcaatggggaggctgtctatgccaaattctgcaagacactcattacacagtctgtagcgcc

SEQ ID NO: 611452 - DNA, 120 bp, Artificial Sequence
  ENSG00000176261_16 (sequence is synthesized)
cctccctttggcctccggaagtgccaggattataggtatgagccaccgcacctggccttaactatcaaccttgagagcaaatgatgacactgcacacacgtccctcaacagctgtatctt

SEQ ID NO: 611453 - DNA, 120 bp, Artificial Sequence
  ENSG00000176261_17 (sequence is synthesized)
ctgacaaatgaaaatgaaacttaacagctccctgaccccctcctgtctcttttggctttctagcatgttaaccacatttacaaggcttattttaaaacatataaagagagaacaaatctt

SEQ ID NO: 611454 - DNA, 120 bp, Artificial Sequence
  ENSG00000176261_18 (sequence is synthesized)
gatgtccagtgagtatagcgggagttcattcctttgaaaccacgtcagtaggaagactgaatgtttcaatcttggtatccctatctttaatttttctcctctcattttggttccttcaca

SEQ ID NO: 611455 - DNA, 74 bp, Artificial Sequence
  ENSG00000176261_19 (sequence is synthesized)
ggctagaccccatctcaaaaaataaaaaataaaaataaggccgggtgtggtggctcaacgcctgtaatcccagc

SEQ ID NO: 611456 - DNA, 74 bp, Artificial Sequence
  ENSG00000176261_20 (sequence is synthesized)
tggagtaccaatttttagtagatggtccaaaaaaacaaaacagaacaaaaagatttttagtagatagtctatta

SEQ ID NO: 611457 - DNA, 120 bp, Artificial Sequence
  ENSG00000176261_21 (sequence is synthesized)
cgcaggaagaggaagatgttagagattacaatttgactgaagaacagaaggcgatcaaggccaagtatccgccagtcaataggaagtacgagtgtgagtaggtggcttacttctctcttt

SEQ ID NO: 611458 - DNA, 120 bp, Artificial Sequence
  ENSG00000176269_0 (sequence is synthesized)
agcccagttggctggaccaatggatggagagaatcactcagtggtatctgagtttttgtttctgggactcactcattcatgggagatccagctcctcctcctagtgttttcctctgtgct

SEQ ID NO: 611459 - DNA, 120 bp, Artificial Sequence
  ENSG00000176269_1 (sequence is synthesized)
ctatgtggcaagcattactggaaacatcttcattgtgttttctgtgaccactgaccctcacttacactcccccatgtactttctactggccagtctctccttcattgacttaggagcctg

SEQ ID NO: 611460 - DNA, 86 bp, Artificial Sequence
  ENSG00000176269_2 (sequence is synthesized)
ttctactggccagtctctccttcattgacttaggagcctgctctgtcacttctcccaagatgatttatgacctgttcagaaagcgc

SEQ ID NO: 611461 - DNA, 120 bp, Artificial Sequence
  ENSG00000176269_3 (sequence is synthesized)
gctcatagccatggcctttgacagatatgtggccctatgtaagcccctccactatctgaccattatgagcccaagaatgtgcctttcatttctggctgttgcctggacccttggtgtcag

SEQ ID NO: 611462 - DNA, 120 bp, Artificial Sequence
  ENSG00000176269_4 (sequence is synthesized)
tagccttctgtggccctaatgtgttggacagcttctactgtgaccttcctcggcttctcagactagcctgtaccgacacctacagattgcagttcatggtcactgttaacagtgggttta

SEQ ID NO: 611463 - DNA, 120 bp, Artificial Sequence
  ENSG00000176269_5 (sequence is synthesized)
tctgtgtgggtactttcttcatacttctaatctcctacgtcttcatcctgtttactgtttggaaacattcctcaggtggttcatccaaggccctttccactctttcagctcacagcacag

SEQ ID NO: 611464 - DNA, 120 bp, Artificial Sequence
  ENSG00000176269_6 (sequence is synthesized)
tggtccttttgttctttggtccacccatgtttgtgtatacacggccacaccctaattcacagatggacaagtttctggctatttttgatgcagttctcactccttttctgaatccagttg

SEQ ID NO: 611465 - DNA, 120 bp, Artificial Sequence
  ENSG00000176269_7 (sequence is synthesized)
tctatacattcaggaataaggagatgaaggcagcaataaagagagtatgcaaacagctagtgatttacaagaagatctcataaatgatacaataagcccttctcgttaaacatgatatgg

SEQ ID NO: 611466 - DNA, 120 bp, Artificial Sequence
  ENSG00000176273_0 (sequence is synthesized)
agcccaggcgctgctgctggcgccagacggcaccggccgctggtagagcgcgtgccgcgagatgcggcctcaggacagcaccggggtcgcggagctccaggagcccgggctgccgctaac

SEQ ID NO: 611467 - DNA, 120 bp, Artificial Sequence
  ENSG00000176273_1 (sequence is synthesized)
ggacgatgcacccccgggcgccactgaggagccggcggccgccgaggcagctggggcgccagaccgcggtaggtgctggctctgcctttcctcgccgtgttgctcccgcaccgagccggc

SEQ ID NO: 611468 - DNA, 120 bp, Artificial Sequence
  ENSG00000176273_2 (sequence is synthesized)
caagaagaaagcaccctgtcctggacttggcttgttttacacattattgtctgccttccttttctcagtgggctctttatttgttaaaaaagtgcaagacgtccatgctgtagagattag

SEQ ID NO: 611469 - DNA, 120 bp, Artificial Sequence
  ENSG00000176273_3 (sequence is synthesized)
tgcgtttcgatgtgtgttccaaatgctagttgttatcccttgcttaatatacagaaaaactgggtttataggcccaaaaggtcaacgaattttcctcattctcagaggagtccttggttc

SEQ ID NO: 611470 - DNA, 120 bp, Artificial Sequence
  ENSG00000176273_4 (sequence is synthesized)
taccgccatgatgcttatatactatgcttaccagacaatgtccctcgctgatgccacagttatcacgtttagcagtccagtgtttacgtccatatttgcttggatatgtctcaaggaaaa

SEQ ID NO: 611471 - DNA, 120 bp, Artificial Sequence
  ENSG00000176273_5 (sequence is synthesized)
atatagcccttgggatgctcttttcaccgtgttcacaatcactggagtgatccttatcgtgagaccaccatttttgtttggttccgacacttcggggatggaagaaagctattcaggcca

SEQ ID NO: 611472 - DNA, 120 bp, Artificial Sequence
  ENSG00000176273_6 (sequence is synthesized)
ccttaagggaacattcgcagcaattggaagtgccgtatttgctgcatcgactctagttatcctaagaaaaatgggaaaatctgtggactactttctgagcatttggtattatgtagtact

SEQ ID NO: 611473 - DNA, 120 bp, Artificial Sequence
  ENSG00000176273_7 (sequence is synthesized)
tggcctcgttgaaagtgtcatcatcctctctgtattaggagagtggagtctgccttactgtgggttggacaggctatttctcatattcattgggctctttggtttggggggtcagatatt

SEQ ID NO: 611474 - DNA, 120 bp, Artificial Sequence
  ENSG00000176273_8 (sequence is synthesized)
tatcacaaaagcacttcaaatagaaaaagcagggccagtagcaataatgaagacaatggatgtggtctttgcttttatctttcagattattttctttaataatgtgccaacgtggtggac

SEQ ID NO: 611475 - DNA, 120 bp, Artificial Sequence
  ENSG00000176273_9 (sequence is synthesized)
agtgggtggtgctctctgcgtagtagccagtaatgttggagcggccattcgtaaatggtaccaaagttccaaatgaagcatcattgctgaaatacatatttttttcaagtacaccatcac

SEQ ID NO: 611476 - DNA, 120 bp, Artificial Sequence
  ENSG00000176273_10 (sequence is synthesized)
ctaattcacatacagcatacgcacacatctggaaaatctgcattttcttcattggttgtatttaataaattgcctaaagtaccatttttgaatatagtatgtctttagttaagaatagct

SEQ ID NO: 611477 - DNA, 120 bp, Artificial Sequence
  ENSG00000176273_11 (sequence is synthesized)
agtctgtttggtgtaacaattttttggtagctttggttttggttttggttttttttgttgttgttgttggggtcaagttggtgagaggagagctcattgtttgaagaaaaaccaaaacat

SEQ ID NO: 611478 - DNA, 120 bp, Artificial Sequence
  ENSG00000176273_12 (sequence is synthesized)
tttatggctagtaatatttatgtaatttttaaaatgtatttttggtactgatgggatatgggtggggaggctattttagatattcttttagcagtgtagagcctaagaaacttggttcta

SEQ ID NO: 611479 - DNA, 120 bp, Artificial Sequence
  ENSG00000176273_13 (sequence is synthesized)
ctaccatgatctttataaactatgccttccagacaattgataatgctgctataattagtattatgttgataattcatttgcaaccttattctatttaggaggatgaagttgaagcttaga

SEQ ID NO: 611480 - DNA, 120 bp, Artificial Sequence
  ENSG00000176273_14 (sequence is synthesized)
gcttaatggtgttaataatacaaatgaattggccttattttcaaggattttataaatgattatcatacttgtaactcatatttgtgccttttcattttaatgctggaatttttattatgt

SEQ ID NO: 611481 - DNA, 120 bp, Artificial Sequence
  ENSG00000176273_15 (sequence is synthesized)
cacctctaaaacacttaaattgccaaatttggctagtagttttgtttcagtggcattagcaactgcagctagcatactataattttaattgtcctcacttttttttgaaactgcactaaa

SEQ ID NO: 611482 - DNA, 120 bp, Artificial Sequence
  ENSG00000176273_16 (sequence is synthesized)
tttttcttaacattccaagatttcagatctctaaatcacaaagagaaatcttggcatgaccagtgtgcacgtttccatcctgaagtgttttctcttcactagaaatgtgattttctataa

SEQ ID NO: 611483 - DNA, 120 bp, Artificial Sequence
  ENSG00000176273_17 (sequence is synthesized)
attccccttgaatttatagtgtgatgccaaataaaattttctcaggatcttattaggttgaaccatatgtaattgccaagattttactattttaacttagaaaaaccatcgtttcatatg

SEQ ID NO: 611484 - DNA, 120 bp, Artificial Sequence
  ENSG00000176273_18 (sequence is synthesized)
tcgtttcatatgattcaccctaatagatacctccattattctctaaatgaaatagaagactttggagtatatgtttttaaagtaattttttaaaatatggtaatgtattaaacttatttt

SEQ ID NO: 611485 - DNA, 120 bp, Artificial Sequence
  ENSG00000176273_19 (sequence is synthesized)
attatgtgtaataatgctttatgttatacattaaatgtaaagacttgtgaatccatgtttgattgactttcatagtttcctgcattgaaataaaatcactatgaattctagtttatcagc

SEQ ID NO: 611486 - DNA, 120 bp, Artificial Sequence
  ENSG00000176273_20 (sequence is synthesized)
atgatgttaaatgtcagtgccataccatgatgcagcaccatgacactaacgccatgaattcaaacagcacgttttacacctggaacttcatcagaccaatactttgcagttagagagaat

SEQ ID NO: 611487 - DNA, 120 bp, Artificial Sequence
  ENSG00000176273_21 (sequence is synthesized)
ttaatatctagaaaagcttgggaggttagtcaggacttagggagtatacataaatggttacttgttgtaatgagccctttattggtgaggttgcaatagcttccagctcttactgtgtca

SEQ ID NO: 611488 - DNA, 120 bp, Artificial Sequence
  ENSG00000176273_22 (sequence is synthesized)
gatgaagcatctgtcattatcttaagcctgcagagttgaaaggttataggctctttcctaccctctcatcataatttttccaaagcaaagaggaacttggcttctggggttcgtgcctta

SEQ ID NO: 611489 - DNA, 120 bp, Artificial Sequence
  ENSG00000176273_23 (sequence is synthesized)
gtgagaaagaatcttttccaatagttccaatgggggaatttttggcttgctgattttatcaattgccttgacacctgacaaaccctaaatgaagtctatgtaggtgagtcatctctgttc

SEQ ID NO: 611490 - DNA, 120 bp, Artificial Sequence
  ENSG00000176273_24 (sequence is synthesized)
cacctgatttacagtattggaatttagacttgcaaaaacatcattctgcaaatatcttagataattacagaatcaggagcatttgagaactctagaggtctcagaaatcatcacataggg

SEQ ID NO: 611491 - DNA, 120 bp, Artificial Sequence
  ENSG00000176273_25 (sequence is synthesized)
gccatgcttcgtagatagggatgatagagaggagacctgcccaagttgaatttccatggccttcctcccttccttagttccatgataaagtatggacagtaaaccactacttgagctacc

SEQ ID NO: 611492 - DNA, 120 bp, Artificial Sequence
  ENSG00000176273_26 (sequence is synthesized)
taaggtgaattaactctcagggaaccctcttccagttctttaccttgcacagtgaaagaatcagtggcacctagaaagttaaatccctttaggcccatacactagagacatgttttgttt

SEQ ID NO: 611493 - DNA, 120 bp, Artificial Sequence
  ENSG00000176273_27 (sequence is synthesized)
gaacaatgtagtttaagtacttgaatgtcacactatataactgaggttagagaaaatgtttcttctagcccttacagggtgtgattcttaaacacaatgtccaaggtgtatacaaggata

SEQ ID NO: 611494 - DNA, 120 bp, Artificial Sequence
  ENSG00000176273_28 (sequence is synthesized)
tgtattgtaacaactatgggtatgtatattttgcagagcgtagtttctatatcttgaaaaggaaaatattttcataaattgtttttataagtactaataaaataatatgaaagaaagcta

SEQ ID NO: 611495 - DNA, 120 bp, Artificial Sequence
  ENSG00000176273_29 (sequence is synthesized)
tggagaagcccacatgaagaggcccatgtggagaggaactgaggccctgacacttggccccatctgcactaccagctgatagccagcatgagcctgccagccaggtaagaggacatgaat

SEQ ID NO: 611496 - DNA, 120 bp, Artificial Sequence
  ENSG00000176273_30 (sequence is synthesized)
ggagttttaccctaaaggttgtggatcaggaaaggtcctaaacaaagcacaggggaatggcactaatctcaccagtaaggtgtgtagccaaaccagctgttccctgttaagaactgtaaa

SEQ ID NO: 611497 - DNA, 120 bp, Artificial Sequence
  ENSG00000176273_31 (sequence is synthesized)
atagcctcaggcaggtccttcaggaggtatggacaagaaggcattgctatcacaggagacgacagctccatgcatgttcctgtccctgaaggccttccagtcagtcaagatgtggaggcg

SEQ ID NO: 611498 - DNA, 120 bp, Artificial Sequence
  ENSG00000176273_32 (sequence is synthesized)
gaagacagtgatataaatgatcctgaccctggtgcagtgactacatgtatgaaataagcctgcatgagtgttatatcaagataaaagggtcatatatgtgccataattggtcatcgaatg

SEQ ID NO: 611499 - DNA, 86 bp, Artificial Sequence
  ENSG00000176273_33 (sequence is synthesized)
acgagatacaacagatgaacacacttcctgtttatgtgctttagttcctttgtatgtgcattttagaaaagtcagaagtctttggt

SEQ ID NO: 611500 - DNA, 120 bp, Artificial Sequence
  ENSG00000176273_34 (sequence is synthesized)
cctttgtatgtgcattttagaaaagtcagaagtctttggtactttgcagcatgtgtgcattggtacaacttctaggaagggcaatttggcaccatctatcagatttacttatgtgcaaaa

SEQ ID NO: 611501 - DNA, 120 bp, Artificial Sequence
  ENSG00000176273_35 (sequence is synthesized)
tgatatgtacaagtttattccagcctgatttgtaatagcaagaagaaatggaactagcctgaatgtccctcaatagagtactggttaagtaagtcatggtatatacccaaaataaaatgt

SEQ ID NO: 611502 - DNA, 120 bp, Artificial Sequence
  ENSG00000176273_36 (sequence is synthesized)
aatgcaattaaaaataaatttaagaagagcaaggaagctttccatatatgggtgtggaataatgtccaaaattgttaagtgaaaaagcaaaattcatatcatggttgagtatgtgctcat

SEQ ID NO: 611503 - DNA, 120 bp, Artificial Sequence
  ENSG00000176273_37 (sequence is synthesized)
ttgtataaaaagagggtaaacagaatattccaggaggatatgcaagaaactgttaacattggttgcctttggcagctgaagggcgaggtgagaggagactttccactgaatcccctttta

SEQ ID NO: 611504 - DNA, 83 bp, Artificial Sequence
  ENSG00000176273_38 (sequence is synthesized)
ggtggaacaaaaataaaaaggtgacttgatggaaaagaaaggagaaagaaaaggagtaaaagacatagggagctacatatata

SEQ ID NO: 611505 - DNA, 120 bp, Artificial Sequence
  ENSG00000176273_39 (sequence is synthesized)
gaaagaaaaggagtaaaagacatagggagctacatatatacattatgtcatacatacatacatgcatagagagatgtttactgctttaatctgggctgtcaccctgactcaccttacgga

SEQ ID NO: 611506 - DNA, 120 bp, Artificial Sequence
  ENSG00000176273_40 (sequence is synthesized)
cttccttttgctccctcctcttttgcctcatagagtctgcagaccatacttaaattcccacatctccatgattgaagggaatataaagatgaaactgaagttcacctttttaataggact

SEQ ID NO: 611507 - DNA, 120 bp, Artificial Sequence
  ENSG00000176273_41 (sequence is synthesized)
atatcctccaagatcctagaaagcgttgtgtggccctgattcagatgtctgctttcctatggcaccaaaacaatttttacttggaaaggacactaacatttattgaataaacctcatccc

SEQ ID NO: 611508 - DNA, 120 bp, Artificial Sequence
  ENSG00000176273_42 (sequence is synthesized)
ccaaccttgggagatagactgattgggaactgaagttcaaagaggttgaatggggttacctacctgctaaattctagtcccctcactagtaaatgatgaggttgggccatgaggtctgcc

SEQ ID NO: 611509 - DNA, 120 bp, Artificial Sequence
  ENSG00000176273_43 (sequence is synthesized)
tgactccaaagaccttgccctttccaatacttcatgctgcctccataattgagggtggtagaatgcagaacagggagtcatttgtcactgtggtggagaaagagttggtttttgactttg

SEQ ID NO: 611510 - DNA, 120 bp, Artificial Sequence
  ENSG00000176273_44 (sequence is synthesized)
ggatttagggatacatatgtcctccttcctccttcccctcctagagcaagagctagaagcgaaagaatagaaggtgatgacaacactgcatatatttcagttttatttcttccgatctac

SEQ ID NO: 611511 - DNA, 120 bp, Artificial Sequence
  ENSG00000176273_45 (sequence is synthesized)
taattaacatttgttgggcagtagccataaacaatcctagccaatgcaaggaaacaccaaatattgtcaagccctcacattggtcataactggaagcaaacatgacatatatggactata

SEQ ID NO: 611512 - DNA, 120 bp, Artificial Sequence
  ENSG00000176273_46 (sequence is synthesized)
taatcagtttgcgtgggctacagcaagatgttgcccaagagcctaggcatgagctggcttcctacggcctccaagcaggaaagaatggagctatacacagtcatctgaatatacagaagt

SEQ ID NO: 611513 - DNA, 120 bp, Artificial Sequence
  ENSG00000176273_47 (sequence is synthesized)
gaaccctgggccagccacattcagccgtaacttccccagactgtttctacaggtgcagtgtgccaatcagaagaaaggtggccaggctcaggagaaaggacaggagagtgactctggcag

SEQ ID NO: 611514 - DNA, 120 bp, Artificial Sequence
  ENSG00000176273_48 (sequence is synthesized)
gcttgctccattgtagagatgagatacaccaagatagtgacttcccagcttttctccccaaagcacccctaatagctgagaagaatctggaggcatagctaccatcacagctacactaac

SEQ ID NO: 611515 - DNA, 120 bp, Artificial Sequence
  ENSG00000176273_49 (sequence is synthesized)
caccatactttactgtatccttcaggtgtctgtcctagctagttttgtggtctggctccttcagtccctgcaacaagcctgtttattttcattatattgatgaggttatagagcttggac

SEQ ID NO: 611516 - DNA, 120 bp, Artificial Sequence
  ENSG00000176273_50 (sequence is synthesized)
aagttacatgacttttcgaagatcacatagctaataagtgtcaagagtcttattctcaaaaccctggtctgtccaactacaagcctgtgctcctgactccactattctgcttaccctaag

SEQ ID NO: 611517 - DNA, 120 bp, Artificial Sequence
  ENSG00000176273_51 (sequence is synthesized)
cctaaagctgcccacttcaagctcaaatcctcttggaggcttcatgctttaaaaaaaaaaaatccatgcaattttttgcatcctaattaataatatatctgtgtgttttagtgtaaattt

SEQ ID NO: 611518 - DNA, 120 bp, Artificial Sequence
  ENSG00000176273_52 (sequence is synthesized)
ttttttttaaattaccaattcagttatttagctttttattccccaaatctttggtaccctaggcagatgtgtcatatttatcctgggctttatgtacctctggtttgagggactcttgaa

SEQ ID NO: 611519 - DNA, 120 bp, Artificial Sequence
  ENSG00000176273_53 (sequence is synthesized)
cttcattttaagaaacatggcccaatgagtacacagtcaagtcttcatgtccctgaacactgcattacaaaatcagcactccttgttctttgtatatttgtgttatcaaataactatgtg

SEQ ID NO: 611520 - DNA, 120 bp, Artificial Sequence
  ENSG00000176273_54 (sequence is synthesized)
attataatctggcttctcatataccataagtgcagaagagaatcaaaagattgagtacctgattccctaaactgtcaaatttcccgttgtatattaataaaatttgtatcgtttcacaaa

SEQ ID NO: 611521 - DNA, 120 bp, Artificial Sequence
  ENSG00000176281_0 (sequence is synthesized)
cagaacaagtttgcagcttggaaccatggataagtccaattcttcagtggtgtctgaatttgtactgttgggactctgtagttctcaaaaactccagcttttctatttttgtttcttctc

SEQ ID NO: 611522 - DNA, 120 bp, Artificial Sequence
  ENSG00000176281_1 (sequence is synthesized)
tgtgttgtatacagtcattgtgctgggaaatcttctcattatcctcacagtgacttctgataccagcctgcactcccctatgtactttctcttgggaaacctttcctttgttgacatttg

SEQ ID NO: 611523 - DNA, 120 bp, Artificial Sequence
  ENSG00000176281_2 (sequence is synthesized)
tcaggcttcttttgctacccctaaaatgattgcagattttctgagtgcacacgagaccatatctttcagtggctgcatagcccaaattttctttattcacctttttactggaggggagat

SEQ ID NO: 611524 - DNA, 120 bp, Artificial Sequence
  ENSG00000176281_3 (sequence is synthesized)
ggtgctacttgtttcgatggcctatgacaggtatgtagccatatgcaaacccttatactatgtggtcatcatgagccgaaggacatgcactgtcttggtaatgatctcctgggctgtgag

SEQ ID NO: 611525 - DNA, 120 bp, Artificial Sequence
  ENSG00000176281_4 (sequence is synthesized)
tcttacatcattgaaatactaattgtggtcaatagtggaattctttccctaagcactttctctctcttggtcagctcctacatcattattcttgttacagtttggctcaagtcttcagct

SEQ ID NO: 611526 - DNA, 120 bp, Artificial Sequence
  ENSG00000176281_5 (sequence is synthesized)
gcaatggcaaaggcattttctacgctggcttcccatattgcagtagtaatattattctttggaccttgcatcttcatctatgtgtggccctttaccatctctcctttggataaatttctt

SEQ ID NO: 611527 - DNA, 120 bp, Artificial Sequence
  ENSG00000176281_6 (sequence is synthesized)
gccatattttacactgttttcacccccgtcctaaaccccattatttatacactaaggaatagggatatgaaggctgccgtaaggaaaattgtgaaccattacctgaggccaaggagaatt

SEQ ID NO: 611528 - DNA, 120 bp, Artificial Sequence
  ENSG00000176281_7 (sequence is synthesized)
tctgaaatgtcactagtagtgagaacttcctttcattaagacaaaactccttcaaattcctcaggtcaatacactgtttaatattttaatgtatttttgtggtgtatctcaattgtgggg

SEQ ID NO: 611529 - DNA, 120 bp, Artificial Sequence
  ENSG00000176293_0 (sequence is synthesized)
gtcggctgccggtgccgcggcctttgtctcgcagtcaggaggggccagccgttcctgccagaagccagggcatgacccctggggtgcgcgtctccacagacccggagcaagtgacgtttg

SEQ ID NO: 611530 - DNA, 120 bp, Artificial Sequence
  ENSG00000176293_1 (sequence is synthesized)
aggacgtggtagtgggcttcagccaggaggagtgggggcagctgaagcctgcccagaggaccctgtaccgtgatgtaatgctggacaccttcaggcttctggtctctgtgggacattggt

SEQ ID NO: 611531 - DNA, 120 bp, Artificial Sequence
  ENSG00000176293_2 (sequence is synthesized)
taccgaagccgaatgtcatctccctgctggagcaagaggcagagctgtgggcggtggagtctagacttccccaaggcgtgtacccagagattaagggacatttccagtttttgcttcttt

SEQ ID NO: 611532 - DNA, 120 bp, Artificial Sequence
  ENSG00000176293_3 (sequence is synthesized)
cagacttggaaactagacccaaagtcaaactgtcagttctaaagcaaggcatctctgaagaaatatccaacagtgtcatcttggtagaaagattcctgtgggatggtctgtggtactgca

SEQ ID NO: 611533 - DNA, 120 bp, Artificial Sequence
  ENSG00000176293_4 (sequence is synthesized)
ggggtgaggacactgagggccactgggaatggagttgtgagagtctagagagcctggcagtgccggtggccttcacgcctgtgaagacgcctgttctggagcagtggcagaggaatgggt

SEQ ID NO: 611534 - DNA, 120 bp, Artificial Sequence
  ENSG00000176293_5 (sequence is synthesized)
ttggggaaaacataagtctgaaccctgatctcccacatcaaccaatgactcctgaaagacaaagcccccacacatggggaacacgtggaaaaagggagaagccagacctaaatgttttac

SEQ ID NO: 611535 - DNA, 120 bp, Artificial Sequence
  ENSG00000176293_6 (sequence is synthesized)
agaaaacctgtgtaaaagagaaaccctacaaatgtcaggaatgcggaaaggcctttagtcacagctcagcacttatcgaacaccaccggacgcacacaggagagagaccttacgaatgtc

SEQ ID NO: 611536 - DNA, 120 bp, Artificial Sequence
  ENSG00000176293_7 (sequence is synthesized)
acgaatgcttaaaaggcttccggaacagctcggcacttaccaaacaccagagaatccatactggggagaaaccctataaatgcactcagtgtgggaggaccttcaaccaaattgccccac

SEQ ID NO: 611537 - DNA, 120 bp, Artificial Sequence
  ENSG00000176293_8 (sequence is synthesized)
tgatccagcaccagagaactcacacaggtgagaagccctatgaatgcagcgaatgtgggaaatccttcagttttaggtcctccttcagccagcacgagcgaactcacacaggcgagaagc

SEQ ID NO: 611538 - DNA, 120 bp, Artificial Sequence
  ENSG00000176293_9 (sequence is synthesized)
gtggtgagtgtggcaaggccttcagccacagctcatccttgaccaaacaccagcgaatccacacaggggagaagccctacgagtgccatgagtgtggaaaagccttcacccagatcacac

SEQ ID NO: 611539 - DNA, 120 bp, Artificial Sequence
  ENSG00000176293_10 (sequence is synthesized)
cactgattcagcaccagaggacccacacaggagaaaagccctatgagtgtggtgagtgtgggaaagccttcagtcagagcacactcctgaccgagcatcggaggattcacacaggagaga

SEQ ID NO: 611540 - DNA, 120 bp, Artificial Sequence
  ENSG00000176293_11 (sequence is synthesized)
agccctatggatgcaacgagtgtgggaaaaccttcagccacagctcctcactcagccagcatgagcggacacacacaggagagaagccctatgagtgcagtcagtgtgggaaggccttcc

SEQ ID NO: 611541 - DNA, 120 bp, Artificial Sequence
  ENSG00000176293_12 (sequence is synthesized)
ggcagagcacacacctcacccaacaccagcgaatccacacaggggagaagccctatgaatgcaatgactgcggcaaggcattcagtcacagctcgtccctcaccaaacatcagcgaatcc

SEQ ID NO: 611542 - DNA, 120 bp, Artificial Sequence
  ENSG00000176293_13 (sequence is synthesized)
acactggggagaagccctacgaatgcaaccagtgtggcagagccttcagccagcttgctcccctcattcagcatcagaggatccacacaggagagaaaccctatgaatgtaaccagtgtg

SEQ ID NO: 611543 - DNA, 120 bp, Artificial Sequence
  ENSG00000176293_14 (sequence is synthesized)
gcagagccttcagccagagctcccttctcatcgaacaccagaggattcacaccaaggaaaagccgtatgggtgcaatgagtgtgggaaatccttcagccacagctcctcgctcagccagc

SEQ ID NO: 611544 - DNA, 120 bp, Artificial Sequence
  ENSG00000176293_15 (sequence is synthesized)
acgaaaggacgcacactggggaaaagccctatgagtgtcacgattgcggaaagtcctttaggcagagcacccacctcactcagcaccggaggatccacacaggagagaagccatatgcat

SEQ ID NO: 611545 - DNA, 120 bp, Artificial Sequence
  ENSG00000176293_16 (sequence is synthesized)
gcagggactgtggaaaggcctttacccacagctcctcccttaccaagcaccagagaactcacactggataaacccactccacatgtgctggggacataggaagaccttaagccatagctc

SEQ ID NO: 611546 - DNA, 120 bp, Artificial Sequence
  ENSG00000176293_17 (sequence is synthesized)
atccctttctagatttgacccaatcatacacatgagaaacgtacattcatacacaagccttttcacacagcactcccctcagacaccctcagagagttcacactgatgggaaatgaccat

SEQ ID NO: 611547 - DNA, 120 bp, Artificial Sequence
  ENSG00000176293_18 (sequence is synthesized)
ataatcaacactcaggaccttcagccttgaacgcccattagtgctatgttatagaacctacaaaaaagaaatggaacaaatgtagtggatccagggaacgcttttgtccaaggattcacc

SEQ ID NO: 611548 - DNA, 120 bp, Artificial Sequence
  ENSG00000176293_19 (sequence is synthesized)
gtattccaaaccagagatgttcaaattggtgagaaacccaacaaatgcctttcatatatacgagaaccaaatgaagtcagaatttgccattattgcacatcacatttttgggggggaaag

SEQ ID NO: 611549 - DNA, 120 bp, Artificial Sequence
  ENSG00000176293_20 (sequence is synthesized)
tgcttatgaatggtgcaggttgactctgatattcattcccaaatgacagtatggcagagtgttccagaaatgagagtggcatctttatggaatcactgtggatactgactgtctcagtaa

SEQ ID NO: 611550 - DNA, 120 bp, Artificial Sequence
  ENSG00000176293_21 (sequence is synthesized)
acagctgtcttgtctgtgtgtatattgtttgatcagggtacatggcagccagtcacagattggaattacatatgacaaagtatcagtgtactataaacaggtttttagttatccctgcat

SEQ ID NO: 611551 - DNA, 120 bp, Artificial Sequence
  ENSG00000176293_22 (sequence is synthesized)
tatttttgcaattaatctttatatgcaatgagattgaaaagctttgtatgggaagactcaaaatgtaaagctgcttccgtagagtctcactgattctgagatggcttttgctgctctgtt

SEQ ID NO: 611552 - DNA, 120 bp, Artificial Sequence
  ENSG00000176293_23 (sequence is synthesized)
ctccctctacatttctctgcagaactcgcgttagaaacacagatatttgttttacaaaaagggagatttttcctttgttaaaccatcgtcttataagcaatagcaaattcatgttagaaa

SEQ ID NO: 611553 - DNA, 120 bp, Artificial Sequence
  ENSG00000176293_24 (sequence is synthesized)
cctaagtccacaaatagcagtctttctgacaactataacctttaaatggtgacttgctgccctcattagaaattgcattggctggccaggcgcggtgacttatgcctgtaatcccagcac

SEQ ID NO: 611554 - DNA, 120 bp, Artificial Sequence
  ENSG00000176293_25 (sequence is synthesized)
agcagatatgtgtccgcacccgccaggccttcagcttccctcagacaggcgggaaaaccctaggctgcccttctccgagcggagggccgccccacacacagcaggcgcttaaacgggtac

SEQ ID NO: 611555 - DNA, 120 bp, Artificial Sequence
  ENSG00000176293_26 (sequence is synthesized)
gcggggccctggacggctctccgcggagctccccaggctctggcgcagttccccggcttggggacctgagcaccgcctctgcctgccccagctgctcacctcccctttcccacagagcag

SEQ ID NO: 611556 - DNA, 90 bp, Artificial Sequence
  ENSG00000176293_27 (sequence is synthesized)
tgcaccaccgtgcccagcttcagcctcacaagtgctgagattacaggtgtaagcctctgcatctggcccagttagccatacagtggaaaa

SEQ ID NO: 611557 - DNA, 120 bp, Artificial Sequence
  ENSG00000176293_28 (sequence is synthesized)
aagcctctgcatctggcccagttagccatacagtggaaaaactgcactctaaccaggtgagcaaagagaacatcactgacaggaggaatgtggacaccgtgcaccctggatgggatgggg

SEQ ID NO: 611558 - DNA, 120 bp, Artificial Sequence
  ENSG00000176293_29 (sequence is synthesized)
gaaggcgcacacatgcaggccacagattagaagtgaagttgacatcacgccaagtacgaaaaggctaaacagctgacaaaatttccacttgagcaaccctggggagcgcaaacaggagga

SEQ ID NO: 611559 - DNA, 120 bp, Artificial Sequence
  ENSG00000176293_30 (sequence is synthesized)
atcggggcaagggtgacttgaagaaagcactggcagatcacgcactttaaggcaactctacactgcacaatgtcaaataacctagcatggggcggcactaaatggctgcaggaaagccga

SEQ ID NO: 611560 - DNA, 120 bp, Artificial Sequence
  ENSG00000176293_31 (sequence is synthesized)
gtcttcttccacatccggcggctcccctcggatgcgagcgctggcccagggtgtgtttacagaggtgagggcttcccgtggacccttctcgttgggagcgcttagcctcaggagcggatt

SEQ ID NO: 611561 - DNA, 120 bp, Artificial Sequence
  ENSG00000176293_32 (sequence is synthesized)
cagggcacaggcagaggacgtccacaaacaccacaggaagccgccacccaggggcgtggaaaggcccaatgcctcgtctgggattcacggccggcaaagcggcccctccggaacgggaca

SEQ ID NO: 611562 - DNA, 120 bp, Artificial Sequence
  ENSG00000176293_33 (sequence is synthesized)
gacagcacagcggctcacctctgcgcctctgggggtgcggggggagcctcgccctccacgctctctgggggaccgcccgccctagcccccgcctgggcttcgcgggtggacggttggggg

SEQ ID NO: 611563 - DNA, 120 bp, Artificial Sequence
  ENSG00000176293_34 (sequence is synthesized)
ggtcttccagcagccctgacaggcgtagcgcttccggccgccatggctgctgtggtgctccatcaggtgcgagagccacgcgaaggcctccccgcactcgccgcaggcatagggcttccc

SEQ ID NO: 611564 - DNA, 120 bp, Artificial Sequence
  ENSG00000176293_35 (sequence is synthesized)
gcgggacaagcccggctcgtcagccccagggccctgcccggcctccagccctgcgctgtcgccggagctagagacgccctcgaggctctgcccgtccccatcctcggggtgcggcctctt

SEQ ID NO: 611565 - DNA, 120 bp, Artificial Sequence
  ENSG00000176293_36 (sequence is synthesized)
ggttcccagtttcgccgtgcccctgtccggggcaggctgctggatgacggactgcctctgcgatccggtggcagagtcggactccgcgtcctgggggtcctgcgggtccggggccttccc

SEQ ID NO: 611566 - DNA, 120 bp, Artificial Sequence
  ENSG00000176293_37 (sequence is synthesized)
aggctgctcttcctcctcctcagtggtgcccgacgggggatcggcaagggcgtccccagggggcgcctccgtaggcagctcaggcagcacccccgcgggggcggcctcctcgcaggcgca

SEQ ID NO: 611567 - DNA, 120 bp, Artificial Sequence
  ENSG00000176293_38 (sequence is synthesized)
cccagcgctctcctgccgcctcccgccttctggaacaaggtcagagccctagcgtgagcgccccgcccagggccagggagaggaggacccagccgagcctcagctgccggaacagcgcac

SEQ ID NO: 611568 - DNA, 120 bp, Artificial Sequence
  ENSG00000176293_39 (sequence is synthesized)
agggctccgggctctggatccccgcggggctcacggctgtttggaagcagcgctgtccctcccaggcagccctgcagcgcatgccccgcgcctgctgctgcagatgtgggacctggaggc

SEQ ID NO: 611569 - DNA, 120 bp, Artificial Sequence
  ENSG00000176293_40 (sequence is synthesized)
ctccaacaacggaggccaccgacaggacaggaaggacagccccactgagcccgggttctggaaaccgcgcctttggaggtctccacctggccactagcttggccacaagatgcacgatgc

SEQ ID NO: 611570 - DNA, 120 bp, Artificial Sequence
  ENSG00000176293_41 (sequence is synthesized)
aaggagagcctgctcagagcgcaccctcctggagggaggggcccggctgccagcgaagagagtggggtcaatagctaaggccaaaccccccagcgacaagccccctggcgacaggcaccc

SEQ ID NO: 611571 - DNA, 120 bp, Artificial Sequence
  ENSG00000176293_42 (sequence is synthesized)
agggccctccagcccaagtccgcctctaggtgttcttgttggtgtgctggcacagagcctccaatggggcagaacggccacccccgggaccagtcatacacagatcctggcaactaacac

SEQ ID NO: 611572 - DNA, 120 bp, Artificial Sequence
  ENSG00000176293_43 (sequence is synthesized)
cactgccgtttccaccgaccaagtcttggggtggtctgtcatgcagcaagagaccatggacgtaactggattcctgcctcactcagacacggtggtgggagaatggtgaagcagtcaatg

SEQ ID NO: 611573 - DNA, 120 bp, Artificial Sequence
  ENSG00000176293_44 (sequence is synthesized)
ctgaggtctttgctggggctgatggcgctgggaggggccccctcagcctctgaagaaaaagcaaaccccacccggccctaacaccaattcaacccaacctcacctgggaggctgcttcct

SEQ ID NO: 611574 - DNA, 120 bp, Artificial Sequence
  ENSG00000176293_45 (sequence is synthesized)
tgtggatctctttccaccaaccggagttcctcagtgtccagcctggaggcagcgtcaggctgggaaagctgataccctgagtggggttaaaaaccaaagaaataaaaggcatcaacacag

SEQ ID NO: 611575 - DNA, 120 bp, Artificial Sequence
  ENSG00000176293_46 (sequence is synthesized)
gtgccgcggcctttgtctcgcagtcaggaggagcagggccagccgttcctgccagaagccagggcatgacccctggggtgcgcgtctccacagacccggtgagaatctcggcctccttgc

SEQ ID NO: 611576 - DNA, 120 bp, Artificial Sequence
  ENSG00000176293_47 (sequence is synthesized)
gcgtgtcctccacctcgtgcccggcctcctcgcgcgcggccttctcacgcccggcctcctctttgcaccccgtccctactcgcgctcagcctcctccttgtgcccggcccctacttgcgt

SEQ ID NO: 611577 - DNA, 120 bp, Artificial Sequence
  ENSG00000176293_48 (sequence is synthesized)
gcccggcccctactcgtgcccggcctctactcgcacaactggcctctactcgcgcacctggcctctactggtgcccggcctctactcgtgcccggcctctatttgcacatctagcctcta

SEQ ID NO: 611578 - DNA, 120 bp, Artificial Sequence
  ENSG00000176294_0 (sequence is synthesized)
atggaaagcgagaacagaacagtgataagagaattcatcctccttggtctgacccagtctcaagatattcagctcctggtctttgtgctagttttaatattctacttcatcatcctccct

SEQ ID NO: 611579 - DNA, 120 bp, Artificial Sequence
  ENSG00000176294_1 (sequence is synthesized)
ggaaattttctcattattttcaccataaagtcagaccctgggctcacagcccccctctatttctttctgggcaacttggccttcctggatgcatcctactccttcattgtggctccccgg

SEQ ID NO: 611580 - DNA, 120 bp, Artificial Sequence
  ENSG00000176294_2 (sequence is synthesized)
atgttggtggacttcctctctgcgaagaagataatctcctacagaggctgcatcactcagctctttttcttgcacttccttggaggaggggagggattactccttgttgtgatggccttt

SEQ ID NO: 611581 - DNA, 120 bp, Artificial Sequence
  ENSG00000176294_3 (sequence is synthesized)
tggcttgggggttttgtccactccattatccaggtggtcctcatcctccgcttgcctttttgtggcccaaaccagctggacaacttcttctgtgatgtcccacaggtcatcaagctggcc

SEQ ID NO: 611582 - DNA, 120 bp, Artificial Sequence
  ENSG00000176294_4 (sequence is synthesized)
tgcaccgacacatttgtggtggagcttctgatggtcttcaacagtggcctgatgacactcctgtgctttctggggcttctggcctcctatgcagtcattctttgtcgcatacgagggtct

SEQ ID NO: 611583 - DNA, 120 bp, Artificial Sequence
  ENSG00000176294_5 (sequence is synthesized)
tcttctgaggcaaaaaacaaggccatgtccacgtgcatcacccatatcattgttatattcttcatgtttggacctggcatcttcatctacacgcgccccttcagggctttcccagctgac

SEQ ID NO: 611584 - DNA, 120 bp, Artificial Sequence
  ENSG00000176294_6 (sequence is synthesized)
aaggtggtttctctcttccacacagtgatttttcctttgttgaatcctgtcatttatacccttcgcaaccaggaagtgaaagcttccatgaaaaaggtgtttaataagcacatagcctga

SEQ ID NO: 611585 - DNA, 120 bp, Artificial Sequence
  ENSG00000176294_7 (sequence is synthesized)
agtactgcaatcactgagtacctcccatttgtcaggactattctgggaactgaaaaaagaaattactgaggcagataaggtccatctgctctccaagagatacaacctagtaaaaataga

SEQ ID NO: 611586 - DNA, 120 bp, Artificial Sequence
  ENSG00000176294_8 (sequence is synthesized)
ccaccattaaggtagaaaataaacagcatagtttcaggaagagatactgctctgtaaaaactaaaaagaaaagtgaaatgataaattgtgactctggattgggagtaaccaatttgtgtt

SEQ ID NO: 611587 - DNA, 120 bp, Artificial Sequence
  ENSG00000176294_9 (sequence is synthesized)
taataatcaaaaaagaccttgaagagctgacgttttggatgatatctggataaactgaagaaggcaaacatgcaaacatttgtggttatagtaatctagacggagggcacaggtagtgca

SEQ ID NO: 611588 - DNA, 120 bp, Artificial Sequence
  ENSG00000176294_10 (sequence is synthesized)
agatgatgatgaacttggtatatttgaagaatacaataaagtccatgttacccggaatatagtaatttaatatgaaaatgattaaagttggagatactggtagtgtcaaaaacatacggt

SEQ ID NO: 611589 - DNA, 120 bp, Artificial Sequence
  ENSG00000176294_11 (sequence is synthesized)
ctacatagtaaatatgagttttcattttattacaattacaataagaagccattctgtggctttaagcaaaagagtgattcctctactgaagggtcataaacaacttagcactgtaaactc

SEQ ID NO: 611590 - DNA, 120 bp, Artificial Sequence
  ENSG00000176294_12 (sequence is synthesized)
aagattctatgcggatatcaaagacttgaaaaatatcattaagaggaaaatattatatttgtaagtgcactttgaaagatattaaactaccaatttttcttacataaataagcagagagt

SEQ ID NO: 611591 - DNA, 120 bp, Artificial Sequence
  ENSG00000176294_13 (sequence is synthesized)
ggcaaaagaaagctggttacttttactgaaaaagatcacaaaaacattttactttttttttctagagcttcatgattactcctagcaaatttttatgacttttagctgtatgtttgacct

SEQ ID NO: 611592 - DNA, 120 bp, Artificial Sequence
  ENSG00000176294_14 (sequence is synthesized)
tattgccaattgatttcactctaagtttaataacaacagtcttttggtagagcaatcaggattttgtgtcagagacaagaaaccattctagctattttaaacaaaacatcatttaatatc

SEQ ID NO: 611593 - DNA, 120 bp, Artificial Sequence
  ENSG00000176294_15 (sequence is synthesized)
gagagttaggtgttcacaaaatcactggaaagtctaaaagagaagactataggctggacgtccagagatgccttacagactaacacaggtgaccaatgttgtcagggaagttgttcttgc

SEQ ID NO: 611594 - DNA, 120 bp, Artificial Sequence
  ENSG00000176294_16 (sequence is synthesized)
tacaatcttagccatctgtttgtctgaaaaacactacaattttagccatgtgcctgggatcaagttgatgatctggaatcactttggacctaacaaatcgcccctagtataacagaagcc

SEQ ID NO: 611595 - DNA, 120 bp, Artificial Sequence
  ENSG00000176294_17 (sequence is synthesized)
tctcctactgcatccctttaactagctgactatatattcaaatctcaaatgagtacattaaatgggcagcatccaaaacatctggaaccccaaatgcaagggggtcaaaaattgagtttt

SEQ ID NO: 611596 - DNA, 120 bp, Artificial Sequence
  ENSG00000176294_18 (sequence is synthesized)
aaaatattttatttttgataatcgccaaagtttatacttaggaatataaattttgtacatggtaaaaatattcagactatagaaaaagtggtctgaatcttcaaataatccttctctatt

SEQ ID NO: 611597 - DNA, 120 bp, Artificial Sequence
  ENSG00000176294_19 (sequence is synthesized)
ctcactctgtttattgcgttgcttcctgttttagtgagaaaggtagcaggtgagaattccttaatctcccatcactaccactatacaacctgcatctgtgattaagtttcctttaacttc

SEQ ID NO: 611598 - DNA, 120 bp, Artificial Sequence
  ENSG00000176294_20 (sequence is synthesized)
tcctgagactgagtgacctgatcctgctcctacagaagtaaacccttccacctgtgcaccagattccatccccctcctctctactaaaggcaattactctggtaactctcctttccctca

SEQ ID NO: 611599 - DNA, 120 bp, Artificial Sequence
  ENSG00000176294_21 (sequence is synthesized)
cctataacatgaactttgtcctccctattgggtgtaacctttagcgtgtaaccacatttcttccctcctaaataaaaccttcttgccaccttttcccctgtccatgtcacttcatgagtc

SEQ ID NO: 611600 - DNA, 120 bp, Artificial Sequence
  ENSG00000176294_22 (sequence is synthesized)
agggaggatgcctactttgtgagagtaacataagatccctgaaggcttaaatttctggagctcttcatatatatacaagaaacaagaagaaagggacaatagaaaaaatattgcaactat

SEQ ID NO: 611601 - DNA, 120 bp, Artificial Sequence
  ENSG00000176294_23 (sequence is synthesized)
tttacttgttcacctgatatcttagattgcagttgaatagacaggtcagagtattagcaggaatagccacaggctaaggtctaaattcagcagtggggcactatgtactctctctcctaa

SEQ ID NO: 611602 - DNA, 120 bp, Artificial Sequence
  ENSG00000176294_24 (sequence is synthesized)
tagatctccatctgcatttaatgcttgggattactttactggcaaacaaaacctttaattctattataattttccatagactcaagagaattgacatctggtgttaaaaaccaaaaatca

SEQ ID NO: 611603 - DNA, 120 bp, Artificial Sequence
  ENSG00000176294_25 (sequence is synthesized)
tacaaatgactgatatgtatcattttccttattaaatatggaagaaaagggaggaggatgcagaaatggtaggctaaaagctccagagaaaaacttaacagattttatgattttgcagaa

SEQ ID NO: 611604 - DNA, 120 bp, Artificial Sequence
  ENSG00000176294_26 (sequence is synthesized)
tattaaactttaatgggtagctggtagacaattaacactctgggagggctcaaaccacataaccaaatgtgccaagataatcctgagctcactcattgtcagtcctgaagattttcctca

SEQ ID NO: 611605 - DNA, 120 bp, Artificial Sequence
  ENSG00000176294_27 (sequence is synthesized)
gagaatctttcatctctttgctcctgagactatatattagaggattacagagtggtgttatcacagaatagaacaagtggatttttatctgagatctacaacttaagaagaatataagtg

SEQ ID NO: 611606 - DNA, 120 bp, Artificial Sequence
  ENSG00000176299_0 (sequence is synthesized)
aactctagataaatgctatgtggactaattatagtttctttaattttcatagttatattatgaaaagagtaaattgaagaaatggaaactgcaaattacaccaaggtgacagaatttgtt

SEQ ID NO: 611607 - DNA, 120 bp, Artificial Sequence
  ENSG00000176299_1 (sequence is synthesized)
ctcactggcctatcccagactcgggaggtccaactagtcctatttgttatatttctatccttctatttgttcatcctaccaggaaatatccttatcatttgcaccatcaggctagaccct

SEQ ID NO: 611608 - DNA, 120 bp, Artificial Sequence
  ENSG00000176299_2 (sequence is synthesized)
catctgacttctcctatgtatttcctgttggctaatctggccctccttgatatttggtactcttccattacagcccctaaaatgctcatagacttctttgtggagaggaagataatttcc

SEQ ID NO: 611609 - DNA, 120 bp, Artificial Sequence
  ENSG00000176299_3 (sequence is synthesized)
tttggtggatgcattgcacagctcttcttcttacactttgttggggcttcggagatgttcttgctcacagtgatggcctatgaccgctatgctgctatctgccgacccctccactatgct

SEQ ID NO: 611610 - DNA, 120 bp, Artificial Sequence
  ENSG00000176299_4 (sequence is synthesized)
gctctctcctggatggggggcttcattcattctataatacaggtggctctcattgttcgacttcctttctgtgggcccaatgagttagacagttacttctgtgacatcacacaggttgtc

SEQ ID NO: 611611 - DNA, 120 bp, Artificial Sequence
  ENSG00000176299_5 (sequence is synthesized)
cggattgcctgtgccaacaccttcccagaggagttagtgatgatctgtagtagtggtctgatctctgtggtgtgtttcattgctctgttaatgtcctatgccttccttctggccttgctc

SEQ ID NO: 611612 - DNA, 120 bp, Artificial Sequence
  ENSG00000176299_6 (sequence is synthesized)
aagaaacattcaggctcaggtgagaataccaacagggccatgtccacctgctattcccacattaccattgtggtgctaatgtttgggccatccatctacatttatgctcgcccatttgac

SEQ ID NO: 611613 - DNA, 120 bp, Artificial Sequence
  ENSG00000176299_7 (sequence is synthesized)
tcattttccctagataaagtggtgtctgtgtttcatactgtaatattccctttacttaatcccattatttacacattgagaaacaaggaagtaaaggcagccatgaggaaggtggtcacc

SEQ ID NO: 611614 - DNA, 120 bp, Artificial Sequence
  ENSG00000176299_8 (sequence is synthesized)
aaatatattttgtgtgaagagaagtgaaagataaattatacattttatagtcctcctgaggatcattgtcctaaagcaggaagtatttgcagtaataatgctgcattcacttcctccgtt

SEQ ID NO: 611615 - DNA, 120 bp, Artificial Sequence
  ENSG00000176299_9 (sequence is synthesized)
ggataaagtcctccactgtgggtggtggaagaggcttcttctacctcctccccatagttcctgaaggcaccaagactgtcacagtaattgttatattatgaaaagagtaaattgaagaaa

SEQ ID NO: 611616 - DNA, 120 bp, Artificial Sequence
  ENSG00000176299_10 (sequence is synthesized)
tctttatattgaaaaaatagaggcattaagatgaaaataaatttactcacacctaccctgaaattccaggcagatcattattagaatttgagatataataataatctgctaaagtacatt

SEQ ID NO: 611617 - DNA, 120 bp, Artificial Sequence
  ENSG00000176299_11 (sequence is synthesized)
ttaactaattgtttattgagtaactactctgcagaggctctggctttgaggggaacatgttgataaaaataaataagacatggagacgtgtccattacaaatatgaagtaaatggcaagc

SEQ ID NO: 611618 - DNA, 120 bp, Artificial Sequence
  ENSG00000176299_12 (sequence is synthesized)
atatggatgcagctagcttcaagttagcaaataaatattgtcaagtttcagtgttggctcagtggaatggtatctggtaaacatcttgctgggtctggaaaaacagattatttgtccttt

SEQ ID NO: 611619 - DNA, 120 bp, Artificial Sequence
  ENSG00000176299_13 (sequence is synthesized)
atctcctcttatttccagagttgatggaaaatgaggattcatttatagaaggtatttcagtttatatttcaggtggtgtccattcaacagttggagacagaactcaaaattttatcacat

SEQ ID NO: 611620 - DNA, 120 bp, Artificial Sequence
  ENSG00000176299_14 (sequence is synthesized)
tttatgaattcaaagcagagtataatttggctgatacatgagattcatgtcattccagatgaagcctccaggcaactagcaatttttatagccagtccctacttacatccttcagagtga

SEQ ID NO: 611621 - DNA, 120 bp, Artificial Sequence
  ENSG00000176299_15 (sequence is synthesized)
aagcaggcttggggagaaagcttctaggttgactggaattggtagacatctagccgtgtagtttttttctaaactatcatctcctttgccacttttgtatgttttccgtaattgctaatc

SEQ ID NO: 611622 - DNA, 120 bp, Artificial Sequence
  ENSG00000176299_16 (sequence is synthesized)
ctgcctctcatgttaaacttaaattggttaggtgctgtttttgttagcgcttaattcagagttatttcccattgagagacctggatgtgttggttcccatgatcccttagagaattatta

SEQ ID NO: 611623 - DNA, 120 bp, Artificial Sequence
  ENSG00000176299_17 (sequence is synthesized)
gggactgatttcctattttcaagcactaaaaactcactctccaagcttctgaatgtaagaggtagattagaacatttgattttataggttatgttttttacttaaatttattagtttttc

SEQ ID NO: 611624 - DNA, 120 bp, Artificial Sequence
  ENSG00000176299_18 (sequence is synthesized)
atttcaaaactaggaaatattttcattgaagggcaagaatgcattgggtgtattaagctttagtcttcttttttaaatttgataatgtaatatggactaaattttaagtgaattagatcc

SEQ ID NO: 611625 - DNA, 120 bp, Artificial Sequence
  ENSG00000176299_19 (sequence is synthesized)
ttgtcaacattaggaatgaatatataaaaataaatcgtataactattcctagagttactatttatttacagagatttatttattaattgaggaggtaatttatgccagacccagtgtacc

SEQ ID NO: 611626 - DNA, 120 bp, Artificial Sequence
  ENSG00000176299_20 (sequence is synthesized)
tcggatgcacaggatggaatggtggtacacaaagcttgttttttgctttgggaatttttccttatggtgaccttcttcgatcttcaatgctacgttacttctcttctaggaacccaaagg

SEQ ID NO: 611627 - DNA, 120 bp, Artificial Sequence
  ENSG00000176299_21 (sequence is synthesized)
catggattgatgttatgagtcctgatttttgagttgacttctcatcacctggaagtgaataaagcagtagacttctctaacattttgtaacacagcatgaaaaaatataaagtacaaaag

SEQ ID NO: 611628 - DNA, 120 bp, Artificial Sequence
  ENSG00000176299_22 (sequence is synthesized)
atatatatatataatatgataaaatgatgagttatgtttctaaatcttttatcatcttactgtcatttctctgtatttgatctagccagacttctattcattttgtcacttatctttcat

SEQ ID NO: 611629 - DNA, 120 bp, Artificial Sequence
  ENSG00000176299_23 (sequence is synthesized)
caaactagggctgatgttctttggaaagggaccactgatttgatatgctcttcaaacaccagcacactgtactacagaaggatatttactgaaaatactgaagctagtaatacaaaggaa

SEQ ID NO: 611630 - DNA, 120 bp, Artificial Sequence
  ENSG00000176299_24 (sequence is synthesized)
aaaggcataaaaacagtagtgtgataactaattgcttacttgggaatattatctgaaattagaaactaatatcaatgaagaaaaaggggaacttttggcaaactctagtaagtaataact

SEQ ID NO: 611631 - DNA, 120 bp, Artificial Sequence
  ENSG00000176299_25 (sequence is synthesized)
gagcctgattcatggaggacataattggaataaggactgagagcaatttcaccccttggaggacatttggaagtgcccagagacatttgtggtggtcacaactgaggacgtatattggca

SEQ ID NO: 611632 - DNA, 120 bp, Artificial Sequence
  ENSG00000176299_26 (sequence is synthesized)
tcttgtactatttagacatcttacaatgcacaggacagcccccagcccctgactcccacatgaattatctggcccaaaatgtcaatagtgccgagaatgaagaactccatcaggttgaga

SEQ ID NO: 611633 - DNA, 120 bp, Artificial Sequence
  ENSG00000176299_27 (sequence is synthesized)
aactctgacttaaataatgggcagggataaggcaggttagtgtagaagaaataggtgttaacctcatatgcaatgttgtgtcattgaatattgtttccaaatagctcagtatcctcagca

SEQ ID NO: 611634 - DNA, 120 bp, Artificial Sequence
  ENSG00000176299_28 (sequence is synthesized)
atcacatacaaaatatgcctcaggactccttttccctatataactcctacattttctttcagttacttttaaatgtcttttaatctctttttttctttcagtctctcctagtcctccttc

SEQ ID NO: 611635 - DNA, 120 bp, Artificial Sequence
  ENSG00000176299_29 (sequence is synthesized)
ggataaagtcctccactgtgggtggtggaagaggcttcttctacctcctccccatagttcctgaaggcaccaagactgtcacagtaattgcccctaaaatgctcatagacttctttgtgg

SEQ ID NO: 611636 - DNA, 120 bp, Artificial Sequence
  ENSG00000176299_30 (sequence is synthesized)
gctctctcctggatggggggcttcattcattctataatacaggaacccaaaggcatggattgatgttatgagtcctgatttttgagttgacttctcatcacctggaagtgaataaagcag

SEQ ID NO: 611637 - DNA, 120 bp, Artificial Sequence
  ENSG00000176302_0 (sequence is synthesized)
gcatttgagaaggcgcctgtgagggtcgctcctcagccgccgcgctcccactccgcgtccccactccgcgccgccgcgcctctgccagccccgaaggtggacgtgaagctccaacacctc

SEQ ID NO: 611638 - DNA, 120 bp, Artificial Sequence
  ENSG00000176302_1 (sequence is synthesized)
gacttctgggcccgcctccatggccaggtcccgggactgctggactgggacatggggaacgagctctttctggccttcaccacatctcacctccccttagcggagcagaaacttgccagg

SEQ ID NO: 611639 - DNA, 120 bp, Artificial Sequence
  ENSG00000176302_2 (sequence is synthesized)
tataaactccgaattgttaagccaccaaaattacccctagagaaaaaacccaaccctgataaggatggtccagattatgagcccaacctctggatgtgggtaaatcccaacattgtgtat

SEQ ID NO: 611640 - DNA, 120 bp, Artificial Sequence
  ENSG00000176302_3 (sequence is synthesized)
ccccctggaaagctggaggtctcaggacgtaggaagagggaggacctgacaagcacactcccctcctctcagccaccccagaaggaggaagatgccagctgctcagaggccgcaggggtg

SEQ ID NO: 611641 - DNA, 120 bp, Artificial Sequence
  ENSG00000176302_4 (sequence is synthesized)
agcaagcggtctccccctcggaagcggtttgccttttcccccagcacctgggagctcacagaagaggaggaggctgaggaccaggaagacagctcctctatggctctcccatcccctcac

SEQ ID NO: 611642 - DNA, 120 bp, Artificial Sequence
  ENSG00000176302_5 (sequence is synthesized)
aaaagggcccccctccagagtcggaggcttcggcaagccagcagccaggcggggaggctctggtcccggccccctctcaattacttccacctaattgccctggcattaagaaacagttcc

SEQ ID NO: 611643 - DNA, 120 bp, Artificial Sequence
  ENSG00000176302_6 (sequence is synthesized)
ccctgtggcctcaacgtgcaacagatctacagtttcactcgaaagcacttcccctttttccggacggccccggaaggctggaagaatactgtccgtcacaatctctgttttcgagacagc

SEQ ID NO: 611644 - DNA, 120 bp, Artificial Sequence
  ENSG00000176302_7 (sequence is synthesized)
tttgagaaagtgcctgtcagcatgcagggcggggccagcacacggcctcgatcttgcctctggaagttgaccgaggagggacaccgccgctttgcggaggaggcccgcgccttggcttcc

SEQ ID NO: 611645 - DNA, 120 bp, Artificial Sequence
  ENSG00000176302_8 (sequence is synthesized)
actcggctagaaagtatccaacagtgcatgagccagccagatgtgatgcccttcctctttgatctttaaccccaagaagcaacagccagctaatgctttattaaaattaccctcactagc

SEQ ID NO: 611646 - DNA, 120 bp, Artificial Sequence
  ENSG00000176302_9 (sequence is synthesized)
tcggaagcggtttgccttttcccccagcacctgggagaaagcacttcccctttttccggacggccccggaaggctggaagaatactgtccgtcacaatctctgttttcgagacagctttg

SEQ ID NO: 611647 - DNA, 120 bp, Artificial Sequence
  ENSG00000176340_0 (sequence is synthesized)
attttggcttcctgaccttgggctacggctgaccgttttttgtggtgtactccgtgccatcatgtccgtcctgacgccgctgctgctgcggggcttgacaggctcggcccggcggctccc

SEQ ID NO: 611648 - DNA, 120 bp, Artificial Sequence
  ENSG00000176340_1 (sequence is synthesized)
agtgccgcgcgccaagatccattcgttgccgccggaggggaagcttgggatcatggaattggccgttgggcttacctcctgcttcgtgaccttcctcctgccagcgggctggatcctgtc

SEQ ID NO: 611649 - DNA, 120 bp, Artificial Sequence
  ENSG00000176340_2 (sequence is synthesized)
acaggaggccagagtgaaggggtccgttctgtccctcacactgtgacctgaccagccccaccggcccatcctggtcatgttactgcatttgtggccggcctcccctggatcatgtcattc

SEQ ID NO: 611650 - DNA, 120 bp, Artificial Sequence
  ENSG00000176340_3 (sequence is synthesized)
aattccagtcacctcttctgcaatcatgacctcttgatgtctccatggtgacctccttgggggtcactgaccctgcttggtggggtcccccttgtaacaataaaatctatttaaacttta

SEQ ID NO: 611651 - DNA, 120 bp, Artificial Sequence
  ENSG00000176358_0 (sequence is synthesized)
atgctgccttgcctcgccctgcttctcctgatggagctgtccgtgtgcactgtggcaggtgatggtggagaggaacagacactcagcactgaagcagagacctgggtaattgtggccttg

SEQ ID NO: 611652 - DNA, 120 bp, Artificial Sequence
  ENSG00000176358_1 (sequence is synthesized)
gaggaaggcgctggccccagcattcagctccagctgcaggaggtgaagacgggcaaggcaagccagttctttgggctgatggggaagcgagtgggaggaagacctctgatccagccaagg

SEQ ID NO: 611653 - DNA, 120 bp, Artificial Sequence
  ENSG00000176358_2 (sequence is synthesized)
gaggatgaggcccaaggttcagagtaaaagcccccaccacagacttcccagaggacacggtgccgcttcttcctacctggatgtcacagctgacaagccggcaggccaactctcttctct

SEQ ID NO: 611654 - DNA, 120 bp, Artificial Sequence
  ENSG00000176358_3 (sequence is synthesized)
gtgtctcctgtcctcatcgctggcacttcacacaaggcccacactgaacccactgggcttcttcctggactctcagtgtcaagcagcagtcctgcataaatgcacagcttcgccgtagca

SEQ ID NO: 611655 - DNA, 120 bp, Artificial Sequence
  ENSG00000176358_4 (sequence is synthesized)
agctgcactgactctgccctccctcacactcagagttggcatctcactgcacagcagtgaggagactcgcacactctgtatcctgtgcctagcacacagtaggcactcaataaatgagtg

SEQ ID NO: 611656 - DNA, 120 bp, Artificial Sequence
  ENSG00000176358_5 (sequence is synthesized)
gctgctgggagagcaggcagtctgcaaggcaagttgtctgactctctaccatgggtagattcaaggctatgagccctggcctggcagacctccgaagtgtgtgtgtgtgtgtgtgtgtgt

SEQ ID NO: 611657 - DNA, 120 bp, Artificial Sequence
  ENSG00000176358_6 (sequence is synthesized)
gtgtgtgtgtgtaagaaatacttatttaacacacggtatatctctggcactgtctgaaatgctttataaatattaactcaatcctcccatcaacctcatggggaagcgagtgggaggtga

SEQ ID NO: 611658 - DNA, 120 bp, Artificial Sequence
  ENSG00000176371_0 (sequence is synthesized)
gggcctctcccgtccattgttctcggtgccccacgggcttgagccggggtgaatctggaggggccgggccgagcccgggggcgctttcgcacgcgaagcaaccgctagagcaggacctgg

SEQ ID NO: 611659 - DNA, 120 bp, Artificial Sequence
  ENSG00000176371_1 (sequence is synthesized)
tctcccgagaggtgagccggagaggcaggcctggagccacgcggaccccgggcagtagcccgagcgggactacttgttgatatttgaggagggaagtgtcttacctgagagcctggctgg

SEQ ID NO: 611660 - DNA, 120 bp, Artificial Sequence
  ENSG00000176371_2 (sequence is synthesized)
agaagactgaggtccaaggcttgaagcctaagtgattgccccaggactgtggatgatggctgcagacatcccgagagtgaccactccgctgagctccttggtccaggtgcctcaagagga

SEQ ID NO: 611661 - DNA, 120 bp, Artificial Sequence
  ENSG00000176371_3 (sequence is synthesized)
agatagacaggaggaggaggtcaccaccatgatcctggaggatgactcctgggtgcaagaagctgtgctgcaggaggatggccctgagtctgagccctttccccagagtgctggcaaggg

SEQ ID NO: 611662 - DNA, 120 bp, Artificial Sequence
  ENSG00000176371_4 (sequence is synthesized)
cggcccccaggaggaggtgaccaggggaccacagggtgcactcggccgcctccgagagctctgccggcgctggctgagaccagaggtacacaccaaggagcagatgttaaccatgctgcc

SEQ ID NO: 611663 - DNA, 120 bp, Artificial Sequence
  ENSG00000176371_5 (sequence is synthesized)
aaaggaaattcaggcttggctgcaagagcatcggcctgaaagcagtgaggaggcagcggccctggtggaagacttgacccagacccttcaggacagtgattttgagatacagagtgaaaa

SEQ ID NO: 611664 - DNA, 120 bp, Artificial Sequence
  ENSG00000176371_6 (sequence is synthesized)
tggggagaactgtaatcaagacatgtttgagaatgaatcacgtaagatattctcggaaatgcctgaaggtgaaagtgctcagcactccgatggggaaagtgactttgagagagatgctgg

SEQ ID NO: 611665 - DNA, 120 bp, Artificial Sequence
  ENSG00000176371_7 (sequence is synthesized)
catccagaggctccagggacacagcccaggtgaggaccacggggaggtggtttctcaggacagggaagttggccagctcataggcctgcagggcacctacctaggggagaagccctacga

SEQ ID NO: 611666 - DNA, 120 bp, Artificial Sequence
  ENSG00000176371_8 (sequence is synthesized)
atgtccccagtgtgggaagaccttcagccggaaatcccacctcatcacacacgagaggacccacacaggagagaaatactacaaatgtgatgaatgtggaaaaagctttagtgatggttc

SEQ ID NO: 611667 - DNA, 120 bp, Artificial Sequence
  ENSG00000176371_9 (sequence is synthesized)
aaattttagtagacaccaaaccactcacaccggggagaagccctacaaatgcagagactgtgggaagagctttagccggagtgccaacctcataacccaccagaggatccacacggggga

SEQ ID NO: 611668 - DNA, 120 bp, Artificial Sequence
  ENSG00000176371_10 (sequence is synthesized)
aaagcccttccagtgtgccgagtgtggcaagagcttcagcaggagtcccaacctcattgcacatcagcgcacccacacaggagagaaaccctactcgtgccccgagtgtggaaagagctt

SEQ ID NO: 611669 - DNA, 120 bp, Artificial Sequence
  ENSG00000176371_11 (sequence is synthesized)
tggcaaccgatccagccttaacacgcatcaggggatccacactggagaaaagccctacgaatgtaaagaatgcggcgaaagctttagttacaactccaatctaatcagacaccagagaat

SEQ ID NO: 611670 - DNA, 120 bp, Artificial Sequence
  ENSG00000176371_12 (sequence is synthesized)
ccacacaggagagaaaccctacaaatgtaccgactgtgggcagaggttcagccagagttcagccctcatcacccaccggagaacccacacaggagagaaaccctaccagtgcagcgagtg

SEQ ID NO: 611671 - DNA, 120 bp, Artificial Sequence
  ENSG00000176371_13 (sequence is synthesized)
tgggaaaagcttcagccgcagctctaacctggccacacaccggagaacccacatggtggagaagccctataagtgtggggtgtgtgggaagagcttcagccagagctccagtctgattgc

SEQ ID NO: 611672 - DNA, 120 bp, Artificial Sequence
  ENSG00000176371_14 (sequence is synthesized)
acaccagggcatgcacacaggggagaaaccctacgagtgcctgacatgtggggagagcttcagctggagctccaacctcctcaagcaccagaggatccacacgggagagaaaccctacaa

SEQ ID NO: 611673 - DNA, 120 bp, Artificial Sequence
  ENSG00000176371_15 (sequence is synthesized)
gtgcggcaagagcttcagccggggctccattctggtcatgcaccagagagcccatttgggagacaagccctacaggtgccctgagtgtgggaaaggctttagctggaactcagtcctcat

SEQ ID NO: 611674 - DNA, 120 bp, Artificial Sequence
  ENSG00000176371_16 (sequence is synthesized)
tatacatcagcgaatccacactggggagaagccctacaaatgccccgagtgtggcaaaggcttcagcaacagctctaactttatcacacatcagagaactcacatgaaagagaaacttta

SEQ ID NO: 611675 - DNA, 120 bp, Artificial Sequence
  ENSG00000176371_17 (sequence is synthesized)
ttgaagtggcaaagagtgaaagtgagggactggcctggagtgggagttgccacactgccccaacagtgattccctttcaaagagctgtgcttcctaaacattctggggggttttgccaga

SEQ ID NO: 611676 - DNA, 120 bp, Artificial Sequence
  ENSG00000176371_18 (sequence is synthesized)
gtcttccccttgctcatcctcatttccaggacactgtcattttagtggtctgagtcaagtcccgtatacattcaagaacagggcataggcgtggaaggtctggaaagttgggtctttttc

SEQ ID NO: 611677 - DNA, 120 bp, Artificial Sequence
  ENSG00000176371_19 (sequence is synthesized)
ccttacattgggtgacttgattggccccctctcatgattcctctgtgcctcagtttcctctttggtaaaatggggggaaatgtttctccatgtggaatggaagacagcatggcccacaac

SEQ ID NO: 611678 - DNA, 120 bp, Artificial Sequence
  ENSG00000176371_20 (sequence is synthesized)
gtgggccgagtcctcagagaaatactggaaatcattggtgtggttctggttgttttgttgttttgctgccacgttgttgggctaaggtgccttcaccccaagctgttagtgttccagggc

SEQ ID NO: 611679 - DNA, 120 bp, Artificial Sequence
  ENSG00000176371_21 (sequence is synthesized)
accccaagctgtcagttagaatctgctcttctggctttggtgtcttgggctttgatttcaggtcaagatggaggggcttctccagttctgagtcacccacgtgaaggtaaagaccctttc

SEQ ID NO: 611680 - DNA, 120 bp, Artificial Sequence
  ENSG00000176371_22 (sequence is synthesized)
tatttccagaaagtgtcaggagcacagaaacttgaggaagtacagcctggagccagtgtcccagtgtcctttccattggtaagagttggacagggccttcaggaaaggggtaaaccgagg

SEQ ID NO: 611681 - DNA, 120 bp, Artificial Sequence
  ENSG00000176371_23 (sequence is synthesized)
acatttcagtgcttgcttttgtctctgcctactgtcctgtggtagatcagctaccaggggaacacatttgttctcgtggggttttgtcctggagagtgtagtgaagtccgagagccctag

SEQ ID NO: 611682 - DNA, 120 bp, Artificial Sequence
  ENSG00000176371_24 (sequence is synthesized)
ctgccaacccatggtggatggtaacttctgtctcatcaagagtaaaacagtcctgcacacagcagggtgggtttgtgcctttggcccaacaggtacatagccccataatttctgaattat

SEQ ID NO: 611683 - DNA, 120 bp, Artificial Sequence
  ENSG00000176371_25 (sequence is synthesized)
ttattctatgcacttgtttccctcttcttttattttttatttgatatatgccgagctagaatcctgtcgggtagcttttgtatactaagaacattattattattattatttttgagacgg

SEQ ID NO: 611684 - DNA, 63 bp, Artificial Sequence
  ENSG00000176371_26 (sequence is synthesized)
gcccaccaccacacccagctattcgatctcctgtcctcgtgatctgcccgccttggcctcccg

SEQ ID NO: 611685 - DNA, 120 bp, Artificial Sequence
  ENSG00000176371_27 (sequence is synthesized)
tacaggcgtgagccagcgcacccggccaagaacattatttttaaagaagtgttaactttgaggacatatctgttccctggagatatttgggcttgaatcaggagtttgtcctacaggtgt

SEQ ID NO: 611686 - DNA, 120 bp, Artificial Sequence
  ENSG00000176371_28 (sequence is synthesized)
acaggtgtcgcccttgatctcaggatgctaccagggctttgttctcgggatcctcgcacctggagagtgaagacgggcatgacggcaggtgaaggggtttgctgtgaaggaagaggagat

SEQ ID NO: 611687 - DNA, 120 bp, Artificial Sequence
  ENSG00000176371_29 (sequence is synthesized)
aaggcatttccaggaaatgggaaactgcctcctcctacacatggggcctgtgctcagaatgggcttagttcttataggatggatgctcagtattccttaataaagtagagttccattctt

SEQ ID NO: 611688 - DNA, 120 bp, Artificial Sequence
  ENSG00000176371_30 (sequence is synthesized)
gttctcggtgccccacgggcttgagccggggtgaatctggaggggccgggccgagcccgggggcgctttcgcacgcgaagcaaccgctagagcaggacctggtctcccgagagacggagt

SEQ ID NO: 611689 - DNA, 120 bp, Artificial Sequence
  ENSG00000176371_31 (sequence is synthesized)
tgtagctgtcgttgcttcccttccggtggaggtgaccagtttgtaatgaacttctggatctccagtcagatactatggaggagagagtgatggagggctgaggagaggcctcaggttgtt

SEQ ID NO: 611690 - DNA, 120 bp, Artificial Sequence
  ENSG00000176371_32 (sequence is synthesized)
atttggttggggaggcacagagcagaggttcaggtctcagcaggtgtcagaggtgattacagcccttcccatccaccttgcagcaggggctttgtgcctttcatctttaactgggcacct

SEQ ID NO: 611691 - DNA, 120 bp, Artificial Sequence
  ENSG00000176371_33 (sequence is synthesized)
gagatgggaaccaatggggaccatcccagacacatgggtttgtctgtccctgacttctgcctctgagattgtctttgttggtctttgtttaataaacgccccgaccttcctcatgattgc

SEQ ID NO: 611692 - DNA, 71 bp, Artificial Sequence
  ENSG00000176371_34 (sequence is synthesized)
cgcgaagcaaccgctagagcaggacctggtctcccgagaggctggagtgcaatggcctgatctccgctcac

SEQ ID NO: 611693 - DNA, 120 bp, Artificial Sequence
  ENSG00000176371_35 (sequence is synthesized)
attgttctcggtgccccacgggcttgagccggggtgaatctggaggggccgggccgagcccgggggcgctttcgcacgcgaagcaaccgctagagcaggacctggtctcccgagagattt

SEQ ID NO: 611694 - DNA, 120 bp, Artificial Sequence
  ENSG00000176371_36 (sequence is synthesized)
ctgaaccaaagaagccagccctgcttaccccagttcccaaacacaggaagtgattttctgcctgagctttctgagttctgttccctcccaccccagggctctccatgcttattcattgca

SEQ ID NO: 611695 - DNA, 120 bp, Artificial Sequence
  ENSG00000176371_37 (sequence is synthesized)
tttccttcctcattgcttttacccagtctgctgttttgggaagccctgacatgtattttggtgcctacatattttatcttctgatctcactgaaaataaaattggattttacttgttttc

SEQ ID NO: 611696 - DNA, 120 bp, Artificial Sequence
  ENSG00000176381_0 (sequence is synthesized)
agtcggacggcgggaggcggttcctgcagggtccagtcccgggagcacccccaggaggaggggagggtgggagcgcctctctttgagtccccgggtttggtcgctgggatgtgaggaagc

SEQ ID NO: 611697 - DNA, 120 bp, Artificial Sequence
  ENSG00000176381_1 (sequence is synthesized)
cggagaggccgcggctggacgcaggtgggtgtggaggggccgcccggactgcggggacccgctccgcgcacagtggctgagcgcccgcctctctttccaggggctgaggatccggcggct

SEQ ID NO: 611698 - DNA, 80 bp, Artificial Sequence
  ENSG00000176381_2 (sequence is synthesized)
gcccccgccccgggggcccaagccgcgcgccagttaccccggaggccctgcgccgcgggggacaagaagaagaggccccc

SEQ ID NO: 611699 - DNA, 120 bp, Artificial Sequence
  ENSG00000176381_3 (sequence is synthesized)
gacaagaagaagaggcccccacagcggcccgaggggctcctctccagctcctggccctccgccacgctcaagaggccgccggcccggcgcggccccggcctggacaggacgcagccgccg

SEQ ID NO: 611700 - DNA, 80 bp, Artificial Sequence
  ENSG00000176381_4 (sequence is synthesized)
gccccgccccggccggcaggctccggccacagcccagcgaggaccacctatgcggcgacctcggcggggacggggaccac

SEQ ID NO: 611701 - DNA, 120 bp, Artificial Sequence
  ENSG00000176381_5 (sequence is synthesized)
cgccgcgggcacctcctcgggggcggggccttgtccagactccgctgcgcgcttctgcctgaatctcacccccgaggccgtcctggtcatccagaagcgtcatctggagaagcagctgct

SEQ ID NO: 611702 - DNA, 120 bp, Artificial Sequence
  ENSG00000176381_6 (sequence is synthesized)
catctggagaagcagctgctggcgcggccccgcaggcccttcccctcaccctcggccgaacccaggcgcctactcgccccgtgtctcccggctagggccgcgggcccgcggaggggcggc

SEQ ID NO: 611703 - DNA, 120 bp, Artificial Sequence
  ENSG00000176381_7 (sequence is synthesized)
ccgcgcgcctccgcccggcgcccagctgctgcacggcggcctgcaggttccccagctcagcccgcggcccggggccctgcggccgatgctcaaggtgtcgctgctcaacgagcggcacag

SEQ ID NO: 611704 - DNA, 120 bp, Artificial Sequence
  ENSG00000176381_8 (sequence is synthesized)
gtcgctgctcaacgagcggcacaggtacgacgacgtggagtacgaggaggagccagaggcggtggacgagggcctggtacgcaagtgcacggagtggctgcgcggcgtggagtccgcggc

SEQ ID NO: 611705 - DNA, 120 bp, Artificial Sequence
  ENSG00000176381_9 (sequence is synthesized)
tgccgcgcggggccgggcgggggccctggactcacggcggcacctgagcacgctgtgagcccagcgggcctgcggggacaggccaggcctgatcccacctcacttcctgcacgcgccact

SEQ ID NO: 611706 - DNA, 120 bp, Artificial Sequence
  ENSG00000176381_10 (sequence is synthesized)
ccgcctaggggccctcgggggagaccgcaggctcctctggccgccagcgcccactttcgggacaccagtgcgcaagctggcccacgtggggcgcagccagactcgcccgacggccacggc

SEQ ID NO: 611707 - DNA, 120 bp, Artificial Sequence
  ENSG00000176381_11 (sequence is synthesized)
ccccctcctgccctcgccagccggcagcccgggcctttctcgttcacaccggtggtatctaccccagatgcctgcctctgcccccactctggcctcctcttggcatcgccgagcatccat

SEQ ID NO: 611708 - DNA, 120 bp, Artificial Sequence
  ENSG00000176381_12 (sequence is synthesized)
cgggccttccccagggctacatctgcacgccccgtggtgtcaccctcagccggcgccgggcaccctggacagtgcggtgggcgatggcccaggtgggtggccgcgacggtggcctcctgc

SEQ ID NO: 611709 - DNA, 120 bp, Artificial Sequence
  ENSG00000176381_13 (sequence is synthesized)
agagctgggacccggtcctacattcgtgattttgttttctcccaagtcagaaaaatgttgagggtattagacatccctgaaactcagttaaccgaatttccagtctccaaagcggaaggg

SEQ ID NO: 611710 - DNA, 120 bp, Artificial Sequence
  ENSG00000176381_14 (sequence is synthesized)
taggcatcgccaggcgctggtgagccctggtcaatgagcgcttccatggaaaccgctcggctgattacattttttctgtgtattatttgaatagagagtaaagctcctccgctgtttcgt

SEQ ID NO: 611711 - DNA, 120 bp, Artificial Sequence
  ENSG00000176381_15 (sequence is synthesized)
aaccatatcctttcccccgctaactggaggctgatttctacatatttcttccatgtatctgagaatatctaactagaaggatgagaaggaaataaaatgttataatcagataaggctggt

SEQ ID NO: 611712 - DNA, 120 bp, Artificial Sequence
  ENSG00000176381_16 (sequence is synthesized)
tataaaagagtaatgtattacctcaatttttgactgactttgtaaaagccaataactggtttaatgtttatcttgatagactttaaatgtatcaagtcttaattgtattttaaattgaag

SEQ ID NO: 611713 - DNA, 120 bp, Artificial Sequence
  ENSG00000176381_17 (sequence is synthesized)
ccttacatttttaaaacagattttgtatttttcttgtggaggtctttgctctaataacacacacacactgtctctctctctctctctctctaattctaggcacacatttagttagatgtg

SEQ ID NO: 611714 - DNA, 120 bp, Artificial Sequence
  ENSG00000176381_18 (sequence is synthesized)
aagcatttaattcattgggagctaggtcagctgccagatgagttgcaaaaacagaaaaaaacctacccattgaataacttctttgaatttggagataagttttcttttacttaaaatgaa

SEQ ID NO: 611715 - DNA, 120 bp, Artificial Sequence
  ENSG00000176381_19 (sequence is synthesized)
tatattaattctagaggggcaaaactagcaatgcttatgcaagtgacggtgctgctcttgttccacccccacccagatggtctctgagtgcgccgtcctgggcagggcacacggtctgga

SEQ ID NO: 611716 - DNA, 120 bp, Artificial Sequence
  ENSG00000176381_20 (sequence is synthesized)
gctgagagggtggagcaagagtgcactgactccgagccgagggcaggagtggctcaacttggtctcgtcttgcacttagtgcaaataccaataattaagatgcctagacttctgcccttg

SEQ ID NO: 611717 - DNA, 120 bp, Artificial Sequence
  ENSG00000176381_21 (sequence is synthesized)
gtcacagtaacaacaacattttgaagacttttccctggtggcatcctagagggaccgactttctgcagcctctgtcttccaagctgagcttctgctgcagtgtggctgtcactgcacctg

SEQ ID NO: 611718 - DNA, 120 bp, Artificial Sequence
  ENSG00000176381_22 (sequence is synthesized)
tgtgtctccctgacgtccctgtcagctgcttcattttgatttcctttcttctcccgccctttctgtaggctctgtcccagcatctcctgttcttaactggccacaatacaacactaagcg

SEQ ID NO: 611719 - DNA, 120 bp, Artificial Sequence
  ENSG00000176381_23 (sequence is synthesized)
catttttagtaatttgtatttattaaatagagtttgtgggccttgttctctactttaaaagcagatgagtggaacatttatgtttccctggtcaatgagcttcaataaaaaacaaacaga

SEQ ID NO: 611720 - DNA, 120 bp, Artificial Sequence
  ENSG00000176381_24 (sequence is synthesized)
aaaaaggttttacacgtgacacatgatatcttttcattgctgttaaggacattttgagaaagttttctaagtcgctatgctccaatttcttaatgcttaaataaaagagaaattcagtga

SEQ ID NO: 611721 - DNA, 120 bp, Artificial Sequence
  ENSG00000176383_0 (sequence is synthesized)
actcccgagccccgagagctccgcgcacctgggcgccatccgccctggctccgctgcacgagctccacgcccgtaccccggcgtcacgctcagcccgcggtgctcgcacacctgagactc

SEQ ID NO: 611722 - DNA, 120 bp, Artificial Sequence
  ENSG00000176383_1 (sequence is synthesized)
atctcgcttcgaccccgccgccgccgccgcccggcatcctgagcacggagacagtctccagctgccgttcatgcttcctccccagccttccgcagcccaccagggaaggggcggtaggag

SEQ ID NO: 611723 - DNA, 120 bp, Artificial Sequence
  ENSG00000176383_2 (sequence is synthesized)
tggccttttaccaaagggaccggcgatgctctgcaggctgtgctggctggtctcgtacagcttggctgtgctgttgctcggctgcctgctcttcctgaggaaggcggccaagcccgcagg

SEQ ID NO: 611724 - DNA, 120 bp, Artificial Sequence
  ENSG00000176383_3 (sequence is synthesized)
agaccccacggcccaccagcctttctgggctcccccaacaccccgtcacagccggtgtccacccaaccacacagtgtctagcgcctctctgtccctgcctagccgtcaccgtctcttctt

SEQ ID NO: 611725 - DNA, 120 bp, Artificial Sequence
  ENSG00000176383_4 (sequence is synthesized)
gacctatcgtcactgccgaaatttctctatcttgctggagccttcaggctgttccaaggataccttcttgctcctggccatcaagtcacagcctggtcacgtggagcgacgtgcggctat

SEQ ID NO: 611726 - DNA, 120 bp, Artificial Sequence
  ENSG00000176383_5 (sequence is synthesized)
ccgcagcacgtggggcagggtggggggatgggctaggggccggcagctgaagctggtgttcctcctaggggtggcaggatccgctcccccagcccagctgctggcctatgagagtaggga

SEQ ID NO: 611727 - DNA, 120 bp, Artificial Sequence
  ENSG00000176383_6 (sequence is synthesized)
gtttgatgacatcctccagtgggacttcactgaggacttcttcaacctgacgctcaaggagctgcacctgcagcgctgggtggtggctgcctgcccccaggcccatttcatgctaaaggg

SEQ ID NO: 611728 - DNA, 120 bp, Artificial Sequence
  ENSG00000176383_7 (sequence is synthesized)
agatgacgatgtctttgtccacgtccccaacgtgttagagttcctggatggctgggacccagcccaggacctcctggtgggagatgtcatccgccaagccctgcccaacaggaacactaa

SEQ ID NO: 611729 - DNA, 120 bp, Artificial Sequence
  ENSG00000176383_8 (sequence is synthesized)
ggtcaaatacttcatcccaccctcaatgtacagggccacccactacccaccctatgctggtgggggaggatatgtcatgtccagagccacagtgcggcgcctccaggctatcatggaaga

SEQ ID NO: 611730 - DNA, 120 bp, Artificial Sequence
  ENSG00000176383_9 (sequence is synthesized)
tgctgaactcttccccattgatgatgtctttgtgggtatgtgcctgaggcggctggggctgagccctatgcaccatgctggcttcaagacatttggaatccggcggcccctggacccctt

SEQ ID NO: 611731 - DNA, 120 bp, Artificial Sequence
  ENSG00000176383_10 (sequence is synthesized)
agacccctgcctgtatagggggctcctgctggttcaccgcctcagccccctcgagatgtggaccatgtgggcactggtgacagatgaggggctcaagtgtgcagctggccccatacccca

SEQ ID NO: 611732 - DNA, 120 bp, Artificial Sequence
  ENSG00000176383_11 (sequence is synthesized)
gcgctgaagggtgggttgggcaacagcctgagagtggactcagtgttgattctctatcgtgatgcgaaattgatgcctgctgctctacagaaaatgccaacttggttttttaactcctct

SEQ ID NO: 611733 - DNA, 120 bp, Artificial Sequence
  ENSG00000176383_12 (sequence is synthesized)
ctctgattaaaaacactgcaacccagctaacttgtccagcatatgttgaatgggagccaaagtgtagcaaatgctgccaggaacctgtcggggcattccgggcgctgcctggggcgctgc

SEQ ID NO: 611734 - DNA, 120 bp, Artificial Sequence
  ENSG00000176383_13 (sequence is synthesized)
agtctgggacctcaaggaaggaggctgcataggaccccaggagagacgcattttctctttcagatgcaaacaaaatcttacactcttctcctttggatacaatagagaaacggaaagaaa

SEQ ID NO: 611735 - DNA, 120 bp, Artificial Sequence
  ENSG00000176383_14 (sequence is synthesized)
ggaaggaacaagaggcctgtgttaagtcctgttgatgttaagtcctgttgagagcaccaggtaaacactctgcaccccttctcttagtagtaataggtttttcactccttggcctcagct

SEQ ID NO: 611736 - DNA, 120 bp, Artificial Sequence
  ENSG00000176383_15 (sequence is synthesized)
gtcctcacaggacagtgggggcagatcagagaacacatcagaaatacatacaaagaaatcgtacaaactggacaggttcccctccccctgccacaactggcatcccaacagagggaacaa

SEQ ID NO: 611737 - DNA, 120 bp, Artificial Sequence
  ENSG00000176383_16 (sequence is synthesized)
gtactaaatcatttttgacgacgtaaataagactgaaaacaggttaaacagttgctgaacttaagggcatgacaaaaaggactcctctctctgacccaggtaggcaaaatgctttgggtg

SEQ ID NO: 611738 - DNA, 120 bp, Artificial Sequence
  ENSG00000176383_17 (sequence is synthesized)
tgaggtaaaaaaaatgggtaagagcagctgtacagagtggggtgaaatgttaaacagggtgcagtgcccaagggctaagaaccaggtccagcgcaagcctgagaccacaggaggcactca

SEQ ID NO: 611739 - DNA, 120 bp, Artificial Sequence
  ENSG00000176383_18 (sequence is synthesized)
cagctcacaaaggcgtctcgcctgattggccagggcaggatctgccgcctcttctcggtgcacagacagtcatgccaaccctgggcagggtggcatctgcccctgctttccccactgagt

SEQ ID NO: 611740 - DNA, 120 bp, Artificial Sequence
  ENSG00000176383_19 (sequence is synthesized)
ggggagacagggcagtgtgctcaggccctcaatcctcacgcaggtaggcctcctgctccgactcagcccgctcctccccttcctcctgtgttttctgacggagctcttctatctgtgctt

SEQ ID NO: 611741 - DNA, 120 bp, Artificial Sequence
  ENSG00000176383_20 (sequence is synthesized)
ctgccagcttggtttctgctttccgggagagctggtgcacctcttccacctgcagtttcaccagctgaatgtgattcctggcggttatagaggcctgatctgcgcctgccaaaagatggg

SEQ ID NO: 611742 - DNA, 120 bp, Artificial Sequence
  ENSG00000176383_21 (sequence is synthesized)
acaatcgggttgagcagccgtgcagggcgcggaaggctcatgtggacgttggcctgggggtgctgtggctgtcatctgaacccctcttggggtcactttccttgacctccctgtcttctc

SEQ ID NO: 611743 - DNA, 120 bp, Artificial Sequence
  ENSG00000176383_22 (sequence is synthesized)
tctctgcaaagaaacttccacctctatgttcaggtctggatttaactgacactctgtcaaaaacagcatttttcttcagctgtcagcggccaacatcacaattattaaatgcaactctca

SEQ ID NO: 611744 - DNA, 120 bp, Artificial Sequence
  ENSG00000176383_23 (sequence is synthesized)
caatcatctttatagctacagagcttttagtacagacctttgattaatttttttaactacacatcttccatttctttttgacaaagagatcatgaataaaattgtcaaagatccctttca

SEQ ID NO: 611745 - DNA, 120 bp, Artificial Sequence
  ENSG00000176383_24 (sequence is synthesized)
cagtctccagctgccgttcatgcttcctccccagccttccgcagcccaccagggaaggggcggtaggagtggccttttaccaaaggtcagattctttcaccgcctctgccagaccccctt

SEQ ID NO: 611746 - DNA, 120 bp, Artificial Sequence
  ENSG00000176383_25 (sequence is synthesized)
cgcctctgccagacccccttgtcccccacccccgcatagatctccagggggctcagaaaactctggccggtggctcacgcctgtagtcccaacgctttgggaggccaaggcgggaggatc

SEQ ID NO: 611747 - DNA, 90 bp, Artificial Sequence
  ENSG00000176383_26 (sequence is synthesized)
ggcgggaggatcgcttgaggccaggagttccagaccagcccaggcaacaaaagataccacatctctacaaaaaataaattagccgggccc

SEQ ID NO: 611748 - DNA, 120 bp, Artificial Sequence
  ENSG00000176383_27 (sequence is synthesized)
gtgagctataattgtgccactgcactagagtctgggtgacagagacactgtctcaaaaaaaaccaacaaaacccttagctctttcactagccgggctggcctcttcctactgtaaacctg

SEQ ID NO: 611749 - DNA, 120 bp, Artificial Sequence
  ENSG00000176383_28 (sequence is synthesized)
actgtaaacctgctgggcccccgtctcccttctttctcccctctctcctgccctggagctgcctgactctgcccacggcctgcagagaccccaggtcttcacgcaaggtgccattcctca

SEQ ID NO: 611750 - DNA, 120 bp, Artificial Sequence
  ENSG00000176383_29 (sequence is synthesized)
ctcagttcttgctcaaacgtccctccatcaaggagggctttttagctacccttggctatgggatccgtcctccgcgtcagccaattctctgcattagactgtaacttctcaacatacctg

SEQ ID NO: 611751 - DNA, 120 bp, Artificial Sequence
  ENSG00000176383_30 (sequence is synthesized)
gttcctatgcgttttgtgctcccctctgagagggcagcgaccctgtcttgcttgccactgcatccctagcacctagcagttgcttttctggtgacggcggctgtggcagtggccaatgcg

SEQ ID NO: 611752 - DNA, 120 bp, Artificial Sequence
  ENSG00000176383_31 (sequence is synthesized)
gcagactggtcagaagtgaagggacaggatgacttggcagtggaggtcaaggggaggggactggggcagagggagacaccagagggacaaaaatgagaaactgaagacaggctttgctac

SEQ ID NO: 611753 - DNA, 120 bp, Artificial Sequence
  ENSG00000176383_32 (sequence is synthesized)
gtggagctcgggcaggccacactggtggattctgtctcctcatccttcttttcaggtccctgggagaaatcagcacttagaacgtggtgggaaggcggggcggggtgcctcggaagccat

SEQ ID NO: 611754 - DNA, 120 bp, Artificial Sequence
  ENSG00000176383_33 (sequence is synthesized)
ccctgatacaagtccccagctttcctgcttcccctcttgtggtgtgtggctttgtctccctccctccctcctggaagccccgacctctgaggcaggtgtaaagggtgtgtgctttggtgg

SEQ ID NO: 611755 - DNA, 120 bp, Artificial Sequence
  ENSG00000176383_34 (sequence is synthesized)
ccacggccaccctgtggtgctggttctcctccgagggaagcagtgcactcctggtcatcttggagacgcccaacacaggaccccacaggcaccaagctttttttgggaaatggtttcact

SEQ ID NO: 611756 - DNA, 120 bp, Artificial Sequence
  ENSG00000176383_35 (sequence is synthesized)
tcccacttgaaaagccctgaatgtcagttccacacttagtgaatttgatccaagctaaactgagtctgtgcctaaaactcatcaggtgctcgagtttcctggaagaatggctgggaacgt

SEQ ID NO: 611757 - DNA, 120 bp, Artificial Sequence
  ENSG00000176383_36 (sequence is synthesized)
cctcagatgatggcagaggagggcaagggctggcaaagcagctgtgcttagcccatcctcaggggagggaggactctggaaagagcctgaggatacgctgagaataaaaagtccagaggc

SEQ ID NO: 611758 - DNA, 120 bp, Artificial Sequence
  ENSG00000176383_37 (sequence is synthesized)
attcccacctcctccagaagccccgcccactcccgagccccgagagctccgcgcacctgggcgccatccgccctggctccgctgcacgagctccacgcccgtaccccggcgtcacgctca

SEQ ID NO: 611759 - DNA, 120 bp, Artificial Sequence
  ENSG00000176383_38 (sequence is synthesized)
ccgcgcacctgggcgccatccgccctggctccgctgcacgagctccacgcccgtaccccggcgtcacgctcagatgcaaacaaaatcttacactcttctcctttggatacaatagagaaa

SEQ ID NO: 611760 - DNA, 120 bp, Artificial Sequence
  ENSG00000176386_0 (sequence is synthesized)
gtagtaggaaatggcgtcgtggcattgaggggcatccctcctagaacctccaggaaaagctcgcggaagacgaggttctgcggagagagaggctccaagcagtctgggaagtgtagtcca

SEQ ID NO: 611761 - DNA, 120 bp, Artificial Sequence
  ENSG00000176386_1 (sequence is synthesized)
gttggcttagcagtagtttcgttgggggggagccgaggttccgggaaggggctaggccggcttgaaaagagattatgactgtaccttttaactttgtagctggaacacaagaagtgtttg

SEQ ID NO: 611762 - DNA, 120 bp, Artificial Sequence
  ENSG00000176386_2 (sequence is synthesized)
tttaatgaatgacgtacacatttaagatctgtttggacgcggaggataatcctgtgaattgctaatagttcactgggtttggcccttagtgttgacttcagtatgctgagacggaaacca

SEQ ID NO: 611763 - DNA, 120 bp, Artificial Sequence
  ENSG00000176386_3 (sequence is synthesized)
aagagtttgagaacattcgaaaggacctggagacccgtaagaaacagaaggaagatgtggaagttgtaggaggcagtgatggagaaggagccattgggcttagcagtgatcccaagagcc

SEQ ID NO: 611764 - DNA, 120 bp, Artificial Sequence
  ENSG00000176386_4 (sequence is synthesized)
gggaacaaatgatcaatgatcggattggttataaaccccaacccaagcccaataatcgttcatctcaatttggaagtcttgaattttagagatggattatcttgcatgccagagcgctgg

SEQ ID NO: 611765 - DNA, 120 bp, Artificial Sequence
  ENSG00000176386_5 (sequence is synthesized)
aatggaataaaatgatggcagaagtacaaaccagatttagagaattgagtgcttgcagtcaagcagaatgtacctcctgcagagacaaatcttctgcatgagattactgatgcttcactt

SEQ ID NO: 611766 - DNA, 120 bp, Artificial Sequence
  ENSG00000176386_6 (sequence is synthesized)
gcactctaagctggaatccaaactctggtttgtctcttgaaaatttgactctataaaactgatctgattttctgtttttaaaaataaatatatttttggaaaaatgtgaggcatccttaa

SEQ ID NO: 611767 - DNA, 120 bp, Artificial Sequence
  ENSG00000176386_7 (sequence is synthesized)
ctagagctaaagcttgatgacattgaagagtttgagaacattcgaaaggacctggaggcataaagaccagaacccctaattcagaaaagagtcgatttcagaagggaccaccaaagaaag

SEQ ID NO: 611768 - DNA, 120 bp, Artificial Sequence
  ENSG00000176386_8 (sequence is synthesized)
aagcctaaaatcttggttctggtgtgactctagatggaatcttgctatgttgcccaggctggaatgcaatggctattcacaggcatgatcccactactgatcagtacaggagttttgacc

SEQ ID NO: 611769 - DNA, 120 bp, Artificial Sequence
  ENSG00000176386_9 (sequence is synthesized)
tgctccatttctgatctaggctggttcaccaggcaacctggtggttccctgctcctgggcttgtttcttggtaaatactttgtctatatggaatgcatctaataaatgaatgctctccta

SEQ ID NO: 611770 - DNA, 80 bp, Artificial Sequence
  ENSG00000176387_0 (sequence is synthesized)
gaaagcgagtgtccctctcgcgccccaggccggtgtacccccgcactccgcgccccggcctagaagctctctctccccgc

SEQ ID NO: 611771 - DNA, 120 bp, Artificial Sequence
  ENSG00000176387_1 (sequence is synthesized)
ctggctgctcgtggctgcccgcgcgctgctgcagctgctgcgctcagacctgcgtctgggccgcccgctgctggcggcgctggcgctgctggccgcgctcgactggctgtgccagcgcct

SEQ ID NO: 611772 - DNA, 80 bp, Artificial Sequence
  ENSG00000176387_2 (sequence is synthesized)
ggcggcgctggcgctgctggccgcgctcgactggctgtgccagcgcctgctgcccccgccggccgcactcgccgtgctgg

SEQ ID NO: 611773 - DNA, 120 bp, Artificial Sequence
  ENSG00000176387_3 (sequence is synthesized)
tgccggtggccactcgcgcggtgctcatcaccggctgtgactctggttttggcaaggagacggccaagaaactggactccatgggcttcacggtgctggccaccgtattggagttgaaca

SEQ ID NO: 611774 - DNA, 120 bp, Artificial Sequence
  ENSG00000176387_4 (sequence is synthesized)
gccccggtgccatcgagctgcgtacctgctgctcccctcgcctaaggctgctgcagatggacctgaccaaaccaggagacattagccgcgtgctagagttcaccaaggcccacaccacca

SEQ ID NO: 611775 - DNA, 120 bp, Artificial Sequence
  ENSG00000176387_5 (sequence is synthesized)
gcaccggcctgtggggcctcgtcaacaacgcaggccacaatgaagtagttgctgatgcggagctgtctccagtggccactttccgtagctgcatggaggtgaatttctttggcgcgctcg

SEQ ID NO: 611776 - DNA, 120 bp, Artificial Sequence
  ENSG00000176387_6 (sequence is synthesized)
agctgaccaagggcctcctgcccctgctgcgcagctcaaggggccgcatcgtgactgtggggagcccagcgggggacatgccatatccgtgcttgggggcctatggaacctccaaagcgg

SEQ ID NO: 611777 - DNA, 120 bp, Artificial Sequence
  ENSG00000176387_7 (sequence is synthesized)
tgagaaacgtgggtcagtgggaaaagcgcaagcaattgctgctggccaacctgcctcaagagctgctgcaggcctacggcaaggactacatcgagcacttgcatgggcagttcctgcact

SEQ ID NO: 611778 - DNA, 120 bp, Artificial Sequence
  ENSG00000176387_8 (sequence is synthesized)
cgctacgcctggccatgtccgacctcaccccagttgtagatgccatcacagatgcgctgctggcagctcggccccgccgccgctattaccccggccagggcctggggctcatgtacttca

SEQ ID NO: 611779 - DNA, 120 bp, Artificial Sequence
  ENSG00000176387_9 (sequence is synthesized)
tccactactacctgcctgaaggcctgcggcgccgcttcctgcaggccttcttcatcagtcactgtctgcctcgagcactgcagcctggccagcctggcactaccccaccacaggacgcag

SEQ ID NO: 611780 - DNA, 120 bp, Artificial Sequence
  ENSG00000176387_10 (sequence is synthesized)
cccaggacccaaacctgagccccggcccttccccagcagtggctcggtgagccatgtgcacctatggcccagccactgcagcacaggaggctccgtgagcccttggttcctccccgaaaa

SEQ ID NO: 611781 - DNA, 120 bp, Artificial Sequence
  ENSG00000176387_11 (sequence is synthesized)
cccccagcattacgatcccccaagtgtcctggaccctggcctaaagaatcccacccccacttcatgcccactgccgatgcccaatccaggcccggtgaggccaaggtttcccagtgagcc

SEQ ID NO: 611782 - DNA, 120 bp, Artificial Sequence
  ENSG00000176387_12 (sequence is synthesized)
tctgcgcctctccactgtttcatgagcccaaacaccctcctggcacaacgctctaccctgcagcttggagaactccgctggatggggagtctcatgcaagacttcactgcagcctttcac

SEQ ID NO: 611783 - DNA, 120 bp, Artificial Sequence
  ENSG00000176387_13 (sequence is synthesized)
aggactctgcagatagtgcctctgcaaactaaggagtgactaggtgggttggggaccccctcaggattgtttctcggcaccagtgcctcagtgctgcaattgagggctaaatcccaagtg

SEQ ID NO: 611784 - DNA, 120 bp, Artificial Sequence
  ENSG00000176387_14 (sequence is synthesized)
tctcttgactggctcaagaattagggccccaactacacacccccaagccacagggaagcatgtactgtacttcccaattgccacattttaaataaagacaaatttttatttcttctaaaa

SEQ ID NO: 611785 - DNA, 120 bp, Artificial Sequence
  ENSG00000176387_15 (sequence is synthesized)
gtggccactcgcgcggtgctcatcaccggggcctggatcccatccagaccctggtgattctggggttgtctcaggctaggctgggccacagtggaagttcactgactgccctggcctggc

SEQ ID NO: 611786 - DNA, 120 bp, Artificial Sequence
  ENSG00000176387_16 (sequence is synthesized)
cagcggagaccgggtgagcaccggctggttcctcgcggtgttcctgcaggcttggcggccgcggtggtgcgatcagcaaagggcaccgggatgccggttgtgcgtgtcctcaggtgtccc

SEQ ID NO: 611787 - DNA, 120 bp, Artificial Sequence
  ENSG00000176387_17 (sequence is synthesized)
aaagcgagtgtccctctcgcgccccagccagtctgggtgtgggggtggggagaaggggatatgaggtggtttccttgggaggggccatgaatcaggtaagaagccagactgctgaggcag

SEQ ID NO: 611788 - DNA, 120 bp, Artificial Sequence
  ENSG00000176387_18 (sequence is synthesized)
agtaggggggaaggaggcacaagggccttgcactccagcaaagatggtagagatggggaagcattcgggctggacaggagagacccaggttccaggcgcagtgtgaagcctcagcagacc

SEQ ID NO: 611789 - DNA, 120 bp, Artificial Sequence
  ENSG00000176387_19 (sequence is synthesized)
ttcctgctttatttgtgagccacctcaacaggacccaggccatctgcaggtactagtggcctagctgggtagtctttcctgaggtctcacctcaggcctttgtgctgctgctgttgcttc

SEQ ID NO: 611790 - DNA, 120 bp, Artificial Sequence
  ENSG00000176387_20 (sequence is synthesized)
tggccttgagcctgagagagaggtgagaggaaggatgctttctctaacttgggctcctccaatctctggttgcaaagctggggttgggggagagaggaccacccaacctgccctgtacaa

SEQ ID NO: 611791 - DNA, 120 bp, Artificial Sequence
  ENSG00000176390_0 (sequence is synthesized)
agtcgggaacccgcgctaggtttcgccggccgcgcggccagatgaggggggcgatggagctggagcctgagctgctgttgcaggaggcccgcgagaacgtggaggcagcgcagagctacc

SEQ ID NO: 611792 - DNA, 120 bp, Artificial Sequence
  ENSG00000176390_1 (sequence is synthesized)
ggcgggagctgggtcaccggcttgaggggctgcgtgaggcgcggaggcagatcaaagaaagtgcatcacagacaagggatgttctcaaacagcattttaatgatttaaagggaacccttg

SEQ ID NO: 611793 - DNA, 120 bp, Artificial Sequence
  ENSG00000176390_2 (sequence is synthesized)
gaaagctcctggatgagcgattggtgacccttttgcaagaggtggacaccattgaacaggagaccattaaaccactagatgactgccagaagctcatagaacacggagtcaacactgcag

SEQ ID NO: 611794 - DNA, 120 bp, Artificial Sequence
  ENSG00000176390_3 (sequence is synthesized)
aggacttagtccgagaaggtgaaatcgccatgcttggtggtgtgggagaagagaatgagaaactgtggagctttaccaaaaaggcctcgcacattcagttggacagcttaccagaagtac

SEQ ID NO: 611795 - DNA, 120 bp, Artificial Sequence
  ENSG00000176390_4 (sequence is synthesized)
ctttactggttgatgtgccttgtttatctgctcagttggatgactcaattcttaacatagtgaaagaccacatttttaagcatggaacagtagcatctcgcccaccagtacagatagaag

SEQ ID NO: 611796 - DNA, 120 bp, Artificial Sequence
  ENSG00000176390_5 (sequence is synthesized)
aactaatagagaaacctggaggcatcattgtacgatggtgtaaggtggatgatgactttacagcccaagattacaggctccagtttcgtaaatgtacttcaaatcattttgaggatgtat

SEQ ID NO: 611797 - DNA, 120 bp, Artificial Sequence
  ENSG00000176390_6 (sequence is synthesized)
atgtaggttctgaaactgaattcatagtattgcacatagaccccaacgttgattaccagttcagagtctgcgcccgaggagatggccgacaggagtggagtccttggagtgtcccccaga

SEQ ID NO: 611798 - DNA, 120 bp, Artificial Sequence
  ENSG00000176390_7 (sequence is synthesized)
taggtcattccacattggtgcctcatgagtggacagctggttttgaggggtacagtctgagcagtcgaagaaatatagcacttcggaacgattctgaatcatcgggtgttctctactcca

SEQ ID NO: 611799 - DNA, 120 bp, Artificial Sequence
  ENSG00000176390_8 (sequence is synthesized)
gagctccgacttatttctgtgggcagacattaacattcagagttgaaactgtgggacagccagacagaagagatagcataggagtgtgtgcagaaaaacaggatggatatgactctctgc

SEQ ID NO: 611800 - DNA, 120 bp, Artificial Sequence
  ENSG00000176390_9 (sequence is synthesized)
agcgggatcaagctgtgtgcattagtacaaatggtgcagtttttgtcaatggaaaagaaatgacaaatcagttacccgcagttacttctgggtccactgtcacgtttgacattgaagccg

SEQ ID NO: 611801 - DNA, 120 bp, Artificial Sequence
  ENSG00000176390_10 (sequence is synthesized)
tgactctaggaaccaccagtaataatgaaggtggacacttcaagcttcgagtaactataagttcaaataatagagaagtggtttttgactggttacttgatcagtcttgtggttctcttt

SEQ ID NO: 611802 - DNA, 120 bp, Artificial Sequence
  ENSG00000176390_11 (sequence is synthesized)
gtaattgctttaaaaaaaaagttgaattcatctctaacttaggccattggaaagtgtttactggattcattttgtaatattttagcaaaaagagacttcaatgttgtggacaaaatcata

SEQ ID NO: 611803 - DNA, 120 bp, Artificial Sequence
  ENSG00000176390_12 (sequence is synthesized)
caattcagtcaattttatttttagcatactgttaaatatcacatcacaataaaaatcaaattggcattaaaagtatagaagatataggaagttctatacccttccactgtacttctcaaa

SEQ ID NO: 611804 - DNA, 120 bp, Artificial Sequence
  ENSG00000176390_13 (sequence is synthesized)
gttggttattagaccaggaaaacttaatgtaatattatttttaaaatcatcttaaaggatccaagtccatgtaactctttagaacaagaggaataggtcagatagaagaagctgtgtaat

SEQ ID NO: 611805 - DNA, 120 bp, Artificial Sequence
  ENSG00000176390_14 (sequence is synthesized)
gtattaatacatccgttcatgtgctgtccacatgaatgtgttgactgtgctctccatgttcaggtatttgtaagcagtgttgacttttatcccctcttcagtaatctttaagtccccaaa

SEQ ID NO: 611806 - DNA, 84 bp, Artificial Sequence
  ENSG00000176390_15 (sequence is synthesized)
tgacttttatcccctcttcagtaatctttaagtccccaaaacattataactttttctttttttgttgagacggagtctcactct

SEQ ID NO: 611807 - DNA, 120 bp, Artificial Sequence
  ENSG00000176390_16 (sequence is synthesized)
taggattacaggtgtgagccactgcagtggaccaatttttgtatttttttaaatgcttgaccaagtgtctaaaataggcaagtagtaccttttgttctttcattgcaatttgatacagta

SEQ ID NO: 611808 - DNA, 120 bp, Artificial Sequence
  ENSG00000176390_17 (sequence is synthesized)
gtaccttttgttctttcattgcaatttgatacagtataggctacagtatttttacagggtaaaactagttatggcagtagtatgcacagcagtgttagccatttcatatgtatgtaatat

SEQ ID NO: 611809 - DNA, 120 bp, Artificial Sequence
  ENSG00000176390_18 (sequence is synthesized)
gcacgtgtgtatccaatctgcctgtgacatgcattttactctttgcagagaatgagctgcagtccagtttaatgtcagtttaataagtggtctctttttagcagagcaaaaaaatatagc

SEQ ID NO: 611810 - DNA, 120 bp, Artificial Sequence
  ENSG00000176390_19 (sequence is synthesized)
tagcgtaaatacttattttttttaaaaacttacttaaatttgtgtgtaaaatatttatttgaaggactttaatatgtaaaaataattgtcttctatgccaccctacagattttattttaa

SEQ ID NO: 611811 - DNA, 120 bp, Artificial Sequence
  ENSG00000176390_20 (sequence is synthesized)
aattatttttttcatttcatttttaccagtatagtaaaaaagtagaaaagcaagtatgatatttttgtaagataatttatttggggattcatgttccctgttagacaatcatgacctttt

SEQ ID NO: 611812 - DNA, 120 bp, Artificial Sequence
  ENSG00000176390_21 (sequence is synthesized)
ctacttgtctttttatatataagtagtagatttccacttgtttagggattaagaagatgttctagaatgtagataccttgtccagccataggaatcaaaataaaaaactaaaaaagttca

SEQ ID NO: 611813 - DNA, 120 bp, Artificial Sequence
  ENSG00000176390_22 (sequence is synthesized)
ccagcctgggccacatgatgaaaatccgtctcgacaaaaaatacaaaatatagctgggtgtagtgacacatgcctgtggtcccagctacctgggaggctaaggtgggagaatcacctgag

SEQ ID NO: 611814 - DNA, 67 bp, Artificial Sequence
  ENSG00000176390_23 (sequence is synthesized)
taatgagaccccatctcaaaaaaaaagttattagaaagtaatccaggtaggaatggtaaaggcggtg

SEQ ID NO: 611815 - DNA, 120 bp, Artificial Sequence
  ENSG00000176390_24 (sequence is synthesized)
tcaaaaaaaaagttattagaaagtaatccaggtaggaatggtaaaggcggtggctggtaaagatgaggcagggctgattttaagagattttgagccaggcacaatggctcacacctgtaa

SEQ ID NO: 611816 - DNA, 120 bp, Artificial Sequence
  ENSG00000176390_25 (sequence is synthesized)
ggagaggaggatcatttgaggtaaggagttcgagaccagtctgggcaatgtagtgagattgtctctaatttttttaaaaaaaaatagctaggcgtgctgagcacagtggctcacacctgt

SEQ ID NO: 611817 - DNA, 120 bp, Artificial Sequence
  ENSG00000176390_26 (sequence is synthesized)
caaatcagttacccgcagttacttctgggtccactgtcacgtttgacattgaagccgtgactctaggaaccaccagtaataatgaaggtggacacttcaagcttcgatcgctctgtcacc

SEQ ID NO: 611818 - DNA, 120 bp, Artificial Sequence
  ENSG00000176390_27 (sequence is synthesized)
caggctagagtgcagtgacacaatcatagctcactacagcctcagactcctgggctcaagagatcctcccaccttggtcttccaaagtactaagattacaagtgtgagccactgcactca

SEQ ID NO: 611819 - DNA, 120 bp, Artificial Sequence
  ENSG00000176390_28 (sequence is synthesized)
tgcagattttggcttaaaaatactattcttctataaggaatcaggactccttgaagaaatcacaacttcagagcagaggaacgaggtcttgctatgttgtccaaactggtctcaaactcc

SEQ ID NO: 611820 - DNA, 120 bp, Artificial Sequence
  ENSG00000176390_29 (sequence is synthesized)
tgggctcaaagtcttcgcaccttggactcccaaagtgttagggttacaggttgtgagactttggaggacaggactgaatgctttaatcatcttcgattaaattaaatcatccccagcacc

SEQ ID NO: 611821 - DNA, 120 bp, Artificial Sequence
  ENSG00000176390_30 (sequence is synthesized)
tgggctcaaagtcttcgcaccttggactcccaaagtgttagggttacagagtctcgctgtcaccaggctggactgcagtggcacgatctcaactcactgtaacctccgcctcctgggttc

SEQ ID NO: 611822 - DNA, 120 bp, Artificial Sequence
  ENSG00000176393_0 (sequence is synthesized)
gagcaacggctctgcggccatggcgagcggcgagcattcccccggcagcggcgcggcccggcggccgctgcactccgcgcaggctgtggacgtggcctcggcctccaacttccgggcctt

SEQ ID NO: 611823 - DNA, 120 bp, Artificial Sequence
  ENSG00000176393_1 (sequence is synthesized)
tgagctgctgcacttgcacctggacctgcgggctgagttcgggcctccagggcccggcgcagggagccgggggctgagcggcaccgcggtcctggacctgcgctgcctggagcccgaggg

SEQ ID NO: 611824 - DNA, 120 bp, Artificial Sequence
  ENSG00000176393_2 (sequence is synthesized)
cgccgccgagctgcggctggactcgcacccgtgcctggaggtgacggcggcggcgctgcggcgggagcggcccggctcggaggagccgcctgcggagcccgtgagcttctacacgcagcc

SEQ ID NO: 611825 - DNA, 120 bp, Artificial Sequence
  ENSG00000176393_3 (sequence is synthesized)
cttctcgcactatggccaggccctgtgcgtgtccttcccgcagccctgccgcgccgccgagcgcctccaggtgctgctcacctaccgcgtcggggagggacccggggtttgctggttggc

SEQ ID NO: 611826 - DNA, 120 bp, Artificial Sequence
  ENSG00000176393_4 (sequence is synthesized)
tcccgagcagacagcaggaaagaagaagcccttcgtgtacacccagggccaggctgtcctaaaccgggccttcttcccttgcttcgacacgcctgctgttaaatacaagtattcagctct

SEQ ID NO: 611827 - DNA, 120 bp, Artificial Sequence
  ENSG00000176393_5 (sequence is synthesized)
tattgaggtcccagatggcttcacagctgtgatgagtgctagcacctgggagaagagaggtccaaataagttcttcttccagatgtgtcagcccatcccctcctatctgatagctttggc

SEQ ID NO: 611828 - DNA, 120 bp, Artificial Sequence
  ENSG00000176393_6 (sequence is synthesized)
catcggagatctggtttcggctgaagttggacccaggagccgggtgtgggctgagccctgcctgattgatgctgccaaggaggagtacaacggggtgatagaagaatttttggcaacagg

SEQ ID NO: 611829 - DNA, 120 bp, Artificial Sequence
  ENSG00000176393_7 (sequence is synthesized)
agagaagctttttggaccttatgtttggggaaggtatgacttgctcttcatgccaccgtcctttccatttggaggaatggagaacccttgtctgacctttgtcaccccctgcctgctagc

SEQ ID NO: 611830 - DNA, 120 bp, Artificial Sequence
  ENSG00000176393_8 (sequence is synthesized)
tggggaccgctccttggcagatgtcatcatccatgagatctcccacagttggtttgggaacctggtcaccaacgccaactggggtgaattctggctcaatgaaggtttcaccatgtacgc

SEQ ID NO: 611831 - DNA, 120 bp, Artificial Sequence
  ENSG00000176393_9 (sequence is synthesized)
agctccgcgtgaagattgaaccaggcgttgacccggacgacacctataatgagaccccctacgagaaaggtttctgctttgtttcatacctggcccacttggtgggtgatcaggatcagt

SEQ ID NO: 611832 - DNA, 120 bp, Artificial Sequence
  ENSG00000176393_10 (sequence is synthesized)
ttgacagttttctcaaggcctatgtgcatgaattcaaattccgaagcatcttagccgatgactttctggacttctacttggaatatttccctgagcttaagaaaaagagagtggatatca

SEQ ID NO: 611833 - DNA, 120 bp, Artificial Sequence
  ENSG00000176393_11 (sequence is synthesized)
ttccaggttttgagtttgatcgatggctgaatacccccggctggcccccgtacctccctgatctctcccctggggactcactcatgaagcctgctgaagagctagcccaactgtgggcag

SEQ ID NO: 611834 - DNA, 120 bp, Artificial Sequence
  ENSG00000176393_12 (sequence is synthesized)
ccgaggagctggacatgaaggccattgaagccgtggccatctctccctggaagacctaccagctggtctacttcctggataagatcctccagaaatcccctctccctcctgggaatgtga

SEQ ID NO: 611835 - DNA, 120 bp, Artificial Sequence
  ENSG00000176393_13 (sequence is synthesized)
aaaaacttggagacacatacccaagtatctcaaatgcccggaatgcagagctccggctgcgatggggccaaatcgtccttaagaacgaccaccaggaagatttctggaaagtgaaggagt

SEQ ID NO: 611836 - DNA, 120 bp, Artificial Sequence
  ENSG00000176393_14 (sequence is synthesized)
tcctgcataaccaggggaagcagaagtatacacttccgctgtaccacgcaatgatgggtggcagtgaggtggcccagaccctcgccaaggagacttttgcatccaccgcctcccagctcc

SEQ ID NO: 611837 - DNA, 120 bp, Artificial Sequence
  ENSG00000176393_15 (sequence is synthesized)
acagcaatgttgtcaactatgtccagcagatcgtggcacccaagggcagttagaggctcgtgtgcatggcccctgcctcttcaggctctccaggctttcagaataattgtttgttcccaa

SEQ ID NO: 611838 - DNA, 120 bp, Artificial Sequence
  ENSG00000176393_16 (sequence is synthesized)
attcctgttccctgatcaacttcctggagtttatatcccctcaggataatctattctctagcttaggtatctgtgactcttgggcctctgctctggtgggaacttacttctctatagccc

SEQ ID NO: 611839 - DNA, 120 bp, Artificial Sequence
  ENSG00000176393_17 (sequence is synthesized)
actgagccccgagacagagaacctgcccacagctctccccgctacaggctgcaggcactgcagggcagcgggtattctcctccccacctaagtctctgggaagaagtggagaggactgat

SEQ ID NO: 611840 - DNA, 120 bp, Artificial Sequence
  ENSG00000176393_18 (sequence is synthesized)
gctcttcttttttctctttctgtcctttttcttgctgattttatgcaaagggctggcattctgattgttcttttttcaggtttaatccttattttaataaagttttcaagcaaaaattaa

SEQ ID NO: 611841 - DNA, 120 bp, Artificial Sequence
  ENSG00000176393_19 (sequence is synthesized)
gccactgggcggtgcatccttcaccctttccgtccttccgcgtctcctccctggccctggaggcttgtccagattgcgccgcattcccgctcatcgcacactgccgtttctaacattttc

SEQ ID NO: 611842 - DNA, 120 bp, Artificial Sequence
  ENSG00000176393_20 (sequence is synthesized)
agtttgacagttttctcaaggtatagtcacatgaggggagaaggaagaggagcggataaagccactgggcctgatcaagggtagaggcagggggcgaaagatgtaaggggttggaggagg

SEQ ID NO: 611843 - DNA, 120 bp, Artificial Sequence
  ENSG00000176393_21 (sequence is synthesized)
gtgccctcttggacttttgggccgaggtacctgattatcagccaccttatctctgctttatggtggctctagaattagccagatgttgatctagctctttgttctgtgttgccttctagt

SEQ ID NO: 611844 - DNA, 120 bp, Artificial Sequence
  ENSG00000176393_22 (sequence is synthesized)
tccacggttaaagctcttatctttgtttttgtttcctcctgtgaagtcctggatttgattaacgaaagaatttgagtaaaagtgagaactggaattagggtgctataagcattataataa

SEQ ID NO: 611845 - DNA, 120 bp, Artificial Sequence
  ENSG00000176393_23 (sequence is synthesized)
gggaagctgaattctgatctcttccatcgctagtctttgactgtggagctagagaagaacgttacgggtgacaggctacaaaagctcaaatcttgtctgctttctcctctgccaggcgtt

SEQ ID NO: 611846 - DNA, 120 bp, Artificial Sequence
  ENSG00000176396_0 (sequence is synthesized)
gcactggggtgtccgccgggcatcgctctgtccagttattccagtttctctgggagcagccgagttgaccccacggtctgagatgtccaagctgcccgcagacagcagtgtcccgcagac

SEQ ID NO: 611847 - DNA, 120 bp, Artificial Sequence
  ENSG00000176396_1 (sequence is synthesized)
aggcgcggcgaatggtgacagagacgtcccgcaggcggaggtaggccgcgggaggcgggagccggccccggcacagcctgaggaggccggggaaggcgcgatggcggcggccaggggagg

SEQ ID NO: 611848 - DNA, 120 bp, Artificial Sequence
  ENSG00000176396_2 (sequence is synthesized)
aagcccggcggcggcggcggccagggaagcccggatggcggaggtcgcccgcttgctgggggagccagtggacgaagagggtcccgagggcaggcccaggtccagacacgggaacggagg

SEQ ID NO: 611849 - DNA, 120 bp, Artificial Sequence
  ENSG00000176396_3 (sequence is synthesized)
cctggctgcgttgccctatctccgtctccgccacccacttagcgttttaggcatcaattaccagcagtttctccgccactatctggaaaattacccgattgctcccggcagaatacaaga

SEQ ID NO: 611850 - DNA, 120 bp, Artificial Sequence
  ENSG00000176396_4 (sequence is synthesized)
gcttgaagaacgccgcaggcgattcgtggaagcctgcagagcaagggaagcagcgtttgatgccgaatatcagcgaaatcctcacagggtggacctcgatattttaacctttacgatagc

SEQ ID NO: 611851 - DNA, 120 bp, Artificial Sequence
  ENSG00000176396_5 (sequence is synthesized)
agttatcaaccctctgatagaagaacttggttgcgataagtttatcaatagagaatagttatgtggtgacactacttcaagagaacctctgcattccagtcataccaatcctgcaacttg

SEQ ID NO: 611852 - DNA, 120 bp, Artificial Sequence
  ENSG00000176396_6 (sequence is synthesized)
attttcagaagtcaagagtatatcgcgataagacagtgcacaggtggaggggaaaaaaagggggagggggaagcttatcttgaaaaagcatcacagaagtagaaaaaaatgtcgaaagca

SEQ ID NO: 611853 - DNA, 120 bp, Artificial Sequence
  ENSG00000176396_7 (sequence is synthesized)
ttataactgtaacgttctttgagtttgtgattgatccacatttttccccctgcattatggaaaatgtctctcagcattgctttattacaaagtaaaggatggttttataaaattgagact

SEQ ID NO: 611854 - DNA, 120 bp, Artificial Sequence
  ENSG00000176396_8 (sequence is synthesized)
gatgaaacatcaatactagagcccatgaggatgaaagaaattatcaaatagtgctgaacagaataagatgttaacgctgagttattaggactggaaggctatgaaaagaacttgaaattg

SEQ ID NO: 611855 - DNA, 120 bp, Artificial Sequence
  ENSG00000176396_9 (sequence is synthesized)
tcggaatatgtgctctcttcatgtcatattcaatagaagtttctagtttaagattgattttgtgttttcttaggcatttcaagtgacaagcaaagtaaatgtatatattatgtgataaat

SEQ ID NO: 611856 - DNA, 120 bp, Artificial Sequence
  ENSG00000176396_10 (sequence is synthesized)
catgttttcaagaacgtcaaatttctggacttttttctttcaatttttaatttttaaagtttttttggtattaaaaaatctattcacaagccaaaaaatatataaaatatacagcgaaaa

SEQ ID NO: 611857 - DNA, 120 bp, Artificial Sequence
  ENSG00000176399_0 (sequence is synthesized)
aacttagcgcccggggtctctgccaggctcacgggacagctgcacctctcagcgtctccagctccaggacgcggtcgtcccaactccttccgagtggaaagagtgtaaaacttttgtccg

SEQ ID NO: 611858 - DNA, 120 bp, Artificial Sequence
  ENSG00000176399_1 (sequence is synthesized)
tgcgcgggtggagctcagtaggaccacggcgcgtcctgccccggcttccccagcctcccagcagggttagctgcggtcagcgcactttccacttgggactcccggccagaaatttctcgg

SEQ ID NO: 611859 - DNA, 120 bp, Artificial Sequence
  ENSG00000176399_2 (sequence is synthesized)
gaatggagcggtcacagtgtggcagcagagaccgaggcgttagcggccgacctcacttggcccctgggctagtggtggctgcccctccgcccccgtccccggcgttgccggtaccatcgg

SEQ ID NO: 611860 - DNA, 120 bp, Artificial Sequence
  ENSG00000176399_3 (sequence is synthesized)
cggtaccatcggggatgcaggttcccccagcgttcctgcggccgcccagcctctttctgcgagcagcggccgcggccgccgccgccgctgccgccacctcgggaagcggaggctgcccgc

SEQ ID NO: 611861 - DNA, 120 bp, Artificial Sequence
  ENSG00000176399_4 (sequence is synthesized)
tggagagcggggtaggcgcggtgggctgcggctacccgcggacgcccaagtgcgcccgctgtcgtaaccatggtgtggtgtcagcgctcaagggccacaagcgcttctgccgctggcggg

SEQ ID NO: 611862 - DNA, 120 bp, Artificial Sequence
  ENSG00000176399_5 (sequence is synthesized)
actgcgcgtgtgccaagtgcaccctgatcgccgagcgccagcgcgtcatggccgcccaggtggcgctgcgcaggcagcaggcgcaggaggagagcgaagcccgggggctacagaggctcc

SEQ ID NO: 611863 - DNA, 120 bp, Artificial Sequence
  ENSG00000176399_6 (sequence is synthesized)
tgtgctcggggctctcctggccccccggtggtcgggcatccgggggcggcggcagagccgagaatccacagtccacgggcggccctgcggcgggggctgcgctgggactgggtgccttga

SEQ ID NO: 611864 - DNA, 120 bp, Artificial Sequence
  ENSG00000176399_7 (sequence is synthesized)
gacaggccagtggttccgcgacccccgctttcgaagttttccagcaagattatcctgaggaaaaacaagaacaaaaagagagtaaatgtgagtcatgccagaatggacaagaagaactga

SEQ ID NO: 611865 - DNA, 120 bp, Artificial Sequence
  ENSG00000176399_8 (sequence is synthesized)
tctccaaatcccatcagctttacctaggatcatcttctaggtctaatggtgtcattgggaaacaaagtatcgggtcatctatttcagaatactccaacaagcctgatagtatcctgtctc

SEQ ID NO: 611866 - DNA, 120 bp, Artificial Sequence
  ENSG00000176399_9 (sequence is synthesized)
ctcatcctggagagcaatcaggaggtgaagagagtcccaggtccttatcatcctctgatctggaatcaggaaatgaaagtgaatgggtcaaagacttgactgcgaccaaggcaagccttc

SEQ ID NO: 611867 - DNA, 120 bp, Artificial Sequence
  ENSG00000176399_10 (sequence is synthesized)
cgacagtgtcctcaagaccaagagatcctcttgatatccttactaagattttcccaaattacaggcgcagccggctagaaggcattctacggttctgcaaaggggatgtggtccaagcca

SEQ ID NO: 611868 - DNA, 120 bp, Artificial Sequence
  ENSG00000176399_11 (sequence is synthesized)
ttgaacaggttttaaatggcaaagaacacaagccagacaacaggaacctagcaaactcagaagaactggaaaacacagcctttcagagagcttcaagttttagtcttgctggaattggtt

SEQ ID NO: 611869 - DNA, 120 bp, Artificial Sequence
  ENSG00000176399_12 (sequence is synthesized)
ttggaactctaggtaataaatcagctttctctcctcttcaaactacttctgcttcttatggaggtgattcaagtctctacggcgtaaatcctagagtaggtatcagtccattaaggctgg

SEQ ID NO: 611870 - DNA, 120 bp, Artificial Sequence
  ENSG00000176399_13 (sequence is synthesized)
catattcttctgcaggaagagggttatctggttttatgtcaccctacctaacacctgggttagtaccaaccttaccttttcggccagctttggattatgccttttcagggatgattagag

SEQ ID NO: 611871 - DNA, 120 bp, Artificial Sequence
  ENSG00000176399_14 (sequence is synthesized)
attcttcctacctttccagtaaagactcaataacttgtggcagactgtacttcagaccaaatcaggacaatccgtaatgtatatgcccattctctctttctggagtttttccagcataca

SEQ ID NO: 611872 - DNA, 120 bp, Artificial Sequence
  ENSG00000176399_15 (sequence is synthesized)
atacatgcacgtgcacacacatacacacacatccattaatatacttcagtaagtatgtgagtggattatgaggtcttaaaatgctgggttttttttttttcaagcaatataataggtctt

SEQ ID NO: 611873 - DNA, 120 bp, Artificial Sequence
  ENSG00000176399_16 (sequence is synthesized)
agatctgaaaactcttcattaggatttatcaagtgaaagaagtaaatctgaacattatatgtgccttgaataaagctatttcaggaaatatttaatgaattttctccctaaattatcatt

SEQ ID NO: 611874 - DNA, 120 bp, Artificial Sequence
  ENSG00000176399_17 (sequence is synthesized)
aacatttttattttaaaactagtttttattttattgaaaagtggaatttttagtgataaaatacatttgtaagtgtaaagcaatacagcataatagaatagaatataaaccgaaaggaag

SEQ ID NO: 611875 - DNA, 120 bp, Artificial Sequence
  ENSG00000176399_18 (sequence is synthesized)
gaagaactgaacaattaaggcaattctaaataattaccatttcaaaactgtttcttctattcctggttcataggaaagaaaaaagttattcaaagtatttttaaagcatttgatttgcag

SEQ ID NO: 611876 - DNA, 120 bp, Artificial Sequence
  ENSG00000176399_19 (sequence is synthesized)
atgggtgattcgtaataaataaaacatttgagcattttgaatttatatttcctgagtattttatttttcaatcttagcttccatgagtgaaaacaagtgccattaaaaaacatttctctt

SEQ ID NO: 611877 - DNA, 120 bp, Artificial Sequence
  ENSG00000176399_20 (sequence is synthesized)
taaagttgacactgtgtctatgaagtaaattttaggaaataagactgcgccatctcctggccactatcgccaattgcaactgagctctgtagagtatatgaattagaaacattgattccg

SEQ ID NO: 611878 - DNA, 120 bp, Artificial Sequence
  ENSG00000176399_21 (sequence is synthesized)
gagaataaccatttttttttcaaatagtcattttggattatactacattaaaatttccatactgtaaagtgcacatctactgtggatgagagttgcagtctttaagtgtgcttatgtctg

SEQ ID NO: 611879 - DNA, 120 bp, Artificial Sequence
  ENSG00000176399_22 (sequence is synthesized)
tatctggggaaatatccttaaaagtttgggacaagaatatatggcagccattctcaaaggtaagaataattttattcagaaaactaaaatagctgctcaaataaatatttattaactgca

SEQ ID NO: 611880 - DNA, 120 bp, Artificial Sequence
  ENSG00000176399_23 (sequence is synthesized)
tttcagaggtattcttgcaattttaaaaataatttttgtcctccctctggcgcatttgaaaactatttatttcagtcagtggaaagtccctgaggaaactgcttacaaaacagtttctag

SEQ ID NO: 611881 - DNA, 120 bp, Artificial Sequence
  ENSG00000176399_24 (sequence is synthesized)
gacattttctttgtatgtcatcatttttcttttttgaaggacagtagcttcattgttattattaggaataaatggaagcccactggtggtaaaagatagttgatgaattagagattgttt

SEQ ID NO: 611882 - DNA, 120 bp, Artificial Sequence
  ENSG00000176399_25 (sequence is synthesized)
aaactatttaagcagcatgactcactaaagattttttaaattatatgtatatacgtatgtgtgtatgcatctatatgcacatatataagtctatgtagacatacattaaacccctatagg

SEQ ID NO: 611883 - DNA, 120 bp, Artificial Sequence
  ENSG00000176399_26 (sequence is synthesized)
ttatattatcatggaggcgtttttcatgaagccagtaagaatgtatttccaaggaatattttgccagcaaatgtgatattaaattacttcagagtatctgatgctgatttaggatgtaaa

SEQ ID NO: 611884 - DNA, 120 bp, Artificial Sequence
  ENSG00000176399_27 (sequence is synthesized)
tgtgtttattaggttatgcattaattttaatggtgtgaatataagaaagcagatcttgaaaaatttcgatgtactcaatattcatttattataaaaaagttttatattctaagcctaaac

SEQ ID NO: 611885 - DNA, 120 bp, Artificial Sequence
  ENSG00000176399_28 (sequence is synthesized)
cgtagtacaatgtctagcaagtagttgaaattcaattcatatatactgagtaagaaactcttatatataatagatctctttgagactctgataaaactgaagaactctacaaaatggcgt

SEQ ID NO: 611886 - DNA, 120 bp, Artificial Sequence
  ENSG00000176399_29 (sequence is synthesized)
acagacacacagttttgcatacaatttcactgggttcttgaatctcctaaatggtattcaggttagattccttggtgattcttcagttgtttctattgcattaatccacttattgaatgc

SEQ ID NO: 611887 - DNA, 120 bp, Artificial Sequence
  ENSG00000176399_30 (sequence is synthesized)
tatttttctgaaaagtgctagatcctgtagaggatactgaatgtaaaatattgtgctctaaaggaagttacattatacaatagagatatggtttaaaaaaaaatcctagagttactgcat

SEQ ID NO: 611888 - DNA, 120 bp, Artificial Sequence
  ENSG00000176399_31 (sequence is synthesized)
tatgtatgtggttttataatgatgtgcttgtatctgagaaactgaattgcttttgaccttgggagaacatccattttgggcagtattcgaatttataaaatagttttataatcataaaac

SEQ ID NO: 611889 - DNA, 120 bp, Artificial Sequence
  ENSG00000176399_32 (sequence is synthesized)
ttaatttatataatgccttacacattccatactctttataataatttaaggacttaatcttatcaaataggtcatttgtctaacaactcagtagtatatgaggaaattggggctcagcag

SEQ ID NO: 611890 - DNA, 120 bp, Artificial Sequence
  ENSG00000176399_33 (sequence is synthesized)
tagggttttttctccctaaggttagtaatatgagtcatctgcagtggaattactgtgctcacttcagcaatttcagactccaatgtctgaggaaggattcatgtctgtttttttcattca

SEQ ID NO: 611891 - DNA, 120 bp, Artificial Sequence
  ENSG00000176399_34 (sequence is synthesized)
tggccttgaacagtgtctgatataggttctcaacctatacactagatttccactgactgaaaaaaaataaaagcaagtattagcttaataatttcttcattcaacacctatttaatattt

SEQ ID NO: 611892 - DNA, 120 bp, Artificial Sequence
  ENSG00000176399_35 (sequence is synthesized)
ttaataatctatttgtgccatgcactgtgttagacacaagagataaagaaatgattaagatacaagactttgcctcaagttgctcacggtctatattgtgtgtacaaaaacaaccaatca

SEQ ID NO: 611893 - DNA, 120 bp, Artificial Sequence
  ENSG00000176399_36 (sequence is synthesized)
accaatgttggtattatttgacagtgttggtacatcaatgagttctttgtaatcttgatatttatatccatggatgctgcttgaagcctgaactcctaagccactaattagtggtgggaa

SEQ ID NO: 611894 - DNA, 120 bp, Artificial Sequence
  ENSG00000176399_37 (sequence is synthesized)
gaaagagggggtaaatgctttaagagctagcatataacaaaaatgaattgggtttattctgtatcatatagagggcctaagaggcaaacatttcatagagtattcagaagaacataagga

SEQ ID NO: 611895 - DNA, 120 bp, Artificial Sequence
  ENSG00000176399_38 (sequence is synthesized)
atgacttttttcacagttaacagctgtccaagagtgtagtggctgcctcgtatgataaagcatctggaactcattgaaaaatgcatgtagaaaataccaatcagagcctgattgatggga

SEQ ID NO: 611896 - DNA, 120 bp, Artificial Sequence
  ENSG00000176399_39 (sequence is synthesized)
tttttaattactgctttaatattgggactgaatcattttgtagctcattagaaacatggaaagtatttgttaaataaataagtcatggaatttcaattctaaggccatgaaaattaaaac

SEQ ID NO: 611897 - DNA, 120 bp, Artificial Sequence
  ENSG00000176399_40 (sequence is synthesized)
accctaccattatttatcaataaaacacagtgcagttttgctcatcagaattttgcctatgtgatagcctcctgagagtaggcagaaaagaaagacatagaacgcagtgcgtgacttaca

SEQ ID NO: 611898 - DNA, 120 bp, Artificial Sequence
  ENSG00000176399_41 (sequence is synthesized)
agggaataaaactgacagaggttagtgtaaggtatataggcatgagtggggcttaaagaggatatgggagaacactgaagacaaatattagtacaattcctataaggtaaataccaatat

SEQ ID NO: 611899 - DNA, 120 bp, Artificial Sequence
  ENSG00000176399_42 (sequence is synthesized)
gtctttctagaagaagcaattgttttggaattgaggaaacctagaatggatttatctatatgacttggacaggttacttatactctttggacatttatttcttctcagcaaaacaagggt

SEQ ID NO: 611900 - DNA, 120 bp, Artificial Sequence
  ENSG00000176399_43 (sequence is synthesized)
aataatatttaacttgcaagattcgtggagataaaagcttaaataaacggcagagtacagtaatgcttatatacgggatgctaaataaataactctcactgttattactttgtattaaga

SEQ ID NO: 611901 - DNA, 120 bp, Artificial Sequence
  ENSG00000176399_44 (sequence is synthesized)
tattatctttgccccctcgtggcagtctctcaacaaagagtactgtaattgcatttaatccacttagtggatgtggagcccaaagggcagccatcactagagcagcgtacaggcttagtt

SEQ ID NO: 611902 - DNA, 120 bp, Artificial Sequence
  ENSG00000176399_45 (sequence is synthesized)
ccagacttcgtgtttggttgttcatttcataggcgagccacgtgttttgtaacatattctcgtatatgttatttggattattttcagggctttctgaagaaaataaacatcgaaatcata

SEQ ID NO: 611903 - DNA, 120 bp, Artificial Sequence
  ENSG00000176401_0 (sequence is synthesized)
atacagcagtgcagtgccgttattccagtctccgtagaaacgctgggactatggcggagccgactgggctgttggagatgtccgagctccccggagatagcagtgtcccacaggtgggca

SEQ ID NO: 611904 - DNA, 120 bp, Artificial Sequence
  ENSG00000176401_1 (sequence is synthesized)
ccgcgagtggcgtcagcgacgtactgcggggggcagtcggcggcggggttcgggtgcaggaggctcgggaaggcccagtggccgaagctgcgcggtccatggcgcggatgccgggccctg

SEQ ID NO: 611905 - DNA, 120 bp, Artificial Sequence
  ENSG00000176401_2 (sequence is synthesized)
tgcccgggcccatccccagcagcgtcccgggcctggcctccgcgccagacccccatcagcagctcgctttcttagaaattaaccggcagctgttgttccgcgagtatctggatggtagct

SEQ ID NO: 611906 - DNA, 120 bp, Artificial Sequence
  ENSG00000176401_3 (sequence is synthesized)
ccatgattccggtcagattactacgggatttcgaggaacgccgcaggctgtttgtggaaggctgcaaggcgagggaagcagcctttgacgcggatcccccgcagatggacttcgctgctg

SEQ ID NO: 611907 - DNA, 120 bp, Artificial Sequence
  ENSG00000176401_4 (sequence is synthesized)
tcgcgtttacggtagcgctgactgcctccgaggccctcagtcctctggccgactgagtcggctgtgatgatgacattggtggcaaggaatagccaagtgacccttttgggatcaaaagaa

SEQ ID NO: 611908 - DNA, 120 bp, Artificial Sequence
  ENSG00000176401_5 (sequence is synthesized)
caggcaggctgtgccagtttagttaactcagtcattagggggaatgcaaactggaagggaatacggcaatgtgcaattgaaggaggaagcacactccgaaatggaaacagacaagactgt

SEQ ID NO: 611909 - DNA, 120 bp, Artificial Sequence
  ENSG00000176401_6 (sequence is synthesized)
tgaatcttgttttctttcttcttttttagtattatttaaatagagaagggagtctcgcatccctaggctggtcccgaacgcttggacccgagcgatcctcccgcttcggcctcccaaagt

SEQ ID NO: 611910 - DNA, 120 bp, Artificial Sequence
  ENSG00000176401_7 (sequence is synthesized)
gacacttctgacttagcactttgttagcaatgcattttcctgcatttgtgaagaatccttcatgactttcaccataaaggatggttttgcaaagatatgagaaaaaaaaaatgccaataa

SEQ ID NO: 611911 - DNA, 120 bp, Artificial Sequence
  ENSG00000176401_8 (sequence is synthesized)
cagaacccatagaaatgaacctaagtgatgaaagaaaacaaagaaatagagttgtcaggaatccaggtgtacctgagttactaggattggaaggctattgagaggactttgaaatttcac

SEQ ID NO: 611912 - DNA, 120 bp, Artificial Sequence
  ENSG00000176401_9 (sequence is synthesized)
aatttgtggtcatgtcaacaaatcctagtgtaagattcatatttgtgttttctgaggtactttagatgaacagtaaatattcaatagaaaaaaccacgtattatatgatcagtgttttca

SEQ ID NO: 611913 - DNA, 120 bp, Artificial Sequence
  ENSG00000176401_10 (sequence is synthesized)
agtctatgtgaaattgggtaggtgtggaataaacttgttttttgttaattttaagctttttattttattctagaatatgtattctattcacaagactcaacaaaaaaaagtatcggccgg

SEQ ID NO: 611914 - DNA, 120 bp, Artificial Sequence
  ENSG00000176401_11 (sequence is synthesized)
actccagcctggtcaacagagtgggactccgtctcaaaaaaaagaaaaaaagtatcaaaagatgctgtgagaaatctctcttgttgctgtcctttgccaaactcagaactattccatgca

SEQ ID NO: 611915 - DNA, 120 bp, Artificial Sequence
  ENSG00000176401_12 (sequence is synthesized)
ggtgccattgcttgtggcttggagttttgttgttgttttcttggttttgcttgttttttgctttttcactgtacgcctttcaggttttctaatgcatatgcaaataaacatcaatctaaa

SEQ ID NO: 611916 - DNA, 120 bp, Artificial Sequence
  ENSG00000176401_13 (sequence is synthesized)
tgcagtgccgttattccagtctccgtagaaacgctgggactatggcggagccgactgggctgttggagatgtccgagctccccggagatagcagtgtcccacagaatatgtattctattc

SEQ ID NO: 611917 - DNA, 120 bp, Artificial Sequence
  ENSG00000176402_0 (sequence is synthesized)
atgtgtggcaggttcctgcggcggctgctggcggaggagagccggcgctccacccccgtggggcgcctcttgcttcccgtgctcctgggattccgccttgtgctgctggctgccagtggg

SEQ ID NO: 611918 - DNA, 120 bp, Artificial Sequence
  ENSG00000176402_1 (sequence is synthesized)
cctggagtctatggtgatgagcagagtgaattcgtgtgtcacacccagcagccgggctgcaaggctgcctgcttcgatgccttccaccccctctccccgctgcgtttctgggtcttccag

SEQ ID NO: 611919 - DNA, 120 bp, Artificial Sequence
  ENSG00000176402_2 (sequence is synthesized)
gtcatcttggtggctgtacccagcgccctctatatgggtttcactctgtatcacgtgatctggcactgggaattatcaggaaaggggaaggaggaggagaccctgatccagggacgggag

SEQ ID NO: 611920 - DNA, 120 bp, Artificial Sequence
  ENSG00000176402_3 (sequence is synthesized)
ggcaacacagatgtcccaggggctggaagcctcaggctgctctgggcttatgtggctcagctgggggctcggcttgtcctggagggggcagccctggggttgcagtaccacctgtatggg

SEQ ID NO: 611921 - DNA, 120 bp, Artificial Sequence
  ENSG00000176402_4 (sequence is synthesized)
tgccttggtagtataacctgcaatctgtcccgcccctctgagaagaccattttcctaaagaccatgtttggagtcagcggtttctgtctcttgtttacttttttggagcttgtgcttctg

SEQ ID NO: 611922 - DNA, 120 bp, Artificial Sequence
  ENSG00000176402_5 (sequence is synthesized)
ggtttggggagatggtggaggacctggaagcacaaatcttcctcttctaaatacttcctaacttcagagagcaccagaagacacaagaaagcaaccgatagcctcccagtggtggaaacc

SEQ ID NO: 611923 - DNA, 120 bp, Artificial Sequence
  ENSG00000176402_6 (sequence is synthesized)
aaagagcaatttcaagaagcagttccaggaagaagcttagcccaggaaaaacaaagaccagttggacccagagatgcctgagttggagatgaactttggccaactttcctcatcaccata

SEQ ID NO: 611924 - DNA, 120 bp, Artificial Sequence
  ENSG00000176402_7 (sequence is synthesized)
cttaaaatcctgtccaaggaggagcttattcaccattttctatacatgtgacatatgtagcagcataaccgacaactgggactgcgctgccttgactccacctctacatacaatgactca

SEQ ID NO: 611925 - DNA, 120 bp, Artificial Sequence
  ENSG00000176402_8 (sequence is synthesized)
gctaaccagactaataaaagccatgtttgcaccattgctcagggaggcattgctttggggaattattcccagtgtcctccttacttatcgcaagtaataaaatccccctgggaaatcctc

SEQ ID NO: 611926 - DNA, 120 bp, Artificial Sequence
  ENSG00000176406_0 (sequence is synthesized)
gctgtcgccttggattgaaggccattgatttgtatgtatttgtcccagcgctggaggctgccccagccgccgcgccggtgccgccgctgccagtggagttgcctccccgcttccctaggg

SEQ ID NO: 611927 - DNA, 120 bp, Artificial Sequence
  ENSG00000176406_1 (sequence is synthesized)
tggttcggctccaccaaacatgtcggctcctgtcgggccccggggccgcctggctcccatcccggcggcctctcagccgcctctgcagcccgagatgcctgacctcagccacctcacgga

SEQ ID NO: 611928 - DNA, 120 bp, Artificial Sequence
  ENSG00000176406_2 (sequence is synthesized)
ggaggagaggaaaatcatcctggccgtcatggataggcagaagaaagaagaggagaaggagcagtccgtgctcaaaaaactgcatcagcagtttgaaatgtataaagagcaggtaaagaa

SEQ ID NO: 611929 - DNA, 120 bp, Artificial Sequence
  ENSG00000176406_3 (sequence is synthesized)
gatgggagaagaatcacagcaacagcaagaacagaagggtgatgcgccaacctgtggtatctgccacaaaacaaagtttgctgatggatgtggccataactgttcatattgccaaacaaa

SEQ ID NO: 611930 - DNA, 120 bp, Artificial Sequence
  ENSG00000176406_4 (sequence is synthesized)
gttctgtgctcgttgtggaggtcgagtgtcattacgctcaaacaaggttatgtgggtatgtaatttgtgccgaaaacaacaagaaatcctcactaaatcaggagcatggttttataatag

SEQ ID NO: 611931 - DNA, 120 bp, Artificial Sequence
  ENSG00000176406_5 (sequence is synthesized)
tggatctaatacaccacagcaacctgatcaaaaggttcttcgagggctaagaaatgaggaggcacctcaggagaagaaaccaaaactacatgagcagacccagttccaaggaccctcagg

SEQ ID NO: 611932 - DNA, 120 bp, Artificial Sequence
  ENSG00000176406_6 (sequence is synthesized)
tgacttatctgtacctgcagtggagaaaagtcgatctcatgggctcacaagacagcattctattaaaaatgggtcaggcgtgaagcatcacattgccagtgacatagcttcagacaggaa

SEQ ID NO: 611933 - DNA, 120 bp, Artificial Sequence
  ENSG00000176406_7 (sequence is synthesized)
aagaagcccatctgtgtccagagatcagaatagaagatacgaccaaagggaagaaagagaggaatattcacagtatgctacttcggataccgcaatgcctagatctccatcagattatgc

SEQ ID NO: 611934 - DNA, 120 bp, Artificial Sequence
  ENSG00000176406_8 (sequence is synthesized)
tgataggcgatctcaacatgaacctcagttttatgaagactctgatcatttaagttatagggactccaacaggagaagtcataggcattccaaagaatatattgtagatgatgaggatgt

SEQ ID NO: 611935 - DNA, 120 bp, Artificial Sequence
  ENSG00000176406_9 (sequence is synthesized)
ggaaagcagagatgaatacgaaaggcaaaggagagaggaagagtaccagtcacgctaccgaagtgatccgaatttggcccgttatccagtaaagccacaaccctatgaagaacaaatgcg

SEQ ID NO: 611936 - DNA, 120 bp, Artificial Sequence
  ENSG00000176406_10 (sequence is synthesized)
gatccatgctgaagtgtcccgagcacggcatgagagaaggcatagtgatgtttctttggcaaatgctgatctggaagattccaggatttctatgctaaggatggatcgaccatcaaggca

SEQ ID NO: 611937 - DNA, 120 bp, Artificial Sequence
  ENSG00000176406_11 (sequence is synthesized)
aagatctatatcagaacgtagagctgccatggaaaatcagcgatcttattcaatggaaagaactcgagaggctcagggaccaagttcttatgcacaaaggaccacaaaccatagtcctcc

SEQ ID NO: 611938 - DNA, 120 bp, Artificial Sequence
  ENSG00000176406_12 (sequence is synthesized)
tacccccaggaggagtccactacccatagatagaccagacttgaggcgtactgactcactacggaaacagcaccacttagatcctagctctgctgtaagaaaaacaaaacgggaaaaaat

SEQ ID NO: 611939 - DNA, 120 bp, Artificial Sequence
  ENSG00000176406_13 (sequence is synthesized)
ggaaacaatgttaaggaatgattctctcagttcagaccagtcagagtcagtgagacctccaccaccaaagcctcataaatcaaagaaaggcggtaaaatgcgccagatttcgttgagcag

SEQ ID NO: 611940 - DNA, 120 bp, Artificial Sequence
  ENSG00000176406_14 (sequence is synthesized)
ttcagaggaggaattggcttccacgcctgaatatacaagttgtgatgatgttgagattgaaagtgagagtgtaagtgaaaaaggagacatggattacaactggttggatcatacgtcttg

SEQ ID NO: 611941 - DNA, 120 bp, Artificial Sequence
  ENSG00000176406_15 (sequence is synthesized)
gcatagcagtgaggcatccccaatgtctttgcaccctgtaacctggcaaccatctaaagatggagatcgtttaattggtcgcattttattaaataagcgtctaaaagatggaagtgtacc

SEQ ID NO: 611942 - DNA, 120 bp, Artificial Sequence
  ENSG00000176406_16 (sequence is synthesized)
tcgagattcaggagcaatgcttggcttgaaggttgtaggaggaaagatgactgaatcaggtcggctttgtgcatttattactaaagtaaaaaaaggaagtttagctgatactgtaggaca

SEQ ID NO: 611943 - DNA, 120 bp, Artificial Sequence
  ENSG00000176406_17 (sequence is synthesized)
tggaatggaagactactgcaaggagccacatttgaggaagtgtacaacatcattctagaatccaaacctgaaccacaagtagaacttgtagtttcaaggcctattggagatataccgcga

SEQ ID NO: 611944 - DNA, 120 bp, Artificial Sequence
  ENSG00000176406_18 (sequence is synthesized)
atacctgatagcacacatgcacaactggagtccagttctagctcctttgaatctcaaaaaatggatcgtccttctatttctgttacctctcccatgagtcctggaatgttgagggatgtc

SEQ ID NO: 611945 - DNA, 120 bp, Artificial Sequence
  ENSG00000176406_19 (sequence is synthesized)
ccacagttcttatcaggacaactttcaagccaaagccttagtagaagaacaacgccttttgttcctagggttcagataaaactatggtttgacaaggttggtcaccaattaatagttaca

SEQ ID NO: 611946 - DNA, 120 bp, Artificial Sequence
  ENSG00000176406_20 (sequence is synthesized)
attttgggagcaaaagatctcccttccagggaagatgggaggccaaggaatccttatgttaaaatttactttcttccagacagaagtgataaaaacaagagaagaactaaaacagtaaag

SEQ ID NO: 611947 - DNA, 120 bp, Artificial Sequence
  ENSG00000176406_21 (sequence is synthesized)
aaaacattggaacccaaatggaaccaaacattcatttattctccagtccaccgaagagaatttcgggaacgaatgctagagattaccctttgggatcaagctcgtgttcgagaggaagaa

SEQ ID NO: 611948 - DNA, 120 bp, Artificial Sequence
  ENSG00000176406_22 (sequence is synthesized)
agtgaattcttaggcgagattttaattgaattagaaacagcattattagatgatgagccacattggtacaaacttcagacgcatgatgtctcttcattgccacttccccacccttctcca

SEQ ID NO: 611949 - DNA, 120 bp, Artificial Sequence
  ENSG00000176406_23 (sequence is synthesized)
tatatgccacgaagacagctccatggagagagcccaacacggaggttgcaaaggtcaaagagaataagtgatagtgaagtctctgactatgactgtgatgatggaattggtgtagtatca

SEQ ID NO: 611950 - DNA, 120 bp, Artificial Sequence
  ENSG00000176406_24 (sequence is synthesized)
gattatcgacatgatggtcgagatcttcaaagctcaacattatcagtgccagaacaagtaatgtcatcaaaccactgttcaccatcagggtctcctcatcgagtagatgttataggaagg

SEQ ID NO: 611951 - DNA, 120 bp, Artificial Sequence
  ENSG00000176406_25 (sequence is synthesized)
actagatcatggtcacccagtgtccctcctccacaaagtcggaatgtggaacaggggcttcgagggacccgcactatgaccggacattataatacaattagccgaatggacagacatcgt

SEQ ID NO: 611952 - DNA, 120 bp, Artificial Sequence
  ENSG00000176406_26 (sequence is synthesized)
gtcatggatgaccattattctccagatagagacagggattgtgaagcagcagatagacagccatatcacagatccagatcaacagaacaacggcctctccttgagcggaccaccacccgc

SEQ ID NO: 611953 - DNA, 120 bp, Artificial Sequence
  ENSG00000176406_27 (sequence is synthesized)
tccagatccactgaacgtcctgatacaaacctcatgaggtcgatgccttcattaatgactggaagatctgcccctccttcacctgccttatcgaggtctcatcctcgtactgggtctgtc

SEQ ID NO: 611954 - DNA, 120 bp, Artificial Sequence
  ENSG00000176406_28 (sequence is synthesized)
cagacaagcccatcaagtactccagtcgcaggacgaaggggccgacagcttccacagcttccaccaaagggaacgttggatagaaaagcaggaggtaaaaaactaaggagcactgtccaa

SEQ ID NO: 611955 - DNA, 120 bp, Artificial Sequence
  ENSG00000176406_29 (sequence is synthesized)
agaagtacagaaacaggcctggccgtggaaatgaggaactggatgactcgacaggcaagccgagagtctacagatggtagcatgaacagctacagctcagaaggaaatctgattttccct

SEQ ID NO: 611956 - DNA, 120 bp, Artificial Sequence
  ENSG00000176406_30 (sequence is synthesized)
ggtgttcgcttggcctctgatagccagttcagtgatttcctggatggccttggccctgctcagctagtgggacgccagactctggcaacacctgcaatgggtgacattcaggtaggaatg

SEQ ID NO: 611957 - DNA, 120 bp, Artificial Sequence
  ENSG00000176406_31 (sequence is synthesized)
atggacaaaaagggacagctggaggtagaaatcatccgggcccgtggccttgttgtaaaaccaggttccaagacactgccagcaccgtatgtaaaagtgtatctattagataacggagtc

SEQ ID NO: 611958 - DNA, 120 bp, Artificial Sequence
  ENSG00000176406_32 (sequence is synthesized)
tgcatagccaaaaagaaaacaaaagtggcaagaaaaacgctggaacccctttaccagcagctattatctttcgaagagagtccacaaggaaaagttttacagatcatcgtctggggagat

SEQ ID NO: 611959 - DNA, 120 bp, Artificial Sequence
  ENSG00000176406_33 (sequence is synthesized)
tatggccgcatggatcacaaatcttttatgggagtggcccagatacttttagatgaactagagctatccaatatggtgatcggatggttcaaacttttcccaccttcctccctagtagat

SEQ ID NO: 611960 - DNA, 120 bp, Artificial Sequence
  ENSG00000176406_34 (sequence is synthesized)
ccaaccttggcccctctgacaagaagagcttcccaatcatctctggaaagttcaactggaccttcttactctcgttcatagcagctgtaaaaaaattgttgtcacagcaaccagcgttac

SEQ ID NO: 611961 - DNA, 120 bp, Artificial Sequence
  ENSG00000176406_35 (sequence is synthesized)
aaaaggtgaatggtacaataagtgatgacaaaccattgccgaaaaagaaacaccagtctgagacaggaaaattggtcctggaaattgaaaccctaaatgtcatgaaagaactggactcta

SEQ ID NO: 611962 - DNA, 120 bp, Artificial Sequence
  ENSG00000176406_36 (sequence is synthesized)
gagaagatatgcaggtactatggatatagaggagagaaatcgccaaatgaaaattaacaaatacaaacaggtagccggatcagatcccagactggaacaagattaccattcgaagtatcg

SEQ ID NO: 611963 - DNA, 120 bp, Artificial Sequence
  ENSG00000176406_37 (sequence is synthesized)
atcaggatgggatcctcatagaggggcagataatgtttctactaaatcttcggacagtgatgtaagtgatatatctgcggtttcaaggactagtagtgcttctcgtttcagcagcacaag

SEQ ID NO: 611964 - DNA, 120 bp, Artificial Sequence
  ENSG00000176406_38 (sequence is synthesized)
ctacatgtctgtccaatcagaacgcccaggaggaaacaagaaaatcagtgtctttacatccaaaatgcaaagcagacaaatgggcatatcagggaagaacatgacaaaaagcaccagcat

SEQ ID NO: 611965 - DNA, 120 bp, Artificial Sequence
  ENSG00000176406_39 (sequence is synthesized)
cagtggagacatgtgctcactggagaagaatgatggcagccagtctgacactgcagtgggcaccttgggcaccagtggcaaaaagcggcgctctagccttggtgccaaaatggtagctat

SEQ ID NO: 611966 - DNA, 120 bp, Artificial Sequence
  ENSG00000176406_40 (sequence is synthesized)
ggtaacactgcatgcttaatgttgtgtcttctgagcctgtttctagggatacaaagcaatcctgtgttctcagaggaagttgcacacattgtgccctaaagaaggccctcaggtgaaaga

SEQ ID NO: 611967 - DNA, 120 bp, Artificial Sequence
  ENSG00000176406_41 (sequence is synthesized)
gcagagctgtgaagaactatcagatttggaattcaatgacactcgagttctggtccaatctgaagccatggattaatctcaaagaatcagtcagtttcatgcaacagaagcccttttcaa

SEQ ID NO: 611968 - DNA, 120 bp, Artificial Sequence
  ENSG00000176406_42 (sequence is synthesized)
tggcacctttatatttttatcattcctttttcttcatttatctaaccccaaagccctgatatgccacagaaatggagctatacagccatgaagcggtgttacaggtgaggagtgtaatcc

SEQ ID NO: 611969 - DNA, 120 bp, Artificial Sequence
  ENSG00000176406_43 (sequence is synthesized)
taggaagcatcaggtgaaaagcaggagaccaaagaagtggtcaggaacaatcatcagccctcctctgggcgggaatcagagcagtcagtccagcaggaagagtggcagactttgtagctc

SEQ ID NO: 611970 - DNA, 120 bp, Artificial Sequence
  ENSG00000176406_44 (sequence is synthesized)
catgggcacgtcaattactaatgctaagatgtgttggactctgaaaaacaaaattctgtggctacactgtactgaatgaaattaaagaaactttttttgcatggacacagattagctgaa

SEQ ID NO: 611971 - DNA, 120 bp, Artificial Sequence
  ENSG00000176406_45 (sequence is synthesized)
tacttaaattattttcttggggctgcaacttgcaaaaaaaaaaaaaagaataaaaatcagccattttcaacaatttatattatttttaaaaataaatttcactagtgcatggttttaaaa

SEQ ID NO: 611972 - DNA, 120 bp, Artificial Sequence
  ENSG00000176406_46 (sequence is synthesized)
aggagagagaatgcaacagggtgatacaaagatacaccatgtttattctttaatcatagtctgtgttttggcagacattacaaatggaaatactttctagaagatacttaaaattctctt

SEQ ID NO: 611973 - DNA, 120 bp, Artificial Sequence
  ENSG00000176406_47 (sequence is synthesized)
tatgtgacaaataagtataatatattcaatttatttccatgttaaatatacaaatcttatgaagttcaatatgtgcaaatttttcacatctttctccttctctcactttacctcttctcc

SEQ ID NO: 611974 - DNA, 120 bp, Artificial Sequence
  ENSG00000176406_48 (sequence is synthesized)
ctcttttaaacttttctttctccctgccagagtgaaccttatactaaaaaattacaagttttgatctgatcctctctcataccccatgtttgattcagagctgtagatgcctctgaattt

SEQ ID NO: 611975 - DNA, 120 bp, Artificial Sequence
  ENSG00000176406_49 (sequence is synthesized)
gcgaatttctcaagggaaaattaactttaagagctttctttatttcaagcatgttgaaaaggattttgcaacatgacttgggagtacattaaagtaagtcagcatgtatttgacgaagaa

SEQ ID NO: 611976 - DNA, 120 bp, Artificial Sequence
  ENSG00000176406_50 (sequence is synthesized)
gatatttgaacttttgcagtttattgtacagtgcatggtaattttttcacctttaaaattcagtttacaggaaaattctaaaatcatgttgccattgtgatgtccaataaatttgttttt

SEQ ID NO: 611977 - DNA, 120 bp, Artificial Sequence
  ENSG00000176406_51 (sequence is synthesized)
agcaccagcattattcatacaggggttaaagtattatttgtagaaggtcttaggttttgtttgttttttaatcatttaaagcaatttctttagccagtttccatttactatgtgaataga

SEQ ID NO: 611978 - DNA, 120 bp, Artificial Sequence
  ENSG00000176406_52 (sequence is synthesized)
agcactgctaaaaattgggaaccctgaaacacagggctgtttattaattcatttttctgtagtaaaattcaatttttcacaaattatatttctaaagaaatatagtaaacataaatttgc

SEQ ID NO: 611979 - DNA, 120 bp, Artificial Sequence
  ENSG00000176406_53 (sequence is synthesized)
aacaattttaaagctccagtttttaggtgactcaaagaaagtcattatgcctattaatagttatttgatgccatcaccaaaagtctatgtgaaaatctcctaaagtcaaaacccctgcct

SEQ ID NO: 611980 - DNA, 120 bp, Artificial Sequence
  ENSG00000176406_54 (sequence is synthesized)
ttggttttacagacggttattaccattgggtggagctgcaaggtcaaatttctcctaagttcccctatttagaggaaaagtcactggttattgtaataaaccacccatggttctttatgt

SEQ ID NO: 611981 - DNA, 120 bp, Artificial Sequence
  ENSG00000176406_55 (sequence is synthesized)
acattttgataacacattattatagcttgattttaattttttgcattaatttttgaaatccacatacatctcatttgtttaaattaaggccatgcacaaatattttttttagttcagtgc

SEQ ID NO: 611982 - DNA, 120 bp, Artificial Sequence
  ENSG00000176406_56 (sequence is synthesized)
tgaccattaaaaactatcatgcttgatacggtgcaaaagttaaaatgagtatcactaaaaatgccttctttttatgtggtgcaatatgaaatacaccaagactgtgtcttgacattctga

SEQ ID NO: 611983 - DNA, 120 bp, Artificial Sequence
  ENSG00000176406_57 (sequence is synthesized)
tggacccaggtaaagttgttaaaagaacgaataaaactttattaaaataatttagacacctgtgtaccagcaacaattgatttaatagacctatagtgtctatactatcccttagaataa

SEQ ID NO: 611984 - DNA, 120 bp, Artificial Sequence
  ENSG00000176406_58 (sequence is synthesized)
aggtttatgattttcctgatactaagatgcagtcacataatcttttgtgcatattcctatacaaattatttctaattttaataagaaggacgtgactacggaatatttgtacatacttgt

SEQ ID NO: 611985 - DNA, 120 bp, Artificial Sequence
  ENSG00000176406_59 (sequence is synthesized)
cattatgcagtatttatttaaaagttggtgtttttttttaattttcacatctgcacctcgacttgtggtttagtcatgtaactagcactatgccagtgaccgttgttgccctgtacatag

SEQ ID NO: 611986 - DNA, 120 bp, Artificial Sequence
  ENSG00000176406_60 (sequence is synthesized)
tatgtttgaaaagtaaagggaattccagttgggaaaaaagggcagattagtcctgtaatgaacaccaactaatgtaaatcaaattcattctggtgatggtatttaacactttaaataaaa

SEQ ID NO: 611987 - DNA, 120 bp, Artificial Sequence
  ENSG00000176406_61 (sequence is synthesized)
catcagagatcagatgaagtatttaactagtaatgtgaagtaagaaatatgataaccttgttatcaagtctgtaagcatataaagatggaaaatttagtattatttcatgtcactgtggg

SEQ ID NO: 611988 - DNA, 120 bp, Artificial Sequence
  ENSG00000176406_62 (sequence is synthesized)
gtggtttccctttagtggaatcactgaactggtaaataacgttcttcagccccagcaaaaacaacaaaatgaaaaggagccccagacaaaactgcatcagcagtttgaaatgtataaaga

SEQ ID NO: 611989 - DNA, 120 bp, Artificial Sequence
  ENSG00000176406_63 (sequence is synthesized)
gagtgtaagtgaaaaaggggacagtcaaaagggaaaaagaaaaactagtgagcaggcagttttgtcggactctaacaccaggtctgagagacaaaaggaaatgatgtactttggtggcca

SEQ ID NO: 611990 - DNA, 120 bp, Artificial Sequence
  ENSG00000176406_64 (sequence is synthesized)
ctctttggaagaggatttggaatggtctgaacctcagattaaggactctggggtagatacgtgtagtagcacaacccttaacgaggagcatagccatagtgataagcaccctgtaacctg

SEQ ID NO: 611991 - DNA, 120 bp, Artificial Sequence
  ENSG00000176406_65 (sequence is synthesized)
atcaggacaactttcagtatgtagtcattacgtttactcttctttttggaatatcaaatagtgtttttaaaatatgatgcttgttttttacaaaccaagttattcctagaacataattgt

SEQ ID NO: 611992 - DNA, 120 bp, Artificial Sequence
  ENSG00000176406_66 (sequence is synthesized)
gcttttaacctcccactttctcattcttttaatttttgaaatccaattttgattatttatcatactgcttcatttattaagagttagatttactgaaatttaataaaagttacattttgt

SEQ ID NO: 611993 - DNA, 120 bp, Artificial Sequence
  ENSG00000176406_67 (sequence is synthesized)
agctccctcccgggcgagacctcggacgttcactgcgagcagccgctccgcccgccaccgcctccatctcctcctctggacccctctccaataaattggaggtcccggcggccaggaaag

SEQ ID NO: 611994 - DNA, 120 bp, Artificial Sequence
  ENSG00000176406_68 (sequence is synthesized)
ccacgtctcctccgggctgggtcagggaggcaggggccagagcctcagggtcccgtggcaccaacctggcttctggcccactggtcccggaaccgctgcggacgctgcgccccagccgcc

SEQ ID NO: 611995 - DNA, 120 bp, Artificial Sequence
  ENSG00000176406_69 (sequence is synthesized)
aagacgccgcgtatcttgtaccgcgggaaaagcgggtcctcgtccaagatgggccggcagggcttggggggtgccagcgctgcggggcgctccatgcagcgctcccagagccggagtagc

SEQ ID NO: 611996 - DNA, 120 bp, Artificial Sequence
  ENSG00000176406_70 (sequence is synthesized)
ggtcacccagtgtccctcctccacaaaggtaagatagactacttattttatttgtagggtggctgtattagtcagtgttctccagagggacaaaactaataggatatatgtatatacgaa

SEQ ID NO: 611997 - DNA, 120 bp, Artificial Sequence
  ENSG00000176406_71 (sequence is synthesized)
agggagtttattagggagaattggctcatatgattataagacaaagtcccaccatagaatttctgcaagctggggaagggagaagccagtagtggcttagtccaagtgtgagtccatttt

SEQ ID NO: 611998 - DNA, 120 bp, Artificial Sequence
  ENSG00000176406_72 (sequence is synthesized)
gaaaggcttaaaaccagggaagctgacaggacaggcttcagtctgtggtcaaaggcctgagagccaccagcaagccactggtgcaagttccagagtccaaaggccaaagaacctagtgtt

SEQ ID NO: 611999 - DNA, 120 bp, Artificial Sequence
  ENSG00000176406_73 (sequence is synthesized)
agcaaggttatcccaccttcttcacccgctttgttccagctgcattggcagccgactggatggtggattgggtgagtcttcctctcctagtccacatattcaaatgtcagtctcctctgg

SEQ ID NO: 612000 - DNA, 120 bp, Artificial Sequence
  ENSG00000176406_74 (sequence is synthesized)
caacaccttacagacacatctagaaacaatactttaccagcctaggcttccttcattccattcaagttgacacgtaatgttaatcatcaaaatggcattacagacctatttatcacatat

SEQ ID NO: 612001 - DNA, 120 bp, Artificial Sequence
  ENSG00000176406_75 (sequence is synthesized)
cggtaataatctctaaagataagagattcttgtggaaaaagaatttaaggaaagcaagatggttttgtttatttaaggaaaaacaaaatgctattcaaggaaaaacaagatgctatacaa

SEQ ID NO: 612002 - DNA, 120 bp, Artificial Sequence
  ENSG00000176406_76 (sequence is synthesized)
taacctatgtaacgagagtaaaatgaaacatgacttgttttgtaattttagacaacctatatgttattttattgtaagagttcaaaataattcagaagaaccagttttcaatcacatatt

SEQ ID NO: 612003 - DNA, 120 bp, Artificial Sequence
  ENSG00000176406_77 (sequence is synthesized)
ccagttttcaatcacatattgatatgagtatatctaggtagaaccaactaattatactcatgaatgatatagataatcggtaatttaatatataggaaataatgaaaatctgactgatat

SEQ ID NO: 612004 - DNA, 82 bp, Artificial Sequence
  ENSG00000176406_78 (sequence is synthesized)
ataataatttttaaaagcatgtgcagtgggaagaatggctcagaaaatctgcagctacaggtcttaagcttactggaaatct

SEQ ID NO: 612005 - DNA, 120 bp, Artificial Sequence
  ENSG00000176406_79 (sequence is synthesized)
gaaaatctgcagctacaggtcttaagcttactggaaatctctgatcaacctggttaagtacagacaagcttaatggaataagaatcacggaaataatagttgaagctaacaagaaatatg

SEQ ID NO: 612006 - DNA, 120 bp, Artificial Sequence
  ENSG00000176406_80 (sequence is synthesized)
tgcataatttacattgtacatacttggaatgtttaagaaattttgaccagttagaatgacacacttatacatcctattttaaataaatgattatttgacttagaattttaattgagtctt

SEQ ID NO: 612007 - DNA, 120 bp, Artificial Sequence
  ENSG00000176406_81 (sequence is synthesized)
aattttacacagaatattggaatgtctaagacagctttagatttattatgtttgaaggatataagacactaaaataagatttatgtaacttagacaattgcagaaattaaacaatatctg

SEQ ID NO: 612008 - DNA, 120 bp, Artificial Sequence
  ENSG00000176406_82 (sequence is synthesized)
acatattaagttgacaaacatggtttaaagtgtttgaagatgttgaattaacaaagtttataaatgggaccaaaattattaaacattttttaaaagtacttaaatgtgatacacttatca

SEQ ID NO: 612009 - DNA, 120 bp, Artificial Sequence
  ENSG00000176406_83 (sequence is synthesized)
atagaataacgtgtaatctgaaatttaaagtttgagaactagttttaaatttgtaactttaataaattgaacccttccctcctctaggaaaataaaagaatacctatgtaaaaggaaaaa

SEQ ID NO: 612010 - DNA, 120 bp, Artificial Sequence
  ENSG00000176406_84 (sequence is synthesized)
agaataacctttttcttaacaggcccatcactagaggattctatgactccatcctttgaatgagtgttgtttttgtgtaattttttagtaacttagttttgaaataaaacaattgtaaac

SEQ ID NO: 612011 - DNA, 120 bp, Artificial Sequence
  ENSG00000176406_85 (sequence is synthesized)
aagtagagactttcaaatcatctgattaaggatggctcctatgattttgccagggctagaaggattaaatgaaagcactgcctggcacactgttgatgtatttttgtcaacatgatgctt

SEQ ID NO: 612012 - DNA, 120 bp, Artificial Sequence
  ENSG00000176406_86 (sequence is synthesized)
gtcatggatgaccattattctccagatagagacagtcattttcttactctacctcgctccagatacagtcagaccattgaccatcatcacagggatggcaggtctcatcctcgtactggg

SEQ ID NO: 612013 - DNA, 120 bp, Artificial Sequence
  ENSG00000176406_87 (sequence is synthesized)
atagttcatgagaaggaagaggtaaaggaagaaagaattaatgagaatgagaaagggaaagagattgccaaaacgtgtaataaggagaaaaacagagaatcaggagacgaggaaaaaaca

SEQ ID NO: 612014 - DNA, 120 bp, Artificial Sequence
  ENSG00000176406_88 (sequence is synthesized)
caagatatacacgagcaagggaaagaaaaagaacagtggaataaagaggatttgcaaaggagattctcacaagatgataccagtgtctttacatccaaaatgcaaagcagacaaatgggc

SEQ ID NO: 612015 - DNA, 120 bp, Artificial Sequence
  ENSG00000176406_89 (sequence is synthesized)
acagtcaggagaaagccgaaagctgcacgggtactgaatcttctacgactgaattagaagaataatgactgtacaattaactatcaacctctgttcatttaagcacagtttttacagagc

SEQ ID NO: 612016 - DNA, 120 bp, Artificial Sequence
  ENSG00000176406_90 (sequence is synthesized)
tcaggagaaatatggaacttgattggcgtgtttttatttgatggtgtcagcaaatagatgattttaaagacaggtggtagggaaaaataagagaaggggaaaaaaaaagaaagaaaatgc

SEQ ID NO: 612017 - DNA, 120 bp, Artificial Sequence
  ENSG00000176406_91 (sequence is synthesized)
aatttgagacattgcgccaggtctgcaattctgttttatctcattttcatggggttttttcatccccaccaaatatcttacaaaatgagctttttggacaaacactgaacaatgcaagga

SEQ ID NO: 612018 - DNA, 120 bp, Artificial Sequence
  ENSG00000176406_92 (sequence is synthesized)
cattttctttacaggcgtctgcagtgctttctctgacttttctccccacacagccctgagcctgctgcagctcattccctgaactcatgtgtcatttaaagaatgaaatcaccgtctcct

SEQ ID NO: 612019 - DNA, 120 bp, Artificial Sequence
  ENSG00000176406_93 (sequence is synthesized)
acttctcgataacataagtggactgctggtcttagcagcggccctcagtagagcatttctttaaaacgccaaaggatttctgctcacactatgaaaaggtgctgttttttaaaaggttgt

SEQ ID NO: 612020 - DNA, 120 bp, Artificial Sequence
  ENSG00000176406_94 (sequence is synthesized)
tattttggattgagtttctttctgattaaatgactcagcaactcacagattttttgagtgaaatttttaatttagtcatggccttcactgacagcatagtcacaaatactcaggcacagg

SEQ ID NO: 612021 - DNA, 120 bp, Artificial Sequence
  ENSG00000176406_95 (sequence is synthesized)
ctctgctagcccctgggtgaagatggcgaaggcataactggctttatgcagcatatgtgtttctgctaaagtgtcagttttgctttgtggggagtggagggtgtgttttcgggatgggga

SEQ ID NO: 612022 - DNA, 120 bp, Artificial Sequence
  ENSG00000176406_96 (sequence is synthesized)
gacgtggtaacctgacatgtaacaacctgtccggagactagcttctacgtgtggatatgaatgggtgagaggatttctccatatccttctggggcgattcctcaactgggagaaggaaac

SEQ ID NO: 612023 - DNA, 120 bp, Artificial Sequence
  ENSG00000176406_97 (sequence is synthesized)
cctgcagagttctcatgggagtctgcttcaggtttgaaatttaagagctagtttggattcatgtttagtaatcgaactgaaatctaagtctagctgtctctctattcttggaaacaacca

SEQ ID NO: 612024 - DNA, 120 bp, Artificial Sequence
  ENSG00000176406_98 (sequence is synthesized)
tttcctccatttccaaagactcaactcgagtccaattccccctatctgtcccatatatttttcctttatcccatatataccccctactctagtgaattgtttctttgttgttcattcctg

SEQ ID NO: 612025 - DNA, 120 bp, Artificial Sequence
  ENSG00000176406_99 (sequence is synthesized)
ttctttgttgttcatatacattcctgtatatgaacaacattttcctttatcccatatataccccctactctagtgaattgtttctttgttgttcattcctgtttctttgttgttcatata

SEQ ID NO: 612026 - DNA, 120 bp, Artificial Sequence
  ENSG00000176406_100 (sequence is synthesized)
cattcctgttataaaaattcccttccctttcttatgtgccctctcctgaaaagcccttctacttttctcaataatgatccatgcgagtcccttcttgcaactcccagctcacgaatgagc

SEQ ID NO: 612027 - DNA, 120 bp, Artificial Sequence
  ENSG00000176406_101 (sequence is synthesized)
tctttcggcaactcctgactaaaccctaacaacatggctgccattgatgccaacaccttcactttcccagggaccccagatgccaaggctccataggcaacaataaaggatatgatggtc

SEQ ID NO: 612028 - DNA, 120 bp, Artificial Sequence
  ENSG00000176406_102 (sequence is synthesized)
ctgtagtgggtatgatagaattaggcaagagatcaccaaagctgtctgcctactactgatgtaaaccttgacattctgtgcacgtaaaaatcatgtgctcaatgtgtttgtctcaactcc

SEQ ID NO: 612029 - DNA, 120 bp, Artificial Sequence
  ENSG00000176406_103 (sequence is synthesized)
ctcagctcgtgatgccctcagggttctgtgggcatttatgcactgaagaaacaggagttcacacatccacctctggactgtgaaatgtgtattgagaaatactttgcaagagagaatttt

SEQ ID NO: 612030 - DNA, 120 bp, Artificial Sequence
  ENSG00000176406_104 (sequence is synthesized)
tttaagtgaacaaacaacaagtctgtgccacacacatcttccatatgccctgactcaggtcacttaatctccaggatttcatttcctcacctggaaaatatggagtttgaggtagattct

SEQ ID NO: 612031 - DNA, 120 bp, Artificial Sequence
  ENSG00000176406_105 (sequence is synthesized)
catctatcattaaatcaacactttaactaaaacgtaagctccttcagggcagagaccgtatcttcagtatcaaaaacaatgtttgacacatagctgctcaataaacatctgtccaatgaa

SEQ ID NO: 612032 - DNA, 120 bp, Artificial Sequence
  ENSG00000176406_106 (sequence is synthesized)
ggcattcacctgcttcaagatgaagctggacatctctttcccagccactggctgccagaaactcattgaagtggatgataaacgcaaactctgcactttttatgagaagcatatggccac

SEQ ID NO: 612033 - DNA, 120 bp, Artificial Sequence
  ENSG00000176406_107 (sequence is synthesized)
agaagttgctgctgatgctctggttgaagaatggaagggttatgtggtcctaatcagtggtgggaatgacaaacaatggttccccatgaagaggggtgtcttgattcatggccgtgtccg

SEQ ID NO: 612034 - DNA, 80 bp, Artificial Sequence
  ENSG00000176407_0 (sequence is synthesized)
aggcccgagagtgaccggagtcacggcgggcgccggcggagctgcggcgtcggacccgcctcctggaggagctcagcccc

SEQ ID NO: 612035 - DNA, 80 bp, Artificial Sequence
  ENSG00000176407_1 (sequence is synthesized)
ccgagcccgggagtcgagtgggagtcggccggccggcgcgggcagcgccgggaccccgcgggggacactgcagccggagc

SEQ ID NO: 612036 - DNA, 120 bp, Artificial Sequence
  ENSG00000176407_2 (sequence is synthesized)
acactgcagccggagcccgggaggggccgcgccgccaccgtctgaactaggatgtcccgacatgaaggtgtcagctgtgatgcatgtttaaaaggaaattttcgaggtcgcagatataag

SEQ ID NO: 612037 - DNA, 120 bp, Artificial Sequence
  ENSG00000176407_3 (sequence is synthesized)
tgtttaatttgctacgattacgatctttgtgcatcttgttatgaaagtggtgcaacaacaacaaggcatacaactgaccacccaatgcagtgcatattaacaagggtagattttgattta

SEQ ID NO: 612038 - DNA, 120 bp, Artificial Sequence
  ENSG00000176407_4 (sequence is synthesized)
tactatggtggggaagctttctctgtagagcagccacagtcttttacttgtccctattgtggaaaaatgggctatacggagacatctcttcaagaacatgttacttctgaacatgcagaa

SEQ ID NO: 612039 - DNA, 120 bp, Artificial Sequence
  ENSG00000176407_5 (sequence is synthesized)
acatcaacagaagtgatttgtccaatatgtgcagcgttacctggaggcgatcctaatcatgtcacggatgactttgcagctcatcttacacttgaacacagagcccctagagatttagat

SEQ ID NO: 612040 - DNA, 120 bp, Artificial Sequence
  ENSG00000176407_6 (sequence is synthesized)
gaatcgagtggtgttcgacatgtacgtagaatgtttcaccctggccggggattaggaggtcctcgtgctcgtagatcaaacatgcactttactagcagttctactggtggactttcttct

SEQ ID NO: 612041 - DNA, 120 bp, Artificial Sequence
  ENSG00000176407_7 (sequence is synthesized)
tctcagagttcatattctccaagcaatagggaagccatggatcctatagctgagcttttatctcagttatcaggagtgagacgttctgcaggaggacagcttaattcctctggcccttcc

SEQ ID NO: 612042 - DNA, 120 bp, Artificial Sequence
  ENSG00000176407_8 (sequence is synthesized)
gcttctcagttacaacaactgcagatgcagctgcagctagaacggcagcatgcccaggcagcacggcaacaactggagaccgcacgcaacgcaacccggcgtactaacacaagcagtgtc

SEQ ID NO: 612043 - DNA, 120 bp, Artificial Sequence
  ENSG00000176407_9 (sequence is synthesized)
accactacaatcacacaatccacagcaacaaccaacatagctaatacagaaagcagtcagcagactctacagaattcccagtttcttttaacaaggttgaatgatcctaaaatgtctgaa

SEQ ID NO: 612044 - DNA, 120 bp, Artificial Sequence
  ENSG00000176407_10 (sequence is synthesized)
acggagcgccagtccatggaaagcgagcgtgcagaccgcagcctgtttgtccaagagctccttctgtccactttagtgcgtgaagagagctcatcctcagatgaggatgatcggggggag

SEQ ID NO: 612045 - DNA, 120 bp, Artificial Sequence
  ENSG00000176407_11 (sequence is synthesized)
atggcagattttggtgctatgggctgtgtagatattatgcctttagatgttgctttagaaaacctaaatttaaaagagagtaataaaggaaatgagcctccaccacctcctctttgatga

SEQ ID NO: 612046 - DNA, 120 bp, Artificial Sequence
  ENSG00000176407_12 (sequence is synthesized)
catcccaattcgcagacaatgtcctctgtgctgtatttgccaatgaaagtggacaacaactatcttgggtttgtttggtgattgtaatttcaggtctgtcactcttgttacattgtgtac

SEQ ID NO: 612047 - DNA, 120 bp, Artificial Sequence
  ENSG00000176407_13 (sequence is synthesized)
attcaaaaggaagagagaaaatatatatgataatcatttccacttaactaatttttacttctagcaggtaaatgtaggtagcagtgcaggggtgatctctgcttcctgtaccttgacatg

SEQ ID NO: 612048 - DNA, 120 bp, Artificial Sequence
  ENSG00000176407_14 (sequence is synthesized)
caaaaggctctcctaatactccacattcaaactgaagaggaaaattgaaatctctaatgaagctgctgtgtgtatttatgaatattaatgaataaaaactgcttggatggtttaccttaa

SEQ ID NO: 612049 - DNA, 120 bp, Artificial Sequence
  ENSG00000176407_15 (sequence is synthesized)
ctactgcatgaggttttttgcagcgtgcatgagttttagtgaccttgttatttaagaagttaaatacaaggagtaaaacttaaaaaaaaaatacaaagcccaaagctttcccaaacatta

SEQ ID NO: 612050 - DNA, 120 bp, Artificial Sequence
  ENSG00000176407_16 (sequence is synthesized)
ttcaatggttacacgacgaagtagcttttgaataatgtctgcctgaatcacctttctttgtgtgcctcctacgcacaaagccagctctgcagtggaatctggggattatagccgggtgtg

SEQ ID NO: 612051 - DNA, 120 bp, Artificial Sequence
  ENSG00000176407_17 (sequence is synthesized)
gcactccgccctgtgtgactgtcctgtcgccctgttagtcatcttgcctgtgtggagctcagcctgtctctttaactcatctgtagaagacacaccagtaaagctactgttggaatctgc

SEQ ID NO: 612052 - DNA, 120 bp, Artificial Sequence
  ENSG00000176407_18 (sequence is synthesized)
tgcaggggcctttgtgtgccctaaaaacaaatcctgttcatgtttgtttaaagtttttactttttgtggttgtttaaaattttttcaattgttaaatatgttttattcaggtgtagatga

SEQ ID NO: 612053 - DNA, 120 bp, Artificial Sequence
  ENSG00000176407_19 (sequence is synthesized)
atttcatttattgactgttcaacagagttaacctgaattatgttgtctttgtttttaaaaatctcacattctcaatcatattttgcattatttatgtatttgctttgtagtttgctgaga

SEQ ID NO: 612054 - DNA, 120 bp, Artificial Sequence
  ENSG00000176407_20 (sequence is synthesized)
cagatcagtatcaggggagctttgaggatttgccttcccagatttgtcagtatattacaaccaaattcttaatgctaattttagcaccttttatttattgggttttttctggcataaaaa

SEQ ID NO: 612055 - DNA, 120 bp, Artificial Sequence
  ENSG00000176407_21 (sequence is synthesized)
gtaaagccttttaattgaatcatgccacctatatgcctatattattaatcctatgtgtaaaaaaaatgtacagctttttttgggtttgttttggggtttggaagggccgggttatttttt

SEQ ID NO: 612056 - DNA, 120 bp, Artificial Sequence
  ENSG00000176407_22 (sequence is synthesized)
atttcctgtttcagtttttgtgcatagactttcacaatagctccaaggcagggacagcgggtttgggggttgggagggcagtttttggaatgtaaatttaggacttttaaaaaggtgcgc

SEQ ID NO: 612057 - DNA, 120 bp, Artificial Sequence
  ENSG00000176407_23 (sequence is synthesized)
acagcttctgataaatttataactagacttaacctaatcatgtctcgttccagttctcttttctctgagcccttttcaaagtctcctctctttctcctgtcatccttttcctttcctgtc

SEQ ID NO: 612058 - DNA, 120 bp, Artificial Sequence
  ENSG00000176407_24 (sequence is synthesized)
cgtgtatctccgtttcttcaacatgacaagcatacagacttgaacacccctccggtgttcttccgagaactgtgaagtccatgttcatccaaatgtaaccaaaaaagaagtcaccctaca

SEQ ID NO: 612059 - DNA, 120 bp, Artificial Sequence
  ENSG00000176407_25 (sequence is synthesized)
tgtctgaaaaactgttgcttctcctctgaaacttcaaactccaacgatttccaaatacaatagctttgttttctttagttctgtaatggataatgtttaaaggaaaactttacaccaggc

SEQ ID NO: 612060 - DNA, 120 bp, Artificial Sequence
  ENSG00000176407_26 (sequence is synthesized)
ttctggttacactagaagtcaagcccattagggattttcattttttttcatttggttgttgagaagtttcaaaaatcagttttcaagctgtggtctttcaaacacatctgcacataagtc

SEQ ID NO: 612061 - DNA, 120 bp, Artificial Sequence
  ENSG00000176407_27 (sequence is synthesized)
acacatttcaataaagcattttcaagactgttgaccacttgaatttctttggtgttagtggattaacctaaccattactctgagattttatatctctaatccagtattttttttcttttt

SEQ ID NO: 612062 - DNA, 120 bp, Artificial Sequence
  ENSG00000176407_28 (sequence is synthesized)
atgctaaacatgggagatcctggttttgtgtgaatgcattattttggatgtgagaaataaatgccaattatatgtactttcccttttctgcacaaattctgggaaaatgtaaaagccttc

SEQ ID NO: 612063 - DNA, 120 bp, Artificial Sequence
  ENSG00000176407_29 (sequence is synthesized)
attttttaacatggttttagggaacaactgtaagtccattcagagcagtttaatttagatgatcacttttaacactgcagaagacctaaggagtcataagattccatctcatgtagaata

SEQ ID NO: 612064 - DNA, 120 bp, Artificial Sequence
  ENSG00000176407_30 (sequence is synthesized)
ctgtatattaattattttttaccagatattttacaaatacctcacctcatcctgtatgtaatcaataatgtattattttagggtagaacgacacagaatatcaatataaaaatatattca

SEQ ID NO: 612065 - DNA, 120 bp, Artificial Sequence
  ENSG00000176407_31 (sequence is synthesized)
tgtactattgaataaaaattaattgcaaagactttgatggagacaaaatcaaaatataccactgtttattttggcagcaccttcaaatttctaaggaccagatcctgaattttgagaatt

SEQ ID NO: 612066 - DNA, 120 bp, Artificial Sequence
  ENSG00000176407_32 (sequence is synthesized)
ttttgtttcgttgagttttgagtgtctaggatataagtttataaatgttctacagtgcttgtctttacttcctgtttagaaatcatttaaatctttcccctcgaggtgctctggaagaag

SEQ ID NO: 612067 - DNA, 120 bp, Artificial Sequence
  ENSG00000176407_33 (sequence is synthesized)
tttaatttcagctctgaacaagtagaaataactgtgcttccttgtatggctgcaatcataagacagaatttctgtggttggctaccgtgaaatctttgtatttatattgcattgttttgt

SEQ ID NO: 612068 - DNA, 120 bp, Artificial Sequence
  ENSG00000176407_34 (sequence is synthesized)
taaaaaaaaaaaaatccacagaagtagaacctaggtttgctactaacaaagtagtggattcttataattaggctcaggtaaagtaagagaaaacttctctccctgtggcccccagagaaa

SEQ ID NO: 612069 - DNA, 120 bp, Artificial Sequence
  ENSG00000176407_35 (sequence is synthesized)
tgaagtaggatagcagattacactattagaaataatagacgtaacaaaaaaaatccagcccattatccccaccccccattttccctctcaatattagaaatttcaataatatgctgacag

SEQ ID NO: 612070 - DNA, 120 bp, Artificial Sequence
  ENSG00000176407_36 (sequence is synthesized)
attttcaaaggtcaccaaggcttttgtgtttttttccggtctgtgggccacagttaaaagaacgggtaacaggttcagagttctcttgatacgtccaagccttagtttccaggaaaaaag

SEQ ID NO: 612071 - DNA, 120 bp, Artificial Sequence
  ENSG00000176407_37 (sequence is synthesized)
ctaggctcctcactgcaaatattaacgctttatatatttactccatggatgttggggtaagcacatatatcaatagttcatagctctagttaaggacaaagtgggttggggggtagaagg

SEQ ID NO: 612072 - DNA, 120 bp, Artificial Sequence
  ENSG00000176407_38 (sequence is synthesized)
agaatactagagaggttacggtagcaggtggctgcagaaaagaatcttttgaatgggattcctgtaacagtgttcagtaccaatattaagtctactgtaagtggggtctgatatggctta

SEQ ID NO: 612073 - DNA, 120 bp, Artificial Sequence
  ENSG00000176407_39 (sequence is synthesized)
ctgatacaggcatgtgtaaaaaactaagtgtgatggaggaatgggtgctaaaagctcttaacagttttgtagagaagccctgcagccgtgtttactatatatgacatgcctgtttcttag

SEQ ID NO: 612074 - DNA, 120 bp, Artificial Sequence
  ENSG00000176407_40 (sequence is synthesized)
tactatatatgacatgcctgtttcttagtttgcatgcacagtttaaggggcacatgcaatattggtttcatgtgcagtaaaaattaaaacacggctgagcgtggtggctcacgcctgtaa

SEQ ID NO: 612075 - DNA, 85 bp, Artificial Sequence
  ENSG00000176407_41 (sequence is synthesized)
agaggttgcagtgagctgagatcacgccgccattgcactccagcccgggcgacgaacactaggtacgaaattatcccagaattat

SEQ ID NO: 612076 - DNA, 120 bp, Artificial Sequence
  ENSG00000176407_42 (sequence is synthesized)
attaaaacactaggtacgaaattatcccagaattatacgcgaaagttggtgttcatgctggaaaacagttacggttatctgtgctctttctaaagctcaactagacactaaaacagttct

SEQ ID NO: 612077 - DNA, 120 bp, Artificial Sequence
  ENSG00000176407_43 (sequence is synthesized)
ctccttgagaccggaagtgggatgggggtgggcaggtggaagggaagaggctggggaggagcctctcatctcatctcatttcagcctcaacagtaattgaaaccctatgcctggcctgga

SEQ ID NO: 612078 - DNA, 120 bp, Artificial Sequence
  ENSG00000176407_44 (sequence is synthesized)
gtgggtagaggttagggttagagtgcaggatggagcagcagtctgcagactttcaggttgtgacgatgtcatgaaattctgtgctattaaacatggctatgtctgagtcagtcattacgg

SEQ ID NO: 612079 - DNA, 120 bp, Artificial Sequence
  ENSG00000176407_45 (sequence is synthesized)
tattccaaagccaaattcaagtgactgtttttctgaatagtataaaaatctaattccctgtgcttatcggcttcaactgtgcttacacaacgtttgtttctaattcgtactcttgcctct

SEQ ID NO: 612080 - DNA, 120 bp, Artificial Sequence
  ENSG00000176407_46 (sequence is synthesized)
tggtttctgtagtttttcaacccatttctgtcagtgttctataaatgcatacattcgttatttaaggaaccctgcagcagacctcgaataaaatgtgacttgatgtttgttgccacttcc

SEQ ID NO: 612081 - DNA, 120 bp, Artificial Sequence
  ENSG00000176407_47 (sequence is synthesized)
tcaacttggttagcaaattcaagttttgaaagacgattcgtctcagagaagttgatcctgaacctccacgtcacattttagtcggttgctattaggtgggtaatgcctaataacatgggt

SEQ ID NO: 612082 - DNA, 120 bp, Artificial Sequence
  ENSG00000176407_48 (sequence is synthesized)
tcctcaaatcacaaaggagaatgctctcaagtcctcatgttaactttagtaagtcagttaactttacagcaactaaagagatcaattaaaaagaacccttaagtctgactgtcccaggta

SEQ ID NO: 612083 - DNA, 120 bp, Artificial Sequence
  ENSG00000176407_49 (sequence is synthesized)
ccttaagtctgactgtcccaggtaactttacttgctgtacagatagtgcacagatatggatgagggctgcacatggctgatttgaaaacccatgtggggccgggtgtggtggctcacgcc

SEQ ID NO: 612084 - DNA, 120 bp, Artificial Sequence
  ENSG00000176407_50 (sequence is synthesized)
aaagaaagaaaacccatgtgggccgcatgtgcacagcctggggctgctttccacaggcctggataatgatgtttctcttcaaggaggcctttactaaccacagggaacctagcatctgac

SEQ ID NO: 612085 - DNA, 120 bp, Artificial Sequence
  ENSG00000176407_51 (sequence is synthesized)
tgtgtccttggcagacagtgcatgtagcctgtagaatgttggctcctctgtctatagaaaccatcagttcgctgctctctcattcatacatactttttgagttcccagtaggtacgaagc

SEQ ID NO: 612086 - DNA, 120 bp, Artificial Sequence
  ENSG00000176407_52 (sequence is synthesized)
tttgtctaaacattatttaccaactgcgatttttacagacttcccctgtaagaattttctaaaagagcctttctcccttacacaattgaaacgttttcaaaggtcatcaagccggttgcg

SEQ ID NO: 612087 - DNA, 120 bp, Artificial Sequence
  ENSG00000176407_53 (sequence is synthesized)
tttggtcagtcacgtgaccaatcagagctggtgagtgagctgctcccttaaatctaccaaattagactgacagcatttggaatctgcctcacacataagagatccatattcatttaatag

SEQ ID NO: 612088 - DNA, 120 bp, Artificial Sequence
  ENSG00000176407_54 (sequence is synthesized)
tgaagccagcccagaagcatcctcttctgtaagctggatggagtcccagctctctctccttgtatataaggagaccacaccctgtatataaggttttcttgaggtagatgcagcaatatt

SEQ ID NO: 612089 - DNA, 120 bp, Artificial Sequence
  ENSG00000176407_55 (sequence is synthesized)
cctggggtaagattctataatactcctgtattggcaagtggactggaccaacagacacaggcctcagccactgtcgctagggactgaaggagagttcatggattcttaccccctagtcat

SEQ ID NO: 612090 - DNA, 120 bp, Artificial Sequence
  ENSG00000176407_56 (sequence is synthesized)
gaaagctattctggccagccttgaatccatttaattttgcccacgagaacctttcatgacaattaacaagacactagtttccccataaaagtccatttttaaatatatagtatgctaatt

SEQ ID NO: 612091 - DNA, 120 bp, Artificial Sequence
  ENSG00000176407_57 (sequence is synthesized)
agcagtgtctgttgaattgccctatcggatagcagccaccatgtgtgctgaccactcacgattcagacttaccttggaaaatatcacactgacgatacagtactttagaataaattgcat

SEQ ID NO: 612092 - DNA, 120 bp, Artificial Sequence
  ENSG00000176407_58 (sequence is synthesized)
attgtatcaggctccgagactaatttgtactgaacccttgatatagattaccttttataacatcaccacctgtcatgaagcttatctgttttctgatttgaataaactttgtgttgtgca

SEQ ID NO: 612093 - DNA, 120 bp, Artificial Sequence
  ENSG00000176407_59 (sequence is synthesized)
atgggaaggctttctaaacagctcttagaccctgttttcagtgctcagtggtacacagtctttgcattgcctgtgtcagctgtgatgcatgtttaaaaggaaattttcgaggtcgcagat

SEQ ID NO: 612094 - DNA, 120 bp, Artificial Sequence
  ENSG00000176407_60 (sequence is synthesized)
gaccgcggggctggcgggaaggctctgcggccaagggacgggaagccctcgccgcctggagcccgccccggcctcgcggctaggcctcggcgcgtccctgggctcgggtaaccaagttcc

SEQ ID NO: 612095 - DNA, 120 bp, Artificial Sequence
  ENSG00000176407_61 (sequence is synthesized)
ggctcgggtaaccaagttcccggggtggatccgaccccgccgcagcaagcaaactccctgctcagtcacccaggcggagcagggctcgctccccgcggccctggtgccctcgccggcatg

SEQ ID NO: 612096 - DNA, 120 bp, Artificial Sequence
  ENSG00000176410_0 (sequence is synthesized)
ctcttgcaccgcctgccgaatcaattcaacatggcagccatgcgctggcgatggtggcagcggctgttaccttggaggttgctgcaggcccgtggctttccacaaaattctgcacccagc

SEQ ID NO: 612097 - DNA, 120 bp, Artificial Sequence
  ENSG00000176410_1 (sequence is synthesized)
ctgggcctaggagcgaggacttattcccagggcgactgctcgtattcgcgcacggcgctgtatgatctgctcggcgtcccctccacagccacgcaggcccaaatcaaggcggcttactac

SEQ ID NO: 612098 - DNA, 120 bp, Artificial Sequence
  ENSG00000176410_2 (sequence is synthesized)
cgtcagtgctttctctaccacccggaccgcaactccgggagcgcggaggccgccgagcgcttcacgcgcatctcccaggcctacgtggtgctgggcagtgccaccctccgtcgcaagtat

SEQ ID NO: 612099 - DNA, 120 bp, Artificial Sequence
  ENSG00000176410_3 (sequence is synthesized)
gatcgcggcctactcagcgacgaggacctgcgcggacctggcgtccggccctccaggacgcccgcacccgaccccggctcgccgcgtaccccgccgcccacctctcggacccacgacggt

SEQ ID NO: 612100 - DNA, 120 bp, Artificial Sequence
  ENSG00000176410_4 (sequence is synthesized)
tctcgggcctcccccggcgccaaccgcacgatgttcaactttgacgccttctaccaggcccactacggggaacaactggagcgggaacggcgcctgagggcccggcgggaggcccttcgc

SEQ ID NO: 612101 - DNA, 120 bp, Artificial Sequence
  ENSG00000176410_5 (sequence is synthesized)
aaacggcaggagtatcggtccatgaaaggcctccgctgggaggatacccgagacacggctgccattttcctcatcttttcaatcttcatcatcatcggcttttatatttaatcggagaga

SEQ ID NO: 612102 - DNA, 120 bp, Artificial Sequence
  ENSG00000176410_6 (sequence is synthesized)
gaagggaaggggagtgtccccagccaaccccccagaaacggccttttttcctgcctctgaacccttggccattgatagtctacctttgctgggatccgaaggaactgtactccccctgcc

SEQ ID NO: 612103 - DNA, 120 bp, Artificial Sequence
  ENSG00000176410_7 (sequence is synthesized)
ctccccgacccgcccagcttagccgatgacctgcacatcgctccactgtggtccagaaaaggaggcctttcgatgtctgagaaagaggccccacgctgtagagtcccgaaagcccaggag

SEQ ID NO: 612104 - DNA, 120 bp, Artificial Sequence
  ENSG00000176410_8 (sequence is synthesized)
tgaagggggttcctggagtctctagggtgcttcttccagagtctgtcttcttgcttccagatgtggtcaacttctggaacactcgctgtagctttattgtttagccccaagcaagattta

SEQ ID NO: 612105 - DNA, 120 bp, Artificial Sequence
  ENSG00000176410_9 (sequence is synthesized)
tctcctcctgccccgcatgtgtatggtgggcctctgtaaccttgaaatgtgcaatgtgaccaattgttgactaccaaaagaaaaggtctggggttgtacgaaacttgtctttctgtgact

SEQ ID NO: 612106 - DNA, 120 bp, Artificial Sequence
  ENSG00000176410_10 (sequence is synthesized)
gagacctggtccagggtaagaatgggatcggtggagagcctgtcgttcctcccgctaaggtcagccccctggggcactcctccttatgttgatagcatgtaggagtgagaaaaagtcatt

SEQ ID NO: 612107 - DNA, 120 bp, Artificial Sequence
  ENSG00000176410_11 (sequence is synthesized)
gagcataaggaatgagtgttcctgtgcccatatttaatgtgtgaccttggagaagttactctgtaggcatgacagcagaggagaaaatcatttggcatcttgaggtctgtcatgctttat

SEQ ID NO: 612108 - DNA, 84 bp, Artificial Sequence
  ENSG00000176410_12 (sequence is synthesized)
gagaaaatcatttggcatcttgaggtctgtcatgctttattatccatagtttttggggggtgctctgttgcccaggctggagtg

SEQ ID NO: 612109 - DNA, 85 bp, Artificial Sequence
  ENSG00000176410_13 (sequence is synthesized)
cgattctcctgcctcagcctcctgtgtaactgggattacaggctcccaccacacctggctagtgctggccagactgaggtctcga

SEQ ID NO: 612110 - DNA, 83 bp, Artificial Sequence
  ENSG00000176410_14 (sequence is synthesized)
tcccggccctattatccatagttctaatccacagggattacagcataatgctagcagggccaggttcatccttgagacagtgt

SEQ ID NO: 612111 - DNA, 120 bp, Artificial Sequence
  ENSG00000176410_15 (sequence is synthesized)
cataatgctagcagggccaggttcatccttgagacagtgtggctggctgtcacctggtcctccctttaccagccagccccattgcacactgtgcagcccatcccctcccagaaatagagt

SEQ ID NO: 612112 - DNA, 120 bp, Artificial Sequence
  ENSG00000176410_16 (sequence is synthesized)
gacaaactctgcacttaagtcccctgtttctgtttaacttgcagtgcttatcacaggcccttccttaattttttaaacaaggctgcttgaggctggggtaaattttggggctttgggagt

SEQ ID NO: 612113 - DNA, 120 bp, Artificial Sequence
  ENSG00000176410_17 (sequence is synthesized)
acacaggactactgagggacggggagttggtggcttggtgttcatggtggagacttggttctttacgcagagcaggctaaaggcgtgttttttctgctctgtttctaattcatgttaagt

SEQ ID NO: 612114 - DNA, 120 bp, Artificial Sequence
  ENSG00000176410_18 (sequence is synthesized)
agttggtcatcactttggtcagagctgctgctgaagctctcttaactgtgagtcactggacgttggcagggagttggctgtgagattgtaggtgctcaagtgtttctgttcgggactgag

SEQ ID NO: 612115 - DNA, 120 bp, Artificial Sequence
  ENSG00000176410_19 (sequence is synthesized)
tgtgaatctgtaaaaggggaaaatcctcgcaagaggtctacgagaaggatgagggcccaagtctagggtctaaacaaagccaggagtggtttggtatattactgagtgcaatcattgcgt

SEQ ID NO: 612116 - DNA, 120 bp, Artificial Sequence
  ENSG00000176410_20 (sequence is synthesized)
gccattcctgcactcaatgtattgtgtaaaatccttaggtaaaatgggataaacccacagctggtcctacttggcctcttgaaaaccattccatcattgtgccaatctagcctgaaaagg

SEQ ID NO: 612117 - DNA, 120 bp, Artificial Sequence
  ENSG00000176422_0 (sequence is synthesized)
atccaaggcgcaagatggcgctgctttttgcacgttctttgcgcttgtgccgctggggagccaaacgattgggagttgcctccacagaggcccagagaggcgtcagtttcaaactggaag

SEQ ID NO: 612118 - DNA, 120 bp, Artificial Sequence
  ENSG00000176422_1 (sequence is synthesized)
aaaaaaccgcccacagcagcctggcactcttcagagatgatacgggtgtcaaatatggcttggtgggattggagcccaccaaggtggccttgaatgtggagcgcttccgggagtgggcag

SEQ ID NO: 612119 - DNA, 120 bp, Artificial Sequence
  ENSG00000176422_2 (sequence is synthesized)
tggtgctggcagacacagcggtcaccagtggcagacactactgggaagtgacagtgaagcgctcccagcagttccggataggagtggcagatgtggacatgtcccgggatagctgcattg

SEQ ID NO: 612120 - DNA, 120 bp, Artificial Sequence
  ENSG00000176422_3 (sequence is synthesized)
gtgttgatgatcgttcctgggtgttcacctatgcccagcgcaagtggtacaccatgttggccaacgagaaagccccagttgagggtattgggcagccagagaaggtggggctgttgctgg

SEQ ID NO: 612121 - DNA, 120 bp, Artificial Sequence
  ENSG00000176422_4 (sequence is synthesized)
agtatgaggcccagaagctgagcctggtggatgtgagccaggtctctgtggttcacacgctacagacagatttccggggtccagtggtgcctgcctttgctctctgggatggggagctgc

SEQ ID NO: 612122 - DNA, 120 bp, Artificial Sequence
  ENSG00000176422_5 (sequence is synthesized)
tgacccattcagggcttgaggtgcccgagggcctctagtatgtccattactggagtccctaatcacgcctttggccagcctccttttgaaagtgtccgaagcctttttactttgcctcaa

SEQ ID NO: 612123 - DNA, 120 bp, Artificial Sequence
  ENSG00000176422_6 (sequence is synthesized)
gcaacctctagctcccacaattcagtgttgggtcctctgtgcaatatcatgatcatcttcctcatcccctaccttgtgaaagctaggcatacagccaaaccctccttttccccacccacc

SEQ ID NO: 612124 - DNA, 120 bp, Artificial Sequence
  ENSG00000176422_7 (sequence is synthesized)
aactactgccaatttcctaggctaccatgggtgtatcttccttgacctgcttccttcagtccctctgcctccctttgcccaggcctttctcagactgtattccatcctggggtcttatca

SEQ ID NO: 612125 - DNA, 120 bp, Artificial Sequence
  ENSG00000176422_8 (sequence is synthesized)
ttcagctttgtttgaatttattaatcaccatgatacctctccctccctttgtccacatgtaacttgttcttggggctctaccagatggctgaagagtaaatcctttctacctctggctga

SEQ ID NO: 612126 - DNA, 120 bp, Artificial Sequence
  ENSG00000176422_9 (sequence is synthesized)
aggagtggtgcagtcaatgacttggccctttttctacagcacatttagagtttgggctctggctccctcagtaagtgctttattaactcagtgtgtcaaaatgaaaacagagccctcctt

SEQ ID NO: 612127 - DNA, 120 bp, Artificial Sequence
  ENSG00000176422_10 (sequence is synthesized)
ccccagtagctcagtgccacagaccttcagccccacacagctgtagctatccttaccctgagtccatctaccttaaatctgtacctctgacacccagccagtctgtcataatcattatcc

SEQ ID NO: 612128 - DNA, 120 bp, Artificial Sequence
  ENSG00000176422_11 (sequence is synthesized)
gccagtctgtcataatcattatcccagttataaccttgaccaaaggggaagagagacacttgggggatatctaggggatgagtgctagaaactatttatttatttttgagacagagtctc

SEQ ID NO: 612129 - DNA, 66 bp, Artificial Sequence
  ENSG00000176422_12 (sequence is synthesized)
gatcttggctcactgcaaactctgccttttgggttcaagcgaccgtctcatttttatatttttagt

SEQ ID NO: 612130 - DNA, 60 bp, Artificial Sequence
  ENSG00000176422_13 (sequence is synthesized)
gtctcgaactcctggcctcacggccaaaactgtttattcttgagaagttccatcttcatt

SEQ ID NO: 612131 - DNA, 120 bp, Artificial Sequence
  ENSG00000176422_14 (sequence is synthesized)
cggccaaaactgtttattcttgagaagttccatcttcatttctgccacagttggaacttcccgaggaaggaaggaggcctgaggttttgcacaatctgtttcagagcctgtttagactca

SEQ ID NO: 612132 - DNA, 120 bp, Artificial Sequence
  ENSG00000176422_15 (sequence is synthesized)
aacctatgcttcccttggcagcagaatacacttaacctaaagcagtatttggagttgagaaaaacctggtggggtaagtgaatatgtactgtttggtagggtaggtagagaagctgtgct

SEQ ID NO: 612133 - DNA, 120 bp, Artificial Sequence
  ENSG00000176422_16 (sequence is synthesized)
ttgaccctgtgattccatctttttctaccttctatgatggtgatgaagctagatacccctagggaagaaagaaggactgggtttagcaaaaatgatttggtaattaaagtttatttgaac

SEQ ID NO: 612134 - DNA, 120 bp, Artificial Sequence
  ENSG00000176422_17 (sequence is synthesized)
acaaaatactttctctgtctataaaattggctgttagcagtagcagcagcatgtcctggccaaggggagtagatttctccagactactaaagccatgtatatagccattcccacttccca

SEQ ID NO: 612135 - DNA, 120 bp, Artificial Sequence
  ENSG00000176422_18 (sequence is synthesized)
tattctgtggatatgtacatgtgcatggtagctagagtccctccaccagagtatctctctcatgatggtttcttcagggagaggaagaggagacctgggtgaagagctgggatggttttg

SEQ ID NO: 612136 - DNA, 120 bp, Artificial Sequence
  ENSG00000176422_19 (sequence is synthesized)
agtggggcaagccattaggctgtaccttgaagcccagtctctctggatagctgtactgcaggtgtcctctgaggcccttctctgtactctgtctgctgagggaatggggtattttgactc

SEQ ID NO: 612137 - DNA, 120 bp, Artificial Sequence
  ENSG00000176422_20 (sequence is synthesized)
ccatagaaagcactagcctaagtcaccaaatgactgcttggtccccactgaagcagtgtagctctccatagtatttttggtggttatggattacatgtgtggccagctcatgctttttct

SEQ ID NO: 612138 - DNA, 120 bp, Artificial Sequence
  ENSG00000176422_21 (sequence is synthesized)
tgagcaggggctgtccatgacctgtgctcataccatgctttctaagttctctttggacagggcctcagctgctgcctcagcctgagtttcagagagtgtgtaggagtcctggtaatcttg

SEQ ID NO: 612139 - DNA, 120 bp, Artificial Sequence
  ENSG00000176422_22 (sequence is synthesized)
aagcagtttgaccacctccagatggttgaactgcacagcatcatccaggggaatgttgccccacctgagaggaataatgatatgatcaggcaaaggagacgtggagagtggtggttgtat

SEQ ID NO: 612140 - DNA, 120 bp, Artificial Sequence
  ENSG00000176422_23 (sequence is synthesized)
atatttgcatggtggctggagggtaggtggagaagctgtgcccaccctcctccacttttagcctattcctcacctgtccttggcaaaaggattcactttgcaagcctcgatcaggaattt

SEQ ID NO: 612141 - DNA, 120 bp, Artificial Sequence
  ENSG00000176422_24 (sequence is synthesized)
aacaacttcgatgtgtcctaggaatatgggcagaaggaaaatgagaaggcgcaggtcttgaaccctttggtgcagacacttagccactgaagtctttaccaagaggggaggggaaaaggc

SEQ ID NO: 612142 - DNA, 120 bp, Artificial Sequence
  ENSG00000176422_25 (sequence is synthesized)
ctcttcccattttgtaccctgcagcactcagtcatagtctagctgcaaaccgaagggtgtctagataaaactagttgctgcccctataaccttgagggcacatataatgaaggtactttt

SEQ ID NO: 612143 - DNA, 120 bp, Artificial Sequence
  ENSG00000176422_26 (sequence is synthesized)
ggtgaaaaagaaagggtcttatgattaccctcctcctcccctccttaacccttcagtaccttcagctgcagcaacatgcagagctgtgcgcgagtcatagtctttctgttccatatccat

SEQ ID NO: 612144 - DNA, 120 bp, Artificial Sequence
  ENSG00000176422_27 (sequence is synthesized)
ggctgacaaggcaaacctgagggtagtgggaaagcagctagagttgcctagatcagactggaatcacaggtgttctttgtgaactggtgtcagactggatgagtttcagagaaagtgaaa

SEQ ID NO: 612145 - DNA, 120 bp, Artificial Sequence
  ENSG00000176422_28 (sequence is synthesized)
cagcctatagccagatttgttggctctgaataatcttttttccatatccagatgagactgttatactcatattagagagatgggaatgtgatccttccagaaatatcactcactgcctac

SEQ ID NO: 612146 - DNA, 120 bp, Artificial Sequence
  ENSG00000176422_29 (sequence is synthesized)
ctgtggtaagtgcccatttgaggcagggtacctacttcctaggacactgctcttaacactcaataacaatggctaacattaattatcatagagcagacagtttactttttttaaaaaaaa

SEQ ID NO: 612147 - DNA, 120 bp, Artificial Sequence
  ENSG00000176422_30 (sequence is synthesized)
tctccttttttaaaaaaatttcatttaaatgcaatctatatccattctaattccaaagctgaagcacttaactattttgttacgctgcctcctagtaaaatctctgaccaggagtatttt

SEQ ID NO: 612148 - DNA, 120 bp, Artificial Sequence
  ENSG00000176422_31 (sequence is synthesized)
attgtgtatatttggtcacagtagcattaccttcgaagagctgagacatcgccactataggcagcaaataacaggttgaccacagtcttgttctggaacacaaatcatacccacatgaca

SEQ ID NO: 612149 - DNA, 120 bp, Artificial Sequence
  ENSG00000176422_32 (sequence is synthesized)
ttaattgaactcacctatgccagctgtgccctgtgaccctcctccatggatgcttagtccaagggtattgctgaagtgttatggaatgtgctactctgaaatattctttttttttttttt

SEQ ID NO: 612150 - DNA, 71 bp, Artificial Sequence
  ENSG00000176422_33 (sequence is synthesized)
atggaatgtgctactctgaatcaggctgaagtgtagtggcgcgcggtcttggctcactgcaacctctgcct

SEQ ID NO: 612151 - DNA, 120 bp, Artificial Sequence
  ENSG00000176422_34 (sequence is synthesized)
caggcgtgagccaccgcacctggcctttgaaatattcttacaagccacctggagttttccttacccgaatttctgccccttcacgccgtgggtctaacttccgagcacagtgcctcaggt

SEQ ID NO: 612152 - DNA, 120 bp, Artificial Sequence
  ENSG00000176422_35 (sequence is synthesized)
acttccgagcacagtgcctcaggttgtcatagttgtggaaattgaagagagacaccaacttctagaattgtaagccaaatatattgtttatttactccttacacttagtaggagctcaaa

SEQ ID NO: 612153 - DNA, 120 bp, Artificial Sequence
  ENSG00000176422_36 (sequence is synthesized)
attgctttattatagtaaaagtggtaccattaaacaaatttattgcttcaaaaatagtaagtactatatgcaaagcatctcacctggcagaagctggtccccctatggctgttccccagc

SEQ ID NO: 612154 - DNA, 120 bp, Artificial Sequence
  ENSG00000176422_37 (sequence is synthesized)
ttgtccaatgggggtgacaggcacatcattcccatgacattgggtaccaccaggaggatggctcctgatacagctgacttggctggcaggcccacctggggaacagaactgaagctgagg

SEQ ID NO: 612155 - DNA, 120 bp, Artificial Sequence
  ENSG00000176422_38 (sequence is synthesized)
ataaagtgggtgtgccccaaatcagaaaataaacaagttaggctgtactcttaacaagtttacaaatgactgcatgaccacaatccacctcaaccttttggcttgttaattagcttcttt

SEQ ID NO: 612156 - DNA, 120 bp, Artificial Sequence
  ENSG00000176422_39 (sequence is synthesized)
tattactcctgtcctttccttcccttaaattcattgattcagctagaaaatattttttgaaatacttacagcattctgtgctagatgctgtgctagaactaggaacttccattctggtgt

SEQ ID NO: 612157 - DNA, 120 bp, Artificial Sequence
  ENSG00000176422_40 (sequence is synthesized)
taggagataggtaataaacaggtaaataaatagacacgtaatgtttaaagtaattgtgataaatagtgagaagtagggtgctgtaaatagaggtagaggggggccacatgagatagggtg

SEQ ID NO: 612158 - DNA, 120 bp, Artificial Sequence
  ENSG00000176422_41 (sequence is synthesized)
gtcagaaaagtctttctttggaaatgacatctaagctgagaccccaaggagaagagccagcaatgtgaagcacaattcaggagctgcaacacctctggttgtttttctttttcttttttt

SEQ ID NO: 612159 - DNA, 120 bp, Artificial Sequence
  ENSG00000176422_42 (sequence is synthesized)
gtgatccacctgcctcggcctcccaaagacatctctttatatattcgaggaacttggtgtttttgagaaactcgtctaaggagtctcaacctaattgccttcctggaagttagtgaatga

SEQ ID NO: 612160 - DNA, 120 bp, Artificial Sequence
  ENSG00000176422_43 (sequence is synthesized)
ggaagttagtgaatgagaggcaggaacaagcttccacctctatcttgagagagtcagtgttctctcttcttagcactgggctcatgacagatggatagcagagccagaaactcacgtgga

SEQ ID NO: 612161 - DNA, 120 bp, Artificial Sequence
  ENSG00000176422_44 (sequence is synthesized)
aggcaaactggccagagaagtcatacatgccgcaggaatgcatgaggctgagggtgttgcgcactgcttcagcactcagcacactctcgcctgtgatggggcagatcccaccgttggcga

SEQ ID NO: 612162 - DNA, 120 bp, Artificial Sequence
  ENSG00000176422_45 (sequence is synthesized)
gggtggctgccatgacactgcctgattcacaagtgacctccacagaacacagctatgaaaacaaagaataggtgaagatgtgacgtgaacctgcacatgggaccctcgggtgtagggaaa

SEQ ID NO: 612163 - DNA, 120 bp, Artificial Sequence
  ENSG00000176422_46 (sequence is synthesized)
gggcaagggcaaggacagtctgtcctgttccctcggccctgagcagtgttttcttacctggaagtagagatcaagggcagccatcatgtccacccccttaggaaagcactgcaaggaaga

SEQ ID NO: 612164 - DNA, 120 bp, Artificial Sequence
  ENSG00000176422_47 (sequence is synthesized)
gaggggagagcatttctcttcaggacatcagccctttcacactgtcagggtctcagctgaagcccccaacccctactgcccttccactagcagcagaattcccagggactttctcttccg

SEQ ID NO: 612165 - DNA, 120 bp, Artificial Sequence
  ENSG00000176422_48 (sequence is synthesized)
gcctcttctggttaccttcttttccttgagataatagccgatggcataattccgatcccctgtttccttctctgactggaatctgaagcaaacacccaatttagtacttgaagttggagg

SEQ ID NO: 612166 - DNA, 120 bp, Artificial Sequence
  ENSG00000176422_49 (sequence is synthesized)
agtgggtgttgggagaaggggaaaaattaccttccctggagagacagaactacatcacaccacaaactaaatgaacccctttataacttctcacagtaatattagaggaaatttctgaac

SEQ ID NO: 612167 - DNA, 120 bp, Artificial Sequence
  ENSG00000176422_50 (sequence is synthesized)
ctgagcaaacactcagcatagttttgttataaagtaaacccaaaccaaacaccccaaactgtctagtcatctaggaaaactggtgaagtttttggctttgaaagtcttggcaagaaaggg

SEQ ID NO: 612168 - DNA, 120 bp, Artificial Sequence
  ENSG00000176422_51 (sequence is synthesized)
cttaggcacaaaccatcacactgcctctctcattatgtactaattagaaatggaacaaattattttacaagataaacaaatgtttatgaagggactcagaggaagctggagggccaaagt

SEQ ID NO: 612169 - DNA, 120 bp, Artificial Sequence
  ENSG00000176422_52 (sequence is synthesized)
tcccctgggatttcttcctcctaagattctctctcccccattcctcttgtccccatcctaagtacacacacatacaccacaatgctttcagtcagtcctctgagtagggacttacgtggc

SEQ ID NO: 612170 - DNA, 120 bp, Artificial Sequence
  ENSG00000176422_53 (sequence is synthesized)
attgctgaaacccatgtattcattcccagccattttgttgagatactgcaacacctggaagagaaaaagggacattgaggctccacttggttaagaagctctattaatacctcacaggtt

SEQ ID NO: 612171 - DNA, 120 bp, Artificial Sequence
  ENSG00000176422_54 (sequence is synthesized)
gactagcccttctgaactcaggtcttgtcaagaggctttcctctctgaggccagcagatttccacatttctggaaataaggcttctagtatgggctggtgcacctggtagtggggttaga

SEQ ID NO: 612172 - DNA, 120 bp, Artificial Sequence
  ENSG00000176422_55 (sequence is synthesized)
gagccactggggcagctggagaggacagcatgccatggcgaaatgcagccaggggctaagtagcaagggaacttacaaaatcaaacttctctgctttgttacagtccatctgcagagaaa

SEQ ID NO: 612173 - DNA, 120 bp, Artificial Sequence
  ENSG00000176422_56 (sequence is synthesized)
gagagagatgtcagcattctaagtgtaggaggatgacagagggaagggtcagaaggatctagtggagttctagtgttagtctggtcctgctgctgcaaatgtgttcaattttataatggc

SEQ ID NO: 612174 - DNA, 120 bp, Artificial Sequence
  ENSG00000176422_57 (sequence is synthesized)
tcctgctgctgcaaatgtgttcaattttataatggccctttttttatccttctgaaaacaccgcacttccattggctcctctctttctctttcttttttttgagacagtcttgctttgtc

SEQ ID NO: 612175 - DNA, 120 bp, Artificial Sequence
  ENSG00000176422_58 (sequence is synthesized)
caagcgatcctcccacttcagcctccaagtagctcggattacaggcatgagccagcttgctgggccatcccacttccattctcaatccaaaccctcatccctgactcccacgttcatttt

SEQ ID NO: 612176 - DNA, 120 bp, Artificial Sequence
  ENSG00000176422_59 (sequence is synthesized)
aaaccctcatccctgactcccacgttcattttcctgactcgaatcctgtctcctagccccaccctatccctgatctccatccccattccttacaccccatgctggagctttactccatcc

SEQ ID NO: 612177 - DNA, 120 bp, Artificial Sequence
  ENSG00000176422_60 (sequence is synthesized)
cattggccagcatgatggttcatgcctgtaatctcagcaatttggggggctgaggcaggaggatcgcttgagaccaggggtttgagaccagcctaggcaacataggagagaccctgcctc

SEQ ID NO: 612178 - DNA, 120 bp, Artificial Sequence
  ENSG00000176422_61 (sequence is synthesized)
caggcgtgagccaccgcgcctggcctctatattttttaaaaaaggtcctacttagatgggaatgggatgaggcaggtcccagatacaggtttgtagatggagccatcacagaacaagggg

SEQ ID NO: 612179 - DNA, 120 bp, Artificial Sequence
  ENSG00000176422_62 (sequence is synthesized)
agatacaggtttgtagatggagccatcacagaacaaggggagagactcagcctcttttcctcacccagactcattgcttactcatgtgtcaactacagagtcaataccacagggactctg

SEQ ID NO: 612180 - DNA, 120 bp, Artificial Sequence
  ENSG00000176422_63 (sequence is synthesized)
atacctgagtccctgaggggaggattcctaacaccaccttccccaggaggggctgtgattggctccagggtgttgctgcccagctgctcccaggttcttgctcaagccctgggagaccta

SEQ ID NO: 612181 - DNA, 120 bp, Artificial Sequence
  ENSG00000176422_64 (sequence is synthesized)
cagctgatgggctagtctgacaccctgttcaaggccaactcacagttccaggtgacgtgaataactgccctggcctggccattcacccttgcctgcaggtgtcccacacccagaagtggc

SEQ ID NO: 612182 - DNA, 120 bp, Artificial Sequence
  ENSG00000176422_65 (sequence is synthesized)
caatcagtgcccaatagtgctgtcctccccttgtctctggcatttggcccttggtcctaggcaggggtcaggacctgctcacttctctaagggtcagaaagctctaggctctagactcat

SEQ ID NO: 612183 - DNA, 120 bp, Artificial Sequence
  ENSG00000176422_66 (sequence is synthesized)
gggtgggggcagggaacagtactgagtggggatgacggaggtggtgcagtctcttatactgacattgtcagcataacatgtgggtccctgctgtgcctcatgtgccttctggggaccctc

SEQ ID NO: 612184 - DNA, 120 bp, Artificial Sequence
  ENSG00000176422_67 (sequence is synthesized)
aaaggaatcagagccccaccagtctccctggagagctgaacaaatatgagggatacaggaacacaggagcttagaggataatacctatcagaaggttaaggtggcactgaccttgatcag

SEQ ID NO: 612185 - DNA, 120 bp, Artificial Sequence
  ENSG00000176422_68 (sequence is synthesized)
ggagctgacaacaatggcaccagcattgaccatggggttatgggggattcctggggaaatacaaaccaccaagagtcttagccactgaacaaagcctccctgacagcccgctcactttgt

SEQ ID NO: 612186 - DNA, 120 bp, Artificial Sequence
  ENSG00000176422_69 (sequence is synthesized)
gggttagacaagaaagactgctagggagaaaggcatgacagggctaatcaggaagggcagagaaacaaaaaaggctgggagatggggtggggataaggagaaggggacagctgtaagtac

SEQ ID NO: 612187 - DNA, 120 bp, Artificial Sequence
  ENSG00000176422_70 (sequence is synthesized)
ggtctgagccttggtagtgctcaccttcctcattgagggagagcttgttgtagcgcaggccacttggctctttgcccacaaacttgtgcacgtagtcagtgcctagggtgcttatggaga

SEQ ID NO: 612188 - DNA, 120 bp, Artificial Sequence
  ENSG00000176422_71 (sequence is synthesized)
tggcataggtgaggggcttcacacaggactgcaggcagaaggggatctttgtgtggcccacagagtgcctggaggcagacagatgccatgaaaggggttggcctgtgttcggcacctgtg

SEQ ID NO: 612189 - DNA, 120 bp, Artificial Sequence
  ENSG00000176422_72 (sequence is synthesized)
ccctgcctccccttcctcttgcccagcatctcaccgttgaccatccacagtgcacagggagacaccccacaggtctgggtttgacttggccagctgagggatgtaggctgccacctggac

SEQ ID NO: 612190 - DNA, 120 bp, Artificial Sequence
  ENSG00000176422_73 (sequence is synthesized)
atgagtgggtagagaaaagggagatggatgtggagaagaggaacagagttgaggttgagggtcaagagaatcttttagataaaagctaaaattctgtcttctatagggcagaggggttcc

SEQ ID NO: 612191 - DNA, 120 bp, Artificial Sequence
  ENSG00000176422_74 (sequence is synthesized)
ctcctgcctgttgctcccagaaatgcccgagccttaagtcctagaaggccatatctttgtgtatccgcaatcctgtagagatagcagtaaagccaatggaagttaaaaaaggagaattct

SEQ ID NO: 612192 - DNA, 120 bp, Artificial Sequence
  ENSG00000176422_75 (sequence is synthesized)
gaggcaaccttccccttttggttcttaggctcagttaccctataaatccctttgaaggctctattcgatcttgattccctcacctgctctaggaatcgtgtatagaaacacatgaagcca

SEQ ID NO: 612193 - DNA, 120 bp, Artificial Sequence
  ENSG00000176422_76 (sequence is synthesized)
tgaagccatgtcaccatttacagaagttctgcttctcatctctcattcataggactcccagccccaggaaatctctgagaagcgaggtatatctaggtgtggtggctcatgcctgtaatc

SEQ ID NO: 612194 - DNA, 120 bp, Artificial Sequence
  ENSG00000176422_77 (sequence is synthesized)
aaaaaaaaaaaaaaaaaatctggcccaggtccctgacccctcccttagtcccctgactctcactttgcctccagtgagctctttgacatcctcaaagatgcgatccacatggcccgtgaa

SEQ ID NO: 612195 - DNA, 120 bp, Artificial Sequence
  ENSG00000176422_78 (sequence is synthesized)
ctcctcaaaatcaggaatgacaaacttctttcggaatgcctgggtcaggagcacaatgttgctgctcacacacctggatcccagacacgattggattagggggctagagaaatgcagctg

SEQ ID NO: 612196 - DNA, 120 bp, Artificial Sequence
  ENSG00000176422_79 (sequence is synthesized)
ggactcactctggagccacggaaattgggaataaagaaggttgagtggtcttcaggtttgggatcaacagctctgttacctttggcaaatcagtttacctttctaggtcttagtttccgt

SEQ ID NO: 612197 - DNA, 120 bp, Artificial Sequence
  ENSG00000176422_80 (sequence is synthesized)
acctctaaaatgaggggttttaatgatgtggaaagacactatgtcttgggatatgagaaaaaaaataaataccagaataatatgtatgtatgttaccttgatatttaaaaaatcctaaat

SEQ ID NO: 612198 - DNA, 120 bp, Artificial Sequence
  ENSG00000176422_81 (sequence is synthesized)
cataaaagtatatttatatatattcatgtatgtatgtcagtacataggacattatctagaagatacccactaatctgctaatatttacttctgggaaaagaggacagggattgagtaggg

SEQ ID NO: 612199 - DNA, 120 bp, Artificial Sequence
  ENSG00000176422_82 (sequence is synthesized)
agggaaaggagaacatgtatttctatattgtttgaactcttatgatgagtattcatgtataacttatgtaataagtaataaaataaaatgaggaattgaactatacaattcccaaattcc

SEQ ID NO: 612200 - DNA, 80 bp, Artificial Sequence
  ENSG00000176428_0 (sequence is synthesized)
ggagcggtgcgtgcggccggagccggagcggatcctggagccggagcggagcggagcggagcggagccggggcggagcgg

SEQ ID NO: 612201 - DNA, 120 bp, Artificial Sequence
  ENSG00000176428_1 (sequence is synthesized)
cggcatgtaccgggcccgggcggcgcgggcggggccggagcccggcagcccggggcgctttgggatcctcagcaccgggcagctccgggacctgcttcaggatgagcccaagctggaccg

SEQ ID NO: 612202 - DNA, 120 bp, Artificial Sequence
  ENSG00000176428_2 (sequence is synthesized)
accggatcgtgcggctcagcaggaagttccagggcctgcagctggagcgtgaggcctgcctggcctccaactacgcgctggccaaggagaacctggccctgcggccccgcctggagatgg

SEQ ID NO: 612203 - DNA, 120 bp, Artificial Sequence
  ENSG00000176428_3 (sequence is synthesized)
gccgggctgccctggccatcaaataccaggagcttcgtgaggtggccgagaactgcgcggacaagctgcagcgactggaggaaagcatgcatcgctggagtccccactgcgcgctgggct

SEQ ID NO: 612204 - DNA, 120 bp, Artificial Sequence
  ENSG00000176428_4 (sequence is synthesized)
ggctgcaggctgagctagaagaggcggagcaggaggcagaggagcagatggagcagctgctgctcggggagcaaagcctggaggccttcctgcctgccttccagcgtggccgcgccctgg

SEQ ID NO: 612205 - DNA, 120 bp, Artificial Sequence
  ENSG00000176428_5 (sequence is synthesized)
cccacctgaggcggacgcaggcagagaagctgcaggagctgctgcggcgtcgggagcgttctgcccagccggcccccacctcggctgctgatccccccaaatccttcccggctgcagctg

SEQ ID NO: 612206 - DNA, 120 bp, Artificial Sequence
  ENSG00000176428_6 (sequence is synthesized)
ccttggactcccgcccagtgcccccactgaagggctcccccgggtgccccctcggcccggcccccctgctgagccctcggccctcgcagccagagcccccccaccggtaggatccacggt

SEQ ID NO: 612207 - DNA, 120 bp, Artificial Sequence
  ENSG00000176428_7 (sequence is synthesized)
ccccccagttggggggcctagacaaacttgatgcgtggctcctcctcctcccccactgcctgggtggggggaggggcaggcccctccccctggcctcaggcaggccctggccctggaggc

SEQ ID NO: 612208 - DNA, 120 bp, Artificial Sequence
  ENSG00000176428_8 (sequence is synthesized)
tgagctggggaggagggtcccctggaagaggcccgagagggggctgggggtgggtgggcagggctttatgcctctggcgctgaagacaccctgccttttttgtttccgtgccccggggcc

SEQ ID NO: 612209 - DNA, 120 bp, Artificial Sequence
  ENSG00000176428_9 (sequence is synthesized)
tctagggtgatggaccagccccgttaaagaacttgactcaactacaggggcctgggaagatgcctgggtcccctaggggccttgccaaggggacctgtcgcaccccaccactccactggg

SEQ ID NO: 612210 - DNA, 120 bp, Artificial Sequence
  ENSG00000176428_10 (sequence is synthesized)
ctcgcacaacgccaaggccgccaggagtgttttacatcatgtcctgagcctacctttcccccaaattctggggcccacagcctaggagccaggtgatcaggcctcggctgtggggccagg

SEQ ID NO: 612211 - DNA, 120 bp, Artificial Sequence
  ENSG00000176428_11 (sequence is synthesized)
gacaccatggccctggggctactacgtgtccacacatgctccagaccctggggcaaggtaggccaggggcttctgacctgtgcaggtgagagtgggccatacccaggaaagaccattctg

SEQ ID NO: 612212 - DNA, 120 bp, Artificial Sequence
  ENSG00000176428_12 (sequence is synthesized)
tatttttctgtccctgtctccttagaatggaagctttttgagggcaggtccttgtctttgtacgttctgtccccagccccgcctcttaggggccgtcaataaatgtgatgatgaggatga

SEQ ID NO: 612213 - DNA, 120 bp, Artificial Sequence
  ENSG00000176435_0 (sequence is synthesized)
agacacagctctgcgtcctcgagcgggacagatccaagttgggagcagctctgcgtgcggggcctcagagaatgaggccggcgttcgccctgtgcctcctctggcaggcgctctggcccg

SEQ ID NO: 612214 - DNA, 120 bp, Artificial Sequence
  ENSG00000176435_1 (sequence is synthesized)
ggccgggcggcggcgaacaccccactgccgaccgtgctggctgctcggcctcgggggcctgctacagcctgcaccacgctaccatgaagcggcaggcggccgaggaggcctgcatcctgc

SEQ ID NO: 612215 - DNA, 120 bp, Artificial Sequence
  ENSG00000176435_2 (sequence is synthesized)
gaggtggggcgctcagcaccgtgcgtgcgggcgccgagctgcgcgctgtgctcgcgctcctgcgggcaggcccagggcccggagggggctccaaagacctgctgttctgggtcgcactgg

SEQ ID NO: 612216 - DNA, 120 bp, Artificial Sequence
  ENSG00000176435_3 (sequence is synthesized)
agcgcaggcgttcccactgcaccctggagaacgagcctttgcggggtttctcctggctgtcctccgaccccggcggtctcgaaagcgacacgctgcagtgggtggaggagccccaacgct

SEQ ID NO: 612217 - DNA, 120 bp, Artificial Sequence
  ENSG00000176435_4 (sequence is synthesized)
cctgcaccgcgcggagatgcgcggtactccaggccaccggtggggtcgagcccgcaggctggaaggagatgcgatgccacctgcgcgccaacggctacctgtgcaagtaccagtttgagg

SEQ ID NO: 612218 - DNA, 120 bp, Artificial Sequence
  ENSG00000176435_5 (sequence is synthesized)
tcttgtgtcctgcgccgcgccccggggccgcctctaacttgagctatcgcgcgcccttccagctgcacagcgccgctctggacttcagtccacctgggaccgaggtgagtgcgctctgcc

SEQ ID NO: 612219 - DNA, 120 bp, Artificial Sequence
  ENSG00000176435_6 (sequence is synthesized)
ggggacagctcccgatctcagttacttgcatcgcggacgaaatcggcgctcgctgggacaaactctcgggcgatgtgttgtgtccctgccccgggaggtacctccgtgctggcaaatgcg

SEQ ID NO: 612220 - DNA, 120 bp, Artificial Sequence
  ENSG00000176435_7 (sequence is synthesized)
cagagctccctaactgcctagacgacttgggaggctttgcctgcgaatgtgctacgggcttcgagctggggaaggacggccgctcttgtgtgaccagtggggaaggacagccgacccttg

SEQ ID NO: 612221 - DNA, 120 bp, Artificial Sequence
  ENSG00000176435_8 (sequence is synthesized)
cgcagagaacatggccaatcagggtcgacgagaagctgggagagacaccacttgtccctgaacaagacaattcagtaacatctattcctgagattcctcgatggggatcacagagcacga

SEQ ID NO: 612222 - DNA, 120 bp, Artificial Sequence
  ENSG00000176435_9 (sequence is synthesized)
tgtctacccttcaaatgtcccttcaagccgagtcaaaggccactatcaccccatcagggagcgtgatttccaagtttaattctacgacttcctctgccactcctcaggctttcgactcct

SEQ ID NO: 612223 - DNA, 120 bp, Artificial Sequence
  ENSG00000176435_10 (sequence is synthesized)
cctctgccgtggtcttcatatttgtgagcacagcagtagtagtgttggtgatcttgaccatgacagtactggggcttgtcaagctctgctttcacgaaagcccctcttcccagccaagga

SEQ ID NO: 612224 - DNA, 120 bp, Artificial Sequence
  ENSG00000176435_11 (sequence is synthesized)
aggagtctatgggcccgccgggcctggagagtgatcctgagcccgctgctttgggctccagttctgcacattgcacaaacaatggggtgaaagtcggggactgtgatctgcgggacagag

SEQ ID NO: 612225 - DNA, 120 bp, Artificial Sequence
  ENSG00000176435_12 (sequence is synthesized)
cagagggtgccttgctggcggagtcccctcttggctctagtgatgcatagggaaacaggggacatgggcactcctgtgaacagtttttcacttttgatgaaacggggaaccaagaggaac

SEQ ID NO: 612226 - DNA, 120 bp, Artificial Sequence
  ENSG00000176435_13 (sequence is synthesized)
ttacttgtgtaactgacaatttctgcagaaatcccccttcctctaaattccctttactccactgaggagctaaatcagaactgcacactccttccctgatgatagaggaagtggaagtgc

SEQ ID NO: 612227 - DNA, 120 bp, Artificial Sequence
  ENSG00000176435_14 (sequence is synthesized)
ctttaggatggtgatactgggggaccgggtagtgctggggagagatattttcttatgtttattcggagaatttggagaagtgattgaacttttcaagacattggaaacaaatagaacaca

SEQ ID NO: 612228 - DNA, 120 bp, Artificial Sequence
  ENSG00000176435_15 (sequence is synthesized)
atataatttacattaaaaaataatttctaccaaaatggaaaggaaatgttctatgttgttcaggctaggagtatattggttcgaaatcccagggaaaaaaataaaaataaaaaattaaag

SEQ ID NO: 612229 - DNA, 120 bp, Artificial Sequence
  ENSG00000176435_16 (sequence is synthesized)
gattgttgataacccagactcaaatatcattgccttcctccaggagtaattaggaacagctgagggcatgctgggagtaagcagcaagagtgcattctgcttttagattgagggagaggt

SEQ ID NO: 612230 - DNA, 120 bp, Artificial Sequence
  ENSG00000176438_0 (sequence is synthesized)
gcccctgcaggtgccatgactcagcagccccaggacgactttgacaggagcgtggaggatgcccaggcatggatgaaggctgtgcaggaccagctgcaggtcaatgacaacacgcaggga

SEQ ID NO: 612231 - DNA, 120 bp, Artificial Sequence
  ENSG00000176438_1 (sequence is synthesized)
ccccgcgcggccctggaggccaggctgtgggagaccgagaaaatatgccagctggagcccgaggggcgtgtgagggtggacctcgtgctacggatggctgaagccctcttggcatgctgc

SEQ ID NO: 612232 - DNA, 120 bp, Artificial Sequence
  ENSG00000176438_2 (sequence is synthesized)
cctggggaccagaagcccgggatcctggcccggctgaaggacatcaaggcccaatgggaggagacagtcacctacatgactcactgtcacagccgcatcgagtgggtgtggctgcactgg

SEQ ID NO: 612233 - DNA, 120 bp, Artificial Sequence
  ENSG00000176438_3 (sequence is synthesized)
agcgagtacctgctggcccgagatgagttctaccgctggttccagaagatgatggtcacactggagccccacatcgagctccagctgggcctgaaggagaagcagtggcagctgagccac

SEQ ID NO: 612234 - DNA, 120 bp, Artificial Sequence
  ENSG00000176438_4 (sequence is synthesized)
gcccaggtgctgctgcacaacgtggacaaccaggcggtgctcctggaccggctgctggaggaggcagcctccctgttcaacaggatcggggaccccagcgtggacgaagatgcccagaag

SEQ ID NO: 612235 - DNA, 120 bp, Artificial Sequence
  ENSG00000176438_5 (sequence is synthesized)
agaatgaaggctgagtacgatgcagtgaaggccaaggcccagaagcgtgtagatctgctggagcaggtggcccgggagcatgaggagtaccaggcaggtgtggacgagttccaactgtgg

SEQ ID NO: 612236 - DNA, 120 bp, Artificial Sequence
  ENSG00000176438_6 (sequence is synthesized)
ctgaaggcggtggtggagaaggtgaatggctgcctggggcggaactgcaagctgcccatcacgcagcgcctctccacactgcaggacattgccaaagattttcccaggggcgaggagtct

SEQ ID NO: 612237 - DNA, 120 bp, Artificial Sequence
  ENSG00000176438_7 (sequence is synthesized)
ctggagacgctggaggagcagtctgcgggtgtcattcggaacacctctcctttgggtgcagagaagatcaccggagaactggaagagatgaggaaagttctggagaagctgcgcgccctc

SEQ ID NO: 612238 - DNA, 120 bp, Artificial Sequence
  ENSG00000176438_8 (sequence is synthesized)
tgggaggaggaggaggagcggctgcggggcctgctccggtccaggggagcctgggagcagcagattaagcagctggaggctgagctcagtgagttcaggatggtcctgcagaggctggcc

SEQ ID NO: 612239 - DNA, 120 bp, Artificial Sequence
  ENSG00000176438_9 (sequence is synthesized)
caggagggcctgcagcctgcggcgaaagcggggaccgaggacgagctggtggcacactggagacgctactcggcaacacgggcggcgctggcctcggaggagccccgggtggaccggctg

SEQ ID NO: 612240 - DNA, 120 bp, Artificial Sequence
  ENSG00000176438_10 (sequence is synthesized)
caagcccagctgaaggagctcatcgtcttccctcacaacctgaagccactctctgatagtgtcatcgctaccatccaggagtatcagagcctgaaggtgaagagcgcgaggctgcgcaat

SEQ ID NO: 612241 - DNA, 120 bp, Artificial Sequence
  ENSG00000176438_11 (sequence is synthesized)
gccgcggcggtggagctgtggcagcatttccagcggcctctgcaggatctgcagctgtggaaggccctggcccagcggctcttggaggtcactgccagcctgccggacctgccttccctt

SEQ ID NO: 612242 - DNA, 120 bp, Artificial Sequence
  ENSG00000176438_12 (sequence is synthesized)
cacaccttcctgccccagatcgaggcagccctgatggaaagctcccgcctgaaagagctgctgacgatgctgcagctgaagaaagacctcctgattggcatctttggccaggagagagcc

SEQ ID NO: 612243 - DNA, 120 bp, Artificial Sequence
  ENSG00000176438_13 (sequence is synthesized)
ggacagagacctgctgcataacagcctcctgcagaggaaaagcaaactgcagagcctgctcgctcagcacaaagactttggagcagcttttgagcccctgcagaggaagctcttggacct

SEQ ID NO: 612244 - DNA, 120 bp, Artificial Sequence
  ENSG00000176438_14 (sequence is synthesized)
ccaggtcagggtccaagccgagaaggggcttcagcgggaccttcctggaaaacaggcccagctctcaaggttgcaggggctgcaggaagaggggctggacttgggggcacagatggaggc

SEQ ID NO: 612245 - DNA, 120 bp, Artificial Sequence
  ENSG00000176438_15 (sequence is synthesized)
tgcaaggcctctggtccaggagaaccccaaccaccagcacaaaatggaccagctttcctccgacttccaggccctgcagaggtctctggaggaccttgtggacaggtgtcggcagagtgt

SEQ ID NO: 612246 - DNA, 120 bp, Artificial Sequence
  ENSG00000176438_16 (sequence is synthesized)
gcaggagcactgcaccttcagccaccagctgctggagctgcggcagtggatcgttgtgaccacgcaaaagctggaggcacaccggggagaggcgggcccgggggatgccgagtcccaaga

SEQ ID NO: 612247 - DNA, 120 bp, Artificial Sequence
  ENSG00000176438_17 (sequence is synthesized)
ggccgagtttgagaggctggtggcagaattcccggagaaggaggcccagctgtccctggtggaagcgcagggctggctggtgatggagaagtcttctccggagggtgctgccgtggtgca

SEQ ID NO: 612248 - DNA, 120 bp, Artificial Sequence
  ENSG00000176438_18 (sequence is synthesized)
ggaggagctcagggagctggcagagtcgtggcgggccttgaggctgctggaagaaagtctgctgagcctcatcagaaactggcatctgcagaggatggaagtggattcggggaagaaaat

SEQ ID NO: 612249 - DNA, 120 bp, Artificial Sequence
  ENSG00000176438_19 (sequence is synthesized)
ggttttcaccaacaacatcccaaagtcaggatttctcatcaatcccatggatcctattcccaggcatcgtcgacgcgcaaatcttctacaggaagaagaagggagccatgaagatttctc

SEQ ID NO: 612250 - DNA, 120 bp, Artificial Sequence
  ENSG00000176438_20 (sequence is synthesized)
ccagctcctgaggaactttgggcagtggttgcaggtggaaaactccaagctggttagaatcatcgcaatgagaacttctacagctgaggacttgaggaccagaaaatcgaagctgcagga

SEQ ID NO: 612251 - DNA, 120 bp, Artificial Sequence
  ENSG00000176438_21 (sequence is synthesized)
gctggaggctcgggtgccagaaggtcagcatctctttgagaacctccttcgtctcgggccagcaagggggacctcggatgagctggaagatctgcgctaccagtggatgctgtacaagtc

SEQ ID NO: 612252 - DNA, 120 bp, Artificial Sequence
  ENSG00000176438_22 (sequence is synthesized)
caagctgaaggactctggccacctgctgacacaaagttctccaggggagccgactggattccaaaagactcggcggtggcgaggactgggctccctcttccggagggcgtgctgtgtggc

SEQ ID NO: 612253 - DNA, 120 bp, Artificial Sequence
  ENSG00000176438_23 (sequence is synthesized)
gctcccactgcagctgcttctgctgctgttcctcctcctgctgttcctgctcccaatcagggaagaggaccgcagctgcaccctggccaacaacttcgcccgctccttcacgctcatgct

SEQ ID NO: 612254 - DNA, 120 bp, Artificial Sequence
  ENSG00000176438_24 (sequence is synthesized)
gcgctacaatggcccaccacccacctaacccactggggcacacaggtgactttctcctccaacctccatcagtcccagggcccctcctgaggatgctcgccagggaaactggaaacaggg

SEQ ID NO: 612255 - DNA, 120 bp, Artificial Sequence
  ENSG00000176438_25 (sequence is synthesized)
gcagggcaaagactgcagagctgcatccatatcagtgctgtgtcagcgttcccagaagacacttactttttatacagtgttgtcttagtctatttatactaaatgtgtactacatgtgac

SEQ ID NO: 612256 - DNA, 120 bp, Artificial Sequence
  ENSG00000176438_26 (sequence is synthesized)
tagggaataatgtctagaatttttatatgatctgtatgtaaatgctcagtatgtataatttcatatacgagttctatttggagttgggaaaattcctagcaatggctccctccaatggga

SEQ ID NO: 612257 - DNA, 120 bp, Artificial Sequence
  ENSG00000176438_27 (sequence is synthesized)
aaaaaaactgatgattatttatttagaaagaaaacatatcactgtcataaatggaaaagatggtgccaattccaaataggtagataaccacacaaataaatacaatgaaaccgaacggag

SEQ ID NO: 612258 - DNA, 120 bp, Artificial Sequence
  ENSG00000176438_28 (sequence is synthesized)
ccatttggttctatttggctccacactgtttccagctgaaggcatggaaaggaagataaacaaatgtcagaaagtgttcaagacagaagcacccaacagagactttctccttgacttaat

SEQ ID NO: 612259 - DNA, 120 bp, Artificial Sequence
  ENSG00000176438_29 (sequence is synthesized)
caaatggcttgaaaaagacttatggggaaggaatagggttctcaggttgtgagtccatgctacttaaggcagacagtccagcccttgggaaggcccctctctggctctaacgcaggactc

SEQ ID NO: 612260 - DNA, 120 bp, Artificial Sequence
  ENSG00000176438_30 (sequence is synthesized)
caggaatcagtgttttgcagggcagtcccaggtctgctctggaaaatgcagcaactgtattctttttccctgcctgtttttccctcacccctctaccctcttcaggacattgccaaagat

SEQ ID NO: 612261 - DNA, 120 bp, Artificial Sequence
  ENSG00000176438_31 (sequence is synthesized)
ttcagatgtaatgaaaggcctctgagctgcaacgtggaagagcgccatagaccctcacttggtgcccagcgactcttgctttatgcgtaatgagaacaagtatgcttgtctagttttaac

SEQ ID NO: 612262 - DNA, 120 bp, Artificial Sequence
  ENSG00000176438_32 (sequence is synthesized)
aaccacaaagagtagctgccacgtgtcagaagtagaaatggcaatgaccagaggcaggttcaatgatagcagtgacaagtgacagagtgatatcgagggagaaaaagaagagctgcagag

SEQ ID NO: 612263 - DNA, 120 bp, Artificial Sequence
  ENSG00000176438_33 (sequence is synthesized)
agcagatccccgaactaagaaagcacagctgtgtggaggcattgcatgccggagccctaaccccagctctcagcggcttctgatcacacagacctatgaggactgtccctggtgatgaca

SEQ ID NO: 612264 - DNA, 120 bp, Artificial Sequence
  ENSG00000176438_34 (sequence is synthesized)
ccgagcccccatgaaacggtgagatcctgctctgtgtgtttcattcagggagaaagggaagaagacaagcttgatttttaagatttccatgcagaatggtgaggcacactcggtgggcag

SEQ ID NO: 612265 - DNA, 120 bp, Artificial Sequence
  ENSG00000176438_35 (sequence is synthesized)
cacccactggcagtgcccaggaaagatgtgtttcctctgttgctcctggactgagttttcatcgtcgagagctcgagctgcaggtgagaagggaagcatctgccacgccaggggccaggg

SEQ ID NO: 612266 - DNA, 120 bp, Artificial Sequence
  ENSG00000176438_36 (sequence is synthesized)
atcgagggtccaggacagaggtgagagaatctgctttggagttcagcctgtctcaagggctctccttccgcttcccagaaaagactctggagacagcaggtctatggggccaagaaggtc

SEQ ID NO: 612267 - DNA, 120 bp, Artificial Sequence
  ENSG00000176438_37 (sequence is synthesized)
tcatgtgcatccccatatgggactagggcccaggccacccaaaaccaggccctctccagccaggtgtaggcgagctgggctccatgcaccacctgggctggggccgcggtgactccatgt

SEQ ID NO: 612268 - DNA, 120 bp, Artificial Sequence
  ENSG00000176438_38 (sequence is synthesized)
gagttcccgaggccagaaactcatcccttccttgccagggaactctgggatggttcctaagtgctctacaactggatcatgtttttcctaaatcaacactaaattttcccctttaaaaaa

SEQ ID NO: 612269 - DNA, 120 bp, Artificial Sequence
  ENSG00000176438_39 (sequence is synthesized)
gtacttaatgcccactctctacaaatggattttgtctgttcaactacaaatacgaggggatttcctcggaccttctgtccggctttggaatcataaggtattatagacccagaaaggccc

SEQ ID NO: 612270 - DNA, 120 bp, Artificial Sequence
  ENSG00000176438_40 (sequence is synthesized)
tttaagtagaggggaaactgaggacctaagagggcctgatacccagcaccattgctgtctcacacacactgaccctttgcctttcactgtgagctctgcccttggggacccgggtcctag

SEQ ID NO: 612271 - DNA, 120 bp, Artificial Sequence
  ENSG00000176438_41 (sequence is synthesized)
gcaactaggacatttcaccggcaggaaacccgtgctgccaaggagagcccttggggctgactcagaaagcgtacttttttttttcttttaactcgtctgtatttgttacaactttaagca

SEQ ID NO: 612272 - DNA, 120 bp, Artificial Sequence
  ENSG00000176438_42 (sequence is synthesized)
atttgttacaactttaagcagaatgtgacttgggcactatatttccatccacaagcctggctctgagttattattattattgttattataattattttgagatggagtttcgctcttttt

SEQ ID NO: 612273 - DNA, 120 bp, Artificial Sequence
  ENSG00000176438_43 (sequence is synthesized)
catttttttttttttttgaatagctttatgataagctgtaggcttataattatgctcctccaaacaacacttttctttggaaaacaagccctgtagactctccatccttccatcaagttc

SEQ ID NO: 612274 - DNA, 120 bp, Artificial Sequence
  ENSG00000176438_44 (sequence is synthesized)
cttccctcaagctgcttcagtttaacttatttctacaagactagtacatgcagaattggcaactacaggggatgaaaagttcaaaaagtagatcctacaaccctgtgacttggtttccaa

SEQ ID NO: 612275 - DNA, 120 bp, Artificial Sequence
  ENSG00000176438_45 (sequence is synthesized)
atatctagagaaatttgtgatttcatggaagaagagaaagcacacttttctccagatatctggaaaccaagccatagggccgttctctgcaggcgaccaccttactggaaaatcaggagc

SEQ ID NO: 612276 - DNA, 120 bp, Artificial Sequence
  ENSG00000176438_46 (sequence is synthesized)
tgagtgagcccaggcagccaagcccagatgtccagtcctggaagtcagagcagtggcagggtgggtgggtgggggggccttgccaggtgtccactttcctatgtcacaggtgagaaagct

SEQ ID NO: 612277 - DNA, 120 bp, Artificial Sequence
  ENSG00000176438_47 (sequence is synthesized)
gaggcccagaatggggaagaaactgatccatggccacacagtgagaggcagcaaggccagagcccaactggccaccatggccctcaggtggtaccctgctcattgtggtatgatccgctc

SEQ ID NO: 612278 - DNA, 120 bp, Artificial Sequence
  ENSG00000176438_48 (sequence is synthesized)
atgtcagcaactacatgaaaaaaacagccactgggcatgtatgcagcctgtcacatataccacatgttggggaaggagaagctggaacatgcgggcgggggtgggaatatctacctatat

SEQ ID NO: 612279 - DNA, 120 bp, Artificial Sequence
  ENSG00000176438_49 (sequence is synthesized)
tttttaaattttgataatgatgccatcaagtctgtttgtttgcataactgttttttaaaaaagaattgatattttcagtattttcatataaatatacttgtaatataacgtaacagccca

SEQ ID NO: 612280 - DNA, 120 bp, Artificial Sequence
  ENSG00000176438_50 (sequence is synthesized)
gttactggtgcttccaagcacaagtgcaatctcctttgcttaaaggagagccaggcaattattcttatgactttagtttccagcctctttaacagccatgcagagctttaaggtgctact

SEQ ID NO: 612281 - DNA, 78 bp, Artificial Sequence
  ENSG00000176438_51 (sequence is synthesized)
gagggaaggagaggagggagaaaggaccaccagtgggtcggttgatgaattagttatccctgcttacctgtccctccc

SEQ ID NO: 612282 - DNA, 120 bp, Artificial Sequence
  ENSG00000176438_52 (sequence is synthesized)
cggttgatgaattagttatccctgcttacctgtccctcccacccctttctttcttagcccgttctctgcatgtggaaaggcacatgcagcacccagagggtgtttaaaaagaaaagctgg

SEQ ID NO: 612283 - DNA, 120 bp, Artificial Sequence
  ENSG00000176438_53 (sequence is synthesized)
gagcgggagggatgggcaggtactgacagcagacgaggcgaggagaccctgggaggtgcccagtggtggcgggacagagggaacaccgacaagggagacaaagaatgtgctcgtttggtg

SEQ ID NO: 612284 - DNA, 120 bp, Artificial Sequence
  ENSG00000176438_54 (sequence is synthesized)
ctcgtgggtgcttgagccccttgggcggcactttgcagccttgctttatgtaattcccacatcgacacctgcccccagggtttgatactgttttacccccatgtttgagatggaaccctg

SEQ ID NO: 612285 - DNA, 120 bp, Artificial Sequence
  ENSG00000176438_55 (sequence is synthesized)
aggcttaaagatataaagacccttgctcatgctgaagtgggtccaaacccacaacatggggcaatgaggaccccaaagcccaggctggaggggggcttcaggctggttctaccaggttgc

SEQ ID NO: 612286 - DNA, 120 bp, Artificial Sequence
  ENSG00000176438_56 (sequence is synthesized)
agtctctgtagcctctgggaatggagttccctgggcaagcaggcagaactctctgcccatcagctcgcctgggacatggccagagcggagcatccaaatgtttccctgagggactgccct

SEQ ID NO: 612287 - DNA, 120 bp, Artificial Sequence
  ENSG00000176438_57 (sequence is synthesized)
atcattatcttcacattgctcacctggaagatgagcccctctaatgtctcatgatgaggtcctcggtcatgaatgacagaactccacacccccaatgcccagcacaggataagagcttca

SEQ ID NO: 612288 - DNA, 120 bp, Artificial Sequence
  ENSG00000176438_58 (sequence is synthesized)
gctgtggtttgttgaattacattaaaaacccaaaggcaaatgtgtttcctgacacccgactcccttccagaggaaatgggtcaaggatgacctgacccaattccatctctcaggccccgt

SEQ ID NO: 612289 - DNA, 120 bp, Artificial Sequence
  ENSG00000176438_59 (sequence is synthesized)
ttgcttcaggcagctggctggagttccctgcagggaccgggggtccaaagatgcttgtctccgggcatcttcaggggaaggaagctggggaccctctgcaccctgggggccaaggagaat

SEQ ID NO: 612290 - DNA, 120 bp, Artificial Sequence
  ENSG00000176438_60 (sequence is synthesized)
gacaggcagagggcaggaaaaggcctgaaggcgggtggtttgtgctggatgttccctaatggattttacagctggcaaactgggaccggtggcatcatcctgccctgccttgcaggggat

SEQ ID NO: 612291 - DNA, 120 bp, Artificial Sequence
  ENSG00000176438_61 (sequence is synthesized)
gggaggctggggctgcccacagttagggagtaaagaggggatcttatctcttccattagactggagccaggcctgactgggaagctgggaggctttgcagaagctttgaggaactgcact

SEQ ID NO: 612292 - DNA, 120 bp, Artificial Sequence
  ENSG00000176438_62 (sequence is synthesized)
ttatggtggtctggctggagagggcggacggggaagtgggccagagggagtcaaaggccagaggtgatgtcaggcttgatttactgaactgtgtgcttaaaagtggttaagatgctaaat

SEQ ID NO: 612293 - DNA, 120 bp, Artificial Sequence
  ENSG00000176438_63 (sequence is synthesized)
tttatgttatgtttattttaccacaatttgagggtgagaggagagagtgagagcaaaagagacagagagaagagagagaaaaggaggaagggagggagggagggagggatagagagagag

SEQ ID NO: 612294 - DNA, 120 bp, Artificial Sequence
  ENSG00000176438_64 (sequence is synthesized)
aaaaagagaatgggaatggcaggctgtgccttcatggttcccaactttcctctgaggacaagcgctagtggcaaagctttcactgaccaaaggcaagtgaaacaatacgagggaacaact

SEQ ID NO: 612295 - DNA, 120 bp, Artificial Sequence
  ENSG00000176438_65 (sequence is synthesized)
tgagtttttctttccataggatttattttgcccaaacgctggctcttcattctgggattatgtccctcctacttcaagggtgctcaatggcctttaggaaatgagggataggtaaaggtg

SEQ ID NO: 612296 - DNA, 120 bp, Artificial Sequence
  ENSG00000176438_66 (sequence is synthesized)
gctctgtcttctttgatggtttctattgtgttttgggagccctcattggacaaaataaaaagttgccaactctatgttggttttgctccccatacagtattcttcctggaaaaacatgct

SEQ ID NO: 612297 - DNA, 120 bp, Artificial Sequence
  ENSG00000176438_67 (sequence is synthesized)
gtctgaaagtttgggaacccaggagatggttgggagaagagagcagcttgaggattgcttagtgcaggagtccccgagggagagaaggaaagagaaatgggaagagggacatcgtggaaa

SEQ ID NO: 612298 - DNA, 120 bp, Artificial Sequence
  ENSG00000176438_68 (sequence is synthesized)
gttgtggcaactgggttcaggggaggccaggagcctgccagctgtggcctctaaaaaaataaaacccaggtgctcactggccctgccttcccactggccattcggatgctgtccggggtc

SEQ ID NO: 612299 - DNA, 120 bp, Artificial Sequence
  ENSG00000176438_69 (sequence is synthesized)
tgcggctttctctcccctggttggtgggcagaagtgccctgtgcctctttgcatcttaatccaatgcaacaagcattctccagcctgtgccaggctttgtgctgggagattcggggtgaa

SEQ ID NO: 612300 - DNA, 120 bp, Artificial Sequence
  ENSG00000176438_70 (sequence is synthesized)
caaagcccagtccctgccctcagggagcttgcagacgaagaaaagggtttgtgccattgaagatgcccaacgggattgcagtcattgcccttgactttgcccatctgcctttccagaggg

SEQ ID NO: 612301 - DNA, 120 bp, Artificial Sequence
  ENSG00000176438_71 (sequence is synthesized)
ggcaggcccactgtcacagaaactggaagagccacacaggggagacagtgggagagctcggaacagggcatgagagtgtcttgctgcctcttggaggccaccattgtgactatgaaccat

SEQ ID NO: 612302 - DNA, 120 bp, Artificial Sequence
  ENSG00000176438_72 (sequence is synthesized)
accgggcagaggaagtgggtcaaggaggccagggcagctgggccgggcagggagaggacctgggcatggcagaggaggggaaaatagactgacccagcctcaggaggtcagaagtgtgtt

SEQ ID NO: 612303 - DNA, 120 bp, Artificial Sequence
  ENSG00000176438_73 (sequence is synthesized)
gggctgtgctgggtcacagaacaacacagcttgggaggctcctggaggcttcaaggggaggcttaaggctaaggctgtggatgttgattgtcgtgtccattactagcccaattattagtc

SEQ ID NO: 612304 - DNA, 120 bp, Artificial Sequence
  ENSG00000176438_74 (sequence is synthesized)
tgtcttcctggtaaaaatgtgtggttggaaatgccaaactgagaagcccacttttccccactggggatcatctgggttggcgtgtccatgctcaaggataatctcttgccctttcctgcc

SEQ ID NO: 612305 - DNA, 120 bp, Artificial Sequence
  ENSG00000176438_75 (sequence is synthesized)
ccctgcctaggatttctccccagaggagaggagctgagggacccccccagggaggctgtgcctgtggctgtcaccctatgatgccagcggcttcctttggattctgtaatcagagtgttt

SEQ ID NO: 612306 - DNA, 120 bp, Artificial Sequence
  ENSG00000176438_76 (sequence is synthesized)
ttcaccggtgtctgcagtgattgccaggaagcctctgtgtccatagcccagcgggatcctgccctaattccctctctcatgggcactcagctaattctcaccccaatctcattgtcacca

SEQ ID NO: 612307 - DNA, 120 bp, Artificial Sequence
  ENSG00000176438_77 (sequence is synthesized)
gtctaggtcagcattggagggaggtgtgggcaactacagcccttgctgcttccaagacagacatcaaaatagttgatcaccaacctttcccactccccactctctgacccaatggacctc

SEQ ID NO: 612308 - DNA, 120 bp, Artificial Sequence
  ENSG00000176438_78 (sequence is synthesized)
acagtcctcaaaactactccaagctactgccaatcaatcattttcttatgtgagcaaaacctgtttgacatccttacacctgtaccagccctctcagaaagctctcaattctggtctcct

SEQ ID NO: 612309 - DNA, 120 bp, Artificial Sequence
  ENSG00000176438_79 (sequence is synthesized)
ttttttctttttttttttttgaatttatgttaaaattaggatgttcccaatcaaaaaatcatttttccttcatctagtaattgggtgagacaaactagccccagaaagcagacaatggga

SEQ ID NO: 612310 - DNA, 120 bp, Artificial Sequence
  ENSG00000176438_80 (sequence is synthesized)
gggatgaactgccaagtaggacttttaggggaggcaaaatggattaggaaatgctaagttctctgttgaaggaggatacctggattcttcaggctgtcagagttggagggcttccataga

SEQ ID NO: 612311 - DNA, 120 bp, Artificial Sequence
  ENSG00000176438_81 (sequence is synthesized)
ctgtcttgttccaactttgtacccattttacaggttaggactctgagacctcagcagttcttgtttggccagtgagctcagggagttagttccaggagtgggggtcggtctctgcaccca

SEQ ID NO: 612312 - DNA, 120 bp, Artificial Sequence
  ENSG00000176438_82 (sequence is synthesized)
ctggatgacagcttgatactgctcagcactagacagggttgagttggaactctgctgctgatgggctgtgtgacattggtccagttccttaccacctccccccacctattggtaaggagg

SEQ ID NO: 612313 - DNA, 120 bp, Artificial Sequence
  ENSG00000176438_83 (sequence is synthesized)
gaagtcagccctggagcgttcagtgctccctgaaatattaggtatcctaggattgtgcgcgtgggctcgcatctggaagagaaatccctagattcagccacgagtaacagaatccctcct

SEQ ID NO: 612314 - DNA, 120 bp, Artificial Sequence
  ENSG00000176438_84 (sequence is synthesized)
cccccgaccaactttggcttaaaccagtcagagactttacttttctctcctcctgagaagtctagatataggcggttgctggcatcgtctcctcaggttatggatgtcagagccaaggct

SEQ ID NO: 612315 - DNA, 120 bp, Artificial Sequence
  ENSG00000176438_85 (sequence is synthesized)
ttgcaactgtccttcctttatatcacagtcacttcatggcccaggatgcttgctgtacctccaatttttcatctgggttccaggtaggaagaaggggagtgaactagacgaatctgccct

SEQ ID NO: 612316 - DNA, 120 bp, Artificial Sequence
  ENSG00000176438_86 (sequence is synthesized)
cctcattagcagctttcccagaagctccaccagccacttccgttctcatctcattggccaggactgtgtcacatgttttcccccacatctgcaaggagtctgggaacatgtgccccaaaa

SEQ ID NO: 612317 - DNA, 120 bp, Artificial Sequence
  ENSG00000176438_87 (sequence is synthesized)
agatgggggctcttctagtaagaatgaagggtagggtggcttggagtggcacttcgctgtctctgctacaattggaggagaaaaccagagtttgtcctgaccctccatgccttggctgta

SEQ ID NO: 612318 - DNA, 120 bp, Artificial Sequence
  ENSG00000176438_88 (sequence is synthesized)
tgctccttgtgtggaactcgaaggcatcatccttgcagtgtgagagtgacctgccaccacggcctgccacctcctctcaggggaccctgagtccttcaggtctacccaaaggcattgtag

SEQ ID NO: 612319 - DNA, 120 bp, Artificial Sequence
  ENSG00000176438_89 (sequence is synthesized)
acattcttcctgcaaggcttgggaaccgacaaatagatctgcccagcttgccagagtttttgtgcaggaacagcccctcccgtctttgtcctggcggtgagcacccagggctaagctttt

SEQ ID NO: 612320 - DNA, 120 bp, Artificial Sequence
  ENSG00000176438_90 (sequence is synthesized)
gaacactttctttgtgtttggattcagcccaggcaatgcatatttgctttcatttcttcttgagcttgaggagctcctgggtgcaaatcttggaaaatgaggatctctgagcctttccag

SEQ ID NO: 612321 - DNA, 120 bp, Artificial Sequence
  ENSG00000176438_91 (sequence is synthesized)
gccagctctttgttttgtagcagacaattgaggctttgaaaaggaaagtgggtgggggcaccccacaggtggccctcatcacccaattgccagtgcctgcaggctgcttcagcagaggcc

SEQ ID NO: 612322 - DNA, 120 bp, Artificial Sequence
  ENSG00000176438_92 (sequence is synthesized)
cagagtcaaagaggacttaaaaccagctgtcgtttctcccttagcttctgtgtatgagagaaacgacttctgtttttcaaagtaagaacaaggaggaatttgtttctaaaagaacattaa

SEQ ID NO: 612323 - DNA, 120 bp, Artificial Sequence
  ENSG00000176438_93 (sequence is synthesized)
aacacaggctcgtggtctaaaagcaaatggttcagcaggatgttcagggccttaaagcacagtcagcaggactcagcatctcccagcacctgctctccggttgtcatggtaacatcatcc

SEQ ID NO: 612324 - DNA, 120 bp, Artificial Sequence
  ENSG00000176438_94 (sequence is synthesized)
ccaacccaaccaccttgtccagccgagagacagcaatcataaggagggacctcggtttcccccgaggatcctgggcttcctttctgaaacgcttgcttctgagctcagcaaccaggaaca

SEQ ID NO: 612325 - DNA, 120 bp, Artificial Sequence
  ENSG00000176438_95 (sequence is synthesized)
ccaggccagcccatccccagcacctctgtggagatgagggacaaagtcctacagtccctcttcctgttctgatgagaaagggagggaagaaaacataccccgagcgcctgcaatatggtc

SEQ ID NO: 612326 - DNA, 120 bp, Artificial Sequence
  ENSG00000176438_96 (sequence is synthesized)
atgacactttcaaaaagcctgtgctatggagtcatgatcagaaaccagagtgtggagagggtcagcagcctgcctcagagcagccagctaggcggggagtggtaaatttgggacttgtac

SEQ ID NO: 612327 - DNA, 120 bp, Artificial Sequence
  ENSG00000176438_97 (sequence is synthesized)
ccaggcatgactggctccgagcccagtgctccactctatggaatgttccctgggcctcagttgctttcctttcctttgcaggccgcgggctgctgccactctggcagctggtgagttagc

SEQ ID NO: 612328 - DNA, 120 bp, Artificial Sequence
  ENSG00000176438_98 (sequence is synthesized)
tggagggcaacattccaaagcaggggcagcatgctgctttcctcctgtgcccactcctgcggggaagtccgttgactcccaccgctgaagggagctggcaacaccaggatgaggtcccag

SEQ ID NO: 612329 - DNA, 120 bp, Artificial Sequence
  ENSG00000176438_99 (sequence is synthesized)
gggacgggagcaggtacccactgtctgtctaccttcccactggaaaagcacggacaggccagcccttgcgggggcaggcagaggacagagttggctttgcgcggtctctgcctgctgagc

SEQ ID NO: 612330 - DNA, 120 bp, Artificial Sequence
  ENSG00000176438_100 (sequence is synthesized)
agttccaattcctctcatgggagaaacaaggaggcagtcgcttgtgcatgttccagaagttttactggggaggaggaagcggacagaggaagctgtgtgtgcatgtgaaggggtgggcag

SEQ ID NO: 612331 - DNA, 120 bp, Artificial Sequence
  ENSG00000176438_101 (sequence is synthesized)
ggtgggagggatgcacgcgtatgtgagcatagcatgtgtgagtactacacacatctccatgcagaagcacaactgggcagccctggcttccagctctgggcttcagcacaacagacacca

SEQ ID NO: 612332 - DNA, 120 bp, Artificial Sequence
  ENSG00000176438_102 (sequence is synthesized)
gcctgtggtctctcagaagccagggagaccacatcgggctcaggacgttttacccaaagtccagagtttttatgcctctccctggcattctccataaagaagggaaggtcagatgacccc

SEQ ID NO: 612333 - DNA, 120 bp, Artificial Sequence
  ENSG00000176438_103 (sequence is synthesized)
ttagatctgtgtcatctgggaatttccttgggctggtttagacacgatgccctctttttctcaggatagcagataacctgctttgaaagagggcttaattctgtgggtcctaaattttct

SEQ ID NO: 612334 - DNA, 120 bp, Artificial Sequence
  ENSG00000176438_104 (sequence is synthesized)
cctttctctctctctttctgtgtgtgtgtgttgggaaaatggcaagtttccaataccagctttggaggaacgattacgttttccctccaatttcaagtccgaaagaccagagccctcatt

SEQ ID NO: 612335 - DNA, 120 bp, Artificial Sequence
  ENSG00000176438_105 (sequence is synthesized)
ccaaagccccccacccagatggattttttcgtttcatttgtcatccgtcccatgggagggccccatgtctcctcagaacccatcctggaggcagcaggtcgggtagagtgagtttggcct

SEQ ID NO: 612336 - DNA, 120 bp, Artificial Sequence
  ENSG00000176438_106 (sequence is synthesized)
gctcatgacctccacccctgagattgtgaacaaggatgtctggggcgatgctgagaatgtttttgaagctgctcccagatgacgctgatgatcacaccagattgagtgctgcgatcgcct

SEQ ID NO: 612337 - DNA, 120 bp, Artificial Sequence
  ENSG00000176438_107 (sequence is synthesized)
tgagtccaacctctgcataaacgaggttctcataaacaagttcactctaccctaagctaagtctatgtgagcaaacccacttcatcctttgtacctggagacctggttacactaacctga

SEQ ID NO: 612338 - DNA, 120 bp, Artificial Sequence
  ENSG00000176438_108 (sequence is synthesized)
ttgtacctggagacctggttacactaacctgatactgacctgttcatgtagctggaatggtgtgtttcatgcagtgtggaccaagcaatggcatggggtgtgtgtgtgtgtgtgtgtgtg

SEQ ID NO: 612339 - DNA, 120 bp, Artificial Sequence
  ENSG00000176438_109 (sequence is synthesized)
cttgtgtgtgtatatgtgcatgtagatgctgcataaatgatttttgatgtcaaagacaaacacattccattgttttaaatattctattatgtaaacaatacgcagagggaccatatctac

SEQ ID NO: 612340 - DNA, 120 bp, Artificial Sequence
  ENSG00000176438_110 (sequence is synthesized)
tcttgtcatattatttgtgatggtaaaacatgcatttgcaataaattaagctttctgggaaggcaagcagtattggagccaaacgactgtctcggaacatgtgtgtgttatctcggttca

SEQ ID NO: 612341 - DNA, 120 bp, Artificial Sequence
  ENSG00000176438_111 (sequence is synthesized)
tatcaagtccaaagctaatggagccttccccgccatccagggaggaacaccaggaccccggagtttcttcttagtgctatattttaaagttgcattgacgttttcctccccttccttttg

SEQ ID NO: 612342 - DNA, 120 bp, Artificial Sequence
  ENSG00000176438_112 (sequence is synthesized)
tgcaagttggaagtagcagtgttctaaaagatggtttgacgtttttgctgttgttttatgtttttaaaaatgtatctgctttgtgtttggaaataaaaatctctattttggtctatgaaa

SEQ ID NO: 612343 - DNA, 120 bp, Artificial Sequence
  ENSG00000176438_113 (sequence is synthesized)
gctctcaaggttgcaggtgaggggtctgtgaggcctgaatcactcctgcccaggtgctcagctgcacctggaagcagcgtctccctctagcagtaaccagcaaagcaacagctgccgtga

SEQ ID NO: 612344 - DNA, 120 bp, Artificial Sequence
  ENSG00000176438_114 (sequence is synthesized)
gccagaaatttagacccttagttgagatctgacctttcacctcaacagaacctctgcttatttatctgatggttcctgacctcaaacaactgagtcttgagctcagcaaaatgacaaact

SEQ ID NO: 612345 - DNA, 120 bp, Artificial Sequence
  ENSG00000176438_115 (sequence is synthesized)
gtctttctgtttactcctcagttccaaagtctaacattggtatttgtttttagaattgctttgctaagtattcttaatgagtccagaggtgttcagttaaaccaactttgggattaagaa

SEQ ID NO: 612346 - DNA, 120 bp, Artificial Sequence
  ENSG00000176438_116 (sequence is synthesized)
taaatgttctgaaacgtggactgtaagtaggctgaccgttgatcattgttggctggataaggaacttgatggttttttaaaatgcgcgtgatacaatagttctctctttaaaacccaagc

SEQ ID NO: 612347 - DNA, 120 bp, Artificial Sequence
  ENSG00000176438_117 (sequence is synthesized)
cgcgtgatacaatagttctctctttaaaacccaagcacagctcatacataaattgagagtgttctctagaagacattaaaaatagtgcattttaggccgggagcggtggctcacgcctgt

SEQ ID NO: 612348 - DNA, 120 bp, Artificial Sequence
  ENSG00000176438_118 (sequence is synthesized)
ggtgaaaccctgtctctacttaaaataaaaaattttttttaaaaaagcaaaaaatttagccaggcgtggtggcgggaatctgtaaccccagctacttgggaggccgaggcaccagaatca

SEQ ID NO: 612349 - DNA, 76 bp, Artificial Sequence
  ENSG00000176438_119 (sequence is synthesized)
aaaaaatttagccaggcgtggtggcgggaatctgtaaccccagctacttgggaggccgaggcacattgtgccactg

SEQ ID NO: 612350 - DNA, 120 bp, Artificial Sequence
  ENSG00000176438_120 (sequence is synthesized)
tccagaaggcgggcttgctttctcctacaacatagtaacttctaaatcattctttgtacctctcaatgactggcttttagaggttctcacttggctcagacactgtcccctttgactgtt

SEQ ID NO: 612351 - DNA, 120 bp, Artificial Sequence
  ENSG00000176438_121 (sequence is synthesized)
ttgcatttgctcccagaaagaggcctgaactttgcatttatccaggctagtggctcagccacccatcctatcatgactcttcatgcaggttagcattggggaggggtgatggcccaaagg

SEQ ID NO: 612352 - DNA, 120 bp, Artificial Sequence
  ENSG00000176438_122 (sequence is synthesized)
gagggcttttcaatagacagactccattcccctgccttcggatgctgacttcaacatctgagccgtctccagaccagcctccacgtgtccctcagcccccgggctcaggcacagcaggac

SEQ ID NO: 612353 - DNA, 120 bp, Artificial Sequence
  ENSG00000176438_123 (sequence is synthesized)
ctccagcttcctagtttagcaaatgcagcagccctgtatcctccctgtgtggaaccgagcaaagtgttgatttgaaatctgttacctgtcttcactgcatgagcctccgaggtgttctga

SEQ ID NO: 612354 - DNA, 120 bp, Artificial Sequence
  ENSG00000176438_124 (sequence is synthesized)
acatggtacaactgtccacgcagctgtcgtgcatctcctacctctgcctggtacagggagctccttcagaatgaacaaagggagctcctacctttgctgtgtggctctcatcccacagcg

SEQ ID NO: 612355 - DNA, 120 bp, Artificial Sequence
  ENSG00000176438_125 (sequence is synthesized)
tgctcaggcctacatctataaaactggggcagtggcctggatcccccgtgggatgctaaggtaggggtcgggctggggttggggggttggatttcctgtgcacaaagtaggcagggagac

SEQ ID NO: 612356 - DNA, 120 bp, Artificial Sequence
  ENSG00000176438_126 (sequence is synthesized)
agagtggccaagggtcttcctctccctctggtttctctcactgagatttcaggtattggtttcctatgacttggtgctggacattgtgtttgaaaaattattcgtagaaattaaatgggc

SEQ ID NO: 612357 - DNA, 120 bp, Artificial Sequence
  ENSG00000176438_127 (sequence is synthesized)
ctagaatgacggtatcttactcaagaaagggttttgtttgcttcttccaggtgcctgggggcaggcaggactggtctagggtctccataatttatcttcaaggcttgtattccttggtca

SEQ ID NO: 612358 - DNA, 120 bp, Artificial Sequence
  ENSG00000176438_128 (sequence is synthesized)
tgaagctgggccatccgtctgttggactggcttgcttgcagtgcacttttatcctgagggcatggacctttgcgatcccagcttcatgtgaggtgctgttttcagaatctgcccattttt

SEQ ID NO: 612359 - DNA, 120 bp, Artificial Sequence
  ENSG00000176438_129 (sequence is synthesized)
gatagacccttatcctgagtggctgccaaaaccctaactcagttttgtagctatttcttccagattggcaaatgccctcagggtcaaagttggttagactcacatttctattatttgttt

SEQ ID NO: 612360 - DNA, 120 bp, Artificial Sequence
  ENSG00000176438_130 (sequence is synthesized)
tttaaaactttgatcaagcaattttttcatcttttgtttttgtactcagtgggagggccagtctgaatgaattatttttccgttactggaagaataatgtctccatgtgtcatctcatct

SEQ ID NO: 612361 - DNA, 120 bp, Artificial Sequence
  ENSG00000176438_131 (sequence is synthesized)
aacacttagaatgattatatgagaggagcactgtgttgcctatttcataggtgagaaaactgaggcttgttaatattgagccacttaaggtcatatagctggcctgtctggctccaaact

SEQ ID NO: 612362 - DNA, 120 bp, Artificial Sequence
  ENSG00000176438_132 (sequence is synthesized)
cccagctctttatacctactatagaatcagagaacactcgtgccttttatttatttatgtatttattttggagacaggtgtcgctctgtcacctaggttggagtgcagtggtgcaatcac

SEQ ID NO: 612363 - DNA, 85 bp, Artificial Sequence
  ENSG00000176438_133 (sequence is synthesized)
cccgagtagctaggactacaggcatgcactatgatgcctggctaatttttaaatttttttggggggtactcctggcctcaagtga

SEQ ID NO: 612364 - DNA, 120 bp, Artificial Sequence
  ENSG00000176438_134 (sequence is synthesized)
gtgagccaccgtatcctgcccatgaatgtaaattatatgagactacaggtcccaaggagccccagtgtctgtcctcaggaagaccccaggcctgctgctgatgccttttcatagtgatat

SEQ ID NO: 612365 - DNA, 120 bp, Artificial Sequence
  ENSG00000176438_135 (sequence is synthesized)
taatcaaagtcccttccagctacatcttctgtctactgctgcagacattcccagcaactgaaacaggagaaggcccaccctgggagcagtgcatgctgggcctcttgagggtcttggcgg

SEQ ID NO: 612366 - DNA, 120 bp, Artificial Sequence
  ENSG00000176438_136 (sequence is synthesized)
gggccaggccccaggtcaagaggtgggtaggggtctccagcacaggcccctccctgtctggggcaacatgctctgctctgaggacttggccacgtcctgtctcatttgagcctgccccag

SEQ ID NO: 612367 - DNA, 120 bp, Artificial Sequence
  ENSG00000176438_137 (sequence is synthesized)
ctgtggccaaagagcatttgatcctactccacagaggacctcagagatcccagagtctgcagagccaggccaccagggcagtaggggtatcccttagccagtcagatactcacctctgtg

SEQ ID NO: 612368 - DNA, 120 bp, Artificial Sequence
  ENSG00000176438_138 (sequence is synthesized)
agccactagcagcagctcctgcagggaagagagtgtcggggctgaaagcttcctgctggccccagattggaaaccgaaaccatacaagatgggaaaacttttctgccatgtttcatccat

SEQ ID NO: 612369 - DNA, 120 bp, Artificial Sequence
  ENSG00000176438_139 (sequence is synthesized)
cccttactgcctctaaacaaacttgagctttgtggaaaagaaagttattccttgttattcaaatacatcaaattattcattttcccattcattctttcatccactcctccatttgctgag

SEQ ID NO: 612370 - DNA, 120 bp, Artificial Sequence
  ENSG00000176438_140 (sequence is synthesized)
tgctactttgttccaagaactgtgctcagagctaggatacagccgtgagtaacgcttctgaccctcagagaatttggaatccggcatagagcttttcagtgggcacacagccttgtatta

SEQ ID NO: 612371 - DNA, 120 bp, Artificial Sequence
  ENSG00000176438_141 (sequence is synthesized)
gagcttttcagtgggcacacagccttgtattaaaatgcaggttctgggctgggtatggtgagctacacctacaatctcagaactttgggaggctgggaggccaaggcaggaggattgctt

SEQ ID NO: 612372 - DNA, 120 bp, Artificial Sequence
  ENSG00000176438_142 (sequence is synthesized)
tgggcaagatagcaagaccccatttctataaaaaatatttaaaaattaactggacatggtggtgtgctcctgtagttccagctactcaggggcctgaggtgggaggatcacttgagccca

SEQ ID NO: 612373 - DNA, 120 bp, Artificial Sequence
  ENSG00000176438_143 (sequence is synthesized)
tgcactccagcctggtgacaaagcaagaccccatttcaatcaatcaatcaatcaacaaaaaataatgaaataagataaaatgcagactctgagttagtagatctggctagggcccacaat

SEQ ID NO: 612374 - DNA, 120 bp, Artificial Sequence
  ENSG00000176438_144 (sequence is synthesized)
gttagtagatctggctagggcccacaattcgattctgcatttctaacaagctctcgggataggcccatgctgctgggcccgggagatactcacctctgtgagccactagcagtagcacct

SEQ ID NO: 612375 - DNA, 120 bp, Artificial Sequence
  ENSG00000176438_145 (sequence is synthesized)
gcaagggagagagcatcggggccgaacacttcctgctggccccagaatggaaactaaaatcatacaagatgggtctatttttgtgccatgactatattttataaaagaaaaaaaaaagaa

SEQ ID NO: 612376 - DNA, 120 bp, Artificial Sequence
  ENSG00000176444_0 (sequence is synthesized)
ccgcgggggtgccgggactccggccgcagtgtcgccgccatcacggacttcctgtgggacaagcgcacgggcctcgccgccagaacgatgccgcatcctcgaaggtaccactcctcagag

SEQ ID NO: 612377 - DNA, 120 bp, Artificial Sequence
  ENSG00000176444_1 (sequence is synthesized)
cgaggcagccgggggagttaccgtgaacactatcggagccgaaagcataagcgacgaagaagtcgctcctggtcaagtagtagtgaccggacacgacggcgtcggcgagaggacagctac

SEQ ID NO: 612378 - DNA, 120 bp, Artificial Sequence
  ENSG00000176444_2 (sequence is synthesized)
catgtccgttctcgaagcagttatgatgatcgttcgtccgaccggagggtgtatgaccggcgatactgtggcagctacagacgcaacgattatagccgggatcggggagatgcctactat

SEQ ID NO: 612379 - DNA, 120 bp, Artificial Sequence
  ENSG00000176444_3 (sequence is synthesized)
gacacagactatcggcattcctatgaatatcagcgggagaacagcagttaccgcagccagcgcagcagccggaggaagcacagacggcggaggaggcgcagccggacatttagccgctca

SEQ ID NO: 612380 - DNA, 120 bp, Artificial Sequence
  ENSG00000176444_4 (sequence is synthesized)
tcttcgcacagcagccggagagccaagagtgtagaggacgacgctgagggccacctcatctaccacgtcggggactggctacaagagcgatatgaaatcgttagcaccttaggagagggg

SEQ ID NO: 612381 - DNA, 120 bp, Artificial Sequence
  ENSG00000176444_5 (sequence is synthesized)
accttcggccgagttgtacaatgtgttgaccatcgcaggggtggggctcgagttgccctgaagatcattaagaatgtggagaagtacaaggaagcagctcgacttgagatcaacgtgcta

SEQ ID NO: 612382 - DNA, 120 bp, Artificial Sequence
  ENSG00000176444_6 (sequence is synthesized)
gagaaaatcaatgagaaagaccctgacaacaagaacctctgtgtccagatgtttgactggtttgactaccatggccacatgtgtatctcctttgagcttctgggccttagcaccttcgat

SEQ ID NO: 612383 - DNA, 120 bp, Artificial Sequence
  ENSG00000176444_7 (sequence is synthesized)
ttcctcaaagacaacaactacctgccctaccccatccaccaagtgcgccacatggccttccagctgtgccaggctgtcaagttcctccatgataacaagctgacacatacagacctcaag

SEQ ID NO: 612384 - DNA, 120 bp, Artificial Sequence
  ENSG00000176444_8 (sequence is synthesized)
gtttgtgaattcagactatgagctcacctacaacctagagaagaagcgagatgagcgcagtgtgaagagcacagctgtgcgggtggtagactttggcagtgccacctttgaccatgagca

SEQ ID NO: 612385 - DNA, 120 bp, Artificial Sequence
  ENSG00000176444_9 (sequence is synthesized)
ccatagcaccattgtctccactcgccattaccgagcaccagaagtcatccttgagttgggctggtcacagccttgtgatgtgtggagtataggctgcatcatctttgaatactatgtggg

SEQ ID NO: 612386 - DNA, 120 bp, Artificial Sequence
  ENSG00000176444_10 (sequence is synthesized)
attcaccctcttccagacccatgacaacagagagcatctagccatgatggaaaggatcttgggtcctatcccttcccggatgatccgaaagacaagaaagcagaaatatttttaccgggg

SEQ ID NO: 612387 - DNA, 120 bp, Artificial Sequence
  ENSG00000176444_11 (sequence is synthesized)
tcgcctggattgggatgagaacacatcagctgggcgctatgttcgtgagaactgcaaaccgctgcggcggtatctgacctcagaggcagaggaacaccaccagctcttcgatctgattga

SEQ ID NO: 612388 - DNA, 120 bp, Artificial Sequence
  ENSG00000176444_12 (sequence is synthesized)
aagcatgctagagtatgaaccagctaagcggctgaccttgggtgaagcccttcagcatcctttcttcgcccgccttcgggctgagccgcccaacaagttgtgggactccagtcgggatat

SEQ ID NO: 612389 - DNA, 120 bp, Artificial Sequence
  ENSG00000176444_13 (sequence is synthesized)
cagtcggtgacgatcaggccctgggcccccctgcatcttttatagcagtgggtgtccagtccaggacactggtgcttttttatacaagagaacgagccagagttcactccttcctcctgg

SEQ ID NO: 612390 - DNA, 120 bp, Artificial Sequence
  ENSG00000176444_14 (sequence is synthesized)
ctctctatatacctgtgaatatgtgaaatagtgtaaatatgaaagaacttgtacctatcacttcaacccctgccttgtacataatactattccatccacacagtttccaccctcacctgc

SEQ ID NO: 612391 - DNA, 120 bp, Artificial Sequence
  ENSG00000176444_15 (sequence is synthesized)
cccctcatacggagttggatgggggccgagtgaggtaaccaggtggcatctaccccatgttttataaggaattttgtacagtctttgtgaaataaaataacgtgcttcatttgaccccca

SEQ ID NO: 612392 - DNA, 120 bp, Artificial Sequence
  ENSG00000176444_16 (sequence is synthesized)
gcggagcggagaggccagagccggagaccgagctgggatcgggccccgggcgggggcggtgcgagcggcgccaagcagatcttaggggcggggacggagccggggcgggcgggactgaag

SEQ ID NO: 612393 - DNA, 120 bp, Artificial Sequence
  ENSG00000176444_17 (sequence is synthesized)
ctctgggagtcacctgggtggtggtcctgcccctgctttgccgcctcagtcactctgagtctcggccccgccccgccgcccccgccttcagcactagggacagcgaccagagctgagatg

SEQ ID NO: 612394 - DNA, 120 bp, Artificial Sequence
  ENSG00000176444_18 (sequence is synthesized)
tcagctgaacattggggcatgaacactgaggtgggcactgagtttgcctactttcttggaagctctccgactcttgaagggccctggatctgctttggagatggatgggcacggagcatt

SEQ ID NO: 612395 - DNA, 120 bp, Artificial Sequence
  ENSG00000176444_19 (sequence is synthesized)
tgtgacccccagtgctctccctggcatgttgggcttattgtgttgggagcagcttctccgccccagcggcctccactctttaatggggaccttgcttgtgaactgcctttttcccccaag

SEQ ID NO: 612396 - DNA, 120 bp, Artificial Sequence
  ENSG00000176444_20 (sequence is synthesized)
ggcaaggggagatctgtgtctgcccggaagggcattgtgtagagcatggggttgtgggtgacattggcaacaacaccacttctctgctctgcccatgcctctccctgttcctgttttggg

SEQ ID NO: 612397 - DNA, 120 bp, Artificial Sequence
  ENSG00000176444_21 (sequence is synthesized)
tttggggacttgggattatgcgccgctctctcttctcacaccgatccaccttactgcatctgacgtgttcccttccactgtcccccatcatcgtctgtcccccctggctgggcgcctgtg

SEQ ID NO: 612398 - DNA, 120 bp, Artificial Sequence
  ENSG00000176444_22 (sequence is synthesized)
accggtgacccctctaccacccaccccgcctccctccggcccccgctccgacacctggcttgctccgaccccccctgccccccgacagcagcacagcagccggagagccaagagtgtaga

SEQ ID NO: 612399 - DNA, 120 bp, Artificial Sequence
  ENSG00000176444_23 (sequence is synthesized)
ggacgacgctgagggccacctcatctaccacgtcggggactggctacaagagcgatgtacaagccaaatcgtaacaatcctatagcctgtaatggtcccatagccatcctaacgtcccaa

SEQ ID NO: 612400 - DNA, 120 bp, Artificial Sequence
  ENSG00000176444_24 (sequence is synthesized)
gccaacctgagtcacagcctcttgccttttctcagtggtgttgtttatctgggtggtttgagttgctgttgagaattgacctctgttgtccactcccagctctcacggcccctgggttaa

SEQ ID NO: 612401 - DNA, 120 bp, Artificial Sequence
  ENSG00000176444_25 (sequence is synthesized)
aggtggtgggaatcacgcaggggttttcttcccctgtgaccatctgtatctgttccccttccttcatctccaccccaggttgctgtccccttttttcttccaactcagctcattccccac

SEQ ID NO: 612402 - DNA, 120 bp, Artificial Sequence
  ENSG00000176444_26 (sequence is synthesized)
tcagttctccacattgcctgccttcctggcagctgatccttagcatgcccttttcagtcccatgctcagttctgtttttgtttcccagacccatgacaacagagagcatctagccatgat

SEQ ID NO: 612403 - DNA, 120 bp, Artificial Sequence
  ENSG00000176444_27 (sequence is synthesized)
ggaaaggatcttgggtcctatcccttcccggatgatccgaaagacaaggtgaaccttgagggggcactagttaactcttttccttttctctccacagaattggtctatttcacatcattt

SEQ ID NO: 612404 - DNA, 120 bp, Artificial Sequence
  ENSG00000176444_28 (sequence is synthesized)
tcttttttctttgatacctcctctccccccagttactttcagatggggaaataagggaattgtaacaagggtgaccttctgattcctcaacctccccttcccctctagaaagcagaaata

SEQ ID NO: 612405 - DNA, 120 bp, Artificial Sequence
  ENSG00000176454_0 (sequence is synthesized)
agagcgccgccgccgccgctgctgcagcagcagctgctctgcagagtggtggccggggccagggccggggtgccctccctcccaccttctcccgccatgagccagggaagtccgggggac

SEQ ID NO: 612406 - DNA, 120 bp, Artificial Sequence
  ENSG00000176454_1 (sequence is synthesized)
tgggcccccctagatcccacccccggacccccagcatcccccaaccccttcgtgcatgagttacatctctctcgcctccagagggttaagttctgcctcctgggggcattgctggccccc

SEQ ID NO: 612407 - DNA, 120 bp, Artificial Sequence
  ENSG00000176454_2 (sequence is synthesized)
atccgagtgcttctggcctttatcgtcctctttctcctctggccctttgcctggcttcaagtggccggtcttagtgaggagcagcttcaggagccaattacaggatggaggaagactgtg

SEQ ID NO: 612408 - DNA, 120 bp, Artificial Sequence
  ENSG00000176454_3 (sequence is synthesized)
tgccacaacggggtgctaggcctgagccgcctgctgtttttcctgctgggcttcctccggattcgcgttcgtggccagcgagcctctcgccttcaagcccctgtccttgttgctgcccca

SEQ ID NO: 612409 - DNA, 120 bp, Artificial Sequence
  ENSG00000176454_4 (sequence is synthesized)
cactccactttctttgaccccattgttctgctgccctgtgacctgcccaaagttgtgtcccgagctgagaacctttccgttcctgtcattggagcccttcttcgattcaaccaagccatc

SEQ ID NO: 612410 - DNA, 120 bp, Artificial Sequence
  ENSG00000176454_5 (sequence is synthesized)
ctggtatcccggcatgacccggcttctcgacgcagagtggtggaggaggtccgaaggcgggccacctcaggaggcaagtggccgcaggtgctattctttcctgagggcacctgttccaac

SEQ ID NO: 612411 - DNA, 120 bp, Artificial Sequence
  ENSG00000176454_6 (sequence is synthesized)
aagaaggctttgcttaagttcaaaccaggagccttcatcgcaggggtgcctgtgcagcctgtcctcatccgctaccccaacagtctggacaccaccagctgggcatggaggggtcctgga

SEQ ID NO: 612412 - DNA, 120 bp, Artificial Sequence
  ENSG00000176454_7 (sequence is synthesized)
gtactcaaagtcctctggctcacagcctctcagccctgcagcattgtggatgtggagttccttcctgtgtatcaccccagccctgaggagagcagggaccccaccctctatgccaacaat

SEQ ID NO: 612413 - DNA, 120 bp, Artificial Sequence
  ENSG00000176454_8 (sequence is synthesized)
gttcagagggtcatggcacaggctctgggcattccagccaccgaatgtgagtttgtagggagcttacctgtgattgtggtgggccggctgaaggtggcgttggaaccacagctctgggaa

SEQ ID NO: 612414 - DNA, 120 bp, Artificial Sequence
  ENSG00000176454_9 (sequence is synthesized)
aaaagtgcttcggaaggctgggctgtccgctggctatgtggacgctggggcagagccaggccggagtcgaatgatcagccaggaagagtttgccaggcagctacagctctctgatcctca

SEQ ID NO: 612415 - DNA, 120 bp, Artificial Sequence
  ENSG00000176454_10 (sequence is synthesized)
gacggtggctggtgcctttggctacttccagcaggataccaagggtttggtggacttccgagatgtggcccttgcactagcagctctggatgggggcaggagcctggaagagctaactcg

SEQ ID NO: 612416 - DNA, 120 bp, Artificial Sequence
  ENSG00000176454_11 (sequence is synthesized)
tctggcctttgagctctttgctgaagagcaagcagagggtcccaaccgcctgctgtacaaagacggcttcagcaccatcctgcacctgctgctgggttcaccccaccctgctgccacagc

SEQ ID NO: 612417 - DNA, 120 bp, Artificial Sequence
  ENSG00000176454_12 (sequence is synthesized)
tttgcatgctgagctgtgccaggcaggatccagccaaggcctctccctctgtcagttccagaacttctccctccatgacccactctatgggaaactcttcagcacctacctgcgcccccc

SEQ ID NO: 612418 - DNA, 120 bp, Artificial Sequence
  ENSG00000176454_13 (sequence is synthesized)
acacacctctcgaggcacctcccagacaccaaatgcctcatccccaggcaaccccactgctctggccaatgggactgtgcaagcacccaagcagaagggagactgagtgcctcagcctct

SEQ ID NO: 612419 - DNA, 120 bp, Artificial Sequence
  ENSG00000176454_14 (sequence is synthesized)
caccccctcctcctcagggcagcgctaggggcctcccctatgcctcagccccatctctgctcctgtttgaattttgttattgttgtttggttgttgtttttttaagttgattttaatttt

SEQ ID NO: 612420 - DNA, 120 bp, Artificial Sequence
  ENSG00000176454_15 (sequence is synthesized)
ttgtttggttgatttttttgtaaaaaactattttatatataaatataaatctatatctatatctattaaaaaaaatgaagtccagtcatattgatgttaccattacttgggaaggaaagg

SEQ ID NO: 612421 - DNA, 120 bp, Artificial Sequence
  ENSG00000176454_16 (sequence is synthesized)
gatgaatggttgtaggacgcccgttggaaaatcacaaatgtttccaaggttcgtcctcttggccatagctggatgaatcttcctcttcggacagggctctttcctgcacagaaatcatac

SEQ ID NO: 612422 - DNA, 120 bp, Artificial Sequence
  ENSG00000176454_17 (sequence is synthesized)
tgaggttccatatcctccctcctgctgtcatctcctatatgtacattttaacagacttcctcgtgaacctcttttcagcccattccctcttgctctgtcctcattaaagattaaaaaata

SEQ ID NO: 612423 - DNA, 120 bp, Artificial Sequence
  ENSG00000176454_18 (sequence is synthesized)
gggggtggaaatgggatttaggagccttcatcgcaggggtgcctgtgcagcctgtcctcatccgctaccccaacagtctggtgagtcttagtccaagaaagagtggaaagggggagcaca

SEQ ID NO: 612424 - DNA, 120 bp, Artificial Sequence
  ENSG00000176454_19 (sequence is synthesized)
aatccaccccaaatggaaataagtgaaaactgttggtgctttaatgggatgtgcattgggggctgtgaccagaggtgggatcaggccctctgttcaaaggtgattggccagttccagggg

SEQ ID NO: 612425 - DNA, 120 bp, Artificial Sequence
  ENSG00000176454_20 (sequence is synthesized)
cacagcctctcagccctgcagcattgtggatgtggaggtatggctcccgtgggggcggtgggagaagtacatctcagactcctgaaaccttgggaaaagagggtgggagtggtcatacct

SEQ ID NO: 612426 - DNA, 120 bp, Artificial Sequence
  ENSG00000176454_21 (sequence is synthesized)
cactttgaggttctgataagaattgtgtgtgtctgtgtttcagttccttcctgtgtatcaccccagccctgaggagagcagggaccccaccctctatgccaacaatgttcagagggtcat

SEQ ID NO: 612427 - DNA, 120 bp, Artificial Sequence
  ENSG00000176454_22 (sequence is synthesized)
gggtctcaagaccatcttctcactttccatgtgctcctgaagaggcttccctttcctctctccacagccttcttcagtcttcttcacctcattctgctcttttttaccccaggtgctatt

SEQ ID NO: 612428 - DNA, 120 bp, Artificial Sequence
  ENSG00000176454_23 (sequence is synthesized)
ctttcctgagggcacctgttccaacaagaaggctttgcttaagttcaaaccaggtgaataaaatgatagtgggtggtgggctgtaggaaaaagaagttccagatttggggagggactctg

SEQ ID NO: 612429 - DNA, 120 bp, Artificial Sequence
  ENSG00000176454_24 (sequence is synthesized)
gttttataaatggggtagggaccaactgaaagacaggaaaataaggcccttgatgccattaatcttttatcctcttgccctcattggtatcttcatcccaccttgggtcccagtcccctc

SEQ ID NO: 612430 - DNA, 120 bp, Artificial Sequence
  ENSG00000176454_25 (sequence is synthesized)
tcctgttcccacaccacctgtcacatgcaagggatgatggctgtctgctcctgggtctatgctttgtggaagaaggatgctgtggagggagcatatccaagctctaaagtggcattctct

SEQ ID NO: 612431 - DNA, 120 bp, Artificial Sequence
  ENSG00000176454_26 (sequence is synthesized)
gcattctgaaactattctgtctagcttgggtagatgagatgagtcagccaagctcagacgtggttcccagacctcacctctaagtaatgtgccctgataggtcccaaagtggccagagac

SEQ ID NO: 612432 - DNA, 120 bp, Artificial Sequence
  ENSG00000176454_27 (sequence is synthesized)
tgggcaaaaaaagtcaggaatggagacactggagtgaagaactggcctcaaagtggggagggactgttggcaagtgaaatataaattaacaccattagtcaaccagtcttagattctgag

SEQ ID NO: 612433 - DNA, 120 bp, Artificial Sequence
  ENSG00000176454_28 (sequence is synthesized)
ggctgggacagagagaaggtgttggagggagttctggtcagttctctaaaaggacaactactataaagggattgtcccagggcaaagataacaggccaggcacggtggctcgcgcctata

SEQ ID NO: 612434 - DNA, 120 bp, Artificial Sequence
  ENSG00000176454_29 (sequence is synthesized)
atgctcaccccgctccaggaggcctattttggtatgctgtttccagtagcttctagatactaggcatttggtatccaacctagtgccacagtgcctaaaactgcagacccccggcctcta

SEQ ID NO: 612435 - DNA, 120 bp, Artificial Sequence
  ENSG00000176454_30 (sequence is synthesized)
aaggaaaaagctataaagtctacagttctgcagaaagggcactggagggtcagggaaggcttgtgcaccacccttttggaagaggaggagcctgtcaggccagtctgtggggcagggtga

SEQ ID NO: 612436 - DNA, 120 bp, Artificial Sequence
  ENSG00000176454_31 (sequence is synthesized)
gctggaacaaagagcagagcagaacccaggcttccctccaggctgacatgttcctagtggccgtatcagtcactcacagtttggagtcctcagtggatgttctcacagctgttgttagat

SEQ ID NO: 612437 - DNA, 120 bp, Artificial Sequence
  ENSG00000176454_32 (sequence is synthesized)
ggccatcccctgagatccactgaagattcattttttaatcaggcatccagtgcattgaagagcaatgttatcatcatgaggaggaacaagggagaaataatcagtaaggactataaattt

SEQ ID NO: 612438 - DNA, 120 bp, Artificial Sequence
  ENSG00000176454_33 (sequence is synthesized)
ctgaaaccactttagagagtggcgaaggtggggaatcataagaccttttggggtgctgggtgagggtctttgaaggagagtcatgaaggttacgtgggaagatgacatgtagaagaaaca

SEQ ID NO: 612439 - DNA, 120 bp, Artificial Sequence
  ENSG00000176454_34 (sequence is synthesized)
acaccggacagttagatggttgagagcttgagacccagctatatctgtaggacttgggcagattattttaaatatcctatagcttctctagaggaattttctcaagattcttagcaagcc

SEQ ID NO: 612440 - DNA, 80 bp, Artificial Sequence
  ENSG00000176463_0 (sequence is synthesized)
ggcggcgaggagctgtgccttccacctctccagccccggcaggacgggggcggccgccgcgaacccggggcggggacagc

SEQ ID NO: 612441 - DNA, 80 bp, Artificial Sequence
  ENSG00000176463_1 (sequence is synthesized)
aaagcggcagcggcggcggcggcggcggcggcgggggaaggatgcaggggaagaagccgggcggttcgtcgggcggcggc

SEQ ID NO: 612442 - DNA, 120 bp, Artificial Sequence
  ENSG00000176463_2 (sequence is synthesized)
cggagcggcgagctgcagggggacgaggcgcagaggaacaagaaaaagaaaaagaaggtgtcctgcttttccaacatcaagatcttcctggtgtccgagtgcgccctgatgctggcgcag

SEQ ID NO: 612443 - DNA, 120 bp, Artificial Sequence
  ENSG00000176463_3 (sequence is synthesized)
ggcacggtgggcgcctacctggtgagcgtcctgaccaccctggagcgtaggttcaacctgcagagcgctgacgtgggtgtgatcgctagcagcttcgagatcgggaacctggcgctcatc

SEQ ID NO: 612444 - DNA, 120 bp, Artificial Sequence
  ENSG00000176463_4 (sequence is synthesized)
ctcttcgtgagctacttcggggcacgcgggcaccggccgcgcctgatcggctgcggcggcatcgtcatggcgctgggcgcgctgctgtcggcgctgcccgagttcctgacccaccagtac

SEQ ID NO: 612445 - DNA, 120 bp, Artificial Sequence
  ENSG00000176463_5 (sequence is synthesized)
aagtacgaggcgggcgagatccgctggggcgccgagggccgcgacgtctgcgcagccaacggctcgggcggcgacgaggggcccgaccccgacctcatctgccgcaaccggacggctacc

SEQ ID NO: 612446 - DNA, 120 bp, Artificial Sequence
  ENSG00000176463_6 (sequence is synthesized)
aacatgatgtacttgctgctcattggggcccaggtgctcctgggcatcggtgctacccctgtgcagcccctgggcgtctcctacatcgacgaccacgtgcggaggaaggactcctcgctc

SEQ ID NO: 612447 - DNA, 120 bp, Artificial Sequence
  ENSG00000176463_7 (sequence is synthesized)
tatataggaatcctgttcacgatgctggtatttggaccagcctgcgggtttatcctgggctctttctgtaccaaaatctacgtggatgcggtcttcattgacacaagtaacctggacatc

SEQ ID NO: 612448 - DNA, 120 bp, Artificial Sequence
  ENSG00000176463_8 (sequence is synthesized)
actccggacgacccccgctggatcggagcctggtggggtggctttctgctctgcggtgccttactcttcttctcttccctcttgatgtttgggtttccacagtccctgcccccgcactca

SEQ ID NO: 612449 - DNA, 120 bp, Artificial Sequence
  ENSG00000176463_9 (sequence is synthesized)
gagcccgccatggaaagcgagcaggccatgctctccgaaagagaatacgagagacccaagcccagcaacggggtcctgaggcaccccctggagccagacagcagtgcctcctgtttccag

SEQ ID NO: 612450 - DNA, 120 bp, Artificial Sequence
  ENSG00000176463_10 (sequence is synthesized)
cagctgagagtgatcccgaaggtcaccaagcacctgctctcaaaccctgtgttcacctgcatcatcctggccgcctgcatggagattgcagtggtggctggcttcgctgcctttttgggg

SEQ ID NO: 612451 - DNA, 120 bp, Artificial Sequence
  ENSG00000176463_11 (sequence is synthesized)
aagtacctggagcagcagtttaacctcaccacctcttctgccaaccagctgcttgggatgactgcgatcccgtgtgcttgtctgggtatcttcctgggaggtcttttggtgaagaagctc

SEQ ID NO: 612452 - DNA, 120 bp, Artificial Sequence
  ENSG00000176463_12 (sequence is synthesized)
agcctgtctgccctgggggccattcggatggccatgctcgtcaacctggtgtccactgcttgctacgtctccttcctcttcctgggctgcgacactggccctgtggctggggttactgtt

SEQ ID NO: 612453 - DNA, 120 bp, Artificial Sequence
  ENSG00000176463_13 (sequence is synthesized)
ccctatggaaacagcacagcacctggctcagccctggacccctactcgccctgcaataataactgtgaatgccaaaccgattccttcactccagtgtgtggggcagatggcatcacctac

SEQ ID NO: 612454 - DNA, 120 bp, Artificial Sequence
  ENSG00000176463_14 (sequence is synthesized)
ctgtctgcctgctttgctggctgcaacagcacgaatctcacgggctgtgcgtgcctcaccaccgtccctgctgagaacgcaaccgtggttcctggaaaatgccccagtcctgggtgccaa

SEQ ID NO: 612455 - DNA, 120 bp, Artificial Sequence
  ENSG00000176463_15 (sequence is synthesized)
gaggccttcctcactttcctctgtgtgatgtgtatctgcagcctgatcggtgccatggcacagacaccctcagtcatcatcctcatcaggacagtcagccctgaactcaagtcttacgct

SEQ ID NO: 612456 - DNA, 120 bp, Artificial Sequence
  ENSG00000176463_16 (sequence is synthesized)
ttgggagttctttttctcctccttcgtttgttgggcttcatccctccacccctcatcttcggggctggcatcgactccacctgcctgttctggagcacgttctgtggggagcaaggcgcc

SEQ ID NO: 612457 - DNA, 120 bp, Artificial Sequence
  ENSG00000176463_17 (sequence is synthesized)
tgcgtcctctacgacaatgtggtctaccgatacctgtatgtcagcatcgccatcgcgctcaaatccttcgccttcatcctgtacaccaccacgtggcagtgcctgaggaaaaactataaa

SEQ ID NO: 612458 - DNA, 120 bp, Artificial Sequence
  ENSG00000176463_18 (sequence is synthesized)
cgctacatcaaaaaccacgagggcgggctgagcaccagtgagttctttgcctctactctgaccctagacaacctggggagggaccctgtgcccgcaaaccagacacataggacaaagttt

SEQ ID NO: 612459 - DNA, 120 bp, Artificial Sequence
  ENSG00000176463_19 (sequence is synthesized)
atctataacctggaagaccatgagtggtgtgaaaacatggagtccgttttatagtgactaaaggagggctgaactctgtattagtaatccaagggtcatttttttcttaaaaaaagaaaa

SEQ ID NO: 612460 - DNA, 120 bp, Artificial Sequence
  ENSG00000176463_20 (sequence is synthesized)
aaaggttccaaaaaaaaccaaaactcagtacacacacacaggcacagatgcacacacacgcagacagacacaccgactttgtcctttttctcagcatcagagccagacaggattcagaat

SEQ ID NO: 612461 - DNA, 120 bp, Artificial Sequence
  ENSG00000176463_21 (sequence is synthesized)
tctactttgaaggcacctcatggttttcaggatgctgacagctgcaagcaacaggcactgccaaattcagggaacagtggtggccagcttggaggatggacatttctggatacacataca

SEQ ID NO: 612462 - DNA, 120 bp, Artificial Sequence
  ENSG00000176463_22 (sequence is synthesized)
catacaaaacagaaaacattttttaaaagaagtttcctaaaataaaaaaaattaaaaaaaaaaaacccacaagttgaaaacattgccagattaagcactagtgacacaccccgtgccacc

SEQ ID NO: 612463 - DNA, 120 bp, Artificial Sequence
  ENSG00000176463_23 (sequence is synthesized)
ctcttcctccaggtgggggtgggggcgggcgcacaagtcggaggggtggaagcaccactcctctctctgactttcgcaatatgggtcactgtgtagacgactcacccagtctgcatgtgg

SEQ ID NO: 612464 - DNA, 120 bp, Artificial Sequence
  ENSG00000176463_24 (sequence is synthesized)
ttcaaggccccagagttctctcagtgatgctaatgggtgatccgtgctggagtttgtaattggcacctctcaccagctccatttccatgttcaagactgagggcctgagggggagccagg

SEQ ID NO: 612465 - DNA, 120 bp, Artificial Sequence
  ENSG00000176463_25 (sequence is synthesized)
tggggggccagcacctcccagtggcgggcatccaccttcccccagccccacagagtgacctcaggaagcagtaggcctcgcctggctatgactgacccggctcagagctggtgagaccca

SEQ ID NO: 612466 - DNA, 120 bp, Artificial Sequence
  ENSG00000176463_26 (sequence is synthesized)
acgcagtccaagtcatttgcttacatttgccaaaaacattttgccatttttaaaagaaaaaaatacaatccatatgaatttcaaactgttgtatgtataatcctctaatactatttttaa

SEQ ID NO: 612467 - DNA, 120 bp, Artificial Sequence
  ENSG00000176463_27 (sequence is synthesized)
ctacttctaaaatctgtgttaacccttcaagtcactaacacagttctctaggccggatttattatgctggttgcttttactttttttctccttttttaatgcaccaaaaatatgtgatac

SEQ ID NO: 612468 - DNA, 120 bp, Artificial Sequence
  ENSG00000176463_28 (sequence is synthesized)
aagggatgcaattaacctattgtaattttcatcattttatcctcattcgaatattctacaaaaacaagaatatacaatgtgttacaagaagaaaaaaaaatgcttcaaaaagagagtgta

SEQ ID NO: 612469 - DNA, 120 bp, Artificial Sequence
  ENSG00000176463_29 (sequence is synthesized)
tatgcagcctgcctttaaaagaatcacatttgagacaacaggggataatgtgatgaattgcaaatttgccttttagcttccttccccatgattcagtgatcactgtcacgggaaaccctt

SEQ ID NO: 612470 - DNA, 120 bp, Artificial Sequence
  ENSG00000176463_30 (sequence is synthesized)
ttatattcatgcttgacattccaagaggcgttcttttcagcctgtggaggagacactcttagatgtgggtttgtgtgtatgggtgcaacacttccggggataggaaagaagaacagttcc

SEQ ID NO: 612471 - DNA, 120 bp, Artificial Sequence
  ENSG00000176463_31 (sequence is synthesized)
ctaacacaagctgttaagaagtctgtagcatctctgataacgaatagacccacaagctcctggaagctgtcgtgtgtccaatgcgtgaaaatgtctgtgacattttcagtgttagtcttg

SEQ ID NO: 612472 - DNA, 120 bp, Artificial Sequence
  ENSG00000176463_32 (sequence is synthesized)
aactaaggcccttgtctgtgtgttttgaaggtgggtgaacctcagagaatgaacctgttatgatttggggtaagaatcacgttggaaaacctctcgcaaccagcacactaggccttctac

SEQ ID NO: 612473 - DNA, 120 bp, Artificial Sequence
  ENSG00000176463_33 (sequence is synthesized)
ggccatttctgtaaggggacagagcttaggtaaaggcacacactcatacacacacaacaaagggccctgctaacttactcctcatgctgcttcagtgacctttgttcatgtcacattcct

SEQ ID NO: 612474 - DNA, 120 bp, Artificial Sequence
  ENSG00000176463_34 (sequence is synthesized)
ggcgctggaaaaaaaactcaaaggttgattggtttgctttttcaccttggacacatttgcattttacccacaaggcaaacaaaagaatcaggaagtaaaaaatggttgggagtgggacag

SEQ ID NO: 612475 - DNA, 120 bp, Artificial Sequence
  ENSG00000176463_35 (sequence is synthesized)
gtatggtaccgaatttttaatgaacattgtaaatgaagaggcttgaatgacagcccaaatctagagaaggcactcagcaagaccaaccaaaagaaaagctgtgtcgtggtatggggccac

SEQ ID NO: 612476 - DNA, 120 bp, Artificial Sequence
  ENSG00000176463_36 (sequence is synthesized)
cgtgatcagctacctggggcaggatgcttctgagacaggcctttcaactgcttagtgttagtatgtccttgcttatgaaaatggggacactcatcagtacgttaactactaaaggggaga

SEQ ID NO: 612477 - DNA, 120 bp, Artificial Sequence
  ENSG00000176463_37 (sequence is synthesized)
tggttctccaaccacttcataaaatatgtatgttctgttgttcctaaggctttgataatatcctgtacagattttggtttagttttgcaaatatattgctaataggtcactcttatagat

SEQ ID NO: 612478 - DNA, 120 bp, Artificial Sequence
  ENSG00000176463_38 (sequence is synthesized)
tattgcttggcccttcaaactcagtacacacacactgaggccctttgacctagtgttttatggaactatttgctttgagagaaaaaaaaaagaaagttttttaaactctttgcattttgg

SEQ ID NO: 612479 - DNA, 120 bp, Artificial Sequence
  ENSG00000176463_39 (sequence is synthesized)
attttttttcctaagattttaggatgaatgtgaaaaagatgttagaataacaggaagacaactccagggctgagttttatcagcaattgggtataaatttaaagaccgctgttgcaggat

SEQ ID NO: 612480 - DNA, 120 bp, Artificial Sequence
  ENSG00000176463_40 (sequence is synthesized)
ggctctgaattctgttgtgtcgtcttttaaaattttaattattctcatatagtaccgaacagaaaactcagtctagttttaatttgccttttgtgctctaaagaagcattgtacatacaa

SEQ ID NO: 612481 - DNA, 120 bp, Artificial Sequence
  ENSG00000176463_41 (sequence is synthesized)
cactagatccagcccctcgattatctgtttggtttcaagtgaatgaaaagatttcctggtaagatcattggatttacagaatacaaaaatgtacgggatggaataaacctagaaagtgaa

SEQ ID NO: 612482 - DNA, 120 bp, Artificial Sequence
  ENSG00000176463_42 (sequence is synthesized)
tcagaagactcctttgtgagaagctgagggcctggccctcttcctcttcctggagagaacagcccaccaccacccacagacctcgcgggcctcacttagcgcgctcctccctgtccgaga

SEQ ID NO: 612483 - DNA, 120 bp, Artificial Sequence
  ENSG00000176463_43 (sequence is synthesized)
acccgagggtccccatgtggattatccagccagtgtgtggtcctttgaggccccaagcgcaggcctgtgatgaggaccaaagaggtgacttatggtcaggagtactccaaacagctctca

SEQ ID NO: 612484 - DNA, 120 bp, Artificial Sequence
  ENSG00000176463_44 (sequence is synthesized)
gagtaggcatctttcctgggtctctaaagagtcatgctgacctggtgtgcaaattcccttccacccatccctctacctcctctggggatggcttgccgacatgctttagaaactcccctc

SEQ ID NO: 612485 - DNA, 120 bp, Artificial Sequence
  ENSG00000176463_45 (sequence is synthesized)
ttgggaatgctcctctgactgagggctccaacagctttaatgaaatcagccgagagggtaaaaaccaacctgttgcatagaatggaggggggaaaaagcacatactcaatagatttttga

SEQ ID NO: 612486 - DNA, 120 bp, Artificial Sequence
  ENSG00000176463_46 (sequence is synthesized)
gtgtggtactctgtatttttgcagcgtttattttccaaatgagcagtttagaaatatgtgatgtaaagtacatactgtacgtttgctgaaaattatattaaaagcactattttaattctt

SEQ ID NO: 612487 - DNA, 120 bp, Artificial Sequence
  ENSG00000176463_47 (sequence is synthesized)
tgaaccccagctctctcacttcggtcccacccttcccaactccccacgcccaagtctttcagtggaacccaagactgtaagaacgtaggccttgtgagagtgaaggaaggatgctcgaac

SEQ ID NO: 612488 - DNA, 120 bp, Artificial Sequence
  ENSG00000176463_48 (sequence is synthesized)
ttgcccaggactcaggcttcagcttcacaatcccgaggaaaggaatgacatttccaaactgtcacctttgtagcgctgggtcaaagtctaaagaggacaaataaatagagacttctgtgg

SEQ ID NO: 612489 - DNA, 120 bp, Artificial Sequence
  ENSG00000176463_49 (sequence is synthesized)
cctcgttgtgcctattgaacaggagagctgcatgtcacaatcaatgagacctgcacagcttgtgaatcatcactgagactagttgtgtttttaatacctttaaaatgaagccacagcatc

SEQ ID NO: 612490 - DNA, 120 bp, Artificial Sequence
  ENSG00000176463_50 (sequence is synthesized)
tattctggaaatgtggcgtaggcttaaaaaccttgctccaaagaggatatcgtttcagccagcatgcagtgaatatctgtggctacacaaaaaaacaaactgtcccgaatgctggaggag

SEQ ID NO: 612491 - DNA, 120 bp, Artificial Sequence
  ENSG00000176463_51 (sequence is synthesized)
gaaatatgacattgtgatgccaggcagttttctgtgacactcaggaatctcttcaatagagatgtacagtgacacttagagccccagaacacaaggtctgtcactagtaatttacataag

SEQ ID NO: 612492 - DNA, 120 bp, Artificial Sequence
  ENSG00000176463_52 (sequence is synthesized)
ataaggataaattattgactgggatacatcttactcatccccgacatctgcttggctgtggggttggtcatgtagataaatatccttcccagaaaggatatttggccttcaaaaaagtct

SEQ ID NO: 612493 - DNA, 120 bp, Artificial Sequence
  ENSG00000176463_53 (sequence is synthesized)
gctcagagtctggtcccttggggttacatggaatgaaacccagcactttattgctttgactgcctactcttgtcccttcactgcaaagccatcatgctattaaataagcctaacaaacag

SEQ ID NO: 612494 - DNA, 120 bp, Artificial Sequence
  ENSG00000176463_54 (sequence is synthesized)
taggtgaagcagaaaagaccgatctctttttcctcttggctcttcttccctcctccccctttaggcacagagtaccaagacattgagactgagaaaacctgccccgaatcacattcacct

SEQ ID NO: 612495 - DNA, 120 bp, Artificial Sequence
  ENSG00000176463_55 (sequence is synthesized)
gaatcagtgcatgagtgaccagctaggactgagcccaaagacctgagattccctgggaggctgtggggtctgccacccagcagatctgtgtcacgggagtggcgctgtcactcgttgagg

SEQ ID NO: 612496 - DNA, 120 bp, Artificial Sequence
  ENSG00000176463_56 (sequence is synthesized)
tggtggcctggttcctttggccttagggaaggacaaacttcaactctgagccttgattgagtgaccttggccaagttacctagcttttctgagcctcactttcttggcaattagatgaac

SEQ ID NO: 612497 - DNA, 80 bp, Artificial Sequence
  ENSG00000176463_57 (sequence is synthesized)
cttccccagcccggctctcgagcggccgcctggcccgacgagggggccgcccggcgctgggggcaggcgggcatgacctc

SEQ ID NO: 612498 - DNA, 120 bp, Artificial Sequence
  ENSG00000176463_58 (sequence is synthesized)
atccaggggaagcgaagttgtcagtatatatgcagatattttccatttaaactatatgtgtatacacacagatgtactcaagtccaatttgtggtgcctgcactcaagagcacaacagcc

SEQ ID NO: 612499 - DNA, 120 bp, Artificial Sequence
  ENSG00000176463_59 (sequence is synthesized)
ctaaaagcctcaaacagaagaacaccacacacagtatgccggcgctttgcagtttcctctgtagaacaccacacacagtatgccggcgctttgcagtttcctctgtagaacaccacacac

SEQ ID NO: 612500 - DNA, 120 bp, Artificial Sequence
  ENSG00000176463_60 (sequence is synthesized)
agtatgccggcgctttgcagtttcctctgtggaacaccacacacagtatgccggcgctttgcagtttcctctgtggaacaccacacacagtatgccggcgctttgcagtttcctctatgg

SEQ ID NO: 612501 - DNA, 120 bp, Artificial Sequence
  ENSG00000176463_61 (sequence is synthesized)
aacaccacacacagtatgccggcgctgtgcagtttcctctatgagactacgctgctttcactgacactaactaagaatgtttctcttcaaggaagaccgtcttggccttctcaggctctc

SEQ ID NO: 612502 - DNA, 120 bp, Artificial Sequence
  ENSG00000176463_62 (sequence is synthesized)
cttggccttctcaggctctcagcagaggatgatgatgataatagcagctgtcattcactttacatggtaaagtgacacagtacacactgttctagatgcttttttttttttttttttttt

SEQ ID NO: 612503 - DNA, 70 bp, Artificial Sequence
  ENSG00000176463_63 (sequence is synthesized)
ctcagtctcccaagtagctgggactgcagatgtgcaccaacatgtaccacagtgcaaattccaggttgtc

SEQ ID NO: 612504 - DNA, 120 bp, Artificial Sequence
  ENSG00000176463_64 (sequence is synthesized)
gaattacaggtgtgagccaccatgccagactgatgctttctatgtgtaaagttagtcttcacagccatctggtgaagactgtagtattatcatcatccccattttgcagatgaggaaact

SEQ ID NO: 612505 - DNA, 120 bp, Artificial Sequence
  ENSG00000176463_65 (sequence is synthesized)
aggcagaactgggacacaaactcatgcgctttgcctcctgagcatgtctttgagccacggagtcagacatatttgcctagcagtgctataagaaaagctaggcagagacaggaacagggg

SEQ ID NO: 612506 - DNA, 120 bp, Artificial Sequence
  ENSG00000176463_66 (sequence is synthesized)
tcctaggtctgtctcttttttctttgcagtttaattattagtaaataagaaattttaagtctcaaaattttggtcagagataaactcagacactgcctcgatatcacgaagttctcattt

SEQ ID NO: 612507 - DNA, 120 bp, Artificial Sequence
  ENSG00000176463_67 (sequence is synthesized)
ctggcctagcaagggcaatggggatacaatggggacatcacaggtgtcttggctactccttttctctccaggctgtgggcaaactctctgctcctgagttggtctagaatcttgttcctg

SEQ ID NO: 612508 - DNA, 120 bp, Artificial Sequence
  ENSG00000176463_68 (sequence is synthesized)
caagatcttcctggtgtccgagtgcgccctgatgctggcgcagggcacggtgggcgcctacctgaataaatatattccagctaagtggacgtggatggttttctgcataaactcttattg

SEQ ID NO: 612509 - DNA, 120 bp, Artificial Sequence
  ENSG00000176463_69 (sequence is synthesized)
cacaagtgaatgcattttgtgtgccatttccctagaactgtaaatgactcaccccaaggagctgctgtctagatgagaaacaaaacctcacactattgctgctgctgcttcatcatgggg

SEQ ID NO: 612510 - DNA, 120 bp, Artificial Sequence
  ENSG00000176463_70 (sequence is synthesized)
aaatgacttctgggcttaggtgattaagtctctttctaccactttactacaggaagacatgtccttggcacatcagacagaacactgaagttatcttgcaaattactttaatggaattaa

SEQ ID NO: 612511 - DNA, 120 bp, Artificial Sequence
  ENSG00000176463_71 (sequence is synthesized)
atcttttccttgctttcctaaaacagtgctcttctgtagggctgtccaatgtatgggaacattactgtaggcattaataggcaagggccacacacgtggacacatgtttctgaagtcccc

SEQ ID NO: 612512 - DNA, 120 bp, Artificial Sequence
  ENSG00000176463_72 (sequence is synthesized)
actgagattggggtccaggaaaagcagcagcctaaaatttgtggggaaggagcaaggcaggtccacagagggccctcgttatggggtagatggaggagagaaggcggcgtccaccacata

SEQ ID NO: 612513 - DNA, 120 bp, Artificial Sequence
  ENSG00000176472_0 (sequence is synthesized)
acgaacttgcctgcctggctggcgcacccagcccctccttccattccttcttccccctctctgcagcctctgccagcccgcactgcgcatgctttctgacgccccctttggtccagcgtg

SEQ ID NO: 612514 - DNA, 120 bp, Artificial Sequence
  ENSG00000176472_1 (sequence is synthesized)
ggaggaggggatggaaatgaggttgggctaagcagcttgcgcgcgctcccttgcctgccctcccccgacgccggacgcgcgccgggcggggcagctccgctggtccgagggcagtgcagc

SEQ ID NO: 612515 - DNA, 120 bp, Artificial Sequence
  ENSG00000176472_2 (sequence is synthesized)
agcggcgacagcggctgcggccgtggccgtggcgggaggagccggaagccccgcccccggggaggggccgtcctgcaggtcccccctctatcctccacggccccatccaagccagggatg

SEQ ID NO: 612516 - DNA, 120 bp, Artificial Sequence
  ENSG00000176472_3 (sequence is synthesized)
aaatttaacggcaagaagggcgcagttgacgcggcgtcaatgaactgagactaagtcaaaagccgggccctccaaccctatccccatcagcctggtcatcaccggcgtcacccccgcccc

SEQ ID NO: 612517 - DNA, 120 bp, Artificial Sequence
  ENSG00000176472_4 (sequence is synthesized)
gcgccctgcccctaggttcctgtgccagcaagatgctggagcgaggcgcggagtccgcggccggggctaccgatcctagtcccactggcaaggaaccagtgaccaaagaagctccccacc

SEQ ID NO: 612518 - DNA, 120 bp, Artificial Sequence
  ENSG00000176472_5 (sequence is synthesized)
caccgctgccccgactgtgacaaggccttctcgtacccgtccaagctggccacgcaccgcttagcacacggaggcgcccgaccccacccatgcccagactgccccaaggccttctcctac

SEQ ID NO: 612519 - DNA, 120 bp, Artificial Sequence
  ENSG00000176472_6 (sequence is synthesized)
ccctccaagctggcagcccaccgcctcacgcacagcggcgcccgcccgcacccgtgcccacactgcccgaagtcctttggccaccgctccaagctggcggctcacctctggacccacgca

SEQ ID NO: 612520 - DNA, 120 bp, Artificial Sequence
  ENSG00000176472_7 (sequence is synthesized)
cccacccgcccctacccgtgccccgactgccccaagtccttctgctacccttccaagctggcggcccaccgccacacgcaccacgccaccgacgcccgcccctatccttgcccgcattgc

SEQ ID NO: 612521 - DNA, 120 bp, Artificial Sequence
  ENSG00000176472_8 (sequence is synthesized)
cccaaggctttctcatttccctccaagctggccgcccatcgcctatgtcacgaccccccaaccgcgcccggcagccaggcgactgcctggcaccgatgctccagctgcggccaggccttt

SEQ ID NO: 612522 - DNA, 120 bp, Artificial Sequence
  ENSG00000176472_9 (sequence is synthesized)
ggccagagacgcttactgctccttcatcaacgcagccaccaccaggtggagcacaagggggagagagactgagccctcccttggctcactgtccccttctgccgccagccctagccagta

SEQ ID NO: 612523 - DNA, 120 bp, Artificial Sequence
  ENSG00000176472_10 (sequence is synthesized)
aagactttttttgtacagccccgcccattccaggactgcagggtctggtggggaaggtcccgcccactctgcgcataggccccgccggctccgcgcttaagacggccgctgagttagttg

SEQ ID NO: 612524 - DNA, 120 bp, Artificial Sequence
  ENSG00000176472_11 (sequence is synthesized)
tggagactccgcccactctgctgaaagactccaaccctgggtttagatagcgaagggactgcctctggcttgaatttgcatagccccgctcactgtgctcttaggctccgcctccccgct

SEQ ID NO: 612525 - DNA, 120 bp, Artificial Sequence
  ENSG00000176472_12 (sequence is synthesized)
agctgtttccctctctctgagggcaactcccctggccctccctccttcggcctggttgcaattctggccggaaacccgctggtgcctgtggcaaataaagtgaggaaggcaggaaccttt

SEQ ID NO: 612526 - DNA, 120 bp, Artificial Sequence
  ENSG00000176472_13 (sequence is synthesized)
agacttcccagtgtgaggcaacggcagggctaggactagggtgaggctgttggtgcaagatttaaggaggcgctcactcacaggtgcggaccctgcacttacaggaccctgagagcgagt

SEQ ID NO: 612527 - DNA, 120 bp, Artificial Sequence
  ENSG00000176472_14 (sequence is synthesized)
gcctccttaaatgttgcactccagggtcctcaccgtccttttcctagtcctgggctccgggttctaagcacccagatgctccttcctcaaacggaggtttccgcaagacaggactgggtc

SEQ ID NO: 612528 - DNA, 120 bp, Artificial Sequence
  ENSG00000176472_15 (sequence is synthesized)
tctttccttctcagccctgccctcagaattccagcccctaatcaacttttatggagatgcatgccaggccaaagggctgcccctaagctttaggaaggaaactccttaaatgctgttgac

SEQ ID NO: 612529 - DNA, 120 bp, Artificial Sequence
  ENSG00000176472_16 (sequence is synthesized)
ttaggagttccgccagtgccccacctgcccagagcctcttgccccagtgccccacctgggtttatggtgcccccctcccagaaatatgagctcaggggtcagaaacccaggtcctgaggt

SEQ ID NO: 612530 - DNA, 120 bp, Artificial Sequence
  ENSG00000176472_17 (sequence is synthesized)
ccctcctccccaaggactcaggatcccaggcccccagtcccctcttcccttaagtttaagaagtccaggccaccaccctcttggggacccagcacccaactcacgaagcgcccgaagcgg

SEQ ID NO: 612531 - DNA, 120 bp, Artificial Sequence
  ENSG00000176472_18 (sequence is synthesized)
atggagtctccatcctcaatgtactcaggagttctgggccccagcttcccattccactgacgctgcagcccagccccgctgggatccatgagtttggtccccggactgaccagcatagag

SEQ ID NO: 612532 - DNA, 120 bp, Artificial Sequence
  ENSG00000176472_19 (sequence is synthesized)
cagccgcagccccagctccttgatcagctgggcatcccgaggcgctgtttccaggactgggtcgatcagaacggcctcccgggactctctgtcacccagcagatacggggtatcactctg

SEQ ID NO: 612533 - DNA, 120 bp, Artificial Sequence
  ENSG00000176472_20 (sequence is synthesized)
gcctcttccagatagctggcagagggcagggcaagggattggccatttatactgggctcgagctcagaagcccgaggaactctttgctcccctgctttggggagatctcaaaccatggac

SEQ ID NO: 612534 - DNA, 120 bp, Artificial Sequence
  ENSG00000176472_21 (sequence is synthesized)
gtggagctgtggtttgacagcgctggctctgcttctccccacacacttacatggcaaaggtaaaaagtctgctactatcgtgggttgatgaggattgtgggcaaacaggctctcttgtta

SEQ ID NO: 612535 - DNA, 120 bp, Artificial Sequence
  ENSG00000176472_22 (sequence is synthesized)
aaagtttaaactggtgtctccactttggccatatgacggtatctaagaaattgaaaatacatacatgcttgtctcaactcttccacttgtaggaatttattctataaactcatgaatgtg

SEQ ID NO: 612536 - DNA, 120 bp, Artificial Sequence
  ENSG00000176472_23 (sequence is synthesized)
agactttttgcaaacgccttgaagggtagaattagcagcgagctcttgaaactgcctctggagatggaactcagcggaattctcgaaaagaagagggacattaaaaagacgggtgcatgc

SEQ ID NO: 612537 - DNA, 120 bp, Artificial Sequence
  ENSG00000176473_0 (sequence is synthesized)
cggtgcgtgtggtgagcggcgggccccgggctggaggggccgggactgggcagcgcctaaagcgccccgtgccgcttaacgcggtctctcatagccgctcgccttcctttcacttcctgt

SEQ ID NO: 612538 - DNA, 120 bp, Artificial Sequence
  ENSG00000176473_1 (sequence is synthesized)
tccttcagaaagcgctgtgccttggaccaaccttacttcttactattgacagctcagctaactcctattcatccttcaaaacccatctctggtggtttggctttgaatgacagcaagaac

SEQ ID NO: 612539 - DNA, 120 bp, Artificial Sequence
  ENSG00000176473_2 (sequence is synthesized)
tctgtctttaatggcttcattggtagcgtatgatgattcggactcggaggctgagacagagcatgcaggaagttttaatgctaccggccagcagaaagacacttctggtgtggccagacc

SEQ ID NO: 612540 - DNA, 120 bp, Artificial Sequence
  ENSG00000176473_3 (sequence is synthesized)
acctgggcaggattttgcatctggtacactggatgtgcccaaagcaggggcacagcccacaaagcatggctcctgtgaagacccagggggctatcgccttccattggctcagcttgggag

SEQ ID NO: 612541 - DNA, 120 bp, Artificial Sequence
  ENSG00000176473_4 (sequence is synthesized)
aagcgattggggatcttgccccagccagaggctacagtggcccgggaaggagcctcaagtcaccttccccatcaaagagccttcttgttcttctctgtggacgagccatgttccagccag

SEQ ID NO: 612542 - DNA, 120 bp, Artificial Sequence
  ENSG00000176473_5 (sequence is synthesized)
ccacatgcccctggcagctgcccgctttaagcaagtaaaactctccaggaactttcccaagtcatctttccatgctcaaagtgagtctgaaaccgtaggtaaaaatggcagctcttttca

SEQ ID NO: 612543 - DNA, 120 bp, Artificial Sequence
  ENSG00000176473_6 (sequence is synthesized)
gaagaaaaaatgtgaggactgtgtggtaccctatactcccagaagactaagacagcggcaggcattaagcacggagacaggcaagggtaaagacgtggagccacaggggccccctgcagg

SEQ ID NO: 612544 - DNA, 120 bp, Artificial Sequence
  ENSG00000176473_7 (sequence is synthesized)
gcgtgccccagcccctctctacgtgggcccgggagtgtctgagtttattcagccatatttgaatagccattataaagaaaccacagttccccggaaagtgcttttccacctgagaggcca

SEQ ID NO: 612545 - DNA, 120 bp, Artificial Sequence
  ENSG00000176473_8 (sequence is synthesized)
tcaaggtatggaacgccgtggactccgggcactgcctgcagacctactccctgcacacagaggcagtgcgggccgcccggtgggctccctgtggccggcgcatcctcagtggtggctttg

SEQ ID NO: 612546 - DNA, 120 bp, Artificial Sequence
  ENSG00000176473_9 (sequence is synthesized)
acttcgcgctgcacctaacagaccttgaaacaggaacccagctatttagtggtcgaagtgactttagaatcactaccttgaaattccatccaaaagaccacaacatctttttatgtggag

SEQ ID NO: 612547 - DNA, 120 bp, Artificial Sequence
  ENSG00000176473_10 (sequence is synthesized)
gcttcagctctgaaatgaaagcttgggatataaggactggcaaggtgatgagaagctacaaggcgaccatccagcagaccttggacatcctgttcctccgggaaggctccgagttcctga

SEQ ID NO: 612548 - DNA, 120 bp, Artificial Sequence
  ENSG00000176473_11 (sequence is synthesized)
gcagcacagacgcttccacccgggactcagctgaccgcaccattattgcctgggatttccggacctctgccaaaatctccaaccagattttccacgagaggttcacctgccccagcctcg

SEQ ID NO: 612549 - DNA, 120 bp, Artificial Sequence
  ENSG00000176473_12 (sequence is synthesized)
ccttgcacccgagagagcccgtgttcctggcacagaccaatggcaactacctggcccttttctccactgtgtggccctaccggatgagcagacggcggcgctatgaagggcacaaggtgg

SEQ ID NO: 612550 - DNA, 120 bp, Artificial Sequence
  ENSG00000176473_13 (sequence is synthesized)
agggctactcagtgggctgcgagtgctccccaggcggtgacttgctggtgacgggcagcgccgatggccgggtcctgatgtacagcttccgcacagccagccgagcatgcacactgcagg

SEQ ID NO: 612551 - DNA, 120 bp, Artificial Sequence
  ENSG00000176473_14 (sequence is synthesized)
ggcacacacaggcctgtgtcggcaccacctatcaccccgtgctgccctccgtcctcgccacctgctcctggggaggggacatgaagatctggcactgagctttttgtcactgaaccttcc

SEQ ID NO: 612552 - DNA, 120 bp, Artificial Sequence
  ENSG00000176473_15 (sequence is synthesized)
cgatgccagctgggctcttggactcccctcttcctcaagggtagatgagaggaacgagcacagaggttggctgtgggtcctgggtaccaccttctgagcctcagtttcctcatctgtaaa

SEQ ID NO: 612553 - DNA, 120 bp, Artificial Sequence
  ENSG00000176473_16 (sequence is synthesized)
gtggggagaaaagtctgtttgcctcaggagtgtgaggactacactagtgaaagcgcctggcgggcagccggcgatgcccaataaatgtgtgttttgctgtttgttaagtgatttcagcaa

SEQ ID NO: 612554 - DNA, 120 bp, Artificial Sequence
  ENSG00000176473_17 (sequence is synthesized)
cagtcctggacatgggccctggggtgcatggagcctctgtctgggtggatcctgctttctgtttcctgggtgagcgcatgccatgtggctcactgtctcttcaagtccctgaaccacatc

SEQ ID NO: 612555 - DNA, 120 bp, Artificial Sequence
  ENSG00000176473_18 (sequence is synthesized)
tggtcctcaccccaggccccacgtactgggcaggaagcagtagttggctcacacagacaggtctcagaagtggggggcaggaacaggacaaaatggtcatgggtgtcatttctgcatcct

SEQ ID NO: 612556 - DNA, 120 bp, Artificial Sequence
  ENSG00000176473_19 (sequence is synthesized)
tccctttcctcactgaggccaagccttgctggggtggaaggggctgggtgcttagtgactgtcactgaggccagacccctcagctgggctggagctggtcccgctggatctgctgaactg

SEQ ID NO: 612557 - DNA, 120 bp, Artificial Sequence
  ENSG00000176473_20 (sequence is synthesized)
tcagcccccgtccccgaagactgctggattcccgttggcagagcggggttgggttctggacagatgggacagatgcatgctaccgcaggtcactgggggagcttgtgagtctgctgctgc

SEQ ID NO: 612558 - DNA, 120 bp, Artificial Sequence
  ENSG00000176473_21 (sequence is synthesized)
ttccaaggctcatccctattgtatgtatcagcattccttgttgctgagtcatagtccattgtatggacataccgcagtttgtttatccagtcacctgtggatggacgttttgagttgtct

SEQ ID NO: 612559 - DNA, 120 bp, Artificial Sequence
  ENSG00000176473_22 (sequence is synthesized)
ccacttctatggataaaactttcaagtaatgaagcagtagttctggcagactaaccctcccacagctaacaactataaactgtacaacagcaacaacaacaaaactacctgaaggtattg

SEQ ID NO: 612560 - DNA, 120 bp, Artificial Sequence
  ENSG00000176473_23 (sequence is synthesized)
gagagcaaaaaaaagcaggcagagactggacagacgtctaccctccaaagaaggaaatggtactggatgagtttctgacttttatgattttgtctgtttgttttgcctaagcataggctc

SEQ ID NO: 612561 - DNA, 120 bp, Artificial Sequence
  ENSG00000176473_24 (sequence is synthesized)
cagtctgtgccagacaggctgctaaaaatttgtatagaaaatctgtagtgttactggcttgaagaaccagaggacagagtttggggtaaccacagcagctggaaagtggctataaactct

SEQ ID NO: 612562 - DNA, 120 bp, Artificial Sequence
  ENSG00000176473_25 (sequence is synthesized)
acccaaatctttgaatgcagactctaagcagctcaactaaggcaaagagaactgaatagaaatttctgctgctgcacaccgcaagggaaacagagtttgaaatttgagtagagccaggtt

SEQ ID NO: 612563 - DNA, 120 bp, Artificial Sequence
  ENSG00000176473_26 (sequence is synthesized)
agctgcgtgtttttttttttaaatcaatattcttcagaggagcataaaagaatttagagataacatacattttgtaatgttcagtattccacccaaaattcctagataaagcaagaaaca

SEQ ID NO: 612564 - DNA, 120 bp, Artificial Sequence
  ENSG00000176473_27 (sequence is synthesized)
ggaagagggggcctatattcaagagaaaggccatcaaaggagcttattgccaagatgatcccaatgttgaaattagcagacaagtattttaaaacagttattatagatgtgctgaaggac

SEQ ID NO: 612565 - DNA, 120 bp, Artificial Sequence
  ENSG00000176473_28 (sequence is synthesized)
acaaaggaaaatatcctcgcaacaagtaaaacaacggggaatctcagtagagaaatagaagctacaagaaaaacaagtgttaaattctggaactgaaaaatacagtatctgaaatgaata

SEQ ID NO: 612566 - DNA, 120 bp, Artificial Sequence
  ENSG00000176473_29 (sequence is synthesized)
attcaccatttcgattccataacagagggaaatgacagagccagtggacttggagatagatcaacagaaagtattcagccttaaaacagagaaaaatgatggaggagaagaaggacagat

SEQ ID NO: 612567 - DNA, 120 bp, Artificial Sequence
  ENSG00000176473_30 (sequence is synthesized)
actcagagaactgtggacaatatcagaaaatctattatacaagtaattgagctccagaagagaggagggagagaatggggaagaaaaaaatattttcaataaataatatcaggaaatgcc

SEQ ID NO: 612568 - DNA, 120 bp, Artificial Sequence
  ENSG00000176473_31 (sequence is synthesized)
gagggaggaggtgagagtgattagtgggagaagaaaagcaggcccaggaccaagccctggggactggggacatcctcggtgaccctgtggagcattgagccatgccagctctgtgcctgg

SEQ ID NO: 612569 - DNA, 120 bp, Artificial Sequence
  ENSG00000176473_32 (sequence is synthesized)
agcataagctttcccttgtcaacatttttcctacatgttcatgagtctgtggatgtgaacaaagcactaggagaagcaaaggtcacgaataactggcggcgatgcaaggaacccagctat

SEQ ID NO: 612570 - DNA, 120 bp, Artificial Sequence
  ENSG00000176476_0 (sequence is synthesized)
cctccgcgcgcgactacgctcataaaaggaaaaaaaagcgtgtgcggttctcgacgtgccgccaatcttcgaacgcaggtctgtgatcatccgcagactccgaaaaagggttcgaggaac

SEQ ID NO: 612571 - DNA, 120 bp, Artificial Sequence
  ENSG00000176476_1 (sequence is synthesized)
gcgcctgctcccctcgtcgcagtttccagcccgacgagcttgttttgtcccggactcggtgcccctgtagacaatggccctcgtgtctgccgattcccgcattgcagaacttctcacaga

SEQ ID NO: 612572 - DNA, 120 bp, Artificial Sequence
  ENSG00000176476_2 (sequence is synthesized)
gctccatcagctgatcaaacaaacccaggaagagcgttcgcggagcgaacacaacttagtgaacatccagaagacccatgagcggatgcagacagagaacaagatttctccctattaccg

SEQ ID NO: 612573 - DNA, 120 bp, Artificial Sequence
  ENSG00000176476_3 (sequence is synthesized)
gacaaagctgcgtggcctctacacaaccgccaaggccgatgcagaggctgagtgcaacatccttcggaaagctctggacaagatcgcggaaatcaagtctctgttggaagagaggcggat

SEQ ID NO: 612574 - DNA, 120 bp, Artificial Sequence
  ENSG00000176476_4 (sequence is synthesized)
ctgcagcagtcggccatgaccctgcccctgtggatcgggaagcctggtgacaagcccccacccctctgtggggccatccctgcctcaggagactacgtggccagacctggagacaaggtg

SEQ ID NO: 612575 - DNA, 120 bp, Artificial Sequence
  ENSG00000176476_5 (sequence is synthesized)
gctgcccgggtgaaggccgtggatggggacgagcagtggatcctggccgaggtggtcagttacagccatgccaccaacaagtatgaggtagatgacatcgatgaagaaggcaaagagaga

SEQ ID NO: 612576 - DNA, 120 bp, Artificial Sequence
  ENSG00000176476_6 (sequence is synthesized)
cacaccctgagccggcgccgtgtcatcccgctgccccagtggaaggccaacccggagacggaccctgaggccttgttccagaaggagcagctcgtgctggccctgtatccccagactacc

SEQ ID NO: 612577 - DNA, 120 bp, Artificial Sequence
  ENSG00000176476_7 (sequence is synthesized)
tgcttctaccgcgccctgatccatgcgcccccacagcggccccaggatgactactcggtcctgtttgaagacacctcctatgcagatggctattcccctcccctcaatgtggctcagaga

SEQ ID NO: 612578 - DNA, 120 bp, Artificial Sequence
  ENSG00000176476_8 (sequence is synthesized)
tacgtggtggcttgtaaggaacccaagaaaaagtgatgccgcctggcagactcgccatcccccaacgacacagggcaggacagcagaggacgtgctgggattaaacacattccccctcta

SEQ ID NO: 612579 - DNA, 120 bp, Artificial Sequence
  ENSG00000176476_9 (sequence is synthesized)
acaatgactcggagccaccccggaagaccatgcgcagaggggtgctgatgaccctgctgcagcagtcggccatgaccctgcccctgtggatcgggaagcctggtgacaagtgagggcagc

SEQ ID NO: 612580 - DNA, 120 bp, Artificial Sequence
  ENSG00000176476_10 (sequence is synthesized)
gccaagactgtgaccgaggtggtcattgtattcaaaatagatttgcatgtatctgcatattccaaaatgcagcaggagggacagctttccgttaatctgggtgacctgaagaactaaaat

SEQ ID NO: 612581 - DNA, 120 bp, Artificial Sequence
  ENSG00000176476_11 (sequence is synthesized)
ccctctactctgaggattcgaaaggcagtgaaatgaggctgtatctagggaagcttgcccttagagcacacaagcgccccagttagctggtgttttctagaaaggagcttccttcccagg

SEQ ID NO: 612582 - DNA, 120 bp, Artificial Sequence
  ENSG00000176476_12 (sequence is synthesized)
cggcccctgcatctgccctgaggccctcaggtggtgagatcctggggctggggctttcttactctgggtaactctgagaattgtgttttcctgggtcctgacaaatattttctgtgagtg

SEQ ID NO: 612583 - DNA, 120 bp, Artificial Sequence
  ENSG00000176476_13 (sequence is synthesized)
gcatccagccttttcctccttttgtctgcaggtatgaggtagatgacatcgatgaagaaggcaaagagtgagtgtccaggccagggcagggcatggagcctgggggcagcctaacagctg

SEQ ID NO: 612584 - DNA, 120 bp, Artificial Sequence
  ENSG00000176476_14 (sequence is synthesized)
atgctgggaggtcctttgctaggacaagaggagaggccctgcgggcagcagtcaccctcctgtgggggcctgtggccaccacctgctggcatcctcccatggaggctctggcagactggc

SEQ ID NO: 612585 - DNA, 120 bp, Artificial Sequence
  ENSG00000176476_15 (sequence is synthesized)
tctaccactgagaagggacaggaggtcattcccagtgcccagaggcaggggtttcccagttctccctcagcagccagagatcatcccgccctggcccctcatctcctgccccttctgggg

SEQ ID NO: 612586 - DNA, 120 bp, Artificial Sequence
  ENSG00000176485_0 (sequence is synthesized)
cttcctggaagggtgcgataaggccgggcgaggtgcctgggatgcttctccccttccgcgaggaagagatctaattgggtagggcgggtgtagactagcctgccgagccgcccgctggca

SEQ ID NO: 612587 - DNA, 120 bp, Artificial Sequence
  ENSG00000176485_1 (sequence is synthesized)
cctgcagcctcctgggcgcccgccgggccccggcgagaaagttgttaaagggagcgaggtggttgttcctggggtccgaggcgcgcctctcacgccctgcccaacagaagccgcagtccc

SEQ ID NO: 612588 - DNA, 120 bp, Artificial Sequence
  ENSG00000176485_2 (sequence is synthesized)
gtggggtctggagacgcagtttcctgttaatgacaataaatccctgctccccctgcctcagacatctacgcagcgaaatcgagcctggccttgagggtccacaccgcgagggaagatgcg

SEQ ID NO: 612589 - DNA, 120 bp, Artificial Sequence
  ENSG00000176485_3 (sequence is synthesized)
tgcgcccattccagagcctaagcctggagacctgattgagatttttcgccctttctacagacactgggccatctatgttggcgatggatatgtggttcatctggcccctccaagtgaggt

SEQ ID NO: 612590 - DNA, 120 bp, Artificial Sequence
  ENSG00000176485_4 (sequence is synthesized)
cgcaggagctggtgcagccagtgtcatgtccgccctgactgacaaggccatcgtgaagaaggaattgctgtatgatgtggccgggagtgacaagtaccaggtcaacaacaaacatgatga

SEQ ID NO: 612591 - DNA, 120 bp, Artificial Sequence
  ENSG00000176485_5 (sequence is synthesized)
caagtactcgccgctgccctgcagcaaaatcatccagcgggcggaggagctggtggggcaggaggtgctctacaagctgaccagtgagaactgcgagcactttgtgaatgagctgcgcta

SEQ ID NO: 612592 - DNA, 120 bp, Artificial Sequence
  ENSG00000176485_6 (sequence is synthesized)
tggagtcgcccgcagtgaccaggtcagagatgtcatcatcgctgcaagcgttgcaggaatgggcttggcagccatgagccttattggagtcatgttctcaagaaacaagcgacaaaagca

SEQ ID NO: 612593 - DNA, 120 bp, Artificial Sequence
  ENSG00000176485_7 (sequence is synthesized)
ataactgaaaaagactgtcctgtcagcgatgactttatacatcaagggggtcttgttttgctagagagtttggggtttggtttgtggatttcattgtgatttataataaggcttattttc

SEQ ID NO: 612594 - DNA, 120 bp, Artificial Sequence
  ENSG00000176485_8 (sequence is synthesized)
acagaataaaataaagcaaaacgagggaggattttattgggggaagtgcagcaagaactgcctggtgtgaagtctgttcagggaacagccgggctgtcttcctggtcagggattgtcttt

SEQ ID NO: 612595 - DNA, 120 bp, Artificial Sequence
  ENSG00000176485_9 (sequence is synthesized)
cactttctttttgcgtgctgtgttctttgcattgcaggaggcagagtccagctccagttatctcaagtagagggcgtttctggtcgtcaggatacatgcggggcggaagggagacagaaa

SEQ ID NO: 612596 - DNA, 120 bp, Artificial Sequence
  ENSG00000176485_10 (sequence is synthesized)
gagactcagcagctggagtctgtagatgttcagctgagttgaaaaaaaaaaagtcctcggctataaggaaatttagtatagatgcttgccaatcttactaaaatttcccttattttcctt

SEQ ID NO: 612597 - DNA, 120 bp, Artificial Sequence
  ENSG00000176485_11 (sequence is synthesized)
tgctctacacgtctttcctttgccttgttgcttccatctccttggcactcctgcttcctcactgcttctgcttgccatgatccccaagtctctgacccaccttcctgcctgctcctctcc

SEQ ID NO: 612598 - DNA, 120 bp, Artificial Sequence
  ENSG00000176485_12 (sequence is synthesized)
tcccacattggctcagattctttccccgctgtctgtgggtccacactcccagtggcacctccaggagagaatctgattggctcagttcgccagataactcaactttcccattggctacct

SEQ ID NO: 612599 - DNA, 120 bp, Artificial Sequence
  ENSG00000176485_13 (sequence is synthesized)
ttgggtcaggtgatctccactagacctatcgcctatgcctgatggtgggtcacatggtgcaaatgttgcctgagagcttagtggattagggatgtggctgggctcatggttgacgtccct

SEQ ID NO: 612600 - DNA, 120 bp, Artificial Sequence
  ENSG00000176485_14 (sequence is synthesized)
gctgctgagcccttacgggtcaggctgggagaaggtaccatgttgtgtgactggtcatttgaggtcttgcagctgttgcttgctgggcttggcaggtgttcaaagtgaccatttttctga

SEQ ID NO: 612601 - DNA, 120 bp, Artificial Sequence
  ENSG00000176485_15 (sequence is synthesized)
agggtttttttctgagtattcctcagatgtactcccctggggccgacggtctttccttccacagggcgatgcttccctacttgcttgtgaatgtttccttcatctccaggttgtctgggg

SEQ ID NO: 612602 - DNA, 120 bp, Artificial Sequence
  ENSG00000176485_16 (sequence is synthesized)
acaattctgtcttttggaggcctgggcaggatttacagagggctccatgccagctccttcctgccgggtccacttctggtgtagggtaaacacctgcccattcatgtcctagtgttgata

SEQ ID NO: 612603 - DNA, 120 bp, Artificial Sequence
  ENSG00000176485_17 (sequence is synthesized)
gaataatcattttctttcagtacagtttcctttttttttttttttgccccggctttttagatgtagcacttaatgccagttctcgagctccccaaacttaagggacacaggtcaacaagc

SEQ ID NO: 612604 - DNA, 120 bp, Artificial Sequence
  ENSG00000176485_18 (sequence is synthesized)
agtaggtctttggaagctcgctctctcacatggtataaggtgagggggacacatggaatgtaaacctccaaactaattatgggggaaaaaggaatgagaaaaacaaacacaagaaggcaa

SEQ ID NO: 612605 - DNA, 120 bp, Artificial Sequence
  ENSG00000176485_19 (sequence is synthesized)
aacaaaaacacctggttcaattaaaaacaacaacaaagcaaaacaaaaaaaacccaaaaccaaaccacacaataaatgagaaaaaaattacataaaacagatgacatgtatagaaataaa

SEQ ID NO: 612606 - DNA, 120 bp, Artificial Sequence
  ENSG00000176485_20 (sequence is synthesized)
aaaatagaatggaggaactaattccaaatatataagtaatcctaagtggactaaatttgcaaagtaaaaggcaaacattacactggattaaaaaacaaatccagggaatacagtttacag

SEQ ID NO: 612607 - DNA, 120 bp, Artificial Sequence
  ENSG00000176485_21 (sequence is synthesized)
gggtgacctcacgccggcccggccaccgcggccattagacccggtccaattgctggggctgcagcgctgcctccgagaccgcgagacatctacgcagcgaaatcgagcctggccttgagg

SEQ ID NO: 612608 - DNA, 120 bp, Artificial Sequence
  ENSG00000176485_22 (sequence is synthesized)
cttgggttaaaaagtattctgaaagcatcctcactgtcctccctggtcccgcacagtgccagagccgggggtcttggactgagtcagagttgcatgggtgcatctggagggaccttgatt

SEQ ID NO: 612609 - DNA, 120 bp, Artificial Sequence
  ENSG00000176485_23 (sequence is synthesized)
gagaggtgaggtcgcaggagctggtgcagccagtgtcatgtccgccctgactgacaaggccatcgtgaagaaggaattgctgtatgatgtggccgggagtgacaagtaccaggtcaacaa

SEQ ID NO: 612610 - DNA, 120 bp, Artificial Sequence
  ENSG00000176490_0 (sequence is synthesized)
cggccgcggcgccgcagggaccagcgggcccaggctcggtctggggttcttgcagctggcaccagccctcccggccccggccgcccacccgccgcggggaagatgccggaacagagtaac

SEQ ID NO: 612611 - DNA, 120 bp, Artificial Sequence
  ENSG00000176490_1 (sequence is synthesized)
ccacccgccgcggggaagatgccggaacagagtaacgattaccgcgtggtggtgttcggggcgggcggcgtgggcaagagctcgctggtgctgcgcttcgtgaagggcacgttccgcgac

SEQ ID NO: 612612 - DNA, 120 bp, Artificial Sequence
  ENSG00000176490_2 (sequence is synthesized)
acctacatccccaccatcgaggacacctaccggcaggtgatcagctgcgacaagagcgtgtgcacgctgcagatcacagacaccaccggcagccaccagttcccggccatgcagcgcctg

SEQ ID NO: 612613 - DNA, 120 bp, Artificial Sequence
  ENSG00000176490_3 (sequence is synthesized)
tccatctccaagggccacgccttcatcctggtgttctccgtcaccagcaagcagtcgctggaggagctggggcccatctacaagctcatcgtgcagatcaagggcagcgtggaggacatc

SEQ ID NO: 612614 - DNA, 120 bp, Artificial Sequence
  ENSG00000176490_4 (sequence is synthesized)
cccgtgatgctcgtgggcaacaagtgcgatgagacgcagcgggaggtggacacgcgcgaggcgcaggcggtggcccaggagtggaagtgcgctttcatggagacctcggccaagatgaac

SEQ ID NO: 612615 - DNA, 120 bp, Artificial Sequence
  ENSG00000176490_5 (sequence is synthesized)
tacaacgtcaaggagctcttccaggagctgctgacgctggagacgcgccggaacatgagcctcaacatcgacggcaagcgctccgggaagcagaagaggacagaccgcgtcaagggcaaa

SEQ ID NO: 612616 - DNA, 120 bp, Artificial Sequence
  ENSG00000176490_6 (sequence is synthesized)
tgcaccctcatgtgagcccggaacgcccgcctgcccgccgcccacccccactgacccccgctgcctcccccaacaccgacaccctcctcggcctcctcctcttctctcatccttcctccg

SEQ ID NO: 612617 - DNA, 120 bp, Artificial Sequence
  ENSG00000176490_7 (sequence is synthesized)
acacctcggctggggaaaccgaggccaccgcccccccctccgctgcccctgcccaccccgaggcagggctggggcttttcttcctcccctgctctctctccaccctcctgttctgtctgt

SEQ ID NO: 612618 - DNA, 120 bp, Artificial Sequence
  ENSG00000176490_8 (sequence is synthesized)
accctccaaaaccaagagccggaggtggcccccttgtcctgcagatgggaaaacaggatggggagctggcaagaggagctgcttgttcccaccaggaccagaggaggctgcgtttccccg

SEQ ID NO: 612619 - DNA, 120 bp, Artificial Sequence
  ENSG00000176490_9 (sequence is synthesized)
tttccatctctttccctggggtgtccccagccagacctgcgcgtcctgtccctcacatttgatcactgtgaccttctgggggaggggggagttgaaaatgcacatcggcctcagatattt

SEQ ID NO: 612620 - DNA, 120 bp, Artificial Sequence
  ENSG00000176490_10 (sequence is synthesized)
ttttcttttttctcctatttggtgttaacatacacccaagcccacccggcccgtcgtgacctctgatctgtgcccactcctccggttccagacgcacctctctcctctgtcttcacagtg

SEQ ID NO: 612621 - DNA, 120 bp, Artificial Sequence
  ENSG00000176490_11 (sequence is synthesized)
gggtgtggggcccgtgggatgggcctcaggccaccaggcaataaccacagggcctgcagcagtgcccctgccagccccgaatcccacccccgggaccagccacatccacagcacaactgc

SEQ ID NO: 612622 - DNA, 120 bp, Artificial Sequence
  ENSG00000176490_12 (sequence is synthesized)
cccgctggagaggcaccatgggcgtggaggggcttcccggacaccgcccacccgggacccgcctcttccaccaagacagagacgttagcaacgcatggcgggtggggacctggggtgctc

SEQ ID NO: 612623 - DNA, 120 bp, Artificial Sequence
  ENSG00000176490_13 (sequence is synthesized)
aggagggggtacccggggccccggccagagatacatcaattacacccccgtggggggacagccgatgggagccagcaccagcaggatccgagggcgccccggacagaggtctgccccacc

SEQ ID NO: 612624 - DNA, 120 bp, Artificial Sequence
  ENSG00000176490_14 (sequence is synthesized)
tgtgccccagagagcagggcctgcccgggaaggtggcgtcctggagtcgagtgtacctgcagccatgaggttctgggtgttttttgagagagtctgagtgacaccacactcgtgtgaccc

SEQ ID NO: 612625 - DNA, 120 bp, Artificial Sequence
  ENSG00000176490_15 (sequence is synthesized)
cacagggttgtgtccaacatacacggaagtggctatggaatggtgtatttgtgcaacctggggtgcgcggatgggtgacttgtatctaagtgcatctgcgtgtatacctgtgtgtgtctg

SEQ ID NO: 612626 - DNA, 120 bp, Artificial Sequence
  ENSG00000176490_16 (sequence is synthesized)
tctgggatgatatgtttttgtggcagtctgtgtgtgtaatagtggtgtagggtatacagagaggtgggtagttgtagatacctgtgtgtggttgtcagcaagactggatatgtgtgaggt

SEQ ID NO: 612627 - DNA, 120 bp, Artificial Sequence
  ENSG00000176490_17 (sequence is synthesized)
gtctgtgtgaatctttgtgcctgtatgagcatgactatattttggggagtgggtgatatggtttatctgagagcatttatctgtaaatatgtttgtcctgattgagggacacgatctgtg

SEQ ID NO: 612628 - DNA, 120 bp, Artificial Sequence
  ENSG00000176490_18 (sequence is synthesized)
ttccactctatagcaacatgactctagcaatgtgactttcggttccaaatctgtatcagtcagctactgctgtgtaacaaatgaccacaaatgtagcaaccagaaacaacacatgcttat

SEQ ID NO: 612629 - DNA, 120 bp, Artificial Sequence
  ENSG00000176490_19 (sequence is synthesized)
tatctcatagattctgtgggtcaagagcctgggtgcaggttggctgggtcctctacttgggatctcaggaggctgcaatcaaagcattcgccaggcagaggtctcatctgaaggcctgat

SEQ ID NO: 612630 - DNA, 120 bp, Artificial Sequence
  ENSG00000176490_20 (sequence is synthesized)
cggggaaggatttgcttcttagaagctcatgtggttgttgcagcattcagttccttgctgttgcaagactgaaggcctcagttcctcgctggctgttggctggaagctgccctttgttct

SEQ ID NO: 612631 - DNA, 120 bp, Artificial Sequence
  ENSG00000176490_21 (sequence is synthesized)
gtaccatgtgggtctctccacagcggggctcggagcatggcagctaagttagtgagggaaggtgagatggaggttttggtcttattgggtgtgaggaagcaacgtgtgtgtgtgcgcacg

SEQ ID NO: 612632 - DNA, 120 bp, Artificial Sequence
  ENSG00000176490_22 (sequence is synthesized)
cccttttgtgcagtgagagagagagagagattgcacacatgtgtctctgtagtcatgtggccaggtgggactatgtaggtaacagattgctcgtgtctgatttggtacaagcatgtttgt

SEQ ID NO: 612633 - DNA, 120 bp, Artificial Sequence
  ENSG00000176490_23 (sequence is synthesized)
tttcctctgtgttcgtgtgagtgtttactcaacaaatgtttattggacacactcagagagagggagtgtgcacacgtgcgtgtgtgttgctatccagcacgtggaccgggctcccagaag

SEQ ID NO: 612634 - DNA, 120 bp, Artificial Sequence
  ENSG00000176490_24 (sequence is synthesized)
agctggcattgtgtctgagcagagctgggtccccccaaaacttgggctggcccagggcccaccagcagctgatgttgcctcctctcctgtcctggcagtagcttctgggttctgaaggtg

SEQ ID NO: 612635 - DNA, 120 bp, Artificial Sequence
  ENSG00000176490_25 (sequence is synthesized)
ccggagagagtgaggctgggcaggggtctgcggccctttctcagggacacaccctgatagcacaatctccttggggccctgcccacctccaggcctctcccacctcaggccctgcccgac

SEQ ID NO: 612636 - DNA, 120 bp, Artificial Sequence
  ENSG00000176490_26 (sequence is synthesized)
cctggggagagagggcatctgcaataggaggggacccgagcctgtcctggctgctggcccatcctgcctgggcatccctggtgctggggactgtgccaggccatgcttgctgtgactccg

SEQ ID NO: 612637 - DNA, 120 bp, Artificial Sequence
  ENSG00000176490_27 (sequence is synthesized)
cccctgccccctctccccccgcatgtgggtgcccccactcccccatcgtggggtctgtgtagccttcgctctagacatagtcttcctgcaataaaaaagtggatcctgcattccccacca

SEQ ID NO: 612638 - DNA, 120 bp, Artificial Sequence
  ENSG00000176490_28 (sequence is synthesized)
agcagcggccgcggcgccgcagggaccagcgggcccagattcccagcctcaggatcccatttatggcaggctcggtctggggttcttgcagctggcaccagccctcccggccccggccgc

SEQ ID NO: 612639 - DNA, 120 bp, Artificial Sequence
  ENSG00000176495_0 (sequence is synthesized)
gcaatccattctcttgtctcctttctgatattaggagcactgagccaatgactgggggaggaaatattacagaaatcacctatttcatcctgctgggattctcagattttcccaggatca

SEQ ID NO: 612640 - DNA, 120 bp, Artificial Sequence
  ENSG00000176495_1 (sequence is synthesized)
taaaagtgctcttcactatattcctggtgatctacattacatctctggcctggaacctctccctcattgttttaataaggatggattcccacctccatacacccatgtatttcttcctca

SEQ ID NO: 612641 - DNA, 120 bp, Artificial Sequence
  ENSG00000176495_2 (sequence is synthesized)
gtaacctgtccttcatagatgtctgctatatcagctccacagtccccaagatgctctccaacctcttacaggaacagcaaactatcacttttgttggttgtattattcagtactttatct

SEQ ID NO: 612642 - DNA, 120 bp, Artificial Sequence
  ENSG00000176495_3 (sequence is synthesized)
tttcaacgatgggactgagtgagtcttgtctcatgacagccatggcttatgatcgttatgctgccatttgtaaccccctgctctattcatccatcatgtcacccaccctctgtgtttgga

SEQ ID NO: 612643 - DNA, 120 bp, Artificial Sequence
  ENSG00000176495_4 (sequence is synthesized)
gggtctaatgtcatcagacatttcttctgtgacatgccccaactgttaatcttgtcctgtactgacactttctttgtacaggtcatgactgctatattaaccatgttctttgggatagca

SEQ ID NO: 612644 - DNA, 120 bp, Artificial Sequence
  ENSG00000176495_5 (sequence is synthesized)
agtgccctagttatcatgatatcctatggctatattggcatctccatcatgaagatcacttcagctaaaggcaggtccaaggcattcaacacctgtgcttctcatctaacagctgtttcc

SEQ ID NO: 612645 - DNA, 120 bp, Artificial Sequence
  ENSG00000176495_6 (sequence is synthesized)
ctcttctatacatcaggaatctttgtctatttgagttccagctctggaggttcttcaagctttgacagatttgcatctgttttctacactgtggtcattcccatgttaaatcccttgatt

SEQ ID NO: 612646 - DNA, 120 bp, Artificial Sequence
  ENSG00000176495_7 (sequence is synthesized)
tacagtttgaggaacaaagaaattaaagatgccttaaagaggttgcaaaagagaaagtgctgctgagtttacagattctgagatttctgccagatatggcccatcagaatctccctaacc

SEQ ID NO: 612647 - DNA, 120 bp, Artificial Sequence
  ENSG00000176495_8 (sequence is synthesized)
atctctcttgctgtgagtggacagccaattttgtggtcaaacatgcccatcttggagtgtgatacgcccacctgaaaaattccattggaaaagaaataagcaatttcaacctttggcaag

SEQ ID NO: 612648 - DNA, 120 bp, Artificial Sequence
  ENSG00000176495_9 (sequence is synthesized)
aaccctgtcttcttggaggacctgggtaaaggtcacaggacaagacttagaacagtggattctgtaccgtctcaatatccatgtaattcttccagtaaggatacacatggaacagagttt

SEQ ID NO: 612649 - DNA, 120 bp, Artificial Sequence
  ENSG00000176495_10 (sequence is synthesized)
atggtcctcagtctctctcattcttcaactcttcccacttcctcacttccacattctgtacctaaagctcttcgttggattctcttactccttactcaaccttctgtaaaaagaaaaacc

SEQ ID NO: 612650 - DNA, 120 bp, Artificial Sequence
  ENSG00000176495_11 (sequence is synthesized)
tcaaacataaaatttcaggtattattctggagtgagggatgggtattgaattcttaaggatgtgaccttgaacactgctatcttcttctttttcacctgtaaaatggggatgttgggata

SEQ ID NO: 612651 - DNA, 120 bp, Artificial Sequence
  ENSG00000176495_12 (sequence is synthesized)
aactacagtcaaatatatgttgtctataaagcctgaaaaatgcatcaaaaatagtaatttactgagtttcagaggaatttcctcagatcaaaacctgcttgggtatgtttcccagttttc

SEQ ID NO: 612652 - DNA, 120 bp, Artificial Sequence
  ENSG00000176495_13 (sequence is synthesized)
tccaccccaaggacccttttaatttaatttttgctcttcaggattctgttttcaaaatgctaataattaacttgattctgtttaaatacatagctttgatttatgatctctgaatagcaa

SEQ ID NO: 612653 - DNA, 120 bp, Artificial Sequence
  ENSG00000176495_14 (sequence is synthesized)
gagacacactgagtcttaatgatatgacggagtactcctatataaggctgttagaacttctgaaatacttcaaattgctctctgttgtaatttttggagaccctgggatctgaagacact

SEQ ID NO: 612654 - DNA, 120 bp, Artificial Sequence
  ENSG00000176495_15 (sequence is synthesized)
gtcctgggcaacacagatatcagagatacccactccaagcacaagaagtgttgctttaaatattctttgtaatcttcttgtacatatattgttctttattgagcaacgtttctgggttta

SEQ ID NO: 612655 - DNA, 120 bp, Artificial Sequence
  ENSG00000176495_16 (sequence is synthesized)
cctgattttgtaccctgcacaactttgcaaactgaccatgtccttattagattagcactggataggattttgatcacctatattcatctagtaaaatctttaacctatctttacatcaat

SEQ ID NO: 612656 - DNA, 120 bp, Artificial Sequence
  ENSG00000176495_17 (sequence is synthesized)
tatcttttcctatgcgaattgtctcaggagatggtgaacatatgcaaggaattaatcaaagagagtgaatgtatccagagttttttctctttttctctagcttatcaaatgtcaacaagg

SEQ ID NO: 612657 - DNA, 120 bp, Artificial Sequence
  ENSG00000176495_18 (sequence is synthesized)
gcacaaaatatgccaatatggaccaacagatgactcaatgccacagacatcaggatctttaggtcctggaggttcattatttttatcctacatcaggataaataatgtggcctcatcatt

SEQ ID NO: 612658 - DNA, 120 bp, Artificial Sequence
  ENSG00000176495_19 (sequence is synthesized)
tatgaatttgtccaaaattatttgtgaaacaacaagatttagaaatcttttgtttcctgtggcttctcagatcaaagatggctcaatgttaggactttgccactacagaaatgaggcctg

SEQ ID NO: 612659 - DNA, 120 bp, Artificial Sequence
  ENSG00000176495_20 (sequence is synthesized)
gcacagacccccaggagttcagaaacatcatctcccatatatgctgatacagcataataaagacatggtggtaaccattgtttattctgtgtttctggatgggaaagaataaacagacag

SEQ ID NO: 612660 - DNA, 120 bp, Artificial Sequence
  ENSG00000176495_21 (sequence is synthesized)
aggggttctgccattggaaagggaaaaaaaagcaatatattggcctggttgtgtctttaagaaagagcaacatgagatagctgcagtttgcctaagacctctctcagctaatcatctaat

SEQ ID NO: 612661 - DNA, 120 bp, Artificial Sequence
  ENSG00000176495_22 (sequence is synthesized)
acatttttggcaatttccttgcctacaccagctgtagcataagaaagaaggaggtgattttaatcatgaagtgggatagaaacaaggatatggttcctgcaatcatatttacttatgagt

SEQ ID NO: 612662 - DNA, 120 bp, Artificial Sequence
  ENSG00000176495_23 (sequence is synthesized)
ctgatgatttgatttcttgtatctagagtctagtgggaaattataatggagatgatattcaaagttcacagccaatagcaacatctgatactgtgggactcaaactttctttttctcccc

SEQ ID NO: 612663 - DNA, 120 bp, Artificial Sequence
  ENSG00000176495_24 (sequence is synthesized)
cattaaatttagaaaatttactcttgtttgactgggtaactattgaatccaggagaggatgaaagaaacatgggtcaaatatatttcagtcaagctcaacctagacaagctaacctgcag

SEQ ID NO: 612664 - DNA, 120 bp, Artificial Sequence
  ENSG00000176495_25 (sequence is synthesized)
tcatgttcagagaagtcatgcatttaagcctactctacatcagccagtcccagctgatctccagatgatctgaggatatgtgagtgataataaatgaatgttgcagtcagcactggattt

SEQ ID NO: 612665 - DNA, 120 bp, Artificial Sequence
  ENSG00000176495_26 (sequence is synthesized)
tgcagtttgttatacagcagtagttaaccaatatacttcataatttaaaattaaaaattttctccttgtccaaactgcctggcgtaaaattcaggctctgccacccccaaggtgtgtgat

SEQ ID NO: 612666 - DNA, 120 bp, Artificial Sequence
  ENSG00000176495_27 (sequence is synthesized)
gctgggcaagccacacaatcttttgtgcctcagttttctcatttgtaaaattgagatattatatatctattttggagttgtttaggattattgagctgatacttattcaaaactcagaat

SEQ ID NO: 612667 - DNA, 120 bp, Artificial Sequence
  ENSG00000176495_28 (sequence is synthesized)
agggaccccagcatataataaacgctatacgtgaatcatgtattattatttattaagtgctttctatgttcaaagaatttaaatggtttcagttgagctaagttttactgttataccaac

SEQ ID NO: 612668 - DNA, 120 bp, Artificial Sequence
  ENSG00000176495_29 (sequence is synthesized)
ttcacagatgaataaacttaggccagagaaattcagaaacacagctagtaagtgaaggggtgggaatccaaactaacattgcagatatcaaagcctcctcccttcttcaataccccttaa

SEQ ID NO: 612669 - DNA, 120 bp, Artificial Sequence
  ENSG00000176495_30 (sequence is synthesized)
tgtataaggtgccaaattgcttattaatatacaaggtacatatgaataaaataaagcaatatttatgagatgtagccaaagctaaaatcagaagtaacaatcttttgaaaagaaatacaa

SEQ ID NO: 612670 - DNA, 120 bp, Artificial Sequence
  ENSG00000176495_31 (sequence is synthesized)
taaagtaacaaagctgtgaatcagaaaaaaattgaaaaaagaatgccaattcaaaccttaagaaaactagaggagaagtggaggagtgggcaagatggctgaccagaagcagctagtgtg

SEQ ID NO: 612671 - DNA, 120 bp, Artificial Sequence
  ENSG00000176495_32 (sequence is synthesized)
tgtggctgtcatggaaaggaacagaaggggtgagcattaggtctttgcaaccctcaagtcaggagatctccttgtgaacccactccaccagggctttcagtcttcagtctaatacacaga

SEQ ID NO: 612672 - DNA, 120 bp, Artificial Sequence
  ENSG00000176495_33 (sequence is synthesized)
gctatgtggagtcttggcagagcagccactcaggccagcatggagtcctcgaaggcttagatacttgggttttctggtaaaagtagctgcagccccagcaaagttggaggttagactcct

SEQ ID NO: 612673 - DNA, 120 bp, Artificial Sequence
  ENSG00000176495_34 (sequence is synthesized)
atgccacctcacaagataagatccactggcttggaattccagacagctaccagtagtggcattgtacctccctaagaaggagctcaaagggaagagctgggctgtcatctttgctgttca

SEQ ID NO: 612674 - DNA, 120 bp, Artificial Sequence
  ENSG00000176495_35 (sequence is synthesized)
gatgccttagctgttccggcctttgggctttgaagaatctgagctgacccagggtggaagagaacccccagcctagcacaacacagctgctctacccaaacatagccagactatgcttta

SEQ ID NO: 612675 - DNA, 120 bp, Artificial Sequence
  ENSG00000176495_36 (sequence is synthesized)
ggtgggtgtccaatcccattcctcttcactgggcaggacctcccaactggggcctgcagccacccccaccaagctctccaggtgacaaagatttgaattatccctgagatggcactcaca

SEQ ID NO: 612676 - DNA, 120 bp, Artificial Sequence
  ENSG00000176495_37 (sequence is synthesized)
gagggagaagtgggttaccatctttgctgttttaatgacttagcaactccagcctttgggctttgaagtatctgagacgactgaggactgaagtagacccccaacacagcacagctgttc

SEQ ID NO: 612677 - DNA, 120 bp, Artificial Sequence
  ENSG00000176495_38 (sequence is synthesized)
taccaaaacgtggccagactgctttttcaagtggttcctaatcctgttcctcctcactgggtggaacctctcaactaggctctccagccacttcctacagctgctttgggccaccaaaac

SEQ ID NO: 612678 - DNA, 120 bp, Artificial Sequence
  ENSG00000176495_39 (sequence is synthesized)
tgcatacctccctgggacaaagctctcagaggaagggacaagccactgtctttgctgtttcacagccttcactggtgacacctccaggttctgggaaatctgaggtgaccaggtactgga

SEQ ID NO: 612679 - DNA, 120 bp, Artificial Sequence
  ENSG00000176495_40 (sequence is synthesized)
gcagcccccaagcataaaacagcagccctatggaaaagtggccagagtgtttcgtgggtttccattcccatatcttctcaccaggaagatcttcaggcctgggcttccagccaccaccag

SEQ ID NO: 612680 - DNA, 120 bp, Artificial Sequence
  ENSG00000176495_41 (sequence is synthesized)
gggcttccagccaccaccagccagaactatcaagccagtatcaaatcaccaactccctagacagagcttccgaggtcaacagaaagtttctatgccactgcctctgcagtggaactgccc

SEQ ID NO: 612681 - DNA, 120 bp, Artificial Sequence
  ENSG00000176495_42 (sequence is synthesized)
aatgagcaaagacactaagtgctttatccacacctctaataatctgtagtcaacccaaggagaagaggctggtctgtctcccacgggtcccacacaccccccaccactcatcaccagaca

SEQ ID NO: 612682 - DNA, 120 bp, Artificial Sequence
  ENSG00000176495_43 (sequence is synthesized)
aagaacccctggcttgggcccacaacacataccctctatcttgggctggctgcactgagcgattgctgacctgcatctctctggggtggagcccccaggagtcaaacaaatgacccttag

SEQ ID NO: 612683 - DNA, 120 bp, Artificial Sequence
  ENSG00000176495_44 (sequence is synthesized)
ccacaaccattacgaagatctcttccactgctgtctctaagctggggaaggaacgtaaacacaaagatctccccagagctgcagcaggcagcccaggagtgctgaatcaggaactacagg

SEQ ID NO: 612684 - DNA, 120 bp, Artificial Sequence
  ENSG00000176495_45 (sequence is synthesized)
cagcactcagggggagaggaaaccacacgttctgagcactgagagggaacacagctgcaaatgtgaggaaacataggggagccacacaacagaacaagagtcttccagctgtcctgtaag

SEQ ID NO: 612685 - DNA, 120 bp, Artificial Sequence
  ENSG00000176495_46 (sequence is synthesized)
cctaggtatcacctactgaatcacacctcaaaacttcaacaccaaaaatatctcactaatatatccccctctgaaacaagagataagaagtgagcatcaaacacagaccctacacaaagc

SEQ ID NO: 612686 - DNA, 120 bp, Artificial Sequence
  ENSG00000176495_47 (sequence is synthesized)
cttggcccagtgaaaacatccagaaaataagttgattgactatactcaaactactctgcagttaaagaaacacccacatgcagagatgagaaaaaaaaaacaatgtaagaactctggtaa

SEQ ID NO: 612687 - DNA, 120 bp, Artificial Sequence
  ENSG00000176495_48 (sequence is synthesized)
ctcaaatggccaaaatatcatatgtcctccaaatgatcacaccagttctccagcaaaggtccttaaccaggccaaactggctagaatgacagaaatagaattcagaatatggatagaaaa

SEQ ID NO: 612688 - DNA, 120 bp, Artificial Sequence
  ENSG00000176495_49 (sequence is synthesized)
aaaaagatcatggaaattcaggaggatggcaaaatccaatccaagaaaaataagaatcacaataaagtgacacagaagctgaaagaaaaatagccagtataaaaaagcacttagtgggtc

SEQ ID NO: 612689 - DNA, 120 bp, Artificial Sequence
  ENSG00000176495_50 (sequence is synthesized)
tgacagagctgaatagcgcaatacaagaattccacaatgcaatcaaaagtattaagagcagaataaaccaagctgaggaaacaatctcagaacttgatgctggttctctgaaataagaca

SEQ ID NO: 612690 - DNA, 120 bp, Artificial Sequence
  ENSG00000176495_51 (sequence is synthesized)
gtcagacacaaataaagaaaaaaaaagaaataaacaaagcctccaagaagtatgggttatgtaaacaggccaaatctacaagtaattgacatcactgaaagggaggggaaggaagaaaac

SEQ ID NO: 612691 - DNA, 120 bp, Artificial Sequence
  ENSG00000176495_52 (sequence is synthesized)
aacttggaaaatatatttcagaatattgtccatgaaaatatccccaaccttgctagagaggacaacagtcaaattcagtaaatacagagaagtccttcaagattctacacaagaagataa

SEQ ID NO: 612692 - DNA, 120 bp, Artificial Sequence
  ENSG00000176495_53 (sequence is synthesized)
tcaccaagacacataatcattatgttttccaaggtcaaaataaaagaatgttaaaggcagctataaggaaagggtgagtcatctacaaagggatccccgtcaggctaacagcagacctct

SEQ ID NO: 612693 - DNA, 120 bp, Artificial Sequence
  ENSG00000176495_54 (sequence is synthesized)
ccactggtaccctacaagccagaagagtttggggttttgtcttccacatccttaaagaaaatagtcttcaaccaagaatttcatatctagccaaactaagctcctaagtgaaggaataat

SEQ ID NO: 612694 - DNA, 120 bp, Artificial Sequence
  ENSG00000176495_55 (sequence is synthesized)
acaatccttctcagataagcaaatgttgagggacttcattaccaccagacctgccttacaagagatcttgaaaggagcagtaaatatagaaaggaaaaactgctaccagctaatacaaaa

SEQ ID NO: 612695 - DNA, 120 bp, Artificial Sequence
  ENSG00000176495_56 (sequence is synthesized)
acacagttaaacacagaaaccaatgtcactatgaagcaaccacacaaacaagtaaacataataaccagctgacagcacaatgacagaatcaaatgcacacatatcagtattaaccttgaa

SEQ ID NO: 612696 - DNA, 120 bp, Artificial Sequence
  ENSG00000176495_57 (sequence is synthesized)
tgtaaatgggctaaatgccccactaaaaaggcacagagtggcaagcaggataaaaaaggaagacccaatggtatgctgtcttcaagagacccgtctcacatgtaagacacacacaggctc

SEQ ID NO: 612697 - DNA, 120 bp, Artificial Sequence
  ENSG00000176495_58 (sequence is synthesized)
aaaataaagggaaggagaaacttccatggctgatttgttactgttgctgccaaatgtcacagactgaaagaatcaaaattgtaaaaatttctattctaaccaattaatgtatgaattatg

SEQ ID NO: 612698 - DNA, 120 bp, Artificial Sequence
  ENSG00000176495_59 (sequence is synthesized)
tgaaataccaatcaaaatcacaacatgcttgtggaaactaaaagttgattatgaaattaatacagaaaagagcaaagtatatccaagatattcttgcccttacaaatatcaatgtattca

SEQ ID NO: 612699 - DNA, 120 bp, Artificial Sequence
  ENSG00000176495_60 (sequence is synthesized)
gaagctatataagtgacataagcaagatggggagtcagggatctcagccctcatcacccacagaaaacaactggacagctatctgtgcatgaaaattgctataggaaggctctgcagtcc

SEQ ID NO: 612700 - DNA, 120 bp, Artificial Sequence
  ENSG00000176495_61 (sequence is synthesized)
agttaaggagctgcagcaacacagtgaagacaagtgaatgaacgtgttagtcagagttctccagagagacaaaaccaataggatacatcagaggagttcctgaactccttaaaattgttg

SEQ ID NO: 612701 - DNA, 120 bp, Artificial Sequence
  ENSG00000176495_62 (sequence is synthesized)
gaaaaatattctgtatatatacatcttttttgatcaaagctttacatcatttggattcacaagaaggaccatgagataacctctgtgatagctctaggctgttatcttgtaggctttttc

SEQ ID NO: 612702 - DNA, 120 bp, Artificial Sequence
  ENSG00000176495_63 (sequence is synthesized)
ttttcacatgtccatgtgttatctacacacaattgggttcttttgctttaatatttgtgtgtatgtggagtattcctttttcttttaaacaaaggtaagactagactttctctgaatatg

SEQ ID NO: 612703 - DNA, 120 bp, Artificial Sequence
  ENSG00000176495_64 (sequence is synthesized)
ctatttggcaacttggtttttttttttccactaaagatagccttccaggtcagcacataaagataaacatttttaatgtttgcatagtgtccctgcttaatattacatagagtagctggg

SEQ ID NO: 612704 - DNA, 120 bp, Artificial Sequence
  ENSG00000176495_65 (sequence is synthesized)
tcataattatttaatcagtactcaaaaacatagtatgagtgcaaaaatgttcactgatttggagagaaagattgtgttatggcaagttagaagaaacagaatatgtgaaggtgaggaatt

SEQ ID NO: 612705 - DNA, 120 bp, Artificial Sequence
  ENSG00000176495_66 (sequence is synthesized)
cagaggaacctctataggtcaccaccttagggaaaaaaaaagacaaaataaggattggaaaactgcagaatgtttaaatttgttaccaccaaagctgaaagcacaatttgtgcagaagga

SEQ ID NO: 612706 - DNA, 120 bp, Artificial Sequence
  ENSG00000176495_67 (sequence is synthesized)
gttacggtacagctaaggctaacctgcatctatgctccagcttccaggactcctccctatgccagagacattataataacagagaaaacaacaacaacaacaacttacaaataaaggatg

SEQ ID NO: 612707 - DNA, 120 bp, Artificial Sequence
  ENSG00000176495_68 (sequence is synthesized)
taaaatgaattataatacaaggcaaggccacatgtagtctagctaagcccatcttgagggaaggtccagggacaaatttggaaaaaattataggataggcaacagataaaggtatgaagt

SEQ ID NO: 612708 - DNA, 120 bp, Artificial Sequence
  ENSG00000176531_0 (sequence is synthesized)
ggtggggccgggccggggccggtggggccgggatggccggatgccgaggccacgggtggggcaagcccgtggctccctcctccctcgggagctgttggacctgttgtcccccctccactt

SEQ ID NO: 612709 - DNA, 120 bp, Artificial Sequence
  ENSG00000176531_1 (sequence is synthesized)
ccgggctgctggggagggggaccgggcggcctctctcctccctcttcccctgccacctgtctcataggcagaagcggccgtgcccagcgcgcagagcggagcgcgccgaagcctgagctc

SEQ ID NO: 612710 - DNA, 120 bp, Artificial Sequence
  ENSG00000176531_2 (sequence is synthesized)
gtgagggggccgaggctgtggggaggtggcagttggacttcggaatctcaaggactccgactcctggcttgttcagagaaggagagccccgactcctggatccctgggagtcccagcggc

SEQ ID NO: 612711 - DNA, 120 bp, Artificial Sequence
  ENSG00000176531_3 (sequence is synthesized)
catggggacgcgaagcagccccgaggaggggaccccgccgccgctggtcccggaatgcgacgtggaggtccagccccagggccatcccgaggagtcccgggaacaggaggcatccgaagt

SEQ ID NO: 612712 - DNA, 120 bp, Artificial Sequence
  ENSG00000176531_4 (sequence is synthesized)
cctggcggaaccttcgagccgcgggggagctgagcagcaggcagaggaagaagaagtgggagaaggcagcagcactgagagcagccgcgacgcgcccgaggctacgcctccgatagctat

SEQ ID NO: 612713 - DNA, 120 bp, Artificial Sequence
  ENSG00000176531_5 (sequence is synthesized)
ggcggccacacctcccgcatccacctcttcgcgggaaggggtgcgaggggcggcgcggcgcctgcaaggacagcagctggaggcattgactcgtgtggccctgatggagcagcgagtgaa

SEQ ID NO: 612714 - DNA, 120 bp, Artificial Sequence
  ENSG00000176531_6 (sequence is synthesized)
ggagctacagcgccagaggaaggagctgaggatcgagatggaggtggaggtggccttgctgcggggtgagctggctggggagcgagtggccgctcgccgggaggaggagcagctgcggga

SEQ ID NO: 612715 - DNA, 120 bp, Artificial Sequence
  ENSG00000176531_7 (sequence is synthesized)
gctgctggagcagcaggcggcctcggagcagcgcggccgccagcagcgggaacaggaacagaggcggctgagccaggaacgggatcgcctagagggtcttcgccagagactccgcaaggc

SEQ ID NO: 612716 - DNA, 120 bp, Artificial Sequence
  ENSG00000176531_8 (sequence is synthesized)
ccagggacagctcgactcacagccagaggaccaacgcgagcggcttctgcagggtgtgcaggagatgagggaacaactggatgtggcccaacgtgcctatgaggacctggagttccagca

SEQ ID NO: 612717 - DNA, 120 bp, Artificial Sequence
  ENSG00000176531_9 (sequence is synthesized)
actggagcgggagagccggcaggaggaggaggatcgggacagccctgggccccaggtgccagaccccaaggtccaggaactccaggccagcatggcgcagcacagaaggggtgctctgca

SEQ ID NO: 612718 - DNA, 120 bp, Artificial Sequence
  ENSG00000176531_10 (sequence is synthesized)
tgagccggaagaaggaggaggcccttcaggccctgtcacaggaacggagccggctgctcgagctcaattgccttcagggaacacctggcggggacttctctgagcccaacccggccctca

SEQ ID NO: 612719 - DNA, 120 bp, Artificial Sequence
  ENSG00000176531_11 (sequence is synthesized)
ctaagctgctgttcacccagaagacagaccgccagctgctggtgctccaggatgccgtggcccactccgctgccacccctacttcttcctgcctcttttctgtccacagctccctgcagg

SEQ ID NO: 612720 - DNA, 120 bp, Artificial Sequence
  ENSG00000176531_12 (sequence is synthesized)
gctccattggcctccagaggactgggagcctgccccggaaaaggggggagagggggagccagagaggatccccccgacctctgtccttccattgtactgaatccctggaggcctcagctc

SEQ ID NO: 612721 - DNA, 120 bp, Artificial Sequence
  ENSG00000176531_13 (sequence is synthesized)
tcccgccagcagtgggggactccggcagataccccctctaccagctgctgaactgtggccgtgggaatagctgtggggccatccatccagacattgcccacatggagcggctcctgcagc

SEQ ID NO: 612722 - DNA, 120 bp, Artificial Sequence
  ENSG00000176531_14 (sequence is synthesized)
aggccatggcggagagggagcggctgctcaaggcccgggaaggaacaagaaggggcacggaaggttcctcaggccctgctgttcctgccatcacggccccacccaccccaccccaccctc

SEQ ID NO: 612723 - DNA, 120 bp, Artificial Sequence
  ENSG00000176531_15 (sequence is synthesized)
caggcccgcgaatcttggatctccggcagcatctggagggatggggccacaacccggaaaactgcccacatgtgcaggtgtctgggtgctgctgccgtggacccctggtgaagatgggcg

SEQ ID NO: 612724 - DNA, 120 bp, Artificial Sequence
  ENSG00000176531_16 (sequence is synthesized)
gccgcatcaagacctggaggaagcgatggttctgctttgaccgccaagcccgccgcttggcctactatgcggacaaggaagagaccaagctcaaaggtgtcatctacttccaggccattg

SEQ ID NO: 612725 - DNA, 120 bp, Artificial Sequence
  ENSG00000176531_17 (sequence is synthesized)
aggaagtctattatgaccacttacgctgtgccttcaagagccccaacccccgcctgaccttctgcgtcaaaacctacgaacgccttttctacatggtggctccgagccccgaagccatgc

SEQ ID NO: 612726 - DNA, 120 bp, Artificial Sequence
  ENSG00000176531_18 (sequence is synthesized)
gcatttggatggacgtcatcgtgaccgccgctgacgaaaaccacgccccctgagtggccccgccctcttggggggaagtcccttcgaggctccgccggcgcggggcgcgggggcgttcct

SEQ ID NO: 612727 - DNA, 120 bp, Artificial Sequence
  ENSG00000176531_19 (sequence is synthesized)
aggccccgcccactgccggaaaacttggacgcaccgctttggaactctcccgggaattccgcaggcgcggcagttcagctggcctgagctgctgcgttctgggttgcaggtgccttgccc

SEQ ID NO: 612728 - DNA, 120 bp, Artificial Sequence
  ENSG00000176531_20 (sequence is synthesized)
ccgacgggatcgccggcccctaaggccctgcccggggcaggaggaagattgcaggggcgggaagaaactatttattggtgctcctgtgataccgaattaaatacggaggaaaaacaggaa

SEQ ID NO: 612729 - DNA, 120 bp, Artificial Sequence
  ENSG00000176531_21 (sequence is synthesized)
ctagagatgagggaggggaggcggggtcgaagaggtcagtagggggcgtgctacgacccggactcaaattccggtcccgtctccggtggcgtgtcgccttggagccatcaagccccgcct

SEQ ID NO: 612730 - DNA, 120 bp, Artificial Sequence
  ENSG00000176531_22 (sequence is synthesized)
ctggaaacttcaggacacgcctccgtaacgctcagttccatcctttgaactcttaggccccgcctccttgggggggggtctccgcgccccggagcagacgcgagcggcgctcagccgtcc

SEQ ID NO: 612731 - DNA, 120 bp, Artificial Sequence
  ENSG00000176531_23 (sequence is synthesized)
gctgccccccttgctgctcctctctgtctcccctgctctgtgcctgcctttttctctgtccttgtttcctgcctgtcatgttcttctgaatagtaacaacaagagctgatactaatgaaa

SEQ ID NO: 612732 - DNA, 120 bp, Artificial Sequence
  ENSG00000176531_24 (sequence is synthesized)
catttactatgtgccagatatggtcctgaatatttcatgagcatttcctcactgaatccttacaacaaacttatgaggcaagttctattacgttttttttttttcacgttataaataaag

SEQ ID NO: 612733 - DNA, 120 bp, Artificial Sequence
  ENSG00000176531_25 (sequence is synthesized)
aaagaagctgaaggtcaaggtgcttaagtaatcttttccaagtttccttagtaagggacagagccaggatttttttatttttattttttgagatagcgtctcactctgtcacccaggctg

SEQ ID NO: 612734 - DNA, 79 bp, Artificial Sequence
  ENSG00000176531_26 (sequence is synthesized)
tcacccaggctggagtgcagtgacacgttcacagctcactgcagcctccacgtcctgtgcttaagctgcgagcccctac

SEQ ID NO: 612735 - DNA, 88 bp, Artificial Sequence
  ENSG00000176531_27 (sequence is synthesized)
tatttttagtagagacagggtttcacctggtcttaaactcttggattcaagcgatcctcccaccttggcctttcaagacgccacagcc

SEQ ID NO: 612736 - DNA, 120 bp, Artificial Sequence
  ENSG00000176531_28 (sequence is synthesized)
aggatttgaacaaacttggtattcaccaccacattctttgcctctattccaaaaagatgcttcatcagatccttcctgggagcctcacattcaagggtctgacttgtgagacccttggga

SEQ ID NO: 612737 - DNA, 120 bp, Artificial Sequence
  ENSG00000176531_29 (sequence is synthesized)
gtctgacttgtgagacccttgggaaaaaatgggcatgtttgaccatatttaacacagagtttcccaaagttttggattagaaagctcggccgggctcggtggctcactcctgtaatccca

SEQ ID NO: 612738 - DNA, 120 bp, Artificial Sequence
  ENSG00000176531_30 (sequence is synthesized)
gcctcggagcagcgcggccgccagcagcgggaacaggtctgtttggctcaccgggtcttcatcagcagtgtccttcctggtccatggatgttggtgtgctcctagccacctgcgccccgg

SEQ ID NO: 612739 - DNA, 120 bp, Artificial Sequence
  ENSG00000176531_31 (sequence is synthesized)
ggttgtccccattccccaaaggaagacatttgggctcctgagagagtgaggggcagatgcccctcctggttttccttctccctccctgggcgagatttttggggctcttcctttgtcccc

SEQ ID NO: 612740 - DNA, 120 bp, Artificial Sequence
  ENSG00000176531_32 (sequence is synthesized)
caggcagatgtggttctgtgggagggtggcctggagagctggctggggccgtgacagatgagtaaccgggacagaggggtgctctgcagcaccggatccgggtcctggaagagcagctca

SEQ ID NO: 612741 - DNA, 120 bp, Artificial Sequence
  ENSG00000176531_33 (sequence is synthesized)
cggggccccttgacccctaggcaggacatctgagttatcggtacctctgggagccacgcgtcccacagccggctctctaggaatggaggccttcaactcttaaggtcatagctgggagaa

SEQ ID NO: 612742 - DNA, 120 bp, Artificial Sequence
  ENSG00000176531_34 (sequence is synthesized)
tgtccttccattgtactggtgaggatccccctgttccccacttccttcccacatcagcactcatcctgcagcagaggatggaggaaacccgcacctatgcctgcaggggagaagtggata

SEQ ID NO: 612743 - DNA, 120 bp, Artificial Sequence
  ENSG00000176532_0 (sequence is synthesized)
gttattttcttttctcccccagctgccccagggttctggtttcccgaatcacttggcaaataaccagcaggtgggcagatgtcttttttgcgttcctacggacgcgtaggcaagttcgat

SEQ ID NO: 612744 - DNA, 120 bp, Artificial Sequence
  ENSG00000176532_1 (sequence is synthesized)
gcgccggagtgaacagccagggtcccatctctcagccggctcccgggcggtgctagcagggaagagggacgcgccggcgaatgaaacactactagcccggaaagccgccctggaccttcc

SEQ ID NO: 612745 - DNA, 120 bp, Artificial Sequence
  ENSG00000176532_2 (sequence is synthesized)
acccgggcagcgagtctggcggcccctcgccgccgccccctccgaccagaacagactgcgctgcgagccccgggcttccgccgcagcgcgcagcaattggaggtgccagaggagaccagc

SEQ ID NO: 612746 - DNA, 120 bp, Artificial Sequence
  ENSG00000176532_3 (sequence is synthesized)
agcagcacttgatttagctgggctgcgggaattccgacctgtacactttccagaagcctgatctctccaagtccgcgcccagggactcgagccccggcttccaggttgacccgagcgcgc

SEQ ID NO: 612747 - DNA, 120 bp, Artificial Sequence
  ENSG00000176532_4 (sequence is synthesized)
ccccttcgtgctctcggccgcgttcaccgcgcgaggcctccgggtcctgttaagcccgagcagcacaggccgctgcctcagcatccaccccgcagcccacgtgtggcaagccggggaagg

SEQ ID NO: 612748 - DNA, 120 bp, Artificial Sequence
  ENSG00000176532_5 (sequence is synthesized)
ggtggagtgaacggccggagaccacgtggagaaaggggccgctttggcccttccatctgggtgccgggagcccctaggccctccggccatggccgacagcggcgatgctggcagctccgg

SEQ ID NO: 612749 - DNA, 120 bp, Artificial Sequence
  ENSG00000176532_6 (sequence is synthesized)
ccacgccacctgcgccgcccagcccggactggaccagcagctcccgggagaaccagcaccccaatctcctcgggggcgccggcgagccccccaaaccagacaagttatacggggacaaat

SEQ ID NO: 612750 - DNA, 120 bp, Artificial Sequence
  ENSG00000176532_7 (sequence is synthesized)
ccggcagcagccgccgcaatttgaagatctcgcgctccggccgctttaaggagaagaggaaagtgcgcgccacgctgctcccggaggcgggcaggtccccggaggaggcaggctttcctg

SEQ ID NO: 612751 - DNA, 120 bp, Artificial Sequence
  ENSG00000176532_8 (sequence is synthesized)
gtgacccccacgaggacaagcagtagccccaatagcctgcgcgctccaggactgcctacccagcactaccccaaacccccagttccaaacccgagacttcaggcccgcccccttacgcgt

SEQ ID NO: 612752 - DNA, 120 bp, Artificial Sequence
  ENSG00000176532_9 (sequence is synthesized)
tgtctcattccaccaaattcagaatatttacacaatgccttcatgattttatttttctggaaattgaagtgtcaattgggttctcaatatttcatgactccaaggatgcattaaatattt

SEQ ID NO: 612753 - DNA, 120 bp, Artificial Sequence
  ENSG00000176532_10 (sequence is synthesized)
atttgtggtaagagaagatacctgccgcggaggagggtggcataattatttttttttcaaaaagctattctggggccctggccccctggctcctgtcacagctcagcttgaactctgtag

SEQ ID NO: 612754 - DNA, 120 bp, Artificial Sequence
  ENSG00000176532_11 (sequence is synthesized)
cctctcaaatgaagaaggtggctgttatttaggactctgtggaaagcaaatcacagtgctgtttttaatgcctgagaaatgcactttaggggtagacttataccttaagtgaaggagtgg

SEQ ID NO: 612755 - DNA, 120 bp, Artificial Sequence
  ENSG00000176532_12 (sequence is synthesized)
gggaggaagaagcattcttaagtagaagcattttaaaataaggcaggattgcttttaatgttaaactacaaaactgtacagcctattttagtgtggactattaaaacccttgcactgtaa

SEQ ID NO: 612756 - DNA, 120 bp, Artificial Sequence
  ENSG00000176532_13 (sequence is synthesized)
agtaaaaggaagaattaggatggcggttttcaagggaagttaagtctagacatgcttctttgaaagtcacaaggcagaagtggtcaaaagtagaatttaaaagaaccaaaacaaatatca

SEQ ID NO: 612757 - DNA, 120 bp, Artificial Sequence
  ENSG00000176532_14 (sequence is synthesized)
taagcttgtccttctctcctactgggatataaattctcctaagtatctcatcgaaaaggctcctgggacgaaagtcgatgggggcaaatcttggagggaaatttcgtgactgtttgacca

SEQ ID NO: 612758 - DNA, 120 bp, Artificial Sequence
  ENSG00000176533_0 (sequence is synthesized)
gggttcggctgcgcggcggggctgaggcggccgcggggcccgagcgcagggagtggagcttggtttcgggatctcggtgctgcagacggcgagacctcctgcacagggtgtacagcaagc

SEQ ID NO: 612759 - DNA, 120 bp, Artificial Sequence
  ENSG00000176533_1 (sequence is synthesized)
tgtgattcctgggaaaactaaaaaagctctctgaacaacggggcccagagctgatggcagacaatgtcagccactaacaacatagcccaggcccggaagctggtggaacagctacgcata

SEQ ID NO: 612760 - DNA, 120 bp, Artificial Sequence
  ENSG00000176533_2 (sequence is synthesized)
gaagccgggattgagcgcatcaaggtctccaaagcggcgtctgacctcatgagctactgtgagcaacatgcccggaacgaccccctgctggtcggagtccctgcctcggagaaccccttt

SEQ ID NO: 612761 - DNA, 85 bp, Artificial Sequence
  ENSG00000176533_3 (sequence is synthesized)
ccccctgctggtcggagtccctgcctcggagaacccctttaaggacaagaaaccttgtattattttataactgtgttctcatatg

SEQ ID NO: 612762 - DNA, 120 bp, Artificial Sequence
  ENSG00000176533_4 (sequence is synthesized)
attagctcaaacaaaacatctcaagtccccaaaacctttaattccaaaagaaatcccccctctccccgccaaaaaaggcgttcccaccgcccggatggggtagaatggaccttgtaggtg

SEQ ID NO: 612763 - DNA, 120 bp, Artificial Sequence
  ENSG00000176533_5 (sequence is synthesized)
gagatgaattttcaggtccgaccccatggccctctcagtttgggccaaaagggatggaggctttacggccacttcccgttcggaataactgaaatcccccagcgatggggtaacaatttt

SEQ ID NO: 612764 - DNA, 120 bp, Artificial Sequence
  ENSG00000176533_6 (sequence is synthesized)
ttaaaactctcgattgccgtttcaattgtggaccggcgccgagggggaaagggaggtgacttcgcccggtggcaatagttccgggagaattggccattggtaaaaagacttcatagggtc

SEQ ID NO: 612765 - DNA, 120 bp, Artificial Sequence
  ENSG00000176533_7 (sequence is synthesized)
actggaatgctttgtgttgtttttaagtagaggtaaaattgagatggggggcgggaggtgacatcatgaagttttttggaaatatctctttatttaaaaaattgttactccatacggcta

SEQ ID NO: 612766 - DNA, 120 bp, Artificial Sequence
  ENSG00000176533_8 (sequence is synthesized)
aactcggattgtgatggttgaacccgtcgctaaactgcacgatcctgcaatgaatgcacgatggagtgtgggggtctggagggggcttcgtctatgaaaagttgccaagtgtgactcccc

SEQ ID NO: 612767 - DNA, 120 bp, Artificial Sequence
  ENSG00000176533_9 (sequence is synthesized)
tgcatgatgttagccatgggtcctttctgcagggtcccctctgtgccagaaatgggttttcgggacttgccccagggaagccgtcaccggcccggcccatcatgtttttggatttttttt

SEQ ID NO: 612768 - DNA, 63 bp, Artificial Sequence
  ENSG00000176533_10 (sequence is synthesized)
acaggcgtgtgccactacgctctcaaactcctgacctcgggatccgcccacctcggcctccca

SEQ ID NO: 612769 - DNA, 120 bp, Artificial Sequence
  ENSG00000176533_11 (sequence is synthesized)
tacaggcatgagccaccgcgcccagtgtgttttaagcatgaggcatccgcgtggctgggagaggctttgaccatccttggctcttccaggttgtcctaccctctggcatccaccatagac

SEQ ID NO: 612770 - DNA, 120 bp, Artificial Sequence
  ENSG00000176533_12 (sequence is synthesized)
gtcctaccctctggcatccaccatagacgtttttcaaacagaaaatgcaggctggggagccgcggcagggcgggtggggctaccctgtgctgctgtgtgtacaaaattgttccatgatct

SEQ ID NO: 612771 - DNA, 120 bp, Artificial Sequence
  ENSG00000176533_13 (sequence is synthesized)
tggagtgactctgaaggactctgggaggtgagacgttgtcccggagatcaaaacgtccgctcaaaacgttaccctgtcgctcgaacccgatctttttgcttttccacccccgtgcaaccc

SEQ ID NO: 612772 - DNA, 120 bp, Artificial Sequence
  ENSG00000176533_14 (sequence is synthesized)
aggacggctgtctgaggccgggagatgccttagacgcaggatgggccactcctcccagcggcaagtggaaatcgaagatgtcatggggtcggggggaggcttctgaaagatgactgcgtc

SEQ ID NO: 612773 - DNA, 120 bp, Artificial Sequence
  ENSG00000176533_15 (sequence is synthesized)
ctcctctgcggcacggacgggagcaggtgcagccacatcttccagggcctgccggcatcacctgcggccacacctgagatggaccccacgcagccctgatcgcaggaggcctggccgccc

SEQ ID NO: 612774 - DNA, 120 bp, Artificial Sequence
  ENSG00000176533_16 (sequence is synthesized)
ctggacggccgcccaggtcctccgtgcaggcccgtgaggcggggatccctgcttggctcacttcctgagctggtgactgccagggttcccacctcgccaaggctagagggctccgggtgt

SEQ ID NO: 612775 - DNA, 120 bp, Artificial Sequence
  ENSG00000176533_17 (sequence is synthesized)
gtgtgcaggtgtcgggggagtgacctccactcctcaacctcgggcagctcccacaggccacagccgggctccccacccccggcacccagctctctacggcaggtccgggagggctggggc

SEQ ID NO: 612776 - DNA, 120 bp, Artificial Sequence
  ENSG00000176533_18 (sequence is synthesized)
ttcggggagccctacccgccaaacctgctgttggcccgggagagccccagaggctcccggagactgcagcctcctgtggttgggctgggagccggcagggtttggggtgtgggcgtcccc

SEQ ID NO: 612777 - DNA, 120 bp, Artificial Sequence
  ENSG00000176533_19 (sequence is synthesized)
accacgcatagcaggaatggcaggaagggacaaaagcctgttccagagaccctgggaggaccccaggcagggagagcccgcctgcctccaccctttccaacaagccatcttggtaactgg

SEQ ID NO: 612778 - DNA, 120 bp, Artificial Sequence
  ENSG00000176533_20 (sequence is synthesized)
gaacaaacacaccccaccccgtttttccttaaaagaggccttaatccccgagcccccgctgccagggcagagggaggagggggcacagctgtgccaagcccggccccactggtgtgtcct

SEQ ID NO: 612779 - DNA, 120 bp, Artificial Sequence
  ENSG00000176533_21 (sequence is synthesized)
cacaatgtgaccccagaaatgccagcagggaacggaggctgctgcagagacgcagccccaggcagccggggctcctaggctggtgcagatggtggggttaaacgggctgagcgttccagg

SEQ ID NO: 612780 - DNA, 120 bp, Artificial Sequence
  ENSG00000176533_22 (sequence is synthesized)
taaactgaggctcggggaggggaaggacaggctggcctctccttcactgtccacagggccttgggttccctgagctgtccagaccccaccatctcccggaccccagggaggtggccattg

SEQ ID NO: 612781 - DNA, 120 bp, Artificial Sequence
  ENSG00000176533_23 (sequence is synthesized)
ccagaagcctgtgggtttctttctagcttgggggattaaaaaaaaaattctccacttttttttttcttgagtagacttcagtgaccacactgtggaaaatacctttgcagacgtggcacc

SEQ ID NO: 612782 - DNA, 120 bp, Artificial Sequence
  ENSG00000176533_24 (sequence is synthesized)
cgagtgcacacaccgaccgccacatgtgcttttctgccgggaatccctggggtgaacgcatgttttatgggcgtttccaggagcgcgcgtgcacctccagacggggagctggcgggcggg

SEQ ID NO: 612783 - DNA, 120 bp, Artificial Sequence
  ENSG00000176533_25 (sequence is synthesized)
ggtggcagcagcagctctagccttggggggacaagcctctctcagctacgccaggggaaaagagagttaaggacactcacccccacccacgcacacacacaaggcagcgtcgggtgggag

SEQ ID NO: 612784 - DNA, 120 bp, Artificial Sequence
  ENSG00000176533_26 (sequence is synthesized)
agagaaggccgtttctccttctgtagcctgggtctcccacgggccttccccgctgctgagcgagacaccagtagccaggtgaagggccacagcgggccaggccccgaccctgttgtgacc

SEQ ID NO: 612785 - DNA, 120 bp, Artificial Sequence
  ENSG00000176533_27 (sequence is synthesized)
cacctgggcaccttcccggaccagctccgcctcccctgccctcctctctccaggaaggagccagaaccctcacccctctcccaccctccccaggggtaaccccaggccaagcacagatag

SEQ ID NO: 612786 - DNA, 120 bp, Artificial Sequence
  ENSG00000176533_28 (sequence is synthesized)
ctcagctgcgacctctggcctctggggacataaacggggcggctgggccagggcggaaggtgctcctgtttccctccttctgcgtggtccctttgacgggccggccaccgtgtccgaggc

SEQ ID NO: 612787 - DNA, 120 bp, Artificial Sequence
  ENSG00000176533_29 (sequence is synthesized)
gcaacgctaggcctccaggccacgcatccatctccaagttaacagcccgtcctgcccaagttctggggcaggtaggagagggccgtcacacacctgtccgcccgtgagtgacccgggggg

SEQ ID NO: 612788 - DNA, 120 bp, Artificial Sequence
  ENSG00000176533_30 (sequence is synthesized)
gcttccgggtggaggtggagccaccacgcccttcctcaaggggtcacttattaaaaagtccacggcctgaggccaggccctctgcacagaagccatatgccggccagccgcgcctcctcc

SEQ ID NO: 612789 - DNA, 120 bp, Artificial Sequence
  ENSG00000176533_31 (sequence is synthesized)
tctgtccacggaaccgctgcccatctaaccttcgtaaagacctgtctcctgtttccagccgccgcctgtggttctagcaggttctatgccatctgcattgggatgtctggttgtttttat

SEQ ID NO: 612790 - DNA, 120 bp, Artificial Sequence
  ENSG00000176533_32 (sequence is synthesized)
ttctgacttttttaaaattccaggtgtgccgcacccactttctcgcagtgttttaatattgtgtggagttgtcgataccacgtgaattcatacacaataaaaagcctcactctccctttt

SEQ ID NO: 612791 - DNA, 120 bp, Artificial Sequence
  ENSG00000176533_33 (sequence is synthesized)
tcaggctttcaccatctccgcctgctccagctcccctgtttcttctccctgtctgatgtcaccttgtgcttcagtgacaccttgaagtttccgggctcccacccgcctccccactgccag

SEQ ID NO: 612792 - DNA, 120 bp, Artificial Sequence
  ENSG00000176533_34 (sequence is synthesized)
tctttatcagagcctgcatcttcttctttggcctgagcatcgtttttgtttgttggctttatctgtagaagaggctcctacctcaagagcagggagtggagcttggtttcgggatctcgg

SEQ ID NO: 612793 - DNA, 120 bp, Artificial Sequence
  ENSG00000176540_0 (sequence is synthesized)
atgtatgtgtcaaattgcaatccttgtgctattcacagaaaaatcaattatccaaataccaaactggatttcgagcaagtgaacaacataacggaattcatcttgcttggcctgacacag

SEQ ID NO: 612794 - DNA, 120 bp, Artificial Sequence
  ENSG00000176540_1 (sequence is synthesized)
aacgcagaggcacagaaactcttgtttgctgtgtttacactcatctactttctcaccatggtagacaacctaatcattgtggtgacaatcaccaccagcccagccctggactcccccgtg

SEQ ID NO: 612795 - DNA, 120 bp, Artificial Sequence
  ENSG00000176540_2 (sequence is synthesized)
tatttttttctgtctttcttttccttcatagatggctgctcctcttctaccatggcccccaaaatgatatttgacttactcactgaaaagaaaactatttccttcagtgggtgcatgacc

SEQ ID NO: 612796 - DNA, 120 bp, Artificial Sequence
  ENSG00000176540_3 (sequence is synthesized)
cagctctttgtagaacatttctttgggggagttgagatcattctgctcgtggtgatggcctatgactgctatgtggccatctgcaagcccctgtactacctgatcacaatgaacaggcag

SEQ ID NO: 612797 - DNA, 120 bp, Artificial Sequence
  ENSG00000176540_4 (sequence is synthesized)
atggcatgggtcgggggatttcttcacgctctgattcaaatgcttttaatagtctggctgcccttctgtggccccaatgtcattgaccatttcatctgtgaccttttccctctgctaaaa

SEQ ID NO: 612798 - DNA, 120 bp, Artificial Sequence
  ENSG00000176540_5 (sequence is synthesized)
ctctcctgcactgacactcacgtctttggactctttgttgccgccaacagtgggctgatgtgtatgctcattttttctattcttattacctcttacgtcctaatcctctgctcacagcgg

SEQ ID NO: 612799 - DNA, 120 bp, Artificial Sequence
  ENSG00000176540_6 (sequence is synthesized)
aaggctctctctacctgcgccttccatatcactgtagtcgtcctattctttgttccctgtatattggtgtaccttcgacccatgatcaccttccctattgataaagctgtgtctgtgttt

SEQ ID NO: 612800 - DNA, 120 bp, Artificial Sequence
  ENSG00000176540_7 (sequence is synthesized)
tatactgtggtaacacccatgttaaaccctttaatctacaccctcagaaacacagaggtgaaaaatgccatgaagcagctctggagccaaataatctggggtaacaatttgtgtgattag

SEQ ID NO: 612801 - DNA, 80 bp, Artificial Sequence
  ENSG00000176542_0 (sequence is synthesized)
gggaaagttgaggccgcgctgccgccgggtctccggccttgagggctcgggctcgcagcggctgcggtggccgcaaaaag

SEQ ID NO: 612802 - DNA, 120 bp, Artificial Sequence
  ENSG00000176542_1 (sequence is synthesized)
ctcccccagccccggaggagcaggcggtggccgcggacggagagattcgcccagacggtcagacactcctgccttcccctcctgggatcatgacccaggcgggggtcgccgccgtcgccg

SEQ ID NO: 612803 - DNA, 120 bp, Artificial Sequence
  ENSG00000176542_2 (sequence is synthesized)
ccgccaccgcggccgagaccgcgcagccggcggtaagaagaaagcataacccatagaccatcttctggcagaagatgatacatttggatcagaaacgggaggcattggaagccaggaatc

SEQ ID NO: 612804 - DNA, 120 bp, Artificial Sequence
  ENSG00000176542_3 (sequence is synthesized)
aaaagtgaagaaactctgcaagcccttaggttcctattactgtaaccatgccagaaatgacagagaatgagacgcctacaaaaaagcagcacagaaagaaaaaccgggagacacacaatg

SEQ ID NO: 612805 - DNA, 120 bp, Artificial Sequence
  ENSG00000176542_4 (sequence is synthesized)
cagtggagaggcatagaaagaagaaaattaatgctgggataaacagaataggagagctgatcccatgttctcctgccctgaagcagagcaagaatatgatcctggaccaagcctttaaat

SEQ ID NO: 612806 - DNA, 120 bp, Artificial Sequence
  ENSG00000176542_5 (sequence is synthesized)
atataacagaattgaaaaggcaaaatgatgaactcctgcttaatggaggaaacaatgaacaagctgaagaaataaaaaagctacggaaacaactggaagaaatccaaaaagaaaatggcc

SEQ ID NO: 612807 - DNA, 120 bp, Artificial Sequence
  ENSG00000176542_6 (sequence is synthesized)
gatatattgaattactgaaagctaatgacatatgcttatatgatgacccgacaattcactggaaaggaaatcttaaaaactcaaaggtctctgttgttattcctagtgaccaggttcaaa

SEQ ID NO: 612808 - DNA, 120 bp, Artificial Sequence
  ENSG00000176542_7 (sequence is synthesized)
aaaaaattattgtttattccaacgggaatcagcctggtggaaacagccagggaacagctgttcaggggataacttttaatgttagtcataatttacaaaagcagaccgccaatgtggtgc

SEQ ID NO: 612809 - DNA, 120 bp, Artificial Sequence
  ENSG00000176542_8 (sequence is synthesized)
cagtacagaggacttgcaatcttgtgactcctgtatctatttctggagtttacccttctgaaaacaagccatggcatcagaccacagttcctgcattggctaccaaccagcctgttcctc

SEQ ID NO: 612810 - DNA, 120 bp, Artificial Sequence
  ENSG00000176542_9 (sequence is synthesized)
tttgtcttcctgctgccatttctgctcagagtattctcgagcttcccacctctgaaagcgaatcaaatgtgcttggtgccactagtggctcactgattgctgtttcaattgaatctgagc

SEQ ID NO: 612811 - DNA, 120 bp, Artificial Sequence
  ENSG00000176542_10 (sequence is synthesized)
ctcaccaacatcattctttgcacacatgcctaaatgatcaaaattcttctgaaaataagaatggacaagagaaccccaaagtattgaagaaaatgaccccttgtgttacaaacatccccc

SEQ ID NO: 612812 - DNA, 120 bp, Artificial Sequence
  ENSG00000176542_11 (sequence is synthesized)
acagctcctcagcaactgccactaaagtgcaccatggaaacaagtcctgcctgagcatacaggacttcagaggtgattttcaaaacacttttgttgtttcagttaccaccacagtctgct

SEQ ID NO: 612813 - DNA, 120 bp, Artificial Sequence
  ENSG00000176542_12 (sequence is synthesized)
cgcagcctcccagaactgcaggtgattcttctccaatgagcattagtaagagtgcagacttgacaagtacagctacagtggtggcatcatctgcccctggagtagggaaggccaccattc

SEQ ID NO: 612814 - DNA, 120 bp, Artificial Sequence
  ENSG00000176542_13 (sequence is synthesized)
ctataagcactctttcgggaaaccctttggacaatggttggactctttcttgttctttgccttcttcaagtgttagtacttcagatttgaaaaacattaatagccttacacgaatctctt

SEQ ID NO: 612815 - DNA, 120 bp, Artificial Sequence
  ENSG00000176542_14 (sequence is synthesized)
cagctggaaacacacagacaacgtggactactttgcaactggcaggaaacactattcagcccttaagccagacaccatcttctgctgtgactccagtattaaatgagtctggtactagcc

SEQ ID NO: 612816 - DNA, 120 bp, Artificial Sequence
  ENSG00000176542_15 (sequence is synthesized)
ccaccacaagcaaccacagtagatatgtggctacagacatcaacttgaataattcctttccagcagatgggcagccagttgagcaagtagttgtaacattgccttcttgtccatctttac

SEQ ID NO: 612817 - DNA, 120 bp, Artificial Sequence
  ENSG00000176542_16 (sequence is synthesized)
ctatgcagccactaattgcccagccacaagttaaatctcagcctcccaaaaatatccttccactgaattcagcaatgcaagtgattcagatggctcagccagttgggtcagctgttaatt

SEQ ID NO: 612818 - DNA, 120 bp, Artificial Sequence
  ENSG00000176542_17 (sequence is synthesized)
cagctccaactaatcaaaatgttataattcttcagccacctagcaccaccccatgcccaacagtgatgagggcagaagtttccaaccaaacagtaggtcaacagatagtaatcatacagg

SEQ ID NO: 612819 - DNA, 120 bp, Artificial Sequence
  ENSG00000176542_18 (sequence is synthesized)
ctgctaatcagaatcctttgccactcctccctgctccacctcctggttctgttcgactccccatcaatggagccaatactgtaatagggtctaataattcagtgcaaaatgttccaacac

SEQ ID NO: 612820 - DNA, 120 bp, Artificial Sequence
  ENSG00000176542_19 (sequence is synthesized)
cacagacttttggaggaaagcatcttgtccacatattaccaagaccttcatctttatcagcgtctaactcaacacaaactttttctgttaccatgtcaaaccaacagcctcaaaccattt
